United States Patent Application Publication US 2005/0244851 A1 - sequence listing, part 154

SEQ ID NO: 6013355 - DNA, 25 bp, Homo sapien
gcggaaccaccaccgcggagagcat

SEQ ID NO: 6013356 - DNA, 25 bp, Homo sapien
ccgaggcagcgcgtcgtatgccgca

SEQ ID NO: 6013357 - DNA, 25 bp, Homo sapien
agagcatcgagtagcgggcagcagg

SEQ ID NO: 6013358 - DNA, 25 bp, Homo sapien
gccggcgtgggttcgaaccagcggc

SEQ ID NO: 6013359 - DNA, 25 bp, Homo sapien
gatgccggtacacgaattcccgctg

SEQ ID NO: 6013360 - DNA, 25 bp, Homo sapien
atcgcgttgcgcgaccttgccgtcg

SEQ ID NO: 6013361 - DNA, 25 bp, Homo sapien
gctcacgcctggccgagatgtcgta

SEQ ID NO: 6013362 - DNA, 25 bp, Homo sapien
cacgcatgtcgcagaactcggtgtc

SEQ ID NO: 6013363 - DNA, 25 bp, Homo sapien
cagcggttgtcccacatcaccagat

SEQ ID NO: 6013364 - DNA, 25 bp, Homo sapien
cgtggctcgcgtgcgcgccgatgaa

SEQ ID NO: 6013365 - DNA, 25 bp, Homo sapien
cgaaccagcggccagttgaccggcg

SEQ ID NO: 6013366 - DNA, 25 bp, Homo sapien
cagttgaccggcggcatggcattgc

SEQ ID NO: 6013367 - DNA, 25 bp, Homo sapien
gaggtcccgaggcagcgcgtcgtat

SEQ ID NO: 6013368 - DNA, 25 bp, Homo sapien
cggagccggcgtgggttcgaaccag

SEQ ID NO: 6013369 - DNA, 25 bp, Homo sapien
cgatgaagagaaacttgcgcccgga

SEQ ID NO: 6013370 - DNA, 25 bp, Homo sapien
cttccgaatagtcggtgtcgccgag

SEQ ID NO: 6013371 - DNA, 25 bp, Homo sapien
cagcaggttgctgaaaggagctgtc

SEQ ID NO: 6013372 - DNA, 25 bp, Homo sapien
atgccgcacgcatgtcgcagaactc

SEQ ID NO: 6013373 - DNA, 25 bp, Homo sapien
ggtacacgaattcccgctgtgtcgc

SEQ ID NO: 6013374 - DNA, 25 bp, Homo sapien
gctggttcgcgaagttcccgaccac

SEQ ID NO: 6013375 - DNA, 25 bp, Homo sapien
ccagcgatgccggtacacgaattcc

SEQ ID NO: 6013376 - DNA, 25 bp, Homo sapien
agcgggcagcaggttgctgaaagga

SEQ ID NO: 6013377 - DNA, 25 bp, Homo sapien
cattgcgttgcgcttccgaatagtc

SEQ ID NO: 6013378 - DNA, 25 bp, Homo sapien
gcctggccgagatgtcgtacctgcg

SEQ ID NO: 6013379 - DNA, 25 bp, Homo sapien
ggttgctgaaaggagctgtcgctgt

SEQ ID NO: 6013380 - DNA, 25 bp, Homo sapien
cggccaccggaaggccttcgacgtg

SEQ ID NO: 6013381 - DNA, 25 bp, Homo sapien
tcgagtagcgggcagcaggttgctg

SEQ ID NO: 6013382 - DNA, 25 bp, Homo sapien
gtgtcgcgtgctcgagaagctccgc

SEQ ID NO: 6013383 - DNA, 25 bp, Homo sapien
atctcccacgttccagcgatgccgg

SEQ ID NO: 6013384 - DNA, 25 bp, Homo sapien
cgctgtgccagagctggttcgcgaa

SEQ ID NO: 6013385 - DNA, 25 bp, Homo sapien
agctgtcgctgtgccagagctggtt

SEQ ID NO: 6013386 - DNA, 25 bp, Homo sapien
aagcgggagttcagtgcgtagtgct

SEQ ID NO: 6013387 - DNA, 25 bp, Homo sapien
tcggtgtcgccgagcaggaagcggg

SEQ ID NO: 6013388 - DNA, 25 bp, Homo sapien
caccagatctcccacgttccagcga

SEQ ID NO: 6013389 - DNA, 25 bp, Homo sapien
tgtccgccaactccgcgtacttgaa

SEQ ID NO: 6013390 - DNA, 25 bp, Homo sapien
tcccgaccacctcgcgcgcatcgcg

SEQ ID NO: 6013391 - DNA, 25 bp, Homo sapien
cttcgacgtggctcgcgtgcgcgcc

SEQ ID NO: 6013392 - DNA, 25 bp, Homo sapien
tcgagatgtccgccaactccgcgta

SEQ ID NO: 6013393 - DNA, 25 bp, Homo sapien
agaactcggtgtcgccgcccgacgg

SEQ ID NO: 6013394 - DNA, 25 bp, Homo sapien
ccaactcggattggaggtcccgagg

SEQ ID NO: 6013395 - DNA, 25 bp, Homo sapien
cgcgtgcgcgccgatgaagagaaac

SEQ ID NO: 6013396 - DNA, 25 bp, Homo sapien
cgagaagctccgcaagcagcatccg

SEQ ID NO: 6013397 - DNA, 25 bp, Homo sapien
cgtcgtatgccgcacgcatgtcgca

SEQ ID NO: 6013398 - DNA, 25 bp, Homo sapien
gaattcccgctgtgtcgcgtgctcg

SEQ ID NO: 6013399 - DNA, 25 bp, Homo sapien
ccacatcaccagatctcccacgttc

SEQ ID NO: 6013400 - DNA, 25 bp, Homo sapien
gccagagctggttcgcgaagttccc

SEQ ID NO: 6013401 - DNA, 25 bp, Homo sapien
gttgtcccacatcaccagatctccc

SEQ ID NO: 6013402 - DNA, 25 bp, Homo sapien
ccgctgtgtcgcgtgctcgagaagc

SEQ ID NO: 6013403 - DNA, 25 bp, Homo sapien
cgagactgacgttcgagatgtccgc

SEQ ID NO: 6013404 - DNA, 25 bp, Homo sapien
acgcagcccttccaactcggattgg

SEQ ID NO: 6013405 - DNA, 25 bp, Homo sapien
gcagcgcgtcgtatgccgcacgcat

SEQ ID NO: 6013406 - DNA, 25 bp, Homo sapien
ccgcggagagcatcgagtagcgggc

SEQ ID NO: 6013407 - DNA, 25 bp, Homo sapien
tgacgttcgagatgtccgccaactc

SEQ ID NO: 6013408 - DNA, 25 bp, Homo sapien
gctcggcacgcagcccttccaactc

SEQ ID NO: 6013409 - DNA, 25 bp, Homo sapien
gctccgcaagcagcatccggccttc

SEQ ID NO: 6013410 - DNA, 25 bp, Homo sapien
agagaaacttgcgcccggagccggc

SEQ ID NO: 6013411 - DNA, 25 bp, Homo sapien
cggtgaagaacgcagcggttgtccc

SEQ ID NO: 6013412 - DNA, 25 bp, Homo sapien
cacctcgcgcgcatcgcgttgcgcg

SEQ ID NO: 6013413 - DNA, 25 bp, Homo sapien
tgtcgccgcccgacggcggaaccac

SEQ ID NO: 6013414 - DNA, 25 bp, Homo sapien
agcggccagttgaccggcggcatgg

SEQ ID NO: 6013415 - DNA, 25 bp, Homo sapien
agaacgcagcggttgtcccacatca

SEQ ID NO: 6013416 - DNA, 25 bp, Homo sapien
tgtcgcagaactcggtgtcgccgcc

SEQ ID NO: 6013417 - DNA, 25 bp, Homo sapien
aaggccttcgacgtggctcgcgtgc

SEQ ID NO: 6013418 - DNA, 25 bp, Homo sapien
caccggaaggccttcgacgtggctc

SEQ ID NO: 6013419 - DNA, 25 bp, Homo sapien
tgggttcgaaccagcggccagttga

SEQ ID NO: 6013420 - DNA, 25 bp, Homo sapien
cgtgctcgagaagctccgcaagcag

SEQ ID NO: 6013421 - DNA, 25 bp, Homo sapien
cggattggaggtcccgaggcagcgc

SEQ ID NO: 6013422 - DNA, 25 bp, Homo sapien
ccggcggcatggcattgcgttgcgc

SEQ ID NO: 6013423 - DNA, 25 bp, Homo sapien
gcccttccaactcggattggaggtc

SEQ ID NO: 6013424 - DNA, 25 bp, Homo sapien
caagcagcatccggccttcggccac

SEQ ID NO: 6013425 - DNA, 25 bp, Homo sapien
gttgcgcgaccttgccgtcgagact

SEQ ID NO: 6013426 - DNA, 25 bp, Homo sapien
gcgcgccgatgaagagaaacttgcg

SEQ ID NO: 6013427 - DNA, 25 bp, Homo sapien
gcgcgcatcgcgttgcgcgaccttg

SEQ ID NO: 6013428 - DNA, 25 bp, Homo sapien
ccgagatgtcgtacctgcgtccgcg

SEQ ID NO: 6013429 - DNA, 25 bp, Homo sapien
cgtagtgctcggcacgcagcccttc

SEQ ID NO: 6013430 - DNA, 25 bp, Homo sapien
cgaagttcccgaccacctcgcgcgc

SEQ ID NO: 6013431 - DNA, 25 bp, Homo sapien
gacggcggaaccaccaccgcggaga

SEQ ID NO: 6013432 - DNA, 25 bp, Homo sapien
cttgcgcccggagccggcgtgggtt

SEQ ID NO: 6013433 - DNA, 25 bp, Homo sapien
tgtcgtacctgcgtccgcggtgaag

SEQ ID NO: 6013434 - DNA, 25 bp, Homo sapien
ccaccaccgcggagagcatcgagta

SEQ ID NO: 6013435 - DNA, 25 bp, Homo sapien
gcatggcattgcgttgcgcttccga

SEQ ID NO: 6013436 - DNA, 25 bp, Homo sapien
cgcagctcacgcctggccgagatgt

SEQ ID NO: 6013437 - DNA, 25 bp, Homo sapien
agcaggaagcgggagttcagtgcgt

SEQ ID NO: 6013438 - DNA, 25 bp, Homo sapien
gagttcagtgcgtagtgctcggcac

SEQ ID NO: 6013439 - DNA, 25 bp, Homo sapien
gcatccggccttcggccaccggaag

SEQ ID NO: 6013440 - DNA, 25 bp, Homo sapien
cgtccgcggtgaagaacgcagcggt

SEQ ID NO: 6013441 - DNA, 25 bp, Homo sapien
tgccgtcgagactgacgttcgagat

SEQ ID NO: 6013442 - DNA, 25 bp, Homo sapien
gttgcgcttccgaatagtcggtgtc

SEQ ID NO: 6013443 - DNA, 25 bp, Homo sapien
cacgttccagcgatgccggtacacg

SEQ ID NO: 6013444 - DNA, 25 bp, Homo sapien
tcagtgcgtagtgctcggcacgcag

SEQ ID NO: 6013445 - DNA, 25 bp, Homo sapien
cgaccttgccgtcgagactgacgtt

SEQ ID NO: 6013446 - DNA, 25 bp, Homo sapien
tgaaaggagctgtcgctgtgccaga

SEQ ID NO: 6013447 - DNA, 25 bp, Homo sapien
tacctgcgtccgcggtgaagaacgc

SEQ ID NO: 6013448 - DNA, 25 bp, Homo sapien
tcgccgagcaggaagcgggagttca

SEQ ID NO: 6013449 - DNA, 25 bp, Homo sapien
ttcttgccaaatctgtgttacaatt

SEQ ID NO: 6013450 - DNA, 25 bp, Homo sapien
ttcagaaggaatatatacctgccag

SEQ ID NO: 6013451 - DNA, 25 bp, Homo sapien
atgtcttcatcgacagtacactaaa

SEQ ID NO: 6013452 - DNA, 25 bp, Homo sapien
tttaataaaacatacttgtctgtga

SEQ ID NO: 6013453 - DNA, 25 bp, Homo sapien
ccaagaggtggttgttgttgacgat

SEQ ID NO: 6013454 - DNA, 25 bp, Homo sapien
attttccaagaggtggttgttgttg

SEQ ID NO: 6013455 - DNA, 25 bp, Homo sapien
tttcttatgtcttcatcgacagtac

SEQ ID NO: 6013456 - DNA, 25 bp, Homo sapien
gcatgagaccttttagttgtaggag

SEQ ID NO: 6013457 - DNA, 25 bp, Homo sapien
tggtaataataataattctaagatt

SEQ ID NO: 6013458 - DNA, 25 bp, Homo sapien
tgatcacaacttttcccagctagac

SEQ ID NO: 6013459 - DNA, 25 bp, Homo sapien
gataggaaaagcattcggaagaaaa

SEQ ID NO: 6013460 - DNA, 25 bp, Homo sapien
tctgtgactttctgagtctaacaca

SEQ ID NO: 6013461 - DNA, 25 bp, Homo sapien
aagcactttaataaaacatacttgt

SEQ ID NO: 6013462 - DNA, 25 bp, Homo sapien
cagttctaagaattaagttccattg

SEQ ID NO: 6013463 - DNA, 25 bp, Homo sapien
tgtaggagtgatggtctaggtaagt

SEQ ID NO: 6013464 - DNA, 25 bp, Homo sapien
agggaggcttttatgtttgatgtaa

SEQ ID NO: 6013465 - DNA, 25 bp, Homo sapien
actggagacaaattcagaaggaata

SEQ ID NO: 6013466 - DNA, 25 bp, Homo sapien
actttctgagtctaacacagacact

SEQ ID NO: 6013467 - DNA, 25 bp, Homo sapien
taaattgatcagtgttttttctgtg

SEQ ID NO: 6013468 - DNA, 25 bp, Homo sapien
gaccttttagttgtaggagtgatgg

SEQ ID NO: 6013469 - DNA, 25 bp, Homo sapien
tgagtctaacacagacactgcaatg

SEQ ID NO: 6013470 - DNA, 25 bp, Homo sapien
gacaaattcagaaggaatatatacc

SEQ ID NO: 6013471 - DNA, 25 bp, Homo sapien
atatacctgccagttttgtggacta

SEQ ID NO: 6013472 - DNA, 25 bp, Homo sapien
aggaatatatacctgccagttttgt

SEQ ID NO: 6013473 - DNA, 25 bp, Homo sapien
ctttatgtgcaaagggaaattcagt

SEQ ID NO: 6013474 - DNA, 25 bp, Homo sapien
cagacagttcttgccaaatctgtgt

SEQ ID NO: 6013475 - DNA, 25 bp, Homo sapien
taagaattaagttccattgcatgag

SEQ ID NO: 6013476 - DNA, 25 bp, Homo sapien
gatcagtgttttttctgtgtattgt

SEQ ID NO: 6013477 - DNA, 25 bp, Homo sapien
ataaaaccctaaattgatcagtgtt

SEQ ID NO: 6013478 - DNA, 25 bp, Homo sapien
taacacagacactgcaatgggttaa

SEQ ID NO: 6013479 - DNA, 25 bp, Homo sapien
ttcccagctagacagacagttcttg

SEQ ID NO: 6013480 - DNA, 25 bp, Homo sapien
aacttcaagcactttaataaaacat

SEQ ID NO: 6013481 - DNA, 25 bp, Homo sapien
tttaccaaagtcactggagacaaat

SEQ ID NO: 6013482 - DNA, 25 bp, Homo sapien
tggactacattaatagggaggcttt

SEQ ID NO: 6013483 - DNA, 25 bp, Homo sapien
gtgcaaagggaaattcagtttctta

SEQ ID NO: 6013484 - DNA, 25 bp, Homo sapien
caacttttcccagctagacagacag

SEQ ID NO: 6013485 - DNA, 25 bp, Homo sapien
agtgatggtctaggtaagttggcat

SEQ ID NO: 6013486 - DNA, 25 bp, Homo sapien
aaaacatacttgtctgtgactttct

SEQ ID NO: 6013487 - DNA, 25 bp, Homo sapien
ctgccagttttgtggactacattaa

SEQ ID NO: 6013488 - DNA, 25 bp, Homo sapien
ctgtgttacaattctgaatgttact

SEQ ID NO: 6013489 - DNA, 25 bp, Homo sapien
ttctgtgtattgtgatcacaacttt

SEQ ID NO: 6013490 - DNA, 25 bp, Homo sapien
tcatcgacagtacactaaatactga

SEQ ID NO: 6013491 - DNA, 25 bp, Homo sapien
ttaagttccattgcatgagaccttt

SEQ ID NO: 6013492 - DNA, 25 bp, Homo sapien
ccaaatctgtgttacaattctgaat

SEQ ID NO: 6013493 - DNA, 25 bp, Homo sapien
acacttgataggaaaagcattcgga

SEQ ID NO: 6013494 - DNA, 25 bp, Homo sapien
ccaaacatattttggtaataataat

SEQ ID NO: 6013495 - DNA, 25 bp, Homo sapien
gcttttatgtttgatgtaattctta

SEQ ID NO: 6013496 - DNA, 25 bp, Homo sapien
agacactgcaatgggttaaattttc

SEQ ID NO: 6013497 - DNA, 25 bp, Homo sapien
gttttgtggactacattaataggga

SEQ ID NO: 6013498 - DNA, 25 bp, Homo sapien
tggtctaggtaagttggcatcctct

SEQ ID NO: 6013499 - DNA, 25 bp, Homo sapien
catattttggtaataataataattc

SEQ ID NO: 6013500 - DNA, 25 bp, Homo sapien
tccattgcatgagaccttttagttg

SEQ ID NO: 6013501 - DNA, 25 bp, Homo sapien
atgtttgatgtaattcttacagttc

SEQ ID NO: 6013502 - DNA, 25 bp, Homo sapien
tgttgttgacgataaattcattaag

SEQ ID NO: 6013503 - DNA, 25 bp, Homo sapien
ggtggttgttgttgacgataaattc

SEQ ID NO: 6013504 - DNA, 25 bp, Homo sapien
tacaattctgaatgttactatgagc

SEQ ID NO: 6013505 - DNA, 25 bp, Homo sapien
tctgaatgttactatgagcatttgt

SEQ ID NO: 6013506 - DNA, 25 bp, Homo sapien
catttgtgtttttacccactcgtga

SEQ ID NO: 6013507 - DNA, 25 bp, Homo sapien
gatgtaattcttacagttctaagaa

SEQ ID NO: 6013508 - DNA, 25 bp, Homo sapien
tttagttgtaggagtgatggtctag

SEQ ID NO: 6013509 - DNA, 25 bp, Homo sapien
cattaatagggaggcttttatgttt

SEQ ID NO: 6013510 - DNA, 25 bp, Homo sapien
taataataattctaagattttggct

SEQ ID NO: 6013511 - DNA, 25 bp, Homo sapien
tacttgtctgtgactttctgagtct

SEQ ID NO: 6013512 - DNA, 25 bp, Homo sapien
tgtttttacccactcgtgaatatta

SEQ ID NO: 6013513 - DNA, 25 bp, Homo sapien
tgcaatgggttaaattttccaagag

SEQ ID NO: 6013514 - DNA, 25 bp, Homo sapien
gtattgtgatcacaacttttcccag

SEQ ID NO: 6013515 - DNA, 25 bp, Homo sapien
agggaaattcagtttcttatgtctt

SEQ ID NO: 6013516 - DNA, 25 bp, Homo sapien
cactaaatactgatttcaaataaaa

SEQ ID NO: 6013517 - DNA, 25 bp, Homo sapien
tgaatattaaaaacttcaagcactt

SEQ ID NO: 6013518 - DNA, 25 bp, Homo sapien
tgttactatgagcatttgtgttttt

SEQ ID NO: 6013519 - DNA, 25 bp, Homo sapien
tgttttttctgtgtattgtgatcac

SEQ ID NO: 6013520 - DNA, 25 bp, Homo sapien
gctagacagacagttcttgccaaat

SEQ ID NO: 6013521 - DNA, 25 bp, Homo sapien
tatgagcatttgtgtttttacccac

SEQ ID NO: 6013522 - DNA, 25 bp, Homo sapien
aaagtcactggagacaaattcagaa

SEQ ID NO: 6013523 - DNA, 25 bp, Homo sapien
acagtacactaaatactgatttcaa

SEQ ID NO: 6013524 - DNA, 25 bp, Homo sapien
cactcgtgaatattaaaaacttcaa

SEQ ID NO: 6013525 - DNA, 25 bp, Homo sapien
ctaagattttggctttatgtgcaaa

SEQ ID NO: 6013526 - DNA, 25 bp, Homo sapien
tcaaataaaaccctaaattgatcag

SEQ ID NO: 6013527 - DNA, 25 bp, Homo sapien
taattctaagattttggctttatgt

SEQ ID NO: 6013528 - DNA, 25 bp, Homo sapien
gttagatttaccaaagtcactggag

SEQ ID NO: 6013529 - DNA, 25 bp, Homo sapien
tcttacagttctaagaattaagttc

SEQ ID NO: 6013530 - DNA, 25 bp, Homo sapien
ttttggctttatgtgcaaagggaaa

SEQ ID NO: 6013531 - DNA, 25 bp, Homo sapien
tgacgataaattcattaagaatttt

SEQ ID NO: 6013532 - DNA, 25 bp, Homo sapien
cttgtatgggctacagcagttccca

SEQ ID NO: 6013533 - DNA, 25 bp, Homo sapien
cattagactgaaaattatttacaca

SEQ ID NO: 6013534 - DNA, 25 bp, Homo sapien
attatttacacatacaagacgaaat

SEQ ID NO: 6013535 - DNA, 25 bp, Homo sapien
cccttaagtgtacattagggacttg

SEQ ID NO: 6013536 - DNA, 25 bp, Homo sapien
tacacatacaagacgaaatagaata

SEQ ID NO: 6013537 - DNA, 25 bp, Homo sapien
gtccacaaaactggcaggtatatat

SEQ ID NO: 6013538 - DNA, 25 bp, Homo sapien
tgacaaataagtataaaagaatcag

SEQ ID NO: 6013539 - DNA, 25 bp, Homo sapien
tgggctacagcagttcccatgactt

SEQ ID NO: 6013540 - DNA, 25 bp, Homo sapien
accatcactcctacaactaaaaggt

SEQ ID NO: 6013541 - DNA, 25 bp, Homo sapien
cttatccagtacttaggaacttgga

SEQ ID NO: 6013542 - DNA, 25 bp, Homo sapien
tgaatttgtctccagtgactttggt

SEQ ID NO: 6013543 - DNA, 25 bp, Homo sapien
ccttgggaccatggaactcttatcc

SEQ ID NO: 6013544 - DNA, 25 bp, Homo sapien
aaaaggtctcatgcaatggaactta

SEQ ID NO: 6013545 - DNA, 25 bp, Homo sapien
tccttctgaatttgtctccagtgac

SEQ ID NO: 6013546 - DNA, 25 bp, Homo sapien
acaactaaaaggtctcatgcaatgg

SEQ ID NO: 6013547 - DNA, 25 bp, Homo sapien
atgacttcaaactactgtgctcttc

SEQ ID NO: 6013548 - DNA, 25 bp, Homo sapien
actcctacaactaaaaggtctcatg

SEQ ID NO: 6013549 - DNA, 25 bp, Homo sapien
gtagaaaggttgttcagaggatgcc

SEQ ID NO: 6013550 - DNA, 25 bp, Homo sapien
atatattccttctgaatttgtctcc

SEQ ID NO: 6013551 - DNA, 25 bp, Homo sapien
tctcatgcaatggaacttaattctt

SEQ ID NO: 6013552 - DNA, 25 bp, Homo sapien
gaccatgtacaacacataagtgtac

SEQ ID NO: 6013553 - DNA, 25 bp, Homo sapien
acaaatatatgcacagatatacaga

SEQ ID NO: 6013554 - DNA, 25 bp, Homo sapien
aatataacaaatatatgcacagata

SEQ ID NO: 6013555 - DNA, 25 bp, Homo sapien
agatcagataaacagctaatggtct

SEQ ID NO: 6013556 - DNA, 25 bp, Homo sapien
ataaaagcctccctattaatgtagt

SEQ ID NO: 6013557 - DNA, 25 bp, Homo sapien
aaactggcaggtatatattccttct

SEQ ID NO: 6013558 - DNA, 25 bp, Homo sapien
ttcttagaactgtaagaattacatc

SEQ ID NO: 6013559 - DNA, 25 bp, Homo sapien
tacattagggacttgtatgggctac

SEQ ID NO: 6013560 - DNA, 25 bp, Homo sapien
acagcatgacaaataagtataaaag

SEQ ID NO: 6013561 - DNA, 25 bp, Homo sapien
gggcagacagcatgacaaataagta

SEQ ID NO: 6013562 - DNA, 25 bp, Homo sapien
acctagaccatcactcctacaacta

SEQ ID NO: 6013563 - DNA, 25 bp, Homo sapien
gctcttccaataatcttcattattt

SEQ ID NO: 6013564 - DNA, 25 bp, Homo sapien
aaaagccattagactgaaaattatt

SEQ ID NO: 6013565 - DNA, 25 bp, Homo sapien
tttgcaagatcagataaacagctaa

SEQ ID NO: 6013566 - DNA, 25 bp, Homo sapien
attacatcaaacataaaagcctccc

SEQ ID NO: 6013567 - DNA, 25 bp, Homo sapien
gaccatggaactcttatccagtact

SEQ ID NO: 6013568 - DNA, 25 bp, Homo sapien
ttgttaaaaagccattagactgaaa

SEQ ID NO: 6013569 - DNA, 25 bp, Homo sapien
caacttacctagaccatcactccta

SEQ ID NO: 6013570 - DNA, 25 bp, Homo sapien
cacataagtgtacaatataacaaat

SEQ ID NO: 6013571 - DNA, 25 bp, Homo sapien
gtgtacaatataacaaatatatgca

SEQ ID NO: 6013572 - DNA, 25 bp, Homo sapien
agcctccctattaatgtagtccaca

SEQ ID NO: 6013573 - DNA, 25 bp, Homo sapien
gataaacagctaatggtctaaaaac

SEQ ID NO: 6013574 - DNA, 25 bp, Homo sapien
gtaagaattacatcaaacataaaag

SEQ ID NO: 6013575 - DNA, 25 bp, Homo sapien
ccaaaccttgggaccatggaactct

SEQ ID NO: 6013576 - DNA, 25 bp, Homo sapien
gaacttaattcttagaactgtaaga

SEQ ID NO: 6013577 - DNA, 25 bp, Homo sapien
ctgaaaattatttacacatacaaga

SEQ ID NO: 6013578 - DNA, 25 bp, Homo sapien
agaactgtaagaattacatcaaaca

SEQ ID NO: 6013579 - DNA, 25 bp, Homo sapien
gaatcagaccatgtacaacacataa

SEQ ID NO: 6013580 - DNA, 25 bp, Homo sapien
gtacaacacataagtgtacaatata

SEQ ID NO: 6013581 - DNA, 25 bp, Homo sapien
tcaaactactgtgctcttccaataa

SEQ ID NO: 6013582 - DNA, 25 bp, Homo sapien
gcaatggaacttaattcttagaact

SEQ ID NO: 6013583 - DNA, 25 bp, Homo sapien
atcttcattatttgttaaaaagcca

SEQ ID NO: 6013584 - DNA, 25 bp, Homo sapien
ggatgccaacttacctagaccatca

SEQ ID NO: 6013585 - DNA, 25 bp, Homo sapien
tacagacatgggtcaggggtagaaa

SEQ ID NO: 6013586 - DNA, 25 bp, Homo sapien
cagtacttaggaacttggagaaaat

SEQ ID NO: 6013587 - DNA, 25 bp, Homo sapien
cctattaatgtagtccacaaaactg

SEQ ID NO: 6013588 - DNA, 25 bp, Homo sapien
aaaattcttaatgaatttatcgtca

SEQ ID NO: 6013589 - DNA, 25 bp, Homo sapien
ttgtaatggggggtgggggcagaca

SEQ ID NO: 6013590 - DNA, 25 bp, Homo sapien
ataagtataaaagaatcagaccatg

SEQ ID NO: 6013591 - DNA, 25 bp, Homo sapien
ccaataatcttcattatttgttaaa

SEQ ID NO: 6013592 - DNA, 25 bp, Homo sapien
tagggacttgtatgggctacagcag

SEQ ID NO: 6013593 - DNA, 25 bp, Homo sapien
cattatttgttaaaaagccattaga

SEQ ID NO: 6013594 - DNA, 25 bp, Homo sapien
gggtgggggcagacagcatgacaaa

SEQ ID NO: 6013595 - DNA, 25 bp, Homo sapien
aggttgttcagaggatgccaactta

SEQ ID NO: 6013596 - DNA, 25 bp, Homo sapien
cagtgactttggtaaatctaactaa

SEQ ID NO: 6013597 - DNA, 25 bp, Homo sapien
ttcagaggatgccaacttacctaga

SEQ ID NO: 6013598 - DNA, 25 bp, Homo sapien
tcaggggtagaaaggttgttcagag

SEQ ID NO: 6013599 - DNA, 25 bp, Homo sapien
catgggtcaggggtagaaaggttgt

SEQ ID NO: 6013600 - DNA, 25 bp, Homo sapien
acagatatacagacatgggtcaggg

SEQ ID NO: 6013601 - DNA, 25 bp, Homo sapien
atatgcacagatatacagacatggg

SEQ ID NO: 6013602 - DNA, 25 bp, Homo sapien
tactgtgctcttccaataatcttca

SEQ ID NO: 6013603 - DNA, 25 bp, Homo sapien
cttaatgaatttatcgtcaacaaca

SEQ ID NO: 6013604 - DNA, 25 bp, Homo sapien
acagcagttcccatgacttcaaact

SEQ ID NO: 6013605 - DNA, 25 bp, Homo sapien
aatgtagtccacaaaactggcaggt

SEQ ID NO: 6013606 - DNA, 25 bp, Homo sapien
tgtctccagtgactttggtaaatct

SEQ ID NO: 6013607 - DNA, 25 bp, Homo sapien
gcaggtatatattccttctgaattt

SEQ ID NO: 6013608 - DNA, 25 bp, Homo sapien
taagtgtacattagggacttgtatg

SEQ ID NO: 6013609 - DNA, 25 bp, Homo sapien
tacaagacgaaatagaataaaagaa

SEQ ID NO: 6013610 - DNA, 25 bp, Homo sapien
tcaaacataaaagcctccctattaa

SEQ ID NO: 6013611 - DNA, 25 bp, Homo sapien
gttcccatgacttcaaactactgtg

SEQ ID NO: 6013612 - DNA, 25 bp, Homo sapien
aatggggggtgggggcagacagcat

SEQ ID NO: 6013613 - DNA, 25 bp, Homo sapien
ataaaagaatcagaccatgtacaac

SEQ ID NO: 6013614 - DNA, 25 bp, Homo sapien
ggaactcttatccagtacttaggaa

SEQ ID NO: 6013615 - DNA, 25 bp, Homo sapien
aggaacttggagaaaattgtaatgg

SEQ ID NO: 6013616 - DNA, 25 bp, Homo sapien
catggaagctctcacactgtgcatc

SEQ ID NO: 6013617 - DNA, 25 bp, Homo sapien
gcagtctgtcccaggttccaggcag

SEQ ID NO: 6013618 - DNA, 25 bp, Homo sapien
gcttggaagtgcacagctggctagt

SEQ ID NO: 6013619 - DNA, 25 bp, Homo sapien
gcttatgattcaattaatctacatt

SEQ ID NO: 6013620 - DNA, 25 bp, Homo sapien
gttaccatgtaagtctcatgagtca

SEQ ID NO: 6013621 - DNA, 25 bp, Homo sapien
aggttccaggcaggtgacagccatg

SEQ ID NO: 6013622 - DNA, 25 bp, Homo sapien
agggcagccaccctcaccctccttc

SEQ ID NO: 6013623 - DNA, 25 bp, Homo sapien
cattgttctgtttgacttttgtgta

SEQ ID NO: 6013624 - DNA, 25 bp, Homo sapien
tcacactgtgcatcacaaagctaac

SEQ ID NO: 6013625 - DNA, 25 bp, Homo sapien
cccacacttggcacttacactaagg

SEQ ID NO: 6013626 - DNA, 25 bp, Homo sapien
ttcctcatgtggcactgtagcatcc

SEQ ID NO: 6013627 - DNA, 25 bp, Homo sapien
actaaggttaccatgtaagtctcat

SEQ ID NO: 6013628 - DNA, 25 bp, Homo sapien
ctgcaatgctgtcaccatggtcctg

SEQ ID NO: 6013629 - DNA, 25 bp, Homo sapien
ctcaccctccttccttatccttcca

SEQ ID NO: 6013630 - DNA, 25 bp, Homo sapien
tacattttggtaatcaattataaaa

SEQ ID NO: 6013631 - DNA, 25 bp, Homo sapien
tgctgtcaccatggtcctgcactgt

SEQ ID NO: 6013632 - DNA, 25 bp, Homo sapien
cgtcataaatttttaaagtgcttat

SEQ ID NO: 6013633 - DNA, 25 bp, Homo sapien
gtctcatgagtcagcagtgcttgga

SEQ ID NO: 6013634 - DNA, 25 bp, Homo sapien
tgtcccaggttccaggcaggtgaca

SEQ ID NO: 6013635 - DNA, 25 bp, Homo sapien
caggatactctgagatgagcaggtt

SEQ ID NO: 6013636 - DNA, 25 bp, Homo sapien
ggtcctgcactgtcgtggctgctgc

SEQ ID NO: 6013637 - DNA, 25 bp, Homo sapien
agctaacaaatggaaatctgaattg

SEQ ID NO: 6013638 - DNA, 25 bp, Homo sapien
tgatgtgttggtgttaacattgttc

SEQ ID NO: 6013639 - DNA, 25 bp, Homo sapien
aagtgcacagctggctagtgctgaa

SEQ ID NO: 6013640 - DNA, 25 bp, Homo sapien
tgaattgcagtctgtcccaggttcc

SEQ ID NO: 6013641 - DNA, 25 bp, Homo sapien
agcagtgcttggaagtgcacagctg

SEQ ID NO: 6013642 - DNA, 25 bp, Homo sapien
gcactgtcgtggctgctgcaggata

SEQ ID NO: 6013643 - DNA, 25 bp, Homo sapien
ttccaccagaagagaaatgtaccac

SEQ ID NO: 6013644 - DNA, 25 bp, Homo sapien
agaaatgtaccacagtcctgatgtg

SEQ ID NO: 6013645 - DNA, 25 bp, Homo sapien
ttgtaaaggctctcagcctcctcag

SEQ ID NO: 6013646 - DNA, 25 bp, Homo sapien
cagtcctgatgtgttggtgttaaca

SEQ ID NO: 6013647 - DNA, 25 bp, Homo sapien
gaaagaactgctgagctcctcaaag

SEQ ID NO: 6013648 - DNA, 25 bp, Homo sapien
gcagtgctgagattgtaaaggctct

SEQ ID NO: 6013649 - DNA, 25 bp, Homo sapien
actctgagatgagcaggttctttgg

SEQ ID NO: 6013650 - DNA, 25 bp, Homo sapien
ggctagtgctgaaaacaggacatag

SEQ ID NO: 6013651 - DNA, 25 bp, Homo sapien
tgagtcagcagtgcttggaagtgca

SEQ ID NO: 6013652 - DNA, 25 bp, Homo sapien
ccctccttccttatccttccaccag

SEQ ID NO: 6013653 - DNA, 25 bp, Homo sapien
tagcatccccgtcataaatttttaa

SEQ ID NO: 6013654 - DNA, 25 bp, Homo sapien
cagaagagaaatgtaccacagtcct

SEQ ID NO: 6013655 - DNA, 25 bp, Homo sapien
tgtctgctcacaggagtcccacact

SEQ ID NO: 6013656 - DNA, 25 bp, Homo sapien
tctttggaaagaactgctgagctcc

SEQ ID NO: 6013657 - DNA, 25 bp, Homo sapien
agccatgtgtgtctgcaatgctgtc

SEQ ID NO: 6013658 - DNA, 25 bp, Homo sapien
aggagtcccacacttggcacttaca

SEQ ID NO: 6013659 - DNA, 25 bp, Homo sapien
tcacaaagctaacaaatggaaatct

SEQ ID NO: 6013660 - DNA, 25 bp, Homo sapien
gcactgtagcatccccgtcataaat

SEQ ID NO: 6013661 - DNA, 25 bp, Homo sapien
ttaatctacattttggtaatcaatt

SEQ ID NO: 6013662 - DNA, 25 bp, Homo sapien
gtgtgtctgcaatgctgtcaccatg

SEQ ID NO: 6013663 - DNA, 25 bp, Homo sapien
gttggtgttaacattgttctgtttg

SEQ ID NO: 6013664 - DNA, 25 bp, Homo sapien
gctcacaggagtcccacacttggca

SEQ ID NO: 6013665 - DNA, 25 bp, Homo sapien
cagcgcagggcagccaccctcaccc

SEQ ID NO: 6013666 - DNA, 25 bp, Homo sapien
actgctgagctcctcaaagcagtgc

SEQ ID NO: 6013667 - DNA, 25 bp, Homo sapien
gaaatctgaattgcagtctgtccca

SEQ ID NO: 6013668 - DNA, 25 bp, Homo sapien
ggtgacagccatgtgtgtctgcaat

SEQ ID NO: 6013669 - DNA, 25 bp, Homo sapien
taaagtgcttatgattcaattaatc

SEQ ID NO: 6013670 - DNA, 25 bp, Homo sapien
tgctgaaaacaggacatagtgccca

SEQ ID NO: 6013671 - DNA, 25 bp, Homo sapien
tgtgcatcacaaagctaacaaatgg

SEQ ID NO: 6013672 - DNA, 25 bp, Homo sapien
gattcaattaatctacattttggta

SEQ ID NO: 6013673 - DNA, 25 bp, Homo sapien
catgtggcactgtagcatccccgtc

SEQ ID NO: 6013674 - DNA, 25 bp, Homo sapien
caaatggaaatctgaattgcagtct

SEQ ID NO: 6013675 - DNA, 25 bp, Homo sapien
tcgtggctgctgcaggatactctga

SEQ ID NO: 6013676 - DNA, 25 bp, Homo sapien
acagctggctagtgctgaaaacagg

SEQ ID NO: 6013677 - DNA, 25 bp, Homo sapien
acttacactaaggttaccatgtaag

SEQ ID NO: 6013678 - DNA, 25 bp, Homo sapien
aggctctcagcctcctcagttcctc

SEQ ID NO: 6013679 - DNA, 25 bp, Homo sapien
agtgcccagcgcagggcagccaccc

SEQ ID NO: 6013680 - DNA, 25 bp, Homo sapien
agctctcacactgtgcatcacaaag

SEQ ID NO: 6013681 - DNA, 25 bp, Homo sapien
gccaccctcaccctccttccttatc

SEQ ID NO: 6013682 - DNA, 25 bp, Homo sapien
gcaggttctttggaaagaactgctg

SEQ ID NO: 6013683 - DNA, 25 bp, Homo sapien
caggcaggtgacagccatgtgtgtc

SEQ ID NO: 6013684 - DNA, 25 bp, Homo sapien
cctgggaagatgctgtctgctcaca

SEQ ID NO: 6013685 - DNA, 25 bp, Homo sapien
cttggcacttacactaaggttacca

SEQ ID NO: 6013686 - DNA, 25 bp, Homo sapien
gagctcctcaaagcagtgctgagat

SEQ ID NO: 6013687 - DNA, 25 bp, Homo sapien
atgtaagtctcatgagtcagcagtg

SEQ ID NO: 6013688 - DNA, 25 bp, Homo sapien
tgttaacattgttctgtttgacttt

SEQ ID NO: 6013689 - DNA, 25 bp, Homo sapien
gacatagtgcccagcgcagggcagc

SEQ ID NO: 6013690 - DNA, 25 bp, Homo sapien
ctcaaagcagtgctgagattgtaaa

SEQ ID NO: 6013691 - DNA, 25 bp, Homo sapien
ttatccttccaccagaagagaaatg

SEQ ID NO: 6013692 - DNA, 25 bp, Homo sapien
agatgctgtctgctcacaggagtcc

SEQ ID NO: 6013693 - DNA, 25 bp, Homo sapien
caccatggtcctgcactgtcgtggc

SEQ ID NO: 6013694 - DNA, 25 bp, Homo sapien
tcagcctcctcagttcctcatgtgg

SEQ ID NO: 6013695 - DNA, 25 bp, Homo sapien
aaacaggacatagtgcccagcgcag

SEQ ID NO: 6013696 - DNA, 25 bp, Homo sapien
agatgagcaggttctttggaaagaa

SEQ ID NO: 6013697 - DNA, 25 bp, Homo sapien
cctcagttcctcatgtggcactgta

SEQ ID NO: 6013698 - DNA, 25 bp, Homo sapien
gtaccacagtcctgatgtgttggtg

SEQ ID NO: 6013699 - DNA, 25 bp, Homo sapien
ttttaccctgggaagatgctgtctg

SEQ ID NO: 6013700 - DNA, 25 bp, Homo sapien
cttccttatccttccaccagaagag

SEQ ID NO: 6013701 - DNA, 25 bp, Homo sapien
aatttttaaagtgcttatgattcaa

SEQ ID NO: 6013702 - DNA, 25 bp, Homo sapien
ctgctgcaggatactctgagatgag

SEQ ID NO: 6013703 - DNA, 25 bp, Homo sapien
ctgagattgtaaaggctctcagcct

SEQ ID NO: 6013704 - DNA, 25 bp, Homo sapien
caaggttcacatgtctgtatttgcc

SEQ ID NO: 6013705 - DNA, 25 bp, Homo sapien
ttaacaccaacacatcaggactgtg

SEQ ID NO: 6013706 - DNA, 25 bp, Homo sapien
actaagtcactaagacaccacaact

SEQ ID NO: 6013707 - DNA, 25 bp, Homo sapien
acagttagcttgttttcaggctaca

SEQ ID NO: 6013708 - DNA, 25 bp, Homo sapien
ccgacagatactataagctgctgtg

SEQ ID NO: 6013709 - DNA, 25 bp, Homo sapien
atgcattactttacacaaaagtcaa

SEQ ID NO: 6013710 - DNA, 25 bp, Homo sapien
catggacaccatgtttcagggacac

SEQ ID NO: 6013711 - DNA, 25 bp, Homo sapien
tcagcactagccagctgtgcacttc

SEQ ID NO: 6013712 - DNA, 25 bp, Homo sapien
tttctcttctggtggaaggataagg

SEQ ID NO: 6013713 - DNA, 25 bp, Homo sapien
ctcagaataaggagtgagctacata

SEQ ID NO: 6013714 - DNA, 25 bp, Homo sapien
agggtggctgccctgcgctgggcac

SEQ ID NO: 6013715 - DNA, 25 bp, Homo sapien
gggtggaaggtgacggcatctccag

SEQ ID NO: 6013716 - DNA, 25 bp, Homo sapien
aacagaacaatgttaacaccaacac

SEQ ID NO: 6013717 - DNA, 25 bp, Homo sapien
gatactataagctgctgtgtgtact

SEQ ID NO: 6013718 - DNA, 25 bp, Homo sapien
caatgtctcagaataaggagtgagc

SEQ ID NO: 6013719 - DNA, 25 bp, Homo sapien
tgctgtgtgtactcaggcatgtact

SEQ ID NO: 6013720 - DNA, 25 bp, Homo sapien
tggaaggataaggaaggagggtgag

SEQ ID NO: 6013721 - DNA, 25 bp, Homo sapien
atttgccactgcctacaggtcacta

SEQ ID NO: 6013722 - DNA, 25 bp, Homo sapien
tagtttttgaatagtttctaataca

SEQ ID NO: 6013723 - DNA, 25 bp, Homo sapien
tttcaggctacattacaagattgca

SEQ ID NO: 6013724 - DNA, 25 bp, Homo sapien
gggcagcagagaacacgctggaaaa

SEQ ID NO: 6013725 - DNA, 25 bp, Homo sapien
ttgtacccgacagatactataagct

SEQ ID NO: 6013726 - DNA, 25 bp, Homo sapien
tttgtttctttgtgtttgagagaaa

SEQ ID NO: 6013727 - DNA, 25 bp, Homo sapien
gtctgtatttgccactgcctacagg

SEQ ID NO: 6013728 - DNA, 25 bp, Homo sapien
atgtaatgtattcaaggttcacatg

SEQ ID NO: 6013729 - DNA, 25 bp, Homo sapien
tgcactccactgttacagcatggac

SEQ ID NO: 6013730 - DNA, 25 bp, Homo sapien
ctcttctttgtacccgacagatact

SEQ ID NO: 6013731 - DNA, 25 bp, Homo sapien
cagagaacacgctggaaaagttttt

SEQ ID NO: 6013732 - DNA, 25 bp, Homo sapien
gctgccctgcgctgggcactatgtc

SEQ ID NO: 6013733 - DNA, 25 bp, Homo sapien
gactcatgagacttacatggtaacc

SEQ ID NO: 6013734 - DNA, 25 bp, Homo sapien
agagaaatgtaatgtattcaaggtt

SEQ ID NO: 6013735 - DNA, 25 bp, Homo sapien
tgtattcaaggttcacatgtctgta

SEQ ID NO: 6013736 - DNA, 25 bp, Homo sapien
caccatgtttcagggacaccacaga

SEQ ID NO: 6013737 - DNA, 25 bp, Homo sapien
gataaggaaggagggtgagggtggc

SEQ ID NO: 6013738 - DNA, 25 bp, Homo sapien
tcacatgtctgtatttgccactgcc

SEQ ID NO: 6013739 - DNA, 25 bp, Homo sapien
tctaatacagttagcttgttttcag

SEQ ID NO: 6013740 - DNA, 25 bp, Homo sapien
tctttgtgtttgagagaaatgtaat

SEQ ID NO: 6013741 - DNA, 25 bp, Homo sapien
ctcacacagacacgggtggaaggtg

SEQ ID NO: 6013742 - DNA, 25 bp, Homo sapien
aagtcaaacagaacaatgttaacac

SEQ ID NO: 6013743 - DNA, 25 bp, Homo sapien
tctcaacagctactcttctttgtac

SEQ ID NO: 6013744 - DNA, 25 bp, Homo sapien
tcactaagacaccacaactcacaca

SEQ ID NO: 6013745 - DNA, 25 bp, Homo sapien
ataaggagtgagctacatactaagt

SEQ ID NO: 6013746 - DNA, 25 bp, Homo sapien
gctacattacaagattgcatgcatt

SEQ ID NO: 6013747 - DNA, 25 bp, Homo sapien
ccactgttacagcatggacaccatg

SEQ ID NO: 6013748 - DNA, 25 bp, Homo sapien
acacaaaagtcaaacagaacaatgt

SEQ ID NO: 6013749 - DNA, 25 bp, Homo sapien
gggcactatgtcctgttttcagcac

SEQ ID NO: 6013750 - DNA, 25 bp, Homo sapien
gattgcatgcattactttacacaaa

SEQ ID NO: 6013751 - DNA, 25 bp, Homo sapien
cactgcctacaggtcactaaaaata

SEQ ID NO: 6013752 - DNA, 25 bp, Homo sapien
acggcatctccagggcagcagagaa

SEQ ID NO: 6013753 - DNA, 25 bp, Homo sapien
cagctactcttctttgtacccgaca

SEQ ID NO: 6013754 - DNA, 25 bp, Homo sapien
ctacaggtcactaaaaatacctagt

SEQ ID NO: 6013755 - DNA, 25 bp, Homo sapien
gaaggagggtgagggtggctgccct

SEQ ID NO: 6013756 - DNA, 25 bp, Homo sapien
ctagccagctgtgcacttccaagca

SEQ ID NO: 6013757 - DNA, 25 bp, Homo sapien
tgtttgagagaaatgtaatgtattc

SEQ ID NO: 6013758 - DNA, 25 bp, Homo sapien
gcacttccaagcactgctgactcat

SEQ ID NO: 6013759 - DNA, 25 bp, Homo sapien
tctccagggcagcagagaacacgct

SEQ ID NO: 6013760 - DNA, 25 bp, Homo sapien
agctgtgcacttccaagcactgctg

SEQ ID NO: 6013761 - DNA, 25 bp, Homo sapien
ggacaccacagacaatgtctcagaa

SEQ ID NO: 6013762 - DNA, 25 bp, Homo sapien
gtgtactcaggcatgtactgcactc

SEQ ID NO: 6013763 - DNA, 25 bp, Homo sapien
aaggtgacggcatctccagggcagc

SEQ ID NO: 6013764 - DNA, 25 bp, Homo sapien
tatgtcctgttttcagcactagcca

SEQ ID NO: 6013765 - DNA, 25 bp, Homo sapien
ctacatactaagtcactaagacacc

SEQ ID NO: 6013766 - DNA, 25 bp, Homo sapien
gcacagctctctgtctcaacagcta

SEQ ID NO: 6013767 - DNA, 25 bp, Homo sapien
agacacgggtggaaggtgacggcat

SEQ ID NO: 6013768 - DNA, 25 bp, Homo sapien
tttgtttgtttctttgtgtttgaga

SEQ ID NO: 6013769 - DNA, 25 bp, Homo sapien
agcttgttttcaggctacattacaa

SEQ ID NO: 6013770 - DNA, 25 bp, Homo sapien
atagtttctaatacagttagcttgt

SEQ ID NO: 6013771 - DNA, 25 bp, Homo sapien
tctctgtctcaacagctactcttct

SEQ ID NO: 6013772 - DNA, 25 bp, Homo sapien
cacaactcacacagacacgggtgga

SEQ ID NO: 6013773 - DNA, 25 bp, Homo sapien
agacaccacaactcacacagacacg

SEQ ID NO: 6013774 - DNA, 25 bp, Homo sapien
ttctggtggaaggataaggaaggag

SEQ ID NO: 6013775 - DNA, 25 bp, Homo sapien
ggtacatttctcttctggtggaagg

SEQ ID NO: 6013776 - DNA, 25 bp, Homo sapien
ttacagcatggacaccatgtttcag

SEQ ID NO: 6013777 - DNA, 25 bp, Homo sapien
catcaggactgtggtacatttctct

SEQ ID NO: 6013778 - DNA, 25 bp, Homo sapien
ccaacacatcaggactgtggtacat

SEQ ID NO: 6013779 - DNA, 25 bp, Homo sapien
gactgtggtacatttctcttctggt

SEQ ID NO: 6013780 - DNA, 25 bp, Homo sapien
tgcgctgggcactatgtcctgtttt

SEQ ID NO: 6013781 - DNA, 25 bp, Homo sapien
gggtgagggtggctgccctgcgctg

SEQ ID NO: 6013782 - DNA, 25 bp, Homo sapien
agtgagctacatactaagtcactaa

SEQ ID NO: 6013783 - DNA, 25 bp, Homo sapien
tttgaatagtttctaatacagttag

SEQ ID NO: 6013784 - DNA, 25 bp, Homo sapien
acaatgttaacaccaacacatcagg

SEQ ID NO: 6013785 - DNA, 25 bp, Homo sapien
actgctgactcatgagacttacatg

SEQ ID NO: 6013786 - DNA, 25 bp, Homo sapien
ttacaagattgcatgcattacttta

SEQ ID NO: 6013787 - DNA, 25 bp, Homo sapien
cacagacaatgtctcagaataagga

SEQ ID NO: 6013788 - DNA, 25 bp, Homo sapien
tcaggcatgtactgcactccactgt

SEQ ID NO: 6013789 - DNA, 25 bp, Homo sapien
tactttacacaaaagtcaaacagaa

SEQ ID NO: 6013790 - DNA, 25 bp, Homo sapien
ataagctgctgtgtgtactcaggca

SEQ ID NO: 6013791 - DNA, 25 bp, Homo sapien
tttcagggacaccacagacaatgtc

SEQ ID NO: 6013792 - DNA, 25 bp, Homo sapien
atgtactgcactccactgttacagc

SEQ ID NO: 6013793 - DNA, 25 bp, Homo sapien
ccaagcactgctgactcatgagact

SEQ ID NO: 6013794 - DNA, 25 bp, Homo sapien
ctgttttcagcactagccagctgtg

SEQ ID NO: 6013795 - DNA, 25 bp, Homo sapien
agcatggcgaggagaccttcaaccg

SEQ ID NO: 6013796 - DNA, 25 bp, Homo sapien
tgaccgcaatctgtaccgttgtggt

SEQ ID NO: 6013797 - DNA, 25 bp, Homo sapien
gagccaagctgctcaacgtgggctt

SEQ ID NO: 6013798 - DNA, 25 bp, Homo sapien
tcatcccctttagacaccgggagca

SEQ ID NO: 6013799 - DNA, 25 bp, Homo sapien
tcctgacgtgccgcctggtcttgtg

SEQ ID NO: 6013800 - DNA, 25 bp, Homo sapien
gacaccgggagcaccacctacgcta

SEQ ID NO: 6013801 - DNA, 25 bp, Homo sapien
cacagctccagtcattccgccctgt

SEQ ID NO: 6013802 - DNA, 25 bp, Homo sapien
tcaacgtgggcttcctagaggcact

SEQ ID NO: 6013803 - DNA, 25 bp, Homo sapien
gcggcagcggctgcgctacggtgtc

SEQ ID NO: 6013804 - DNA, 25 bp, Homo sapien
gccctgtcctgacgtgccgcctggt

SEQ ID NO: 6013805 - DNA, 25 bp, Homo sapien
atctgcaccccatgttgaggcggca

SEQ ID NO: 6013806 - DNA, 25 bp, Homo sapien
tatggatgaccgcaatctgtaccgt

SEQ ID NO: 6013807 - DNA, 25 bp, Homo sapien
caggcctggtcccacagctccagtc

SEQ ID NO: 6013808 - DNA, 25 bp, Homo sapien
gctgcctgaagtgcccagtgccagg

SEQ ID NO: 6013809 - DNA, 25 bp, Homo sapien
aggatgctgcctatgactgcttcat

SEQ ID NO: 6013810 - DNA, 25 bp, Homo sapien
tccagtcattccgccctgtcctgac

SEQ ID NO: 6013811 - DNA, 25 bp, Homo sapien
cccatgcctctggaacgggtgcaga

SEQ ID NO: 6013812 - DNA, 25 bp, Homo sapien
agcagtaccaactgctctcggccca

SEQ ID NO: 6013813 - DNA, 25 bp, Homo sapien
accaactgctctcggcccaacgcca

SEQ ID NO: 6013814 - DNA, 25 bp, Homo sapien
attcacctcacccatgcctctggaa

SEQ ID NO: 6013815 - DNA, 25 bp, Homo sapien
caggcgtgctcctgggcggccgcta

SEQ ID NO: 6013816 - DNA, 25 bp, Homo sapien
tactttggaggtgtgtcgggcctga

SEQ ID NO: 6013817 - DNA, 25 bp, Homo sapien
ccggttgccctatgctagctacttt

SEQ ID NO: 6013818 - DNA, 25 bp, Homo sapien
gcggctgcgctacggtgtctatgtc

SEQ ID NO: 6013819 - DNA, 25 bp, Homo sapien
tattctccacccgactgcaccccag

SEQ ID NO: 6013820 - DNA, 25 bp, Homo sapien
ctgggcggccgctattctccacccg

SEQ ID NO: 6013821 - DNA, 25 bp, Homo sapien
caagtttggcttccggttgccctat

SEQ ID NO: 6013822 - DNA, 25 bp, Homo sapien
tccactatctgcaccccatgttgag

SEQ ID NO: 6013823 - DNA, 25 bp, Homo sapien
actgccgctagctccgggctgcctg

SEQ ID NO: 6013824 - DNA, 25 bp, Homo sapien
accacctacgctattggctccacta

SEQ ID NO: 6013825 - DNA, 25 bp, Homo sapien
cttcagtgatgtggacctggtccct

SEQ ID NO: 6013826 - DNA, 25 bp, Homo sapien
agtcatcatcccctttagacaccgg

SEQ ID NO: 6013827 - DNA, 25 bp, Homo sapien
catcgaattcacctcacccatgcct

SEQ ID NO: 6013828 - DNA, 25 bp, Homo sapien
gaagtgcccagtgccaggcctggtc

SEQ ID NO: 6013829 - DNA, 25 bp, Homo sapien
ggtccctatggatgaccgcaatctg

SEQ ID NO: 6013830 - DNA, 25 bp, Homo sapien
cgtgccgcctggtcttgtgggccga

SEQ ID NO: 6013831 - DNA, 25 bp, Homo sapien
cattccgccctgtcctgacgtgccg

SEQ ID NO: 6013832 - DNA, 25 bp, Homo sapien
cagcagcagtaccaactgctctcgg

SEQ ID NO: 6013833 - DNA, 25 bp, Homo sapien
ccagcccaaacggtggcagtcatca

SEQ ID NO: 6013834 - DNA, 25 bp, Homo sapien
ttgtggtgaccagccccgccacttt

SEQ ID NO: 6013835 - DNA, 25 bp, Homo sapien
gtaccgttgtggtgaccagccccgc

SEQ ID NO: 6013836 - DNA, 25 bp, Homo sapien
ggtgtctatgtcatcaaccagcatg

SEQ ID NO: 6013837 - DNA, 25 bp, Homo sapien
cgctacggtgtctatgtcatcaacc

SEQ ID NO: 6013838 - DNA, 25 bp, Homo sapien
tggtcccacagctccagtcattccg

SEQ ID NO: 6013839 - DNA, 25 bp, Homo sapien
accccatgttgaggcggcagcggct

SEQ ID NO: 6013840 - DNA, 25 bp, Homo sapien
tatgtcatcaaccagcatggcgagg

SEQ ID NO: 6013841 - DNA, 25 bp, Homo sapien
agctgctcaacgtgggcttcctaga

SEQ ID NO: 6013842 - DNA, 25 bp, Homo sapien
ctttagacaccgggagcaccaccta

SEQ ID NO: 6013843 - DNA, 25 bp, Homo sapien
tgctagctactttggaggtgtgtcg

SEQ ID NO: 6013844 - DNA, 25 bp, Homo sapien
tcctagaggcactgaaggaggatgc

SEQ ID NO: 6013845 - DNA, 25 bp, Homo sapien
gtgctcctgggcggccgctattctc

SEQ ID NO: 6013846 - DNA, 25 bp, Homo sapien
gctagctccgggctgcctgaagtgc

SEQ ID NO: 6013847 - DNA, 25 bp, Homo sapien
agaccttcaaccgagccaagctgct

SEQ ID NO: 6013848 - DNA, 25 bp, Homo sapien
cctcacccatgcctctggaacgggt

SEQ ID NO: 6013849 - DNA, 25 bp, Homo sapien
tgaaggaggatgctgcctatgactg

SEQ ID NO: 6013850 - DNA, 25 bp, Homo sapien
gcctggtcttgtgggccgagtggtc

SEQ ID NO: 6013851 - DNA, 25 bp, Homo sapien
agtggtcatcgaattcacctcaccc

SEQ ID NO: 6013852 - DNA, 25 bp, Homo sapien
ctccgggctgcctgaagtgcccagt

SEQ ID NO: 6013853 - DNA, 25 bp, Homo sapien
tggcttccggttgccctatgctagc

SEQ ID NO: 6013854 - DNA, 25 bp, Homo sapien
catggacaagtttggcttccggttg

SEQ ID NO: 6013855 - DNA, 25 bp, Homo sapien
ccgccactttgccatcgccatggac

SEQ ID NO: 6013856 - DNA, 25 bp, Homo sapien
gggtgcagagggaaaatccaggcgt

SEQ ID NO: 6013857 - DNA, 25 bp, Homo sapien
aaaatccaggcgtgctcctgggcgg

SEQ ID NO: 6013858 - DNA, 25 bp, Homo sapien
cagtgccaggcctggtcccacagct

SEQ ID NO: 6013859 - DNA, 25 bp, Homo sapien
gggagcaccacctacgctattggct

SEQ ID NO: 6013860 - DNA, 25 bp, Homo sapien
caatctgtaccgttgtggtgaccag

SEQ ID NO: 6013861 - DNA, 25 bp, Homo sapien
catcgccatggacaagtttggcttc

SEQ ID NO: 6013862 - DNA, 25 bp, Homo sapien
tcaaccgagccaagctgctcaacgt

SEQ ID NO: 6013863 - DNA, 25 bp, Homo sapien
gggccgagtggtcatcgaattcacc

SEQ ID NO: 6013864 - DNA, 25 bp, Homo sapien
ccagccccgccactttgccatcgcc

SEQ ID NO: 6013865 - DNA, 25 bp, Homo sapien
ccgactgcaccccagcccaaacggt

SEQ ID NO: 6013866 - DNA, 25 bp, Homo sapien
ctttgccatcgccatggacaagttt

SEQ ID NO: 6013867 - DNA, 25 bp, Homo sapien
gttgaggcggcagcggctgcgctac

SEQ ID NO: 6013868 - DNA, 25 bp, Homo sapien
cttcatcttcagtgatgtggacctg

SEQ ID NO: 6013869 - DNA, 25 bp, Homo sapien
ggcccaacgccactgccgctagctc

SEQ ID NO: 6013870 - DNA, 25 bp, Homo sapien
tgcaccccagcccaaacggtggcag

SEQ ID NO: 6013871 - DNA, 25 bp, Homo sapien
gccctatgctagctactttggaggt

SEQ ID NO: 6013872 - DNA, 25 bp, Homo sapien
tgactgcttcatcttcagtgatgtg

SEQ ID NO: 6013873 - DNA, 25 bp, Homo sapien
caaacggtggcagtcatcatcccct

SEQ ID NO: 6013874 - DNA, 25 bp, Homo sapien
atcaaccagcatggcgaggagacct

SEQ ID NO: 6013875 - DNA, 25 bp, Homo sapien
acgccactgccgctagctccgggct

SEQ ID NO: 6013876 - DNA, 25 bp, Homo sapien
tgcctatgactgcttcatcttcagt

SEQ ID NO: 6013877 - DNA, 25 bp, Homo sapien
agagggaaaatccaggcgtgctcct

SEQ ID NO: 6013878 - DNA, 25 bp, Homo sapien
tcttgtgggccgagtggtcatcgaa

SEQ ID NO: 6013879 - DNA, 25 bp, Homo sapien
tggaacgggtgcagagggaaaatcc

SEQ ID NO: 6013880 - DNA, 25 bp, Homo sapien
ggacctggtccctatggatgaccgc

SEQ ID NO: 6013881 - DNA, 25 bp, Homo sapien
gcgaggagaccttcaaccgagccaa

SEQ ID NO: 6013882 - DNA, 25 bp, Homo sapien
tgctctcggcccaacgccactgccg

SEQ ID NO: 6013883 - DNA, 25 bp, Homo sapien
aggcactgaaggaggatgctgccta

SEQ ID NO: 6013884 - DNA, 25 bp, Homo sapien
ggccgctattctccacccgactgca

SEQ ID NO: 6013885 - DNA, 25 bp, Homo sapien
cctctggaacgggtgcagagggaaa

SEQ ID NO: 6013886 - DNA, 25 bp, Homo sapien
ggtggcagtcatcatcccctttaga

SEQ ID NO: 6013887 - DNA, 25 bp, Homo sapien
tacgctattggctccactatctgca

SEQ ID NO: 6013888 - DNA, 25 bp, Homo sapien
attggctccactatctgcaccccat

SEQ ID NO: 6013889 - DNA, 25 bp, Homo sapien
tgggcttcctagaggcactgaagga

SEQ ID NO: 6013890 - DNA, 25 bp, Homo sapien
tccacccgactgcaccccagcccaa

SEQ ID NO: 6013891 - DNA, 25 bp, Homo sapien
tgatgtggacctggtccctatggat

SEQ ID NO: 6013892 - DNA, 25 bp, Homo sapien
acctccaaagtagctagcatagggc

SEQ ID NO: 6013893 - DNA, 25 bp, Homo sapien
ctggttgatgacatagacaccgtag

SEQ ID NO: 6013894 - DNA, 25 bp, Homo sapien
cttggctcggttgaaggtctcctcg

SEQ ID NO: 6013895 - DNA, 25 bp, Homo sapien
cggtcatccatagggaccaggtcca

SEQ ID NO: 6013896 - DNA, 25 bp, Homo sapien
ccgcacggatccaatgccgtcccac

SEQ ID NO: 6013897 - DNA, 25 bp, Homo sapien
aacctctgagggttgggctcgttat

SEQ ID NO: 6013898 - DNA, 25 bp, Homo sapien
cacgttgagcagcttggctcggttg

SEQ ID NO: 6013899 - DNA, 25 bp, Homo sapien
tgttttgaatcttattaaacctctg

SEQ ID NO: 6013900 - DNA, 25 bp, Homo sapien
ccaaacttgtccatggcgatggcaa

SEQ ID NO: 6013901 - DNA, 25 bp, Homo sapien
ccagccccagtactcgttgggaaag

SEQ ID NO: 6013902 - DNA, 25 bp, Homo sapien
ctcgttgggaaagccattgatcctc

SEQ ID NO: 6013903 - DNA, 25 bp, Homo sapien
ctgaagatgaagcagtcataggcag

SEQ ID NO: 6013904 - DNA, 25 bp, Homo sapien
accacaacggtacagattgcggtca

SEQ ID NO: 6013905 - DNA, 25 bp, Homo sapien
tgaagatgtcatcatcctcgccacc

SEQ ID NO: 6013906 - DNA, 25 bp, Homo sapien
tccactgtgatgttggtgaagagcg

SEQ ID NO: 6013907 - DNA, 25 bp, Homo sapien
ccaatgccgtcccacttcatgctca

SEQ ID NO: 6013908 - DNA, 25 bp, Homo sapien
tgggctcgttatgtttgtcccggtc

SEQ ID NO: 6013909 - DNA, 25 bp, Homo sapien
atgaagcagtcataggcagcatcct

SEQ ID NO: 6013910 - DNA, 25 bp, Homo sapien
gagcagcttggctcggttgaaggtc

SEQ ID NO: 6013911 - DNA, 25 bp, Homo sapien
gagggttgggctcgttatgtttgtc

SEQ ID NO: 6013912 - DNA, 25 bp, Homo sapien
ggatccaatgccgtcccacttcatg

SEQ ID NO: 6013913 - DNA, 25 bp, Homo sapien
ggcgtgagatcttcatcccagtcag

SEQ ID NO: 6013914 - DNA, 25 bp, Homo sapien
agccgctgccgcctcaacatggggt

SEQ ID NO: 6013915 - DNA, 25 bp, Homo sapien
ctcgttatgtttgtcccggtcgtgc

SEQ ID NO: 6013916 - DNA, 25 bp, Homo sapien
tgaaggtctcctcgccatgctggtt

SEQ ID NO: 6013917 - DNA, 25 bp, Homo sapien
acatcactgaagatgaagcagtcat

SEQ ID NO: 6013918 - DNA, 25 bp, Homo sapien
gcggggctggtcaccacaacggtac

SEQ ID NO: 6013919 - DNA, 25 bp, Homo sapien
tcatgcggtagcggccaatccggac

SEQ ID NO: 6013920 - DNA, 25 bp, Homo sapien
cagtgcctctaggaagcccacgttg

SEQ ID NO: 6013921 - DNA, 25 bp, Homo sapien
caggcccgacacacctccaaagtag

SEQ ID NO: 6013922 - DNA, 25 bp, Homo sapien
catgctcatctttgtgttttgaatc

SEQ ID NO: 6013923 - DNA, 25 bp, Homo sapien
aggtccacatcactgaagatgaagc

SEQ ID NO: 6013924 - DNA, 25 bp, Homo sapien
tgggccttgctcaggcccgacacac

SEQ ID NO: 6013925 - DNA, 25 bp, Homo sapien
ccagtactcgttgggaaagccattg

SEQ ID NO: 6013926 - DNA, 25 bp, Homo sapien
gccatgctggttgatgacatagaca

SEQ ID NO: 6013927 - DNA, 25 bp, Homo sapien
ctctaggaagcccacgttgagcagc

SEQ ID NO: 6013928 - DNA, 25 bp, Homo sapien
gggaccaggtccacatcactgaaga

SEQ ID NO: 6013929 - DNA, 25 bp, Homo sapien
ggaaagccattgatcctcagaaact

SEQ ID NO: 6013930 - DNA, 25 bp, Homo sapien
aaagtggcggggctggtcaccacaa

SEQ ID NO: 6013931 - DNA, 25 bp, Homo sapien
agaaactgggccttgctcaggcccg

SEQ ID NO: 6013932 - DNA, 25 bp, Homo sapien
tcatcccagtcagggagatccggtt

SEQ ID NO: 6013933 - DNA, 25 bp, Homo sapien
taggcagcatcctccttcagtgcct

SEQ ID NO: 6013934 - DNA, 25 bp, Homo sapien
ggccaatccggacatccgggcgtga

SEQ ID NO: 6013935 - DNA, 25 bp, Homo sapien
tccggacatccgggcgtgagatctt

SEQ ID NO: 6013936 - DNA, 25 bp, Homo sapien
ccaatgtccactgtgatgttggtga

SEQ ID NO: 6013937 - DNA, 25 bp, Homo sapien
cttgatcatgcggtagcggccaatc

SEQ ID NO: 6013938 - DNA, 25 bp, Homo sapien
ccattgatcctcagaaactgggcct

SEQ ID NO: 6013939 - DNA, 25 bp, Homo sapien
tcccggtcgtgcttgatcatgcggt

SEQ ID NO: 6013940 - DNA, 25 bp, Homo sapien
atcctcagaaactgggccttgctca

SEQ ID NO: 6013941 - DNA, 25 bp, Homo sapien
aaagtagctagcatagggcaaccgg

SEQ ID NO: 6013942 - DNA, 25 bp, Homo sapien
acttccaagactcggtaccgcacgg

SEQ ID NO: 6013943 - DNA, 25 bp, Homo sapien
catccgggcgtgagatcttcatccc

SEQ ID NO: 6013944 - DNA, 25 bp, Homo sapien
cctcgccaccccagccccagtactc

SEQ ID NO: 6013945 - DNA, 25 bp, Homo sapien
ggtagcggccaatccggacatccgg

SEQ ID NO: 6013946 - DNA, 25 bp, Homo sapien
tccatagggaccaggtccacatcac

SEQ ID NO: 6013947 - DNA, 25 bp, Homo sapien
ttgctcaggcccgacacacctccaa

SEQ ID NO: 6013948 - DNA, 25 bp, Homo sapien
gcaaccggaagccaaacttgtccat

SEQ ID NO: 6013949 - DNA, 25 bp, Homo sapien
agatcttcatcccagtcagggagat

SEQ ID NO: 6013950 - DNA, 25 bp, Homo sapien
atagacaccgtagcgcagccgctgc

SEQ ID NO: 6013951 - DNA, 25 bp, Homo sapien
ttgtccatggcgatggcaaagtggc

SEQ ID NO: 6013952 - DNA, 25 bp, Homo sapien
catctttgtgttttgaatcttatta

SEQ ID NO: 6013953 - DNA, 25 bp, Homo sapien
gctagcatagggcaaccggaagcca

SEQ ID NO: 6013954 - DNA, 25 bp, Homo sapien
cagattgcggtcatccatagggacc

SEQ ID NO: 6013955 - DNA, 25 bp, Homo sapien
ctggtcaccacaacggtacagattg

SEQ ID NO: 6013956 - DNA, 25 bp, Homo sapien
cagtcagggagatccggttgaagat

SEQ ID NO: 6013957 - DNA, 25 bp, Homo sapien
ctcggttgaaggtctcctcgccatg

SEQ ID NO: 6013958 - DNA, 25 bp, Homo sapien
tcgtgcttgatcatgcggtagcggc

SEQ ID NO: 6013959 - DNA, 25 bp, Homo sapien
gcatcctccttcagtgcctctagga

SEQ ID NO: 6013960 - DNA, 25 bp, Homo sapien
agagcggttgccgagacacttccaa

SEQ ID NO: 6013961 - DNA, 25 bp, Homo sapien
gatgacatagacaccgtagcgcagc

SEQ ID NO: 6013962 - DNA, 25 bp, Homo sapien
ctcctcgccatgctggttgatgaca

SEQ ID NO: 6013963 - DNA, 25 bp, Homo sapien
gccgtcccacttcatgctcatcttt

SEQ ID NO: 6013964 - DNA, 25 bp, Homo sapien
caagactcggtaccgcacggatcca

SEQ ID NO: 6013965 - DNA, 25 bp, Homo sapien
ggttgccgagacacttccaagactc

SEQ ID NO: 6013966 - DNA, 25 bp, Homo sapien
tattaaacctctgagggttgggctc

SEQ ID NO: 6013967 - DNA, 25 bp, Homo sapien
cggaagccaaacttgtccatggcga

SEQ ID NO: 6013968 - DNA, 25 bp, Homo sapien
acggtacagattgcggtcatccata

SEQ ID NO: 6013969 - DNA, 25 bp, Homo sapien
gggagatccggttgaagatgtcatc

SEQ ID NO: 6013970 - DNA, 25 bp, Homo sapien
gaagcccacgttgagcagcttggct

SEQ ID NO: 6013971 - DNA, 25 bp, Homo sapien
tgccgcctcaacatggggtgcagat

SEQ ID NO: 6013972 - DNA, 25 bp, Homo sapien
tagcgcagccgctgccgcctcaaca

SEQ ID NO: 6013973 - DNA, 25 bp, Homo sapien
cgagacacttccaagactcggtacc

SEQ ID NO: 6013974 - DNA, 25 bp, Homo sapien
cgacacacctccaaagtagctagca

SEQ ID NO: 6013975 - DNA, 25 bp, Homo sapien
catagggcaaccggaagccaaactt

SEQ ID NO: 6013976 - DNA, 25 bp, Homo sapien
tgaatcttattaaacctctgagggt

SEQ ID NO: 6013977 - DNA, 25 bp, Homo sapien
tccttcagtgcctctaggaagccca

SEQ ID NO: 6013978 - DNA, 25 bp, Homo sapien
cggtaccgcacggatccaatgccgt

SEQ ID NO: 6013979 - DNA, 25 bp, Homo sapien
tccggttgaagatgtcatcatcctc

SEQ ID NO: 6013980 - DNA, 25 bp, Homo sapien
cagtcataggcagcatcctccttca

SEQ ID NO: 6013981 - DNA, 25 bp, Homo sapien
tgtttgtcccggtcgtgcttgatca

SEQ ID NO: 6013982 - DNA, 25 bp, Homo sapien
tggtgaagagcggttgccgagacac

SEQ ID NO: 6013983 - DNA, 25 bp, Homo sapien
ccaccccagccccagtactcgttgg

SEQ ID NO: 6013984 - DNA, 25 bp, Homo sapien
tgatgttggtgaagagcggttgccg

SEQ ID NO: 6013985 - DNA, 25 bp, Homo sapien
ccacttcatgctcatctttgtgttt

SEQ ID NO: 6013986 - DNA, 25 bp, Homo sapien
ttcaatgcctcctcggcagccttga

SEQ ID NO: 6013987 - DNA, 25 bp, Homo sapien
tgatcatcgtggtgaagggtgacca

SEQ ID NO: 6013988 - DNA, 25 bp, Homo sapien
aagacttccgcgggacggcgcatga

SEQ ID NO: 6013989 - DNA, 25 bp, Homo sapien
ttgacattggggaaggagagaacct

SEQ ID NO: 6013990 - DNA, 25 bp, Homo sapien
ttcaggaagacttccgcgggacggc

SEQ ID NO: 6013991 - DNA, 25 bp, Homo sapien
cgtggtgaagggtgaccagcgtcca

SEQ ID NO: 6013992 - DNA, 25 bp, Homo sapien
agcttgtcgacgctgcccatggaca

SEQ ID NO: 6013993 - DNA, 25 bp, Homo sapien
gcgtcctcttcgtaaggaacaccca

SEQ ID NO: 6013994 - DNA, 25 bp, Homo sapien
aatttcagacagctccataccgccg

SEQ ID NO: 6013995 - DNA, 25 bp, Homo sapien
atagtgttggggtccatgcaggagt

SEQ ID NO: 6013996 - DNA, 25 bp, Homo sapien
tagtaacctcgcgggtgttcttgac

SEQ ID NO: 6013997 - DNA, 25 bp, Homo sapien
cgtgcttgacgacaacgtagttggg

SEQ ID NO: 6013998 - DNA, 25 bp, Homo sapien
cgttgatagtgttggggtccatgca

SEQ ID NO: 6013999 - DNA, 25 bp, Homo sapien
gggtgatcaagtcctcaacagcggt

SEQ ID NO: 6014000 - DNA, 25 bp, Homo sapien
caggagtgatcatcgtggtgaaggg

SEQ ID NO: 6014001 - DNA, 25 bp, Homo sapien
gccatcaatttcagacagctccata

SEQ ID NO: 6014002 - DNA, 25 bp, Homo sapien
gcgcatgaccatagcagaaaagagt

SEQ ID NO: 6014003 - DNA, 25 bp, Homo sapien
gaagggtgaccagcgtccagttgac

SEQ ID NO: 6014004 - DNA, 25 bp, Homo sapien
cgcttcgcacagaaggcgccgaatg

SEQ ID NO: 6014005 - DNA, 25 bp, Homo sapien
gtactgatgatgacaggagcgttga

SEQ ID NO: 6014006 - DNA, 25 bp, Homo sapien
tcgtgaccagtggtactgatgatga

SEQ ID NO: 6014007 - DNA, 25 bp, Homo sapien
cagcggtagcattgaagagcttgac

SEQ ID NO: 6014008 - DNA, 25 bp, Homo sapien
ttctcggtcggacgggtgatcaagt

SEQ ID NO: 6014009 - DNA, 25 bp, Homo sapien
catggacaccaagcgcttcgcacag

SEQ ID NO: 6014010 - DNA, 25 bp, Homo sapien
atgatgacaggagcgttgatagtgt

SEQ ID NO: 6014011 - DNA, 25 bp, Homo sapien
agctcgttcaggaagacttccgcgg

SEQ ID NO: 6014012 - DNA, 25 bp, Homo sapien
ctcctcggcagccttgacaccactg

SEQ ID NO: 6014013 - DNA, 25 bp, Homo sapien
catgcggttaaagccatcaatttca

SEQ ID NO: 6014014 - DNA, 25 bp, Homo sapien
agggcccatgcggttaaagccatca

SEQ ID NO: 6014015 - DNA, 25 bp, Homo sapien
caagcccttagtaacctcgcgggtg

SEQ ID NO: 6014016 - DNA, 25 bp, Homo sapien
gcgtccagttgacgacaacaccagc

SEQ ID NO: 6014017 - DNA, 25 bp, Homo sapien
tcggacgggtgatcaagtcctcaac

SEQ ID NO: 6014018 - DNA, 25 bp, Homo sapien
ccttgacaccactgagaaccatggc

SEQ ID NO: 6014019 - DNA, 25 bp, Homo sapien
caccaagcgcttcgcacagaaggcg

SEQ ID NO: 6014020 - DNA, 25 bp, Homo sapien
caggagcgttgatagtgttggggtc

SEQ ID NO: 6014021 - DNA, 25 bp, Homo sapien
ttggggtccatgcaggagtgatcat

SEQ ID NO: 6014022 - DNA, 25 bp, Homo sapien
gaccatagcagaaaagagttggcca

SEQ ID NO: 6014023 - DNA, 25 bp, Homo sapien
agttgacgacaacaccagcaatctg

SEQ ID NO: 6014024 - DNA, 25 bp, Homo sapien
tgaccagcgtccagttgacgacaac

SEQ ID NO: 6014025 - DNA, 25 bp, Homo sapien
aaacagggaggcgtgcttgacgaca

SEQ ID NO: 6014026 - DNA, 25 bp, Homo sapien
cctcgcgggtgttcttgacgatggc

SEQ ID NO: 6014027 - DNA, 25 bp, Homo sapien
ggcccatcgtgaccagtggtactga

SEQ ID NO: 6014028 - DNA, 25 bp, Homo sapien
gaaccttcgacatgagtgtcgaggt

SEQ ID NO: 6014029 - DNA, 25 bp, Homo sapien
ttgccgttctcggtcggacgggtga

SEQ ID NO: 6014030 - DNA, 25 bp, Homo sapien
atgtcgagaccacgcatgccaccta

SEQ ID NO: 6014031 - DNA, 25 bp, Homo sapien
tgagtgtcgaggtaaacagggaggc

SEQ ID NO: 6014032 - DNA, 25 bp, Homo sapien
gggacggcgcatgaccatagcagaa

SEQ ID NO: 6014033 - DNA, 25 bp, Homo sapien
agacagctccataccgccgattatc

SEQ ID NO: 6014034 - DNA, 25 bp, Homo sapien
acacccagctcgttcaggaagactt

SEQ ID NO: 6014035 - DNA, 25 bp, Homo sapien
cggcagccttgacaccactgagaac

SEQ ID NO: 6014036 - DNA, 25 bp, Homo sapien
gttaaagccatcaatttcagacagc

SEQ ID NO: 6014037 - DNA, 25 bp, Homo sapien
taaggaacacccagctcgttcagga

SEQ ID NO: 6014038 - DNA, 25 bp, Homo sapien
gggaggcgtgcttgacgacaacgta

SEQ ID NO: 6014039 - DNA, 25 bp, Homo sapien
gcacagaaggcgccgaatggcccat

SEQ ID NO: 6014040 - DNA, 25 bp, Homo sapien
tagcattgaagagcttgacattggg

SEQ ID NO: 6014041 - DNA, 25 bp, Homo sapien
tcaagtcctcaacagcggtagcatt

SEQ ID NO: 6014042 - DNA, 25 bp, Homo sapien
gcatgccacctagcttgtcgacgct

SEQ ID NO: 6014043 - DNA, 25 bp, Homo sapien
tcgacatgagtgtcgaggtaaacag

SEQ ID NO: 6014044 - DNA, 25 bp, Homo sapien
accgccgattatcaagcccttagta

SEQ ID NO: 6014045 - DNA, 25 bp, Homo sapien
gaccacgcatgccacctagcttgtc

SEQ ID NO: 6014046 - DNA, 25 bp, Homo sapien
gattatcaagcccttagtaacctcg

SEQ ID NO: 6014047 - DNA, 25 bp, Homo sapien
ccagtggtactgatgatgacaggag

SEQ ID NO: 6014048 - DNA, 25 bp, Homo sapien
gagctcatgtcgagaccacgcatgc

SEQ ID NO: 6014049 - DNA, 25 bp, Homo sapien
aaggcgccgaatggcccatcgtgac

SEQ ID NO: 6014050 - DNA, 25 bp, Homo sapien
ccgaatggcccatcgtgaccagtgg

SEQ ID NO: 6014051 - DNA, 25 bp, Homo sapien
ccacctagcttgtcgacgctgccca

SEQ ID NO: 6014052 - DNA, 25 bp, Homo sapien
cgacaacaccagcaatctgggggtt

SEQ ID NO: 6014053 - DNA, 25 bp, Homo sapien
gctgcccatggacaccaagcgcttc

SEQ ID NO: 6014054 - DNA, 25 bp, Homo sapien
gtttgcgtcctcttcgtaaggaaca

SEQ ID NO: 6014055 - DNA, 25 bp, Homo sapien
gcatcctcggccgagctcatgtcga

SEQ ID NO: 6014056 - DNA, 25 bp, Homo sapien
cctcaacagcggtagcattgaagag

SEQ ID NO: 6014057 - DNA, 25 bp, Homo sapien
ccatggcaccgaaggtagggcccat

SEQ ID NO: 6014058 - DNA, 25 bp, Homo sapien
caccagcaatctgggggttgccgtt

SEQ ID NO: 6014059 - DNA, 25 bp, Homo sapien
acgatggcatcctcggccgagctca

SEQ ID NO: 6014060 - DNA, 25 bp, Homo sapien
aacaccttcaatgcctcctcggcag

SEQ ID NO: 6014061 - DNA, 25 bp, Homo sapien
gtcgacgctgcccatggacaccaag

SEQ ID NO: 6014062 - DNA, 25 bp, Homo sapien
caatctgggggttgccgttctcggt

SEQ ID NO: 6014063 - DNA, 25 bp, Homo sapien
tcgaggtaaacagggaggcgtgctt

SEQ ID NO: 6014064 - DNA, 25 bp, Homo sapien
gggtgttcttgacgatggcatcctc

SEQ ID NO: 6014065 - DNA, 25 bp, Homo sapien
caccgaaggtagggcccatgcggtt

SEQ ID NO: 6014066 - DNA, 25 bp, Homo sapien
tcttgacgatggcatcctcggccga

SEQ ID NO: 6014067 - DNA, 25 bp, Homo sapien
ctccataccgccgattatcaagccc

SEQ ID NO: 6014068 - DNA, 25 bp, Homo sapien
ttccgcgggacggcgcatgaccata

SEQ ID NO: 6014069 - DNA, 25 bp, Homo sapien
tggggaaggagagaaccttcgacat

SEQ ID NO: 6014070 - DNA, 25 bp, Homo sapien
tcttcgtaaggaacacccagctcgt

SEQ ID NO: 6014071 - DNA, 25 bp, Homo sapien
tcggccgagctcatgtcgagaccac

SEQ ID NO: 6014072 - DNA, 25 bp, Homo sapien
tgagaaccatggcaccgaaggtagg

SEQ ID NO: 6014073 - DNA, 25 bp, Homo sapien
tccatgcaggagtgatcatcgtggt

SEQ ID NO: 6014074 - DNA, 25 bp, Homo sapien
aggagagaaccttcgacatgagtgt

SEQ ID NO: 6014075 - DNA, 25 bp, Homo sapien
caccactgagaaccatggcaccgaa

SEQ ID NO: 6014076 - DNA, 25 bp, Homo sapien
gcggatttcgttgaggccgagcgag

SEQ ID NO: 6014077 - DNA, 25 bp, Homo sapien
tctgcccggcgagcgacggatcggc

SEQ ID NO: 6014078 - DNA, 25 bp, Homo sapien
gcccggataggtcttggccacgcag

SEQ ID NO: 6014079 - DNA, 25 bp, Homo sapien
gcgacggatcggcatgtacgatcag

SEQ ID NO: 6014080 - DNA, 25 bp, Homo sapien
cggttgccgtgtaaccggtcggatg

SEQ ID NO: 6014081 - DNA, 25 bp, Homo sapien
tgaaggcggcgataaccgcgatggt

SEQ ID NO: 6014082 - DNA, 25 bp, Homo sapien
cacgcgccagatggcgttgctgacc

SEQ ID NO: 6014083 - DNA, 25 bp, Homo sapien
cagtgcaaaactcatggcgatgcgg

SEQ ID NO: 6014084 - DNA, 25 bp, Homo sapien
tcggatgcacgcgccagatggcgtt

SEQ ID NO: 6014085 - DNA, 25 bp, Homo sapien
cgccatgacctcataagccttggca

SEQ ID NO: 6014086 - DNA, 25 bp, Homo sapien
gcgccagaccctcgcggatttcgtt

SEQ ID NO: 6014087 - DNA, 25 bp, Homo sapien
aacgcaccggcgtctcgttgaaggc

SEQ ID NO: 6014088 - DNA, 25 bp, Homo sapien
ggcaagcgctttccagtagcccgga

SEQ ID NO: 6014089 - DNA, 25 bp, Homo sapien
gcatccggctgagtgaatttgtcag

SEQ ID NO: 6014090 - DNA, 25 bp, Homo sapien
cggcgagcgacggatcggcatgtac

SEQ ID NO: 6014091 - DNA, 25 bp, Homo sapien
cgatggttggaatggcgtcctgcat

SEQ ID NO: 6014092 - DNA, 25 bp, Homo sapien
aaaactcatggcgatgcggtgatcg

SEQ ID NO: 6014093 - DNA, 25 bp, Homo sapien
tctcgttgaaggcggcgataaccgc

SEQ ID NO: 6014094 - DNA, 25 bp, Homo sapien
cgcattccttgacgcgcagattggc

SEQ ID NO: 6014095 - DNA, 25 bp, Homo sapien
ggtgatcggcaaaggtatcgatgga

SEQ ID NO: 6014096 - DNA, 25 bp, Homo sapien
cgacgccgagcgaggcaagcgcttt

SEQ ID NO: 6014097 - DNA, 25 bp, Homo sapien
tggcgtcctgcatctgcgaaccgtc

SEQ ID NO: 6014098 - DNA, 25 bp, Homo sapien
tcttggccacgcaggcgggattctg

SEQ ID NO: 6014099 - DNA, 25 bp, Homo sapien
gctcgatgtggaaatcggttgccgt

SEQ ID NO: 6014100 - DNA, 25 bp, Homo sapien
ggcgggattctggatggcgatgcct

SEQ ID NO: 6014101 - DNA, 25 bp, Homo sapien
taaccgcgatggttggaatggcgtc

SEQ ID NO: 6014102 - DNA, 25 bp, Homo sapien
gacctcataagccttggcatccggc

SEQ ID NO: 6014103 - DNA, 25 bp, Homo sapien
ccgtgtaaccggtcggatgcacgcg

SEQ ID NO: 6014104 - DNA, 25 bp, Homo sapien
attctggatggcgatgcctccgatc

SEQ ID NO: 6014105 - DNA, 25 bp, Homo sapien
cgagcgaggcaagcgctttccagta

SEQ ID NO: 6014106 - DNA, 25 bp, Homo sapien
cggcaaaggtatcgatggaggcatc

SEQ ID NO: 6014107 - DNA, 25 bp, Homo sapien
cgacgaaacgcaccggcgtctcgtt

SEQ ID NO: 6014108 - DNA, 25 bp, Homo sapien
ttcgttgaggccgagcgagacggcg

SEQ ID NO: 6014109 - DNA, 25 bp, Homo sapien
ataggtcttggccacgcaggcggga

SEQ ID NO: 6014110 - DNA, 25 bp, Homo sapien
atttcggcgggcagatgcggaaact

SEQ ID NO: 6014111 - DNA, 25 bp, Homo sapien
cgcgccccagagataggtggcggcg

SEQ ID NO: 6014112 - DNA, 25 bp, Homo sapien
gccggtcagaagctccgcgccccag

SEQ ID NO: 6014113 - DNA, 25 bp, Homo sapien
ccggcgtctcgttgaaggcggcgat

SEQ ID NO: 6014114 - DNA, 25 bp, Homo sapien
cgccgccagtgcaaaactcatggcg

SEQ ID NO: 6014115 - DNA, 25 bp, Homo sapien
cgctttccagtagcccggataggtc

SEQ ID NO: 6014116 - DNA, 25 bp, Homo sapien
gccttggcatccggctgagtgaatt

SEQ ID NO: 6014117 - DNA, 25 bp, Homo sapien
gtgccgatatcgatagcaccgccgg

SEQ ID NO: 6014118 - DNA, 25 bp, Homo sapien
cctgcatctgcgaaccgtcgatttc

SEQ ID NO: 6014119 - DNA, 25 bp, Homo sapien
attggcgatgccgacgaaacgcacc

SEQ ID NO: 6014120 - DNA, 25 bp, Homo sapien
aaactgcgccatgacctcataagcc

SEQ ID NO: 6014121 - DNA, 25 bp, Homo sapien
gatgcggaaactgcgccatgacctc

SEQ ID NO: 6014122 - DNA, 25 bp, Homo sapien
atagtcgacgccgagcgaggcaagc

SEQ ID NO: 6014123 - DNA, 25 bp, Homo sapien
gtgaatttgtcagcgggcgtgccga

SEQ ID NO: 6014124 - DNA, 25 bp, Homo sapien
accctcgcggatttcgttgaggccg

SEQ ID NO: 6014125 - DNA, 25 bp, Homo sapien
cgatggaggcatcgaccgtctgccc

SEQ ID NO: 6014126 - DNA, 25 bp, Homo sapien
cttgagcgccgccagtgcaaaactc

SEQ ID NO: 6014127 - DNA, 25 bp, Homo sapien
catgtacgatcaggtcgtcaccctc

SEQ ID NO: 6014128 - DNA, 25 bp, Homo sapien
cgggcagatgcggaaactgcgccat

SEQ ID NO: 6014129 - DNA, 25 bp, Homo sapien
tgaggccgagcgagacggcgcggat

SEQ ID NO: 6014130 - DNA, 25 bp, Homo sapien
gatgcctccgatcttgagcgccgcc

SEQ ID NO: 6014131 - DNA, 25 bp, Homo sapien
cggcgataaccgcgatggttggaat

SEQ ID NO: 6014132 - DNA, 25 bp, Homo sapien
atatcgatagcaccgccggtcagaa

SEQ ID NO: 6014133 - DNA, 25 bp, Homo sapien
ccagagataggtggcggcggaggca

SEQ ID NO: 6014134 - DNA, 25 bp, Homo sapien
tccgatcttgagcgccgccagtgca

SEQ ID NO: 6014135 - DNA, 25 bp, Homo sapien
aggtatcgatggaggcatcgaccgt

SEQ ID NO: 6014136 - DNA, 25 bp, Homo sapien
taggtggcggcggaggcatccggct

SEQ ID NO: 6014137 - DNA, 25 bp, Homo sapien
atagcaccgccggtcagaagctccg

SEQ ID NO: 6014138 - DNA, 25 bp, Homo sapien
cgagcgagacggcgcggatgcggtc

SEQ ID NO: 6014139 - DNA, 25 bp, Homo sapien
cgatgccgacgaaacgcaccggcgt

SEQ ID NO: 6014140 - DNA, 25 bp, Homo sapien
gatggcgatgcctccgatcttgagc

SEQ ID NO: 6014141 - DNA, 25 bp, Homo sapien
aaccggtcggatgcacgcgccagat

SEQ ID NO: 6014142 - DNA, 25 bp, Homo sapien
cgatgcggtgatcggcaaaggtatc

SEQ ID NO: 6014143 - DNA, 25 bp, Homo sapien
ttcggtatagtcgacgccgagcgag

SEQ ID NO: 6014144 - DNA, 25 bp, Homo sapien
accgtctgcccggcgagcgacggat

SEQ ID NO: 6014145 - DNA, 25 bp, Homo sapien
tgcggtcgcattccttgacgcgcag

SEQ ID NO: 6014146 - DNA, 25 bp, Homo sapien
gcgggcgtgccgatatcgatagcac

SEQ ID NO: 6014147 - DNA, 25 bp, Homo sapien
gcgcagattggcgatgccgacgaaa

SEQ ID NO: 6014148 - DNA, 25 bp, Homo sapien
tctgcgaaccgtcgatttcggcggg

SEQ ID NO: 6014149 - DNA, 25 bp, Homo sapien
ttggaatggcgtcctgcatctgcga

SEQ ID NO: 6014150 - DNA, 25 bp, Homo sapien
cataagccttggcatccggctgagt

SEQ ID NO: 6014151 - DNA, 25 bp, Homo sapien
gaggcatccggctcgatgtggaaat

SEQ ID NO: 6014152 - DNA, 25 bp, Homo sapien
cacgcaggcgggattctggatggcg

SEQ ID NO: 6014153 - DNA, 25 bp, Homo sapien
ccagtagcccggataggtcttggcc

SEQ ID NO: 6014154 - DNA, 25 bp, Homo sapien
catccggctcgatgtggaaatcggt

SEQ ID NO: 6014155 - DNA, 25 bp, Homo sapien
tcatggcgatgcggtgatcggcaaa

SEQ ID NO: 6014156 - DNA, 25 bp, Homo sapien
caccctcttcatgcgccagaccctc

SEQ ID NO: 6014157 - DNA, 25 bp, Homo sapien
aaccgtcgatttcggcgggcagatg

SEQ ID NO: 6014158 - DNA, 25 bp, Homo sapien
tgtggaaatcggttgccgtgtaacc

SEQ ID NO: 6014159 - DNA, 25 bp, Homo sapien
cttgacgcgcagattggcgatgccg

SEQ ID NO: 6014160 - DNA, 25 bp, Homo sapien
ggtcgtcaccctcttcatgcgccag

SEQ ID NO: 6014161 - DNA, 25 bp, Homo sapien
gatcggcatgtacgatcaggtcgtc

SEQ ID NO: 6014162 - DNA, 25 bp, Homo sapien
cgatcaggtcgtcaccctcttcatg

SEQ ID NO: 6014163 - DNA, 25 bp, Homo sapien
cgcggatgcggtcgcattccttgac

SEQ ID NO: 6014164 - DNA, 25 bp, Homo sapien
aggcatcgaccgtctgcccggcgag

SEQ ID NO: 6014165 - DNA, 25 bp, Homo sapien
gtcagaagctccgcgccccagagat

SEQ ID NO: 6014166 - DNA, 25 bp, Homo sapien
ttcatgcgccagaccctcgcggatt

SEQ ID NO: 6014167 - DNA, 25 bp, Homo sapien
ggctgagtgaatttgtcagcgggcg

SEQ ID NO: 6014168 - DNA, 25 bp, Homo sapien
agctccgcgccccagagataggtgg

SEQ ID NO: 6014169 - DNA, 25 bp, Homo sapien
agacggcgcggatgcggtcgcattc

SEQ ID NO: 6014170 - DNA, 25 bp, Homo sapien
ttgtcagcgggcgtgccgatatcga

SEQ ID NO: 6014171 - DNA, 25 bp, Homo sapien
gcggcggaggcatccggctcgatgt

SEQ ID NO: 6014172 - DNA, 25 bp, Homo sapien
ttccagttgcgagccacacatcatc

SEQ ID NO: 6014173 - DNA, 25 bp, Homo sapien
tttatttcttccagcttaactctgg

SEQ ID NO: 6014174 - DNA, 25 bp, Homo sapien
cttggctcagacaccacaaatatct

SEQ ID NO: 6014175 - DNA, 25 bp, Homo sapien
gcccagggatggtctcttcacagtc

SEQ ID NO: 6014176 - DNA, 25 bp, Homo sapien
ccctcatctcagaggatgaagacta

SEQ ID NO: 6014177 - DNA, 25 bp, Homo sapien
ttctgtaatggggacagtggctgca

SEQ ID NO: 6014178 - DNA, 25 bp, Homo sapien
tctttttgccacatctccatctctt

SEQ ID NO: 6014179 - DNA, 25 bp, Homo sapien
catcgcgctgggaagatgacgtgat

SEQ ID NO: 6014180 - DNA, 25 bp, Homo sapien
gaagacatcgcgctgggaagatgac

SEQ ID NO: 6014181 - DNA, 25 bp, Homo sapien
tgctcttaggctgtgcaaacattgc

SEQ ID NO: 6014182 - DNA, 25 bp, Homo sapien
atctccatctcttagacagttctgc

SEQ ID NO: 6014183 - DNA, 25 bp, Homo sapien
accacaaatatcttaatgcttcacc

SEQ ID NO: 6014184 - DNA, 25 bp, Homo sapien
gccaggctggcatgaggctcttttt

SEQ ID NO: 6014185 - DNA, 25 bp, Homo sapien
ctgtggaggcaagagagggtttggg

SEQ ID NO: 6014186 - DNA, 25 bp, Homo sapien
ctgggaagatgacgtgatgacatca

SEQ ID NO: 6014187 - DNA, 25 bp, Homo sapien
tgccacatctccatctcttagacag

SEQ ID NO: 6014188 - DNA, 25 bp, Homo sapien
aatggggacagtggctgcatccggc

SEQ ID NO: 6014189 - DNA, 25 bp, Homo sapien
atctcttagacagttctgcagcccc

SEQ ID NO: 6014190 - DNA, 25 bp, Homo sapien
tctcagaggatgaagactaatacta

SEQ ID NO: 6014191 - DNA, 25 bp, Homo sapien
caccaccactcggccaggctggcat

SEQ ID NO: 6014192 - DNA, 25 bp, Homo sapien
gttctgcagcccctcatctcagagg

SEQ ID NO: 6014193 - DNA, 25 bp, Homo sapien
acattgcaggtacccccttttccag

SEQ ID NO: 6014194 - DNA, 25 bp, Homo sapien
ctggcatgaggctctttttgccaca

SEQ ID NO: 6014195 - DNA, 25 bp, Homo sapien
aactctgggtgtgagacttccatca

SEQ ID NO: 6014196 - DNA, 25 bp, Homo sapien
agacacgcccaccagtctgccccgg

SEQ ID NO: 6014197 - DNA, 25 bp, Homo sapien
tctcttcacagtctgtggaggcaag

SEQ ID NO: 6014198 - DNA, 25 bp, Homo sapien
tgcagcccctcatctcagaggatga

SEQ ID NO: 6014199 - DNA, 25 bp, Homo sapien
ccattgcttggctcagacaccacaa

SEQ ID NO: 6014200 - DNA, 25 bp, Homo sapien
aagactaatactaactcgctgagtg

SEQ ID NO: 6014201 - DNA, 25 bp, Homo sapien
tgcgagccacacatcatcctagttg

SEQ ID NO: 6014202 - DNA, 25 bp, Homo sapien
cagtgagcctgagaaagtacggcaa

SEQ ID NO: 6014203 - DNA, 25 bp, Homo sapien
gagacttccatcactgacctctatg

SEQ ID NO: 6014204 - DNA, 25 bp, Homo sapien
cactatagggcactcatcaggctgt

SEQ ID NO: 6014205 - DNA, 25 bp, Homo sapien
tgccaaatttttatttcttccagct

SEQ ID NO: 6014206 - DNA, 25 bp, Homo sapien
gtttggggagtagctcctgtcacct

SEQ ID NO: 6014207 - DNA, 25 bp, Homo sapien
gtcacctctcagaaccaacaccacc

SEQ ID NO: 6014208 - DNA, 25 bp, Homo sapien
atccggcccagggatggtctcttca

SEQ ID NO: 6014209 - DNA, 25 bp, Homo sapien
agctgggaagacatcgcgctgggaa

SEQ ID NO: 6014210 - DNA, 25 bp, Homo sapien
aatatcttaatgcttcaccgactgg

SEQ ID NO: 6014211 - DNA, 25 bp, Homo sapien
tctatgccattgcttggctcagaca

SEQ ID NO: 6014212 - DNA, 25 bp, Homo sapien
ccacacatcatcctagttgttctgt

SEQ ID NO: 6014213 - DNA, 25 bp, Homo sapien
aatactaactcgctgagtggtaaga

SEQ ID NO: 6014214 - DNA, 25 bp, Homo sapien
acagtggctgcatccggcccaggga

SEQ ID NO: 6014215 - DNA, 25 bp, Homo sapien
ctcatcaggctgtgctcttaggctg

SEQ ID NO: 6014216 - DNA, 25 bp, Homo sapien
gaggaacagtgagcctgagaaagta

SEQ ID NO: 6014217 - DNA, 25 bp, Homo sapien
tccatcactgacctctatgccattg

SEQ ID NO: 6014218 - DNA, 25 bp, Homo sapien
taactcgctgagtggtaagaaatac

SEQ ID NO: 6014219 - DNA, 25 bp, Homo sapien
gctcctgtcacctctcagaaccaac

SEQ ID NO: 6014220 - DNA, 25 bp, Homo sapien
ggatggtctcttcacagtctgtgga

SEQ ID NO: 6014221 - DNA, 25 bp, Homo sapien
gctgcatccggcccagggatggtct

SEQ ID NO: 6014222 - DNA, 25 bp, Homo sapien
cctgagaaagtacggcaagagagtg

SEQ ID NO: 6014223 - DNA, 25 bp, Homo sapien
aaccaacaccaccactcggccaggc

SEQ ID NO: 6014224 - DNA, 25 bp, Homo sapien
tacccccttttccagttgcgagcca

SEQ ID NO: 6014225 - DNA, 25 bp, Homo sapien
cagcttaactctgggtgtgagactt

SEQ ID NO: 6014226 - DNA, 25 bp, Homo sapien
actgacctctatgccattgcttggc

SEQ ID NO: 6014227 - DNA, 25 bp, Homo sapien
agagggtttggggagtagctcctgt

SEQ ID NO: 6014228 - DNA, 25 bp, Homo sapien
gcaagagagggtttggggagtagct

SEQ ID NO: 6014229 - DNA, 25 bp, Homo sapien
atcatcctagttgttctgtaatggg

SEQ ID NO: 6014230 - DNA, 25 bp, Homo sapien
tgaggctctttttgccacatctcca

SEQ ID NO: 6014231 - DNA, 25 bp, Homo sapien
tggtaagaaatacaaaggacgagga

SEQ ID NO: 6014232 - DNA, 25 bp, Homo sapien
gcttcaccgactggccatgagacac

SEQ ID NO: 6014233 - DNA, 25 bp, Homo sapien
cactcggccaggctggcatgaggct

SEQ ID NO: 6014234 - DNA, 25 bp, Homo sapien
gaggactctggacccagttctgcca

SEQ ID NO: 6014235 - DNA, 25 bp, Homo sapien
tctcagaaccaacaccaccactcgg

SEQ ID NO: 6014236 - DNA, 25 bp, Homo sapien
tcttccagcttaactctgggtgtga

SEQ ID NO: 6014237 - DNA, 25 bp, Homo sapien
cgtgatgacatcaggacccgaggac

SEQ ID NO: 6014238 - DNA, 25 bp, Homo sapien
agggcactcatcaggctgtgctctt

SEQ ID NO: 6014239 - DNA, 25 bp, Homo sapien
aggacccgaggactctggacccagt

SEQ ID NO: 6014240 - DNA, 25 bp, Homo sapien
aggatgaagactaatactaactcgc

SEQ ID NO: 6014241 - DNA, 25 bp, Homo sapien
cacagtctgtggaggcaagagaggg

SEQ ID NO: 6014242 - DNA, 25 bp, Homo sapien
agtctgccccgggaccacactatag

SEQ ID NO: 6014243 - DNA, 25 bp, Homo sapien
cagccttgccaaatttttatttctt

SEQ ID NO: 6014244 - DNA, 25 bp, Homo sapien
ccttttccagttgcgagccacacat

SEQ ID NO: 6014245 - DNA, 25 bp, Homo sapien
tcagacaccacaaatatcttaatgc

SEQ ID NO: 6014246 - DNA, 25 bp, Homo sapien
ggccatgagacacgcccaccagtct

SEQ ID NO: 6014247 - DNA, 25 bp, Homo sapien
agatgacgtgatgacatcaggaccc

SEQ ID NO: 6014248 - DNA, 25 bp, Homo sapien
gggtgtgagacttccatcactgacc

SEQ ID NO: 6014249 - DNA, 25 bp, Homo sapien
aaatacaaaggacgaggaacagtga

SEQ ID NO: 6014250 - DNA, 25 bp, Homo sapien
gcccaccagtctgccccgggaccac

SEQ ID NO: 6014251 - DNA, 25 bp, Homo sapien
aggctgtgctcttaggctgtgcaaa

SEQ ID NO: 6014252 - DNA, 25 bp, Homo sapien
acccagttctgccagccttgccaaa

SEQ ID NO: 6014253 - DNA, 25 bp, Homo sapien
tagacagttctgcagcccctcatct

SEQ ID NO: 6014254 - DNA, 25 bp, Homo sapien
gctgagtggtaagaaatacaaagga

SEQ ID NO: 6014255 - DNA, 25 bp, Homo sapien
tctggacccagttctgccagccttg

SEQ ID NO: 6014256 - DNA, 25 bp, Homo sapien
ttctgccagccttgccaaattttta

SEQ ID NO: 6014257 - DNA, 25 bp, Homo sapien
ggagtagctcctgtcacctctcaga

SEQ ID NO: 6014258 - DNA, 25 bp, Homo sapien
tgcaggtacccccttttccagttgc

SEQ ID NO: 6014259 - DNA, 25 bp, Homo sapien
taggctgtgcaaacattgcaggtac

SEQ ID NO: 6014260 - DNA, 25 bp, Homo sapien
ggaccacactatagggcactcatca

SEQ ID NO: 6014261 - DNA, 25 bp, Homo sapien
aaaggacgaggaacagtgagcctga

SEQ ID NO: 6014262 - DNA, 25 bp, Homo sapien
gacatcaggacccgaggactctgga

SEQ ID NO: 6014263 - DNA, 25 bp, Homo sapien
tagttgttctgtaatggggacagtg

SEQ ID NO: 6014264 - DNA, 25 bp, Homo sapien
tgccccgggaccacactatagggca

SEQ ID NO: 6014265 - DNA, 25 bp, Homo sapien
gtgcaaacattgcaggtaccccctt

SEQ ID NO: 6014266 - DNA, 25 bp, Homo sapien
ccgactggccatgagacacgcccac

SEQ ID NO: 6014267 - DNA, 25 bp, Homo sapien
cttaatgcttcaccgactggccatg

SEQ ID NO: 6014268 - DNA, 25 bp, Homo sapien
ctcctctgccaagaccagctgaaaa

SEQ ID NO: 6014269 - DNA, 25 bp, Homo sapien
tatcagctcgcccatgttttccaca

SEQ ID NO: 6014270 - DNA, 25 bp, Homo sapien
gggcttcaagtacttatttgcccaa

SEQ ID NO: 6014271 - DNA, 25 bp, Homo sapien
tgagatgaggggctgcagaactgtc

SEQ ID NO: 6014272 - DNA, 25 bp, Homo sapien
tagtattagtcttcatcctctgaga

SEQ ID NO: 6014273 - DNA, 25 bp, Homo sapien
ttaactcttggctcctcctttcgta

SEQ ID NO: 6014274 - DNA, 25 bp, Homo sapien
ggcgccagagcttatgacaagcctc

SEQ ID NO: 6014275 - DNA, 25 bp, Homo sapien
aggagacctttatattgttagccca

SEQ ID NO: 6014276 - DNA, 25 bp, Homo sapien
gagctactccccaaaccctctcttg

SEQ ID NO: 6014277 - DNA, 25 bp, Homo sapien
atcctctgagatgaggggctgcaga

SEQ ID NO: 6014278 - DNA, 25 bp, Homo sapien
agaaaggcctttgcatatgggcgcc

SEQ ID NO: 6014279 - DNA, 25 bp, Homo sapien
cctggccgagtggtggtgttggttc

SEQ ID NO: 6014280 - DNA, 25 bp, Homo sapien
gtggtgttggttctgagaggtgaca

SEQ ID NO: 6014281 - DNA, 25 bp, Homo sapien
ccatgttttccacatcactctcttg

SEQ ID NO: 6014282 - DNA, 25 bp, Homo sapien
caactttgaaaacctggcctcctct

SEQ ID NO: 6014283 - DNA, 25 bp, Homo sapien
aaagagcctcatgccagcctggccg

SEQ ID NO: 6014284 - DNA, 25 bp, Homo sapien
tacttatttgcccaaagcaactcag

SEQ ID NO: 6014285 - DNA, 25 bp, Homo sapien
tctaagagatggagatgtggcaaaa

SEQ ID NO: 6014286 - DNA, 25 bp, Homo sapien
gtgcctaagaaaggcctttgcatat

SEQ ID NO: 6014287 - DNA, 25 bp, Homo sapien
cctggcctcctctgccaagaccagc

SEQ ID NO: 6014288 - DNA, 25 bp, Homo sapien
gacctttatattgttagcccatcta

SEQ ID NO: 6014289 - DNA, 25 bp, Homo sapien
atagatgtgcctaagaaaggccttt

SEQ ID NO: 6014290 - DNA, 25 bp, Homo sapien
cagagcctctaaggggcttcaagta

SEQ ID NO: 6014291 - DNA, 25 bp, Homo sapien
ctttctcaggctcactgttcctcgt

SEQ ID NO: 6014292 - DNA, 25 bp, Homo sapien
tgaaaacctggcctcctctgccaag

SEQ ID NO: 6014293 - DNA, 25 bp, Homo sapien
aagcctcactgcaggcacacagagc

SEQ ID NO: 6014294 - DNA, 25 bp, Homo sapien
gaccagctgaaaaggagacctttat

SEQ ID NO: 6014295 - DNA, 25 bp, Homo sapien
ctctcttgcctccacagactgtgaa

SEQ ID NO: 6014296 - DNA, 25 bp, Homo sapien
cacagactgtgaagagaccatccct

SEQ ID NO: 6014297 - DNA, 25 bp, Homo sapien
caactcagtgtttttagatttcttt

SEQ ID NO: 6014298 - DNA, 25 bp, Homo sapien
tatgacaagcctcactgcaggcaca

SEQ ID NO: 6014299 - DNA, 25 bp, Homo sapien
agatgtggcaaaaagagcctcatgc

SEQ ID NO: 6014300 - DNA, 25 bp, Homo sapien
agggcaagtgcttctgagtggagga

SEQ ID NO: 6014301 - DNA, 25 bp, Homo sapien
agtgcttctgagtggaggagataaa

SEQ ID NO: 6014302 - DNA, 25 bp, Homo sapien
ctcctcctttcgtatcagctcgccc

SEQ ID NO: 6014303 - DNA, 25 bp, Homo sapien
gctgcagaactgtctaagagatgga

SEQ ID NO: 6014304 - DNA, 25 bp, Homo sapien
ggtgacaggagctactccccaaacc

SEQ ID NO: 6014305 - DNA, 25 bp, Homo sapien
caggctcactgttcctcgtcctttg

SEQ ID NO: 6014306 - DNA, 25 bp, Homo sapien
cctcatgccagcctggccgagtggt

SEQ ID NO: 6014307 - DNA, 25 bp, Homo sapien
ttagcccatctatttgggtttccca

SEQ ID NO: 6014308 - DNA, 25 bp, Homo sapien
tgaggggctgcagaactgtctaaga

SEQ ID NO: 6014309 - DNA, 25 bp, Homo sapien
ttttccacatcactctcttgccgta

SEQ ID NO: 6014310 - DNA, 25 bp, Homo sapien
ctgagaggtgacaggagctactccc

SEQ ID NO: 6014311 - DNA, 25 bp, Homo sapien
ctgtgaagagaccatccctgggccg

SEQ ID NO: 6014312 - DNA, 25 bp, Homo sapien
atattgttagcccatctatttgggt

SEQ ID NO: 6014313 - DNA, 25 bp, Homo sapien
gcgagttagtattagtcttcatcct

SEQ ID NO: 6014314 - DNA, 25 bp, Homo sapien
ctctaaggggcttcaagtacttatt

SEQ ID NO: 6014315 - DNA, 25 bp, Homo sapien
ttcaagtacttatttgcccaaagca

SEQ ID NO: 6014316 - DNA, 25 bp, Homo sapien
cactcagcgagttagtattagtctt

SEQ ID NO: 6014317 - DNA, 25 bp, Homo sapien
ccaaagcaactcagtgtttttagat

SEQ ID NO: 6014318 - DNA, 25 bp, Homo sapien
gaactgtctaagagatggagatgtg

SEQ ID NO: 6014319 - DNA, 25 bp, Homo sapien
tgccaagaccagctgaaaaggagac

SEQ ID NO: 6014320 - DNA, 25 bp, Homo sapien
ctccccaaaccctctcttgcctcca

SEQ ID NO: 6014321 - DNA, 25 bp, Homo sapien
tctgagtggaggagataaacaactt

SEQ ID NO: 6014322 - DNA, 25 bp, Homo sapien
gccagcctggccgagtggtggtgtt

SEQ ID NO: 6014323 - DNA, 25 bp, Homo sapien
tttagatttctttaactcttggctc

SEQ ID NO: 6014324 - DNA, 25 bp, Homo sapien
gcatttcttagagggaacaagggca

SEQ ID NO: 6014325 - DNA, 25 bp, Homo sapien
tgcctccacagactgtgaagagacc

SEQ ID NO: 6014326 - DNA, 25 bp, Homo sapien
tagtcttcatcctctgagatgaggg

SEQ ID NO: 6014327 - DNA, 25 bp, Homo sapien
agagcttatgacaagcctcactgca

SEQ ID NO: 6014328 - DNA, 25 bp, Homo sapien
ggaagtgcatttcttagagggaaca

SEQ ID NO: 6014329 - DNA, 25 bp, Homo sapien
ttggttctgagaggtgacaggagct

SEQ ID NO: 6014330 - DNA, 25 bp, Homo sapien
ccccagctagcttgtatggaagtgc

SEQ ID NO: 6014331 - DNA, 25 bp, Homo sapien
acatcactctcttgccgtactttct

SEQ ID NO: 6014332 - DNA, 25 bp, Homo sapien
gccgtactttctcaggctcactgtt

SEQ ID NO: 6014333 - DNA, 25 bp, Homo sapien
ctgaaaaggagacctttatattgtt

SEQ ID NO: 6014334 - DNA, 25 bp, Homo sapien
gtcctttgtatttcttaccactcag

SEQ ID NO: 6014335 - DNA, 25 bp, Homo sapien
agatggagatgtggcaaaaagagcc

SEQ ID NO: 6014336 - DNA, 25 bp, Homo sapien
tcctcgtcctttgtatttcttacca

SEQ ID NO: 6014337 - DNA, 25 bp, Homo sapien
ctttcgtatcagctcgcccatgttt

SEQ ID NO: 6014338 - DNA, 25 bp, Homo sapien
tcttggctcctcctttcgtatcagc

SEQ ID NO: 6014339 - DNA, 25 bp, Homo sapien
tcttaccactcagcgagttagtatt

SEQ ID NO: 6014340 - DNA, 25 bp, Homo sapien
catatgggcgccagagcttatgaca

SEQ ID NO: 6014341 - DNA, 25 bp, Homo sapien
gctagcttgtatggaagtgcatttc

SEQ ID NO: 6014342 - DNA, 25 bp, Homo sapien
ggaacaagggcaagtgcttctgagt

SEQ ID NO: 6014343 - DNA, 25 bp, Homo sapien
ttgtatggaagtgcatttcttagag

SEQ ID NO: 6014344 - DNA, 25 bp, Homo sapien
atttctttaactcttggctcctcct

SEQ ID NO: 6014345 - DNA, 25 bp, Homo sapien
tggaggagataaacaactttgaaaa

SEQ ID NO: 6014346 - DNA, 25 bp, Homo sapien
ccatctatttgggtttcccatagga

SEQ ID NO: 6014347 - DNA, 25 bp, Homo sapien
cactgttcctcgtcctttgtatttc

SEQ ID NO: 6014348 - DNA, 25 bp, Homo sapien
gcctttgcatatgggcgccagagct

SEQ ID NO: 6014349 - DNA, 25 bp, Homo sapien
actgcaggcacacagagcctctaag

SEQ ID NO: 6014350 - DNA, 25 bp, Homo sapien
gtttcccataggatagatgtgccta

SEQ ID NO: 6014351 - DNA, 25 bp, Homo sapien
cataggatagatgtgcctaagaaag

SEQ ID NO: 6014352 - DNA, 25 bp, Homo sapien
cgagtggtggtgttggttctgagag

SEQ ID NO: 6014353 - DNA, 25 bp, Homo sapien
ttagagggaacaagggcaagtgctt

SEQ ID NO: 6014354 - DNA, 25 bp, Homo sapien
ggcaaaaagagcctcatgccagcct

SEQ ID NO: 6014355 - DNA, 25 bp, Homo sapien
atttgcccaaagcaactcagtgttt

SEQ ID NO: 6014356 - DNA, 25 bp, Homo sapien
caaaccctctcttgcctccacagac

SEQ ID NO: 6014357 - DNA, 25 bp, Homo sapien
gctcgcccatgttttccacatcact

SEQ ID NO: 6014358 - DNA, 25 bp, Homo sapien
tctcttgccgtactttctcaggctc

SEQ ID NO: 6014359 - DNA, 25 bp, Homo sapien
atttgggtttcccataggatagatg

SEQ ID NO: 6014360 - DNA, 25 bp, Homo sapien
agagaccatccctgggccggatgca

SEQ ID NO: 6014361 - DNA, 25 bp, Homo sapien
tgtatttcttaccactcagcgagtt

SEQ ID NO: 6014362 - DNA, 25 bp, Homo sapien
ggcacacagagcctctaaggggctt

SEQ ID NO: 6014363 - DNA, 25 bp, Homo sapien
caggtgtatcttatacacgtggctt

SEQ ID NO: 6014364 - DNA, 25 bp, Homo sapien
agcggcttcggccagtaacgttagg

SEQ ID NO: 6014365 - DNA, 25 bp, Homo sapien
gagccatttgactctttccacaact

SEQ ID NO: 6014366 - DNA, 25 bp, Homo sapien
gtcgccaggtggggggttccgctgc

SEQ ID NO: 6014367 - DNA, 25 bp, Homo sapien
gcacctgtcgccaggtggggggttc

SEQ ID NO: 6014368 - DNA, 25 bp, Homo sapien
attccaagcggcttcggccagtaac

SEQ ID NO: 6014369 - DNA, 25 bp, Homo sapien
ttttaacctcgactaaacacatgta

SEQ ID NO: 6014370 - DNA, 25 bp, Homo sapien
gctcgtcaagaagacagggccaggt

SEQ ID NO: 6014371 - DNA, 25 bp, Homo sapien
ggccttattccaagcggcttcggcc

SEQ ID NO: 6014372 - DNA, 25 bp, Homo sapien
gggcatccttcagccccttgttgaa

SEQ ID NO: 6014373 - DNA, 25 bp, Homo sapien
ccccttgttgaatacgcttgaggag

SEQ ID NO: 6014374 - DNA, 25 bp, Homo sapien
aaacgcacaccggccttattccaag

SEQ ID NO: 6014375 - DNA, 25 bp, Homo sapien
atcccatacaatggggtaccttctg

SEQ ID NO: 6014376 - DNA, 25 bp, Homo sapien
tacgcttgaggagagccatttgact

SEQ ID NO: 6014377 - DNA, 25 bp, Homo sapien
cagacgttgtttgtcttcaagaagc

SEQ ID NO: 6014378 - DNA, 25 bp, Homo sapien
tccgggccctcacattgccaaaaga

SEQ ID NO: 6014379 - DNA, 25 bp, Homo sapien
tttgactctttccacaactatccaa

SEQ ID NO: 6014380 - DNA, 25 bp, Homo sapien
caacgtggcactggggttgtgccgc

SEQ ID NO: 6014381 - DNA, 25 bp, Homo sapien
tcgctacagacgttgtttgtcttca

SEQ ID NO: 6014382 - DNA, 25 bp, Homo sapien
tctttccacaactatccaactcaca

SEQ ID NO: 6014383 - DNA, 25 bp, Homo sapien
cacaactatccaactcacaacgtgg

SEQ ID NO: 6014384 - DNA, 25 bp, Homo sapien
gggttgtgccgcctttgcaggtgta

SEQ ID NO: 6014385 - DNA, 25 bp, Homo sapien
aaagggtcgctacagacgttgtttg

SEQ ID NO: 6014386 - DNA, 25 bp, Homo sapien
cggcaatatggtggaaaataacata

SEQ ID NO: 6014387 - DNA, 25 bp, Homo sapien
gtggcttttggccgcagaggcacct

SEQ ID NO: 6014388 - DNA, 25 bp, Homo sapien
ctatccaactcacaacgtggcactg

SEQ ID NO: 6014389 - DNA, 25 bp, Homo sapien
gcactggggttgtgccgcctttgca

SEQ ID NO: 6014390 - DNA, 25 bp, Homo sapien
acccctaggaatgctcgtcaagaag

SEQ ID NO: 6014391 - DNA, 25 bp, Homo sapien
ctgcttccttcacgacattcaacag

SEQ ID NO: 6014392 - DNA, 25 bp, Homo sapien
ggaaagacccctaggaatgctcgtc

SEQ ID NO: 6014393 - DNA, 25 bp, Homo sapien
gacattcaacagaccttgcattcct

SEQ ID NO: 6014394 - DNA, 25 bp, Homo sapien
tgaggagagccatttgactctttcc

SEQ ID NO: 6014395 - DNA, 25 bp, Homo sapien
atagacaaacgcacaccggccttat

SEQ ID NO: 6014396 - DNA, 25 bp, Homo sapien
atacacgtggcttttggccgcagag

SEQ ID NO: 6014397 - DNA, 25 bp, Homo sapien
attgccaaaagacggcaatatggtg

SEQ ID NO: 6014398 - DNA, 25 bp, Homo sapien
ccttcacgacattcaacagaccttg

SEQ ID NO: 6014399 - DNA, 25 bp, Homo sapien
gttgaatacgcttgaggagagccat

SEQ ID NO: 6014400 - DNA, 25 bp, Homo sapien
aacctcgactaaacacatgtaaagc

SEQ ID NO: 6014401 - DNA, 25 bp, Homo sapien
aggtggggggttccgctgcctgcaa

SEQ ID NO: 6014402 - DNA, 25 bp, Homo sapien
ttgtttgtcttcaagaagcttccag

SEQ ID NO: 6014403 - DNA, 25 bp, Homo sapien
tatcttatacacgtggcttttggcc

SEQ ID NO: 6014404 - DNA, 25 bp, Homo sapien
gccccagatcagatcccatacaatg

SEQ ID NO: 6014405 - DNA, 25 bp, Homo sapien
cctcacattgccaaaagacggcaat

SEQ ID NO: 6014406 - DNA, 25 bp, Homo sapien
cttccagaggaactgcttccttcac

SEQ ID NO: 6014407 - DNA, 25 bp, Homo sapien
ccttctgggcatccttcagcccctt

SEQ ID NO: 6014408 - DNA, 25 bp, Homo sapien
aggaatgctcgtcaagaagacaggg

SEQ ID NO: 6014409 - DNA, 25 bp, Homo sapien
ggaaaataacatatagacaaacgca

SEQ ID NO: 6014410 - DNA, 25 bp, Homo sapien
acaccggccttattccaagcggctt

SEQ ID NO: 6014411 - DNA, 25 bp, Homo sapien
gtaaagcatgtgcaccgaggcccca

SEQ ID NO: 6014412 - DNA, 25 bp, Homo sapien
aactcacaacgtggcactggggttg

SEQ ID NO: 6014413 - DNA, 25 bp, Homo sapien
gcctgcaaagggtcgctacagacgt

SEQ ID NO: 6014414 - DNA, 25 bp, Homo sapien
gatcagatcccatacaatggggtac

SEQ ID NO: 6014415 - DNA, 25 bp, Homo sapien
gcagaggcacctgtcgccaggtggg

SEQ ID NO: 6014416 - DNA, 25 bp, Homo sapien
accttgcattcctttggcgagaggg

SEQ ID NO: 6014417 - DNA, 25 bp, Homo sapien
gaggaactgcttccttcacgacatt

SEQ ID NO: 6014418 - DNA, 25 bp, Homo sapien
ggggtaccttctgggcatccttcag

SEQ ID NO: 6014419 - DNA, 25 bp, Homo sapien
tccgctgcctgcaaagggtcgctac

SEQ ID NO: 6014420 - DNA, 25 bp, Homo sapien
gggttccgctgcctgcaaagggtcg

SEQ ID NO: 6014421 - DNA, 25 bp, Homo sapien
catgtgcaccgaggccccagatcag

SEQ ID NO: 6014422 - DNA, 25 bp, Homo sapien
tatggtggaaaataacatatagaca

SEQ ID NO: 6014423 - DNA, 25 bp, Homo sapien
aagaagcttccagaggaactgcttc

SEQ ID NO: 6014424 - DNA, 25 bp, Homo sapien
cttcagccccttgttgaatacgctt

SEQ ID NO: 6014425 - DNA, 25 bp, Homo sapien
cctttgcaggtgtatcttatacacg

SEQ ID NO: 6014426 - DNA, 25 bp, Homo sapien
gactaaacacatgtaaagcatgtgc

SEQ ID NO: 6014427 - DNA, 25 bp, Homo sapien
caagaagacagggccaggtttccgg

SEQ ID NO: 6014428 - DNA, 25 bp, Homo sapien
tttggccgcagaggcacctgtcgcc

SEQ ID NO: 6014429 - DNA, 25 bp, Homo sapien
caacagaccttgcattcctttggcg

SEQ ID NO: 6014430 - DNA, 25 bp, Homo sapien
aaaagacggcaatatggtggaaaat

SEQ ID NO: 6014431 - DNA, 25 bp, Homo sapien
cattcctttggcgagaggggaaaga

SEQ ID NO: 6014432 - DNA, 25 bp, Homo sapien
gtcttcaagaagcttccagaggaac

SEQ ID NO: 6014433 - DNA, 25 bp, Homo sapien
gtgccgcctttgcaggtgtatctta

SEQ ID NO: 6014434 - DNA, 25 bp, Homo sapien
aggtttccgggccctcacattgcca

SEQ ID NO: 6014435 - DNA, 25 bp, Homo sapien
accgaggccccagatcagatcccat

SEQ ID NO: 6014436 - DNA, 25 bp, Homo sapien
tacaatggggtaccttctgggcatc

SEQ ID NO: 6014437 - DNA, 25 bp, Homo sapien
acacatgtaaagcatgtgcaccgag

SEQ ID NO: 6014438 - DNA, 25 bp, Homo sapien
taacatatagacaaacgcacaccgg

SEQ ID NO: 6014439 - DNA, 25 bp, Homo sapien
cccacgccccaggagaatacaggtg

SEQ ID NO: 6014440 - DNA, 25 bp, Homo sapien
gcccaaggacaccaactttctgccc

SEQ ID NO: 6014441 - DNA, 25 bp, Homo sapien
gccctggactgatggtagatgcccc

SEQ ID NO: 6014442 - DNA, 25 bp, Homo sapien
tcctcagcccaaggacaccaacttt

SEQ ID NO: 6014443 - DNA, 25 bp, Homo sapien
gttctcctggctagttcctcaaaac

SEQ ID NO: 6014444 - DNA, 25 bp, Homo sapien
cagccctcctcagcccaaggacacc

SEQ ID NO: 6014445 - DNA, 25 bp, Homo sapien
ccatgctcttggctgcagttaactg

SEQ ID NO: 6014446 - DNA, 25 bp, Homo sapien
gaccagctccatttctctggattct

SEQ ID NO: 6014447 - DNA, 25 bp, Homo sapien
gagatccagcgtcgcctgtgtctgt

SEQ ID NO: 6014448 - DNA, 25 bp, Homo sapien
tctgcccttgtcactcctgcatctg

SEQ ID NO: 6014449 - DNA, 25 bp, Homo sapien
atccaggagccacggctcatggaac

SEQ ID NO: 6014450 - DNA, 25 bp, Homo sapien
gccccaggagaatacaggtgccagg

SEQ ID NO: 6014451 - DNA, 25 bp, Homo sapien
gggaagcaggtgaccagctccattt

SEQ ID NO: 6014452 - DNA, 25 bp, Homo sapien
tgcatctgccgatggcccctgtcca

SEQ ID NO: 6014453 - DNA, 25 bp, Homo sapien
ggacaccaactttctgcccttgtca

SEQ ID NO: 6014454 - DNA, 25 bp, Homo sapien
atagccacccgagtatccaaccaga

SEQ ID NO: 6014455 - DNA, 25 bp, Homo sapien
ctcttggctgcagttaactgtcctg

SEQ ID NO: 6014456 - DNA, 25 bp, Homo sapien
tgtccagagcctctgagcgatccct

SEQ ID NO: 6014457 - DNA, 25 bp, Homo sapien
ctccatttctctggattctgaccca

SEQ ID NO: 6014458 - DNA, 25 bp, Homo sapien
cagtgccttctagagccattgcggg

SEQ ID NO: 6014459 - DNA, 25 bp, Homo sapien
cactcctgcatctgccgatggcccc

SEQ ID NO: 6014460 - DNA, 25 bp, Homo sapien
gcaggtgaccagctccatttctctg

SEQ ID NO: 6014461 - DNA, 25 bp, Homo sapien
gttaactgtcctgggtggattcagt

SEQ ID NO: 6014462 - DNA, 25 bp, Homo sapien
tggtagatgcccctctccatgctct

SEQ ID NO: 6014463 - DNA, 25 bp, Homo sapien
tcaaaacttccctgtatgaaaagga

SEQ ID NO: 6014464 - DNA, 25 bp, Homo sapien
aggtgggggaagcaggtgaccagct

SEQ ID NO: 6014465 - DNA, 25 bp, Homo sapien
gggtggattcagtgtccagagcctc

SEQ ID NO: 6014466 - DNA, 25 bp, Homo sapien
tctcagcaaatgtccctaggaccag

SEQ ID NO: 6014467 - DNA, 25 bp, Homo sapien
ggatgtggatacagggcctgccatt

SEQ ID NO: 6014468 - DNA, 25 bp, Homo sapien
tccctaggaccaggccctggactga

SEQ ID NO: 6014469 - DNA, 25 bp, Homo sapien
ggagaatacaggtgccaggaaggtg

SEQ ID NO: 6014470 - DNA, 25 bp, Homo sapien
tgtcctgggtggattcagtgtccag

SEQ ID NO: 6014471 - DNA, 25 bp, Homo sapien
tgccgatggcccctgtccaaactgg

SEQ ID NO: 6014472 - DNA, 25 bp, Homo sapien
ctgtgggttgggcatagccacccga

SEQ ID NO: 6014473 - DNA, 25 bp, Homo sapien
gtgatgcagccggcaatccagccct

SEQ ID NO: 6014474 - DNA, 25 bp, Homo sapien
gaccaggccctggactgatggtaga

SEQ ID NO: 6014475 - DNA, 25 bp, Homo sapien
tgccaggaaggtgctgccccgagtg

SEQ ID NO: 6014476 - DNA, 25 bp, Homo sapien
atggaacagtgccttctagagccat

SEQ ID NO: 6014477 - DNA, 25 bp, Homo sapien
cggctcatggaacagtgccttctag

SEQ ID NO: 6014478 - DNA, 25 bp, Homo sapien
attcagtgtccagagcctctgagcg

SEQ ID NO: 6014479 - DNA, 25 bp, Homo sapien
tacaggtgccaggaaggtgctgccc

SEQ ID NO: 6014480 - DNA, 25 bp, Homo sapien
agcctggggcccctgctcaaccacc

SEQ ID NO: 6014481 - DNA, 25 bp, Homo sapien
ccctgcctggcatccaggagccacg

SEQ ID NO: 6014482 - DNA, 25 bp, Homo sapien
cgcctgtgtctgtccagaccctgcc

SEQ ID NO: 6014483 - DNA, 25 bp, Homo sapien
gcaatccagccctcctcagcccaag

SEQ ID NO: 6014484 - DNA, 25 bp, Homo sapien
gggcccctgctcaaccacctgtggg

SEQ ID NO: 6014485 - DNA, 25 bp, Homo sapien
tgtctgtccagaccctgcctggcat

SEQ ID NO: 6014486 - DNA, 25 bp, Homo sapien
tgccattctcagcaaatgtccctag

SEQ ID NO: 6014487 - DNA, 25 bp, Homo sapien
tctgaggtgggggaagcaggtgacc

SEQ ID NO: 6014488 - DNA, 25 bp, Homo sapien
ttctctggattctgacccaggcttc

SEQ ID NO: 6014489 - DNA, 25 bp, Homo sapien
gaaggtgctgccccgagtgggtgtg

SEQ ID NO: 6014490 - DNA, 25 bp, Homo sapien
tgtatgaaaaggacaaccaaaagga

SEQ ID NO: 6014491 - DNA, 25 bp, Homo sapien
caggcttctgggttctcctggctag

SEQ ID NO: 6014492 - DNA, 25 bp, Homo sapien
ggattctgacccaggcttctgggtt

SEQ ID NO: 6014493 - DNA, 25 bp, Homo sapien
ctgctcaaccacctgtgggttgggc

SEQ ID NO: 6014494 - DNA, 25 bp, Homo sapien
aaccagaaccgattctgccaactgg

SEQ ID NO: 6014495 - DNA, 25 bp, Homo sapien
cagccggcaatccagccctcctcag

SEQ ID NO: 6014496 - DNA, 25 bp, Homo sapien
caactggagatccagcgtcgcctgt

SEQ ID NO: 6014497 - DNA, 25 bp, Homo sapien
cttccctgtatgaaaaggacaacca

SEQ ID NO: 6014498 - DNA, 25 bp, Homo sapien
caaatgtccctaggaccaggccctg

SEQ ID NO: 6014499 - DNA, 25 bp, Homo sapien
cagcgtcgcctgtgtctgtccagac

SEQ ID NO: 6014500 - DNA, 25 bp, Homo sapien
cgagtgggtgtgtgaccaggcagtg

SEQ ID NO: 6014501 - DNA, 25 bp, Homo sapien
cgatccctgctctgtctgaggtggg

SEQ ID NO: 6014502 - DNA, 25 bp, Homo sapien
gctgcagttaactgtcctgggtgga

SEQ ID NO: 6014503 - DNA, 25 bp, Homo sapien
acccgagtatccaaccagaaccgat

SEQ ID NO: 6014504 - DNA, 25 bp, Homo sapien
aaccgattctgccaactggagatcc

SEQ ID NO: 6014505 - DNA, 25 bp, Homo sapien
tggagcacagcctggggcccctgct

SEQ ID NO: 6014506 - DNA, 25 bp, Homo sapien
ggtgtgtgaccaggcagtgatgcag

SEQ ID NO: 6014507 - DNA, 25 bp, Homo sapien
gagccacggctcatggaacagtgcc

SEQ ID NO: 6014508 - DNA, 25 bp, Homo sapien
agggcctgccattctcagcaaatgt

SEQ ID NO: 6014509 - DNA, 25 bp, Homo sapien
aggcagtgatgcagccggcaatcca

SEQ ID NO: 6014510 - DNA, 25 bp, Homo sapien
gactgatggtagatgcccctctcca

SEQ ID NO: 6014511 - DNA, 25 bp, Homo sapien
gtatccaaccagaaccgattctgcc

SEQ ID NO: 6014512 - DNA, 25 bp, Homo sapien
aaccacctgtgggttgggcatagcc

SEQ ID NO: 6014513 - DNA, 25 bp, Homo sapien
caactttctgcccttgtcactcctg

SEQ ID NO: 6014514 - DNA, 25 bp, Homo sapien
cttgtcactcctgcatctgccgatg

SEQ ID NO: 6014515 - DNA, 25 bp, Homo sapien
cctctccatgctcttggctgcagtt

SEQ ID NO: 6014516 - DNA, 25 bp, Homo sapien
gagcctctgagcgatccctgctctg

SEQ ID NO: 6014517 - DNA, 25 bp, Homo sapien
tctgagcgatccctgctctgtctga

SEQ ID NO: 6014518 - DNA, 25 bp, Homo sapien
ttgcggggatgtggatacagggcct

SEQ ID NO: 6014519 - DNA, 25 bp, Homo sapien
atggcccctgtccaaactggagcac

SEQ ID NO: 6014520 - DNA, 25 bp, Homo sapien
ccaaactggagcacagcctggggcc

SEQ ID NO: 6014521 - DNA, 25 bp, Homo sapien
ttgggcatagccacccgagtatcca

SEQ ID NO: 6014522 - DNA, 25 bp, Homo sapien
ctggcatccaggagccacggctcat

SEQ ID NO: 6014523 - DNA, 25 bp, Homo sapien
gatgcccctctccatgctcttggct

SEQ ID NO: 6014524 - DNA, 25 bp, Homo sapien
cctgtccaaactggagcacagcctg

SEQ ID NO: 6014525 - DNA, 25 bp, Homo sapien
tccagaccctgcctggcatccagga

SEQ ID NO: 6014526 - DNA, 25 bp, Homo sapien
tgaccaggcagtgatgcagccggca

SEQ ID NO: 6014527 - DNA, 25 bp, Homo sapien
ggatacagggcctgccattctcagc

SEQ ID NO: 6014528 - DNA, 25 bp, Homo sapien
ttctgggttctcctggctagttcct

SEQ ID NO: 6014529 - DNA, 25 bp, Homo sapien
agttcctcaaaacttccctgtatga

SEQ ID NO: 6014530 - DNA, 25 bp, Homo sapien
ttctgccaactggagatccagcgtc

SEQ ID NO: 6014531 - DNA, 25 bp, Homo sapien
ctggctagttcctcaaaacttccct

SEQ ID NO: 6014532 - DNA, 25 bp, Homo sapien
gctgccccgagtgggtgtgtgacca

SEQ ID NO: 6014533 - DNA, 25 bp, Homo sapien
tgtatttttacaaatacaaaggtca

SEQ ID NO: 6014534 - DNA, 25 bp, Homo sapien
tctgctgcctggtacctattactgt

SEQ ID NO: 6014535 - DNA, 25 bp, Homo sapien
caaatacaaaggtcaagttcctgga

SEQ ID NO: 6014536 - DNA, 25 bp, Homo sapien
tgggtcagaatccagagaaatggag

SEQ ID NO: 6014537 - DNA, 25 bp, Homo sapien
tccccagcatggtggccaggcttgc

SEQ ID NO: 6014538 - DNA, 25 bp, Homo sapien
gaatccacccaggacagttaactgc

SEQ ID NO: 6014539 - DNA, 25 bp, Homo sapien
ccagtacagcttagctttaaaggtc

SEQ ID NO: 6014540 - DNA, 25 bp, Homo sapien
agcacatagaagtccaagaagggac

SEQ ID NO: 6014541 - DNA, 25 bp, Homo sapien
cagggaagttttgaggaactagcca

SEQ ID NO: 6014542 - DNA, 25 bp, Homo sapien
gggacaagcacatagaagtccaaga

SEQ ID NO: 6014543 - DNA, 25 bp, Homo sapien
gcttcccccacctcagacagagcag

SEQ ID NO: 6014544 - DNA, 25 bp, Homo sapien
caagttcctggacttggcaaacgct

SEQ ID NO: 6014545 - DNA, 25 bp, Homo sapien
gcttgcccagtacagcttagcttta

SEQ ID NO: 6014546 - DNA, 25 bp, Homo sapien
tcttcatgttcccagaaaattcttc

SEQ ID NO: 6014547 - DNA, 25 bp, Homo sapien
gcagggtgttctcagatcaggaaag

SEQ ID NO: 6014548 - DNA, 25 bp, Homo sapien
tggttgtccttttcatacagggaag

SEQ ID NO: 6014549 - DNA, 25 bp, Homo sapien
tgaggaactagccaggagaacccag

SEQ ID NO: 6014550 - DNA, 25 bp, Homo sapien
gagggtactctactgttccttgtct

SEQ ID NO: 6014551 - DNA, 25 bp, Homo sapien
tgttctcagatcaggaaaggcacac

SEQ ID NO: 6014552 - DNA, 25 bp, Homo sapien
gctctggacactgaatccacccagg

SEQ ID NO: 6014553 - DNA, 25 bp, Homo sapien
tcttaagaatagtgtgattccatct

SEQ ID NO: 6014554 - DNA, 25 bp, Homo sapien
ttgctttgtgagcatttaagagatg

SEQ ID NO: 6014555 - DNA, 25 bp, Homo sapien
gaatagtgtgattccatctcttcat

SEQ ID NO: 6014556 - DNA, 25 bp, Homo sapien
cagatcaggaaaggcacacttacaa

SEQ ID NO: 6014557 - DNA, 25 bp, Homo sapien
cagcttagctttaaaggtccttttg

SEQ ID NO: 6014558 - DNA, 25 bp, Homo sapien
agcctcttgctttgtgagcatttaa

SEQ ID NO: 6014559 - DNA, 25 bp, Homo sapien
ccagaggagggtactctactgttcc

SEQ ID NO: 6014560 - DNA, 25 bp, Homo sapien
ttactgtcactatccccagcatggt

SEQ ID NO: 6014561 - DNA, 25 bp, Homo sapien
aaacgctcttaagaatagtgtgatt

SEQ ID NO: 6014562 - DNA, 25 bp, Homo sapien
gcctgccagaagtgtggagcctctt

SEQ ID NO: 6014563 - DNA, 25 bp, Homo sapien
cccacctcagacagagcagggatcg

SEQ ID NO: 6014564 - DNA, 25 bp, Homo sapien
taactgcagccaagagcatggagag

SEQ ID NO: 6014565 - DNA, 25 bp, Homo sapien
tcagaggctctggacactgaatcca

SEQ ID NO: 6014566 - DNA, 25 bp, Homo sapien
atctttgggacaagcacatagaagt

SEQ ID NO: 6014567 - DNA, 25 bp, Homo sapien
aagggacctggatgtttcaggcaat

SEQ ID NO: 6014568 - DNA, 25 bp, Homo sapien
aaaggccctggcctgccagaagtgt

SEQ ID NO: 6014569 - DNA, 25 bp, Homo sapien
tacctattactgtcactatccccag

SEQ ID NO: 6014570 - DNA, 25 bp, Homo sapien
actagccaggagaacccagaagcct

SEQ ID NO: 6014571 - DNA, 25 bp, Homo sapien
tagaagtccaagaagggacctggat

SEQ ID NO: 6014572 - DNA, 25 bp, Homo sapien
ggcacacttacaaggtcacccataa

SEQ ID NO: 6014573 - DNA, 25 bp, Homo sapien
caggagaacccagaagcctgggtca

SEQ ID NO: 6014574 - DNA, 25 bp, Homo sapien
tcactatccccagcatggtggccag

SEQ ID NO: 6014575 - DNA, 25 bp, Homo sapien
cttgtctctctcatgctgaagagaa

SEQ ID NO: 6014576 - DNA, 25 bp, Homo sapien
cccataatctttgggacaagcacat

SEQ ID NO: 6014577 - DNA, 25 bp, Homo sapien
cagagaaatggagctggtcacctgc

SEQ ID NO: 6014578 - DNA, 25 bp, Homo sapien
ctcagacagagcagggatcgctcag

SEQ ID NO: 6014579 - DNA, 25 bp, Homo sapien
actctactgttccttgtctctctca

SEQ ID NO: 6014580 - DNA, 25 bp, Homo sapien
cctggacttggcaaacgctcttaag

SEQ ID NO: 6014581 - DNA, 25 bp, Homo sapien
catttaagagatgtgtatttttaca

SEQ ID NO: 6014582 - DNA, 25 bp, Homo sapien
tctctcatgctgaagagaaaggccc

SEQ ID NO: 6014583 - DNA, 25 bp, Homo sapien
atgttcccagaaaattcttcccagc

SEQ ID NO: 6014584 - DNA, 25 bp, Homo sapien
aggaaaggcacacttacaaggtcac

SEQ ID NO: 6014585 - DNA, 25 bp, Homo sapien
gtgtggagcctcttgctttgtgagc

SEQ ID NO: 6014586 - DNA, 25 bp, Homo sapien
tccttttcatacagggaagttttga

SEQ ID NO: 6014587 - DNA, 25 bp, Homo sapien
ggatcgctcagaggctctggacact

SEQ ID NO: 6014588 - DNA, 25 bp, Homo sapien
atgctgaagagaaaggccctggcct

SEQ ID NO: 6014589 - DNA, 25 bp, Homo sapien
gagatgtgtatttttacaaatacaa

SEQ ID NO: 6014590 - DNA, 25 bp, Homo sapien
agaatccagagaaatggagctggtc

SEQ ID NO: 6014591 - DNA, 25 bp, Homo sapien
aggcaatctgctgcctggtacctat

SEQ ID NO: 6014592 - DNA, 25 bp, Homo sapien
ttcccagccgggcagggtgttctca

SEQ ID NO: 6014593 - DNA, 25 bp, Homo sapien
tccaagaagggacctggatgtttca

SEQ ID NO: 6014594 - DNA, 25 bp, Homo sapien
aacccagaagcctgggtcagaatcc

SEQ ID NO: 6014595 - DNA, 25 bp, Homo sapien
gacactgaatccacccaggacagtt

SEQ ID NO: 6014596 - DNA, 25 bp, Homo sapien
aagttttgaggaactagccaggaga

SEQ ID NO: 6014597 - DNA, 25 bp, Homo sapien
caaaggtcaagttcctggacttggc

SEQ ID NO: 6014598 - DNA, 25 bp, Homo sapien
agtcctccagaggagggtactctac

SEQ ID NO: 6014599 - DNA, 25 bp, Homo sapien
gaagcctgggtcagaatccagagaa

SEQ ID NO: 6014600 - DNA, 25 bp, Homo sapien
tgtttcaggcaatctgctgcctggt

SEQ ID NO: 6014601 - DNA, 25 bp, Homo sapien
tgtgattccatctcttcatgttccc

SEQ ID NO: 6014602 - DNA, 25 bp, Homo sapien
cttacaaggtcacccataatctttg

SEQ ID NO: 6014603 - DNA, 25 bp, Homo sapien
ggccagtcctccagaggagggtact

SEQ ID NO: 6014604 - DNA, 25 bp, Homo sapien
gacagttaactgcagccaagagcat

SEQ ID NO: 6014605 - DNA, 25 bp, Homo sapien
aaattcttcccagccgggcagggtg

SEQ ID NO: 6014606 - DNA, 25 bp, Homo sapien
ccctggcctgccagaagtgtggagc

SEQ ID NO: 6014607 - DNA, 25 bp, Homo sapien
ctgttccttgtctctctcatgctga

SEQ ID NO: 6014608 - DNA, 25 bp, Homo sapien
aggtcacccataatctttgggacaa

SEQ ID NO: 6014609 - DNA, 25 bp, Homo sapien
tccatctcttcatgttcccagaaaa

SEQ ID NO: 6014610 - DNA, 25 bp, Homo sapien
aatggagctggtcacctgcttcccc

SEQ ID NO: 6014611 - DNA, 25 bp, Homo sapien
gcctggtacctattactgtcactat

SEQ ID NO: 6014612 - DNA, 25 bp, Homo sapien
gccaggcttgcccagtacagcttag

SEQ ID NO: 6014613 - DNA, 25 bp, Homo sapien
atggtggccaggcttgcccagtaca

SEQ ID NO: 6014614 - DNA, 25 bp, Homo sapien
ccagaagtgtggagcctcttgcttt

SEQ ID NO: 6014615 - DNA, 25 bp, Homo sapien
ttcatacagggaagttttgaggaac

SEQ ID NO: 6014616 - DNA, 25 bp, Homo sapien
cttggcaaacgctcttaagaatagt

SEQ ID NO: 6014617 - DNA, 25 bp, Homo sapien
cagagcagggatcgctcagaggctc

SEQ ID NO: 6014618 - DNA, 25 bp, Homo sapien
acccaggacagttaactgcagccaa

SEQ ID NO: 6014619 - DNA, 25 bp, Homo sapien
tgtgagcatttaagagatgtgtatt

SEQ ID NO: 6014620 - DNA, 25 bp, Homo sapien
aagagaaaggccctggcctgccaga

SEQ ID NO: 6014621 - DNA, 25 bp, Homo sapien
agccgggcagggtgttctcagatca

SEQ ID NO: 6014622 - DNA, 25 bp, Homo sapien
tccttttggttgtccttttcataca

SEQ ID NO: 6014623 - DNA, 25 bp, Homo sapien
cctggatgtttcaggcaatctgctg

SEQ ID NO: 6014624 - DNA, 25 bp, Homo sapien
ccagaaaattcttcccagccgggca

SEQ ID NO: 6014625 - DNA, 25 bp, Homo sapien
tgtacgaatcggatatccgatcggt

SEQ ID NO: 6014626 - DNA, 25 bp, Homo sapien
ttttccgcaacagagattgcagaat

SEQ ID NO: 6014627 - DNA, 25 bp, Homo sapien
atgtatcgccgcccaaatagtccac

SEQ ID NO: 6014628 - DNA, 25 bp, Homo sapien
taatcaactcgatgaaatctctttt

SEQ ID NO: 6014629 - DNA, 25 bp, Homo sapien
tcacagaggcgataatgatgtacga

SEQ ID NO: 6014630 - DNA, 25 bp, Homo sapien
tgcagaatttggtttgccgatggat

SEQ ID NO: 6014631 - DNA, 25 bp, Homo sapien
tatttgggatttgatttgttttata

SEQ ID NO: 6014632 - DNA, 25 bp, Homo sapien
tgactttttgagtatttgggatttg

SEQ ID NO: 6014633 - DNA, 25 bp, Homo sapien
gatcggtgtcattattttatttttg

SEQ ID NO: 6014634 - DNA, 25 bp, Homo sapien
caaattcttgaaaataattctcttt

SEQ ID NO: 6014635 - DNA, 25 bp, Homo sapien
atttggtttgccgatggatgtatcg

SEQ ID NO: 6014636 - DNA, 25 bp, Homo sapien
gtttgccgatggatgtatcgccgcc

SEQ ID NO: 6014637 - DNA, 25 bp, Homo sapien
agtaactttacatatcttcatacca

SEQ ID NO: 6014638 - DNA, 25 bp, Homo sapien
tttacatatcttcataccaaatgaa

SEQ ID NO: 6014639 - DNA, 25 bp, Homo sapien
gaataacttatgtcaatacaaattc

SEQ ID NO: 6014640 - DNA, 25 bp, Homo sapien
tcctcctctctaggatcggaaacct

SEQ ID NO: 6014641 - DNA, 25 bp, Homo sapien
ttttgagtatttgggatttgatttg

SEQ ID NO: 6014642 - DNA, 25 bp, Homo sapien
tctctttgaagtcgcagtatacttg

SEQ ID NO: 6014643 - DNA, 25 bp, Homo sapien
cggattcaagaagagacaagagcgt

SEQ ID NO: 6014644 - DNA, 25 bp, Homo sapien
gattcataatcaactcgatgaaatc

SEQ ID NO: 6014645 - DNA, 25 bp, Homo sapien
tgaaaacttagtaactttacatatc

SEQ ID NO: 6014646 - DNA, 25 bp, Homo sapien
agtacgaccgattcacagaggcgat

SEQ ID NO: 6014647 - DNA, 25 bp, Homo sapien
cgcagtatacttgatcaaagccaat

SEQ ID NO: 6014648 - DNA, 25 bp, Homo sapien
agttttatgaataattgaataatgc

SEQ ID NO: 6014649 - DNA, 25 bp, Homo sapien
gagacaagagcgtaaactgaagaat

SEQ ID NO: 6014650 - DNA, 25 bp, Homo sapien
atcatagcgctttttccgcaacaga

SEQ ID NO: 6014651 - DNA, 25 bp, Homo sapien
aatcggatatccgatcggtgtcatt

SEQ ID NO: 6014652 - DNA, 25 bp, Homo sapien
ttgacgaatactatcatagcgcttt

SEQ ID NO: 6014653 - DNA, 25 bp, Homo sapien
agagcgtaaactgaagaatcctcct

SEQ ID NO: 6014654 - DNA, 25 bp, Homo sapien
ctcttttagttttatgaataattga

SEQ ID NO: 6014655 - DNA, 25 bp, Homo sapien
gatcaaagccaattgttttaggtac

SEQ ID NO: 6014656 - DNA, 25 bp, Homo sapien
actcgatgaaatctcttttagtttt

SEQ ID NO: 6014657 - DNA, 25 bp, Homo sapien
aaaaaattatgtattcatatacgaa

SEQ ID NO: 6014658 - DNA, 25 bp, Homo sapien
cgccgcccaaatagtccaccggatt

SEQ ID NO: 6014659 - DNA, 25 bp, Homo sapien
gttgagagtacgaccgattcacaga

SEQ ID NO: 6014660 - DNA, 25 bp, Homo sapien
taaaaagtaacttgattcataatca

SEQ ID NO: 6014661 - DNA, 25 bp, Homo sapien
ccaaatagtccaccggattcaagaa

SEQ ID NO: 6014662 - DNA, 25 bp, Homo sapien
ttatgaataattgaataatgcatgt

SEQ ID NO: 6014663 - DNA, 25 bp, Homo sapien
agccaattgttttaggtacactaga

SEQ ID NO: 6014664 - DNA, 25 bp, Homo sapien
taatgatgtacgaatcggatatccg

SEQ ID NO: 6014665 - DNA, 25 bp, Homo sapien
cttgaaaataattctctttgaagtc

SEQ ID NO: 6014666 - DNA, 25 bp, Homo sapien
aggcgataatgatgtacgaatcgga

SEQ ID NO: 6014667 - DNA, 25 bp, Homo sapien
aaacatttgacgaatactatcatag

SEQ ID NO: 6014668 - DNA, 25 bp, Homo sapien
cgatggatgtatcgccgcccaaata

SEQ ID NO: 6014669 - DNA, 25 bp, Homo sapien
aatactatcatagcgctttttccgc

SEQ ID NO: 6014670 - DNA, 25 bp, Homo sapien
aacttagtaactttacatatcttca

SEQ ID NO: 6014671 - DNA, 25 bp, Homo sapien
caatacaaattcttgaaaataattc

SEQ ID NO: 6014672 - DNA, 25 bp, Homo sapien
taggtacactagatttgacgaaaat

SEQ ID NO: 6014673 - DNA, 25 bp, Homo sapien
tgaaatctcttttagttttatgaat

SEQ ID NO: 6014674 - DNA, 25 bp, Homo sapien
tctctaggatcggaaacctccgtgg

SEQ ID NO: 6014675 - DNA, 25 bp, Homo sapien
gtccaccggattcaagaagagacaa

SEQ ID NO: 6014676 - DNA, 25 bp, Homo sapien
gcgctttttccgcaacagagattgc

SEQ ID NO: 6014677 - DNA, 25 bp, Homo sapien
tgaatccgtaaatgaaaacttagta

SEQ ID NO: 6014678 - DNA, 25 bp, Homo sapien
tatacgaataacttatgtcaataca

SEQ ID NO: 6014679 - DNA, 25 bp, Homo sapien
atttgacgaaaatttgtctgcgatg

SEQ ID NO: 6014680 - DNA, 25 bp, Homo sapien
taaactgaagaatcctcctctctag

SEQ ID NO: 6014681 - DNA, 25 bp, Homo sapien
gcaacagagattgcagaatttggtt

SEQ ID NO: 6014682 - DNA, 25 bp, Homo sapien
gagattgcagaatttggtttgccga

SEQ ID NO: 6014683 - DNA, 25 bp, Homo sapien
tatcttcataccaaatgaaaactta

SEQ ID NO: 6014684 - DNA, 25 bp, Homo sapien
cttatgtcaatacaaattcttgaaa

SEQ ID NO: 6014685 - DNA, 25 bp, Homo sapien
tgcgatgaatccgtaaatgaaaact

SEQ ID NO: 6014686 - DNA, 25 bp, Homo sapien
gaagaatcctcctctctaggatcgg

SEQ ID NO: 6014687 - DNA, 25 bp, Homo sapien
tattcatatacgaataacttatgtc

SEQ ID NO: 6014688 - DNA, 25 bp, Homo sapien
ttatgtattcatatacgaataactt

SEQ ID NO: 6014689 - DNA, 25 bp, Homo sapien
gaaacctccgtggttgagagtacga

SEQ ID NO: 6014690 - DNA, 25 bp, Homo sapien
tgtcattattttatttttgccctaa

SEQ ID NO: 6014691 - DNA, 25 bp, Homo sapien
ttgttttaggtacactagatttgac

SEQ ID NO: 6014692 - DNA, 25 bp, Homo sapien
taacttgattcataatcaactcgat

SEQ ID NO: 6014693 - DNA, 25 bp, Homo sapien
tccgtggttgagagtacgaccgatt

SEQ ID NO: 6014694 - DNA, 25 bp, Homo sapien
cttagtaaaaagtaacttgattcat

SEQ ID NO: 6014695 - DNA, 25 bp, Homo sapien
accgattcacagaggcgataatgat

SEQ ID NO: 6014696 - DNA, 25 bp, Homo sapien
atacttgatcaaagccaattgtttt

SEQ ID NO: 6014697 - DNA, 25 bp, Homo sapien
caagaagagacaagagcgtaaactg

SEQ ID NO: 6014698 - DNA, 25 bp, Homo sapien
atatccgatcggtgtcattatttta

SEQ ID NO: 6014699 - DNA, 25 bp, Homo sapien
cactagatttgacgaaaatttgtct

SEQ ID NO: 6014700 - DNA, 25 bp, Homo sapien
tgaagtcgcagtatacttgatcaaa

SEQ ID NO: 6014701 - DNA, 25 bp, Homo sapien
ggatcggaaacctccgtggttgaga

SEQ ID NO: 6014702 - DNA, 25 bp, Homo sapien
cgaaaatttgtctgcgatgaatccg

SEQ ID NO: 6014703 - DNA, 25 bp, Homo sapien
cataccaaatgaaaacttacttagt

SEQ ID NO: 6014704 - DNA, 25 bp, Homo sapien
tttgtctgcgatgaatccgtaaatg

SEQ ID NO: 6014705 - DNA, 25 bp, Homo sapien
aataattctctttgaagtcgcagta

SEQ ID NO: 6014706 - DNA, 25 bp, Homo sapien
tttggtaaacatttgacgaatacta

SEQ ID NO: 6014707 - DNA, 25 bp, Homo sapien
ggtcttaagcgtttttcagagcaac

SEQ ID NO: 6014708 - DNA, 25 bp, Homo sapien
tccattttcagatatacaaaacaaa

SEQ ID NO: 6014709 - DNA, 25 bp, Homo sapien
gtttctctattttcatcaatcccta

SEQ ID NO: 6014710 - DNA, 25 bp, Homo sapien
atgcagattgtgtgtttgttaggtt

SEQ ID NO: 6014711 - DNA, 25 bp, Homo sapien
cttgctaactggcaatttgaacaga

SEQ ID NO: 6014712 - DNA, 25 bp, Homo sapien
taagaacgaagctacaaatgcaaaa

SEQ ID NO: 6014713 - DNA, 25 bp, Homo sapien
cataagaaactctaagaacgaagct

SEQ ID NO: 6014714 - DNA, 25 bp, Homo sapien
ccccgttcagctatcggtttctcta

SEQ ID NO: 6014715 - DNA, 25 bp, Homo sapien
cttttagtgacaaactcacatatgc

SEQ ID NO: 6014716 - DNA, 25 bp, Homo sapien
atcagtagtttggtcttaagcgttt

SEQ ID NO: 6014717 - DNA, 25 bp, Homo sapien
aagcgtttttcagagcaacataatt

SEQ ID NO: 6014718 - DNA, 25 bp, Homo sapien
aaaacaaacaatcaatataggtcat

SEQ ID NO: 6014719 - DNA, 25 bp, Homo sapien
tgtgaaaggataacattactctttt

SEQ ID NO: 6014720 - DNA, 25 bp, Homo sapien
catgacgttttcttgacgtaaaaga

SEQ ID NO: 6014721 - DNA, 25 bp, Homo sapien
ggaatattccattccattttcagat

SEQ ID NO: 6014722 - DNA, 25 bp, Homo sapien
tcgtttggaatattccattccattt

SEQ ID NO: 6014723 - DNA, 25 bp, Homo sapien
acaaatgcaaaatctgcatgtcaaa

SEQ ID NO: 6014724 - DNA, 25 bp, Homo sapien
ttcagatatacaaaacaaacaatca

SEQ ID NO: 6014725 - DNA, 25 bp, Homo sapien
tcatttcgtttggaatattccattc

SEQ ID NO: 6014726 - DNA, 25 bp, Homo sapien
tgatatataagtcttgctaactggc

SEQ ID NO: 6014727 - DNA, 25 bp, Homo sapien
taactggcaatttgaacagataaaa

SEQ ID NO: 6014728 - DNA, 25 bp, Homo sapien
tcaaacaaaacttattaggcccata

SEQ ID NO: 6014729 - DNA, 25 bp, Homo sapien
cagttgttaaccaaattaatcttat

SEQ ID NO: 6014730 - DNA, 25 bp, Homo sapien
attgatcagatttcagttgttaacc

SEQ ID NO: 6014731 - DNA, 25 bp, Homo sapien
tattttttgtgatatgttcgatttt

SEQ ID NO: 6014732 - DNA, 25 bp, Homo sapien
ggttttaaataataacagtgatata

SEQ ID NO: 6014733 - DNA, 25 bp, Homo sapien
catcaatccctattattttattttt

SEQ ID NO: 6014734 - DNA, 25 bp, Homo sapien
gataaaagtatcatgatatcagtag

SEQ ID NO: 6014735 - DNA, 25 bp, Homo sapien
aaactctaagaacgaagctacaaat

SEQ ID NO: 6014736 - DNA, 25 bp, Homo sapien
tgaacagataaaagtatcatgatat

SEQ ID NO: 6014737 - DNA, 25 bp, Homo sapien
tgtttgttaggttagtgccataaga

SEQ ID NO: 6014738 - DNA, 25 bp, Homo sapien
tattttcatcaatccctattatttt

SEQ ID NO: 6014739 - DNA, 25 bp, Homo sapien
catttggttttaaataataacagtg

SEQ ID NO: 6014740 - DNA, 25 bp, Homo sapien
agaaatgtttttgaggttgaaaatg

SEQ ID NO: 6014741 - DNA, 25 bp, Homo sapien
gatatgttcgatttttttttgtgaa

SEQ ID NO: 6014742 - DNA, 25 bp, Homo sapien
gttcagctatcggtttctctatttt

SEQ ID NO: 6014743 - DNA, 25 bp, Homo sapien
atgtttttgaggttgaaaatgcaga

SEQ ID NO: 6014744 - DNA, 25 bp, Homo sapien
ttccattccattttcagatatacaa

SEQ ID NO: 6014745 - DNA, 25 bp, Homo sapien
gcaaaatctgcatgtcaaatagtat

SEQ ID NO: 6014746 - DNA, 25 bp, Homo sapien
aactatattgatcagatttcagttg

SEQ ID NO: 6014747 - DNA, 25 bp, Homo sapien
ttaggttagtgccataagaaactct

SEQ ID NO: 6014748 - DNA, 25 bp, Homo sapien
catgatatcagtagtttggtcttaa

SEQ ID NO: 6014749 - DNA, 25 bp, Homo sapien
aacaatcaatataggtcatttggtt

SEQ ID NO: 6014750 - DNA, 25 bp, Homo sapien
aatagtatctctcttttagtgacaa

SEQ ID NO: 6014751 - DNA, 25 bp, Homo sapien
gagcaacataattgtaaagttttat

SEQ ID NO: 6014752 - DNA, 25 bp, Homo sapien
tagtgccataagaaactctaagaac

SEQ ID NO: 6014753 - DNA, 25 bp, Homo sapien
aaataataacagtgatatataagtc

SEQ ID NO: 6014754 - DNA, 25 bp, Homo sapien
ctatcggtttctctattttcatcaa

SEQ ID NO: 6014755 - DNA, 25 bp, Homo sapien
ttgtttcaagaacatgacgttttct

SEQ ID NO: 6014756 - DNA, 25 bp, Homo sapien
caatataggtcatttggttttaaat

SEQ ID NO: 6014757 - DNA, 25 bp, Homo sapien
tctgcatgtcaaatagtatctctct

SEQ ID NO: 6014758 - DNA, 25 bp, Homo sapien
ttgaggttgaaaatgcagattgtgt

SEQ ID NO: 6014759 - DNA, 25 bp, Homo sapien
gtgacaaactcacatatgcataaaa

SEQ ID NO: 6014760 - DNA, 25 bp, Homo sapien
atctctcttttagtgacaaactcac

SEQ ID NO: 6014761 - DNA, 25 bp, Homo sapien
cattactctttttgtttcaagaaca

SEQ ID NO: 6014762 - DNA, 25 bp, Homo sapien
gcaatttgaacagataaaagtatca

SEQ ID NO: 6014763 - DNA, 25 bp, Homo sapien
caagaacatgacgttttcttgacgt

SEQ ID NO: 6014764 - DNA, 25 bp, Homo sapien
tttttgtgaaaggataacattactc

SEQ ID NO: 6014765 - DNA, 25 bp, Homo sapien
ctctttttgtttcaagaacatgacg

SEQ ID NO: 6014766 - DNA, 25 bp, Homo sapien
aagtatcatgatatcagtagtttgg

SEQ ID NO: 6014767 - DNA, 25 bp, Homo sapien
catatgcataaaaaataaactatat

SEQ ID NO: 6014768 - DNA, 25 bp, Homo sapien
ttgaaaatgcagattgtgtgtttgt

SEQ ID NO: 6014769 - DNA, 25 bp, Homo sapien
ttttcagagcaacataattgtaaag

SEQ ID NO: 6014770 - DNA, 25 bp, Homo sapien
cataaaaaataaactatattgatca

SEQ ID NO: 6014771 - DNA, 25 bp, Homo sapien
attgtgtgtttgttaggttagtgcc

SEQ ID NO: 6014772 - DNA, 25 bp, Homo sapien
aaataaactatattgatcagatttc

SEQ ID NO: 6014773 - DNA, 25 bp, Homo sapien
ataagtcttgctaactggcaatttg

SEQ ID NO: 6014774 - DNA, 25 bp, Homo sapien
cagatttcagttgttaaccaaatta

SEQ ID NO: 6014775 - DNA, 25 bp, Homo sapien
tattttattttttgtgatatgttcg

SEQ ID NO: 6014776 - DNA, 25 bp, Homo sapien
aactcacatatgcataaaaaataaa

SEQ ID NO: 6014777 - DNA, 25 bp, Homo sapien
cgaagctacaaatgcaaaatctgca

SEQ ID NO: 6014778 - DNA, 25 bp, Homo sapien
tatacaaaacaaacaatcaatatag

SEQ ID NO: 6014779 - DNA, 25 bp, Homo sapien
tgtcaaatagtatctctcttttagt

SEQ ID NO: 6014780 - DNA, 25 bp, Homo sapien
ggataacattactctttttgtttca

SEQ ID NO: 6014781 - DNA, 25 bp, Homo sapien
taacagtgatatataagtcttgcta

SEQ ID NO: 6014782 - DNA, 25 bp, Homo sapien
cttctcccccccgttcagctatcgg

SEQ ID NO: 6014783 - DNA, 25 bp, Homo sapien
ttgtgatatgttcgatttttttttg

SEQ ID NO: 6014784 - DNA, 25 bp, Homo sapien
atggcctcatcaatttctgctgctg

SEQ ID NO: 6014785 - DNA, 25 bp, Homo sapien
caaacacgccaagcgtcctgataag

SEQ ID NO: 6014786 - DNA, 25 bp, Homo sapien
ccccggtggccggagatgcacgtcg

SEQ ID NO: 6014787 - DNA, 25 bp, Homo sapien
ctgttgaaaattcggtgtctgctgt

SEQ ID NO: 6014788 - DNA, 25 bp, Homo sapien
acgtcgatgttcgacgggaatctag

SEQ ID NO: 6014789 - DNA, 25 bp, Homo sapien
ctgctgctgttgaaaattcggtgtc

SEQ ID NO: 6014790 - DNA, 25 bp, Homo sapien
tcatcaatttctgctgctgctgctg

SEQ ID NO: 6014791 - DNA, 25 bp, Homo sapien
atgttcgacgggaatctagacattg

SEQ ID NO: 6014792 - DNA, 25 bp, Homo sapien
cgatgtgattcaatggcctcatcaa

SEQ ID NO: 6014793 - DNA, 25 bp, Homo sapien
gaggattaatgggtcggttctgaat

SEQ ID NO: 6014794 - DNA, 25 bp, Homo sapien
gcgtcctgataagcgcattgaagct

SEQ ID NO: 6014795 - DNA, 25 bp, Homo sapien
ttgttgtctctgttgttgttgtagt

SEQ ID NO: 6014796 - DNA, 25 bp, Homo sapien
gactagaaaactatactaattgctg

SEQ ID NO: 6014797 - DNA, 25 bp, Homo sapien
gaatttcatcaaaagtatataaagt

SEQ ID NO: 6014798 - DNA, 25 bp, Homo sapien
acaacaaacctctcgcaagcatctt

SEQ ID NO: 6014799 - DNA, 25 bp, Homo sapien
gacattgctgcttgttgctgttgtt

SEQ ID NO: 6014800 - DNA, 25 bp, Homo sapien
aaaattcggtgtctgctgtcccaaa

SEQ ID NO: 6014801 - DNA, 25 bp, Homo sapien
cggctttgatgaatttcatcaaaag

SEQ ID NO: 6014802 - DNA, 25 bp, Homo sapien
cagggcgactcctaaggagataaca

SEQ ID NO: 6014803 - DNA, 25 bp, Homo sapien
aacctctcgcaagcatcttcgagag

SEQ ID NO: 6014804 - DNA, 25 bp, Homo sapien
gaagctcgatgtgattcaatggcct

SEQ ID NO: 6014805 - DNA, 25 bp, Homo sapien
tttttgcaattgctgcaatagaagc

SEQ ID NO: 6014806 - DNA, 25 bp, Homo sapien
ttgctgcggctttgatgaatttcat

SEQ ID NO: 6014807 - DNA, 25 bp, Homo sapien
acattctgctgctgctgctgttgaa

SEQ ID NO: 6014808 - DNA, 25 bp, Homo sapien
tagaagcatttgttgttgtctctgt

SEQ ID NO: 6014809 - DNA, 25 bp, Homo sapien
ttgttgtttttgcaattgctgcaat

SEQ ID NO: 6014810 - DNA, 25 bp, Homo sapien
catcaaaagtatataaagtttgata

SEQ ID NO: 6014811 - DNA, 25 bp, Homo sapien
gatcattaaattcaattattaatag

SEQ ID NO: 6014812 - DNA, 25 bp, Homo sapien
tcgagagaagagaagggttgtttaa

SEQ ID NO: 6014813 - DNA, 25 bp, Homo sapien
actcgatacattctgctgctgctgc

SEQ ID NO: 6014814 - DNA, 25 bp, Homo sapien
ctgctgactcgatacattctgctgc

SEQ ID NO: 6014815 - DNA, 25 bp, Homo sapien
taggggtaggattctgctgaggcgg

SEQ ID NO: 6014816 - DNA, 25 bp, Homo sapien
gataagcgcattgaagctcgatgtg

SEQ ID NO: 6014817 - DNA, 25 bp, Homo sapien
tgatgaatttcatcaaaagtatata

SEQ ID NO: 6014818 - DNA, 25 bp, Homo sapien
gatagatcaatgtttgatatcatta

SEQ ID NO: 6014819 - DNA, 25 bp, Homo sapien
acccaaaaaaacgtgatagatcatt

SEQ ID NO: 6014820 - DNA, 25 bp, Homo sapien
tctgctgaggcggaggattaatggg

SEQ ID NO: 6014821 - DNA, 25 bp, Homo sapien
gtatataaagtttgataatttgcat

SEQ ID NO: 6014822 - DNA, 25 bp, Homo sapien
ttgctgcatcatctgctgactcgat

SEQ ID NO: 6014823 - DNA, 25 bp, Homo sapien
gactcctaaggagataacaactcaa

SEQ ID NO: 6014824 - DNA, 25 bp, Homo sapien
tttgatacaacaaacctctcgcaag

SEQ ID NO: 6014825 - DNA, 25 bp, Homo sapien
aaattggggtgacaaacacgccaag

SEQ ID NO: 6014826 - DNA, 25 bp, Homo sapien
cggtgtctgctgtcccaaattaggg

SEQ ID NO: 6014827 - DNA, 25 bp, Homo sapien
ttgatatcattaaattgagactaga

SEQ ID NO: 6014828 - DNA, 25 bp, Homo sapien
tggccggagatgcacgtcgatgttc

SEQ ID NO: 6014829 - DNA, 25 bp, Homo sapien
tgttgttgttgttgctgcatcatct

SEQ ID NO: 6014830 - DNA, 25 bp, Homo sapien
catcatctgctgactcgatacattc

SEQ ID NO: 6014831 - DNA, 25 bp, Homo sapien
aatctagacattgctgcttgttgct

SEQ ID NO: 6014832 - DNA, 25 bp, Homo sapien
agatgcacgtcgatgttcgacggga

SEQ ID NO: 6014833 - DNA, 25 bp, Homo sapien
aattgagactagaaaactatactaa

SEQ ID NO: 6014834 - DNA, 25 bp, Homo sapien
tgataatttgcatttgatacaacaa

SEQ ID NO: 6014835 - DNA, 25 bp, Homo sapien
gcatcttcgagagaagagaagggtt

SEQ ID NO: 6014836 - DNA, 25 bp, Homo sapien
gggtgacaaacacgccaagcgtcct

SEQ ID NO: 6014837 - DNA, 25 bp, Homo sapien
ttaatagatagatcaatgtttgata

SEQ ID NO: 6014838 - DNA, 25 bp, Homo sapien
tcgcaagcatcttcgagagaagaga

SEQ ID NO: 6014839 - DNA, 25 bp, Homo sapien
tcattaaattgagactagaaaacta

SEQ ID NO: 6014840 - DNA, 25 bp, Homo sapien
tttgcatttgatacaacaaacctct

SEQ ID NO: 6014841 - DNA, 25 bp, Homo sapien
aaattcaattattaatagatagatc

SEQ ID NO: 6014842 - DNA, 25 bp, Homo sapien
tgaggcggaggattaatgggtcggt

SEQ ID NO: 6014843 - DNA, 25 bp, Homo sapien
tcggttctgaatcaaccccggtggc

SEQ ID NO: 6014844 - DNA, 25 bp, Homo sapien
aagcctcagggcgactcctaaggag

SEQ ID NO: 6014845 - DNA, 25 bp, Homo sapien
taatgggtcggttctgaatcaaccc

SEQ ID NO: 6014846 - DNA, 25 bp, Homo sapien
aaaaacgtgatagatcattaaattc

SEQ ID NO: 6014847 - DNA, 25 bp, Homo sapien
aaagtttgataatttgcatttgata

SEQ ID NO: 6014848 - DNA, 25 bp, Homo sapien
gattcaatggcctcatcaatttctg

SEQ ID NO: 6014849 - DNA, 25 bp, Homo sapien
ctgctgtcccaaattagggttaggg

SEQ ID NO: 6014850 - DNA, 25 bp, Homo sapien
gctgcttgttgctgttgttgttttt

SEQ ID NO: 6014851 - DNA, 25 bp, Homo sapien
gacgggaatctagacattgctgctt

SEQ ID NO: 6014852 - DNA, 25 bp, Homo sapien
tgctgctgctgctgttgaaaattcg

SEQ ID NO: 6014853 - DNA, 25 bp, Homo sapien
ctgctgctgctgttgttgttgttgc

SEQ ID NO: 6014854 - DNA, 25 bp, Homo sapien
caattgctgcaatagaagcatttgt

SEQ ID NO: 6014855 - DNA, 25 bp, Homo sapien
taggattctgctgaggcggaggatt

SEQ ID NO: 6014856 - DNA, 25 bp, Homo sapien
tgctgctgttgttgttgttgctgca

SEQ ID NO: 6014857 - DNA, 25 bp, Homo sapien
tttctgctgctgctgctgttgttgt

SEQ ID NO: 6014858 - DNA, 25 bp, Homo sapien
caattattaatagatagatcaatgt

SEQ ID NO: 6014859 - DNA, 25 bp, Homo sapien
caatgtttgatatcattaaattgag

SEQ ID NO: 6014860 - DNA, 25 bp, Homo sapien
ttgttgttgctgcatcatctgctga

SEQ ID NO: 6014861 - DNA, 25 bp, Homo sapien
aaaactatactaattgctgcggctt

SEQ ID NO: 6014862 - DNA, 25 bp, Homo sapien
taaggagataacaactcaaaaccca

SEQ ID NO: 6014863 - DNA, 25 bp, Homo sapien
cgccaagcgtcctgataagcgcatt

SEQ ID NO: 6014864 - DNA, 25 bp, Homo sapien
catttgttgttgtctctgttgttgt

SEQ ID NO: 6014865 - DNA, 25 bp, Homo sapien
atactaattgctgcggctttgatga

SEQ ID NO: 6014866 - DNA, 25 bp, Homo sapien
cgtgatagatcattaaattcaatta

SEQ ID NO: 6014867 - DNA, 25 bp, Homo sapien
ctgcaatagaagcatttgttgttgt

SEQ ID NO: 6014868 - DNA, 25 bp, Homo sapien
tagggttaggggtaggattctgctg

SEQ ID NO: 6014869 - DNA, 25 bp, Homo sapien
ttctgaatcaaccccggtggccgga

SEQ ID NO: 6014870 - DNA, 25 bp, Homo sapien
tgtctctgttgttgttgtagttggt

SEQ ID NO: 6014871 - DNA, 25 bp, Homo sapien
cgcattgaagctcgatgtgattcaa

SEQ ID NO: 6014872 - DNA, 25 bp, Homo sapien
aatcaaccccggtggccggagatgc

SEQ ID NO: 6014873 - DNA, 25 bp, Homo sapien
aacttttattattcccgcagagcat

SEQ ID NO: 6014874 - DNA, 25 bp, Homo sapien
agcctttgaagtggcggaattagga

SEQ ID NO: 6014875 - DNA, 25 bp, Homo sapien
gtttaggtctacttgtcacgggatc

SEQ ID NO: 6014876 - DNA, 25 bp, Homo sapien
gaagtggcggaattaggagccatca

SEQ ID NO: 6014877 - DNA, 25 bp, Homo sapien
tgtcaaaatccagattatggggttt

SEQ ID NO: 6014878 - DNA, 25 bp, Homo sapien
acgagcatgaccaagataacaatgc

SEQ ID NO: 6014879 - DNA, 25 bp, Homo sapien
tcccgcagagcatttcccggctagg

SEQ ID NO: 6014880 - DNA, 25 bp, Homo sapien
cgttagaggagaacgagcatgacca

SEQ ID NO: 6014881 - DNA, 25 bp, Homo sapien
gtacagttggtattggtcaaagcac

SEQ ID NO: 6014882 - DNA, 25 bp, Homo sapien
gctttcttgattcttggtggcgttt

SEQ ID NO: 6014883 - DNA, 25 bp, Homo sapien
gaagatcgttagaggagaacgagca

SEQ ID NO: 6014884 - DNA, 25 bp, Homo sapien
atttcttcaccaaggaaactatggg

SEQ ID NO: 6014885 - DNA, 25 bp, Homo sapien
agagcatttcccggctaggtttagg

SEQ ID NO: 6014886 - DNA, 25 bp, Homo sapien
acaatgctgagtctgaagatgagcc

SEQ ID NO: 6014887 - DNA, 25 bp, Homo sapien
atcgctgcttgctccaccattcccg

SEQ ID NO: 6014888 - DNA, 25 bp, Homo sapien
ctctggtgccgcgggtaagcttggg

SEQ ID NO: 6014889 - DNA, 25 bp, Homo sapien
aagcgatgataaaaaccagatttat

SEQ ID NO: 6014890 - DNA, 25 bp, Homo sapien
tgccgcgggtaagcttggggctatt

SEQ ID NO: 6014891 - DNA, 25 bp, Homo sapien
gggtaagcttggggctattgtgggc

SEQ ID NO: 6014892 - DNA, 25 bp, Homo sapien
cttttgcaattttggtcccaacact

SEQ ID NO: 6014893 - DNA, 25 bp, Homo sapien
tcaccaaggaaactatgggaagatc

SEQ ID NO: 6014894 - DNA, 25 bp, Homo sapien
ctgaagatgagccacagattgttga

SEQ ID NO: 6014895 - DNA, 25 bp, Homo sapien
gtaaaccgtatgagaattgctttct

SEQ ID NO: 6014896 - DNA, 25 bp, Homo sapien
catcgacaagataggtcgtgtcaaa

SEQ ID NO: 6014897 - DNA, 25 bp, Homo sapien
aagataacaatgctgagtctgaaga

SEQ ID NO: 6014898 - DNA, 25 bp, Homo sapien
ttcttcttttgcaattttggtccca

SEQ ID NO: 6014899 - DNA, 25 bp, Homo sapien
ggttattggttcacagtttacttca

SEQ ID NO: 6014900 - DNA, 25 bp, Homo sapien
ccgaagtaaaccgtatgagaattgc

SEQ ID NO: 6014901 - DNA, 25 bp, Homo sapien
tccaccattcccggttattggttca

SEQ ID NO: 6014902 - DNA, 25 bp, Homo sapien
caagaagatggaaagcgatgataaa

SEQ ID NO: 6014903 - DNA, 25 bp, Homo sapien
cttggtggcgtttgcattgctggaa

SEQ ID NO: 6014904 - DNA, 25 bp, Homo sapien
gcactgttgggttcttgtgggctac

SEQ ID NO: 6014905 - DNA, 25 bp, Homo sapien
tgataaaaaccagatttatcccgaa

SEQ ID NO: 6014906 - DNA, 25 bp, Homo sapien
tggccgttatttatttagtcgctgg

SEQ ID NO: 6014907 - DNA, 25 bp, Homo sapien
ttgggttcttgtgggctaccaagaa

SEQ ID NO: 6014908 - DNA, 25 bp, Homo sapien
ggctaccaagaagatggaaagcgat

SEQ ID NO: 6014909 - DNA, 25 bp, Homo sapien
aaagcacgagcataataataaaggc

SEQ ID NO: 6014910 - DNA, 25 bp, Homo sapien
tcttggtgacgtatttcttcaccaa

SEQ ID NO: 6014911 - DNA, 25 bp, Homo sapien
caattttggtcccaacactacaact

SEQ ID NO: 6014912 - DNA, 25 bp, Homo sapien
ttggtcaaagcacgagcataataat

SEQ ID NO: 6014913 - DNA, 25 bp, Homo sapien
attatggggtttttcttcatggccg

SEQ ID NO: 6014914 - DNA, 25 bp, Homo sapien
atccagattatggggtttttcttca

SEQ ID NO: 6014915 - DNA, 25 bp, Homo sapien
ggctattgtgggcactgttgggttc

SEQ ID NO: 6014916 - DNA, 25 bp, Homo sapien
ttgtcacgggatctctggtgccgcg

SEQ ID NO: 6014917 - DNA, 25 bp, Homo sapien
atgaccaagataacaatgctgagtc

SEQ ID NO: 6014918 - DNA, 25 bp, Homo sapien
cttgtgggctaccaagaagatggaa

SEQ ID NO: 6014919 - DNA, 25 bp, Homo sapien
ttgattcttggtggcgtttgcattg

SEQ ID NO: 6014920 - DNA, 25 bp, Homo sapien
gcattgctggaatcttggtgacgta

SEQ ID NO: 6014921 - DNA, 25 bp, Homo sapien
taaaggcttcatggttctctacggt

SEQ ID NO: 6014922 - DNA, 25 bp, Homo sapien
cactacaacttttattattcccgca

SEQ ID NO: 6014923 - DNA, 25 bp, Homo sapien
ttatcccgaagtaaaccgtatgaga

SEQ ID NO: 6014924 - DNA, 25 bp, Homo sapien
cgtatgagaattgctttcttgattc

SEQ ID NO: 6014925 - DNA, 25 bp, Homo sapien
ttggttcacagtttacttcatcgac

SEQ ID NO: 6014926 - DNA, 25 bp, Homo sapien
gcttgctccaccattcccggttatt

SEQ ID NO: 6014927 - DNA, 25 bp, Homo sapien
tgacgtatttcttcaccaaggaaac

SEQ ID NO: 6014928 - DNA, 25 bp, Homo sapien
cacagtttacttcatcgacaagata

SEQ ID NO: 6014929 - DNA, 25 bp, Homo sapien
aggtcgtgtcaaaatccagattatg

SEQ ID NO: 6014930 - DNA, 25 bp, Homo sapien
ctggaatcttggtgacgtatttctt

SEQ ID NO: 6014931 - DNA, 25 bp, Homo sapien
ttggtattggtcaaagcacgagcat

SEQ ID NO: 6014932 - DNA, 25 bp, Homo sapien
atgagccacagattgttgacgggca

SEQ ID NO: 6014933 - DNA, 25 bp, Homo sapien
aggagaacgagcatgaccaagataa

SEQ ID NO: 6014934 - DNA, 25 bp, Homo sapien
tatttatttagtcgctggtattccg

SEQ ID NO: 6014935 - DNA, 25 bp, Homo sapien
gccatcatcgctgcttgctccacca

SEQ ID NO: 6014936 - DNA, 25 bp, Homo sapien
cattcccggttattggttcacagtt

SEQ ID NO: 6014937 - DNA, 25 bp, Homo sapien
gcttggggctattgtgggcactgtt

SEQ ID NO: 6014938 - DNA, 25 bp, Homo sapien
cacagattgttgacgggcaatcctc

SEQ ID NO: 6014939 - DNA, 25 bp, Homo sapien
aggaaactatgggaagatcgttaga

SEQ ID NO: 6014940 - DNA, 25 bp, Homo sapien
gatggaaagcgatgataaaaaccag

SEQ ID NO: 6014941 - DNA, 25 bp, Homo sapien
gcgtttgcattgctggaatcttggt

SEQ ID NO: 6014942 - DNA, 25 bp, Homo sapien
cgagcataataataaaggcttcatg

SEQ ID NO: 6014943 - DNA, 25 bp, Homo sapien
ctatgggaagatcgttagaggagaa

SEQ ID NO: 6014944 - DNA, 25 bp, Homo sapien
gtctacttgtcacgggatctctggt

SEQ ID NO: 6014945 - DNA, 25 bp, Homo sapien
ttacttcatcgacaagataggtcgt

SEQ ID NO: 6014946 - DNA, 25 bp, Homo sapien
tttagtcgctggtattccgtacagt

SEQ ID NO: 6014947 - DNA, 25 bp, Homo sapien
taataataaaggcttcatggttctc

SEQ ID NO: 6014948 - DNA, 25 bp, Homo sapien
tattattcccgcagagcatttcccg

SEQ ID NO: 6014949 - DNA, 25 bp, Homo sapien
ttaggagccatcatcgctgcttgct

SEQ ID NO: 6014950 - DNA, 25 bp, Homo sapien
cgctggtattccgtacagttggtat

SEQ ID NO: 6014951 - DNA, 25 bp, Homo sapien
tattccgtacagttggtattggtca

SEQ ID NO: 6014952 - DNA, 25 bp, Homo sapien
ctgagtctgaagatgagccacagat

SEQ ID NO: 6014953 - DNA, 25 bp, Homo sapien
caagataggtcgtgtcaaaatccag

SEQ ID NO: 6014954 - DNA, 25 bp, Homo sapien
cgggatctctggtgccgcgggtaag

SEQ ID NO: 6014955 - DNA, 25 bp, Homo sapien
cttcatggttctctacggtttggtt

SEQ ID NO: 6014956 - DNA, 25 bp, Homo sapien
gcggaattaggagccatcatcgctg

SEQ ID NO: 6014957 - DNA, 25 bp, Homo sapien
agaattgctttcttgattcttggtg

SEQ ID NO: 6014958 - DNA, 25 bp, Homo sapien
tcttcatggccgttatttatttagt

SEQ ID NO: 6014959 - DNA, 25 bp, Homo sapien
ggctaggtttaggtctacttgtcac

SEQ ID NO: 6014960 - DNA, 25 bp, Homo sapien
attgtgggcactgttgggttcttgt

SEQ ID NO: 6014961 - DNA, 25 bp, Homo sapien
tttgggatagaaacaggaatctagc

SEQ ID NO: 6014962 - DNA, 25 bp, Homo sapien
tgcttataggtaccctattgagtgt

SEQ ID NO: 6014963 - DNA, 25 bp, Homo sapien
agtgcgtttccagccaaaagcatag

SEQ ID NO: 6014964 - DNA, 25 bp, Homo sapien
aggtaccctattgagtgtgtcccca

SEQ ID NO: 6014965 - DNA, 25 bp, Homo sapien
ctctactttgttccttgagaaatga

SEQ ID NO: 6014966 - DNA, 25 bp, Homo sapien
gtggagatttctgtgtcagcccaaa

SEQ ID NO: 6014967 - DNA, 25 bp, Homo sapien
caatacctcaaaacagagtaacaaa

SEQ ID NO: 6014968 - DNA, 25 bp, Homo sapien
tttccagccaaaagcatagccgtag

SEQ ID NO: 6014969 - DNA, 25 bp, Homo sapien
agatacatatcggaatatcatgtga

SEQ ID NO: 6014970 - DNA, 25 bp, Homo sapien
gatcttcctaaatctctactttgtt

SEQ ID NO: 6014971 - DNA, 25 bp, Homo sapien
cctgactcttaagccttctgttaat

SEQ ID NO: 6014972 - DNA, 25 bp, Homo sapien
ggccgatgaaacagatacatatcgg

SEQ ID NO: 6014973 - DNA, 25 bp, Homo sapien
agatgttcaaagagtttcagtgctc

SEQ ID NO: 6014974 - DNA, 25 bp, Homo sapien
acaatctccctcgtgaactctatcg

SEQ ID NO: 6014975 - DNA, 25 bp, Homo sapien
tgaaagcccacagatggtaagcgtc

SEQ ID NO: 6014976 - DNA, 25 bp, Homo sapien
tttttcatgaaagcccacagatggt

SEQ ID NO: 6014977 - DNA, 25 bp, Homo sapien
cccacagatggtaagcgtcctgact

SEQ ID NO: 6014978 - DNA, 25 bp, Homo sapien
gttattgctaagaccggcctccaaa

SEQ ID NO: 6014979 - DNA, 25 bp, Homo sapien
taaacaaaatatctgaagagatgtt

SEQ ID NO: 6014980 - DNA, 25 bp, Homo sapien
atttctgtgtcagcccaaatgttga

SEQ ID NO: 6014981 - DNA, 25 bp, Homo sapien
ctcttcgcttgtcagcttaatgatc

SEQ ID NO: 6014982 - DNA, 25 bp, Homo sapien
tgagtgtgtccccaatacctcaaaa

SEQ ID NO: 6014983 - DNA, 25 bp, Homo sapien
ccagactatgccaacagtgttattg

SEQ ID NO: 6014984 - DNA, 25 bp, Homo sapien
gtcagcccaaatgttgaaggtgcaa

SEQ ID NO: 6014985 - DNA, 25 bp, Homo sapien
catttatataaagattctactagaa

SEQ ID NO: 6014986 - DNA, 25 bp, Homo sapien
gccgtagaggagaggtgcctttggg

SEQ ID NO: 6014987 - DNA, 25 bp, Homo sapien
tctagctgcttataggtaccctatt

SEQ ID NO: 6014988 - DNA, 25 bp, Homo sapien
gccaaaagcatagccgtagaggaga

SEQ ID NO: 6014989 - DNA, 25 bp, Homo sapien
tgaaacagatacatatcggaatatc

SEQ ID NO: 6014990 - DNA, 25 bp, Homo sapien
ctagaatcatgtaaaatgactatga

SEQ ID NO: 6014991 - DNA, 25 bp, Homo sapien
tgttagttctctcccctttttcatg

SEQ ID NO: 6014992 - DNA, 25 bp, Homo sapien
gatggtaagcgtcctgactcttaag

SEQ ID NO: 6014993 - DNA, 25 bp, Homo sapien
tgtccccaatacctcaaaacagagt

SEQ ID NO: 6014994 - DNA, 25 bp, Homo sapien
ctgcattctactccagactatgcca

SEQ ID NO: 6014995 - DNA, 25 bp, Homo sapien
ctcaaaacagagtaacaaaaacatt

SEQ ID NO: 6014996 - DNA, 25 bp, Homo sapien
gaaacactaaacaaaatatctgaag

SEQ ID NO: 6014997 - DNA, 25 bp, Homo sapien
ctgttgtctctaggggaagtgcgtt

SEQ ID NO: 6014998 - DNA, 25 bp, Homo sapien
tcttaagccttctgttaatctcttc

SEQ ID NO: 6014999 - DNA, 25 bp, Homo sapien
ggaatatcatgtgatcttcctaaat

SEQ ID NO: 6015000 - DNA, 25 bp, Homo sapien
aagcgtcctgactcttaagccttct

SEQ ID NO: 6015001 - DNA, 25 bp, Homo sapien
tcaaagagtttcagtgctcaggcct

SEQ ID NO: 6015002 - DNA, 25 bp, Homo sapien
agcatagccgtagaggagaggtgcc

SEQ ID NO: 6015003 - DNA, 25 bp, Homo sapien
aacagtgttattgctaagaccggcc

SEQ ID NO: 6015004 - DNA, 25 bp, Homo sapien
tatgccaacagtgttattgctaaga

SEQ ID NO: 6015005 - DNA, 25 bp, Homo sapien
ttgaaggtgcaattctcagtggctt

SEQ ID NO: 6015006 - DNA, 25 bp, Homo sapien
accggcctccaaaagctatcgagtg

SEQ ID NO: 6015007 - DNA, 25 bp, Homo sapien
ctctaggggaagtgcgtttccagcc

SEQ ID NO: 6015008 - DNA, 25 bp, Homo sapien
attctcagtggcttagctgcagcgt

SEQ ID NO: 6015009 - DNA, 25 bp, Homo sapien
ggtgcaattctcagtggcttagctg

SEQ ID NO: 6015010 - DNA, 25 bp, Homo sapien
actatgacaatctccctcgtgaact

SEQ ID NO: 6015011 - DNA, 25 bp, Homo sapien
cagacttctagctgcttataggtac

SEQ ID NO: 6015012 - DNA, 25 bp, Homo sapien
tctatcggccgatgaaacagataca

SEQ ID NO: 6015013 - DNA, 25 bp, Homo sapien
gcagcgtcaaagcttttgcagactt

SEQ ID NO: 6015014 - DNA, 25 bp, Homo sapien
tcccctttttcatgaaagcccacag

SEQ ID NO: 6015015 - DNA, 25 bp, Homo sapien
tcatgtaaaatgactatgacaatct

SEQ ID NO: 6015016 - DNA, 25 bp, Homo sapien
ctaaatctctactttgttccttgag

SEQ ID NO: 6015017 - DNA, 25 bp, Homo sapien
ctccaaaagctatcgagtgaaacac

SEQ ID NO: 6015018 - DNA, 25 bp, Homo sapien
tataaagattctactagaatcatgt

SEQ ID NO: 6015019 - DNA, 25 bp, Homo sapien
ccaaatgttgaaggtgcaattctca

SEQ ID NO: 6015020 - DNA, 25 bp, Homo sapien
acaggaatctagcaatctgtggaga

SEQ ID NO: 6015021 - DNA, 25 bp, Homo sapien
agtgctcaggccttgttagttctct

SEQ ID NO: 6015022 - DNA, 25 bp, Homo sapien
gttctctcccctttttcatgaaagc

SEQ ID NO: 6015023 - DNA, 25 bp, Homo sapien
tgttaatctcttcgcttgtcagctt

SEQ ID NO: 6015024 - DNA, 25 bp, Homo sapien
aagctatcgagtgaaacactaaaca

SEQ ID NO: 6015025 - DNA, 25 bp, Homo sapien
tcatgtgatcttcctaaatctctac

SEQ ID NO: 6015026 - DNA, 25 bp, Homo sapien
ctgaagagatgttcaaagagtttca

SEQ ID NO: 6015027 - DNA, 25 bp, Homo sapien
tcaaagcttttgcagacttctagct

SEQ ID NO: 6015028 - DNA, 25 bp, Homo sapien
aaaatgactatgacaatctccctcg

SEQ ID NO: 6015029 - DNA, 25 bp, Homo sapien
tctactccagactatgccaacagtg

SEQ ID NO: 6015030 - DNA, 25 bp, Homo sapien
agtttcagtgctcaggccttgttag

SEQ ID NO: 6015031 - DNA, 25 bp, Homo sapien
atctagcaatctgtggagatttctg

SEQ ID NO: 6015032 - DNA, 25 bp, Homo sapien
cagcttaatgatctgttgtctctag

SEQ ID NO: 6015033 - DNA, 25 bp, Homo sapien
aaatatctgaagagatgttcaaaga

SEQ ID NO: 6015034 - DNA, 25 bp, Homo sapien
tccctcgtgaactctatcggccgat

SEQ ID NO: 6015035 - DNA, 25 bp, Homo sapien
gccttctgttaatctcttcgcttgt

SEQ ID NO: 6015036 - DNA, 25 bp, Homo sapien
cctattgagtgtgtccccaatacct

SEQ ID NO: 6015037 - DNA, 25 bp, Homo sapien
catatcggaatatcatgtgatcttc

SEQ ID NO: 6015038 - DNA, 25 bp, Homo sapien
gctaagaccggcctccaaaagctat

SEQ ID NO: 6015039 - DNA, 25 bp, Homo sapien
cgtgaactctatcggccgatgaaac

SEQ ID NO: 6015040 - DNA, 25 bp, Homo sapien
ttagctgcagcgtcaaagcttttgc

SEQ ID NO: 6015041 - DNA, 25 bp, Homo sapien
agtggcttagctgcagcgtcaaagc

SEQ ID NO: 6015042 - DNA, 25 bp, Homo sapien
aggagaggtgcctttgggatagaaa

SEQ ID NO: 6015043 - DNA, 25 bp, Homo sapien
ggtgcctttgggatagaaacaggaa

SEQ ID NO: 6015044 - DNA, 25 bp, Homo sapien
cttttgcagacttctagctgcttat

SEQ ID NO: 6015045 - DNA, 25 bp, Homo sapien
aatgatctgttgtctctaggggaag

SEQ ID NO: 6015046 - DNA, 25 bp, Homo sapien
caatctgtggagatttctgtgtcag

SEQ ID NO: 6015047 - DNA, 25 bp, Homo sapien
tggatactgcattctactccagact

SEQ ID NO: 6015048 - DNA, 25 bp, Homo sapien
cagagtaacaaaaacatttatataa

SEQ ID NO: 6015049 - DNA, 25 bp, Homo sapien
tcgagtgaaacactaaacaaaatat

SEQ ID NO: 6015050 - DNA, 25 bp, Homo sapien
atagaaacaggaatctagcaatctg

SEQ ID NO: 6015051 - DNA, 25 bp, Homo sapien
gggaagtgcgtttccagccaaaagc

SEQ ID NO: 6015052 - DNA, 25 bp, Homo sapien
gcttgtcagcttaatgatctgttgt

SEQ ID NO: 6015053 - DNA, 25 bp, Homo sapien
attctactagaatcatgtaaaatga

SEQ ID NO: 6015054 - DNA, 25 bp, Homo sapien
caggccttgttagttctctcccctt

SEQ ID NO: 6015055 - DNA, 25 bp, Homo sapien
aaaccattggatctctttttctggt

SEQ ID NO: 6015056 - DNA, 25 bp, Homo sapien
tctcaccaaggtaaaccattggatc

SEQ ID NO: 6015057 - DNA, 25 bp, Homo sapien
accgaggcatcactcgatgaatggc

SEQ ID NO: 6015058 - DNA, 25 bp, Homo sapien
atgaaacaagttaacttataaatgg

SEQ ID NO: 6015059 - DNA, 25 bp, Homo sapien
cagcggcgaatctgttttcctttta

SEQ ID NO: 6015060 - DNA, 25 bp, Homo sapien
ctcgaggttcgcttctctctttgta

SEQ ID NO: 6015061 - DNA, 25 bp, Homo sapien
agaagaactaaagtagagctgtttt

SEQ ID NO: 6015062 - DNA, 25 bp, Homo sapien
aggaactaggtctaccgaggcatca

SEQ ID NO: 6015063 - DNA, 25 bp, Homo sapien
caagtttaaagttcagtcttgagga

SEQ ID NO: 6015064 - DNA, 25 bp, Homo sapien
tcggtctcctcctcctcctcggtct

SEQ ID NO: 6015065 - DNA, 25 bp, Homo sapien
actaaagtagagctgttttgctcct

SEQ ID NO: 6015066 - DNA, 25 bp, Homo sapien
agacaatctttacttcttgtcataa

SEQ ID NO: 6015067 - DNA, 25 bp, Homo sapien
aaacattcctttgataatctcctct

SEQ ID NO: 6015068 - DNA, 25 bp, Homo sapien
ttttgttccagcattgtactcttta

SEQ ID NO: 6015069 - DNA, 25 bp, Homo sapien
gaataatctgattgaagggtatgtt

SEQ ID NO: 6015070 - DNA, 25 bp, Homo sapien
gtgattgaataatctgattgaaggg

SEQ ID NO: 6015071 - DNA, 25 bp, Homo sapien
gcatcactcgatgaatggctcgagg

SEQ ID NO: 6015072 - DNA, 25 bp, Homo sapien
ctcttcctcctcttcagtgtgattg

SEQ ID NO: 6015073 - DNA, 25 bp, Homo sapien
gataatctcctcttttaccagaaaa

SEQ ID NO: 6015074 - DNA, 25 bp, Homo sapien
tcctcctcggtctatgggcatacag

SEQ ID NO: 6015075 - DNA, 25 bp, Homo sapien
caaggtaaaccattggatctctttt

SEQ ID NO: 6015076 - DNA, 25 bp, Homo sapien
ctctttagacaatctttacttcttg

SEQ ID NO: 6015077 - DNA, 25 bp, Homo sapien
gggaactactttggccaagacatcg

SEQ ID NO: 6015078 - DNA, 25 bp, Homo sapien
gttcgcttctctctttgtactcttc

SEQ ID NO: 6015079 - DNA, 25 bp, Homo sapien
ctcctcatgaaacaagttaacttat

SEQ ID NO: 6015080 - DNA, 25 bp, Homo sapien
ctctttttctggttcatcatttgtg

SEQ ID NO: 6015081 - DNA, 25 bp, Homo sapien
tagactcagcttcggcgttttgaaa

SEQ ID NO: 6015082 - DNA, 25 bp, Homo sapien
agttcagtcttgaggaaatttaggg

SEQ ID NO: 6015083 - DNA, 25 bp, Homo sapien
tcggaatcggtctcctcctcctcct

SEQ ID NO: 6015084 - DNA, 25 bp, Homo sapien
gccaagacatcgtctgggaaaacaa

SEQ ID NO: 6015085 - DNA, 25 bp, Homo sapien
ttccagttgttatagactcagcttc

SEQ ID NO: 6015086 - DNA, 25 bp, Homo sapien
taggtctaccgaggcatcactcgat

SEQ ID NO: 6015087 - DNA, 25 bp, Homo sapien
ttctggttcatcatttgtgcagtta

SEQ ID NO: 6015088 - DNA, 25 bp, Homo sapien
tcttcagggaactactttggccaag

SEQ ID NO: 6015089 - DNA, 25 bp, Homo sapien
ttggatctctttttctggttcatca

SEQ ID NO: 6015090 - DNA, 25 bp, Homo sapien
cttctcagcggcgaatctgttttcc

SEQ ID NO: 6015091 - DNA, 25 bp, Homo sapien
tctgattgaagggtatgttttttta

SEQ ID NO: 6015092 - DNA, 25 bp, Homo sapien
tcagcgtctcaccaaggtaaaccat

SEQ ID NO: 6015093 - DNA, 25 bp, Homo sapien
tctttacttcttgtcataaatattc

SEQ ID NO: 6015094 - DNA, 25 bp, Homo sapien
ttgttatagactcagcttcggcgtt

SEQ ID NO: 6015095 - DNA, 25 bp, Homo sapien
actttggccaagacatcgtctggga

SEQ ID NO: 6015096 - DNA, 25 bp, Homo sapien
gcagttaaacattcctttgataatc

SEQ ID NO: 6015097 - DNA, 25 bp, Homo sapien
cagcttcggcgttttgaaagagttt

SEQ ID NO: 6015098 - DNA, 25 bp, Homo sapien
aatattctcctcatgaaacaagtta

SEQ ID NO: 6015099 - DNA, 25 bp, Homo sapien
cctcctcttcctcctcttcagtgtg

SEQ ID NO: 6015100 - DNA, 25 bp, Homo sapien
cactttttttgttccagcattgtac

SEQ ID NO: 6015101 - DNA, 25 bp, Homo sapien
tctctctttgtactcttcctcctct

SEQ ID NO: 6015102 - DNA, 25 bp, Homo sapien
tcctttgataatctcctcttttacc

SEQ ID NO: 6015103 - DNA, 25 bp, Homo sapien
tgaagggtatgtttttttatcttca

SEQ ID NO: 6015104 - DNA, 25 bp, Homo sapien
agaacaagaagaactaaagtagagc

SEQ ID NO: 6015105 - DNA, 25 bp, Homo sapien
ctcgatgaatggctcgaggttcgct

SEQ ID NO: 6015106 - DNA, 25 bp, Homo sapien
ttcagtgtgattgaataatctgatt

SEQ ID NO: 6015107 - DNA, 25 bp, Homo sapien
gtagagctgttttgctccttccagt

SEQ ID NO: 6015108 - DNA, 25 bp, Homo sapien
gaatggctcgaggttcgcttctctc

SEQ ID NO: 6015109 - DNA, 25 bp, Homo sapien
acatcgtctgggaaaacaaagaaca

SEQ ID NO: 6015110 - DNA, 25 bp, Homo sapien
ccaagttcagcgtctcaccaaggta

SEQ ID NO: 6015111 - DNA, 25 bp, Homo sapien
tgctccttccagttgttatagactc

SEQ ID NO: 6015112 - DNA, 25 bp, Homo sapien
tcctcctcctcctcggtctatgggc

SEQ ID NO: 6015113 - DNA, 25 bp, Homo sapien
tcggtctatgggcatacagccaagt

SEQ ID NO: 6015114 - DNA, 25 bp, Homo sapien
attgtactctttagacaatctttac

SEQ ID NO: 6015115 - DNA, 25 bp, Homo sapien
tccagcattgtactctttagacaat

SEQ ID NO: 6015116 - DNA, 25 bp, Homo sapien
ctcctcttcagtgtgattgaataat

SEQ ID NO: 6015117 - DNA, 25 bp, Homo sapien
aacgacactttttttgttccagcat

SEQ ID NO: 6015118 - DNA, 25 bp, Homo sapien
tctgggaaaacaaagaacaagaaga

SEQ ID NO: 6015119 - DNA, 25 bp, Homo sapien
tttgtactcttcctcctcttcctcc

SEQ ID NO: 6015120 - DNA, 25 bp, Homo sapien
atacagccaagttcagcgtctcacc

SEQ ID NO: 6015121 - DNA, 25 bp, Homo sapien
tatgggcatacagccaagttcagcg

SEQ ID NO: 6015122 - DNA, 25 bp, Homo sapien
gtcataaatattctcctcatgaaac

SEQ ID NO: 6015123 - DNA, 25 bp, Homo sapien
cttcttgtcataaatattctcctca

SEQ ID NO: 6015124 - DNA, 25 bp, Homo sapien
ttaacactcggaatcggtctcctcc

SEQ ID NO: 6015125 - DNA, 25 bp, Homo sapien
ttcatcatttgtgcagttaaacatt

SEQ ID NO: 6015126 - DNA, 25 bp, Homo sapien
ctgttttgctccttccagttgttat

SEQ ID NO: 6015127 - DNA, 25 bp, Homo sapien
caaggtggaagtaggaactaggtct

SEQ ID NO: 6015128 - DNA, 25 bp, Homo sapien
atttgtgcagttaaacattcctttg

SEQ ID NO: 6015129 - DNA, 25 bp, Homo sapien
tttatcttcagggaactactttggc

SEQ ID NO: 6015130 - DNA, 25 bp, Homo sapien
tggaagtaggaactaggtctaccga

SEQ ID NO: 6015131 - DNA, 25 bp, Homo sapien
tgttgtgtctaattttgaagttaac

SEQ ID NO: 6015132 - DNA, 25 bp, Homo sapien
gcactcttgaaaaagtcatgccgtt

SEQ ID NO: 6015133 - DNA, 25 bp, Homo sapien
aatcccagcagctgttacaaactca

SEQ ID NO: 6015134 - DNA, 25 bp, Homo sapien
tgttacaaactcaagaaggaccatg

SEQ ID NO: 6015135 - DNA, 25 bp, Homo sapien
aaaggacagggccatcgccaattgg

SEQ ID NO: 6015136 - DNA, 25 bp, Homo sapien
ttcaaacttgacttcagcacgtgtc

SEQ ID NO: 6015137 - DNA, 25 bp, Homo sapien
catcgccaattggagtattttgttg

SEQ ID NO: 6015138 - DNA, 25 bp, Homo sapien
ggtaagttttccgtatgttgcatca

SEQ ID NO: 6015139 - DNA, 25 bp, Homo sapien
atctttcgaaagggcagattggtag

SEQ ID NO: 6015140 - DNA, 25 bp, Homo sapien
gtacataaccttcgggcatggcact

SEQ ID NO: 6015141 - DNA, 25 bp, Homo sapien
gttgtctggtaaaaggacagggcca

SEQ ID NO: 6015142 - DNA, 25 bp, Homo sapien
ttggtaggacaggtaatggttgtct

SEQ ID NO: 6015143 - DNA, 25 bp, Homo sapien
aagaaggaccatgtggtctctcttt

SEQ ID NO: 6015144 - DNA, 25 bp, Homo sapien
cttgacttcagcacgtgtcttatag

SEQ ID NO: 6015145 - DNA, 25 bp, Homo sapien
agttcccgtcatctttgaaaaatat

SEQ ID NO: 6015146 - DNA, 25 bp, Homo sapien
gtggtctctcttttcgttgggatct

SEQ ID NO: 6015147 - DNA, 25 bp, Homo sapien
ctagttgaacgcttccatcttcaat

SEQ ID NO: 6015148 - DNA, 25 bp, Homo sapien
cttcaatgttgtgtctaattttgaa

SEQ ID NO: 6015149 - DNA, 25 bp, Homo sapien
gaacgcttccatcttcaatgttgtg

SEQ ID NO: 6015150 - DNA, 25 bp, Homo sapien
tagttctttcctgtacataaccttc

SEQ ID NO: 6015151 - DNA, 25 bp, Homo sapien
cagattggtaggacaggtaatggtt

SEQ ID NO: 6015152 - DNA, 25 bp, Homo sapien
caataccttttaactcgattctatt

SEQ ID NO: 6015153 - DNA, 25 bp, Homo sapien
ccatgatgtatacattgtgtgagtt

SEQ ID NO: 6015154 - DNA, 25 bp, Homo sapien
cagggccatcgccaattggagtatt

SEQ ID NO: 6015155 - DNA, 25 bp, Homo sapien
aagtcatgccgtttcatatgatctg

SEQ ID NO: 6015156 - DNA, 25 bp, Homo sapien
tgaagttaactttgattccattctt

SEQ ID NO: 6015157 - DNA, 25 bp, Homo sapien
ctttgaaaaatatagttctttcctg

SEQ ID NO: 6015158 - DNA, 25 bp, Homo sapien
ttgaagaccataaccgaaagtagtg

SEQ ID NO: 6015159 - DNA, 25 bp, Homo sapien
tttgttgataatggtctgctagttg

SEQ ID NO: 6015160 - DNA, 25 bp, Homo sapien
catcttctttaaaatcaataccttt

SEQ ID NO: 6015161 - DNA, 25 bp, Homo sapien
caattggagtattttgttgataatg

SEQ ID NO: 6015162 - DNA, 25 bp, Homo sapien
aaagcattgaagaccataaccgaaa

SEQ ID NO: 6015163 - DNA, 25 bp, Homo sapien
acaagtgttggccatggaacaggta

SEQ ID NO: 6015164 - DNA, 25 bp, Homo sapien
tgtattccaacttgtgtccaagaat

SEQ ID NO: 6015165 - DNA, 25 bp, Homo sapien
gataatggtctgctagttgaacgct

SEQ ID NO: 6015166 - DNA, 25 bp, Homo sapien
cgaaagggcagattggtaggacagg

SEQ ID NO: 6015167 - DNA, 25 bp, Homo sapien
ttccatcttcaatgttgtgtctaat

SEQ ID NO: 6015168 - DNA, 25 bp, Homo sapien
cgtcatctttgaaaaatatagttct

SEQ ID NO: 6015169 - DNA, 25 bp, Homo sapien
acgtgtcttatagttcccgtcatct

SEQ ID NO: 6015170 - DNA, 25 bp, Homo sapien
accttcgggcatggcactcttgaaa

SEQ ID NO: 6015171 - DNA, 25 bp, Homo sapien
aactttgattccattcttttgtttg

SEQ ID NO: 6015172 - DNA, 25 bp, Homo sapien
attcttttgtttgtctgccatgatg

SEQ ID NO: 6015173 - DNA, 25 bp, Homo sapien
gagtattttgttgataatggtctgc

SEQ ID NO: 6015174 - DNA, 25 bp, Homo sapien
aaaatatagttctttcctgtacata

SEQ ID NO: 6015175 - DNA, 25 bp, Homo sapien
attaacaagtgtatcaccttcaaac

SEQ ID NO: 6015176 - DNA, 25 bp, Homo sapien
cttttaactcgattctattaacaag

SEQ ID NO: 6015177 - DNA, 25 bp, Homo sapien
caagaatgtttccatcttctttaaa

SEQ ID NO: 6015178 - DNA, 25 bp, Homo sapien
gtgagttatagttgtattccaactt

SEQ ID NO: 6015179 - DNA, 25 bp, Homo sapien
aaactcaagaaggaccatgtggtct

SEQ ID NO: 6015180 - DNA, 25 bp, Homo sapien
gattctattaacaagtgtatcacct

SEQ ID NO: 6015181 - DNA, 25 bp, Homo sapien
ttgtttgtctgccatgatgtataca

SEQ ID NO: 6015182 - DNA, 25 bp, Homo sapien
taactcgattctattaacaagtgta

SEQ ID NO: 6015183 - DNA, 25 bp, Homo sapien
tgtatacattgtgtgagttatagtt

SEQ ID NO: 6015184 - DNA, 25 bp, Homo sapien
gtagtgacaagtgttggccatggaa

SEQ ID NO: 6015185 - DNA, 25 bp, Homo sapien
tgatctgggtatcttgcaaagcatt

SEQ ID NO: 6015186 - DNA, 25 bp, Homo sapien
ttttccgtatgttgcatcaccttca

SEQ ID NO: 6015187 - DNA, 25 bp, Homo sapien
ccgaaagtagtgacaagtgttggcc

SEQ ID NO: 6015188 - DNA, 25 bp, Homo sapien
tgtctgccatgatgtatacattgtg

SEQ ID NO: 6015189 - DNA, 25 bp, Homo sapien
tgtgtccaagaatgtttccatcttc

SEQ ID NO: 6015190 - DNA, 25 bp, Homo sapien
cagtagtgcaaataaatttaagggt

SEQ ID NO: 6015191 - DNA, 25 bp, Homo sapien
atcaccttcaaacttgacttcagca

SEQ ID NO: 6015192 - DNA, 25 bp, Homo sapien
cattgtgtgagttatagttgtattc

SEQ ID NO: 6015193 - DNA, 25 bp, Homo sapien
gttgggatctttcgaaagggcagat

SEQ ID NO: 6015194 - DNA, 25 bp, Homo sapien
tgtttccatcttctttaaaatcaat

SEQ ID NO: 6015195 - DNA, 25 bp, Homo sapien
catggaacaggtagttttccagtag

SEQ ID NO: 6015196 - DNA, 25 bp, Homo sapien
gaccatgtggtctctcttttcgttg

SEQ ID NO: 6015197 - DNA, 25 bp, Homo sapien
gaccataaccgaaagtagtgacaag

SEQ ID NO: 6015198 - DNA, 25 bp, Homo sapien
gtatgttgcatcaccttcaccctct

SEQ ID NO: 6015199 - DNA, 25 bp, Homo sapien
tctcttttcgttgggatctttcgaa

SEQ ID NO: 6015200 - DNA, 25 bp, Homo sapien
ggcatggcactcttgaaaaagtcat

SEQ ID NO: 6015201 - DNA, 25 bp, Homo sapien
tgccgtttcatatgatctgggtatc

SEQ ID NO: 6015202 - DNA, 25 bp, Homo sapien
gattccattcttttgtttgtctgcc

SEQ ID NO: 6015203 - DNA, 25 bp, Homo sapien
ggtctgctagttgaacgcttccatc

SEQ ID NO: 6015204 - DNA, 25 bp, Homo sapien
ttgaaaaagtcatgccgtttcatat

SEQ ID NO: 6015205 - DNA, 25 bp, Homo sapien
tttcctgtacataaccttcgggcat

SEQ ID NO: 6015206 - DNA, 25 bp, Homo sapien
tatagttgtattccaacttgtgtcc

SEQ ID NO: 6015207 - DNA, 25 bp, Homo sapien
agttttccagtagtgcaaataaatt

SEQ ID NO: 6015208 - DNA, 25 bp, Homo sapien
ctggtaaaaggacagggccatcgcc

SEQ ID NO: 6015209 - DNA, 25 bp, Homo sapien
ttcagcacgtgtcttatagttcccg

SEQ ID NO: 6015210 - DNA, 25 bp, Homo sapien
aagtgtatcaccttcaaacttgact

SEQ ID NO: 6015211 - DNA, 25 bp, Homo sapien
gtaatggttgtctggtaaaaggaca

SEQ ID NO: 6015212 - DNA, 25 bp, Homo sapien
gttggccatggaacaggtagttttc

SEQ ID NO: 6015213 - DNA, 25 bp, Homo sapien
cttgcaaagcattgaagaccataac

SEQ ID NO: 6015214 - DNA, 25 bp, Homo sapien
acaggtagttttccagtagtgcaaa

SEQ ID NO: 6015215 - DNA, 25 bp, Homo sapien
ggacaggtaatggttgtctggtaaa

SEQ ID NO: 6015216 - DNA, 25 bp, Homo sapien
ccaacttgtgtccaagaatgtttcc

SEQ ID NO: 6015217 - DNA, 25 bp, Homo sapien
gggtatcttgcaaagcattgaagac

SEQ ID NO: 6015218 - DNA, 25 bp, Homo sapien
ttcatatgatctgggtatcttgcaa

SEQ ID NO: 6015219 - DNA, 25 bp, Homo sapien
cttatagttcccgtcatctttgaaa

SEQ ID NO: 6015220 - DNA, 25 bp, Homo sapien
agcagctgttacaaactcaagaagg

SEQ ID NO: 6015221 - DNA, 25 bp, Homo sapien
tagctctttagccttgtcttgtatc

SEQ ID NO: 6015222 - DNA, 25 bp, Homo sapien
tttagccttgtcttgtatctctttt

SEQ ID NO: 6015223 - DNA, 25 bp, Homo sapien
cgcttttcaaactcttgtgtaagtt

SEQ ID NO: 6015224 - DNA, 25 bp, Homo sapien
tgctaattaaaaaagcattctttgt

SEQ ID NO: 6015225 - DNA, 25 bp, Homo sapien
tattcaaattttaaatattcaagct

SEQ ID NO: 6015226 - DNA, 25 bp, Homo sapien
attttgtatatgtttttgatgttgc

SEQ ID NO: 6015227 - DNA, 25 bp, Homo sapien
caagctctttgttagcttctctcct

SEQ ID NO: 6015228 - DNA, 25 bp, Homo sapien
tttatgctctggtcctggtattctt

SEQ ID NO: 6015229 - DNA, 25 bp, Homo sapien
aatttttttcacaccatttgcctat

SEQ ID NO: 6015230 - DNA, 25 bp, Homo sapien
gatgttgctctattttcgcttgtaa

SEQ ID NO: 6015231 - DNA, 25 bp, Homo sapien
cgttaatttatgctctggtcctggt

SEQ ID NO: 6015232 - DNA, 25 bp, Homo sapien
cgattttagctctttagccttgtct

SEQ ID NO: 6015233 - DNA, 25 bp, Homo sapien
ctctattttcgcttgtaattcgttt

SEQ ID NO: 6015234 - DNA, 25 bp, Homo sapien
tagcttctctcctgctttcatctgt

SEQ ID NO: 6015235 - DNA, 25 bp, Homo sapien
accatttgcctatttcttttagtcg

SEQ ID NO: 6015236 - DNA, 25 bp, Homo sapien
ctctttgatatttaagctctttttc

SEQ ID NO: 6015237 - DNA, 25 bp, Homo sapien
ctaaattttgtatatgtttttgatg

SEQ ID NO: 6015238 - DNA, 25 bp, Homo sapien
ctctcctgctttcatctgtgctaat

SEQ ID NO: 6015239 - DNA, 25 bp, Homo sapien
aaaaagcattctttgttaactgata

SEQ ID NO: 6015240 - DNA, 25 bp, Homo sapien
tctattctttcggcttttaatggaa

SEQ ID NO: 6015241 - DNA, 25 bp, Homo sapien
catctttgactttatgatattcaaa

SEQ ID NO: 6015242 - DNA, 25 bp, Homo sapien
cataggcttaaacgcttttcaaact

SEQ ID NO: 6015243 - DNA, 25 bp, Homo sapien
tcgtgtcctagttctaaattttgta

SEQ ID NO: 6015244 - DNA, 25 bp, Homo sapien
tgtgtgcctcaaacaaagtttttaa

SEQ ID NO: 6015245 - DNA, 25 bp, Homo sapien
cattttttgttttgtgtgcctcaaa

SEQ ID NO: 6015246 - DNA, 25 bp, Homo sapien
ttttttcaattctaggggcatttgc

SEQ ID NO: 6015247 - DNA, 25 bp, Homo sapien
gactttatgatattcaaattttaaa

SEQ ID NO: 6015248 - DNA, 25 bp, Homo sapien
aattttaaatattcaagctctttgt

SEQ ID NO: 6015249 - DNA, 25 bp, Homo sapien
ctcgttcatctttgactttatgata

SEQ ID NO: 6015250 - DNA, 25 bp, Homo sapien
ctaggggcatttgcgttaatttatg

SEQ ID NO: 6015251 - DNA, 25 bp, Homo sapien
tgttcaaaagaattttcaaaagctc

SEQ ID NO: 6015252 - DNA, 25 bp, Homo sapien
tgttaactgatagtcttctcttact

SEQ ID NO: 6015253 - DNA, 25 bp, Homo sapien
gaattttcaaaagctctttgatatt

SEQ ID NO: 6015254 - DNA, 25 bp, Homo sapien
caaaagctctttgatatttaagctc

SEQ ID NO: 6015255 - DNA, 25 bp, Homo sapien
cttaaacgcttttcaaactcttgtg

SEQ ID NO: 6015256 - DNA, 25 bp, Homo sapien
cttgtcttgtatctctttttctttt

SEQ ID NO: 6015257 - DNA, 25 bp, Homo sapien
caaaagaattttcaaaagctctttg

SEQ ID NO: 6015258 - DNA, 25 bp, Homo sapien
gctctttcgtgtcctagttctaaat

SEQ ID NO: 6015259 - DNA, 25 bp, Homo sapien
gatatttaagctctttttctattct

SEQ ID NO: 6015260 - DNA, 25 bp, Homo sapien
gtttttgatgttgctctattttcgc

SEQ ID NO: 6015261 - DNA, 25 bp, Homo sapien
tgttttgtgtgcctcaaacaaagtt

SEQ ID NO: 6015262 - DNA, 25 bp, Homo sapien
tcttactttggcgttgtattttcca

SEQ ID NO: 6015263 - DNA, 25 bp, Homo sapien
ctctggtcctggtattctttgaagc

SEQ ID NO: 6015264 - DNA, 25 bp, Homo sapien
tgcctatttcttttagtcgagtttc

SEQ ID NO: 6015265 - DNA, 25 bp, Homo sapien
catctgtgctaattaaaaaagcatt

SEQ ID NO: 6015266 - DNA, 25 bp, Homo sapien
tttcacaccatttgcctatttcttt

SEQ ID NO: 6015267 - DNA, 25 bp, Homo sapien
atgtttttccataggcttaaacgct

SEQ ID NO: 6015268 - DNA, 25 bp, Homo sapien
ctgctccacgcttaaatttttttca

SEQ ID NO: 6015269 - DNA, 25 bp, Homo sapien
aattatctcgttcatctttgacttt

SEQ ID NO: 6015270 - DNA, 25 bp, Homo sapien
tcctttaaagctctttcgtgtccta

SEQ ID NO: 6015271 - DNA, 25 bp, Homo sapien
cttgtgtaagttcctttaaagctct

SEQ ID NO: 6015272 - DNA, 25 bp, Homo sapien
tcaaactcttgtgtaagttccttta

SEQ ID NO: 6015273 - DNA, 25 bp, Homo sapien
cttttaactgctccacgcttaaatt

SEQ ID NO: 6015274 - DNA, 25 bp, Homo sapien
tttgcttgttcaaaagaattttcaa

SEQ ID NO: 6015275 - DNA, 25 bp, Homo sapien
tttccataggcttaaacgcttttca

SEQ ID NO: 6015276 - DNA, 25 bp, Homo sapien
caattctaggggcatttgcgttaat

SEQ ID NO: 6015277 - DNA, 25 bp, Homo sapien
cattctttgttaactgatagtcttc

SEQ ID NO: 6015278 - DNA, 25 bp, Homo sapien
cctagttctaaattttgtatatgtt

SEQ ID NO: 6015279 - DNA, 25 bp, Homo sapien
ctgatagtcttctcttactttggcg

SEQ ID NO: 6015280 - DNA, 25 bp, Homo sapien
catttgcgttaatttatgctctggt

SEQ ID NO: 6015281 - DNA, 25 bp, Homo sapien
aatattcaagctctttgttagcttc

SEQ ID NO: 6015282 - DNA, 25 bp, Homo sapien
tattctttgaagcaatgctttttct

SEQ ID NO: 6015283 - DNA, 25 bp, Homo sapien
ttttaaattatctcgttcatctttg

SEQ ID NO: 6015284 - DNA, 25 bp, Homo sapien
ttaaagctctttcgtgtcctagttc

SEQ ID NO: 6015285 - DNA, 25 bp, Homo sapien
tcctggtattctttgaagcaatgct

SEQ ID NO: 6015286 - DNA, 25 bp, Homo sapien
atatttcttttaactgctccacgct

SEQ ID NO: 6015287 - DNA, 25 bp, Homo sapien
atggaaatatttcttttaactgctc

SEQ ID NO: 6015288 - DNA, 25 bp, Homo sapien
tgctttcatctgtgctaattaaaaa

SEQ ID NO: 6015289 - DNA, 25 bp, Homo sapien
agctctttttctattctttcggctt

SEQ ID NO: 6015290 - DNA, 25 bp, Homo sapien
ttctttcgattttagctctttagcc

SEQ ID NO: 6015291 - DNA, 25 bp, Homo sapien
cacgcttaaatttttttcacaccat

SEQ ID NO: 6015292 - DNA, 25 bp, Homo sapien
gtcttctcttactttggcgttgtat

SEQ ID NO: 6015293 - DNA, 25 bp, Homo sapien
ctttgttagcttctctcctgctttc

SEQ ID NO: 6015294 - DNA, 25 bp, Homo sapien
cgcttgtaattcgttttctttcgat

SEQ ID NO: 6015295 - DNA, 25 bp, Homo sapien
gtatatgtttttgatgttgctctat

SEQ ID NO: 6015296 - DNA, 25 bp, Homo sapien
tcgtcccactcaaaataagctttgc

SEQ ID NO: 6015297 - DNA, 25 bp, Homo sapien
atatccatcatcaggatttctttta

SEQ ID NO: 6015298 - DNA, 25 bp, Homo sapien
tagttgattgactaaataagcaaaa

SEQ ID NO: 6015299 - DNA, 25 bp, Homo sapien
ttttagcatatttaccgctaagggc

SEQ ID NO: 6015300 - DNA, 25 bp, Homo sapien
ctttgccagtggttctaaattgctt

SEQ ID NO: 6015301 - DNA, 25 bp, Homo sapien
caaatttacatatttgtgtataact

SEQ ID NO: 6015302 - DNA, 25 bp, Homo sapien
ttattctgttaaataaagtgctttc

SEQ ID NO: 6015303 - DNA, 25 bp, Homo sapien
aaagctgtaattagtagttagttga

SEQ ID NO: 6015304 - DNA, 25 bp, Homo sapien
tttcattaattttaaaatcattagc

SEQ ID NO: 6015305 - DNA, 25 bp, Homo sapien
cattgtttcaaacaaatttacatat

SEQ ID NO: 6015306 - DNA, 25 bp, Homo sapien
gtataacttctgtctttgtttctat

SEQ ID NO: 6015307 - DNA, 25 bp, Homo sapien
ttcaaacaaatttacatatttgtgt

SEQ ID NO: 6015308 - DNA, 25 bp, Homo sapien
atattctcttgagttagaaagtttt

SEQ ID NO: 6015309 - DNA, 25 bp, Homo sapien
tctttagaaagttctttgatagcag

SEQ ID NO: 6015310 - DNA, 25 bp, Homo sapien
tttgatagcaggtttaaaatccatt

SEQ ID NO: 6015311 - DNA, 25 bp, Homo sapien
cataagcaagatttttaaaaggcac

SEQ ID NO: 6015312 - DNA, 25 bp, Homo sapien
aataagctttgccagtggttctaaa

SEQ ID NO: 6015313 - DNA, 25 bp, Homo sapien
agtgctttcatcatatccatcatca

SEQ ID NO: 6015314 - DNA, 25 bp, Homo sapien
caaaactcgtcccactcaaaataag

SEQ ID NO: 6015315 - DNA, 25 bp, Homo sapien
caagatttttaaaaggcactctaat

SEQ ID NO: 6015316 - DNA, 25 bp, Homo sapien
aggcggtaaagtgttttagcatatt

SEQ ID NO: 6015317 - DNA, 25 bp, Homo sapien
agctaatgcctgaaactttgccgcc

SEQ ID NO: 6015318 - DNA, 25 bp, Homo sapien
actcaaaataagctttgccagtggt

SEQ ID NO: 6015319 - DNA, 25 bp, Homo sapien
aaagattgctgttctttagaaagtt

SEQ ID NO: 6015320 - DNA, 25 bp, Homo sapien
tgtatttccattgtttcaaacaaat

SEQ ID NO: 6015321 - DNA, 25 bp, Homo sapien
gaaagttctttgatagcaggtttaa

SEQ ID NO: 6015322 - DNA, 25 bp, Homo sapien
tgctgttctttagaaagttctttga

SEQ ID NO: 6015323 - DNA, 25 bp, Homo sapien
tacatatttgtgtataacttctgtc

SEQ ID NO: 6015324 - DNA, 25 bp, Homo sapien
tgccgccacgcccacgcctgcggtt

SEQ ID NO: 6015325 - DNA, 25 bp, Homo sapien
tatccataactttacaaaactcgtc

SEQ ID NO: 6015326 - DNA, 25 bp, Homo sapien
tgttaaatattctcttgagttagaa

SEQ ID NO: 6015327 - DNA, 25 bp, Homo sapien
gtggtatatccataactttacaaaa

SEQ ID NO: 6015328 - DNA, 25 bp, Homo sapien
gcactctaatttggtcaaaaagatt

SEQ ID NO: 6015329 - DNA, 25 bp, Homo sapien
accgctaagggctataaattcttca

SEQ ID NO: 6015330 - DNA, 25 bp, Homo sapien
tttaaaatccatttatcgacttcgc

SEQ ID NO: 6015331 - DNA, 25 bp, Homo sapien
cgctttgtctataatcttgtggtat

SEQ ID NO: 6015332 - DNA, 25 bp, Homo sapien
attttctgttaaatattctcttgag

SEQ ID NO: 6015333 - DNA, 25 bp, Homo sapien
cagtggttctaaattgctttaaaag

SEQ ID NO: 6015334 - DNA, 25 bp, Homo sapien
aagctcaaagctgtaattagtagtt

SEQ ID NO: 6015335 - DNA, 25 bp, Homo sapien
tgcctgaaactttgccgccacgccc

SEQ ID NO: 6015336 - DNA, 25 bp, Homo sapien
agcaggtttaaaatccatttatcga

SEQ ID NO: 6015337 - DNA, 25 bp, Homo sapien
cttttaacatagtgtatttccattg

SEQ ID NO: 6015338 - DNA, 25 bp, Homo sapien
tctttttcataagcaagatttttaa

SEQ ID NO: 6015339 - DNA, 25 bp, Homo sapien
atttatcgacttcgctttgtctata

SEQ ID NO: 6015340 - DNA, 25 bp, Homo sapien
tcttgagttagaaagtttttcatta

SEQ ID NO: 6015341 - DNA, 25 bp, Homo sapien
tgatattttctgttaaatattctct

SEQ ID NO: 6015342 - DNA, 25 bp, Homo sapien
tattttaagctattgatattttctg

SEQ ID NO: 6015343 - DNA, 25 bp, Homo sapien
taaaaggcactctaatttggtcaaa

SEQ ID NO: 6015344 - DNA, 25 bp, Homo sapien
cgacttcgctttgtctataatcttg

SEQ ID NO: 6015345 - DNA, 25 bp, Homo sapien
atcatcaggatttcttttaacatag

SEQ ID NO: 6015346 - DNA, 25 bp, Homo sapien
gtctataatcttgtggtatatccat

SEQ ID NO: 6015347 - DNA, 25 bp, Homo sapien
taatttggtcaaaaagattgctgtt

SEQ ID NO: 6015348 - DNA, 25 bp, Homo sapien
ggtcaaaaagattgctgttctttag

SEQ ID NO: 6015349 - DNA, 25 bp, Homo sapien
aaatccatttatcgacttcgctttg

SEQ ID NO: 6015350 - DNA, 25 bp, Homo sapien
agtagttagttgattgactaaataa

SEQ ID NO: 6015351 - DNA, 25 bp, Homo sapien
tataaattcttcaagctcaaagctg

SEQ ID NO: 6015352 - DNA, 25 bp, Homo sapien
aagctattgatattttctgttaaat

SEQ ID NO: 6015353 - DNA, 25 bp, Homo sapien
cttctgtctttgtttctatgatttg

SEQ ID NO: 6015354 - DNA, 25 bp, Homo sapien
aaactttgccgccacgcccacgcct

SEQ ID NO: 6015355 - DNA, 25 bp, Homo sapien
catatttaccgctaagggctataaa

SEQ ID NO: 6015356 - DNA, 25 bp, Homo sapien
ttctatgatttgtttaaaatttgcc

SEQ ID NO: 6015357 - DNA, 25 bp, Homo sapien
aatcttgtggtatatccataacttt

SEQ ID NO: 6015358 - DNA, 25 bp, Homo sapien
ctgttaaataaagtgctttcatcat

SEQ ID NO: 6015359 - DNA, 25 bp, Homo sapien
acatagtgtatttccattgtttcaa

SEQ ID NO: 6015360 - DNA, 25 bp, Homo sapien
aagtaaagctaatgcctgaaacttt

SEQ ID NO: 6015361 - DNA, 25 bp, Homo sapien
aagggctataaattcttcaagctca

SEQ ID NO: 6015362 - DNA, 25 bp, Homo sapien
aaagtgttttagcatatttaccgct

SEQ ID NO: 6015363 - DNA, 25 bp, Homo sapien
tctttgtttctatgatttgtttaaa

SEQ ID NO: 6015364 - DNA, 25 bp, Homo sapien
gattgactaaataagcaaaatcagg

SEQ ID NO: 6015365 - DNA, 25 bp, Homo sapien
ttcatcatatccatcatcaggattt

SEQ ID NO: 6015366 - DNA, 25 bp, Homo sapien
aggatttcttttaacatagtgtatt

SEQ ID NO: 6015367 - DNA, 25 bp, Homo sapien
tgcggttttttctttttcataagca

SEQ ID NO: 6015368 - DNA, 25 bp, Homo sapien
ctaaataagcaaaatcagggtttat

SEQ ID NO: 6015369 - DNA, 25 bp, Homo sapien
aataaagtgctttcatcatatccat

SEQ ID NO: 6015370 - DNA, 25 bp, Homo sapien
tgatttgtttaaaatttgccttgaa

SEQ ID NO: 6015371 - DNA, 25 bp, Homo sapien
gtaattagtagttagttgattgact

SEQ ID NO: 6015372 - DNA, 25 bp, Homo sapien
cacgcccacgcctgcggttttttct

SEQ ID NO: 6015373 - DNA, 25 bp, Homo sapien
atttgtgtataacttctgtctttgt

SEQ ID NO: 6015374 - DNA, 25 bp, Homo sapien
ttcttcaagctcaaagctgtaatta

SEQ ID NO: 6015375 - DNA, 25 bp, Homo sapien
ttaaaaaatcatacagctcgcgcgg

SEQ ID NO: 6015376 - DNA, 25 bp, Homo sapien
cagctcgcgcggatctttaaatgga

SEQ ID NO: 6015377 - DNA, 25 bp, Homo sapien
gacgcagaaggcaatgtcataccac

SEQ ID NO: 6015378 - DNA, 25 bp, Homo sapien
tctttcacaaagatgttgctgtctc

SEQ ID NO: 6015379 - DNA, 25 bp, Homo sapien
ttctcccaatcaggcttgatcccca

SEQ ID NO: 6015380 - DNA, 25 bp, Homo sapien
gcggctgtctaagctattcgtatag

SEQ ID NO: 6015381 - DNA, 25 bp, Homo sapien
tcttccccgatatcctccctgatcg

SEQ ID NO: 6015382 - DNA, 25 bp, Homo sapien
tactgttcttccccgatatcctccc

SEQ ID NO: 6015383 - DNA, 25 bp, Homo sapien
atccccagtaagtcaaaaaatagct

SEQ ID NO: 6015384 - DNA, 25 bp, Homo sapien
agcctgatgcactccgcatacagct

SEQ ID NO: 6015385 - DNA, 25 bp, Homo sapien
tcgacatactgttcttccccgatat

SEQ ID NO: 6015386 - DNA, 25 bp, Homo sapien
gtctaagctattcgtatagggacaa

SEQ ID NO: 6015387 - DNA, 25 bp, Homo sapien
ccgatatcctccctgatcgaccgga

SEQ ID NO: 6015388 - DNA, 25 bp, Homo sapien
acttgtccgccctgccgcttctccc

SEQ ID NO: 6015389 - DNA, 25 bp, Homo sapien
tccgatatgtcgatggagtgaaaga

SEQ ID NO: 6015390 - DNA, 25 bp, Homo sapien
aatcatacagctcgcgcggatcttt

SEQ ID NO: 6015391 - DNA, 25 bp, Homo sapien
tgcactccgcatacagctcgataat

SEQ ID NO: 6015392 - DNA, 25 bp, Homo sapien
atctttaaatggagtgtcttcttcc

SEQ ID NO: 6015393 - DNA, 25 bp, Homo sapien
agtaatccaattcggctaagcggct

SEQ ID NO: 6015394 - DNA, 25 bp, Homo sapien
ccgtctttaaaaaatcatacagctc

SEQ ID NO: 6015395 - DNA, 25 bp, Homo sapien
cgttattcagtaagtaatccaattc

SEQ ID NO: 6015396 - DNA, 25 bp, Homo sapien
atggagtgaaagagcctgatgcact

SEQ ID NO: 6015397 - DNA, 25 bp, Homo sapien
catcggccagatcgttattcagtaa

SEQ ID NO: 6015398 - DNA, 25 bp, Homo sapien
caattcggctaagcggctgtctaag

SEQ ID NO: 6015399 - DNA, 25 bp, Homo sapien
tcttcccagttttcgcaatccacat

SEQ ID NO: 6015400 - DNA, 25 bp, Homo sapien
gccatcggcctcactcatgagcaga

SEQ ID NO: 6015401 - DNA, 25 bp, Homo sapien
gattgctccagccatcatgccgttc

SEQ ID NO: 6015402 - DNA, 25 bp, Homo sapien
ttcgcaatccacatcggccagatcg

SEQ ID NO: 6015403 - DNA, 25 bp, Homo sapien
ccaggtcgccgtgggaaaagacaag

SEQ ID NO: 6015404 - DNA, 25 bp, Homo sapien
tgtctcccaggtcgccgtgggaaaa

SEQ ID NO: 6015405 - DNA, 25 bp, Homo sapien
aaatggagtgtcttcttcccagttt

SEQ ID NO: 6015406 - DNA, 25 bp, Homo sapien
gcgcggatctttaaatggagtgtct

SEQ ID NO: 6015407 - DNA, 25 bp, Homo sapien
ccaagatcaataaagccacttactt

SEQ ID NO: 6015408 - DNA, 25 bp, Homo sapien
ggctaagcggctgtctaagctattc

SEQ ID NO: 6015409 - DNA, 25 bp, Homo sapien
tcttcatactcttccgagcaaagga

SEQ ID NO: 6015410 - DNA, 25 bp, Homo sapien
aaaggacgccatcggcctcactcat

SEQ ID NO: 6015411 - DNA, 25 bp, Homo sapien
cttttcagggctttgttcatcttca

SEQ ID NO: 6015412 - DNA, 25 bp, Homo sapien
agggctttgttcatcttcatactct

SEQ ID NO: 6015413 - DNA, 25 bp, Homo sapien
ccgccctgccgcttctcccaagatc

SEQ ID NO: 6015414 - DNA, 25 bp, Homo sapien
atgttgctgtctcccaggtcgccgt

SEQ ID NO: 6015415 - DNA, 25 bp, Homo sapien
tcagtaagtaatccaattcggctaa

SEQ ID NO: 6015416 - DNA, 25 bp, Homo sapien
tgccgcttctcccaagatcaataaa

SEQ ID NO: 6015417 - DNA, 25 bp, Homo sapien
ggcttgatccccagtaagtcaaaaa

SEQ ID NO: 6015418 - DNA, 25 bp, Homo sapien
caatcaggcttgatccccagtaagt

SEQ ID NO: 6015419 - DNA, 25 bp, Homo sapien
tttattttctcccaatcaggcttga

SEQ ID NO: 6015420 - DNA, 25 bp, Homo sapien
ttgccatctttcacaaagatgttgc

SEQ ID NO: 6015421 - DNA, 25 bp, Homo sapien
tgaaagagcctgatgcactccgcat

SEQ ID NO: 6015422 - DNA, 25 bp, Homo sapien
catagcatcatgtccttttcccgtt

SEQ ID NO: 6015423 - DNA, 25 bp, Homo sapien
aagccacttactttgccatctttca

SEQ ID NO: 6015424 - DNA, 25 bp, Homo sapien
aatagctcgacatactgttcttccc

SEQ ID NO: 6015425 - DNA, 25 bp, Homo sapien
tgagcagattgctccagccatcatg

SEQ ID NO: 6015426 - DNA, 25 bp, Homo sapien
agtaagtcaaaaaatagctcgacat

SEQ ID NO: 6015427 - DNA, 25 bp, Homo sapien
atcctccctgatcgaccggacgcag

SEQ ID NO: 6015428 - DNA, 25 bp, Homo sapien
atccacatcggccagatcgttattc

SEQ ID NO: 6015429 - DNA, 25 bp, Homo sapien
gctattcgtatagggacaatccgat

SEQ ID NO: 6015430 - DNA, 25 bp, Homo sapien
ccagatcgttattcagtaagtaatc

SEQ ID NO: 6015431 - DNA, 25 bp, Homo sapien
tcaaaaaatagctcgacatactgtt

SEQ ID NO: 6015432 - DNA, 25 bp, Homo sapien
acctttggaacaggcagctttcctt

SEQ ID NO: 6015433 - DNA, 25 bp, Homo sapien
cttactttgccatctttcacaaaga

SEQ ID NO: 6015434 - DNA, 25 bp, Homo sapien
tttccttccagccatagcatcatgt

SEQ ID NO: 6015435 - DNA, 25 bp, Homo sapien
cctgatcgaccggacgcagaaggca

SEQ ID NO: 6015436 - DNA, 25 bp, Homo sapien
ccatcatgccgttcaaagtgcagga

SEQ ID NO: 6015437 - DNA, 25 bp, Homo sapien
atcatgtccttttcccgttccacat

SEQ ID NO: 6015438 - DNA, 25 bp, Homo sapien
tgcaggacctttggaacaggcagct

SEQ ID NO: 6015439 - DNA, 25 bp, Homo sapien
ctccagccatcatgccgttcaaagt

SEQ ID NO: 6015440 - DNA, 25 bp, Homo sapien
tccgagcaaaggacgccatcggcct

SEQ ID NO: 6015441 - DNA, 25 bp, Homo sapien
ggcagctttccttccagccatagca

SEQ ID NO: 6015442 - DNA, 25 bp, Homo sapien
atgtcgatggagtgaaagagcctga

SEQ ID NO: 6015443 - DNA, 25 bp, Homo sapien
acagctcgataatcttttcagggct

SEQ ID NO: 6015444 - DNA, 25 bp, Homo sapien
ccgcatacagctcgataatcttttc

SEQ ID NO: 6015445 - DNA, 25 bp, Homo sapien
tcaaagtgcaggacctttggaacag

SEQ ID NO: 6015446 - DNA, 25 bp, Homo sapien
cggcctcactcatgagcagattgct

SEQ ID NO: 6015447 - DNA, 25 bp, Homo sapien
cactcatgagcagattgctccagcc

SEQ ID NO: 6015448 - DNA, 25 bp, Homo sapien
cagttttcgcaatccacatcggcca

SEQ ID NO: 6015449 - DNA, 25 bp, Homo sapien
tgccgttcaaagtgcaggacctttg

SEQ ID NO: 6015450 - DNA, 25 bp, Homo sapien
gaaggcaatgtcataccacttgtcc

SEQ ID NO: 6015451 - DNA, 25 bp, Homo sapien
gataatcttttcagggctttgttca

SEQ ID NO: 6015452 - DNA, 25 bp, Homo sapien
tccagccatagcatcatgtcctttt

SEQ ID NO: 6015453 - DNA, 25 bp, Homo sapien
aatgtcataccacttgtccgccctg

SEQ ID NO: 6015454 - DNA, 25 bp, Homo sapien
tactcttccgagcaaaggacgccat

SEQ ID NO: 6015455 - DNA, 25 bp, Homo sapien
gtatagggacaatccgatatgtcga

SEQ ID NO: 6015456 - DNA, 25 bp, Homo sapien
cgaccggacgcagaaggcaatgtca

SEQ ID NO: 6015457 - DNA, 25 bp, Homo sapien
cttctcccaagatcaataaagccac

SEQ ID NO: 6015458 - DNA, 25 bp, Homo sapien
ggaacaggcagctttccttccagcc

SEQ ID NO: 6015459 - DNA, 25 bp, Homo sapien
acaaagatgttgctgtctcccaggt

SEQ ID NO: 6015460 - DNA, 25 bp, Homo sapien
tcaataaagccacttactttgccat

SEQ ID NO: 6015461 - DNA, 25 bp, Homo sapien
ggacaatccgatatgtcgatggagt

SEQ ID NO: 6015462 - DNA, 25 bp, Homo sapien
tgtagttgccgtcgtccttgaagaa

SEQ ID NO: 6015463 - DNA, 25 bp, Homo sapien
aatcccagcagctgttacaaactca

SEQ ID NO: 6015464 - DNA, 25 bp, Homo sapien
gatgcccttcagctcgatgcggttc

SEQ ID NO: 6015465 - DNA, 25 bp, Homo sapien
tgttacaaactcaagaaggaccatg

SEQ ID NO: 6015466 - DNA, 25 bp, Homo sapien
aagttggccttgatgccgttcttct

SEQ ID NO: 6015467 - DNA, 25 bp, Homo sapien
ggatgttgccgtcctccttgaagtc

SEQ ID NO: 6015468 - DNA, 25 bp, Homo sapien
gggtgctcaggtagtggttgtcggg

SEQ ID NO: 6015469 - DNA, 25 bp, Homo sapien
aacttcacctcggcgcgggtcttgt

SEQ ID NO: 6015470 - DNA, 25 bp, Homo sapien
gccccaggatgttgccgtcctcctt

SEQ ID NO: 6015471 - DNA, 25 bp, Homo sapien
atctttcgaaagggcggactgggtg

SEQ ID NO: 6015472 - DNA, 25 bp, Homo sapien
cttcagctcgatgcggttcaccagg

SEQ ID NO: 6015473 - DNA, 25 bp, Homo sapien
actccagcttgtgccccaggatgtt

SEQ ID NO: 6015474 - DNA, 25 bp, Homo sapien
agcacggggccgtcgccgatggggg

SEQ ID NO: 6015475 - DNA, 25 bp, Homo sapien
ggtaagttttccgtatgttgcatca

SEQ ID NO: 6015476 - DNA, 25 bp, Homo sapien
tgccgttcttctgcttgtcggcggt

SEQ ID NO: 6015477 - DNA, 25 bp, Homo sapien
ggcgcgggtcttgtagttgccgtcg

SEQ ID NO: 6015478 - DNA, 25 bp, Homo sapien
aagaaggaccatgtggtctctcttt

SEQ ID NO: 6015479 - DNA, 25 bp, Homo sapien
cgatgggggtgttctgctggtagtg

SEQ ID NO: 6015480 - DNA, 25 bp, Homo sapien
tggtagtggtcggcgagctgcacgc

SEQ ID NO: 6015481 - DNA, 25 bp, Homo sapien
gtggtctctcttttcgttgggatct

SEQ ID NO: 6015482 - DNA, 25 bp, Homo sapien
tggtcggcgagctgcacgctgccgt

SEQ ID NO: 6015483 - DNA, 25 bp, Homo sapien
ctccttgaagtcgatgcccttcagc

SEQ ID NO: 6015484 - DNA, 25 bp, Homo sapien
cactgcacgccccaggtcagggtgg

SEQ ID NO: 6015485 - DNA, 25 bp, Homo sapien
gggtgttctgctggtagtggtcggc

SEQ ID NO: 6015486 - DNA, 25 bp, Homo sapien
tgaagaagatggtgcgctcctggac

SEQ ID NO: 6015487 - DNA, 25 bp, Homo sapien
caggtcagggtggtcacgagggtgg

SEQ ID NO: 6015488 - DNA, 25 bp, Homo sapien
gcagcagcacggggccgtcgccgat

SEQ ID NO: 6015489 - DNA, 25 bp, Homo sapien
ttctgctggtagtggtcggcgagct

SEQ ID NO: 6015490 - DNA, 25 bp, Homo sapien
cgtccttgaagaagatggtgcgctc

SEQ ID NO: 6015491 - DNA, 25 bp, Homo sapien
tgcgctcctggacgtagccttcggg

SEQ ID NO: 6015492 - DNA, 25 bp, Homo sapien
gcggacttgaagaagtcgtgctgct

SEQ ID NO: 6015493 - DNA, 25 bp, Homo sapien
gatgttgtggcggatcttgaagttg

SEQ ID NO: 6015494 - DNA, 25 bp, Homo sapien
cggggtagcggctgaagcactgcac

SEQ ID NO: 6015495 - DNA, 25 bp, Homo sapien
tcgatgcggttcaccagggtgtcgc

SEQ ID NO: 6015496 - DNA, 25 bp, Homo sapien
tgtggcggatcttgaagttggcctt

SEQ ID NO: 6015497 - DNA, 25 bp, Homo sapien
gcttgtgccccaggatgttgccgtc

SEQ ID NO: 6015498 - DNA, 25 bp, Homo sapien
cggttcaccagggtgtcgccctcga

SEQ ID NO: 6015499 - DNA, 25 bp, Homo sapien
tgccgtcgtccttgaagaagatggt

SEQ ID NO: 6015500 - DNA, 25 bp, Homo sapien
agttgtactccagcttgtgccccag

SEQ ID NO: 6015501 - DNA, 25 bp, Homo sapien
tgaagcactgcacgccccaggtcag

SEQ ID NO: 6015502 - DNA, 25 bp, Homo sapien
aagtcgtgctgcttcatgtggtcgg

SEQ ID NO: 6015503 - DNA, 25 bp, Homo sapien
cctggacgtagccttcgggcatggc

SEQ ID NO: 6015504 - DNA, 25 bp, Homo sapien
ctgcacgctgccgtcctcgatgttg

SEQ ID NO: 6015505 - DNA, 25 bp, Homo sapien
tgggatctttcgaaagggcggactg

SEQ ID NO: 6015506 - DNA, 25 bp, Homo sapien
tgtcgggcagcagcacggggccgtc

SEQ ID NO: 6015507 - DNA, 25 bp, Homo sapien
tcaggtagtggttgtcgggcagcag

SEQ ID NO: 6015508 - DNA, 25 bp, Homo sapien
cggactgggtgctcaggtagtggtt

SEQ ID NO: 6015509 - DNA, 25 bp, Homo sapien
gggtggtcacgagggtgggccatgg

SEQ ID NO: 6015510 - DNA, 25 bp, Homo sapien
ggtcttgtagttgccgtcgtccttg

SEQ ID NO: 6015511 - DNA, 25 bp, Homo sapien
ttgaagaagtcgtgctgcttcatgt

SEQ ID NO: 6015512 - DNA, 25 bp, Homo sapien
aaactcaagaaggaccatgtggtct

SEQ ID NO: 6015513 - DNA, 25 bp, Homo sapien
cgctgccgtcctcgatgttgtggcg

SEQ ID NO: 6015514 - DNA, 25 bp, Homo sapien
ttttccgtatgttgcatcaccttca

SEQ ID NO: 6015515 - DNA, 25 bp, Homo sapien
tgatatagacgttgtggctgatgta

SEQ ID NO: 6015516 - DNA, 25 bp, Homo sapien
agatggtgcgctcctggacgtagcc

SEQ ID NO: 6015517 - DNA, 25 bp, Homo sapien
cagtagtgcaaataaatttaagggt

SEQ ID NO: 6015518 - DNA, 25 bp, Homo sapien
tgtggtcggggtagcggctgaagca

SEQ ID NO: 6015519 - DNA, 25 bp, Homo sapien
cggcggtgatatagacgttgtggct

SEQ ID NO: 6015520 - DNA, 25 bp, Homo sapien
gaccatgtggtctctcttttcgttg

SEQ ID NO: 6015521 - DNA, 25 bp, Homo sapien
accagggtgtcgccctcgaacttca

SEQ ID NO: 6015522 - DNA, 25 bp, Homo sapien
ccttcgggcatggcggacttgaaga

SEQ ID NO: 6015523 - DNA, 25 bp, Homo sapien
catggaacaggtagttttccagtag

SEQ ID NO: 6015524 - DNA, 25 bp, Homo sapien
gaagtcgatgcccttcagctcgatg

SEQ ID NO: 6015525 - DNA, 25 bp, Homo sapien
gtatgttgcatcaccttcaccctct

SEQ ID NO: 6015526 - DNA, 25 bp, Homo sapien
tctcttttcgttgggatctttcgaa

SEQ ID NO: 6015527 - DNA, 25 bp, Homo sapien
acctcggcgcgggtcttgtagttgc

SEQ ID NO: 6015528 - DNA, 25 bp, Homo sapien
acgtagccttcgggcatggcggact

SEQ ID NO: 6015529 - DNA, 25 bp, Homo sapien
tgccgtcctccttgaagtcgatgcc

SEQ ID NO: 6015530 - DNA, 25 bp, Homo sapien
tgatgtagttgtactccagcttgtg

SEQ ID NO: 6015531 - DNA, 25 bp, Homo sapien
gatcttgaagttggccttgatgccg

SEQ ID NO: 6015532 - DNA, 25 bp, Homo sapien
gtgtcgccctcgaacttcacctcgg

SEQ ID NO: 6015533 - DNA, 25 bp, Homo sapien
cgtcgccgatgggggtgttctgctg

SEQ ID NO: 6015534 - DNA, 25 bp, Homo sapien
ggcatggcggacttgaagaagtcgt

SEQ ID NO: 6015535 - DNA, 25 bp, Homo sapien
cacgagggtgggccatggaacaggt

SEQ ID NO: 6015536 - DNA, 25 bp, Homo sapien
gcgagctgcacgctgccgtcctcga

SEQ ID NO: 6015537 - DNA, 25 bp, Homo sapien
agcggctgaagcactgcacgcccca

SEQ ID NO: 6015538 - DNA, 25 bp, Homo sapien
agttttccagtagtgcaaataaatt

SEQ ID NO: 6015539 - DNA, 25 bp, Homo sapien
cgaaagggcggactgggtgctcagg

SEQ ID NO: 6015540 - DNA, 25 bp, Homo sapien
ccctcgaacttcacctcggcgcggg

SEQ ID NO: 6015541 - DNA, 25 bp, Homo sapien
acgccccaggtcagggtggtcacga

SEQ ID NO: 6015542 - DNA, 25 bp, Homo sapien
agacgttgtggctgatgtagttgta

SEQ ID NO: 6015543 - DNA, 25 bp, Homo sapien
gtgggccatggaacaggtagttttc

SEQ ID NO: 6015544 - DNA, 25 bp, Homo sapien
gccttgatgccgttcttctgcttgt

SEQ ID NO: 6015545 - DNA, 25 bp, Homo sapien
acaggtagttttccagtagtgcaaa

SEQ ID NO: 6015546 - DNA, 25 bp, Homo sapien
gcttgtcggcggtgatatagacgtt

SEQ ID NO: 6015547 - DNA, 25 bp, Homo sapien
gtcctcgatgttgtggcggatcttg

SEQ ID NO: 6015548 - DNA, 25 bp, Homo sapien
tcttctgcttgtcggcggtgatata

SEQ ID NO: 6015549 - DNA, 25 bp, Homo sapien
agtggttgtcgggcagcagcacggg

SEQ ID NO: 6015550 - DNA, 25 bp, Homo sapien
agcagctgttacaaactcaagaagg

SEQ ID NO: 6015551 - DNA, 25 bp, Homo sapien
tgtggctgatgtagttgtactccag

SEQ ID NO: 6015552 - DNA, 25 bp, Homo sapien
agtagtatgttgcagtcttttggaa

SEQ ID NO: 6015553 - DNA, 25 bp, Homo sapien
tgccttccaacccagtcagaaatcg

SEQ ID NO: 6015554 - DNA, 25 bp, Homo sapien
caaacaagggaataaacgaatgagg

SEQ ID NO: 6015555 - DNA, 25 bp, Homo sapien
ggacgatatcaatgccgtaatcatt

SEQ ID NO: 6015556 - DNA, 25 bp, Homo sapien
aaaagttcacctgtcccacctgctt

SEQ ID NO: 6015557 - DNA, 25 bp, Homo sapien
gcgcatcaccaacattttctggcgt

SEQ ID NO: 6015558 - DNA, 25 bp, Homo sapien
agcaagtcagcatcggaatctagag

SEQ ID NO: 6015559 - DNA, 25 bp, Homo sapien
gtatttcggagtgcctgaactattt

SEQ ID NO: 6015560 - DNA, 25 bp, Homo sapien
agaaatcgagttccaatccaaaagt

SEQ ID NO: 6015561 - DNA, 25 bp, Homo sapien
aagctttcggggctctcttgccttc

SEQ ID NO: 6015562 - DNA, 25 bp, Homo sapien
tccacacctccgcttacatcaacac

SEQ ID NO: 6015563 - DNA, 25 bp, Homo sapien
aaccgaggaactcttggtattcttg

SEQ ID NO: 6015564 - DNA, 25 bp, Homo sapien
ttaggttgattacgaaacacgccaa

SEQ ID NO: 6015565 - DNA, 25 bp, Homo sapien
tcagtccaccagctaacataaaatg

SEQ ID NO: 6015566 - DNA, 25 bp, Homo sapien
aaatgtaagctttcggggctctctt

SEQ ID NO: 6015567 - DNA, 25 bp, Homo sapien
caataaccgggtcaattgttctctt

SEQ ID NO: 6015568 - DNA, 25 bp, Homo sapien
ccagtcagaaatcgagttccaatcc

SEQ ID NO: 6015569 - DNA, 25 bp, Homo sapien
cgggtcaattgttctctttctattg

SEQ ID NO: 6015570 - DNA, 25 bp, Homo sapien
tcggaatctagagcacattctgcgg

SEQ ID NO: 6015571 - DNA, 25 bp, Homo sapien
caccagctaacataaaatgtaagct

SEQ ID NO: 6015572 - DNA, 25 bp, Homo sapien
cttgaaattttccttgcaataaccg

SEQ ID NO: 6015573 - DNA, 25 bp, Homo sapien
cagtcttttggaaatacgagtcttt

SEQ ID NO: 6015574 - DNA, 25 bp, Homo sapien
ctggcgtcagtccaccagctaacat

SEQ ID NO: 6015575 - DNA, 25 bp, Homo sapien
tgaggtttctgtgaagctgcactga

SEQ ID NO: 6015576 - DNA, 25 bp, Homo sapien
gcttacatcaacaccaataacgcca

SEQ ID NO: 6015577 - DNA, 25 bp, Homo sapien
taataactggcaaaccgaggaactc

SEQ ID NO: 6015578 - DNA, 25 bp, Homo sapien
cattttctggcgtcagtccaccagc

SEQ ID NO: 6015579 - DNA, 25 bp, Homo sapien
actcatctccatgcagttggacgat

SEQ ID NO: 6015580 - DNA, 25 bp, Homo sapien
tgaccagagccaaaacatcctcctt

SEQ ID NO: 6015581 - DNA, 25 bp, Homo sapien
gccacgactcatctccatgcagttg

SEQ ID NO: 6015582 - DNA, 25 bp, Homo sapien
taacgccatttaatctaagcgcatc

SEQ ID NO: 6015583 - DNA, 25 bp, Homo sapien
ctattgggcacacatataataccca

SEQ ID NO: 6015584 - DNA, 25 bp, Homo sapien
ctctcttgccttccaacccagtcag

SEQ ID NO: 6015585 - DNA, 25 bp, Homo sapien
tttatatgcttttacaagacttgaa

SEQ ID NO: 6015586 - DNA, 25 bp, Homo sapien
acaccatttgtctccacacctccgc

SEQ ID NO: 6015587 - DNA, 25 bp, Homo sapien
tacgagtcttttaataactggcaaa

SEQ ID NO: 6015588 - DNA, 25 bp, Homo sapien
gagttccaatccaaaagttcacctg

SEQ ID NO: 6015589 - DNA, 25 bp, Homo sapien
caccaataacgccatttaatctaag

SEQ ID NO: 6015590 - DNA, 25 bp, Homo sapien
tgccgtaatcattgaccagagccaa

SEQ ID NO: 6015591 - DNA, 25 bp, Homo sapien
aatcattgaccagagccaaaacatc

SEQ ID NO: 6015592 - DNA, 25 bp, Homo sapien
gcagttggacgatatcaatgccgta

SEQ ID NO: 6015593 - DNA, 25 bp, Homo sapien
atacccagcaagtcagcatcggaat

SEQ ID NO: 6015594 - DNA, 25 bp, Homo sapien
cggagtgcctgaactatttttatat

SEQ ID NO: 6015595 - DNA, 25 bp, Homo sapien
cgaaacacgccaaccaagtatttcg

SEQ ID NO: 6015596 - DNA, 25 bp, Homo sapien
ctgaatcaaacaagggaataaacga

SEQ ID NO: 6015597 - DNA, 25 bp, Homo sapien
ggaactcttggtattcttgccacga

SEQ ID NO: 6015598 - DNA, 25 bp, Homo sapien
tcccacctgcttctgaatcaaacaa

SEQ ID NO: 6015599 - DNA, 25 bp, Homo sapien
gcactgagtagtatgttgcagtctt

SEQ ID NO: 6015600 - DNA, 25 bp, Homo sapien
atctaagcgcatcaccaacattttc

SEQ ID NO: 6015601 - DNA, 25 bp, Homo sapien
tcagcatcggaatctagagcacatt

SEQ ID NO: 6015602 - DNA, 25 bp, Homo sapien
gagccaaaacatcctccttaggttg

SEQ ID NO: 6015603 - DNA, 25 bp, Homo sapien
tcctccttaggttgattacgaaaca

SEQ ID NO: 6015604 - DNA, 25 bp, Homo sapien
ggaataaacgaatgaggtttctgtg

SEQ ID NO: 6015605 - DNA, 25 bp, Homo sapien
gcctgaactatttttatatgctttt

SEQ ID NO: 6015606 - DNA, 25 bp, Homo sapien
cacgccaaccaagtatttcggagtg

SEQ ID NO: 6015607 - DNA, 25 bp, Homo sapien
catttaatctaagcgcatcaccaac

SEQ ID NO: 6015608 - DNA, 25 bp, Homo sapien
ctccatgcagttggacgatatcaat

SEQ ID NO: 6015609 - DNA, 25 bp, Homo sapien
ggcacacatataatacccagcaagt

SEQ ID NO: 6015610 - DNA, 25 bp, Homo sapien
tctgcggcctctgtgctctgcaagc

SEQ ID NO: 6015611 - DNA, 25 bp, Homo sapien
acaagacttgaaattttccttgcaa

SEQ ID NO: 6015612 - DNA, 25 bp, Homo sapien
tgcttttacaagacttgaaattttc

SEQ ID NO: 6015613 - DNA, 25 bp, Homo sapien
cttggtattcttgccacgactcatc

SEQ ID NO: 6015614 - DNA, 25 bp, Homo sapien
gcctctgtgctctgcaagccgcaaa

SEQ ID NO: 6015615 - DNA, 25 bp, Homo sapien
attcttgccacgactcatctccatg

SEQ ID NO: 6015616 - DNA, 25 bp, Homo sapien
gcacattctgcggcctctgtgctct

SEQ ID NO: 6015617 - DNA, 25 bp, Homo sapien
aacgaatgaggtttctgtgaagctg

SEQ ID NO: 6015618 - DNA, 25 bp, Homo sapien
caatccaaaagttcacctgtcccac

SEQ ID NO: 6015619 - DNA, 25 bp, Homo sapien
tcggggctctcttgccttccaaccc

SEQ ID NO: 6015620 - DNA, 25 bp, Homo sapien
acctccgcttacatcaacaccaata

SEQ ID NO: 6015621 - DNA, 25 bp, Homo sapien
cacctgtcccacctgcttctgaatc

SEQ ID NO: 6015622 - DNA, 25 bp, Homo sapien
tccttgcaataaccgggtcaattgt

SEQ ID NO: 6015623 - DNA, 25 bp, Homo sapien
actatttttatatgcttttacaaga

SEQ ID NO: 6015624 - DNA, 25 bp, Homo sapien
tgattacgaaacacgccaaccaagt

SEQ ID NO: 6015625 - DNA, 25 bp, Homo sapien
aattgttctctttctattgggcaca

SEQ ID NO: 6015626 - DNA, 25 bp, Homo sapien
ctggcaaaccgaggaactcttggta

SEQ ID NO: 6015627 - DNA, 25 bp, Homo sapien
ttctgtgaagctgcactgagtagta

SEQ ID NO: 6015628 - DNA, 25 bp, Homo sapien
catataatacccagcaagtcagcat

SEQ ID NO: 6015629 - DNA, 25 bp, Homo sapien
tcttttacaccatttgtctccacac

SEQ ID NO: 6015630 - DNA, 25 bp, Homo sapien
ctaacataaaatgtaagctttcggg

SEQ ID NO: 6015631 - DNA, 25 bp, Homo sapien
tttgtctccacacctccgcttacat

SEQ ID NO: 6015632 - DNA, 25 bp, Homo sapien
atgttgcagtcttttggaaatacga

SEQ ID NO: 6015633 - DNA, 25 bp, Homo sapien
tccaacccagtcagaaatcgagttc

SEQ ID NO: 6015634 - DNA, 25 bp, Homo sapien
aaacatcctccttaggttgattacg

SEQ ID NO: 6015635 - DNA, 25 bp, Homo sapien
tctctttctattgggcacacatata

SEQ ID NO: 6015636 - DNA, 25 bp, Homo sapien
gaagctgcactgagtagtatgttgc

SEQ ID NO: 6015637 - DNA, 25 bp, Homo sapien
tatcaatgccgtaatcattgaccag

SEQ ID NO: 6015638 - DNA, 25 bp, Homo sapien
catcaacaccaataacgccatttaa

SEQ ID NO: 6015639 - DNA, 25 bp, Homo sapien
tctagagcacattctgcggcctctg

SEQ ID NO: 6015640 - DNA, 25 bp, Homo sapien
aaccaagtatttcggagtgcctgaa

SEQ ID NO: 6015641 - DNA, 25 bp, Homo sapien
ctgcttctgaatcaaacaagggaat

SEQ ID NO: 6015642 - DNA, 25 bp, Homo sapien
ttagagtcttttacaccatttgtct

SEQ ID NO: 6015643 - DNA, 25 bp, Homo sapien
attttgttagagtcttttacaccat

SEQ ID NO: 6015644 - DNA, 25 bp, Homo sapien
caccaacattttctggcgtcagtcc

SEQ ID NO: 6015645 - DNA, 25 bp, Homo sapien
ctgacccggcaaaacaggtagttat

SEQ ID NO: 6015646 - DNA, 25 bp, Homo sapien
ctatacgtaacagggtgttataagc

SEQ ID NO: 6015647 - DNA, 25 bp, Homo sapien
acccccaggctaagtgccttctcta

SEQ ID NO: 6015648 - DNA, 25 bp, Homo sapien
taacattctcccaccgtcagtacgt

SEQ ID NO: 6015649 - DNA, 25 bp, Homo sapien
gtttcactatccagggtacggatat

SEQ ID NO: 6015650 - DNA, 25 bp, Homo sapien
cggtgctaaccagcgttttcgttct

SEQ ID NO: 6015651 - DNA, 25 bp, Homo sapien
cattggtccagccaccagcttgcat

SEQ ID NO: 6015652 - DNA, 25 bp, Homo sapien
gtgtccagaccaggccaggtatctc

SEQ ID NO: 6015653 - DNA, 25 bp, Homo sapien
taacagggtgttataagcaatcccc

SEQ ID NO: 6015654 - DNA, 25 bp, Homo sapien
caatccccagaaatgccagattacg

SEQ ID NO: 6015655 - DNA, 25 bp, Homo sapien
atgatctccggtattgaaactccag

SEQ ID NO: 6015656 - DNA, 25 bp, Homo sapien
ccagcgcgggccatatctcgcgcgg

SEQ ID NO: 6015657 - DNA, 25 bp, Homo sapien
caggtagttattcggatcatcagct

SEQ ID NO: 6015658 - DNA, 25 bp, Homo sapien
tgagtgaacgaacctggtcgaaatc

SEQ ID NO: 6015659 - DNA, 25 bp, Homo sapien
accgtcagtacgtgagatatcttta

SEQ ID NO: 6015660 - DNA, 25 bp, Homo sapien
ttcggctatacgtaacagggtgtta

SEQ ID NO: 6015661 - DNA, 25 bp, Homo sapien
cattttttctgacccggcaaaacag

SEQ ID NO: 6015662 - DNA, 25 bp, Homo sapien
gagacggaaatccatcgctcgacca

SEQ ID NO: 6015663 - DNA, 25 bp, Homo sapien
cctggcagcgatcgctattttccat

SEQ ID NO: 6015664 - DNA, 25 bp, Homo sapien
gggtacggatatagttcatgacaat

SEQ ID NO: 6015665 - DNA, 25 bp, Homo sapien
gattacgtatatcctggcagcgatc

SEQ ID NO: 6015666 - DNA, 25 bp, Homo sapien
agtgccttctctacacctgcggtgc

SEQ ID NO: 6015667 - DNA, 25 bp, Homo sapien
ggatatagttcatgacaatatttac

SEQ ID NO: 6015668 - DNA, 25 bp, Homo sapien
cgctattttccatgagtgaacgaac

SEQ ID NO: 6015669 - DNA, 25 bp, Homo sapien
tatttacattggtccagccaccagc

SEQ ID NO: 6015670 - DNA, 25 bp, Homo sapien
ggctccgacacgggcactgtgtcca

SEQ ID NO: 6015671 - DNA, 25 bp, Homo sapien
ttattcggatcatcagctacaccag

SEQ ID NO: 6015672 - DNA, 25 bp, Homo sapien
aaccctgatcctggcaatttcggct

SEQ ID NO: 6015673 - DNA, 25 bp, Homo sapien
atgccagattacgtatatcctggca

SEQ ID NO: 6015674 - DNA, 25 bp, Homo sapien
cacctgcggtgctaaccagcgtttt

SEQ ID NO: 6015675 - DNA, 25 bp, Homo sapien
ctggtggcagatggcgcggcaacac

SEQ ID NO: 6015676 - DNA, 25 bp, Homo sapien
ttctctacacctgcggtgctaacca

SEQ ID NO: 6015677 - DNA, 25 bp, Homo sapien
tcagctacaccagagacggaaatcc

SEQ ID NO: 6015678 - DNA, 25 bp, Homo sapien
gaccaggccaggtatctctgaccag

SEQ ID NO: 6015679 - DNA, 25 bp, Homo sapien
caacaccattttttctgacccggca

SEQ ID NO: 6015680 - DNA, 25 bp, Homo sapien
tttccatgagtgaacgaacctggtc

SEQ ID NO: 6015681 - DNA, 25 bp, Homo sapien
tgaccagagtcatccttagcgccgt

SEQ ID NO: 6015682 - DNA, 25 bp, Homo sapien
gagttgatagctggctggtggcaga

SEQ ID NO: 6015683 - DNA, 25 bp, Homo sapien
acaccagagacggaaatccatcgct

SEQ ID NO: 6015684 - DNA, 25 bp, Homo sapien
aggctaagtgccttctctacacctg

SEQ ID NO: 6015685 - DNA, 25 bp, Homo sapien
cgggccatatctcgcgcggctccga

SEQ ID NO: 6015686 - DNA, 25 bp, Homo sapien
tctcccaccgtcagtacgtgagata

SEQ ID NO: 6015687 - DNA, 25 bp, Homo sapien
agcgatcgctattttccatgagtga

SEQ ID NO: 6015688 - DNA, 25 bp, Homo sapien
gatcctggcaatttcggctatacgt

SEQ ID NO: 6015689 - DNA, 25 bp, Homo sapien
gtccagccaccagcttgcatgatct

SEQ ID NO: 6015690 - DNA, 25 bp, Homo sapien
gagttgcttcaaaaatcccttccag

SEQ ID NO: 6015691 - DNA, 25 bp, Homo sapien
gagtcatccttagcgccgtaaatca

SEQ ID NO: 6015692 - DNA, 25 bp, Homo sapien
cttcaaaaatcccttccagggcgcg

SEQ ID NO: 6015693 - DNA, 25 bp, Homo sapien
gccaatatggattaacattctccca

SEQ ID NO: 6015694 - DNA, 25 bp, Homo sapien
cgccgtaaatcaatcgatgagttgc

SEQ ID NO: 6015695 - DNA, 25 bp, Homo sapien
cgaaatcagtgcgttcgaacgctag

SEQ ID NO: 6015696 - DNA, 25 bp, Homo sapien
cttccagggcgcgagttgatagctg

SEQ ID NO: 6015697 - DNA, 25 bp, Homo sapien
gcccctgtttcactatccagggtac

SEQ ID NO: 6015698 - DNA, 25 bp, Homo sapien
ggatcatcagctacaccagagacgg

SEQ ID NO: 6015699 - DNA, 25 bp, Homo sapien
gcttgcatgatctccggtattgaaa

SEQ ID NO: 6015700 - DNA, 25 bp, Homo sapien
cagatggcgcggcaacaccattttt

SEQ ID NO: 6015701 - DNA, 25 bp, Homo sapien
atcgatgagttgcttcaaaaatccc

SEQ ID NO: 6015702 - DNA, 25 bp, Homo sapien
atggattaacattctcccaccgtca

SEQ ID NO: 6015703 - DNA, 25 bp, Homo sapien
ggcactgtgtccagaccaggccagg

SEQ ID NO: 6015704 - DNA, 25 bp, Homo sapien
gaaatccatcgctcgaccagtttag

SEQ ID NO: 6015705 - DNA, 25 bp, Homo sapien
gggcgcgagttgatagctggctggt

SEQ ID NO: 6015706 - DNA, 25 bp, Homo sapien
atctttaaccctgatcctggcaatt

SEQ ID NO: 6015707 - DNA, 25 bp, Homo sapien
gccaggtatctctgaccagagtcat

SEQ ID NO: 6015708 - DNA, 25 bp, Homo sapien
agtacgtgagatatctttaaccctg

SEQ ID NO: 6015709 - DNA, 25 bp, Homo sapien
cgttttcgttctgccaatatggatt

SEQ ID NO: 6015710 - DNA, 25 bp, Homo sapien
aacgaacctggtcgaaatcagtgcg

SEQ ID NO: 6015711 - DNA, 25 bp, Homo sapien
ggcaatttcggctatacgtaacagg

SEQ ID NO: 6015712 - DNA, 25 bp, Homo sapien
agttcatgacaatatttacattggt

SEQ ID NO: 6015713 - DNA, 25 bp, Homo sapien
aaccagcgttttcgttctgccaata

SEQ ID NO: 6015714 - DNA, 25 bp, Homo sapien
cctggtcgaaatcagtgcgttcgaa

SEQ ID NO: 6015715 - DNA, 25 bp, Homo sapien
ccttagcgccgtaaatcaatcgatg

SEQ ID NO: 6015716 - DNA, 25 bp, Homo sapien
tcgcgcggctccgacacgggcactg

SEQ ID NO: 6015717 - DNA, 25 bp, Homo sapien
ccaccagcttgcatgatctccggta

SEQ ID NO: 6015718 - DNA, 25 bp, Homo sapien
cgttctgccaatatggattaacatt

SEQ ID NO: 6015719 - DNA, 25 bp, Homo sapien
ctatccagggtacggatatagttca

SEQ ID NO: 6015720 - DNA, 25 bp, Homo sapien
gacacgggcactgtgtccagaccag

SEQ ID NO: 6015721 - DNA, 25 bp, Homo sapien
tagctggctggtggcagatggcgcg

SEQ ID NO: 6015722 - DNA, 25 bp, Homo sapien
ccagaaatgccagattacgtatatc

SEQ ID NO: 6015723 - DNA, 25 bp, Homo sapien
catcgctcgaccagtttagttaccc

SEQ ID NO: 6015724 - DNA, 25 bp, Homo sapien
gtatatcctggcagcgatcgctatt

SEQ ID NO: 6015725 - DNA, 25 bp, Homo sapien
atatctcgcgcggctccgacacggg

SEQ ID NO: 6015726 - DNA, 25 bp, Homo sapien
tccggtattgaaactccagcgcggg

SEQ ID NO: 6015727 - DNA, 25 bp, Homo sapien
attgaaactccagcgcgggccatat

SEQ ID NO: 6015728 - DNA, 25 bp, Homo sapien
tatctctgaccagagtcatccttag

SEQ ID NO: 6015729 - DNA, 25 bp, Homo sapien
gcaaaacaggtagttattcggatca

SEQ ID NO: 6015730 - DNA, 25 bp, Homo sapien
gcgcggcaacaccattttttctgac

SEQ ID NO: 6015731 - DNA, 25 bp, Homo sapien
tgacaatatttacattggtccagcc

SEQ ID NO: 6015732 - DNA, 25 bp, Homo sapien
tgagatatctttaaccctgatcctg

SEQ ID NO: 6015733 - DNA, 25 bp, Homo sapien
ggtgttataagcaatccccagaaat

SEQ ID NO: 6015734 - DNA, 25 bp, Homo sapien
ataagcaatccccagaaatgccaga

SEQ ID NO: 6015735 - DNA, 25 bp, Homo sapien
aaatcccttccagggcgcgagttga

SEQ ID NO: 6015736 - DNA, 25 bp, Homo sapien
aaatcaatcgatgagttgcttcaaa

SEQ ID NO: 6015737 - DNA, 25 bp, Homo sapien
gcaacattagtaacgtcttccaata

SEQ ID NO: 6015738 - DNA, 25 bp, Homo sapien
cgtcgaaatttcgttgctgtaaggt

SEQ ID NO: 6015739 - DNA, 25 bp, Homo sapien
tttgtaatctgttagtagttgaaac

SEQ ID NO: 6015740 - DNA, 25 bp, Homo sapien
gggcgttatttcatggacagtatta

SEQ ID NO: 6015741 - DNA, 25 bp, Homo sapien
tatttcatggacagtattattttct

SEQ ID NO: 6015742 - DNA, 25 bp, Homo sapien
taatagccggaactgattctaacag

SEQ ID NO: 6015743 - DNA, 25 bp, Homo sapien
gttgaaaccatcatggccgaagtaa

SEQ ID NO: 6015744 - DNA, 25 bp, Homo sapien
tcttgtgggcgttatttcatggaca

SEQ ID NO: 6015745 - DNA, 25 bp, Homo sapien
atgtcatatgaaaagcttcttgtgg

SEQ ID NO: 6015746 - DNA, 25 bp, Homo sapien
attgcagatataacgggagattgag

SEQ ID NO: 6015747 - DNA, 25 bp, Homo sapien
ccataagtatcacgtattgctttta

SEQ ID NO: 6015748 - DNA, 25 bp, Homo sapien
tcagctgagcgtgatactatttctg

SEQ ID NO: 6015749 - DNA, 25 bp, Homo sapien
atggccgaagtaatgtcactatagt

SEQ ID NO: 6015750 - DNA, 25 bp, Homo sapien
cagtaatttgtaatctgttagtagt

SEQ ID NO: 6015751 - DNA, 25 bp, Homo sapien
tatctacgtcgaaatttcgttgctg

SEQ ID NO: 6015752 - DNA, 25 bp, Homo sapien
ctaatgccataagtatcacgtattg

SEQ ID NO: 6015753 - DNA, 25 bp, Homo sapien
ttagtagttgaaaccatcatggccg

SEQ ID NO: 6015754 - DNA, 25 bp, Homo sapien
gaaataaaattgtcagctgagcgtg

SEQ ID NO: 6015755 - DNA, 25 bp, Homo sapien
acactagcagcaacatccttaaccg

SEQ ID NO: 6015756 - DNA, 25 bp, Homo sapien
tcaactattgcagatataacgggag

SEQ ID NO: 6015757 - DNA, 25 bp, Homo sapien
cattactaatgccataagtatcacg

SEQ ID NO: 6015758 - DNA, 25 bp, Homo sapien
cgtattgcttttatagtagcaaaat

SEQ ID NO: 6015759 - DNA, 25 bp, Homo sapien
ctatttgaaataaaattgtcagctg

SEQ ID NO: 6015760 - DNA, 25 bp, Homo sapien
ttaataaatgacaaaatagtgggag

SEQ ID NO: 6015761 - DNA, 25 bp, Homo sapien
aaagcttcttgtgggcgttatttca

SEQ ID NO: 6015762 - DNA, 25 bp, Homo sapien
aatctgttagtagttgaaaccatca

SEQ ID NO: 6015763 - DNA, 25 bp, Homo sapien
cattctataagatctatttgaaata

SEQ ID NO: 6015764 - DNA, 25 bp, Homo sapien
acgggagattgagaagctagtttat

SEQ ID NO: 6015765 - DNA, 25 bp, Homo sapien
atgtcactatagtttaatgaattat

SEQ ID NO: 6015766 - DNA, 25 bp, Homo sapien
gcagcaacatccttaaccgatgaag

SEQ ID NO: 6015767 - DNA, 25 bp, Homo sapien
acatccttaaccgatgaagtaatag

SEQ ID NO: 6015768 - DNA, 25 bp, Homo sapien
tctatcattctataagatctatttg

SEQ ID NO: 6015769 - DNA, 25 bp, Homo sapien
tattttctatcattctataagatct

SEQ ID NO: 6015770 - DNA, 25 bp, Homo sapien
ttagtaacgtcttccaataagtctc

SEQ ID NO: 6015771 - DNA, 25 bp, Homo sapien
gatgccactagtttgtatatgatat

SEQ ID NO: 6015772 - DNA, 25 bp, Homo sapien
tgatatcattactaatgccataagt

SEQ ID NO: 6015773 - DNA, 25 bp, Homo sapien
gcttttatagtagcaaaatcaacta

SEQ ID NO: 6015774 - DNA, 25 bp, Homo sapien
ttcataacactagcagcaacatcct

SEQ ID NO: 6015775 - DNA, 25 bp, Homo sapien
attctattccgtatgagtggattat

SEQ ID NO: 6015776 - DNA, 25 bp, Homo sapien
gatataacgggagattgagaagcta

SEQ ID NO: 6015777 - DNA, 25 bp, Homo sapien
cagtattattttctatcattctata

SEQ ID NO: 6015778 - DNA, 25 bp, Homo sapien
catggacagtattattttctatcat

SEQ ID NO: 6015779 - DNA, 25 bp, Homo sapien
acaaactcccgataattttgctttg

SEQ ID NO: 6015780 - DNA, 25 bp, Homo sapien
gaagtaatgtcactatagtttaatg

SEQ ID NO: 6015781 - DNA, 25 bp, Homo sapien
ttctaaattttttcataacactagc

SEQ ID NO: 6015782 - DNA, 25 bp, Homo sapien
agaatttatctacgtcgaaatttcg

SEQ ID NO: 6015783 - DNA, 25 bp, Homo sapien
ctaacagattagaaaatgttaatgg

SEQ ID NO: 6015784 - DNA, 25 bp, Homo sapien
taattttgctttgctgcttttttga

SEQ ID NO: 6015785 - DNA, 25 bp, Homo sapien
agtttaatgaattattattcctagc

SEQ ID NO: 6015786 - DNA, 25 bp, Homo sapien
gctgcttttttgaacattttagtat

SEQ ID NO: 6015787 - DNA, 25 bp, Homo sapien
aagtatctacatcagtaatttgtaa

SEQ ID NO: 6015788 - DNA, 25 bp, Homo sapien
ctatagtttaatgaattattattcc

SEQ ID NO: 6015789 - DNA, 25 bp, Homo sapien
accatcatggccgaagtaatgtcac

SEQ ID NO: 6015790 - DNA, 25 bp, Homo sapien
ccaatgacaaactcccgataatttt

SEQ ID NO: 6015791 - DNA, 25 bp, Homo sapien
gtttatagaatttatctacgtcgaa

SEQ ID NO: 6015792 - DNA, 25 bp, Homo sapien
gtgggagcgtcagatgccactagtt

SEQ ID NO: 6015793 - DNA, 25 bp, Homo sapien
gatgaagtaatagccggaactgatt

SEQ ID NO: 6015794 - DNA, 25 bp, Homo sapien
tccaataagtctccaatgacaaact

SEQ ID NO: 6015795 - DNA, 25 bp, Homo sapien
ctgattctaacagattagaaaatgt

SEQ ID NO: 6015796 - DNA, 25 bp, Homo sapien
tcctagcaacattagtaacgtcttc

SEQ ID NO: 6015797 - DNA, 25 bp, Homo sapien
aagctagtttatagaatttatctac

SEQ ID NO: 6015798 - DNA, 25 bp, Homo sapien
aattttttcataacactagcagcaa

SEQ ID NO: 6015799 - DNA, 25 bp, Homo sapien
ccggaactgattctaacagattaga

SEQ ID NO: 6015800 - DNA, 25 bp, Homo sapien
ctacatcagtaatttgtaatctgtt

SEQ ID NO: 6015801 - DNA, 25 bp, Homo sapien
aatgacaaaatagtgggagcgtcag

SEQ ID NO: 6015802 - DNA, 25 bp, Homo sapien
acgtcttccaataagtctccaatga

SEQ ID NO: 6015803 - DNA, 25 bp, Homo sapien
ttaaccgatgaagtaatagccggaa

SEQ ID NO: 6015804 - DNA, 25 bp, Homo sapien
ttccgtatgagtggattatcctgat

SEQ ID NO: 6015805 - DNA, 25 bp, Homo sapien
tcctgattaataaatgacaaaatag

SEQ ID NO: 6015806 - DNA, 25 bp, Homo sapien
gattgagaagctagtttatagaatt

SEQ ID NO: 6015807 - DNA, 25 bp, Homo sapien
atgagtggattatcctgattaataa

SEQ ID NO: 6015808 - DNA, 25 bp, Homo sapien
cgttgctgtaaggttttaatgtcat

SEQ ID NO: 6015809 - DNA, 25 bp, Homo sapien
gcgtcagatgccactagtttgtata

SEQ ID NO: 6015810 - DNA, 25 bp, Homo sapien
gtatcacgtattgcttttatagtag

SEQ ID NO: 6015811 - DNA, 25 bp, Homo sapien
tcccgataattttgctttgctgctt

SEQ ID NO: 6015812 - DNA, 25 bp, Homo sapien
gatactatttctgagaaagtatcta

SEQ ID NO: 6015813 - DNA, 25 bp, Homo sapien
tgtaaggttttaatgtcatatgaaa

SEQ ID NO: 6015814 - DNA, 25 bp, Homo sapien
atagtagcaaaatcaactattgcag

SEQ ID NO: 6015815 - DNA, 25 bp, Homo sapien
aaaatagtgggagcgtcagatgcca

SEQ ID NO: 6015816 - DNA, 25 bp, Homo sapien
gttttaatgtcatatgaaaagcttc

SEQ ID NO: 6015817 - DNA, 25 bp, Homo sapien
actagtttgtatatgatatcattac

SEQ ID NO: 6015818 - DNA, 25 bp, Homo sapien
tgtatatgatatcattactaatgcc

SEQ ID NO: 6015819 - DNA, 25 bp, Homo sapien
aagatctatttgaaataaaattgtc

SEQ ID NO: 6015820 - DNA, 25 bp, Homo sapien
aaattgtcagctgagcgtgatacta

SEQ ID NO: 6015821 - DNA, 25 bp, Homo sapien
gcaaaatcaactattgcagatataa

SEQ ID NO: 6015822 - DNA, 25 bp, Homo sapien
aagtctccaatgacaaactcccgat

SEQ ID NO: 6015823 - DNA, 25 bp, Homo sapien
gagcgtgatactatttctgagaaag

SEQ ID NO: 6015824 - DNA, 25 bp, Homo sapien
tatgaaaagcttcttgtgggcgtta

SEQ ID NO: 6015825 - DNA, 25 bp, Homo sapien
tgctttgctgcttttttgaacattt

SEQ ID NO: 6015826 - DNA, 25 bp, Homo sapien
tattattcctagcaacattagtaac

SEQ ID NO: 6015827 - DNA, 25 bp, Homo sapien
atgaattattattcctagcaacatt

SEQ ID NO: 6015828 - DNA, 25 bp, Homo sapien
gagaaagtatctacatcagtaattt

SEQ ID NO: 6015829 - DNA, 25 bp, Homo sapien
ggattatcctgattaataaatgaca

SEQ ID NO: 6015830 - DNA, 25 bp, Homo sapien
atttcgttgctgtaaggttttaatg

SEQ ID NO: 6015831 - DNA, 25 bp, Homo sapien
aaatcaatcgatgagttgcttcaaa

SEQ ID NO: 6015832 - DNA, 25 bp, Homo sapien
ctgacccggcaaaacaggtagttat

SEQ ID NO: 6015833 - DNA, 25 bp, Homo sapien
acccccaggctaagtgccttctcta

SEQ ID NO: 6015834 - DNA, 25 bp, Homo sapien
ctatacgtaacagggtgttataagc

SEQ ID NO: 6015835 - DNA, 25 bp, Homo sapien
taacattctcccaccgtcagtacgt

SEQ ID NO: 6015836 - DNA, 25 bp, Homo sapien
ccagcgcgggccatatctcgcgcgg

SEQ ID NO: 6015837 - DNA, 25 bp, Homo sapien
gtttcactatccaggttacggatat

SEQ ID NO: 6015838 - DNA, 25 bp, Homo sapien
cggtgctaaccagcgttttcgttct

SEQ ID NO: 6015839 - DNA, 25 bp, Homo sapien
gtgtccagaccaggccaggtatctc

SEQ ID NO: 6015840 - DNA, 25 bp, Homo sapien
taacagggtgttataagcaatcccc

SEQ ID NO: 6015841 - DNA, 25 bp, Homo sapien
caatccccagaaatgccagattacg

SEQ ID NO: 6015842 - DNA, 25 bp, Homo sapien
atgatctccggtattgaaactccag

SEQ ID NO: 6015843 - DNA, 25 bp, Homo sapien
cattggtccagccaccagcttgcat

SEQ ID NO: 6015844 - DNA, 25 bp, Homo sapien
caggtagttattcggatcatcagct

SEQ ID NO: 6015845 - DNA, 25 bp, Homo sapien
tgagtgaacgaacctggtcgaaatc

SEQ ID NO: 6015846 - DNA, 25 bp, Homo sapien
accgtcagtacgtgagatatcttta

SEQ ID NO: 6015847 - DNA, 25 bp, Homo sapien
ggttacggatatagttcatgacaat

SEQ ID NO: 6015848 - DNA, 25 bp, Homo sapien
cattttttctgacccggcaaaacag

SEQ ID NO: 6015849 - DNA, 25 bp, Homo sapien
cctggcagcgatcgctattttccat

SEQ ID NO: 6015850 - DNA, 25 bp, Homo sapien
gagacggaaatccatcgctcgacca

SEQ ID NO: 6015851 - DNA, 25 bp, Homo sapien
ttattcggatcatcagctacaccag

SEQ ID NO: 6015852 - DNA, 25 bp, Homo sapien
gattacgtatatcctggcagcgatc

SEQ ID NO: 6015853 - DNA, 25 bp, Homo sapien
tatttacattggtccagccaccagc

SEQ ID NO: 6015854 - DNA, 25 bp, Homo sapien
agtgccttctctacacctgcggtgc

SEQ ID NO: 6015855 - DNA, 25 bp, Homo sapien
cgctattttccatgagtgaacgaac

SEQ ID NO: 6015856 - DNA, 25 bp, Homo sapien
ggctccgacacgggcactgtgtcca

SEQ ID NO: 6015857 - DNA, 25 bp, Homo sapien
ggatatagttcatgacaatatttac

SEQ ID NO: 6015858 - DNA, 25 bp, Homo sapien
aaccctgatcctggcaatttcggct

SEQ ID NO: 6015859 - DNA, 25 bp, Homo sapien
cacctgcggtgctaaccagcgtttt

SEQ ID NO: 6015860 - DNA, 25 bp, Homo sapien
atgccagattacgtatatcctggca

SEQ ID NO: 6015861 - DNA, 25 bp, Homo sapien
ttctctacacctgcggtgctaacca

SEQ ID NO: 6015862 - DNA, 25 bp, Homo sapien
gcccctgtttcactatccaggttac

SEQ ID NO: 6015863 - DNA, 25 bp, Homo sapien
tcagctacaccagagacggaaatcc

SEQ ID NO: 6015864 - DNA, 25 bp, Homo sapien
gaccaggccaggtatctctgaccag

SEQ ID NO: 6015865 - DNA, 25 bp, Homo sapien
ctggtggcagatggcgcggcaacac

SEQ ID NO: 6015866 - DNA, 25 bp, Homo sapien
caacaccattttttctgacccggca

SEQ ID NO: 6015867 - DNA, 25 bp, Homo sapien
tgaccagagtcatccttagcgccgt

SEQ ID NO: 6015868 - DNA, 25 bp, Homo sapien
acaccagagacggaaatccatcgct

SEQ ID NO: 6015869 - DNA, 25 bp, Homo sapien
gagttgatagctggctggtggcaga

SEQ ID NO: 6015870 - DNA, 25 bp, Homo sapien
tttccatgagtgaacgaacctggtc

SEQ ID NO: 6015871 - DNA, 25 bp, Homo sapien
gatcctggcaatttcggctatacgt

SEQ ID NO: 6015872 - DNA, 25 bp, Homo sapien
aggctaagtgccttctctacacctg

SEQ ID NO: 6015873 - DNA, 25 bp, Homo sapien
tctcccaccgtcagtacgtgagata

SEQ ID NO: 6015874 - DNA, 25 bp, Homo sapien
gtccagccaccagcttgcatgatct

SEQ ID NO: 6015875 - DNA, 25 bp, Homo sapien
gccaggtatctctgaccagagtcat

SEQ ID NO: 6015876 - DNA, 25 bp, Homo sapien
agcgatcgctattttccatgagtga

SEQ ID NO: 6015877 - DNA, 25 bp, Homo sapien
cgggccatatctcgcgcggctccga

SEQ ID NO: 6015878 - DNA, 25 bp, Homo sapien
gagttgcttcaaaaatcccttccag

SEQ ID NO: 6015879 - DNA, 25 bp, Homo sapien
cttcaaaaatcccttccagggcgcg

SEQ ID NO: 6015880 - DNA, 25 bp, Homo sapien
gagtcatccttagcgccgtaaatca

SEQ ID NO: 6015881 - DNA, 25 bp, Homo sapien
cttccagggcgcgagttgatagctg

SEQ ID NO: 6015882 - DNA, 25 bp, Homo sapien
cgccgtaaatcaatcgatgagttgc

SEQ ID NO: 6015883 - DNA, 25 bp, Homo sapien
gccaatatggattaacattctccca

SEQ ID NO: 6015884 - DNA, 25 bp, Homo sapien
cgaaatcagtgcgttcgaacgctag

SEQ ID NO: 6015885 - DNA, 25 bp, Homo sapien
cagatggcgcggcaacaccattttt

SEQ ID NO: 6015886 - DNA, 25 bp, Homo sapien
ggatcatcagctacaccagagacgg

SEQ ID NO: 6015887 - DNA, 25 bp, Homo sapien
gcttgcatgatctccggtattgaaa

SEQ ID NO: 6015888 - DNA, 25 bp, Homo sapien
atcgatgagttgcttcaaaaatccc

SEQ ID NO: 6015889 - DNA, 25 bp, Homo sapien
atggattaacattctcccaccgtca

SEQ ID NO: 6015890 - DNA, 25 bp, Homo sapien
ggcactgtgtccagaccaggccagg

SEQ ID NO: 6015891 - DNA, 25 bp, Homo sapien
gggcgcgagttgatagctggctggt

SEQ ID NO: 6015892 - DNA, 25 bp, Homo sapien
gaaatccatcgctcgaccagtttag

SEQ ID NO: 6015893 - DNA, 25 bp, Homo sapien
aacgaacctggtcgaaatcagtgcg

SEQ ID NO: 6015894 - DNA, 25 bp, Homo sapien
agtacgtgagatatctttaaccctg

SEQ ID NO: 6015895 - DNA, 25 bp, Homo sapien
agttcatgacaatatttacattggt

SEQ ID NO: 6015896 - DNA, 25 bp, Homo sapien
ttcggctatacgtaacagggtgtta

SEQ ID NO: 6015897 - DNA, 25 bp, Homo sapien
aaccagcgttttcgttctgccaata

SEQ ID NO: 6015898 - DNA, 25 bp, Homo sapien
cgttttcgttctgccaatatggatt

SEQ ID NO: 6015899 - DNA, 25 bp, Homo sapien
cctggtcgaaatcagtgcgttcgaa

SEQ ID NO: 6015900 - DNA, 25 bp, Homo sapien
ccttagcgccgtaaatcaatcgatg

SEQ ID NO: 6015901 - DNA, 25 bp, Homo sapien
ggcaatttcggctatacgtaacagg

SEQ ID NO: 6015902 - DNA, 25 bp, Homo sapien
tcgcgcggctccgacacgggcactg

SEQ ID NO: 6015903 - DNA, 25 bp, Homo sapien
gacacgggcactgtgtccagaccag

SEQ ID NO: 6015904 - DNA, 25 bp, Homo sapien
tagctggctggtggcagatggcgcg

SEQ ID NO: 6015905 - DNA, 25 bp, Homo sapien
cgttctgccaatatggattaacatt

SEQ ID NO: 6015906 - DNA, 25 bp, Homo sapien
ccagaaatgccagattacgtatatc

SEQ ID NO: 6015907 - DNA, 25 bp, Homo sapien
ctatccaggttacggatatagttca

SEQ ID NO: 6015908 - DNA, 25 bp, Homo sapien
ccaccagcttgcatgatctccggta

SEQ ID NO: 6015909 - DNA, 25 bp, Homo sapien
tccggtattgaaactccagcgcggg

SEQ ID NO: 6015910 - DNA, 25 bp, Homo sapien
catcgctcgaccagtttagttaccc

SEQ ID NO: 6015911 - DNA, 25 bp, Homo sapien
gtatatcctggcagcgatcgctatt

SEQ ID NO: 6015912 - DNA, 25 bp, Homo sapien
atatctcgcgcggctccgacacggg

SEQ ID NO: 6015913 - DNA, 25 bp, Homo sapien
attgaaactccagcgcgggccatat

SEQ ID NO: 6015914 - DNA, 25 bp, Homo sapien
atctttaaccctgatcctggcaatt

SEQ ID NO: 6015915 - DNA, 25 bp, Homo sapien
tgacaatatttacattggtccagcc

SEQ ID NO: 6015916 - DNA, 25 bp, Homo sapien
tgagatatctttaaccctgatcctg

SEQ ID NO: 6015917 - DNA, 25 bp, Homo sapien
gcgcggcaacaccattttttctgac

SEQ ID NO: 6015918 - DNA, 25 bp, Homo sapien
ggtgttataagcaatccccagaaat

SEQ ID NO: 6015919 - DNA, 25 bp, Homo sapien
tatctctgaccagagtcatccttag

SEQ ID NO: 6015920 - DNA, 25 bp, Homo sapien
ataagcaatccccagaaatgccaga

SEQ ID NO: 6015921 - DNA, 25 bp, Homo sapien
aaatcccttccagggcgcgagttga

SEQ ID NO: 6015922 - DNA, 25 bp, Homo sapien
gcaaaacaggtagttattcggatca

SEQ ID NO: 6015923 - DNA, 25 bp, Homo sapien
tattatcctcataaagcattgtaat

SEQ ID NO: 6015924 - DNA, 25 bp, Homo sapien
cctcataaagcattgtaatcttctc

SEQ ID NO: 6015925 - DNA, 25 bp, Homo sapien
agaataagggtgtctaacagctaca

SEQ ID NO: 6015926 - DNA, 25 bp, Homo sapien
tcgtagttttgactaacttgccatt

SEQ ID NO: 6015927 - DNA, 25 bp, Homo sapien
taccactcgaatacttctatctact

SEQ ID NO: 6015928 - DNA, 25 bp, Homo sapien
aaacaatctggtgcatagtctgaaa

SEQ ID NO: 6015929 - DNA, 25 bp, Homo sapien
tgccattcatttctattaacacaaa

SEQ ID NO: 6015930 - DNA, 25 bp, Homo sapien
tcaactccctacacataccacaagg

SEQ ID NO: 6015931 - DNA, 25 bp, Homo sapien
gcttcaatatgtactgccgaaatga

SEQ ID NO: 6015932 - DNA, 25 bp, Homo sapien
aactgcactaccaatggcaatggct

SEQ ID NO: 6015933 - DNA, 25 bp, Homo sapien
agttactcgtcctatatacgcttca

SEQ ID NO: 6015934 - DNA, 25 bp, Homo sapien
ttgtaatcttctctgtcgctacttc

SEQ ID NO: 6015935 - DNA, 25 bp, Homo sapien
agctacaatcgtgtcaaaatccttt

SEQ ID NO: 6015936 - DNA, 25 bp, Homo sapien
tcatttctattaacacaaaacaatc

SEQ ID NO: 6015937 - DNA, 25 bp, Homo sapien
cctgttttcgtacgaattgccgctc

SEQ ID NO: 6015938 - DNA, 25 bp, Homo sapien
aatggcttctgcacaaacagttact

SEQ ID NO: 6015939 - DNA, 25 bp, Homo sapien
tctattaacacaaaacaatctggtg

SEQ ID NO: 6015940 - DNA, 25 bp, Homo sapien
tctactaattctagatcttgttgag

SEQ ID NO: 6015941 - DNA, 25 bp, Homo sapien
ttcgtcagaataagggtgtctaaca

SEQ ID NO: 6015942 - DNA, 25 bp, Homo sapien
aattctagatcttgttgagaaatgt

SEQ ID NO: 6015943 - DNA, 25 bp, Homo sapien
aaagcattgtaatcttctctgtcgc

SEQ ID NO: 6015944 - DNA, 25 bp, Homo sapien
acacataccacaaggacttaccact

SEQ ID NO: 6015945 - DNA, 25 bp, Homo sapien
tctaacagctacaatcgtgtcaaaa

SEQ ID NO: 6015946 - DNA, 25 bp, Homo sapien
agatcttgttgagaaatgttaaatg

SEQ ID NO: 6015947 - DNA, 25 bp, Homo sapien
gcatagtctgaaatcaactccctac

SEQ ID NO: 6015948 - DNA, 25 bp, Homo sapien
tctgaaatcaactccctacacatac

SEQ ID NO: 6015949 - DNA, 25 bp, Homo sapien
atccttttgtccattcgaaactgca

SEQ ID NO: 6015950 - DNA, 25 bp, Homo sapien
tcgaatacttctatctacttcgtca

SEQ ID NO: 6015951 - DNA, 25 bp, Homo sapien
accacaaggacttaccactcgaata

SEQ ID NO: 6015952 - DNA, 25 bp, Homo sapien
cgaattgccgctcccacatgatgtt

SEQ ID NO: 6015953 - DNA, 25 bp, Homo sapien
ttctgcacaaacagttactcgtcct

SEQ ID NO: 6015954 - DNA, 25 bp, Homo sapien
tctggtgcatagtctgaaatcaact

SEQ ID NO: 6015955 - DNA, 25 bp, Homo sapien
aatggcaatggcttctgcacaaaca

SEQ ID NO: 6015956 - DNA, 25 bp, Homo sapien
agggtgtctaacagctacaatcgtg

SEQ ID NO: 6015957 - DNA, 25 bp, Homo sapien
gctacttctactaattctagatctt

SEQ ID NO: 6015958 - DNA, 25 bp, Homo sapien
tccctacacataccacaaggactta

SEQ ID NO: 6015959 - DNA, 25 bp, Homo sapien
aacacaaaacaatctggtgcatagt

SEQ ID NO: 6015960 - DNA, 25 bp, Homo sapien
attcgaaactgcactaccaatggca

SEQ ID NO: 6015961 - DNA, 25 bp, Homo sapien
atctacttcgtcagaataagggtgt

SEQ ID NO: 6015962 - DNA, 25 bp, Homo sapien
acttctatctacttcgtcagaataa

SEQ ID NO: 6015963 - DNA, 25 bp, Homo sapien
ttttgactaacttgccattcatttc

SEQ ID NO: 6015964 - DNA, 25 bp, Homo sapien
cttcaatcgtagttttgactaactt

SEQ ID NO: 6015965 - DNA, 25 bp, Homo sapien
tcttctctgtcgctacttctactaa

SEQ ID NO: 6015966 - DNA, 25 bp, Homo sapien
ttcgtacgaattgccgctcccacat

SEQ ID NO: 6015967 - DNA, 25 bp, Homo sapien
aatcgtgtcaaaatccttttgtcca

SEQ ID NO: 6015968 - DNA, 25 bp, Homo sapien
gaaatgatttctcctgttttcgtac

SEQ ID NO: 6015969 - DNA, 25 bp, Homo sapien
actgccgaaatgatttctcctgttt

SEQ ID NO: 6015970 - DNA, 25 bp, Homo sapien
gtcaaaatccttttgtccattcgaa

SEQ ID NO: 6015971 - DNA, 25 bp, Homo sapien
tgttgagaaatgttaaatgttttca

SEQ ID NO: 6015972 - DNA, 25 bp, Homo sapien
actaccaatggcaatggcttctgca

SEQ ID NO: 6015973 - DNA, 25 bp, Homo sapien
gatgtttattatcctcataaagcat

SEQ ID NO: 6015974 - DNA, 25 bp, Homo sapien
tcgtcctatatacgcttcaatatgt

SEQ ID NO: 6015975 - DNA, 25 bp, Homo sapien
ttgtccattcgaaactgcactacca

SEQ ID NO: 6015976 - DNA, 25 bp, Homo sapien
aggacttaccactcgaatacttcta

SEQ ID NO: 6015977 - DNA, 25 bp, Homo sapien
atttctcctgttttcgtacgaattg

SEQ ID NO: 6015978 - DNA, 25 bp, Homo sapien
atatgtactgccgaaatgatttctc

SEQ ID NO: 6015979 - DNA, 25 bp, Homo sapien
ctaacttgccattcatttctattaa

SEQ ID NO: 6015980 - DNA, 25 bp, Homo sapien
ccacatgatgtttattatcctcata

SEQ ID NO: 6015981 - DNA, 25 bp, Homo sapien
atatacgcttcaatatgtactgccg

SEQ ID NO: 6015982 - DNA, 25 bp, Homo sapien
ccgctcccacatgatgtttattatc

SEQ ID NO: 6015983 - DNA, 25 bp, Homo sapien
tctgtcgctacttctactaattcta

SEQ ID NO: 6015984 - DNA, 25 bp, Homo sapien
acaaacagttactcgtcctatatac

SEQ ID NO: 6015985 - DNA, 25 bp, Homo sapien
atcttatcaagggtcagtttaggaa

SEQ ID NO: 6015986 - DNA, 25 bp, Homo sapien
ccctgcagcttcagccccgaccatg

SEQ ID NO: 6015987 - DNA, 25 bp, Homo sapien
tgggcactgacctctgaaaatgtca

SEQ ID NO: 6015988 - DNA, 25 bp, Homo sapien
ctgacctctgaaaatgtcaaaaaat

SEQ ID NO: 6015989 - DNA, 25 bp, Homo sapien
ggatgatgagaccagcctgggtttc

SEQ ID NO: 6015990 - DNA, 25 bp, Homo sapien
tttccaggagtgagattgacttaaa

SEQ ID NO: 6015991 - DNA, 25 bp, Homo sapien
atttctaggtatgtgtataccgccc

SEQ ID NO: 6015992 - DNA, 25 bp, Homo sapien
agattgacttaaatcttatcaaggg

SEQ ID NO: 6015993 - DNA, 25 bp, Homo sapien
cacaaaatctcctgggcacagggca

SEQ ID NO: 6015994 - DNA, 25 bp, Homo sapien
gcttctgacccggatgatgagacca

SEQ ID NO: 6015995 - DNA, 25 bp, Homo sapien
cctagcattacctctgagcaaacgg

SEQ ID NO: 6015996 - DNA, 25 bp, Homo sapien
gtgtataccgcccaccctagcatta

SEQ ID NO: 6015997 - DNA, 25 bp, Homo sapien
accttgtgggcactgacctctgaaa

SEQ ID NO: 6015998 - DNA, 25 bp, Homo sapien
cttctgttgcccagtttctgatgct

SEQ ID NO: 6015999 - DNA, 25 bp, Homo sapien
tgctgaaccttgtgggcactgacct

SEQ ID NO: 6016000 - DNA, 25 bp, Homo sapien
ccgacaccagtggttactacaagac

SEQ ID NO: 6016001 - DNA, 25 bp, Homo sapien
taaggaacattgtttccaggagtga

SEQ ID NO: 6016002 - DNA, 25 bp, Homo sapien
ctgccctgctgaaccttgtgggcac

SEQ ID NO: 6016003 - DNA, 25 bp, Homo sapien
agatgtacggcaagactctcagcag

SEQ ID NO: 6016004 - DNA, 25 bp, Homo sapien
tgggcacagggcacacagatgcctt

SEQ ID NO: 6016005 - DNA, 25 bp, Homo sapien
cagggacacgtgatggaacgctgat

SEQ ID NO: 6016006 - DNA, 25 bp, Homo sapien
tgtgggtcattccttccccttcaca

SEQ ID NO: 6016007 - DNA, 25 bp, Homo sapien
tttagtcttctgttgcccagtttct

SEQ ID NO: 6016008 - DNA, 25 bp, Homo sapien
agactctcagcagcatgatcatggc

SEQ ID NO: 6016009 - DNA, 25 bp, Homo sapien
gtgggggtaggggacacctcatctg

SEQ ID NO: 6016010 - DNA, 25 bp, Homo sapien
ccatctactgagtcagggtcttcag

SEQ ID NO: 6016011 - DNA, 25 bp, Homo sapien
tgacccggatgatgagaccagcctg

SEQ ID NO: 6016012 - DNA, 25 bp, Homo sapien
acaagactgccctgctgaaccttgt

SEQ ID NO: 6016013 - DNA, 25 bp, Homo sapien
gtcagtttaggaagatgtacggcaa

SEQ ID NO: 6016014 - DNA, 25 bp, Homo sapien
gcaagaagtgtgagcccagcccctg

SEQ ID NO: 6016015 - DNA, 25 bp, Homo sapien
atctcctgggcacagggcacacaga

SEQ ID NO: 6016016 - DNA, 25 bp, Homo sapien
acggcaagactctcagcagcatgat

SEQ ID NO: 6016017 - DNA, 25 bp, Homo sapien
cttccccttcacacaaaatctcctg

SEQ ID NO: 6016018 - DNA, 25 bp, Homo sapien
cttgcagtgtcctgtgggtcattcc

SEQ ID NO: 6016019 - DNA, 25 bp, Homo sapien
agtgtgagcccagcccctgcagctt

SEQ ID NO: 6016020 - DNA, 25 bp, Homo sapien
agtttctgatgcttctcatcccatg

SEQ ID NO: 6016021 - DNA, 25 bp, Homo sapien
gggtaggggacacctcatctggctt

SEQ ID NO: 6016022 - DNA, 25 bp, Homo sapien
cagggcacacagatgccttggctct

SEQ ID NO: 6016023 - DNA, 25 bp, Homo sapien
attacctctgagcaaacggaaacat

SEQ ID NO: 6016024 - DNA, 25 bp, Homo sapien
aggtatgtgtataccgcccacccta

SEQ ID NO: 6016025 - DNA, 25 bp, Homo sapien
cgctgataaggaacattgtttccag

SEQ ID NO: 6016026 - DNA, 25 bp, Homo sapien
gcagagagactctactacgccatga

SEQ ID NO: 6016027 - DNA, 25 bp, Homo sapien
atggaacgctgataaggaacattgt

SEQ ID NO: 6016028 - DNA, 25 bp, Homo sapien
tcccatgcttctgacccggatgatg

SEQ ID NO: 6016029 - DNA, 25 bp, Homo sapien
ttggctctgacccatctactgagtc

SEQ ID NO: 6016030 - DNA, 25 bp, Homo sapien
ccagtggttactacaagactgccct

SEQ ID NO: 6016031 - DNA, 25 bp, Homo sapien
gatgccttggctctgacccatctac

SEQ ID NO: 6016032 - DNA, 25 bp, Homo sapien
acacagatgccttggctctgaccca

SEQ ID NO: 6016033 - DNA, 25 bp, Homo sapien
tctgagcaaacggaaacatcaacat

SEQ ID NO: 6016034 - DNA, 25 bp, Homo sapien
tcattccttccccttcacacaaaat

SEQ ID NO: 6016035 - DNA, 25 bp, Homo sapien
caaacggaaacatcaacatgaagaa

SEQ ID NO: 6016036 - DNA, 25 bp, Homo sapien
tcccttccacctctcccgtcagtca

SEQ ID NO: 6016037 - DNA, 25 bp, Homo sapien
tctgaaaatgtcaaaaaatagaaca

SEQ ID NO: 6016038 - DNA, 25 bp, Homo sapien
tcagggtcttcagaggaagaaccaa

SEQ ID NO: 6016039 - DNA, 25 bp, Homo sapien
gttactacaagactgccctgctgaa

SEQ ID NO: 6016040 - DNA, 25 bp, Homo sapien
ctggcttttagtcttctgttgccca

SEQ ID NO: 6016041 - DNA, 25 bp, Homo sapien
ctcccgtcagtcatttctaggtatg

SEQ ID NO: 6016042 - DNA, 25 bp, Homo sapien
tactacgccatgaagggagcaggga

SEQ ID NO: 6016043 - DNA, 25 bp, Homo sapien
gaaacatcaacatgaagaaagaagc

SEQ ID NO: 6016044 - DNA, 25 bp, Homo sapien
acttaaatcttatcaagggtcagtt

SEQ ID NO: 6016045 - DNA, 25 bp, Homo sapien
gagactctactacgccatgaaggga

SEQ ID NO: 6016046 - DNA, 25 bp, Homo sapien
tctgacccatctactgagtcagggt

SEQ ID NO: 6016047 - DNA, 25 bp, Homo sapien
tgaagaaagaagcttgcagtgtcct

SEQ ID NO: 6016048 - DNA, 25 bp, Homo sapien
acattgtttccaggagtgagattga

SEQ ID NO: 6016049 - DNA, 25 bp, Homo sapien
tcagtcatttctaggtatgtgtata

SEQ ID NO: 6016050 - DNA, 25 bp, Homo sapien
caaaaaatagaacaagggcaagaag

SEQ ID NO: 6016051 - DNA, 25 bp, Homo sapien
actgagtcagggtcttcagaggaag

SEQ ID NO: 6016052 - DNA, 25 bp, Homo sapien
aatgtcaaaaaatagaacaagggca

SEQ ID NO: 6016053 - DNA, 25 bp, Homo sapien
cttcacacaaaatctcctgggcaca

SEQ ID NO: 6016054 - DNA, 25 bp, Homo sapien
agcttcagccccgaccatgggtggg

SEQ ID NO: 6016055 - DNA, 25 bp, Homo sapien
agggagcagggacacgtgatggaac

SEQ ID NO: 6016056 - DNA, 25 bp, Homo sapien
tgatgcttctcatcccatgcttctg

SEQ ID NO: 6016057 - DNA, 25 bp, Homo sapien
tcagcagcatgatcatggccgacac

SEQ ID NO: 6016058 - DNA, 25 bp, Homo sapien
gggacacctcatctggcttttagtc

SEQ ID NO: 6016059 - DNA, 25 bp, Homo sapien
gtgtcctgtgggtcattccttcccc

SEQ ID NO: 6016060 - DNA, 25 bp, Homo sapien
acaagggcaagaagtgtgagcccag

SEQ ID NO: 6016061 - DNA, 25 bp, Homo sapien
ggagtgagattgacttaaatcttat

SEQ ID NO: 6016062 - DNA, 25 bp, Homo sapien
ttctcatcccatgcttctgacccgg

SEQ ID NO: 6016063 - DNA, 25 bp, Homo sapien
aagaagcttgcagtgtcctgtgggt

SEQ ID NO: 6016064 - DNA, 25 bp, Homo sapien
gcccaccctagcattacctctgagc

SEQ ID NO: 6016065 - DNA, 25 bp, Homo sapien
cctcatctggcttttagtcttctgt

SEQ ID NO: 6016066 - DNA, 25 bp, Homo sapien
ccatgaagggagcagggacacgtga

SEQ ID NO: 6016067 - DNA, 25 bp, Homo sapien
cacgtgatggaacgctgataaggaa

SEQ ID NO: 6016068 - DNA, 25 bp, Homo sapien
ttaggaagatgtacggcaagactct

SEQ ID NO: 6016069 - DNA, 25 bp, Homo sapien
taccgcccaccctagcattacctct

SEQ ID NO: 6016070 - DNA, 25 bp, Homo sapien
atagaacaagggcaagaagtgtgag

SEQ ID NO: 6016071 - DNA, 25 bp, Homo sapien
tgagaccagcctgggtttcccttcc

SEQ ID NO: 6016072 - DNA, 25 bp, Homo sapien
ttgcccagtttctgatgcttctcat

SEQ ID NO: 6016073 - DNA, 25 bp, Homo sapien
gcatgatcatggccgacaccagtgg

SEQ ID NO: 6016074 - DNA, 25 bp, Homo sapien
tcaagggtcagtttaggaagatgta

SEQ ID NO: 6016075 - DNA, 25 bp, Homo sapien
tcatggccgacaccagtggttacta

SEQ ID NO: 6016076 - DNA, 25 bp, Homo sapien
tcaacatgaagaaagaagcttgcag

SEQ ID NO: 6016077 - DNA, 25 bp, Homo sapien
ccacctctcccgtcagtcatttcta

SEQ ID NO: 6016078 - DNA, 25 bp, Homo sapien
tgactgacgggagaggtggaaggga

SEQ ID NO: 6016079 - DNA, 25 bp, Homo sapien
tcatgttcttcaggctcggagacca

SEQ ID NO: 6016080 - DNA, 25 bp, Homo sapien
gttcttcctctgaagaccctgactc

SEQ ID NO: 6016081 - DNA, 25 bp, Homo sapien
cagaggtaatgctagggtgggcggt

SEQ ID NO: 6016082 - DNA, 25 bp, Homo sapien
ccgattggcagagctatgtgaccct

SEQ ID NO: 6016083 - DNA, 25 bp, Homo sapien
ccacctagagcctaacaatttccgt

SEQ ID NO: 6016084 - DNA, 25 bp, Homo sapien
caagcttctttcttcatgttgatgt

SEQ ID NO: 6016085 - DNA, 25 bp, Homo sapien
tcactggctgcctgataatgatgct

SEQ ID NO: 6016086 - DNA, 25 bp, Homo sapien
atgggtcagagccaaggcatctgtg

SEQ ID NO: 6016087 - DNA, 25 bp, Homo sapien
gtgctattaggatggtgtaagaatt

SEQ ID NO: 6016088 - DNA, 25 bp, Homo sapien
tcagaccacagcgtacttgggtcag

SEQ ID NO: 6016089 - DNA, 25 bp, Homo sapien
tgtcctctcatagaggtgctctccc

SEQ ID NO: 6016090 - DNA, 25 bp, Homo sapien
cgatcagaggatgggattcatgctc

SEQ ID NO: 6016091 - DNA, 25 bp, Homo sapien
ttagcagctaagacaactgctagaa

SEQ ID NO: 6016092 - DNA, 25 bp, Homo sapien
ttgatgtttccgtttgctcagaggt

SEQ ID NO: 6016093 - DNA, 25 bp, Homo sapien
gtctgcaagcttcagcatggaggga

SEQ ID NO: 6016094 - DNA, 25 bp, Homo sapien
gaggtgctctcccacatgctcactg

SEQ ID NO: 6016095 - DNA, 25 bp, Homo sapien
tgaccctttctcagatccacggccg

SEQ ID NO: 6016096 - DNA, 25 bp, Homo sapien
taatgcgtgctattaggatggtgta

SEQ ID NO: 6016097 - DNA, 25 bp, Homo sapien
tccttggttcttcctctgaagaccc

SEQ ID NO: 6016098 - DNA, 25 bp, Homo sapien
tctttcttcatgttgatgtttccgt

SEQ ID NO: 6016099 - DNA, 25 bp, Homo sapien
tatacacatacctagaaatgactga

SEQ ID NO: 6016100 - DNA, 25 bp, Homo sapien
cggccgtgtcctctcatagaggtgc

SEQ ID NO: 6016101 - DNA, 25 bp, Homo sapien
tttctcagatccacggccgtgtcct

SEQ ID NO: 6016102 - DNA, 25 bp, Homo sapien
gaagagttctgtcatgttcttcagg

SEQ ID NO: 6016103 - DNA, 25 bp, Homo sapien
ttccgttaagtgagtgtcccgattg

SEQ ID NO: 6016104 - DNA, 25 bp, Homo sapien
tagggtgggcggtatacacatacct

SEQ ID NO: 6016105 - DNA, 25 bp, Homo sapien
aaatccatgttccttggttcttcct

SEQ ID NO: 6016106 - DNA, 25 bp, Homo sapien
cagagccaaggcatctgtgtgccct

SEQ ID NO: 6016107 - DNA, 25 bp, Homo sapien
cctctgaagaccctgactcagtaga

SEQ ID NO: 6016108 - DNA, 25 bp, Homo sapien
tgatgcttagcagctaagacaactg

SEQ ID NO: 6016109 - DNA, 25 bp, Homo sapien
tttgctcagaggtaatgctagggtg

SEQ ID NO: 6016110 - DNA, 25 bp, Homo sapien
atgctcagggctgggcggctcccta

SEQ ID NO: 6016111 - DNA, 25 bp, Homo sapien
ctcatagaggtgctctcccacatgc

SEQ ID NO: 6016112 - DNA, 25 bp, Homo sapien
gttctgtcatgttcttcaggctcgg

SEQ ID NO: 6016113 - DNA, 25 bp, Homo sapien
ttcatgttgatgtttccgtttgctc

SEQ ID NO: 6016114 - DNA, 25 bp, Homo sapien
aatgactggacaagcccgagtttct

SEQ ID NO: 6016115 - DNA, 25 bp, Homo sapien
ggctgggcggctccctagtctgcaa

SEQ ID NO: 6016116 - DNA, 25 bp, Homo sapien
taatgctagggtgggcggtatacac

SEQ ID NO: 6016117 - DNA, 25 bp, Homo sapien
gatccacggccgtgtcctctcatag

SEQ ID NO: 6016118 - DNA, 25 bp, Homo sapien
ctctcccacatgctcactggctgcc

SEQ ID NO: 6016119 - DNA, 25 bp, Homo sapien
taacaatttccgttaagtgagtgtc

SEQ ID NO: 6016120 - DNA, 25 bp, Homo sapien
acactgcaagcttctttcttcatgt

SEQ ID NO: 6016121 - DNA, 25 bp, Homo sapien
ccacagcgtacttgggtcaggacgg

SEQ ID NO: 6016122 - DNA, 25 bp, Homo sapien
cttcaggctcggagaccacgatcag

SEQ ID NO: 6016123 - DNA, 25 bp, Homo sapien
tggtgtaagaattttcctccaccta

SEQ ID NO: 6016124 - DNA, 25 bp, Homo sapien
acaactgctagaaatccatgttcct

SEQ ID NO: 6016125 - DNA, 25 bp, Homo sapien
gctaagacaactgctagaaatccat

SEQ ID NO: 6016126 - DNA, 25 bp, Homo sapien
ggagggaatgactggacaagcccga

SEQ ID NO: 6016127 - DNA, 25 bp, Homo sapien
ttaggatggtgtaagaattttcctc

SEQ ID NO: 6016128 - DNA, 25 bp, Homo sapien
ttaagtgagtgtcccgattggcaga

SEQ ID NO: 6016129 - DNA, 25 bp, Homo sapien
ggcggctccctagtctgcaagcttc

SEQ ID NO: 6016130 - DNA, 25 bp, Homo sapien
tgacccacaggacactgcaagcttc

SEQ ID NO: 6016131 - DNA, 25 bp, Homo sapien
ggcagagctatgtgaccctttctca

SEQ ID NO: 6016132 - DNA, 25 bp, Homo sapien
caaggcatctgtgtgccctgtgccc

SEQ ID NO: 6016133 - DNA, 25 bp, Homo sapien
gctcggagaccacgatcagaggatg

SEQ ID NO: 6016134 - DNA, 25 bp, Homo sapien
tgtaatcccatctaatgcgtgctat

SEQ ID NO: 6016135 - DNA, 25 bp, Homo sapien
catacctagaaatgactgacgggag

SEQ ID NO: 6016136 - DNA, 25 bp, Homo sapien
aggatgggattcatgctcagggctg

SEQ ID NO: 6016137 - DNA, 25 bp, Homo sapien
atctgtgtgccctgtgcccaggaga

SEQ ID NO: 6016138 - DNA, 25 bp, Homo sapien
gctatgtgaccctttctcagatcca

SEQ ID NO: 6016139 - DNA, 25 bp, Homo sapien
agcccgagtttctcagaccacagcg

SEQ ID NO: 6016140 - DNA, 25 bp, Homo sapien
tgtgaaggggaaggaatgacccaca

SEQ ID NO: 6016141 - DNA, 25 bp, Homo sapien
ggattcatgctcagggctgggcggc

SEQ ID NO: 6016142 - DNA, 25 bp, Homo sapien
cacaggacactgcaagcttctttct

SEQ ID NO: 6016143 - DNA, 25 bp, Homo sapien
cagtagatgggtcagagccaaggca

SEQ ID NO: 6016144 - DNA, 25 bp, Homo sapien
agtttctcagaccacagcgtacttg

SEQ ID NO: 6016145 - DNA, 25 bp, Homo sapien
agaccacgatcagaggatgggattc

SEQ ID NO: 6016146 - DNA, 25 bp, Homo sapien
cacatgctcactggctgcctgataa

SEQ ID NO: 6016147 - DNA, 25 bp, Homo sapien
cagcatggagggaatgactggacaa

SEQ ID NO: 6016148 - DNA, 25 bp, Homo sapien
gggatttgtaatcccatctaatgcg

SEQ ID NO: 6016149 - DNA, 25 bp, Homo sapien
gctgcctgataatgatgcttagcag

SEQ ID NO: 6016150 - DNA, 25 bp, Homo sapien
tgataatgatgcttagcagctaaga

SEQ ID NO: 6016151 - DNA, 25 bp, Homo sapien
aaggaatgacccacaggacactgca

SEQ ID NO: 6016152 - DNA, 25 bp, Homo sapien
tggacaagcccgagtttctcagacc

SEQ ID NO: 6016153 - DNA, 25 bp, Homo sapien
aagaattttcctccacctagagcct

SEQ ID NO: 6016154 - DNA, 25 bp, Homo sapien
aagcttcagcatggagggaatgact

SEQ ID NO: 6016155 - DNA, 25 bp, Homo sapien
tccctagtctgcaagcttcagcatg

SEQ ID NO: 6016156 - DNA, 25 bp, Homo sapien
agagcctaacaatttccgttaagtg

SEQ ID NO: 6016157 - DNA, 25 bp, Homo sapien
tttcctccacctagagcctaacaat

SEQ ID NO: 6016158 - DNA, 25 bp, Homo sapien
gtgccctgtgcccaggagattttgt

SEQ ID NO: 6016159 - DNA, 25 bp, Homo sapien
gggcggtatacacatacctagaaat

SEQ ID NO: 6016160 - DNA, 25 bp, Homo sapien
cccatctaatgcgtgctattaggat

SEQ ID NO: 6016161 - DNA, 25 bp, Homo sapien
ctgactcagtagatgggtcagagcc

SEQ ID NO: 6016162 - DNA, 25 bp, Homo sapien
aagaccctgactcagtagatgggtc

SEQ ID NO: 6016163 - DNA, 25 bp, Homo sapien
tttccgtttgctcagaggtaatgct

SEQ ID NO: 6016164 - DNA, 25 bp, Homo sapien
tgtgcccaggagattttgtgtgaag

SEQ ID NO: 6016165 - DNA, 25 bp, Homo sapien
aggacggggatttgtaatcccatct

SEQ ID NO: 6016166 - DNA, 25 bp, Homo sapien
aggggaaggaatgacccacaggaca

SEQ ID NO: 6016167 - DNA, 25 bp, Homo sapien
agtgtcccgattggcagagctatgt

SEQ ID NO: 6016168 - DNA, 25 bp, Homo sapien
ccatgttccttggttcttcctctga

SEQ ID NO: 6016169 - DNA, 25 bp, Homo sapien
tagaaatgactgacgggagaggtgg

SEQ ID NO: 6016170 - DNA, 25 bp, Homo sapien
tgttcaacaggccagccattacgct

SEQ ID NO: 6016171 - DNA, 25 bp, Homo sapien
gagcgagacgaaatacgcgatcgct

SEQ ID NO: 6016172 - DNA, 25 bp, Homo sapien
gaggcagttccataggatggcaaga

SEQ ID NO: 6016173 - DNA, 25 bp, Homo sapien
atacctggaatgctgttttgccggg

SEQ ID NO: 6016174 - DNA, 25 bp, Homo sapien
gccggggatcgcagtggtgagtaac

SEQ ID NO: 6016175 - DNA, 25 bp, Homo sapien
cttctaatacctggaatgctgtttt

SEQ ID NO: 6016176 - DNA, 25 bp, Homo sapien
tacaaacaggaatcgaatgcaaccg

SEQ ID NO: 6016177 - DNA, 25 bp, Homo sapien
aaaggacaattacaaacaggaatcg

SEQ ID NO: 6016178 - DNA, 25 bp, Homo sapien
aatacgcgatcgctgttaaaaggac

SEQ ID NO: 6016179 - DNA, 25 bp, Homo sapien
ttatcaagtgagaaatcaccatgag

SEQ ID NO: 6016180 - DNA, 25 bp, Homo sapien
agtgagaaatcaccatgagtgacga

SEQ ID NO: 6016181 - DNA, 25 bp, Homo sapien
gcaaccggcgcaggaacactgccag

SEQ ID NO: 6016182 - DNA, 25 bp, Homo sapien
gcgcatcaacaatattttcacctga

SEQ ID NO: 6016183 - DNA, 25 bp, Homo sapien
ctcaccgaggcagttccataggatg

SEQ ID NO: 6016184 - DNA, 25 bp, Homo sapien
cataaattccgtcagccagtttagt

SEQ ID NO: 6016185 - DNA, 25 bp, Homo sapien
taggatggcaagatcctggtatcgg

SEQ ID NO: 6016186 - DNA, 25 bp, Homo sapien
tgaaaaagccgtttctgtaatgaag

SEQ ID NO: 6016187 - DNA, 25 bp, Homo sapien
gtatcggtctgcgattccgactcgt

SEQ ID NO: 6016188 - DNA, 25 bp, Homo sapien
gtctgcgattccgactcgtccaaca

SEQ ID NO: 6016189 - DNA, 25 bp, Homo sapien
gcgcctgagcgagacgaaatacgcg

SEQ ID NO: 6016190 - DNA, 25 bp, Homo sapien
ggcgcaggaacactgccagcgcatc

SEQ ID NO: 6016191 - DNA, 25 bp, Homo sapien
tcattcgtgattgcgcctgagcgag

SEQ ID NO: 6016192 - DNA, 25 bp, Homo sapien
agtggtgagtaaccatgcatcatca

SEQ ID NO: 6016193 - DNA, 25 bp, Homo sapien
gccgtttctgtaatgaaggagaaaa

SEQ ID NO: 6016194 - DNA, 25 bp, Homo sapien
cacctgaatcaggatattcttctaa

SEQ ID NO: 6016195 - DNA, 25 bp, Homo sapien
tctgaccatctcatctgtaacatca

SEQ ID NO: 6016196 - DNA, 25 bp, Homo sapien
gacaattacaaacaggaatcgaatg

SEQ ID NO: 6016197 - DNA, 25 bp, Homo sapien
gatcgcagtggtgagtaaccatgca

SEQ ID NO: 6016198 - DNA, 25 bp, Homo sapien
ttttgccggggatcgcagtggtgag

SEQ ID NO: 6016199 - DNA, 25 bp, Homo sapien
cttgatggtcggaagaggcataaat

SEQ ID NO: 6016200 - DNA, 25 bp, Homo sapien
caataccatatttttgaaaaagccg

SEQ ID NO: 6016201 - DNA, 25 bp, Homo sapien
ctgttaaaaggacaattacaaacag

SEQ ID NO: 6016202 - DNA, 25 bp, Homo sapien
aaaatgcttgatggtcggaagaggc

SEQ ID NO: 6016203 - DNA, 25 bp, Homo sapien
caggaatcgaatgcaaccggcgcag

SEQ ID NO: 6016204 - DNA, 25 bp, Homo sapien
ccatgcatcatcaggagtacggata

SEQ ID NO: 6016205 - DNA, 25 bp, Homo sapien
gattccgactcgtccaacatcaata

SEQ ID NO: 6016206 - DNA, 25 bp, Homo sapien
ccaaaccgttattcattcgtgattg

SEQ ID NO: 6016207 - DNA, 25 bp, Homo sapien
tttattcatatcaggattatcaata

SEQ ID NO: 6016208 - DNA, 25 bp, Homo sapien
gtttagtctgaccatctcatctgta

SEQ ID NO: 6016209 - DNA, 25 bp, Homo sapien
catatcaggattatcaataccatat

SEQ ID NO: 6016210 - DNA, 25 bp, Homo sapien
ctgcaatttattcatatcaggatta

SEQ ID NO: 6016211 - DNA, 25 bp, Homo sapien
catatttttgaaaaagccgtttctg

SEQ ID NO: 6016212 - DNA, 25 bp, Homo sapien
tattttcacctgaatcaggatattc

SEQ ID NO: 6016213 - DNA, 25 bp, Homo sapien
gttccataggatggcaagatcctgg

SEQ ID NO: 6016214 - DNA, 25 bp, Homo sapien
tcgtcatcaaaatcactcgcatcaa

SEQ ID NO: 6016215 - DNA, 25 bp, Homo sapien
atcctggtatcggtctgcgattccg

SEQ ID NO: 6016216 - DNA, 25 bp, Homo sapien
cagacttgttcaacaggccagccat

SEQ ID NO: 6016217 - DNA, 25 bp, Homo sapien
cctcgtcaaaaataaggttatcaag

SEQ ID NO: 6016218 - DNA, 25 bp, Homo sapien
caacaatattttcacctgaatcagg

SEQ ID NO: 6016219 - DNA, 25 bp, Homo sapien
gtccaacatcaatacaacctattaa

SEQ ID NO: 6016220 - DNA, 25 bp, Homo sapien
agcttatgcatttctttccagactt

SEQ ID NO: 6016221 - DNA, 25 bp, Homo sapien
ttccgtcagccagtttagtctgacc

SEQ ID NO: 6016222 - DNA, 25 bp, Homo sapien
tcgaatgcaaccggcgcaggaacac

SEQ ID NO: 6016223 - DNA, 25 bp, Homo sapien
aatcaggatattcttctaatacctg

SEQ ID NO: 6016224 - DNA, 25 bp, Homo sapien
ccatgagtgacgactgaatccggtg

SEQ ID NO: 6016225 - DNA, 25 bp, Homo sapien
tcaaaaataaggttatcaagtgaga

SEQ ID NO: 6016226 - DNA, 25 bp, Homo sapien
actgaatccggtgagaatggcaaaa

SEQ ID NO: 6016227 - DNA, 25 bp, Homo sapien
gacgaaatacgcgatcgctgttaaa

SEQ ID NO: 6016228 - DNA, 25 bp, Homo sapien
tctttccagacttgttcaacaggcc

SEQ ID NO: 6016229 - DNA, 25 bp, Homo sapien
aggagtacggataaaatgcttgatg

SEQ ID NO: 6016230 - DNA, 25 bp, Homo sapien
gtgacgactgaatccggtgagaatg

SEQ ID NO: 6016231 - DNA, 25 bp, Homo sapien
ctgtaatgaaggagaaaactcaccg

SEQ ID NO: 6016232 - DNA, 25 bp, Homo sapien
atcaaaatcactcgcatcaaccaaa

SEQ ID NO: 6016233 - DNA, 25 bp, Homo sapien
ggattatcaataccatatttttgaa

SEQ ID NO: 6016234 - DNA, 25 bp, Homo sapien
cagccagtttagtctgaccatctca

SEQ ID NO: 6016235 - DNA, 25 bp, Homo sapien
cgttattcattcgtgattgcgcctg

SEQ ID NO: 6016236 - DNA, 25 bp, Homo sapien
tcactcgcatcaaccaaaccgttat

SEQ ID NO: 6016237 - DNA, 25 bp, Homo sapien
catcaatacaacctattaatttccc

SEQ ID NO: 6016238 - DNA, 25 bp, Homo sapien
ctgccagcgcatcaacaatattttc

SEQ ID NO: 6016239 - DNA, 25 bp, Homo sapien
gagtaaccatgcatcatcaggagta

SEQ ID NO: 6016240 - DNA, 25 bp, Homo sapien
ggtcggaagaggcataaattccgtc

SEQ ID NO: 6016241 - DNA, 25 bp, Homo sapien
aaatcaccatgagtgacgactgaat

SEQ ID NO: 6016242 - DNA, 25 bp, Homo sapien
acaggccagccattacgctcgtcat

SEQ ID NO: 6016243 - DNA, 25 bp, Homo sapien
aagaggcataaattccgtcagccag

SEQ ID NO: 6016244 - DNA, 25 bp, Homo sapien
agaaaactcaccgaggcagttccat

SEQ ID NO: 6016245 - DNA, 25 bp, Homo sapien
gagaatggcaaaagcttatgcattt

SEQ ID NO: 6016246 - DNA, 25 bp, Homo sapien
gtgattgcgcctgagcgagacgaaa

SEQ ID NO: 6016247 - DNA, 25 bp, Homo sapien
ggaacactgccagcgcatcaacaat

SEQ ID NO: 6016248 - DNA, 25 bp, Homo sapien
ttacgctcgtcatcaaaatcactcg

SEQ ID NO: 6016249 - DNA, 25 bp, Homo sapien
acggataaaatgcttgatggtcgga

SEQ ID NO: 6016250 - DNA, 25 bp, Homo sapien
tccggtgagaatggcaaaagcttat

SEQ ID NO: 6016251 - DNA, 25 bp, Homo sapien
gatattcttctaatacctggaatgc

SEQ ID NO: 6016252 - DNA, 25 bp, Homo sapien
cagccattacgctcgtcatcaaaat

SEQ ID NO: 6016253 - DNA, 25 bp, Homo sapien
tgcatttctttccagacttgttcaa

SEQ ID NO: 6016254 - DNA, 25 bp, Homo sapien
ggcaaaagcttatgcatttctttcc

SEQ ID NO: 6016255 - DNA, 25 bp, Homo sapien
ataaggttatcaagtgagaaatcac

SEQ ID NO: 6016256 - DNA, 25 bp, Homo sapien
gactcgtccaacatcaatacaacct

SEQ ID NO: 6016257 - DNA, 25 bp, Homo sapien
cgatcgctgttaaaaggacaattac

SEQ ID NO: 6016258 - DNA, 25 bp, Homo sapien
atcatcaggagtacggataaaatgc

SEQ ID NO: 6016259 - DNA, 25 bp, Homo sapien
gcatcaaccaaaccgttattcattc

SEQ ID NO: 6016260 - DNA, 25 bp, Homo sapien
tgaaggagaaaactcaccgaggcag

SEQ ID NO: 6016261 - DNA, 25 bp, Homo sapien
ggcaagatcctggtatcggtctgcg

SEQ ID NO: 6016262 - DNA, 25 bp, Homo sapien
gtcagggcttctggatattcccatt

SEQ ID NO: 6016263 - DNA, 25 bp, Homo sapien
acctgattccaagtttccactctct

SEQ ID NO: 6016264 - DNA, 25 bp, Homo sapien
ccacagaccaagtcagggcttctgg

SEQ ID NO: 6016265 - DNA, 25 bp, Homo sapien
tggttgtttattctcaaagtcactc

SEQ ID NO: 6016266 - DNA, 25 bp, Homo sapien
agagcaataaagcttcctacgatgg

SEQ ID NO: 6016267 - DNA, 25 bp, Homo sapien
acagggactacagaaatatgagtcc

SEQ ID NO: 6016268 - DNA, 25 bp, Homo sapien
caagcacccgtggaggatgttcctg

SEQ ID NO: 6016269 - DNA, 25 bp, Homo sapien
tacgatggaaatgtatcctgccacc

SEQ ID NO: 6016270 - DNA, 25 bp, Homo sapien
caaacactatatgcaactcacattt

SEQ ID NO: 6016271 - DNA, 25 bp, Homo sapien
gagggacctgaaggagggatgaatt

SEQ ID NO: 6016272 - DNA, 25 bp, Homo sapien
taatccttaaagctctgaaagaaaa

SEQ ID NO: 6016273 - DNA, 25 bp, Homo sapien
tctagatccagtactatgacaggga

SEQ ID NO: 6016274 - DNA, 25 bp, Homo sapien
caaaccttagctgttgagaaagtaa

SEQ ID NO: 6016275 - DNA, 25 bp, Homo sapien
ttttgttcattttgatctagaaatc

SEQ ID NO: 6016276 - DNA, 25 bp, Homo sapien
gacagcaacccaaggacccaaacaa

SEQ ID NO: 6016277 - DNA, 25 bp, Homo sapien
gcaagtcaagcacccgtggaggatg

SEQ ID NO: 6016278 - DNA, 25 bp, Homo sapien
acagcttccttcatgatgaacactg

SEQ ID NO: 6016279 - DNA, 25 bp, Homo sapien
gatcaacacccctcagcagcagtgg

SEQ ID NO: 6016280 - DNA, 25 bp, Homo sapien
aataaagcttcctacgatggaaatg

SEQ ID NO: 6016281 - DNA, 25 bp, Homo sapien
ttctatggaccatcaccaagccaca

SEQ ID NO: 6016282 - DNA, 25 bp, Homo sapien
agaaaaatcaactccctcgatcaac

SEQ ID NO: 6016283 - DNA, 25 bp, Homo sapien
tgagtccaaacactatatgcaactc

SEQ ID NO: 6016284 - DNA, 25 bp, Homo sapien
tttattctcaaagtcactcttgttt

SEQ ID NO: 6016285 - DNA, 25 bp, Homo sapien
gttgagaaagtaagagcaataaagc

SEQ ID NO: 6016286 - DNA, 25 bp, Homo sapien
ctatatgcaactcacattttctatg

SEQ ID NO: 6016287 - DNA, 25 bp, Homo sapien
gggggattttgttcattttgatcta

SEQ ID NO: 6016288 - DNA, 25 bp, Homo sapien
ctcaaagtcactcttgttttgtttt

SEQ ID NO: 6016289 - DNA, 25 bp, Homo sapien
tcatcacaaagccacagaccaagtc

SEQ ID NO: 6016290 - DNA, 25 bp, Homo sapien
caaacatctggagactctcatatgg

SEQ ID NO: 6016291 - DNA, 25 bp, Homo sapien
caaggacccaaacaaacatctggag

SEQ ID NO: 6016292 - DNA, 25 bp, Homo sapien
gaggatgttcctgggtgaacagctt

SEQ ID NO: 6016293 - DNA, 25 bp, Homo sapien
ggatattcccattgctttttaacag

SEQ ID NO: 6016294 - DNA, 25 bp, Homo sapien
acagttatgggtcaaaccttagctg

SEQ ID NO: 6016295 - DNA, 25 bp, Homo sapien
tcattttgatctagaaatctaagtt

SEQ ID NO: 6016296 - DNA, 25 bp, Homo sapien
gttcctgggtgaacagcttccttca

SEQ ID NO: 6016297 - DNA, 25 bp, Homo sapien
atgggtcaaaccttagctgttgaga

SEQ ID NO: 6016298 - DNA, 25 bp, Homo sapien
gggtgaacagcttccttcatgatga

SEQ ID NO: 6016299 - DNA, 25 bp, Homo sapien
catatggacagcaacccaaggaccc

SEQ ID NO: 6016300 - DNA, 25 bp, Homo sapien
tcttgttttgttttgagttgtttga

SEQ ID NO: 6016301 - DNA, 25 bp, Homo sapien
tgccacctagctgggtacccatatg

SEQ ID NO: 6016302 - DNA, 25 bp, Homo sapien
tgatctagaaatctaagttttttaa

SEQ ID NO: 6016303 - DNA, 25 bp, Homo sapien
atgatgaacactgagaccacctgat

SEQ ID NO: 6016304 - DNA, 25 bp, Homo sapien
ttaacatcatcacaaagccacagac

SEQ ID NO: 6016305 - DNA, 25 bp, Homo sapien
cacattttctatggaccatcaccaa

SEQ ID NO: 6016306 - DNA, 25 bp, Homo sapien
ggaaatgtatcctgccacctagctg

SEQ ID NO: 6016307 - DNA, 25 bp, Homo sapien
tgctttttaacagttatgggtcaaa

SEQ ID NO: 6016308 - DNA, 25 bp, Homo sapien
gcttctggatattcccattgctttt

SEQ ID NO: 6016309 - DNA, 25 bp, Homo sapien
actatgacagggactacagaaatat

SEQ ID NO: 6016310 - DNA, 25 bp, Homo sapien
tccagtactatgacagggactacag

SEQ ID NO: 6016311 - DNA, 25 bp, Homo sapien
gagaccacctgattccaagtttcca

SEQ ID NO: 6016312 - DNA, 25 bp, Homo sapien
gaaatatgagtccaaacactatatg

SEQ ID NO: 6016313 - DNA, 25 bp, Homo sapien
tctggagactctcatatggacatta

SEQ ID NO: 6016314 - DNA, 25 bp, Homo sapien
gactctcatatggacattacacatg

SEQ ID NO: 6016315 - DNA, 25 bp, Homo sapien
ggccctgcaagtcaagcacccgtgg

SEQ ID NO: 6016316 - DNA, 25 bp, Homo sapien
ggaccatcaccaagccacaaggaaa

SEQ ID NO: 6016317 - DNA, 25 bp, Homo sapien
attccaagtttccactctctagatc

SEQ ID NO: 6016318 - DNA, 25 bp, Homo sapien
tcccattgctttttaacagttatgg

SEQ ID NO: 6016319 - DNA, 25 bp, Homo sapien
actacagaaatatgagtccaaacac

SEQ ID NO: 6016320 - DNA, 25 bp, Homo sapien
gcttcctacgatggaaatgtatcct

SEQ ID NO: 6016321 - DNA, 25 bp, Homo sapien
tccttcatgatgaacactgagacca

SEQ ID NO: 6016322 - DNA, 25 bp, Homo sapien
accaagtcagggcttctggatattc

SEQ ID NO: 6016323 - DNA, 25 bp, Homo sapien
atcaactccctcgatcaacacccct

SEQ ID NO: 6016324 - DNA, 25 bp, Homo sapien
tctgaaagaaaaatcaactccctcg

SEQ ID NO: 6016325 - DNA, 25 bp, Homo sapien
gacattacacatgagggacctgaag

SEQ ID NO: 6016326 - DNA, 25 bp, Homo sapien
tagctgggtacccatatggacagca

SEQ ID NO: 6016327 - DNA, 25 bp, Homo sapien
agcagtggccctgcaagtcaagcac

SEQ ID NO: 6016328 - DNA, 25 bp, Homo sapien
cactctctagatccagtactatgac

SEQ ID NO: 6016329 - DNA, 25 bp, Homo sapien
tccctcgatcaacacccctcagcag

SEQ ID NO: 6016330 - DNA, 25 bp, Homo sapien
aaaatctaatccttaaagctctgaa

SEQ ID NO: 6016331 - DNA, 25 bp, Homo sapien
cccgtggaggatgttcctgggtgaa

SEQ ID NO: 6016332 - DNA, 25 bp, Homo sapien
ggtacccatatggacagcaacccaa

SEQ ID NO: 6016333 - DNA, 25 bp, Homo sapien
acacatgagggacctgaaggaggga

SEQ ID NO: 6016334 - DNA, 25 bp, Homo sapien
atgaattggttgtttattctcaaag

SEQ ID NO: 6016335 - DNA, 25 bp, Homo sapien
agtttccactctctagatccagtac

SEQ ID NO: 6016336 - DNA, 25 bp, Homo sapien
cccaaacaaacatctggagactctc

SEQ ID NO: 6016337 - DNA, 25 bp, Homo sapien
ctcagcagcagtggccctgcaagtc

SEQ ID NO: 6016338 - DNA, 25 bp, Homo sapien
gcaactcacattttctatggaccat

SEQ ID NO: 6016339 - DNA, 25 bp, Homo sapien
acaaagccacagaccaagtcagggc

SEQ ID NO: 6016340 - DNA, 25 bp, Homo sapien
aacactgagaccacctgattccaag

SEQ ID NO: 6016341 - DNA, 25 bp, Homo sapien
acacccctcagcagcagtggccctg

SEQ ID NO: 6016342 - DNA, 25 bp, Homo sapien
catatggacattacacatgagggac

SEQ ID NO: 6016343 - DNA, 25 bp, Homo sapien
taaagctctgaaagaaaaatcaact

SEQ ID NO: 6016344 - DNA, 25 bp, Homo sapien
cctgaaggagggatgaattggttgt

SEQ ID NO: 6016345 - DNA, 25 bp, Homo sapien
ggagggatgaattggttgtttattc

SEQ ID NO: 6016346 - DNA, 25 bp, Homo sapien
aaagtaagagcaataaagcttccta

SEQ ID NO: 6016347 - DNA, 25 bp, Homo sapien
ttagctgttgagaaagtaagagcaa

SEQ ID NO: 6016348 - DNA, 25 bp, Homo sapien
gtatcctgccacctagctgggtacc

SEQ ID NO: 6016349 - DNA, 25 bp, Homo sapien
tcaccaagccacaaggaaagggctt

SEQ ID NO: 6016350 - DNA, 25 bp, Homo sapien
cacgggtgcttgacttgcagggcca

SEQ ID NO: 6016351 - DNA, 25 bp, Homo sapien
tcatcatgaaggaagctgttcaccc

SEQ ID NO: 6016352 - DNA, 25 bp, Homo sapien
gtgaactgttcaagttcttctatag

SEQ ID NO: 6016353 - DNA, 25 bp, Homo sapien
agtccctgtcatagtactggatcta

SEQ ID NO: 6016354 - DNA, 25 bp, Homo sapien
cattaatagtgaagagtaaagaaaa

SEQ ID NO: 6016355 - DNA, 25 bp, Homo sapien
gtgttcaaattggacttctgtgaac

SEQ ID NO: 6016356 - DNA, 25 bp, Homo sapien
agtactggatctagagagtggaaac

SEQ ID NO: 6016357 - DNA, 25 bp, Homo sapien
agtgtttggactcatatttctgtag

SEQ ID NO: 6016358 - DNA, 25 bp, Homo sapien
gatcgagggagttgatttttctttc

SEQ ID NO: 6016359 - DNA, 25 bp, Homo sapien
tcttccagtggcttcaatgtagtca

SEQ ID NO: 6016360 - DNA, 25 bp, Homo sapien
tgttctcatcaatgtaaacacaaca

SEQ ID NO: 6016361 - DNA, 25 bp, Homo sapien
gaagaggttcgtgccaacacttgga

SEQ ID NO: 6016362 - DNA, 25 bp, Homo sapien
aagtagttccatgaagccctttcct

SEQ ID NO: 6016363 - DNA, 25 bp, Homo sapien
tgtcatagtactggatctagagagt

SEQ ID NO: 6016364 - DNA, 25 bp, Homo sapien
aaaatgtgagttgcatatagtgttt

SEQ ID NO: 6016365 - DNA, 25 bp, Homo sapien
cactttcaacagtgaggcagggaag

SEQ ID NO: 6016366 - DNA, 25 bp, Homo sapien
gaacacagagatacctgacccattt

SEQ ID NO: 6016367 - DNA, 25 bp, Homo sapien
catatgcacaatgaagaggttcgtg

SEQ ID NO: 6016368 - DNA, 25 bp, Homo sapien
acttgcagggccactgctgctgagg

SEQ ID NO: 6016369 - DNA, 25 bp, Homo sapien
cacaatgaagaggttcgtgccaaca

SEQ ID NO: 6016370 - DNA, 25 bp, Homo sapien
atcctccacgggtgcttgacttgca

SEQ ID NO: 6016371 - DNA, 25 bp, Homo sapien
ctttccttgtggcttggtgatggtc

SEQ ID NO: 6016372 - DNA, 25 bp, Homo sapien
caacagtgaggcagggaagaacaca

SEQ ID NO: 6016373 - DNA, 25 bp, Homo sapien
tgaggcagggaagaacacagagata

SEQ ID NO: 6016374 - DNA, 25 bp, Homo sapien
atacaagtgttcaaattggacttct

SEQ ID NO: 6016375 - DNA, 25 bp, Homo sapien
gatggtccatagaaaatgtgagttg

SEQ ID NO: 6016376 - DNA, 25 bp, Homo sapien
tgcttgacttgcagggccactgctg

SEQ ID NO: 6016377 - DNA, 25 bp, Homo sapien
cttggtgatggtccatagaaaatgt

SEQ ID NO: 6016378 - DNA, 25 bp, Homo sapien
ttccatgaagccctttccttgtggc

SEQ ID NO: 6016379 - DNA, 25 bp, Homo sapien
tgatttttctttcagagctttaagg

SEQ ID NO: 6016380 - DNA, 25 bp, Homo sapien
catatttctgtagtccctgtcatag

SEQ ID NO: 6016381 - DNA, 25 bp, Homo sapien
ggtgttgatcgagggagttgatttt

SEQ ID NO: 6016382 - DNA, 25 bp, Homo sapien
atcaggtggtctcagtgttcatcat

SEQ ID NO: 6016383 - DNA, 25 bp, Homo sapien
ccatagaaaatgtgagttgcatata

SEQ ID NO: 6016384 - DNA, 25 bp, Homo sapien
cttggaatcaggtggtctcagtgtt

SEQ ID NO: 6016385 - DNA, 25 bp, Homo sapien
aagaaaatgggtccagtgtcttcca

SEQ ID NO: 6016386 - DNA, 25 bp, Homo sapien
tctgtagtccctgtcatagtactgg

SEQ ID NO: 6016387 - DNA, 25 bp, Homo sapien
gcccaagaagggaatcataccttct

SEQ ID NO: 6016388 - DNA, 25 bp, Homo sapien
tgctgaagtagttccatgaagccct

SEQ ID NO: 6016389 - DNA, 25 bp, Homo sapien
tggaaacttggaatcaggtggtctc

SEQ ID NO: 6016390 - DNA, 25 bp, Homo sapien
ctccctcactttcaacagtgaggca

SEQ ID NO: 6016391 - DNA, 25 bp, Homo sapien
ttgtggcttggtgatggtccataga

SEQ ID NO: 6016392 - DNA, 25 bp, Homo sapien
tgtaaacacaacattaatagtgaag

SEQ ID NO: 6016393 - DNA, 25 bp, Homo sapien
aagctgttcacccaggaacatcctc

SEQ ID NO: 6016394 - DNA, 25 bp, Homo sapien
aatgggtccagtgtcttccatatgc

SEQ ID NO: 6016395 - DNA, 25 bp, Homo sapien
agttcttctataggcccaagaaggg

SEQ ID NO: 6016396 - DNA, 25 bp, Homo sapien
tgtgagtgctgaagtagttccatga

SEQ ID NO: 6016397 - DNA, 25 bp, Homo sapien
ccactgctgctgaggggtgttgatc

SEQ ID NO: 6016398 - DNA, 25 bp, Homo sapien
agagatacctgacccatttcttcca

SEQ ID NO: 6016399 - DNA, 25 bp, Homo sapien
aagttcatcagctccctcactttca

SEQ ID NO: 6016400 - DNA, 25 bp, Homo sapien
cccatttcttccagtggcttcaatg

SEQ ID NO: 6016401 - DNA, 25 bp, Homo sapien
tccagtgtcttccatatgcacaatg

SEQ ID NO: 6016402 - DNA, 25 bp, Homo sapien
tggtctcagtgttcatcatgaagga

SEQ ID NO: 6016403 - DNA, 25 bp, Homo sapien
acctgacccatttcttccagtggct

SEQ ID NO: 6016404 - DNA, 25 bp, Homo sapien
aggaacatcctccacgggtgcttga

SEQ ID NO: 6016405 - DNA, 25 bp, Homo sapien
gcatatagtgtttggactcatattt

SEQ ID NO: 6016406 - DNA, 25 bp, Homo sapien
tggactcatatttctgtagtccctg

SEQ ID NO: 6016407 - DNA, 25 bp, Homo sapien
ctataggcccaagaagggaatcata

SEQ ID NO: 6016408 - DNA, 25 bp, Homo sapien
acttctgtgaactgttcaagttctt

SEQ ID NO: 6016409 - DNA, 25 bp, Homo sapien
ttcgtgccaacacttggacaggtcc

SEQ ID NO: 6016410 - DNA, 25 bp, Homo sapien
gccattagctcttgttctcatcaat

SEQ ID NO: 6016411 - DNA, 25 bp, Homo sapien
tgagttgcatatagtgtttggactc

SEQ ID NO: 6016412 - DNA, 25 bp, Homo sapien
tgaggggaaactaagttcatcagct

SEQ ID NO: 6016413 - DNA, 25 bp, Homo sapien
tgttcaagttcttctataggcccaa

SEQ ID NO: 6016414 - DNA, 25 bp, Homo sapien
gaaactaagttcatcagctccctca

SEQ ID NO: 6016415 - DNA, 25 bp, Homo sapien
agctcttgttctcatcaatgtaaac

SEQ ID NO: 6016416 - DNA, 25 bp, Homo sapien
cagtgttcatcatgaaggaagctgt

SEQ ID NO: 6016417 - DNA, 25 bp, Homo sapien
aatcataccttctgtgagtgctgaa

SEQ ID NO: 6016418 - DNA, 25 bp, Homo sapien
ggatctagagagtggaaacttggaa

SEQ ID NO: 6016419 - DNA, 25 bp, Homo sapien
gtcctgaggggaaactaagttcatc

SEQ ID NO: 6016420 - DNA, 25 bp, Homo sapien
agtggcttcaatgtagtcatacaag

SEQ ID NO: 6016421 - DNA, 25 bp, Homo sapien
ttctttcagagctttaaggattaga

SEQ ID NO: 6016422 - DNA, 25 bp, Homo sapien
gtagtcatacaagtgttcaaattgg

SEQ ID NO: 6016423 - DNA, 25 bp, Homo sapien
agagtaaagaaaatgggtccagtgt

SEQ ID NO: 6016424 - DNA, 25 bp, Homo sapien
acacaacattaatagtgaagagtaa

SEQ ID NO: 6016425 - DNA, 25 bp, Homo sapien
tcacccaggaacatcctccacgggt

SEQ ID NO: 6016426 - DNA, 25 bp, Homo sapien
agggaagaacacagagatacctgac

SEQ ID NO: 6016427 - DNA, 25 bp, Homo sapien
catcaatgtaaacacaacattaata

SEQ ID NO: 6016428 - DNA, 25 bp, Homo sapien
gaagggaatcataccttctgtgagt

SEQ ID NO: 6016429 - DNA, 25 bp, Homo sapien
agagagtggaaacttggaatcaggt

SEQ ID NO: 6016430 - DNA, 25 bp, Homo sapien
gggagttgatttttctttcagagct

SEQ ID NO: 6016431 - DNA, 25 bp, Homo sapien
tgaaggaagctgttcacccaggaac

SEQ ID NO: 6016432 - DNA, 25 bp, Homo sapien
ttcaatgtagtcatacaagtgttca

SEQ ID NO: 6016433 - DNA, 25 bp, Homo sapien
accttctgtgagtgctgaagtagtt

SEQ ID NO: 6016434 - DNA, 25 bp, Homo sapien
atcagctccctcactttcaacagtg

SEQ ID NO: 6016435 - DNA, 25 bp, Homo sapien
ccaacacttggacaggtcctgaggg

SEQ ID NO: 6016436 - DNA, 25 bp, Homo sapien
cagagctttaaggattagatttttt

SEQ ID NO: 6016437 - DNA, 25 bp, Homo sapien
gaagccctttccttgtggcttggtg

SEQ ID NO: 6016438 - DNA, 25 bp, Homo sapien
tagtgaagagtaaagaaaatgggtc

SEQ ID NO: 6016439 - DNA, 25 bp, Homo sapien
gtcttccatatgcacaatgaagagg

SEQ ID NO: 6016440 - DNA, 25 bp, Homo sapien
aaattggacttctgtgaactgttca

SEQ ID NO: 6016441 - DNA, 25 bp, Homo sapien
gatcctaggcccttccttagccagg

SEQ ID NO: 6016442 - DNA, 25 bp, Homo sapien
gcaggctgctctggggggtctggtg

SEQ ID NO: 6016443 - DNA, 25 bp, Homo sapien
agcacgctacagagtgagctgcatc

SEQ ID NO: 6016444 - DNA, 25 bp, Homo sapien
gaagctggggtcaggggtggccttc

SEQ ID NO: 6016445 - DNA, 25 bp, Homo sapien
aaggagctgtgcaatgggcatacag

SEQ ID NO: 6016446 - DNA, 25 bp, Homo sapien
ctgtgcaatgggcatacagctaggt

SEQ ID NO: 6016447 - DNA, 25 bp, Homo sapien
ggcactgggaatcaagcccatgccc

SEQ ID NO: 6016448 - DNA, 25 bp, Homo sapien
taagggcaaccttaatccttctgcc

SEQ ID NO: 6016449 - DNA, 25 bp, Homo sapien
tgtgtcaaagcctaggggtccctgg

SEQ ID NO: 6016450 - DNA, 25 bp, Homo sapien
gcatctcgtgtgacttaagctggcc

SEQ ID NO: 6016451 - DNA, 25 bp, Homo sapien
ctacagagtgagctgcatcccgggc

SEQ ID NO: 6016452 - DNA, 25 bp, Homo sapien
tatgtaactaagggcaaccttaatc

SEQ ID NO: 6016453 - DNA, 25 bp, Homo sapien
ggaatcaagcccatgcccctgtata

SEQ ID NO: 6016454 - DNA, 25 bp, Homo sapien
gaggccagcacgctacagagtgagc

SEQ ID NO: 6016455 - DNA, 25 bp, Homo sapien
tagcctcgttgtgtggctttggccc

SEQ ID NO: 6016456 - DNA, 25 bp, Homo sapien
ctaagccattgtctctctggagtga

SEQ ID NO: 6016457 - DNA, 25 bp, Homo sapien
ggttggcaggctgctctggggggtc

SEQ ID NO: 6016458 - DNA, 25 bp, Homo sapien
ctcaaccctgttatgtaactaaggg

SEQ ID NO: 6016459 - DNA, 25 bp, Homo sapien
caaccttaatccttctgcctccact

SEQ ID NO: 6016460 - DNA, 25 bp, Homo sapien
gtgtgtgtgtggacctccaccactc

SEQ ID NO: 6016461 - DNA, 25 bp, Homo sapien
ccaggctgtgtcaaagcctaggggt

SEQ ID NO: 6016462 - DNA, 25 bp, Homo sapien
ttggccctaagccattgtctctctg

SEQ ID NO: 6016463 - DNA, 25 bp, Homo sapien
tctggcatgggcaaagggcaaaggg

SEQ ID NO: 6016464 - DNA, 25 bp, Homo sapien
ctggggtcaggggtggccttcctga

SEQ ID NO: 6016465 - DNA, 25 bp, Homo sapien
ccacgtggtcactgggtgccaagga

SEQ ID NO: 6016466 - DNA, 25 bp, Homo sapien
ccttagccaggctgtgtcaaagcct

SEQ ID NO: 6016467 - DNA, 25 bp, Homo sapien
gtggctttggccctaagccattgtc

SEQ ID NO: 6016468 - DNA, 25 bp, Homo sapien
ctctctggagtgagttttctttttt

SEQ ID NO: 6016469 - DNA, 25 bp, Homo sapien
tgttcaccctgtttctcatagcctc

SEQ ID NO: 6016470 - DNA, 25 bp, Homo sapien
ggccttcctgaagaaggctcccttg

SEQ ID NO: 6016471 - DNA, 25 bp, Homo sapien
ttctgcctccacttgtctccctgtg

SEQ ID NO: 6016472 - DNA, 25 bp, Homo sapien
tctgtttttgggggcactgggaatc

SEQ ID NO: 6016473 - DNA, 25 bp, Homo sapien
ctaggtgggaagctggggtcagggg

SEQ ID NO: 6016474 - DNA, 25 bp, Homo sapien
caggttttctgtgcctgactggggt

SEQ ID NO: 6016475 - DNA, 25 bp, Homo sapien
ctggggggtctggtgttcaccctgt

SEQ ID NO: 6016476 - DNA, 25 bp, Homo sapien
ctaggggtccctgggttggcaggct

SEQ ID NO: 6016477 - DNA, 25 bp, Homo sapien
gccatgggctcaccagctggggcca

SEQ ID NO: 6016478 - DNA, 25 bp, Homo sapien
agctggcctcaaccctgttatgtaa

SEQ ID NO: 6016479 - DNA, 25 bp, Homo sapien
ggcccttccttagccaggctgtgtc

SEQ ID NO: 6016480 - DNA, 25 bp, Homo sapien
gcaaagggccatgggctcaccagct

SEQ ID NO: 6016481 - DNA, 25 bp, Homo sapien
caatgggcatacagctaggtgggaa

SEQ ID NO: 6016482 - DNA, 25 bp, Homo sapien
tcactgggtgccaaggagctgtgca

SEQ ID NO: 6016483 - DNA, 25 bp, Homo sapien
ctgcatcccgggctgggcaggtttt

SEQ ID NO: 6016484 - DNA, 25 bp, Homo sapien
cccgggctgggcaggttttctgtgc

SEQ ID NO: 6016485 - DNA, 25 bp, Homo sapien
ctccacttgtctccctgtgtgctga

SEQ ID NO: 6016486 - DNA, 25 bp, Homo sapien
ttctcatagcctcgttgtgtggctt

SEQ ID NO: 6016487 - DNA, 25 bp, Homo sapien
cgtgtgacttaagctggcctcaacc

SEQ ID NO: 6016488 - DNA, 25 bp, Homo sapien
gtctggtgttcaccctgtttctcat

SEQ ID NO: 6016489 - DNA, 25 bp, Homo sapien
ggtgccaaggagctgtgcaatgggc

SEQ ID NO: 6016490 - DNA, 25 bp, Homo sapien
ttctgtgcctgactggggtctggca

SEQ ID NO: 6016491 - DNA, 25 bp, Homo sapien
atgggcaaagggcaaagggccatgg

SEQ ID NO: 6016492 - DNA, 25 bp, Homo sapien
aagcccatgcccctgtatacgaggc

SEQ ID NO: 6016493 - DNA, 25 bp, Homo sapien
ccactctctgtttttgggggcactg

SEQ ID NO: 6016494 - DNA, 25 bp, Homo sapien
tgcccctgtatacgaggccagcacg

SEQ ID NO: 6016495 - DNA, 25 bp, Homo sapien
gctgggcaggttttctgtgcctgac

SEQ ID NO: 6016496 - DNA, 25 bp, Homo sapien
ttttttaagacagcatctcgtgtga

SEQ ID NO: 6016497 - DNA, 25 bp, Homo sapien
ctggggccacgtggtcactgggtgc

SEQ ID NO: 6016498 - DNA, 25 bp, Homo sapien
accagctggggccacgtggtcactg

SEQ ID NO: 6016499 - DNA, 25 bp, Homo sapien
ccctgtgtgctgagattacaggtgt

SEQ ID NO: 6016500 - DNA, 25 bp, Homo sapien
cctgttatgtaactaagggcaacct

SEQ ID NO: 6016501 - DNA, 25 bp, Homo sapien
ttacaggtgtgtgtgtggacctcca

SEQ ID NO: 6016502 - DNA, 25 bp, Homo sapien
gggctcaccagctggggccacgtgg

SEQ ID NO: 6016503 - DNA, 25 bp, Homo sapien
gggtggccttcctgaagaaggctcc

SEQ ID NO: 6016504 - DNA, 25 bp, Homo sapien
acttaagctggcctcaaccctgtta

SEQ ID NO: 6016505 - DNA, 25 bp, Homo sapien
gtatacgaggccagcacgctacaga

SEQ ID NO: 6016506 - DNA, 25 bp, Homo sapien
gagattacaggtgtgtgtgtggacc

SEQ ID NO: 6016507 - DNA, 25 bp, Homo sapien
agtgagctgcatcccgggctgggca

SEQ ID NO: 6016508 - DNA, 25 bp, Homo sapien
ttgtctccctgtgtgctgagattac

SEQ ID NO: 6016509 - DNA, 25 bp, Homo sapien
ctggggtctggcatgggcaaagggc

SEQ ID NO: 6016510 - DNA, 25 bp, Homo sapien
cgttgtgtggctttggccctaagcc

SEQ ID NO: 6016511 - DNA, 25 bp, Homo sapien
ctgctctggggggtctggtgttcac

SEQ ID NO: 6016512 - DNA, 25 bp, Homo sapien
tgctgagattacaggtgtgtgtgtg

SEQ ID NO: 6016513 - DNA, 25 bp, Homo sapien
caaagggcaaagggccatgggctca

SEQ ID NO: 6016514 - DNA, 25 bp, Homo sapien
tccctgggttggcaggctgctctgg

SEQ ID NO: 6016515 - DNA, 25 bp, Homo sapien
gtgtggacctccaccactctctgtt

SEQ ID NO: 6016516 - DNA, 25 bp, Homo sapien
ccctgtttctcatagcctcgttgtg

SEQ ID NO: 6016517 - DNA, 25 bp, Homo sapien
tttgggggcactgggaatcaagccc

SEQ ID NO: 6016518 - DNA, 25 bp, Homo sapien
cattgtctctctggagtgagttttc

SEQ ID NO: 6016519 - DNA, 25 bp, Homo sapien
gcatacagctaggtgggaagctggg

SEQ ID NO: 6016520 - DNA, 25 bp, Homo sapien
gcctgactggggtctggcatgggca

SEQ ID NO: 6016521 - DNA, 25 bp, Homo sapien
gtcaggggtggccttcctgaagaag

SEQ ID NO: 6016522 - DNA, 25 bp, Homo sapien
aagacagcatctcgtgtgacttaag

SEQ ID NO: 6016523 - DNA, 25 bp, Homo sapien
taatccttctgcctccacttgtctc

SEQ ID NO: 6016524 - DNA, 25 bp, Homo sapien
acctccaccactctctgtttttggg

SEQ ID NO: 6016525 - DNA, 25 bp, Homo sapien
gagacggggccccaggacaagtgag

SEQ ID NO: 6016526 - DNA, 25 bp, Homo sapien
gggatgcagctcactctgtagcgtg

SEQ ID NO: 6016527 - DNA, 25 bp, Homo sapien
aaaggatggcaaggcctggcaggtc

SEQ ID NO: 6016528 - DNA, 25 bp, Homo sapien
tatggcagctcacactccttaatct

SEQ ID NO: 6016529 - DNA, 25 bp, Homo sapien
cactccttaatctgcatgctcttgt

SEQ ID NO: 6016530 - DNA, 25 bp, Homo sapien
gcctggcaggtctataccaagggag

SEQ ID NO: 6016531 - DNA, 25 bp, Homo sapien
tgatcccacatccttgtctatggca

SEQ ID NO: 6016532 - DNA, 25 bp, Homo sapien
gacagccatggctgctggcttacag

SEQ ID NO: 6016533 - DNA, 25 bp, Homo sapien
gggatggagacggggccccaggaca

SEQ ID NO: 6016534 - DNA, 25 bp, Homo sapien
agggagccttcttcaggaaggccac

SEQ ID NO: 6016535 - DNA, 25 bp, Homo sapien
accccagtcaggcacagaaaacctg

SEQ ID NO: 6016536 - DNA, 25 bp, Homo sapien
ttcccacctagctgtatgcccattg

SEQ ID NO: 6016537 - DNA, 25 bp, Homo sapien
aggcctggtccttgatcccacatcc

SEQ ID NO: 6016538 - DNA, 25 bp, Homo sapien
cgtggccccagctggtgagcccatg

SEQ ID NO: 6016539 - DNA, 25 bp, Homo sapien
cccagcttcccacctagctgtatgc

SEQ ID NO: 6016540 - DNA, 25 bp, Homo sapien
cagcccgggatgcagctcactctgt

SEQ ID NO: 6016541 - DNA, 25 bp, Homo sapien
cttgtctatggcagctcacactcct

SEQ ID NO: 6016542 - DNA, 25 bp, Homo sapien
gccctttgcccatgccagaccccag

SEQ ID NO: 6016543 - DNA, 25 bp, Homo sapien
aggtgtccctgggacagccatggct

SEQ ID NO: 6016544 - DNA, 25 bp, Homo sapien
acagaggcttcctgtgtaatgagac

SEQ ID NO: 6016545 - DNA, 25 bp, Homo sapien
tcaggaaggccacccctgaccccag

SEQ ID NO: 6016546 - DNA, 25 bp, Homo sapien
gggcaggtgtccctgggacagccat

SEQ ID NO: 6016547 - DNA, 25 bp, Homo sapien
gcccattgcacagctccttggcacc

SEQ ID NO: 6016548 - DNA, 25 bp, Homo sapien
cccactggtagtaaacagaaaggag

SEQ ID NO: 6016549 - DNA, 25 bp, Homo sapien
ctgtatgcccattgcacagctcctt

SEQ ID NO: 6016550 - DNA, 25 bp, Homo sapien
acctagctgtatgcccattgcacag

SEQ ID NO: 6016551 - DNA, 25 bp, Homo sapien
atgagaccaaagaataaagagcaga

SEQ ID NO: 6016552 - DNA, 25 bp, Homo sapien
tgggtgtcctctccgggtcccaggc

SEQ ID NO: 6016553 - DNA, 25 bp, Homo sapien
ctggtagtaaacagaaaggagtgag

SEQ ID NO: 6016554 - DNA, 25 bp, Homo sapien
gggaagtcactagggatggagacgg

SEQ ID NO: 6016555 - DNA, 25 bp, Homo sapien
tcactagggatggagacggggcccc

SEQ ID NO: 6016556 - DNA, 25 bp, Homo sapien
ttcttggcatccctgggtgtcctct

SEQ ID NO: 6016557 - DNA, 25 bp, Homo sapien
caccgtcacccccaggggcaggtgt

SEQ ID NO: 6016558 - DNA, 25 bp, Homo sapien
gcacagaaaacctgcccagcccggg

SEQ ID NO: 6016559 - DNA, 25 bp, Homo sapien
cctgaccccagcttcccacctagct

SEQ ID NO: 6016560 - DNA, 25 bp, Homo sapien
ccttcttcaggaaggccacccctga

SEQ ID NO: 6016561 - DNA, 25 bp, Homo sapien
acaggacaagctttaaaaccagcca

SEQ ID NO: 6016562 - DNA, 25 bp, Homo sapien
caagctttaaaaccagccaaaggat

SEQ ID NO: 6016563 - DNA, 25 bp, Homo sapien
gatgccagctcttcttggcatccct

SEQ ID NO: 6016564 - DNA, 25 bp, Homo sapien
caggtctataccaagggagccttct

SEQ ID NO: 6016565 - DNA, 25 bp, Homo sapien
tgcccatgccagaccccagtcaggc

SEQ ID NO: 6016566 - DNA, 25 bp, Homo sapien
ccagccaaaggatggcaaggcctgg

SEQ ID NO: 6016567 - DNA, 25 bp, Homo sapien
tgtgtaatgagaccaaagaataaag

SEQ ID NO: 6016568 - DNA, 25 bp, Homo sapien
aagagagatgccagctcttcttggc

SEQ ID NO: 6016569 - DNA, 25 bp, Homo sapien
gggttgggacatagcgtgacaggac

SEQ ID NO: 6016570 - DNA, 25 bp, Homo sapien
tgctggcttacaggctatctgggct

SEQ ID NO: 6016571 - DNA, 25 bp, Homo sapien
ggccacccctgaccccagcttccca

SEQ ID NO: 6016572 - DNA, 25 bp, Homo sapien
acccagtgaccacgtggccccagct

SEQ ID NO: 6016573 - DNA, 25 bp, Homo sapien
ccgaggataagggttgggacatagc

SEQ ID NO: 6016574 - DNA, 25 bp, Homo sapien
ggcaaggcctggcaggtctatacca

SEQ ID NO: 6016575 - DNA, 25 bp, Homo sapien
gagtaccacagaggcttcctgtgta

SEQ ID NO: 6016576 - DNA, 25 bp, Homo sapien
ggtccttgatcccacatccttgtct

SEQ ID NO: 6016577 - DNA, 25 bp, Homo sapien
gagtgagcaccgtcacccccagggg

SEQ ID NO: 6016578 - DNA, 25 bp, Homo sapien
tccttggcacccagtgaccacgtgg

SEQ ID NO: 6016579 - DNA, 25 bp, Homo sapien
ccaaagaataaagagcagaagagag

SEQ ID NO: 6016580 - DNA, 25 bp, Homo sapien
ttacaggctatctgggcttacaggg

SEQ ID NO: 6016581 - DNA, 25 bp, Homo sapien
gtaaacagaaaggagtgagcaccgt

SEQ ID NO: 6016582 - DNA, 25 bp, Homo sapien
cacatccttgtctatggcagctcac

SEQ ID NO: 6016583 - DNA, 25 bp, Homo sapien
ttaaaaccagccaaaggatggcaag

SEQ ID NO: 6016584 - DNA, 25 bp, Homo sapien
gtgagcccatggccctttgcccttt

SEQ ID NO: 6016585 - DNA, 25 bp, Homo sapien
tgcccagcccgggatgcagctcact

SEQ ID NO: 6016586 - DNA, 25 bp, Homo sapien
ctcttgtcttaacgccgaggataag

SEQ ID NO: 6016587 - DNA, 25 bp, Homo sapien
tataccaagggagccttcttcagga

SEQ ID NO: 6016588 - DNA, 25 bp, Homo sapien
aaaacctgcccagcccgggatgcag

SEQ ID NO: 6016589 - DNA, 25 bp, Homo sapien
agcgtgacaggacaagctttaaaac

SEQ ID NO: 6016590 - DNA, 25 bp, Homo sapien
tgaccacgtggccccagctggtgag

SEQ ID NO: 6016591 - DNA, 25 bp, Homo sapien
tgccagaccccagtcaggcacagaa

SEQ ID NO: 6016592 - DNA, 25 bp, Homo sapien
gggtcccaggcctggtccttgatcc

SEQ ID NO: 6016593 - DNA, 25 bp, Homo sapien
agctcacactccttaatctgcatgc

SEQ ID NO: 6016594 - DNA, 25 bp, Homo sapien
gataagggttgggacatagcgtgac

SEQ ID NO: 6016595 - DNA, 25 bp, Homo sapien
ttaatctgcatgctcttgtcttaac

SEQ ID NO: 6016596 - DNA, 25 bp, Homo sapien
agctcttcttggcatccctgggtgt

SEQ ID NO: 6016597 - DNA, 25 bp, Homo sapien
tctgggcttacaggggaagtcacta

SEQ ID NO: 6016598 - DNA, 25 bp, Homo sapien
ccatggccctttgccctttgcccat

SEQ ID NO: 6016599 - DNA, 25 bp, Homo sapien
ggggccccaggacaagtgagtacca

SEQ ID NO: 6016600 - DNA, 25 bp, Homo sapien
gacaagtgagtaccacagaggcttc

SEQ ID NO: 6016601 - DNA, 25 bp, Homo sapien
cttacaggggaagtcactagggatg

SEQ ID NO: 6016602 - DNA, 25 bp, Homo sapien
ggacatagcgtgacaggacaagctt

SEQ ID NO: 6016603 - DNA, 25 bp, Homo sapien
agaaaggagtgagcaccgtcacccc

SEQ ID NO: 6016604 - DNA, 25 bp, Homo sapien
ccctgggacagccatggctgctggc

SEQ ID NO: 6016605 - DNA, 25 bp, Homo sapien
gcatccctgggtgtcctctccgggt

SEQ ID NO: 6016606 - DNA, 25 bp, Homo sapien
agtcaggcacagaaaacctgcccag

SEQ ID NO: 6016607 - DNA, 25 bp, Homo sapien
gagcagaagagagatgccagctctt

SEQ ID NO: 6016608 - DNA, 25 bp, Homo sapien
tcacccccaggggcaggtgtccctg

SEQ ID NO: 6016609 - DNA, 25 bp, Homo sapien
gctatctgggcttacaggggaagtc

SEQ ID NO: 6016610 - DNA, 25 bp, Homo sapien
ccctttgccctttgcccatgccaga

SEQ ID NO: 6016611 - DNA, 25 bp, Homo sapien
catggctgctggcttacaggctatc

SEQ ID NO: 6016612 - DNA, 25 bp, Homo sapien
tgcacagctccttggcacccagtga

SEQ ID NO: 6016613 - DNA, 25 bp, Homo sapien
ctctccgggtcccaggcctggtcct

SEQ ID NO: 6016614 - DNA, 25 bp, Homo sapien
gcttcctgtgtaatgagaccaaaga

SEQ ID NO: 6016615 - DNA, 25 bp, Homo sapien
ccccaggacaagtgagtaccacaga

SEQ ID NO: 6016616 - DNA, 25 bp, Homo sapien
tgcatgctcttgtcttaacgccgag

SEQ ID NO: 6016617 - DNA, 25 bp, Homo sapien
cccaggggcaggtgtccctgggaca

SEQ ID NO: 6016618 - DNA, 25 bp, Homo sapien
aggtacattgagcaactgactgaaa

SEQ ID NO: 6016619 - DNA, 25 bp, Homo sapien
gcgggcaagaatgtgaataaaggcc

SEQ ID NO: 6016620 - DNA, 25 bp, Homo sapien
gacgaaaaacatattctcaataaac

SEQ ID NO: 6016621 - DNA, 25 bp, Homo sapien
cacccagggattggctgagacgaaa

SEQ ID NO: 6016622 - DNA, 25 bp, Homo sapien
attgagcaactgactgaaatgcctc

SEQ ID NO: 6016623 - DNA, 25 bp, Homo sapien
ctgccgacatggaagccatcacaga

SEQ ID NO: 6016624 - DNA, 25 bp, Homo sapien
accgtaacacgccacatcttgcgaa

SEQ ID NO: 6016625 - DNA, 25 bp, Homo sapien
tgcgtataatatttgcccatggtga

SEQ ID NO: 6016626 - DNA, 25 bp, Homo sapien
ctcaccgtctttcattgccatacgg

SEQ ID NO: 6016627 - DNA, 25 bp, Homo sapien
agcggcatcagcaccttgtcgcctt

SEQ ID NO: 6016628 - DNA, 25 bp, Homo sapien
aatcgtcgtggtattcactccagag

SEQ ID NO: 6016629 - DNA, 25 bp, Homo sapien
taatatttgcccatggtgaaaacgg

SEQ ID NO: 6016630 - DNA, 25 bp, Homo sapien
cggtctggttataggtacattgagc

SEQ ID NO: 6016631 - DNA, 25 bp, Homo sapien
atcgccagcggcatcagcaccttgt

SEQ ID NO: 6016632 - DNA, 25 bp, Homo sapien
tcattaagcattctgccgacatgga

SEQ ID NO: 6016633 - DNA, 25 bp, Homo sapien
tgaacactatcccatatcaccagct

SEQ ID NO: 6016634 - DNA, 25 bp, Homo sapien
gccacgtttaaatcaaaactggtga

SEQ ID NO: 6016635 - DNA, 25 bp, Homo sapien
gcgatgaaaacgtttcagtttgctc

SEQ ID NO: 6016636 - DNA, 25 bp, Homo sapien
gccggaaatcgtcgtggtattcact

SEQ ID NO: 6016637 - DNA, 25 bp, Homo sapien
catcaggcgggcaagaatgtgaata

SEQ ID NO: 6016638 - DNA, 25 bp, Homo sapien
caaaatgttctttacgatgccattg

SEQ ID NO: 6016639 - DNA, 25 bp, Homo sapien
acgggggcgaagaagttgtccatat

SEQ ID NO: 6016640 - DNA, 25 bp, Homo sapien
cttgcgaatatatgtgtagaaactg

SEQ ID NO: 6016641 - DNA, 25 bp, Homo sapien
cgtggtattcactccagagcgatga

SEQ ID NO: 6016642 - DNA, 25 bp, Homo sapien
tgtaattcattaagcattctgccga

SEQ ID NO: 6016643 - DNA, 25 bp, Homo sapien
gtctttcattgccatacggaattcc

SEQ ID NO: 6016644 - DNA, 25 bp, Homo sapien
tgtgtagaaactgccggaaatcgtc

SEQ ID NO: 6016645 - DNA, 25 bp, Homo sapien
tttaaatcaaaactggtgaaactca

SEQ ID NO: 6016646 - DNA, 25 bp, Homo sapien
cattgccatacggaattccggatga

SEQ ID NO: 6016647 - DNA, 25 bp, Homo sapien
atcagcaccttgtcgccttgcgtat

SEQ ID NO: 6016648 - DNA, 25 bp, Homo sapien
ctgttgtaattcattaagcattctg

SEQ ID NO: 6016649 - DNA, 25 bp, Homo sapien
ttgcccatggtgaaaacgggggcga

SEQ ID NO: 6016650 - DNA, 25 bp, Homo sapien
actggtgaaactcacccagggattg

SEQ ID NO: 6016651 - DNA, 25 bp, Homo sapien
gccaggttttcaccgtaacacgcca

SEQ ID NO: 6016652 - DNA, 25 bp, Homo sapien
ccatatcaccagctcaccgtctttc

SEQ ID NO: 6016653 - DNA, 25 bp, Homo sapien
tttgctcatggaaaacggtgtaaca

SEQ ID NO: 6016654 - DNA, 25 bp, Homo sapien
aaaacgtttcagtttgctcatggaa

SEQ ID NO: 6016655 - DNA, 25 bp, Homo sapien
acatggaagccatcacagacggcat

SEQ ID NO: 6016656 - DNA, 25 bp, Homo sapien
catggtgaaaacgggggcgaagaag

SEQ ID NO: 6016657 - DNA, 25 bp, Homo sapien
tccagagcgatgaaaacgtttcagt

SEQ ID NO: 6016658 - DNA, 25 bp, Homo sapien
actgaaatgcctcaaaatgttcttt

SEQ ID NO: 6016659 - DNA, 25 bp, Homo sapien
aagccatcacagacggcatgatgaa

SEQ ID NO: 6016660 - DNA, 25 bp, Homo sapien
caccagctcaccgtctttcattgcc

SEQ ID NO: 6016661 - DNA, 25 bp, Homo sapien
gttgtccatattggccacgtttaaa

SEQ ID NO: 6016662 - DNA, 25 bp, Homo sapien
ccacatcttgcgaatatatgtgtag

SEQ ID NO: 6016663 - DNA, 25 bp, Homo sapien
gaagaagttgtccatattggccacg

SEQ ID NO: 6016664 - DNA, 25 bp, Homo sapien
gggattggctgagacgaaaaacata

SEQ ID NO: 6016665 - DNA, 25 bp, Homo sapien
gttttcaccgtaacacgccacatct

SEQ ID NO: 6016666 - DNA, 25 bp, Homo sapien
gtgtaacaagggtgaacactatccc

SEQ ID NO: 6016667 - DNA, 25 bp, Homo sapien
acggcatgatgaacctgaatcgcca

SEQ ID NO: 6016668 - DNA, 25 bp, Homo sapien
attcactccagagcgatgaaaacgt

SEQ ID NO: 6016669 - DNA, 25 bp, Homo sapien
gttctttacgatgccattgggatat

SEQ ID NO: 6016670 - DNA, 25 bp, Homo sapien
ggctgagacgaaaaacatattctca

SEQ ID NO: 6016671 - DNA, 25 bp, Homo sapien
aggccggataaaacttgtgcttatt

SEQ ID NO: 6016672 - DNA, 25 bp, Homo sapien
agcattctgccgacatggaagccat

SEQ ID NO: 6016673 - DNA, 25 bp, Homo sapien
aacacgccacatcttgcgaatatat

SEQ ID NO: 6016674 - DNA, 25 bp, Homo sapien
actatcccatatcaccagctcaccg

SEQ ID NO: 6016675 - DNA, 25 bp, Homo sapien
atgtgaataaaggccggataaaact

SEQ ID NO: 6016676 - DNA, 25 bp, Homo sapien
ccatacggaattccggatgagcatt

SEQ ID NO: 6016677 - DNA, 25 bp, Homo sapien
ggttataggtacattgagcaactga

SEQ ID NO: 6016678 - DNA, 25 bp, Homo sapien
tcacagacggcatgatgaacctgaa

SEQ ID NO: 6016679 - DNA, 25 bp, Homo sapien
acctgaatcgccagcggcatcagca

SEQ ID NO: 6016680 - DNA, 25 bp, Homo sapien
tatccagctgaacggtctggttata

SEQ ID NO: 6016681 - DNA, 25 bp, Homo sapien
caagggtgaacactatcccatatca

SEQ ID NO: 6016682 - DNA, 25 bp, Homo sapien
tttcagtttgctcatggaaaacggt

SEQ ID NO: 6016683 - DNA, 25 bp, Homo sapien
atgcctcaaaatgttctttacgatg

SEQ ID NO: 6016684 - DNA, 25 bp, Homo sapien
catattctcaataaaccctttaggg

SEQ ID NO: 6016685 - DNA, 25 bp, Homo sapien
catggaaaacggtgtaacaagggtg

SEQ ID NO: 6016686 - DNA, 25 bp, Homo sapien
ccgtaatatccagctgaacggtctg

SEQ ID NO: 6016687 - DNA, 25 bp, Homo sapien
caagaatgtgaataaaggccggata

SEQ ID NO: 6016688 - DNA, 25 bp, Homo sapien
ataaaggccggataaaacttgtgct

SEQ ID NO: 6016689 - DNA, 25 bp, Homo sapien
gagcattcatcaggcgggcaagaat

SEQ ID NO: 6016690 - DNA, 25 bp, Homo sapien
tcgccttgcgtataatatttgccca

SEQ ID NO: 6016691 - DNA, 25 bp, Homo sapien
caactgactgaaatgcctcaaaatg

SEQ ID NO: 6016692 - DNA, 25 bp, Homo sapien
aatatatgtgtagaaactgccggaa

SEQ ID NO: 6016693 - DNA, 25 bp, Homo sapien
gggcgaagaagttgtccatattggc

SEQ ID NO: 6016694 - DNA, 25 bp, Homo sapien
aaaaggccgtaatatccagctgaac

SEQ ID NO: 6016695 - DNA, 25 bp, Homo sapien
atcaaaactggtgaaactcacccag

SEQ ID NO: 6016696 - DNA, 25 bp, Homo sapien
gaaactcacccagggattggctgag

SEQ ID NO: 6016697 - DNA, 25 bp, Homo sapien
tgatgaacctgaatcgccagcggca

SEQ ID NO: 6016698 - DNA, 25 bp, Homo sapien
tacgatgccattgggatatatcaac

SEQ ID NO: 6016699 - DNA, 25 bp, Homo sapien
catattggccacgtttaaatcaaaa

SEQ ID NO: 6016700 - DNA, 25 bp, Homo sapien
gctgaacggtctggttataggtaca

SEQ ID NO: 6016701 - DNA, 25 bp, Homo sapien
accttgtcgccttgcgtataatatt

SEQ ID NO: 6016702 - DNA, 25 bp, Homo sapien
ccggatgagcattcatcaggcgggc

SEQ ID NO: 6016703 - DNA, 25 bp, Homo sapien
gaaactgccggaaatcgtcgtggta

SEQ ID NO: 6016704 - DNA, 25 bp, Homo sapien
ggaattccggatgagcattcatcag

SEQ ID NO: 6016705 - DNA, 25 bp, Homo sapien
tcgagcacagctgcgcaaggaacgc

SEQ ID NO: 6016706 - DNA, 25 bp, Homo sapien
gccgtcgggcatgcgcgccttgagc

SEQ ID NO: 6016707 - DNA, 25 bp, Homo sapien
ctgatcgacaagaccggcttccatc

SEQ ID NO: 6016708 - DNA, 25 bp, Homo sapien
acgatagccgcgctgcctcgtcctg

SEQ ID NO: 6016709 - DNA, 25 bp, Homo sapien
gagcccctgatgctcttcgtccaga

SEQ ID NO: 6016710 - DNA, 25 bp, Homo sapien
tgggtcacgacgagatcctcgccgt

SEQ ID NO: 6016711 - DNA, 25 bp, Homo sapien
agccagtcccttcccgcttcagtga

SEQ ID NO: 6016712 - DNA, 25 bp, Homo sapien
acgacgagatcctcgccgtcgggca

SEQ ID NO: 6016713 - DNA, 25 bp, Homo sapien
gaacagttcggctggcgcgagcccc

SEQ ID NO: 6016714 - DNA, 25 bp, Homo sapien
aatgggcaggtagccggatcaagcg

SEQ ID NO: 6016715 - DNA, 25 bp, Homo sapien
ggtagccaacgctatgtcctgatag

SEQ ID NO: 6016716 - DNA, 25 bp, Homo sapien
gcctcgtcctgcagttcattcaggg

SEQ ID NO: 6016717 - DNA, 25 bp, Homo sapien
cccattcgccgccaagctcttcagc

SEQ ID NO: 6016718 - DNA, 25 bp, Homo sapien
aatagcagccagtcccttcccgctt

SEQ ID NO: 6016719 - DNA, 25 bp, Homo sapien
cgagtacgtgctcgctcgatgcgat

SEQ ID NO: 6016720 - DNA, 25 bp, Homo sapien
accgtaaagcacgaggaagcggtca

SEQ ID NO: 6016721 - DNA, 25 bp, Homo sapien
cccgcttcagtgacaacgtcgagca

SEQ ID NO: 6016722 - DNA, 25 bp, Homo sapien
gctcgatgcgatgtttcgcttggtg

SEQ ID NO: 6016723 - DNA, 25 bp, Homo sapien
tatgtcctgatagcggtccgccaca

SEQ ID NO: 6016724 - DNA, 25 bp, Homo sapien
tcttcagcaatatcacgggtagcca

SEQ ID NO: 6016725 - DNA, 25 bp, Homo sapien
gccacagtcgatgaatccagaaaag

SEQ ID NO: 6016726 - DNA, 25 bp, Homo sapien
tgcgctgcgaatcgggagcggcgat

SEQ ID NO: 6016727 - DNA, 25 bp, Homo sapien
caggcatcgccatgggtcacgacga

SEQ ID NO: 6016728 - DNA, 25 bp, Homo sapien
gtatgcagccgccgcattgcatcag

SEQ ID NO: 6016729 - DNA, 25 bp, Homo sapien
ctcttcgtccagatcatcctgatcg

SEQ ID NO: 6016730 - DNA, 25 bp, Homo sapien
caggtagccggatcaagcgtatgca

SEQ ID NO: 6016731 - DNA, 25 bp, Homo sapien
ggcacttcgcccaatagcagccagt

SEQ ID NO: 6016732 - DNA, 25 bp, Homo sapien
ctgatgctcttcgtccagatcatcc

SEQ ID NO: 6016733 - DNA, 25 bp, Homo sapien
ccatgatggatactttctcggcagg

SEQ ID NO: 6016734 - DNA, 25 bp, Homo sapien
tcagtgacaacgtcgagcacagctg

SEQ ID NO: 6016735 - DNA, 25 bp, Homo sapien
atcctgccccggcacttcgcccaat

SEQ ID NO: 6016736 - DNA, 25 bp, Homo sapien
gggcatgcgcgccttgagcctggcg

SEQ ID NO: 6016737 - DNA, 25 bp, Homo sapien
tcccttcccgcttcagtgacaacgt

SEQ ID NO: 6016738 - DNA, 25 bp, Homo sapien
atcatcctgatcgacaagaccggct

SEQ ID NO: 6016739 - DNA, 25 bp, Homo sapien
gcgcaaggaacgcccgtcgtggcca

SEQ ID NO: 6016740 - DNA, 25 bp, Homo sapien
gtggccagccacgatagccgcgctg

SEQ ID NO: 6016741 - DNA, 25 bp, Homo sapien
accggcttccatccgagtacgtgct

SEQ ID NO: 6016742 - DNA, 25 bp, Homo sapien
gcggccattttccaccatgatattc

SEQ ID NO: 6016743 - DNA, 25 bp, Homo sapien
tgcgcgccttgagcctggcgaacag

SEQ ID NO: 6016744 - DNA, 25 bp, Homo sapien
gcaatatcacgggtagccaacgcta

SEQ ID NO: 6016745 - DNA, 25 bp, Homo sapien
agccgccgcattgcatcagccatga

SEQ ID NO: 6016746 - DNA, 25 bp, Homo sapien
cgggagcggcgataccgtaaagcac

SEQ ID NO: 6016747 - DNA, 25 bp, Homo sapien
gcaaggtgagatgacaggagatcct

SEQ ID NO: 6016748 - DNA, 25 bp, Homo sapien
tcaagcgtatgcagccgccgcattg

SEQ ID NO: 6016749 - DNA, 25 bp, Homo sapien
gccggatcaagcgtatgcagccgcc

SEQ ID NO: 6016750 - DNA, 25 bp, Homo sapien
atcacgggtagccaacgctatgtcc

SEQ ID NO: 6016751 - DNA, 25 bp, Homo sapien
atattcggcaagcaggcatcgccat

SEQ ID NO: 6016752 - DNA, 25 bp, Homo sapien
cttgagcctggcgaacagttcggct

SEQ ID NO: 6016753 - DNA, 25 bp, Homo sapien
acaacgtcgagcacagctgcgcaag

SEQ ID NO: 6016754 - DNA, 25 bp, Homo sapien
ggaacgcccgtcgtggccagccacg

SEQ ID NO: 6016755 - DNA, 25 bp, Homo sapien
attttccaccatgatattcggcaag

SEQ ID NO: 6016756 - DNA, 25 bp, Homo sapien
tcgccatgggtcacgacgagatcct

SEQ ID NO: 6016757 - DNA, 25 bp, Homo sapien
gcgctgcctcgtcctgcagttcatt

SEQ ID NO: 6016758 - DNA, 25 bp, Homo sapien
ggcgatgcgctgcgaatcgggagcg

SEQ ID NO: 6016759 - DNA, 25 bp, Homo sapien
agatcctcgccgtcgggcatgcgcg

SEQ ID NO: 6016760 - DNA, 25 bp, Homo sapien
cgcattgcatcagccatgatggata

SEQ ID NO: 6016761 - DNA, 25 bp, Homo sapien
tggatactttctcggcaggagcaag

SEQ ID NO: 6016762 - DNA, 25 bp, Homo sapien
catcagccatgatggatactttctc

SEQ ID NO: 6016763 - DNA, 25 bp, Homo sapien
gacaggagatcctgccccggcactt

SEQ ID NO: 6016764 - DNA, 25 bp, Homo sapien
ggcaagcaggcatcgccatgggtca

SEQ ID NO: 6016765 - DNA, 25 bp, Homo sapien
gtccgccacacccagccggccacag

SEQ ID NO: 6016766 - DNA, 25 bp, Homo sapien
cctggcgaacagttcggctggcgcg

SEQ ID NO: 6016767 - DNA, 25 bp, Homo sapien
gtgctcgctcgatgcgatgtttcgc

SEQ ID NO: 6016768 - DNA, 25 bp, Homo sapien
gcttggtggtcgaatgggcaggtag

SEQ ID NO: 6016769 - DNA, 25 bp, Homo sapien
tgtttcgcttggtggtcgaatgggc

SEQ ID NO: 6016770 - DNA, 25 bp, Homo sapien
tgagatgacaggagatcctgccccg

SEQ ID NO: 6016771 - DNA, 25 bp, Homo sapien
tcgcccaatagcagccagtcccttc

SEQ ID NO: 6016772 - DNA, 25 bp, Homo sapien
tttctcggcaggagcaaggtgagat

SEQ ID NO: 6016773 - DNA, 25 bp, Homo sapien
tgccccggcacttcgcccaatagca

SEQ ID NO: 6016774 - DNA, 25 bp, Homo sapien
tccatccgagtacgtgctcgctcga

SEQ ID NO: 6016775 - DNA, 25 bp, Homo sapien
tggcgcgagcccctgatgctcttcg

SEQ ID NO: 6016776 - DNA, 25 bp, Homo sapien
cagccggccacagtcgatgaatcca

SEQ ID NO: 6016777 - DNA, 25 bp, Homo sapien
agaaaagcggccattttccaccatg

SEQ ID NO: 6016778 - DNA, 25 bp, Homo sapien
cccgtcgtggccagccacgatagcc

SEQ ID NO: 6016779 - DNA, 25 bp, Homo sapien
tggtcgaatgggcaggtagccggat

SEQ ID NO: 6016780 - DNA, 25 bp, Homo sapien
gcaggagcaaggtgagatgacagga

SEQ ID NO: 6016781 - DNA, 25 bp, Homo sapien
ggcgataccgtaaagcacgaggaag

SEQ ID NO: 6016782 - DNA, 25 bp, Homo sapien
cacacccagccggccacagtcgatg

SEQ ID NO: 6016783 - DNA, 25 bp, Homo sapien
gacaagaccggcttccatccgagta

SEQ ID NO: 6016784 - DNA, 25 bp, Homo sapien
aagcacgaggaagcggtcagcccat

SEQ ID NO: 6016785 - DNA, 25 bp, Homo sapien
aggaagcggtcagcccattcgccgc

SEQ ID NO: 6016786 - DNA, 25 bp, Homo sapien
ggtcagcccattcgccgccaagctc

SEQ ID NO: 6016787 - DNA, 25 bp, Homo sapien
tcgccgccaagctcttcagcaatat

SEQ ID NO: 6016788 - DNA, 25 bp, Homo sapien
caacgctatgtcctgatagcggtcc

SEQ ID NO: 6016789 - DNA, 25 bp, Homo sapien
gtccagatcatcctgatcgacaaga

SEQ ID NO: 6016790 - DNA, 25 bp, Homo sapien
ccaagctcttcagcaatatcacggg

SEQ ID NO: 6016791 - DNA, 25 bp, Homo sapien
tagccgcgctgcctcgtcctgcagt

SEQ ID NO: 6016792 - DNA, 25 bp, Homo sapien
gtcgatgaatccagaaaagcggcca

SEQ ID NO: 6016793 - DNA, 25 bp, Homo sapien
acagctgcgcaaggaacgcccgtcg

SEQ ID NO: 6016794 - DNA, 25 bp, Homo sapien
gaatccagaaaagcggccattttcc

SEQ ID NO: 6016795 - DNA, 25 bp, Homo sapien
tgcgatgtttcgcttggtggtcgaa

SEQ ID NO: 6016796 - DNA, 25 bp, Homo sapien
ttcggctggcgcgagcccctgatgc

SEQ ID NO: 6016797 - DNA, 25 bp, Homo sapien
caccatgatattcggcaagcaggca

SEQ ID NO: 6016798 - DNA, 25 bp, Homo sapien
cgaatcgggagcggcgataccgtaa

SEQ ID NO: 6016799 - DNA, 25 bp, Homo sapien
gatgggggtgttctgctggtagtgg

SEQ ID NO: 6016800 - DNA, 25 bp, Homo sapien
acgagggtgggccagggcacgggca

SEQ ID NO: 6016801 - DNA, 25 bp, Homo sapien
gatgcccttcagctcgatgcggttc

SEQ ID NO: 6016802 - DNA, 25 bp, Homo sapien
ggatgttgccgtcctccttgaagtc

SEQ ID NO: 6016803 - DNA, 25 bp, Homo sapien
gtcggcgagctgcacgctgccgtcc

SEQ ID NO: 6016804 - DNA, 25 bp, Homo sapien
agcacggggccgtcgccgatggggg

SEQ ID NO: 6016805 - DNA, 25 bp, Homo sapien
aacttcacctcggcgcgggtcttgt

SEQ ID NO: 6016806 - DNA, 25 bp, Homo sapien
cggccatgatatagacgttgtggct

SEQ ID NO: 6016807 - DNA, 25 bp, Homo sapien
gccccaggatgttgccgtcctcctt

SEQ ID NO: 6016808 - DNA, 25 bp, Homo sapien
cttcagctcgatgcggttcaccagg

SEQ ID NO: 6016809 - DNA, 25 bp, Homo sapien
actccagcttgtgccccaggatgtt

SEQ ID NO: 6016810 - DNA, 25 bp, Homo sapien
ggaccatgtgatcgcgcttctcgtt

SEQ ID NO: 6016811 - DNA, 25 bp, Homo sapien
ggcgcgggtcttgtagttgccgtcg

SEQ ID NO: 6016812 - DNA, 25 bp, Homo sapien
gggcggactggtagctcaggtagtg

SEQ ID NO: 6016813 - DNA, 25 bp, Homo sapien
caggccgtagccgaaggtggtcacg

SEQ ID NO: 6016814 - DNA, 25 bp, Homo sapien
tgatatagacgttgtggctgttgta

SEQ ID NO: 6016815 - DNA, 25 bp, Homo sapien
cacgggcagcttgccggtggtgcag

SEQ ID NO: 6016816 - DNA, 25 bp, Homo sapien
tgtagttgccgtcgtccttgaagaa

SEQ ID NO: 6016817 - DNA, 25 bp, Homo sapien
ctccttgaagtcgatgcccttcagc

SEQ ID NO: 6016818 - DNA, 25 bp, Homo sapien
gtggcatcgccctcgccctcgccgg

SEQ ID NO: 6016819 - DNA, 25 bp, Homo sapien
cgaaggtggtcacgagggtgggcca

SEQ ID NO: 6016820 - DNA, 25 bp, Homo sapien
tggttgtcgggcagcagcacggggc

SEQ ID NO: 6016821 - DNA, 25 bp, Homo sapien
gcgcttctcgttggggtctttgctc

SEQ ID NO: 6016822 - DNA, 25 bp, Homo sapien
ggtgggccagggcacgggcagcttg

SEQ ID NO: 6016823 - DNA, 25 bp, Homo sapien
cgtccttgaagaagatggtgcgctc

SEQ ID NO: 6016824 - DNA, 25 bp, Homo sapien
tgcgctcctggacgtagccttcggg

SEQ ID NO: 6016825 - DNA, 25 bp, Homo sapien
cttcagggtcagcttgccgtaggtg

SEQ ID NO: 6016826 - DNA, 25 bp, Homo sapien
ttgctcagggcggactggtagctca

SEQ ID NO: 6016827 - DNA, 25 bp, Homo sapien
gcggacttgaagaagtcgtgctgct

SEQ ID NO: 6016828 - DNA, 25 bp, Homo sapien
tcgatgcggttcaccagggtgtcgc

SEQ ID NO: 6016829 - DNA, 25 bp, Homo sapien
agacgttgtggctgttgtagttgta

SEQ ID NO: 6016830 - DNA, 25 bp, Homo sapien
gcttgtgccccaggatgttgccgtc

SEQ ID NO: 6016831 - DNA, 25 bp, Homo sapien
ggtgttctgctggtagtggtcggcg

SEQ ID NO: 6016832 - DNA, 25 bp, Homo sapien
tgaagaagatggtgcgctcctggac

SEQ ID NO: 6016833 - DNA, 25 bp, Homo sapien
agttcaccttgatgccgttcttctg

SEQ ID NO: 6016834 - DNA, 25 bp, Homo sapien
cggtcacgaactccagcaggaccat

SEQ ID NO: 6016835 - DNA, 25 bp, Homo sapien
cggttcaccagggtgtcgccctcga

SEQ ID NO: 6016836 - DNA, 25 bp, Homo sapien
ggccgtcgccgatgggggtgttctg

SEQ ID NO: 6016837 - DNA, 25 bp, Homo sapien
tgccgttcttctgcttgtcggccat

SEQ ID NO: 6016838 - DNA, 25 bp, Homo sapien
tgccgtcgtccttgaagaagatggt

SEQ ID NO: 6016839 - DNA, 25 bp, Homo sapien
agttgtactccagcttgtgccccag

SEQ ID NO: 6016840 - DNA, 25 bp, Homo sapien
actggtagctcaggtagtggttgtc

SEQ ID NO: 6016841 - DNA, 25 bp, Homo sapien
tggtgcagatgaacttcagggtcag

SEQ ID NO: 6016842 - DNA, 25 bp, Homo sapien
tcgggcagcagcacggggccgtcgc

SEQ ID NO: 6016843 - DNA, 25 bp, Homo sapien
atcccggcggcggtcacgaactcca

SEQ ID NO: 6016844 - DNA, 25 bp, Homo sapien
aagtcgtgctgcttcatgtggtcgg

SEQ ID NO: 6016845 - DNA, 25 bp, Homo sapien
cctggacgtagccttcgggcatggc

SEQ ID NO: 6016846 - DNA, 25 bp, Homo sapien
ctgctggtagtggtcggcgagctgc

SEQ ID NO: 6016847 - DNA, 25 bp, Homo sapien
tgccgtcctcgatgttgtggcggat

SEQ ID NO: 6016848 - DNA, 25 bp, Homo sapien
tagcgggcgaagcactgcaggccgt

SEQ ID NO: 6016849 - DNA, 25 bp, Homo sapien
gtggtcggggtagcgggcgaagcac

SEQ ID NO: 6016850 - DNA, 25 bp, Homo sapien
ggggtagcgggcgaagcactgcagg

SEQ ID NO: 6016851 - DNA, 25 bp, Homo sapien
gtggtcacgagggtgggccagggca

SEQ ID NO: 6016852 - DNA, 25 bp, Homo sapien
tgttgtagttgtactccagcttgtg

SEQ ID NO: 6016853 - DNA, 25 bp, Homo sapien
ggcggatcttgaagttcaccttgat

SEQ ID NO: 6016854 - DNA, 25 bp, Homo sapien
ttgaagaagtcgtgctgcttcatgt

SEQ ID NO: 6016855 - DNA, 25 bp, Homo sapien
agatgaacttcagggtcagcttgcc

SEQ ID NO: 6016856 - DNA, 25 bp, Homo sapien
aggtagtggttgtcgggcagcagca

SEQ ID NO: 6016857 - DNA, 25 bp, Homo sapien
cgtagccgaaggtggtcacgagggt

SEQ ID NO: 6016858 - DNA, 25 bp, Homo sapien
ggtcttgtagttgccgtcgtccttg

SEQ ID NO: 6016859 - DNA, 25 bp, Homo sapien
agatggtgcgctcctggacgtagcc

SEQ ID NO: 6016860 - DNA, 25 bp, Homo sapien
ccttcgggcatggcggacttgaaga

SEQ ID NO: 6016861 - DNA, 25 bp, Homo sapien
gggtctttgctcagggcggactggt

SEQ ID NO: 6016862 - DNA, 25 bp, Homo sapien
tgccggtggtgcagatgaacttcag

SEQ ID NO: 6016863 - DNA, 25 bp, Homo sapien
tgtggctgttgtagttgtactccag

SEQ ID NO: 6016864 - DNA, 25 bp, Homo sapien
ccagcaggaccatgtgatcgcgctt

SEQ ID NO: 6016865 - DNA, 25 bp, Homo sapien
accagggtgtcgccctcgaacttca

SEQ ID NO: 6016866 - DNA, 25 bp, Homo sapien
tcttctgcttgtcggccatgatata

SEQ ID NO: 6016867 - DNA, 25 bp, Homo sapien
gaagtcgatgcccttcagctcgatg

SEQ ID NO: 6016868 - DNA, 25 bp, Homo sapien
cggcggcggtcacgaactccagcag

SEQ ID NO: 6016869 - DNA, 25 bp, Homo sapien
gtagtggtcggcgagctgcacgctg

SEQ ID NO: 6016870 - DNA, 25 bp, Homo sapien
cgaactccagcaggaccatgtgatc

SEQ ID NO: 6016871 - DNA, 25 bp, Homo sapien
ccttgatgccgttcttctgcttgtc

SEQ ID NO: 6016872 - DNA, 25 bp, Homo sapien
gagctgcacgctgccgtcctcgatg

SEQ ID NO: 6016873 - DNA, 25 bp, Homo sapien
tcgccgatgggggtgttctgctggt

SEQ ID NO: 6016874 - DNA, 25 bp, Homo sapien
cttgccgtaggtggcatcgccctcg

SEQ ID NO: 6016875 - DNA, 25 bp, Homo sapien
tgttgtggcggatcttgaagttcac

SEQ ID NO: 6016876 - DNA, 25 bp, Homo sapien
gcgaagcactgcaggccgtagccga

SEQ ID NO: 6016877 - DNA, 25 bp, Homo sapien
tagctcaggtagtggttgtcgggca

SEQ ID NO: 6016878 - DNA, 25 bp, Homo sapien
gtgatcgcgcttctcgttggggtct

SEQ ID NO: 6016879 - DNA, 25 bp, Homo sapien
gcttgtcggccatgatatagacgtt

SEQ ID NO: 6016880 - DNA, 25 bp, Homo sapien
tcgttggggtctttgctcagggcgg

SEQ ID NO: 6016881 - DNA, 25 bp, Homo sapien
acctcggcgcgggtcttgtagttgc

SEQ ID NO: 6016882 - DNA, 25 bp, Homo sapien
acgtagccttcgggcatggcggact

SEQ ID NO: 6016883 - DNA, 25 bp, Homo sapien
gtgtcgccctcgaacttcacctcgg

SEQ ID NO: 6016884 - DNA, 25 bp, Homo sapien
gcactgcaggccgtagccgaaggtg

SEQ ID NO: 6016885 - DNA, 25 bp, Homo sapien
tgccgtcctccttgaagtcgatgcc

SEQ ID NO: 6016886 - DNA, 25 bp, Homo sapien
gcacgctgccgtcctcgatgttgtg

SEQ ID NO: 6016887 - DNA, 25 bp, Homo sapien
ggcatggcggacttgaagaagtcgt

SEQ ID NO: 6016888 - DNA, 25 bp, Homo sapien
cctcgatgttgtggcggatcttgaa

SEQ ID NO: 6016889 - DNA, 25 bp, Homo sapien
ccctcgaacttcacctcggcgcggg

SEQ ID NO: 6016890 - DNA, 25 bp, Homo sapien
tcttgaagttcaccttgatgccgtt

SEQ ID NO: 6016891 - DNA, 25 bp, Homo sapien
ccagggcacgggcagcttgccggtg

SEQ ID NO: 6016892 - DNA, 25 bp, Homo sapien
gtcagcttgccgtaggtggcatcgc

SEQ ID NO: 6016893 - DNA, 25 bp, Homo sapien
cagcttgccggtggtgcagatgaac

SEQ ID NO: 6016894 - DNA, 25 bp, Homo sapien
aggccaggttcctgatgtcctggca

SEQ ID NO: 6016895 - DNA, 25 bp, Homo sapien
tgatgtagttcatcactatgttcac

SEQ ID NO: 6016896 - DNA, 25 bp, Homo sapien
cctggcatctgtcagagttctccat

SEQ ID NO: 6016897 - DNA, 25 bp, Homo sapien
ggttcctgatgtcctggcatctgtc

SEQ ID NO: 6016898 - DNA, 25 bp, Homo sapien
gccagaccaggccaggtatctctgc

SEQ ID NO: 6016899 - DNA, 25 bp, Homo sapien
ccccagggacagggccttctccaca

SEQ ID NO: 6016900 - DNA, 25 bp, Homo sapien
caaagtcagtgcgttcaaaggccag

SEQ ID NO: 6016901 - DNA, 25 bp, Homo sapien
acccggcagaacaggtagttgttgg

SEQ ID NO: 6016902 - DNA, 25 bp, Homo sapien
tcaggcggtgggtggcctcaaagat

SEQ ID NO: 6016903 - DNA, 25 bp, Homo sapien
atagatcaggcggtgggtggcctca

SEQ ID NO: 6016904 - DNA, 25 bp, Homo sapien
tgattctggcaatttcggcaatgcg

SEQ ID NO: 6016905 - DNA, 25 bp, Homo sapien
caatgcgcagcagggtgttgtaggc

SEQ ID NO: 6016906 - DNA, 25 bp, Homo sapien
gggagatgtccttcactctgattct

SEQ ID NO: 6016907 - DNA, 25 bp, Homo sapien
atctgtcagagttctccatcaggga

SEQ ID NO: 6016908 - DNA, 25 bp, Homo sapien
aaggggcagccacaccattctttct

SEQ ID NO: 6016909 - DNA, 25 bp, Homo sapien
tctctgcccagagtcatccttggca

SEQ ID NO: 6016910 - DNA, 25 bp, Homo sapien
tctccaccagcttggtaacccccag

SEQ ID NO: 6016911 - DNA, 25 bp, Homo sapien
tcagggatctgacttggtcaaagtc

SEQ ID NO: 6016912 - DNA, 25 bp, Homo sapien
ggcaccatagatcaggcggtgggtg

SEQ ID NO: 6016913 - DNA, 25 bp, Homo sapien
ccattctttctgacccggcagaaca

SEQ ID NO: 6016914 - DNA, 25 bp, Homo sapien
gtccagccaccagcctgcatgattt

SEQ ID NO: 6016915 - DNA, 25 bp, Homo sapien
agacacagagatccatctctccacc

SEQ ID NO: 6016916 - DNA, 25 bp, Homo sapien
ccccagtctcagagtccaggtttct

SEQ ID NO: 6016917 - DNA, 25 bp, Homo sapien
acaccagggtcttggtcctgccaat

SEQ ID NO: 6016918 - DNA, 25 bp, Homo sapien
tgtccctggcagcacccactctggc

SEQ ID NO: 6016919 - DNA, 25 bp, Homo sapien
cggtgcgggagatgtccttcactct

SEQ ID NO: 6016920 - DNA, 25 bp, Homo sapien
attggtccagccaccagcctgcatg

SEQ ID NO: 6016921 - DNA, 25 bp, Homo sapien
ggtgggtggcctcaaagatcccttc

SEQ ID NO: 6016922 - DNA, 25 bp, Homo sapien
tggcaatttcggcaatgcgcagcag

SEQ ID NO: 6016923 - DNA, 25 bp, Homo sapien
atctgacttggtcaaagtcagtgcg

SEQ ID NO: 6016924 - DNA, 25 bp, Homo sapien
tggcctcaaagatcccttccagggc

SEQ ID NO: 6016925 - DNA, 25 bp, Homo sapien
gcctgcatgatttcagggatggaca

SEQ ID NO: 6016926 - DNA, 25 bp, Homo sapien
tgtccttcactctgattctggcaat

SEQ ID NO: 6016927 - DNA, 25 bp, Homo sapien
atccttggcaccatagatcaggcgg

SEQ ID NO: 6016928 - DNA, 25 bp, Homo sapien
tttctgacccggcagaacaggtagt

SEQ ID NO: 6016929 - DNA, 25 bp, Homo sapien
tgtaggcaatgcccaggaaggccag

SEQ ID NO: 6016930 - DNA, 25 bp, Homo sapien
tgttcacattggtccagccaccagc

SEQ ID NO: 6016931 - DNA, 25 bp, Homo sapien
tgatgtcctggcatctgtcagagtt

SEQ ID NO: 6016932 - DNA, 25 bp, Homo sapien
acaccagctgtggacaccagggtct

SEQ ID NO: 6016933 - DNA, 25 bp, Homo sapien
cagagttctccatcagggatctgac

SEQ ID NO: 6016934 - DNA, 25 bp, Homo sapien
gggaggtggcagaaggggcagccac

SEQ ID NO: 6016935 - DNA, 25 bp, Homo sapien
atcagccacaccagacacagagatc

SEQ ID NO: 6016936 - DNA, 25 bp, Homo sapien
agagtcatccttggcaccatagatc

SEQ ID NO: 6016937 - DNA, 25 bp, Homo sapien
ccagcttggtaacccccagggacag

SEQ ID NO: 6016938 - DNA, 25 bp, Homo sapien
atccatctctccaccagcttggtaa

SEQ ID NO: 6016939 - DNA, 25 bp, Homo sapien
agagtggccagaccaggccaggtat

SEQ ID NO: 6016940 - DNA, 25 bp, Homo sapien
cagggcccgggtggacagttgggag

SEQ ID NO: 6016941 - DNA, 25 bp, Homo sapien
ttgttggggtcatcagccacaccag

SEQ ID NO: 6016942 - DNA, 25 bp, Homo sapien
agtccaggtttctgatgtagttcat

SEQ ID NO: 6016943 - DNA, 25 bp, Homo sapien
agggacagggccttctccacaccag

SEQ ID NO: 6016944 - DNA, 25 bp, Homo sapien
tttcggcaatgcgcagcagggtgtt

SEQ ID NO: 6016945 - DNA, 25 bp, Homo sapien
gggtcttggtcctgccaatgtggat

SEQ ID NO: 6016946 - DNA, 25 bp, Homo sapien
tctcagagtccaggtttctgatgta

SEQ ID NO: 6016947 - DNA, 25 bp, Homo sapien
tcactatgttcacattggtccagcc

SEQ ID NO: 6016948 - DNA, 25 bp, Homo sapien
atgatttcagggatggacacaccag

SEQ ID NO: 6016949 - DNA, 25 bp, Homo sapien
accaggccaggtatctctgcccaga

SEQ ID NO: 6016950 - DNA, 25 bp, Homo sapien
gggtcatcagccacaccagacacag

SEQ ID NO: 6016951 - DNA, 25 bp, Homo sapien
acaccagacacagagatccatctct

SEQ ID NO: 6016952 - DNA, 25 bp, Homo sapien
tcactctgattctggcaatttcggc

SEQ ID NO: 6016953 - DNA, 25 bp, Homo sapien
ctctggcagagtggccagaccaggc

SEQ ID NO: 6016954 - DNA, 25 bp, Homo sapien
atggacacaccagccctggccatgt

SEQ ID NO: 6016955 - DNA, 25 bp, Homo sapien
tctccatcagggatctgacttggtc

SEQ ID NO: 6016956 - DNA, 25 bp, Homo sapien
tggcagaaggggcagccacaccatt

SEQ ID NO: 6016957 - DNA, 25 bp, Homo sapien
agggccttctccacaccagctgtgg

SEQ ID NO: 6016958 - DNA, 25 bp, Homo sapien
ccaccagcctgcatgatttcaggga

SEQ ID NO: 6016959 - DNA, 25 bp, Homo sapien
tggccatgtccctggcagcacccac

SEQ ID NO: 6016960 - DNA, 25 bp, Homo sapien
cttccagggcccgggtggacagttg

SEQ ID NO: 6016961 - DNA, 25 bp, Homo sapien
gggtgttgtaggcaatgcccaggaa

SEQ ID NO: 6016962 - DNA, 25 bp, Homo sapien
caggtagttgttggggtcatcagcc

SEQ ID NO: 6016963 - DNA, 25 bp, Homo sapien
ttctccacaccagctgtggacacca

SEQ ID NO: 6016964 - DNA, 25 bp, Homo sapien
tggtcctgccaatgtggatcagcat

SEQ ID NO: 6016965 - DNA, 25 bp, Homo sapien
gctgtggacaccagggtcttggtcc

SEQ ID NO: 6016966 - DNA, 25 bp, Homo sapien
cagccctggccatgtccctggcagc

SEQ ID NO: 6016967 - DNA, 25 bp, Homo sapien
ggacagttgggaggtggcagaaggg

SEQ ID NO: 6016968 - DNA, 25 bp, Homo sapien
cttggtcaaagtcagtgcgttcaaa

SEQ ID NO: 6016969 - DNA, 25 bp, Homo sapien
caccatcggtgcgggagatgtcctt

SEQ ID NO: 6016970 - DNA, 25 bp, Homo sapien
ggtttctgatgtagttcatcactat

SEQ ID NO: 6016971 - DNA, 25 bp, Homo sapien
tcagggatggacacaccagccctgg

SEQ ID NO: 6016972 - DNA, 25 bp, Homo sapien
tgtggatcagcattctcccaccatc

SEQ ID NO: 6016973 - DNA, 25 bp, Homo sapien
agttcatcactatgttcacattggt

SEQ ID NO: 6016974 - DNA, 25 bp, Homo sapien
cagccacaccattctttctgacccg

SEQ ID NO: 6016975 - DNA, 25 bp, Homo sapien
tgcccagagtcatccttggcaccat

SEQ ID NO: 6016976 - DNA, 25 bp, Homo sapien
ccaggtatctctgcccagagtcatc

SEQ ID NO: 6016977 - DNA, 25 bp, Homo sapien
tgccaatgtggatcagcattctccc

SEQ ID NO: 6016978 - DNA, 25 bp, Homo sapien
agagatccatctctccaccagcttg

SEQ ID NO: 6016979 - DNA, 25 bp, Homo sapien
ccgggtggacagttgggaggtggca

SEQ ID NO: 6016980 - DNA, 25 bp, Homo sapien
tggcagcacccactctggcagagtg

SEQ ID NO: 6016981 - DNA, 25 bp, Homo sapien
cacccactctggcagagtggccaga

SEQ ID NO: 6016982 - DNA, 25 bp, Homo sapien
tcagcattctcccaccatcggtgcg

SEQ ID NO: 6016983 - DNA, 25 bp, Homo sapien
caatgcccaggaaggccaggttcct

SEQ ID NO: 6016984 - DNA, 25 bp, Homo sapien
cagcagggtgttgtaggcaatgccc

SEQ ID NO: 6016985 - DNA, 25 bp, Homo sapien
ccaggaaggccaggttcctgatgtc

SEQ ID NO: 6016986 - DNA, 25 bp, Homo sapien
cagaacaggtagttgttggggtcat

SEQ ID NO: 6016987 - DNA, 25 bp, Homo sapien
ttctcccaccatcggtgcgggagat

SEQ ID NO: 6016988 - DNA, 25 bp, Homo sapien
ggccgtcgccgatgggggtgttctg

SEQ ID NO: 6016989 - DNA, 25 bp, Homo sapien
tgtggctgttgtagttgtactccag

SEQ ID NO: 6016990 - DNA, 25 bp, Homo sapien
acgagggtgggccagggcacgggca

SEQ ID NO: 6016991 - DNA, 25 bp, Homo sapien
gatgcccttcagctcgatgcggttc

SEQ ID NO: 6016992 - DNA, 25 bp, Homo sapien
gtcggcgagctgcacgctgccgtcc

SEQ ID NO: 6016993 - DNA, 25 bp, Homo sapien
ggatgttgccgtcctccttgaagtc

SEQ ID NO: 6016994 - DNA, 25 bp, Homo sapien
cggccatgatatagacgttgtggct

SEQ ID NO: 6016995 - DNA, 25 bp, Homo sapien
gccccaggatgttgccgtcctcctt

SEQ ID NO: 6016996 - DNA, 25 bp, Homo sapien
aacttcacctcggcgcgggtcttgt

SEQ ID NO: 6016997 - DNA, 25 bp, Homo sapien
cttcagctcgatgcggttcaccagg

SEQ ID NO: 6016998 - DNA, 25 bp, Homo sapien
gatgggggtgttctgctggtagtgg

SEQ ID NO: 6016999 - DNA, 25 bp, Homo sapien
actccagcttgtgccccaggatgtt

SEQ ID NO: 6017000 - DNA, 25 bp, Homo sapien
gtggtcacgagggtgggccagggca

SEQ ID NO: 6017001 - DNA, 25 bp, Homo sapien
ggaccatgtgatcgcgcttctcgtt

SEQ ID NO: 6017002 - DNA, 25 bp, Homo sapien
ggcgcgggtcttgtagttgccgtcg

SEQ ID NO: 6017003 - DNA, 25 bp, Homo sapien
gccgagagtgatcccggcggcggtc

SEQ ID NO: 6017004 - DNA, 25 bp, Homo sapien
gggcggactggtagctcaggtagtg

SEQ ID NO: 6017005 - DNA, 25 bp, Homo sapien
caggccgtagccgaaggtggtcacg

SEQ ID NO: 6017006 - DNA, 25 bp, Homo sapien
cacgggcagcttgccggtggtgcag

SEQ ID NO: 6017007 - DNA, 25 bp, Homo sapien
tgtagttgccgtcgtccttgaagaa

SEQ ID NO: 6017008 - DNA, 25 bp, Homo sapien
tgatatagacgttgtggctgttgta

SEQ ID NO: 6017009 - DNA, 25 bp, Homo sapien
agcacggggccgtcgccgatggggg

SEQ ID NO: 6017010 - DNA, 25 bp, Homo sapien
tggttgtcgggcagcagcacggggc

SEQ ID NO: 6017011 - DNA, 25 bp, Homo sapien
ctccttgaagtcgatgcccttcagc

SEQ ID NO: 6017012 - DNA, 25 bp, Homo sapien
gcgcttctcgttggggtctttgctc

SEQ ID NO: 6017013 - DNA, 25 bp, Homo sapien
cgaaggtggtcacgagggtgggcca

SEQ ID NO: 6017014 - DNA, 25 bp, Homo sapien
ggtgggccagggcacgggcagcttg

SEQ ID NO: 6017015 - DNA, 25 bp, Homo sapien
cgtccttgaagaagatggtgcgctc

SEQ ID NO: 6017016 - DNA, 25 bp, Homo sapien
cttcagggtcagcttgccgtaggtg

SEQ ID NO: 6017017 - DNA, 25 bp, Homo sapien
cggttcaccagggtgtcgccctcga

SEQ ID NO: 6017018 - DNA, 25 bp, Homo sapien
ttgctcagggcggactggtagctca

SEQ ID NO: 6017019 - DNA, 25 bp, Homo sapien
tgcgctcctggacgtagccttcggg

SEQ ID NO: 6017020 - DNA, 25 bp, Homo sapien
gcggacttgaagaagtcgtgctgct

SEQ ID NO: 6017021 - DNA, 25 bp, Homo sapien
tcgatgcggttcaccagggtgtcgc

SEQ ID NO: 6017022 - DNA, 25 bp, Homo sapien
agacgttgtggctgttgtagttgta

SEQ ID NO: 6017023 - DNA, 25 bp, Homo sapien
gcttgtgccccaggatgttgccgtc

SEQ ID NO: 6017024 - DNA, 25 bp, Homo sapien
tgccggtggtgcagatgaacttcag

SEQ ID NO: 6017025 - DNA, 25 bp, Homo sapien
ggtgttctgctggtagtggtcggcg

SEQ ID NO: 6017026 - DNA, 25 bp, Homo sapien
tgatcccggcggcggtcacgaactc

SEQ ID NO: 6017027 - DNA, 25 bp, Homo sapien
cggtcacgaactccagcaggaccat

SEQ ID NO: 6017028 - DNA, 25 bp, Homo sapien
agttcaccttgatgccgttcttctg

SEQ ID NO: 6017029 - DNA, 25 bp, Homo sapien
tgccgtcgtccttgaagaagatggt

SEQ ID NO: 6017030 - DNA, 25 bp, Homo sapien
agttgtactccagcttgtgccccag

SEQ ID NO: 6017031 - DNA, 25 bp, Homo sapien
tgccgttcttctgcttgtcggccat

SEQ ID NO: 6017032 - DNA, 25 bp, Homo sapien
cctggacgtagccttcgggcatggc

SEQ ID NO: 6017033 - DNA, 25 bp, Homo sapien
tggtgcagatgaacttcagggtcag

SEQ ID NO: 6017034 - DNA, 25 bp, Homo sapien
tcgggcagcagcacggggccgtcgc

SEQ ID NO: 6017035 - DNA, 25 bp, Homo sapien
aagtcgtgctgcttcatgtggtcgg

SEQ ID NO: 6017036 - DNA, 25 bp, Homo sapien
cggcggcggtcacgaactccagcag

SEQ ID NO: 6017037 - DNA, 25 bp, Homo sapien
actggtagctcaggtagtggttgtc

SEQ ID NO: 6017038 - DNA, 25 bp, Homo sapien
gtggtcggggtagcgggcgaagcac

SEQ ID NO: 6017039 - DNA, 25 bp, Homo sapien
cgaactccagcaggaccatgtgatc

SEQ ID NO: 6017040 - DNA, 25 bp, Homo sapien
tagcgggcgaagcactgcaggccgt

SEQ ID NO: 6017041 - DNA, 25 bp, Homo sapien
ggggtagcgggcgaagcactgcagg

SEQ ID NO: 6017042 - DNA, 25 bp, Homo sapien
tgccgtcctcgatgttgtggcggat

SEQ ID NO: 6017043 - DNA, 25 bp, Homo sapien
ctgctggtagtggtcggcgagctgc

SEQ ID NO: 6017044 - DNA, 25 bp, Homo sapien
aggtagtggttgtcgggcagcagca

SEQ ID NO: 6017045 - DNA, 25 bp, Homo sapien
ttgaagaagtcgtgctgcttcatgt

SEQ ID NO: 6017046 - DNA, 25 bp, Homo sapien
ggcggatcttgaagttcaccttgat

SEQ ID NO: 6017047 - DNA, 25 bp, Homo sapien
tgttgtagttgtactccagcttgtg

SEQ ID NO: 6017048 - DNA, 25 bp, Homo sapien
agatgaacttcagggtcagcttgcc

SEQ ID NO: 6017049 - DNA, 25 bp, Homo sapien
cgtagccgaaggtggtcacgagggt

SEQ ID NO: 6017050 - DNA, 25 bp, Homo sapien
ggtcttgtagttgccgtcgtccttg

SEQ ID NO: 6017051 - DNA, 25 bp, Homo sapien
agatggtgcgctcctggacgtagcc

SEQ ID NO: 6017052 - DNA, 25 bp, Homo sapien
ccttcgggcatggcggacttgaaga

SEQ ID NO: 6017053 - DNA, 25 bp, Homo sapien
gggtctttgctcagggcggactggt

SEQ ID NO: 6017054 - DNA, 25 bp, Homo sapien
tcttctgcttgtcggccatgatata

SEQ ID NO: 6017055 - DNA, 25 bp, Homo sapien
accagggtgtcgccctcgaacttca

SEQ ID NO: 6017056 - DNA, 25 bp, Homo sapien
ccagcaggaccatgtgatcgcgctt

SEQ ID NO: 6017057 - DNA, 25 bp, Homo sapien
ccttgatgccgttcttctgcttgtc

SEQ ID NO: 6017058 - DNA, 25 bp, Homo sapien
gtagtggtcggcgagctgcacgctg

SEQ ID NO: 6017059 - DNA, 25 bp, Homo sapien
gaagtcgatgcccttcagctcgatg

SEQ ID NO: 6017060 - DNA, 25 bp, Homo sapien
tgttgtggcggatcttgaagttcac

SEQ ID NO: 6017061 - DNA, 25 bp, Homo sapien
gagctgcacgctgccgtcctcgatg

SEQ ID NO: 6017062 - DNA, 25 bp, Homo sapien
cttgccgtaggtggcatcgccctcg

SEQ ID NO: 6017063 - DNA, 25 bp, Homo sapien
tcgccgatgggggtgttctgctggt

SEQ ID NO: 6017064 - DNA, 25 bp, Homo sapien
gtgtcgccctcgaacttcacctcgg

SEQ ID NO: 6017065 - DNA, 25 bp, Homo sapien
tcttgaagttcaccttgatgccgtt

SEQ ID NO: 6017066 - DNA, 25 bp, Homo sapien
gtgatcgcgcttctcgttggggtct

SEQ ID NO: 6017067 - DNA, 25 bp, Homo sapien
gcgaagcactgcaggccgtagccga

SEQ ID NO: 6017068 - DNA, 25 bp, Homo sapien
tagctcaggtagtggttgtcgggca

SEQ ID NO: 6017069 - DNA, 25 bp, Homo sapien
gcacgctgccgtcctcgatgttgtg

SEQ ID NO: 6017070 - DNA, 25 bp, Homo sapien
acctcggcgcgggtcttgtagttgc

SEQ ID NO: 6017071 - DNA, 25 bp, Homo sapien
acgtagccttcgggcatggcggact

SEQ ID NO: 6017072 - DNA, 25 bp, Homo sapien
tcgttggggtctttgctcagggcgg

SEQ ID NO: 6017073 - DNA, 25 bp, Homo sapien
tgccgtcctccttgaagtcgatgcc

SEQ ID NO: 6017074 - DNA, 25 bp, Homo sapien
gcttgtcggccatgatatagacgtt

SEQ ID NO: 6017075 - DNA, 25 bp, Homo sapien
gcactgcaggccgtagccgaaggtg

SEQ ID NO: 6017076 - DNA, 25 bp, Homo sapien
ggcatggcggacttgaagaagtcgt

SEQ ID NO: 6017077 - DNA, 25 bp, Homo sapien
cctcgatgttgtggcggatcttgaa

SEQ ID NO: 6017078 - DNA, 25 bp, Homo sapien
ccctcgaacttcacctcggcgcggg

SEQ ID NO: 6017079 - DNA, 25 bp, Homo sapien
ccagggcacgggcagcttgccggtg

SEQ ID NO: 6017080 - DNA, 25 bp, Homo sapien
gtcagcttgccgtaggtggcatcgc

SEQ ID NO: 6017081 - DNA, 25 bp, Homo sapien
tgaagaagatggtgcgctcctggac

SEQ ID NO: 6017082 - DNA, 25 bp, Homo sapien
cagcttgccggtggtgcagatgaac

SEQ ID NO: 6017083 - DNA, 25 bp, Homo sapien
tgcttcacgtacaccttggagccgt

SEQ ID NO: 6017084 - DNA, 25 bp, Homo sapien
ttggagtccacgtagtagtagccgg

SEQ ID NO: 6017085 - DNA, 25 bp, Homo sapien
tcttctgcattacggggccgtcgga

SEQ ID NO: 6017086 - DNA, 25 bp, Homo sapien
gaggggaagttcacgccgatgaact

SEQ ID NO: 6017087 - DNA, 25 bp, Homo sapien
ctcgcccttcagcacgccgtcgcgg

SEQ ID NO: 6017088 - DNA, 25 bp, Homo sapien
tgaactccaccaggtagtggccgcc

SEQ ID NO: 6017089 - DNA, 25 bp, Homo sapien
ggaaggacagcttcttgtagtcggg

SEQ ID NO: 6017090 - DNA, 25 bp, Homo sapien
gatctcgaactcgtggccgttcacg

SEQ ID NO: 6017091 - DNA, 25 bp, Homo sapien
gttcatcacgcgctcccacttgaag

SEQ ID NO: 6017092 - DNA, 25 bp, Homo sapien
caggcgctcggtggagggctcccag

SEQ ID NO: 6017093 - DNA, 25 bp, Homo sapien
cttcagggccttgtggatctcgccc

SEQ ID NO: 6017094 - DNA, 25 bp, Homo sapien
ctcgaagttcatcacgcgctcccac

SEQ ID NO: 6017095 - DNA, 25 bp, Homo sapien
atggtgtagtcctcgttgtgggagg

SEQ ID NO: 6017096 - DNA, 25 bp, Homo sapien
gccctcgatctcgaactcgtggccg

SEQ ID NO: 6017097 - DNA, 25 bp, Homo sapien
tccacgatggtgtagtcctcgttgt

SEQ ID NO: 6017098 - DNA, 25 bp, Homo sapien
tagtcctcgttgtgggaggtgatgt

SEQ ID NO: 6017099 - DNA, 25 bp, Homo sapien
ccttggtcaccttcagcttggcggt

SEQ ID NO: 6017100 - DNA, 25 bp, Homo sapien
ttgtagatgaagcagccgtcctgca

SEQ ID NO: 6017101 - DNA, 25 bp, Homo sapien
ggtcaccacgccgccgtcctcgaag

SEQ ID NO: 6017102 - DNA, 25 bp, Homo sapien
atgtcccaggcgaagggcagggggc

SEQ ID NO: 6017103 - DNA, 25 bp, Homo sapien
ggccctcgccctcgccctcgatctc

SEQ ID NO: 6017104 - DNA, 25 bp, Homo sapien
cctcggggaaggacagcttcttgta

SEQ ID NO: 6017105 - DNA, 25 bp, Homo sapien
tccagcttggagtccacgtagtagt

SEQ ID NO: 6017106 - DNA, 25 bp, Homo sapien
tcggggatgtcggcggggtgcttca

SEQ ID NO: 6017107 - DNA, 25 bp, Homo sapien
atgaacttcaccttgtagatgaagc

SEQ ID NO: 6017108 - DNA, 25 bp, Homo sapien
cagcttcttgtagtcggggatgtcg

SEQ ID NO: 6017109 - DNA, 25 bp, Homo sapien
cacgggcttcttggccatgtagatg

SEQ ID NO: 6017110 - DNA, 25 bp, Homo sapien
gggcggccctcgccctcgccctcga

SEQ ID NO: 6017111 - DNA, 25 bp, Homo sapien
cttcttggccatgtagatggacttg

SEQ ID NO: 6017112 - DNA, 25 bp, Homo sapien
ggccttgtggatctcgcccttcagc

SEQ ID NO: 6017113 - DNA, 25 bp, Homo sapien
gtggccgccgtccttcagcttcagg

SEQ ID NO: 6017114 - DNA, 25 bp, Homo sapien
ctcggtggagggctcccagcccata

SEQ ID NO: 6017115 - DNA, 25 bp, Homo sapien
tcacgcgctcccacttgaagccctc

SEQ ID NO: 6017116 - DNA, 25 bp, Homo sapien
gccgtcctcgaagttcatcacgcgc

SEQ ID NO: 6017117 - DNA, 25 bp, Homo sapien
ccacgtagtagtagccgggcagctg

SEQ ID NO: 6017118 - DNA, 25 bp, Homo sapien
gcggggtgcttcacgtacaccttgg

SEQ ID NO: 6017119 - DNA, 25 bp, Homo sapien
ccttcagcttcagggccttgtggat

SEQ ID NO: 6017120 - DNA, 25 bp, Homo sapien
aagttcacgccgatgaacttcacct

SEQ ID NO: 6017121 - DNA, 25 bp, Homo sapien
tgggaggtgatgtccagcttggagt

SEQ ID NO: 6017122 - DNA, 25 bp, Homo sapien
ttcaccttgtagatgaagcagccgt

SEQ ID NO: 6017123 - DNA, 25 bp, Homo sapien
atgtcggcggggtgcttcacgtaca

SEQ ID NO: 6017124 - DNA, 25 bp, Homo sapien
cacgccgtcgcgggggtacaggcgc

SEQ ID NO: 6017125 - DNA, 25 bp, Homo sapien
ggccgcccttggtcaccttcagctt

SEQ ID NO: 6017126 - DNA, 25 bp, Homo sapien
tcgttgtgggaggtgatgtccagct

SEQ ID NO: 6017127 - DNA, 25 bp, Homo sapien
tcctgcagggaggagtcctgggtca

SEQ ID NO: 6017128 - DNA, 25 bp, Homo sapien
tcagcttggcggtctgggtgccctc

SEQ ID NO: 6017129 - DNA, 25 bp, Homo sapien
agccgggcagctgcacgggcttctt

SEQ ID NO: 6017130 - DNA, 25 bp, Homo sapien
cagccgtcctgcagggaggagtcct

SEQ ID NO: 6017131 - DNA, 25 bp, Homo sapien
gctcccacttgaagccctcggggaa

SEQ ID NO: 6017132 - DNA, 25 bp, Homo sapien
cgctcgtactgctccacgatggtgt

SEQ ID NO: 6017133 - DNA, 25 bp, Homo sapien
ggggggacaggatgtcccaggcgaa

SEQ ID NO: 6017134 - DNA, 25 bp, Homo sapien
gctcccagcccatagtcttcttctg

SEQ ID NO: 6017135 - DNA, 25 bp, Homo sapien
gagtcctgggtcacggtcaccacgc

SEQ ID NO: 6017136 - DNA, 25 bp, Homo sapien
cttcagcacgccgtcgcgggggtac

SEQ ID NO: 6017137 - DNA, 25 bp, Homo sapien
atgaagcagccgtcctgcagggagg

SEQ ID NO: 6017138 - DNA, 25 bp, Homo sapien
gtggatctcgcccttcagcacgccg

SEQ ID NO: 6017139 - DNA, 25 bp, Homo sapien
tcgcgggggtacaggcgctcggtgg

SEQ ID NO: 6017140 - DNA, 25 bp, Homo sapien
gaactcgtggccgttcacggagccc

SEQ ID NO: 6017141 - DNA, 25 bp, Homo sapien
tggcggtctgggtgccctcgtaggg

SEQ ID NO: 6017142 - DNA, 25 bp, Homo sapien
gccgtccttcagcttcagggccttg

SEQ ID NO: 6017143 - DNA, 25 bp, Homo sapien
tactgctccacgatggtgtagtcct

SEQ ID NO: 6017144 - DNA, 25 bp, Homo sapien
agcccatagtcttcttctgcattac

SEQ ID NO: 6017145 - DNA, 25 bp, Homo sapien
cgtcggaggggaagttcacgccgat

SEQ ID NO: 6017146 - DNA, 25 bp, Homo sapien
cacgccgccgtcctcgaagttcatc

SEQ ID NO: 6017147 - DNA, 25 bp, Homo sapien
tcgtaggggcggccctcgccctcgc

SEQ ID NO: 6017148 - DNA, 25 bp, Homo sapien
accttggagccgtactggaactggg

SEQ ID NO: 6017149 - DNA, 25 bp, Homo sapien
tgccctcgtaggggcggccctcgcc

SEQ ID NO: 6017150 - DNA, 25 bp, Homo sapien
ctccaccaggtagtggccgccgtcc

SEQ ID NO: 6017151 - DNA, 25 bp, Homo sapien
ggtcacggtcaccacgccgccgtcc

SEQ ID NO: 6017152 - DNA, 25 bp, Homo sapien
tcaccttcagcttggcggtctgggt

SEQ ID NO: 6017153 - DNA, 25 bp, Homo sapien
tagtcttcttctgcattacggggcc

SEQ ID NO: 6017154 - DNA, 25 bp, Homo sapien
caggtagtggccgccgtccttcagc

SEQ ID NO: 6017155 - DNA, 25 bp, Homo sapien
gggtacaggcgctcggtggagggct

SEQ ID NO: 6017156 - DNA, 25 bp, Homo sapien
acaggatgtcccaggcgaagggcag

SEQ ID NO: 6017157 - DNA, 25 bp, Homo sapien
ggccatgtagatggacttgaactcc

SEQ ID NO: 6017158 - DNA, 25 bp, Homo sapien
acgtacaccttggagccgtactgga

SEQ ID NO: 6017159 - DNA, 25 bp, Homo sapien
tggaactggggggacaggatgtccc

SEQ ID NO: 6017160 - DNA, 25 bp, Homo sapien
gaagccctcggggaaggacagcttc

SEQ ID NO: 6017161 - DNA, 25 bp, Homo sapien
cacttgaagccctcggggaaggaca

SEQ ID NO: 6017162 - DNA, 25 bp, Homo sapien
gtggccgttcacggagccctccatg

SEQ ID NO: 6017163 - DNA, 25 bp, Homo sapien
agggaggagtcctgggtcacggtca

SEQ ID NO: 6017164 - DNA, 25 bp, Homo sapien
gtagatggacttgaactccaccagg

SEQ ID NO: 6017165 - DNA, 25 bp, Homo sapien
agtagtagccgggcagctgcacggg

SEQ ID NO: 6017166 - DNA, 25 bp, Homo sapien
gccctcgccctcgatctcgaactcg

SEQ ID NO: 6017167 - DNA, 25 bp, Homo sapien
acgccgatgaacttcaccttgtaga

SEQ ID NO: 6017168 - DNA, 25 bp, Homo sapien
cagctgcacgggcttcttggccatg

SEQ ID NO: 6017169 - DNA, 25 bp, Homo sapien
gtgatgtccagcttggagtccacgt

SEQ ID NO: 6017170 - DNA, 25 bp, Homo sapien
tggagggctcccagcccatagtctt

SEQ ID NO: 6017171 - DNA, 25 bp, Homo sapien
tctgggtgccctcgtaggggcggcc

SEQ ID NO: 6017172 - DNA, 25 bp, Homo sapien
cttgtagtcggggatgtcggcgggg

SEQ ID NO: 6017173 - DNA, 25 bp, Homo sapien
caggcgaagggcagggggccgccct

SEQ ID NO: 6017174 - DNA, 25 bp, Homo sapien
ctgccccattgacggccacgctttg

SEQ ID NO: 6017175 - DNA, 25 bp, Homo sapien
gtactcccggaattgccgttatcac

SEQ ID NO: 6017176 - DNA, 25 bp, Homo sapien
attcgcgacagcctgcgctcaaacg

SEQ ID NO: 6017177 - DNA, 25 bp, Homo sapien
tcggtgcgctcttggtcgagccgca

SEQ ID NO: 6017178 - DNA, 25 bp, Homo sapien
gatccccaatacattgaataggaca

SEQ ID NO: 6017179 - DNA, 25 bp, Homo sapien
tgcaccctcctgttcctcctgccag

SEQ ID NO: 6017180 - DNA, 25 bp, Homo sapien
agcgaaggcgcgctctgcttcatct

SEQ ID NO: 6017181 - DNA, 25 bp, Homo sapien
cgagccgcccaaggtcgatcagacc

SEQ ID NO: 6017182 - DNA, 25 bp, Homo sapien
cattgaagagttttagggtccacca

SEQ ID NO: 6017183 - DNA, 25 bp, Homo sapien
atcaacggcgcgtccgaacattcgc

SEQ ID NO: 6017184 - DNA, 25 bp, Homo sapien
atcggcatagcgatctgctgttccg

SEQ ID NO: 6017185 - DNA, 25 bp, Homo sapien
gttcctcctgccagttgatgacctc

SEQ ID NO: 6017186 - DNA, 25 bp, Homo sapien
cccgtgcattgaagagttttagggt

SEQ ID NO: 6017187 - DNA, 25 bp, Homo sapien
gtgaacagcgccaagttgctgcccc

SEQ ID NO: 6017188 - DNA, 25 bp, Homo sapien
aaccgataggctgtgaacagcgcca

SEQ ID NO: 6017189 - DNA, 25 bp, Homo sapien
attgaataggacagcgaaggcgcgc

SEQ ID NO: 6017190 - DNA, 25 bp, Homo sapien
gcgctgcccagttctcttcggcgtt

SEQ ID NO: 6017191 - DNA, 25 bp, Homo sapien
ccggaattgccgttatcaccaagca

SEQ ID NO: 6017192 - DNA, 25 bp, Homo sapien
agcgccaagttgctgccccattgac

SEQ ID NO: 6017193 - DNA, 25 bp, Homo sapien
tcgtccggtaagaagtcgggattga

SEQ ID NO: 6017194 - DNA, 25 bp, Homo sapien
cgacagcctgcgctcaaacggacat

SEQ ID NO: 6017195 - DNA, 25 bp, Homo sapien
tcggcatgcagggatcaccatggca

SEQ ID NO: 6017196 - DNA, 25 bp, Homo sapien
taggacagcgaaggcgcgctctgct

SEQ ID NO: 6017197 - DNA, 25 bp, Homo sapien
gtcgggggcttcgatccccaataca

SEQ ID NO: 6017198 - DNA, 25 bp, Homo sapien
ccaaaagatcgtgcagcggcgtact

SEQ ID NO: 6017199 - DNA, 25 bp, Homo sapien
atcagacccgtgcattgaagagttt

SEQ ID NO: 6017200 - DNA, 25 bp, Homo sapien
cgttcgacacgagccaaaagatcgt

SEQ ID NO: 6017201 - DNA, 25 bp, Homo sapien
tgccaaatcggcatagcgatctgct

SEQ ID NO: 6017202 - DNA, 25 bp, Homo sapien
agttgatgacctcggggcaagccac

SEQ ID NO: 6017203 - DNA, 25 bp, Homo sapien
ggcttcgatccccaatacattgaat

SEQ ID NO: 6017204 - DNA, 25 bp, Homo sapien
tgcgggacaccacatcaacggcgcg

SEQ ID NO: 6017205 - DNA, 25 bp, Homo sapien
agagttttagggtccaccatgaagt

SEQ ID NO: 6017206 - DNA, 25 bp, Homo sapien
ggcgcgctctgcttcatctggcgct

SEQ ID NO: 6017207 - DNA, 25 bp, Homo sapien
tcgcggtcgggggcttcgatcccca

SEQ ID NO: 6017208 - DNA, 25 bp, Homo sapien
cctgcgctcaaacggacattgatca

SEQ ID NO: 6017209 - DNA, 25 bp, Homo sapien
tcttgtcctcgtccggtaagaagtc

SEQ ID NO: 6017210 - DNA, 25 bp, Homo sapien
ggatcaccatggcaaacaaccatat

SEQ ID NO: 6017211 - DNA, 25 bp, Homo sapien
gcgtactcttgtcctcgtccggtaa

SEQ ID NO: 6017212 - DNA, 25 bp, Homo sapien
cattgacggccacgctttgagcaaa

SEQ ID NO: 6017213 - DNA, 25 bp, Homo sapien
cggacattgatcaaccgataggctg

SEQ ID NO: 6017214 - DNA, 25 bp, Homo sapien
agtcgggattgacggcattgcggga

SEQ ID NO: 6017215 - DNA, 25 bp, Homo sapien
ttgatcaaccgataggctgtgaaca

SEQ ID NO: 6017216 - DNA, 25 bp, Homo sapien
aaccatatcggtgcgctcttggtcg

SEQ ID NO: 6017217 - DNA, 25 bp, Homo sapien
ttgccgttatcaccaagcatgcacc

SEQ ID NO: 6017218 - DNA, 25 bp, Homo sapien
tggtcgagccgcaccggtagctctc

SEQ ID NO: 6017219 - DNA, 25 bp, Homo sapien
cccagttctcttcggcgttagcaat

SEQ ID NO: 6017220 - DNA, 25 bp, Homo sapien
gtaagaagtcgggattgacggcatt

SEQ ID NO: 6017221 - DNA, 25 bp, Homo sapien
taggctgtgaacagcgccaagttgc

SEQ ID NO: 6017222 - DNA, 25 bp, Homo sapien
ggcgttagcaatcatgagtgccaaa

SEQ ID NO: 6017223 - DNA, 25 bp, Homo sapien
tgacctcggggcaagccacacctcg

SEQ ID NO: 6017224 - DNA, 25 bp, Homo sapien
gcccaaggtcgatcagacccgtgca

SEQ ID NO: 6017225 - DNA, 25 bp, Homo sapien
caagcatgcaccctcctgttcctcc

SEQ ID NO: 6017226 - DNA, 25 bp, Homo sapien
agctctcgttcgacacgagccaaaa

SEQ ID NO: 6017227 - DNA, 25 bp, Homo sapien
atagcgatctgctgttccgagccgc

SEQ ID NO: 6017228 - DNA, 25 bp, Homo sapien
accatggcaaacaaccatatcggtg

SEQ ID NO: 6017229 - DNA, 25 bp, Homo sapien
attgacggcattgcgggacaccaca

SEQ ID NO: 6017230 - DNA, 25 bp, Homo sapien
accggtagctctcgttcgacacgag

SEQ ID NO: 6017231 - DNA, 25 bp, Homo sapien
atctgctgttccgagccgcccaagg

SEQ ID NO: 6017232 - DNA, 25 bp, Homo sapien
acaccacatcaacggcgcgtccgaa

SEQ ID NO: 6017233 - DNA, 25 bp, Homo sapien
ctcaaacggacattgatcaaccgat

SEQ ID NO: 6017234 - DNA, 25 bp, Homo sapien
aagttgctgccccattgacggccac

SEQ ID NO: 6017235 - DNA, 25 bp, Homo sapien
gagcaaatccgctccagacagatca

SEQ ID NO: 6017236 - DNA, 25 bp, Homo sapien
tcatctggcgctgcccagttctctt

SEQ ID NO: 6017237 - DNA, 25 bp, Homo sapien
atccgctccagacagatcagccgcc

SEQ ID NO: 6017238 - DNA, 25 bp, Homo sapien
atgcagggatcaccatggcaaacaa

SEQ ID NO: 6017239 - DNA, 25 bp, Homo sapien
tctgcttcatctggcgctgcccagt

SEQ ID NO: 6017240 - DNA, 25 bp, Homo sapien
catgagtgccaaatcggcatagcga

SEQ ID NO: 6017241 - DNA, 25 bp, Homo sapien
tgaagttcggcatgcagggatcacc

SEQ ID NO: 6017242 - DNA, 25 bp, Homo sapien
gatcgtgcagcggcgtactcttgtc

SEQ ID NO: 6017243 - DNA, 25 bp, Homo sapien
ctcctgttcctcctgccagttgatg

SEQ ID NO: 6017244 - DNA, 25 bp, Homo sapien
cgctttgagcaaatccgctccagac

SEQ ID NO: 6017245 - DNA, 25 bp, Homo sapien
cggccacgctttgagcaaatccgct

SEQ ID NO: 6017246 - DNA, 25 bp, Homo sapien
tagggtccaccatgaagttcggcat

SEQ ID NO: 6017247 - DNA, 25 bp, Homo sapien
ctcttcggcgttagcaatcatgagt

SEQ ID NO: 6017248 - DNA, 25 bp, Homo sapien
agccgcaccggtagctctcgttcga

SEQ ID NO: 6017249 - DNA, 25 bp, Homo sapien
tatcaccaagcatgcaccctcctgt

SEQ ID NO: 6017250 - DNA, 25 bp, Homo sapien
agcaatcatgagtgccaaatcggca

SEQ ID NO: 6017251 - DNA, 25 bp, Homo sapien
ccaccatgaagttcggcatgcaggg

SEQ ID NO: 6017252 - DNA, 25 bp, Homo sapien
aggtcgatcagacccgtgcattgaa

SEQ ID NO: 6017253 - DNA, 25 bp, Homo sapien
ccgaacattcgcgacagcctgcgct

SEQ ID NO: 6017254 - DNA, 25 bp, Homo sapien
cggggcaagccacacctcgaccttt

SEQ ID NO: 6017255 - DNA, 25 bp, Homo sapien
tcagccgccggtactcccggaattg

SEQ ID NO: 6017256 - DNA, 25 bp, Homo sapien
tccagacagatcagccgccggtact

SEQ ID NO: 6017257 - DNA, 25 bp, Homo sapien
gcagcggcgtactcttgtcctcgtc

SEQ ID NO: 6017258 - DNA, 25 bp, Homo sapien
ggcattgcgggacaccacatcaacg

SEQ ID NO: 6017259 - DNA, 25 bp, Homo sapien
cctgccagttgatgacctcggggca

SEQ ID NO: 6017260 - DNA, 25 bp, Homo sapien
cgctcttggtcgagccgcaccggta

SEQ ID NO: 6017261 - DNA, 25 bp, Homo sapien
agaaggcaaggcgttcgcggtcggg

SEQ ID NO: 6017262 - DNA, 25 bp, Homo sapien
cacgagccaaaagatcgtgcagcgg

SEQ ID NO: 6017263 - DNA, 25 bp, Homo sapien
ctgttccgagccgcccaaggtcgat

SEQ ID NO: 6017264 - DNA, 25 bp, Homo sapien
caatacattgaataggacagcgaag

SEQ ID NO: 6017265 - DNA, 25 bp, Homo sapien
ggcgcgtccgaacattcgcgacagc

SEQ ID NO: 6017266 - DNA, 25 bp, Homo sapien
gcaaacaaccatatcggtgcgctct

SEQ ID NO: 6017267 - DNA, 25 bp, Homo sapien
ttaagtagctatttatttgtaaaca

SEQ ID NO: 6017268 - DNA, 25 bp, Homo sapien
tggaagacagcatagttaagtctac

SEQ ID NO: 6017269 - DNA, 25 bp, Homo sapien
tggagactgcagactccatcttcag

SEQ ID NO: 6017270 - DNA, 25 bp, Homo sapien
aagattgtctttacactaacaacgg

SEQ ID NO: 6017271 - DNA, 25 bp, Homo sapien
ttttgacctttgggtatctgttctc

SEQ ID NO: 6017272 - DNA, 25 bp, Homo sapien
ctagctttcctagttccaggaaatt

SEQ ID NO: 6017273 - DNA, 25 bp, Homo sapien
tccaggaaattttcttcacatttta

SEQ ID NO: 6017274 - DNA, 25 bp, Homo sapien
aagaaatcccaagctagtctaacca

SEQ ID NO: 6017275 - DNA, 25 bp, Homo sapien
agctatttatttgtaaacatttctt

SEQ ID NO: 6017276 - DNA, 25 bp, Homo sapien
ttacaagttccattgaattattcgc

SEQ ID NO: 6017277 - DNA, 25 bp, Homo sapien
ctaggcactctttgtaacagtagtg

SEQ ID NO: 6017278 - DNA, 25 bp, Homo sapien
tagaataatgattttaaaagaaatc

SEQ ID NO: 6017279 - DNA, 25 bp, Homo sapien
acaacggccgtgaagaaatggaaga

SEQ ID NO: 6017280 - DNA, 25 bp, Homo sapien
acagcatagttaagtctactctttg

SEQ ID NO: 6017281 - DNA, 25 bp, Homo sapien
tagttaagtctactctttgccatct

SEQ ID NO: 6017282 - DNA, 25 bp, Homo sapien
ctgcagactccatcttcagtgggac

SEQ ID NO: 6017283 - DNA, 25 bp, Homo sapien
atacctttcaaatccatggaatgtc

SEQ ID NO: 6017284 - DNA, 25 bp, Homo sapien
tttcatttaagtagctatttatttg

SEQ ID NO: 6017285 - DNA, 25 bp, Homo sapien
actctttgtaacagtagtgtggtgc

SEQ ID NO: 6017286 - DNA, 25 bp, Homo sapien
tggtgtagaataatgattttaaaag

SEQ ID NO: 6017287 - DNA, 25 bp, Homo sapien
gttccattgaattattcgctaggca

SEQ ID NO: 6017288 - DNA, 25 bp, Homo sapien
tgacttaccactttgtatttttgac

SEQ ID NO: 6017289 - DNA, 25 bp, Homo sapien
taaaagtcattaatgtcattgatta

SEQ ID NO: 6017290 - DNA, 25 bp, Homo sapien
cttcacattttatataactatttaa

SEQ ID NO: 6017291 - DNA, 25 bp, Homo sapien
actccatcttcagtgggaccgtggt

SEQ ID NO: 6017292 - DNA, 25 bp, Homo sapien
aagaaatggaagacagcatagttaa

SEQ ID NO: 6017293 - DNA, 25 bp, Homo sapien
atgacacaaagatcatcaaagattg

SEQ ID NO: 6017294 - DNA, 25 bp, Homo sapien
tgactttaaatcctgacttaccact

SEQ ID NO: 6017295 - DNA, 25 bp, Homo sapien
ttgaattattcgctaggcactcttt

SEQ ID NO: 6017296 - DNA, 25 bp, Homo sapien
ttaattggtgtagaataatgatttt

SEQ ID NO: 6017297 - DNA, 25 bp, Homo sapien
tactaagtgagaatgacacaaagat

SEQ ID NO: 6017298 - DNA, 25 bp, Homo sapien
tattcgctaggcactctttgtaaca

SEQ ID NO: 6017299 - DNA, 25 bp, Homo sapien
tgtatttttgacctttgggtatctg

SEQ ID NO: 6017300 - DNA, 25 bp, Homo sapien
ctctttgccatctgagttgtatcat

SEQ ID NO: 6017301 - DNA, 25 bp, Homo sapien
atttaattacaagttccattgaatt

SEQ ID NO: 6017302 - DNA, 25 bp, Homo sapien
tcctagttccaggaaattttcttca

SEQ ID NO: 6017303 - DNA, 25 bp, Homo sapien
ctctgtttaattggtgtagaataat

SEQ ID NO: 6017304 - DNA, 25 bp, Homo sapien
attaaaatacctttcaaatccatgg

SEQ ID NO: 6017305 - DNA, 25 bp, Homo sapien
cgtggtctagctttcctagttccag

SEQ ID NO: 6017306 - DNA, 25 bp, Homo sapien
tccaattgactttaaatcctgactt

SEQ ID NO: 6017307 - DNA, 25 bp, Homo sapien
gtgagaatgacacaaagatcatcaa

SEQ ID NO: 6017308 - DNA, 25 bp, Homo sapien
tataactatttaattacaagttcca

SEQ ID NO: 6017309 - DNA, 25 bp, Homo sapien
ttcaaatccatggaatgtctggctt

SEQ ID NO: 6017310 - DNA, 25 bp, Homo sapien
gtatcatgacatggagactgcagac

SEQ ID NO: 6017311 - DNA, 25 bp, Homo sapien
gtctttacactaacaacggccgtga

SEQ ID NO: 6017312 - DNA, 25 bp, Homo sapien
atcccaagctagtctaaccaaactc

SEQ ID NO: 6017313 - DNA, 25 bp, Homo sapien
gtcattgattatatacatgtatgtt

SEQ ID NO: 6017314 - DNA, 25 bp, Homo sapien
agtctactctttgccatctgagttg

SEQ ID NO: 6017315 - DNA, 25 bp, Homo sapien
tctgttctctgtttaattggtgtag

SEQ ID NO: 6017316 - DNA, 25 bp, Homo sapien
gacctttgggtatctgttctctgtt

SEQ ID NO: 6017317 - DNA, 25 bp, Homo sapien
gaaattttcttcacattttatataa

SEQ ID NO: 6017318 - DNA, 25 bp, Homo sapien
tccatggaatgtctggcttttaaat

SEQ ID NO: 6017319 - DNA, 25 bp, Homo sapien
tcatcaaagattgtctttacactaa

SEQ ID NO: 6017320 - DNA, 25 bp, Homo sapien
tcttcagtgggaccgtggtctagct

SEQ ID NO: 6017321 - DNA, 25 bp, Homo sapien
gccatctgagttgtatcatgacatg

SEQ ID NO: 6017322 - DNA, 25 bp, Homo sapien
tgtaatttgacctttttgcttgatt

SEQ ID NO: 6017323 - DNA, 25 bp, Homo sapien
tgggaccgtggtctagctttcctag

SEQ ID NO: 6017324 - DNA, 25 bp, Homo sapien
gaatgtctggcttttaaatgtaatt

SEQ ID NO: 6017325 - DNA, 25 bp, Homo sapien
acacttccaattgactttaaatcct

SEQ ID NO: 6017326 - DNA, 25 bp, Homo sapien
ctggcttttaaatgtaatttgacct

SEQ ID NO: 6017327 - DNA, 25 bp, Homo sapien
tgcttgattttttttcatttaagta

SEQ ID NO: 6017328 - DNA, 25 bp, Homo sapien
ttaagttaaaagtcattaatgtcat

SEQ ID NO: 6017329 - DNA, 25 bp, Homo sapien
agctagtctaaccaaactctaaatt

SEQ ID NO: 6017330 - DNA, 25 bp, Homo sapien
atgattttaaaagaaatcccaagct

SEQ ID NO: 6017331 - DNA, 25 bp, Homo sapien
acactaacaacggccgtgaagaaat

SEQ ID NO: 6017332 - DNA, 25 bp, Homo sapien
ttaaaagaaatcccaagctagtcta

SEQ ID NO: 6017333 - DNA, 25 bp, Homo sapien
tgattttttttcatttaagtagcta

SEQ ID NO: 6017334 - DNA, 25 bp, Homo sapien
tgggtatctgttctctgtttaattg

SEQ ID NO: 6017335 - DNA, 25 bp, Homo sapien
atgacatggagactgcagactccat

SEQ ID NO: 6017336 - DNA, 25 bp, Homo sapien
cattaatgtcattgattatatacat

SEQ ID NO: 6017337 - DNA, 25 bp, Homo sapien
cacgatttaaaaacacttccaattg

SEQ ID NO: 6017338 - DNA, 25 bp, Homo sapien
aaaaagtactaagtgagaatgacac

SEQ ID NO: 6017339 - DNA, 25 bp, Homo sapien
caaagatcatcaaagattgtcttta

SEQ ID NO: 6017340 - DNA, 25 bp, Homo sapien
gattatatacatgtatgtttttcta

SEQ ID NO: 6017341 - DNA, 25 bp, Homo sapien
gccgtgaagaaatggaagacagcat

SEQ ID NO: 6017342 - DNA, 25 bp, Homo sapien
taaatcctgacttaccactttgtat

SEQ ID NO: 6017343 - DNA, 25 bp, Homo sapien
tgagttgtatcatgacatggagact

SEQ ID NO: 6017344 - DNA, 25 bp, Homo sapien
aagatggagtctgcagtctccatgt

SEQ ID NO: 6017345 - DNA, 25 bp, Homo sapien
atcccatgagctaaaccttaatcca

SEQ ID NO: 6017346 - DNA, 25 bp, Homo sapien
tatattgttagcaaaattatttcta

SEQ ID NO: 6017347 - DNA, 25 bp, Homo sapien
gagcaccacactactgttacaaaga

SEQ ID NO: 6017348 - DNA, 25 bp, Homo sapien
ggcaaagagtagacttaactatgct

SEQ ID NO: 6017349 - DNA, 25 bp, Homo sapien
tttctaaagtagttcatgactaagg

SEQ ID NO: 6017350 - DNA, 25 bp, Homo sapien
atgaacacagggaatgatgtccaca

SEQ ID NO: 6017351 - DNA, 25 bp, Homo sapien
acggtcccactgaagatggagtctg

SEQ ID NO: 6017352 - DNA, 25 bp, Homo sapien
agcagtcatatattaaatgtgtgta

SEQ ID NO: 6017353 - DNA, 25 bp, Homo sapien
gcaaaattatttctaaagtagttca

SEQ ID NO: 6017354 - DNA, 25 bp, Homo sapien
ccacactactgttacaaagagtgcc

SEQ ID NO: 6017355 - DNA, 25 bp, Homo sapien
gaacttgtaattaaatagttatata

SEQ ID NO: 6017356 - DNA, 25 bp, Homo sapien
caatattttaaagagcaccacacta

SEQ ID NO: 6017357 - DNA, 25 bp, Homo sapien
cttgaaggctaacaaaatctgtgtt

SEQ ID NO: 6017358 - DNA, 25 bp, Homo sapien
ttattacttaatatattgttagcaa

SEQ ID NO: 6017359 - DNA, 25 bp, Homo sapien
aatgtgaagaaaatttcctggaact

SEQ ID NO: 6017360 - DNA, 25 bp, Homo sapien
gagtagacttaactatgctgtcttc

SEQ ID NO: 6017361 - DNA, 25 bp, Homo sapien
tcagatggcaaagagtagacttaac

SEQ ID NO: 6017362 - DNA, 25 bp, Homo sapien
tttaaagagcaccacactactgtta

SEQ ID NO: 6017363 - DNA, 25 bp, Homo sapien
aaatagttatataaaatgtgaagaa

SEQ ID NO: 6017364 - DNA, 25 bp, Homo sapien
gtccacacgtgtctaacatcaatat

SEQ ID NO: 6017365 - DNA, 25 bp, Homo sapien
agtattttcataaaacctgctgaag

SEQ ID NO: 6017366 - DNA, 25 bp, Homo sapien
ttttacattcaagttaagacaattc

SEQ ID NO: 6017367 - DNA, 25 bp, Homo sapien
gttcatgactaagggctcagtattt

SEQ ID NO: 6017368 - DNA, 25 bp, Homo sapien
tccatttttacattcaagttaagac

SEQ ID NO: 6017369 - DNA, 25 bp, Homo sapien
atttcctggaactaggaaagctaga

SEQ ID NO: 6017370 - DNA, 25 bp, Homo sapien
taacatcaatattttaaagagcacc

SEQ ID NO: 6017371 - DNA, 25 bp, Homo sapien
tacaactcagatggcaaagagtaga

SEQ ID NO: 6017372 - DNA, 25 bp, Homo sapien
ggctaacaaaatctgtgttcaaaag

SEQ ID NO: 6017373 - DNA, 25 bp, Homo sapien
agagtgcctagcgaataattcaatg

SEQ ID NO: 6017374 - DNA, 25 bp, Homo sapien
catacataaagtgggtaattttatt

SEQ ID NO: 6017375 - DNA, 25 bp, Homo sapien
tacaaagagtgcctagcgaataatt

SEQ ID NO: 6017376 - DNA, 25 bp, Homo sapien
gctggctaggacgttgggtagctgg

SEQ ID NO: 6017377 - DNA, 25 bp, Homo sapien
aatgatgtccacacgtgtctaacat

SEQ ID NO: 6017378 - DNA, 25 bp, Homo sapien
gctgaagactaatgatcaatgggga

SEQ ID NO: 6017379 - DNA, 25 bp, Homo sapien
gacaattcagcaccgtttaaacttg

SEQ ID NO: 6017380 - DNA, 25 bp, Homo sapien
tactacacagcaagcagtcatatat

SEQ ID NO: 6017381 - DNA, 25 bp, Homo sapien
caaaatctgtgttcaaaagctggct

SEQ ID NO: 6017382 - DNA, 25 bp, Homo sapien
gagagaatgaacacagggaatgatg

SEQ ID NO: 6017383 - DNA, 25 bp, Homo sapien
tacttaatatattgttagcaaaatt

SEQ ID NO: 6017384 - DNA, 25 bp, Homo sapien
gcagtctccatgtcatgatacaact

SEQ ID NO: 6017385 - DNA, 25 bp, Homo sapien
aaacctgctgaagactaatgatcaa

SEQ ID NO: 6017386 - DNA, 25 bp, Homo sapien
ccactgaagatggagtctgcagtct

SEQ ID NO: 6017387 - DNA, 25 bp, Homo sapien
tactgttacaaagagtgcctagcga

SEQ ID NO: 6017388 - DNA, 25 bp, Homo sapien
tcaaaagctggctaggacgttgggt

SEQ ID NO: 6017389 - DNA, 25 bp, Homo sapien
taggacgttgggtagctgggaataa

SEQ ID NO: 6017390 - DNA, 25 bp, Homo sapien
tgagctaaaccttaatccattttta

SEQ ID NO: 6017391 - DNA, 25 bp, Homo sapien
tgatcaatggggagagaatgaacac

SEQ ID NO: 6017392 - DNA, 25 bp, Homo sapien
ctaggaaagctagaccacggtccca

SEQ ID NO: 6017393 - DNA, 25 bp, Homo sapien
ctgtgttcaaaagctggctaggacg

SEQ ID NO: 6017394 - DNA, 25 bp, Homo sapien
atgaagcatacataaagtgggtaat

SEQ ID NO: 6017395 - DNA, 25 bp, Homo sapien
taattaaatagttatataaaatgtg

SEQ ID NO: 6017396 - DNA, 25 bp, Homo sapien
gggctcagtattttcataaaacctg

SEQ ID NO: 6017397 - DNA, 25 bp, Homo sapien
aatggggagagaatgaacacaggga

SEQ ID NO: 6017398 - DNA, 25 bp, Homo sapien
tcatgatacaactcagatggcaaag

SEQ ID NO: 6017399 - DNA, 25 bp, Homo sapien
gtctatgtgaatttaaaaatgaagc

SEQ ID NO: 6017400 - DNA, 25 bp, Homo sapien
agaccacggtcccactgaagatgga

SEQ ID NO: 6017401 - DNA, 25 bp, Homo sapien
tgtcccctactacacagcaagcagt

SEQ ID NO: 6017402 - DNA, 25 bp, Homo sapien
gactaatgatcaatggggagagaat

SEQ ID NO: 6017403 - DNA, 25 bp, Homo sapien
tcaatggaacttgtaattaaatagt

SEQ ID NO: 6017404 - DNA, 25 bp, Homo sapien
tggaactaggaaagctagaccacgg

SEQ ID NO: 6017405 - DNA, 25 bp, Homo sapien
ttaaatgtgtgtatcccatgagcta

SEQ ID NO: 6017406 - DNA, 25 bp, Homo sapien
ttcataaaacctgctgaagactaat

SEQ ID NO: 6017407 - DNA, 25 bp, Homo sapien
aaagtagttcatgactaagggctca

SEQ ID NO: 6017408 - DNA, 25 bp, Homo sapien
acagcaagcagtcatatattaaatg

SEQ ID NO: 6017409 - DNA, 25 bp, Homo sapien
tgttagcaaaattatttctaaagta

SEQ ID NO: 6017410 - DNA, 25 bp, Homo sapien
atgacatgtcccctactacacagca

SEQ ID NO: 6017411 - DNA, 25 bp, Homo sapien
gtgaatttaaaaatgaagcatacat

SEQ ID NO: 6017412 - DNA, 25 bp, Homo sapien
gtgtgtatcccatgagctaaacctt

SEQ ID NO: 6017413 - DNA, 25 bp, Homo sapien
cgtgtctaacatcaatattttaaag

SEQ ID NO: 6017414 - DNA, 25 bp, Homo sapien
agttaagacaattcagcaccgttta

SEQ ID NO: 6017415 - DNA, 25 bp, Homo sapien
acagggaatgatgtccacacgtgtc

SEQ ID NO: 6017416 - DNA, 25 bp, Homo sapien
gaataattcaatggaacttgtaatt

SEQ ID NO: 6017417 - DNA, 25 bp, Homo sapien
cattcaagttaagacaattcagcac

SEQ ID NO: 6017418 - DNA, 25 bp, Homo sapien
cagcaccgtttaaacttgaaggcta

SEQ ID NO: 6017419 - DNA, 25 bp, Homo sapien
aattatttctaaagtagttcatgac

SEQ ID NO: 6017420 - DNA, 25 bp, Homo sapien
tgaagaaaatttcctggaactagga

SEQ ID NO: 6017421 - DNA, 25 bp, Homo sapien
catatattaaatgtgtgtatcccat

SEQ ID NO: 6017422 - DNA, 25 bp, Homo sapien
aaagctagaccacggtcccactgaa

SEQ ID NO: 6017423 - DNA, 25 bp, Homo sapien
cctagcgaataattcaatggaactt

SEQ ID NO: 6017424 - DNA, 25 bp, Homo sapien
taaaattgtctatgtgaatttaaaa

SEQ ID NO: 6017425 - DNA, 25 bp, Homo sapien
gactaagggctcagtattttcataa

SEQ ID NO: 6017426 - DNA, 25 bp, Homo sapien
gagtctgcagtctccatgtcatgat

SEQ ID NO: 6017427 - DNA, 25 bp, Homo sapien
ttaaaaatgaagcatacataaagtg

SEQ ID NO: 6017428 - DNA, 25 bp, Homo sapien
taaacttgaaggctaacaaaatctg

SEQ ID NO: 6017429 - DNA, 25 bp, Homo sapien
tccatgtcatgatacaactcagatg

SEQ ID NO: 6017430 - DNA, 25 bp, Homo sapien
tccgcacagggaactcaaggcctgc

SEQ ID NO: 6017431 - DNA, 25 bp, Homo sapien
gaccagttctaaggtactcggcctc

SEQ ID NO: 6017432 - DNA, 25 bp, Homo sapien
cagagaaccccgaagaggctttgtt

SEQ ID NO: 6017433 - DNA, 25 bp, Homo sapien
tatttggttgggcacattctctatt

SEQ ID NO: 6017434 - DNA, 25 bp, Homo sapien
agctgaccgggggaagtgtaagtgc

SEQ ID NO: 6017435 - DNA, 25 bp, Homo sapien
tagcaccgtaatcctgtcctccccc

SEQ ID NO: 6017436 - DNA, 25 bp, Homo sapien
acacggagtggaagttaagggctgc

SEQ ID NO: 6017437 - DNA, 25 bp, Homo sapien
gcccacaccgggagctgacacggag

SEQ ID NO: 6017438 - DNA, 25 bp, Homo sapien
ggttgggcacattctctattggtca

SEQ ID NO: 6017439 - DNA, 25 bp, Homo sapien
tgttacgcccacaccgggagctgac

SEQ ID NO: 6017440 - DNA, 25 bp, Homo sapien
tgattgtttattggggttcttcctg

SEQ ID NO: 6017441 - DNA, 25 bp, Homo sapien
acagcccaaactgatggggccacca

SEQ ID NO: 6017442 - DNA, 25 bp, Homo sapien
tatattttaaacaccagtggacatt

SEQ ID NO: 6017443 - DNA, 25 bp, Homo sapien
ttttccccacaagcaagctcacgtt

SEQ ID NO: 6017444 - DNA, 25 bp, Homo sapien
tttcctaaaccacagcccaaactga

SEQ ID NO: 6017445 - DNA, 25 bp, Homo sapien
ccatcctatttggttgggcacattc

SEQ ID NO: 6017446 - DNA, 25 bp, Homo sapien
tcttcctgtcttttccccacaagca

SEQ ID NO: 6017447 - DNA, 25 bp, Homo sapien
gagaagggctctgagtacgtaagct

SEQ ID NO: 6017448 - DNA, 25 bp, Homo sapien
cctcttccatcctatttggttgggc

SEQ ID NO: 6017449 - DNA, 25 bp, Homo sapien
accagtggacattttccaggagaag

SEQ ID NO: 6017450 - DNA, 25 bp, Homo sapien
tctaaggtactcggcctccctcttc

SEQ ID NO: 6017451 - DNA, 25 bp, Homo sapien
ctgctgtggtgttcaggcggtactt

SEQ ID NO: 6017452 - DNA, 25 bp, Homo sapien
aatgcagtgttacgcccacaccggg

SEQ ID NO: 6017453 - DNA, 25 bp, Homo sapien
accttccgtgactgattgtttattg

SEQ ID NO: 6017454 - DNA, 25 bp, Homo sapien
ccacaagcaagctcacgtttacatt

SEQ ID NO: 6017455 - DNA, 25 bp, Homo sapien
caggcggtacttgaatttagcaccg

SEQ ID NO: 6017456 - DNA, 25 bp, Homo sapien
gcctgccaccttccgtgactgattg

SEQ ID NO: 6017457 - DNA, 25 bp, Homo sapien
aaatgaagaaagcaaatgcatagga

SEQ ID NO: 6017458 - DNA, 25 bp, Homo sapien
gcaagctcacgtttacattgccatc

SEQ ID NO: 6017459 - DNA, 25 bp, Homo sapien
ggacattttccaggagaagggctct

SEQ ID NO: 6017460 - DNA, 25 bp, Homo sapien
gttaagggctgctccgcacagggaa

SEQ ID NO: 6017461 - DNA, 25 bp, Homo sapien
caaatgcataggatgggtttaagca

SEQ ID NO: 6017462 - DNA, 25 bp, Homo sapien
gaatttagcaccgtaatcctgtcct

SEQ ID NO: 6017463 - DNA, 25 bp, Homo sapien
gggctctgagtacgtaagctgaccg

SEQ ID NO: 6017464 - DNA, 25 bp, Homo sapien
ccaaactgatggggccaccagaaac

SEQ ID NO: 6017465 - DNA, 25 bp, Homo sapien
ttaaacaccagtggacattttccag

SEQ ID NO: 6017466 - DNA, 25 bp, Homo sapien
cgtgactgattgtttattggggttc

SEQ ID NO: 6017467 - DNA, 25 bp, Homo sapien
gttcgatatatgtggctttatattt

SEQ ID NO: 6017468 - DNA, 25 bp, Homo sapien
tactcggcctccctcttccatccta

SEQ ID NO: 6017469 - DNA, 25 bp, Homo sapien
aaggcgtggccgtacgcaaatgcag

SEQ ID NO: 6017470 - DNA, 25 bp, Homo sapien
tgccatcagagaaccccgaagaggc

SEQ ID NO: 6017471 - DNA, 25 bp, Homo sapien
tcacgtttacattgccatcagagaa

SEQ ID NO: 6017472 - DNA, 25 bp, Homo sapien
gtgctcacacaaaaggcgtggccgt

SEQ ID NO: 6017473 - DNA, 25 bp, Homo sapien
cataggatgggtttaagcacttttt

SEQ ID NO: 6017474 - DNA, 25 bp, Homo sapien
ccgggggaagtgtaagtgcatgcag

SEQ ID NO: 6017475 - DNA, 25 bp, Homo sapien
tggccgtacgcaaatgcagtgttac

SEQ ID NO: 6017476 - DNA, 25 bp, Homo sapien
agaaagcaaatgcataggatgggtt

SEQ ID NO: 6017477 - DNA, 25 bp, Homo sapien
tgatggggccaccagaaactgctgt

SEQ ID NO: 6017478 - DNA, 25 bp, Homo sapien
gaagtgtaagtgcatgcagtgctca

SEQ ID NO: 6017479 - DNA, 25 bp, Homo sapien
ggccaccagaaactgctgtggtgtt

SEQ ID NO: 6017480 - DNA, 25 bp, Homo sapien
tgagtacgtaagctgaccgggggaa

SEQ ID NO: 6017481 - DNA, 25 bp, Homo sapien
cagaaactgctgtggtgttcaggcg

SEQ ID NO: 6017482 - DNA, 25 bp, Homo sapien
ttacattgccatcagagaaccccga

SEQ ID NO: 6017483 - DNA, 25 bp, Homo sapien
cagggaactcaaggcctgccacctt

SEQ ID NO: 6017484 - DNA, 25 bp, Homo sapien
tacgcaaatgcagtgttacgcccac

SEQ ID NO: 6017485 - DNA, 25 bp, Homo sapien
ctcaaggcctgccaccttccgtgac

SEQ ID NO: 6017486 - DNA, 25 bp, Homo sapien
aaacgagttcgatatatgtggcttt

SEQ ID NO: 6017487 - DNA, 25 bp, Homo sapien
tgttaaaaacgagttcgatatatgt

SEQ ID NO: 6017488 - DNA, 25 bp, Homo sapien
gtacttgaatttagcaccgtaatcc

SEQ ID NO: 6017489 - DNA, 25 bp, Homo sapien
caccgggagctgacacggagtggaa

SEQ ID NO: 6017490 - DNA, 25 bp, Homo sapien
taagtgcatgcagtgctcacacaaa

SEQ ID NO: 6017491 - DNA, 25 bp, Homo sapien
gagctgacacggagtggaagttaag

SEQ ID NO: 6017492 - DNA, 25 bp, Homo sapien
agtggaagttaagggctgctccgca

SEQ ID NO: 6017493 - DNA, 25 bp, Homo sapien
tttccaggagaagggctctgagtac

SEQ ID NO: 6017494 - DNA, 25 bp, Homo sapien
tatatgtggctttatattttaaaca

SEQ ID NO: 6017495 - DNA, 25 bp, Homo sapien
ggcctccctcttccatcctatttgg

SEQ ID NO: 6017496 - DNA, 25 bp, Homo sapien
taaaccacagcccaaactgatgggg

SEQ ID NO: 6017497 - DNA, 25 bp, Homo sapien
acacaaaaggcgtggccgtacgcaa

SEQ ID NO: 6017498 - DNA, 25 bp, Homo sapien
tggctttatattttaaacaccagtg

SEQ ID NO: 6017499 - DNA, 25 bp, Homo sapien
catgcagtgctcacacaaaaggcgt

SEQ ID NO: 6017500 - DNA, 25 bp, Homo sapien
ggtgttcaggcggtacttgaattta

SEQ ID NO: 6017501 - DNA, 25 bp, Homo sapien
tgtcttttccccacaagcaagctca

SEQ ID NO: 6017502 - DNA, 25 bp, Homo sapien
ggctgctccgcacagggaactcaag

SEQ ID NO: 6017503 - DNA, 25 bp, Homo sapien
tctcccaaaggagactgagcctggg

SEQ ID NO: 6017504 - DNA, 25 bp, Homo sapien
aacactttctgcttcaaacctgaca

SEQ ID NO: 6017505 - DNA, 25 bp, Homo sapien
gcaaacttgacaaaagtcctgtccg

SEQ ID NO: 6017506 - DNA, 25 bp, Homo sapien
ctgggctagcacagttgtcatggag

SEQ ID NO: 6017507 - DNA, 25 bp, Homo sapien
tccacatctcccaaaggagactgag

SEQ ID NO: 6017508 - DNA, 25 bp, Homo sapien
tacggtgctaaattcaagtaccgcc

SEQ ID NO: 6017509 - DNA, 25 bp, Homo sapien
cactgtgcttagctgggctagcaca

SEQ ID NO: 6017510 - DNA, 25 bp, Homo sapien
ccacaaacagtcaaatcagaatgat

SEQ ID NO: 6017511 - DNA, 25 bp, Homo sapien
caaataggatggaagagggaggccg

SEQ ID NO: 6017512 - DNA, 25 bp, Homo sapien
tggcaggacagtatcatttgggagc

SEQ ID NO: 6017513 - DNA, 25 bp, Homo sapien
ggacattctagaaggtctacactgt

SEQ ID NO: 6017514 - DNA, 25 bp, Homo sapien
tgggagctagtcctagatcggacat

SEQ ID NO: 6017515 - DNA, 25 bp, Homo sapien
catgacacacctcagttaagcctgc

SEQ ID NO: 6017516 - DNA, 25 bp, Homo sapien
gtgctgtccactggagtccactgtg

SEQ ID NO: 6017517 - DNA, 25 bp, Homo sapien
gacagtatcatttgggagctagtcc

SEQ ID NO: 6017518 - DNA, 25 bp, Homo sapien
cctggggtgctgtccactggagtcc

SEQ ID NO: 6017519 - DNA, 25 bp, Homo sapien
taccgcctgaacaccacagcagttt

SEQ ID NO: 6017520 - DNA, 25 bp, Homo sapien
gccaagaacactttctgcttcaaac

SEQ ID NO: 6017521 - DNA, 25 bp, Homo sapien
ttgacaaaagtcctgtccgtcacag

SEQ ID NO: 6017522 - DNA, 25 bp, Homo sapien
tgctcaggtgacaggaaagcctctt

SEQ ID NO: 6017523 - DNA, 25 bp, Homo sapien
gaggccgagtaccttagaactggtc

SEQ ID NO: 6017524 - DNA, 25 bp, Homo sapien
aaatcagaatgatggcaggacagta

SEQ ID NO: 6017525 - DNA, 25 bp, Homo sapien
acacctcagttaagcctgccagctt

SEQ ID NO: 6017526 - DNA, 25 bp, Homo sapien
ctgtccgtcacaggcttgagatgga

SEQ ID NO: 6017527 - DNA, 25 bp, Homo sapien
gcgtaccattggggcaaacttgaca

SEQ ID NO: 6017528 - DNA, 25 bp, Homo sapien
tagatcggacattctagaaggtcta

SEQ ID NO: 6017529 - DNA, 25 bp, Homo sapien
tctagaaggtctacactgtgaagcg

SEQ ID NO: 6017530 - DNA, 25 bp, Homo sapien
aatagagaatgtgcccaaccaaata

SEQ ID NO: 6017531 - DNA, 25 bp, Homo sapien
gcagtttctggtggccccatcagtt

SEQ ID NO: 6017532 - DNA, 25 bp, Homo sapien
atggagggcgatgctcaccacaaac

SEQ ID NO: 6017533 - DNA, 25 bp, Homo sapien
acagtcaaatcagaatgatggcagg

SEQ ID NO: 6017534 - DNA, 25 bp, Homo sapien
ggtgacaggaaagcctcttcaaaca

SEQ ID NO: 6017535 - DNA, 25 bp, Homo sapien
catgaacatgacacacctcagttaa

SEQ ID NO: 6017536 - DNA, 25 bp, Homo sapien
ctggtggccccatcagtttgggctg

SEQ ID NO: 6017537 - DNA, 25 bp, Homo sapien
ctaggattcgggggcacggacacac

SEQ ID NO: 6017538 - DNA, 25 bp, Homo sapien
ggaggacaggattacggtgctaaat

SEQ ID NO: 6017539 - DNA, 25 bp, Homo sapien
gatggaaactagagcacacaacccc

SEQ ID NO: 6017540 - DNA, 25 bp, Homo sapien
aaagtcctgtccgtcacaggcttga

SEQ ID NO: 6017541 - DNA, 25 bp, Homo sapien
agcacacaaccccaccctggggtgc

SEQ ID NO: 6017542 - DNA, 25 bp, Homo sapien
tgaagcggcagcctaggattcgggg

SEQ ID NO: 6017543 - DNA, 25 bp, Homo sapien
aagcctgccagcttgtcctccacat

SEQ ID NO: 6017544 - DNA, 25 bp, Homo sapien
gccagcttgtcctccacatctccca

SEQ ID NO: 6017545 - DNA, 25 bp, Homo sapien
gctaaattcaagtaccgcctgaaca

SEQ ID NO: 6017546 - DNA, 25 bp, Homo sapien
gcttgagatggaaactagagcacac

SEQ ID NO: 6017547 - DNA, 25 bp, Homo sapien
aggtctacactgtgaagcggcagcc

SEQ ID NO: 6017548 - DNA, 25 bp, Homo sapien
aatgtgcccaaccaaataggatgga

SEQ ID NO: 6017549 - DNA, 25 bp, Homo sapien
cattggggcaaacttgacaaaagtc

SEQ ID NO: 6017550 - DNA, 25 bp, Homo sapien
ctgaccaatagagaatgtgcccaac

SEQ ID NO: 6017551 - DNA, 25 bp, Homo sapien
ggcagcctaggattcgggggcacgg

SEQ ID NO: 6017552 - DNA, 25 bp, Homo sapien
ctagtcctagatcggacattctaga

SEQ ID NO: 6017553 - DNA, 25 bp, Homo sapien
ctgaacaccacagcagtttctggtg

SEQ ID NO: 6017554 - DNA, 25 bp, Homo sapien
ttcaagtaccgcctgaacaccacag

SEQ ID NO: 6017555 - DNA, 25 bp, Homo sapien
cctgacacacttctgaccaatagag

SEQ ID NO: 6017556 - DNA, 25 bp, Homo sapien
gccccatcagtttgggctgtggttt

SEQ ID NO: 6017557 - DNA, 25 bp, Homo sapien
accacagcagtttctggtggcccca

SEQ ID NO: 6017558 - DNA, 25 bp, Homo sapien
tcacaggcttgagatggaaactaga

SEQ ID NO: 6017559 - DNA, 25 bp, Homo sapien
atcatttgggagctagtcctagatc

SEQ ID NO: 6017560 - DNA, 25 bp, Homo sapien
tcagttaagcctgccagcttgtcct

SEQ ID NO: 6017561 - DNA, 25 bp, Homo sapien
caaacagcgtaccattggggcaaac

SEQ ID NO: 6017562 - DNA, 25 bp, Homo sapien
gcctgggccaagaacactttctgct

SEQ ID NO: 6017563 - DNA, 25 bp, Homo sapien
ggaaagcctcttcaaacagcgtacc

SEQ ID NO: 6017564 - DNA, 25 bp, Homo sapien
ttgtcctccacatctcccaaaggag

SEQ ID NO: 6017565 - DNA, 25 bp, Homo sapien
acacttctgaccaatagagaatgtg

SEQ ID NO: 6017566 - DNA, 25 bp, Homo sapien
gcttagctgggctagcacagttgtc

SEQ ID NO: 6017567 - DNA, 25 bp, Homo sapien
ttcaaacctgacacacttctgacca

SEQ ID NO: 6017568 - DNA, 25 bp, Homo sapien
ttctgcttcaaacctgacacacttc

SEQ ID NO: 6017569 - DNA, 25 bp, Homo sapien
aaaggagactgagcctgggccaaga

SEQ ID NO: 6017570 - DNA, 25 bp, Homo sapien
gaagagggaggccgagtaccttaga

SEQ ID NO: 6017571 - DNA, 25 bp, Homo sapien
tccactggagtccactgtgcttagc

SEQ ID NO: 6017572 - DNA, 25 bp, Homo sapien
ggatggaagagggaggccgagtacc

SEQ ID NO: 6017573 - DNA, 25 bp, Homo sapien
gacacacatgaacatgacacacctc

SEQ ID NO: 6017574 - DNA, 25 bp, Homo sapien
aactagagcacacaaccccaccctg

SEQ ID NO: 6017575 - DNA, 25 bp, Homo sapien
ggcacggacacacatgaacatgaca

SEQ ID NO: 6017576 - DNA, 25 bp, Homo sapien
tcagtttgggctgtggtttaggaaa

SEQ ID NO: 6017577 - DNA, 25 bp, Homo sapien
caaccccaccctggggtgctgtcca

SEQ ID NO: 6017578 - DNA, 25 bp, Homo sapien
ccaaatgctcaggtgacaggaaagc

SEQ ID NO: 6017579 - DNA, 25 bp, Homo sapien
ttcgggggcacggacacacatgaac

SEQ ID NO: 6017580 - DNA, 25 bp, Homo sapien
tgctcaccacaaacagtcaaatcag

SEQ ID NO: 6017581 - DNA, 25 bp, Homo sapien
agttgtcatggagggcgatgctcac

SEQ ID NO: 6017582 - DNA, 25 bp, Homo sapien
caggattacggtgctaaattcaagt

SEQ ID NO: 6017583 - DNA, 25 bp, Homo sapien
gggcgatgctcaccacaaacagtca

SEQ ID NO: 6017584 - DNA, 25 bp, Homo sapien
ggagtccactgtgcttagctgggct

SEQ ID NO: 6017585 - DNA, 25 bp, Homo sapien
gactgagcctgggccaagaacactt

SEQ ID NO: 6017586 - DNA, 25 bp, Homo sapien
cccaaccaaataggatggaagaggg

SEQ ID NO: 6017587 - DNA, 25 bp, Homo sapien
acactgtgaagcggcagcctaggat

SEQ ID NO: 6017588 - DNA, 25 bp, Homo sapien
gaatgatggcaggacagtatcattt

SEQ ID NO: 6017589 - DNA, 25 bp, Homo sapien
cctcttcaaacagcgtaccattggg

SEQ ID NO: 6017590 - DNA, 25 bp, Homo sapien
ccaccctggggtgctgtccactgga

SEQ ID NO: 6017591 - DNA, 25 bp, Homo sapien
aacctgaattcttttgcatagcata

SEQ ID NO: 6017592 - DNA, 25 bp, Homo sapien
aaatgtataggcctggttcgtaagc

SEQ ID NO: 6017593 - DNA, 25 bp, Homo sapien
tgactttatattttgtggttgattt

SEQ ID NO: 6017594 - DNA, 25 bp, Homo sapien
gaaaatcatgctcaccaacagacag

SEQ ID NO: 6017595 - DNA, 25 bp, Homo sapien
cactgttgtttctacacaaagtgaa

SEQ ID NO: 6017596 - DNA, 25 bp, Homo sapien
tagctgtgtttttcccattgctgtg

SEQ ID NO: 6017597 - DNA, 25 bp, Homo sapien
tcccattgctgtgaccaaaacctga

SEQ ID NO: 6017598 - DNA, 25 bp, Homo sapien
caacttggtgtatacattgtttcta

SEQ ID NO: 6017599 - DNA, 25 bp, Homo sapien
gaaggtttgagaatgttttaggaca

SEQ ID NO: 6017600 - DNA, 25 bp, Homo sapien
tgctgtgaccaaaacctgaattctt

SEQ ID NO: 6017601 - DNA, 25 bp, Homo sapien
tgtttctagctgtgtttttcccatt

SEQ ID NO: 6017602 - DNA, 25 bp, Homo sapien
agacaagaggtagagaggagttggg

SEQ ID NO: 6017603 - DNA, 25 bp, Homo sapien
cccttccttcagagtcctgacactc

SEQ ID NO: 6017604 - DNA, 25 bp, Homo sapien
ataaatcaactcagtgtatacattg

SEQ ID NO: 6017605 - DNA, 25 bp, Homo sapien
catgtgataagcactgttgtttcta

SEQ ID NO: 6017606 - DNA, 25 bp, Homo sapien
cagacagaaggtttgagaatgtttt

SEQ ID NO: 6017607 - DNA, 25 bp, Homo sapien
tttttatgtctaatgtgaggcttgg

SEQ ID NO: 6017608 - DNA, 25 bp, Homo sapien
tgtctaatgtgaggcttggattggt

SEQ ID NO: 6017609 - DNA, 25 bp, Homo sapien
atagacataaatcaactcagtgtat

SEQ ID NO: 6017610 - DNA, 25 bp, Homo sapien
tgagaatgttttaggacaataattt

SEQ ID NO: 6017611 - DNA, 25 bp, Homo sapien
tgagggtgggaaggaaggtagcttg

SEQ ID NO: 6017612 - DNA, 25 bp, Homo sapien
catgggaaatgtataggcctggttc

SEQ ID NO: 6017613 - DNA, 25 bp, Homo sapien
gcatactgactttatattttgtggt

SEQ ID NO: 6017614 - DNA, 25 bp, Homo sapien
taagagtaaatatgtttatgtgaca

SEQ ID NO: 6017615 - DNA, 25 bp, Homo sapien
gataagcactgttgtttctacacaa

SEQ ID NO: 6017616 - DNA, 25 bp, Homo sapien
ataaaaatgtacagacaagaggtag

SEQ ID NO: 6017617 - DNA, 25 bp, Homo sapien
tggctgcccttccttcagagtcctg

SEQ ID NO: 6017618 - DNA, 25 bp, Homo sapien
gaccaaaacctgaattcttttgcat

SEQ ID NO: 6017619 - DNA, 25 bp, Homo sapien
gaaaatgtaccacatgggaaatgta

SEQ ID NO: 6017620 - DNA, 25 bp, Homo sapien
tataggcctggttcgtaagcatact

SEQ ID NO: 6017621 - DNA, 25 bp, Homo sapien
ggtgtatacattgtttctacaattc

SEQ ID NO: 6017622 - DNA, 25 bp, Homo sapien
agtcctgacactctattagcactga

SEQ ID NO: 6017623 - DNA, 25 bp, Homo sapien
tacattgtttctacaacttggtgta

SEQ ID NO: 6017624 - DNA, 25 bp, Homo sapien
aactggtccgtgattgaaaacccag

SEQ ID NO: 6017625 - DNA, 25 bp, Homo sapien
ttaagtcatgtgataagcactgttg

SEQ ID NO: 6017626 - DNA, 25 bp, Homo sapien
tacattgtttctagctgtgtttttc

SEQ ID NO: 6017627 - DNA, 25 bp, Homo sapien
attggtttaagtcatgtgataagca

SEQ ID NO: 6017628 - DNA, 25 bp, Homo sapien
aattcttttgcatagcatattaatg

SEQ ID NO: 6017629 - DNA, 25 bp, Homo sapien
gcttggattggtttaagtcatgtga

SEQ ID NO: 6017630 - DNA, 25 bp, Homo sapien
tcgtaagcatactgactttatattt

SEQ ID NO: 6017631 - DNA, 25 bp, Homo sapien
caccaacagacagaaggtttgagaa

SEQ ID NO: 6017632 - DNA, 25 bp, Homo sapien
tgtttatgtgacatagacataaatc

SEQ ID NO: 6017633 - DNA, 25 bp, Homo sapien
tgtgaggcttggattggtttaagtc

SEQ ID NO: 6017634 - DNA, 25 bp, Homo sapien
agtgtatacattgtttctacaactt

SEQ ID NO: 6017635 - DNA, 25 bp, Homo sapien
tacattgtttctacaattcagtgta

SEQ ID NO: 6017636 - DNA, 25 bp, Homo sapien
tgtgacatagacataaatcaactca

SEQ ID NO: 6017637 - DNA, 25 bp, Homo sapien
aaggaaggtagcttggtacctggct

SEQ ID NO: 6017638 - DNA, 25 bp, Homo sapien
cctggttcgtaagcatactgacttt

SEQ ID NO: 6017639 - DNA, 25 bp, Homo sapien
cacactttatagaggcataagagaa

SEQ ID NO: 6017640 - DNA, 25 bp, Homo sapien
catgctcaccaacagacagaaggtt

SEQ ID NO: 6017641 - DNA, 25 bp, Homo sapien
ctattagcactgaaaatcatgctca

SEQ ID NO: 6017642 - DNA, 25 bp, Homo sapien
ctgtcaatctgtgtgtgcataaaaa

SEQ ID NO: 6017643 - DNA, 25 bp, Homo sapien
tagcatattaatgaaaatgtaccac

SEQ ID NO: 6017644 - DNA, 25 bp, Homo sapien
gacactctattagcactgaaaatca

SEQ ID NO: 6017645 - DNA, 25 bp, Homo sapien
cttcagagtcctgacactctattag

SEQ ID NO: 6017646 - DNA, 25 bp, Homo sapien
atctgtgtgtgcataaaaatgtaca

SEQ ID NO: 6017647 - DNA, 25 bp, Homo sapien
gtgttgctgtcaatctgtgtgtgca

SEQ ID NO: 6017648 - DNA, 25 bp, Homo sapien
tggtacctggctgcccttccttcag

SEQ ID NO: 6017649 - DNA, 25 bp, Homo sapien
gtttctacaattcagtgtatacatt

SEQ ID NO: 6017650 - DNA, 25 bp, Homo sapien
agtgtatacattgtttctagctgtg

SEQ ID NO: 6017651 - DNA, 25 bp, Homo sapien
gtttctacaacttggtgtatacatt

SEQ ID NO: 6017652 - DNA, 25 bp, Homo sapien
tgttttaggacaataatttgtatgg

SEQ ID NO: 6017653 - DNA, 25 bp, Homo sapien
attaatgaaaatgtaccacatggga

SEQ ID NO: 6017654 - DNA, 25 bp, Homo sapien
tgtttctacacaaagtgaaactggt

SEQ ID NO: 6017655 - DNA, 25 bp, Homo sapien
gggtgccacactttatagaggcata

SEQ ID NO: 6017656 - DNA, 25 bp, Homo sapien
aagtgaaactggtccgtgattgaaa

SEQ ID NO: 6017657 - DNA, 25 bp, Homo sapien
gtagcttggtacctggctgcccttc

SEQ ID NO: 6017658 - DNA, 25 bp, Homo sapien
atgtacagacaagaggtagagagga

SEQ ID NO: 6017659 - DNA, 25 bp, Homo sapien
taaatatgtttatgtgacatagaca

SEQ ID NO: 6017660 - DNA, 25 bp, Homo sapien
tttgcatagcatattaatgaaaatg

SEQ ID NO: 6017661 - DNA, 25 bp, Homo sapien
cagctagagagcttaagagtaaata

SEQ ID NO: 6017662 - DNA, 25 bp, Homo sapien
gagagcttaagagtaaatatgttta

SEQ ID NO: 6017663 - DNA, 25 bp, Homo sapien
aacccagtgttgctgtcaatctgtg

SEQ ID NO: 6017664 - DNA, 25 bp, Homo sapien
tacacaaagtgaaactggtccgtga

SEQ ID NO: 6017665 - DNA, 25 bp, Homo sapien
gaggtagagaggagttgggttgagg

SEQ ID NO: 6017666 - DNA, 25 bp, Homo sapien
caactcagtgtatacattgtttcta

SEQ ID NO: 6017667 - DNA, 25 bp, Homo sapien
caattcagtgtatacattgtttcta

SEQ ID NO: 6017668 - DNA, 25 bp, Homo sapien
gagaggagttgggttgagggtggga

SEQ ID NO: 6017669 - DNA, 25 bp, Homo sapien
tgtttttcccattgctgtgaccaaa

SEQ ID NO: 6017670 - DNA, 25 bp, Homo sapien
gcactgaaaatcatgctcaccaaca

SEQ ID NO: 6017671 - DNA, 25 bp, Homo sapien
gtgtgcataaaaatgtacagacaag

SEQ ID NO: 6017672 - DNA, 25 bp, Homo sapien
tccgtgattgaaaacccagtgttgc

SEQ ID NO: 6017673 - DNA, 25 bp, Homo sapien
attgaaaacccagtgttgctgtcaa

SEQ ID NO: 6017674 - DNA, 25 bp, Homo sapien
tgtccagctagagagcttaagagta

SEQ ID NO: 6017675 - DNA, 25 bp, Homo sapien
gtaccacatgggaaatgtataggcc

SEQ ID NO: 6017676 - DNA, 25 bp, Homo sapien
attgtatttttatgtctaatgtgag

SEQ ID NO: 6017677 - DNA, 25 bp, Homo sapien
atcccaaagaatgtctgtagaaatc

SEQ ID NO: 6017678 - DNA, 25 bp, Homo sapien
cagacccccctctctttctgtctgt

SEQ ID NO: 6017679 - DNA, 25 bp, Homo sapien
caacccaactcctctctacctcttg

SEQ ID NO: 6017680 - DNA, 25 bp, Homo sapien
caagctaccttccttcccaccctca

SEQ ID NO: 6017681 - DNA, 25 bp, Homo sapien
gttaccaagcccattgtacagccaa

SEQ ID NO: 6017682 - DNA, 25 bp, Homo sapien
catgtcttcaccctctgtgttctgg

SEQ ID NO: 6017683 - DNA, 25 bp, Homo sapien
gatgtttaaaatatcccaaagaatg

SEQ ID NO: 6017684 - DNA, 25 bp, Homo sapien
gttctggccctgctgtgtggatggg

SEQ ID NO: 6017685 - DNA, 25 bp, Homo sapien
tcttatgcctctataaagtgtggca

SEQ ID NO: 6017686 - DNA, 25 bp, Homo sapien
accttctgtctgttggtgagcatga

SEQ ID NO: 6017687 - DNA, 25 bp, Homo sapien
gccaggtaccaagctaccttccttc

SEQ ID NO: 6017688 - DNA, 25 bp, Homo sapien
aaggctcagacccccctctctttct

SEQ ID NO: 6017689 - DNA, 25 bp, Homo sapien
tctccacatgtcttcaccctctgtg

SEQ ID NO: 6017690 - DNA, 25 bp, Homo sapien
gatttaaatcaacatgttttgagta

SEQ ID NO: 6017691 - DNA, 25 bp, Homo sapien
ggactctgaaggaagggcagccagg

SEQ ID NO: 6017692 - DNA, 25 bp, Homo sapien
attgtacagccaagaaaccaaggct

SEQ ID NO: 6017693 - DNA, 25 bp, Homo sapien
agacttagaatctctgaatctggat

SEQ ID NO: 6017694 - DNA, 25 bp, Homo sapien
ctcttgtctgtacatttttatgcac

SEQ ID NO: 6017695 - DNA, 25 bp, Homo sapien
agaaatcttttctcttatgcctcta

SEQ ID NO: 6017696 - DNA, 25 bp, Homo sapien
gtatctttctgaaaatcatacattc

SEQ ID NO: 6017697 - DNA, 25 bp, Homo sapien
ttatggtgctggtccatggatgttt

SEQ ID NO: 6017698 - DNA, 25 bp, Homo sapien
gtctgtagaaatcttttctcttatg

SEQ ID NO: 6017699 - DNA, 25 bp, Homo sapien
agacacaaggctcagacccccctct

SEQ ID NO: 6017700 - DNA, 25 bp, Homo sapien
aggaacagacacaaggctcagaccc

SEQ ID NO: 6017701 - DNA, 25 bp, Homo sapien
tgaagaaataaataaactgatttaa

SEQ ID NO: 6017702 - DNA, 25 bp, Homo sapien
gagttatctaggagacttagaatct

SEQ ID NO: 6017703 - DNA, 25 bp, Homo sapien
ggatgggaaatgtgaagaaataaat

SEQ ID NO: 6017704 - DNA, 25 bp, Homo sapien
ttctgaaaatcatacattcatgaag

SEQ ID NO: 6017705 - DNA, 25 bp, Homo sapien
ttattgtcctaaaacattctcaaac

SEQ ID NO: 6017706 - DNA, 25 bp, Homo sapien
cccgtttctccacatgtcttcaccc

SEQ ID NO: 6017707 - DNA, 25 bp, Homo sapien
agtgctaatagagtgtcaggactct

SEQ ID NO: 6017708 - DNA, 25 bp, Homo sapien
ggtgtagcacagactaccttatggt

SEQ ID NO: 6017709 - DNA, 25 bp, Homo sapien
agggcagccaggtaccaagctacct

SEQ ID NO: 6017710 - DNA, 25 bp, Homo sapien
gactaggtactaagtgttaacatct

SEQ ID NO: 6017711 - DNA, 25 bp, Homo sapien
actaccttatggtgctggtccatgg

SEQ ID NO: 6017712 - DNA, 25 bp, Homo sapien
tgctggtccatggatgtttaaaata

SEQ ID NO: 6017713 - DNA, 25 bp, Homo sapien
tctcaaaccttctgtctgttggtga

SEQ ID NO: 6017714 - DNA, 25 bp, Homo sapien
cctctgtgttctggccctgctgtgt

SEQ ID NO: 6017715 - DNA, 25 bp, Homo sapien
ttcaccgactaggtactaagtgtta

SEQ ID NO: 6017716 - DNA, 25 bp, Homo sapien
tgaaggaagggcagccaggtaccaa

SEQ ID NO: 6017717 - DNA, 25 bp, Homo sapien
tcctaaaacattctcaaaccttctg

SEQ ID NO: 6017718 - DNA, 25 bp, Homo sapien
atacattcatgaaggaacagacaca

SEQ ID NO: 6017719 - DNA, 25 bp, Homo sapien
aactcctctctacctcttgtctgta

SEQ ID NO: 6017720 - DNA, 25 bp, Homo sapien
ttttaagtatctttctgaaaatcat

SEQ ID NO: 6017721 - DNA, 25 bp, Homo sapien
tacaaattattgtcctaaaacattc

SEQ ID NO: 6017722 - DNA, 25 bp, Homo sapien
taaaatatcccaaagaatgtctgta

SEQ ID NO: 6017723 - DNA, 25 bp, Homo sapien
ctctacctcttgtctgtacattttt

SEQ ID NO: 6017724 - DNA, 25 bp, Homo sapien
tctgaatctggattcaccgactagg

SEQ ID NO: 6017725 - DNA, 25 bp, Homo sapien
cagccaagaaaccaaggctttaaat

SEQ ID NO: 6017726 - DNA, 25 bp, Homo sapien
tactaagtgttaacatctggtgtag

SEQ ID NO: 6017727 - DNA, 25 bp, Homo sapien
tgtctgtctcccgtttctccacatg

SEQ ID NO: 6017728 - DNA, 25 bp, Homo sapien
gtgttaacatctggtgtagcacaga

SEQ ID NO: 6017729 - DNA, 25 bp, Homo sapien
agaatctctgaatctggattcaccg

SEQ ID NO: 6017730 - DNA, 25 bp, Homo sapien
gtgtcaggactctgaaggaagggca

SEQ ID NO: 6017731 - DNA, 25 bp, Homo sapien
taaataaactgatttaaatcaacat

SEQ ID NO: 6017732 - DNA, 25 bp, Homo sapien
tgtctgttggtgagcatgattttca

SEQ ID NO: 6017733 - DNA, 25 bp, Homo sapien
gcacagactaccttatggtgctggt

SEQ ID NO: 6017734 - DNA, 25 bp, Homo sapien
tctgtacatttttatgcacacacag

SEQ ID NO: 6017735 - DNA, 25 bp, Homo sapien
ctgtgtggatgggaaatgtgaagaa

SEQ ID NO: 6017736 - DNA, 25 bp, Homo sapien
aatagagtgtcaggactctgaagga

SEQ ID NO: 6017737 - DNA, 25 bp, Homo sapien
tgtctggagttatctaggagactta

SEQ ID NO: 6017738 - DNA, 25 bp, Homo sapien
cttcaccctctgtgttctggccctg

SEQ ID NO: 6017739 - DNA, 25 bp, Homo sapien
tctggattcaccgactaggtactaa

SEQ ID NO: 6017740 - DNA, 25 bp, Homo sapien
ttgagtatcttatgtctggagttat

SEQ ID NO: 6017741 - DNA, 25 bp, Homo sapien
tctttctgtctgtctcccgtttctc

SEQ ID NO: 6017742 - DNA, 25 bp, Homo sapien
caccctcaacccaactcctctctac

SEQ ID NO: 6017743 - DNA, 25 bp, Homo sapien
taaactgatttaaatcaacatgttt

SEQ ID NO: 6017744 - DNA, 25 bp, Homo sapien
cccctctctttctgtctgtctcccg

SEQ ID NO: 6017745 - DNA, 25 bp, Homo sapien
aaacattctcaaaccttctgtctgt

SEQ ID NO: 6017746 - DNA, 25 bp, Homo sapien
gaaatgtgaagaaataaataaactg

SEQ ID NO: 6017747 - DNA, 25 bp, Homo sapien
atcttatgtctggagttatctagga

SEQ ID NO: 6017748 - DNA, 25 bp, Homo sapien
tccatggatgtttaaaatatcccaa

SEQ ID NO: 6017749 - DNA, 25 bp, Homo sapien
tctaggagacttagaatctctgaat

SEQ ID NO: 6017750 - DNA, 25 bp, Homo sapien
gccctgctgtgtggatgggaaatgt

SEQ ID NO: 6017751 - DNA, 25 bp, Homo sapien
gcctctataaagtgtggcacccccc

SEQ ID NO: 6017752 - DNA, 25 bp, Homo sapien
ttggtgagcatgattttcagtgcta

SEQ ID NO: 6017753 - DNA, 25 bp, Homo sapien
tcatgaaggaacagacacaaggctc

SEQ ID NO: 6017754 - DNA, 25 bp, Homo sapien
aatcaacatgttttgagtatcttat

SEQ ID NO: 6017755 - DNA, 25 bp, Homo sapien
attttcagtgctaatagagtgtcag

SEQ ID NO: 6017756 - DNA, 25 bp, Homo sapien
aaatcatacattcatgaaggaacag

SEQ ID NO: 6017757 - DNA, 25 bp, Homo sapien
cttttctcttatgcctctataaagt

SEQ ID NO: 6017758 - DNA, 25 bp, Homo sapien
taaatatttttaagtatctttctga

SEQ ID NO: 6017759 - DNA, 25 bp, Homo sapien
aagcccattgtacagccaagaaacc

SEQ ID NO: 6017760 - DNA, 25 bp, Homo sapien
tgtctcccgtttctccacatgtctt

SEQ ID NO: 6017761 - DNA, 25 bp, Homo sapien
catgttttgagtatcttatgtctgg

SEQ ID NO: 6017762 - DNA, 25 bp, Homo sapien
agcatgattttcagtgctaatagag

SEQ ID NO: 6017763 - DNA, 25 bp, Homo sapien
acatctggtgtagcacagactacct

SEQ ID NO: 6017764 - DNA, 25 bp, Homo sapien
aagaatgtctgtagaaatcttttct

SEQ ID NO: 6017765 - DNA, 25 bp, Homo sapien
atatgtaaagttacagatatgggac

SEQ ID NO: 6017766 - DNA, 25 bp, Homo sapien
caggagcggttcaggtctgtgacga

SEQ ID NO: 6017767 - DNA, 25 bp, Homo sapien
cgaagcctccaggttcgcacaagag

SEQ ID NO: 6017768 - DNA, 25 bp, Homo sapien
atggcgcagaccgccatgtccgaga

SEQ ID NO: 6017769 - DNA, 25 bp, Homo sapien
gggcactccttgtctatgacatcac

SEQ ID NO: 6017770 - DNA, 25 bp, Homo sapien
caggtgaactggaccccgagaggat

SEQ ID NO: 6017771 - DNA, 25 bp, Homo sapien
gacacggccggccaggagcggttca

SEQ ID NO: 6017772 - DNA, 25 bp, Homo sapien
ttgaaaagaaattcaaagatgactc

SEQ ID NO: 6017773 - DNA, 25 bp, Homo sapien
ggcagaatggcgcagaccgccatgt

SEQ ID NO: 6017774 - DNA, 25 bp, Homo sapien
taattggttaacagatgccagaatg

SEQ ID NO: 6017775 - DNA, 25 bp, Homo sapien
ctactacagaggtgcagctggggca

SEQ ID NO: 6017776 - DNA, 25 bp, Homo sapien
cggttcaggtctgtgacgagaagct

SEQ ID NO: 6017777 - DNA, 25 bp, Homo sapien
ttggctcaaagataataaatgtcgg

SEQ ID NO: 6017778 - DNA, 25 bp, Homo sapien
gaacaagaaggacttggatgccgac

SEQ ID NO: 6017779 - DNA, 25 bp, Homo sapien
ttgcttgcttcatcagttcattgaa

SEQ ID NO: 6017780 - DNA, 25 bp, Homo sapien
cagaccgccatgtccgagacttacg

SEQ ID NO: 6017781 - DNA, 25 bp, Homo sapien
acttggatgccgaccgggaagtcac

SEQ ID NO: 6017782 - DNA, 25 bp, Homo sapien
gttcctggaaaccagtgcactgact

SEQ ID NO: 6017783 - DNA, 25 bp, Homo sapien
gctttcatgcagtgtgcaaggaaaa

SEQ ID NO: 6017784 - DNA, 25 bp, Homo sapien
tgtgacgagaagctactacagaggt

SEQ ID NO: 6017785 - DNA, 25 bp, Homo sapien
cttcctcgaagcctccaggttcgca

SEQ ID NO: 6017786 - DNA, 25 bp, Homo sapien
tctatgacatcaccagccgagaaac

SEQ ID NO: 6017787 - DNA, 25 bp, Homo sapien
tggcgagaacgtcgaagaggctttc

SEQ ID NO: 6017788 - DNA, 25 bp, Homo sapien
tctgcgggaacaagaaggacttgga

SEQ ID NO: 6017789 - DNA, 25 bp, Homo sapien
gaaaatacttaacaaaattgaatca

SEQ ID NO: 6017790 - DNA, 25 bp, Homo sapien
atgactcaaatcataccataggaat

SEQ ID NO: 6017791 - DNA, 25 bp, Homo sapien
atgccgaccgggaagtcaccttcct

SEQ ID NO: 6017792 - DNA, 25 bp, Homo sapien
gcttactaattggttaacagatgcc

SEQ ID NO: 6017793 - DNA, 25 bp, Homo sapien
cggagctgtggcggcagaatggcgc

SEQ ID NO: 6017794 - DNA, 25 bp, Homo sapien
caaatcttgcttgcttcatcagttc

SEQ ID NO: 6017795 - DNA, 25 bp, Homo sapien
aataaatgtcggtggtaaatatgta

SEQ ID NO: 6017796 - DNA, 25 bp, Homo sapien
aaagttacagatatgggacacggcc

SEQ ID NO: 6017797 - DNA, 25 bp, Homo sapien
tacttaacaaaattgaatcaggtga

SEQ ID NO: 6017798 - DNA, 25 bp, Homo sapien
caaagataataaatgtcggtggtaa

SEQ ID NO: 6017799 - DNA, 25 bp, Homo sapien
gttcgcacaagagaatgagctgatg

SEQ ID NO: 6017800 - DNA, 25 bp, Homo sapien
agatgccagaatgctggcgagccag

SEQ ID NO: 6017801 - DNA, 25 bp, Homo sapien
acaagagaatgagctgatgttcctg

SEQ ID NO: 6017802 - DNA, 25 bp, Homo sapien
tgtcggtggtaaatatgtaaagtta

SEQ ID NO: 6017803 - DNA, 25 bp, Homo sapien
gaatgagctgatgttcctggaaacc

SEQ ID NO: 6017804 - DNA, 25 bp, Homo sapien
ttaaattcttggtcatcggaaatgc

SEQ ID NO: 6017805 - DNA, 25 bp, Homo sapien
tggtaaatatgtaaagttacagata

SEQ ID NO: 6017806 - DNA, 25 bp, Homo sapien
gaacatcgtccttatcctctgcggg

SEQ ID NO: 6017807 - DNA, 25 bp, Homo sapien
caaatcataccataggaatggaatt

SEQ ID NO: 6017808 - DNA, 25 bp, Homo sapien
caatgcgcttactaattggttaaca

SEQ ID NO: 6017809 - DNA, 25 bp, Homo sapien
aactggcaaatcttgcttgcttcat

SEQ ID NO: 6017810 - DNA, 25 bp, Homo sapien
gcttcatcagttcattgaaaagaaa

SEQ ID NO: 6017811 - DNA, 25 bp, Homo sapien
tgcgggaactggcaaatcttgcttg

SEQ ID NO: 6017812 - DNA, 25 bp, Homo sapien
tccttgtctatgacatcaccagccg

SEQ ID NO: 6017813 - DNA, 25 bp, Homo sapien
caggtctgtgacgagaagctactac

SEQ ID NO: 6017814 - DNA, 25 bp, Homo sapien
cgagaaacctacaatgcgcttacta

SEQ ID NO: 6017815 - DNA, 25 bp, Homo sapien
taggaatggaatttggctcaaagat

SEQ ID NO: 6017816 - DNA, 25 bp, Homo sapien
cagtgcactgactggcgagaacgtc

SEQ ID NO: 6017817 - DNA, 25 bp, Homo sapien
cgtccttatcctctgcgggaacaag

SEQ ID NO: 6017818 - DNA, 25 bp, Homo sapien
ttgaatcaggtgaactggaccccga

SEQ ID NO: 6017819 - DNA, 25 bp, Homo sapien
cggaaatgcgggaactggcaaatct

SEQ ID NO: 6017820 - DNA, 25 bp, Homo sapien
tgtggcggcagaatggcgcagaccg

SEQ ID NO: 6017821 - DNA, 25 bp, Homo sapien
gttaacagatgccagaatgctggcg

SEQ ID NO: 6017822 - DNA, 25 bp, Homo sapien
cagaggtgcagctggggcactcctt

SEQ ID NO: 6017823 - DNA, 25 bp, Homo sapien
acatcaccagccgagaaacctacaa

SEQ ID NO: 6017824 - DNA, 25 bp, Homo sapien
tccgagacttacgatttcttgttta

SEQ ID NO: 6017825 - DNA, 25 bp, Homo sapien
gctgatgttcctggaaaccagtgca

SEQ ID NO: 6017826 - DNA, 25 bp, Homo sapien
agaaattcaaagatgactcaaatca

SEQ ID NO: 6017827 - DNA, 25 bp, Homo sapien
ataccataggaatggaatttggctc

SEQ ID NO: 6017828 - DNA, 25 bp, Homo sapien
gccatgtccgagacttacgatttct

SEQ ID NO: 6017829 - DNA, 25 bp, Homo sapien
tatcctctgcgggaacaagaaggac

SEQ ID NO: 6017830 - DNA, 25 bp, Homo sapien
gtcatcggaaatgcgggaactggca

SEQ ID NO: 6017831 - DNA, 25 bp, Homo sapien
agaaggacttggatgccgaccggga

SEQ ID NO: 6017832 - DNA, 25 bp, Homo sapien
tcttgtttaaattcttggtcatcgg

SEQ ID NO: 6017833 - DNA, 25 bp, Homo sapien
cagctggggcactccttgtctatga

SEQ ID NO: 6017834 - DNA, 25 bp, Homo sapien
acctacaatgcgcttactaattggt

SEQ ID NO: 6017835 - DNA, 25 bp, Homo sapien
agtcaccttcctcgaagcctccagg

SEQ ID NO: 6017836 - DNA, 25 bp, Homo sapien
gctggcgagccagaacatcgtcctt

SEQ ID NO: 6017837 - DNA, 25 bp, Homo sapien
atgcagtgtgcaaggaaaatactta

SEQ ID NO: 6017838 - DNA, 25 bp, Homo sapien
aactggaccccgagaggatgggctc

SEQ ID NO: 6017839 - DNA, 25 bp, Homo sapien
acaaaattgaatcaggtgaactgga

SEQ ID NO: 6017840 - DNA, 25 bp, Homo sapien
accccgcggagctgtggcggcagaa

SEQ ID NO: 6017841 - DNA, 25 bp, Homo sapien
gaacgtcgaagaggctttcatgcag

SEQ ID NO: 6017842 - DNA, 25 bp, Homo sapien
accagccgagaaacctacaatgcgc

SEQ ID NO: 6017843 - DNA, 25 bp, Homo sapien
gagccagaacatcgtccttatcctc

SEQ ID NO: 6017844 - DNA, 25 bp, Homo sapien
ggacggaccccgcggagctgtggcg

SEQ ID NO: 6017845 - DNA, 25 bp, Homo sapien
acagatatgggacacggccggccag

SEQ ID NO: 6017846 - DNA, 25 bp, Homo sapien
tcaaagatgactcaaatcataccat

SEQ ID NO: 6017847 - DNA, 25 bp, Homo sapien
cagaatgctggcgagccagaacatc

SEQ ID NO: 6017848 - DNA, 25 bp, Homo sapien
ctccaggttcgcacaagagaatgag

SEQ ID NO: 6017849 - DNA, 25 bp, Homo sapien
gaagaggctttcatgcagtgtgcaa

SEQ ID NO: 6017850 - DNA, 25 bp, Homo sapien
actgactggcgagaacgtcgaagag

SEQ ID NO: 6017851 - DNA, 25 bp, Homo sapien
ggaaaccagtgcactgactggcgag

SEQ ID NO: 6017852 - DNA, 25 bp, Homo sapien
tcttggtcatcggaaatgcgggaac

SEQ ID NO: 6017853 - DNA, 25 bp, Homo sapien
tggaatttggctcaaagataataaa

SEQ ID NO: 6017854 - DNA, 25 bp, Homo sapien
tgtgcaaggaaaatacttaacaaaa

SEQ ID NO: 6017855 - DNA, 25 bp, Homo sapien
gagaagctactacagaggtgcagct

SEQ ID NO: 6017856 - DNA, 25 bp, Homo sapien
cgggaagtcaccttcctcgaagcct

SEQ ID NO: 6017857 - DNA, 25 bp, Homo sapien
gatttcttgtttaaattcttggtca

SEQ ID NO: 6017858 - DNA, 25 bp, Homo sapien
ggccggccaggagcggttcaggtct

SEQ ID NO: 6017859 - DNA, 25 bp, Homo sapien
ggggcaggggtctgcatccatgtgg

SEQ ID NO: 6017860 - DNA, 25 bp, Homo sapien
tacgcataaccaacacaaggaggaa

SEQ ID NO: 6017861 - DNA, 25 bp, Homo sapien
gggttctgtcatgtcacaccggctc

SEQ ID NO: 6017862 - DNA, 25 bp, Homo sapien
gggagttaaccaacgcaatgagaaa

SEQ ID NO: 6017863 - DNA, 25 bp, Homo sapien
aggacccaccgctgaacctgtgtca

SEQ ID NO: 6017864 - DNA, 25 bp, Homo sapien
tactccaggacccaccgctgaacct

SEQ ID NO: 6017865 - DNA, 25 bp, Homo sapien
acgtgctgggccgtggccagcacaa

SEQ ID NO: 6017866 - DNA, 25 bp, Homo sapien
ggagtttaaaaagaaagctcactga

SEQ ID NO: 6017867 - DNA, 25 bp, Homo sapien
gatggtagtaaaaactccagcctct

SEQ ID NO: 6017868 - DNA, 25 bp, Homo sapien
atctacttctgtgccgagtagaaaa

SEQ ID NO: 6017869 - DNA, 25 bp, Homo sapien
agagggattaaataagaaacgcact

SEQ ID NO: 6017870 - DNA, 25 bp, Homo sapien
ccagagtcctttcataccgggtcat

SEQ ID NO: 6017871 - DNA, 25 bp, Homo sapien
tgcatttcctgggagtttaaaaaga

SEQ ID NO: 6017872 - DNA, 25 bp, Homo sapien
cagtgtacaccgttccccaggaaga

SEQ ID NO: 6017873 - DNA, 25 bp, Homo sapien
agttagttcgcagaatggctgctga

SEQ ID NO: 6017874 - DNA, 25 bp, Homo sapien
aacagccacactcctgtgcacttgg

SEQ ID NO: 6017875 - DNA, 25 bp, Homo sapien
attaaataagaaacgcactggctgt

SEQ ID NO: 6017876 - DNA, 25 bp, Homo sapien
ttccccaggaagatctacttctgtg

SEQ ID NO: 6017877 - DNA, 25 bp, Homo sapien
actgcatgtcctgggagttaaccaa

SEQ ID NO: 6017878 - DNA, 25 bp, Homo sapien
tgctgagcccccggctgccagtgta

SEQ ID NO: 6017879 - DNA, 25 bp, Homo sapien
agcctcttcagcctccggcggctgt

SEQ ID NO: 6017880 - DNA, 25 bp, Homo sapien
cggctctgtgctgtgggaacgtgct

SEQ ID NO: 6017881 - DNA, 25 bp, Homo sapien
tggctgttcacaccagagtcctttc

SEQ ID NO: 6017882 - DNA, 25 bp, Homo sapien
agtgcagggttctgtcatgtcacac

SEQ ID NO: 6017883 - DNA, 25 bp, Homo sapien
ggcttctaaaggtactgtccgctga

SEQ ID NO: 6017884 - DNA, 25 bp, Homo sapien
acaccgttccccaggaagatctact

SEQ ID NO: 6017885 - DNA, 25 bp, Homo sapien
ttcacaccagagtcctttcataccg

SEQ ID NO: 6017886 - DNA, 25 bp, Homo sapien
cgtgaagggtacgtgtggggcaggg

SEQ ID NO: 6017887 - DNA, 25 bp, Homo sapien
aggaagatctacttctgtgccgagt

SEQ ID NO: 6017888 - DNA, 25 bp, Homo sapien
gtggatcacagaaacagtgtaaaag

SEQ ID NO: 6017889 - DNA, 25 bp, Homo sapien
taaccaacgcaatgagaaagcacgc

SEQ ID NO: 6017890 - DNA, 25 bp, Homo sapien
ttctgtgccgagtagaaaagatggt

SEQ ID NO: 6017891 - DNA, 25 bp, Homo sapien
agtaaaaactccagcctcttcagcc

SEQ ID NO: 6017892 - DNA, 25 bp, Homo sapien
tgtgtcactggggcgcctaacagcc

SEQ ID NO: 6017893 - DNA, 25 bp, Homo sapien
gagcctgtgtacgtcgaggtgaccg

SEQ ID NO: 6017894 - DNA, 25 bp, Homo sapien
ccatgtggcttctaaaggtactgtc

SEQ ID NO: 6017895 - DNA, 25 bp, Homo sapien
agctggatttaacggaacgtgaagg

SEQ ID NO: 6017896 - DNA, 25 bp, Homo sapien
tcacaccggctctgtgctgtgggaa

SEQ ID NO: 6017897 - DNA, 25 bp, Homo sapien
gaaagctcactgagtgcagggttct

SEQ ID NO: 6017898 - DNA, 25 bp, Homo sapien
ccaccgctgaacctgtgtcactggg

SEQ ID NO: 6017899 - DNA, 25 bp, Homo sapien
tgagaaagcacgctctctcacattc

SEQ ID NO: 6017900 - DNA, 25 bp, Homo sapien
ctcacgtccatgactgcatgtcctg

SEQ ID NO: 6017901 - DNA, 25 bp, Homo sapien
taagaaacgcactggctgttcacac

SEQ ID NO: 6017902 - DNA, 25 bp, Homo sapien
aaccaacacaaggaggaaagcacgc

SEQ ID NO: 6017903 - DNA, 25 bp, Homo sapien
tactgtccgctgagttagttcgcag

SEQ ID NO: 6017904 - DNA, 25 bp, Homo sapien
cacttggagcctgtgtacgtcgagg

SEQ ID NO: 6017905 - DNA, 25 bp, Homo sapien
agcacgctcacgtccatgactgcat

SEQ ID NO: 6017906 - DNA, 25 bp, Homo sapien
tgtgctgtgggaacgtgctgggccg

SEQ ID NO: 6017907 - DNA, 25 bp, Homo sapien
ttcagcctccggcggctgtactcca

SEQ ID NO: 6017908 - DNA, 25 bp, Homo sapien
tgtcctgggagttaaccaacgcaat

SEQ ID NO: 6017909 - DNA, 25 bp, Homo sapien
ctccggcggctgtactccaggaccc

SEQ ID NO: 6017910 - DNA, 25 bp, Homo sapien
cggctgtactccaggacccaccgct

SEQ ID NO: 6017911 - DNA, 25 bp, Homo sapien
cacattcacaactgcatttcctggg

SEQ ID NO: 6017912 - DNA, 25 bp, Homo sapien
gggtcatacgcataaccaacacaag

SEQ ID NO: 6017913 - DNA, 25 bp, Homo sapien
actggggcgcctaacagccacactc

SEQ ID NO: 6017914 - DNA, 25 bp, Homo sapien
acgcactggctgttcacaccagagt

SEQ ID NO: 6017915 - DNA, 25 bp, Homo sapien
gcccccggctgccagtgtacaccgt

SEQ ID NO: 6017916 - DNA, 25 bp, Homo sapien
gcgcctaacagccacactcctgtgc

SEQ ID NO: 6017917 - DNA, 25 bp, Homo sapien
cataccgggtcatacgcataaccaa

SEQ ID NO: 6017918 - DNA, 25 bp, Homo sapien
cacactcctgtgcacttggagcctg

SEQ ID NO: 6017919 - DNA, 25 bp, Homo sapien
gaggaaagcacgctcacgtccatga

SEQ ID NO: 6017920 - DNA, 25 bp, Homo sapien
ggctgccagtgtacaccgttcccca

SEQ ID NO: 6017921 - DNA, 25 bp, Homo sapien
taaaaagaaagctcactgagtgcag

SEQ ID NO: 6017922 - DNA, 25 bp, Homo sapien
tgaacctgtgtcactggggcgccta

SEQ ID NO: 6017923 - DNA, 25 bp, Homo sapien
tcactgagtgcagggttctgtcatg

SEQ ID NO: 6017924 - DNA, 25 bp, Homo sapien
tgggccgtggccagcacaagctgga

SEQ ID NO: 6017925 - DNA, 25 bp, Homo sapien
gccgagtagaaaagatggtagtaaa

SEQ ID NO: 6017926 - DNA, 25 bp, Homo sapien
aggggtctgcatccatgtggcttct

SEQ ID NO: 6017927 - DNA, 25 bp, Homo sapien
gtgggaacgtgctgggccgtggcca

SEQ ID NO: 6017928 - DNA, 25 bp, Homo sapien
cacaaggaggaaagcacgctcacgt

SEQ ID NO: 6017929 - DNA, 25 bp, Homo sapien
gtggccagcacaagctggatttaac

SEQ ID NO: 6017930 - DNA, 25 bp, Homo sapien
tccatgactgcatgtcctgggagtt

SEQ ID NO: 6017931 - DNA, 25 bp, Homo sapien
tcctttcataccgggtcatacgcat

SEQ ID NO: 6017932 - DNA, 25 bp, Homo sapien
tacgtgtggggcaggggtctgcatc

SEQ ID NO: 6017933 - DNA, 25 bp, Homo sapien
ctctctcacattcacaactgcattt

SEQ ID NO: 6017934 - DNA, 25 bp, Homo sapien
cacagaaacagtgtaaaaggggtgg

SEQ ID NO: 6017935 - DNA, 25 bp, Homo sapien
ccgctgagttagttcgcagaatggc

SEQ ID NO: 6017936 - DNA, 25 bp, Homo sapien
tgtcatgtcacaccggctctgtgct

SEQ ID NO: 6017937 - DNA, 25 bp, Homo sapien
taaaggtactgtccgctgagttagt

SEQ ID NO: 6017938 - DNA, 25 bp, Homo sapien
cctgtgcacttggagcctgtgtacg

SEQ ID NO: 6017939 - DNA, 25 bp, Homo sapien
acgcaatgagaaagcacgctctctc

SEQ ID NO: 6017940 - DNA, 25 bp, Homo sapien
aactccagcctcttcagcctccggc

SEQ ID NO: 6017941 - DNA, 25 bp, Homo sapien
agcacgctctctcacattcacaact

SEQ ID NO: 6017942 - DNA, 25 bp, Homo sapien
cacaactgcatttcctgggagttta

SEQ ID NO: 6017943 - DNA, 25 bp, Homo sapien
ttcgcagaatggctgctgagccccc

SEQ ID NO: 6017944 - DNA, 25 bp, Homo sapien
ctgcatccatgtggcttctaaaggt

SEQ ID NO: 6017945 - DNA, 25 bp, Homo sapien
gaatggctgctgagcccccggctgc

SEQ ID NO: 6017946 - DNA, 25 bp, Homo sapien
agcacaagctggatttaacggaacg

SEQ ID NO: 6017947 - DNA, 25 bp, Homo sapien
aatacaaggccactttcctgtcatc

SEQ ID NO: 6017948 - DNA, 25 bp, Homo sapien
tctttgtagtcttccccgttatcca

SEQ ID NO: 6017949 - DNA, 25 bp, Homo sapien
atatgctggaccacttctttgtagt

SEQ ID NO: 6017950 - DNA, 25 bp, Homo sapien
gagtaaatacaaggccactttcctg

SEQ ID NO: 6017951 - DNA, 25 bp, Homo sapien
tctactaaagttcctatccttggca

SEQ ID NO: 6017952 - DNA, 25 bp, Homo sapien
tggcatttagggtctggggtttcta

SEQ ID NO: 6017953 - DNA, 25 bp, Homo sapien
tatccaaaacctgggcggccagcgt

SEQ ID NO: 6017954 - DNA, 25 bp, Homo sapien
gggttaacatttcactggagatgga

SEQ ID NO: 6017955 - DNA, 25 bp, Homo sapien
ataaaagctgtctcttgttatagtg

SEQ ID NO: 6017956 - DNA, 25 bp, Homo sapien
aaagcgctctccagcagggtccgtg

SEQ ID NO: 6017957 - DNA, 25 bp, Homo sapien
ccccgtcccatgcaacacatctctg

SEQ ID NO: 6017958 - DNA, 25 bp, Homo sapien
cctatccttggcatatgattgcact

SEQ ID NO: 6017959 - DNA, 25 bp, Homo sapien
ctctccagcagggtccgtggctttc

SEQ ID NO: 6017960 - DNA, 25 bp, Homo sapien
tcttgttatagtggtacattatgaa

SEQ ID NO: 6017961 - DNA, 25 bp, Homo sapien
aagccaaatactttgaagacaatct

SEQ ID NO: 6017962 - DNA, 25 bp, Homo sapien
agtgccccccgtcccatgcaacaca

SEQ ID NO: 6017963 - DNA, 25 bp, Homo sapien
taatcagatgttaacataacttaag

SEQ ID NO: 6017964 - DNA, 25 bp, Homo sapien
gctcatttctcctcaatataatcag

SEQ ID NO: 6017965 - DNA, 25 bp, Homo sapien
acttaagaggactgaaggctggtgc

SEQ ID NO: 6017966 - DNA, 25 bp, Homo sapien
agttccatatgctggaccacttctt

SEQ ID NO: 6017967 - DNA, 25 bp, Homo sapien
gccagtgggttaacatttcactgga

SEQ ID NO: 6017968 - DNA, 25 bp, Homo sapien
atcttagattacagagcaaatggta

SEQ ID NO: 6017969 - DNA, 25 bp, Homo sapien
cagcagggtccgtggctttcttctg

SEQ ID NO: 6017970 - DNA, 25 bp, Homo sapien
aacctgggcggccagcgtttcctga

SEQ ID NO: 6017971 - DNA, 25 bp, Homo sapien
gttctgagtttcaaaagtggctctt

SEQ ID NO: 6017972 - DNA, 25 bp, Homo sapien
ggctcttgtgtgactgaatcaatta

SEQ ID NO: 6017973 - DNA, 25 bp, Homo sapien
ttgattttggcatttagggtctggg

SEQ ID NO: 6017974 - DNA, 25 bp, Homo sapien
taatgggccagtgggttaacatttc

SEQ ID NO: 6017975 - DNA, 25 bp, Homo sapien
tagggtctggggtttctattgtatg

SEQ ID NO: 6017976 - DNA, 25 bp, Homo sapien
tgggcggccagcgtttcctgaacgt

SEQ ID NO: 6017977 - DNA, 25 bp, Homo sapien
ttgcacttgattttggcatttaggg

SEQ ID NO: 6017978 - DNA, 25 bp, Homo sapien
agcttggatagtatcttagattaca

SEQ ID NO: 6017979 - DNA, 25 bp, Homo sapien
aaaagtggctcttgtgtgactgaat

SEQ ID NO: 6017980 - DNA, 25 bp, Homo sapien
gattacagagcaaatggtaagatga

SEQ ID NO: 6017981 - DNA, 25 bp, Homo sapien
tggaccacttctttgtagtcttccc

SEQ ID NO: 6017982 - DNA, 25 bp, Homo sapien
tgtcatccaggctcacatgttctga

SEQ ID NO: 6017983 - DNA, 25 bp, Homo sapien
aagaacagtaccaagcccccatagc

SEQ ID NO: 6017984 - DNA, 25 bp, Homo sapien
aatactttgaagacaatctaatggg

SEQ ID NO: 6017985 - DNA, 25 bp, Homo sapien
cactggagatggaaagcgctctcca

SEQ ID NO: 6017986 - DNA, 25 bp, Homo sapien
tcttctgttttcaagaagagttcca

SEQ ID NO: 6017987 - DNA, 25 bp, Homo sapien
caaactaaagccaaatactttgaag

SEQ ID NO: 6017988 - DNA, 25 bp, Homo sapien
atatgattgcacttgattttggcat

SEQ ID NO: 6017989 - DNA, 25 bp, Homo sapien
tgaaggctggtgcagtgccccccgt

SEQ ID NO: 6017990 - DNA, 25 bp, Homo sapien
aagatgaagaacagtaccaagcccc

SEQ ID NO: 6017991 - DNA, 25 bp, Homo sapien
ttctcctcaatataatcagatgtta

SEQ ID NO: 6017992 - DNA, 25 bp, Homo sapien
ctgaacgtgttgcttctataaggga

SEQ ID NO: 6017993 - DNA, 25 bp, Homo sapien
tgtgtgactgaatcaattacagttt

SEQ ID NO: 6017994 - DNA, 25 bp, Homo sapien
cgtttcctgaacgtgttgcttctat

SEQ ID NO: 6017995 - DNA, 25 bp, Homo sapien
ctggggtttctattgtatgttttcg

SEQ ID NO: 6017996 - DNA, 25 bp, Homo sapien
agtttcaaaagtggctcttgtgtga

SEQ ID NO: 6017997 - DNA, 25 bp, Homo sapien
agagcaaatggtaagatgaagaaca

SEQ ID NO: 6017998 - DNA, 25 bp, Homo sapien
tcaatataatcagatgttaacataa

SEQ ID NO: 6017999 - DNA, 25 bp, Homo sapien
aggccactttcctgtcatccaggct

SEQ ID NO: 6018000 - DNA, 25 bp, Homo sapien
acatctctgcagttagtggagtaaa

SEQ ID NO: 6018001 - DNA, 25 bp, Homo sapien
ccaggctcacatgttctgagtttca

SEQ ID NO: 6018002 - DNA, 25 bp, Homo sapien
ggtccgtggctttcttctgttttca

SEQ ID NO: 6018003 - DNA, 25 bp, Homo sapien
ggtacattatgaagcttggatagta

SEQ ID NO: 6018004 - DNA, 25 bp, Homo sapien
gatgttaacataacttaagaggact

SEQ ID NO: 6018005 - DNA, 25 bp, Homo sapien
agtaccaagcccccatagctcattt

SEQ ID NO: 6018006 - DNA, 25 bp, Homo sapien
tcaattacagtttacaaactaaagc

SEQ ID NO: 6018007 - DNA, 25 bp, Homo sapien
actgaatcaattacagtttacaaac

SEQ ID NO: 6018008 - DNA, 25 bp, Homo sapien
tggctttcttctgttttcaagaaga

SEQ ID NO: 6018009 - DNA, 25 bp, Homo sapien
tggtgcagtgccccccgtcccatgc

SEQ ID NO: 6018010 - DNA, 25 bp, Homo sapien
aaagttcctatccttggcatatgat

SEQ ID NO: 6018011 - DNA, 25 bp, Homo sapien
gaggactgaaggctggtgcagtgcc

SEQ ID NO: 6018012 - DNA, 25 bp, Homo sapien
ctttcctgtcatccaggctcacatg

SEQ ID NO: 6018013 - DNA, 25 bp, Homo sapien
ctgcagttagtggagtaaatacaag

SEQ ID NO: 6018014 - DNA, 25 bp, Homo sapien
acatttcactggagatggaaagcgc

SEQ ID NO: 6018015 - DNA, 25 bp, Homo sapien
gctgtctcttgttatagtggtacat

SEQ ID NO: 6018016 - DNA, 25 bp, Homo sapien
cttggcatatgattgcacttgattt

SEQ ID NO: 6018017 - DNA, 25 bp, Homo sapien
tgcaacacatctctgcagttagtgg

SEQ ID NO: 6018018 - DNA, 25 bp, Homo sapien
ttgaagacaatctaatgggccagtg

SEQ ID NO: 6018019 - DNA, 25 bp, Homo sapien
acaatctaatgggccagtgggttaa

SEQ ID NO: 6018020 - DNA, 25 bp, Homo sapien
cccatagctcatttctcctcaatat

SEQ ID NO: 6018021 - DNA, 25 bp, Homo sapien
tcacatgttctgagtttcaaaagtg

SEQ ID NO: 6018022 - DNA, 25 bp, Homo sapien
ttagtggagtaaatacaaggccact

SEQ ID NO: 6018023 - DNA, 25 bp, Homo sapien
gttttcaagaagagttccatatgct

SEQ ID NO: 6018024 - DNA, 25 bp, Homo sapien
gtcccatgcaacacatctctgcagt

SEQ ID NO: 6018025 - DNA, 25 bp, Homo sapien
aatggtaagatgaagaacagtacca

SEQ ID NO: 6018026 - DNA, 25 bp, Homo sapien
gtgttgcttctataagggaatattt

SEQ ID NO: 6018027 - DNA, 25 bp, Homo sapien
aacataacttaagaggactgaaggc

SEQ ID NO: 6018028 - DNA, 25 bp, Homo sapien
gatagtatcttagattacagagcaa

SEQ ID NO: 6018029 - DNA, 25 bp, Homo sapien
cttctataagggaatatttactttg

SEQ ID NO: 6018030 - DNA, 25 bp, Homo sapien
ggccagcgtttcctgaacgtgttgc

SEQ ID NO: 6018031 - DNA, 25 bp, Homo sapien
tatagtggtacattatgaagcttgg

SEQ ID NO: 6018032 - DNA, 25 bp, Homo sapien
caagcccccatagctcatttctcct

SEQ ID NO: 6018033 - DNA, 25 bp, Homo sapien
ttatgaagcttggatagtatcttag

SEQ ID NO: 6018034 - DNA, 25 bp, Homo sapien
aagaagagttccatatgctggacca

SEQ ID NO: 6018035 - DNA, 25 bp, Homo sapien
agatggaaagcgctctccagcaggg

SEQ ID NO: 6018036 - DNA, 25 bp, Homo sapien
attcagtcacacaagagccactttt

SEQ ID NO: 6018037 - DNA, 25 bp, Homo sapien
tagaaaccccagaccctaaatgcca

SEQ ID NO: 6018038 - DNA, 25 bp, Homo sapien
ccaatgagaatttagtctgaataac

SEQ ID NO: 6018039 - DNA, 25 bp, Homo sapien
tcttaaccgaaaacatacaatagaa

SEQ ID NO: 6018040 - DNA, 25 bp, Homo sapien
cctacaacgatgttccttaaatact

SEQ ID NO: 6018041 - DNA, 25 bp, Homo sapien
taattgattcagtcacacaagagcc

SEQ ID NO: 6018042 - DNA, 25 bp, Homo sapien
tattcccttatagaagcaacacgtt

SEQ ID NO: 6018043 - DNA, 25 bp, Homo sapien
aatcaagtgcaatcatatgccaagg

SEQ ID NO: 6018044 - DNA, 25 bp, Homo sapien
gggaagactacaaagaagtggtcca

SEQ ID NO: 6018045 - DNA, 25 bp, Homo sapien
agagcgctttccatctccagtgaaa

SEQ ID NO: 6018046 - DNA, 25 bp, Homo sapien
agaagaaagccacggaccctgctgg

SEQ ID NO: 6018047 - DNA, 25 bp, Homo sapien
cctaaatgccaaaatcaagtgcaat

SEQ ID NO: 6018048 - DNA, 25 bp, Homo sapien
tttcttcaataaagataggttgctc

SEQ ID NO: 6018049 - DNA, 25 bp, Homo sapien
tcagaatcttcactattaaatgttg

SEQ ID NO: 6018050 - DNA, 25 bp, Homo sapien
caacgatgttccttaaatactctta

SEQ ID NO: 6018051 - DNA, 25 bp, Homo sapien
cttcttgctcttgtatggcttgctg

SEQ ID NO: 6018052 - DNA, 25 bp, Homo sapien
aactaacatgggtgagaacctacaa

SEQ ID NO: 6018053 - DNA, 25 bp, Homo sapien
tctccacacccctgcccccttcttg

SEQ ID NO: 6018054 - DNA, 25 bp, Homo sapien
tgccaaaatcaagtgcaatcatatg

SEQ ID NO: 6018055 - DNA, 25 bp, Homo sapien
gccaaggataggaactttagtagaa

SEQ ID NO: 6018056 - DNA, 25 bp, Homo sapien
actattaaatgttgaaatctcacag

SEQ ID NO: 6018057 - DNA, 25 bp, Homo sapien
tggtccagcatatggaactcttctt

SEQ ID NO: 6018058 - DNA, 25 bp, Homo sapien
gtttgtaaactgtaattgattcagt

SEQ ID NO: 6018059 - DNA, 25 bp, Homo sapien
agcatatggaactcttcttgaaaac

SEQ ID NO: 6018060 - DNA, 25 bp, Homo sapien
gaataacactcaagtcatcccattc

SEQ ID NO: 6018061 - DNA, 25 bp, Homo sapien
gtcatcccattctcgtaaaactaac

SEQ ID NO: 6018062 - DNA, 25 bp, Homo sapien
gctttagtttgtaaactgtaattga

SEQ ID NO: 6018063 - DNA, 25 bp, Homo sapien
gctcttgtatggcttgctgccaatg

SEQ ID NO: 6018064 - DNA, 25 bp, Homo sapien
ccattctcgtaaaactaacatgggt

SEQ ID NO: 6018065 - DNA, 25 bp, Homo sapien
agtaaatattcccttatagaagcaa

SEQ ID NO: 6018066 - DNA, 25 bp, Homo sapien
tgagaacctacaacgatgttcctta

SEQ ID NO: 6018067 - DNA, 25 bp, Homo sapien
tgaaaacagaagaaagccacggacc

SEQ ID NO: 6018068 - DNA, 25 bp, Homo sapien
tcaaagtatttggctttagtttgta

SEQ ID NO: 6018069 - DNA, 25 bp, Homo sapien
aagataggttgctcagaatcttcac

SEQ ID NO: 6018070 - DNA, 25 bp, Homo sapien
ggaccctgctggagagcgctttcca

SEQ ID NO: 6018071 - DNA, 25 bp, Homo sapien
catacaatagaaaccccagacccta

SEQ ID NO: 6018072 - DNA, 25 bp, Homo sapien
atctccagtgaaatgttaacccact

SEQ ID NO: 6018073 - DNA, 25 bp, Homo sapien
aagagccacttttgaaactcagaac

SEQ ID NO: 6018074 - DNA, 25 bp, Homo sapien
cacccctgcccccttcttgctcttg

SEQ ID NO: 6018075 - DNA, 25 bp, Homo sapien
agaatttagtctgaataacactcaa

SEQ ID NO: 6018076 - DNA, 25 bp, Homo sapien
gtgcaatcatatgccaaggatagga

SEQ ID NO: 6018077 - DNA, 25 bp, Homo sapien
tcgtaaaactaacatgggtgagaac

SEQ ID NO: 6018078 - DNA, 25 bp, Homo sapien
tgcccccttcttgctcttgtatggc

SEQ ID NO: 6018079 - DNA, 25 bp, Homo sapien
atactcttaaccgaaaacatacaat

SEQ ID NO: 6018080 - DNA, 25 bp, Homo sapien
ctggccgcccaggttttggataacg

SEQ ID NO: 6018081 - DNA, 25 bp, Homo sapien
tcacaggcaaagacacacttcatac

SEQ ID NO: 6018082 - DNA, 25 bp, Homo sapien
ccagaccctaaatgccaaaatcaag

SEQ ID NO: 6018083 - DNA, 25 bp, Homo sapien
tgctggagagcgctttccatctcca

SEQ ID NO: 6018084 - DNA, 25 bp, Homo sapien
acacgttcaggaaacgctggccgcc

SEQ ID NO: 6018085 - DNA, 25 bp, Homo sapien
gtatggcttgctgccaatgagaatt

SEQ ID NO: 6018086 - DNA, 25 bp, Homo sapien
tcaataaagataggttgctcagaat

SEQ ID NO: 6018087 - DNA, 25 bp, Homo sapien
atgttaacccactggcccattagat

SEQ ID NO: 6018088 - DNA, 25 bp, Homo sapien
ttgtcttcaaagtatttggctttag

SEQ ID NO: 6018089 - DNA, 25 bp, Homo sapien
tcttcttgaaaacagaagaaagcca

SEQ ID NO: 6018090 - DNA, 25 bp, Homo sapien
ctttccatctccagtgaaatgttaa

SEQ ID NO: 6018091 - DNA, 25 bp, Homo sapien
aaatgttgaaatctcacaggcaaag

SEQ ID NO: 6018092 - DNA, 25 bp, Homo sapien
cactcaagtcatcccattctcgtaa

SEQ ID NO: 6018093 - DNA, 25 bp, Homo sapien
gcaaagacacacttcatacccctct

SEQ ID NO: 6018094 - DNA, 25 bp, Homo sapien
tgaaatctcacaggcaaagacacac

SEQ ID NO: 6018095 - DNA, 25 bp, Homo sapien
tcacacaagagccacttttgaaact

SEQ ID NO: 6018096 - DNA, 25 bp, Homo sapien
acccactggcccattagattgtctt

SEQ ID NO: 6018097 - DNA, 25 bp, Homo sapien
actacaaagaagtggtccagcatat

SEQ ID NO: 6018098 - DNA, 25 bp, Homo sapien
agccacggaccctgctggagagcgc

SEQ ID NO: 6018099 - DNA, 25 bp, Homo sapien
tggataacggggaagactacaaaga

SEQ ID NO: 6018100 - DNA, 25 bp, Homo sapien
aacgctggccgcccaggttttggat

SEQ ID NO: 6018101 - DNA, 25 bp, Homo sapien
tggcccattagattgtcttcaaagt

SEQ ID NO: 6018102 - DNA, 25 bp, Homo sapien
aagaagtggtccagcatatggaact

SEQ ID NO: 6018103 - DNA, 25 bp, Homo sapien
acacacttcatacccctctccacac

SEQ ID NO: 6018104 - DNA, 25 bp, Homo sapien
tagtctgaataacactcaagtcatc

SEQ ID NO: 6018105 - DNA, 25 bp, Homo sapien
aaactgtaattgattcagtcacaca

SEQ ID NO: 6018106 - DNA, 25 bp, Homo sapien
tcaggaaacgctggccgcccaggtt

SEQ ID NO: 6018107 - DNA, 25 bp, Homo sapien
agtgaaatgttaacccactggccca

SEQ ID NO: 6018108 - DNA, 25 bp, Homo sapien
ttgctgccaatgagaatttagtctg

SEQ ID NO: 6018109 - DNA, 25 bp, Homo sapien
tcatatgccaaggataggaacttta

SEQ ID NO: 6018110 - DNA, 25 bp, Homo sapien
attagattgtcttcaaagtatttgg

SEQ ID NO: 6018111 - DNA, 25 bp, Homo sapien
tggaactcttcttgaaaacagaaga

SEQ ID NO: 6018112 - DNA, 25 bp, Homo sapien
cgaaaacatacaatagaaaccccag

SEQ ID NO: 6018113 - DNA, 25 bp, Homo sapien
catacccctctccacacccctgccc

SEQ ID NO: 6018114 - DNA, 25 bp, Homo sapien
tcttcactattaaatgttgaaatct

SEQ ID NO: 6018115 - DNA, 25 bp, Homo sapien
catgggtgagaacctacaacgatgt

SEQ ID NO: 6018116 - DNA, 25 bp, Homo sapien
gaagcaacacgttcaggaaacgctg

SEQ ID NO: 6018117 - DNA, 25 bp, Homo sapien
cttatagaagcaacacgttcaggaa

SEQ ID NO: 6018118 - DNA, 25 bp, Homo sapien
ggttgctcagaatcttcactattaa

SEQ ID NO: 6018119 - DNA, 25 bp, Homo sapien
gatatgtttcggataacaggaagtt

SEQ ID NO: 6018120 - DNA, 25 bp, Homo sapien
tttcggataacaggaagttatccga

SEQ ID NO: 6018121 - DNA, 25 bp, Homo sapien
ataacaggaagttatccgaagcgat

SEQ ID NO: 6018122 - DNA, 25 bp, Homo sapien
ggaagttatccgaagcgatgagagt

SEQ ID NO: 6018123 - DNA, 25 bp, Homo sapien
gtgagtgatatgtttcggataacag

SEQ ID NO: 6018124 - DNA, 25 bp, Homo sapien
ccaaagtgagtgatatgtttcggat

SEQ ID NO: 6018125 - DNA, 25 bp, Homo sapien
ttcggataacatacattatacgaag

SEQ ID NO: 6018126 - DNA, 25 bp, Homo sapien
cattatacgaagttatattaagggt

SEQ ID NO: 6018127 - DNA, 25 bp, Homo sapien
agtgatatgtttcggataacataca

SEQ ID NO: 6018128 - DNA, 25 bp, Homo sapien
taacatacattatacgaagttatat

SEQ ID NO: 6018129 - DNA, 25 bp, Homo sapien
aaagtgagtgatatgtttcggataa

SEQ ID NO: 6018130 - DNA, 25 bp, Homo sapien
tatattaagggttattgaatatgat

SEQ ID NO: 6018131 - DNA, 25 bp, Homo sapien
atgtttcggataacatacattatac

SEQ ID NO: 6018132 - DNA, 25 bp, Homo sapien
tactgtggctatttcccttatctgc

SEQ ID NO: 6018133 - DNA, 25 bp, Homo sapien
cgttcttaatatcgctgaatcttcc

SEQ ID NO: 6018134 - DNA, 25 bp, Homo sapien
aatctcgaagtatactcaaacgaat

SEQ ID NO: 6018135 - DNA, 25 bp, Homo sapien
tttattgacaatatcgaaactcagc

SEQ ID NO: 6018136 - DNA, 25 bp, Homo sapien
ttcgaactgtaattgcaaactactt

SEQ ID NO: 6018137 - DNA, 25 bp, Homo sapien
gctgttccgttatgtgtaatcatcc

SEQ ID NO: 6018138 - DNA, 25 bp, Homo sapien
ttgattgctgttccgttatgtgtaa

SEQ ID NO: 6018139 - DNA, 25 bp, Homo sapien
tatcagtgatatcagattgatgttt

SEQ ID NO: 6018140 - DNA, 25 bp, Homo sapien
cgtcttgtatttaaactggagtgat

SEQ ID NO: 6018141 - DNA, 25 bp, Homo sapien
acactggattattactcccagatac

SEQ ID NO: 6018142 - DNA, 25 bp, Homo sapien
aagtgctttaagcatttttttactg

SEQ ID NO: 6018143 - DNA, 25 bp, Homo sapien
cttattttggactaatttaaatgat

SEQ ID NO: 6018144 - DNA, 25 bp, Homo sapien
tgctttcaccctcacttagaagtgc

SEQ ID NO: 6018145 - DNA, 25 bp, Homo sapien
tgatgaaagtagctaggaagaggaa

SEQ ID NO: 6018146 - DNA, 25 bp, Homo sapien
agtatatgtgcctactaacgcttgt

SEQ ID NO: 6018147 - DNA, 25 bp, Homo sapien
caccctcacttagaagtgctttaag

SEQ ID NO: 6018148 - DNA, 25 bp, Homo sapien
aatttagtattttctcagtgatctc

SEQ ID NO: 6018149 - DNA, 25 bp, Homo sapien
gtatttaaactggagtgatttattg

SEQ ID NO: 6018150 - DNA, 25 bp, Homo sapien
acaatatcgaaactcagcgaattgc

SEQ ID NO: 6018151 - DNA, 25 bp, Homo sapien
gcttgtctttgtctctgtcactaaa

SEQ ID NO: 6018152 - DNA, 25 bp, Homo sapien
ctaatttaaatgatttcggatcaac

SEQ ID NO: 6018153 - DNA, 25 bp, Homo sapien
ccgttatgtgtaatcatccaacata

SEQ ID NO: 6018154 - DNA, 25 bp, Homo sapien
cacttagaagtgctttaagcatttt

SEQ ID NO: 6018155 - DNA, 25 bp, Homo sapien
ctttgtctctgtcactaaacactgg

SEQ ID NO: 6018156 - DNA, 25 bp, Homo sapien
cgatgattcgaactgtaattgcaaa

SEQ ID NO: 6018157 - DNA, 25 bp, Homo sapien
gcatttttttactgtggctatttcc

SEQ ID NO: 6018158 - DNA, 25 bp, Homo sapien
cccaagcaggaatcaatttctttaa

SEQ ID NO: 6018159 - DNA, 25 bp, Homo sapien
caggaatcaatttctttaatgaggc

SEQ ID NO: 6018160 - DNA, 25 bp, Homo sapien
atcttccacaattgatgaaagtagc

SEQ ID NO: 6018161 - DNA, 25 bp, Homo sapien
tttgtccatagtaaggaataattgt

SEQ ID NO: 6018162 - DNA, 25 bp, Homo sapien
tcgaaactcagcgaattgcttatga

SEQ ID NO: 6018163 - DNA, 25 bp, Homo sapien
taccccttgcgctaaagaagtatat

SEQ ID NO: 6018164 - DNA, 25 bp, Homo sapien
ttatgatagtattatagctcatgaa

SEQ ID NO: 6018165 - DNA, 25 bp, Homo sapien
gtattttctcagtgatctcccagat

SEQ ID NO: 6018166 - DNA, 25 bp, Homo sapien
tctcagtgatctcccagatgctttc

SEQ ID NO: 6018167 - DNA, 25 bp, Homo sapien
ttgcaaactacttacaatatcagtg

SEQ ID NO: 6018168 - DNA, 25 bp, Homo sapien
gaattgcttatgatagtattatagc

SEQ ID NO: 6018169 - DNA, 25 bp, Homo sapien
ttacaatatcagtgatatcagattg

SEQ ID NO: 6018170 - DNA, 25 bp, Homo sapien
tttgtaaatctcgaagtatactcaa

SEQ ID NO: 6018171 - DNA, 25 bp, Homo sapien
ctcagcgaattgcttatgatagtat

SEQ ID NO: 6018172 - DNA, 25 bp, Homo sapien
taaagaagtatatgtgcctactaac

SEQ ID NO: 6018173 - DNA, 25 bp, Homo sapien
atttcggatcaacgttcttaatatc

SEQ ID NO: 6018174 - DNA, 25 bp, Homo sapien
taaattcccaagcaggaatcaattt

SEQ ID NO: 6018175 - DNA, 25 bp, Homo sapien
tcaatttctttaatgaggcttccag

SEQ ID NO: 6018176 - DNA, 25 bp, Homo sapien
tagtattatagctcatgaatgtggc

SEQ ID NO: 6018177 - DNA, 25 bp, Homo sapien
aatgtggctctcttgattgctgttc

SEQ ID NO: 6018178 - DNA, 25 bp, Homo sapien
tgatatcagattgatgtttttgtcc

SEQ ID NO: 6018179 - DNA, 25 bp, Homo sapien
taaatgatttcggatcaacgttctt

SEQ ID NO: 6018180 - DNA, 25 bp, Homo sapien
tactcccagatacttattttggact

SEQ ID NO: 6018181 - DNA, 25 bp, Homo sapien
ttcccttatctgcttcttccgatga

SEQ ID NO: 6018182 - DNA, 25 bp, Homo sapien
gatcaacgttcttaatatcgctgaa

SEQ ID NO: 6018183 - DNA, 25 bp, Homo sapien
gcttccagaattgttgctttttgcg

SEQ ID NO: 6018184 - DNA, 25 bp, Homo sapien
ttgcgctaaagaagtatatgtgcct

SEQ ID NO: 6018185 - DNA, 25 bp, Homo sapien
aggaataattgtaaattcccaagca

SEQ ID NO: 6018186 - DNA, 25 bp, Homo sapien
ctgtaattgcaaactacttacaata

SEQ ID NO: 6018187 - DNA, 25 bp, Homo sapien
aaactggagtgatttattgacaata

SEQ ID NO: 6018188 - DNA, 25 bp, Homo sapien
ctttaagcatttttttactgtggct

SEQ ID NO: 6018189 - DNA, 25 bp, Homo sapien
tgtgcctactaacgcttgtctttgt

SEQ ID NO: 6018190 - DNA, 25 bp, Homo sapien
ctctgtcactaaacactggattatt

SEQ ID NO: 6018191 - DNA, 25 bp, Homo sapien
tctttaatgaggcttccagaattgt

SEQ ID NO: 6018192 - DNA, 25 bp, Homo sapien
gttgctttttgcgtcttgtatttaa

SEQ ID NO: 6018193 - DNA, 25 bp, Homo sapien
gctctcttgattgctgttccgttat

SEQ ID NO: 6018194 - DNA, 25 bp, Homo sapien
ttgtttttgtaaatctcgaagtata

SEQ ID NO: 6018195 - DNA, 25 bp, Homo sapien
catagtaaggaataattgtaaattc

SEQ ID NO: 6018196 - DNA, 25 bp, Homo sapien
gatgtttttgtccatagtaaggaat

SEQ ID NO: 6018197 - DNA, 25 bp, Homo sapien
tatagctcatgaatgtggctctctt

SEQ ID NO: 6018198 - DNA, 25 bp, Homo sapien
cagattgatgtttttgtccatagta

SEQ ID NO: 6018199 - DNA, 25 bp, Homo sapien
cgctgaatcttccacaattgatgaa

SEQ ID NO: 6018200 - DNA, 25 bp, Homo sapien
ccagatgctttcaccctcacttaga

SEQ ID NO: 6018201 - DNA, 25 bp, Homo sapien
aagtagctaggaagaggaattggta

SEQ ID NO: 6018202 - DNA, 25 bp, Homo sapien
actaacgcttgtctttgtctctgtc

SEQ ID NO: 6018203 - DNA, 25 bp, Homo sapien
taattgtaaattcccaagcaggaat

SEQ ID NO: 6018204 - DNA, 25 bp, Homo sapien
ctaggaagaggaattggtataaagt

SEQ ID NO: 6018205 - DNA, 25 bp, Homo sapien
cacaattgatgaaagtagctaggaa

SEQ ID NO: 6018206 - DNA, 25 bp, Homo sapien
aactacttacaatatcagtgatatc

SEQ ID NO: 6018207 - DNA, 25 bp, Homo sapien
ttttgcgtcttgtatttaaactgga

SEQ ID NO: 6018208 - DNA, 25 bp, Homo sapien
tatctgcttcttccgatgattcgaa

SEQ ID NO: 6018209 - DNA, 25 bp, Homo sapien
cactaaacactggattattactccc

SEQ ID NO: 6018210 - DNA, 25 bp, Homo sapien
taatatcgctgaatcttccacaatt

SEQ ID NO: 6018211 - DNA, 25 bp, Homo sapien
ttggactaatttaaatgatttcgga

SEQ ID NO: 6018212 - DNA, 25 bp, Homo sapien
cgatcctaccccttgcgctaaagaa

SEQ ID NO: 6018213 - DNA, 25 bp, Homo sapien
gattattactcccagatacttattt

SEQ ID NO: 6018214 - DNA, 25 bp, Homo sapien
caaacgaatttagtattttctcagt

SEQ ID NO: 6018215 - DNA, 25 bp, Homo sapien
tcatgaatgtggctctcttgattgc

SEQ ID NO: 6018216 - DNA, 25 bp, Homo sapien
gaagtatactcaaacgaatttagta

SEQ ID NO: 6018217 - DNA, 25 bp, Homo sapien
gatctcccagatgctttcaccctca

SEQ ID NO: 6018218 - DNA, 25 bp, Homo sapien
aatgaggcttccagaattgttgctt

SEQ ID NO: 6018219 - DNA, 25 bp, Homo sapien
ttcttccgatgattcgaactgtaat

SEQ ID NO: 6018220 - DNA, 25 bp, Homo sapien
ggctatttcccttatctgcttcttc

SEQ ID NO: 6018221 - DNA, 25 bp, Homo sapien
gagtgatttattgacaatatcgaaa

SEQ ID NO: 6018222 - DNA, 25 bp, Homo sapien
cagatacttattttggactaattta

SEQ ID NO: 6018223 - DNA, 25 bp, Homo sapien
agaattgttgctttttgcgtcttgt

SEQ ID NO: 6018224 - DNA, 25 bp, Homo sapien
ggagaagtttgggccagatgcccaa

SEQ ID NO: 6018225 - DNA, 25 bp, Homo sapien
ttactgtcaagtagacccatacggc

SEQ ID NO: 6018226 - DNA, 25 bp, Homo sapien
gcatcttgttccgttaaactattga

SEQ ID NO: 6018227 - DNA, 25 bp, Homo sapien
tgacctttatcctgttctctttcca

SEQ ID NO: 6018228 - DNA, 25 bp, Homo sapien
cgtgagaatgaatttagtattattg

SEQ ID NO: 6018229 - DNA, 25 bp, Homo sapien
tccttcatccgcctccgcatcttgt

SEQ ID NO: 6018230 - DNA, 25 bp, Homo sapien
cacttttgaactttgtacgacgaat

SEQ ID NO: 6018231 - DNA, 25 bp, Homo sapien
catgttgtacattgtttagttcacg

SEQ ID NO: 6018232 - DNA, 25 bp, Homo sapien
ttcaccccacaatccttcatccgcc

SEQ ID NO: 6018233 - DNA, 25 bp, Homo sapien
gctgtaatatgctgctcttcataat

SEQ ID NO: 6018234 - DNA, 25 bp, Homo sapien
cctctacatcaacaggcttccaatg

SEQ ID NO: 6018235 - DNA, 25 bp, Homo sapien
atgaattatggagcacctaataaca

SEQ ID NO: 6018236 - DNA, 25 bp, Homo sapien
tcggctattatctccgcctcagttt

SEQ ID NO: 6018237 - DNA, 25 bp, Homo sapien
gttcctttagtatatgatacaagac

SEQ ID NO: 6018238 - DNA, 25 bp, Homo sapien
tcttcaggcggtagctcctgatctc

SEQ ID NO: 6018239 - DNA, 25 bp, Homo sapien
ttccctgagattgaattagttcctt

SEQ ID NO: 6018240 - DNA, 25 bp, Homo sapien
tgcccaatatgcttgacatgaaaac

SEQ ID NO: 6018241 - DNA, 25 bp, Homo sapien
tcataatgtaagcttatctttatcg

SEQ ID NO: 6018242 - DNA, 25 bp, Homo sapien
tgaaaacgtgagaatgaatttagta

SEQ ID NO: 6018243 - DNA, 25 bp, Homo sapien
ttcttcaaggcggagaagtttgggc

SEQ ID NO: 6018244 - DNA, 25 bp, Homo sapien
ttacggttccctgagattgaattag

SEQ ID NO: 6018245 - DNA, 25 bp, Homo sapien
gccatcctctggctatttccaatta

SEQ ID NO: 6018246 - DNA, 25 bp, Homo sapien
gtttgggccagatgcccaatatgct

SEQ ID NO: 6018247 - DNA, 25 bp, Homo sapien
attatctccgcctcagtttgatctt

SEQ ID NO: 6018248 - DNA, 25 bp, Homo sapien
gctcttcaaattttactgtcaagta

SEQ ID NO: 6018249 - DNA, 25 bp, Homo sapien
gaatcgtgtgaaaaactactaccgc

SEQ ID NO: 6018250 - DNA, 25 bp, Homo sapien
ttatcctgttctctttccacaaact

SEQ ID NO: 6018251 - DNA, 25 bp, Homo sapien
cttatctttatcgaatcgtgtgaaa

SEQ ID NO: 6018252 - DNA, 25 bp, Homo sapien
tccgcctcagtttgatcttccgctt

SEQ ID NO: 6018253 - DNA, 25 bp, Homo sapien
agaaatgtattcatgaattatggag

SEQ ID NO: 6018254 - DNA, 25 bp, Homo sapien
ccgttaaactattgacttcatgttg

SEQ ID NO: 6018255 - DNA, 25 bp, Homo sapien
tgctcttcataatgtaagcttatct

SEQ ID NO: 6018256 - DNA, 25 bp, Homo sapien
aataacattcttcaaggcggagaag

SEQ ID NO: 6018257 - DNA, 25 bp, Homo sapien
tgttctctttccacaaacttagaaa

SEQ ID NO: 6018258 - DNA, 25 bp, Homo sapien
tcaagtagacccatacggctgtaat

SEQ ID NO: 6018259 - DNA, 25 bp, Homo sapien
caggcttccaatgctcttcaaattt

SEQ ID NO: 6018260 - DNA, 25 bp, Homo sapien
ccaattatcctgtcggctattatct

SEQ ID NO: 6018261 - DNA, 25 bp, Homo sapien
cgagaagggtcctcttcaggcggta

SEQ ID NO: 6018262 - DNA, 25 bp, Homo sapien
tgtaagcttatctttatcgaatcgt

SEQ ID NO: 6018263 - DNA, 25 bp, Homo sapien
tccaatgctcttcaaattttactgt

SEQ ID NO: 6018264 - DNA, 25 bp, Homo sapien
aactattgacttcatgttgtacatt

SEQ ID NO: 6018265 - DNA, 25 bp, Homo sapien
tgatcttccgcttcagactgccatt

SEQ ID NO: 6018266 - DNA, 25 bp, Homo sapien
tatggagcacctaataacattcttc

SEQ ID NO: 6018267 - DNA, 25 bp, Homo sapien
tttatcgaatcgtgtgaaaaactac

SEQ ID NO: 6018268 - DNA, 25 bp, Homo sapien
gaattagttcctttagtatatgata

SEQ ID NO: 6018269 - DNA, 25 bp, Homo sapien
ttgtacgacgaattttgaggttcgc

SEQ ID NO: 6018270 - DNA, 25 bp, Homo sapien
tgtttagttcacgagaagggtcctc

SEQ ID NO: 6018271 - DNA, 25 bp, Homo sapien
agctcctgatctcctatatgacctt

SEQ ID NO: 6018272 - DNA, 25 bp, Homo sapien
acgacgaattttgaggttcgccatc

SEQ ID NO: 6018273 - DNA, 25 bp, Homo sapien
agacccatacggctgtaatatgctg

SEQ ID NO: 6018274 - DNA, 25 bp, Homo sapien
atatgctgctcttcataatgtaagc

SEQ ID NO: 6018275 - DNA, 25 bp, Homo sapien
gtattcatgaattatggagcaccta

SEQ ID NO: 6018276 - DNA, 25 bp, Homo sapien
gtacattgtttagttcacgagaagg

SEQ ID NO: 6018277 - DNA, 25 bp, Homo sapien
tgtgaaaaactactaccgcgataaa

SEQ ID NO: 6018278 - DNA, 25 bp, Homo sapien
gagattgaattagttcctttagtat

SEQ ID NO: 6018279 - DNA, 25 bp, Homo sapien
tgatctcctatatgacctttatcct

SEQ ID NO: 6018280 - DNA, 25 bp, Homo sapien
caaacttagaaatgtattcatgaat

SEQ ID NO: 6018281 - DNA, 25 bp, Homo sapien
ttgttccgttaaactattgacttca

SEQ ID NO: 6018282 - DNA, 25 bp, Homo sapien
gcacctaataacattcttcaaggcg

SEQ ID NO: 6018283 - DNA, 25 bp, Homo sapien
tatgatacaagacacttttgaactt

SEQ ID NO: 6018284 - DNA, 25 bp, Homo sapien
aattttgaggttcgccatcctctgg

SEQ ID NO: 6018285 - DNA, 25 bp, Homo sapien
ttgacatgaaaacgtgagaatgaat

SEQ ID NO: 6018286 - DNA, 25 bp, Homo sapien
tcagtttgatcttccgcttcagact

SEQ ID NO: 6018287 - DNA, 25 bp, Homo sapien
caaattttactgtcaagtagaccca

SEQ ID NO: 6018288 - DNA, 25 bp, Homo sapien
cataatgaatctatttcaccccaca

SEQ ID NO: 6018289 - DNA, 25 bp, Homo sapien
ggcggtagctcctgatctcctatat

SEQ ID NO: 6018290 - DNA, 25 bp, Homo sapien
caaggcggagaagtttgggccagat

SEQ ID NO: 6018291 - DNA, 25 bp, Homo sapien
atatgcttgacatgaaaacgtgaga

SEQ ID NO: 6018292 - DNA, 25 bp, Homo sapien
gccagatgcccaatatgcttgacat

SEQ ID NO: 6018293 - DNA, 25 bp, Homo sapien
tgccatttttcacataatgaatcta

SEQ ID NO: 6018294 - DNA, 25 bp, Homo sapien
agttcacgagaagggtcctcttcag

SEQ ID NO: 6018295 - DNA, 25 bp, Homo sapien
tgaactttgtacgacgaattttgag

SEQ ID NO: 6018296 - DNA, 25 bp, Homo sapien
tccgcttcagactgccatttttcac

SEQ ID NO: 6018297 - DNA, 25 bp, Homo sapien
actcgacctctacatcaacaggctt

SEQ ID NO: 6018298 - DNA, 25 bp, Homo sapien
catccgcctccgcatcttgttccgt

SEQ ID NO: 6018299 - DNA, 25 bp, Homo sapien
ctctggctatttccaattatcctgt

SEQ ID NO: 6018300 - DNA, 25 bp, Homo sapien
ccacaatccttcatccgcctccgca

SEQ ID NO: 6018301 - DNA, 25 bp, Homo sapien
atcctgtcggctattatctccgcct

SEQ ID NO: 6018302 - DNA, 25 bp, Homo sapien
gggtcctcttcaggcggtagctcct

SEQ ID NO: 6018303 - DNA, 25 bp, Homo sapien
catcaacaggcttccaatgctcttc

SEQ ID NO: 6018304 - DNA, 25 bp, Homo sapien
gaatctatttcaccccacaatcctt

SEQ ID NO: 6018305 - DNA, 25 bp, Homo sapien
tttccacaaacttagaaatgtattc

SEQ ID NO: 6018306 - DNA, 25 bp, Homo sapien
gcctccgcatcttgttccgttaaac

SEQ ID NO: 6018307 - DNA, 25 bp, Homo sapien
ctatttccaattatcctgtcggcta

SEQ ID NO: 6018308 - DNA, 25 bp, Homo sapien
catacggctgtaatatgctgctctt

SEQ ID NO: 6018309 - DNA, 25 bp, Homo sapien
cctatatgacctttatcctgttctc

SEQ ID NO: 6018310 - DNA, 25 bp, Homo sapien
ttagtatatgatacaagacactttt

SEQ ID NO: 6018311 - DNA, 25 bp, Homo sapien
atctaaactcgacctctacatcaac

SEQ ID NO: 6018312 - DNA, 25 bp, Homo sapien
ttttcacataatgaatctatttcac

SEQ ID NO: 6018313 - DNA, 25 bp, Homo sapien
acaagacacttttgaactttgtacg

SEQ ID NO: 6018314 - DNA, 25 bp, Homo sapien
aggttcgccatcctctggctatttc

SEQ ID NO: 6018315 - DNA, 25 bp, Homo sapien
tcagactgccatttttcacataatg

SEQ ID NO: 6018316 - DNA, 25 bp, Homo sapien
tgacttcatgttgtacattgtttag

SEQ ID NO: 6018317 - DNA, 25 bp, Homo sapien
gaaaactcccaggttcggatgttca

SEQ ID NO: 6018318 - DNA, 25 bp, Homo sapien
ctcccaggttcggatgttcaaaatt

SEQ ID NO: 6018319 - DNA, 25 bp, Homo sapien
tcaatgatgggtaacaagtacgatc

SEQ ID NO: 6018320 - DNA, 25 bp, Homo sapien
gacggagtatactagtatagtctat

SEQ ID NO: 6018321 - DNA, 25 bp, Homo sapien
tctttctcggtctagctagttttac

SEQ ID NO: 6018322 - DNA, 25 bp, Homo sapien
cgtggaattctaagtgccagcttta

SEQ ID NO: 6018323 - DNA, 25 bp, Homo sapien
gttttactacatcgcgaagatagaa

SEQ ID NO: 6018324 - DNA, 25 bp, Homo sapien
gtagacacatcatcatcagtaagct

SEQ ID NO: 6018325 - DNA, 25 bp, Homo sapien
cgttaaaggacaaggacctgagcgg

SEQ ID NO: 6018326 - DNA, 25 bp, Homo sapien
tccttactacagacccgcctgaaag

SEQ ID NO: 6018327 - DNA, 25 bp, Homo sapien
agcgtcacatcggataataatgatg

SEQ ID NO: 6018328 - DNA, 25 bp, Homo sapien
atagtccgtggaattctaagtgcca

SEQ ID NO: 6018329 - DNA, 25 bp, Homo sapien
ccttttgcatttctagtctctttct

SEQ ID NO: 6018330 - DNA, 25 bp, Homo sapien
ggcagccattgtagaagtgcctttt

SEQ ID NO: 6018331 - DNA, 25 bp, Homo sapien
agctgcagcgtcacatcggataata

SEQ ID NO: 6018332 - DNA, 25 bp, Homo sapien
tgtatctcctcaaagcgtattcgaa

SEQ ID NO: 6018333 - DNA, 25 bp, Homo sapien
gtagctaactcttctatgcaatcta

SEQ ID NO: 6018334 - DNA, 25 bp, Homo sapien
acatcggataataatgatggcagcc

SEQ ID NO: 6018335 - DNA, 25 bp, Homo sapien
agtgccagctttataatgtcattct

SEQ ID NO: 6018336 - DNA, 25 bp, Homo sapien
aacaagtacgatcgtaaatctgtaa

SEQ ID NO: 6018337 - DNA, 25 bp, Homo sapien
tagtatagtctatagtccgtggaat

SEQ ID NO: 6018338 - DNA, 25 bp, Homo sapien
acagtagacggagtatactagtata

SEQ ID NO: 6018339 - DNA, 25 bp, Homo sapien
atcttagatcacactgcctttgctg

SEQ ID NO: 6018340 - DNA, 25 bp, Homo sapien
gagctggatcaatagagtaacaaaa

SEQ ID NO: 6018341 - DNA, 25 bp, Homo sapien
tagagtaacaaaagagtggtaaggc

SEQ ID NO: 6018342 - DNA, 25 bp, Homo sapien
gtttgtcggatattaggctgtatct

SEQ ID NO: 6018343 - DNA, 25 bp, Homo sapien
cattgtagaagtgccttttgcattt

SEQ ID NO: 6018344 - DNA, 25 bp, Homo sapien
agtctatagtccgtggaattctaag

SEQ ID NO: 6018345 - DNA, 25 bp, Homo sapien
tgagcggaagtgtatcgtacagtag

SEQ ID NO: 6018346 - DNA, 25 bp, Homo sapien
tttgacaaaaagcattgagtagcta

SEQ ID NO: 6018347 - DNA, 25 bp, Homo sapien
gatagaatcttagatcacactgcct

SEQ ID NO: 6018348 - DNA, 25 bp, Homo sapien
tcggtctagctagttttactacatc

SEQ ID NO: 6018349 - DNA, 25 bp, Homo sapien
tatcgtacagtagacggagtatact

SEQ ID NO: 6018350 - DNA, 25 bp, Homo sapien
cgtaaatctgtaaaacagtttgtcg

SEQ ID NO: 6018351 - DNA, 25 bp, Homo sapien
tctgtaaaacagtttgtcggatatt

SEQ ID NO: 6018352 - DNA, 25 bp, Homo sapien
gcctcgttaaaggacaaggacctga

SEQ ID NO: 6018353 - DNA, 25 bp, Homo sapien
tcattctccttactacagacccgcc

SEQ ID NO: 6018354 - DNA, 25 bp, Homo sapien
aaaacagtttgtcggatattaggct

SEQ ID NO: 6018355 - DNA, 25 bp, Homo sapien
cgcgaagatagaatcttagatcaca

SEQ ID NO: 6018356 - DNA, 25 bp, Homo sapien
atgggtaacaagtacgatcgtaaat

SEQ ID NO: 6018357 - DNA, 25 bp, Homo sapien
gataataatgatggcagccattgta

SEQ ID NO: 6018358 - DNA, 25 bp, Homo sapien
aatgatggcagccattgtagaagtg

SEQ ID NO: 6018359 - DNA, 25 bp, Homo sapien
ttgagaagctgcagcgtcacatcgg

SEQ ID NO: 6018360 - DNA, 25 bp, Homo sapien
gaagtgccttttgcatttctagtct

SEQ ID NO: 6018361 - DNA, 25 bp, Homo sapien
caatctatagctgttttataaggca

SEQ ID NO: 6018362 - DNA, 25 bp, Homo sapien
gacccgcctgaaagtagacacatca

SEQ ID NO: 6018363 - DNA, 25 bp, Homo sapien
cggatattaggctgtatctcctcaa

SEQ ID NO: 6018364 - DNA, 25 bp, Homo sapien
ctacatcgcgaagatagaatcttag

SEQ ID NO: 6018365 - DNA, 25 bp, Homo sapien
attctaagtgccagctttataatgt

SEQ ID NO: 6018366 - DNA, 25 bp, Homo sapien
attcgaatatcattgagaagctgca

SEQ ID NO: 6018367 - DNA, 25 bp, Homo sapien
aactcttctatgcaatctatagctg

SEQ ID NO: 6018368 - DNA, 25 bp, Homo sapien
gaagtgtatcgtacagtagacggag

SEQ ID NO: 6018369 - DNA, 25 bp, Homo sapien
gcatttctagtctctttctcggtct

SEQ ID NO: 6018370 - DNA, 25 bp, Homo sapien
acatcatcatcagtaagctttgaca

SEQ ID NO: 6018371 - DNA, 25 bp, Homo sapien
aggacctgagcggaagtgtatcgta

SEQ ID NO: 6018372 - DNA, 25 bp, Homo sapien
tttgctgagctggatcaatagagta

SEQ ID NO: 6018373 - DNA, 25 bp, Homo sapien
gtatactagtatagtctatagtccg

SEQ ID NO: 6018374 - DNA, 25 bp, Homo sapien
atatcattgagaagctgcagcgtca

SEQ ID NO: 6018375 - DNA, 25 bp, Homo sapien
caaaattcaatgatgggtaacaagt

SEQ ID NO: 6018376 - DNA, 25 bp, Homo sapien
ggttcggatgttcaaaattcaatga

SEQ ID NO: 6018377 - DNA, 25 bp, Homo sapien
tctatgcaatctatagctgttttat

SEQ ID NO: 6018378 - DNA, 25 bp, Homo sapien
ctacagacccgcctgaaagtagaca

SEQ ID NO: 6018379 - DNA, 25 bp, Homo sapien
ctgaaagtagacacatcatcatcag

SEQ ID NO: 6018380 - DNA, 25 bp, Homo sapien
gatcaatagagtaacaaaagagtgg

SEQ ID NO: 6018381 - DNA, 25 bp, Homo sapien
aaaaagcattgagtagctaactctt

SEQ ID NO: 6018382 - DNA, 25 bp, Homo sapien
gatgttcaaaattcaatgatgggta

SEQ ID NO: 6018383 - DNA, 25 bp, Homo sapien
ttaggctgtatctcctcaaagcgta

SEQ ID NO: 6018384 - DNA, 25 bp, Homo sapien
tacgatcgtaaatctgtaaaacagt

SEQ ID NO: 6018385 - DNA, 25 bp, Homo sapien
agctttataatgtcattctccttac

SEQ ID NO: 6018386 - DNA, 25 bp, Homo sapien
cattgagtagctaactcttctatgc

SEQ ID NO: 6018387 - DNA, 25 bp, Homo sapien
actgcctttgctgagctggatcaat

SEQ ID NO: 6018388 - DNA, 25 bp, Homo sapien
ataatgtcattctccttactacaga

SEQ ID NO: 6018389 - DNA, 25 bp, Homo sapien
gatcacactgcctttgctgagctgg

SEQ ID NO: 6018390 - DNA, 25 bp, Homo sapien
tcatcagtaagctttgacaaaaagc

SEQ ID NO: 6018391 - DNA, 25 bp, Homo sapien
tagctagttttactacatcgcgaag

SEQ ID NO: 6018392 - DNA, 25 bp, Homo sapien
gtaagctttgacaaaaagcattgag

SEQ ID NO: 6018393 - DNA, 25 bp, Homo sapien
ctagtctctttctcggtctagctag

SEQ ID NO: 6018394 - DNA, 25 bp, Homo sapien
aggacaaggacctgagcggaagtgt

SEQ ID NO: 6018395 - DNA, 25 bp, Homo sapien
tcctcaaagcgtattcgaatatcat

SEQ ID NO: 6018396 - DNA, 25 bp, Homo sapien
aagcgtattcgaatatcattgagaa

SEQ ID NO: 6018397 - DNA, 25 bp, Homo sapien
tcttgtctttctcgggcaatcttcc

SEQ ID NO: 6018398 - DNA, 25 bp, Homo sapien
ggaacttcttcatttgtattagcat

SEQ ID NO: 6018399 - DNA, 25 bp, Homo sapien
ttgtgtctctacttcttgttcgcct

SEQ ID NO: 6018400 - DNA, 25 bp, Homo sapien
gagcataccatttccaatcgaatca

SEQ ID NO: 6018401 - DNA, 25 bp, Homo sapien
tttgtattagcatggttcacttcag

SEQ ID NO: 6018402 - DNA, 25 bp, Homo sapien
agtccttccttccaactcactcttt

SEQ ID NO: 6018403 - DNA, 25 bp, Homo sapien
ctattattatagcaatagatttgta

SEQ ID NO: 6018404 - DNA, 25 bp, Homo sapien
ctctacttcttgttcgcctggaggg

SEQ ID NO: 6018405 - DNA, 25 bp, Homo sapien
cttgttattctgtagcatcaaatct

SEQ ID NO: 6018406 - DNA, 25 bp, Homo sapien
cacttcagtccttccttccaactca

SEQ ID NO: 6018407 - DNA, 25 bp, Homo sapien
taacagcttgttattctgtagcatc

SEQ ID NO: 6018408 - DNA, 25 bp, Homo sapien
ttcttgtgaagagagcataccattt

SEQ ID NO: 6018409 - DNA, 25 bp, Homo sapien
aatagatttgtatagttgctttcta

SEQ ID NO: 6018410 - DNA, 25 bp, Homo sapien
gttcattgaaactattgaatatatc

SEQ ID NO: 6018411 - DNA, 25 bp, Homo sapien
ccgccagttcattgaaactattgaa

SEQ ID NO: 6018412 - DNA, 25 bp, Homo sapien
atatatcctttagagattccgggat

SEQ ID NO: 6018413 - DNA, 25 bp, Homo sapien
aacgacgcttacgagcttcataaca

SEQ ID NO: 6018414 - DNA, 25 bp, Homo sapien
ttgtatagttgctttctattgtcta

SEQ ID NO: 6018415 - DNA, 25 bp, Homo sapien
gattccgggatgaataaatcaccta

SEQ ID NO: 6018416 - DNA, 25 bp, Homo sapien
ttcgcctggagggaacttcttcatt

SEQ ID NO: 6018417 - DNA, 25 bp, Homo sapien
acttgcttcttgtgaagagagcata

SEQ ID NO: 6018418 - DNA, 25 bp, Homo sapien
ttgcatttgtgtctctacttcttgt

SEQ ID NO: 6018419 - DNA, 25 bp, Homo sapien
ttccgttggagctggtgggactaat

SEQ ID NO: 6018420 - DNA, 25 bp, Homo sapien
accatttccaatcgaatcaaacctt

SEQ ID NO: 6018421 - DNA, 25 bp, Homo sapien
gtgtacaatccatttttctcatgag

SEQ ID NO: 6018422 - DNA, 25 bp, Homo sapien
attctgtagcatcaaatctatggca

SEQ ID NO: 6018423 - DNA, 25 bp, Homo sapien
attagcatggttcacttcagtcctt

SEQ ID NO: 6018424 - DNA, 25 bp, Homo sapien
ctcctcttgcatttgtgtctctact

SEQ ID NO: 6018425 - DNA, 25 bp, Homo sapien
ccaactcactctttttttgctgtaa

SEQ ID NO: 6018426 - DNA, 25 bp, Homo sapien
cataacatcttcttccgttggagct

SEQ ID NO: 6018427 - DNA, 25 bp, Homo sapien
tgggtaacgacgcttacgagcttca

SEQ ID NO: 6018428 - DNA, 25 bp, Homo sapien
caaatctatggcagcctgacttgct

SEQ ID NO: 6018429 - DNA, 25 bp, Homo sapien
ttttttgctgtaaacgattctctgc

SEQ ID NO: 6018430 - DNA, 25 bp, Homo sapien
tgatggtgttttgtaatttatatgc

SEQ ID NO: 6018431 - DNA, 25 bp, Homo sapien
ctcgttgctactctcctttttttcg

SEQ ID NO: 6018432 - DNA, 25 bp, Homo sapien
tggaactaaagtaagcaattgggta

SEQ ID NO: 6018433 - DNA, 25 bp, Homo sapien
agcagcttgacgatctggtggaact

SEQ ID NO: 6018434 - DNA, 25 bp, Homo sapien
tggagctggtgggactaataactgt

SEQ ID NO: 6018435 - DNA, 25 bp, Homo sapien
gcatttcggtagctctcttcttgtc

SEQ ID NO: 6018436 - DNA, 25 bp, Homo sapien
ctttctattgtctaacagcttgtta

SEQ ID NO: 6018437 - DNA, 25 bp, Homo sapien
tgttttgtaatttatatgctcctct

SEQ ID NO: 6018438 - DNA, 25 bp, Homo sapien
tatatgctcctcttgcatttgtgtc

SEQ ID NO: 6018439 - DNA, 25 bp, Homo sapien
atggttcacttcagtccttccttcc

SEQ ID NO: 6018440 - DNA, 25 bp, Homo sapien
cgctttagggccctcagtgatggtg

SEQ ID NO: 6018441 - DNA, 25 bp, Homo sapien
gtaatttatatgctcctcttgcatt

SEQ ID NO: 6018442 - DNA, 25 bp, Homo sapien
atctggtggaactaaagtaagcaat

SEQ ID NO: 6018443 - DNA, 25 bp, Homo sapien
aaacgattctctgccgccagttcat

SEQ ID NO: 6018444 - DNA, 25 bp, Homo sapien
ggactaataactgtgtacaatccat

SEQ ID NO: 6018445 - DNA, 25 bp, Homo sapien
tccttccaactcactctttttttgc

SEQ ID NO: 6018446 - DNA, 25 bp, Homo sapien
aacctttccttaaccatcttcgcag

SEQ ID NO: 6018447 - DNA, 25 bp, Homo sapien
tttttctcatgagcatttcggtagc

SEQ ID NO: 6018448 - DNA, 25 bp, Homo sapien
ctttctcgggcaatcttcctattat

SEQ ID NO: 6018449 - DNA, 25 bp, Homo sapien
tgctgtaaacgattctctgccgcca

SEQ ID NO: 6018450 - DNA, 25 bp, Homo sapien
tgaagagagcataccatttccaatc

SEQ ID NO: 6018451 - DNA, 25 bp, Homo sapien
ttcttgttcgcctggagggaacttc

SEQ ID NO: 6018452 - DNA, 25 bp, Homo sapien
tctctgccgccagttcattgaaact

SEQ ID NO: 6018453 - DNA, 25 bp, Homo sapien
cctttagagattccgggatgaataa

SEQ ID NO: 6018454 - DNA, 25 bp, Homo sapien
cactctttttttgctgtaaacgatt

SEQ ID NO: 6018455 - DNA, 25 bp, Homo sapien
aagtaagcaattgggtaacgacgct

SEQ ID NO: 6018456 - DNA, 25 bp, Homo sapien
tatggcagcctgacttgcttcttgt

SEQ ID NO: 6018457 - DNA, 25 bp, Homo sapien
cctcagtgatggtgttttgtaattt

SEQ ID NO: 6018458 - DNA, 25 bp, Homo sapien
tattgaatatatcctttagagattc

SEQ ID NO: 6018459 - DNA, 25 bp, Homo sapien
tcacctattaaagcagcttgacgat

SEQ ID NO: 6018460 - DNA, 25 bp, Homo sapien
ctggtgggactaataactgtgtaca

SEQ ID NO: 6018461 - DNA, 25 bp, Homo sapien
ggaaccgctttagggccctcagtga

SEQ ID NO: 6018462 - DNA, 25 bp, Homo sapien
tcttcatttgtattagcatggttca

SEQ ID NO: 6018463 - DNA, 25 bp, Homo sapien
tagcatcaaatctatggcagcctga

SEQ ID NO: 6018464 - DNA, 25 bp, Homo sapien
tccaatcgaatcaaacctttcctta

SEQ ID NO: 6018465 - DNA, 25 bp, Homo sapien
cttaccctcgttgctactctccttt

SEQ ID NO: 6018466 - DNA, 25 bp, Homo sapien
gagcttcataacatcttcttccgtt

SEQ ID NO: 6018467 - DNA, 25 bp, Homo sapien
aatccatttttctcatgagcatttc

SEQ ID NO: 6018468 - DNA, 25 bp, Homo sapien
gcttacgagcttcataacatcttct

SEQ ID NO: 6018469 - DNA, 25 bp, Homo sapien
ttgacgatctggtggaactaaagta

SEQ ID NO: 6018470 - DNA, 25 bp, Homo sapien
cggtagctctcttcttgtctttctc

SEQ ID NO: 6018471 - DNA, 25 bp, Homo sapien
agcctgacttgcttcttgtgaagag

SEQ ID NO: 6018472 - DNA, 25 bp, Homo sapien
gccccttaccctcgttgctactctc

SEQ ID NO: 6018473 - DNA, 25 bp, Homo sapien
ataactgtgtacaatccatttttct

SEQ ID NO: 6018474 - DNA, 25 bp, Homo sapien
tagttgctttctattgtctaacagc

SEQ ID NO: 6018475 - DNA, 25 bp, Homo sapien
cgggcaatcttcctattattatagc

SEQ ID NO: 6018476 - DNA, 25 bp, Homo sapien
tgaaactattgaatatatcctttag

SEQ ID NO: 6018477 - DNA, 25 bp, Homo sapien
agcaattgggtaacgacgcttacga

SEQ ID NO: 6018478 - DNA, 25 bp, Homo sapien
gggatgaataaatcacctattaaag

SEQ ID NO: 6018479 - DNA, 25 bp, Homo sapien
tattaaagcagcttgacgatctggt

SEQ ID NO: 6018480 - DNA, 25 bp, Homo sapien
tatagcaatagatttgtatagttgc

SEQ ID NO: 6018481 - DNA, 25 bp, Homo sapien
atcttcttccgttggagctggtggg

SEQ ID NO: 6018482 - DNA, 25 bp, Homo sapien
tgctactctcctttttttcgtggga

SEQ ID NO: 6018483 - DNA, 25 bp, Homo sapien
ctctcttcttgtctttctcgggcaa

SEQ ID NO: 6018484 - DNA, 25 bp, Homo sapien
aataaatcacctattaaagcagctt

SEQ ID NO: 6018485 - DNA, 25 bp, Homo sapien
tagggccctcagtgatggtgttttg

SEQ ID NO: 6018486 - DNA, 25 bp, Homo sapien
ctggagggaacttcttcatttgtat

SEQ ID NO: 6018487 - DNA, 25 bp, Homo sapien
attgtctaacagcttgttattctgt

SEQ ID NO: 6018488 - DNA, 25 bp, Homo sapien
atcttcctattattatagcaataga

SEQ ID NO: 6018489 - DNA, 25 bp, Homo sapien
tcatgagcatttcggtagctctctt

SEQ ID NO: 6018490 - DNA, 25 bp, Homo sapien
tccttaaccatcttcgcagcaggca

SEQ ID NO: 6018491 - DNA, 25 bp, Homo sapien
actcggtaatggcgcgcattgcgcc

SEQ ID NO: 6018492 - DNA, 25 bp, Homo sapien
cagtcgcgtaccgtcttcatgggag

SEQ ID NO: 6018493 - DNA, 25 bp, Homo sapien
tcattcagcatttgcatggtttgtt

SEQ ID NO: 6018494 - DNA, 25 bp, Homo sapien
gacggcgggatataacatgagctgt

SEQ ID NO: 6018495 - DNA, 25 bp, Homo sapien
tcgtatcccactaccgagatatccg

SEQ ID NO: 6018496 - DNA, 25 bp, Homo sapien
tgcatggtttgttgaaaaccggaca

SEQ ID NO: 6018497 - DNA, 25 bp, Homo sapien
ttatgccagccagccagacgcagac

SEQ ID NO: 6018498 - DNA, 25 bp, Homo sapien
cgtcttcatgggagaaaataatact

SEQ ID NO: 6018499 - DNA, 25 bp, Homo sapien
ggagaggcggtttgcgtattgggcg

SEQ ID NO: 6018500 - DNA, 25 bp, Homo sapien
cgcattgcgcccagcgccatctgat

SEQ ID NO: 6018501 - DNA, 25 bp, Homo sapien
gagacagaacttaatgggcccgcta

SEQ ID NO: 6018502 - DNA, 25 bp, Homo sapien
tcttttcaccagtgagacgggcaac

SEQ ID NO: 6018503 - DNA, 25 bp, Homo sapien
cgccttcccgttccgctatcggctg

SEQ ID NO: 6018504 - DNA, 25 bp, Homo sapien
tcgtgccagctgcattaatgaatcg

SEQ ID NO: 6018505 - DNA, 25 bp, Homo sapien
cgcgcggggagaggcggtttgcgta

SEQ ID NO: 6018506 - DNA, 25 bp, Homo sapien
cctgtttgatggtggttgacggcgg

SEQ ID NO: 6018507 - DNA, 25 bp, Homo sapien
gccagacgcagacgcgccgagacag

SEQ ID NO: 6018508 - DNA, 25 bp, Homo sapien
aacagcgcgatttgctggtgaccca

SEQ ID NO: 6018509 - DNA, 25 bp, Homo sapien
accagatgctccacgcccagtcgcg

SEQ ID NO: 6018510 - DNA, 25 bp, Homo sapien
agcatttgcatggtttgttgaaaac

SEQ ID NO: 6018511 - DNA, 25 bp, Homo sapien
cggacatggcactccagtcgccttc

SEQ ID NO: 6018512 - DNA, 25 bp, Homo sapien
tgatggtggttgacggcgggatata

SEQ ID NO: 6018513 - DNA, 25 bp, Homo sapien
ctgattgcccttcaccgcctggccc

SEQ ID NO: 6018514 - DNA, 25 bp, Homo sapien
ccacgctggtttgccccagcaggcg

SEQ ID NO: 6018515 - DNA, 25 bp, Homo sapien
gagtgagatatttatgccagccagc

SEQ ID NO: 6018516 - DNA, 25 bp, Homo sapien
cccgttccgctatcggctgaatttg

SEQ ID NO: 6018517 - DNA, 25 bp, Homo sapien
gcaggcgaaaatcctgtttgatggt

SEQ ID NO: 6018518 - DNA, 25 bp, Homo sapien
ccgagatatccgcaccaacgcgcag

SEQ ID NO: 6018519 - DNA, 25 bp, Homo sapien
tggcactccagtcgccttcccgttc

SEQ ID NO: 6018520 - DNA, 25 bp, Homo sapien
agatatttatgccagccagccagac

SEQ ID NO: 6018521 - DNA, 25 bp, Homo sapien
aatgggcccgctaacagcgcgattt

SEQ ID NO: 6018522 - DNA, 25 bp, Homo sapien
taatactgttgatgggtgtctggtc

SEQ ID NO: 6018523 - DNA, 25 bp, Homo sapien
ccagctgcattaatgaatcggccaa

SEQ ID NO: 6018524 - DNA, 25 bp, Homo sapien
gcatcgcagtgggaacgatgccctc

SEQ ID NO: 6018525 - DNA, 25 bp, Homo sapien
acgcccagtcgcgtaccgtcttcat

SEQ ID NO: 6018526 - DNA, 25 bp, Homo sapien
gaaaatcctgtttgatggtggttga

SEQ ID NO: 6018527 - DNA, 25 bp, Homo sapien
gagacgggcaacagctgattgccct

SEQ ID NO: 6018528 - DNA, 25 bp, Homo sapien
gaaaaccggacatggcactccagtc

SEQ ID NO: 6018529 - DNA, 25 bp, Homo sapien
gcagtgggaacgatgccctcattca

SEQ ID NO: 6018530 - DNA, 25 bp, Homo sapien
gggatataacatgagctgtcttcgg

SEQ ID NO: 6018531 - DNA, 25 bp, Homo sapien
gaatttgattgcgagtgagatattt

SEQ ID NO: 6018532 - DNA, 25 bp, Homo sapien
tcggctgaatttgattgcgagtgag

SEQ ID NO: 6018533 - DNA, 25 bp, Homo sapien
gcgatttgctggtgacccaatgcga

SEQ ID NO: 6018534 - DNA, 25 bp, Homo sapien
tggttgacggcgggatataacatga

SEQ ID NO: 6018535 - DNA, 25 bp, Homo sapien
ccaacgcgcggggagaggcggtttg

SEQ ID NO: 6018536 - DNA, 25 bp, Homo sapien
tgacccaatgcgaccagatgctcca

SEQ ID NO: 6018537 - DNA, 25 bp, Homo sapien
caccgcctggccctgagagagttgc

SEQ ID NO: 6018538 - DNA, 25 bp, Homo sapien
agagttgcagcaagcggtccacgct

SEQ ID NO: 6018539 - DNA, 25 bp, Homo sapien
cgcgcagcccggactcggtaatggc

SEQ ID NO: 6018540 - DNA, 25 bp, Homo sapien
gaacttaatgggcccgctaacagcg

SEQ ID NO: 6018541 - DNA, 25 bp, Homo sapien
taacatgagctgtcttcggtatcgt

SEQ ID NO: 6018542 - DNA, 25 bp, Homo sapien
gcattaatgaatcggccaacgcgcg

SEQ ID NO: 6018543 - DNA, 25 bp, Homo sapien
accagtgagacgggcaacagctgat

SEQ ID NO: 6018544 - DNA, 25 bp, Homo sapien
cgcgccgagacagaacttaatgggc

SEQ ID NO: 6018545 - DNA, 25 bp, Homo sapien
agaaaataatactgttgatgggtgt

SEQ ID NO: 6018546 - DNA, 25 bp, Homo sapien
ggaacgatgccctcattcagcattt

SEQ ID NO: 6018547 - DNA, 25 bp, Homo sapien
gcgtaccgtcttcatgggagaaaat

SEQ ID NO: 6018548 - DNA, 25 bp, Homo sapien
ccactaccgagatatccgcaccaac

SEQ ID NO: 6018549 - DNA, 25 bp, Homo sapien
gagctgtcttcggtatcgtcgtatc

SEQ ID NO: 6018550 - DNA, 25 bp, Homo sapien
gcccggactcggtaatggcgcgcat

SEQ ID NO: 6018551 - DNA, 25 bp, Homo sapien
gtatcgtcgtatcccactaccgaga

SEQ ID NO: 6018552 - DNA, 25 bp, Homo sapien
gtttgttgaaaaccggacatggcac

SEQ ID NO: 6018553 - DNA, 25 bp, Homo sapien
ggcaacagctgattgcccttcaccg

SEQ ID NO: 6018554 - DNA, 25 bp, Homo sapien
tgcgtattgggcgccagggtggttt

SEQ ID NO: 6018555 - DNA, 25 bp, Homo sapien
gccccagcaggcgaaaatcctgttt

SEQ ID NO: 6018556 - DNA, 25 bp, Homo sapien
gattgcgagtgagatatttatgcca

SEQ ID NO: 6018557 - DNA, 25 bp, Homo sapien
taatggcgcgcattgcgcccagcgc

SEQ ID NO: 6018558 - DNA, 25 bp, Homo sapien
caaccagcatcgcagtgggaacgat

SEQ ID NO: 6018559 - DNA, 25 bp, Homo sapien
caccaacgcgcagcccggactcggt

SEQ ID NO: 6018560 - DNA, 25 bp, Homo sapien
tcttcggtatcgtcgtatcccacta

SEQ ID NO: 6018561 - DNA, 25 bp, Homo sapien
tggtttgccccagcaggcgaaaatc

SEQ ID NO: 6018562 - DNA, 25 bp, Homo sapien
gcagcaagcggtccacgctggtttg

SEQ ID NO: 6018563 - DNA, 25 bp, Homo sapien
gccagccagacgcagacgcgccgag

SEQ ID NO: 6018564 - DNA, 25 bp, Homo sapien
gcggtttgcgtattgggcgccaggg

SEQ ID NO: 6018565 - DNA, 25 bp, Homo sapien
tccagtcgccttcccgttccgctat

SEQ ID NO: 6018566 - DNA, 25 bp, Homo sapien
catgggagaaaataatactgttgat

SEQ ID NO: 6018567 - DNA, 25 bp, Homo sapien
cctggccctgagagagttgcagcaa

SEQ ID NO: 6018568 - DNA, 25 bp, Homo sapien
cgttggcaaccagcatcgcagtggg

SEQ ID NO: 6018569 - DNA, 25 bp, Homo sapien
cccgctaacagcgcgatttgctggt

SEQ ID NO: 6018570 - DNA, 25 bp, Homo sapien
cgcagacgcgccgagacagaactta

SEQ ID NO: 6018571 - DNA, 25 bp, Homo sapien
gcgccatctgatcgttggcaaccag

SEQ ID NO: 6018572 - DNA, 25 bp, Homo sapien
tctgatcgttggcaaccagcatcgc

SEQ ID NO: 6018573 - DNA, 25 bp, Homo sapien
tggtttttcttttcaccagtgagac

SEQ ID NO: 6018574 - DNA, 25 bp, Homo sapien
gcgcccagcgccatctgatcgttgg

SEQ ID NO: 6018575 - DNA, 25 bp, Homo sapien
gcccttcaccgcctggccctgagag

SEQ ID NO: 6018576 - DNA, 25 bp, Homo sapien
tgctggtgacccaatgcgaccagat

SEQ ID NO: 6018577 - DNA, 25 bp, Homo sapien
agcggtccacgctggtttgccccag

SEQ ID NO: 6018578 - DNA, 25 bp, Homo sapien
atgccctcattcagcatttgcatgg

SEQ ID NO: 6018579 - DNA, 25 bp, Homo sapien
tgctccacgcccagtcgcgtaccgt

SEQ ID NO: 6018580 - DNA, 25 bp, Homo sapien
cctgagagagttgcagcaagcggtc

SEQ ID NO: 6018581 - DNA, 25 bp, Homo sapien
tatccgcaccaacgcgcagcccgga

SEQ ID NO: 6018582 - DNA, 25 bp, Homo sapien
aatgcgaccagatgctccacgccca

SEQ ID NO: 6018583 - DNA, 25 bp, Homo sapien
ccgctatcggctgaatttgattgcg

SEQ ID NO: 6018584 - DNA, 25 bp, Homo sapien
ttgcggcctatatggatgttggaac

SEQ ID NO: 6018585 - DNA, 25 bp, Homo sapien
tctcttttttcaacttctgatggat

SEQ ID NO: 6018586 - DNA, 25 bp, Homo sapien
gtaacgttgggtgcaatcagtacgt

SEQ ID NO: 6018587 - DNA, 25 bp, Homo sapien
aacgccagccgccacgacgtttggt

SEQ ID NO: 6018588 - DNA, 25 bp, Homo sapien
tcgttatcggaaaagagtacatctc

SEQ ID NO: 6018589 - DNA, 25 bp, Homo sapien
acttctgatggatgcgagtgattaa

SEQ ID NO: 6018590 - DNA, 25 bp, Homo sapien
catctcgccgttttttctcaattca

SEQ ID NO: 6018591 - DNA, 25 bp, Homo sapien
aaaaattgcggcctatatggatgtt

SEQ ID NO: 6018592 - DNA, 25 bp, Homo sapien
gagaaatagacaggcggttctaccc

SEQ ID NO: 6018593 - DNA, 25 bp, Homo sapien
gatggatgcgagtgattaaactcat

SEQ ID NO: 6018594 - DNA, 25 bp, Homo sapien
tgtagtcatcgacaatggttaaatt

SEQ ID NO: 6018595 - DNA, 25 bp, Homo sapien
cctatatggatgttggaaccgtaag

SEQ ID NO: 6018596 - DNA, 25 bp, Homo sapien
catttctttaatcaggctttctctt

SEQ ID NO: 6018597 - DNA, 25 bp, Homo sapien
catcgacaatggttaaattgaaatt

SEQ ID NO: 6018598 - DNA, 25 bp, Homo sapien
tgtcttttgtgacgatactacccgc

SEQ ID NO: 6018599 - DNA, 25 bp, Homo sapien
cgatactacccgcgccaataacaga

SEQ ID NO: 6018600 - DNA, 25 bp, Homo sapien
catacattaacgttttcccacgaag

SEQ ID NO: 6018601 - DNA, 25 bp, Homo sapien
ttttcaacttctgatggatgcgagt

SEQ ID NO: 6018602 - DNA, 25 bp, Homo sapien
ataacccgacaaggaacgccagccg

SEQ ID NO: 6018603 - DNA, 25 bp, Homo sapien
ccacgacgtttggtggaatgtcttt

SEQ ID NO: 6018604 - DNA, 25 bp, Homo sapien
tgccaatcgttatcggaaaagagta

SEQ ID NO: 6018605 - DNA, 25 bp, Homo sapien
ttgcctgctcttattctttcggtca

SEQ ID NO: 6018606 - DNA, 25 bp, Homo sapien
ttgtgacgatactacccgcgccaat

SEQ ID NO: 6018607 - DNA, 25 bp, Homo sapien
tgattaaactcatacattaacgttt

SEQ ID NO: 6018608 - DNA, 25 bp, Homo sapien
gaaagagtaacgttgggtgcaatca

SEQ ID NO: 6018609 - DNA, 25 bp, Homo sapien
tgaaatttgcataaaaattgcggcc

SEQ ID NO: 6018610 - DNA, 25 bp, Homo sapien
agtacgttatcaccgattgttaccg

SEQ ID NO: 6018611 - DNA, 25 bp, Homo sapien
gtggaatgtcttttgtgacgatact

SEQ ID NO: 6018612 - DNA, 25 bp, Homo sapien
ttccgatccagacgttattgccaat

SEQ ID NO: 6018613 - DNA, 25 bp, Homo sapien
catgacttccgatccagacgttatt

SEQ ID NO: 6018614 - DNA, 25 bp, Homo sapien
ttaccgtgtagtcatcgacaatggt

SEQ ID NO: 6018615 - DNA, 25 bp, Homo sapien
tatttcgcgaataacccgacaagga

SEQ ID NO: 6018616 - DNA, 25 bp, Homo sapien
gcaatcagtacgttatcaccgattg

SEQ ID NO: 6018617 - DNA, 25 bp, Homo sapien
gccgttttttctcaattcatggtgt

SEQ ID NO: 6018618 - DNA, 25 bp, Homo sapien
ttggaaccgtaagagaaatagacag

SEQ ID NO: 6018619 - DNA, 25 bp, Homo sapien
cagccgccacgacgtttggtggaat

SEQ ID NO: 6018620 - DNA, 25 bp, Homo sapien
tgctcttattctttcggtcattggc

SEQ ID NO: 6018621 - DNA, 25 bp, Homo sapien
ccttcgcacatatcggtaaatagct

SEQ ID NO: 6018622 - DNA, 25 bp, Homo sapien
cacatatcggtaaatagcttgcctg

SEQ ID NO: 6018623 - DNA, 25 bp, Homo sapien
ggtaagccttcgcacatatcggtaa

SEQ ID NO: 6018624 - DNA, 25 bp, Homo sapien
acaaggaacgccagccgccacgacg

SEQ ID NO: 6018625 - DNA, 25 bp, Homo sapien
tatcaccgattgttaccgtgtagtc

SEQ ID NO: 6018626 - DNA, 25 bp, Homo sapien
aattatccccgatggtgacgcctgg

SEQ ID NO: 6018627 - DNA, 25 bp, Homo sapien
tgcttatcccggtcgtttatttcgc

SEQ ID NO: 6018628 - DNA, 25 bp, Homo sapien
aagagtacatctcgccgttttttct

SEQ ID NO: 6018629 - DNA, 25 bp, Homo sapien
atggtgtacagggtgtcccgtaacg

SEQ ID NO: 6018630 - DNA, 25 bp, Homo sapien
cgattgttaccgtgtagtcatcgac

SEQ ID NO: 6018631 - DNA, 25 bp, Homo sapien
tacccgcgccaataacagaattatc

SEQ ID NO: 6018632 - DNA, 25 bp, Homo sapien
taatagtgcttatcccggtcgttta

SEQ ID NO: 6018633 - DNA, 25 bp, Homo sapien
tgcgagtgattaaactcatacatta

SEQ ID NO: 6018634 - DNA, 25 bp, Homo sapien
aggctttctcttttttcaacttctg

SEQ ID NO: 6018635 - DNA, 25 bp, Homo sapien
ttttctcaattcatggtgtacaggg

SEQ ID NO: 6018636 - DNA, 25 bp, Homo sapien
ttgcataaaaattgcggcctatatg

SEQ ID NO: 6018637 - DNA, 25 bp, Homo sapien
taccgtggcaaacatttctttaatc

SEQ ID NO: 6018638 - DNA, 25 bp, Homo sapien
cgcctggattaataaccacatgact

SEQ ID NO: 6018639 - DNA, 25 bp, Homo sapien
tcggaaaagagtacatctcgccgtt

SEQ ID NO: 6018640 - DNA, 25 bp, Homo sapien
caatggttaaattgaaatttgcata

SEQ ID NO: 6018641 - DNA, 25 bp, Homo sapien
taaccacatgacttccgatccagac

SEQ ID NO: 6018642 - DNA, 25 bp, Homo sapien
tccagacgttattgccaatcgttat

SEQ ID NO: 6018643 - DNA, 25 bp, Homo sapien
aatagcttgcctgctcttattcttt

SEQ ID NO: 6018644 - DNA, 25 bp, Homo sapien
agacaggcggttctacccaggcgtt

SEQ ID NO: 6018645 - DNA, 25 bp, Homo sapien
caattcatggtgtacagggtgtccc

SEQ ID NO: 6018646 - DNA, 25 bp, Homo sapien
gattaataaccacatgacttccgat

SEQ ID NO: 6018647 - DNA, 25 bp, Homo sapien
tttttccggtaagccttcgcacata

SEQ ID NO: 6018648 - DNA, 25 bp, Homo sapien
ggcaaacatttctttaatcaggctt

SEQ ID NO: 6018649 - DNA, 25 bp, Homo sapien
taacagaattatccccgatggtgac

SEQ ID NO: 6018650 - DNA, 25 bp, Homo sapien
tggatgttggaaccgtaagagaaat

SEQ ID NO: 6018651 - DNA, 25 bp, Homo sapien
ttaatcaggctttctcttttttcaa

SEQ ID NO: 6018652 - DNA, 25 bp, Homo sapien
cgtttggtggaatgtcttttgtgac

SEQ ID NO: 6018653 - DNA, 25 bp, Homo sapien
ttgggtgcaatcagtacgttatcac

SEQ ID NO: 6018654 - DNA, 25 bp, Homo sapien
ccgtaagagaaatagacaggcggtt

SEQ ID NO: 6018655 - DNA, 25 bp, Homo sapien
cgttattgccaatcgttatcggaaa

SEQ ID NO: 6018656 - DNA, 25 bp, Homo sapien
tggtgacgcctggattaataaccac

SEQ ID NO: 6018657 - DNA, 25 bp, Homo sapien
gaaataatagtgcttatcccggtcg

SEQ ID NO: 6018658 - DNA, 25 bp, Homo sapien
cgccaataacagaattatccccgat

SEQ ID NO: 6018659 - DNA, 25 bp, Homo sapien
taaattgaaatttgcataaaaattg

SEQ ID NO: 6018660 - DNA, 25 bp, Homo sapien
tattctttcggtcattggcatgttc

SEQ ID NO: 6018661 - DNA, 25 bp, Homo sapien
tcgcgaataacccgacaaggaacgc

SEQ ID NO: 6018662 - DNA, 25 bp, Homo sapien
tcggtaaatagcttgcctgctctta

SEQ ID NO: 6018663 - DNA, 25 bp, Homo sapien
ccccgatggtgacgcctggattaat

SEQ ID NO: 6018664 - DNA, 25 bp, Homo sapien
cagaagcactactttgttgcctaga

SEQ ID NO: 6018665 - DNA, 25 bp, Homo sapien
actaaacagaagcactactttgttg

SEQ ID NO: 6018666 - DNA, 25 bp, Homo sapien
tattccaggcctccgttagctttgt

SEQ ID NO: 6018667 - DNA, 25 bp, Homo sapien
catgagtaaatacatctctaatgcc

SEQ ID NO: 6018668 - DNA, 25 bp, Homo sapien
agatcacctgctctaatgtccctgt

SEQ ID NO: 6018669 - DNA, 25 bp, Homo sapien
gacaagggagtcagatgccagacag

SEQ ID NO: 6018670 - DNA, 25 bp, Homo sapien
agctcactgctgtttacagtaccct

SEQ ID NO: 6018671 - DNA, 25 bp, Homo sapien
caagctcaggctccatgaagatcac

SEQ ID NO: 6018672 - DNA, 25 bp, Homo sapien
tttgttgcctagagaaaaatcttct

SEQ ID NO: 6018673 - DNA, 25 bp, Homo sapien
cagcgtcttctgtcgttgttatatc

SEQ ID NO: 6018674 - DNA, 25 bp, Homo sapien
cttttattccaggcctccgttagct

SEQ ID NO: 6018675 - DNA, 25 bp, Homo sapien
tgagaaagctcactgctgtttacag

SEQ ID NO: 6018676 - DNA, 25 bp, Homo sapien
tttacagtaccctgcgtagccttag

SEQ ID NO: 6018677 - DNA, 25 bp, Homo sapien
aggcctccgttagctttgttctctt

SEQ ID NO: 6018678 - DNA, 25 bp, Homo sapien
taaaatctcttaaacagaaaagata

SEQ ID NO: 6018679 - DNA, 25 bp, Homo sapien
agggctgcaggagggtccttgagac

SEQ ID NO: 6018680 - DNA, 25 bp, Homo sapien
cacctctgagaaagctcactgctgt

SEQ ID NO: 6018681 - DNA, 25 bp, Homo sapien
caggctccatgaagatcacctgctc

SEQ ID NO: 6018682 - DNA, 25 bp, Homo sapien
gctttgttctctttgtacacctgac

SEQ ID NO: 6018683 - DNA, 25 bp, Homo sapien
aggactgagagctcatggcatgagt

SEQ ID NO: 6018684 - DNA, 25 bp, Homo sapien
acttgggtatagctgaacttttact

SEQ ID NO: 6018685 - DNA, 25 bp, Homo sapien
tgggaacccacctctgagacaaggg

SEQ ID NO: 6018686 - DNA, 25 bp, Homo sapien
acttttactaaacagaagcactact

SEQ ID NO: 6018687 - DNA, 25 bp, Homo sapien
agaaaaatcttctcaggacttttat

SEQ ID NO: 6018688 - DNA, 25 bp, Homo sapien
tctgagacaagggagtcagatgcca

SEQ ID NO: 6018689 - DNA, 25 bp, Homo sapien
gagagctcatggcatgagtaaatac

SEQ ID NO: 6018690 - DNA, 25 bp, Homo sapien
atatgttaattaccaaaaccattct

SEQ ID NO: 6018691 - DNA, 25 bp, Homo sapien
tcgttgttatatcccatagagtaga

SEQ ID NO: 6018692 - DNA, 25 bp, Homo sapien
atcttctcaggacttttattccagg

SEQ ID NO: 6018693 - DNA, 25 bp, Homo sapien
cagcccctggccccgctgagatact

SEQ ID NO: 6018694 - DNA, 25 bp, Homo sapien
gttctctttgtacacctgactcaac

SEQ ID NO: 6018695 - DNA, 25 bp, Homo sapien
gagtagagctctcgttcccaaacac

SEQ ID NO: 6018696 - DNA, 25 bp, Homo sapien
agatgccagacagtggctcccagac

SEQ ID NO: 6018697 - DNA, 25 bp, Homo sapien
caaacactccatagaaacacccttt

SEQ ID NO: 6018698 - DNA, 25 bp, Homo sapien
agctgaacttttactaaacagaagc

SEQ ID NO: 6018699 - DNA, 25 bp, Homo sapien
tctatcagatattaaaatatgttaa

SEQ ID NO: 6018700 - DNA, 25 bp, Homo sapien
gccttagctcatcagcgtcttctgt

SEQ ID NO: 6018701 - DNA, 25 bp, Homo sapien
ccgctgagatactcgggtgtttttg

SEQ ID NO: 6018702 - DNA, 25 bp, Homo sapien
ctggccccgctgagatactcgggtg

SEQ ID NO: 6018703 - DNA, 25 bp, Homo sapien
taccaaaaccattctctgagaaaaa

SEQ ID NO: 6018704 - DNA, 25 bp, Homo sapien
ctaatgcctatctttctatcagata

SEQ ID NO: 6018705 - DNA, 25 bp, Homo sapien
tgttagtgtagcctgggcagtgaaa

SEQ ID NO: 6018706 - DNA, 25 bp, Homo sapien
actcaacacctctgagaaagctcac

SEQ ID NO: 6018707 - DNA, 25 bp, Homo sapien
cacctgactcaacacctctgagaaa

SEQ ID NO: 6018708 - DNA, 25 bp, Homo sapien
ttatatcccatagagtagagctctc

SEQ ID NO: 6018709 - DNA, 25 bp, Homo sapien
acacaaacttgggtatagctgaact

SEQ ID NO: 6018710 - DNA, 25 bp, Homo sapien
ccatgaagatcacctgctctaatgt

SEQ ID NO: 6018711 - DNA, 25 bp, Homo sapien
ctaatgtccctgtgcttagttcaga

SEQ ID NO: 6018712 - DNA, 25 bp, Homo sapien
cactactttgttgcctagagaaaaa

SEQ ID NO: 6018713 - DNA, 25 bp, Homo sapien
gcctagagaaaaatcttctcaggac

SEQ ID NO: 6018714 - DNA, 25 bp, Homo sapien
cgttcccaaacactccatagaaaca

SEQ ID NO: 6018715 - DNA, 25 bp, Homo sapien
cccatagagtagagctctcgttccc

SEQ ID NO: 6018716 - DNA, 25 bp, Homo sapien
ccgttagctttgttctctttgtaca

SEQ ID NO: 6018717 - DNA, 25 bp, Homo sapien
agataaacacaaacttgggtatagc

SEQ ID NO: 6018718 - DNA, 25 bp, Homo sapien
tgcttagttcagaggactgagagct

SEQ ID NO: 6018719 - DNA, 25 bp, Homo sapien
tccctgtgcttagttcagaggactg

SEQ ID NO: 6018720 - DNA, 25 bp, Homo sapien
gtaccctgcgtagccttagctcatc

SEQ ID NO: 6018721 - DNA, 25 bp, Homo sapien
gatattaaaatatgttaattaccaa

SEQ ID NO: 6018722 - DNA, 25 bp, Homo sapien
tcatggcatgagtaaatacatctct

SEQ ID NO: 6018723 - DNA, 25 bp, Homo sapien
gggccctgggaacccacctctgaga

SEQ ID NO: 6018724 - DNA, 25 bp, Homo sapien
agatactcgggtgtttttgttagtg

SEQ ID NO: 6018725 - DNA, 25 bp, Homo sapien
tgtagcctgggcagtgaaagggctg

SEQ ID NO: 6018726 - DNA, 25 bp, Homo sapien
ggtatagctgaacttttactaaaca

SEQ ID NO: 6018727 - DNA, 25 bp, Homo sapien
cctatctttctatcagatattaaaa

SEQ ID NO: 6018728 - DNA, 25 bp, Homo sapien
ccctttctcatctctgagcagcccc

SEQ ID NO: 6018729 - DNA, 25 bp, Homo sapien
tccatagaaacaccctttctcatct

SEQ ID NO: 6018730 - DNA, 25 bp, Homo sapien
tcaggacttttattccaggcctccg

SEQ ID NO: 6018731 - DNA, 25 bp, Homo sapien
cttctgtcgttgttatatcccatag

SEQ ID NO: 6018732 - DNA, 25 bp, Homo sapien
ctgggcagtgaaagggctgcaggag

SEQ ID NO: 6018733 - DNA, 25 bp, Homo sapien
gcaggagggtccttgagacggggcc

SEQ ID NO: 6018734 - DNA, 25 bp, Homo sapien
gttaattaccaaaaccattctctga

SEQ ID NO: 6018735 - DNA, 25 bp, Homo sapien
cccacctctgagacaagggagtcag

SEQ ID NO: 6018736 - DNA, 25 bp, Homo sapien
gctcatcagcgtcttctgtcgttgt

SEQ ID NO: 6018737 - DNA, 25 bp, Homo sapien
cgggtgtttttgttagtgtagcctg

SEQ ID NO: 6018738 - DNA, 25 bp, Homo sapien
tcttaaacagaaaagataaacacaa

SEQ ID NO: 6018739 - DNA, 25 bp, Homo sapien
agtgaaagggctgcaggagggtcct

SEQ ID NO: 6018740 - DNA, 25 bp, Homo sapien
tgtttttgttagtgtagcctgggca

SEQ ID NO: 6018741 - DNA, 25 bp, Homo sapien
gttcagaggactgagagctcatggc

SEQ ID NO: 6018742 - DNA, 25 bp, Homo sapien
cctgctctaatgtccctgtgcttag

SEQ ID NO: 6018743 - DNA, 25 bp, Homo sapien
ctgctgtttacagtaccctgcgtag

SEQ ID NO: 6018744 - DNA, 25 bp, Homo sapien
ggagtcagatgccagacagtggctc

SEQ ID NO: 6018745 - DNA, 25 bp, Homo sapien
ctcatctctgagcagcccctggccc

SEQ ID NO: 6018746 - DNA, 25 bp, Homo sapien
taaatacatctctaatgcctatctt

SEQ ID NO: 6018747 - DNA, 25 bp, Homo sapien
agctctcgttcccaaacactccata

SEQ ID NO: 6018748 - DNA, 25 bp, Homo sapien
tctgagcagcccctggccccgctga

SEQ ID NO: 6018749 - DNA, 25 bp, Homo sapien
gtggctcccagacaagctcaggctc

SEQ ID NO: 6018750 - DNA, 25 bp, Homo sapien
gaaacaccctttctcatctctgagc

SEQ ID NO: 6018751 - DNA, 25 bp, Homo sapien
tttgtacacctgactcaacacctct

SEQ ID NO: 6018752 - DNA, 25 bp, Homo sapien
tgcgtagccttagctcatcagcgtc

SEQ ID NO: 6018753 - DNA, 25 bp, Homo sapien
cccagacaagctcaggctccatgaa

SEQ ID NO: 6018754 - DNA, 25 bp, Homo sapien
cagacagtggctcccagacaagctc

SEQ ID NO: 6018755 - DNA, 25 bp, Homo sapien
catctctaatgcctatctttctatc

SEQ ID NO: 6018756 - DNA, 25 bp, Homo sapien
cagaaaagataaacacaaacttggg

SEQ ID NO: 6018757 - DNA, 25 bp, Homo sapien
caccctcaccttcaaggagctcact

SEQ ID NO: 6018758 - DNA, 25 bp, Homo sapien
actcatgccatgagctctcagtcct

SEQ ID NO: 6018759 - DNA, 25 bp, Homo sapien
gccatgagctctcagtcctctgaac

SEQ ID NO: 6018760 - DNA, 25 bp, Homo sapien
aatacattcatttacaactacctga

SEQ ID NO: 6018761 - DNA, 25 bp, Homo sapien
aagataggcattagagatgtattta

SEQ ID NO: 6018762 - DNA, 25 bp, Homo sapien
tgtctgggagccactgtctggcatc

SEQ ID NO: 6018763 - DNA, 25 bp, Homo sapien
actacctgacaacatggaaacatac

SEQ ID NO: 6018764 - DNA, 25 bp, Homo sapien
caacgtgtccagtaaattaatacca

SEQ ID NO: 6018765 - DNA, 25 bp, Homo sapien
aagcaacttcaaagtcaggagtctc

SEQ ID NO: 6018766 - DNA, 25 bp, Homo sapien
ctaagcacagggacattagagcagg

SEQ ID NO: 6018767 - DNA, 25 bp, Homo sapien
agttaaggctgtttctagtcatgcc

SEQ ID NO: 6018768 - DNA, 25 bp, Homo sapien
aagatagaaattctgaatctttctc

SEQ ID NO: 6018769 - DNA, 25 bp, Homo sapien
caagaaaagatagaaattctgaatc

SEQ ID NO: 6018770 - DNA, 25 bp, Homo sapien
acccttttagctcacacctgaaagc

SEQ ID NO: 6018771 - DNA, 25 bp, Homo sapien
tgacaacatggaaacatacaagaaa

SEQ ID NO: 6018772 - DNA, 25 bp, Homo sapien
tggcatctgactcccttgtctcaga

SEQ ID NO: 6018773 - DNA, 25 bp, Homo sapien
agctgcccgccgcaaacccacacag

SEQ ID NO: 6018774 - DNA, 25 bp, Homo sapien
ctagatacacagaatgttctcgaac

SEQ ID NO: 6018775 - DNA, 25 bp, Homo sapien
tgaaagcttctgcaccctcaccttc

SEQ ID NO: 6018776 - DNA, 25 bp, Homo sapien
ctgaatctttctcaaataactccac

SEQ ID NO: 6018777 - DNA, 25 bp, Homo sapien
actccactgaagaaaccgttagtca

SEQ ID NO: 6018778 - DNA, 25 bp, Homo sapien
cttcaaagtcaggagtctctagata

SEQ ID NO: 6018779 - DNA, 25 bp, Homo sapien
gtctgtacccttttagctcacacct

SEQ ID NO: 6018780 - DNA, 25 bp, Homo sapien
caaacccacacaggctttaaagcaa

SEQ ID NO: 6018781 - DNA, 25 bp, Homo sapien
agtcaggagtctctagatacacaga

SEQ ID NO: 6018782 - DNA, 25 bp, Homo sapien
taggaagtctgtacccttttagctc

SEQ ID NO: 6018783 - DNA, 25 bp, Homo sapien
tcatgccattatcaacgtgtccagt

SEQ ID NO: 6018784 - DNA, 25 bp, Homo sapien
gagtctctagatacacagaatgttc

SEQ ID NO: 6018785 - DNA, 25 bp, Homo sapien
tttacaactacctgacaacatggaa

SEQ ID NO: 6018786 - DNA, 25 bp, Homo sapien
cttaggagttaaggctgtttctagt

SEQ ID NO: 6018787 - DNA, 25 bp, Homo sapien
ttagctcacacctgaaagcttctgc

SEQ ID NO: 6018788 - DNA, 25 bp, Homo sapien
ggagccactgtctggcatctgactc

SEQ ID NO: 6018789 - DNA, 25 bp, Homo sapien
ttttaatatctgatagaaagatagg

SEQ ID NO: 6018790 - DNA, 25 bp, Homo sapien
caaggagctcactgtacagagctgc

SEQ ID NO: 6018791 - DNA, 25 bp, Homo sapien
actgtctggcatctgactcccttgt

SEQ ID NO: 6018792 - DNA, 25 bp, Homo sapien
tctcagaggtgggttcccagggccc

SEQ ID NO: 6018793 - DNA, 25 bp, Homo sapien
agagatgtatttactcatgccatga

SEQ ID NO: 6018794 - DNA, 25 bp, Homo sapien
gtgatcttcatggagcctgagcttg

SEQ ID NO: 6018795 - DNA, 25 bp, Homo sapien
caccttcaaggagctcactgtacag

SEQ ID NO: 6018796 - DNA, 25 bp, Homo sapien
tccagtaaattaataccacctgaga

SEQ ID NO: 6018797 - DNA, 25 bp, Homo sapien
acagggacattagagcaggtgatct

SEQ ID NO: 6018798 - DNA, 25 bp, Homo sapien
gagcaggtgatcttcatggagcctg

SEQ ID NO: 6018799 - DNA, 25 bp, Homo sapien
aaattaataccacctgagaaaggct

SEQ ID NO: 6018800 - DNA, 25 bp, Homo sapien
ccccgtctcaaggaccctcctgcag

SEQ ID NO: 6018801 - DNA, 25 bp, Homo sapien
gagaatggttttggtaattaacata

SEQ ID NO: 6018802 - DNA, 25 bp, Homo sapien
aaaccgttagtcacaagttgtcatt

SEQ ID NO: 6018803 - DNA, 25 bp, Homo sapien
atatctgatagaaagataggcatta

SEQ ID NO: 6018804 - DNA, 25 bp, Homo sapien
gagcttgtctgggagccactgtctg

SEQ ID NO: 6018805 - DNA, 25 bp, Homo sapien
cattatcaacgtgtccagtaaatta

SEQ ID NO: 6018806 - DNA, 25 bp, Homo sapien
acaagttgtcattaggaagtctgta

SEQ ID NO: 6018807 - DNA, 25 bp, Homo sapien
cctgagcttaggagttaaggctgtt

SEQ ID NO: 6018808 - DNA, 25 bp, Homo sapien
tgtcattaggaagtctgtacccttt

SEQ ID NO: 6018809 - DNA, 25 bp, Homo sapien
cagtcctctgaactaagcacaggga

SEQ ID NO: 6018810 - DNA, 25 bp, Homo sapien
gagcctgagcttgtctgggagccac

SEQ ID NO: 6018811 - DNA, 25 bp, Homo sapien
aatgttctcgaacctgagcttagga

SEQ ID NO: 6018812 - DNA, 25 bp, Homo sapien
cccttgtctcagaggtgggttccca

SEQ ID NO: 6018813 - DNA, 25 bp, Homo sapien
ctcgaacctgagcttaggagttaag

SEQ ID NO: 6018814 - DNA, 25 bp, Homo sapien
ctttctcaaataactccactgaaga

SEQ ID NO: 6018815 - DNA, 25 bp, Homo sapien
gctcactgtacagagctgcccgccg

SEQ ID NO: 6018816 - DNA, 25 bp, Homo sapien
ctcaaggaccctcctgcagcccttt

SEQ ID NO: 6018817 - DNA, 25 bp, Homo sapien
gaccctcctgcagccctttcactgc

SEQ ID NO: 6018818 - DNA, 25 bp, Homo sapien
agctctcagtcctctgaactaagca

SEQ ID NO: 6018819 - DNA, 25 bp, Homo sapien
ttagtcacaagttgtcattaggaag

SEQ ID NO: 6018820 - DNA, 25 bp, Homo sapien
cattcatttacaactacctgacaac

SEQ ID NO: 6018821 - DNA, 25 bp, Homo sapien
ttctcagagaatggttttggtaatt

SEQ ID NO: 6018822 - DNA, 25 bp, Homo sapien
aacatacaagaaaagatagaaattc

SEQ ID NO: 6018823 - DNA, 25 bp, Homo sapien
ctgactcccttgtctcagaggtggg

SEQ ID NO: 6018824 - DNA, 25 bp, Homo sapien
cttctgcaccctcaccttcaaggag

SEQ ID NO: 6018825 - DNA, 25 bp, Homo sapien
tctgaactaagcacagggacattag

SEQ ID NO: 6018826 - DNA, 25 bp, Homo sapien
gtatttactcatgccatgagctctc

SEQ ID NO: 6018827 - DNA, 25 bp, Homo sapien
ggctgtttctagtcatgccattatc

SEQ ID NO: 6018828 - DNA, 25 bp, Homo sapien
aacatattttaatatctgatagaaa

SEQ ID NO: 6018829 - DNA, 25 bp, Homo sapien
caaataactccactgaagaaaccgt

SEQ ID NO: 6018830 - DNA, 25 bp, Homo sapien
acacaggctttaaagcaacttcaaa

SEQ ID NO: 6018831 - DNA, 25 bp, Homo sapien
cacacctgaaagcttctgcaccctc

SEQ ID NO: 6018832 - DNA, 25 bp, Homo sapien
acacagaatgttctcgaacctgagc

SEQ ID NO: 6018833 - DNA, 25 bp, Homo sapien
gaaattctgaatctttctcaaataa

SEQ ID NO: 6018834 - DNA, 25 bp, Homo sapien
catggaaacatacaagaaaagatag

SEQ ID NO: 6018835 - DNA, 25 bp, Homo sapien
ctgaagaaaccgttagtcacaagtt

SEQ ID NO: 6018836 - DNA, 25 bp, Homo sapien
ttctagtcatgccattatcaacgtg

SEQ ID NO: 6018837 - DNA, 25 bp, Homo sapien
ccgccgcaaacccacacaggcttta

SEQ ID NO: 6018838 - DNA, 25 bp, Homo sapien
ataccacctgagaaaggcttgtttt

SEQ ID NO: 6018839 - DNA, 25 bp, Homo sapien
ttcatggagcctgagcttgtctggg

SEQ ID NO: 6018840 - DNA, 25 bp, Homo sapien
gctttaaagcaacttcaaagtcagg

SEQ ID NO: 6018841 - DNA, 25 bp, Homo sapien
ggtaattaacatattttaatatctg

SEQ ID NO: 6018842 - DNA, 25 bp, Homo sapien
acattagagcaggtgatcttcatgg

SEQ ID NO: 6018843 - DNA, 25 bp, Homo sapien
gtacagagctgcccgccgcaaaccc

SEQ ID NO: 6018844 - DNA, 25 bp, Homo sapien
gatagaaagataggcattagagatg

SEQ ID NO: 6018845 - DNA, 25 bp, Homo sapien
ggcattagagatgtatttactcatg

SEQ ID NO: 6018846 - DNA, 25 bp, Homo sapien
caccgtttgagtcgataacttctga

SEQ ID NO: 6018847 - DNA, 25 bp, Homo sapien
gttgtacctgtcttcgatctcgaag

SEQ ID NO: 6018848 - DNA, 25 bp, Homo sapien
cttcaactgcatgtcaggcccgtag

SEQ ID NO: 6018849 - DNA, 25 bp, Homo sapien
acaccgcaggctgccgttgccggtt

SEQ ID NO: 6018850 - DNA, 25 bp, Homo sapien
accaagatactgattcgggttgtac

SEQ ID NO: 6018851 - DNA, 25 bp, Homo sapien
cccaccaccaagatactgattcggg

SEQ ID NO: 6018852 - DNA, 25 bp, Homo sapien
gcggcgatgccggtcggtccaacca

SEQ ID NO: 6018853 - DNA, 25 bp, Homo sapien
tggagtctccgacgagcacagggct

SEQ ID NO: 6018854 - DNA, 25 bp, Homo sapien
attcgggttgtacctgtcttcgatc

SEQ ID NO: 6018855 - DNA, 25 bp, Homo sapien
tgagggcacccacccgaccaacgct

SEQ ID NO: 6018856 - DNA, 25 bp, Homo sapien
tgctgcctcaagcatcgacaggtcg

SEQ ID NO: 6018857 - DNA, 25 bp, Homo sapien
ttctccgcgcagttgagggcaccca

SEQ ID NO: 6018858 - DNA, 25 bp, Homo sapien
gccggttaatcgacacgctgaacac

SEQ ID NO: 6018859 - DNA, 25 bp, Homo sapien
cgaccaacgctagtttgggcgacct

SEQ ID NO: 6018860 - DNA, 25 bp, Homo sapien
tcggtccaaccacctgcgtcgacat

SEQ ID NO: 6018861 - DNA, 25 bp, Homo sapien
ttgagtcgataacttctgacaccgc

SEQ ID NO: 6018862 - DNA, 25 bp, Homo sapien
acacgctgaacacatcagggcgcga

SEQ ID NO: 6018863 - DNA, 25 bp, Homo sapien
catcgacaggtcgatctcggcgtag

SEQ ID NO: 6018864 - DNA, 25 bp, Homo sapien
cggtgacaacgacttgctcttcaac

SEQ ID NO: 6018865 - DNA, 25 bp, Homo sapien
agcgactgcaaattctccgcgcagt

SEQ ID NO: 6018866 - DNA, 25 bp, Homo sapien
gggatcgagcgagtactttgctgcc

SEQ ID NO: 6018867 - DNA, 25 bp, Homo sapien
caacgctagtttgggcgacctgtaa

SEQ ID NO: 6018868 - DNA, 25 bp, Homo sapien
tagagattacgacctcacgatcccc

SEQ ID NO: 6018869 - DNA, 25 bp, Homo sapien
ggcgcgaatagtggcccgtgggatc

SEQ ID NO: 6018870 - DNA, 25 bp, Homo sapien
ctgcatgtcaggcccgtagatccgc

SEQ ID NO: 6018871 - DNA, 25 bp, Homo sapien
ctgaacacatcagggcgcgaatagt

SEQ ID NO: 6018872 - DNA, 25 bp, Homo sapien
caacgacttgctcttcaactgcatg

SEQ ID NO: 6018873 - DNA, 25 bp, Homo sapien
ttccaagcgtgaatggccaggcgga

SEQ ID NO: 6018874 - DNA, 25 bp, Homo sapien
tgccggtcggtccaaccacctgcgt

SEQ ID NO: 6018875 - DNA, 25 bp, Homo sapien
cgagcacagggcttccaagcgtgaa

SEQ ID NO: 6018876 - DNA, 25 bp, Homo sapien
tgagaacgaaggtccccgtctcggc

SEQ ID NO: 6018877 - DNA, 25 bp, Homo sapien
caaccacctgcgtcgacatgagaac

SEQ ID NO: 6018878 - DNA, 25 bp, Homo sapien
ccctattgccgtagagattacgacc

SEQ ID NO: 6018879 - DNA, 25 bp, Homo sapien
ggcgtagacgatgccctcttcggtc

SEQ ID NO: 6018880 - DNA, 25 bp, Homo sapien
gtagatccgcgcgtacccaccacca

SEQ ID NO: 6018881 - DNA, 25 bp, Homo sapien
ttgtttagcgactgcaaattctccg

SEQ ID NO: 6018882 - DNA, 25 bp, Homo sapien
gcaagcgcaaacttgtttagcgact

SEQ ID NO: 6018883 - DNA, 25 bp, Homo sapien
cttctgacaccgcaggctgccgttg

SEQ ID NO: 6018884 - DNA, 25 bp, Homo sapien
gccctcttcggtcggtgacaacgac

SEQ ID NO: 6018885 - DNA, 25 bp, Homo sapien
cttgctcttcaactgcatgtcaggc

SEQ ID NO: 6018886 - DNA, 25 bp, Homo sapien
gcgtacccaccaccaagatactgat

SEQ ID NO: 6018887 - DNA, 25 bp, Homo sapien
cctgtcttcgatctcgaaggcggcg

SEQ ID NO: 6018888 - DNA, 25 bp, Homo sapien
cgtctcggccgcgtagacctggttg

SEQ ID NO: 6018889 - DNA, 25 bp, Homo sapien
cctgcgtcgacatgagaacgaaggt

SEQ ID NO: 6018890 - DNA, 25 bp, Homo sapien
tcgaaggcggcgatgccggtcggtc

SEQ ID NO: 6018891 - DNA, 25 bp, Homo sapien
cggccgcgtagacctggttgatggc

SEQ ID NO: 6018892 - DNA, 25 bp, Homo sapien
tcgacatgagaacgaaggtccccgt

SEQ ID NO: 6018893 - DNA, 25 bp, Homo sapien
caggctgccgttgccggttaatcga

SEQ ID NO: 6018894 - DNA, 25 bp, Homo sapien
tgcaaattctccgcgcagttgaggg

SEQ ID NO: 6018895 - DNA, 25 bp, Homo sapien
gtactttgctgcctcaagcatcgac

SEQ ID NO: 6018896 - DNA, 25 bp, Homo sapien
tcgtcgggctcgcatgctgctctcg

SEQ ID NO: 6018897 - DNA, 25 bp, Homo sapien
cgtagacctggttgatggcgccgat

SEQ ID NO: 6018898 - DNA, 25 bp, Homo sapien
cccctcgtcgggctcgcatgctgct

SEQ ID NO: 6018899 - DNA, 25 bp, Homo sapien
cgataacttctgacaccgcaggctg

SEQ ID NO: 6018900 - DNA, 25 bp, Homo sapien
tcgggtcctcgtcaccgtttgagtc

SEQ ID NO: 6018901 - DNA, 25 bp, Homo sapien
ttcggtcggtgacaacgacttgctc

SEQ ID NO: 6018902 - DNA, 25 bp, Homo sapien
gagcgagtactttgctgcctcaagc

SEQ ID NO: 6018903 - DNA, 25 bp, Homo sapien
ggcgacctgtaagtccgatccgtca

SEQ ID NO: 6018904 - DNA, 25 bp, Homo sapien
tccgcgcgtacccaccaccaagata

SEQ ID NO: 6018905 - DNA, 25 bp, Homo sapien
cacccacccgaccaacgctagtttg

SEQ ID NO: 6018906 - DNA, 25 bp, Homo sapien
gtcaggcccgtagatccgcgcgtac

SEQ ID NO: 6018907 - DNA, 25 bp, Homo sapien
cagggcttccaagcgtgaatggcca

SEQ ID NO: 6018908 - DNA, 25 bp, Homo sapien
cctcgtcaccgtttgagtcgataac

SEQ ID NO: 6018909 - DNA, 25 bp, Homo sapien
ggccaggcggagatatgtatctgtt

SEQ ID NO: 6018910 - DNA, 25 bp, Homo sapien
atactgattcgggttgtacctgtct

SEQ ID NO: 6018911 - DNA, 25 bp, Homo sapien
atatgtatctgttcaccctcggcag

SEQ ID NO: 6018912 - DNA, 25 bp, Homo sapien
taatcgacacgctgaacacatcagg

SEQ ID NO: 6018913 - DNA, 25 bp, Homo sapien
agtttgggcgacctgtaagtccgat

SEQ ID NO: 6018914 - DNA, 25 bp, Homo sapien
gatctcggcgtagacgatgccctct

SEQ ID NO: 6018915 - DNA, 25 bp, Homo sapien
atagtggcccgtgggatcgagcgag

SEQ ID NO: 6018916 - DNA, 25 bp, Homo sapien
gacgatgccctcttcggtcggtgac

SEQ ID NO: 6018917 - DNA, 25 bp, Homo sapien
gcatgctgctctcgggtcctcgtca

SEQ ID NO: 6018918 - DNA, 25 bp, Homo sapien
accctcggcagcaagcgcaaacttg

SEQ ID NO: 6018919 - DNA, 25 bp, Homo sapien
ctcaagcatcgacaggtcgatctcg

SEQ ID NO: 6018920 - DNA, 25 bp, Homo sapien
tgatggcgccgatggagtctccgac

SEQ ID NO: 6018921 - DNA, 25 bp, Homo sapien
cacccgaccaacgctagtttgggcg

SEQ ID NO: 6018922 - DNA, 25 bp, Homo sapien
atctgttcaccctcggcagcaagcg

SEQ ID NO: 6018923 - DNA, 25 bp, Homo sapien
acgatccccctcgtcgggctcgcat

SEQ ID NO: 6018924 - DNA, 25 bp, Homo sapien
ttcgatctcgaaggcggcgatgccg

SEQ ID NO: 6018925 - DNA, 25 bp, Homo sapien
gggctcgcatgctgctctcgggtcc

SEQ ID NO: 6018926 - DNA, 25 bp, Homo sapien
cctggttgatggcgccgatggagtc

SEQ ID NO: 6018927 - DNA, 25 bp, Homo sapien
gcccgtgggatcgagcgagtacttt

SEQ ID NO: 6018928 - DNA, 25 bp, Homo sapien
cgtgaatggccaggcggagatatgt

SEQ ID NO: 6018929 - DNA, 25 bp, Homo sapien
ctccgacgagcacagggcttccaag

SEQ ID NO: 6018930 - DNA, 25 bp, Homo sapien
gcaaacttgtttagcgactgcaaat

SEQ ID NO: 6018931 - DNA, 25 bp, Homo sapien
caggtcgatctcggcgtagacgatg

SEQ ID NO: 6018932 - DNA, 25 bp, Homo sapien
ttgccgtagagattacgacctcacg

SEQ ID NO: 6018933 - DNA, 25 bp, Homo sapien
cggcagcaagcgcaaacttgtttag

SEQ ID NO: 6018934 - DNA, 25 bp, Homo sapien
catcagggcgcgaatagtggcccgt

SEQ ID NO: 6018935 - DNA, 25 bp, Homo sapien
gcggagatatgtatctgttcaccct

SEQ ID NO: 6018936 - DNA, 25 bp, Homo sapien
gccgttgccggttaatcgacacgct

SEQ ID NO: 6018937 - DNA, 25 bp, Homo sapien
cgcagttgagggcacccacccgacc

SEQ ID NO: 6018938 - DNA, 25 bp, Homo sapien
cgccgatggagtctccgacgagcac

SEQ ID NO: 6018939 - DNA, 25 bp, Homo sapien
tgctctcgggtcctcgtcaccgttt

SEQ ID NO: 6018940 - DNA, 25 bp, Homo sapien
ccaagctgcatcatcgaaattgccg

SEQ ID NO: 6018941 - DNA, 25 bp, Homo sapien
attgcgtcgcatcgaccctgcgccc

SEQ ID NO: 6018942 - DNA, 25 bp, Homo sapien
gagttggtcaagaccaatgcggagc

SEQ ID NO: 6018943 - DNA, 25 bp, Homo sapien
cggagccgcggcgatcctgcaagct

SEQ ID NO: 6018944 - DNA, 25 bp, Homo sapien
cacatggggatcagcaatcgcgcat

SEQ ID NO: 6018945 - DNA, 25 bp, Homo sapien
cgtgcacgaggtgccggacttcggg

SEQ ID NO: 6018946 - DNA, 25 bp, Homo sapien
ctgttatgcggccattgtccgtcag

SEQ ID NO: 6018947 - DNA, 25 bp, Homo sapien
cgaccctgcgcccaagctgcatcat

SEQ ID NO: 6018948 - DNA, 25 bp, Homo sapien
atatacgcccggagccgcggcgatc

SEQ ID NO: 6018949 - DNA, 25 bp, Homo sapien
cggggcagtcctcggcccaaagcat

SEQ ID NO: 6018950 - DNA, 25 bp, Homo sapien
gttggagccgaaatccgcgtgcacg

SEQ ID NO: 6018951 - DNA, 25 bp, Homo sapien
gacattgttggagccgaaatccgcg

SEQ ID NO: 6018952 - DNA, 25 bp, Homo sapien
attgccgtcaaccaagctctgatag

SEQ ID NO: 6018953 - DNA, 25 bp, Homo sapien
cggcccaaagcatcagctcatcgag

SEQ ID NO: 6018954 - DNA, 25 bp, Homo sapien
acagtcccggctccggatcggacga

SEQ ID NO: 6018955 - DNA, 25 bp, Homo sapien
caagctctgatagagttggtcaaga

SEQ ID NO: 6018956 - DNA, 25 bp, Homo sapien
gccgaaatccgcgtgcacgaggtgc

SEQ ID NO: 6018957 - DNA, 25 bp, Homo sapien
cggtgtcgtccatcacagtttgcca

SEQ ID NO: 6018958 - DNA, 25 bp, Homo sapien
atacaagccaaccacggcctccaga

SEQ ID NO: 6018959 - DNA, 25 bp, Homo sapien
ttgaccgattccttgcggtccgaat

SEQ ID NO: 6018960 - DNA, 25 bp, Homo sapien
tttgccagtgatacacatggggatc

SEQ ID NO: 6018961 - DNA, 25 bp, Homo sapien
ggcgatttgtgtacgcccgacagtc

SEQ ID NO: 6018962 - DNA, 25 bp, Homo sapien
tcagctcatcgagagcctgcgcgac

SEQ ID NO: 6018963 - DNA, 25 bp, Homo sapien
agtcaatgaccgctgttatgcggcc

SEQ ID NO: 6018964 - DNA, 25 bp, Homo sapien
tcgcctcgctccagtcaatgaccgc

SEQ ID NO: 6018965 - DNA, 25 bp, Homo sapien
ccacggcctccagaagaagatgttg

SEQ ID NO: 6018966 - DNA, 25 bp, Homo sapien
tacttctacacagccatcggtccag

SEQ ID NO: 6018967 - DNA, 25 bp, Homo sapien
acacagccatcggtccagacggccg

SEQ ID NO: 6018968 - DNA, 25 bp, Homo sapien
gtccagacggccgcgcttctgcggg

SEQ ID NO: 6018969 - DNA, 25 bp, Homo sapien
gcgatcctgcaagctccggatgcct

SEQ ID NO: 6018970 - DNA, 25 bp, Homo sapien
ctccgctcgaagtagcgcgtctgct

SEQ ID NO: 6018971 - DNA, 25 bp, Homo sapien
ccatgtagtgtattgaccgattcct

SEQ ID NO: 6018972 - DNA, 25 bp, Homo sapien
cgtcaggacattgttggagccgaaa

SEQ ID NO: 6018973 - DNA, 25 bp, Homo sapien
aaagcatcagctcatcgagagcctg

SEQ ID NO: 6018974 - DNA, 25 bp, Homo sapien
actatcggcgagtacttctacacag

SEQ ID NO: 6018975 - DNA, 25 bp, Homo sapien
ttgggaatccccgaacatcgcctcg

SEQ ID NO: 6018976 - DNA, 25 bp, Homo sapien
gcgcatatgaaatcacgccatgtag

SEQ ID NO: 6018977 - DNA, 25 bp, Homo sapien
tctgcgggcgatttgtgtacgcccg

SEQ ID NO: 6018978 - DNA, 25 bp, Homo sapien
tgctccatacaagccaaccacggcc

SEQ ID NO: 6018979 - DNA, 25 bp, Homo sapien
agctccggatgcctccgctcgaagt

SEQ ID NO: 6018980 - DNA, 25 bp, Homo sapien
aatccgcgtgcacgaggtgccggac

SEQ ID NO: 6018981 - DNA, 25 bp, Homo sapien
ggatgcctccgctcgaagtagcgcg

SEQ ID NO: 6018982 - DNA, 25 bp, Homo sapien
ccggctccggatcggacgattgcgt

SEQ ID NO: 6018983 - DNA, 25 bp, Homo sapien
gcgtcggtttccactatcggcgagt

SEQ ID NO: 6018984 - DNA, 25 bp, Homo sapien
cgcgcttctgcgggcgatttgtgta

SEQ ID NO: 6018985 - DNA, 25 bp, Homo sapien
ggacttcggggcagtcctcggccca

SEQ ID NO: 6018986 - DNA, 25 bp, Homo sapien
ccatcggtccagacggccgcgcttc

SEQ ID NO: 6018987 - DNA, 25 bp, Homo sapien
ttgtgtacgcccgacagtcccggct

SEQ ID NO: 6018988 - DNA, 25 bp, Homo sapien
tagcgcgtctgctgctccatacaag

SEQ ID NO: 6018989 - DNA, 25 bp, Homo sapien
ggcgagtacttctacacagccatcg

SEQ ID NO: 6018990 - DNA, 25 bp, Homo sapien
cctccagaagaagatgttggcgacc

SEQ ID NO: 6018991 - DNA, 25 bp, Homo sapien
tcgaagtagcgcgtctgctgctcca

SEQ ID NO: 6018992 - DNA, 25 bp, Homo sapien
gtctgctgctccatacaagccaacc

SEQ ID NO: 6018993 - DNA, 25 bp, Homo sapien
ctcgtattgggaatccccgaacatc

SEQ ID NO: 6018994 - DNA, 25 bp, Homo sapien
gcaatcgcgcatatgaaatcacgcc

SEQ ID NO: 6018995 - DNA, 25 bp, Homo sapien
gattccttgcggtccgaatgggccg

SEQ ID NO: 6018996 - DNA, 25 bp, Homo sapien
cactgacggtgtcgtccatcacagt

SEQ ID NO: 6018997 - DNA, 25 bp, Homo sapien
gagcctgcgcgacggacgcactgac

SEQ ID NO: 6018998 - DNA, 25 bp, Homo sapien
atcacgccatgtagtgtattgaccg

SEQ ID NO: 6018999 - DNA, 25 bp, Homo sapien
acggccgcgcttctgcgggcgattt

SEQ ID NO: 6019000 - DNA, 25 bp, Homo sapien
agtcctcggcccaaagcatcagctc

SEQ ID NO: 6019001 - DNA, 25 bp, Homo sapien
ctgatagagttggtcaagaccaatg

SEQ ID NO: 6019002 - DNA, 25 bp, Homo sapien
cgtccatcacagtttgccagtgata

SEQ ID NO: 6019003 - DNA, 25 bp, Homo sapien
ggtttccactatcggcgagtacttc

SEQ ID NO: 6019004 - DNA, 25 bp, Homo sapien
gaagaagatgttggcgacctcgtat

SEQ ID NO: 6019005 - DNA, 25 bp, Homo sapien
tcgcatcgaccctgcgcccaagctg

SEQ ID NO: 6019006 - DNA, 25 bp, Homo sapien
gcgacctcgtattgggaatccccga

SEQ ID NO: 6019007 - DNA, 25 bp, Homo sapien
gcggagcatatacgcccggagccgc

SEQ ID NO: 6019008 - DNA, 25 bp, Homo sapien
agtgatacacatggggatcagcaat

SEQ ID NO: 6019009 - DNA, 25 bp, Homo sapien
gccaaccacggcctccagaagaaga

SEQ ID NO: 6019010 - DNA, 25 bp, Homo sapien
gtcaagaccaatgcggagcatatac

SEQ ID NO: 6019011 - DNA, 25 bp, Homo sapien
ctgcgcccaagctgcatcatcgaaa

SEQ ID NO: 6019012 - DNA, 25 bp, Homo sapien
atgaaatcacgccatgtagtgtatt

SEQ ID NO: 6019013 - DNA, 25 bp, Homo sapien
ctgcaagctccggatgcctccgctc

SEQ ID NO: 6019014 - DNA, 25 bp, Homo sapien
tgaccgctgttatgcggccattgtc

SEQ ID NO: 6019015 - DNA, 25 bp, Homo sapien
tcacagtttgccagtgatacacatg

SEQ ID NO: 6019016 - DNA, 25 bp, Homo sapien
cggacgcactgacggtgtcgtccat

SEQ ID NO: 6019017 - DNA, 25 bp, Homo sapien
attgtccgtcaggacattgttggag

SEQ ID NO: 6019018 - DNA, 25 bp, Homo sapien
tgcatcatcgaaattgccgtcaacc

SEQ ID NO: 6019019 - DNA, 25 bp, Homo sapien
agtgtattgaccgattccttgcggt

SEQ ID NO: 6019020 - DNA, 25 bp, Homo sapien
atcgaaattgccgtcaaccaagctc

SEQ ID NO: 6019021 - DNA, 25 bp, Homo sapien
catcgagagcctgcgcgacggacgc

SEQ ID NO: 6019022 - DNA, 25 bp, Homo sapien
gggatcagcaatcgcgcatatgaaa

SEQ ID NO: 6019023 - DNA, 25 bp, Homo sapien
gccgcggcgatcctgcaagctccgg

SEQ ID NO: 6019024 - DNA, 25 bp, Homo sapien
cgctccagtcaatgaccgctgttat

SEQ ID NO: 6019025 - DNA, 25 bp, Homo sapien
ccggatcggacgattgcgtcgcatc

SEQ ID NO: 6019026 - DNA, 25 bp, Homo sapien
accaatgcggagcatatacgcccgg

SEQ ID NO: 6019027 - DNA, 25 bp, Homo sapien
atgttggcgacctcgtattgggaat

SEQ ID NO: 6019028 - DNA, 25 bp, Homo sapien
gcgcgacggacgcactgacggtgtc

SEQ ID NO: 6019029 - DNA, 25 bp, Homo sapien
cgaacatcgcctcgctccagtcaat

SEQ ID NO: 6019030 - DNA, 25 bp, Homo sapien
tgcggccattgtccgtcaggacatt

SEQ ID NO: 6019031 - DNA, 25 bp, Homo sapien
gtcaaccaagctctgatagagttgg

SEQ ID NO: 6019032 - DNA, 25 bp, Homo sapien
cggacgattgcgtcgcatcgaccct

SEQ ID NO: 6019033 - DNA, 25 bp, Homo sapien
agtgaaggacaatgagctatcagca

SEQ ID NO: 6019034 - DNA, 25 bp, Homo sapien
cggggtcagtggcactaatgattgc

SEQ ID NO: 6019035 - DNA, 25 bp, Homo sapien
agtgaaagtgaaggacaatgagcta

SEQ ID NO: 6019036 - DNA, 25 bp, Homo sapien
gactagatcactgaaacttgctcct

SEQ ID NO: 6019037 - DNA, 25 bp, Homo sapien
attgtagtggtattaaacatccctg

SEQ ID NO: 6019038 - DNA, 25 bp, Homo sapien
tgtgaaagcgcttgagaatttgttt

SEQ ID NO: 6019039 - DNA, 25 bp, Homo sapien
ccatcatcaattttactagccgtga

SEQ ID NO: 6019040 - DNA, 25 bp, Homo sapien
aatattcccactttgattaaaattg

SEQ ID NO: 6019041 - DNA, 25 bp, Homo sapien
tcagtggcactaatgattgcagctg

SEQ ID NO: 6019042 - DNA, 25 bp, Homo sapien
aaaaggcgtgactgagcgatgcgaa

SEQ ID NO: 6019043 - DNA, 25 bp, Homo sapien
caatggcacaggtgaaggccctact

SEQ ID NO: 6019044 - DNA, 25 bp, Homo sapien
tgatttcaatggcacaggtgaaggc

SEQ ID NO: 6019045 - DNA, 25 bp, Homo sapien
tcaattttactagccgtgatttcat

SEQ ID NO: 6019046 - DNA, 25 bp, Homo sapien
gcagctgttgctgttgccctagaaa

SEQ ID NO: 6019047 - DNA, 25 bp, Homo sapien
tgttgccctagaaaaggcgtgactg

SEQ ID NO: 6019048 - DNA, 25 bp, Homo sapien
agataacagcttgactagatcactg

SEQ ID NO: 6019049 - DNA, 25 bp, Homo sapien
attggttgtgaaagcgcttgagaat

SEQ ID NO: 6019050 - DNA, 25 bp, Homo sapien
cctagaaaaggcgtgactgagcgat

SEQ ID NO: 6019051 - DNA, 25 bp, Homo sapien
gaggcaattggttgtgaaagcgctt

SEQ ID NO: 6019052 - DNA, 25 bp, Homo sapien
cacaggtgaaggccctactgagcca

SEQ ID NO: 6019053 - DNA, 25 bp, Homo sapien
cgagagggtggacggttagataaca

SEQ ID NO: 6019054 - DNA, 25 bp, Homo sapien
tggttttgaattattaccatcatca

SEQ ID NO: 6019055 - DNA, 25 bp, Homo sapien
aaacaaagcagacggggtcagtggc

SEQ ID NO: 6019056 - DNA, 25 bp, Homo sapien
cccactttgattaaaattggcgcca

SEQ ID NO: 6019057 - DNA, 25 bp, Homo sapien
tgagctatcagcaatattcccactt

SEQ ID NO: 6019058 - DNA, 25 bp, Homo sapien
ttcatcatcgaatagatagttatat

SEQ ID NO: 6019059 - DNA, 25 bp, Homo sapien
tatacatcatccattgtagtggtat

SEQ ID NO: 6019060 - DNA, 25 bp, Homo sapien
aggagaaacatatttaacactgata

SEQ ID NO: 6019061 - DNA, 25 bp, Homo sapien
actgttagtgaaagtgaaggacaat

SEQ ID NO: 6019062 - DNA, 25 bp, Homo sapien
atttgtttgagttgttatgaggttc

SEQ ID NO: 6019063 - DNA, 25 bp, Homo sapien
gccaccaaacaaagcagacggggtc

SEQ ID NO: 6019064 - DNA, 25 bp, Homo sapien
ttagaggaggcaattggttgtgaaa

SEQ ID NO: 6019065 - DNA, 25 bp, Homo sapien
atcagcaatattcccactttgatta

SEQ ID NO: 6019066 - DNA, 25 bp, Homo sapien
ggacaatgagctatcagcaatattc

SEQ ID NO: 6019067 - DNA, 25 bp, Homo sapien
aatagatagttatatacatcatcca

SEQ ID NO: 6019068 - DNA, 25 bp, Homo sapien
tgagccaggagaaacatatttaaca

SEQ ID NO: 6019069 - DNA, 25 bp, Homo sapien
ttccaaacgcgttatacgcagtttg

SEQ ID NO: 6019070 - DNA, 25 bp, Homo sapien
cactgatattgttgacattttcctc

SEQ ID NO: 6019071 - DNA, 25 bp, Homo sapien
tgctcctgatttcaatggcacaggt

SEQ ID NO: 6019072 - DNA, 25 bp, Homo sapien
tccctgtagtgattccaaacgcgtt

SEQ ID NO: 6019073 - DNA, 25 bp, Homo sapien
tgacagtggttttgaattattacca

SEQ ID NO: 6019074 - DNA, 25 bp, Homo sapien
gcttcttggtattgtcactggagag

SEQ ID NO: 6019075 - DNA, 25 bp, Homo sapien
acggttagataacagcttgactaga

SEQ ID NO: 6019076 - DNA, 25 bp, Homo sapien
cgtccaaccaggtgacagtggtttt

SEQ ID NO: 6019077 - DNA, 25 bp, Homo sapien
tgaattattaccatcatcaatttta

SEQ ID NO: 6019078 - DNA, 25 bp, Homo sapien
atcactgaaacttgctcctgatttc

SEQ ID NO: 6019079 - DNA, 25 bp, Homo sapien
gcactaatgattgcagctgttgctg

SEQ ID NO: 6019080 - DNA, 25 bp, Homo sapien
ttatcatgaacgttagaggaggcaa

SEQ ID NO: 6019081 - DNA, 25 bp, Homo sapien
gaagagtagggtattgggcgatagt

SEQ ID NO: 6019082 - DNA, 25 bp, Homo sapien
agcgcttgagaatttgtttgagttg

SEQ ID NO: 6019083 - DNA, 25 bp, Homo sapien
aacatatttaacactgatattgttg

SEQ ID NO: 6019084 - DNA, 25 bp, Homo sapien
tggagagttacgagagggtggacgg

SEQ ID NO: 6019085 - DNA, 25 bp, Homo sapien
cggaccgttgctactgttagtgaaa

SEQ ID NO: 6019086 - DNA, 25 bp, Homo sapien
gaggttcggaccgttgctactgtta

SEQ ID NO: 6019087 - DNA, 25 bp, Homo sapien
ttgagttgttatgaggttcggaccg

SEQ ID NO: 6019088 - DNA, 25 bp, Homo sapien
ttattaccatcatcaattttactag

SEQ ID NO: 6019089 - DNA, 25 bp, Homo sapien
tgaacgttagaggaggcaattggtt

SEQ ID NO: 6019090 - DNA, 25 bp, Homo sapien
gaaacttgctcctgatttcaatggc

SEQ ID NO: 6019091 - DNA, 25 bp, Homo sapien
tgttatgaggttcggaccgttgcta

SEQ ID NO: 6019092 - DNA, 25 bp, Homo sapien
tgtcactggagagttacgagagggt

SEQ ID NO: 6019093 - DNA, 25 bp, Homo sapien
ttatacgcagtttggtccgtccaac

SEQ ID NO: 6019094 - DNA, 25 bp, Homo sapien
tcatcgaatagatagttatatacat

SEQ ID NO: 6019095 - DNA, 25 bp, Homo sapien
tagttatatacatcatccattgtag

SEQ ID NO: 6019096 - DNA, 25 bp, Homo sapien
ttattcatgaagttatcatgaacgt

SEQ ID NO: 6019097 - DNA, 25 bp, Homo sapien
accaggtgacagtggttttgaatta

SEQ ID NO: 6019098 - DNA, 25 bp, Homo sapien
aggtgtgcttcttggtattgtcact

SEQ ID NO: 6019099 - DNA, 25 bp, Homo sapien
aattggcgccaccaaacaaagcaga

SEQ ID NO: 6019100 - DNA, 25 bp, Homo sapien
agcagacggggtcagtggcactaat

SEQ ID NO: 6019101 - DNA, 25 bp, Homo sapien
taaacatccctgtagtgattccaaa

SEQ ID NO: 6019102 - DNA, 25 bp, Homo sapien
atgattgcagctgttgctgttgccc

SEQ ID NO: 6019103 - DNA, 25 bp, Homo sapien
ttggtccgtccaaccaggtgacagt

SEQ ID NO: 6019104 - DNA, 25 bp, Homo sapien
tgacattttcctccggaagagtagg

SEQ ID NO: 6019105 - DNA, 25 bp, Homo sapien
gtggtattaaacatccctgtagtga

SEQ ID NO: 6019106 - DNA, 25 bp, Homo sapien
tgaaggccctactgagccaggagaa

SEQ ID NO: 6019107 - DNA, 25 bp, Homo sapien
atgaagttatcatgaacgttagagg

SEQ ID NO: 6019108 - DNA, 25 bp, Homo sapien
ccctactgagccaggagaaacatat

SEQ ID NO: 6019109 - DNA, 25 bp, Homo sapien
tgagaatttgtttgagttgttatga

SEQ ID NO: 6019110 - DNA, 25 bp, Homo sapien
ctccggaagagtagggtattgggcg

SEQ ID NO: 6019111 - DNA, 25 bp, Homo sapien
ttactagccgtgatttcattattca

SEQ ID NO: 6019112 - DNA, 25 bp, Homo sapien
ggtggacggttagataacagcttga

SEQ ID NO: 6019113 - DNA, 25 bp, Homo sapien
ttgattaaaattggcgccaccaaac

SEQ ID NO: 6019114 - DNA, 25 bp, Homo sapien
cgtgactgagcgatgcgaaggtgtg

SEQ ID NO: 6019115 - DNA, 25 bp, Homo sapien
tgagcgatgcgaaggtgtgcttctt

SEQ ID NO: 6019116 - DNA, 25 bp, Homo sapien
acgcgttatacgcagtttggtccgt

SEQ ID NO: 6019117 - DNA, 25 bp, Homo sapien
tttcattattcatgaagttatcatg

SEQ ID NO: 6019118 - DNA, 25 bp, Homo sapien
gttgctactgttagtgaaagtgaag

SEQ ID NO: 6019119 - DNA, 25 bp, Homo sapien
tattgttgacattttcctccggaag

SEQ ID NO: 6019120 - DNA, 25 bp, Homo sapien
tagtgattccaaacgcgttatacgc

SEQ ID NO: 6019121 - DNA, 25 bp, Homo sapien
tggtattgtcactggagagttacga

SEQ ID NO: 6019122 - DNA, 25 bp, Homo sapien
gttgctgttgccctagaaaaggcgt

SEQ ID NO: 6019123 - DNA, 25 bp, Homo sapien
gcagtttggtccgtccaaccaggtg

SEQ ID NO: 6019124 - DNA, 25 bp, Homo sapien
tcatccattgtagtggtattaaaca

SEQ ID NO: 6019125 - DNA, 25 bp, Homo sapien
atgcgaaggtgtgcttcttggtatt

SEQ ID NO: 6019126 - DNA, 25 bp, Homo sapien
cagcttgactagatcactgaaactt

SEQ ID NO: 6019127 - DNA, 25 bp, Homo sapien
tttaacactgatattgttgacattt

SEQ ID NO: 6019128 - DNA, 25 bp, Homo sapien
ttggcctgaggcctttcgggcctct

SEQ ID NO: 6019129 - DNA, 25 bp, Homo sapien
cctttgcatctggatagggaaaggg

SEQ ID NO: 6019130 - DNA, 25 bp, Homo sapien
gtttatcctctcatgggtgattatc

SEQ ID NO: 6019131 - DNA, 25 bp, Homo sapien
cctaccttaatcccccattctcttg

SEQ ID NO: 6019132 - DNA, 25 bp, Homo sapien
gattatctcagtggtgtcaccaggg

SEQ ID NO: 6019133 - DNA, 25 bp, Homo sapien
ctttcgggcctctccagtgggttct

SEQ ID NO: 6019134 - DNA, 25 bp, Homo sapien
ttgggcgccaagcaacctgccaggt

SEQ ID NO: 6019135 - DNA, 25 bp, Homo sapien
tgtccctgctggtcctggggctgcc

SEQ ID NO: 6019136 - DNA, 25 bp, Homo sapien
agggcaaggggctgcattcctctga

SEQ ID NO: 6019137 - DNA, 25 bp, Homo sapien
gccagaattcccttgggcgccaagc

SEQ ID NO: 6019138 - DNA, 25 bp, Homo sapien
gggctgccagaattcccttgggcgc

SEQ ID NO: 6019139 - DNA, 25 bp, Homo sapien
cactgctgctggctcccgaggacag

SEQ ID NO: 6019140 - DNA, 25 bp, Homo sapien
cagccgaggggtaaagagccctctg

SEQ ID NO: 6019141 - DNA, 25 bp, Homo sapien
tgaggcctttcgggcctctccagtg

SEQ ID NO: 6019142 - DNA, 25 bp, Homo sapien
aatggctgttgacccagggcaccta

SEQ ID NO: 6019143 - DNA, 25 bp, Homo sapien
ctcccgaggacagtgggactttagc

SEQ ID NO: 6019144 - DNA, 25 bp, Homo sapien
ccccaggccgtgcacccttttcagc

SEQ ID NO: 6019145 - DNA, 25 bp, Homo sapien
cctgtgtttatacactgctgctggc

SEQ ID NO: 6019146 - DNA, 25 bp, Homo sapien
cacccttttcagctggatgagagcc

SEQ ID NO: 6019147 - DNA, 25 bp, Homo sapien
aggacagtgggactttagcaaggaa

SEQ ID NO: 6019148 - DNA, 25 bp, Homo sapien
ctttagcaaggaagtgcagccgagg

SEQ ID NO: 6019149 - DNA, 25 bp, Homo sapien
agagggtttggagggcaaggggctg

SEQ ID NO: 6019150 - DNA, 25 bp, Homo sapien
ggttctgtttatcctctcatgggtg

SEQ ID NO: 6019151 - DNA, 25 bp, Homo sapien
cagcagtccttgaatggctgttgac

SEQ ID NO: 6019152 - DNA, 25 bp, Homo sapien
tgccaggtagccagtccctctgtta

SEQ ID NO: 6019153 - DNA, 25 bp, Homo sapien
attcccttgggcgccaagcaacctg

SEQ ID NO: 6019154 - DNA, 25 bp, Homo sapien
catacagtctgctttgtgttgaaac

SEQ ID NO: 6019155 - DNA, 25 bp, Homo sapien
cctctggttcattgcctgatcggct

SEQ ID NO: 6019156 - DNA, 25 bp, Homo sapien
tgggactttagcaaggaagtgcagc

SEQ ID NO: 6019157 - DNA, 25 bp, Homo sapien
tagggaaaggggtggagacatacag

SEQ ID NO: 6019158 - DNA, 25 bp, Homo sapien
atgggtgattatctcagtggtgtca

SEQ ID NO: 6019159 - DNA, 25 bp, Homo sapien
gcaacctgccaggtagccagtccct

SEQ ID NO: 6019160 - DNA, 25 bp, Homo sapien
ttgaaacccagatttgtaccctgtg

SEQ ID NO: 6019161 - DNA, 25 bp, Homo sapien
gctttcaaaatacaagcacagcagt

SEQ ID NO: 6019162 - DNA, 25 bp, Homo sapien
tacaagcctttgcatctggataggg

SEQ ID NO: 6019163 - DNA, 25 bp, Homo sapien
agtccctctgttacaagcctttgca

SEQ ID NO: 6019164 - DNA, 25 bp, Homo sapien
ataggacatttacatcggaaaagtc

SEQ ID NO: 6019165 - DNA, 25 bp, Homo sapien
cctggcccattttaaggtaatctca

SEQ ID NO: 6019166 - DNA, 25 bp, Homo sapien
aggggctgcattcctctgagggact

SEQ ID NO: 6019167 - DNA, 25 bp, Homo sapien
gtctgctttgtgttgaaacccagat

SEQ ID NO: 6019168 - DNA, 25 bp, Homo sapien
ccagtgggttctgtttatcctctca

SEQ ID NO: 6019169 - DNA, 25 bp, Homo sapien
atcggctttgagagagggtttggag

SEQ ID NO: 6019170 - DNA, 25 bp, Homo sapien
catcggaaaagtctctccctacctt

SEQ ID NO: 6019171 - DNA, 25 bp, Homo sapien
tttgtgttgaaacccagatttgtac

SEQ ID NO: 6019172 - DNA, 25 bp, Homo sapien
ggcctctccagtgggttctgtttat

SEQ ID NO: 6019173 - DNA, 25 bp, Homo sapien
tgcattcctctgagggacttggcct

SEQ ID NO: 6019174 - DNA, 25 bp, Homo sapien
gttgacccagggcacctagctgtcc

SEQ ID NO: 6019175 - DNA, 25 bp, Homo sapien
gggtaaagagccctctggttcattg

SEQ ID NO: 6019176 - DNA, 25 bp, Homo sapien
agtcatccccaggccgtgcaccctt

SEQ ID NO: 6019177 - DNA, 25 bp, Homo sapien
gtagccagtccctctgttacaagcc

SEQ ID NO: 6019178 - DNA, 25 bp, Homo sapien
ttaatcccccattctcttgctttca

SEQ ID NO: 6019179 - DNA, 25 bp, Homo sapien
gaagtcagtcatccccaggccgtgc

SEQ ID NO: 6019180 - DNA, 25 bp, Homo sapien
tttgagagagggtttggagggcaag

SEQ ID NO: 6019181 - DNA, 25 bp, Homo sapien
tttatacactgctgctggctcccga

SEQ ID NO: 6019182 - DNA, 25 bp, Homo sapien
cccagatttgtaccctgtgtttata

SEQ ID NO: 6019183 - DNA, 25 bp, Homo sapien
gccgtgcacccttttcagctggatg

SEQ ID NO: 6019184 - DNA, 25 bp, Homo sapien
tcctggggctgccagaattcccttg

SEQ ID NO: 6019185 - DNA, 25 bp, Homo sapien
gcattctctccaaacagctaccctg

SEQ ID NO: 6019186 - DNA, 25 bp, Homo sapien
ctcagtggtgtcaccaggggcttcc

SEQ ID NO: 6019187 - DNA, 25 bp, Homo sapien
ggcttcctcccagaagtcagtcatc

SEQ ID NO: 6019188 - DNA, 25 bp, Homo sapien
tggagacatacagtctgctttgtgt

SEQ ID NO: 6019189 - DNA, 25 bp, Homo sapien
caagcacagcagtccttgaatggct

SEQ ID NO: 6019190 - DNA, 25 bp, Homo sapien
catttacatcggaaaagtctctccc

SEQ ID NO: 6019191 - DNA, 25 bp, Homo sapien
tgcctgatcggctttgagagagggt

SEQ ID NO: 6019192 - DNA, 25 bp, Homo sapien
tttcagctggatgagagccagggat

SEQ ID NO: 6019193 - DNA, 25 bp, Homo sapien
agggatgcattctctccaaacagct

SEQ ID NO: 6019194 - DNA, 25 bp, Homo sapien
tgctggtcctggggctgccagaatt

SEQ ID NO: 6019195 - DNA, 25 bp, Homo sapien
gccaagcaacctgccaggtagccag

SEQ ID NO: 6019196 - DNA, 25 bp, Homo sapien
tccttgaatggctgttgacccaggg

SEQ ID NO: 6019197 - DNA, 25 bp, Homo sapien
tctccaaacagctaccctggcccat

SEQ ID NO: 6019198 - DNA, 25 bp, Homo sapien
agagccagggatgcattctctccaa

SEQ ID NO: 6019199 - DNA, 25 bp, Homo sapien
tggatgagagccagggatgcattct

SEQ ID NO: 6019200 - DNA, 25 bp, Homo sapien
tctcttgctttcaaaatacaagcac

SEQ ID NO: 6019201 - DNA, 25 bp, Homo sapien
aacagctaccctggcccattttaag

SEQ ID NO: 6019202 - DNA, 25 bp, Homo sapien
aaggggtggagacatacagtctgct

SEQ ID NO: 6019203 - DNA, 25 bp, Homo sapien
agggcacctagctgtccctgctggt

SEQ ID NO: 6019204 - DNA, 25 bp, Homo sapien
accaggggcttcctcccagaagtca

SEQ ID NO: 6019205 - DNA, 25 bp, Homo sapien
agggacttggcctgaggcctttcgg

SEQ ID NO: 6019206 - DNA, 25 bp, Homo sapien
aaaatacaagcacagcagtccttga

SEQ ID NO: 6019207 - DNA, 25 bp, Homo sapien
cctctgagggacttggcctgaggcc

SEQ ID NO: 6019208 - DNA, 25 bp, Homo sapien
ttgtaccctgtgtttatacactgct

SEQ ID NO: 6019209 - DNA, 25 bp, Homo sapien
aagagccctctggttcattgcctga

SEQ ID NO: 6019210 - DNA, 25 bp, Homo sapien
cctctcatgggtgattatctcagtg

SEQ ID NO: 6019211 - DNA, 25 bp, Homo sapien
ccccattctcttgctttcaaaatac

SEQ ID NO: 6019212 - DNA, 25 bp, Homo sapien
gttcattgcctgatcggctttgaga

SEQ ID NO: 6019213 - DNA, 25 bp, Homo sapien
ggtgtcaccaggggcttcctcccag

SEQ ID NO: 6019214 - DNA, 25 bp, Homo sapien
cctagctgtccctgctggtcctggg

SEQ ID NO: 6019215 - DNA, 25 bp, Homo sapien
tgctggctcccgaggacagtgggac

SEQ ID NO: 6019216 - DNA, 25 bp, Homo sapien
tctgttacaagcctttgcatctgga

SEQ ID NO: 6019217 - DNA, 25 bp, Homo sapien
ctcccagaagtcagtcatccccagg

SEQ ID NO: 6019218 - DNA, 25 bp, Homo sapien
gtttggagggcaaggggctgcattc

SEQ ID NO: 6019219 - DNA, 25 bp, Homo sapien
gtagaaatggcttctcaaataactg

SEQ ID NO: 6019220 - DNA, 25 bp, Homo sapien
actgctagcccgtcgaggttggcaa

SEQ ID NO: 6019221 - DNA, 25 bp, Homo sapien
caccacacacaacactgaacccatc

SEQ ID NO: 6019222 - DNA, 25 bp, Homo sapien
tttggaggattctatggaacatttt

SEQ ID NO: 6019223 - DNA, 25 bp, Homo sapien
acacaacactgaacccatcgctgct

SEQ ID NO: 6019224 - DNA, 25 bp, Homo sapien
aggcaatgaaccagagggctcttta

SEQ ID NO: 6019225 - DNA, 25 bp, Homo sapien
actgagataatcacccatgagagga

SEQ ID NO: 6019226 - DNA, 25 bp, Homo sapien
tgaaccagagggctctttacccctc

SEQ ID NO: 6019227 - DNA, 25 bp, Homo sapien
aggccaagtccctcagaggaatgca

SEQ ID NO: 6019228 - DNA, 25 bp, Homo sapien
gggaggaagcccctggtgacaccac

SEQ ID NO: 6019229 - DNA, 25 bp, Homo sapien
tgagtgggttttgggaacttggcga

SEQ ID NO: 6019230 - DNA, 25 bp, Homo sapien
ccttctcctggaccgttttcacatt

SEQ ID NO: 6019231 - DNA, 25 bp, Homo sapien
gaaacaaaatacagtattcaccaca

SEQ ID NO: 6019232 - DNA, 25 bp, Homo sapien
ggagacagaactgaaacaaaataca

SEQ ID NO: 6019233 - DNA, 25 bp, Homo sapien
agaggcccgaaaggcctcaggccaa

SEQ ID NO: 6019234 - DNA, 25 bp, Homo sapien
taaaatgggccagggtagctgtttg

SEQ ID NO: 6019235 - DNA, 25 bp, Homo sapien
acttctgggaggaagcccctggtga

SEQ ID NO: 6019236 - DNA, 25 bp, Homo sapien
ctttgctgagtgggttttgggaact

SEQ ID NO: 6019237 - DNA, 25 bp, Homo sapien
ataactgtcatatattaaaaataag

SEQ ID NO: 6019238 - DNA, 25 bp, Homo sapien
gctaaagtcccactgtcctcgggag

SEQ ID NO: 6019239 - DNA, 25 bp, Homo sapien
atgcatccctggctctcatccagct

SEQ ID NO: 6019240 - DNA, 25 bp, Homo sapien
agaacccactggagaggcccgaaag

SEQ ID NO: 6019241 - DNA, 25 bp, Homo sapien
cagagggctctttacccctcggctg

SEQ ID NO: 6019242 - DNA, 25 bp, Homo sapien
tggggatgactgacttctgggagga

SEQ ID NO: 6019243 - DNA, 25 bp, Homo sapien
acggcctggggatgactgacttctg

SEQ ID NO: 6019244 - DNA, 25 bp, Homo sapien
tcgaggttggcaactttgctgagtg

SEQ ID NO: 6019245 - DNA, 25 bp, Homo sapien
ttagacactgctagcccgtcgaggt

SEQ ID NO: 6019246 - DNA, 25 bp, Homo sapien
cagccccttgccctccaaaccctct

SEQ ID NO: 6019247 - DNA, 25 bp, Homo sapien
ccctggctctcatccagctgaaaag

SEQ ID NO: 6019248 - DNA, 25 bp, Homo sapien
aagctgccttctcctggaccgtttt

SEQ ID NO: 6019249 - DNA, 25 bp, Homo sapien
cactgaacccatcgctgcttagaca

SEQ ID NO: 6019250 - DNA, 25 bp, Homo sapien
cctctctcaaagccgatcaggcaat

SEQ ID NO: 6019251 - DNA, 25 bp, Homo sapien
ttccttgctaaagtcccactgtcct

SEQ ID NO: 6019252 - DNA, 25 bp, Homo sapien
cacattatctgggagacagaactga

SEQ ID NO: 6019253 - DNA, 25 bp, Homo sapien
cactggagaggcccgaaaggcctca

SEQ ID NO: 6019254 - DNA, 25 bp, Homo sapien
tatctgggagacagaactgaaacaa

SEQ ID NO: 6019255 - DNA, 25 bp, Homo sapien
cgttttcacattatctgggagacag

SEQ ID NO: 6019256 - DNA, 25 bp, Homo sapien
tgggaacttggcgagggtagaagtc

SEQ ID NO: 6019257 - DNA, 25 bp, Homo sapien
accttaaaatgggccagggtagctg

SEQ ID NO: 6019258 - DNA, 25 bp, Homo sapien
tcagaggaatgcagccccttgccct

SEQ ID NO: 6019259 - DNA, 25 bp, Homo sapien
gggtgcacggcctggggatgactga

SEQ ID NO: 6019260 - DNA, 25 bp, Homo sapien
tctcaaataactgtcatatattaaa

SEQ ID NO: 6019261 - DNA, 25 bp, Homo sapien
tattaaaaataagaataagaaagca

SEQ ID NO: 6019262 - DNA, 25 bp, Homo sapien
tgactgacttctgggaggaagcccc

SEQ ID NO: 6019263 - DNA, 25 bp, Homo sapien
gacaccactgagataatcacccatg

SEQ ID NO: 6019264 - DNA, 25 bp, Homo sapien
agcccgtcgaggttggcaactttgc

SEQ ID NO: 6019265 - DNA, 25 bp, Homo sapien
gaagcccctggtgacaccactgaga

SEQ ID NO: 6019266 - DNA, 25 bp, Homo sapien
aaaataagaataagaaagcacacgc

SEQ ID NO: 6019267 - DNA, 25 bp, Homo sapien
tttacccctcggctgcacttccttg

SEQ ID NO: 6019268 - DNA, 25 bp, Homo sapien
cctggtgacaccactgagataatca

SEQ ID NO: 6019269 - DNA, 25 bp, Homo sapien
gaagaatgagattaccttaaaatgg

SEQ ID NO: 6019270 - DNA, 25 bp, Homo sapien
cacacgctgcatataggaagctgcc

SEQ ID NO: 6019271 - DNA, 25 bp, Homo sapien
tgagattaccttaaaatgggccagg

SEQ ID NO: 6019272 - DNA, 25 bp, Homo sapien
atggcttctcaaataactgtcatat

SEQ ID NO: 6019273 - DNA, 25 bp, Homo sapien
tcaaagccgatcaggcaatgaacca

SEQ ID NO: 6019274 - DNA, 25 bp, Homo sapien
gctgcacttccttgctaaagtccca

SEQ ID NO: 6019275 - DNA, 25 bp, Homo sapien
agaataagaaagcacacgctgcata

SEQ ID NO: 6019276 - DNA, 25 bp, Homo sapien
ctctcatccagctgaaaagggtgca

SEQ ID NO: 6019277 - DNA, 25 bp, Homo sapien
ggccagggtagctgtttggagagaa

SEQ ID NO: 6019278 - DNA, 25 bp, Homo sapien
ataggaagctgccttctcctggacc

SEQ ID NO: 6019279 - DNA, 25 bp, Homo sapien
tatggaacattttgaagaatgagat

SEQ ID NO: 6019280 - DNA, 25 bp, Homo sapien
acccatgagaggataaacagaaccc

SEQ ID NO: 6019281 - DNA, 25 bp, Homo sapien
cctcggctgcacttccttgctaaag

SEQ ID NO: 6019282 - DNA, 25 bp, Homo sapien
ctgcatataggaagctgccttctcc

SEQ ID NO: 6019283 - DNA, 25 bp, Homo sapien
tgctgggggaatttggaggattcta

SEQ ID NO: 6019284 - DNA, 25 bp, Homo sapien
aacttggcgagggtagaagtctgct

SEQ ID NO: 6019285 - DNA, 25 bp, Homo sapien
agtattcaccacacacaacactgaa

SEQ ID NO: 6019286 - DNA, 25 bp, Homo sapien
tccagctgaaaagggtgcacggcct

SEQ ID NO: 6019287 - DNA, 25 bp, Homo sapien
tgtttggagagaatgcatccctggc

SEQ ID NO: 6019288 - DNA, 25 bp, Homo sapien
cattttgaagaatgagattacctta

SEQ ID NO: 6019289 - DNA, 25 bp, Homo sapien
ctggaccgttttcacattatctggg

SEQ ID NO: 6019290 - DNA, 25 bp, Homo sapien
ggcctcaggccaagtccctcagagg

SEQ ID NO: 6019291 - DNA, 25 bp, Homo sapien
ggctctttacccctcggctgcactt

SEQ ID NO: 6019292 - DNA, 25 bp, Homo sapien
agtccctcagaggaatgcagcccct

SEQ ID NO: 6019293 - DNA, 25 bp, Homo sapien
acccatcgctgcttagacactgcta

SEQ ID NO: 6019294 - DNA, 25 bp, Homo sapien
ttgccctccaaaccctctctcaaag

SEQ ID NO: 6019295 - DNA, 25 bp, Homo sapien
gggaatttggaggattctatggaac

SEQ ID NO: 6019296 - DNA, 25 bp, Homo sapien
gtcatatattaaaaataagaataag

SEQ ID NO: 6019297 - DNA, 25 bp, Homo sapien
ataaacagaacccactggagaggcc

SEQ ID NO: 6019298 - DNA, 25 bp, Homo sapien
gaagtctgctgggggaatttggagg

SEQ ID NO: 6019299 - DNA, 25 bp, Homo sapien
aaatacagtattcaccacacacaac

SEQ ID NO: 6019300 - DNA, 25 bp, Homo sapien
tggcaactttgctgagtgggttttg

SEQ ID NO: 6019301 - DNA, 25 bp, Homo sapien
ccaaaccctctctcaaagccgatca

SEQ ID NO: 6019302 - DNA, 25 bp, Homo sapien
agaactgaaacaaaatacagtattc

SEQ ID NO: 6019303 - DNA, 25 bp, Homo sapien
ggaatgcagccccttgccctccaaa

SEQ ID NO: 6019304 - DNA, 25 bp, Homo sapien
gagaggataaacagaacccactgga

SEQ ID NO: 6019305 - DNA, 25 bp, Homo sapien
ggtagctgtttggagagaatgcatc

SEQ ID NO: 6019306 - DNA, 25 bp, Homo sapien
ggattctatggaacattttgaagaa

SEQ ID NO: 6019307 - DNA, 25 bp, Homo sapien
gagagaatgcatccctggctctcat

SEQ ID NO: 6019308 - DNA, 25 bp, Homo sapien
agaaagcacacgctgcatataggaa

SEQ ID NO: 6019309 - DNA, 25 bp, Homo sapien
cgctgcttagacactgctagcccgt

SEQ ID NO: 6019310 - DNA, 25 bp, Homo sapien
ccgaaaggcctcaggccaagtccct

SEQ ID NO: 6019311 - DNA, 25 bp, Homo sapien
ccgatcaggcaatgaaccagagggc

SEQ ID NO: 6019312 - DNA, 25 bp, Homo sapien
ataatcacccatgagaggataaaca

SEQ ID NO: 6019313 - DNA, 25 bp, Homo sapien
gagaacccgagccggtcggtccaga

SEQ ID NO: 6019314 - DNA, 25 bp, Homo sapien
tccgaccactcggcgtacagctcgt

SEQ ID NO: 6019315 - DNA, 25 bp, Homo sapien
accacctggtcctggaccgcgctga

SEQ ID NO: 6019316 - DNA, 25 bp, Homo sapien
tccaggccgcgcacccacacccagg

SEQ ID NO: 6019317 - DNA, 25 bp, Homo sapien
cagggtcacgtcgtcccggaccaca

SEQ ID NO: 6019318 - DNA, 25 bp, Homo sapien
cggtcggtccagaactcgaccgctc

SEQ ID NO: 6019319 - DNA, 25 bp, Homo sapien
ggcgaactcccgcccccacggctgc

SEQ ID NO: 6019320 - DNA, 25 bp, Homo sapien
gtgagcaccggaacggcactggtca

SEQ ID NO: 6019321 - DNA, 25 bp, Homo sapien
gcccccacggctgctcgccgatctc

SEQ ID NO: 6019322 - DNA, 25 bp, Homo sapien
tgccggccgggtcgcgcagggcgaa

SEQ ID NO: 6019323 - DNA, 25 bp, Homo sapien
ggcgaagtcgtcctccacgaagtcc

SEQ ID NO: 6019324 - DNA, 25 bp, Homo sapien
cactcggcgtacagctcgtccaggc

SEQ ID NO: 6019325 - DNA, 25 bp, Homo sapien
cacaccggcgaagtcgtcctccacg

SEQ ID NO: 6019326 - DNA, 25 bp, Homo sapien
ccgagccggtcggtccagaactcga

SEQ ID NO: 6019327 - DNA, 25 bp, Homo sapien
ctcggtcatggccggcccggaggcg

SEQ ID NO: 6019328 - DNA, 25 bp, Homo sapien
gcgtcccggaagttcgtggacacga

SEQ ID NO: 6019329 - DNA, 25 bp, Homo sapien
tggaccgcgctgatgaacagggtca

SEQ ID NO: 6019330 - DNA, 25 bp, Homo sapien
gccagggtgttgtccggcaccacct

SEQ ID NO: 6019331 - DNA, 25 bp, Homo sapien
gccgatctcggtcatggccggcccg

SEQ ID NO: 6019332 - DNA, 25 bp, Homo sapien
tgctcgccgatctcggtcatggccg

SEQ ID NO: 6019333 - DNA, 25 bp, Homo sapien
acccaggccagggtgttgtccggca

SEQ ID NO: 6019334 - DNA, 25 bp, Homo sapien
gaacggcactggtcaacttggccat

SEQ ID NO: 6019335 - DNA, 25 bp, Homo sapien
agctcgtccaggccgcgcacccaca

SEQ ID NO: 6019336 - DNA, 25 bp, Homo sapien
tggtcctggaccgcgctgatgaaca

SEQ ID NO: 6019337 - DNA, 25 bp, Homo sapien
cacgtcgtcccggaccacaccggcg

SEQ ID NO: 6019338 - DNA, 25 bp, Homo sapien
gcgtacagctcgtccaggccgcgca

SEQ ID NO: 6019339 - DNA, 25 bp, Homo sapien
gaagttcgtggacacgacctccgac

SEQ ID NO: 6019340 - DNA, 25 bp, Homo sapien
gcaccggaacggcactggtcaactt

SEQ ID NO: 6019341 - DNA, 25 bp, Homo sapien
aactcgaccgctccggcgacgtcgc

SEQ ID NO: 6019342 - DNA, 25 bp, Homo sapien
ccgcgcacccacacccaggccaggg

SEQ ID NO: 6019343 - DNA, 25 bp, Homo sapien
cgcgcggtgagcaccggaacggcac

SEQ ID NO: 6019344 - DNA, 25 bp, Homo sapien
acgacctccgaccactcggcgtaca

SEQ ID NO: 6019345 - DNA, 25 bp, Homo sapien
ccgggtcgcgcagggcgaactcccg

SEQ ID NO: 6019346 - DNA, 25 bp, Homo sapien
acccacacccaggccagggtgttgt

SEQ ID NO: 6019347 - DNA, 25 bp, Homo sapien
gcagttgccggccgggtcgcgcagg

SEQ ID NO: 6019348 - DNA, 25 bp, Homo sapien
acggctgctcgccgatctcggtcat

SEQ ID NO: 6019349 - DNA, 25 bp, Homo sapien
acgtcgcgcgcggtgagcaccggaa

SEQ ID NO: 6019350 - DNA, 25 bp, Homo sapien
tcgtcctccacgaagtcccgggaga

SEQ ID NO: 6019351 - DNA, 25 bp, Homo sapien
gtggacacgacctccgaccactcgg

SEQ ID NO: 6019352 - DNA, 25 bp, Homo sapien
cggaccacaccggcgaagtcgtcct

SEQ ID NO: 6019353 - DNA, 25 bp, Homo sapien
ccggcgacgtcgcgcgcggtgagca

SEQ ID NO: 6019354 - DNA, 25 bp, Homo sapien
gcgcagggcgaactcccgcccccac

SEQ ID NO: 6019355 - DNA, 25 bp, Homo sapien
actcccgcccccacggctgctcgcc

SEQ ID NO: 6019356 - DNA, 25 bp, Homo sapien
gtccagaactcgaccgctccggcga

SEQ ID NO: 6019357 - DNA, 25 bp, Homo sapien
cgcgctgatgaacagggtcacgtcg

SEQ ID NO: 6019358 - DNA, 25 bp, Homo sapien
tccggcaccacctggtcctggaccg

SEQ ID NO: 6019359 - DNA, 25 bp, Homo sapien
gatgaacagggtcacgtcgtcccgg

SEQ ID NO: 6019360 - DNA, 25 bp, Homo sapien
accgctccggcgacgtcgcgcgcgg

SEQ ID NO: 6019361 - DNA, 25 bp, Homo sapien
catggccggcccggaggcgtcccgg

SEQ ID NO: 6019362 - DNA, 25 bp, Homo sapien
gtgttgtccggcaccacctggtcct

SEQ ID NO: 6019363 - DNA, 25 bp, Homo sapien
tttcgcccaagtcatgagagctacc

SEQ ID NO: 6019364 - DNA, 25 bp, Homo sapien
atcgtttggtagctcatcgataggc

SEQ ID NO: 6019365 - DNA, 25 bp, Homo sapien
gacacgagctgagagacttgccgca

SEQ ID NO: 6019366 - DNA, 25 bp, Homo sapien
gagttgttcaaaatcaggctcgata

SEQ ID NO: 6019367 - DNA, 25 bp, Homo sapien
actttgtcgagagtagaatctaagg

SEQ ID NO: 6019368 - DNA, 25 bp, Homo sapien
tcttgcttaacccaatcatcgttgt

SEQ ID NO: 6019369 - DNA, 25 bp, Homo sapien
cacttcagaaccaagcttatgacct

SEQ ID NO: 6019370 - DNA, 25 bp, Homo sapien
gcaaactgaggtaatcaaaaccaag

SEQ ID NO: 6019371 - DNA, 25 bp, Homo sapien
ttaacccaatcatcgttgttagcgg

SEQ ID NO: 6019372 - DNA, 25 bp, Homo sapien
aatcagaaaagacagctccagatca

SEQ ID NO: 6019373 - DNA, 25 bp, Homo sapien
aatcaagccaatgttttgtgtgccc

SEQ ID NO: 6019374 - DNA, 25 bp, Homo sapien
ggtatcccagtgatgctcgaagcag

SEQ ID NO: 6019375 - DNA, 25 bp, Homo sapien
cgataggcaaactgaggtaatcaaa

SEQ ID NO: 6019376 - DNA, 25 bp, Homo sapien
atccattgcgatggcggctttggtg

SEQ ID NO: 6019377 - DNA, 25 bp, Homo sapien
gacgtcgatttctaagctgcctcca

SEQ ID NO: 6019378 - DNA, 25 bp, Homo sapien
ttggctactttgtcgagagtagaat

SEQ ID NO: 6019379 - DNA, 25 bp, Homo sapien
gaggtattggctactttgtcgagag

SEQ ID NO: 6019380 - DNA, 25 bp, Homo sapien
caagcaaggagtagagcttgcaatg

SEQ ID NO: 6019381 - DNA, 25 bp, Homo sapien
ccaagtcatgagagctaccaagcaa

SEQ ID NO: 6019382 - DNA, 25 bp, Homo sapien
gaaccgaggtattggctactttgtc

SEQ ID NO: 6019383 - DNA, 25 bp, Homo sapien
tgaggtaatcaaaaccaagcgcttt

SEQ ID NO: 6019384 - DNA, 25 bp, Homo sapien
caagcgacgttcattcacagtcgcg

SEQ ID NO: 6019385 - DNA, 25 bp, Homo sapien
agaaccaagcttatgaccttcaaaa

SEQ ID NO: 6019386 - DNA, 25 bp, Homo sapien
atgctcgaagcagtcgcgaacgaac

SEQ ID NO: 6019387 - DNA, 25 bp, Homo sapien
tgtgcccttggtctgcagccagtga

SEQ ID NO: 6019388 - DNA, 25 bp, Homo sapien
ttcaaaatcaggctcgataaagtcg

SEQ ID NO: 6019389 - DNA, 25 bp, Homo sapien
ctcgataaagtcgacgtcgatttct

SEQ ID NO: 6019390 - DNA, 25 bp, Homo sapien
tcgttgttagcggtaaaggcgatta

SEQ ID NO: 6019391 - DNA, 25 bp, Homo sapien
gttttgtgtgcccttggtctgcagc

SEQ ID NO: 6019392 - DNA, 25 bp, Homo sapien
ccagtgatgctcgaagcagtcgcga

SEQ ID NO: 6019393 - DNA, 25 bp, Homo sapien
ttcaaaatcaagatcgtttggtagc

SEQ ID NO: 6019394 - DNA, 25 bp, Homo sapien
aaccaagcgctttttctagtgtgtc

SEQ ID NO: 6019395 - DNA, 25 bp, Homo sapien
gagacttgccgcaatcaagccaatg

SEQ ID NO: 6019396 - DNA, 25 bp, Homo sapien
aatcaaaaccaagcgctttttctag

SEQ ID NO: 6019397 - DNA, 25 bp, Homo sapien
gcgctttttctagtgtgtcacgcaa

SEQ ID NO: 6019398 - DNA, 25 bp, Homo sapien
gatttctaagctgcctccatccatt

SEQ ID NO: 6019399 - DNA, 25 bp, Homo sapien
agagataacttcataggcgacacga

SEQ ID NO: 6019400 - DNA, 25 bp, Homo sapien
acgttcattcacagtcgcgatggtg

SEQ ID NO: 6019401 - DNA, 25 bp, Homo sapien
aacatgtcatagacttcttcttgct

SEQ ID NO: 6019402 - DNA, 25 bp, Homo sapien
agctaccaagcaaggagtagagctt

SEQ ID NO: 6019403 - DNA, 25 bp, Homo sapien
aacgaacacttcagaaccaagctta

SEQ ID NO: 6019404 - DNA, 25 bp, Homo sapien
atcaagatcgtttggtagctcatcg

SEQ ID NO: 6019405 - DNA, 25 bp, Homo sapien
tggtagctcatcgataggcaaactg

SEQ ID NO: 6019406 - DNA, 25 bp, Homo sapien
taagctgcctccatccattgcgatg

SEQ ID NO: 6019407 - DNA, 25 bp, Homo sapien
aagcttatgaccttcaaaatcaaga

SEQ ID NO: 6019408 - DNA, 25 bp, Homo sapien
agttcaccacaccaaccgcagtaat

SEQ ID NO: 6019409 - DNA, 25 bp, Homo sapien
tgaccttcaaaatcaagatcgtttg

SEQ ID NO: 6019410 - DNA, 25 bp, Homo sapien
gcaatgcccagtgcggatatgcgct

SEQ ID NO: 6019411 - DNA, 25 bp, Homo sapien
ccacaccaaccgcagtaatcagaaa

SEQ ID NO: 6019412 - DNA, 25 bp, Homo sapien
accaaccgcagtaatcagaaaagac

SEQ ID NO: 6019413 - DNA, 25 bp, Homo sapien
aaaagacagctccagatcagagata

SEQ ID NO: 6019414 - DNA, 25 bp, Homo sapien
gtgtgtcacgcaagttcaccacacc

SEQ ID NO: 6019415 - DNA, 25 bp, Homo sapien
ataggcgacacgagctgagagactt

SEQ ID NO: 6019416 - DNA, 25 bp, Homo sapien
gaagcagtcgcgaacgaacacttca

SEQ ID NO: 6019417 - DNA, 25 bp, Homo sapien
tcgagagtagaatctaaggtatccc

SEQ ID NO: 6019418 - DNA, 25 bp, Homo sapien
aggagtagagcttgcaatgcccagt

SEQ ID NO: 6019419 - DNA, 25 bp, Homo sapien
acttcttcttgcttaacccaatcat

SEQ ID NO: 6019420 - DNA, 25 bp, Homo sapien
agctgagagacttgccgcaatcaag

SEQ ID NO: 6019421 - DNA, 25 bp, Homo sapien
gcctccatccattgcgatggcggct

SEQ ID NO: 6019422 - DNA, 25 bp, Homo sapien
gccaatgttttgtgtgcccttggtc

SEQ ID NO: 6019423 - DNA, 25 bp, Homo sapien
cgcagtaatcagaaaagacagctcc

SEQ ID NO: 6019424 - DNA, 25 bp, Homo sapien
cgctttcaagcgacgttcattcaca

SEQ ID NO: 6019425 - DNA, 25 bp, Homo sapien
ccagtgcggatatgcgctaacatgt

SEQ ID NO: 6019426 - DNA, 25 bp, Homo sapien
ctcatcgataggcaaactgaggtaa

SEQ ID NO: 6019427 - DNA, 25 bp, Homo sapien
cggatatgcgctaacatgtcataga

SEQ ID NO: 6019428 - DNA, 25 bp, Homo sapien
agagcttgcaatgcccagtgcggat

SEQ ID NO: 6019429 - DNA, 25 bp, Homo sapien
tttctagtgtgtcacgcaagttcac

SEQ ID NO: 6019430 - DNA, 25 bp, Homo sapien
catgagagctaccaagcaaggagta

SEQ ID NO: 6019431 - DNA, 25 bp, Homo sapien
tctaaggtatcccagtgatgctcga

SEQ ID NO: 6019432 - DNA, 25 bp, Homo sapien
aacttcataggcgacacgagctgag

SEQ ID NO: 6019433 - DNA, 25 bp, Homo sapien
agtcgcgatggtgagttgttcaaaa

SEQ ID NO: 6019434 - DNA, 25 bp, Homo sapien
caatcatcgttgttagcggtaaagg

SEQ ID NO: 6019435 - DNA, 25 bp, Homo sapien
gtcgcgaacgaacacttcagaacca

SEQ ID NO: 6019436 - DNA, 25 bp, Homo sapien
cacgaccaagttttcgcccaagtca

SEQ ID NO: 6019437 - DNA, 25 bp, Homo sapien
attcacagtcgcgatggtgagttgt

SEQ ID NO: 6019438 - DNA, 25 bp, Homo sapien
tgccgcaatcaagccaatgttttgt

SEQ ID NO: 6019439 - DNA, 25 bp, Homo sapien
gcgatggcggctttggtgacggatt

SEQ ID NO: 6019440 - DNA, 25 bp, Homo sapien
aaagtcgacgtcgatttctaagctg

SEQ ID NO: 6019441 - DNA, 25 bp, Homo sapien
tgcgctaacatgtcatagacttctt

SEQ ID NO: 6019442 - DNA, 25 bp, Homo sapien
cagctccagatcagagataacttca

SEQ ID NO: 6019443 - DNA, 25 bp, Homo sapien
cagatcagagataacttcataggcg

SEQ ID NO: 6019444 - DNA, 25 bp, Homo sapien
atcaggctcgataaagtcgacgtcg

SEQ ID NO: 6019445 - DNA, 25 bp, Homo sapien
tcatagacttcttcttgcttaaccc

SEQ ID NO: 6019446 - DNA, 25 bp, Homo sapien
gatggtgagttgttcaaaatcaggc

SEQ ID NO: 6019447 - DNA, 25 bp, Homo sapien
gtagaatctaaggtatcccagtgat

SEQ ID NO: 6019448 - DNA, 25 bp, Homo sapien
gcggctttggtgacggattggtaaa

SEQ ID NO: 6019449 - DNA, 25 bp, Homo sapien
caagttttcgcccaagtcatgagag

SEQ ID NO: 6019450 - DNA, 25 bp, Homo sapien
cacgcaagttcaccacaccaaccgc

SEQ ID NO: 6019451 - DNA, 25 bp, Homo sapien
ctctatttgagtcatgatcgacgga

SEQ ID NO: 6019452 - DNA, 25 bp, Homo sapien
tgtgtaagccgatggattcagttgg

SEQ ID NO: 6019453 - DNA, 25 bp, Homo sapien
tgcgctttcttctcgtgagtgttga

SEQ ID NO: 6019454 - DNA, 25 bp, Homo sapien
aatagcttcatagatgcgataattt

SEQ ID NO: 6019455 - DNA, 25 bp, Homo sapien
ttcttctcgtgagtgttgatgatcc

SEQ ID NO: 6019456 - DNA, 25 bp, Homo sapien
tgcttcaaaaccacaacaaatattg

SEQ ID NO: 6019457 - DNA, 25 bp, Homo sapien
gccatgttcagtcgcgacttcgttg

SEQ ID NO: 6019458 - DNA, 25 bp, Homo sapien
ataatttcttcttcagaaccgtttg

SEQ ID NO: 6019459 - DNA, 25 bp, Homo sapien
agtcgtaccaatggcccaagaagtt

SEQ ID NO: 6019460 - DNA, 25 bp, Homo sapien
tcgttgtaaagatcaagctgcgctt

SEQ ID NO: 6019461 - DNA, 25 bp, Homo sapien
tggattcagttggattttcgggaac

SEQ ID NO: 6019462 - DNA, 25 bp, Homo sapien
gtcaatacccgtcgcatcaatatct

SEQ ID NO: 6019463 - DNA, 25 bp, Homo sapien
cattcacgtatgagtcgtaccaatg

SEQ ID NO: 6019464 - DNA, 25 bp, Homo sapien
ctgtcgttgatgctgactccgcgac

SEQ ID NO: 6019465 - DNA, 25 bp, Homo sapien
ttgagtcatgatcgacggaggtgat

SEQ ID NO: 6019466 - DNA, 25 bp, Homo sapien
ttgctggataatcgcgatacactct

SEQ ID NO: 6019467 - DNA, 25 bp, Homo sapien
cattgacctttattgaagtcgtaac

SEQ ID NO: 6019468 - DNA, 25 bp, Homo sapien
tcgggaacttaatatgttcgttatc

SEQ ID NO: 6019469 - DNA, 25 bp, Homo sapien
agaatcattggtaggccacgctctg

SEQ ID NO: 6019470 - DNA, 25 bp, Homo sapien
tcacgccattgacctttattgaagt

SEQ ID NO: 6019471 - DNA, 25 bp, Homo sapien
agaagttgcggcaaatatctttggc

SEQ ID NO: 6019472 - DNA, 25 bp, Homo sapien
ttgatgctgactccgcgacgacata

SEQ ID NO: 6019473 - DNA, 25 bp, Homo sapien
attggtaggccacgctctgcagccc

SEQ ID NO: 6019474 - DNA, 25 bp, Homo sapien
tcgtagctgtaatcaattcggcgat

SEQ ID NO: 6019475 - DNA, 25 bp, Homo sapien
aaatcttggtggcattcacgtatga

SEQ ID NO: 6019476 - DNA, 25 bp, Homo sapien
acccgtcgcatcaatatcttgctgg

SEQ ID NO: 6019477 - DNA, 25 bp, Homo sapien
ttcaacacaaaatcacgccattgac

SEQ ID NO: 6019478 - DNA, 25 bp, Homo sapien
cgctctgcagcccattctgtcgttg

SEQ ID NO: 6019479 - DNA, 25 bp, Homo sapien
acaaaatcacgccattgacctttat

SEQ ID NO: 6019480 - DNA, 25 bp, Homo sapien
gacataaacaggagcaccaccttgt

SEQ ID NO: 6019481 - DNA, 25 bp, Homo sapien
gtggtcaatcttagtcacatcgtag

SEQ ID NO: 6019482 - DNA, 25 bp, Homo sapien
cgtttgcttcaaaaccacaacaaat

SEQ ID NO: 6019483 - DNA, 25 bp, Homo sapien
ttttgtttggtcagagtcgtcaaaa

SEQ ID NO: 6019484 - DNA, 25 bp, Homo sapien
aatattgtcaatacccgtcgcatca

SEQ ID NO: 6019485 - DNA, 25 bp, Homo sapien
ttcatagatgcgataatttcttctt

SEQ ID NO: 6019486 - DNA, 25 bp, Homo sapien
gatgcgataatttcttcttcagaac

SEQ ID NO: 6019487 - DNA, 25 bp, Homo sapien
ctgtaatcaattcggcgattggtgt

SEQ ID NO: 6019488 - DNA, 25 bp, Homo sapien
aatatcttgctggataatcgcgata

SEQ ID NO: 6019489 - DNA, 25 bp, Homo sapien
gcgacttcgttgtaaagatcaagct

SEQ ID NO: 6019490 - DNA, 25 bp, Homo sapien
gcgatacactcttcaggcgtcccta

SEQ ID NO: 6019491 - DNA, 25 bp, Homo sapien
cgcgacgacataaacaggagcacca

SEQ ID NO: 6019492 - DNA, 25 bp, Homo sapien
cccattctgtcgttgatgctgactc

SEQ ID NO: 6019493 - DNA, 25 bp, Homo sapien
atcagactggaatagcttcatagat

SEQ ID NO: 6019494 - DNA, 25 bp, Homo sapien
tcagtcgcgacttcgttgtaaagat

SEQ ID NO: 6019495 - DNA, 25 bp, Homo sapien
tggcctttcaacacaaaatcacgcc

SEQ ID NO: 6019496 - DNA, 25 bp, Homo sapien
cgcatcaatatcttgctggataatc

SEQ ID NO: 6019497 - DNA, 25 bp, Homo sapien
atgatccagcttagaatcattggta

SEQ ID NO: 6019498 - DNA, 25 bp, Homo sapien
aggccacgctctgcagcccattctg

SEQ ID NO: 6019499 - DNA, 25 bp, Homo sapien
caaacagtggtcaatcttagtcaca

SEQ ID NO: 6019500 - DNA, 25 bp, Homo sapien
aacaggagcaccaccttgtgtgtaa

SEQ ID NO: 6019501 - DNA, 25 bp, Homo sapien
tgcggcaaatatctttggctctatt

SEQ ID NO: 6019502 - DNA, 25 bp, Homo sapien
tccctactgggttgatttcgtagct

SEQ ID NO: 6019503 - DNA, 25 bp, Homo sapien
cgtcaaaaatcttggtggcattcac

SEQ ID NO: 6019504 - DNA, 25 bp, Homo sapien
tctttgtggcctttcaacacaaaat

SEQ ID NO: 6019505 - DNA, 25 bp, Homo sapien
ctttggctctatttgagtcatgatc

SEQ ID NO: 6019506 - DNA, 25 bp, Homo sapien
aatcttagtcacatcgtagccatgt

SEQ ID NO: 6019507 - DNA, 25 bp, Homo sapien
aaaaccacaacaaatattgtcaata

SEQ ID NO: 6019508 - DNA, 25 bp, Homo sapien
caggcgtccctactgggttgatttc

SEQ ID NO: 6019509 - DNA, 25 bp, Homo sapien
cgtatgagtcgtaccaatggcccaa

SEQ ID NO: 6019510 - DNA, 25 bp, Homo sapien
ataatcgcgatacactcttcaggcg

SEQ ID NO: 6019511 - DNA, 25 bp, Homo sapien
tcttcttcagaaccgtttgcttcaa

SEQ ID NO: 6019512 - DNA, 25 bp, Homo sapien
atcgtagccatgttcagtcgcgact

SEQ ID NO: 6019513 - DNA, 25 bp, Homo sapien
ctgggttgatttcgtagctgtaatc

SEQ ID NO: 6019514 - DNA, 25 bp, Homo sapien
gacggaggtgatgtaagacaaacag

SEQ ID NO: 6019515 - DNA, 25 bp, Homo sapien
actcttcaggcgtccctactgggtt

SEQ ID NO: 6019516 - DNA, 25 bp, Homo sapien
tgactccgcgacgacataaacagga

SEQ ID NO: 6019517 - DNA, 25 bp, Homo sapien
tcaattcggcgattggtgtctttgt

SEQ ID NO: 6019518 - DNA, 25 bp, Homo sapien
taaagatcaagctgcgctttcttct

SEQ ID NO: 6019519 - DNA, 25 bp, Homo sapien
cagaaccgtttgcttcaaaaccaca

SEQ ID NO: 6019520 - DNA, 25 bp, Homo sapien
gactggaatagcttcatagatgcga

SEQ ID NO: 6019521 - DNA, 25 bp, Homo sapien
tcgtgagtgttgatgatccagctta

SEQ ID NO: 6019522 - DNA, 25 bp, Homo sapien
agcaccaccttgtgtgtaagccgat

SEQ ID NO: 6019523 - DNA, 25 bp, Homo sapien
cagcttagaatcattggtaggccac

SEQ ID NO: 6019524 - DNA, 25 bp, Homo sapien
tcaagctgcgctttcttctcgtgag

SEQ ID NO: 6019525 - DNA, 25 bp, Homo sapien
gtaagacaaacagtggtcaatctta

SEQ ID NO: 6019526 - DNA, 25 bp, Homo sapien
cagagtcgtcaaaaatcttggtggc

SEQ ID NO: 6019527 - DNA, 25 bp, Homo sapien
ttggtgtctttgtggcctttcaaca

SEQ ID NO: 6019528 - DNA, 25 bp, Homo sapien
gtgttgatgatccagcttagaatca

SEQ ID NO: 6019529 - DNA, 25 bp, Homo sapien
agtcacatcgtagccatgttcagtc

SEQ ID NO: 6019530 - DNA, 25 bp, Homo sapien
agccgatggattcagttggattttc

SEQ ID NO: 6019531 - DNA, 25 bp, Homo sapien
cggcgattggtgtctttgtggcctt

SEQ ID NO: 6019532 - DNA, 25 bp, Homo sapien
ttggtcagagtcgtcaaaaatcttg

SEQ ID NO: 6019533 - DNA, 25 bp, Homo sapien
accttgtgtgtaagccgatggattc

SEQ ID NO: 6019534 - DNA, 25 bp, Homo sapien
ctgcagcccattctgtcgttgatgc

SEQ ID NO: 6019535 - DNA, 25 bp, Homo sapien
ggcccaagaagttgcggcaaatatc

SEQ ID NO: 6019536 - DNA, 25 bp, Homo sapien
aaatatctttggctctatttgagtc

SEQ ID NO: 6019537 - DNA, 25 bp, Homo sapien
atgatcgacggaggtgatgtaagac

SEQ ID NO: 6019538 - DNA, 25 bp, Homo sapien
accaatggcccaagaagttgcggca

SEQ ID NO: 6019539 - DNA, 25 bp, Homo sapien
acaacaaatattgtcaatacccgtc

SEQ ID NO: 6019540 - DNA, 25 bp, Homo sapien
tgatttcgtagctgtaatcaattcg

SEQ ID NO: 6019541 - DNA, 25 bp, Homo sapien
ggtgatgtaagacaaacagtggtca

SEQ ID NO: 6019542 - DNA, 25 bp, Homo sapien
tggtggcattcacgtatgagtcgta

SEQ ID NO: 6019543 - DNA, 25 bp, Homo sapien
ccttgctgcttcaccatctacattt

SEQ ID NO: 6019544 - DNA, 25 bp, Homo sapien
aactataaaaatcattgtttggatg

SEQ ID NO: 6019545 - DNA, 25 bp, Homo sapien
gctgcctgagtactttcttcataag

SEQ ID NO: 6019546 - DNA, 25 bp, Homo sapien
aacacgagtggaagccctaacttag

SEQ ID NO: 6019547 - DNA, 25 bp, Homo sapien
ttgcgcaggaccgccttcagtgaac

SEQ ID NO: 6019548 - DNA, 25 bp, Homo sapien
cagcgtcagcttgtgtcgaacctga

SEQ ID NO: 6019549 - DNA, 25 bp, Homo sapien
gtaccgatggcattttctgacaaca

SEQ ID NO: 6019550 - DNA, 25 bp, Homo sapien
gcgctttatcttccatcgactcaaa

SEQ ID NO: 6019551 - DNA, 25 bp, Homo sapien
aacttagccgcccattcaaccactt

SEQ ID NO: 6019552 - DNA, 25 bp, Homo sapien
tatcttccatcgactcaaaagacat

SEQ ID NO: 6019553 - DNA, 25 bp, Homo sapien
ccggcgtattcttttctttgagcgt

SEQ ID NO: 6019554 - DNA, 25 bp, Homo sapien
tcaataggtccgcggcaccacaaca

SEQ ID NO: 6019555 - DNA, 25 bp, Homo sapien
ttttctgacaacagctctcccattt

SEQ ID NO: 6019556 - DNA, 25 bp, Homo sapien
tgagcgtttgagtcgtcccatctaa

SEQ ID NO: 6019557 - DNA, 25 bp, Homo sapien
gcgagcttctgcccttgctgcttca

SEQ ID NO: 6019558 - DNA, 25 bp, Homo sapien
agtacccagtagtgaatgcatcatt

SEQ ID NO: 6019559 - DNA, 25 bp, Homo sapien
cccattttttgctcaaagtcggtat

SEQ ID NO: 6019560 - DNA, 25 bp, Homo sapien
tacattttggttgaccagcagcgtc

SEQ ID NO: 6019561 - DNA, 25 bp, Homo sapien
cacggacaaactcttccaaatacac

SEQ ID NO: 6019562 - DNA, 25 bp, Homo sapien
caaagtcggtatttgagtaagattc

SEQ ID NO: 6019563 - DNA, 25 bp, Homo sapien
accatctacattttggttgaccagc

SEQ ID NO: 6019564 - DNA, 25 bp, Homo sapien
cacaacactcaatcgcaactcgcgc

SEQ ID NO: 6019565 - DNA, 25 bp, Homo sapien
cgcattcacaaattgcgcaggaccg

SEQ ID NO: 6019566 - DNA, 25 bp, Homo sapien
tttctttgagcgtttgagtcgtccc

SEQ ID NO: 6019567 - DNA, 25 bp, Homo sapien
tcgcaactcgcgctgcctgagtact

SEQ ID NO: 6019568 - DNA, 25 bp, Homo sapien
cagcttgtgtcgaacctgactaaca

SEQ ID NO: 6019569 - DNA, 25 bp, Homo sapien
gacactcactgaacaactgaaactg

SEQ ID NO: 6019570 - DNA, 25 bp, Homo sapien
actcaatcgcaactcgcgctgcctg

SEQ ID NO: 6019571 - DNA, 25 bp, Homo sapien
catctaaacacgagtggaagcccta

SEQ ID NO: 6019572 - DNA, 25 bp, Homo sapien
ccacatcgataaccgctctttgctg

SEQ ID NO: 6019573 - DNA, 25 bp, Homo sapien
tttggatggcagtacccagtagtga

SEQ ID NO: 6019574 - DNA, 25 bp, Homo sapien
cgataaccgctctttgctgcgcttt

SEQ ID NO: 6019575 - DNA, 25 bp, Homo sapien
aagattcacggacaaactcttccaa

SEQ ID NO: 6019576 - DNA, 25 bp, Homo sapien
accatgtgcctgagcaacttcgtgg

SEQ ID NO: 6019577 - DNA, 25 bp, Homo sapien
tgatgatcttgtgacactcactgaa

SEQ ID NO: 6019578 - DNA, 25 bp, Homo sapien
atacacgcgagcttctgcccttgct

SEQ ID NO: 6019579 - DNA, 25 bp, Homo sapien
caaactcttccaaatacacgcgagc

SEQ ID NO: 6019580 - DNA, 25 bp, Homo sapien
tgaatgcatcattgatgatcttgtg

SEQ ID NO: 6019581 - DNA, 25 bp, Homo sapien
cttccaaatacacgcgagcttctgc

SEQ ID NO: 6019582 - DNA, 25 bp, Homo sapien
aaccacttctttgctcgtcgcattc

SEQ ID NO: 6019583 - DNA, 25 bp, Homo sapien
tttgagtcgtcccatctaaacacga

SEQ ID NO: 6019584 - DNA, 25 bp, Homo sapien
gctcgtcgcattcacaaattgcgca

SEQ ID NO: 6019585 - DNA, 25 bp, Homo sapien
ccgctctttgctgcgctttatcttc

SEQ ID NO: 6019586 - DNA, 25 bp, Homo sapien
actcaaaagacatcaataggtccgc

SEQ ID NO: 6019587 - DNA, 25 bp, Homo sapien
tattcttttctttgagcgtttgagt

SEQ ID NO: 6019588 - DNA, 25 bp, Homo sapien
ttgagtaagattcacggacaaactc

SEQ ID NO: 6019589 - DNA, 25 bp, Homo sapien
atggcattttctgacaacagctctc

SEQ ID NO: 6019590 - DNA, 25 bp, Homo sapien
aagacatcaataggtccgcggcacc

SEQ ID NO: 6019591 - DNA, 25 bp, Homo sapien
tcataagtaccgatggcattttctg

SEQ ID NO: 6019592 - DNA, 25 bp, Homo sapien
ctttcttcataagtaccgatggcat

SEQ ID NO: 6019593 - DNA, 25 bp, Homo sapien
cggcaccacaacactcaatcgcaac

SEQ ID NO: 6019594 - DNA, 25 bp, Homo sapien
gtgtcgaacctgactaacatcgaca

SEQ ID NO: 6019595 - DNA, 25 bp, Homo sapien
agcaacttcgtggtacaaaccggcg

SEQ ID NO: 6019596 - DNA, 25 bp, Homo sapien
gaccagcagcgtcagcttgtgtcga

SEQ ID NO: 6019597 - DNA, 25 bp, Homo sapien
aacctgactaacatcgacaccatgt

SEQ ID NO: 6019598 - DNA, 25 bp, Homo sapien
tttgctcaaagtcggtatttgagta

SEQ ID NO: 6019599 - DNA, 25 bp, Homo sapien
cacaaattgcgcaggaccgccttca

SEQ ID NO: 6019600 - DNA, 25 bp, Homo sapien
gatggcagtacccagtagtgaatgc

SEQ ID NO: 6019601 - DNA, 25 bp, Homo sapien
gtgaacgcgtgtgggttaacggaga

SEQ ID NO: 6019602 - DNA, 25 bp, Homo sapien
actcgcgctgcctgagtactttctt

SEQ ID NO: 6019603 - DNA, 25 bp, Homo sapien
cggtatttgagtaagattcacggac

SEQ ID NO: 6019604 - DNA, 25 bp, Homo sapien
atcgacaccatgtgcctgagcaact

SEQ ID NO: 6019605 - DNA, 25 bp, Homo sapien
gccttcagtgaacgcgtgtgggtta

SEQ ID NO: 6019606 - DNA, 25 bp, Homo sapien
aggaccgccttcagtgaacgcgtgt

SEQ ID NO: 6019607 - DNA, 25 bp, Homo sapien
gacaacagctctcccattttttgct

SEQ ID NO: 6019608 - DNA, 25 bp, Homo sapien
catcattgatgatcttgtgacactc

SEQ ID NO: 6019609 - DNA, 25 bp, Homo sapien
ttggttgaccagcagcgtcagcttg

SEQ ID NO: 6019610 - DNA, 25 bp, Homo sapien
ttctttgctcgtcgcattcacaaat

SEQ ID NO: 6019611 - DNA, 25 bp, Homo sapien
ccatcgactcaaaagacatcaatag

SEQ ID NO: 6019612 - DNA, 25 bp, Homo sapien
agctctcccattttttgctcaaagt

SEQ ID NO: 6019613 - DNA, 25 bp, Homo sapien
gccgcccattcaaccacttctttgc

SEQ ID NO: 6019614 - DNA, 25 bp, Homo sapien
cattcaaccacttctttgctcgtcg

SEQ ID NO: 6019615 - DNA, 25 bp, Homo sapien
actaacatcgacaccatgtgcctga

SEQ ID NO: 6019616 - DNA, 25 bp, Homo sapien
tcgtcccatctaaacacgagtggaa

SEQ ID NO: 6019617 - DNA, 25 bp, Homo sapien
tttgctgcgctttatcttccatcga

SEQ ID NO: 6019618 - DNA, 25 bp, Homo sapien
tgcctgagcaacttcgtggtacaaa

SEQ ID NO: 6019619 - DNA, 25 bp, Homo sapien
gagtggaagccctaacttagccgcc

SEQ ID NO: 6019620 - DNA, 25 bp, Homo sapien
cactgaacaactgaaactgagaatc

SEQ ID NO: 6019621 - DNA, 25 bp, Homo sapien
ttctgcccttgctgcttcaccatct

SEQ ID NO: 6019622 - DNA, 25 bp, Homo sapien
tcttgtgacactcactgaacaactg

SEQ ID NO: 6019623 - DNA, 25 bp, Homo sapien
tgagtactttcttcataagtaccga

SEQ ID NO: 6019624 - DNA, 25 bp, Homo sapien
gagaatccgttggtcgattaaagaa

SEQ ID NO: 6019625 - DNA, 25 bp, Homo sapien
agccctaacttagccgcccattcaa

SEQ ID NO: 6019626 - DNA, 25 bp, Homo sapien
tgcttcaccatctacattttggttg

SEQ ID NO: 6019627 - DNA, 25 bp, Homo sapien
ggtccgcggcaccacaacactcaat

SEQ ID NO: 6019628 - DNA, 25 bp, Homo sapien
gaaactgagaatccgttggtcgatt

SEQ ID NO: 6019629 - DNA, 25 bp, Homo sapien
acaactgaaactgagaatccgttgg

SEQ ID NO: 6019630 - DNA, 25 bp, Homo sapien
aaaaatcattgtttggatggcagta

SEQ ID NO: 6019631 - DNA, 25 bp, Homo sapien
cagtagtgaatgcatcattgatgat

SEQ ID NO: 6019632 - DNA, 25 bp, Homo sapien
taaccgctgaaagtacgtccatata

SEQ ID NO: 6019633 - DNA, 25 bp, Homo sapien
attgctgaggagttcccatgaaaat

SEQ ID NO: 6019634 - DNA, 25 bp, Homo sapien
tatcgttgagatcttccaccacctc

SEQ ID NO: 6019635 - DNA, 25 bp, Homo sapien
tcaagtcatcgatttctgtgctcgc

SEQ ID NO: 6019636 - DNA, 25 bp, Homo sapien
tgttttcctgcttaaccgctgaaag

SEQ ID NO: 6019637 - DNA, 25 bp, Homo sapien
ggaaaacggggatatcgttgagatc

SEQ ID NO: 6019638 - DNA, 25 bp, Homo sapien
gctgtttttgttcctgcaatgacca

SEQ ID NO: 6019639 - DNA, 25 bp, Homo sapien
catcattattgtggtaatggtattg

SEQ ID NO: 6019640 - DNA, 25 bp, Homo sapien
cggggatatcgttgagatcttccac

SEQ ID NO: 6019641 - DNA, 25 bp, Homo sapien
ccatataaatgcctctattagttag

SEQ ID NO: 6019642 - DNA, 25 bp, Homo sapien
cctgcttaaccgctgaaagtacgtc

SEQ ID NO: 6019643 - DNA, 25 bp, Homo sapien
catcgatttctgtgctcgctgcgat

SEQ ID NO: 6019644 - DNA, 25 bp, Homo sapien
ttagttagcgctatcggcgaaaaga

SEQ ID NO: 6019645 - DNA, 25 bp, Homo sapien
ggcgagatgtcagctgtttttgttc

SEQ ID NO: 6019646 - DNA, 25 bp, Homo sapien
cccctttaacaaggcgagatgtcag

SEQ ID NO: 6019647 - DNA, 25 bp, Homo sapien
gaggagttcccatgaaaatcaagtc

SEQ ID NO: 6019648 - DNA, 25 bp, Homo sapien
gcctctcgcagaactgacgataatc

SEQ ID NO: 6019649 - DNA, 25 bp, Homo sapien
atgtcagctgtttttgttcctgcaa

SEQ ID NO: 6019650 - DNA, 25 bp, Homo sapien
ctgaaagtacgtccatataaatgcc

SEQ ID NO: 6019651 - DNA, 25 bp, Homo sapien
tggtaatggtattgatatgcccctt

SEQ ID NO: 6019652 - DNA, 25 bp, Homo sapien
actgacgataatcatcattattgtg

SEQ ID NO: 6019653 - DNA, 25 bp, Homo sapien
cctctattagttagcgctatcggcg

SEQ ID NO: 6019654 - DNA, 25 bp, Homo sapien
cctgcaatgaccattgctgaggagt

SEQ ID NO: 6019655 - DNA, 25 bp, Homo sapien
taaatgcctctattagttagcgcta

SEQ ID NO: 6019656 - DNA, 25 bp, Homo sapien
agcgctatcggcgaaaagaatggtg

SEQ ID NO: 6019657 - DNA, 25 bp, Homo sapien
cgaaaagaatggtgatataaggggc

SEQ ID NO: 6019658 - DNA, 25 bp, Homo sapien
cgcagaactgacgataatcatcatt

SEQ ID NO: 6019659 - DNA, 25 bp, Homo sapien
tttgttcctgcaatgaccattgctg

SEQ ID NO: 6019660 - DNA, 25 bp, Homo sapien
gtacgtccatataaatgcctctatt

SEQ ID NO: 6019661 - DNA, 25 bp, Homo sapien
cttccaccacctctccgactcccag

SEQ ID NO: 6019662 - DNA, 25 bp, Homo sapien
gatatgcccctttaacaaggcgaga

SEQ ID NO: 6019663 - DNA, 25 bp, Homo sapien
tatcggcgaaaagaatggtgatata

SEQ ID NO: 6019664 - DNA, 25 bp, Homo sapien
tattgtggtaatggtattgatatgc

SEQ ID NO: 6019665 - DNA, 25 bp, Homo sapien
ctcccagcctctcgcagaactgacg

SEQ ID NO: 6019666 - DNA, 25 bp, Homo sapien
tgaaaatcaagtcatcgatttctgt

SEQ ID NO: 6019667 - DNA, 25 bp, Homo sapien
tgagatcttccaccacctctccgac

SEQ ID NO: 6019668 - DNA, 25 bp, Homo sapien
atgaccattgctgaggagttcccat

SEQ ID NO: 6019669 - DNA, 25 bp, Homo sapien
tggtattgatatgcccctttaacaa

SEQ ID NO: 6019670 - DNA, 25 bp, Homo sapien
tttctgtgctcgctgcgatgttttc

SEQ ID NO: 6019671 - DNA, 25 bp, Homo sapien
ttcccatgaaaatcaagtcatcgat

SEQ ID NO: 6019672 - DNA, 25 bp, Homo sapien
taacaaggcgagatgtcagctgttt

SEQ ID NO: 6019673 - DNA, 25 bp, Homo sapien
ctgcgatgttttcctgcttaaccgc

SEQ ID NO: 6019674 - DNA, 25 bp, Homo sapien
ccacctctccgactcccagcctctc

SEQ ID NO: 6019675 - DNA, 25 bp, Homo sapien
tgctcgctgcgatgttttcctgctt

SEQ ID NO: 6019676 - DNA, 25 bp, Homo sapien
gataatcatcattattgtggtaatg

SEQ ID NO: 6019677 - DNA, 25 bp, Homo sapien
ctccgactcccagcctctcgcagaa

SEQ ID NO: 6019678 - DNA, 25 bp, Homo sapien
tcgggaagacctgccacgcccgcgt

SEQ ID NO: 6019679 - DNA, 25 bp, Homo sapien
tccatccttgtcaatcaaggcgttg

SEQ ID NO: 6019680 - DNA, 25 bp, Homo sapien
tcatcgtcgggaagacctgccacgc

SEQ ID NO: 6019681 - DNA, 25 bp, Homo sapien
aatccacgatctctttttccgtcat

SEQ ID NO: 6019682 - DNA, 25 bp, Homo sapien
gacctgccacgcccgcgtcgaagat

SEQ ID NO: 6019683 - DNA, 25 bp, Homo sapien
cgcgcccggtttatcatccccctcg

SEQ ID NO: 6019684 - DNA, 25 bp, Homo sapien
tacttcgtccacaaacacaactcct

SEQ ID NO: 6019685 - DNA, 25 bp, Homo sapien
tgtatttaattaaagacttcaagcg

SEQ ID NO: 6019686 - DNA, 25 bp, Homo sapien
gcctctctgattaacgcccagcgtt

SEQ ID NO: 6019687 - DNA, 25 bp, Homo sapien
tccggattgtttacataaccggaca

SEQ ID NO: 6019688 - DNA, 25 bp, Homo sapien
cagatccacaaccttcgcttcaaaa

SEQ ID NO: 6019689 - DNA, 25 bp, Homo sapien
tcgtctttccgtgctccaaaacaac

SEQ ID NO: 6019690 - DNA, 25 bp, Homo sapien
gttggggtgttgtaacaatatcgat

SEQ ID NO: 6019691 - DNA, 25 bp, Homo sapien
cgatctctttttccgtcatcgtctt

SEQ ID NO: 6019692 - DNA, 25 bp, Homo sapien
cgacgtaatccacgatctctttttc

SEQ ID NO: 6019693 - DNA, 25 bp, Homo sapien
accggacataatcataggtcctctg

SEQ ID NO: 6019694 - DNA, 25 bp, Homo sapien
tttaattaaagacttcaagcggtca

SEQ ID NO: 6019695 - DNA, 25 bp, Homo sapien
tctctctgatttttcttgcgtcgag

SEQ ID NO: 6019696 - DNA, 25 bp, Homo sapien
cacaaccttcgcttcaaaaaatgga

SEQ ID NO: 6019697 - DNA, 25 bp, Homo sapien
aagcggtcaactatgaagaagtgtt

SEQ ID NO: 6019698 - DNA, 25 bp, Homo sapien
cataatcataggtcctctgacacat

SEQ ID NO: 6019699 - DNA, 25 bp, Homo sapien
atgaagaagtgttcgtcttcgtccc

SEQ ID NO: 6019700 - DNA, 25 bp, Homo sapien
ccacgcccgcgtcgaagatgttggg

SEQ ID NO: 6019701 - DNA, 25 bp, Homo sapien
gcgggaagttcaccggcgtcatcgt

SEQ ID NO: 6019702 - DNA, 25 bp, Homo sapien
ttccgtgctccaaaacaacaacggc

SEQ ID NO: 6019703 - DNA, 25 bp, Homo sapien
ccagcgttttcccggtatccagatc

SEQ ID NO: 6019704 - DNA, 25 bp, Homo sapien
gtcctctgacacataattcgcctct

SEQ ID NO: 6019705 - DNA, 25 bp, Homo sapien
tttcgcggttgttacttgactggcg

SEQ ID NO: 6019706 - DNA, 25 bp, Homo sapien
gtctccagaatgtagccatccatcc

SEQ ID NO: 6019707 - DNA, 25 bp, Homo sapien
gtgttgtaacaatatcgattccaat

SEQ ID NO: 6019708 - DNA, 25 bp, Homo sapien
tgctccaaaacaacaacggcggcgg

SEQ ID NO: 6019709 - DNA, 25 bp, Homo sapien
tcataggtcctctgacacataattc

SEQ ID NO: 6019710 - DNA, 25 bp, Homo sapien
gggggccacctgatatcctttgtat

SEQ ID NO: 6019711 - DNA, 25 bp, Homo sapien
cttcgcttcaaaaaatggaacaact

SEQ ID NO: 6019712 - DNA, 25 bp, Homo sapien
gatatcctttgtatttaattaaaga

SEQ ID NO: 6019713 - DNA, 25 bp, Homo sapien
cccctcgggtgtaatcagaatagct

SEQ ID NO: 6019714 - DNA, 25 bp, Homo sapien
attaaagacttcaagcggtcaacta

SEQ ID NO: 6019715 - DNA, 25 bp, Homo sapien
agttcaccggcgtcatcgtcgggaa

SEQ ID NO: 6019716 - DNA, 25 bp, Homo sapien
ctttatgaggatctctctgattttt

SEQ ID NO: 6019717 - DNA, 25 bp, Homo sapien
ggcggcgggaagttcaccggcgtca

SEQ ID NO: 6019718 - DNA, 25 bp, Homo sapien
agctatgtctccagaatgtagccat

SEQ ID NO: 6019719 - DNA, 25 bp, Homo sapien
tcttgcgtcgagttttccggtaaga

SEQ ID NO: 6019720 - DNA, 25 bp, Homo sapien
ccggcgtcatcgtcgggaagacctg

SEQ ID NO: 6019721 - DNA, 25 bp, Homo sapien
cttgtcaatcaaggcgttggtcgct

SEQ ID NO: 6019722 - DNA, 25 bp, Homo sapien
agaatgtagccatccatccttgtca

SEQ ID NO: 6019723 - DNA, 25 bp, Homo sapien
tagccatccatccttgtcaatcaag

SEQ ID NO: 6019724 - DNA, 25 bp, Homo sapien
tccaattcagcgggggccacctgat

SEQ ID NO: 6019725 - DNA, 25 bp, Homo sapien
tttcggtacttcgtccacaaacaca

SEQ ID NO: 6019726 - DNA, 25 bp, Homo sapien
tcgtcttcgtcccagtaagctatgt

SEQ ID NO: 6019727 - DNA, 25 bp, Homo sapien
ataattcgcctctctgattaacgcc

SEQ ID NO: 6019728 - DNA, 25 bp, Homo sapien
gtccacaaacacaactcctccgcgc

SEQ ID NO: 6019729 - DNA, 25 bp, Homo sapien
ggtatccagatccacaaccttcgct

SEQ ID NO: 6019730 - DNA, 25 bp, Homo sapien
gcgttggtcgcttccggattgttta

SEQ ID NO: 6019731 - DNA, 25 bp, Homo sapien
taccgaccgcgcccggtttatcatc

SEQ ID NO: 6019732 - DNA, 25 bp, Homo sapien
ggttgttacttgactggcgacgtaa

SEQ ID NO: 6019733 - DNA, 25 bp, Homo sapien
aactcctccgcgcaactttttcgcg

SEQ ID NO: 6019734 - DNA, 25 bp, Homo sapien
tacttgactggcgacgtaatccacg

SEQ ID NO: 6019735 - DNA, 25 bp, Homo sapien
tatcatccccctcgggtgtaatcag

SEQ ID NO: 6019736 - DNA, 25 bp, Homo sapien
tacataaccggacataatcataggt

SEQ ID NO: 6019737 - DNA, 25 bp, Homo sapien
gacttcaagcggtcaactatgaaga

SEQ ID NO: 6019738 - DNA, 25 bp, Homo sapien
taatcagaatagctgatgtagtctc

SEQ ID NO: 6019739 - DNA, 25 bp, Homo sapien
tgaggatctctctgatttttcttgc

SEQ ID NO: 6019740 - DNA, 25 bp, Homo sapien
cgcgtcgaagatgttggggtgttgt

SEQ ID NO: 6019741 - DNA, 25 bp, Homo sapien
ttcgtcccagtaagctatgtctcca

SEQ ID NO: 6019742 - DNA, 25 bp, Homo sapien
tcaactatgaagaagtgttcgtctt

SEQ ID NO: 6019743 - DNA, 25 bp, Homo sapien
taacaatatcgattccaattcagcg

SEQ ID NO: 6019744 - DNA, 25 bp, Homo sapien
cgtcatcgtctttccgtgctccaaa

SEQ ID NO: 6019745 - DNA, 25 bp, Homo sapien
tttttccgtcatcgtctttccgtgc

SEQ ID NO: 6019746 - DNA, 25 bp, Homo sapien
ttttcccggtatccagatccacaac

SEQ ID NO: 6019747 - DNA, 25 bp, Homo sapien
cgggtgtaatcagaatagctgatgt

SEQ ID NO: 6019748 - DNA, 25 bp, Homo sapien
aaacacaactcctccgcgcaacttt

SEQ ID NO: 6019749 - DNA, 25 bp, Homo sapien
cacctgatatcctttgtatttaatt

SEQ ID NO: 6019750 - DNA, 25 bp, Homo sapien
ctccgcgcaactttttcgcggttgt

SEQ ID NO: 6019751 - DNA, 25 bp, Homo sapien
gaagatgttggggtgttgtaacaat

SEQ ID NO: 6019752 - DNA, 25 bp, Homo sapien
atcaaggcgttggtcgcttccggat

SEQ ID NO: 6019753 - DNA, 25 bp, Homo sapien
tgacacataattcgcctctctgatt

SEQ ID NO: 6019754 - DNA, 25 bp, Homo sapien
gtcgcttccggattgtttacataac

SEQ ID NO: 6019755 - DNA, 25 bp, Homo sapien
aagtgttcgtcttcgtcccagtaag

SEQ ID NO: 6019756 - DNA, 25 bp, Homo sapien
tgatttttcttgcgtcgagttttcc

SEQ ID NO: 6019757 - DNA, 25 bp, Homo sapien
ctgattaacgcccagcgttttcccg

SEQ ID NO: 6019758 - DNA, 25 bp, Homo sapien
tcagcgggggccacctgatatcctt

SEQ ID NO: 6019759 - DNA, 25 bp, Homo sapien
attgtttacataaccggacataatc

SEQ ID NO: 6019760 - DNA, 25 bp, Homo sapien
gactggcgacgtaatccacgatctc

SEQ ID NO: 6019761 - DNA, 25 bp, Homo sapien
gaatagctgatgtagtctcagtgag

SEQ ID NO: 6019762 - DNA, 25 bp, Homo sapien
ccagtaagctatgtctccagaatgt

SEQ ID NO: 6019763 - DNA, 25 bp, Homo sapien
atcgattccaattcagcgggggcca

SEQ ID NO: 6019764 - DNA, 25 bp, Homo sapien
catactgtgccatctctagccaagc

SEQ ID NO: 6019765 - DNA, 25 bp, Homo sapien
ggcaagggtaccctcccagtctcac

SEQ ID NO: 6019766 - DNA, 25 bp, Homo sapien
gaagtgactagtggaagggagagag

SEQ ID NO: 6019767 - DNA, 25 bp, Homo sapien
ttacttccaacttgttctgatgccc

SEQ ID NO: 6019768 - DNA, 25 bp, Homo sapien
aggccacaggcagagctatgaatga

SEQ ID NO: 6019769 - DNA, 25 bp, Homo sapien
tctctagccaagcaagccaggttta

SEQ ID NO: 6019770 - DNA, 25 bp, Homo sapien
cccaccctcttctgacctttgttct

SEQ ID NO: 6019771 - DNA, 25 bp, Homo sapien
tctgacctttgttctccagacctga

SEQ ID NO: 6019772 - DNA, 25 bp, Homo sapien
atgaatctgggaggagagtggtctg

SEQ ID NO: 6019773 - DNA, 25 bp, Homo sapien
cctaagcttgaaattgatctctata

SEQ ID NO: 6019774 - DNA, 25 bp, Homo sapien
gagaggaaggggaggcagagacaaa

SEQ ID NO: 6019775 - DNA, 25 bp, Homo sapien
gctctggggactgagctccatgctc

SEQ ID NO: 6019776 - DNA, 25 bp, Homo sapien
aaggggaggcagagacaaaggccac

SEQ ID NO: 6019777 - DNA, 25 bp, Homo sapien
ccagcctccttcctgttgtctgaaa

SEQ ID NO: 6019778 - DNA, 25 bp, Homo sapien
agctaagcaggttgtcctgtcacaa

SEQ ID NO: 6019779 - DNA, 25 bp, Homo sapien
tctccagacctgacccaggtaggca

SEQ ID NO: 6019780 - DNA, 25 bp, Homo sapien
caagccaggtttagagaagggtcaa

SEQ ID NO: 6019781 - DNA, 25 bp, Homo sapien
attcccaggagggaagtgactagtg

SEQ ID NO: 6019782 - DNA, 25 bp, Homo sapien
cctcttctgacctttgttctccaga

SEQ ID NO: 6019783 - DNA, 25 bp, Homo sapien
ggtaccctcccagtctcacctacca

SEQ ID NO: 6019784 - DNA, 25 bp, Homo sapien
gcaggttgtcctgtcacaagctctg

SEQ ID NO: 6019785 - DNA, 25 bp, Homo sapien
ctgggaggagagtggtctgtaagct

SEQ ID NO: 6019786 - DNA, 25 bp, Homo sapien
gaaaatatgtgtgcacccctaagct

SEQ ID NO: 6019787 - DNA, 25 bp, Homo sapien
tctcatttgccccttggtctcttta

SEQ ID NO: 6019788 - DNA, 25 bp, Homo sapien
cttgaaattgatctctatactctag

SEQ ID NO: 6019789 - DNA, 25 bp, Homo sapien
tgatgccctctgtttcccaggccag

SEQ ID NO: 6019790 - DNA, 25 bp, Homo sapien
ggtcttgaaaatatgtgtgcacccc

SEQ ID NO: 6019791 - DNA, 25 bp, Homo sapien
agacaaaggccacaggcagagctat

SEQ ID NO: 6019792 - DNA, 25 bp, Homo sapien
acctaccatactgtgccatctctag

SEQ ID NO: 6019793 - DNA, 25 bp, Homo sapien
ttcctgccctccctggctactgggt

SEQ ID NO: 6019794 - DNA, 25 bp, Homo sapien
tatgctgctgagtccccctttcctg

SEQ ID NO: 6019795 - DNA, 25 bp, Homo sapien
ccaggccaggcttgtctgtggtgac

SEQ ID NO: 6019796 - DNA, 25 bp, Homo sapien
caggcttgtctgtggtgacctgggc

SEQ ID NO: 6019797 - DNA, 25 bp, Homo sapien
aggagggaagtgactagtggaaggg

SEQ ID NO: 6019798 - DNA, 25 bp, Homo sapien
agtctcacctaccatactgtgccat

SEQ ID NO: 6019799 - DNA, 25 bp, Homo sapien
actagtggaagggagagaggaaggg

SEQ ID NO: 6019800 - DNA, 25 bp, Homo sapien
tccttcctgttgtctgaaacctgga

SEQ ID NO: 6019801 - DNA, 25 bp, Homo sapien
cctcagccagcctccttcctgttgt

SEQ ID NO: 6019802 - DNA, 25 bp, Homo sapien
agctatgaatgagaatgggtcttga

SEQ ID NO: 6019803 - DNA, 25 bp, Homo sapien
caggccatgaatctgggaggagagt

SEQ ID NO: 6019804 - DNA, 25 bp, Homo sapien
tggtctgtaagctccatcagccctg

SEQ ID NO: 6019805 - DNA, 25 bp, Homo sapien
ccctccctggctactgggtcaataa

SEQ ID NO: 6019806 - DNA, 25 bp, Homo sapien
gacctgacccaggtaggcaagggta

SEQ ID NO: 6019807 - DNA, 25 bp, Homo sapien
atgtgtgcacccctaagcttgaaat

SEQ ID NO: 6019808 - DNA, 25 bp, Homo sapien
ctggctactgggtcaataatctttc

SEQ ID NO: 6019809 - DNA, 25 bp, Homo sapien
aagggagagaggaaggggaggcaga

SEQ ID NO: 6019810 - DNA, 25 bp, Homo sapien
gcactttgacattcccaggagggaa

SEQ ID NO: 6019811 - DNA, 25 bp, Homo sapien
attgatctctatactctagcccctc

SEQ ID NO: 6019812 - DNA, 25 bp, Homo sapien
gggactgagctccatgctccaaccc

SEQ ID NO: 6019813 - DNA, 25 bp, Homo sapien
gaatgagaatgggtcttgaaaatat

SEQ ID NO: 6019814 - DNA, 25 bp, Homo sapien
tttgccccttggtctctttatgctg

SEQ ID NO: 6019815 - DNA, 25 bp, Homo sapien
tctagcccctcagccagcctccttc

SEQ ID NO: 6019816 - DNA, 25 bp, Homo sapien
ctgttgtctgaaacctggagctaag

SEQ ID NO: 6019817 - DNA, 25 bp, Homo sapien
caggtaggcaagggtaccctcccag

SEQ ID NO: 6019818 - DNA, 25 bp, Homo sapien
tgtcctgtcacaagctctggggact

SEQ ID NO: 6019819 - DNA, 25 bp, Homo sapien
gccaagcaagccaggtttagagaag

SEQ ID NO: 6019820 - DNA, 25 bp, Homo sapien
aggcagagacaaaggccacaggcag

SEQ ID NO: 6019821 - DNA, 25 bp, Homo sapien
tgagctccatgctccaaccccaccc

SEQ ID NO: 6019822 - DNA, 25 bp, Homo sapien
caggcagagctatgaatgagaatgg

SEQ ID NO: 6019823 - DNA, 25 bp, Homo sapien
cagggctctcatttgccccttggtc

SEQ ID NO: 6019824 - DNA, 25 bp, Homo sapien
gtgccatctctagccaagcaagcca

SEQ ID NO: 6019825 - DNA, 25 bp, Homo sapien
tcaataatctttcaggccatgaatc

SEQ ID NO: 6019826 - DNA, 25 bp, Homo sapien
ctttgttctccagacctgacccagg

SEQ ID NO: 6019827 - DNA, 25 bp, Homo sapien
tgtctgtggtgacctgggcatgggt

SEQ ID NO: 6019828 - DNA, 25 bp, Homo sapien
ctctatactctagcccctcagccag

SEQ ID NO: 6019829 - DNA, 25 bp, Homo sapien
tgtttcccaggccaggcttgtctgt

SEQ ID NO: 6019830 - DNA, 25 bp, Homo sapien
actgggtcaataatctttcaggcca

SEQ ID NO: 6019831 - DNA, 25 bp, Homo sapien
ccctttcctgccctccctggctact

SEQ ID NO: 6019832 - DNA, 25 bp, Homo sapien
ccttggtctctttatgctgctgagt

SEQ ID NO: 6019833 - DNA, 25 bp, Homo sapien
agaatgggtcttgaaaatatgtgtg

SEQ ID NO: 6019834 - DNA, 25 bp, Homo sapien
ggcatgggtgacagggctctcattt

SEQ ID NO: 6019835 - DNA, 25 bp, Homo sapien
ccaacttgttctgatgccctctgtt

SEQ ID NO: 6019836 - DNA, 25 bp, Homo sapien
tctgaaacctggagctaagcaggtt

SEQ ID NO: 6019837 - DNA, 25 bp, Homo sapien
tctctttatgctgctgagtccccct

SEQ ID NO: 6019838 - DNA, 25 bp, Homo sapien
gtaagctccatcagccctgtcctga

SEQ ID NO: 6019839 - DNA, 25 bp, Homo sapien
gtcacaagctctggggactgagctc

SEQ ID NO: 6019840 - DNA, 25 bp, Homo sapien
gggtgacagggctctcatttgcccc

SEQ ID NO: 6019841 - DNA, 25 bp, Homo sapien
tttgacattcccaggagggaagtga

SEQ ID NO: 6019842 - DNA, 25 bp, Homo sapien
tccatcagccctgtcctgagacagc

SEQ ID NO: 6019843 - DNA, 25 bp, Homo sapien
tgttctgatgccctctgtttcccag

SEQ ID NO: 6019844 - DNA, 25 bp, Homo sapien
cctcccagtctcacctaccatactg

SEQ ID NO: 6019845 - DNA, 25 bp, Homo sapien
tgcacccctaagcttgaaattgatc

SEQ ID NO: 6019846 - DNA, 25 bp, Homo sapien
cctctgtttcccaggccaggcttgt

SEQ ID NO: 6019847 - DNA, 25 bp, Homo sapien
ggagagtggtctgtaagctccatca

SEQ ID NO: 6019848 - DNA, 25 bp, Homo sapien
tggtgacctgggcatgggtgacagg

SEQ ID NO: 6019849 - DNA, 25 bp, Homo sapien
gttgtttacttccaacttgttctga

SEQ ID NO: 6019850 - DNA, 25 bp, Homo sapien
ccatgctccaaccccaccctcttct

SEQ ID NO: 6019851 - DNA, 25 bp, Homo sapien
acctgggcatgggtgacagggctct

SEQ ID NO: 6019852 - DNA, 25 bp, Homo sapien
atctttcaggccatgaatctgggag

SEQ ID NO: 6019853 - DNA, 25 bp, Homo sapien
acctggagctaagcaggttgtcctg

SEQ ID NO: 6019854 - DNA, 25 bp, Homo sapien
ctgagctttctcagaggagagaagg

SEQ ID NO: 6019855 - DNA, 25 bp, Homo sapien
ctccagtgtccttcccccctgctgt

SEQ ID NO: 6019856 - DNA, 25 bp, Homo sapien
tgtccttcccccctgctgtctcagg

SEQ ID NO: 6019857 - DNA, 25 bp, Homo sapien
acacaggggcggctccaaaggtgga

SEQ ID NO: 6019858 - DNA, 25 bp, Homo sapien
aaagggggactcagcagcataaaga

SEQ ID NO: 6019859 - DNA, 25 bp, Homo sapien
acaagaaagtctccagtgtccttcc

SEQ ID NO: 6019860 - DNA, 25 bp, Homo sapien
tgccaatgggttggattttctcttc

SEQ ID NO: 6019861 - DNA, 25 bp, Homo sapien
aaggggcaaatgagagccctgtcac

SEQ ID NO: 6019862 - DNA, 25 bp, Homo sapien
ctgctgtctcaggacagggctgatg

SEQ ID NO: 6019863 - DNA, 25 bp, Homo sapien
gctgatggagcttacagaccactct

SEQ ID NO: 6019864 - DNA, 25 bp, Homo sapien
agtctgtaaccagaaggctaagtaa

SEQ ID NO: 6019865 - DNA, 25 bp, Homo sapien
ctccaaaggtggatttgaggctccc

SEQ ID NO: 6019866 - DNA, 25 bp, Homo sapien
ggaaatagtctgtaaccagaaggct

SEQ ID NO: 6019867 - DNA, 25 bp, Homo sapien
tggaggggtagagaatgccttgttt

SEQ ID NO: 6019868 - DNA, 25 bp, Homo sapien
taattcaccacttccaagtataaaa

SEQ ID NO: 6019869 - DNA, 25 bp, Homo sapien
gaggagagaagggttcctaatgcac

SEQ ID NO: 6019870 - DNA, 25 bp, Homo sapien
cctgtcacccatgcccaggtcacca

SEQ ID NO: 6019871 - DNA, 25 bp, Homo sapien
taaaatatgtattttctagcatgga

SEQ ID NO: 6019872 - DNA, 25 bp, Homo sapien
gcctgggaaacagagggcatcagaa

SEQ ID NO: 6019873 - DNA, 25 bp, Homo sapien
ctgctccgatgtaaccaggcaccca

SEQ ID NO: 6019874 - DNA, 25 bp, Homo sapien
tttgaggctcccctgctccgatgta

SEQ ID NO: 6019875 - DNA, 25 bp, Homo sapien
tcttctgtctttaataatatatgtt

SEQ ID NO: 6019876 - DNA, 25 bp, Homo sapien
ccacttccaagtataaaaaacgcag

SEQ ID NO: 6019877 - DNA, 25 bp, Homo sapien
caaagagcttcttgccaatgggttg

SEQ ID NO: 6019878 - DNA, 25 bp, Homo sapien
ctcaggacagggctgatggagctta

SEQ ID NO: 6019879 - DNA, 25 bp, Homo sapien
taagtaagccccacaagaaagtctc

SEQ ID NO: 6019880 - DNA, 25 bp, Homo sapien
gtcaccacagacaagcctggcctgg

SEQ ID NO: 6019881 - DNA, 25 bp, Homo sapien
catggcctgaaagattattgaccca

SEQ ID NO: 6019882 - DNA, 25 bp, Homo sapien
tagagaatgccttgttttgttttgt

SEQ ID NO: 6019883 - DNA, 25 bp, Homo sapien
tatgtttaaggtggaggggtagaga

SEQ ID NO: 6019884 - DNA, 25 bp, Homo sapien
gcttcttgccaatgggttggatttt

SEQ ID NO: 6019885 - DNA, 25 bp, Homo sapien
aataatatatgtttaaggtggaggg

SEQ ID NO: 6019886 - DNA, 25 bp, Homo sapien
taaccagaaggctaagtaagcccca

SEQ ID NO: 6019887 - DNA, 25 bp, Homo sapien
gagagccctgtcacccatgcccagg

SEQ ID NO: 6019888 - DNA, 25 bp, Homo sapien
cacccacaaagagcttcttgccaat

SEQ ID NO: 6019889 - DNA, 25 bp, Homo sapien
gatgtaaccaggcacccacaaagag

SEQ ID NO: 6019890 - DNA, 25 bp, Homo sapien
ccttatataaaataattcaccactt

SEQ ID NO: 6019891 - DNA, 25 bp, Homo sapien
cacagtttgtgaggcagtgctccct

SEQ ID NO: 6019892 - DNA, 25 bp, Homo sapien
ataaaataattcaccacttccaagt

SEQ ID NO: 6019893 - DNA, 25 bp, Homo sapien
gagaagggttcctaatgcacacagg

SEQ ID NO: 6019894 - DNA, 25 bp, Homo sapien
gaaggctaagtaagccccacaagaa

SEQ ID NO: 6019895 - DNA, 25 bp, Homo sapien
taaggtggaggggtagagaatgcct

SEQ ID NO: 6019896 - DNA, 25 bp, Homo sapien
ttccaagtataaaaaacgcagtctc

SEQ ID NO: 6019897 - DNA, 25 bp, Homo sapien
gacagggctgatggagcttacagac

SEQ ID NO: 6019898 - DNA, 25 bp, Homo sapien
caggaaagggggactcagcagcata

SEQ ID NO: 6019899 - DNA, 25 bp, Homo sapien
gcccaggtcaccacagacaagcctg

SEQ ID NO: 6019900 - DNA, 25 bp, Homo sapien
tcccccctgctgtctcaggacaggg

SEQ ID NO: 6019901 - DNA, 25 bp, Homo sapien
gaaacagagggcatcagaacaagtt

SEQ ID NO: 6019902 - DNA, 25 bp, Homo sapien
caaatgagagccctgtcacccatgc

SEQ ID NO: 6019903 - DNA, 25 bp, Homo sapien
gagggcatcagaacaagttggaagt

SEQ ID NO: 6019904 - DNA, 25 bp, Homo sapien
accaggcacccacaaagagcttctt

SEQ ID NO: 6019905 - DNA, 25 bp, Homo sapien
tagcatggaaatagtctgtaaccag

SEQ ID NO: 6019906 - DNA, 25 bp, Homo sapien
aatgaccttatataaaataattcac

SEQ ID NO: 6019907 - DNA, 25 bp, Homo sapien
gattttctcttctgtctttaataat

SEQ ID NO: 6019908 - DNA, 25 bp, Homo sapien
gattattgacccagtagccagggag

SEQ ID NO: 6019909 - DNA, 25 bp, Homo sapien
ggactcagcagcataaagagaccaa

SEQ ID NO: 6019910 - DNA, 25 bp, Homo sapien
agtagccagggagggcaggaaaggg

SEQ ID NO: 6019911 - DNA, 25 bp, Homo sapien
acccatgcccaggtcaccacagaca

SEQ ID NO: 6019912 - DNA, 25 bp, Homo sapien
agcctggcctgggaaacagagggca

SEQ ID NO: 6019913 - DNA, 25 bp, Homo sapien
ggagcttacagaccactctcctccc

SEQ ID NO: 6019914 - DNA, 25 bp, Homo sapien
ggagggcaggaaagggggactcagc

SEQ ID NO: 6019915 - DNA, 25 bp, Homo sapien
ataaagagaccaaggggcaaatgag

SEQ ID NO: 6019916 - DNA, 25 bp, Homo sapien
cagattcatggcctgaaagattatt

SEQ ID NO: 6019917 - DNA, 25 bp, Homo sapien
tacagaccactctcctcccagattc

SEQ ID NO: 6019918 - DNA, 25 bp, Homo sapien
cagtctcacagtttgtgaggcagtg

SEQ ID NO: 6019919 - DNA, 25 bp, Homo sapien
tgtgaggcagtgctccctctgagct

SEQ ID NO: 6019920 - DNA, 25 bp, Homo sapien
attttctagcatggaaatagtctgt

SEQ ID NO: 6019921 - DNA, 25 bp, Homo sapien
tgacccagtagccagggagggcagg

SEQ ID NO: 6019922 - DNA, 25 bp, Homo sapien
ctttaataatatatgtttaaggtgg

SEQ ID NO: 6019923 - DNA, 25 bp, Homo sapien
acagacaagcctggcctgggaaaca

SEQ ID NO: 6019924 - DNA, 25 bp, Homo sapien
ctaatgcacacaggggcggctccaa

SEQ ID NO: 6019925 - DNA, 25 bp, Homo sapien
tcctcccagattcatggcctgaaag

SEQ ID NO: 6019926 - DNA, 25 bp, Homo sapien
gtataaaaaacgcagtctcacagtt

SEQ ID NO: 6019927 - DNA, 25 bp, Homo sapien
ggctcccctgctccgatgtaaccag

SEQ ID NO: 6019928 - DNA, 25 bp, Homo sapien
ctccctctgagctttctcagaggag

SEQ ID NO: 6019929 - DNA, 25 bp, Homo sapien
aagtctccagtgtccttcccccctg

SEQ ID NO: 6019930 - DNA, 25 bp, Homo sapien
agcagcataaagagaccaaggggca

SEQ ID NO: 6019931 - DNA, 25 bp, Homo sapien
ctgaaagattattgacccagtagcc

SEQ ID NO: 6019932 - DNA, 25 bp, Homo sapien
gggcggctccaaaggtggatttgag

SEQ ID NO: 6019933 - DNA, 25 bp, Homo sapien
gcagtgctccctctgagctttctca

SEQ ID NO: 6019934 - DNA, 25 bp, Homo sapien
tgggttggattttctcttctgtctt

SEQ ID NO: 6019935 - DNA, 25 bp, Homo sapien
aggtggatttgaggctcccctgctc

SEQ ID NO: 6019936 - DNA, 25 bp, Homo sapien
tatgtattttctagcatggaaatag

SEQ ID NO: 6019937 - DNA, 25 bp, Homo sapien
aaaacgcagtctcacagtttgtgag

SEQ ID NO: 6019938 - DNA, 25 bp, Homo sapien
ccactctcctcccagattcatggcc

SEQ ID NO: 6019939 - DNA, 25 bp, Homo sapien
agccccacaagaaagtctccagtgt

SEQ ID NO: 6019940 - DNA, 25 bp, Homo sapien
ttctcagaggagagaagggttccta

SEQ ID NO: 6019941 - DNA, 25 bp, Homo sapien
ggttcctaatgcacacaggggcggc

SEQ ID NO: 6019942 - DNA, 25 bp, Homo sapien
ccagggttcctccaagccagggaag

SEQ ID NO: 6019943 - DNA, 25 bp, Homo sapien
tggcctgaccctggacgctcggagc

SEQ ID NO: 6019944 - DNA, 25 bp, Homo sapien
ccaagggatacaggggctcactgtg

SEQ ID NO: 6019945 - DNA, 25 bp, Homo sapien
tgctgttgttgctgaggtctgtgct

SEQ ID NO: 6019946 - DNA, 25 bp, Homo sapien
agctgggcctagaaactcacagatg

SEQ ID NO: 6019947 - DNA, 25 bp, Homo sapien
tgtccaccgaatagacctgtcactc

SEQ ID NO: 6019948 - DNA, 25 bp, Homo sapien
agacagcccagctggcaggtttccc

SEQ ID NO: 6019949 - DNA, 25 bp, Homo sapien
gacgctcggagcctggctgtctcct

SEQ ID NO: 6019950 - DNA, 25 bp, Homo sapien
cagtggcatgggaggccctaaaaat

SEQ ID NO: 6019951 - DNA, 25 bp, Homo sapien
tcttccactggcctgggctctcctc

SEQ ID NO: 6019952 - DNA, 25 bp, Homo sapien
aagatgtaaacttggcctgaccctg

SEQ ID NO: 6019953 - DNA, 25 bp, Homo sapien
tcccagccagacgaccgaggtgcct

SEQ ID NO: 6019954 - DNA, 25 bp, Homo sapien
ttgtcctacctactcagtcccattt

SEQ ID NO: 6019955 - DNA, 25 bp, Homo sapien
cggtcctgccatagctgctggacgc

SEQ ID NO: 6019956 - DNA, 25 bp, Homo sapien
tcagtcccattttgtccaccgaata

SEQ ID NO: 6019957 - DNA, 25 bp, Homo sapien
ctgtgctgaggccagggttcctcca

SEQ ID NO: 6019958 - DNA, 25 bp, Homo sapien
gctggaagctgggcctagaaactca

SEQ ID NO: 6019959 - DNA, 25 bp, Homo sapien
accctggacgctcggagcctggctg

SEQ ID NO: 6019960 - DNA, 25 bp, Homo sapien
tctcagcggtcctgccatagctgct

SEQ ID NO: 6019961 - DNA, 25 bp, Homo sapien
aaactcacagatggcctggcagtgg

SEQ ID NO: 6019962 - DNA, 25 bp, Homo sapien
catgggaggccctaaaaattagtgg

SEQ ID NO: 6019963 - DNA, 25 bp, Homo sapien
ccgaatagacctgtcactcaaggct

SEQ ID NO: 6019964 - DNA, 25 bp, Homo sapien
ctcatgtcagcacccaagacaccct

SEQ ID NO: 6019965 - DNA, 25 bp, Homo sapien
ctcccagctggaagctgggcctaga

SEQ ID NO: 6019966 - DNA, 25 bp, Homo sapien
tgctgtttcttaggtgagtgagtgt

SEQ ID NO: 6019967 - DNA, 25 bp, Homo sapien
ctggctgtctcctcttccactggcc

SEQ ID NO: 6019968 - DNA, 25 bp, Homo sapien
cagatggcctggcagtggcatggga

SEQ ID NO: 6019969 - DNA, 25 bp, Homo sapien
actgtgcttggtcccacagcagtgc

SEQ ID NO: 6019970 - DNA, 25 bp, Homo sapien
gggctttcctagctgatgttgtcct

SEQ ID NO: 6019971 - DNA, 25 bp, Homo sapien
agctgctggacgctcccagctggaa

SEQ ID NO: 6019972 - DNA, 25 bp, Homo sapien
ccaagacaccctcaaacttgtcagg

SEQ ID NO: 6019973 - DNA, 25 bp, Homo sapien
gcagtgctgacgttcctaagtcctg

SEQ ID NO: 6019974 - DNA, 25 bp, Homo sapien
tgaggtctgtgctgaggccagggtt

SEQ ID NO: 6019975 - DNA, 25 bp, Homo sapien
gtctcctcttccactggcctgggct

SEQ ID NO: 6019976 - DNA, 25 bp, Homo sapien
cagaaatccagagaatggtgaattg

SEQ ID NO: 6019977 - DNA, 25 bp, Homo sapien
actggcctgggctctcctccctccc

SEQ ID NO: 6019978 - DNA, 25 bp, Homo sapien
tcaaggctctcagcggtcctgccat

SEQ ID NO: 6019979 - DNA, 25 bp, Homo sapien
tccagagaatggtgaattgaagatg

SEQ ID NO: 6019980 - DNA, 25 bp, Homo sapien
ctggacgctcccagctggaagctgg

SEQ ID NO: 6019981 - DNA, 25 bp, Homo sapien
tgtgggcgccctgggcattgctgtt

SEQ ID NO: 6019982 - DNA, 25 bp, Homo sapien
tcctagctgatgttgtcctacctac

SEQ ID NO: 6019983 - DNA, 25 bp, Homo sapien
ctgacgttcctaagtcctgggcttt

SEQ ID NO: 6019984 - DNA, 25 bp, Homo sapien
cggagcctggctgtctcctcttcca

SEQ ID NO: 6019985 - DNA, 25 bp, Homo sapien
cagggaagtacttcctgggagacag

SEQ ID NO: 6019986 - DNA, 25 bp, Homo sapien
ggtgcctgtgggcgccctgggcatt

SEQ ID NO: 6019987 - DNA, 25 bp, Homo sapien
aagggccctggtcactctcctgttc

SEQ ID NO: 6019988 - DNA, 25 bp, Homo sapien
ccattttgtccaccgaatagacctg

SEQ ID NO: 6019989 - DNA, 25 bp, Homo sapien
tagacctgtcactcaaggctctcag

SEQ ID NO: 6019990 - DNA, 25 bp, Homo sapien
cgccctgggcattgctgtttcttag

SEQ ID NO: 6019991 - DNA, 25 bp, Homo sapien
agtacttcctgggagacagcccagc

SEQ ID NO: 6019992 - DNA, 25 bp, Homo sapien
ttcctaagtcctgggctttcctagc

SEQ ID NO: 6019993 - DNA, 25 bp, Homo sapien
ttcctccaagccagggaagtacttc

SEQ ID NO: 6019994 - DNA, 25 bp, Homo sapien
ctgttcccagccagacgaccgaggt

SEQ ID NO: 6019995 - DNA, 25 bp, Homo sapien
cccacagcagtgctgacgttcctaa

SEQ ID NO: 6019996 - DNA, 25 bp, Homo sapien
gggctcactgtgcttggtcccacag

SEQ ID NO: 6019997 - DNA, 25 bp, Homo sapien
ggtgagtgagtgtgctgttgttgct

SEQ ID NO: 6019998 - DNA, 25 bp, Homo sapien
cttggtcccacagcagtgctgacgt

SEQ ID NO: 6019999 - DNA, 25 bp, Homo sapien
ccagacgaccgaggtgcctgtgggc

SEQ ID NO: 6020000 - DNA, 25 bp, Homo sapien
tctcctccctcccaagggatacagg

SEQ ID NO: 6020001 - DNA, 25 bp, Homo sapien
taaacttggcctgaccctggacgct

SEQ ID NO: 6020002 - DNA, 25 bp, Homo sapien
tcctgggagacagcccagctggcag

SEQ ID NO: 6020003 - DNA, 25 bp, Homo sapien
ctcaaacttgtcaggggagggcaag

SEQ ID NO: 6020004 - DNA, 25 bp, Homo sapien
gcctggcagtggcatgggaggccct

SEQ ID NO: 6020005 - DNA, 25 bp, Homo sapien
ctgggctctcctccctcccaaggga

SEQ ID NO: 6020006 - DNA, 25 bp, Homo sapien
gaattgaagatgtaaacttggcctg

SEQ ID NO: 6020007 - DNA, 25 bp, Homo sapien
tacctactcagtcccattttgtcca

SEQ ID NO: 6020008 - DNA, 25 bp, Homo sapien
tgccatagctgctggacgctcccag

SEQ ID NO: 6020009 - DNA, 25 bp, Homo sapien
atacaggggctcactgtgcttggtc

SEQ ID NO: 6020010 - DNA, 25 bp, Homo sapien
ggaaattttgagagaggacaggtat

SEQ ID NO: 6020011 - DNA, 25 bp, Homo sapien
gacaccctcaaacttgtcaggggag

SEQ ID NO: 6020012 - DNA, 25 bp, Homo sapien
agtcctgggctttcctagctgatgt

SEQ ID NO: 6020013 - DNA, 25 bp, Homo sapien
gaatggtgaattgaagatgtaaact

SEQ ID NO: 6020014 - DNA, 25 bp, Homo sapien
gtttcccagaaatccagagaatggt

SEQ ID NO: 6020015 - DNA, 25 bp, Homo sapien
ctgaggccagggttcctccaagcca

SEQ ID NO: 6020016 - DNA, 25 bp, Homo sapien
gggcattgctgtttcttaggtgagt

SEQ ID NO: 6020017 - DNA, 25 bp, Homo sapien
tggtcactctcctgttcccagccag

SEQ ID NO: 6020018 - DNA, 25 bp, Homo sapien
gaccgaggtgcctgtgggcgccctg

SEQ ID NO: 6020019 - DNA, 25 bp, Homo sapien
tccctcccaagggatacaggggctc

SEQ ID NO: 6020020 - DNA, 25 bp, Homo sapien
tgagtgtgctgttgttgctgaggtc

SEQ ID NO: 6020021 - DNA, 25 bp, Homo sapien
ttcttaggtgagtgagtgtgctgtt

SEQ ID NO: 6020022 - DNA, 25 bp, Homo sapien
cagcacccaagacaccctcaaactt

SEQ ID NO: 6020023 - DNA, 25 bp, Homo sapien
tttgagagaggacaggtattgcccc

SEQ ID NO: 6020024 - DNA, 25 bp, Homo sapien
tgtcactcaaggctctcagcggtcc

SEQ ID NO: 6020025 - DNA, 25 bp, Homo sapien
agggcaagggccctggtcactctcc

SEQ ID NO: 6020026 - DNA, 25 bp, Homo sapien
tggcaggtttcccagaaatccagag

SEQ ID NO: 6020027 - DNA, 25 bp, Homo sapien
attagtggaaattttgagagaggac

SEQ ID NO: 6020028 - DNA, 25 bp, Homo sapien
caggggagggcaagggccctggtca

SEQ ID NO: 6020029 - DNA, 25 bp, Homo sapien
gccaacctcatgtcagcacccaaga

SEQ ID NO: 6020030 - DNA, 25 bp, Homo sapien
ctgatgttgtcctacctactcagtc

SEQ ID NO: 6020031 - DNA, 25 bp, Homo sapien
cttgtcaggggagggcaagggccct

SEQ ID NO: 6020032 - DNA, 25 bp, Homo sapien
ctctcctgttcccagccagacgacc

SEQ ID NO: 6020033 - DNA, 25 bp, Homo sapien
cccagctggcaggtttcccagaaat

SEQ ID NO: 6020034 - DNA, 25 bp, Homo sapien
tgttgctgaggtctgtgctgaggcc

SEQ ID NO: 6020035 - DNA, 25 bp, Homo sapien
gcctagaaactcacagatggcctgg

SEQ ID NO: 6020036 - DNA, 25 bp, Homo sapien
ccaagccagggaagtacttcctggg

SEQ ID NO: 6020037 - DNA, 25 bp, Homo sapien
agactcactcactcaccaaagtctg

SEQ ID NO: 6020038 - DNA, 25 bp, Homo sapien
catatgtgggtaactggcagtgact

SEQ ID NO: 6020039 - DNA, 25 bp, Homo sapien
gcttccagctgggagcgtccagcag

SEQ ID NO: 6020040 - DNA, 25 bp, Homo sapien
acagactaggtgttgcaacagtggg

SEQ ID NO: 6020041 - DNA, 25 bp, Homo sapien
atgggactgagtaggtaggacaaca

SEQ ID NO: 6020042 - DNA, 25 bp, Homo sapien
tgtgagtttctaggcccagcttcca

SEQ ID NO: 6020043 - DNA, 25 bp, Homo sapien
gtgtttgtttatcttccacatccca

SEQ ID NO: 6020044 - DNA, 25 bp, Homo sapien
atacctgtcctctctcaaaatttcc

SEQ ID NO: 6020045 - DNA, 25 bp, Homo sapien
actggcagtgactttgggcaatcaa

SEQ ID NO: 6020046 - DNA, 25 bp, Homo sapien
atcttccagaacacagtcagactca

SEQ ID NO: 6020047 - DNA, 25 bp, Homo sapien
ggctgttcaatgaatggcctctgtg

SEQ ID NO: 6020048 - DNA, 25 bp, Homo sapien
caatcaagtttgtgtccttgttgct

SEQ ID NO: 6020049 - DNA, 25 bp, Homo sapien
ctcaccaaagtctgccatctgctat

SEQ ID NO: 6020050 - DNA, 25 bp, Homo sapien
cttgagtgacaggtctattcggtgg

SEQ ID NO: 6020051 - DNA, 25 bp, Homo sapien
gccatctgctatccctaccacctga

SEQ ID NO: 6020052 - DNA, 25 bp, Homo sapien
ctgagtaggtaggacaacatcagct

SEQ ID NO: 6020053 - DNA, 25 bp, Homo sapien
ggcccagcttccagctgggagcgtc

SEQ ID NO: 6020054 - DNA, 25 bp, Homo sapien
gtctattcggtggacaaaatgggac

SEQ ID NO: 6020055 - DNA, 25 bp, Homo sapien
tttctaggcccagcttccagctggg

SEQ ID NO: 6020056 - DNA, 25 bp, Homo sapien
agctatggcaggaccgctgagagcc

SEQ ID NO: 6020057 - DNA, 25 bp, Homo sapien
cggaggacagcaggctctgcctcta

SEQ ID NO: 6020058 - DNA, 25 bp, Homo sapien
ccttgactgccagttatcgtgcccg

SEQ ID NO: 6020059 - DNA, 25 bp, Homo sapien
tgggtaactggcagtgactttgggc

SEQ ID NO: 6020060 - DNA, 25 bp, Homo sapien
gggcaatacctgtcctctctcaaaa

SEQ ID NO: 6020061 - DNA, 25 bp, Homo sapien
cacccggcaactgtgtttgtttatc

SEQ ID NO: 6020062 - DNA, 25 bp, Homo sapien
gtggggacgtgagcagacagtgctg

SEQ ID NO: 6020063 - DNA, 25 bp, Homo sapien
gtccttgttgctttctacaactgag

SEQ ID NO: 6020064 - DNA, 25 bp, Homo sapien
cctcccatgccactgccaggccatc

SEQ ID NO: 6020065 - DNA, 25 bp, Homo sapien
accgctgagagccttgagtgacagg

SEQ ID NO: 6020066 - DNA, 25 bp, Homo sapien
ggctctgcctctagtcccagtcctg

SEQ ID NO: 6020067 - DNA, 25 bp, Homo sapien
cagctgggagcgtccagcagctatg

SEQ ID NO: 6020068 - DNA, 25 bp, Homo sapien
gtttatcttccacatcccaggagcc

SEQ ID NO: 6020069 - DNA, 25 bp, Homo sapien
gctatccctaccacctgaccaccaa

SEQ ID NO: 6020070 - DNA, 25 bp, Homo sapien
gtatcgccttgactgccagttatcg

SEQ ID NO: 6020071 - DNA, 25 bp, Homo sapien
gagcccggtcccatcttccagaaca

SEQ ID NO: 6020072 - DNA, 25 bp, Homo sapien
cactcactcaccaaagtctgccatc

SEQ ID NO: 6020073 - DNA, 25 bp, Homo sapien
tccagcagctatggcaggaccgctg

SEQ ID NO: 6020074 - DNA, 25 bp, Homo sapien
aactgagcggaggacagcaggctct

SEQ ID NO: 6020075 - DNA, 25 bp, Homo sapien
tcaatgaatggcctctgtggggcaa

SEQ ID NO: 6020076 - DNA, 25 bp, Homo sapien
ccaccaaccaggaccagccccacag

SEQ ID NO: 6020077 - DNA, 25 bp, Homo sapien
tcgaggtatcgccttgactgccagt

SEQ ID NO: 6020078 - DNA, 25 bp, Homo sapien
tttgggcaatcaagtttgtgtcctt

SEQ ID NO: 6020079 - DNA, 25 bp, Homo sapien
gttgctttctacaactgagcggagg

SEQ ID NO: 6020080 - DNA, 25 bp, Homo sapien
gcctctagtcccagtcctggctgtt

SEQ ID NO: 6020081 - DNA, 25 bp, Homo sapien
acctgaccaccaaccaggaccagcc

SEQ ID NO: 6020082 - DNA, 25 bp, Homo sapien
cccgctggggccctgccacccggca

SEQ ID NO: 6020083 - DNA, 25 bp, Homo sapien
accaggaccagccccacagttccct

SEQ ID NO: 6020084 - DNA, 25 bp, Homo sapien
agtgactttgggcaatcaagtttgt

SEQ ID NO: 6020085 - DNA, 25 bp, Homo sapien
tgacaggtctattcggtggacaaaa

SEQ ID NO: 6020086 - DNA, 25 bp, Homo sapien
atcccaggagccctggcttctggtc

SEQ ID NO: 6020087 - DNA, 25 bp, Homo sapien
agtcccagtcctggctgttcaatga

SEQ ID NO: 6020088 - DNA, 25 bp, Homo sapien
cctgccacccggcaactgtgtttgt

SEQ ID NO: 6020089 - DNA, 25 bp, Homo sapien
gagagccttgagtgacaggtctatt

SEQ ID NO: 6020090 - DNA, 25 bp, Homo sapien
acagcaggctctgcctctagtccca

SEQ ID NO: 6020091 - DNA, 25 bp, Homo sapien
acagtcagactcactcactcaccaa

SEQ ID NO: 6020092 - DNA, 25 bp, Homo sapien
ctggcttctggtcatatgtgggtaa

SEQ ID NO: 6020093 - DNA, 25 bp, Homo sapien
gagcgtccagcagctatggcaggac

SEQ ID NO: 6020094 - DNA, 25 bp, Homo sapien
aaagtctgccatctgctatccctac

SEQ ID NO: 6020095 - DNA, 25 bp, Homo sapien
accagccccacagttccctcgaggt

SEQ ID NO: 6020096 - DNA, 25 bp, Homo sapien
gcaacagtggggacgtgagcagaca

SEQ ID NO: 6020097 - DNA, 25 bp, Homo sapien
aggtaggacaacatcagctaggaaa

SEQ ID NO: 6020098 - DNA, 25 bp, Homo sapien
aatttttagggcctcccatgccact

SEQ ID NO: 6020099 - DNA, 25 bp, Homo sapien
ttctacaactgagcggaggacagca

SEQ ID NO: 6020100 - DNA, 25 bp, Homo sapien
tcggtggacaaaatgggactgagta

SEQ ID NO: 6020101 - DNA, 25 bp, Homo sapien
gccatctgtgagtttctaggcccag

SEQ ID NO: 6020102 - DNA, 25 bp, Homo sapien
gtcctctctcaaaatttccactaat

SEQ ID NO: 6020103 - DNA, 25 bp, Homo sapien
tgccaggccatctgtgagtttctag

SEQ ID NO: 6020104 - DNA, 25 bp, Homo sapien
aatggcctctgtggggcaatacctg

SEQ ID NO: 6020105 - DNA, 25 bp, Homo sapien
gtttgtgtccttgttgctttctaca

SEQ ID NO: 6020106 - DNA, 25 bp, Homo sapien
ggtcccatcttccagaacacagtca

SEQ ID NO: 6020107 - DNA, 25 bp, Homo sapien
cctaccacctgaccaccaaccagga

SEQ ID NO: 6020108 - DNA, 25 bp, Homo sapien
gacaacatcagctaggaaagcccag

SEQ ID NO: 6020109 - DNA, 25 bp, Homo sapien
cagacagtgctgagcccggtcccat

SEQ ID NO: 6020110 - DNA, 25 bp, Homo sapien
ttccacatcccaggagccctggctt

SEQ ID NO: 6020111 - DNA, 25 bp, Homo sapien
ccactaatttttagggcctcccatg

SEQ ID NO: 6020112 - DNA, 25 bp, Homo sapien
agtcctggctgttcaatgaatggcc

SEQ ID NO: 6020113 - DNA, 25 bp, Homo sapien
gcaactgtgtttgtttatcttccac

SEQ ID NO: 6020114 - DNA, 25 bp, Homo sapien
ttagggcctcccatgccactgccag

SEQ ID NO: 6020115 - DNA, 25 bp, Homo sapien
cccacagttccctcgaggtatcgcc

SEQ ID NO: 6020116 - DNA, 25 bp, Homo sapien
tctgtggggcaatacctgtcctctc

SEQ ID NO: 6020117 - DNA, 25 bp, Homo sapien
ttgcaaacagactaggtgttgcaac

SEQ ID NO: 6020118 - DNA, 25 bp, Homo sapien
ggagccctggcttctggtcatatgt

SEQ ID NO: 6020119 - DNA, 25 bp, Homo sapien
tggggccctgccacccggcaactgt

SEQ ID NO: 6020120 - DNA, 25 bp, Homo sapien
ggcaggaccgctgagagccttgagt

SEQ ID NO: 6020121 - DNA, 25 bp, Homo sapien
gttccctcgaggtatcgccttgact

SEQ ID NO: 6020122 - DNA, 25 bp, Homo sapien
gacaaaatgggactgagtaggtagg

SEQ ID NO: 6020123 - DNA, 25 bp, Homo sapien
tctggtcatatgtgggtaactggca

SEQ ID NO: 6020124 - DNA, 25 bp, Homo sapien
atgccactgccaggccatctgtgag

SEQ ID NO: 6020125 - DNA, 25 bp, Homo sapien
actgccagttatcgtgcccgctggg

SEQ ID NO: 6020126 - DNA, 25 bp, Homo sapien
cagaacacagtcagactcactcact

SEQ ID NO: 6020127 - DNA, 25 bp, Homo sapien
acgtgagcagacagtgctgagcccg

SEQ ID NO: 6020128 - DNA, 25 bp, Homo sapien
gtgctgagcccggtcccatcttcca

SEQ ID NO: 6020129 - DNA, 25 bp, Homo sapien
tctgtttaaggctttaatggtactg

SEQ ID NO: 6020130 - DNA, 25 bp, Homo sapien
tgatacgcttcaacccacttttgtt

SEQ ID NO: 6020131 - DNA, 25 bp, Homo sapien
atgtttatcagcatagactatggag

SEQ ID NO: 6020132 - DNA, 25 bp, Homo sapien
gggagcagaaagttaaatgtgatac

SEQ ID NO: 6020133 - DNA, 25 bp, Homo sapien
cagagaactcggaacatgtgtatgt

SEQ ID NO: 6020134 - DNA, 25 bp, Homo sapien
acgcagctggttgcagataaaggga

SEQ ID NO: 6020135 - DNA, 25 bp, Homo sapien
tgtagcaaaatgaattttttcataa

SEQ ID NO: 6020136 - DNA, 25 bp, Homo sapien
acaagataggaaaatgtacattact

SEQ ID NO: 6020137 - DNA, 25 bp, Homo sapien
actcggaacatgtgtatgtattatt

SEQ ID NO: 6020138 - DNA, 25 bp, Homo sapien
tacagaacgaaacaaccagattaaa

SEQ ID NO: 6020139 - DNA, 25 bp, Homo sapien
tatggaggagtgcagagaactcgga

SEQ ID NO: 6020140 - DNA, 25 bp, Homo sapien
acccacttttgttacaatgcatttg

SEQ ID NO: 6020141 - DNA, 25 bp, Homo sapien
gctttaatggtactgatttctgaaa

SEQ ID NO: 6020142 - DNA, 25 bp, Homo sapien
ttggggtgggggggatgagaccaca

SEQ ID NO: 6020143 - DNA, 25 bp, Homo sapien
gcttttgttaagatacagaacgaaa

SEQ ID NO: 6020144 - DNA, 25 bp, Homo sapien
gtgggggggatgagaccacaagata

SEQ ID NO: 6020145 - DNA, 25 bp, Homo sapien
ttaaatgtgatacgcttcaacccac

SEQ ID NO: 6020146 - DNA, 25 bp, Homo sapien
aacatgtgtatgtattatttggact

SEQ ID NO: 6020147 - DNA, 25 bp, Homo sapien
tgtacctttttcagattggaattag

SEQ ID NO: 6020148 - DNA, 25 bp, Homo sapien
atggtactgatttctgaaatgataa

SEQ ID NO: 6020149 - DNA, 25 bp, Homo sapien
atggagtgattttgttacctttggg

SEQ ID NO: 6020150 - DNA, 25 bp, Homo sapien
gagaccacaagataggaaaatgtac

SEQ ID NO: 6020151 - DNA, 25 bp, Homo sapien
ccaatttgtagcaaaatgaattttt

SEQ ID NO: 6020152 - DNA, 25 bp, Homo sapien
ctaaaatcttaaaacttacgcagct

SEQ ID NO: 6020153 - DNA, 25 bp, Homo sapien
cagattggaattagttttctgttta

SEQ ID NO: 6020154 - DNA, 25 bp, Homo sapien
tctgaaatgataaggaaaagacaaa

SEQ ID NO: 6020155 - DNA, 25 bp, Homo sapien
tgtgcctttttgtacctttttcaga

SEQ ID NO: 6020156 - DNA, 25 bp, Homo sapien
ttgaattttacagtaaagaagcact

SEQ ID NO: 6020157 - DNA, 25 bp, Homo sapien
agaaagttaaatgtgatacgcttca

SEQ ID NO: 6020158 - DNA, 25 bp, Homo sapien
tgtatgtattatttggactttggat

SEQ ID NO: 6020159 - DNA, 25 bp, Homo sapien
atcttaaaacttacgcagctggttg

SEQ ID NO: 6020160 - DNA, 25 bp, Homo sapien
taggaaaatgtacattacttctagt

SEQ ID NO: 6020161 - DNA, 25 bp, Homo sapien
aaacttacgcagctggttgcagata

SEQ ID NO: 6020162 - DNA, 25 bp, Homo sapien
aaaaattaactcatggagtgatttt

SEQ ID NO: 6020163 - DNA, 25 bp, Homo sapien
aactagaatgttagacacattttgg

SEQ ID NO: 6020164 - DNA, 25 bp, Homo sapien
ttttcagattggaattagttttctg

SEQ ID NO: 6020165 - DNA, 25 bp, Homo sapien
tccatgtacacttttttattttctg

SEQ ID NO: 6020166 - DNA, 25 bp, Homo sapien
atagactatggaggagtgcagagaa

SEQ ID NO: 6020167 - DNA, 25 bp, Homo sapien
tcttaatccatgtacacttttttat

SEQ ID NO: 6020168 - DNA, 25 bp, Homo sapien
gggatgagaccacaagataggaaaa

SEQ ID NO: 6020169 - DNA, 25 bp, Homo sapien
gacacattttggtcttaatccatgt

SEQ ID NO: 6020170 - DNA, 25 bp, Homo sapien
tgtgtgtacataatgtttatcagca

SEQ ID NO: 6020171 - DNA, 25 bp, Homo sapien
tacaatgcatttgcttttgttaaga

SEQ ID NO: 6020172 - DNA, 25 bp, Homo sapien
tttctgtattttttccacctcgctg

SEQ ID NO: 6020173 - DNA, 25 bp, Homo sapien
gtaaagaagcactgggatttatgtg

SEQ ID NO: 6020174 - DNA, 25 bp, Homo sapien
tggttgcagataaagggagttttca

SEQ ID NO: 6020175 - DNA, 25 bp, Homo sapien
gcttcaacccacttttgttacaatg

SEQ ID NO: 6020176 - DNA, 25 bp, Homo sapien
tgggatttatgtgcctttttgtacc

SEQ ID NO: 6020177 - DNA, 25 bp, Homo sapien
cattacttctagttttagactttag

SEQ ID NO: 6020178 - DNA, 25 bp, Homo sapien
aatgttagacacattttggtcttaa

SEQ ID NO: 6020179 - DNA, 25 bp, Homo sapien
ttttggtcttaatccatgtacactt

SEQ ID NO: 6020180 - DNA, 25 bp, Homo sapien
ggagtgcagagaactcggaacatgt

SEQ ID NO: 6020181 - DNA, 25 bp, Homo sapien
ttgtggcgggagcagaaagttaaat

SEQ ID NO: 6020182 - DNA, 25 bp, Homo sapien
atcagcatagactatggaggagtgc

SEQ ID NO: 6020183 - DNA, 25 bp, Homo sapien
atatcaccaatttgtagcaaaatga

SEQ ID NO: 6020184 - DNA, 25 bp, Homo sapien
aagggagttttcatatcaccaattt

SEQ ID NO: 6020185 - DNA, 25 bp, Homo sapien
ctgtaaaaatggtgtgtgtacataa

SEQ ID NO: 6020186 - DNA, 25 bp, Homo sapien
tttacagtaaagaagcactgggatt

SEQ ID NO: 6020187 - DNA, 25 bp, Homo sapien
tattatttggactttggattcaggt

SEQ ID NO: 6020188 - DNA, 25 bp, Homo sapien
aagacaaaatattttgtggcgggag

SEQ ID NO: 6020189 - DNA, 25 bp, Homo sapien
ttttgttacaatgcatttgcttttg

SEQ ID NO: 6020190 - DNA, 25 bp, Homo sapien
taaaaaaaattaactcatggagtga

SEQ ID NO: 6020191 - DNA, 25 bp, Homo sapien
tacataatgtttatcagcatagact

SEQ ID NO: 6020192 - DNA, 25 bp, Homo sapien
acctcgctgtaaaaatggtgtgtgt

SEQ ID NO: 6020193 - DNA, 25 bp, Homo sapien
attttttcataaactagaatgttag

SEQ ID NO: 6020194 - DNA, 25 bp, Homo sapien
aaaatattttgtggcgggagcagaa

SEQ ID NO: 6020195 - DNA, 25 bp, Homo sapien
ttcataaactagaatgttagacaca

SEQ ID NO: 6020196 - DNA, 25 bp, Homo sapien
tttccacctcgctgtaaaaatggtg

SEQ ID NO: 6020197 - DNA, 25 bp, Homo sapien
taactcatggagtgattttgttacc

SEQ ID NO: 6020198 - DNA, 25 bp, Homo sapien
aaatggtgtgtgtacataatgttta

SEQ ID NO: 6020199 - DNA, 25 bp, Homo sapien
gcatttgcttttgttaagatacaga

SEQ ID NO: 6020200 - DNA, 25 bp, Homo sapien
aatgtacattacttctagttttaga

SEQ ID NO: 6020201 - DNA, 25 bp, Homo sapien
ctgatttctgaaatgataaggaaaa

SEQ ID NO: 6020202 - DNA, 25 bp, Homo sapien
aagcactgggatttatgtgcctttt

SEQ ID NO: 6020203 - DNA, 25 bp, Homo sapien
ttaagatacagaacgaaacaaccag

SEQ ID NO: 6020204 - DNA, 25 bp, Homo sapien
atgataaggaaaagacaaaatattt

SEQ ID NO: 6020205 - DNA, 25 bp, Homo sapien
ccagattaaaaaaaattaactcatg

SEQ ID NO: 6020206 - DNA, 25 bp, Homo sapien
gttttcatatcaccaatttgtagca

SEQ ID NO: 6020207 - DNA, 25 bp, Homo sapien
cagataaagggagttttcatatcac

SEQ ID NO: 6020208 - DNA, 25 bp, Homo sapien
tgtattttttccacctcgctgtaaa

SEQ ID NO: 6020209 - DNA, 25 bp, Homo sapien
ttaaggctttaatggtactgatttc

SEQ ID NO: 6020210 - DNA, 25 bp, Homo sapien
caaaatgaattttttcataaactag

SEQ ID NO: 6020211 - DNA, 25 bp, Homo sapien
ttgctagtgctgcaagaaacaggcc

SEQ ID NO: 6020212 - DNA, 25 bp, Homo sapien
agaagtctctccagtttaaaagctt

SEQ ID NO: 6020213 - DNA, 25 bp, Homo sapien
catacacatgttccgagttctctgc

SEQ ID NO: 6020214 - DNA, 25 bp, Homo sapien
acccataacgaaagatattaacatg

SEQ ID NO: 6020215 - DNA, 25 bp, Homo sapien
tctgcactcctccatagtctatgct

SEQ ID NO: 6020216 - DNA, 25 bp, Homo sapien
tggattaagaccaaaatgtgtctaa

SEQ ID NO: 6020217 - DNA, 25 bp, Homo sapien
ttttaaaaacacacacttgctagtg

SEQ ID NO: 6020218 - DNA, 25 bp, Homo sapien
atactttacccataacgaaagatat

SEQ ID NO: 6020219 - DNA, 25 bp, Homo sapien
gataaacattatgtacacacaccat

SEQ ID NO: 6020220 - DNA, 25 bp, Homo sapien
ataatacatacacatgttccgagtt

SEQ ID NO: 6020221 - DNA, 25 bp, Homo sapien
tgtacatggattaagaccaaaatgt

SEQ ID NO: 6020222 - DNA, 25 bp, Homo sapien
tgtttcagaagtctctccagtttaa

SEQ ID NO: 6020223 - DNA, 25 bp, Homo sapien
cagttgaatcaaatgtcactttgtt

SEQ ID NO: 6020224 - DNA, 25 bp, Homo sapien
ctcctccatagtctatgctgataaa

SEQ ID NO: 6020225 - DNA, 25 bp, Homo sapien
caagaaacaggccacccctttcact

SEQ ID NO: 6020226 - DNA, 25 bp, Homo sapien
aacgaaagatattaacatgcaaaaa

SEQ ID NO: 6020227 - DNA, 25 bp, Homo sapien
aaattatgtaaaacattgtgctaag

SEQ ID NO: 6020228 - DNA, 25 bp, Homo sapien
tggtacaaattatgtaaaacattgt

SEQ ID NO: 6020229 - DNA, 25 bp, Homo sapien
acattctagtttatgaaaaaattca

SEQ ID NO: 6020230 - DNA, 25 bp, Homo sapien
tgtctaacattctagtttatgaaaa

SEQ ID NO: 6020231 - DNA, 25 bp, Homo sapien
tagtttatgaaaaaattcattttgc

SEQ ID NO: 6020232 - DNA, 25 bp, Homo sapien
attctaactacagctcaacagttga

SEQ ID NO: 6020233 - DNA, 25 bp, Homo sapien
cctgaatccaaagtccaaataatac

SEQ ID NO: 6020234 - DNA, 25 bp, Homo sapien
aagaccaaaatgtgtctaacattct

SEQ ID NO: 6020235 - DNA, 25 bp, Homo sapien
taaaaattgagtattctaactacag

SEQ ID NO: 6020236 - DNA, 25 bp, Homo sapien
agatattaacatgcaaaaaacctga

SEQ ID NO: 6020237 - DNA, 25 bp, Homo sapien
cagcgaggtggaaaaaatacagaaa

SEQ ID NO: 6020238 - DNA, 25 bp, Homo sapien
caaagctgtttcagaagtctctcca

SEQ ID NO: 6020239 - DNA, 25 bp, Homo sapien
gagttctctgcactcctccatagtc

SEQ ID NO: 6020240 - DNA, 25 bp, Homo sapien
aattcattttgctacaaattggtga

SEQ ID NO: 6020241 - DNA, 25 bp, Homo sapien
attatgtacacacaccatttttaca

SEQ ID NO: 6020242 - DNA, 25 bp, Homo sapien
tccaaagtccaaataatacatacac

SEQ ID NO: 6020243 - DNA, 25 bp, Homo sapien
ctatgctgataaacattatgtacac

SEQ ID NO: 6020244 - DNA, 25 bp, Homo sapien
atgttccgagttctctgcactcctc

SEQ ID NO: 6020245 - DNA, 25 bp, Homo sapien
tgaaaaaattcattttgctacaaat

SEQ ID NO: 6020246 - DNA, 25 bp, Homo sapien
tacacacaccatttttacagcgagg

SEQ ID NO: 6020247 - DNA, 25 bp, Homo sapien
aatcaaatgtcactttgttttgtaa

SEQ ID NO: 6020248 - DNA, 25 bp, Homo sapien
aaaaacacacacttgctagtgctgc

SEQ ID NO: 6020249 - DNA, 25 bp, Homo sapien
actacagctcaacagttgaatcaaa

SEQ ID NO: 6020250 - DNA, 25 bp, Homo sapien
agaaaataaaaaagtgtacatggat

SEQ ID NO: 6020251 - DNA, 25 bp, Homo sapien
tttacagcgaggtggaaaaaataca

SEQ ID NO: 6020252 - DNA, 25 bp, Homo sapien
gctcaacagttgaatcaaatgtcac

SEQ ID NO: 6020253 - DNA, 25 bp, Homo sapien
caccatttttacagcgaggtggaaa

SEQ ID NO: 6020254 - DNA, 25 bp, Homo sapien
aaaatgtgtctaacattctagttta

SEQ ID NO: 6020255 - DNA, 25 bp, Homo sapien
cattgtgctaagaacttttacccct

SEQ ID NO: 6020256 - DNA, 25 bp, Homo sapien
tgtaaaacattgtgctaagaacttt

SEQ ID NO: 6020257 - DNA, 25 bp, Homo sapien
aaaaagtgtacatggattaagacca

SEQ ID NO: 6020258 - DNA, 25 bp, Homo sapien
ttgagtattctaactacagctcaac

SEQ ID NO: 6020259 - DNA, 25 bp, Homo sapien
gtgctgcaagaaacaggccacccct

SEQ ID NO: 6020260 - DNA, 25 bp, Homo sapien
acacacttgctagtgctgcaagaaa

SEQ ID NO: 6020261 - DNA, 25 bp, Homo sapien
atgtcactttgttttgtaaatactt

SEQ ID NO: 6020262 - DNA, 25 bp, Homo sapien
gcaaaaaacctgaatccaaagtcca

SEQ ID NO: 6020263 - DNA, 25 bp, Homo sapien
catagtctatgctgataaacattat

SEQ ID NO: 6020264 - DNA, 25 bp, Homo sapien
gtccaaataatacatacacatgttc

SEQ ID NO: 6020265 - DNA, 25 bp, Homo sapien
cagacgcaaagctgtttcagaagtc

SEQ ID NO: 6020266 - DNA, 25 bp, Homo sapien
ttcttgagtagcattagggtatttc

SEQ ID NO: 6020267 - DNA, 25 bp, Homo sapien
caaaactgccaaggggctgatgtgg

SEQ ID NO: 6020268 - DNA, 25 bp, Homo sapien
aagaaatccccagaaccagtcagat

SEQ ID NO: 6020269 - DNA, 25 bp, Homo sapien
caaccagtgtacagcagcctaaaaa

SEQ ID NO: 6020270 - DNA, 25 bp, Homo sapien
gtggacggacagcagcgcagccgca

SEQ ID NO: 6020271 - DNA, 25 bp, Homo sapien
tagtgtgggctggacagaggagaag

SEQ ID NO: 6020272 - DNA, 25 bp, Homo sapien
gtgccttgctcattcttgagtagca

SEQ ID NO: 6020273 - DNA, 25 bp, Homo sapien
ggagaagcgcaagcatcatggagac

SEQ ID NO: 6020274 - DNA, 25 bp, Homo sapien
caatgacatccacaagttcagggac

SEQ ID NO: 6020275 - DNA, 25 bp, Homo sapien
gcagaccagaactgtgaagatgcgg

SEQ ID NO: 6020276 - DNA, 25 bp, Homo sapien
gacagaggagaagcgcaagcatcat

SEQ ID NO: 6020277 - DNA, 25 bp, Homo sapien
taagtgcctccagggttcctagtgt

SEQ ID NO: 6020278 - DNA, 25 bp, Homo sapien
tgcagcaagaccaagaaatccccag

SEQ ID NO: 6020279 - DNA, 25 bp, Homo sapien
cctgcaaatgtaactacaactgccc

SEQ ID NO: 6020280 - DNA, 25 bp, Homo sapien
cagccgcagttggagaatgccaagg

SEQ ID NO: 6020281 - DNA, 25 bp, Homo sapien
gccaaggggctgatgtggacggaca

SEQ ID NO: 6020282 - DNA, 25 bp, Homo sapien
cagggactaagtgcctccagggttc

SEQ ID NO: 6020283 - DNA, 25 bp, Homo sapien
ggttccgatgcgaagatggagagat

SEQ ID NO: 6020284 - DNA, 25 bp, Homo sapien
gtatttcaaaactgccaaggggctg

SEQ ID NO: 6020285 - DNA, 25 bp, Homo sapien
actgcggctcctgcgtagatggccg

SEQ ID NO: 6020286 - DNA, 25 bp, Homo sapien
tgatgatccagtcctgcaaatgtaa

SEQ ID NO: 6020287 - DNA, 25 bp, Homo sapien
tgaatggtgccttgctcattcttga

SEQ ID NO: 6020288 - DNA, 25 bp, Homo sapien
tccagtgtcaagaaataccggccca

SEQ ID NO: 6020289 - DNA, 25 bp, Homo sapien
gagagatgttttccaagaatgtcat

SEQ ID NO: 6020290 - DNA, 25 bp, Homo sapien
gggctgatgtggacggacagcagcg

SEQ ID NO: 6020291 - DNA, 25 bp, Homo sapien
tgtggacaaccagtgtacagcagcc

SEQ ID NO: 6020292 - DNA, 25 bp, Homo sapien
catcgttccgactgtacagcctatt

SEQ ID NO: 6020293 - DNA, 25 bp, Homo sapien
ggatgctccagtgtcaagaaatacc

SEQ ID NO: 6020294 - DNA, 25 bp, Homo sapien
atgccaaggggctgatgtggacgga

SEQ ID NO: 6020295 - DNA, 25 bp, Homo sapien
cgtgggtgggcggaggatgaatggt

SEQ ID NO: 6020296 - DNA, 25 bp, Homo sapien
aagatggagagatgttttccaagaa

SEQ ID NO: 6020297 - DNA, 25 bp, Homo sapien
ggcccaaatactgcggctcctgcgt

SEQ ID NO: 6020298 - DNA, 25 bp, Homo sapien
ctaaaaaagggcaagaaatgcagca

SEQ ID NO: 6020299 - DNA, 25 bp, Homo sapien
tccccagaaccagtcagatttactt

SEQ ID NO: 6020300 - DNA, 25 bp, Homo sapien
tgcacacctctgcagaccagaactg

SEQ ID NO: 6020301 - DNA, 25 bp, Homo sapien
cagaactgtgaagatgcggttccga

SEQ ID NO: 6020302 - DNA, 25 bp, Homo sapien
attagggtatttcaaaactgccaag

SEQ ID NO: 6020303 - DNA, 25 bp, Homo sapien
tgttttccaagaatgtcatgatgat

SEQ ID NO: 6020304 - DNA, 25 bp, Homo sapien
cctccagggttcctagtgtgggctg

SEQ ID NO: 6020305 - DNA, 25 bp, Homo sapien
cttcatagtactggagcgggcatta

SEQ ID NO: 6020306 - DNA, 25 bp, Homo sapien
ggtgctgcacacctctgcagaccag

SEQ ID NO: 6020307 - DNA, 25 bp, Homo sapien
aagaccaagaaatccccagaaccag

SEQ ID NO: 6020308 - DNA, 25 bp, Homo sapien
tccgactgtacagcctattcaatga

SEQ ID NO: 6020309 - DNA, 25 bp, Homo sapien
acgaggcatcgttccgactgtacag

SEQ ID NO: 6020310 - DNA, 25 bp, Homo sapien
ggaggatgaatggtgccttgctcat

SEQ ID NO: 6020311 - DNA, 25 bp, Homo sapien
agtactggagcgggcattattgctc

SEQ ID NO: 6020312 - DNA, 25 bp, Homo sapien
gtcagatttacttatgcaggatgct

SEQ ID NO: 6020313 - DNA, 25 bp, Homo sapien
tccagtcctgcaaatgtaactacaa

SEQ ID NO: 6020314 - DNA, 25 bp, Homo sapien
cagttggagaagacttcgcttcata

SEQ ID NO: 6020315 - DNA, 25 bp, Homo sapien
acctctgcagaccagaactgtgaag

SEQ ID NO: 6020316 - DNA, 25 bp, Homo sapien
tgctcattcttgagtagcattaggg

SEQ ID NO: 6020317 - DNA, 25 bp, Homo sapien
agatgcggttccgatgcgaagatgg

SEQ ID NO: 6020318 - DNA, 25 bp, Homo sapien
tggagacgtgggtgggcggaggatg

SEQ ID NO: 6020319 - DNA, 25 bp, Homo sapien
gacagcagcgcagccgcagttggag

SEQ ID NO: 6020320 - DNA, 25 bp, Homo sapien
gatgcgaagatggagagatgttttc

SEQ ID NO: 6020321 - DNA, 25 bp, Homo sapien
gtgggcggaggatgaatggtgcctt

SEQ ID NO: 6020322 - DNA, 25 bp, Homo sapien
ggagcgggcattattgctccatatt

SEQ ID NO: 6020323 - DNA, 25 bp, Homo sapien
gtgtacagcagcctaaaaaagggca

SEQ ID NO: 6020324 - DNA, 25 bp, Homo sapien
ctcctgcgtagatggccggtgctgc

SEQ ID NO: 6020325 - DNA, 25 bp, Homo sapien
gggctggacagaggagaagcgcaag

SEQ ID NO: 6020326 - DNA, 25 bp, Homo sapien
caaatactgcggctcctgcgtagat

SEQ ID NO: 6020327 - DNA, 25 bp, Homo sapien
tgtacagcctattcaatgacatcca

SEQ ID NO: 6020328 - DNA, 25 bp, Homo sapien
ggttcctagtgtgggctggacagag

SEQ ID NO: 6020329 - DNA, 25 bp, Homo sapien
ccaagaatgtcatgatgatccagtc

SEQ ID NO: 6020330 - DNA, 25 bp, Homo sapien
aagaaatgcagcaagaccaagaaat

SEQ ID NO: 6020331 - DNA, 25 bp, Homo sapien
tgatgtggacggacagcagcgcagc

SEQ ID NO: 6020332 - DNA, 25 bp, Homo sapien
gaaccagtcagatttacttatgcag

SEQ ID NO: 6020333 - DNA, 25 bp, Homo sapien
atcccaacgaggcatcgttccgact

SEQ ID NO: 6020334 - DNA, 25 bp, Homo sapien
aagggcaagaaatgcagcaagacca

SEQ ID NO: 6020335 - DNA, 25 bp, Homo sapien
ggctgatgtggacggacagcagcgc

SEQ ID NO: 6020336 - DNA, 25 bp, Homo sapien
acaactgcccgcatcccaacgaggc

SEQ ID NO: 6020337 - DNA, 25 bp, Homo sapien
aataccggcccaaatactgcggctc

SEQ ID NO: 6020338 - DNA, 25 bp, Homo sapien
agcagcctaaaaaagggcaagaaat

SEQ ID NO: 6020339 - DNA, 25 bp, Homo sapien
agcgcagccgcagttggagaagact

SEQ ID NO: 6020340 - DNA, 25 bp, Homo sapien
cagccgcagttggagaagacttcgc

SEQ ID NO: 6020341 - DNA, 25 bp, Homo sapien
tttacttatgcaggatgctccagtg

SEQ ID NO: 6020342 - DNA, 25 bp, Homo sapien
gcatcatggagacgtgggtgggcgg

SEQ ID NO: 6020343 - DNA, 25 bp, Homo sapien
cctattcaatgacatccacaagttc

SEQ ID NO: 6020344 - DNA, 25 bp, Homo sapien
tatgcaggatgctccagtgtcaaga

SEQ ID NO: 6020345 - DNA, 25 bp, Homo sapien
tcaagaaataccggcccaaatactg

SEQ ID NO: 6020346 - DNA, 25 bp, Homo sapien
catccacaagttcagggactaagtg

SEQ ID NO: 6020347 - DNA, 25 bp, Homo sapien
tgtgaagatgcggttccgatgcgaa

SEQ ID NO: 6020348 - DNA, 25 bp, Homo sapien
gcgcaagcatcatggagacgtgggt

SEQ ID NO: 6020349 - DNA, 25 bp, Homo sapien
gcccgcatcccaacgaggcatcgtt

SEQ ID NO: 6020350 - DNA, 25 bp, Homo sapien
atgtcatgatgatccagtcctgcaa

SEQ ID NO: 6020351 - DNA, 25 bp, Homo sapien
agcgcagccgcagttggagaatgcc

SEQ ID NO: 6020352 - DNA, 25 bp, Homo sapien
caagttcagggactaagtgcctcca

SEQ ID NO: 6020353 - DNA, 25 bp, Homo sapien
agtagcattagggtatttcaaaact

SEQ ID NO: 6020354 - DNA, 25 bp, Homo sapien
atggccggtgctgcacacctctgca

SEQ ID NO: 6020355 - DNA, 25 bp, Homo sapien
gagaagacttcgcttcatagtactg

SEQ ID NO: 6020356 - DNA, 25 bp, Homo sapien
aatgtaactacaactgcccgcatcc

SEQ ID NO: 6020357 - DNA, 25 bp, Homo sapien
ggacagcagcgcagccgcagttgga

SEQ ID NO: 6020358 - DNA, 25 bp, Homo sapien
acttcgcttcatagtactggagcgg

SEQ ID NO: 6020359 - DNA, 25 bp, Homo sapien
cgtagatggccggtgctgcacacct

SEQ ID NO: 6020360 - DNA, 25 bp, Homo sapien
tgagcaaggcaccattcatcctccg

SEQ ID NO: 6020361 - DNA, 25 bp, Homo sapien
actgcggctgcgctgctgtccgtcc

SEQ ID NO: 6020362 - DNA, 25 bp, Homo sapien
cccaactaatcttattttgtctcta

SEQ ID NO: 6020363 - DNA, 25 bp, Homo sapien
tccaactgcggctgcgctgctgtcc

SEQ ID NO: 6020364 - DNA, 25 bp, Homo sapien
gctcgggaaggaatgagaggcgctt

SEQ ID NO: 6020365 - DNA, 25 bp, Homo sapien
aaaacacctggtttctgtttgcagt

SEQ ID NO: 6020366 - DNA, 25 bp, Homo sapien
ttaaaatcatttacaaattattcca

SEQ ID NO: 6020367 - DNA, 25 bp, Homo sapien
attcatcctccgcccacccacgtct

SEQ ID NO: 6020368 - DNA, 25 bp, Homo sapien
acttagcaaataatttacaaacaga

SEQ ID NO: 6020369 - DNA, 25 bp, Homo sapien
tccaatatggagcaataatgcccgc

SEQ ID NO: 6020370 - DNA, 25 bp, Homo sapien
acagaaaacagaacgtcatccgtaa

SEQ ID NO: 6020371 - DNA, 25 bp, Homo sapien
aacagaacgtcatccgtaaacatgc

SEQ ID NO: 6020372 - DNA, 25 bp, Homo sapien
acttggcccaactaatcttattttg

SEQ ID NO: 6020373 - DNA, 25 bp, Homo sapien
cacgtctccatgatgcttgcgcttc

SEQ ID NO: 6020374 - DNA, 25 bp, Homo sapien
tgcggctgcgctgctgtccgtccac

SEQ ID NO: 6020375 - DNA, 25 bp, Homo sapien
ctgctgtccgtccacatcagcccct

SEQ ID NO: 6020376 - DNA, 25 bp, Homo sapien
caagaatgagcaaggcaccattcat

SEQ ID NO: 6020377 - DNA, 25 bp, Homo sapien
caaataatttacaaacagaaaacag

SEQ ID NO: 6020378 - DNA, 25 bp, Homo sapien
ttctgtttgcagttttagagtgcag

SEQ ID NO: 6020379 - DNA, 25 bp, Homo sapien
tctggagcaaaaaaatacacttagc

SEQ ID NO: 6020380 - DNA, 25 bp, Homo sapien
tccgtaaacatgctccaatatggag

SEQ ID NO: 6020381 - DNA, 25 bp, Homo sapien
tgataaataaaaaaacattcaatct

SEQ ID NO: 6020382 - DNA, 25 bp, Homo sapien
gtctctattacaattgtagaaccaa

SEQ ID NO: 6020383 - DNA, 25 bp, Homo sapien
gctactcaagaatgagcaaggcacc

SEQ ID NO: 6020384 - DNA, 25 bp, Homo sapien
tggcagttttgaaataccctaatgc

SEQ ID NO: 6020385 - DNA, 25 bp, Homo sapien
gaagcgaagtcttctccaactgcgg

SEQ ID NO: 6020386 - DNA, 25 bp, Homo sapien
tctccaactgcggctgcgctgctgt

SEQ ID NO: 6020387 - DNA, 25 bp, Homo sapien
attacaattgtagaaccaagaaagg

SEQ ID NO: 6020388 - DNA, 25 bp, Homo sapien
ccacatcagccccttggcattctcc

SEQ ID NO: 6020389 - DNA, 25 bp, Homo sapien
aaataccctaatgctactcaagaat

SEQ ID NO: 6020390 - DNA, 25 bp, Homo sapien
ggtagctgccccaaggacactcaca

SEQ ID NO: 6020391 - DNA, 25 bp, Homo sapien
gcgctttcatttacttctgtcaaag

SEQ ID NO: 6020392 - DNA, 25 bp, Homo sapien
aatcatttacaaattattccagtat

SEQ ID NO: 6020393 - DNA, 25 bp, Homo sapien
atgcccgctccagtactatgaagcg

SEQ ID NO: 6020394 - DNA, 25 bp, Homo sapien
ggacaagcagggctttcacttggcc

SEQ ID NO: 6020395 - DNA, 25 bp, Homo sapien
acgtcatccgtaaacatgctccaat

SEQ ID NO: 6020396 - DNA, 25 bp, Homo sapien
tgctgtccgtccacatcagcccctt

SEQ ID NO: 6020397 - DNA, 25 bp, Homo sapien
ggcaccattcatcctccgcccaccc

SEQ ID NO: 6020398 - DNA, 25 bp, Homo sapien
tattttgtctctattacaattgtag

SEQ ID NO: 6020399 - DNA, 25 bp, Homo sapien
aaatacacttagcaaataatttaca

SEQ ID NO: 6020400 - DNA, 25 bp, Homo sapien
tcagccccttggcattctccaactg

SEQ ID NO: 6020401 - DNA, 25 bp, Homo sapien
gatataaaattaaaatcatttacaa

SEQ ID NO: 6020402 - DNA, 25 bp, Homo sapien
caatcttaaaacacctggtttctgt

SEQ ID NO: 6020403 - DNA, 25 bp, Homo sapien
atggagcaataatgcccgctccagt

SEQ ID NO: 6020404 - DNA, 25 bp, Homo sapien
tgcgctgctgtccgtccacatcagc

SEQ ID NO: 6020405 - DNA, 25 bp, Homo sapien
caataatgcccgctccagtactatg

SEQ ID NO: 6020406 - DNA, 25 bp, Homo sapien
attattccagtattacatttcccct

SEQ ID NO: 6020407 - DNA, 25 bp, Homo sapien
agcagggctttcacttggcccaact

SEQ ID NO: 6020408 - DNA, 25 bp, Homo sapien
tccgtccacatcagccccttggcat

SEQ ID NO: 6020409 - DNA, 25 bp, Homo sapien
gctttcacttggcccaactaatctt

SEQ ID NO: 6020410 - DNA, 25 bp, Homo sapien
ccacatcagccccttggcagttttg

SEQ ID NO: 6020411 - DNA, 25 bp, Homo sapien
actcacagagtgtccccctccgctc

SEQ ID NO: 6020412 - DNA, 25 bp, Homo sapien
taatcttattttgtctctattacaa

SEQ ID NO: 6020413 - DNA, 25 bp, Homo sapien
gctgcgctgctgtccgtccacatca

SEQ ID NO: 6020414 - DNA, 25 bp, Homo sapien
aacatgctccaatatggagcaataa

SEQ ID NO: 6020415 - DNA, 25 bp, Homo sapien
tgagaggcgctttcatttacttctg

SEQ ID NO: 6020416 - DNA, 25 bp, Homo sapien
tccagtattacatttcccctccctc

SEQ ID NO: 6020417 - DNA, 25 bp, Homo sapien
ccctccgctcgggaaggaatgagag

SEQ ID NO: 6020418 - DNA, 25 bp, Homo sapien
gcaaaaaaatacacttagcaaataa

SEQ ID NO: 6020419 - DNA, 25 bp, Homo sapien
cccacccacgtctccatgatgcttg

SEQ ID NO: 6020420 - DNA, 25 bp, Homo sapien
gtactatgaagcgaagtcttctcca

SEQ ID NO: 6020421 - DNA, 25 bp, Homo sapien
tcatttacttctgtcaaaggacaag

SEQ ID NO: 6020422 - DNA, 25 bp, Homo sapien
tccgtccacatcagccccttggcag

SEQ ID NO: 6020423 - DNA, 25 bp, Homo sapien
ttgcagttttagagtgcaggtagct

SEQ ID NO: 6020424 - DNA, 25 bp, Homo sapien
cactgatataaaattaaaatcattt

SEQ ID NO: 6020425 - DNA, 25 bp, Homo sapien
gaaggaatgagaggcgctttcattt

SEQ ID NO: 6020426 - DNA, 25 bp, Homo sapien
cctccgcccacccacgtctccatga

SEQ ID NO: 6020427 - DNA, 25 bp, Homo sapien
aacattcaatcttaaaacacctggt

SEQ ID NO: 6020428 - DNA, 25 bp, Homo sapien
ttacaaacagaaaacagaacgtcat

SEQ ID NO: 6020429 - DNA, 25 bp, Homo sapien
aaggacactcacagagtgtccccct

SEQ ID NO: 6020430 - DNA, 25 bp, Homo sapien
caaaagctacactttgataaataaa

SEQ ID NO: 6020431 - DNA, 25 bp, Homo sapien
acttctgtcaaaggacaagcagggc

SEQ ID NO: 6020432 - DNA, 25 bp, Homo sapien
gcattctccaactgcggctgcgctg

SEQ ID NO: 6020433 - DNA, 25 bp, Homo sapien
ccttggcattctccaactgcggctg

SEQ ID NO: 6020434 - DNA, 25 bp, Homo sapien
aagtcttctccaactgcggctgcgc

SEQ ID NO: 6020435 - DNA, 25 bp, Homo sapien
cctggtttctgtttgcagttttaga

SEQ ID NO: 6020436 - DNA, 25 bp, Homo sapien
ttacaaattattccagtattacatt

SEQ ID NO: 6020437 - DNA, 25 bp, Homo sapien
gtcaaaggacaagcagggctttcac

SEQ ID NO: 6020438 - DNA, 25 bp, Homo sapien
tgccccaaggacactcacagagtgt

SEQ ID NO: 6020439 - DNA, 25 bp, Homo sapien
cagccccttggcagttttgaaatac

SEQ ID NO: 6020440 - DNA, 25 bp, Homo sapien
agagtgtccccctccgctcgggaag

SEQ ID NO: 6020441 - DNA, 25 bp, Homo sapien
ttttagagtgcaggtagctgcccca

SEQ ID NO: 6020442 - DNA, 25 bp, Homo sapien
ttttgaaataccctaatgctactca

SEQ ID NO: 6020443 - DNA, 25 bp, Homo sapien
gctccagtactatgaagcgaagtct

SEQ ID NO: 6020444 - DNA, 25 bp, Homo sapien
agtgcaggtagctgccccaaggaca

SEQ ID NO: 6020445 - DNA, 25 bp, Homo sapien
cctccccaaaagctacactttgata

SEQ ID NO: 6020446 - DNA, 25 bp, Homo sapien
cctaatgctactcaagaatgagcaa

SEQ ID NO: 6020447 - DNA, 25 bp, Homo sapien
cgggtctgtcttagtgagacgctcc

SEQ ID NO: 6020448 - DNA, 25 bp, Homo sapien
ggcttcaaccttgtcaacacagcct

SEQ ID NO: 6020449 - DNA, 25 bp, Homo sapien
cttggaaggcagaggcagttggatc

SEQ ID NO: 6020450 - DNA, 25 bp, Homo sapien
aggcagaggcagttggatctctggg

SEQ ID NO: 6020451 - DNA, 25 bp, Homo sapien
agaaagtcagatttctggttgattt

SEQ ID NO: 6020452 - DNA, 25 bp, Homo sapien
gcctatatagtgagttctaggccag

SEQ ID NO: 6020453 - DNA, 25 bp, Homo sapien
cagcctcactgaagaaactggtctg

SEQ ID NO: 6020454 - DNA, 25 bp, Homo sapien
tgaggccagtttggcctatatagtg

SEQ ID NO: 6020455 - DNA, 25 bp, Homo sapien
agggtagggtgtggttgcacacacc

SEQ ID NO: 6020456 - DNA, 25 bp, Homo sapien
acgctccactgagctctgagggagc

SEQ ID NO: 6020457 - DNA, 25 bp, Homo sapien
agtgagacgctccactgagctctga

SEQ ID NO: 6020458 - DNA, 25 bp, Homo sapien
agggaggagttttgttcctgatgaa

SEQ ID NO: 6020459 - DNA, 25 bp, Homo sapien
aacttggctctttgttggcaactca

SEQ ID NO: 6020460 - DNA, 25 bp, Homo sapien
gggtgtggttgcacacaccttaatc

SEQ ID NO: 6020461 - DNA, 25 bp, Homo sapien
aacaccaagacctgcccctatgttt

SEQ ID NO: 6020462 - DNA, 25 bp, Homo sapien
gggttttcgtggcttggcattgtga

SEQ ID NO: 6020463 - DNA, 25 bp, Homo sapien
tgttggcaactcagaaagtcagatt

SEQ ID NO: 6020464 - DNA, 25 bp, Homo sapien
tgatgtgggttttcgtggcttggca

SEQ ID NO: 6020465 - DNA, 25 bp, Homo sapien
gcttggcattgtgagagctgatgct

SEQ ID NO: 6020466 - DNA, 25 bp, Homo sapien
agattaccctggagatgacgggtct

SEQ ID NO: 6020467 - DNA, 25 bp, Homo sapien
tcagatttctggttgatttggaata

SEQ ID NO: 6020468 - DNA, 25 bp, Homo sapien
gagagctgatgctcacatttgaaac

SEQ ID NO: 6020469 - DNA, 25 bp, Homo sapien
atagtgagttctaggccagccatgg

SEQ ID NO: 6020470 - DNA, 25 bp, Homo sapien
tattatagggtagggtgtggttgca

SEQ ID NO: 6020471 - DNA, 25 bp, Homo sapien
ccctggagatgacgggtctgtctta

SEQ ID NO: 6020472 - DNA, 25 bp, Homo sapien
acctgcccctatgtttccttccgtg

SEQ ID NO: 6020473 - DNA, 25 bp, Homo sapien
agcagcctctggagggaggagtttt

SEQ ID NO: 6020474 - DNA, 25 bp, Homo sapien
tcaacacagcctcactgaagaaact

SEQ ID NO: 6020475 - DNA, 25 bp, Homo sapien
gatgcatagtgagactctttctcaa

SEQ ID NO: 6020476 - DNA, 25 bp, Homo sapien
aattgtgattttgccactttcggat

SEQ ID NO: 6020477 - DNA, 25 bp, Homo sapien
agtccttgatgtgggttttcgtggc

SEQ ID NO: 6020478 - DNA, 25 bp, Homo sapien
ccagcacttggaaggcagaggcagt

SEQ ID NO: 6020479 - DNA, 25 bp, Homo sapien
aggcagttggatctctgggagtttg

SEQ ID NO: 6020480 - DNA, 25 bp, Homo sapien
tggaatataggcttaaaactttata

SEQ ID NO: 6020481 - DNA, 25 bp, Homo sapien
cggtggtgacgtgggcttcaacctt

SEQ ID NO: 6020482 - DNA, 25 bp, Homo sapien
agaaactggtctgcctcaacaccaa

SEQ ID NO: 6020483 - DNA, 25 bp, Homo sapien
aagacaagtccttgatgtgggtttt

SEQ ID NO: 6020484 - DNA, 25 bp, Homo sapien
ctgatgaagacaagtccttgatgtg

SEQ ID NO: 6020485 - DNA, 25 bp, Homo sapien
ctagaaaattgtgattttgccactt

SEQ ID NO: 6020486 - DNA, 25 bp, Homo sapien
ctggaaagcagcctctggagggagg

SEQ ID NO: 6020487 - DNA, 25 bp, Homo sapien
acccagcacgttcggtggtgacgtg

SEQ ID NO: 6020488 - DNA, 25 bp, Homo sapien
ctctgagggagctggaaagcagcct

SEQ ID NO: 6020489 - DNA, 25 bp, Homo sapien
ctctggagggaggagttttgttcct

SEQ ID NO: 6020490 - DNA, 25 bp, Homo sapien
tttgtctgcctcctcagaacttggc

SEQ ID NO: 6020491 - DNA, 25 bp, Homo sapien
ttgatttggaatataggcttaaaac

SEQ ID NO: 6020492 - DNA, 25 bp, Homo sapien
ttaatcccagcacttggaaggcaga

SEQ ID NO: 6020493 - DNA, 25 bp, Homo sapien
ttggatctctgggagtttgaggcca

SEQ ID NO: 6020494 - DNA, 25 bp, Homo sapien
tcttacccttgcctagaaaattgtg

SEQ ID NO: 6020495 - DNA, 25 bp, Homo sapien
gccactttcggatgttgaattcttt

SEQ ID NO: 6020496 - DNA, 25 bp, Homo sapien
cactgaagaaactggtctgcctcaa

SEQ ID NO: 6020497 - DNA, 25 bp, Homo sapien
ccctatgtttccttccgtgtgccag

SEQ ID NO: 6020498 - DNA, 25 bp, Homo sapien
tcacatttgaaactttgggtcttac

SEQ ID NO: 6020499 - DNA, 25 bp, Homo sapien
ttcgtggcttggcattgtgagagct

SEQ ID NO: 6020500 - DNA, 25 bp, Homo sapien
tgttgaattctttgttaactaagaa

SEQ ID NO: 6020501 - DNA, 25 bp, Homo sapien
agtttggcctatatagtgagttcta

SEQ ID NO: 6020502 - DNA, 25 bp, Homo sapien
agatgacgggtctgtcttagtgaga

SEQ ID NO: 6020503 - DNA, 25 bp, Homo sapien
cactgagctctgagggagctggaaa

SEQ ID NO: 6020504 - DNA, 25 bp, Homo sapien
actttatattatagggtagggtgtg

SEQ ID NO: 6020505 - DNA, 25 bp, Homo sapien
gattttgccactttcggatgttgaa

SEQ ID NO: 6020506 - DNA, 25 bp, Homo sapien
acaccttaatcccagcacttggaag

SEQ ID NO: 6020507 - DNA, 25 bp, Homo sapien
accttgtcaacacagcctcactgaa

SEQ ID NO: 6020508 - DNA, 25 bp, Homo sapien
ttcggatgttgaattctttgttaac

SEQ ID NO: 6020509 - DNA, 25 bp, Homo sapien
agaaagttagaagtggttttgtctg

SEQ ID NO: 6020510 - DNA, 25 bp, Homo sapien
tgtgccagattaccctggagatgac

SEQ ID NO: 6020511 - DNA, 25 bp, Homo sapien
gttagaagtggttttgtctgcctcc

SEQ ID NO: 6020512 - DNA, 25 bp, Homo sapien
tgatgctcacatttgaaactttggg

SEQ ID NO: 6020513 - DNA, 25 bp, Homo sapien
caactcagaaagtcagatttctggt

SEQ ID NO: 6020514 - DNA, 25 bp, Homo sapien
tgtttccttccgtgtgccagattac

SEQ ID NO: 6020515 - DNA, 25 bp, Homo sapien
ttgttcctgatgaagacaagtcctt

SEQ ID NO: 6020516 - DNA, 25 bp, Homo sapien
tggtctgcctcaacaccaagacctg

SEQ ID NO: 6020517 - DNA, 25 bp, Homo sapien
ccttgcctagaaaattgtgattttg

SEQ ID NO: 6020518 - DNA, 25 bp, Homo sapien
tctctgggagtttgaggccagtttg

SEQ ID NO: 6020519 - DNA, 25 bp, Homo sapien
tgcctcaacaccaagacctgcccct

SEQ ID NO: 6020520 - DNA, 25 bp, Homo sapien
ggttgcacacaccttaatcccagca

SEQ ID NO: 6020521 - DNA, 25 bp, Homo sapien
gacgtgggcttcaaccttgtcaaca

SEQ ID NO: 6020522 - DNA, 25 bp, Homo sapien
agggagctggaaagcagcctctgga

SEQ ID NO: 6020523 - DNA, 25 bp, Homo sapien
cacgttcggtggtgacgtgggcttc

SEQ ID NO: 6020524 - DNA, 25 bp, Homo sapien
cattgtgagagctgatgctcacatt

SEQ ID NO: 6020525 - DNA, 25 bp, Homo sapien
ctcagaacttggctctttgttggca

SEQ ID NO: 6020526 - DNA, 25 bp, Homo sapien
ggagttttgttcctgatgaagacaa

SEQ ID NO: 6020527 - DNA, 25 bp, Homo sapien
ggagtttgaggccagtttggcctat

SEQ ID NO: 6020528 - DNA, 25 bp, Homo sapien
gctctttgttggcaactcagaaagt

SEQ ID NO: 6020529 - DNA, 25 bp, Homo sapien
caagacctgcccctatgtttccttc

SEQ ID NO: 6020530 - DNA, 25 bp, Homo sapien
gccatggatgcatagtgagactctt

SEQ ID NO: 6020531 - DNA, 25 bp, Homo sapien
tgcctcctcagaacttggctctttg

SEQ ID NO: 6020532 - DNA, 25 bp, Homo sapien
agtggttttgtctgcctcctcagaa

SEQ ID NO: 6020533 - DNA, 25 bp, Homo sapien
agttctaggccagccatggatgcat

SEQ ID NO: 6020534 - DNA, 25 bp, Homo sapien
aggccagccatggatgcatagtgag

SEQ ID NO: 6020535 - DNA, 25 bp, Homo sapien
ttctggttgatttggaatataggct

SEQ ID NO: 6020536 - DNA, 25 bp, Homo sapien
cttccgtgtgccagattaccctgga

SEQ ID NO: 6020537 - DNA, 25 bp, Homo sapien
tgtcttagtgagacgctccactgag

SEQ ID NO: 6020538 - DNA, 25 bp, Homo sapien
ataggccaaactggcctcaaactcc

SEQ ID NO: 6020539 - DNA, 25 bp, Homo sapien
aggtttgggcaaggcaattcttgct

SEQ ID NO: 6020540 - DNA, 25 bp, Homo sapien
ggctcccaagaacaccttactgcct

SEQ ID NO: 6020541 - DNA, 25 bp, Homo sapien
caaattctaggaagaaaattgagga

SEQ ID NO: 6020542 - DNA, 25 bp, Homo sapien
caagtgctgggattaaggtgtgtgc

SEQ ID NO: 6020543 - DNA, 25 bp, Homo sapien
tgaaccaattccacattctagacat

SEQ ID NO: 6020544 - DNA, 25 bp, Homo sapien
caggaacaggaccttctgagtcacc

SEQ ID NO: 6020545 - DNA, 25 bp, Homo sapien
tctgaagaggcctccaaattctagg

SEQ ID NO: 6020546 - DNA, 25 bp, Homo sapien
tataatataaagttttaagcctata

SEQ ID NO: 6020547 - DNA, 25 bp, Homo sapien
tagacattcaagttgggaatgtttt

SEQ ID NO: 6020548 - DNA, 25 bp, Homo sapien
gggcaaggcaattcttgctggacac

SEQ ID NO: 6020549 - DNA, 25 bp, Homo sapien
cttgacctttggcgtagacgtaggt

SEQ ID NO: 6020550 - DNA, 25 bp, Homo sapien
tcttttgttctgtgtccatttcact

SEQ ID NO: 6020551 - DNA, 25 bp, Homo sapien
gaggcctccaaattctaggaagaaa

SEQ ID NO: 6020552 - DNA, 25 bp, Homo sapien
tggaaagagtctaagtgtggctccc

SEQ ID NO: 6020553 - DNA, 25 bp, Homo sapien
cctccacatctttggaaagagtcta

SEQ ID NO: 6020554 - DNA, 25 bp, Homo sapien
ttgggaatgttttggcccatgttat

SEQ ID NO: 6020555 - DNA, 25 bp, Homo sapien
ctgggttcttttgttctgtgtccat

SEQ ID NO: 6020556 - DNA, 25 bp, Homo sapien
ctgttccctccacatctttggaaag

SEQ ID NO: 6020557 - DNA, 25 bp, Homo sapien
gagtctcactatgcatccatggctg

SEQ ID NO: 6020558 - DNA, 25 bp, Homo sapien
cactatataggccaaactggcctca

SEQ ID NO: 6020559 - DNA, 25 bp, Homo sapien
tttgtttgttttgagaaagagtctc

SEQ ID NO: 6020560 - DNA, 25 bp, Homo sapien
actgcctctgccttccaagtgctgg

SEQ ID NO: 6020561 - DNA, 25 bp, Homo sapien
gatccaactgcctctgccttccaag

SEQ ID NO: 6020562 - DNA, 25 bp, Homo sapien
tttcactgaacaggaaaatgaacca

SEQ ID NO: 6020563 - DNA, 25 bp, Homo sapien
agttttaagcctatattccaaatca

SEQ ID NO: 6020564 - DNA, 25 bp, Homo sapien
acattctagacattcaagttgggaa

SEQ ID NO: 6020565 - DNA, 25 bp, Homo sapien
tagatcattgaccaggaacaggacc

SEQ ID NO: 6020566 - DNA, 25 bp, Homo sapien
cttccaagtgctgggattaaggtgt

SEQ ID NO: 6020567 - DNA, 25 bp, Homo sapien
gatgagtccatctgttccctccaca

SEQ ID NO: 6020568 - DNA, 25 bp, Homo sapien
cccagagatccaactgcctctgcct

SEQ ID NO: 6020569 - DNA, 25 bp, Homo sapien
cttctgagtcacctgtcagatagtc

SEQ ID NO: 6020570 - DNA, 25 bp, Homo sapien
gcatccatggctggcctagaactca

SEQ ID NO: 6020571 - DNA, 25 bp, Homo sapien
tgttttgagaaagagtctcactatg

SEQ ID NO: 6020572 - DNA, 25 bp, Homo sapien
tcttgctggacactgggttcttttg

SEQ ID NO: 6020573 - DNA, 25 bp, Homo sapien
ctgtcagatagtcaacattctgaag

SEQ ID NO: 6020574 - DNA, 25 bp, Homo sapien
tgctgggattaaggtgtgtgcaacc

SEQ ID NO: 6020575 - DNA, 25 bp, Homo sapien
caaactcccagagatccaactgcct

SEQ ID NO: 6020576 - DNA, 25 bp, Homo sapien
gttctgtgtccatttcactgaacag

SEQ ID NO: 6020577 - DNA, 25 bp, Homo sapien
tatattccaaatcaaccagaaatct

SEQ ID NO: 6020578 - DNA, 25 bp, Homo sapien
caggaccttctgagtcacctgtcag

SEQ ID NO: 6020579 - DNA, 25 bp, Homo sapien
ggcaattcttgctggacactgggtt

SEQ ID NO: 6020580 - DNA, 25 bp, Homo sapien
tggcgtagacgtaggtttgggcaag

SEQ ID NO: 6020581 - DNA, 25 bp, Homo sapien
gaactcactatataggccaaactgg

SEQ ID NO: 6020582 - DNA, 25 bp, Homo sapien
attgaggaccccattaactttcaag

SEQ ID NO: 6020583 - DNA, 25 bp, Homo sapien
ctacattctaaaagttgtttgtttg

SEQ ID NO: 6020584 - DNA, 25 bp, Homo sapien
aattccacattctagacattcaagt

SEQ ID NO: 6020585 - DNA, 25 bp, Homo sapien
ggaaaatgaaccaattccacattct

SEQ ID NO: 6020586 - DNA, 25 bp, Homo sapien
gatagtcaacattctgaagaggcct

SEQ ID NO: 6020587 - DNA, 25 bp, Homo sapien
caagaacaccttactgccttgacct

SEQ ID NO: 6020588 - DNA, 25 bp, Homo sapien
ccaaatcaaccagaaatctgacttt

SEQ ID NO: 6020589 - DNA, 25 bp, Homo sapien
tggcctcaaactcccagagatccaa

SEQ ID NO: 6020590 - DNA, 25 bp, Homo sapien
tgcaaccacaccctaccctataata

SEQ ID NO: 6020591 - DNA, 25 bp, Homo sapien
caaccagaaatctgactttctgagt

SEQ ID NO: 6020592 - DNA, 25 bp, Homo sapien
gagaaagagtctcactatgcatcca

SEQ ID NO: 6020593 - DNA, 25 bp, Homo sapien
tgtccatttcactgaacaggaaaat

SEQ ID NO: 6020594 - DNA, 25 bp, Homo sapien
ggcctagaactcactatataggcca

SEQ ID NO: 6020595 - DNA, 25 bp, Homo sapien
atggctggcctagaactcactatat

SEQ ID NO: 6020596 - DNA, 25 bp, Homo sapien
agacgtaggtttgggcaaggcaatt

SEQ ID NO: 6020597 - DNA, 25 bp, Homo sapien
gagtctaagtgtggctcccaagaac

SEQ ID NO: 6020598 - DNA, 25 bp, Homo sapien
cggaattctacattctaaaagttgt

SEQ ID NO: 6020599 - DNA, 25 bp, Homo sapien
tctgccttccaagtgctgggattaa

SEQ ID NO: 6020600 - DNA, 25 bp, Homo sapien
aagtgtggctcccaagaacacctta

SEQ ID NO: 6020601 - DNA, 25 bp, Homo sapien
tggacactgggttcttttgttctgt

SEQ ID NO: 6020602 - DNA, 25 bp, Homo sapien
tggcccatgttatagatcattgacc

SEQ ID NO: 6020603 - DNA, 25 bp, Homo sapien
atgttatagatcattgaccaggaac

SEQ ID NO: 6020604 - DNA, 25 bp, Homo sapien
caaactggcctcaaactcccagaga

SEQ ID NO: 6020605 - DNA, 25 bp, Homo sapien
gattaaggtgtgtgcaaccacaccc

SEQ ID NO: 6020606 - DNA, 25 bp, Homo sapien
ctaggaagaaaattgaggaccccat

SEQ ID NO: 6020607 - DNA, 25 bp, Homo sapien
atgttttggcccatgttatagatca

SEQ ID NO: 6020608 - DNA, 25 bp, Homo sapien
ttcaagttgggaatgttttggccca

SEQ ID NO: 6020609 - DNA, 25 bp, Homo sapien
cacaccctaccctataatataaagt

SEQ ID NO: 6020610 - DNA, 25 bp, Homo sapien
taagcctatattccaaatcaaccag

SEQ ID NO: 6020611 - DNA, 25 bp, Homo sapien
catctttggaaagagtctaagtgtg

SEQ ID NO: 6020612 - DNA, 25 bp, Homo sapien
caacattctgaagaggcctccaaat

SEQ ID NO: 6020613 - DNA, 25 bp, Homo sapien
tgaacaggaaaatgaaccaattcca

SEQ ID NO: 6020614 - DNA, 25 bp, Homo sapien
gaaatctgactttctgagttgccaa

SEQ ID NO: 6020615 - DNA, 25 bp, Homo sapien
attgaccaggaacaggaccttctga

SEQ ID NO: 6020616 - DNA, 25 bp, Homo sapien
tactgccttgacctttggcgtagac

SEQ ID NO: 6020617 - DNA, 25 bp, Homo sapien
ggtgtgtgcaaccacaccctaccct

SEQ ID NO: 6020618 - DNA, 25 bp, Homo sapien
cactatgcatccatggctggcctag

SEQ ID NO: 6020619 - DNA, 25 bp, Homo sapien
tccatctgttccctccacatctttg

SEQ ID NO: 6020620 - DNA, 25 bp, Homo sapien
acaccttactgccttgacctttggc

SEQ ID NO: 6020621 - DNA, 25 bp, Homo sapien
agtcacctgtcagatagtcaacatt

SEQ ID NO: 6020622 - DNA, 25 bp, Homo sapien
gagaaacgacatgcgcggcgccacc

SEQ ID NO: 6020623 - DNA, 25 bp, Homo sapien
tcaaactcaaaatcgtccacgtcca

SEQ ID NO: 6020624 - DNA, 25 bp, Homo sapien
gggactccacgtcccccagcatctc

SEQ ID NO: 6020625 - DNA, 25 bp, Homo sapien
atctgttcaaactcaaaatcgtcca

SEQ ID NO: 6020626 - DNA, 25 bp, Homo sapien
cagcataaagtacccagaggagcgg

SEQ ID NO: 6020627 - DNA, 25 bp, Homo sapien
cgcgggagcgtcatcgtcgtccggg

SEQ ID NO: 6020628 - DNA, 25 bp, Homo sapien
agcccggcctccgcgggagcgtcat

SEQ ID NO: 6020629 - DNA, 25 bp, Homo sapien
aggtcgcgacgctggagtacgagtc

SEQ ID NO: 6020630 - DNA, 25 bp, Homo sapien
gcgtcggcgggcgtcatatccacct

SEQ ID NO: 6020631 - DNA, 25 bp, Homo sapien
caggtgctcgcgaatgtggtttagc

SEQ ID NO: 6020632 - DNA, 25 bp, Homo sapien
ccgcatgacggactcgccctccgag

SEQ ID NO: 6020633 - DNA, 25 bp, Homo sapien
tcgcaccagcgggaggttcaggtgc

SEQ ID NO: 6020634 - DNA, 25 bp, Homo sapien
gcgggcgtcatatccacctcctcgc

SEQ ID NO: 6020635 - DNA, 25 bp, Homo sapien
cagtcgccgggcctccacgggaact

SEQ ID NO: 6020636 - DNA, 25 bp, Homo sapien
cagcgggaggttcaggtgctcgcga

SEQ ID NO: 6020637 - DNA, 25 bp, Homo sapien
caacttggcccggatcagcagcata

SEQ ID NO: 6020638 - DNA, 25 bp, Homo sapien
tggtggacagtctgcgggggcgttg

SEQ ID NO: 6020639 - DNA, 25 bp, Homo sapien
tcctcgccgtccaggcggagttcgt

SEQ ID NO: 6020640 - DNA, 25 bp, Homo sapien
atcggtaaacatctgttcaaactca

SEQ ID NO: 6020641 - DNA, 25 bp, Homo sapien
tccagggcgtcggcgggcgtcatat

SEQ ID NO: 6020642 - DNA, 25 bp, Homo sapien
tcaaaatcgtccacgtccaaagccc

SEQ ID NO: 6020643 - DNA, 25 bp, Homo sapien
ggggcggtggtggacagtctgcggg

SEQ ID NO: 6020644 - DNA, 25 bp, Homo sapien
ctcccgcagtcgccgggcctccacg

SEQ ID NO: 6020645 - DNA, 25 bp, Homo sapien
aagtacccagaggagcgggcctggt

SEQ ID NO: 6020646 - DNA, 25 bp, Homo sapien
gccctcgattgtcgatccgtaattg

SEQ ID NO: 6020647 - DNA, 25 bp, Homo sapien
gtaatgggggcggtggtggacagtc

SEQ ID NO: 6020648 - DNA, 25 bp, Homo sapien
gtgctcccgcatgacggactcgccc

SEQ ID NO: 6020649 - DNA, 25 bp, Homo sapien
atcgtcgtccgggaggtcgagcagg

SEQ ID NO: 6020650 - DNA, 25 bp, Homo sapien
tcgatccgtaattgtttctggtccg

SEQ ID NO: 6020651 - DNA, 25 bp, Homo sapien
tctggtccgcccgcggctatacgcg

SEQ ID NO: 6020652 - DNA, 25 bp, Homo sapien
ccgcccgcggctatacgcgtgctcc

SEQ ID NO: 6020653 - DNA, 25 bp, Homo sapien
gagcaggccctcgattgtcgatccg

SEQ ID NO: 6020654 - DNA, 25 bp, Homo sapien
gcctggttgccctgcaggacgggcg

SEQ ID NO: 6020655 - DNA, 25 bp, Homo sapien
cgccgccgcacttcgcaccagcggg

SEQ ID NO: 6020656 - DNA, 25 bp, Homo sapien
gcggctatacgcgtgctcccgcatg

SEQ ID NO: 6020657 - DNA, 25 bp, Homo sapien
ttcctccgccgccgcacttcgcacc

SEQ ID NO: 6020658 - DNA, 25 bp, Homo sapien
tacgagacggggtcgtgggtcattc

SEQ ID NO: 6020659 - DNA, 25 bp, Homo sapien
ccagaggagcgggcctggttgccct

SEQ ID NO: 6020660 - DNA, 25 bp, Homo sapien
ggcgttgtcccgcggagagaaacga

SEQ ID NO: 6020661 - DNA, 25 bp, Homo sapien
gccaccagcccggcctccgcgggag

SEQ ID NO: 6020662 - DNA, 25 bp, Homo sapien
tggagtacgagtccaacttggcccg

SEQ ID NO: 6020663 - DNA, 25 bp, Homo sapien
ctcccaggctgacgtcggtaatggg

SEQ ID NO: 6020664 - DNA, 25 bp, Homo sapien
cgacgctggagtacgagtccaactt

SEQ ID NO: 6020665 - DNA, 25 bp, Homo sapien
gagcgggcctggttgccctgcagga

SEQ ID NO: 6020666 - DNA, 25 bp, Homo sapien
gagggggactccacgtcccccagca

SEQ ID NO: 6020667 - DNA, 25 bp, Homo sapien
gtttagctcccgcagtcgccgggcc

SEQ ID NO: 6020668 - DNA, 25 bp, Homo sapien
gacggactcgccctccgaggtcgcg

SEQ ID NO: 6020669 - DNA, 25 bp, Homo sapien
tgcaggacgggcggggtcgtgaggg

SEQ ID NO: 6020670 - DNA, 25 bp, Homo sapien
aatgtggtttagctcccgcagtcgc

SEQ ID NO: 6020671 - DNA, 25 bp, Homo sapien
cgtaattgtttctggtccgcccgcg

SEQ ID NO: 6020672 - DNA, 25 bp, Homo sapien
agcgtcatcgtcgtccgggaggtcg

SEQ ID NO: 6020673 - DNA, 25 bp, Homo sapien
ctgacgtcggtaatgggggcggtgg

SEQ ID NO: 6020674 - DNA, 25 bp, Homo sapien
ctcgcgaatgtggtttagctcccgc

SEQ ID NO: 6020675 - DNA, 25 bp, Homo sapien
gaggtcgagcaggccctcgattgtc

SEQ ID NO: 6020676 - DNA, 25 bp, Homo sapien
gttcgtctcccaggctgacgtcggt

SEQ ID NO: 6020677 - DNA, 25 bp, Homo sapien
ttgccctgcaggacgggcggggtcg

SEQ ID NO: 6020678 - DNA, 25 bp, Homo sapien
aagccccatacgagacggggtcgtg

SEQ ID NO: 6020679 - DNA, 25 bp, Homo sapien
gattgtcgatccgtaattgtttctg

SEQ ID NO: 6020680 - DNA, 25 bp, Homo sapien
cgcggagagaaacgacatgcgcggc

SEQ ID NO: 6020681 - DNA, 25 bp, Homo sapien
cgtccacgtccaaagccccatacga

SEQ ID NO: 6020682 - DNA, 25 bp, Homo sapien
acagtctgcgggggcgttgtcccgc

SEQ ID NO: 6020683 - DNA, 25 bp, Homo sapien
gtccgggaggtcgagcaggccctcg

SEQ ID NO: 6020684 - DNA, 25 bp, Homo sapien
catctccaagtcgaagtcgtccagg

SEQ ID NO: 6020685 - DNA, 25 bp, Homo sapien
gcctccgcgggagcgtcatcgtcgt

SEQ ID NO: 6020686 - DNA, 25 bp, Homo sapien
gacatgcgcggcgccaccagcccgg

SEQ ID NO: 6020687 - DNA, 25 bp, Homo sapien
caagtcgaagtcgtccagggcgtcg

SEQ ID NO: 6020688 - DNA, 25 bp, Homo sapien
ctccgaggtcgcgacgctggagtac

SEQ ID NO: 6020689 - DNA, 25 bp, Homo sapien
cccagcatctccaagtcgaagtcgt

SEQ ID NO: 6020690 - DNA, 25 bp, Homo sapien
cgggttcctccgccgccgcacttcg

SEQ ID NO: 6020691 - DNA, 25 bp, Homo sapien
gtaaacatctgttcaaactcaaaat

SEQ ID NO: 6020692 - DNA, 25 bp, Homo sapien
cgtccaggcggagttcgtctcccag

SEQ ID NO: 6020693 - DNA, 25 bp, Homo sapien
gtcatatccacctcctcgccgtcca

SEQ ID NO: 6020694 - DNA, 25 bp, Homo sapien
ggcggagttcgtctcccaggctgac

SEQ ID NO: 6020695 - DNA, 25 bp, Homo sapien
cgcacttcgcaccagcgggaggttc

SEQ ID NO: 6020696 - DNA, 25 bp, Homo sapien
gatcagcagcataaagtacccagag

SEQ ID NO: 6020697 - DNA, 25 bp, Homo sapien
gaggttcaggtgctcgcgaatgtgg

SEQ ID NO: 6020698 - DNA, 25 bp, Homo sapien
ttgtcccgcggagagaaacgacatg

SEQ ID NO: 6020699 - DNA, 25 bp, Homo sapien
attgtttctggtccgcccgcggcta

SEQ ID NO: 6020700 - DNA, 25 bp, Homo sapien
aagtcgtccagggcgtcggcgggcg

SEQ ID NO: 6020701 - DNA, 25 bp, Homo sapien
tccacctcctcgccgtccaggcgga

SEQ ID NO: 6020702 - DNA, 25 bp, Homo sapien
cgtccaaagccccatacgagacggg

SEQ ID NO: 6020703 - DNA, 25 bp, Homo sapien
acgtcccccagcatctccaagtcga

SEQ ID NO: 6020704 - DNA, 25 bp, Homo sapien
cgcggcgccaccagcccggcctccg

SEQ ID NO: 6020705 - DNA, 25 bp, Homo sapien
cgagtccaacttggcccggatcagc

SEQ ID NO: 6020706 - DNA, 25 bp, Homo sapien
ggcccggatcagcagcataaagtac

SEQ ID NO: 6020707 - DNA, 25 bp, Homo sapien
tgcgggggcgttgtcccgcggagag

SEQ ID NO: 6020708 - DNA, 25 bp, Homo sapien
tatacgcgtgctcccgcatgacgga

SEQ ID NO: 6020709 - DNA, 25 bp, Homo sapien
ctcgccctccgaggtcgcgacgctg

SEQ ID NO: 6020710 - DNA, 25 bp, Homo sapien
tctaggctaaaagagttcactgaat

SEQ ID NO: 6020711 - DNA, 25 bp, Homo sapien
tcattccacacaggctaaaaacgcc

SEQ ID NO: 6020712 - DNA, 25 bp, Homo sapien
ggaaaagatacaagatgtgtataac

SEQ ID NO: 6020713 - DNA, 25 bp, Homo sapien
gaaatgtgtctgaggatgaatggaa

SEQ ID NO: 6020714 - DNA, 25 bp, Homo sapien
tctctttcctaactggtgtgggctt

SEQ ID NO: 6020715 - DNA, 25 bp, Homo sapien
attttcatttactcaatttctaggc

SEQ ID NO: 6020716 - DNA, 25 bp, Homo sapien
aaggatcttggatgccaagagatat

SEQ ID NO: 6020717 - DNA, 25 bp, Homo sapien
tgtttgtaagcattgtaaatgcaca

SEQ ID NO: 6020718 - DNA, 25 bp, Homo sapien
tgatccacactaaggtgactattta

SEQ ID NO: 6020719 - DNA, 25 bp, Homo sapien
aaatgttctcattttattgaacgct

SEQ ID NO: 6020720 - DNA, 25 bp, Homo sapien
aaggataaaatgatagtatctcttt

SEQ ID NO: 6020721 - DNA, 25 bp, Homo sapien
atgatcctagaatgtttgtaagcat

SEQ ID NO: 6020722 - DNA, 25 bp, Homo sapien
attttgaagtaagccagtttatctt

SEQ ID NO: 6020723 - DNA, 25 bp, Homo sapien
tcaaatgtatttatggagtctaatt

SEQ ID NO: 6020724 - DNA, 25 bp, Homo sapien
tcaatttctaggctaaaagagttca

SEQ ID NO: 6020725 - DNA, 25 bp, Homo sapien
ttagaatgatattgtgaaattggct

SEQ ID NO: 6020726 - DNA, 25 bp, Homo sapien
aagtaagccagtttatctttagaat

SEQ ID NO: 6020727 - DNA, 25 bp, Homo sapien
gtgtctgaggatgaatggaaatgtt

SEQ ID NO: 6020728 - DNA, 25 bp, Homo sapien
tttattgaacgctaagaacaacaac

SEQ ID NO: 6020729 - DNA, 25 bp, Homo sapien
tacatagccttgttactgtcattcc

SEQ ID NO: 6020730 - DNA, 25 bp, Homo sapien
tgaacgctaagaacaacaacaaaaa

SEQ ID NO: 6020731 - DNA, 25 bp, Homo sapien
gaggatgaatggaaatgttctcatt

SEQ ID NO: 6020732 - DNA, 25 bp, Homo sapien
gctactaaggatcttggatgccaag

SEQ ID NO: 6020733 - DNA, 25 bp, Homo sapien
ggtcgtgcattttcatcaggaaaag

SEQ ID NO: 6020734 - DNA, 25 bp, Homo sapien
aaaagctatcgtattttcatttact

SEQ ID NO: 6020735 - DNA, 25 bp, Homo sapien
atgcacaactgccatctccaaatat

SEQ ID NO: 6020736 - DNA, 25 bp, Homo sapien
tgccaagagatattttaaagccaat

SEQ ID NO: 6020737 - DNA, 25 bp, Homo sapien
caaaaaagaaatgtagggtgctact

SEQ ID NO: 6020738 - DNA, 25 bp, Homo sapien
ttatctttagaatgatattgtgaaa

SEQ ID NO: 6020739 - DNA, 25 bp, Homo sapien
atagtatctctttcctaactggtgt

SEQ ID NO: 6020740 - DNA, 25 bp, Homo sapien
tcctaactggtgtgggcttaggagt

SEQ ID NO: 6020741 - DNA, 25 bp, Homo sapien
catttggaaatgtgtctgaggatga

SEQ ID NO: 6020742 - DNA, 25 bp, Homo sapien
agatgtgtataacatttggaaatgt

SEQ ID NO: 6020743 - DNA, 25 bp, Homo sapien
ttcttataagactgtttttagaaga

SEQ ID NO: 6020744 - DNA, 25 bp, Homo sapien
tctaattacatagccttgttactgt

SEQ ID NO: 6020745 - DNA, 25 bp, Homo sapien
catctccaaatattttcttataaga

SEQ ID NO: 6020746 - DNA, 25 bp, Homo sapien
cttggatgccaagagatattttaaa

SEQ ID NO: 6020747 - DNA, 25 bp, Homo sapien
ctagaatgtttgtaagcattgtaaa

SEQ ID NO: 6020748 - DNA, 25 bp, Homo sapien
aggtgactatttatgatcctagaat

SEQ ID NO: 6020749 - DNA, 25 bp, Homo sapien
tagggtgctactaaggatcttggat

SEQ ID NO: 6020750 - DNA, 25 bp, Homo sapien
tgatattgtgaaattggctttaaat

SEQ ID NO: 6020751 - DNA, 25 bp, Homo sapien
aaaatgatagtatctctttcctaac

SEQ ID NO: 6020752 - DNA, 25 bp, Homo sapien
ttccgatcaaatgtatttatggagt

SEQ ID NO: 6020753 - DNA, 25 bp, Homo sapien
atttactcaatttctaggctaaaag

SEQ ID NO: 6020754 - DNA, 25 bp, Homo sapien
ctggtgtgggcttaggagtgatcca

SEQ ID NO: 6020755 - DNA, 25 bp, Homo sapien
tgaaattggctttaaatataaccat

SEQ ID NO: 6020756 - DNA, 25 bp, Homo sapien
tatcgtattttcatttactcaattt

SEQ ID NO: 6020757 - DNA, 25 bp, Homo sapien
gagatattttaaagccaatttgtaa

SEQ ID NO: 6020758 - DNA, 25 bp, Homo sapien
cacacaggctaaaaacgcctctata

SEQ ID NO: 6020759 - DNA, 25 bp, Homo sapien
gcattttcatcaggaaaagatacaa

SEQ ID NO: 6020760 - DNA, 25 bp, Homo sapien
ttgtaaatgcacaactgccatctcc

SEQ ID NO: 6020761 - DNA, 25 bp, Homo sapien
gatacaagatgtgtataacatttgg

SEQ ID NO: 6020762 - DNA, 25 bp, Homo sapien
tcatcaggaaaagatacaagatgtg

SEQ ID NO: 6020763 - DNA, 25 bp, Homo sapien
atggagtctaattacatagccttgt

SEQ ID NO: 6020764 - DNA, 25 bp, Homo sapien
tataagactgtttttagaagaagaa

SEQ ID NO: 6020765 - DNA, 25 bp, Homo sapien
tggaaaagtaggacaagaattttga

SEQ ID NO: 6020766 - DNA, 25 bp, Homo sapien
gtatttatggagtctaattacatag

SEQ ID NO: 6020767 - DNA, 25 bp, Homo sapien
taaccattccgatcaaatgtattta

SEQ ID NO: 6020768 - DNA, 25 bp, Homo sapien
tgggcttaggagtgatccacactaa

SEQ ID NO: 6020769 - DNA, 25 bp, Homo sapien
gccttgttactgtcattccacacag

SEQ ID NO: 6020770 - DNA, 25 bp, Homo sapien
aactgccatctccaaatattttctt

SEQ ID NO: 6020771 - DNA, 25 bp, Homo sapien
acactaaggtgactatttatgatcc

SEQ ID NO: 6020772 - DNA, 25 bp, Homo sapien
taaatataaccattccgatcaaatg

SEQ ID NO: 6020773 - DNA, 25 bp, Homo sapien
tggctttaaatataaccattccgat

SEQ ID NO: 6020774 - DNA, 25 bp, Homo sapien
ggctaaaaacgcctctataaggata

SEQ ID NO: 6020775 - DNA, 25 bp, Homo sapien
taagcattgtaaatgcacaactgcc

SEQ ID NO: 6020776 - DNA, 25 bp, Homo sapien
gaatggaaatgttctcattttattg

SEQ ID NO: 6020777 - DNA, 25 bp, Homo sapien
aaacgcctctataaggataaaatga

SEQ ID NO: 6020778 - DNA, 25 bp, Homo sapien
tctcattttattgaacgctaagaac

SEQ ID NO: 6020779 - DNA, 25 bp, Homo sapien
ctatttatgatcctagaatgtttgt

SEQ ID NO: 6020780 - DNA, 25 bp, Homo sapien
agtaggacaagaattttgaagtaag

SEQ ID NO: 6020781 - DNA, 25 bp, Homo sapien
taggagtgatccacactaaggtgac

SEQ ID NO: 6020782 - DNA, 25 bp, Homo sapien
ctctataaggataaaatgatagtat

SEQ ID NO: 6020783 - DNA, 25 bp, Homo sapien
caaatattttcttataagactgttt

SEQ ID NO: 6020784 - DNA, 25 bp, Homo sapien
acaagaattttgaagtaagccagtt

SEQ ID NO: 6020785 - DNA, 25 bp, Homo sapien
gccagtttatctttagaatgatatt

SEQ ID NO: 6020786 - DNA, 25 bp, Homo sapien
gtataacatttggaaatgtgtctga

SEQ ID NO: 6020787 - DNA, 25 bp, Homo sapien
acaaacaaaagctatcgtattttca

SEQ ID NO: 6020788 - DNA, 25 bp, Homo sapien
ttactgtcattccacacaggctaaa

SEQ ID NO: 6020789 - DNA, 25 bp, Homo sapien
gaaatgtagggtgctactaaggatc

SEQ ID NO: 6020790 - DNA, 25 bp, Homo sapien
aaaagcggtcgtgcattttcatcag

SEQ ID NO: 6020791 - DNA, 25 bp, Homo sapien
agactactggaaaataagactatag

SEQ ID NO: 6020792 - DNA, 25 bp, Homo sapien
atgtaatttcaaattcaaacctgta

SEQ ID NO: 6020793 - DNA, 25 bp, Homo sapien
gacatacacttacattacaatatgc

SEQ ID NO: 6020794 - DNA, 25 bp, Homo sapien
gagagacacaataatcacataggaa

SEQ ID NO: 6020795 - DNA, 25 bp, Homo sapien
acttctcaagtccattgacttaaaa

SEQ ID NO: 6020796 - DNA, 25 bp, Homo sapien
catcacattttacaaccttttattt

SEQ ID NO: 6020797 - DNA, 25 bp, Homo sapien
gtttatataatgtaatttcaaattc

SEQ ID NO: 6020798 - DNA, 25 bp, Homo sapien
cttaaaaaacagtggtagagagaca

SEQ ID NO: 6020799 - DNA, 25 bp, Homo sapien
cagttgtgcatttacaatgcttaca

SEQ ID NO: 6020800 - DNA, 25 bp, Homo sapien
atgactgaactagcaatatatctgt

SEQ ID NO: 6020801 - DNA, 25 bp, Homo sapien
aaacattctaggatcataaatagtc

SEQ ID NO: 6020802 - DNA, 25 bp, Homo sapien
tttgattggaaaattttattcagtg

SEQ ID NO: 6020803 - DNA, 25 bp, Homo sapien
tgaaaatacgatagcttttgtttgt

SEQ ID NO: 6020804 - DNA, 25 bp, Homo sapien
acttacattacaatatgcaaactcc

SEQ ID NO: 6020805 - DNA, 25 bp, Homo sapien
cctaagcccacaccagttaggaaag

SEQ ID NO: 6020806 - DNA, 25 bp, Homo sapien
cagaatacttctcaagtccattgac

SEQ ID NO: 6020807 - DNA, 25 bp, Homo sapien
gtggtagagagacacaataatcaca

SEQ ID NO: 6020808 - DNA, 25 bp, Homo sapien
attcaaacctgtatcaaaagggtcg

SEQ ID NO: 6020809 - DNA, 25 bp, Homo sapien
caaaagggtcgggacatatacctat

SEQ ID NO: 6020810 - DNA, 25 bp, Homo sapien
ttaattaaacttcagtcataaacta

SEQ ID NO: 6020811 - DNA, 25 bp, Homo sapien
gagatactatcattttatccttata

SEQ ID NO: 6020812 - DNA, 25 bp, Homo sapien
gtgaagccatataaatgtcagaata

SEQ ID NO: 6020813 - DNA, 25 bp, Homo sapien
aggaaagagatactatcattttatc

SEQ ID NO: 6020814 - DNA, 25 bp, Homo sapien
atgcctagactactggaaaataaga

SEQ ID NO: 6020815 - DNA, 25 bp, Homo sapien
cattgacttaaaaaacagtggtaga

SEQ ID NO: 6020816 - DNA, 25 bp, Homo sapien
cacaataatcacataggaatgccta

SEQ ID NO: 6020817 - DNA, 25 bp, Homo sapien
gaactagcaatatatctgtgaagcc

SEQ ID NO: 6020818 - DNA, 25 bp, Homo sapien
tgaactcttttagcctagaaattga

SEQ ID NO: 6020819 - DNA, 25 bp, Homo sapien
cctgtatcaaaagggtcgggacata

SEQ ID NO: 6020820 - DNA, 25 bp, Homo sapien
gcaatatatctgtgaagccatataa

SEQ ID NO: 6020821 - DNA, 25 bp, Homo sapien
ctatttagaatagtgttggacatac

SEQ ID NO: 6020822 - DNA, 25 bp, Homo sapien
aaaagtacacatacagtatatacac

SEQ ID NO: 6020823 - DNA, 25 bp, Homo sapien
aaatgtcagaatacttctcaagtcc

SEQ ID NO: 6020824 - DNA, 25 bp, Homo sapien
aatagtcaccttagtgtggatcact

SEQ ID NO: 6020825 - DNA, 25 bp, Homo sapien
aatcacataggaatgcctagactac

SEQ ID NO: 6020826 - DNA, 25 bp, Homo sapien
tataatgtaatttcaaattcaaacc

SEQ ID NO: 6020827 - DNA, 25 bp, Homo sapien
agtaaatgaaaatacgatagctttt

SEQ ID NO: 6020828 - DNA, 25 bp, Homo sapien
ccagttaggaaagagatactatcat

SEQ ID NO: 6020829 - DNA, 25 bp, Homo sapien
ttcttcttctaaaaacagtcttata

SEQ ID NO: 6020830 - DNA, 25 bp, Homo sapien
ttggaaaattttattcagtgaactc

SEQ ID NO: 6020831 - DNA, 25 bp, Homo sapien
ataagactataggaattttgattgg

SEQ ID NO: 6020832 - DNA, 25 bp, Homo sapien
tattttaaaaagtacacatacagta

SEQ ID NO: 6020833 - DNA, 25 bp, Homo sapien
cttttagcctagaaattgagtaaat

SEQ ID NO: 6020834 - DNA, 25 bp, Homo sapien
ccatataaatgtcagaatacttctc

SEQ ID NO: 6020835 - DNA, 25 bp, Homo sapien
attcagtgaactcttttagcctaga

SEQ ID NO: 6020836 - DNA, 25 bp, Homo sapien
tatacacatacacatcacattttac

SEQ ID NO: 6020837 - DNA, 25 bp, Homo sapien
gtgttggacatacacttacattaca

SEQ ID NO: 6020838 - DNA, 25 bp, Homo sapien
cataaactatttagaatagtgttgg

SEQ ID NO: 6020839 - DNA, 25 bp, Homo sapien
ctggaaaataagactataggaattt

SEQ ID NO: 6020840 - DNA, 25 bp, Homo sapien
agatggcagttgtgcatttacaatg

SEQ ID NO: 6020841 - DNA, 25 bp, Homo sapien
ataggaatgcctagactactggaaa

SEQ ID NO: 6020842 - DNA, 25 bp, Homo sapien
taaacttcagtcataaactatttag

SEQ ID NO: 6020843 - DNA, 25 bp, Homo sapien
tttatttaattaaacttcagtcata

SEQ ID NO: 6020844 - DNA, 25 bp, Homo sapien
atatgcaaactccaatctatgactg

SEQ ID NO: 6020845 - DNA, 25 bp, Homo sapien
aaaacagtggtagagagacacaata

SEQ ID NO: 6020846 - DNA, 25 bp, Homo sapien
tctaggatcataaatagtcacctta

SEQ ID NO: 6020847 - DNA, 25 bp, Homo sapien
gaaaatatttggagatggcagttgt

SEQ ID NO: 6020848 - DNA, 25 bp, Homo sapien
gcttacaaacattctaggatcataa

SEQ ID NO: 6020849 - DNA, 25 bp, Homo sapien
ctatcattttatccttatagaggcg

SEQ ID NO: 6020850 - DNA, 25 bp, Homo sapien
caccttagtgtggatcactcctaag

SEQ ID NO: 6020851 - DNA, 25 bp, Homo sapien
acacatacagtatatacacatacac

SEQ ID NO: 6020852 - DNA, 25 bp, Homo sapien
ttcagtcataaactatttagaatag

SEQ ID NO: 6020853 - DNA, 25 bp, Homo sapien
atcataaatagtcaccttagtgtgg

SEQ ID NO: 6020854 - DNA, 25 bp, Homo sapien
atttggagatggcagttgtgcattt

SEQ ID NO: 6020855 - DNA, 25 bp, Homo sapien
acagtatatacacatacacatcaca

SEQ ID NO: 6020856 - DNA, 25 bp, Homo sapien
gcctagaaattgagtaaatgaaaat

SEQ ID NO: 6020857 - DNA, 25 bp, Homo sapien
agaatagtgttggacatacacttac

SEQ ID NO: 6020858 - DNA, 25 bp, Homo sapien
attacaatatgcaaactccaatcta

SEQ ID NO: 6020859 - DNA, 25 bp, Homo sapien
aaactccaatctatgactgaactag

SEQ ID NO: 6020860 - DNA, 25 bp, Homo sapien
agtgtggatcactcctaagcccaca

SEQ ID NO: 6020861 - DNA, 25 bp, Homo sapien
caagtccattgacttaaaaaacagt

SEQ ID NO: 6020862 - DNA, 25 bp, Homo sapien
tacaatgcttacaaacattctagga

SEQ ID NO: 6020863 - DNA, 25 bp, Homo sapien
ttataagaaaatatttggagatggc

SEQ ID NO: 6020864 - DNA, 25 bp, Homo sapien
tgcatttacaatgcttacaaacatt

SEQ ID NO: 6020865 - DNA, 25 bp, Homo sapien
gatcactcctaagcccacaccagtt

SEQ ID NO: 6020866 - DNA, 25 bp, Homo sapien
aattttattcagtgaactcttttag

SEQ ID NO: 6020867 - DNA, 25 bp, Homo sapien
catacacatcacattttacaacctt

SEQ ID NO: 6020868 - DNA, 25 bp, Homo sapien
caatctatgactgaactagcaatat

SEQ ID NO: 6020869 - DNA, 25 bp, Homo sapien
cccacaccagttaggaaagagatac

SEQ ID NO: 6020870 - DNA, 25 bp, Homo sapien
tatctgtgaagccatataaatgtca

SEQ ID NO: 6020871 - DNA, 25 bp, Homo sapien
acagtcttataagaaaatatttgga

SEQ ID NO: 6020872 - DNA, 25 bp, Homo sapien
aaattgagtaaatgaaaatacgata

SEQ ID NO: 6020873 - DNA, 25 bp, Homo sapien
tttcaaattcaaacctgtatcaaaa

SEQ ID NO: 6020874 - DNA, 25 bp, Homo sapien
tcttctaaaaacagtcttataagaa

SEQ ID NO: 6020875 - DNA, 25 bp, Homo sapien
ctataggaattttgattggaaaatt

SEQ ID NO: 6020876 - DNA, 25 bp, Homo sapien
ctcgccctccgaggtcgcgacgctg

SEQ ID NO: 6020877 - DNA, 25 bp, Homo sapien
tcaaactcaaaatcgtccacgtcca

SEQ ID NO: 6020878 - DNA, 25 bp, Homo sapien
atctgttcaaactcaaaatcgtcca

SEQ ID NO: 6020879 - DNA, 25 bp, Homo sapien
gggactccacgtcccccagcatctc

SEQ ID NO: 6020880 - DNA, 25 bp, Homo sapien
acgacatgcgcggcgccaccagccc

SEQ ID NO: 6020881 - DNA, 25 bp, Homo sapien
aggtcgcgacgctggagtacgagtc

SEQ ID NO: 6020882 - DNA, 25 bp, Homo sapien
ccagcccggcctccgcaggagcgtc

SEQ ID NO: 6020883 - DNA, 25 bp, Homo sapien
caggtgctcgcgaatgtggtttagc

SEQ ID NO: 6020884 - DNA, 25 bp, Homo sapien
gcgtcggcgggcgtcatatccacct

SEQ ID NO: 6020885 - DNA, 25 bp, Homo sapien
ccgcatgacggactcgccctccgag

SEQ ID NO: 6020886 - DNA, 25 bp, Homo sapien
tcgcaccagcgggaggttcaggtgc

SEQ ID NO: 6020887 - DNA, 25 bp, Homo sapien
tggtggacagtctgcgggggcgttg

SEQ ID NO: 6020888 - DNA, 25 bp, Homo sapien
cagtcgccgggcctccacgggaact

SEQ ID NO: 6020889 - DNA, 25 bp, Homo sapien
gcgggggcgttgtcccgcggagaga

SEQ ID NO: 6020890 - DNA, 25 bp, Homo sapien
cagcgggaggttcaggtgctcgcga

SEQ ID NO: 6020891 - DNA, 25 bp, Homo sapien
cagtctgcgggggcgttgtcccgcg

SEQ ID NO: 6020892 - DNA, 25 bp, Homo sapien
tcctcgccgtccaggcggagttcgt

SEQ ID NO: 6020893 - DNA, 25 bp, Homo sapien
gcgggcgtcatatccacctcctcgc

SEQ ID NO: 6020894 - DNA, 25 bp, Homo sapien
caacttggcccggatcagcagcata

SEQ ID NO: 6020895 - DNA, 25 bp, Homo sapien
atcggtaaacatctgttcaaactca

SEQ ID NO: 6020896 - DNA, 25 bp, Homo sapien
tccagggcgtcggcgggcgtcatat

SEQ ID NO: 6020897 - DNA, 25 bp, Homo sapien
gcgccaccagcccggcctccgcagg

SEQ ID NO: 6020898 - DNA, 25 bp, Homo sapien
ctcccgcagtcgccgggcctccacg

SEQ ID NO: 6020899 - DNA, 25 bp, Homo sapien
tcaaaatcgtccacgtccaaagccc

SEQ ID NO: 6020900 - DNA, 25 bp, Homo sapien
ggggcggtggtggacagtctgcggg

SEQ ID NO: 6020901 - DNA, 25 bp, Homo sapien
atcgtcgtccgggaggtcgagcagg

SEQ ID NO: 6020902 - DNA, 25 bp, Homo sapien
gccctcgattgtcgatccgtaattg

SEQ ID NO: 6020903 - DNA, 25 bp, Homo sapien
gtaatgggggcggtggtggacagtc

SEQ ID NO: 6020904 - DNA, 25 bp, Homo sapien
gtgctcccgcatgacggactcgccc

SEQ ID NO: 6020905 - DNA, 25 bp, Homo sapien
aagtacccagaggagcgggcctggt

SEQ ID NO: 6020906 - DNA, 25 bp, Homo sapien
tcgatccgtaattgtttctggtccg

SEQ ID NO: 6020907 - DNA, 25 bp, Homo sapien
cccgcggagagaaacgacatgcgcg

SEQ ID NO: 6020908 - DNA, 25 bp, Homo sapien
gcctggttgccctgcaggacgggcg

SEQ ID NO: 6020909 - DNA, 25 bp, Homo sapien
ccgcccgcggctatacgcgtgctcc

SEQ ID NO: 6020910 - DNA, 25 bp, Homo sapien
gagcaggccctcgattgtcgatccg

SEQ ID NO: 6020911 - DNA, 25 bp, Homo sapien
cgccgccgcacttcgcaccagcggg

SEQ ID NO: 6020912 - DNA, 25 bp, Homo sapien
ttcctccgccgccgcacttcgcacc

SEQ ID NO: 6020913 - DNA, 25 bp, Homo sapien
gcggctatacgcgtgctcccgcatg

SEQ ID NO: 6020914 - DNA, 25 bp, Homo sapien
tctggtccgcccgcggctatacgcg

SEQ ID NO: 6020915 - DNA, 25 bp, Homo sapien
tacgagacggggtcgtgggtcattc

SEQ ID NO: 6020916 - DNA, 25 bp, Homo sapien
ccagaggagcgggcctggttgccct

SEQ ID NO: 6020917 - DNA, 25 bp, Homo sapien
tggagtacgagtccaacttggcccg

SEQ ID NO: 6020918 - DNA, 25 bp, Homo sapien
ctcccaggctgacgtcggtaatggg

SEQ ID NO: 6020919 - DNA, 25 bp, Homo sapien
cgttgtcccgcggagagaaacgaca

SEQ ID NO: 6020920 - DNA, 25 bp, Homo sapien
cgacgctggagtacgagtccaactt

SEQ ID NO: 6020921 - DNA, 25 bp, Homo sapien
gtttagctcccgcagtcgccgggcc

SEQ ID NO: 6020922 - DNA, 25 bp, Homo sapien
gagggggactccacgtcccccagca

SEQ ID NO: 6020923 - DNA, 25 bp, Homo sapien
agagaaacgacatgcgcggcgccac

SEQ ID NO: 6020924 - DNA, 25 bp, Homo sapien
gagcgggcctggttgccctgcagga

SEQ ID NO: 6020925 - DNA, 25 bp, Homo sapien
gacggactcgccctccgaggtcgcg

SEQ ID NO: 6020926 - DNA, 25 bp, Homo sapien
tgcaggacgggcggggtcgtgaggg

SEQ ID NO: 6020927 - DNA, 25 bp, Homo sapien
aatgtggtttagctcccgcagtcgc

SEQ ID NO: 6020928 - DNA, 25 bp, Homo sapien
cgtaattgtttctggtccgcccgcg

SEQ ID NO: 6020929 - DNA, 25 bp, Homo sapien
agcgtcatcgtcgtccgggaggtcg

SEQ ID NO: 6020930 - DNA, 25 bp, Homo sapien
ctgacgtcggtaatgggggcggtgg

SEQ ID NO: 6020931 - DNA, 25 bp, Homo sapien
ctcgcgaatgtggtttagctcccgc

SEQ ID NO: 6020932 - DNA, 25 bp, Homo sapien
gaggtcgagcaggccctcgattgtc

SEQ ID NO: 6020933 - DNA, 25 bp, Homo sapien
ccgcaggagcgtcatcgtcgtccgg

SEQ ID NO: 6020934 - DNA, 25 bp, Homo sapien
gttcgtctcccaggctgacgtcggt

SEQ ID NO: 6020935 - DNA, 25 bp, Homo sapien
ttgccctgcaggacgggcggggtcg

SEQ ID NO: 6020936 - DNA, 25 bp, Homo sapien
aagccccatacgagacggggtcgtg

SEQ ID NO: 6020937 - DNA, 25 bp, Homo sapien
gattgtcgatccgtaattgtttctg

SEQ ID NO: 6020938 - DNA, 25 bp, Homo sapien
cgtccacgtccaaagccccatacga

SEQ ID NO: 6020939 - DNA, 25 bp, Homo sapien
catctccaagtcgaagtcgtccagg

SEQ ID NO: 6020940 - DNA, 25 bp, Homo sapien
caagtcgaagtcgtccagggcgtcg

SEQ ID NO: 6020941 - DNA, 25 bp, Homo sapien
gtccgggaggtcgagcaggccctcg

SEQ ID NO: 6020942 - DNA, 25 bp, Homo sapien
ctccgaggtcgcgacgctggagtac

SEQ ID NO: 6020943 - DNA, 25 bp, Homo sapien
cccagcatctccaagtcgaagtcgt

SEQ ID NO: 6020944 - DNA, 25 bp, Homo sapien
tgcgcggcgccaccagcccggcctc

SEQ ID NO: 6020945 - DNA, 25 bp, Homo sapien
cgtccaggcggagttcgtctcccag

SEQ ID NO: 6020946 - DNA, 25 bp, Homo sapien
ggcctccgcaggagcgtcatcgtcg

SEQ ID NO: 6020947 - DNA, 25 bp, Homo sapien
cgggttcctccgccgccgcacttcg

SEQ ID NO: 6020948 - DNA, 25 bp, Homo sapien
gtcatatccacctcctcgccgtcca

SEQ ID NO: 6020949 - DNA, 25 bp, Homo sapien
cgcacttcgcaccagcgggaggttc

SEQ ID NO: 6020950 - DNA, 25 bp, Homo sapien
gtaaacatctgttcaaactcaaaat

SEQ ID NO: 6020951 - DNA, 25 bp, Homo sapien
cgtccaaagccccatacgagacggg

SEQ ID NO: 6020952 - DNA, 25 bp, Homo sapien
gatcagcagcataaagtacccagag

SEQ ID NO: 6020953 - DNA, 25 bp, Homo sapien
ggcccggatcagcagcataaagtac

SEQ ID NO: 6020954 - DNA, 25 bp, Homo sapien
gaggttcaggtgctcgcgaatgtgg

SEQ ID NO: 6020955 - DNA, 25 bp, Homo sapien
attgtttctggtccgcccgcggcta

SEQ ID NO: 6020956 - DNA, 25 bp, Homo sapien
tccacctcctcgccgtccaggcgga

SEQ ID NO: 6020957 - DNA, 25 bp, Homo sapien
aagtcgtccagggcgtcggcgggcg

SEQ ID NO: 6020958 - DNA, 25 bp, Homo sapien
ggcggagttcgtctcccaggctgac

SEQ ID NO: 6020959 - DNA, 25 bp, Homo sapien
cgagtccaacttggcccggatcagc

SEQ ID NO: 6020960 - DNA, 25 bp, Homo sapien
tatacgcgtgctcccgcatgacgga

SEQ ID NO: 6020961 - DNA, 25 bp, Homo sapien
acgtcccccagcatctccaagtcga

SEQ ID NO: 6020962 - DNA, 25 bp, Homo sapien
cagcataaagtacccagaggagcgg

SEQ ID NO: 6020963 - DNA, 25 bp, Homo sapien
gattccattcttttgtttgtctgcc

SEQ ID NO: 6020964 - DNA, 25 bp, Homo sapien
tgacttcagcacgtgtcttgtagtt

SEQ ID NO: 6020965 - DNA, 25 bp, Homo sapien
aatcccagcagctgttacaaactca

SEQ ID NO: 6020966 - DNA, 25 bp, Homo sapien
tgttacaaactcaagaaggaccatg

SEQ ID NO: 6020967 - DNA, 25 bp, Homo sapien
aacaagggtatcaccttcaaacttg

SEQ ID NO: 6020968 - DNA, 25 bp, Homo sapien
tgttgtgtctaattttgaagttaac

SEQ ID NO: 6020969 - DNA, 25 bp, Homo sapien
ttcatatgatctgggtatcttgaaa

SEQ ID NO: 6020970 - DNA, 25 bp, Homo sapien
catctttgaaaaatatagttctttc

SEQ ID NO: 6020971 - DNA, 25 bp, Homo sapien
catcgccaattggagtattttgttg

SEQ ID NO: 6020972 - DNA, 25 bp, Homo sapien
aaaggacagggccatcgccaattgg

SEQ ID NO: 6020973 - DNA, 25 bp, Homo sapien
gttgtctggtaaaaggacagggcca

SEQ ID NO: 6020974 - DNA, 25 bp, Homo sapien
attgaacaccataagagaaagtagt

SEQ ID NO: 6020975 - DNA, 25 bp, Homo sapien
aagaaggaccatgtggtctctcttt

SEQ ID NO: 6020976 - DNA, 25 bp, Homo sapien
tctttcctgtacataaccttcgggc

SEQ ID NO: 6020977 - DNA, 25 bp, Homo sapien
tatagttctttcctgtacataacct

SEQ ID NO: 6020978 - DNA, 25 bp, Homo sapien
gtggtctctcttttcgttgggatct

SEQ ID NO: 6020979 - DNA, 25 bp, Homo sapien
ctagttgaacgcttccatcttcaat

SEQ ID NO: 6020980 - DNA, 25 bp, Homo sapien
cttcaatgttgtgtctaattttgaa

SEQ ID NO: 6020981 - DNA, 25 bp, Homo sapien
ccatgatgtatacattgtgtgagtt

SEQ ID NO: 6020982 - DNA, 25 bp, Homo sapien
caccttcaaacttgacttcagcacg

SEQ ID NO: 6020983 - DNA, 25 bp, Homo sapien
ttctattaacaagggtatcaccttc

SEQ ID NO: 6020984 - DNA, 25 bp, Homo sapien
gaacgcttccatcttcaatgttgtg

SEQ ID NO: 6020985 - DNA, 25 bp, Homo sapien
gggtatcttgaaaagcattgaacac

SEQ ID NO: 6020986 - DNA, 25 bp, Homo sapien
ttccgtatgttgcatcaccttcacc

SEQ ID NO: 6020987 - DNA, 25 bp, Homo sapien
gcatggcactcttgaaaaagtcatg

SEQ ID NO: 6020988 - DNA, 25 bp, Homo sapien
caataccttttaactcgattctatt

SEQ ID NO: 6020989 - DNA, 25 bp, Homo sapien
cagggccatcgccaattggagtatt

SEQ ID NO: 6020990 - DNA, 25 bp, Homo sapien
tgaagttaactttgattccattctt

SEQ ID NO: 6020991 - DNA, 25 bp, Homo sapien
tttgttgataatggtctgctagttg

SEQ ID NO: 6020992 - DNA, 25 bp, Homo sapien
catcttctttaaaatcaataccttt

SEQ ID NO: 6020993 - DNA, 25 bp, Homo sapien
gtgtcttgtagttcccgtcatcttt

SEQ ID NO: 6020994 - DNA, 25 bp, Homo sapien
caattggagtattttgttgataatg

SEQ ID NO: 6020995 - DNA, 25 bp, Homo sapien
acaagtgttggccatggaacaggta

SEQ ID NO: 6020996 - DNA, 25 bp, Homo sapien
tgtattccaatttgtgtccaagaat

SEQ ID NO: 6020997 - DNA, 25 bp, Homo sapien
atctttcgaaagggcagattgtgtg

SEQ ID NO: 6020998 - DNA, 25 bp, Homo sapien
ttccatcttcaatgttgtgtctaat

SEQ ID NO: 6020999 - DNA, 25 bp, Homo sapien
gataatggtctgctagttgaacgct

SEQ ID NO: 6021000 - DNA, 25 bp, Homo sapien
gagtattttgttgataatggtctgc

SEQ ID NO: 6021001 - DNA, 25 bp, Homo sapien
aactttgattccattcttttgtttg

SEQ ID NO: 6021002 - DNA, 25 bp, Homo sapien
tcccgtcatctttgaaaaatatagt

SEQ ID NO: 6021003 - DNA, 25 bp, Homo sapien
attcttttgtttgtctgccatgatg

SEQ ID NO: 6021004 - DNA, 25 bp, Homo sapien
gggtatcaccttcaaacttgacttc

SEQ ID NO: 6021005 - DNA, 25 bp, Homo sapien
cttttaactcgattctattaacaag

SEQ ID NO: 6021006 - DNA, 25 bp, Homo sapien
caagaatgtttccatcttctttaaa

SEQ ID NO: 6021007 - DNA, 25 bp, Homo sapien
tgaaaaagtcatgctgtttcatatg

SEQ ID NO: 6021008 - DNA, 25 bp, Homo sapien
taagttttccgtatgttgcatcacc

SEQ ID NO: 6021009 - DNA, 25 bp, Homo sapien
aaactcaagaaggaccatgtggtct

SEQ ID NO: 6021010 - DNA, 25 bp, Homo sapien
ttgtgtggacaggtaatggttgtct

SEQ ID NO: 6021011 - DNA, 25 bp, Homo sapien
gagaaagtagtgacaagtgttggcc

SEQ ID NO: 6021012 - DNA, 25 bp, Homo sapien
tgttgcatcaccttcaccctctcca

SEQ ID NO: 6021013 - DNA, 25 bp, Homo sapien
caccataagagaaagtagtgacaag

SEQ ID NO: 6021014 - DNA, 25 bp, Homo sapien
cttcgggcatggcactcttgaaaaa

SEQ ID NO: 6021015 - DNA, 25 bp, Homo sapien
cgaaagggcagattgtgtggacagg

SEQ ID NO: 6021016 - DNA, 25 bp, Homo sapien
aaaagcattgaacaccataagagaa

SEQ ID NO: 6021017 - DNA, 25 bp, Homo sapien
tgtatacattgtgtgagttatagtt

SEQ ID NO: 6021018 - DNA, 25 bp, Homo sapien
gtagtgacaagtgttggccatggaa

SEQ ID NO: 6021019 - DNA, 25 bp, Homo sapien
ttgtttgtctgccatgatgtataca

SEQ ID NO: 6021020 - DNA, 25 bp, Homo sapien
tgatctgggtatcttgaaaagcatt

SEQ ID NO: 6021021 - DNA, 25 bp, Homo sapien
tgtgtccaagaatgtttccatcttc

SEQ ID NO: 6021022 - DNA, 25 bp, Homo sapien
tgtctgccatgatgtatacattgtg

SEQ ID NO: 6021023 - DNA, 25 bp, Homo sapien
tgtttccatcttctttaaaatcaat

SEQ ID NO: 6021024 - DNA, 25 bp, Homo sapien
tgtagttcccgtcatctttgaaaaa

SEQ ID NO: 6021025 - DNA, 25 bp, Homo sapien
cagtagtgcaaataaatttaagggt

SEQ ID NO: 6021026 - DNA, 25 bp, Homo sapien
cattgtgtgagttatagttgtattc

SEQ ID NO: 6021027 - DNA, 25 bp, Homo sapien
gttgggatctttcgaaagggcagat

SEQ ID NO: 6021028 - DNA, 25 bp, Homo sapien
cagcacgtgtcttgtagttcccgtc

SEQ ID NO: 6021029 - DNA, 25 bp, Homo sapien
gaaaaatatagttctttcctgtaca

SEQ ID NO: 6021030 - DNA, 25 bp, Homo sapien
cagattgtgtggacaggtaatggtt

SEQ ID NO: 6021031 - DNA, 25 bp, Homo sapien
catggaacaggtagttttccagtag

SEQ ID NO: 6021032 - DNA, 25 bp, Homo sapien
gaccatgtggtctctcttttcgttg

SEQ ID NO: 6021033 - DNA, 25 bp, Homo sapien
cttgaaaagcattgaacaccataag

SEQ ID NO: 6021034 - DNA, 25 bp, Homo sapien
tctcttttcgttgggatctttcgaa

SEQ ID NO: 6021035 - DNA, 25 bp, Homo sapien
gtgagttatagttgtattccaattt

SEQ ID NO: 6021036 - DNA, 25 bp, Homo sapien
ggtctgctagttgaacgcttccatc

SEQ ID NO: 6021037 - DNA, 25 bp, Homo sapien
tatagttgtattccaatttgtgtcc

SEQ ID NO: 6021038 - DNA, 25 bp, Homo sapien
ataaccttcgggcatggcactcttg

SEQ ID NO: 6021039 - DNA, 25 bp, Homo sapien
ctgtacataaccttcgggcatggca

SEQ ID NO: 6021040 - DNA, 25 bp, Homo sapien
agttttccagtagtgcaaataaatt

SEQ ID NO: 6021041 - DNA, 25 bp, Homo sapien
ctggtaaaaggacagggccatcgcc

SEQ ID NO: 6021042 - DNA, 25 bp, Homo sapien
agggtaagttttccgtatgttgcat

SEQ ID NO: 6021043 - DNA, 25 bp, Homo sapien
cactcttgaaaaagtcatgctgttt

SEQ ID NO: 6021044 - DNA, 25 bp, Homo sapien
caaacttgacttcagcacgtgtctt

SEQ ID NO: 6021045 - DNA, 25 bp, Homo sapien
gtaatggttgtctggtaaaaggaca

SEQ ID NO: 6021046 - DNA, 25 bp, Homo sapien
tgctgtttcatatgatctgggtatc

SEQ ID NO: 6021047 - DNA, 25 bp, Homo sapien
gttggccatggaacaggtagttttc

SEQ ID NO: 6021048 - DNA, 25 bp, Homo sapien
ccaatttgtgtccaagaatgtttcc

SEQ ID NO: 6021049 - DNA, 25 bp, Homo sapien
ggacaggtaatggttgtctggtaaa

SEQ ID NO: 6021050 - DNA, 25 bp, Homo sapien
acaggtagttttccagtagtgcaaa

SEQ ID NO: 6021051 - DNA, 25 bp, Homo sapien
aagtcatgctgtttcatatgatctg

SEQ ID NO: 6021052 - DNA, 25 bp, Homo sapien
agcagctgttacaaactcaagaagg

SEQ ID NO: 6021053 - DNA, 25 bp, Homo sapien
actcgattctattaacaagggtatc

SEQ ID NO: 6021054 - DNA, 25 bp, Homo sapien
gcttggccagcagtaccaaaggaaa

SEQ ID NO: 6021055 - DNA, 25 bp, Homo sapien
ggccagtccctattactgttaagag

SEQ ID NO: 6021056 - DNA, 25 bp, Homo sapien
ataagagagcttccaacttgccctg

SEQ ID NO: 6021057 - DNA, 25 bp, Homo sapien
gttgttctcccaacacatctgaaaa

SEQ ID NO: 6021058 - DNA, 25 bp, Homo sapien
gccctaaagagctaaacagaacagg

SEQ ID NO: 6021059 - DNA, 25 bp, Homo sapien
ctccgcttggccagcagtaccaaag

SEQ ID NO: 6021060 - DNA, 25 bp, Homo sapien
ggtccttttgcagttgccaacttgt

SEQ ID NO: 6021061 - DNA, 25 bp, Homo sapien
tgacccctccgcttggccagcagta

SEQ ID NO: 6021062 - DNA, 25 bp, Homo sapien
ttcaaaagacaacatgcttagaaaa

SEQ ID NO: 6021063 - DNA, 25 bp, Homo sapien
taaacagaacaggttgttctcccaa

SEQ ID NO: 6021064 - DNA, 25 bp, Homo sapien
gtggaggaagatgacccatggcgtg

SEQ ID NO: 6021065 - DNA, 25 bp, Homo sapien
ctcccaacacatctgaaaataagag

SEQ ID NO: 6021066 - DNA, 25 bp, Homo sapien
caaagcatctgcctttggaaaacta

SEQ ID NO: 6021067 - DNA, 25 bp, Homo sapien
ccaagacagtatcgccagctttagc

SEQ ID NO: 6021068 - DNA, 25 bp, Homo sapien
acacatctgaaaataagagagcttc

SEQ ID NO: 6021069 - DNA, 25 bp, Homo sapien
tgccctgttccccatcctcttcctg

SEQ ID NO: 6021070 - DNA, 25 bp, Homo sapien
tgggttcaccctggccagtccctat

SEQ ID NO: 6021071 - DNA, 25 bp, Homo sapien
ttgccaacttgtaactgcacttgat

SEQ ID NO: 6021072 - DNA, 25 bp, Homo sapien
ccagcccagtcctaagcatccactg

SEQ ID NO: 6021073 - DNA, 25 bp, Homo sapien
atggagcaaagccaagacagtatcg

SEQ ID NO: 6021074 - DNA, 25 bp, Homo sapien
catcctcttcctgtggaggaagatg

SEQ ID NO: 6021075 - DNA, 25 bp, Homo sapien
taagcatccactgtgccttcagttc

SEQ ID NO: 6021076 - DNA, 25 bp, Homo sapien
aactgcacttgatacatacacattc

SEQ ID NO: 6021077 - DNA, 25 bp, Homo sapien
cagttccgggaagacactgcttttt

SEQ ID NO: 6021078 - DNA, 25 bp, Homo sapien
aagatttctggaaggtctcgcccta

SEQ ID NO: 6021079 - DNA, 25 bp, Homo sapien
tccctattactgttaagaggcatag

SEQ ID NO: 6021080 - DNA, 25 bp, Homo sapien
acttgtaactgcacttgatacatac

SEQ ID NO: 6021081 - DNA, 25 bp, Homo sapien
aaatgttatgatcgatgattcaaaa

SEQ ID NO: 6021082 - DNA, 25 bp, Homo sapien
atgaagaagatttctggaaggtctc

SEQ ID NO: 6021083 - DNA, 25 bp, Homo sapien
tcacagaggcatgggtccttttgca

SEQ ID NO: 6021084 - DNA, 25 bp, Homo sapien
taaccatgggttcaccctggccagt

SEQ ID NO: 6021085 - DNA, 25 bp, Homo sapien
taacataaatgttatgatcgatgat

SEQ ID NO: 6021086 - DNA, 25 bp, Homo sapien
ccaacttgccctgttccccatcctc

SEQ ID NO: 6021087 - DNA, 25 bp, Homo sapien
gagtctggaaatgttacatcacaga

SEQ ID NO: 6021088 - DNA, 25 bp, Homo sapien
gccacagcccctcaaagcatctgcc

SEQ ID NO: 6021089 - DNA, 25 bp, Homo sapien
gaacaggttgttctcccaacacatc

SEQ ID NO: 6021090 - DNA, 25 bp, Homo sapien
catgcttagaaaatggagcaaagcc

SEQ ID NO: 6021091 - DNA, 25 bp, Homo sapien
tacaagtctccaaaccatctctaag

SEQ ID NO: 6021092 - DNA, 25 bp, Homo sapien
tttttacaagtctccaaaccatctc

SEQ ID NO: 6021093 - DNA, 25 bp, Homo sapien
gtaccaaaggaaagatacaggacaa

SEQ ID NO: 6021094 - DNA, 25 bp, Homo sapien
gaagatgacccatggcgtgcccacc

SEQ ID NO: 6021095 - DNA, 25 bp, Homo sapien
ccagcagtaccaaaggaaagataca

SEQ ID NO: 6021096 - DNA, 25 bp, Homo sapien
ctttagcaactgtaaccatgggttc

SEQ ID NO: 6021097 - DNA, 25 bp, Homo sapien
cagtatcgccagctttagcaactgt

SEQ ID NO: 6021098 - DNA, 25 bp, Homo sapien
cccacccacagccatggtgacccct

SEQ ID NO: 6021099 - DNA, 25 bp, Homo sapien
acccaccccacccacagccatggtg

SEQ ID NO: 6021100 - DNA, 25 bp, Homo sapien
ggtctcgccctaaagagctaaacag

SEQ ID NO: 6021101 - DNA, 25 bp, Homo sapien
ggacaagccacagcccctcaaagca

SEQ ID NO: 6021102 - DNA, 25 bp, Homo sapien
ggaaatgttacatcacagaggcatg

SEQ ID NO: 6021103 - DNA, 25 bp, Homo sapien
cgtgcccacccaccccacccacagc

SEQ ID NO: 6021104 - DNA, 25 bp, Homo sapien
tttttaacataaatgttatgatcga

SEQ ID NO: 6021105 - DNA, 25 bp, Homo sapien
gcccctcaaagcatctgcctttgga

SEQ ID NO: 6021106 - DNA, 25 bp, Homo sapien
ctgaaaataagagagcttccaactt

SEQ ID NO: 6021107 - DNA, 25 bp, Homo sapien
cgccagctttagcaactgtaaccat

SEQ ID NO: 6021108 - DNA, 25 bp, Homo sapien
aagagctaaacagaacaggttgttc

SEQ ID NO: 6021109 - DNA, 25 bp, Homo sapien
gttccccatcctcttcctgtggagg

SEQ ID NO: 6021110 - DNA, 25 bp, Homo sapien
tccactgtgccttcagttccgggaa

SEQ ID NO: 6021111 - DNA, 25 bp, Homo sapien
ggatcttcattgttgttatgaagaa

SEQ ID NO: 6021112 - DNA, 25 bp, Homo sapien
acttgatacatacacattccagccc

SEQ ID NO: 6021113 - DNA, 25 bp, Homo sapien
ccatggtgacccctccgcttggcca

SEQ ID NO: 6021114 - DNA, 25 bp, Homo sapien
accctggccagtccctattactgtt

SEQ ID NO: 6021115 - DNA, 25 bp, Homo sapien
tctggaaggtctcgccctaaagagc

SEQ ID NO: 6021116 - DNA, 25 bp, Homo sapien
gttgttatgaagaagatttctggaa

SEQ ID NO: 6021117 - DNA, 25 bp, Homo sapien
tatgatcgatgattcaaaagacaac

SEQ ID NO: 6021118 - DNA, 25 bp, Homo sapien
agatacaggacaagccacagcccct

SEQ ID NO: 6021119 - DNA, 25 bp, Homo sapien
ggcatgggtccttttgcagttgcca

SEQ ID NO: 6021120 - DNA, 25 bp, Homo sapien
tcggagggatcttcattgttgttat

SEQ ID NO: 6021121 - DNA, 25 bp, Homo sapien
ccacagccatggtgacccctccgct

SEQ ID NO: 6021122 - DNA, 25 bp, Homo sapien
gttacatcacagaggcatgggtcct

SEQ ID NO: 6021123 - DNA, 25 bp, Homo sapien
tctccaaaccatctctaagcctccg

SEQ ID NO: 6021124 - DNA, 25 bp, Homo sapien
ttaagaggcatagagtctggaaatg

SEQ ID NO: 6021125 - DNA, 25 bp, Homo sapien
gagcttccaacttgccctgttcccc

SEQ ID NO: 6021126 - DNA, 25 bp, Homo sapien
caactgtaaccatgggttcaccctg

SEQ ID NO: 6021127 - DNA, 25 bp, Homo sapien
catctgcctttggaaaactaaattt

SEQ ID NO: 6021128 - DNA, 25 bp, Homo sapien
cacattccagcccagtcctaagcat

SEQ ID NO: 6021129 - DNA, 25 bp, Homo sapien
tcattgttgttatgaagaagatttc

SEQ ID NO: 6021130 - DNA, 25 bp, Homo sapien
agacaacatgcttagaaaatggagc

SEQ ID NO: 6021131 - DNA, 25 bp, Homo sapien
ggcatagagtctggaaatgttacat

SEQ ID NO: 6021132 - DNA, 25 bp, Homo sapien
tacatacacattccagcccagtcct

SEQ ID NO: 6021133 - DNA, 25 bp, Homo sapien
ttactgttaagaggcatagagtctg

SEQ ID NO: 6021134 - DNA, 25 bp, Homo sapien
cttcctgtggaggaagatgacccat

SEQ ID NO: 6021135 - DNA, 25 bp, Homo sapien
cgatgattcaaaagacaacatgctt

SEQ ID NO: 6021136 - DNA, 25 bp, Homo sapien
tttgcagttgccaacttgtaactgc

SEQ ID NO: 6021137 - DNA, 25 bp, Homo sapien
aaggaaagatacaggacaagccaca

SEQ ID NO: 6021138 - DNA, 25 bp, Homo sapien
tagaaaatggagcaaagccaagaca

SEQ ID NO: 6021139 - DNA, 25 bp, Homo sapien
gtgccttcagttccgggaagacact

SEQ ID NO: 6021140 - DNA, 25 bp, Homo sapien
gcaaagccaagacagtatcgccagc

SEQ ID NO: 6021141 - DNA, 25 bp, Homo sapien
cagtcctaagcatccactgtgcctt

SEQ ID NO: 6021142 - DNA, 25 bp, Homo sapien
cactgagtccccgtgtcacgaagac

SEQ ID NO: 6021143 - DNA, 25 bp, Homo sapien
gtgtcacgaagactggaaatatctt

SEQ ID NO: 6021144 - DNA, 25 bp, Homo sapien
aactggtcggtctgacttcctatac

SEQ ID NO: 6021145 - DNA, 25 bp, Homo sapien
cggaactgaaggcacagtggatgct

SEQ ID NO: 6021146 - DNA, 25 bp, Homo sapien
aaaaagcagtgtcttcccggaactg

SEQ ID NO: 6021147 - DNA, 25 bp, Homo sapien
ccaccccataaaagcagttaagatt

SEQ ID NO: 6021148 - DNA, 25 bp, Homo sapien
caggatgaggtctctattatccaga

SEQ ID NO: 6021149 - DNA, 25 bp, Homo sapien
cagttacaagttggcaactgcaaaa

SEQ ID NO: 6021150 - DNA, 25 bp, Homo sapien
taaagccaacatgagtcacttctac

SEQ ID NO: 6021151 - DNA, 25 bp, Homo sapien
acatccaacagtgttctcagcatcc

SEQ ID NO: 6021152 - DNA, 25 bp, Homo sapien
agcagttaagattatacaagattat

SEQ ID NO: 6021153 - DNA, 25 bp, Homo sapien
agcatccaggatgaggtctctatta

SEQ ID NO: 6021154 - DNA, 25 bp, Homo sapien
tatgcctcttaacagtaatagggac

SEQ ID NO: 6021155 - DNA, 25 bp, Homo sapien
gaggtctctattatccagaaagatg

SEQ ID NO: 6021156 - DNA, 25 bp, Homo sapien
tacagcggctgagccttttagcatc

SEQ ID NO: 6021157 - DNA, 25 bp, Homo sapien
atgcctctgtgatgtaacatttcca

SEQ ID NO: 6021158 - DNA, 25 bp, Homo sapien
tgtctgtcctgagaagcagaaggca

SEQ ID NO: 6021159 - DNA, 25 bp, Homo sapien
tcggaggcttagagatggtttggag

SEQ ID NO: 6021160 - DNA, 25 bp, Homo sapien
gctcctcaactcatcggaggcttag

SEQ ID NO: 6021161 - DNA, 25 bp, Homo sapien
ggacccatgcctctgtgatgtaaca

SEQ ID NO: 6021162 - DNA, 25 bp, Homo sapien
atatcttctattaaccgcaaacctt

SEQ ID NO: 6021163 - DNA, 25 bp, Homo sapien
agggcttgagtcctagggagatgag

SEQ ID NO: 6021164 - DNA, 25 bp, Homo sapien
gccttttagcatcttgtgacatcca

SEQ ID NO: 6021165 - DNA, 25 bp, Homo sapien
atttccagactctatgcctcttaac

SEQ ID NO: 6021166 - DNA, 25 bp, Homo sapien
aagttggcaactgcaaaaggaccca

SEQ ID NO: 6021167 - DNA, 25 bp, Homo sapien
gcaaacctttacatccaccccataa

SEQ ID NO: 6021168 - DNA, 25 bp, Homo sapien
tggttctacagcggctgagcctttt

SEQ ID NO: 6021169 - DNA, 25 bp, Homo sapien
tggatgcttaggactgggctggaat

SEQ ID NO: 6021170 - DNA, 25 bp, Homo sapien
ttacatccaccccataaaagcagtt

SEQ ID NO: 6021171 - DNA, 25 bp, Homo sapien
agatgaggacgtggctcctcaactc

SEQ ID NO: 6021172 - DNA, 25 bp, Homo sapien
tttccctgtctgtcctgagaagcag

SEQ ID NO: 6021173 - DNA, 25 bp, Homo sapien
gagtcacttctactgaaatgttctt

SEQ ID NO: 6021174 - DNA, 25 bp, Homo sapien
tctattatccagaaagatgcagctg

SEQ ID NO: 6021175 - DNA, 25 bp, Homo sapien
cgaagactggaaatatcttctatta

SEQ ID NO: 6021176 - DNA, 25 bp, Homo sapien
gcttagagatggtttggagacttgt

SEQ ID NO: 6021177 - DNA, 25 bp, Homo sapien
gctggaatgtgtatgtatcaagtgc

SEQ ID NO: 6021178 - DNA, 25 bp, Homo sapien
agactctatgcctcttaacagtaat

SEQ ID NO: 6021179 - DNA, 25 bp, Homo sapien
gttctcagcatccaggatgaggtct

SEQ ID NO: 6021180 - DNA, 25 bp, Homo sapien
gatctgagggcttgagtcctaggga

SEQ ID NO: 6021181 - DNA, 25 bp, Homo sapien
cactacagctctgtcccagcaacac

SEQ ID NO: 6021182 - DNA, 25 bp, Homo sapien
gacgtggctcctcaactcatcggag

SEQ ID NO: 6021183 - DNA, 25 bp, Homo sapien
cagaaggcaggtgttagaaactggt

SEQ ID NO: 6021184 - DNA, 25 bp, Homo sapien
aacagtgttctcagcatccaggatg

SEQ ID NO: 6021185 - DNA, 25 bp, Homo sapien
ctgaaatgttcttggttctacagcg

SEQ ID NO: 6021186 - DNA, 25 bp, Homo sapien
tgtcccagcaacactgagtccccgt

SEQ ID NO: 6021187 - DNA, 25 bp, Homo sapien
cataaaagcagttaagattatacaa

SEQ ID NO: 6021188 - DNA, 25 bp, Homo sapien
gttagaaactggtcggtctgacttc

SEQ ID NO: 6021189 - DNA, 25 bp, Homo sapien
tcctgagaagcagaaggcaggtgtt

SEQ ID NO: 6021190 - DNA, 25 bp, Homo sapien
tgagtcctagggagatgaggacgtg

SEQ ID NO: 6021191 - DNA, 25 bp, Homo sapien
gtccccgtgtcacgaagactggaaa

SEQ ID NO: 6021192 - DNA, 25 bp, Homo sapien
gacttcctatactaaagccaacatg

SEQ ID NO: 6021193 - DNA, 25 bp, Homo sapien
ttttgctttccctgtctgtcctgag

SEQ ID NO: 6021194 - DNA, 25 bp, Homo sapien
tgaaggcacagtggatgcttaggac

SEQ ID NO: 6021195 - DNA, 25 bp, Homo sapien
aaagatgcagctgatctgagggctt

SEQ ID NO: 6021196 - DNA, 25 bp, Homo sapien
ctatactaaagccaacatgagtcac

SEQ ID NO: 6021197 - DNA, 25 bp, Homo sapien
gcaactgcaaaaggacccatgcctc

SEQ ID NO: 6021198 - DNA, 25 bp, Homo sapien
gagatggtttggagacttgtaaaaa

SEQ ID NO: 6021199 - DNA, 25 bp, Homo sapien
tattaaccgcaaacctttacatcca

SEQ ID NO: 6021200 - DNA, 25 bp, Homo sapien
atgtgtatgtatcaagtgcagttac

SEQ ID NO: 6021201 - DNA, 25 bp, Homo sapien
atccagaaagatgcagctgatctga

SEQ ID NO: 6021202 - DNA, 25 bp, Homo sapien
atgtatcaagtgcagttacaagttg

SEQ ID NO: 6021203 - DNA, 25 bp, Homo sapien
caactcatcggaggcttagagatgg

SEQ ID NO: 6021204 - DNA, 25 bp, Homo sapien
caacatgagtcacttctactgaaat

SEQ ID NO: 6021205 - DNA, 25 bp, Homo sapien
gcaggtgttagaaactggtcggtct

SEQ ID NO: 6021206 - DNA, 25 bp, Homo sapien
cggtctgacttcctatactaaagcc

SEQ ID NO: 6021207 - DNA, 25 bp, Homo sapien
agaagcagaaggcaggtgttagaaa

SEQ ID NO: 6021208 - DNA, 25 bp, Homo sapien
cagtaatagggactggccagggtga

SEQ ID NO: 6021209 - DNA, 25 bp, Homo sapien
tgttcttggttctacagcggctgag

SEQ ID NO: 6021210 - DNA, 25 bp, Homo sapien
gattatttttgctttccctgtctgt

SEQ ID NO: 6021211 - DNA, 25 bp, Homo sapien
tgtaacatttccagactctatgcct

SEQ ID NO: 6021212 - DNA, 25 bp, Homo sapien
ggctgagccttttagcatcttgtga

SEQ ID NO: 6021213 - DNA, 25 bp, Homo sapien
taagattatacaagattatttttgc

SEQ ID NO: 6021214 - DNA, 25 bp, Homo sapien
tcttaacagtaatagggactggcca

SEQ ID NO: 6021215 - DNA, 25 bp, Homo sapien
gcagtgtcttcccggaactgaaggc

SEQ ID NO: 6021216 - DNA, 25 bp, Homo sapien
cagctctgtcccagcaacactgagt

SEQ ID NO: 6021217 - DNA, 25 bp, Homo sapien
caagtgcagttacaagttggcaact

SEQ ID NO: 6021218 - DNA, 25 bp, Homo sapien
tcttcccggaactgaaggcacagtg

SEQ ID NO: 6021219 - DNA, 25 bp, Homo sapien
ctggaaatatcttctattaaccgca

SEQ ID NO: 6021220 - DNA, 25 bp, Homo sapien
ctagggagatgaggacgtggctcct

SEQ ID NO: 6021221 - DNA, 25 bp, Homo sapien
tagggactggccagggtgaacccat

SEQ ID NO: 6021222 - DNA, 25 bp, Homo sapien
cttaggactgggctggaatgtgtat

SEQ ID NO: 6021223 - DNA, 25 bp, Homo sapien
gactgggctggaatgtgtatgtatc

SEQ ID NO: 6021224 - DNA, 25 bp, Homo sapien
gcaaaaggacccatgcctctgtgat

SEQ ID NO: 6021225 - DNA, 25 bp, Homo sapien
ctgtgatgtaacatttccagactct

SEQ ID NO: 6021226 - DNA, 25 bp, Homo sapien
gcagctgatctgagggcttgagtcc

SEQ ID NO: 6021227 - DNA, 25 bp, Homo sapien
tacaagattatttttgctttccctg

SEQ ID NO: 6021228 - DNA, 25 bp, Homo sapien
cttgtgacatccaacagtgttctca

SEQ ID NO: 6021229 - DNA, 25 bp, Homo sapien
tagcatcttgtgacatccaacagtg

SEQ ID NO: 6021230 - DNA, 25 bp, Homo sapien
cttctactgaaatgttcttggttct

SEQ ID NO: 6021231 - DNA, 25 bp, Homo sapien
cacagtggatgcttaggactgggct

SEQ ID NO: 6021232 - DNA, 25 bp, Homo sapien
agcaacactgagtccccgtgtcacg

SEQ ID NO: 6021233 - DNA, 25 bp, Homo sapien
acaggagacatggtattaaagtctg

SEQ ID NO: 6021234 - DNA, 25 bp, Homo sapien
gaaaagctaacatgaaaggatcgta

SEQ ID NO: 6021235 - DNA, 25 bp, Homo sapien
catcttccttggtaatacctgccat

SEQ ID NO: 6021236 - DNA, 25 bp, Homo sapien
gtggatggctcgtacaccatccgcc

SEQ ID NO: 6021237 - DNA, 25 bp, Homo sapien
aaggcaaagtggctgcttgatccct

SEQ ID NO: 6021238 - DNA, 25 bp, Homo sapien
aagtggctgcttgatcccttgctga

SEQ ID NO: 6021239 - DNA, 25 bp, Homo sapien
gaagttggctcacaattaagaagtt

SEQ ID NO: 6021240 - DNA, 25 bp, Homo sapien
caattaagaagtttaacacttgatg

SEQ ID NO: 6021241 - DNA, 25 bp, Homo sapien
aaatccaaagtgtagctaacatctg

SEQ ID NO: 6021242 - DNA, 25 bp, Homo sapien
tcgttgaagtgactggaatggtccc

SEQ ID NO: 6021243 - DNA, 25 bp, Homo sapien
tatgtaaaataaaattatgccgtcg

SEQ ID NO: 6021244 - DNA, 25 bp, Homo sapien
tttcgcccgaactccttgcactcta

SEQ ID NO: 6021245 - DNA, 25 bp, Homo sapien
gtggaggcacagaaatccaaagtgt

SEQ ID NO: 6021246 - DNA, 25 bp, Homo sapien
aggaaaagaacataacaaggactat

SEQ ID NO: 6021247 - DNA, 25 bp, Homo sapien
aagactgaagttggctcacaattaa

SEQ ID NO: 6021248 - DNA, 25 bp, Homo sapien
atgcattcagacttcccagaaccct

SEQ ID NO: 6021249 - DNA, 25 bp, Homo sapien
gatgtaaaaggaaaagaacataaca

SEQ ID NO: 6021250 - DNA, 25 bp, Homo sapien
ctgcttgacaagtccccatcgttga

SEQ ID NO: 6021251 - DNA, 25 bp, Homo sapien
tgtaaataacataaactgtatatat

SEQ ID NO: 6021252 - DNA, 25 bp, Homo sapien
taatactgtttattacagccccgcc

SEQ ID NO: 6021253 - DNA, 25 bp, Homo sapien
gcaggatgccggcatatacgagtgt

SEQ ID NO: 6021254 - DNA, 25 bp, Homo sapien
cataacaaggactatttttcgcccg

SEQ ID NO: 6021255 - DNA, 25 bp, Homo sapien
atcgtacagtctggtggaggcacag

SEQ ID NO: 6021256 - DNA, 25 bp, Homo sapien
ccatgatgtgtatgtaaataacata

SEQ ID NO: 6021257 - DNA, 25 bp, Homo sapien
atcccttgctgaatgcaaggagcta

SEQ ID NO: 6021258 - DNA, 25 bp, Homo sapien
tcgggatgatcgtttattttgcaag

SEQ ID NO: 6021259 - DNA, 25 bp, Homo sapien
tccttgcactctactgcgcatcttc

SEQ ID NO: 6021260 - DNA, 25 bp, Homo sapien
tataaaacccagatccttaatactg

SEQ ID NO: 6021261 - DNA, 25 bp, Homo sapien
taatacctgccatcgggatgatcgt

SEQ ID NO: 6021262 - DNA, 25 bp, Homo sapien
aaagtgtagctaacatctgaaatgt

SEQ ID NO: 6021263 - DNA, 25 bp, Homo sapien
acatctgaaatgtttgagaagagac

SEQ ID NO: 6021264 - DNA, 25 bp, Homo sapien
tgatcgtttattttgcaagaaaagc

SEQ ID NO: 6021265 - DNA, 25 bp, Homo sapien
tatatatgtaaaataaaattatgcc

SEQ ID NO: 6021266 - DNA, 25 bp, Homo sapien
gcacagaaatccaaagtgtagctaa

SEQ ID NO: 6021267 - DNA, 25 bp, Homo sapien
actgcgcatcttccttggtaatacc

SEQ ID NO: 6021268 - DNA, 25 bp, Homo sapien
tttattttgcaagaaaagctaacat

SEQ ID NO: 6021269 - DNA, 25 bp, Homo sapien
catccgccaggcacagctgcaggat

SEQ ID NO: 6021270 - DNA, 25 bp, Homo sapien
acagctgcaggatgccggcatatac

SEQ ID NO: 6021271 - DNA, 25 bp, Homo sapien
acaaaccaagccatgcattcagact

SEQ ID NO: 6021272 - DNA, 25 bp, Homo sapien
atggtcccatgatgtgtatgtaaat

SEQ ID NO: 6021273 - DNA, 25 bp, Homo sapien
aagtgactggaatggtcccatgatg

SEQ ID NO: 6021274 - DNA, 25 bp, Homo sapien
gaatctaagactgaagttggctcac

SEQ ID NO: 6021275 - DNA, 25 bp, Homo sapien
ttctcagtaaagaaggcaaagtggc

SEQ ID NO: 6021276 - DNA, 25 bp, Homo sapien
ggctcacaattaagaagtttaacac

SEQ ID NO: 6021277 - DNA, 25 bp, Homo sapien
ggctcgtacaccatccgccaggcac

SEQ ID NO: 6021278 - DNA, 25 bp, Homo sapien
tccccatcgttgaagtgactggaat

SEQ ID NO: 6021279 - DNA, 25 bp, Homo sapien
cattatttataaaacccagatcctt

SEQ ID NO: 6021280 - DNA, 25 bp, Homo sapien
gacaagtccccatcgttgaagtgac

SEQ ID NO: 6021281 - DNA, 25 bp, Homo sapien
agaagtttaacacttgatgtaaaag

SEQ ID NO: 6021282 - DNA, 25 bp, Homo sapien
cgagtgtgaatctaagactgaagtt

SEQ ID NO: 6021283 - DNA, 25 bp, Homo sapien
tttgagaagagacattatttataaa

SEQ ID NO: 6021284 - DNA, 25 bp, Homo sapien
cagtctggtggaggcacagaaatcc

SEQ ID NO: 6021285 - DNA, 25 bp, Homo sapien
tgtgtatgtaaataacataaactgt

SEQ ID NO: 6021286 - DNA, 25 bp, Homo sapien
tacaccatccgccaggcacagctgc

SEQ ID NO: 6021287 - DNA, 25 bp, Homo sapien
taacataaactgtatatatgtaaaa

SEQ ID NO: 6021288 - DNA, 25 bp, Homo sapien
tatttttcgcccgaactccttgcac

SEQ ID NO: 6021289 - DNA, 25 bp, Homo sapien
ctggaatggtcccatgatgtgtatg

SEQ ID NO: 6021290 - DNA, 25 bp, Homo sapien
aacccagatccttaatactgtttat

SEQ ID NO: 6021291 - DNA, 25 bp, Homo sapien
gtaaagaaggcaaagtggctgcttg

SEQ ID NO: 6021292 - DNA, 25 bp, Homo sapien
ccctccacaaaccaagccatgcatt

SEQ ID NO: 6021293 - DNA, 25 bp, Homo sapien
agaacataacaaggactatttttcg

SEQ ID NO: 6021294 - DNA, 25 bp, Homo sapien
gacatggtattaaagtctgtggatg

SEQ ID NO: 6021295 - DNA, 25 bp, Homo sapien
ccgccccctccacaaaccaagccat

SEQ ID NO: 6021296 - DNA, 25 bp, Homo sapien
gatccttaatactgtttattacagc

SEQ ID NO: 6021297 - DNA, 25 bp, Homo sapien
cacttgatgtaaaaggaaaagaaca

SEQ ID NO: 6021298 - DNA, 25 bp, Homo sapien
tgccggcatatacgagtgtgaatct

SEQ ID NO: 6021299 - DNA, 25 bp, Homo sapien
aagtctgtggatggctcgtacacca

SEQ ID NO: 6021300 - DNA, 25 bp, Homo sapien
tcagacttcccagaacccttctcag

SEQ ID NO: 6021301 - DNA, 25 bp, Homo sapien
ctaacatgaaaggatcgtacagtct

SEQ ID NO: 6021302 - DNA, 25 bp, Homo sapien
caagccatgcattcagacttcccag

SEQ ID NO: 6021303 - DNA, 25 bp, Homo sapien
gaaatgtttgagaagagacattatt

SEQ ID NO: 6021304 - DNA, 25 bp, Homo sapien
accagaaaagttctgcttgacaagt

SEQ ID NO: 6021305 - DNA, 25 bp, Homo sapien
ccttggtaatacctgccatcgggat

SEQ ID NO: 6021306 - DNA, 25 bp, Homo sapien
ttgcaagaaaagctaacatgaaagg

SEQ ID NO: 6021307 - DNA, 25 bp, Homo sapien
aagagacattatttataaaacccag

SEQ ID NO: 6021308 - DNA, 25 bp, Homo sapien
ggagctaaccagaaaagttctgctt

SEQ ID NO: 6021309 - DNA, 25 bp, Homo sapien
taaactgtatatatgtaaaataaaa

SEQ ID NO: 6021310 - DNA, 25 bp, Homo sapien
cactctactgcgcatcttccttggt

SEQ ID NO: 6021311 - DNA, 25 bp, Homo sapien
tgaaaggatcgtacagtctggtgga

SEQ ID NO: 6021312 - DNA, 25 bp, Homo sapien
ctgccatcgggatgatcgtttattt

SEQ ID NO: 6021313 - DNA, 25 bp, Homo sapien
gaacccttctcagtaaagaaggcaa

SEQ ID NO: 6021314 - DNA, 25 bp, Homo sapien
ctgcttgatcccttgctgaatgcaa

SEQ ID NO: 6021315 - DNA, 25 bp, Homo sapien
atgcaaggagctaaccagaaaagtt

SEQ ID NO: 6021316 - DNA, 25 bp, Homo sapien
ccaggcacagctgcaggatgccggc

SEQ ID NO: 6021317 - DNA, 25 bp, Homo sapien
tagctaacatctgaaatgtttgaga

SEQ ID NO: 6021318 - DNA, 25 bp, Homo sapien
ccgaactccttgcactctactgcgc

SEQ ID NO: 6021319 - DNA, 25 bp, Homo sapien
gtattaaagtctgtggatggctcgt

SEQ ID NO: 6021320 - DNA, 25 bp, Homo sapien
catatacgagtgtgaatctaagact

SEQ ID NO: 6021321 - DNA, 25 bp, Homo sapien
aaaataaaattatgccgtcgcgagg

SEQ ID NO: 6021322 - DNA, 25 bp, Homo sapien
aaagttctgcttgacaagtccccat

SEQ ID NO: 6021323 - DNA, 25 bp, Homo sapien
gcaaagacaggagacatggtattaa

SEQ ID NO: 6021324 - DNA, 25 bp, Homo sapien
ttcccagaacccttctcagtaaaga

SEQ ID NO: 6021325 - DNA, 25 bp, Homo sapien
tgctgaatgcaaggagctaaccaga

SEQ ID NO: 6021326 - DNA, 25 bp, Homo sapien
acagtaccatgtagagaaaattact

SEQ ID NO: 6021327 - DNA, 25 bp, Homo sapien
aattacttagccattctaccatgaa

SEQ ID NO: 6021328 - DNA, 25 bp, Homo sapien
atcaagcagccactttgccttcttt

SEQ ID NO: 6021329 - DNA, 25 bp, Homo sapien
aagcattaagttacaacagtcagtc

SEQ ID NO: 6021330 - DNA, 25 bp, Homo sapien
tactctaaacaacctcgcgacggca

SEQ ID NO: 6021331 - DNA, 25 bp, Homo sapien
ttagctgcctagtcaacattaacat

SEQ ID NO: 6021332 - DNA, 25 bp, Homo sapien
ctctttaccatttgcctataaaaat

SEQ ID NO: 6021333 - DNA, 25 bp, Homo sapien
ttgcctataaaaatatagaaccctg

SEQ ID NO: 6021334 - DNA, 25 bp, Homo sapien
gtcacttcaacgatggggacttgtc

SEQ ID NO: 6021335 - DNA, 25 bp, Homo sapien
tccccgtaccgtacagtaccatgta

SEQ ID NO: 6021336 - DNA, 25 bp, Homo sapien
ccatgaattagaaagtagtacctga

SEQ ID NO: 6021337 - DNA, 25 bp, Homo sapien
aagggttctgggaagtctgaatgca

SEQ ID NO: 6021338 - DNA, 25 bp, Homo sapien
attctaccatgaattagaaagtagt

SEQ ID NO: 6021339 - DNA, 25 bp, Homo sapien
cttctttactgagaagggttctggg

SEQ ID NO: 6021340 - DNA, 25 bp, Homo sapien
acaacagtcagtccaagcaacactc

SEQ ID NO: 6021341 - DNA, 25 bp, Homo sapien
aattcataggaataaaattaggttg

SEQ ID NO: 6021342 - DNA, 25 bp, Homo sapien
cctaagaagcattaagttacaacag

SEQ ID NO: 6021343 - DNA, 25 bp, Homo sapien
taaaaaacatgaaatcattgttaat

SEQ ID NO: 6021344 - DNA, 25 bp, Homo sapien
gaacttttctggttagctccttgca

SEQ ID NO: 6021345 - DNA, 25 bp, Homo sapien
ataaaaatatagaaccctgacttct

SEQ ID NO: 6021346 - DNA, 25 bp, Homo sapien
ctctgattacgttctgacctgcata

SEQ ID NO: 6021347 - DNA, 25 bp, Homo sapien
ataaaattcataggaataaaattag

SEQ ID NO: 6021348 - DNA, 25 bp, Homo sapien
tatatacagtttatgttatttacat

SEQ ID NO: 6021349 - DNA, 25 bp, Homo sapien
gtcagtccaagcaacactctctgat

SEQ ID NO: 6021350 - DNA, 25 bp, Homo sapien
cactggttagctgcctagtcaacat

SEQ ID NO: 6021351 - DNA, 25 bp, Homo sapien
gaaagtcaacccagtgacctcttta

SEQ ID NO: 6021352 - DNA, 25 bp, Homo sapien
cagccactttgccttctttactgag

SEQ ID NO: 6021353 - DNA, 25 bp, Homo sapien
ctttgccttctttactgagaagggt

SEQ ID NO: 6021354 - DNA, 25 bp, Homo sapien
ctttcctaagaagcattaagttaca

SEQ ID NO: 6021355 - DNA, 25 bp, Homo sapien
atggcttggtttgtggagggggcgg

SEQ ID NO: 6021356 - DNA, 25 bp, Homo sapien
gtacctgaaagtcaacccagtgacc

SEQ ID NO: 6021357 - DNA, 25 bp, Homo sapien
ttacgttctgacctgcatatggagt

SEQ ID NO: 6021358 - DNA, 25 bp, Homo sapien
tgctgctactctaaacaacctcgcg

SEQ ID NO: 6021359 - DNA, 25 bp, Homo sapien
tcttttaaaaaacatgaaatcattg

SEQ ID NO: 6021360 - DNA, 25 bp, Homo sapien
ataaaaaggtgacactggttagctg

SEQ ID NO: 6021361 - DNA, 25 bp, Homo sapien
taagttacaacagtcagtccaagca

SEQ ID NO: 6021362 - DNA, 25 bp, Homo sapien
atgttatttacatacacatcatggg

SEQ ID NO: 6021363 - DNA, 25 bp, Homo sapien
atggagtgctgctactctaaacaac

SEQ ID NO: 6021364 - DNA, 25 bp, Homo sapien
taccgtacagtaccatgtagagaaa

SEQ ID NO: 6021365 - DNA, 25 bp, Homo sapien
gcctagtcaacattaacattaatat

SEQ ID NO: 6021366 - DNA, 25 bp, Homo sapien
tattaaactttcctaagaagcatta

SEQ ID NO: 6021367 - DNA, 25 bp, Homo sapien
gaatgcatggcttggtttgtggagg

SEQ ID NO: 6021368 - DNA, 25 bp, Homo sapien
ttctggttagctccttgcattcagc

SEQ ID NO: 6021369 - DNA, 25 bp, Homo sapien
tacacatcatgggaccattccagtc

SEQ ID NO: 6021370 - DNA, 25 bp, Homo sapien
tcaacgatggggacttgtcaagcag

SEQ ID NO: 6021371 - DNA, 25 bp, Homo sapien
aggtgacactggttagctgcctagt

SEQ ID NO: 6021372 - DNA, 25 bp, Homo sapien
ttccagtcacttcaacgatggggac

SEQ ID NO: 6021373 - DNA, 25 bp, Homo sapien
cctcgcgacggcataattttatttt

SEQ ID NO: 6021374 - DNA, 25 bp, Homo sapien
tctgggaagtctgaatgcatggctt

SEQ ID NO: 6021375 - DNA, 25 bp, Homo sapien
cataggaataaaattaggttgaaga

SEQ ID NO: 6021376 - DNA, 25 bp, Homo sapien
acttgtcaagcagaacttttctggt

SEQ ID NO: 6021377 - DNA, 25 bp, Homo sapien
aaacaacctcgcgacggcataattt

SEQ ID NO: 6021378 - DNA, 25 bp, Homo sapien
aacactctctgattacgttctgacc

SEQ ID NO: 6021379 - DNA, 25 bp, Homo sapien
gaaatcattgttaataaaattcata

SEQ ID NO: 6021380 - DNA, 25 bp, Homo sapien
ccttgcattcagcaagggatcaagc

SEQ ID NO: 6021381 - DNA, 25 bp, Homo sapien
cagtttatgttatttacatacacat

SEQ ID NO: 6021382 - DNA, 25 bp, Homo sapien
tttacatacacatcatgggaccatt

SEQ ID NO: 6021383 - DNA, 25 bp, Homo sapien
attcagcaagggatcaagcagccac

SEQ ID NO: 6021384 - DNA, 25 bp, Homo sapien
taccatttgcctataaaaatataga

SEQ ID NO: 6021385 - DNA, 25 bp, Homo sapien
ttagctccttgcattcagcaaggga

SEQ ID NO: 6021386 - DNA, 25 bp, Homo sapien
tactgagaagggttctgggaagtct

SEQ ID NO: 6021387 - DNA, 25 bp, Homo sapien
caagcagaacttttctggttagctc

SEQ ID NO: 6021388 - DNA, 25 bp, Homo sapien
attagaaagtagtacctgaaagtca

SEQ ID NO: 6021389 - DNA, 25 bp, Homo sapien
aagtagtacctgaaagtcaacccag

SEQ ID NO: 6021390 - DNA, 25 bp, Homo sapien
ttgtggagggggcggggctgtaata

SEQ ID NO: 6021391 - DNA, 25 bp, Homo sapien
atcatgggaccattccagtcacttc

SEQ ID NO: 6021392 - DNA, 25 bp, Homo sapien
ataaaacataaaaaggtgacactgg

SEQ ID NO: 6021393 - DNA, 25 bp, Homo sapien
cattgttaataaaattcataggaat

SEQ ID NO: 6021394 - DNA, 25 bp, Homo sapien
caacattaacattaatattaaactt

SEQ ID NO: 6021395 - DNA, 25 bp, Homo sapien
atggggacttgtcaagcagaacttt

SEQ ID NO: 6021396 - DNA, 25 bp, Homo sapien
ggaccattccagtcacttcaacgat

SEQ ID NO: 6021397 - DNA, 25 bp, Homo sapien
gacggcataattttattttacatat

SEQ ID NO: 6021398 - DNA, 25 bp, Homo sapien
caacccagtgacctctttaccattt

SEQ ID NO: 6021399 - DNA, 25 bp, Homo sapien
taattttattttacatatatacagt

SEQ ID NO: 6021400 - DNA, 25 bp, Homo sapien
ctgcatatggagtgctgctactcta

SEQ ID NO: 6021401 - DNA, 25 bp, Homo sapien
tctgacctgcatatggagtgctgct

SEQ ID NO: 6021402 - DNA, 25 bp, Homo sapien
aagtctgaatgcatggcttggtttg

SEQ ID NO: 6021403 - DNA, 25 bp, Homo sapien
caagggatcaagcagccactttgcc

SEQ ID NO: 6021404 - DNA, 25 bp, Homo sapien
ccatgtagagaaaattacttagcca

SEQ ID NO: 6021405 - DNA, 25 bp, Homo sapien
agagaaaattacttagccattctac

SEQ ID NO: 6021406 - DNA, 25 bp, Homo sapien
ttagccattctaccatgaattagaa

SEQ ID NO: 6021407 - DNA, 25 bp, Homo sapien
aacatgaaatcattgttaataaaat

SEQ ID NO: 6021408 - DNA, 25 bp, Homo sapien
ccaagcaacactctctgattacgtt

SEQ ID NO: 6021409 - DNA, 25 bp, Homo sapien
agtgacctctttaccatttgcctat

SEQ ID NO: 6021410 - DNA, 25 bp, Homo sapien
tattttacatatatacagtttatgt

SEQ ID NO: 6021411 - DNA, 25 bp, Homo sapien
tttttccagcatgaggtgtcaccaa

SEQ ID NO: 6021412 - DNA, 25 bp, Homo sapien
aaaattaatgtatgtaaacatgcct

SEQ ID NO: 6021413 - DNA, 25 bp, Homo sapien
aatgtatgtaaacatgcctttggga

SEQ ID NO: 6021414 - DNA, 25 bp, Homo sapien
cattaaactgcctatttgtttgtct

SEQ ID NO: 6021415 - DNA, 25 bp, Homo sapien
tctaggattaagcattgaaaaacaa

SEQ ID NO: 6021416 - DNA, 25 bp, Homo sapien
taattacacacttatcaaactgaaa

SEQ ID NO: 6021417 - DNA, 25 bp, Homo sapien
ataataaaatcacattaaactgcct

SEQ ID NO: 6021418 - DNA, 25 bp, Homo sapien
caatgaaaataattttatggttggg

SEQ ID NO: 6021419 - DNA, 25 bp, Homo sapien
aggatttagactggtggtctgaatt

SEQ ID NO: 6021420 - DNA, 25 bp, Homo sapien
catttcacaatttttttccagcatg

SEQ ID NO: 6021421 - DNA, 25 bp, Homo sapien
atctcttctatgcattttcagtcaa

SEQ ID NO: 6021422 - DNA, 25 bp, Homo sapien
tgtaaacatgcctttgggaaaaaga

SEQ ID NO: 6021423 - DNA, 25 bp, Homo sapien
cagcattagaaaggttgagatccac

SEQ ID NO: 6021424 - DNA, 25 bp, Homo sapien
cacacttatcaaactgaaagtctta

SEQ ID NO: 6021425 - DNA, 25 bp, Homo sapien
actgaaagtcttaaaaacaatattg

SEQ ID NO: 6021426 - DNA, 25 bp, Homo sapien
gggtcacagcattagaaaggttgag

SEQ ID NO: 6021427 - DNA, 25 bp, Homo sapien
ggtggtctgaattagtatcccactt

SEQ ID NO: 6021428 - DNA, 25 bp, Homo sapien
gaggtgtcaccaaggatttagactg

SEQ ID NO: 6021429 - DNA, 25 bp, Homo sapien
aaattacagttttaaagtagcaatg

SEQ ID NO: 6021430 - DNA, 25 bp, Homo sapien
caatattgtgtgttcttatctatat

SEQ ID NO: 6021431 - DNA, 25 bp, Homo sapien
aaattctgaatctctaggattaagc

SEQ ID NO: 6021432 - DNA, 25 bp, Homo sapien
aagttgtcatagaaaccattttgtc

SEQ ID NO: 6021433 - DNA, 25 bp, Homo sapien
cagtctcttctgcatgttaccaaat

SEQ ID NO: 6021434 - DNA, 25 bp, Homo sapien
tatttgtttgtctgtattgccaaat

SEQ ID NO: 6021435 - DNA, 25 bp, Homo sapien
ttcttttagaaaattaatgtatgta

SEQ ID NO: 6021436 - DNA, 25 bp, Homo sapien
ctgtctaaaacatttcacaattttt

SEQ ID NO: 6021437 - DNA, 25 bp, Homo sapien
tcatagaaaccattttgtcagtctc

SEQ ID NO: 6021438 - DNA, 25 bp, Homo sapien
attcaagggtcacagcattagaaag

SEQ ID NO: 6021439 - DNA, 25 bp, Homo sapien
ggcatttaattacacacttatcaaa

SEQ ID NO: 6021440 - DNA, 25 bp, Homo sapien
ctgaattagtatcccacttttctat

SEQ ID NO: 6021441 - DNA, 25 bp, Homo sapien
ctgagcaactgtattcaagggtcac

SEQ ID NO: 6021442 - DNA, 25 bp, Homo sapien
aaaaatagctaaaacatctaagaat

SEQ ID NO: 6021443 - DNA, 25 bp, Homo sapien
cagtcaaaattctgaatctctagga

SEQ ID NO: 6021444 - DNA, 25 bp, Homo sapien
aagtagcaatgaaaataattttatg

SEQ ID NO: 6021445 - DNA, 25 bp, Homo sapien
gggtcctgagcaactgtattcaagg

SEQ ID NO: 6021446 - DNA, 25 bp, Homo sapien
atttataacagtagggaaattacag

SEQ ID NO: 6021447 - DNA, 25 bp, Homo sapien
aactttggacactgagagtatggtg

SEQ ID NO: 6021448 - DNA, 25 bp, Homo sapien
ctatataaaaatagctaaaacatct

SEQ ID NO: 6021449 - DNA, 25 bp, Homo sapien
acaatttttttccagcatgaggtgt

SEQ ID NO: 6021450 - DNA, 25 bp, Homo sapien
cacttttctatgtaaacttttcatt

SEQ ID NO: 6021451 - DNA, 25 bp, Homo sapien
aaaaagatctcttctatgcattttc

SEQ ID NO: 6021452 - DNA, 25 bp, Homo sapien
cattaaaagttgtcatagaaaccat

SEQ ID NO: 6021453 - DNA, 25 bp, Homo sapien
agtatcccacttttctatgtaaact

SEQ ID NO: 6021454 - DNA, 25 bp, Homo sapien
gaagacaactttggacactgagagt

SEQ ID NO: 6021455 - DNA, 25 bp, Homo sapien
cttctgcatgttaccaaatattcag

SEQ ID NO: 6021456 - DNA, 25 bp, Homo sapien
tagactggtggtctgaattagtatc

SEQ ID NO: 6021457 - DNA, 25 bp, Homo sapien
ttttgtcagtctcttctgcatgtta

SEQ ID NO: 6021458 - DNA, 25 bp, Homo sapien
aagtcttaaaaacaatattgtgtgt

SEQ ID NO: 6021459 - DNA, 25 bp, Homo sapien
tcaccaaggatttagactggtggtc

SEQ ID NO: 6021460 - DNA, 25 bp, Homo sapien
tctatgcattttcagtcaaaattct

SEQ ID NO: 6021461 - DNA, 25 bp, Homo sapien
acttttcattaaaagttgtcataga

SEQ ID NO: 6021462 - DNA, 25 bp, Homo sapien
tgtattgccaaatgccaaatggaaa

SEQ ID NO: 6021463 - DNA, 25 bp, Homo sapien
aaaaagaagacaactttggacactg

SEQ ID NO: 6021464 - DNA, 25 bp, Homo sapien
catgcctttgggaaaaagatctctt

SEQ ID NO: 6021465 - DNA, 25 bp, Homo sapien
aactgtattcaagggtcacagcatt

SEQ ID NO: 6021466 - DNA, 25 bp, Homo sapien
actgcctatttgtttgtctgtattg

SEQ ID NO: 6021467 - DNA, 25 bp, Homo sapien
gtgtgttcttatctatataaaaata

SEQ ID NO: 6021468 - DNA, 25 bp, Homo sapien
tttgtctgtattgccaaatgccaaa

SEQ ID NO: 6021469 - DNA, 25 bp, Homo sapien
aaacaactgtctaaaacatttcaca

SEQ ID NO: 6021470 - DNA, 25 bp, Homo sapien
cagcatgaggtgtcaccaaggattt

SEQ ID NO: 6021471 - DNA, 25 bp, Homo sapien
tagaaaggttgagatccactgaaat

SEQ ID NO: 6021472 - DNA, 25 bp, Homo sapien
aaatcacattaaactgcctatttgt

SEQ ID NO: 6021473 - DNA, 25 bp, Homo sapien
ggacactgagagtatggtggcattt

SEQ ID NO: 6021474 - DNA, 25 bp, Homo sapien
cagttttaaagtagcaatgaaaata

SEQ ID NO: 6021475 - DNA, 25 bp, Homo sapien
tgaatctctaggattaagcattgaa

SEQ ID NO: 6021476 - DNA, 25 bp, Homo sapien
attaagcattgaaaaacaactgtct

SEQ ID NO: 6021477 - DNA, 25 bp, Homo sapien
tgagagtatggtggcatttaattac

SEQ ID NO: 6021478 - DNA, 25 bp, Homo sapien
cattttcagtcaaaattctgaatct

SEQ ID NO: 6021479 - DNA, 25 bp, Homo sapien
gatccactgaaatgttgactcttct

SEQ ID NO: 6021480 - DNA, 25 bp, Homo sapien
tggttggggtcctgagcaactgtat

SEQ ID NO: 6021481 - DNA, 25 bp, Homo sapien
tatcaaactgaaagtcttaaaaaca

SEQ ID NO: 6021482 - DNA, 25 bp, Homo sapien
aacatctaagaataataaaatcaca

SEQ ID NO: 6021483 - DNA, 25 bp, Homo sapien
tgaaatgttgactcttctttttttc

SEQ ID NO: 6021484 - DNA, 25 bp, Homo sapien
cattgaaaaacaactgtctaaaaca

SEQ ID NO: 6021485 - DNA, 25 bp, Homo sapien
agctaaaacatctaagaataataaa

SEQ ID NO: 6021486 - DNA, 25 bp, Homo sapien
tttgggaaaaagatctcttctatgc

SEQ ID NO: 6021487 - DNA, 25 bp, Homo sapien
aaaccattttgtcagtctcttctgc

SEQ ID NO: 6021488 - DNA, 25 bp, Homo sapien
ggttgagatccactgaaatgttgac

SEQ ID NO: 6021489 - DNA, 25 bp, Homo sapien
taagaataataaaatcacattaaac

SEQ ID NO: 6021490 - DNA, 25 bp, Homo sapien
tttagaaaattaatgtatgtaaaca

SEQ ID NO: 6021491 - DNA, 25 bp, Homo sapien
catgttaccaaatattcagttaaaa

SEQ ID NO: 6021492 - DNA, 25 bp, Homo sapien
tcttatctatataaaaatagctaaa

SEQ ID NO: 6021493 - DNA, 25 bp, Homo sapien
tatggtggcatttaattacacactt

SEQ ID NO: 6021494 - DNA, 25 bp, Homo sapien
taaaaacaatattgtgtgttcttat

SEQ ID NO: 6021495 - DNA, 25 bp, Homo sapien
aattttatggttggggtcctgagca

SEQ ID NO: 6021496 - DNA, 25 bp, Homo sapien
atcacaatttataacagtagggaaa

SEQ ID NO: 6021497 - DNA, 25 bp, Homo sapien
gcagtttaatgtgattttattattc

SEQ ID NO: 6021498 - DNA, 25 bp, Homo sapien
acaattgaaaagttgatacactggc

SEQ ID NO: 6021499 - DNA, 25 bp, Homo sapien
agtttacatagaaaagtgggatact

SEQ ID NO: 6021500 - DNA, 25 bp, Homo sapien
gactgacaaaatggtttctatgaca

SEQ ID NO: 6021501 - DNA, 25 bp, Homo sapien
caatcagacatacacaagagtctta

SEQ ID NO: 6021502 - DNA, 25 bp, Homo sapien
taaatgccaccatactctcagtgtc

SEQ ID NO: 6021503 - DNA, 25 bp, Homo sapien
taagtgtgtaattaaatgccaccat

SEQ ID NO: 6021504 - DNA, 25 bp, Homo sapien
catatgtaagcaagtaacagtttaa

SEQ ID NO: 6021505 - DNA, 25 bp, Homo sapien
ggtctttccatttggcatttggcaa

SEQ ID NO: 6021506 - DNA, 25 bp, Homo sapien
tacatttcctttgatacttaaggac

SEQ ID NO: 6021507 - DNA, 25 bp, Homo sapien
ttgatactcaaactagcttgtgcat

SEQ ID NO: 6021508 - DNA, 25 bp, Homo sapien
ttaactgaatatttggtaacatgca

SEQ ID NO: 6021509 - DNA, 25 bp, Homo sapien
cagtttaaaggacagcaaggagcta

SEQ ID NO: 6021510 - DNA, 25 bp, Homo sapien
atagtaacaattgaaaagttgatac

SEQ ID NO: 6021511 - DNA, 25 bp, Homo sapien
aaagaagaacttcaatcagacatac

SEQ ID NO: 6021512 - DNA, 25 bp, Homo sapien
cctagaaaagaagaacttcaatcag

SEQ ID NO: 6021513 - DNA, 25 bp, Homo sapien
agaagagactgacaaaatggtttct

SEQ ID NO: 6021514 - DNA, 25 bp, Homo sapien
cgtgctctaagtggtctttccattt

SEQ ID NO: 6021515 - DNA, 25 bp, Homo sapien
ctatgacaacttttaatgaaaagtt

SEQ ID NO: 6021516 - DNA, 25 bp, Homo sapien
gataagaacacacaatattgttttt

SEQ ID NO: 6021517 - DNA, 25 bp, Homo sapien
acctaagatctattgatactcaaac

SEQ ID NO: 6021518 - DNA, 25 bp, Homo sapien
ttaatccctcagtctagtcgtgctc

SEQ ID NO: 6021519 - DNA, 25 bp, Homo sapien
caaataggcagtttaatgtgatttt

SEQ ID NO: 6021520 - DNA, 25 bp, Homo sapien
tccatttggcatttggcaatacaga

SEQ ID NO: 6021521 - DNA, 25 bp, Homo sapien
taaggacattataaatcatacttta

SEQ ID NO: 6021522 - DNA, 25 bp, Homo sapien
tgtttttaagactttcagtttgata

SEQ ID NO: 6021523 - DNA, 25 bp, Homo sapien
aaaggacagcaaggagctatgtaga

SEQ ID NO: 6021524 - DNA, 25 bp, Homo sapien
gaacttcaatcagacatacacaaga

SEQ ID NO: 6021525 - DNA, 25 bp, Homo sapien
ttgatacactggcatattggttaag

SEQ ID NO: 6021526 - DNA, 25 bp, Homo sapien
agaagttaatccctcagtctagtcg

SEQ ID NO: 6021527 - DNA, 25 bp, Homo sapien
cattataaatcatactttaacaaaa

SEQ ID NO: 6021528 - DNA, 25 bp, Homo sapien
taatgtgattttattattcttagat

SEQ ID NO: 6021529 - DNA, 25 bp, Homo sapien
gtgttcaggtgctgtaagaaacacc

SEQ ID NO: 6021530 - DNA, 25 bp, Homo sapien
tatttttatatagataagaacacac

SEQ ID NO: 6021531 - DNA, 25 bp, Homo sapien
tatatagataagaacacacaatatt

SEQ ID NO: 6021532 - DNA, 25 bp, Homo sapien
catattggttaagtgttcaggtgct

SEQ ID NO: 6021533 - DNA, 25 bp, Homo sapien
actttaacaaaaatctatgcatggc

SEQ ID NO: 6021534 - DNA, 25 bp, Homo sapien
tttcagtttgataagtgtgtaatta

SEQ ID NO: 6021535 - DNA, 25 bp, Homo sapien
cacaagagtcttagaatttcatcta

SEQ ID NO: 6021536 - DNA, 25 bp, Homo sapien
tctagtcgtgctctaagtggtcttt

SEQ ID NO: 6021537 - DNA, 25 bp, Homo sapien
gtaattaaatgccaccatactctca

SEQ ID NO: 6021538 - DNA, 25 bp, Homo sapien
tttgataagtgtgtaattaaatgcc

SEQ ID NO: 6021539 - DNA, 25 bp, Homo sapien
gggatactaattcagaccaccagtc

SEQ ID NO: 6021540 - DNA, 25 bp, Homo sapien
taagactttcagtttgataagtgtg

SEQ ID NO: 6021541 - DNA, 25 bp, Homo sapien
ttggtaacatgcagaagagactgac

SEQ ID NO: 6021542 - DNA, 25 bp, Homo sapien
gatacttaaggacattataaatcat

SEQ ID NO: 6021543 - DNA, 25 bp, Homo sapien
gtgattttattattcttagatgttt

SEQ ID NO: 6021544 - DNA, 25 bp, Homo sapien
cagcaaggagctatgtagacctaag

SEQ ID NO: 6021545 - DNA, 25 bp, Homo sapien
tttggcaatacagacaaacaaatag

SEQ ID NO: 6021546 - DNA, 25 bp, Homo sapien
acatagaaaagtgggatactaattc

SEQ ID NO: 6021547 - DNA, 25 bp, Homo sapien
ggttaagtgttcaggtgctgtaaga

SEQ ID NO: 6021548 - DNA, 25 bp, Homo sapien
gaaaagttgatacactggcatattg

SEQ ID NO: 6021549 - DNA, 25 bp, Homo sapien
agtcttagaatttcatctagaagtt

SEQ ID NO: 6021550 - DNA, 25 bp, Homo sapien
gacaaacaaataggcagtttaatgt

SEQ ID NO: 6021551 - DNA, 25 bp, Homo sapien
ctaagtggtctttccatttggcatt

SEQ ID NO: 6021552 - DNA, 25 bp, Homo sapien
tactctcagtgtccaaagttgtctt

SEQ ID NO: 6021553 - DNA, 25 bp, Homo sapien
cagtgtccaaagttgtcttcttttt

SEQ ID NO: 6021554 - DNA, 25 bp, Homo sapien
aaaagtgggatactaattcagacca

SEQ ID NO: 6021555 - DNA, 25 bp, Homo sapien
aagtaacagtttaaaggacagcaag

SEQ ID NO: 6021556 - DNA, 25 bp, Homo sapien
ttcttagatgttttagctattttta

SEQ ID NO: 6021557 - DNA, 25 bp, Homo sapien
ttggcatttggcaatacagacaaac

SEQ ID NO: 6021558 - DNA, 25 bp, Homo sapien
gatgttttagctatttttatataga

SEQ ID NO: 6021559 - DNA, 25 bp, Homo sapien
tggtttctatgacaacttttaatga

SEQ ID NO: 6021560 - DNA, 25 bp, Homo sapien
aatcatactttaacaaaaatctatg

SEQ ID NO: 6021561 - DNA, 25 bp, Homo sapien
gcatggcatatgtaagcaagtaaca

SEQ ID NO: 6021562 - DNA, 25 bp, Homo sapien
gaatatttggtaacatgcagaagag

SEQ ID NO: 6021563 - DNA, 25 bp, Homo sapien
agaatttcatctagaagttaatccc

SEQ ID NO: 6021564 - DNA, 25 bp, Homo sapien
tagctatttttatatagataagaac

SEQ ID NO: 6021565 - DNA, 25 bp, Homo sapien
ccaccatactctcagtgtccaaagt

SEQ ID NO: 6021566 - DNA, 25 bp, Homo sapien
aggtgctgtaagaaacacctagaaa

SEQ ID NO: 6021567 - DNA, 25 bp, Homo sapien
tattattcttagatgttttagctat

SEQ ID NO: 6021568 - DNA, 25 bp, Homo sapien
tgtaagaaacacctagaaaagaaga

SEQ ID NO: 6021569 - DNA, 25 bp, Homo sapien
ctcaaactagcttgtgcatagtaac

SEQ ID NO: 6021570 - DNA, 25 bp, Homo sapien
gatctattgatactcaaactagctt

SEQ ID NO: 6021571 - DNA, 25 bp, Homo sapien
ctagcttgtgcatagtaacaattga

SEQ ID NO: 6021572 - DNA, 25 bp, Homo sapien
atctatgcatggcatatgtaagcaa

SEQ ID NO: 6021573 - DNA, 25 bp, Homo sapien
acatgcagaagagactgacaaaatg

SEQ ID NO: 6021574 - DNA, 25 bp, Homo sapien
caatacagacaaacaaataggcagt

SEQ ID NO: 6021575 - DNA, 25 bp, Homo sapien
acaaaatggtttctatgacaacttt

SEQ ID NO: 6021576 - DNA, 25 bp, Homo sapien
cactggcatattggttaagtgttca

SEQ ID NO: 6021577 - DNA, 25 bp, Homo sapien
tcctttgatacttaaggacattata

SEQ ID NO: 6021578 - DNA, 25 bp, Homo sapien
cctcagtctagtcgtgctctaagtg

SEQ ID NO: 6021579 - DNA, 25 bp, Homo sapien
acaaaaatctatgcatggcatatgt

SEQ ID NO: 6021580 - DNA, 25 bp, Homo sapien
tgtgcatagtaacaattgaaaagtt

SEQ ID NO: 6021581 - DNA, 25 bp, Homo sapien
ggagctatgtagacctaagatctat

SEQ ID NO: 6021582 - DNA, 25 bp, Homo sapien
taagcaagtaacagtttaaaggaca

SEQ ID NO: 6021583 - DNA, 25 bp, Homo sapien
gacatacacaagagtcttagaattt

SEQ ID NO: 6021584 - DNA, 25 bp, Homo sapien
atgaaaagtttacatagaaaagtgg

SEQ ID NO: 6021585 - DNA, 25 bp, Homo sapien
tcatctagaagttaatccctcagtc

SEQ ID NO: 6021586 - DNA, 25 bp, Homo sapien
caatattgtttttaagactttcagt

SEQ ID NO: 6021587 - DNA, 25 bp, Homo sapien
aacacacaatattgtttttaagact

SEQ ID NO: 6021588 - DNA, 25 bp, Homo sapien
atgtagacctaagatctattgatac

SEQ ID NO: 6021589 - DNA, 25 bp, Homo sapien
gtccgcacccacactggtgagaagc

SEQ ID NO: 6021590 - DNA, 25 bp, Homo sapien
acgacctgtggaaaggccttctcta

SEQ ID NO: 6021591 - DNA, 25 bp, Homo sapien
cctcactgccaggactccttccagc

SEQ ID NO: 6021592 - DNA, 25 bp, Homo sapien
ctgaagatgcacatccgaagccaca

SEQ ID NO: 6021593 - DNA, 25 bp, Homo sapien
cggaggccctcgctgaccctgctac

SEQ ID NO: 6021594 - DNA, 25 bp, Homo sapien
cctccccatcctcgctggcatcttc

SEQ ID NO: 6021595 - DNA, 25 bp, Homo sapien
tcagtattcatgaggtgtagcctct

SEQ ID NO: 6021596 - DNA, 25 bp, Homo sapien
cgcatgtccttgctccacaagcacc

SEQ ID NO: 6021597 - DNA, 25 bp, Homo sapien
agaactaaagccaacccactggctg

SEQ ID NO: 6021598 - DNA, 25 bp, Homo sapien
cccactgcaaccgtgcttttgctga

SEQ ID NO: 6021599 - DNA, 25 bp, Homo sapien
ggctctcttggtggcctttgccgca

SEQ ID NO: 6021600 - DNA, 25 bp, Homo sapien
ttggtccggggacctgtggcgtcca

SEQ ID NO: 6021601 - DNA, 25 bp, Homo sapien
ctgctacctccccatcctcgctggc

SEQ ID NO: 6021602 - DNA, 25 bp, Homo sapien
ctggtgagaagccattctcctgctc

SEQ ID NO: 6021603 - DNA, 25 bp, Homo sapien
tccaacctgcgtgcccacctccaaa

SEQ ID NO: 6021604 - DNA, 25 bp, Homo sapien
cggatgtgaagagataccagtgcca

SEQ ID NO: 6021605 - DNA, 25 bp, Homo sapien
ttctcccgcatgtccttgctccaca

SEQ ID NO: 6021606 - DNA, 25 bp, Homo sapien
tggctgcttcagggccacgtccgca

SEQ ID NO: 6021607 - DNA, 25 bp, Homo sapien
aaggccttctctaggccctggctgc

SEQ ID NO: 6021608 - DNA, 25 bp, Homo sapien
ggcctttgccgcaggtggctgatgg

SEQ ID NO: 6021609 - DNA, 25 bp, Homo sapien
gataccagtgccaggcctgtgcccg

SEQ ID NO: 6021610 - DNA, 25 bp, Homo sapien
gggaagcttgaaccccgctcaggga

SEQ ID NO: 6021611 - DNA, 25 bp, Homo sapien
gctcaccctcctcctcactgccagg

SEQ ID NO: 6021612 - DNA, 25 bp, Homo sapien
tgtgcccgaaccttctcccgcatgt

SEQ ID NO: 6021613 - DNA, 25 bp, Homo sapien
cctcctcctcactgccaggactcct

SEQ ID NO: 6021614 - DNA, 25 bp, Homo sapien
tgcgtgcccacctccaaacccactc

SEQ ID NO: 6021615 - DNA, 25 bp, Homo sapien
gaggtgtagcctctggacacagctg

SEQ ID NO: 6021616 - DNA, 25 bp, Homo sapien
gcctcctacccctcagtattcatga

SEQ ID NO: 6021617 - DNA, 25 bp, Homo sapien
tggttcctgcttggctctcttggtg

SEQ ID NO: 6021618 - DNA, 25 bp, Homo sapien
gctccggaggccctcgctgaccctg

SEQ ID NO: 6021619 - DNA, 25 bp, Homo sapien
ctgcttggctctcttggtggccttt

SEQ ID NO: 6021620 - DNA, 25 bp, Homo sapien
gcttcgagccatagaactaaagcca

SEQ ID NO: 6021621 - DNA, 25 bp, Homo sapien
ttctctaggccctggctgcttcagg

SEQ ID NO: 6021622 - DNA, 25 bp, Homo sapien
cccacctccaaacccactcggatgt

SEQ ID NO: 6021623 - DNA, 25 bp, Homo sapien
agatgcacatccgaagccacacgct

SEQ ID NO: 6021624 - DNA, 25 bp, Homo sapien
agaagccattctcctgctcccactg

SEQ ID NO: 6021625 - DNA, 25 bp, Homo sapien
agtgccaggcctgtgcccgaacctt

SEQ ID NO: 6021626 - DNA, 25 bp, Homo sapien
acctgtggcgtccatgtctggacct

SEQ ID NO: 6021627 - DNA, 25 bp, Homo sapien
acatccgaagccacacgctgccttg

SEQ ID NO: 6021628 - DNA, 25 bp, Homo sapien
aacccactggctgggaagcttgaac

SEQ ID NO: 6021629 - DNA, 25 bp, Homo sapien
tggctgctccggaggccctcgctga

SEQ ID NO: 6021630 - DNA, 25 bp, Homo sapien
tccacaagcaccaagagtctggctg

SEQ ID NO: 6021631 - DNA, 25 bp, Homo sapien
tccagccttggtccggggacctgtg

SEQ ID NO: 6021632 - DNA, 25 bp, Homo sapien
tagcctctggacacagctgcttcga

SEQ ID NO: 6021633 - DNA, 25 bp, Homo sapien
tggacctggttcctgcttggctctc

SEQ ID NO: 6021634 - DNA, 25 bp, Homo sapien
tccaaacccactcggatgtgaagag

SEQ ID NO: 6021635 - DNA, 25 bp, Homo sapien
cccagagcctcctacccctcagtat

SEQ ID NO: 6021636 - DNA, 25 bp, Homo sapien
gcaaccgtgcttttgctgaccgctc

SEQ ID NO: 6021637 - DNA, 25 bp, Homo sapien
ctgatggagtgcctttgtacccgcc

SEQ ID NO: 6021638 - DNA, 25 bp, Homo sapien
ctgaccctgctacctccccatcctc

SEQ ID NO: 6021639 - DNA, 25 bp, Homo sapien
aaagccaacccactggctgggaagc

SEQ ID NO: 6021640 - DNA, 25 bp, Homo sapien
tgccgcaggtggctgatggagtgcc

SEQ ID NO: 6021641 - DNA, 25 bp, Homo sapien
cccacactggtgagaagccattctc

SEQ ID NO: 6021642 - DNA, 25 bp, Homo sapien
aggtggctgatggagtgcctttgta

SEQ ID NO: 6021643 - DNA, 25 bp, Homo sapien
gaccgctccaacctgcgtgcccacc

SEQ ID NO: 6021644 - DNA, 25 bp, Homo sapien
aggactccttccagccttggtccgg

SEQ ID NO: 6021645 - DNA, 25 bp, Homo sapien
gccttgtgtctgcacgacctgtgga

SEQ ID NO: 6021646 - DNA, 25 bp, Homo sapien
cattctcctgctcccactgcaaccg

SEQ ID NO: 6021647 - DNA, 25 bp, Homo sapien
ctggctgggaagcttgaaccccgct

SEQ ID NO: 6021648 - DNA, 25 bp, Homo sapien
ggcgtccatgtctggacctggttcc

SEQ ID NO: 6021649 - DNA, 25 bp, Homo sapien
cgaaccttctcccgcatgtccttgc

SEQ ID NO: 6021650 - DNA, 25 bp, Homo sapien
cccactcggatgtgaagagatacca

SEQ ID NO: 6021651 - DNA, 25 bp, Homo sapien
aggccctggctgcttcagggccacg

SEQ ID NO: 6021652 - DNA, 25 bp, Homo sapien
ggccacgtccgcacccacactggtg

SEQ ID NO: 6021653 - DNA, 25 bp, Homo sapien
cttggtggcctttgccgcaggtggc

SEQ ID NO: 6021654 - DNA, 25 bp, Homo sapien
ccctcgctgaccctgctacctcccc

SEQ ID NO: 6021655 - DNA, 25 bp, Homo sapien
gagtgcctttgtacccgcccagagc

SEQ ID NO: 6021656 - DNA, 25 bp, Homo sapien
catcctcgctggcatcttcccggag

SEQ ID NO: 6021657 - DNA, 25 bp, Homo sapien
catgtctggacctggttcctgcttg

SEQ ID NO: 6021658 - DNA, 25 bp, Homo sapien
ccggagctcaccctcctcctcactg

SEQ ID NO: 6021659 - DNA, 25 bp, Homo sapien
ttcatgaggtgtagcctctggacac

SEQ ID NO: 6021660 - DNA, 25 bp, Homo sapien
ccggggacctgtggcgtccatgtct

SEQ ID NO: 6021661 - DNA, 25 bp, Homo sapien
tccttgctccacaagcaccaagagt

SEQ ID NO: 6021662 - DNA, 25 bp, Homo sapien
gtgcttttgctgaccgctccaacct

SEQ ID NO: 6021663 - DNA, 25 bp, Homo sapien
ctggacacagctgcttcgagccata

SEQ ID NO: 6021664 - DNA, 25 bp, Homo sapien
aggcctgtgcccgaaccttctcccg

SEQ ID NO: 6021665 - DNA, 25 bp, Homo sapien
cttcagggccacgtccgcacccaca

SEQ ID NO: 6021666 - DNA, 25 bp, Homo sapien
agagtctggctgctccggaggccct

SEQ ID NO: 6021667 - DNA, 25 bp, Homo sapien
gaagccacacgctgccttgtgtctg

SEQ ID NO: 6021668 - DNA, 25 bp, Homo sapien
tgtctgcacgacctgtggaaaggcc

SEQ ID NO: 6021669 - DNA, 25 bp, Homo sapien
tgtggaaaggccttctctaggccct

SEQ ID NO: 6021670 - DNA, 25 bp, Homo sapien
tgccaggactccttccagccttggt

SEQ ID NO: 6021671 - DNA, 25 bp, Homo sapien
agccatagaactaaagccaacccac

SEQ ID NO: 6021672 - DNA, 25 bp, Homo sapien
tgtacccgcccagagcctcctaccc

SEQ ID NO: 6021673 - DNA, 25 bp, Homo sapien
cgctggcatcttcccggagctcacc

SEQ ID NO: 6021674 - DNA, 25 bp, Homo sapien
tgaagagataccagtgccaggcctg

SEQ ID NO: 6021675 - DNA, 25 bp, Homo sapien
acagctgcttcgagccatagaacta

SEQ ID NO: 6021676 - DNA, 25 bp, Homo sapien
tttgctgaccgctccaacctgcgtg

SEQ ID NO: 6021677 - DNA, 25 bp, Homo sapien
gcaccaagagtctggctgctccgga

SEQ ID NO: 6021678 - DNA, 25 bp, Homo sapien
cctgctcccactgcaaccgtgcttt

SEQ ID NO: 6021679 - DNA, 25 bp, Homo sapien
tacccctcagtattcatgaggtgta

SEQ ID NO: 6021680 - DNA, 25 bp, Homo sapien
atcttcccggagctcaccctcctcc

SEQ ID NO: 6021681 - DNA, 25 bp, Homo sapien
acacgctgccttgtgtctgcacgac

SEQ ID NO: 6021682 - DNA, 25 bp, Homo sapien
caccagacaaatgggggcgggggct

SEQ ID NO: 6021683 - DNA, 25 bp, Homo sapien
tgtaaacatctttctcccggggcca

SEQ ID NO: 6021684 - DNA, 25 bp, Homo sapien
gagccaagcaggaaccaggtccaga

SEQ ID NO: 6021685 - DNA, 25 bp, Homo sapien
cacctgcggcaaaggccaccaagag

SEQ ID NO: 6021686 - DNA, 25 bp, Homo sapien
gaggctacacctcatgaatactgag

SEQ ID NO: 6021687 - DNA, 25 bp, Homo sapien
gtgaaacaggtgtcaccagacaaat

SEQ ID NO: 6021688 - DNA, 25 bp, Homo sapien
tatggctcgaagcagctgtgtccag

SEQ ID NO: 6021689 - DNA, 25 bp, Homo sapien
gctgaagcaccccacttggccccta

SEQ ID NO: 6021690 - DNA, 25 bp, Homo sapien
cccacttggcccctaacaagtgatg

SEQ ID NO: 6021691 - DNA, 25 bp, Homo sapien
agcaggaaccaggtccagacatgga

SEQ ID NO: 6021692 - DNA, 25 bp, Homo sapien
aaaggcactccatcagccacctgcg

SEQ ID NO: 6021693 - DNA, 25 bp, Homo sapien
caggtccccggaccaaggctggaag

SEQ ID NO: 6021694 - DNA, 25 bp, Homo sapien
ggccaggctgaagcaccccacttgg

SEQ ID NO: 6021695 - DNA, 25 bp, Homo sapien
gtacctcaaagaaggtggcctgaag

SEQ ID NO: 6021696 - DNA, 25 bp, Homo sapien
catggtcccttctgagacagttaaa

SEQ ID NO: 6021697 - DNA, 25 bp, Homo sapien
ccctgctgaggcatggttacagctg

SEQ ID NO: 6021698 - DNA, 25 bp, Homo sapien
gtgggttggctttagttctatggct

SEQ ID NO: 6021699 - DNA, 25 bp, Homo sapien
tgaggcatggttacagctggacggg

SEQ ID NO: 6021700 - DNA, 25 bp, Homo sapien
actgaggggtaggaggctctgggcg

SEQ ID NO: 6021701 - DNA, 25 bp, Homo sapien
tgagacagttaaactgctgtgaaac

SEQ ID NO: 6021702 - DNA, 25 bp, Homo sapien
atggccattattcatggtcccttct

SEQ ID NO: 6021703 - DNA, 25 bp, Homo sapien
caaatgggggcgggggctgaaacag

SEQ ID NO: 6021704 - DNA, 25 bp, Homo sapien
catggacgccacaggtccccggacc

SEQ ID NO: 6021705 - DNA, 25 bp, Homo sapien
gggctgaaacagttgcccaggccca

SEQ ID NO: 6021706 - DNA, 25 bp, Homo sapien
tggctttagttctatggctcgaagc

SEQ ID NO: 6021707 - DNA, 25 bp, Homo sapien
ccggaccaaggctggaaggagtcct

SEQ ID NO: 6021708 - DNA, 25 bp, Homo sapien
aggggaactattgcatagtctgttg

SEQ ID NO: 6021709 - DNA, 25 bp, Homo sapien
gttctgggagacacattggccaggc

SEQ ID NO: 6021710 - DNA, 25 bp, Homo sapien
ctgaagggtccttgagggaggtagg

SEQ ID NO: 6021711 - DNA, 25 bp, Homo sapien
acacctcatgaatactgaggggtag

SEQ ID NO: 6021712 - DNA, 25 bp, Homo sapien
agcggggttcaagcttcccagccag

SEQ ID NO: 6021713 - DNA, 25 bp, Homo sapien
ggagacacattggccaggctgaagc

SEQ ID NO: 6021714 - DNA, 25 bp, Homo sapien
gggggaggggaactattgcatagtc

SEQ ID NO: 6021715 - DNA, 25 bp, Homo sapien
cagccagtgggttggctttagttct

SEQ ID NO: 6021716 - DNA, 25 bp, Homo sapien
agcaccccacttggcccctaacaag

SEQ ID NO: 6021717 - DNA, 25 bp, Homo sapien
tctgttgtacctcaaagaaggtggc

SEQ ID NO: 6021718 - DNA, 25 bp, Homo sapien
agttaaactgctgtgaaacaggtgt

SEQ ID NO: 6021719 - DNA, 25 bp, Homo sapien
ccccaaaatagttctgggagacaca

SEQ ID NO: 6021720 - DNA, 25 bp, Homo sapien
gggtacaaaggcactccatcagcca

SEQ ID NO: 6021721 - DNA, 25 bp, Homo sapien
caagtgatggccattattcatggtc

SEQ ID NO: 6021722 - DNA, 25 bp, Homo sapien
gaggctctgggcgggtacaaaggca

SEQ ID NO: 6021723 - DNA, 25 bp, Homo sapien
catcagccacctgcggcaaaggcca

SEQ ID NO: 6021724 - DNA, 25 bp, Homo sapien
acctggacatgtgtccagtaaccac

SEQ ID NO: 6021725 - DNA, 25 bp, Homo sapien
gggtaggaggctctgggcgggtaca

SEQ ID NO: 6021726 - DNA, 25 bp, Homo sapien
aggccaccaagagagccaagcagga

SEQ ID NO: 6021727 - DNA, 25 bp, Homo sapien
gttcaagcttcccagccagtgggtt

SEQ ID NO: 6021728 - DNA, 25 bp, Homo sapien
aaccaggtccagacatggacgccac

SEQ ID NO: 6021729 - DNA, 25 bp, Homo sapien
tccctgagcggggttcaagcttccc

SEQ ID NO: 6021730 - DNA, 25 bp, Homo sapien
cgccacaggtccccggaccaaggct

SEQ ID NO: 6021731 - DNA, 25 bp, Homo sapien
gcttcccagccagtgggttggcttt

SEQ ID NO: 6021732 - DNA, 25 bp, Homo sapien
tcgaagcagctgtgtccagaggcta

SEQ ID NO: 6021733 - DNA, 25 bp, Homo sapien
caggtgtcaccagacaaatgggggc

SEQ ID NO: 6021734 - DNA, 25 bp, Homo sapien
aaacagttgcccaggcccaggggca

SEQ ID NO: 6021735 - DNA, 25 bp, Homo sapien
caggcccaggggcacctggacatgt

SEQ ID NO: 6021736 - DNA, 25 bp, Homo sapien
cagctgtgtccagaggctacacctc

SEQ ID NO: 6021737 - DNA, 25 bp, Homo sapien
actgctgtgaaacaggtgtcaccag

SEQ ID NO: 6021738 - DNA, 25 bp, Homo sapien
aggggcacctggacatgtgtccagt

SEQ ID NO: 6021739 - DNA, 25 bp, Homo sapien
taaccaccctgctgaggcatggtta

SEQ ID NO: 6021740 - DNA, 25 bp, Homo sapien
gggcgggggctgaaacagttgccca

SEQ ID NO: 6021741 - DNA, 25 bp, Homo sapien
ctgttgggcccccaaaatagttctg

SEQ ID NO: 6021742 - DNA, 25 bp, Homo sapien
ctgggcgggtacaaaggcactccat

SEQ ID NO: 6021743 - DNA, 25 bp, Homo sapien
actattgcatagtctgttgtacctc

SEQ ID NO: 6021744 - DNA, 25 bp, Homo sapien
cactccatcagccacctgcggcaaa

SEQ ID NO: 6021745 - DNA, 25 bp, Homo sapien
attattcatggtcccttctgagaca

SEQ ID NO: 6021746 - DNA, 25 bp, Homo sapien
gtccagtaaccaccctgctgaggca

SEQ ID NO: 6021747 - DNA, 25 bp, Homo sapien
acatgtgtccagtaaccaccctgct

SEQ ID NO: 6021748 - DNA, 25 bp, Homo sapien
catgaatactgaggggtaggaggct

SEQ ID NO: 6021749 - DNA, 25 bp, Homo sapien
cttggcccctaacaagtgatggcca

SEQ ID NO: 6021750 - DNA, 25 bp, Homo sapien
aggtggcctgaagggtccttgaggg

SEQ ID NO: 6021751 - DNA, 25 bp, Homo sapien
atggttacagctggacggggtgggg

SEQ ID NO: 6021752 - DNA, 25 bp, Homo sapien
tgtccagaggctacacctcatgaat

SEQ ID NO: 6021753 - DNA, 25 bp, Homo sapien
gtccagacatggacgccacaggtcc

SEQ ID NO: 6021754 - DNA, 25 bp, Homo sapien
tagttctatggctcgaagcagctgt

SEQ ID NO: 6021755 - DNA, 25 bp, Homo sapien
acattggccaggctgaagcacccca

SEQ ID NO: 6021756 - DNA, 25 bp, Homo sapien
tggggtccctgagcggggttcaagc

SEQ ID NO: 6021757 - DNA, 25 bp, Homo sapien
aaatagttctgggagacacattggc

SEQ ID NO: 6021758 - DNA, 25 bp, Homo sapien
cggcaaaggccaccaagagagccaa

SEQ ID NO: 6021759 - DNA, 25 bp, Homo sapien
caaagaaggtggcctgaagggtcct

SEQ ID NO: 6021760 - DNA, 25 bp, Homo sapien
ttgcccaggcccaggggcacctgga

SEQ ID NO: 6021761 - DNA, 25 bp, Homo sapien
atctttctcccggggccacctgttg

SEQ ID NO: 6021762 - DNA, 25 bp, Homo sapien
ccaagagagccaagcaggaaccagg

SEQ ID NO: 6021763 - DNA, 25 bp, Homo sapien
cccttctgagacagttaaactgctg

SEQ ID NO: 6021764 - DNA, 25 bp, Homo sapien
gcatagtctgttgtacctcaaagaa

SEQ ID NO: 6021765 - DNA, 25 bp, Homo sapien
ccctaacaagtgatggccattattc

SEQ ID NO: 6021766 - DNA, 25 bp, Homo sapien
cttccatgttcttctccccaccatc

SEQ ID NO: 6021767 - DNA, 25 bp, Homo sapien
tgaattattctcttttctaacaaaa

SEQ ID NO: 6021768 - DNA, 25 bp, Homo sapien
gtttaccttaacactgccatccaaa

SEQ ID NO: 6021769 - DNA, 25 bp, Homo sapien
tgttttaggcacactgtactcattc

SEQ ID NO: 6021770 - DNA, 25 bp, Homo sapien
cttcatttttatcagcattttcctg

SEQ ID NO: 6021771 - DNA, 25 bp, Homo sapien
ccatagccacattaaacttcatttt

SEQ ID NO: 6021772 - DNA, 25 bp, Homo sapien
aggcaatgctttaaataatctttgg

SEQ ID NO: 6021773 - DNA, 25 bp, Homo sapien
catggtgactattccagggggaaat

SEQ ID NO: 6021774 - DNA, 25 bp, Homo sapien
caatctaaaactccaattcccatag

SEQ ID NO: 6021775 - DNA, 25 bp, Homo sapien
taaaacctctacaaatgtggtatgg

SEQ ID NO: 6021776 - DNA, 25 bp, Homo sapien
gcaaagcaatgccactttgaattat

SEQ ID NO: 6021777 - DNA, 25 bp, Homo sapien
tctttgtccaatctctctttccact

SEQ ID NO: 6021778 - DNA, 25 bp, Homo sapien
tgtttcatgccctgagtcttccatg

SEQ ID NO: 6021779 - DNA, 25 bp, Homo sapien
ttttatcagcattttcctggctgtc

SEQ ID NO: 6021780 - DNA, 25 bp, Homo sapien
atctttgggcctaaaatctatttgt

SEQ ID NO: 6021781 - DNA, 25 bp, Homo sapien
cctctacaaatgtggtatggctgat

SEQ ID NO: 6021782 - DNA, 25 bp, Homo sapien
actcagccacaggtctgtaccaaat

SEQ ID NO: 6021783 - DNA, 25 bp, Homo sapien
ggctgtcttcatcatcatcatcact

SEQ ID NO: 6021784 - DNA, 25 bp, Homo sapien
aggcacactgtactcattcatggtg

SEQ ID NO: 6021785 - DNA, 25 bp, Homo sapien
ggcctgaaatgagccttgggactgt

SEQ ID NO: 6021786 - DNA, 25 bp, Homo sapien
cttagccaatctaaaactccaattc

SEQ ID NO: 6021787 - DNA, 25 bp, Homo sapien
ccacattaaacttcattttttgata

SEQ ID NO: 6021788 - DNA, 25 bp, Homo sapien
taaacttcattttttgatacactga

SEQ ID NO: 6021789 - DNA, 25 bp, Homo sapien
tgagcaaactcagccacaggtctgt

SEQ ID NO: 6021790 - DNA, 25 bp, Homo sapien
ctgcagtgttttaggcacactgtac

SEQ ID NO: 6021791 - DNA, 25 bp, Homo sapien
tgaatcaatgcctgtttcatgccct

SEQ ID NO: 6021792 - DNA, 25 bp, Homo sapien
tccaatctctctttccactccacaa

SEQ ID NO: 6021793 - DNA, 25 bp, Homo sapien
ccacaggtctgtaccaaattaacat

SEQ ID NO: 6021794 - DNA, 25 bp, Homo sapien
atctatttgttttacaaatctggcc

SEQ ID NO: 6021795 - DNA, 25 bp, Homo sapien
ttgttttacaaatctggcctgcagt

SEQ ID NO: 6021796 - DNA, 25 bp, Homo sapien
taagaagcaaagcaatgccactttg

SEQ ID NO: 6021797 - DNA, 25 bp, Homo sapien
atgccctgagtcttccatgttcttc

SEQ ID NO: 6021798 - DNA, 25 bp, Homo sapien
ttctaacaaaaactcactgcgttcc

SEQ ID NO: 6021799 - DNA, 25 bp, Homo sapien
ttaacataagaagcaaagcaatgcc

SEQ ID NO: 6021800 - DNA, 25 bp, Homo sapien
ctctctttccactccacaattctgc

SEQ ID NO: 6021801 - DNA, 25 bp, Homo sapien
ctgtttcttagccaatctaaaactc

SEQ ID NO: 6021802 - DNA, 25 bp, Homo sapien
ccaattcccatagccacattaaact

SEQ ID NO: 6021803 - DNA, 25 bp, Homo sapien
tgttcttctccccaccatcttcatt

SEQ ID NO: 6021804 - DNA, 25 bp, Homo sapien
tacaaatctggcctgcagtgtttta

SEQ ID NO: 6021805 - DNA, 25 bp, Homo sapien
caaatgtggtatggctgattatgat

SEQ ID NO: 6021806 - DNA, 25 bp, Homo sapien
ttccactccacaattctgctctgaa

SEQ ID NO: 6021807 - DNA, 25 bp, Homo sapien
aataatctttgggcctaaaatctat

SEQ ID NO: 6021808 - DNA, 25 bp, Homo sapien
cgttccaggcaatgctttaaataat

SEQ ID NO: 6021809 - DNA, 25 bp, Homo sapien
ggactgtgaatcaatgcctgtttca

SEQ ID NO: 6021810 - DNA, 25 bp, Homo sapien
agcaagtaaaacctctacaaatgtg

SEQ ID NO: 6021811 - DNA, 25 bp, Homo sapien
ctctgaatactttgagcaaactcag

SEQ ID NO: 6021812 - DNA, 25 bp, Homo sapien
tctcttttctaacaaaaactcactg

SEQ ID NO: 6021813 - DNA, 25 bp, Homo sapien
ctaaactctttgtccaatctctctt

SEQ ID NO: 6021814 - DNA, 25 bp, Homo sapien
ttatgatcatgaacagactgtgagg

SEQ ID NO: 6021815 - DNA, 25 bp, Homo sapien
attctgctctgaatactttgagcaa

SEQ ID NO: 6021816 - DNA, 25 bp, Homo sapien
tcattttttgatacactgacaaact

SEQ ID NO: 6021817 - DNA, 25 bp, Homo sapien
actgtactcattcatggtgactatt

SEQ ID NO: 6021818 - DNA, 25 bp, Homo sapien
caccatcttcatttttatcagcatt

SEQ ID NO: 6021819 - DNA, 25 bp, Homo sapien
tgctttaaataatctttgggcctaa

SEQ ID NO: 6021820 - DNA, 25 bp, Homo sapien
tttcctggctgtcttcatcatcatc

SEQ ID NO: 6021821 - DNA, 25 bp, Homo sapien
tttgatacactgacaaactaaactc

SEQ ID NO: 6021822 - DNA, 25 bp, Homo sapien
ttctaagtttaccttaacactgcca

SEQ ID NO: 6021823 - DNA, 25 bp, Homo sapien
gaaatgagccttgggactgtgaatc

SEQ ID NO: 6021824 - DNA, 25 bp, Homo sapien
ttctccccaccatcttcatttttat

SEQ ID NO: 6021825 - DNA, 25 bp, Homo sapien
atactttgagcaaactcagccacag

SEQ ID NO: 6021826 - DNA, 25 bp, Homo sapien
atatttgagttcttttatttaggtg

SEQ ID NO: 6021827 - DNA, 25 bp, Homo sapien
tgtgaggactgaggggcctgaaatg

SEQ ID NO: 6021828 - DNA, 25 bp, Homo sapien
tcatcatcatcactgtttcttagcc

SEQ ID NO: 6021829 - DNA, 25 bp, Homo sapien
ctcattcatggtgactattccaggg

SEQ ID NO: 6021830 - DNA, 25 bp, Homo sapien
tgagtcttccatgttcttctcccca

SEQ ID NO: 6021831 - DNA, 25 bp, Homo sapien
gacaaactaaactctttgtccaatc

SEQ ID NO: 6021832 - DNA, 25 bp, Homo sapien
gccttgggactgtgaatcaatgcct

SEQ ID NO: 6021833 - DNA, 25 bp, Homo sapien
aaaactccaattcccatagccacat

SEQ ID NO: 6021834 - DNA, 25 bp, Homo sapien
cagcattttcctggctgtcttcatc

SEQ ID NO: 6021835 - DNA, 25 bp, Homo sapien
tcatcactgtttcttagccaatcta

SEQ ID NO: 6021836 - DNA, 25 bp, Homo sapien
actgaggggcctgaaatgagccttg

SEQ ID NO: 6021837 - DNA, 25 bp, Homo sapien
accaaattaacataagaagcaaagc

SEQ ID NO: 6021838 - DNA, 25 bp, Homo sapien
acagactgtgaggactgaggggcct

SEQ ID NO: 6021839 - DNA, 25 bp, Homo sapien
ctattccagggggaaatatttgagt

SEQ ID NO: 6021840 - DNA, 25 bp, Homo sapien
aatgcctgtttcatgccctgagtct

SEQ ID NO: 6021841 - DNA, 25 bp, Homo sapien
tcactgcgttccaggcaatgcttta

SEQ ID NO: 6021842 - DNA, 25 bp, Homo sapien
tggtatggctgattatgatcatgaa

SEQ ID NO: 6021843 - DNA, 25 bp, Homo sapien
caaaaactcactgcgttccaggcaa

SEQ ID NO: 6021844 - DNA, 25 bp, Homo sapien
gtctgtaccaaattaacataagaag

SEQ ID NO: 6021845 - DNA, 25 bp, Homo sapien
gcaatgccactttgaattattctct

SEQ ID NO: 6021846 - DNA, 25 bp, Homo sapien
ggctgattatgatcatgaacagact

SEQ ID NO: 6021847 - DNA, 25 bp, Homo sapien
tccacaattctgctctgaatacttt

SEQ ID NO: 6021848 - DNA, 25 bp, Homo sapien
tctggcctgcagtgttttaggcaca

SEQ ID NO: 6021849 - DNA, 25 bp, Homo sapien
tacactgacaaactaaactctttgt

SEQ ID NO: 6021850 - DNA, 25 bp, Homo sapien
tcatgaacagactgtgaggactgag

SEQ ID NO: 6021851 - DNA, 25 bp, Homo sapien
ccactttgaattattctcttttcta

SEQ ID NO: 6021852 - DNA, 25 bp, Homo sapien
gtaagcacagcaagcatatgcagtt

SEQ ID NO: 6021853 - DNA, 25 bp, Homo sapien
atgagcatattttactccatcttcc

SEQ ID NO: 6021854 - DNA, 25 bp, Homo sapien
ttccttcacaaagatcaagtccaaa

SEQ ID NO: 6021855 - DNA, 25 bp, Homo sapien
gatttaaggaagaagcaaatacctc

SEQ ID NO: 6021856 - DNA, 25 bp, Homo sapien
caccaggatttaaggaagaagcaaa

SEQ ID NO: 6021857 - DNA, 25 bp, Homo sapien
tctttgcacactcaggccattgttt

SEQ ID NO: 6021858 - DNA, 25 bp, Homo sapien
atattttactccatcttccattttc

SEQ ID NO: 6021859 - DNA, 25 bp, Homo sapien
ctcctttatcaggatgaaactcctt

SEQ ID NO: 6021860 - DNA, 25 bp, Homo sapien
gcctccaaagtcaggttgatgagca

SEQ ID NO: 6021861 - DNA, 25 bp, Homo sapien
caagtggatctttcctgtataattt

SEQ ID NO: 6021862 - DNA, 25 bp, Homo sapien
agcatatgcagttagcagacatttt

SEQ ID NO: 6021863 - DNA, 25 bp, Homo sapien
caggccattgtttgcagtacattgc

SEQ ID NO: 6021864 - DNA, 25 bp, Homo sapien
attgtttgcagtacattgcatcaac

SEQ ID NO: 6021865 - DNA, 25 bp, Homo sapien
tcatcagaggaatattcccccaggc

SEQ ID NO: 6021866 - DNA, 25 bp, Homo sapien
tcattttttcttcatctcctccttt

SEQ ID NO: 6021867 - DNA, 25 bp, Homo sapien
cacactcaggccattgtttgcagta

SEQ ID NO: 6021868 - DNA, 25 bp, Homo sapien
catcaacaccaggatttaaggaaga

SEQ ID NO: 6021869 - DNA, 25 bp, Homo sapien
attcattttcttcattttttcttca

SEQ ID NO: 6021870 - DNA, 25 bp, Homo sapien
gcatttttttaaatatgcctttctc

SEQ ID NO: 6021871 - DNA, 25 bp, Homo sapien
tcagttgcatcccagaagcctccaa

SEQ ID NO: 6021872 - DNA, 25 bp, Homo sapien
gatctttcctgtataattttctatt

SEQ ID NO: 6021873 - DNA, 25 bp, Homo sapien
gaggaatattcccccaggcactcct

SEQ ID NO: 6021874 - DNA, 25 bp, Homo sapien
cacaaagatcaagtccaaaccacat

SEQ ID NO: 6021875 - DNA, 25 bp, Homo sapien
atcttccattttcttgtacagagta

SEQ ID NO: 6021876 - DNA, 25 bp, Homo sapien
aatacctcagttgcatcccagaagc

SEQ ID NO: 6021877 - DNA, 25 bp, Homo sapien
atcaagtccaaaccacattctaaag

SEQ ID NO: 6021878 - DNA, 25 bp, Homo sapien
tactccatcttccattttcttgtac

SEQ ID NO: 6021879 - DNA, 25 bp, Homo sapien
cctttctcatcagaggaatattccc

SEQ ID NO: 6021880 - DNA, 25 bp, Homo sapien
cattttcttgtacagagtattcatt

SEQ ID NO: 6021881 - DNA, 25 bp, Homo sapien
caaagattcctctctgtttaaaact

SEQ ID NO: 6021882 - DNA, 25 bp, Homo sapien
catctcctcctttatcaggatgaaa

SEQ ID NO: 6021883 - DNA, 25 bp, Homo sapien
acagcaagcatatgcagttagcaga

SEQ ID NO: 6021884 - DNA, 25 bp, Homo sapien
gatgaaactccttgcatttttttaa

SEQ ID NO: 6021885 - DNA, 25 bp, Homo sapien
acagaagtaaggttccttcacaaag

SEQ ID NO: 6021886 - DNA, 25 bp, Homo sapien
tagcagacattttctttgcacactc

SEQ ID NO: 6021887 - DNA, 25 bp, Homo sapien
tccaattatgtcacaccacagaagt

SEQ ID NO: 6021888 - DNA, 25 bp, Homo sapien
gtccattagctgcaaagattcctct

SEQ ID NO: 6021889 - DNA, 25 bp, Homo sapien
tagaaggtccattagctgcaaagat

SEQ ID NO: 6021890 - DNA, 25 bp, Homo sapien
aaagtcaggttgatgagcatatttt

SEQ ID NO: 6021891 - DNA, 25 bp, Homo sapien
ctccttgcatttttttaaatatgcc

SEQ ID NO: 6021892 - DNA, 25 bp, Homo sapien
ccagaagcctccaaagtcaggttga

SEQ ID NO: 6021893 - DNA, 25 bp, Homo sapien
tcctcagtaagcacagcaagcatat

SEQ ID NO: 6021894 - DNA, 25 bp, Homo sapien
aatatgcctttctcatcagaggaat

SEQ ID NO: 6021895 - DNA, 25 bp, Homo sapien
cgaagcagtagcaatcaacccacac

SEQ ID NO: 6021896 - DNA, 25 bp, Homo sapien
aggttgatgagcatattttactcca

SEQ ID NO: 6021897 - DNA, 25 bp, Homo sapien
ttatgtcacaccacagaagtaaggt

SEQ ID NO: 6021898 - DNA, 25 bp, Homo sapien
ggcactcctttcaagacctagaagg

SEQ ID NO: 6021899 - DNA, 25 bp, Homo sapien
gtaaggttccttcacaaagatcaag

SEQ ID NO: 6021900 - DNA, 25 bp, Homo sapien
accacattctaaagcaatcgaagca

SEQ ID NO: 6021901 - DNA, 25 bp, Homo sapien
cagagtattcattttcttcattttt

SEQ ID NO: 6021902 - DNA, 25 bp, Homo sapien
tattcccccaggcactcctttcaag

SEQ ID NO: 6021903 - DNA, 25 bp, Homo sapien
tgcagtacattgcatcaacaccagg

SEQ ID NO: 6021904 - DNA, 25 bp, Homo sapien
cctgtataattttctattttcatgc

SEQ ID NO: 6021905 - DNA, 25 bp, Homo sapien
ttctattttcatgcttcatcctcag

SEQ ID NO: 6021906 - DNA, 25 bp, Homo sapien
agcaatcgaagcagtagcaatcaac

SEQ ID NO: 6021907 - DNA, 25 bp, Homo sapien
cttgtacagagtattcattttcttc

SEQ ID NO: 6021908 - DNA, 25 bp, Homo sapien
tttcatgcttcatcctcagtaagca

SEQ ID NO: 6021909 - DNA, 25 bp, Homo sapien
gaagcaaatacctcagttgcatccc

SEQ ID NO: 6021910 - DNA, 25 bp, Homo sapien
cccacacaagtggatctttcctgta

SEQ ID NO: 6021911 - DNA, 25 bp, Homo sapien
aagacctagaaggtccattagctgc

SEQ ID NO: 6021912 - DNA, 25 bp, Homo sapien
tagctgcaaagattcctctctgttt

SEQ ID NO: 6021913 - DNA, 25 bp, Homo sapien
ttttaaatatgcctttctcatcaga

SEQ ID NO: 6021914 - DNA, 25 bp, Homo sapien
gcttcatcctcagtaagcacagcaa

SEQ ID NO: 6021915 - DNA, 25 bp, Homo sapien
tgcagttagcagacattttctttgc

SEQ ID NO: 6021916 - DNA, 25 bp, Homo sapien
ttttcttcattttttcttcatctcc

SEQ ID NO: 6021917 - DNA, 25 bp, Homo sapien
acattttctttgcacactcaggcca

SEQ ID NO: 6021918 - DNA, 25 bp, Homo sapien
tatcaggatgaaactccttgcattt

SEQ ID NO: 6021919 - DNA, 25 bp, Homo sapien
ttctaaagcaatcgaagcagtagca

SEQ ID NO: 6021920 - DNA, 25 bp, Homo sapien
tttcttcatctcctcctttatcagg

SEQ ID NO: 6021921 - DNA, 25 bp, Homo sapien
acattgcatcaacaccaggatttaa

SEQ ID NO: 6021922 - DNA, 25 bp, Homo sapien
tgcatcccagaagcctccaaagtca

SEQ ID NO: 6021923 - DNA, 25 bp, Homo sapien
agtagcaatcaacccacacaagtgg

SEQ ID NO: 6021924 - DNA, 25 bp, Homo sapien
tccaaaccacattctaaagcaatcg

SEQ ID NO: 6021925 - DNA, 25 bp, Homo sapien
ccccaggcactcctttcaagaccta

SEQ ID NO: 6021926 - DNA, 25 bp, Homo sapien
aaggaagaagcaaatacctcagttg

SEQ ID NO: 6021927 - DNA, 25 bp, Homo sapien
cacaccacagaagtaaggttccttc

SEQ ID NO: 6021928 - DNA, 25 bp, Homo sapien
taattttctattttcatgcttcatc

SEQ ID NO: 6021929 - DNA, 25 bp, Homo sapien
cctttcaagacctagaaggtccatt

SEQ ID NO: 6021930 - DNA, 25 bp, Homo sapien
aatcaacccacacaagtggatcttt

SEQ ID NO: 6021931 - DNA, 25 bp, Homo sapien
accaactcgcgaggggatcgagccc

SEQ ID NO: 6021932 - DNA, 25 bp, Homo sapien
ggcggcggtggaatcgaaatctcgt

SEQ ID NO: 6021933 - DNA, 25 bp, Homo sapien
gaggatcatccagccggcgtcccgg

SEQ ID NO: 6021934 - DNA, 25 bp, Homo sapien
actcctgcagttcgggggcatggat

SEQ ID NO: 6021935 - DNA, 25 bp, Homo sapien
tagaaggcggcggtggaatcgaaat

SEQ ID NO: 6021936 - DNA, 25 bp, Homo sapien
acgattccgaagcccaacctttcat

SEQ ID NO: 6021937 - DNA, 25 bp, Homo sapien
cgcgaggggatcgagcccggggtgg

SEQ ID NO: 6021938 - DNA, 25 bp, Homo sapien
gatagccgctgctggtttcctggat

SEQ ID NO: 6021939 - DNA, 25 bp, Homo sapien
atcgaaatctcgtgatggcaggttg

SEQ ID NO: 6021940 - DNA, 25 bp, Homo sapien
cgctggaggatcatccagccggcgt

SEQ ID NO: 6021941 - DNA, 25 bp, Homo sapien
gcccaacctttcatagaaggcggcg

SEQ ID NO: 6021942 - DNA, 25 bp, Homo sapien
tccccactcctgcagttcgggggca

SEQ ID NO: 6021943 - DNA, 25 bp, Homo sapien
atcaggcgcaggagcgtcccgtccg

SEQ ID NO: 6021944 - DNA, 25 bp, Homo sapien
atctcgtgatggcaggttgggcgtc

SEQ ID NO: 6021945 - DNA, 25 bp, Homo sapien
ccggggtgggcgaagaactccagca

SEQ ID NO: 6021946 - DNA, 25 bp, Homo sapien
cggatttgcactgccggtagaactc

SEQ ID NO: 6021947 - DNA, 25 bp, Homo sapien
tgcactgccggtagaactccgcgag

SEQ ID NO: 6021948 - DNA, 25 bp, Homo sapien
cgtccgggtcgaccaaagcggccat

SEQ ID NO: 6021949 - DNA, 25 bp, Homo sapien
ccaaagcggccatcgtgcctcccca

SEQ ID NO: 6021950 - DNA, 25 bp, Homo sapien
gccggtagaactccgcgaggtcgtc

SEQ ID NO: 6021951 - DNA, 25 bp, Homo sapien
cagctgaaccaactcgcgaggggat

SEQ ID NO: 6021952 - DNA, 25 bp, Homo sapien
aagaactccagcatgagatccccgc

SEQ ID NO: 6021953 - DNA, 25 bp, Homo sapien
caggttgggcgtcgcttggtcggtc

SEQ ID NO: 6021954 - DNA, 25 bp, Homo sapien
catgagatccccgcgctggaggatc

SEQ ID NO: 6021955 - DNA, 25 bp, Homo sapien
agcctcaggcagcagctgaaccaac

SEQ ID NO: 6021956 - DNA, 25 bp, Homo sapien
gatcgagcccggggtgggcgaagaa

SEQ ID NO: 6021957 - DNA, 25 bp, Homo sapien
aggcagcagctgaaccaactcgcga

SEQ ID NO: 6021958 - DNA, 25 bp, Homo sapien
catccagccggcgtcccggaaaacg

SEQ ID NO: 6021959 - DNA, 25 bp, Homo sapien
cctttcatagaaggcggcggtggaa

SEQ ID NO: 6021960 - DNA, 25 bp, Homo sapien
gggtcgaccaaagcggccatcgtgc

SEQ ID NO: 6021961 - DNA, 25 bp, Homo sapien
atccccgcgctggaggatcatccag

SEQ ID NO: 6021962 - DNA, 25 bp, Homo sapien
tgcgcggatagccgctgctggtttc

SEQ ID NO: 6021963 - DNA, 25 bp, Homo sapien
tgggcgaagaactccagcatgagat

SEQ ID NO: 6021964 - DNA, 25 bp, Homo sapien
cgtgcctccccactcctgcagttcg

SEQ ID NO: 6021965 - DNA, 25 bp, Homo sapien
gcaggagcgtcccgtccgggtcgac

SEQ ID NO: 6021966 - DNA, 25 bp, Homo sapien
tggtttcctggatgccgacggattt

SEQ ID NO: 6021967 - DNA, 25 bp, Homo sapien
gcgaggtcgtccagcctcaggcagc

SEQ ID NO: 6021968 - DNA, 25 bp, Homo sapien
ggtggaatcgaaatctcgtgatggc

SEQ ID NO: 6021969 - DNA, 25 bp, Homo sapien
gcagttcgggggcatggatgcgcgg

SEQ ID NO: 6021970 - DNA, 25 bp, Homo sapien
tccgaagcccaacctttcatagaag

SEQ ID NO: 6021971 - DNA, 25 bp, Homo sapien
cgctgctggtttcctggatgccgac

SEQ ID NO: 6021972 - DNA, 25 bp, Homo sapien
tcgtccagcctcaggcagcagctga

SEQ ID NO: 6021973 - DNA, 25 bp, Homo sapien
cggccatcgtgcctccccactcctg

SEQ ID NO: 6021974 - DNA, 25 bp, Homo sapien
cgggggcatggatgcgcggatagcc

SEQ ID NO: 6021975 - DNA, 25 bp, Homo sapien
tccagcatgagatccccgcgctgga

SEQ ID NO: 6021976 - DNA, 25 bp, Homo sapien
catggatgcgcggatagccgctgct

SEQ ID NO: 6021977 - DNA, 25 bp, Homo sapien
tgccgacggatttgcactgccggta

SEQ ID NO: 6021978 - DNA, 25 bp, Homo sapien
cctggatgccgacggatttgcactg

SEQ ID NO: 6021979 - DNA, 25 bp, Homo sapien
agaactccgcgaggtcgtccagcct

SEQ ID NO: 6021980 - DNA, 25 bp, Homo sapien
tgatggcaggttgggcgtcgcttgg

SEQ ID NO: 6021981 - DNA, 25 bp, Homo sapien
tcagattgcttttattattcattaa

SEQ ID NO: 6021982 - DNA, 25 bp, Homo sapien
ggttgtgcctatgtaatataggaca

SEQ ID NO: 6021983 - DNA, 25 bp, Homo sapien
aagaattatttatgaacgagatctc

SEQ ID NO: 6021984 - DNA, 25 bp, Homo sapien
cacataaaagttgaaattactagaa

SEQ ID NO: 6021985 - DNA, 25 bp, Homo sapien
acaccaacccacatgcaaaacccca

SEQ ID NO: 6021986 - DNA, 25 bp, Homo sapien
tactagaaaatgtgcatatggatgc

SEQ ID NO: 6021987 - DNA, 25 bp, Homo sapien
aagttcaaattctgcactgtgcaaa

SEQ ID NO: 6021988 - DNA, 25 bp, Homo sapien
atgcctctgtcacacttctaacaca

SEQ ID NO: 6021989 - DNA, 25 bp, Homo sapien
aagttgaaattactagaaaatgtgc

SEQ ID NO: 6021990 - DNA, 25 bp, Homo sapien
aaaatgtgcatatggatgcttgtaa

SEQ ID NO: 6021991 - DNA, 25 bp, Homo sapien
ccttgctaggagaaagctggttgtg

SEQ ID NO: 6021992 - DNA, 25 bp, Homo sapien
tagagaagtagttccagatatgctg

SEQ ID NO: 6021993 - DNA, 25 bp, Homo sapien
tttagatgtgatcaagttcaaattc

SEQ ID NO: 6021994 - DNA, 25 bp, Homo sapien
tatttatgaacgagatctcacattt

SEQ ID NO: 6021995 - DNA, 25 bp, Homo sapien
aactgctgtgcaaagagaagagccc

SEQ ID NO: 6021996 - DNA, 25 bp, Homo sapien
atgcaaaaccccacaagtgtagtcg

SEQ ID NO: 6021997 - DNA, 25 bp, Homo sapien
gaagatctatctcagaggctatagc

SEQ ID NO: 6021998 - DNA, 25 bp, Homo sapien
gtcaagggatatactggaatatgtt

SEQ ID NO: 6021999 - DNA, 25 bp, Homo sapien
cattttttttatcacataaaagttg

SEQ ID NO: 6022000 - DNA, 25 bp, Homo sapien
ggatatactggaatatgttagagaa

SEQ ID NO: 6022001 - DNA, 25 bp, Homo sapien
cacattttcagattgcttttattat

SEQ ID NO: 6022002 - DNA, 25 bp, Homo sapien
tgtgatcaagttcaaattctgcact

SEQ ID NO: 6022003 - DNA, 25 bp, Homo sapien
gcctatgtaatataggacaaaggtg

SEQ ID NO: 6022004 - DNA, 25 bp, Homo sapien
taaaatgataaagaagatctatctc

SEQ ID NO: 6022005 - DNA, 25 bp, Homo sapien
agaaagtaccaggattgttgccgct

SEQ ID NO: 6022006 - DNA, 25 bp, Homo sapien
tgcactgtgcaaagtacaagtttta

SEQ ID NO: 6022007 - DNA, 25 bp, Homo sapien
ctaacacatcacattaatttctagt

SEQ ID NO: 6022008 - DNA, 25 bp, Homo sapien
tgcatatggatgcttgtaaactgct

SEQ ID NO: 6022009 - DNA, 25 bp, Homo sapien
atctgaacaccaacccacatgcaaa

SEQ ID NO: 6022010 - DNA, 25 bp, Homo sapien
gattgttgccgctgttttgttttac

SEQ ID NO: 6022011 - DNA, 25 bp, Homo sapien
gtcattcaatgtgattcagaaagga

SEQ ID NO: 6022012 - DNA, 25 bp, Homo sapien
gattcagaaaggaaagagtcaaggg

SEQ ID NO: 6022013 - DNA, 25 bp, Homo sapien
taggacaaaggtgaccgatttcatc

SEQ ID NO: 6022014 - DNA, 25 bp, Homo sapien
ctcatctccgccatgcctctgtcac

SEQ ID NO: 6022015 - DNA, 25 bp, Homo sapien
agatctcacattttcagattgcttt

SEQ ID NO: 6022016 - DNA, 25 bp, Homo sapien
caatgtgattcagaaaggaaagagt

SEQ ID NO: 6022017 - DNA, 25 bp, Homo sapien
ttaatgtaaaatgataaagaagatc

SEQ ID NO: 6022018 - DNA, 25 bp, Homo sapien
taggagaaagctggttgtgcctatg

SEQ ID NO: 6022019 - DNA, 25 bp, Homo sapien
caacaacaacaacaaaaatcaataa

SEQ ID NO: 6022020 - DNA, 25 bp, Homo sapien
agagccctcaactgtaatagctata

SEQ ID NO: 6022021 - DNA, 25 bp, Homo sapien
ctatctcagaggctatagctgggag

SEQ ID NO: 6022022 - DNA, 25 bp, Homo sapien
gtagtcgtcattcaatgtgattcag

SEQ ID NO: 6022023 - DNA, 25 bp, Homo sapien
taccaggattgttgccgctgttttg

SEQ ID NO: 6022024 - DNA, 25 bp, Homo sapien
tattcattaatgtaaaatgataaag

SEQ ID NO: 6022025 - DNA, 25 bp, Homo sapien
aaatttgtgggtatctgaacaccaa

SEQ ID NO: 6022026 - DNA, 25 bp, Homo sapien
tgaaattactagaaaatgtgcatat

SEQ ID NO: 6022027 - DNA, 25 bp, Homo sapien
atatgttagagaagtagttccagat

SEQ ID NO: 6022028 - DNA, 25 bp, Homo sapien
gataaagaagatctatctcagaggc

SEQ ID NO: 6022029 - DNA, 25 bp, Homo sapien
ctatagctgggagcagaaactgtga

SEQ ID NO: 6022030 - DNA, 25 bp, Homo sapien
gaaaggaaagagtcaagggatatac

SEQ ID NO: 6022031 - DNA, 25 bp, Homo sapien
gttagcccttgctaggagaaagctg

SEQ ID NO: 6022032 - DNA, 25 bp, Homo sapien
aaagagtcaagggatatactggaat

SEQ ID NO: 6022033 - DNA, 25 bp, Homo sapien
taatgaagaattatttatgaacgag

SEQ ID NO: 6022034 - DNA, 25 bp, Homo sapien
cttgtaaactgctgtgcaaagagaa

SEQ ID NO: 6022035 - DNA, 25 bp, Homo sapien
ttagagcaggaccattttttttatc

SEQ ID NO: 6022036 - DNA, 25 bp, Homo sapien
acaagtgtagtcgtcattcaatgtg

SEQ ID NO: 6022037 - DNA, 25 bp, Homo sapien
agctatagaaagtaccaggattgtt

SEQ ID NO: 6022038 - DNA, 25 bp, Homo sapien
tctgtcacacttctaacacatcaca

SEQ ID NO: 6022039 - DNA, 25 bp, Homo sapien
aagagaagagccctcaactgtaata

SEQ ID NO: 6022040 - DNA, 25 bp, Homo sapien
tgcttttattattcattaatgtaaa

SEQ ID NO: 6022041 - DNA, 25 bp, Homo sapien
tccagatatgctggaatgttagccc

SEQ ID NO: 6022042 - DNA, 25 bp, Homo sapien
caacaacaaaaatcaataatgaaga

SEQ ID NO: 6022043 - DNA, 25 bp, Homo sapien
gtgggtatctgaacaccaacccaca

SEQ ID NO: 6022044 - DNA, 25 bp, Homo sapien
acccacatgcaaaaccccacaagtg

SEQ ID NO: 6022045 - DNA, 25 bp, Homo sapien
tgtgcaaagagaagagccctcaact

SEQ ID NO: 6022046 - DNA, 25 bp, Homo sapien
ctgggagcagaaactgtgaaatttg

SEQ ID NO: 6022047 - DNA, 25 bp, Homo sapien
caggaccattttttttatcacataa

SEQ ID NO: 6022048 - DNA, 25 bp, Homo sapien
actgtgaaatttgtgggtatctgaa

SEQ ID NO: 6022049 - DNA, 25 bp, Homo sapien
ggaatgttagcccttgctaggagaa

SEQ ID NO: 6022050 - DNA, 25 bp, Homo sapien
ttctagtttagatgtgatcaagttc

SEQ ID NO: 6022051 - DNA, 25 bp, Homo sapien
actggaatatgttagagaagtagtt

SEQ ID NO: 6022052 - DNA, 25 bp, Homo sapien
gcagaaactgtgaaatttgtgggta

SEQ ID NO: 6022053 - DNA, 25 bp, Homo sapien
aaagctggttgtgcctatgtaatat

SEQ ID NO: 6022054 - DNA, 25 bp, Homo sapien
tccgccatgcctctgtcacacttct

SEQ ID NO: 6022055 - DNA, 25 bp, Homo sapien
attaatttctagtttagatgtgatc

SEQ ID NO: 6022056 - DNA, 25 bp, Homo sapien
gtaatataggacaaaggtgaccgat

SEQ ID NO: 6022057 - DNA, 25 bp, Homo sapien
ctcaactgtaatagctatagaaagt

SEQ ID NO: 6022058 - DNA, 25 bp, Homo sapien
tatgctggaatgttagcccttgcta

SEQ ID NO: 6022059 - DNA, 25 bp, Homo sapien
tttatcacataaaagttgaaattac

SEQ ID NO: 6022060 - DNA, 25 bp, Homo sapien
tgaacgagatctcacattttcagat

SEQ ID NO: 6022061 - DNA, 25 bp, Homo sapien
caaaaatcaataatgaagaattatt

SEQ ID NO: 6022062 - DNA, 25 bp, Homo sapien
cagaggctatagctgggagcagaaa

SEQ ID NO: 6022063 - DNA, 25 bp, Homo sapien
agtagttccagatatgctggaatgt

SEQ ID NO: 6022064 - DNA, 25 bp, Homo sapien
aaccccacaagtgtagtcgtcattc

SEQ ID NO: 6022065 - DNA, 25 bp, Homo sapien
aaattctgcactgtgcaaagtacaa

SEQ ID NO: 6022066 - DNA, 25 bp, Homo sapien
catcacattaatttctagtttagat

SEQ ID NO: 6022067 - DNA, 25 bp, Homo sapien
tgtaatagctatagaaagtaccagg

SEQ ID NO: 6022068 - DNA, 25 bp, Homo sapien
acacttctaacacatcacattaatt

SEQ ID NO: 6022069 - DNA, 25 bp, Homo sapien
tggatgcttgtaaactgctgtgcaa

SEQ ID NO: 6022070 - DNA, 25 bp, Homo sapien
gtgcaaagtacaagttttagagcag

SEQ ID NO: 6022071 - DNA, 25 bp, Homo sapien
tgtttacaagcattcttacataccc

SEQ ID NO: 6022072 - DNA, 25 bp, Homo sapien
gttcagatacccacaaatttcacag

SEQ ID NO: 6022073 - DNA, 25 bp, Homo sapien
ttttgcatgtgggttggtgttcaga

SEQ ID NO: 6022074 - DNA, 25 bp, Homo sapien
tacacttgtggggttttgcatgtgg

SEQ ID NO: 6022075 - DNA, 25 bp, Homo sapien
ggctcagtgagacagacaatcatgg

SEQ ID NO: 6022076 - DNA, 25 bp, Homo sapien
tcacagtttctgctcccagctatag

SEQ ID NO: 6022077 - DNA, 25 bp, Homo sapien
tgagttttcttctttcaaaagccta

SEQ ID NO: 6022078 - DNA, 25 bp, Homo sapien
cagacaatcatggatggagacggac

SEQ ID NO: 6022079 - DNA, 25 bp, Homo sapien
ggaactacttctctaacatattcca

SEQ ID NO: 6022080 - DNA, 25 bp, Homo sapien
gttagcaccacaaatctatactgca

SEQ ID NO: 6022081 - DNA, 25 bp, Homo sapien
ctaacatattccagtatatcccttg

SEQ ID NO: 6022082 - DNA, 25 bp, Homo sapien
caaatttcacagtttctgctcccag

SEQ ID NO: 6022083 - DNA, 25 bp, Homo sapien
tatttacagctaataaataaattga

SEQ ID NO: 6022084 - DNA, 25 bp, Homo sapien
ttttattgttagaattgactccaaa

SEQ ID NO: 6022085 - DNA, 25 bp, Homo sapien
tactgcagataaccacaacagactt

SEQ ID NO: 6022086 - DNA, 25 bp, Homo sapien
cagactttccagtgtttacaagcat

SEQ ID NO: 6022087 - DNA, 25 bp, Homo sapien
ctcccagctatagcctctgagatag

SEQ ID NO: 6022088 - DNA, 25 bp, Homo sapien
cctatattacataggcacaaccagc

SEQ ID NO: 6022089 - DNA, 25 bp, Homo sapien
gtactgtttcatcagagttaagttg

SEQ ID NO: 6022090 - DNA, 25 bp, Homo sapien
aattgactccaaacttgatgaaatc

SEQ ID NO: 6022091 - DNA, 25 bp, Homo sapien
cagagttaagttggctcagtgagac

SEQ ID NO: 6022092 - DNA, 25 bp, Homo sapien
cacacattatttacagctaataaat

SEQ ID NO: 6022093 - DNA, 25 bp, Homo sapien
ggtcacctttgtcctatattacata

SEQ ID NO: 6022094 - DNA, 25 bp, Homo sapien
ttgactctttcctttctgaatcaca

SEQ ID NO: 6022095 - DNA, 25 bp, Homo sapien
tttcatcagagttaagttggctcag

SEQ ID NO: 6022096 - DNA, 25 bp, Homo sapien
aattagcaataatggggatgccggt

SEQ ID NO: 6022097 - DNA, 25 bp, Homo sapien
ctttcctttctgaatcacattgaat

SEQ ID NO: 6022098 - DNA, 25 bp, Homo sapien
aatcacattgaatgacgactacact

SEQ ID NO: 6022099 - DNA, 25 bp, Homo sapien
gaaatcggtcacctttgtcctatat

SEQ ID NO: 6022100 - DNA, 25 bp, Homo sapien
tactgtaatgaattagcaataatgg

SEQ ID NO: 6022101 - DNA, 25 bp, Homo sapien
gcctatttcattgtactgtttcatc

SEQ ID NO: 6022102 - DNA, 25 bp, Homo sapien
gcctctgagatagatcttctttatc

SEQ ID NO: 6022103 - DNA, 25 bp, Homo sapien
tcaaaagcctatttcattgtactgt

SEQ ID NO: 6022104 - DNA, 25 bp, Homo sapien
gcagataccatttcttcacacaggt

SEQ ID NO: 6022105 - DNA, 25 bp, Homo sapien
acttctctaacatattccagtatat

SEQ ID NO: 6022106 - DNA, 25 bp, Homo sapien
tattccagtatatcccttgactctt

SEQ ID NO: 6022107 - DNA, 25 bp, Homo sapien
cagctaataaataaattgaaagcta

SEQ ID NO: 6022108 - DNA, 25 bp, Homo sapien
cttctttcaaaagcctatttcattg

SEQ ID NO: 6022109 - DNA, 25 bp, Homo sapien
atatctggaactacttctctaacat

SEQ ID NO: 6022110 - DNA, 25 bp, Homo sapien
ctccaaacttgatgaaatcggtcac

SEQ ID NO: 6022111 - DNA, 25 bp, Homo sapien
attgaatgacgactacacttgtggg

SEQ ID NO: 6022112 - DNA, 25 bp, Homo sapien
catatgtatgcatggatgtgtatat

SEQ ID NO: 6022113 - DNA, 25 bp, Homo sapien
cattgacatatgtatgcatggatgt

SEQ ID NO: 6022114 - DNA, 25 bp, Homo sapien
agataaccacaacagactttccagt

SEQ ID NO: 6022115 - DNA, 25 bp, Homo sapien
aagcatcattgacatatgtatgcat

SEQ ID NO: 6022116 - DNA, 25 bp, Homo sapien
caataatggggatgccggtaacaaa

SEQ ID NO: 6022117 - DNA, 25 bp, Homo sapien
tccagcatatctggaactacttctc

SEQ ID NO: 6022118 - DNA, 25 bp, Homo sapien
ttccagtgtttacaagcattcttac

SEQ ID NO: 6022119 - DNA, 25 bp, Homo sapien
gacggacacaaagttagcaccacaa

SEQ ID NO: 6022120 - DNA, 25 bp, Homo sapien
tacccacaaatttcacagtttctgc

SEQ ID NO: 6022121 - DNA, 25 bp, Homo sapien
tgttagaattgactccaaacttgat

SEQ ID NO: 6022122 - DNA, 25 bp, Homo sapien
aatgaattagcaataatggggatgc

SEQ ID NO: 6022123 - DNA, 25 bp, Homo sapien
atcatggatggagacggacacaaag

SEQ ID NO: 6022124 - DNA, 25 bp, Homo sapien
tatgcatggatgtgtatatactgta

SEQ ID NO: 6022125 - DNA, 25 bp, Homo sapien
taagttggctcagtgagacagacaa

SEQ ID NO: 6022126 - DNA, 25 bp, Homo sapien
cacaaagttagcaccacaaatctat

SEQ ID NO: 6022127 - DNA, 25 bp, Homo sapien
accatttcttcacacaggtgagttt

SEQ ID NO: 6022128 - DNA, 25 bp, Homo sapien
tgccggtaacaaattatacatattt

SEQ ID NO: 6022129 - DNA, 25 bp, Homo sapien
gtgagacagacaatcatggatggag

SEQ ID NO: 6022130 - DNA, 25 bp, Homo sapien
catacccacacattatttacagcta

SEQ ID NO: 6022131 - DNA, 25 bp, Homo sapien
aaccagctttctcctagcaagggct

SEQ ID NO: 6022132 - DNA, 25 bp, Homo sapien
aatctatactgcagataaccacaac

SEQ ID NO: 6022133 - DNA, 25 bp, Homo sapien
aggcacaaccagctttctcctagca

SEQ ID NO: 6022134 - DNA, 25 bp, Homo sapien
ttcttacatacccacacattattta

SEQ ID NO: 6022135 - DNA, 25 bp, Homo sapien
tgtatatactgtaatgaattagcaa

SEQ ID NO: 6022136 - DNA, 25 bp, Homo sapien
caagcattcttacatacccacacat

SEQ ID NO: 6022137 - DNA, 25 bp, Homo sapien
gttggtgttcagatacccacaaatt

SEQ ID NO: 6022138 - DNA, 25 bp, Homo sapien
tttctgctcccagctatagcctctg

SEQ ID NO: 6022139 - DNA, 25 bp, Homo sapien
cacaggtgagttttcttctttcaaa

SEQ ID NO: 6022140 - DNA, 25 bp, Homo sapien
tggatgtgtatatactgtaatgaat

SEQ ID NO: 6022141 - DNA, 25 bp, Homo sapien
ttcattgtactgtttcatcagagtt

SEQ ID NO: 6022142 - DNA, 25 bp, Homo sapien
gatggagacggacacaaagttagca

SEQ ID NO: 6022143 - DNA, 25 bp, Homo sapien
tggggatgccggtaacaaattatac

SEQ ID NO: 6022144 - DNA, 25 bp, Homo sapien
tcttcacacaggtgagttttcttct

SEQ ID NO: 6022145 - DNA, 25 bp, Homo sapien
gctatagcctctgagatagatcttc

SEQ ID NO: 6022146 - DNA, 25 bp, Homo sapien
ctttctcctagcaagggctaacatt

SEQ ID NO: 6022147 - DNA, 25 bp, Homo sapien
taaataaattgaaagctaaagcatc

SEQ ID NO: 6022148 - DNA, 25 bp, Homo sapien
aagggctaacattccagcatatctg

SEQ ID NO: 6022149 - DNA, 25 bp, Homo sapien
aattgaaagctaaagcatcattgac

SEQ ID NO: 6022150 - DNA, 25 bp, Homo sapien
taacattccagcatatctggaacta

SEQ ID NO: 6022151 - DNA, 25 bp, Homo sapien
atgtgggttggtgttcagataccca

SEQ ID NO: 6022152 - DNA, 25 bp, Homo sapien
ttacataggcacaaccagctttctc

SEQ ID NO: 6022153 - DNA, 25 bp, Homo sapien
ccacaacagactttccagtgtttac

SEQ ID NO: 6022154 - DNA, 25 bp, Homo sapien
ctttgtcctatattacataggcaca

SEQ ID NO: 6022155 - DNA, 25 bp, Homo sapien
acttgatgaaatcggtcacctttgt

SEQ ID NO: 6022156 - DNA, 25 bp, Homo sapien
aagctaaagcatcattgacatatgt

SEQ ID NO: 6022157 - DNA, 25 bp, Homo sapien
cctagcaagggctaacattccagca

SEQ ID NO: 6022158 - DNA, 25 bp, Homo sapien
gacgactacacttgtggggttttgc

SEQ ID NO: 6022159 - DNA, 25 bp, Homo sapien
accacaaatctatactgcagataac

SEQ ID NO: 6022160 - DNA, 25 bp, Homo sapien
acatatttttattgttagaattgac

SEQ ID NO: 6022161 - DNA, 25 bp, Homo sapien
tttctgaatcacattgaatgacgac

SEQ ID NO: 6022162 - DNA, 25 bp, Homo sapien
ttagcaggagtatccactgcccgaa

SEQ ID NO: 6022163 - DNA, 25 bp, Homo sapien
ccctcccactcaacctcataggata

SEQ ID NO: 6022164 - DNA, 25 bp, Homo sapien
tataacactttttacatatatgtac

SEQ ID NO: 6022165 - DNA, 25 bp, Homo sapien
acttgaccctgtagacggagtactg

SEQ ID NO: 6022166 - DNA, 25 bp, Homo sapien
cacgtggccccctttcatctgaaag

SEQ ID NO: 6022167 - DNA, 25 bp, Homo sapien
cgtcagcctcgtgttgaatcttaaa

SEQ ID NO: 6022168 - DNA, 25 bp, Homo sapien
acaactttacatcctaacactataa

SEQ ID NO: 6022169 - DNA, 25 bp, Homo sapien
caagcaatctgtgaaatggtgctat

SEQ ID NO: 6022170 - DNA, 25 bp, Homo sapien
ggaaccctctgcaaaaacagtaata

SEQ ID NO: 6022171 - DNA, 25 bp, Homo sapien
ccaaacgcaagccaaaccaaacaga

SEQ ID NO: 6022172 - DNA, 25 bp, Homo sapien
gccctaagcactcacagacgaaaag

SEQ ID NO: 6022173 - DNA, 25 bp, Homo sapien
cctaacactataaccaagctcagta

SEQ ID NO: 6022174 - DNA, 25 bp, Homo sapien
cctatttataacactttttacatat

SEQ ID NO: 6022175 - DNA, 25 bp, Homo sapien
agacggagtactggggccacacgtt

SEQ ID NO: 6022176 - DNA, 25 bp, Homo sapien
tttgctcagacataaaaactccacg

SEQ ID NO: 6022177 - DNA, 25 bp, Homo sapien
cctcgtgttgaatcttaaacaactt

SEQ ID NO: 6022178 - DNA, 25 bp, Homo sapien
cagacagttgaagacctttacacta

SEQ ID NO: 6022179 - DNA, 25 bp, Homo sapien
tcttaaacaactttacatcctaaca

SEQ ID NO: 6022180 - DNA, 25 bp, Homo sapien
cactcaacctcataggataaccaaa

SEQ ID NO: 6022181 - DNA, 25 bp, Homo sapien
gttgattgaagatgtatataatatc

SEQ ID NO: 6022182 - DNA, 25 bp, Homo sapien
gttgaagacctttacactatgggtg

SEQ ID NO: 6022183 - DNA, 25 bp, Homo sapien
agaagtcagagacaagcaatctgtg

SEQ ID NO: 6022184 - DNA, 25 bp, Homo sapien
taaatgagaagtcagagacaagcaa

SEQ ID NO: 6022185 - DNA, 25 bp, Homo sapien
ggattgttttgctttttatgttgac

SEQ ID NO: 6022186 - DNA, 25 bp, Homo sapien
agcactcacagacgaaaagccctga

SEQ ID NO: 6022187 - DNA, 25 bp, Homo sapien
cagacataaaaactccacgtggccc

SEQ ID NO: 6022188 - DNA, 25 bp, Homo sapien
tttttatgttgaccgtcagcctcgt

SEQ ID NO: 6022189 - DNA, 25 bp, Homo sapien
atacctccctcccactcaacctcat

SEQ ID NO: 6022190 - DNA, 25 bp, Homo sapien
tttacatatatgtacataggattgt

SEQ ID NO: 6022191 - DNA, 25 bp, Homo sapien
ttttaatctttttgttttgctcaga

SEQ ID NO: 6022192 - DNA, 25 bp, Homo sapien
cccgaatccatgtgtgaagccctaa

SEQ ID NO: 6022193 - DNA, 25 bp, Homo sapien
tggctcctgaacacttgaccctgta

SEQ ID NO: 6022194 - DNA, 25 bp, Homo sapien
ttacatcctaacactataaccaagc

SEQ ID NO: 6022195 - DNA, 25 bp, Homo sapien
atatctatggtttataaaacctatt

SEQ ID NO: 6022196 - DNA, 25 bp, Homo sapien
cagttgagtggggattgctgttgat

SEQ ID NO: 6022197 - DNA, 25 bp, Homo sapien
gggccacacgtttaaatgagaagtc

SEQ ID NO: 6022198 - DNA, 25 bp, Homo sapien
ctgaacacttgaccctgtagacgga

SEQ ID NO: 6022199 - DNA, 25 bp, Homo sapien
taggataaccaaagtgtggggacaa

SEQ ID NO: 6022200 - DNA, 25 bp, Homo sapien
tagccccaaacccaaacgcaagcca

SEQ ID NO: 6022201 - DNA, 25 bp, Homo sapien
tgtgaagccctaagcactcacagac

SEQ ID NO: 6022202 - DNA, 25 bp, Homo sapien
gacccagtgcatttagcaggagtat

SEQ ID NO: 6022203 - DNA, 25 bp, Homo sapien
ttgaagatgtatataatatctatgg

SEQ ID NO: 6022204 - DNA, 25 bp, Homo sapien
cactttttacatatatgtacatagg

SEQ ID NO: 6022205 - DNA, 25 bp, Homo sapien
caaaccccagacagttgaagacctt

SEQ ID NO: 6022206 - DNA, 25 bp, Homo sapien
tgttgaccgtcagcctcgtgttgaa

SEQ ID NO: 6022207 - DNA, 25 bp, Homo sapien
aagcagatacctccctcccactcaa

SEQ ID NO: 6022208 - DNA, 25 bp, Homo sapien
gttgaatcttaaacaactttacatc

SEQ ID NO: 6022209 - DNA, 25 bp, Homo sapien
tacataggattgttttgctttttat

SEQ ID NO: 6022210 - DNA, 25 bp, Homo sapien
aagccctgaccggaaccctctgcaa

SEQ ID NO: 6022211 - DNA, 25 bp, Homo sapien
agtaatagctggtggctcctgaaca

SEQ ID NO: 6022212 - DNA, 25 bp, Homo sapien
tacactatgggtgacccagtgcatt

SEQ ID NO: 6022213 - DNA, 25 bp, Homo sapien
gatgtatataatatctatggtttat

SEQ ID NO: 6022214 - DNA, 25 bp, Homo sapien
gccaaaccaaacagaacgcagttga

SEQ ID NO: 6022215 - DNA, 25 bp, Homo sapien
gattgctgttgattgaagatgtata

SEQ ID NO: 6022216 - DNA, 25 bp, Homo sapien
tatatgtacataggattgttttgct

SEQ ID NO: 6022217 - DNA, 25 bp, Homo sapien
accaagctcagtatctttgttttgt

SEQ ID NO: 6022218 - DNA, 25 bp, Homo sapien
atgggtgacccagtgcatttagcag

SEQ ID NO: 6022219 - DNA, 25 bp, Homo sapien
agtggggattgctgttgattgaaga

SEQ ID NO: 6022220 - DNA, 25 bp, Homo sapien
agagctagccccaaacccaaacgca

SEQ ID NO: 6022221 - DNA, 25 bp, Homo sapien
agtgtggggacaaaccccagacagt

SEQ ID NO: 6022222 - DNA, 25 bp, Homo sapien
cacagacgaaaagccctgaccggaa

SEQ ID NO: 6022223 - DNA, 25 bp, Homo sapien
tataatatctatggtttataaaacc

SEQ ID NO: 6022224 - DNA, 25 bp, Homo sapien
ctctgcaaaaacagtaatagctggt

SEQ ID NO: 6022225 - DNA, 25 bp, Homo sapien
aaaaacagtaatagctggtggctcc

SEQ ID NO: 6022226 - DNA, 25 bp, Homo sapien
actataaccaagctcagtatctttg

SEQ ID NO: 6022227 - DNA, 25 bp, Homo sapien
cagagacaagcaatctgtgaaatgg

SEQ ID NO: 6022228 - DNA, 25 bp, Homo sapien
cctttcatctgaaagcagatacctc

SEQ ID NO: 6022229 - DNA, 25 bp, Homo sapien
tggccccctttcatctgaaagcaga

SEQ ID NO: 6022230 - DNA, 25 bp, Homo sapien
acctcataggataaccaaagtgtgg

SEQ ID NO: 6022231 - DNA, 25 bp, Homo sapien
ctcagtatctttgttttgtttcgtt

SEQ ID NO: 6022232 - DNA, 25 bp, Homo sapien
ctgaccggaaccctctgcaaaaaca

SEQ ID NO: 6022233 - DNA, 25 bp, Homo sapien
gacctttacactatgggtgacccag

SEQ ID NO: 6022234 - DNA, 25 bp, Homo sapien
aactccacgtggccccctttcatct

SEQ ID NO: 6022235 - DNA, 25 bp, Homo sapien
gggacaaaccccagacagttgaaga

SEQ ID NO: 6022236 - DNA, 25 bp, Homo sapien
gtgcatttagcaggagtatccactg

SEQ ID NO: 6022237 - DNA, 25 bp, Homo sapien
ttttgttttgctcagacataaaaac

SEQ ID NO: 6022238 - DNA, 25 bp, Homo sapien
agctggtggctcctgaacacttgac

SEQ ID NO: 6022239 - DNA, 25 bp, Homo sapien
ccaaacagaacgcagttgagtgggg

SEQ ID NO: 6022240 - DNA, 25 bp, Homo sapien
gtactggggccacacgtttaaatga

SEQ ID NO: 6022241 - DNA, 25 bp, Homo sapien
ccctgtagacggagtactggggcca

SEQ ID NO: 6022242 - DNA, 25 bp, Homo sapien
agaacgcagttgagtggggattgct

SEQ ID NO: 6022243 - DNA, 25 bp, Homo sapien
ttttgctttttatgttgaccgtcag

SEQ ID NO: 6022244 - DNA, 25 bp, Homo sapien
ccactgcccgaatccatgtgtgaag

SEQ ID NO: 6022245 - DNA, 25 bp, Homo sapien
ggagtatccactgcccgaatccatg

SEQ ID NO: 6022246 - DNA, 25 bp, Homo sapien
tccatgtgtgaagccctaagcactc

SEQ ID NO: 6022247 - DNA, 25 bp, Homo sapien
atctgaaagcagatacctccctccc

SEQ ID NO: 6022248 - DNA, 25 bp, Homo sapien
acgcaagccaaaccaaacagaacgc

SEQ ID NO: 6022249 - DNA, 25 bp, Homo sapien
cacgtttaaatgagaagtcagagac

SEQ ID NO: 6022250 - DNA, 25 bp, Homo sapien
tgggtcacccatagtgtaaaggtct

SEQ ID NO: 6022251 - DNA, 25 bp, Homo sapien
gaaaggtctggagtcttagcatcag

SEQ ID NO: 6022252 - DNA, 25 bp, Homo sapien
tttcgtctgtgagtgcttagggctt

SEQ ID NO: 6022253 - DNA, 25 bp, Homo sapien
tagtcccaagggtctagatgctcgt

SEQ ID NO: 6022254 - DNA, 25 bp, Homo sapien
aggagccaccagctattactgtttt

SEQ ID NO: 6022255 - DNA, 25 bp, Homo sapien
taggtatgaaagcagttatgaaccg

SEQ ID NO: 6022256 - DNA, 25 bp, Homo sapien
tgagaaaactgtgggactgacgaag

SEQ ID NO: 6022257 - DNA, 25 bp, Homo sapien
tagcatcagaaggacaccgtatata

SEQ ID NO: 6022258 - DNA, 25 bp, Homo sapien
agacagtccttggaggcacagaaca

SEQ ID NO: 6022259 - DNA, 25 bp, Homo sapien
tgagtggtttaaacgattagtaata

SEQ ID NO: 6022260 - DNA, 25 bp, Homo sapien
acagttggtggccaatacaagtcat

SEQ ID NO: 6022261 - DNA, 25 bp, Homo sapien
aatctatagcaccatttcacagatt

SEQ ID NO: 6022262 - DNA, 25 bp, Homo sapien
cagtactccgtctacagggtcaagt

SEQ ID NO: 6022263 - DNA, 25 bp, Homo sapien
gacaccgtatatacatctacagttg

SEQ ID NO: 6022264 - DNA, 25 bp, Homo sapien
gtatatacatctacagttggtggcc

SEQ ID NO: 6022265 - DNA, 25 bp, Homo sapien
caccagctattactgtttttgcaga

SEQ ID NO: 6022266 - DNA, 25 bp, Homo sapien
gaggcacagaacactctagacccag

SEQ ID NO: 6022267 - DNA, 25 bp, Homo sapien
aataacaacagcctagctaggtatg

SEQ ID NO: 6022268 - DNA, 25 bp, Homo sapien
gacccagaaagccagggaactcgct

SEQ ID NO: 6022269 - DNA, 25 bp, Homo sapien
cattctgctgtatcgcataaaactg

SEQ ID NO: 6022270 - DNA, 25 bp, Homo sapien
atggattcgggcagtggatactcct

SEQ ID NO: 6022271 - DNA, 25 bp, Homo sapien
gacttctcatttaaacgtgtggccc

SEQ ID NO: 6022272 - DNA, 25 bp, Homo sapien
tccttggaggcacagaacactctag

SEQ ID NO: 6022273 - DNA, 25 bp, Homo sapien
actcgctagtcccaagggtctagat

SEQ ID NO: 6022274 - DNA, 25 bp, Homo sapien
tctagatgctcgtcctgatgctccg

SEQ ID NO: 6022275 - DNA, 25 bp, Homo sapien
atgctccgaccgtgagaaaactgtg

SEQ ID NO: 6022276 - DNA, 25 bp, Homo sapien
catttaaacgtgtggccccagtact

SEQ ID NO: 6022277 - DNA, 25 bp, Homo sapien
caaggaatggtaaatctatagcacc

SEQ ID NO: 6022278 - DNA, 25 bp, Homo sapien
gggactgacgaaggctttgagattt

SEQ ID NO: 6022279 - DNA, 25 bp, Homo sapien
ttccagtgagtggtttaaacgatta

SEQ ID NO: 6022280 - DNA, 25 bp, Homo sapien
ggtctccattctgctgtatcgcata

SEQ ID NO: 6022281 - DNA, 25 bp, Homo sapien
tgtagtaataacaacagcctagcta

SEQ ID NO: 6022282 - DNA, 25 bp, Homo sapien
ggtcaagtgttcaggagccaccagc

SEQ ID NO: 6022283 - DNA, 25 bp, Homo sapien
tccgtctacagggtcaagtgttcag

SEQ ID NO: 6022284 - DNA, 25 bp, Homo sapien
atgaaccgtttgtatcgggtctcca

SEQ ID NO: 6022285 - DNA, 25 bp, Homo sapien
cagggaactcgctagtcccaagggt

SEQ ID NO: 6022286 - DNA, 25 bp, Homo sapien
gtgtaaaggtcttcaactgtctggg

SEQ ID NO: 6022287 - DNA, 25 bp, Homo sapien
cgaccgtgagaaaactgtgggactg

SEQ ID NO: 6022288 - DNA, 25 bp, Homo sapien
tgaaagcagttatgaaccgtttgta

SEQ ID NO: 6022289 - DNA, 25 bp, Homo sapien
atggtaaatctatagcaccatttca

SEQ ID NO: 6022290 - DNA, 25 bp, Homo sapien
aacgtgtggccccagtactccgtct

SEQ ID NO: 6022291 - DNA, 25 bp, Homo sapien
cgattagtaataacaaggaatggta

SEQ ID NO: 6022292 - DNA, 25 bp, Homo sapien
ctattactgtttttgcagagggttc

SEQ ID NO: 6022293 - DNA, 25 bp, Homo sapien
ctgtgagtgcttagggcttcacaca

SEQ ID NO: 6022294 - DNA, 25 bp, Homo sapien
ctacagggtcaagtgttcaggagcc

SEQ ID NO: 6022295 - DNA, 25 bp, Homo sapien
tactcctgctaaatgcactgggtca

SEQ ID NO: 6022296 - DNA, 25 bp, Homo sapien
aaaactgttaattgagtttccagtg

SEQ ID NO: 6022297 - DNA, 25 bp, Homo sapien
acagattgcttgtctctgacttctc

SEQ ID NO: 6022298 - DNA, 25 bp, Homo sapien
tcacacatggattcgggcagtggat

SEQ ID NO: 6022299 - DNA, 25 bp, Homo sapien
gtctctgacttctcatttaaacgtg

SEQ ID NO: 6022300 - DNA, 25 bp, Homo sapien
atttattgtagtaataacaacagcc

SEQ ID NO: 6022301 - DNA, 25 bp, Homo sapien
taataacaaggaatggtaaatctat

SEQ ID NO: 6022302 - DNA, 25 bp, Homo sapien
actctagacccagaaagccagggaa

SEQ ID NO: 6022303 - DNA, 25 bp, Homo sapien
tcgcataaaactgttaattgagttt

SEQ ID NO: 6022304 - DNA, 25 bp, Homo sapien
tggccccagtactccgtctacaggg

SEQ ID NO: 6022305 - DNA, 25 bp, Homo sapien
caagggtctagatgctcgtcctgat

SEQ ID NO: 6022306 - DNA, 25 bp, Homo sapien
caagtcatcgccagacagtccttgg

SEQ ID NO: 6022307 - DNA, 25 bp, Homo sapien
agggcttttcgtctgtgagtgctta

SEQ ID NO: 6022308 - DNA, 25 bp, Homo sapien
gtatcgggtctccattctgctgtat

SEQ ID NO: 6022309 - DNA, 25 bp, Homo sapien
cccatagtgtaaaggtcttcaactg

SEQ ID NO: 6022310 - DNA, 25 bp, Homo sapien
gctgtatcgcataaaactgttaatt

SEQ ID NO: 6022311 - DNA, 25 bp, Homo sapien
acgaaggctttgagatttatttatt

SEQ ID NO: 6022312 - DNA, 25 bp, Homo sapien
cgtttgtatcgggtctccattctgc

SEQ ID NO: 6022313 - DNA, 25 bp, Homo sapien
cagaaggacaccgtatatacatcta

SEQ ID NO: 6022314 - DNA, 25 bp, Homo sapien
gagtcttagcatcagaaggacaccg

SEQ ID NO: 6022315 - DNA, 25 bp, Homo sapien
cagttatgaaccgtttgtatcgggt

SEQ ID NO: 6022316 - DNA, 25 bp, Homo sapien
acatctacagttggtggccaataca

SEQ ID NO: 6022317 - DNA, 25 bp, Homo sapien
tggtggccaatacaagtcatcgcca

SEQ ID NO: 6022318 - DNA, 25 bp, Homo sapien
cagaacactctagacccagaaagcc

SEQ ID NO: 6022319 - DNA, 25 bp, Homo sapien
tgttaattgagtttccagtgagtgg

SEQ ID NO: 6022320 - DNA, 25 bp, Homo sapien
agggcttcacacatggattcgggca

SEQ ID NO: 6022321 - DNA, 25 bp, Homo sapien
cctagctaggtatgaaagcagttat

SEQ ID NO: 6022322 - DNA, 25 bp, Homo sapien
aactgtgggactgacgaaggctttg

SEQ ID NO: 6022323 - DNA, 25 bp, Homo sapien
gtgttcaggagccaccagctattac

SEQ ID NO: 6022324 - DNA, 25 bp, Homo sapien
ctgtttttgcagagggttccggtca

SEQ ID NO: 6022325 - DNA, 25 bp, Homo sapien
gtgcttagggcttcacacatggatt

SEQ ID NO: 6022326 - DNA, 25 bp, Homo sapien
atgcactgggtcacccatagtgtaa

SEQ ID NO: 6022327 - DNA, 25 bp, Homo sapien
caacagcctagctaggtatgaaagc

SEQ ID NO: 6022328 - DNA, 25 bp, Homo sapien
ttgagtttccagtgagtggtttaaa

SEQ ID NO: 6022329 - DNA, 25 bp, Homo sapien
tgctcgtcctgatgctccgaccgtg

SEQ ID NO: 6022330 - DNA, 25 bp, Homo sapien
ggtctggagtcttagcatcagaagg

SEQ ID NO: 6022331 - DNA, 25 bp, Homo sapien
catttcacagattgcttgtctctga

SEQ ID NO: 6022332 - DNA, 25 bp, Homo sapien
agtggatactcctgctaaatgcact

SEQ ID NO: 6022333 - DNA, 25 bp, Homo sapien
tgctaaatgcactgggtcacccata

SEQ ID NO: 6022334 - DNA, 25 bp, Homo sapien
gctttgagatttatttattgtagta

SEQ ID NO: 6022335 - DNA, 25 bp, Homo sapien
atcgccagacagtccttggaggcac

SEQ ID NO: 6022336 - DNA, 25 bp, Homo sapien
ccaatacaagtcatcgccagacagt

SEQ ID NO: 6022337 - DNA, 25 bp, Homo sapien
gaaagccagggaactcgctagtccc

SEQ ID NO: 6022338 - DNA, 25 bp, Homo sapien
tagcaccatttcacagattgcttgt

SEQ ID NO: 6022339 - DNA, 25 bp, Homo sapien
ccggtcagggcttttcgtctgtgag

SEQ ID NO: 6022340 - DNA, 25 bp, Homo sapien
tcctgatgctccgaccgtgagaaaa

SEQ ID NO: 6022341 - DNA, 25 bp, Homo sapien
ttgcagagggttccggtcagggctt

SEQ ID NO: 6022342 - DNA, 25 bp, Homo sapien
tcgggcagtggatactcctgctaaa

SEQ ID NO: 6022343 - DNA, 25 bp, Homo sapien
tgctaacatagatttaactgaatac

SEQ ID NO: 6022344 - DNA, 25 bp, Homo sapien
tctcgactcttcgggcgtttctttc

SEQ ID NO: 6022345 - DNA, 25 bp, Homo sapien
ccctgcactacccagtgtctcactg

SEQ ID NO: 6022346 - DNA, 25 bp, Homo sapien
tgagacctgaggacccaccagtcag

SEQ ID NO: 6022347 - DNA, 25 bp, Homo sapien
ggcacacatgacagactcccagcag

SEQ ID NO: 6022348 - DNA, 25 bp, Homo sapien
cagcctcctggtcccctgcactacc

SEQ ID NO: 6022349 - DNA, 25 bp, Homo sapien
gatggttggctgttccgcctgggga

SEQ ID NO: 6022350 - DNA, 25 bp, Homo sapien
taactctgaggccatggcccatcca

SEQ ID NO: 6022351 - DNA, 25 bp, Homo sapien
tcactggctgtgttggaaacggagt

SEQ ID NO: 6022352 - DNA, 25 bp, Homo sapien
actcttaacactcacccagactctg

SEQ ID NO: 6022353 - DNA, 25 bp, Homo sapien
cagacacaggtacaaaatttgggta

SEQ ID NO: 6022354 - DNA, 25 bp, Homo sapien
ccatgtttggctgttggttttagtt

SEQ ID NO: 6022355 - DNA, 25 bp, Homo sapien
gaggccatggcccatccacagcctc

SEQ ID NO: 6022356 - DNA, 25 bp, Homo sapien
atttgggtaaagatactgtgagacc

SEQ ID NO: 6022357 - DNA, 25 bp, Homo sapien
cttgtttaaaatgtttggatggttg

SEQ ID NO: 6022358 - DNA, 25 bp, Homo sapien
agaataatccagagctgtggcacac

SEQ ID NO: 6022359 - DNA, 25 bp, Homo sapien
gtccacaagcacgagatatctctag

SEQ ID NO: 6022360 - DNA, 25 bp, Homo sapien
actagaacccaagtcacagcatttt

SEQ ID NO: 6022361 - DNA, 25 bp, Homo sapien
tcccctggtggtttggagttaggca

SEQ ID NO: 6022362 - DNA, 25 bp, Homo sapien
ttaaaatgtttggatggttggctgt

SEQ ID NO: 6022363 - DNA, 25 bp, Homo sapien
gcccgggaccttgctgtcttctcga

SEQ ID NO: 6022364 - DNA, 25 bp, Homo sapien
cagtgtctcactggctgtgttggaa

SEQ ID NO: 6022365 - DNA, 25 bp, Homo sapien
catttgactcttaacactcacccag

SEQ ID NO: 6022366 - DNA, 25 bp, Homo sapien
tcaaggaaagacagaataatccaga

SEQ ID NO: 6022367 - DNA, 25 bp, Homo sapien
ctggggataaggtgctaacatagat

SEQ ID NO: 6022368 - DNA, 25 bp, Homo sapien
tgttggaaacggagttgcataagct

SEQ ID NO: 6022369 - DNA, 25 bp, Homo sapien
gcattttcccacataactctgaggc

SEQ ID NO: 6022370 - DNA, 25 bp, Homo sapien
tgtttggatggttggctgttccgcc

SEQ ID NO: 6022371 - DNA, 25 bp, Homo sapien
atttcaattttgcatttgactctta

SEQ ID NO: 6022372 - DNA, 25 bp, Homo sapien
gtgcttatttcattttgggggatgt

SEQ ID NO: 6022373 - DNA, 25 bp, Homo sapien
acatggcaagtcttagtagcctagg

SEQ ID NO: 6022374 - DNA, 25 bp, Homo sapien
gactctgtgcttatttcattttggg

SEQ ID NO: 6022375 - DNA, 25 bp, Homo sapien
acccaagtcacagcattttcccaca

SEQ ID NO: 6022376 - DNA, 25 bp, Homo sapien
ttccgcctggggataaggtgctaac

SEQ ID NO: 6022377 - DNA, 25 bp, Homo sapien
atccagagctgtggcacacatgaca

SEQ ID NO: 6022378 - DNA, 25 bp, Homo sapien
ctcaccgtccacaagcacgagatat

SEQ ID NO: 6022379 - DNA, 25 bp, Homo sapien
ataagctcaccgtccacaagcacga

SEQ ID NO: 6022380 - DNA, 25 bp, Homo sapien
aacactcacccagactctgtgctta

SEQ ID NO: 6022381 - DNA, 25 bp, Homo sapien
ggtggtttggagttaggcagaggga

SEQ ID NO: 6022382 - DNA, 25 bp, Homo sapien
ctgaggacccaccagtcagaaccca

SEQ ID NO: 6022383 - DNA, 25 bp, Homo sapien
atggcccatccacagcctcctggtc

SEQ ID NO: 6022384 - DNA, 25 bp, Homo sapien
atactgtgagacctgaggacccacc

SEQ ID NO: 6022385 - DNA, 25 bp, Homo sapien
ttggagttaggcagagggaagttac

SEQ ID NO: 6022386 - DNA, 25 bp, Homo sapien
ctgtcttctcgactcttcgggcgtt

SEQ ID NO: 6022387 - DNA, 25 bp, Homo sapien
attttgcatttgactcttaacactc

SEQ ID NO: 6022388 - DNA, 25 bp, Homo sapien
agctgtggcacacatgacagactcc

SEQ ID NO: 6022389 - DNA, 25 bp, Homo sapien
gtcacagcattttcccacataactc

SEQ ID NO: 6022390 - DNA, 25 bp, Homo sapien
catagatttaactgaatacattaac

SEQ ID NO: 6022391 - DNA, 25 bp, Homo sapien
ctggtcccctgcactacccagtgtc

SEQ ID NO: 6022392 - DNA, 25 bp, Homo sapien
catccacagcctcctggtcccctgc

SEQ ID NO: 6022393 - DNA, 25 bp, Homo sapien
aaagaaactagaacccaagtcacag

SEQ ID NO: 6022394 - DNA, 25 bp, Homo sapien
atgacagactcccagcagcccggga

SEQ ID NO: 6022395 - DNA, 25 bp, Homo sapien
gctgtgttggaaacggagttgcata

SEQ ID NO: 6022396 - DNA, 25 bp, Homo sapien
ttctttccatgtttggctgttggtt

SEQ ID NO: 6022397 - DNA, 25 bp, Homo sapien
cctaggtcaaggaaagacagaataa

SEQ ID NO: 6022398 - DNA, 25 bp, Homo sapien
agttgcataagctcaccgtccacaa

SEQ ID NO: 6022399 - DNA, 25 bp, Homo sapien
actacccagtgtctcactggctgtg

SEQ ID NO: 6022400 - DNA, 25 bp, Homo sapien
tggctgttccgcctggggataaggt

SEQ ID NO: 6022401 - DNA, 25 bp, Homo sapien
tcccacataactctgaggccatggc

SEQ ID NO: 6022402 - DNA, 25 bp, Homo sapien
aagcacgagatatctctagctttca

SEQ ID NO: 6022403 - DNA, 25 bp, Homo sapien
cagcagcccgggaccttgctgtctt

SEQ ID NO: 6022404 - DNA, 25 bp, Homo sapien
accttgctgtcttctcgactcttcg

SEQ ID NO: 6022405 - DNA, 25 bp, Homo sapien
ctcttcgggcgtttctttccatgtt

SEQ ID NO: 6022406 - DNA, 25 bp, Homo sapien
gaacccacatggcaagtcttagtag

SEQ ID NO: 6022407 - DNA, 25 bp, Homo sapien
gctttcatttcaattttgcatttga

SEQ ID NO: 6022408 - DNA, 25 bp, Homo sapien
tttaactgaatacattaacggtgct

SEQ ID NO: 6022409 - DNA, 25 bp, Homo sapien
atttcattttgggggatgtgggctt

SEQ ID NO: 6022410 - DNA, 25 bp, Homo sapien
acccaccagtcagaacccacatggc

SEQ ID NO: 6022411 - DNA, 25 bp, Homo sapien
aaacggagttgcataagctcaccgt

SEQ ID NO: 6022412 - DNA, 25 bp, Homo sapien
caagtcttagtagcctaggtcaagg

SEQ ID NO: 6022413 - DNA, 25 bp, Homo sapien
aagttacagacacaggtacaaaatt

SEQ ID NO: 6022414 - DNA, 25 bp, Homo sapien
tgaatacattaacggtgctaaaaaa

SEQ ID NO: 6022415 - DNA, 25 bp, Homo sapien
tagtagcctaggtcaaggaaagaca

SEQ ID NO: 6022416 - DNA, 25 bp, Homo sapien
gtaaagatactgtgagacctgagga

SEQ ID NO: 6022417 - DNA, 25 bp, Homo sapien
ataaggtgctaacatagatttaact

SEQ ID NO: 6022418 - DNA, 25 bp, Homo sapien
gagatatctctagctttcatttcaa

SEQ ID NO: 6022419 - DNA, 25 bp, Homo sapien
tctctagctttcatttcaattttgc

SEQ ID NO: 6022420 - DNA, 25 bp, Homo sapien
agactcccagcagcccgggaccttg

SEQ ID NO: 6022421 - DNA, 25 bp, Homo sapien
ttaggcagagggaagttacagacac

SEQ ID NO: 6022422 - DNA, 25 bp, Homo sapien
cacccagactctgtgcttatttcat

SEQ ID NO: 6022423 - DNA, 25 bp, Homo sapien
cagtcagaacccacatggcaagtct

SEQ ID NO: 6022424 - DNA, 25 bp, Homo sapien
gggcgtttctttccatgtttggctg

SEQ ID NO: 6022425 - DNA, 25 bp, Homo sapien
aaagacagaataatccagagctgtg

SEQ ID NO: 6022426 - DNA, 25 bp, Homo sapien
agagggaagttacagacacaggtac

SEQ ID NO: 6022427 - DNA, 25 bp, Homo sapien
acccaaattttgtacctgtgtctgt

SEQ ID NO: 6022428 - DNA, 25 bp, Homo sapien
gagtctgtcatgtgtgccacagctc

SEQ ID NO: 6022429 - DNA, 25 bp, Homo sapien
tcccggcaagaacctgaaagcccaa

SEQ ID NO: 6022430 - DNA, 25 bp, Homo sapien
taacttccctctgcctaactccaaa

SEQ ID NO: 6022431 - DNA, 25 bp, Homo sapien
gcaagaacctgaaagcccaattgca

SEQ ID NO: 6022432 - DNA, 25 bp, Homo sapien
ctggattattctgtctttccttgac

SEQ ID NO: 6022433 - DNA, 25 bp, Homo sapien
ttggaggggaacaatttctcagcct

SEQ ID NO: 6022434 - DNA, 25 bp, Homo sapien
taatgagaagcagctttttcatgaa

SEQ ID NO: 6022435 - DNA, 25 bp, Homo sapien
cttcctcttgagtctcactttcctg

SEQ ID NO: 6022436 - DNA, 25 bp, Homo sapien
aaacgcccgaagagtcgagaagaca

SEQ ID NO: 6022437 - DNA, 25 bp, Homo sapien
tggggagaggtgagggggaacatgc

SEQ ID NO: 6022438 - DNA, 25 bp, Homo sapien
tcttgattagtagaaggtttcaagt

SEQ ID NO: 6022439 - DNA, 25 bp, Homo sapien
agtctcacttcctctacgttacaac

SEQ ID NO: 6022440 - DNA, 25 bp, Homo sapien
aaccttttctgtcttcctcttgagt

SEQ ID NO: 6022441 - DNA, 25 bp, Homo sapien
cttgagtctcactttcctgaaacag

SEQ ID NO: 6022442 - DNA, 25 bp, Homo sapien
acagctctggattattctgtctttc

SEQ ID NO: 6022443 - DNA, 25 bp, Homo sapien
aggtctcacagtatctttacccaaa

SEQ ID NO: 6022444 - DNA, 25 bp, Homo sapien
atgacagccatctagatgtgaaaaa

SEQ ID NO: 6022445 - DNA, 25 bp, Homo sapien
tctcactttcctgaaacagcctccc

SEQ ID NO: 6022446 - DNA, 25 bp, Homo sapien
tcatgaaatgcttggaggggaacaa

SEQ ID NO: 6022447 - DNA, 25 bp, Homo sapien
acctgaaagcccaattgcagttgag

SEQ ID NO: 6022448 - DNA, 25 bp, Homo sapien
aaaaccaacagccaaacatggaaag

SEQ ID NO: 6022449 - DNA, 25 bp, Homo sapien
agtggcagggggtggggagaggtga

SEQ ID NO: 6022450 - DNA, 25 bp, Homo sapien
agaggtgagggggaacatgctagaa

SEQ ID NO: 6022451 - DNA, 25 bp, Homo sapien
gctagaaactttatgacagccatct

SEQ ID NO: 6022452 - DNA, 25 bp, Homo sapien
gctactaagacttgccatgtgggtt

SEQ ID NO: 6022453 - DNA, 25 bp, Homo sapien
caaacatggaaagaaacgcccgaag

SEQ ID NO: 6022454 - DNA, 25 bp, Homo sapien
aatgcttggaggggaacaatttctc

SEQ ID NO: 6022455 - DNA, 25 bp, Homo sapien
tggtgggtcctcaggtctcacagta

SEQ ID NO: 6022456 - DNA, 25 bp, Homo sapien
agtttctcttgattagtagaaggtt

SEQ ID NO: 6022457 - DNA, 25 bp, Homo sapien
aaccaattcaccagtctcacttcct

SEQ ID NO: 6022458 - DNA, 25 bp, Homo sapien
aattgcagttgagtgatgttctggc

SEQ ID NO: 6022459 - DNA, 25 bp, Homo sapien
gtcctcaggtctcacagtatcttta

SEQ ID NO: 6022460 - DNA, 25 bp, Homo sapien
gatctgaccattccgttggcttgga

SEQ ID NO: 6022461 - DNA, 25 bp, Homo sapien
tctgactggtgggtcctcaggtctc

SEQ ID NO: 6022462 - DNA, 25 bp, Homo sapien
cttggaagtttctcttgattagtag

SEQ ID NO: 6022463 - DNA, 25 bp, Homo sapien
gagggggaacatgctagaaacttta

SEQ ID NO: 6022464 - DNA, 25 bp, Homo sapien
aaatcaaaccaattcaccagtctca

SEQ ID NO: 6022465 - DNA, 25 bp, Homo sapien
tagagctcccggcaagaacctgaaa

SEQ ID NO: 6022466 - DNA, 25 bp, Homo sapien
catggttaatgagaagcagcttttt

SEQ ID NO: 6022467 - DNA, 25 bp, Homo sapien
tgctgggagtctgtcatgtgtgcca

SEQ ID NO: 6022468 - DNA, 25 bp, Homo sapien
tagatgtgaaaaaaatcaaaccaat

SEQ ID NO: 6022469 - DNA, 25 bp, Homo sapien
cacagtatctttacccaaattttgt

SEQ ID NO: 6022470 - DNA, 25 bp, Homo sapien
tcaccaaaactaaaaccaacagcca

SEQ ID NO: 6022471 - DNA, 25 bp, Homo sapien
gtctttccttgacctaggctactaa

SEQ ID NO: 6022472 - DNA, 25 bp, Homo sapien
attttgtacctgtgtctgtaacttc

SEQ ID NO: 6022473 - DNA, 25 bp, Homo sapien
ttctggcccacccatggctcaccaa

SEQ ID NO: 6022474 - DNA, 25 bp, Homo sapien
ccgggctgctgggagtctgtcatgt

SEQ ID NO: 6022475 - DNA, 25 bp, Homo sapien
catggctcaccaaaactaaaaccaa

SEQ ID NO: 6022476 - DNA, 25 bp, Homo sapien
ttctgtcttcctcttgagtctcact

SEQ ID NO: 6022477 - DNA, 25 bp, Homo sapien
aagacttgccatgtgggttctgact

SEQ ID NO: 6022478 - DNA, 25 bp, Homo sapien
tgtgccacagctctggattattctg

SEQ ID NO: 6022479 - DNA, 25 bp, Homo sapien
gggaacaatttctcagcctgtgaga

SEQ ID NO: 6022480 - DNA, 25 bp, Homo sapien
ttagtagaaggtttcaagtggcagg

SEQ ID NO: 6022481 - DNA, 25 bp, Homo sapien
caatttctcagcctgtgagatctga

SEQ ID NO: 6022482 - DNA, 25 bp, Homo sapien
gtcatgtgtgccacagctctggatt

SEQ ID NO: 6022483 - DNA, 25 bp, Homo sapien
ttcaccagtctcacttcctctacgt

SEQ ID NO: 6022484 - DNA, 25 bp, Homo sapien
ctcagcctgtgagatctgaccattc

SEQ ID NO: 6022485 - DNA, 25 bp, Homo sapien
ctctacgttacaaccttttctgtct

SEQ ID NO: 6022486 - DNA, 25 bp, Homo sapien
aagcccaattgcagttgagtgatgt

SEQ ID NO: 6022487 - DNA, 25 bp, Homo sapien
cctcccagtgcctagagctcccggc

SEQ ID NO: 6022488 - DNA, 25 bp, Homo sapien
tgaaaaaaatcaaaccaattcacca

SEQ ID NO: 6022489 - DNA, 25 bp, Homo sapien
aaggtcccgggctgctgggagtctg

SEQ ID NO: 6022490 - DNA, 25 bp, Homo sapien
gtgatgttctggcccacccatggct

SEQ ID NO: 6022491 - DNA, 25 bp, Homo sapien
ccttgacctaggctactaagacttg

SEQ ID NO: 6022492 - DNA, 25 bp, Homo sapien
aactttatgacagccatctagatgt

SEQ ID NO: 6022493 - DNA, 25 bp, Homo sapien
cgttggcttggaagtttctcttgat

SEQ ID NO: 6022494 - DNA, 25 bp, Homo sapien
aaacagcctcccagtgcctagagct

SEQ ID NO: 6022495 - DNA, 25 bp, Homo sapien
acctaggctactaagacttgccatg

SEQ ID NO: 6022496 - DNA, 25 bp, Homo sapien
agttgagtgatgttctggcccaccc

SEQ ID NO: 6022497 - DNA, 25 bp, Homo sapien
tacctgtgtctgtaacttccctctg

SEQ ID NO: 6022498 - DNA, 25 bp, Homo sapien
aacagccaaacatggaaagaaacgc

SEQ ID NO: 6022499 - DNA, 25 bp, Homo sapien
tgccatgtgggttctgactggtggg

SEQ ID NO: 6022500 - DNA, 25 bp, Homo sapien
cccacccatggctcaccaaaactaa

SEQ ID NO: 6022501 - DNA, 25 bp, Homo sapien
tgtctgtaacttccctctgcctaac

SEQ ID NO: 6022502 - DNA, 25 bp, Homo sapien
tttcctgaaacagcctcccagtgcc

SEQ ID NO: 6022503 - DNA, 25 bp, Homo sapien
agtgcctagagctcccggcaagaac

SEQ ID NO: 6022504 - DNA, 25 bp, Homo sapien
aaactaaaaccaacagccaaacatg

SEQ ID NO: 6022505 - DNA, 25 bp, Homo sapien
gctttttcatgaaatgcttggaggg

SEQ ID NO: 6022506 - DNA, 25 bp, Homo sapien
ccgaagagtcgagaagacagcaagg

SEQ ID NO: 6022507 - DNA, 25 bp, Homo sapien
aagacagcaaggtcccgggctgctg

SEQ ID NO: 6022508 - DNA, 25 bp, Homo sapien
gccatctagatgtgaaaaaaatcaa

SEQ ID NO: 6022509 - DNA, 25 bp, Homo sapien
gtgggttctgactggtgggtcctca

SEQ ID NO: 6022510 - DNA, 25 bp, Homo sapien
gaagcagctttttcatgaaatgctt

SEQ ID NO: 6022511 - DNA, 25 bp, Homo sapien
ctgtgagatctgaccattccgttgg

SEQ ID NO: 6022512 - DNA, 25 bp, Homo sapien
tggaaagaaacgcccgaagagtcga

SEQ ID NO: 6022513 - DNA, 25 bp, Homo sapien
gaacatgctagaaactttatgacag

SEQ ID NO: 6022514 - DNA, 25 bp, Homo sapien
ccattccgttggcttggaagtttct

SEQ ID NO: 6022515 - DNA, 25 bp, Homo sapien
agtcgagaagacagcaaggtcccgg

SEQ ID NO: 6022516 - DNA, 25 bp, Homo sapien
cctctgcctaactccaaaccaccag

SEQ ID NO: 6022517 - DNA, 25 bp, Homo sapien
tattctgtctttccttgacctaggc

SEQ ID NO: 6022518 - DNA, 25 bp, Homo sapien
ctccagggctcctcggggctgccgc

SEQ ID NO: 6022519 - DNA, 25 bp, Homo sapien
tggttccaaaacaagcgtgccaaga

SEQ ID NO: 6022520 - DNA, 25 bp, Homo sapien
tgctcttttcctttgaatgtttttg

SEQ ID NO: 6022521 - DNA, 25 bp, Homo sapien
tttcctttgaatgtttttgcttctc

SEQ ID NO: 6022522 - DNA, 25 bp, Homo sapien
agagaaagcaatcctccgagtggac

SEQ ID NO: 6022523 - DNA, 25 bp, Homo sapien
ccaacggcgcccgtgccacctccag

SEQ ID NO: 6022524 - DNA, 25 bp, Homo sapien
gggaaaaataaacatctattctcta

SEQ ID NO: 6022525 - DNA, 25 bp, Homo sapien
agggaggcatcaatcagggcgacag

SEQ ID NO: 6022526 - DNA, 25 bp, Homo sapien
tttcgttgctcttttcctttgaatg

SEQ ID NO: 6022527 - DNA, 25 bp, Homo sapien
taactcactgtataagatgaaactg

SEQ ID NO: 6022528 - DNA, 25 bp, Homo sapien
gcgacagagaaagcgagcaagagaa

SEQ ID NO: 6022529 - DNA, 25 bp, Homo sapien
gcgcccgtgccacctccagggctcc

SEQ ID NO: 6022530 - DNA, 25 bp, Homo sapien
cgagcaagagaaagcaatcctccga

SEQ ID NO: 6022531 - DNA, 25 bp, Homo sapien
tcggggctgccgcttcaccagcccc

SEQ ID NO: 6022532 - DNA, 25 bp, Homo sapien
ctgccgcttcaccagccccacgcag

SEQ ID NO: 6022533 - DNA, 25 bp, Homo sapien
gcgaattccttaaagctctatctag

SEQ ID NO: 6022534 - DNA, 25 bp, Homo sapien
gaaactgcgaattccttaaagctct

SEQ ID NO: 6022535 - DNA, 25 bp, Homo sapien
gccaaactgcttacgaccgtgtata

SEQ ID NO: 6022536 - DNA, 25 bp, Homo sapien
tatggagggaggcatcaatcagggc

SEQ ID NO: 6022537 - DNA, 25 bp, Homo sapien
agaaagcgagcaagagaaagcaatc

SEQ ID NO: 6022538 - DNA, 25 bp, Homo sapien
attctctaactcactgtataagatg

SEQ ID NO: 6022539 - DNA, 25 bp, Homo sapien
aacggcctggcgctgcacctcatgg

SEQ ID NO: 6022540 - DNA, 25 bp, Homo sapien
cctggcgctgcacctcatggcccag

SEQ ID NO: 6022541 - DNA, 25 bp, Homo sapien
tagctgtggccagctccgggggccc

SEQ ID NO: 6022542 - DNA, 25 bp, Homo sapien
atcaagaaagccacaggcatcaaga

SEQ ID NO: 6022543 - DNA, 25 bp, Homo sapien
atcagggcgacagagaaagcgagca

SEQ ID NO: 6022544 - DNA, 25 bp, Homo sapien
cttcaccagccccacgcagagacga

SEQ ID NO: 6022545 - DNA, 25 bp, Homo sapien
cacggttcaggacaaagacgagagc

SEQ ID NO: 6022546 - DNA, 25 bp, Homo sapien
tggcccagggactgtacaaccactc

SEQ ID NO: 6022547 - DNA, 25 bp, Homo sapien
gagtaagactcggacaggtgctatg

SEQ ID NO: 6022548 - DNA, 25 bp, Homo sapien
aaagccacaggcatcaagaacggcc

SEQ ID NO: 6022549 - DNA, 25 bp, Homo sapien
atgtttttgcttctctgggtacctc

SEQ ID NO: 6022550 - DNA, 25 bp, Homo sapien
ctctgggtacctcctgcacccccaa

SEQ ID NO: 6022551 - DNA, 25 bp, Homo sapien
cctccgagtggacattcacatagga

SEQ ID NO: 6022552 - DNA, 25 bp, Homo sapien
actgtataagatgaaactgcgaatt

SEQ ID NO: 6022553 - DNA, 25 bp, Homo sapien
tggccagctccgggggcccgcggtc

SEQ ID NO: 6022554 - DNA, 25 bp, Homo sapien
acctcatggcccagggactgtacaa

SEQ ID NO: 6022555 - DNA, 25 bp, Homo sapien
ggctcctcggggctgccgcttcacc

SEQ ID NO: 6022556 - DNA, 25 bp, Homo sapien
agggactgtacaaccactctaccac

SEQ ID NO: 6022557 - DNA, 25 bp, Homo sapien
tgcacccccaacgctggccctggtt

SEQ ID NO: 6022558 - DNA, 25 bp, Homo sapien
gtgccacctccagggctcctcgggg

SEQ ID NO: 6022559 - DNA, 25 bp, Homo sapien
aagctctatctagccaaactgctta

SEQ ID NO: 6022560 - DNA, 25 bp, Homo sapien
ccagccccacgcagagacgatcgct

SEQ ID NO: 6022561 - DNA, 25 bp, Homo sapien
gtacctcctgcacccccaacgctgg

SEQ ID NO: 6022562 - DNA, 25 bp, Homo sapien
taagatgaaactgcgaattccttaa

SEQ ID NO: 6022563 - DNA, 25 bp, Homo sapien
tatctagccaaactgcttacgaccg

SEQ ID NO: 6022564 - DNA, 25 bp, Homo sapien
tccttaaagctctatctagccaaac

SEQ ID NO: 6022565 - DNA, 25 bp, Homo sapien
gactcggacaggtgctatgggggaa

SEQ ID NO: 6022566 - DNA, 25 bp, Homo sapien
ccacgcagagacgatcgctatggag

SEQ ID NO: 6022567 - DNA, 25 bp, Homo sapien
ctttgaatgtttttgcttctctggg

SEQ ID NO: 6022568 - DNA, 25 bp, Homo sapien
caaaacaagcgtgccaagatcaaga

SEQ ID NO: 6022569 - DNA, 25 bp, Homo sapien
tttctttgtgtgagtgtgagtgtgt

SEQ ID NO: 6022570 - DNA, 25 bp, Homo sapien
ctatgggggaaaaataaacatctat

SEQ ID NO: 6022571 - DNA, 25 bp, Homo sapien
gatcgctatggagggaggcatcaat

SEQ ID NO: 6022572 - DNA, 25 bp, Homo sapien
gggacttttctttgtgtgagtgtga

SEQ ID NO: 6022573 - DNA, 25 bp, Homo sapien
agcaatcctccgagtggacattcac

SEQ ID NO: 6022574 - DNA, 25 bp, Homo sapien
acatctattctctaactcactgtat

SEQ ID NO: 6022575 - DNA, 25 bp, Homo sapien
ctggccctggtttctctgggacttt

SEQ ID NO: 6022576 - DNA, 25 bp, Homo sapien
aataaacatctattctctaactcac

SEQ ID NO: 6022577 - DNA, 25 bp, Homo sapien
gcatcaatcagggcgacagagaaag

SEQ ID NO: 6022578 - DNA, 25 bp, Homo sapien
ttctctgggacttttctttgtgtga

SEQ ID NO: 6022579 - DNA, 25 bp, Homo sapien
aagcgtgccaagatcaagaaagcca

SEQ ID NO: 6022580 - DNA, 25 bp, Homo sapien
tgtacaaccactctaccaccacggt

SEQ ID NO: 6022581 - DNA, 25 bp, Homo sapien
tgaaacgggagtaagactcggacag

SEQ ID NO: 6022582 - DNA, 25 bp, Homo sapien
taccaccacggttcaggacaaagac

SEQ ID NO: 6022583 - DNA, 25 bp, Homo sapien
gctgcacctcatggcccagggactg

SEQ ID NO: 6022584 - DNA, 25 bp, Homo sapien
agcccagtttcgttttcgttgctct

SEQ ID NO: 6022585 - DNA, 25 bp, Homo sapien
aagatctggttccaaaacaagcgtg

SEQ ID NO: 6022586 - DNA, 25 bp, Homo sapien
gacaggtgctatgggggaaaaataa

SEQ ID NO: 6022587 - DNA, 25 bp, Homo sapien
ccaacgctggccctggtttctctgg

SEQ ID NO: 6022588 - DNA, 25 bp, Homo sapien
agagacgatcgctatggagggaggc

SEQ ID NO: 6022589 - DNA, 25 bp, Homo sapien
acaggcatcaagaacggcctggcgc

SEQ ID NO: 6022590 - DNA, 25 bp, Homo sapien
gtgtatatatttaatttcagcccag

SEQ ID NO: 6022591 - DNA, 25 bp, Homo sapien
ctggtttctctgggacttttctttg

SEQ ID NO: 6022592 - DNA, 25 bp, Homo sapien
acgaccgtgtatatatttaatttca

SEQ ID NO: 6022593 - DNA, 25 bp, Homo sapien
ccactctaccaccacggttcaggac

SEQ ID NO: 6022594 - DNA, 25 bp, Homo sapien
ttgcttctctgggtacctcctgcac

SEQ ID NO: 6022595 - DNA, 25 bp, Homo sapien
tgtgtgagtgtgagtgtgtttcctt

SEQ ID NO: 6022596 - DNA, 25 bp, Homo sapien
gccaagatcaagaaagccacaggca

SEQ ID NO: 6022597 - DNA, 25 bp, Homo sapien
gcggtcccaacggcgcccgtgccac

SEQ ID NO: 6022598 - DNA, 25 bp, Homo sapien
ctgcttacgaccgtgtatatattta

SEQ ID NO: 6022599 - DNA, 25 bp, Homo sapien
agtggacattcacataggaacaaaa

SEQ ID NO: 6022600 - DNA, 25 bp, Homo sapien
atcaagaacggcctggcgctgcacc

SEQ ID NO: 6022601 - DNA, 25 bp, Homo sapien
cattcacataggaacaaaacggttt

SEQ ID NO: 6022602 - DNA, 25 bp, Homo sapien
atatttaatttcagcccagtttcgt

SEQ ID NO: 6022603 - DNA, 25 bp, Homo sapien
agacaagaccaatagaagaatcctg

SEQ ID NO: 6022604 - DNA, 25 bp, Homo sapien
ggagccctggaggtggcacgggcgc

SEQ ID NO: 6022605 - DNA, 25 bp, Homo sapien
ctggaggtggcacgggcgccgttgg

SEQ ID NO: 6022606 - DNA, 25 bp, Homo sapien
atctttggcttgtagcggcggttca

SEQ ID NO: 6022607 - DNA, 25 bp, Homo sapien
ttgggggtgcaggaggtacccagag

SEQ ID NO: 6022608 - DNA, 25 bp, Homo sapien
tcgccctgattgatgcctccctcca

SEQ ID NO: 6022609 - DNA, 25 bp, Homo sapien
aaaccgttttgttcctatgtgaatg

SEQ ID NO: 6022610 - DNA, 25 bp, Homo sapien
gttcctatgtgaatgtccactcgga

SEQ ID NO: 6022611 - DNA, 25 bp, Homo sapien
tggcacgggcgccgttgggaccgcg

SEQ ID NO: 6022612 - DNA, 25 bp, Homo sapien
tgggtgggtagagaagaggcgaggg

SEQ ID NO: 6022613 - DNA, 25 bp, Homo sapien
atttctcaaggagtctccagaaaag

SEQ ID NO: 6022614 - DNA, 25 bp, Homo sapien
acgaaactgggctgaaattaaatat

SEQ ID NO: 6022615 - DNA, 25 bp, Homo sapien
tagaagaatcctgggtgggtagaga

SEQ ID NO: 6022616 - DNA, 25 bp, Homo sapien
cctccatagcgatcgtctctgcgtg

SEQ ID NO: 6022617 - DNA, 25 bp, Homo sapien
gggcagacacacaaggaaacacact

SEQ ID NO: 6022618 - DNA, 25 bp, Homo sapien
aatcctgggtgggtagagaagaggc

SEQ ID NO: 6022619 - DNA, 25 bp, Homo sapien
cattcaaaggaaaagagcaacgaaa

SEQ ID NO: 6022620 - DNA, 25 bp, Homo sapien
ctcacactcacacaaagaaaagtcc

SEQ ID NO: 6022621 - DNA, 25 bp, Homo sapien
caaagaaaagtcccagagaaaccag

SEQ ID NO: 6022622 - DNA, 25 bp, Homo sapien
caaggagtctccagaaaaggaaggg

SEQ ID NO: 6022623 - DNA, 25 bp, Homo sapien
tggcttgtagcggcggttcagtctc

SEQ ID NO: 6022624 - DNA, 25 bp, Homo sapien
cacggtcgtaagcagtttggctaga

SEQ ID NO: 6022625 - DNA, 25 bp, Homo sapien
gatgtttatttttcccccatagcac

SEQ ID NO: 6022626 - DNA, 25 bp, Homo sapien
tttttcccccatagcacctgtccga

SEQ ID NO: 6022627 - DNA, 25 bp, Homo sapien
aggattgctttctcttgctcgcttt

SEQ ID NO: 6022628 - DNA, 25 bp, Homo sapien
tcgctttctctgtcgccctgattga

SEQ ID NO: 6022629 - DNA, 25 bp, Homo sapien
ccccatagcacctgtccgagtctta

SEQ ID NO: 6022630 - DNA, 25 bp, Homo sapien
gaagaggcgaggggcagacacacaa

SEQ ID NO: 6022631 - DNA, 25 bp, Homo sapien
tgcctccctccatagcgatcgtctc

SEQ ID NO: 6022632 - DNA, 25 bp, Homo sapien
gctttctcttgctcgctttctctgt

SEQ ID NO: 6022633 - DNA, 25 bp, Homo sapien
ggttgtatttctcaaggagtctcca

SEQ ID NO: 6022634 - DNA, 25 bp, Homo sapien
caaggaaacacactcacactcacac

SEQ ID NO: 6022635 - DNA, 25 bp, Homo sapien
gacacacaaggaaacacactcacac

SEQ ID NO: 6022636 - DNA, 25 bp, Homo sapien
ggtgaagcggcagccccgaggagcc

SEQ ID NO: 6022637 - DNA, 25 bp, Homo sapien
atagagctttaaggaattcgcagtt

SEQ ID NO: 6022638 - DNA, 25 bp, Homo sapien
ggctagatagagctttaaggaattc

SEQ ID NO: 6022639 - DNA, 25 bp, Homo sapien
ctttaaggaattcgcagtttcatct

SEQ ID NO: 6022640 - DNA, 25 bp, Homo sapien
ctgtggggttgtatttctcaaggag

SEQ ID NO: 6022641 - DNA, 25 bp, Homo sapien
ttatacagtgagttagagaatagat

SEQ ID NO: 6022642 - DNA, 25 bp, Homo sapien
ttcatcttatacagtgagttagaga

SEQ ID NO: 6022643 - DNA, 25 bp, Homo sapien
caggaggtacccagagaagcaaaaa

SEQ ID NO: 6022644 - DNA, 25 bp, Homo sapien
gggctggtgaagcggcagccccgag

SEQ ID NO: 6022645 - DNA, 25 bp, Homo sapien
ggatttacgggagggatagacaaga

SEQ ID NO: 6022646 - DNA, 25 bp, Homo sapien
gcggttcagtctcgcagtctgtggg

SEQ ID NO: 6022647 - DNA, 25 bp, Homo sapien
atagcgatcgtctctgcgtggggct

SEQ ID NO: 6022648 - DNA, 25 bp, Homo sapien
tcttgctcgctttctctgtcgccct

SEQ ID NO: 6022649 - DNA, 25 bp, Homo sapien
tcgtctctgcgtggggctggtgaag

SEQ ID NO: 6022650 - DNA, 25 bp, Homo sapien
aactgggctgaaattaaatatatac

SEQ ID NO: 6022651 - DNA, 25 bp, Homo sapien
cgtaagcagtttggctagatagagc

SEQ ID NO: 6022652 - DNA, 25 bp, Homo sapien
cagggccagcgttgggggtgcagga

SEQ ID NO: 6022653 - DNA, 25 bp, Homo sapien
gagggatagacaagaccaatagaag

SEQ ID NO: 6022654 - DNA, 25 bp, Homo sapien
gctgaaattaaatatatacacggtc

SEQ ID NO: 6022655 - DNA, 25 bp, Homo sapien
ttacgggagggatagacaagaccaa

SEQ ID NO: 6022656 - DNA, 25 bp, Homo sapien
atgtccactcggaggattgctttct

SEQ ID NO: 6022657 - DNA, 25 bp, Homo sapien
agtgagttagagaatagatgtttat

SEQ ID NO: 6022658 - DNA, 25 bp, Homo sapien
ggaattcgcagtttcatcttataca

SEQ ID NO: 6022659 - DNA, 25 bp, Homo sapien
gcagtctgtggggttgtatttctca

SEQ ID NO: 6022660 - DNA, 25 bp, Homo sapien
gcgaggggcagacacacaaggaaac

SEQ ID NO: 6022661 - DNA, 25 bp, Homo sapien
ccccgaggagccctggaggtggcac

SEQ ID NO: 6022662 - DNA, 25 bp, Homo sapien
tacccagagaagcaaaaacattcaa

SEQ ID NO: 6022663 - DNA, 25 bp, Homo sapien
agcacctgtccgagtcttactcccg

SEQ ID NO: 6022664 - DNA, 25 bp, Homo sapien
cggcagccccgaggagccctggagg

SEQ ID NO: 6022665 - DNA, 25 bp, Homo sapien
gcaacgaaaacgaaactgggctgaa

SEQ ID NO: 6022666 - DNA, 25 bp, Homo sapien
tgattgatgcctccctccatagcga

SEQ ID NO: 6022667 - DNA, 25 bp, Homo sapien
cacactcacactcacacaaagaaaa

SEQ ID NO: 6022668 - DNA, 25 bp, Homo sapien
gagaagcaaaaacattcaaaggaaa

SEQ ID NO: 6022669 - DNA, 25 bp, Homo sapien
gaccaatagaagaatcctgggtggg

SEQ ID NO: 6022670 - DNA, 25 bp, Homo sapien
tatatacacggtcgtaagcagtttg

SEQ ID NO: 6022671 - DNA, 25 bp, Homo sapien
attaaatatatacacggtcgtaagc

SEQ ID NO: 6022672 - DNA, 25 bp, Homo sapien
agtcccagagaaaccagggccagcg

SEQ ID NO: 6022673 - DNA, 25 bp, Homo sapien
gggtgcaggaggtacccagagaagc

SEQ ID NO: 6022674 - DNA, 25 bp, Homo sapien
cgcagtttcatcttatacagtgagt

SEQ ID NO: 6022675 - DNA, 25 bp, Homo sapien
ctcacacaaagaaaagtcccagaga

SEQ ID NO: 6022676 - DNA, 25 bp, Homo sapien
atgtgaatgtccactcggaggattg

SEQ ID NO: 6022677 - DNA, 25 bp, Homo sapien
cagtttggctagatagagctttaag

SEQ ID NO: 6022678 - DNA, 25 bp, Homo sapien
cgttttgttcctatgtgaatgtcca

SEQ ID NO: 6022679 - DNA, 25 bp, Homo sapien
tgtccgagtcttactcccgtttcaa

SEQ ID NO: 6022680 - DNA, 25 bp, Homo sapien
tgcgtggggctggtgaagcggcagc

SEQ ID NO: 6022681 - DNA, 25 bp, Homo sapien
gtagcggcggttcagtctcgcagtc

SEQ ID NO: 6022682 - DNA, 25 bp, Homo sapien
tagagaatagatgtttatttttccc

SEQ ID NO: 6022683 - DNA, 25 bp, Homo sapien
agagaaaccagggccagcgttgggg

SEQ ID NO: 6022684 - DNA, 25 bp, Homo sapien
agtctcgcagtctgtggggttgtat

SEQ ID NO: 6022685 - DNA, 25 bp, Homo sapien
actcggaggattgctttctcttgct

SEQ ID NO: 6022686 - DNA, 25 bp, Homo sapien
caaaaacattcaaaggaaaagagca

SEQ ID NO: 6022687 - DNA, 25 bp, Homo sapien
tctctgtcgccctgattgatgcctc

SEQ ID NO: 6022688 - DNA, 25 bp, Homo sapien
tagagaagaggcgaggggcagacac

SEQ ID NO: 6022689 - DNA, 25 bp, Homo sapien
gtggttatgtgagcacagaccaact

SEQ ID NO: 6022690 - DNA, 25 bp, Homo sapien
gggtcttaattttgtgatactaagc

SEQ ID NO: 6022691 - DNA, 25 bp, Homo sapien
tcctatctttaaatggcaagggaaa

SEQ ID NO: 6022692 - DNA, 25 bp, Homo sapien
agatattgctccagatgctgagatg

SEQ ID NO: 6022693 - DNA, 25 bp, Homo sapien
gacagcagatattgctccagatgct

SEQ ID NO: 6022694 - DNA, 25 bp, Homo sapien
gatcatgcttttggaaaaagcaaaa

SEQ ID NO: 6022695 - DNA, 25 bp, Homo sapien
ttttaaatctgtgttgggagagcat

SEQ ID NO: 6022696 - DNA, 25 bp, Homo sapien
gcacagaccaactgaacaaaatcat

SEQ ID NO: 6022697 - DNA, 25 bp, Homo sapien
agtggaaaatcaagaattcgtaatc

SEQ ID NO: 6022698 - DNA, 25 bp, Homo sapien
tgagagtggatatggattctaaaat

SEQ ID NO: 6022699 - DNA, 25 bp, Homo sapien
ttgtctttaagactgtatagtggca

SEQ ID NO: 6022700 - DNA, 25 bp, Homo sapien
actatgttttaaatctgtgttggga

SEQ ID NO: 6022701 - DNA, 25 bp, Homo sapien
tggattctaaaatactttttctgga

SEQ ID NO: 6022702 - DNA, 25 bp, Homo sapien
gccttatactcaacgcaactgcttt

SEQ ID NO: 6022703 - DNA, 25 bp, Homo sapien
agtggcagtgattgtctgtactgtg

SEQ ID NO: 6022704 - DNA, 25 bp, Homo sapien
ccagatgtctgagacagcagatatt

SEQ ID NO: 6022705 - DNA, 25 bp, Homo sapien
tctggaaatgtcaaaatatcaataa

SEQ ID NO: 6022706 - DNA, 25 bp, Homo sapien
gaggacatttacatcaccacagaaa

SEQ ID NO: 6022707 - DNA, 25 bp, Homo sapien
accaactgaacaaaatcatgcagta

SEQ ID NO: 6022708 - DNA, 25 bp, Homo sapien
cattaaatagctacgttttttatgt

SEQ ID NO: 6022709 - DNA, 25 bp, Homo sapien
aatgaattgtctttaagactgtata

SEQ ID NO: 6022710 - DNA, 25 bp, Homo sapien
tggcaagggaaaggctgggcacaaa

SEQ ID NO: 6022711 - DNA, 25 bp, Homo sapien
gctgggcacaaacgcttaaaccaaa

SEQ ID NO: 6022712 - DNA, 25 bp, Homo sapien
aaccaagctttaaccaagaggacat

SEQ ID NO: 6022713 - DNA, 25 bp, Homo sapien
cgtaatcagataaatgctcccattg

SEQ ID NO: 6022714 - DNA, 25 bp, Homo sapien
ccgtgcagtctccaaggggccttat

SEQ ID NO: 6022715 - DNA, 25 bp, Homo sapien
tgaacaaaatcatgcagtagccttt

SEQ ID NO: 6022716 - DNA, 25 bp, Homo sapien
aattttccctcctcgtgtggttatg

SEQ ID NO: 6022717 - DNA, 25 bp, Homo sapien
actaagcattaaatagctacgtttt

SEQ ID NO: 6022718 - DNA, 25 bp, Homo sapien
tactcaacgcaactgctttgccttt

SEQ ID NO: 6022719 - DNA, 25 bp, Homo sapien
tacaccacggttcacaccgtgcagt

SEQ ID NO: 6022720 - DNA, 25 bp, Homo sapien
tgagatgtctgtcccagactacacc

SEQ ID NO: 6022721 - DNA, 25 bp, Homo sapien
atgctcccattgtgaattataaata

SEQ ID NO: 6022722 - DNA, 25 bp, Homo sapien
caaggggccttatactcaacgcaac

SEQ ID NO: 6022723 - DNA, 25 bp, Homo sapien
ctgtatagtggcagtgattgtctgt

SEQ ID NO: 6022724 - DNA, 25 bp, Homo sapien
ctttaaatggcaagggaaaggctgg

SEQ ID NO: 6022725 - DNA, 25 bp, Homo sapien
agctttaaccaagaggacatttaca

SEQ ID NO: 6022726 - DNA, 25 bp, Homo sapien
atttacatcaccacagaaagcctta

SEQ ID NO: 6022727 - DNA, 25 bp, Homo sapien
agatgctgagatgtctgtcccagac

SEQ ID NO: 6022728 - DNA, 25 bp, Homo sapien
tattttaatgaattgtctttaagac

SEQ ID NO: 6022729 - DNA, 25 bp, Homo sapien
atctgtgttgggagagcatgagagt

SEQ ID NO: 6022730 - DNA, 25 bp, Homo sapien
ttaagactgtatagtggcagtgatt

SEQ ID NO: 6022731 - DNA, 25 bp, Homo sapien
tttatgtatgtagatcatgcttttg

SEQ ID NO: 6022732 - DNA, 25 bp, Homo sapien
agtctccaaggggccttatactcaa

SEQ ID NO: 6022733 - DNA, 25 bp, Homo sapien
tgcctgacaaaaagaattttccctc

SEQ ID NO: 6022734 - DNA, 25 bp, Homo sapien
ccattgtgaattataaatattttaa

SEQ ID NO: 6022735 - DNA, 25 bp, Homo sapien
ctttttctggaaatgtcaaaatatc

SEQ ID NO: 6022736 - DNA, 25 bp, Homo sapien
cctcgtgtggttatgtgagcacaga

SEQ ID NO: 6022737 - DNA, 25 bp, Homo sapien
gttgggagagcatgagagtggatat

SEQ ID NO: 6022738 - DNA, 25 bp, Homo sapien
taattttgtgatactaagcattaaa

SEQ ID NO: 6022739 - DNA, 25 bp, Homo sapien
tgtgatactaagcattaaatagcta

SEQ ID NO: 6022740 - DNA, 25 bp, Homo sapien
agagcatgagagtggatatggattc

SEQ ID NO: 6022741 - DNA, 25 bp, Homo sapien
cacaaacgcttaaaccaaaactatg

SEQ ID NO: 6022742 - DNA, 25 bp, Homo sapien
tactgcccagatgtctgagacagca

SEQ ID NO: 6022743 - DNA, 25 bp, Homo sapien
ccacggttcacaccgtgcagtctcc

SEQ ID NO: 6022744 - DNA, 25 bp, Homo sapien
gtctgagacagcagatattgctcca

SEQ ID NO: 6022745 - DNA, 25 bp, Homo sapien
ggaaaggctgggcacaaacgcttaa

SEQ ID NO: 6022746 - DNA, 25 bp, Homo sapien
gttcacaccgtgcagtctccaaggg

SEQ ID NO: 6022747 - DNA, 25 bp, Homo sapien
aatgtcaaaatatcaataagtggaa

SEQ ID NO: 6022748 - DNA, 25 bp, Homo sapien
acgttttttatgtatgtagatcatg

SEQ ID NO: 6022749 - DNA, 25 bp, Homo sapien
tgctccagatgctgagatgtctgtc

SEQ ID NO: 6022750 - DNA, 25 bp, Homo sapien
atgtgagcacagaccaactgaacaa

SEQ ID NO: 6022751 - DNA, 25 bp, Homo sapien
cacgtcttgtataaaaccaagcttt

SEQ ID NO: 6022752 - DNA, 25 bp, Homo sapien
tgtctgtactgtgggtcttaatttt

SEQ ID NO: 6022753 - DNA, 25 bp, Homo sapien
cagataaatgctcccattgtgaatt

SEQ ID NO: 6022754 - DNA, 25 bp, Homo sapien
accaaaactatgttttaaatctgtg

SEQ ID NO: 6022755 - DNA, 25 bp, Homo sapien
ctgctttgcctttgcctgacaaaaa

SEQ ID NO: 6022756 - DNA, 25 bp, Homo sapien
tactgtgggtcttaattttgtgata

SEQ ID NO: 6022757 - DNA, 25 bp, Homo sapien
ccagactacaccacggttcacaccg

SEQ ID NO: 6022758 - DNA, 25 bp, Homo sapien
tggatatggattctaaaatactttt

SEQ ID NO: 6022759 - DNA, 25 bp, Homo sapien
agcctttcctatctttaaatggcaa

SEQ ID NO: 6022760 - DNA, 25 bp, Homo sapien
cacagaaagccttaccactactgcc

SEQ ID NO: 6022761 - DNA, 25 bp, Homo sapien
aaatcaagaattcgtaatcagataa

SEQ ID NO: 6022762 - DNA, 25 bp, Homo sapien
agtgattgtctgtactgtgggtctt

SEQ ID NO: 6022763 - DNA, 25 bp, Homo sapien
gtctgtcccagactacaccacggtt

SEQ ID NO: 6022764 - DNA, 25 bp, Homo sapien
atcaccacagaaagccttaccacta

SEQ ID NO: 6022765 - DNA, 25 bp, Homo sapien
acgcaactgctttgcctttgcctga

SEQ ID NO: 6022766 - DNA, 25 bp, Homo sapien
agaattcgtaatcagataaatgctc

SEQ ID NO: 6022767 - DNA, 25 bp, Homo sapien
aaccaagaggacatttacatcacca

SEQ ID NO: 6022768 - DNA, 25 bp, Homo sapien
aagccttaccactactgcccagatg

SEQ ID NO: 6022769 - DNA, 25 bp, Homo sapien
tgcagtagcctttcctatctttaaa

SEQ ID NO: 6022770 - DNA, 25 bp, Homo sapien
taaaatactttttctggaaatgtca

SEQ ID NO: 6022771 - DNA, 25 bp, Homo sapien
taccactactgcccagatgtctgag

SEQ ID NO: 6022772 - DNA, 25 bp, Homo sapien
tatgtagatcatgcttttggaaaaa

SEQ ID NO: 6022773 - DNA, 25 bp, Homo sapien
tcaataagtggaaaatcaagaattc

SEQ ID NO: 6022774 - DNA, 25 bp, Homo sapien
aaatcatgcagtagcctttcctatc

SEQ ID NO: 6022775 - DNA, 25 bp, Homo sapien
ggaagccacgtcttgtataaaacca

SEQ ID NO: 6022776 - DNA, 25 bp, Homo sapien
tgcctttgcctgacaaaaagaattt

SEQ ID NO: 6022777 - DNA, 25 bp, Homo sapien
atagctacgttttttatgtatgtag

SEQ ID NO: 6022778 - DNA, 25 bp, Homo sapien
ttccctcctcgtgtggttatgtgag

SEQ ID NO: 6022779 - DNA, 25 bp, Homo sapien
aaaatatcaataagtggaaaatcaa

SEQ ID NO: 6022780 - DNA, 25 bp, Homo sapien
cagtcttaaagacaattcattaaaa

SEQ ID NO: 6022781 - DNA, 25 bp, Homo sapien
tcacaaaattaagacccacagtaca

SEQ ID NO: 6022782 - DNA, 25 bp, Homo sapien
catgcttaaagtgtaaattattaaa

SEQ ID NO: 6022783 - DNA, 25 bp, Homo sapien
actatacagtcttaaagacaattca

SEQ ID NO: 6022784 - DNA, 25 bp, Homo sapien
ccctctttacactgtagctgctaca

SEQ ID NO: 6022785 - DNA, 25 bp, Homo sapien
acatacataaaaaacgtagctattt

SEQ ID NO: 6022786 - DNA, 25 bp, Homo sapien
gacccacagtacagacaatcactgc

SEQ ID NO: 6022787 - DNA, 25 bp, Homo sapien
ttcctgaactgcaaaagccacctga

SEQ ID NO: 6022788 - DNA, 25 bp, Homo sapien
atgtcaaaataaatgttttgcatat

SEQ ID NO: 6022789 - DNA, 25 bp, Homo sapien
aactgcaaaagccacctgattgttt

SEQ ID NO: 6022790 - DNA, 25 bp, Homo sapien
ttgttttgctttttccaaaagcatg

SEQ ID NO: 6022791 - DNA, 25 bp, Homo sapien
caaaataaatgttttgcatatccaa

SEQ ID NO: 6022792 - DNA, 25 bp, Homo sapien
attagacatttttagagttaagaag

SEQ ID NO: 6022793 - DNA, 25 bp, Homo sapien
tttccaaaagcatgatctacataca

SEQ ID NO: 6022794 - DNA, 25 bp, Homo sapien
caggttattagacatttttagagtt

SEQ ID NO: 6022795 - DNA, 25 bp, Homo sapien
ttgctttttccaaaagcatgatcta

SEQ ID NO: 6022796 - DNA, 25 bp, Homo sapien
aattaagacccacagtacagacaat

SEQ ID NO: 6022797 - DNA, 25 bp, Homo sapien
tggttttctttacgttcattgacca

SEQ ID NO: 6022798 - DNA, 25 bp, Homo sapien
gctatttaatgcttagtatcacaaa

SEQ ID NO: 6022799 - DNA, 25 bp, Homo sapien
atttataattcacaatgggagcatt

SEQ ID NO: 6022800 - DNA, 25 bp, Homo sapien
aaaaaaatcagcctgtgctataatc

SEQ ID NO: 6022801 - DNA, 25 bp, Homo sapien
ctttacactgtagctgctacatcct

SEQ ID NO: 6022802 - DNA, 25 bp, Homo sapien
taaaatgtttttttctaataatgca

SEQ ID NO: 6022803 - DNA, 25 bp, Homo sapien
aatatgtgtgtagcatattataaag

SEQ ID NO: 6022804 - DNA, 25 bp, Homo sapien
aacgtagctatttaatgcttagtat

SEQ ID NO: 6022805 - DNA, 25 bp, Homo sapien
aagaaaaaaaaaatcagcctgtgct

SEQ ID NO: 6022806 - DNA, 25 bp, Homo sapien
taatgcttagtatcacaaaattaag

SEQ ID NO: 6022807 - DNA, 25 bp, Homo sapien
tgatctacatacataaaaaacgtag

SEQ ID NO: 6022808 - DNA, 25 bp, Homo sapien
actgccactatacagtcttaaagac

SEQ ID NO: 6022809 - DNA, 25 bp, Homo sapien
taaaatatttataattcacaatggg

SEQ ID NO: 6022810 - DNA, 25 bp, Homo sapien
ttcaatttcctgaactgcaaaagcc

SEQ ID NO: 6022811 - DNA, 25 bp, Homo sapien
aaagcatgatctacatacataaaaa

SEQ ID NO: 6022812 - DNA, 25 bp, Homo sapien
ttctaataatgcaggttattagaca

SEQ ID NO: 6022813 - DNA, 25 bp, Homo sapien
ctagttttaccttctcacctagagt

SEQ ID NO: 6022814 - DNA, 25 bp, Homo sapien
acaatcactgccactatacagtctt

SEQ ID NO: 6022815 - DNA, 25 bp, Homo sapien
ataaaaaacgtagctatttaatgct

SEQ ID NO: 6022816 - DNA, 25 bp, Homo sapien
taatgcaggttattagacattttta

SEQ ID NO: 6022817 - DNA, 25 bp, Homo sapien
aactacaatatgtgtgtagcatatt

SEQ ID NO: 6022818 - DNA, 25 bp, Homo sapien
gttctgaactacaatatgtgtgtag

SEQ ID NO: 6022819 - DNA, 25 bp, Homo sapien
tctgcattcaatttcctgaactgca

SEQ ID NO: 6022820 - DNA, 25 bp, Homo sapien
tgtttttttctaataatgcaggtta

SEQ ID NO: 6022821 - DNA, 25 bp, Homo sapien
aattcacaatgggagcatttatctg

SEQ ID NO: 6022822 - DNA, 25 bp, Homo sapien
cacctgattgttttgctttttccaa

SEQ ID NO: 6022823 - DNA, 25 bp, Homo sapien
cctgtgctataatctgcattcaatt

SEQ ID NO: 6022824 - DNA, 25 bp, Homo sapien
gtacagacaatcactgccactatac

SEQ ID NO: 6022825 - DNA, 25 bp, Homo sapien
tggattgttctgaactacaatatgt

SEQ ID NO: 6022826 - DNA, 25 bp, Homo sapien
ttagtatcacaaaattaagacccac

SEQ ID NO: 6022827 - DNA, 25 bp, Homo sapien
taaagacaattcattaaaatattta

SEQ ID NO: 6022828 - DNA, 25 bp, Homo sapien
ttacgttcattgaccaaaacatgaa

SEQ ID NO: 6022829 - DNA, 25 bp, Homo sapien
ttctttacgttcattgaccaaaaca

SEQ ID NO: 6022830 - DNA, 25 bp, Homo sapien
aaaagccacctgattgttttgcttt

SEQ ID NO: 6022831 - DNA, 25 bp, Homo sapien
ctcacctagagttttagttcccagt

SEQ ID NO: 6022832 - DNA, 25 bp, Homo sapien
aatcagcctgtgctataatctgcat

SEQ ID NO: 6022833 - DNA, 25 bp, Homo sapien
ctataatctgcattcaatttcctga

SEQ ID NO: 6022834 - DNA, 25 bp, Homo sapien
agcgccgcagtggtggccccacctt

SEQ ID NO: 6022835 - DNA, 25 bp, Homo sapien
ctgctgagctaggactcagcccaga

SEQ ID NO: 6022836 - DNA, 25 bp, Homo sapien
cttgggggaaggatgccattattcg

SEQ ID NO: 6022837 - DNA, 25 bp, Homo sapien
agcgccgtccctcctaggtgcgccc

SEQ ID NO: 6022838 - DNA, 25 bp, Homo sapien
cacgaccccaaggtggcgctggaga

SEQ ID NO: 6022839 - DNA, 25 bp, Homo sapien
cagctttgaccaaaggagaaccctg

SEQ ID NO: 6022840 - DNA, 25 bp, Homo sapien
gctggggtcggagcattgggcacag

SEQ ID NO: 6022841 - DNA, 25 bp, Homo sapien
ttctacacctcacctggcctcactg

SEQ ID NO: 6022842 - DNA, 25 bp, Homo sapien
tatttttgatatcagctttgaccaa

SEQ ID NO: 6022843 - DNA, 25 bp, Homo sapien
cacctggcctcactgtttagtgcct

SEQ ID NO: 6022844 - DNA, 25 bp, Homo sapien
gcagtggtggccccacctttctaca

SEQ ID NO: 6022845 - DNA, 25 bp, Homo sapien
agctaggactcagcccagacaaggc

SEQ ID NO: 6022846 - DNA, 25 bp, Homo sapien
tgcgcccggcgctgcctgacagccc

SEQ ID NO: 6022847 - DNA, 25 bp, Homo sapien
acccattctcactgtgaatctccct

SEQ ID NO: 6022848 - DNA, 25 bp, Homo sapien
acaaggcggcagaggtgctgagcca

SEQ ID NO: 6022849 - DNA, 25 bp, Homo sapien
cggggataactggtagcagcggcag

SEQ ID NO: 6022850 - DNA, 25 bp, Homo sapien
acccgctggctaaattcactgctga

SEQ ID NO: 6022851 - DNA, 25 bp, Homo sapien
tgtgaatctccctgctggggtcgga

SEQ ID NO: 6022852 - DNA, 25 bp, Homo sapien
cagctgctgccgagctgctggcgca

SEQ ID NO: 6022853 - DNA, 25 bp, Homo sapien
acaaggcagctgctgccgagctgct

SEQ ID NO: 6022854 - DNA, 25 bp, Homo sapien
ctggagagcctctacccgctggcta

SEQ ID NO: 6022855 - DNA, 25 bp, Homo sapien
gtggcgctggagagcctctacccgc

SEQ ID NO: 6022856 - DNA, 25 bp, Homo sapien
agggtgcgcacttggccgcaggacc

SEQ ID NO: 6022857 - DNA, 25 bp, Homo sapien
tgggataggggaagggagatttata

SEQ ID NO: 6022858 - DNA, 25 bp, Homo sapien
gctggcgcagaccacgcacttcctg

SEQ ID NO: 6022859 - DNA, 25 bp, Homo sapien
acctagagcgccgtccctcctaggt

SEQ ID NO: 6022860 - DNA, 25 bp, Homo sapien
atcgaccgtttctctcccacctaga

SEQ ID NO: 6022861 - DNA, 25 bp, Homo sapien
ctccctgctggggtcggagcattgg

SEQ ID NO: 6022862 - DNA, 25 bp, Homo sapien
cccaaggtggcgctggagagcctct

SEQ ID NO: 6022863 - DNA, 25 bp, Homo sapien
aggtgctgagccagggtgcgcactt

SEQ ID NO: 6022864 - DNA, 25 bp, Homo sapien
gatttatatttttgatatcagcttt

SEQ ID NO: 6022865 - DNA, 25 bp, Homo sapien
agcaggacaaggcagctgctgccga

SEQ ID NO: 6022866 - DNA, 25 bp, Homo sapien
cacgcacttcctgcacgaccccaag

SEQ ID NO: 6022867 - DNA, 25 bp, Homo sapien
gacagccgaaccatcgaccgtttct

SEQ ID NO: 6022868 - DNA, 25 bp, Homo sapien
cggcagaggtgctgagccagggtgc

SEQ ID NO: 6022869 - DNA, 25 bp, Homo sapien
tccggcccttgcgaccacacccatt

SEQ ID NO: 6022870 - DNA, 25 bp, Homo sapien
aagggagatttatatttttgatatc

SEQ ID NO: 6022871 - DNA, 25 bp, Homo sapien
cctgtggctcattggccctctcccc

SEQ ID NO: 6022872 - DNA, 25 bp, Homo sapien
ctgctcttgggggaaggatgccatt

SEQ ID NO: 6022873 - DNA, 25 bp, Homo sapien
gcccagacaaggcggcagaggtgct

SEQ ID NO: 6022874 - DNA, 25 bp, Homo sapien
aaccctgcctctccctgtggctcat

SEQ ID NO: 6022875 - DNA, 25 bp, Homo sapien
ccgtgctgctcttgggggaaggatg

SEQ ID NO: 6022876 - DNA, 25 bp, Homo sapien
gactcagcccagacaaggcggcaga

SEQ ID NO: 6022877 - DNA, 25 bp, Homo sapien
tggccctctcccccggctccgtgct

SEQ ID NO: 6022878 - DNA, 25 bp, Homo sapien
tagcctggggaagtcagtgggggaa

SEQ ID NO: 6022879 - DNA, 25 bp, Homo sapien
gtagcagcggcagcgccgcagtggt

SEQ ID NO: 6022880 - DNA, 25 bp, Homo sapien
gatgccattattcggacggttgctc

SEQ ID NO: 6022881 - DNA, 25 bp, Homo sapien
cggcgctgcctgacagcccggggat

SEQ ID NO: 6022882 - DNA, 25 bp, Homo sapien
gcagaccacgcacttcctgcacgac

SEQ ID NO: 6022883 - DNA, 25 bp, Homo sapien
tgcctgacagcccggggataactgg

SEQ ID NO: 6022884 - DNA, 25 bp, Homo sapien
ttggccgcaggaccggacagccgaa

SEQ ID NO: 6022885 - DNA, 25 bp, Homo sapien
tggctaaattcactgctgagctagg

SEQ ID NO: 6022886 - DNA, 25 bp, Homo sapien
tctcccacctagagcgccgtccctc

SEQ ID NO: 6022887 - DNA, 25 bp, Homo sapien
ctgtttagtgccttagcctggggaa

SEQ ID NO: 6022888 - DNA, 25 bp, Homo sapien
ttgctcccagccctacctccggccc

SEQ ID NO: 6022889 - DNA, 25 bp, Homo sapien
ctacctccggcccttgcgaccacac

SEQ ID NO: 6022890 - DNA, 25 bp, Homo sapien
tgatatcagctttgaccaaaggaga

SEQ ID NO: 6022891 - DNA, 25 bp, Homo sapien
ggaaggatgccattattcggacggt

SEQ ID NO: 6022892 - DNA, 25 bp, Homo sapien
aggaccggacagccgaaccatcgac

SEQ ID NO: 6022893 - DNA, 25 bp, Homo sapien
cggcagcgccgcagtggtggcccca

SEQ ID NO: 6022894 - DNA, 25 bp, Homo sapien
aattcactgctgagctaggactcag

SEQ ID NO: 6022895 - DNA, 25 bp, Homo sapien
acagcccggggataactggtagcag

SEQ ID NO: 6022896 - DNA, 25 bp, Homo sapien
ccggctccgtgctgctcttggggga

SEQ ID NO: 6022897 - DNA, 25 bp, Homo sapien
attattcggacggttgctcccagcc

SEQ ID NO: 6022898 - DNA, 25 bp, Homo sapien
ccagccctacctccggcccttgcga

SEQ ID NO: 6022899 - DNA, 25 bp, Homo sapien
gctgccgagctgctggcgcagacca

SEQ ID NO: 6022900 - DNA, 25 bp, Homo sapien
gtccctcctaggtgcgcccggcgct

SEQ ID NO: 6022901 - DNA, 25 bp, Homo sapien
aaggagaaccctgcctctccctgtg

SEQ ID NO: 6022902 - DNA, 25 bp, Homo sapien
ccacctttctacacctcacctggcc

SEQ ID NO: 6022903 - DNA, 25 bp, Homo sapien
cttcctgcacgaccccaaggtggcg

SEQ ID NO: 6022904 - DNA, 25 bp, Homo sapien
gctcattggccctctcccccggctc

SEQ ID NO: 6022905 - DNA, 25 bp, Homo sapien
cctctccctgtggctcattggccct

SEQ ID NO: 6022906 - DNA, 25 bp, Homo sapien
gaaccatcgaccgtttctctcccac

SEQ ID NO: 6022907 - DNA, 25 bp, Homo sapien
taactggtagcagcggcagcgccgc

SEQ ID NO: 6022908 - DNA, 25 bp, Homo sapien
gagctgctggcgcagaccacgcact

SEQ ID NO: 6022909 - DNA, 25 bp, Homo sapien
gtggccccacctttctacacctcac

SEQ ID NO: 6022910 - DNA, 25 bp, Homo sapien
cgcacttggccgcaggaccggacag

SEQ ID NO: 6022911 - DNA, 25 bp, Homo sapien
cctaggtgcgcccggcgctgcctga

SEQ ID NO: 6022912 - DNA, 25 bp, Homo sapien
tgagccagggtgcgcacttggccgc

SEQ ID NO: 6022913 - DNA, 25 bp, Homo sapien
cggacggttgctcccagccctacct

SEQ ID NO: 6022914 - DNA, 25 bp, Homo sapien
gaccacacccattctcactgtgaat

SEQ ID NO: 6022915 - DNA, 25 bp, Homo sapien
cgtttctctcccacctagagcgccg

SEQ ID NO: 6022916 - DNA, 25 bp, Homo sapien
gcctcactgtttagtgccttagcct

SEQ ID NO: 6022917 - DNA, 25 bp, Homo sapien
tgaccaaaggagaaccctgcctctc

SEQ ID NO: 6022918 - DNA, 25 bp, Homo sapien
acctcacctggcctcactgtttagt

SEQ ID NO: 6022919 - DNA, 25 bp, Homo sapien
agcctctacccgctggctaaattca

SEQ ID NO: 6022920 - DNA, 25 bp, Homo sapien
tctcccccggctccgtgctgctctt

SEQ ID NO: 6022921 - DNA, 25 bp, Homo sapien
agtgccttagcctggggaagtcagt

SEQ ID NO: 6022922 - DNA, 25 bp, Homo sapien
tctcactgtgaatctccctgctggg

SEQ ID NO: 6022923 - DNA, 25 bp, Homo sapien
ccttgcgaccacacccattctcact

SEQ ID NO: 6022924 - DNA, 25 bp, Homo sapien
gtacagagtagagaatatacaaagg

SEQ ID NO: 6022925 - DNA, 25 bp, Homo sapien
ctggtggtgaggaaaggaagggttg

SEQ ID NO: 6022926 - DNA, 25 bp, Homo sapien
aatggcatccttcccccaagagcag

SEQ ID NO: 6022927 - DNA, 25 bp, Homo sapien
tataaatctcccttcccctatccca

SEQ ID NO: 6022928 - DNA, 25 bp, Homo sapien
tgagccacagggagaggcagggttc

SEQ ID NO: 6022929 - DNA, 25 bp, Homo sapien
accgtccgaataatggcatccttcc

SEQ ID NO: 6022930 - DNA, 25 bp, Homo sapien
agggccggaggtagggctgggagca

SEQ ID NO: 6022931 - DNA, 25 bp, Homo sapien
agccgggggagagggccaatgagcc

SEQ ID NO: 6022932 - DNA, 25 bp, Homo sapien
gccagagctgcccaccctggtggtg

SEQ ID NO: 6022933 - DNA, 25 bp, Homo sapien
atgggtcagggttgtcatccctggc

SEQ ID NO: 6022934 - DNA, 25 bp, Homo sapien
agggagattcacagtgagaatgggt

SEQ ID NO: 6022935 - DNA, 25 bp, Homo sapien
gaacttcacattatcagtcccgggc

SEQ ID NO: 6022936 - DNA, 25 bp, Homo sapien
ggataggggtcacctagggcgcatg

SEQ ID NO: 6022937 - DNA, 25 bp, Homo sapien
gcacggagccgggggagagggccaa

SEQ ID NO: 6022938 - DNA, 25 bp, Homo sapien
aatgaggaacttcacattatcagtc

SEQ ID NO: 6022939 - DNA, 25 bp, Homo sapien
ttggccctggggctagtgccacttg

SEQ ID NO: 6022940 - DNA, 25 bp, Homo sapien
agctgatatcaaaaatataaatctc

SEQ ID NO: 6022941 - DNA, 25 bp, Homo sapien
gggttctcctttggtcaaagctgat

SEQ ID NO: 6022942 - DNA, 25 bp, Homo sapien
aaagttgggctcaggataggggtca

SEQ ID NO: 6022943 - DNA, 25 bp, Homo sapien
gtgtggtcgcaagggccggaggtag

SEQ ID NO: 6022944 - DNA, 25 bp, Homo sapien
gggctcaggataggggtcacctagg

SEQ ID NO: 6022945 - DNA, 25 bp, Homo sapien
cggccggctcagtcccctcccctct

SEQ ID NO: 6022946 - DNA, 25 bp, Homo sapien
ggctgggcaggagcaggggacgggg

SEQ ID NO: 6022947 - DNA, 25 bp, Homo sapien
cctggcgccagagctgcccaccctg

SEQ ID NO: 6022948 - DNA, 25 bp, Homo sapien
cctggggctagtgccacttgtgcaa

SEQ ID NO: 6022949 - DNA, 25 bp, Homo sapien
ctagtgccacttgtgcaaaatgagg

SEQ ID NO: 6022950 - DNA, 25 bp, Homo sapien
atccttcccccaagagcagcacgga

SEQ ID NO: 6022951 - DNA, 25 bp, Homo sapien
cgaataatggcatccttcccccaag

SEQ ID NO: 6022952 - DNA, 25 bp, Homo sapien
cctctctccaactgtgcccaatgct

SEQ ID NO: 6022953 - DNA, 25 bp, Homo sapien
gaatgggtgtggtcgcaagggccgg

SEQ ID NO: 6022954 - DNA, 25 bp, Homo sapien
ccagctaaagttgggctcaggatag

SEQ ID NO: 6022955 - DNA, 25 bp, Homo sapien
gggaggccctccggccggctcagtc

SEQ ID NO: 6022956 - DNA, 25 bp, Homo sapien
cctcggaagcagagacagatgggtc

SEQ ID NO: 6022957 - DNA, 25 bp, Homo sapien
caggagcaggggacggggaggccct

SEQ ID NO: 6022958 - DNA, 25 bp, Homo sapien
agagcagcacggagccgggggagag

SEQ ID NO: 6022959 - DNA, 25 bp, Homo sapien
ccacttgtgcaaaatgaggaacttc

SEQ ID NO: 6022960 - DNA, 25 bp, Homo sapien
ggagacctctctccagcccagctaa

SEQ ID NO: 6022961 - DNA, 25 bp, Homo sapien
aaggaaggagacctctctccagccc

SEQ ID NO: 6022962 - DNA, 25 bp, Homo sapien
tccaactgtgcccaatgctccgacc

SEQ ID NO: 6022963 - DNA, 25 bp, Homo sapien
ccctcccctctctccaactgtgccc

SEQ ID NO: 6022964 - DNA, 25 bp, Homo sapien
ggagagggccaatgagccacaggga

SEQ ID NO: 6022965 - DNA, 25 bp, Homo sapien
gggtcacctagggcgcatgcaataa

SEQ ID NO: 6022966 - DNA, 25 bp, Homo sapien
tcgcaagggccggaggtagggctgg

SEQ ID NO: 6022967 - DNA, 25 bp, Homo sapien
gcctgtgtacagagtagagaatata

SEQ ID NO: 6022968 - DNA, 25 bp, Homo sapien
agggctgggagcaaccgtccgaata

SEQ ID NO: 6022969 - DNA, 25 bp, Homo sapien
gtcatccctggcgccagagctgccc

SEQ ID NO: 6022970 - DNA, 25 bp, Homo sapien
gaggcagggttctcctttggtcaaa

SEQ ID NO: 6022971 - DNA, 25 bp, Homo sapien
gggacacctcggaagcagagacaga

SEQ ID NO: 6022972 - DNA, 25 bp, Homo sapien
cagtcccctcccctctctccaactg

SEQ ID NO: 6022973 - DNA, 25 bp, Homo sapien
gaggaggggacacctcggaagcaga

SEQ ID NO: 6022974 - DNA, 25 bp, Homo sapien
gtgcaaaatgaggaacttcacatta

SEQ ID NO: 6022975 - DNA, 25 bp, Homo sapien
ccaccctggtggtgaggaaaggaag

SEQ ID NO: 6022976 - DNA, 25 bp, Homo sapien
cagtgagaatgggtgtggtcgcaag

SEQ ID NO: 6022977 - DNA, 25 bp, Homo sapien
ggctctggaagagcctgtgtacaga

SEQ ID NO: 6022978 - DNA, 25 bp, Homo sapien
aagcagagacagatgggtcagggtt

SEQ ID NO: 6022979 - DNA, 25 bp, Homo sapien
gcgcatgcaataaatatatggtccg

SEQ ID NO: 6022980 - DNA, 25 bp, Homo sapien
ggccaatgagccacagggagaggca

SEQ ID NO: 6022981 - DNA, 25 bp, Homo sapien
cctagggcgcatgcaataaatatat

SEQ ID NO: 6022982 - DNA, 25 bp, Homo sapien
cagtcccgggctgggcaggagcagg

SEQ ID NO: 6022983 - DNA, 25 bp, Homo sapien
gccctccggccggctcagtcccctc

SEQ ID NO: 6022984 - DNA, 25 bp, Homo sapien
agtagagaatatacaaagggacaga

SEQ ID NO: 6022985 - DNA, 25 bp, Homo sapien
cacattatcagtcccgggctgggca

SEQ ID NO: 6022986 - DNA, 25 bp, Homo sapien
gcaataaatatatggtccggggacc

SEQ ID NO: 6022987 - DNA, 25 bp, Homo sapien
ggaaccaaggaaggagacctctctc

SEQ ID NO: 6022988 - DNA, 25 bp, Homo sapien
caggaagaggaggggacacctcgga

SEQ ID NO: 6022989 - DNA, 25 bp, Homo sapien
cccagcagggagattcacagtgaga

SEQ ID NO: 6022990 - DNA, 25 bp, Homo sapien
attcacagtgagaatgggtgtggtc

SEQ ID NO: 6022991 - DNA, 25 bp, Homo sapien
gaatatacaaagggacagaacggga

SEQ ID NO: 6022992 - DNA, 25 bp, Homo sapien
gaagagcctgtgtacagagtagaga

SEQ ID NO: 6022993 - DNA, 25 bp, Homo sapien
caatgctccgaccccagcagggaga

SEQ ID NO: 6022994 - DNA, 25 bp, Homo sapien
acagggagaggcagggttctccttt

SEQ ID NO: 6022995 - DNA, 25 bp, Homo sapien
agacagatgggtcagggttgtcatc

SEQ ID NO: 6022996 - DNA, 25 bp, Homo sapien
tgtgcccaatgctccgaccccagca

SEQ ID NO: 6022997 - DNA, 25 bp, Homo sapien
ggtcaaagctgatatcaaaaatata

SEQ ID NO: 6022998 - DNA, 25 bp, Homo sapien
cagggttgtcatccctggcgccaga

SEQ ID NO: 6022999 - DNA, 25 bp, Homo sapien
tccgaccccagcagggagattcaca

SEQ ID NO: 6023000 - DNA, 25 bp, Homo sapien
cggctcagtcccctcccctctctcc

SEQ ID NO: 6023001 - DNA, 25 bp, Homo sapien
cccccaagagcagcacggagccggg

SEQ ID NO: 6023002 - DNA, 25 bp, Homo sapien
tccagcccagctaaagttgggctca

SEQ ID NO: 6023003 - DNA, 25 bp, Homo sapien
tatcaaaaatataaatctcccttcc

SEQ ID NO: 6023004 - DNA, 25 bp, Homo sapien
agctgcccaccctggtggtgaggaa

SEQ ID NO: 6023005 - DNA, 25 bp, Homo sapien
ggaggtagggctgggagcaaccgtc

SEQ ID NO: 6023006 - DNA, 25 bp, Homo sapien
ctctctccagcccagctaaagttgg

SEQ ID NO: 6023007 - DNA, 25 bp, Homo sapien
tcctttggtcaaagctgatatcaaa

SEQ ID NO: 6023008 - DNA, 25 bp, Homo sapien
gaagggttggccctggggctagtgc

SEQ ID NO: 6023009 - DNA, 25 bp, Homo sapien
gggagcaaccgtccgaataatggca

SEQ ID NO: 6023010 - DNA, 25 bp, Homo sapien
ttgggatcactgtgagttttgcaca

SEQ ID NO: 6023011 - DNA, 25 bp, Homo sapien
cagactggtattgcaaggtgatctc

SEQ ID NO: 6023012 - DNA, 25 bp, Homo sapien
tgatgagaagaaaacagcgagacca

SEQ ID NO: 6023013 - DNA, 25 bp, Homo sapien
tgatctcagacagtcgatatggatt

SEQ ID NO: 6023014 - DNA, 25 bp, Homo sapien
ggtattgcaaggtgatctcagacag

SEQ ID NO: 6023015 - DNA, 25 bp, Homo sapien
aacagcgagaccacgtgtcgtgcgc

SEQ ID NO: 6023016 - DNA, 25 bp, Homo sapien
tcactgtcagcttggaccagcccgt

SEQ ID NO: 6023017 - DNA, 25 bp, Homo sapien
ttgcacatggagagatacagactgc

SEQ ID NO: 6023018 - DNA, 25 bp, Homo sapien
aacagtagagaaaacgccgattagc

SEQ ID NO: 6023019 - DNA, 25 bp, Homo sapien
gtcgatatggattcattctgatgag

SEQ ID NO: 6023020 - DNA, 25 bp, Homo sapien
atctagcaaaccgccgccctttcct

SEQ ID NO: 6023021 - DNA, 25 bp, Homo sapien
cagacagtcgatatggattcattct

SEQ ID NO: 6023022 - DNA, 25 bp, Homo sapien
agccagcccagggtccctctgtggt

SEQ ID NO: 6023023 - DNA, 25 bp, Homo sapien
ttttgtttaggataagagaaggctg

SEQ ID NO: 6023024 - DNA, 25 bp, Homo sapien
cagggctcactgtcagcttggacca

SEQ ID NO: 6023025 - DNA, 25 bp, Homo sapien
cccgtacttacatctactgaacact

SEQ ID NO: 6023026 - DNA, 25 bp, Homo sapien
agatacagactgctggcataggtcg

SEQ ID NO: 6023027 - DNA, 25 bp, Homo sapien
caaaccgccgccctttcctctgtgc

SEQ ID NO: 6023028 - DNA, 25 bp, Homo sapien
atggattcattctgatgagaagaaa

SEQ ID NO: 6023029 - DNA, 25 bp, Homo sapien
ctggcataggtcgtctctaacagta

SEQ ID NO: 6023030 - DNA, 25 bp, Homo sapien
agagaaaacgccgattagcacaatc

SEQ ID NO: 6023031 - DNA, 25 bp, Homo sapien
gggcacagccccagccagcccaggg

SEQ ID NO: 6023032 - DNA, 25 bp, Homo sapien
cacttaatttaaatttatatcctat

SEQ ID NO: 6023033 - DNA, 25 bp, Homo sapien
agaagggggcacagccccagccagc

SEQ ID NO: 6023034 - DNA, 25 bp, Homo sapien
tccagtccctgcatctagcaaaccg

SEQ ID NO: 6023035 - DNA, 25 bp, Homo sapien
atgtgataagaaaactgttcagact

SEQ ID NO: 6023036 - DNA, 25 bp, Homo sapien
gagaccacgtgtcgtgcgcatgagc

SEQ ID NO: 6023037 - DNA, 25 bp, Homo sapien
agggaggggcgatgcccttcagaag

SEQ ID NO: 6023038 - DNA, 25 bp, Homo sapien
ctttcctctgtgcccgtacttacat

SEQ ID NO: 6023039 - DNA, 25 bp, Homo sapien
tgagcacagatgctggccttgggat

SEQ ID NO: 6023040 - DNA, 25 bp, Homo sapien
tgtggtcatgactgggtgtgagcac

SEQ ID NO: 6023041 - DNA, 25 bp, Homo sapien
cagccccagccagcccagggtccct

SEQ ID NO: 6023042 - DNA, 25 bp, Homo sapien
tttatatcctataattctttttgga

SEQ ID NO: 6023043 - DNA, 25 bp, Homo sapien
agtggttcttgccaaactggaggga

SEQ ID NO: 6023044 - DNA, 25 bp, Homo sapien
cttgccaaactggagggaggggcga

SEQ ID NO: 6023045 - DNA, 25 bp, Homo sapien
ttcaagattcagaaaaagtccagtc

SEQ ID NO: 6023046 - DNA, 25 bp, Homo sapien
ccctgcatctagcaaaccgccgccc

SEQ ID NO: 6023047 - DNA, 25 bp, Homo sapien
ataattctttttggatgtttcaaga

SEQ ID NO: 6023048 - DNA, 25 bp, Homo sapien
ctggccttgggatcactgtgagttt

SEQ ID NO: 6023049 - DNA, 25 bp, Homo sapien
atctgtaatctacgtgatgtgataa

SEQ ID NO: 6023050 - DNA, 25 bp, Homo sapien
tctgtgcccgtacttacatctactg

SEQ ID NO: 6023051 - DNA, 25 bp, Homo sapien
gcaaggtgatctcagacagtcgata

SEQ ID NO: 6023052 - DNA, 25 bp, Homo sapien
gtagctttttgtttaggataagaga

SEQ ID NO: 6023053 - DNA, 25 bp, Homo sapien
taggtcgtctctaacagtagagaaa

SEQ ID NO: 6023054 - DNA, 25 bp, Homo sapien
tgagttttgcacatggagagataca

SEQ ID NO: 6023055 - DNA, 25 bp, Homo sapien
tcactgtgagttttgcacatggaga

SEQ ID NO: 6023056 - DNA, 25 bp, Homo sapien
catgactgggtgtgagcacagatgc

SEQ ID NO: 6023057 - DNA, 25 bp, Homo sapien
caggcttacacactttcttttctta

SEQ ID NO: 6023058 - DNA, 25 bp, Homo sapien
agactgctggcataggtcgtctcta

SEQ ID NO: 6023059 - DNA, 25 bp, Homo sapien
aaactggagggaggggcgatgccct

SEQ ID NO: 6023060 - DNA, 25 bp, Homo sapien
gtaatctacgtgatgtgataagaaa

SEQ ID NO: 6023061 - DNA, 25 bp, Homo sapien
aacgccgattagcacaatctaaatc

SEQ ID NO: 6023062 - DNA, 25 bp, Homo sapien
gattagcacaatctaaatcccccga

SEQ ID NO: 6023063 - DNA, 25 bp, Homo sapien
gtacagcaggcttacacactttctt

SEQ ID NO: 6023064 - DNA, 25 bp, Homo sapien
cacaatctaaatcccccgagtagct

SEQ ID NO: 6023065 - DNA, 25 bp, Homo sapien
cgtgcgcatgagctcatacagggct

SEQ ID NO: 6023066 - DNA, 25 bp, Homo sapien
acgtgtcgtgcgcatgagctcatac

SEQ ID NO: 6023067 - DNA, 25 bp, Homo sapien
tacgtgatgtgataagaaaactgtt

SEQ ID NO: 6023068 - DNA, 25 bp, Homo sapien
atggagagatacagactgctggcat

SEQ ID NO: 6023069 - DNA, 25 bp, Homo sapien
cgtgaggtacagcaggcttacacac

SEQ ID NO: 6023070 - DNA, 25 bp, Homo sapien
ctttttggatgtttcaagattcaga

SEQ ID NO: 6023071 - DNA, 25 bp, Homo sapien
tctactgaacactgtatatgtaatt

SEQ ID NO: 6023072 - DNA, 25 bp, Homo sapien
tgcccttcagaagggggcacagccc

SEQ ID NO: 6023073 - DNA, 25 bp, Homo sapien
actgttcagactggtattgcaaggt

SEQ ID NO: 6023074 - DNA, 25 bp, Homo sapien
ccagggtccctctgtggtcatgact

SEQ ID NO: 6023075 - DNA, 25 bp, Homo sapien
taagagaaggctggtaattcactta

SEQ ID NO: 6023076 - DNA, 25 bp, Homo sapien
ctcatacagggctcactgtcagctt

SEQ ID NO: 6023077 - DNA, 25 bp, Homo sapien
ttggaccagcccgtgaggtacagca

SEQ ID NO: 6023078 - DNA, 25 bp, Homo sapien
ttaggataagagaaggctggtaatt

SEQ ID NO: 6023079 - DNA, 25 bp, Homo sapien
tatcctataattctttttggatgtt

SEQ ID NO: 6023080 - DNA, 25 bp, Homo sapien
gaagaaaacagcgagaccacgtgtc

SEQ ID NO: 6023081 - DNA, 25 bp, Homo sapien
gggcgatgcccttcagaagggggca

SEQ ID NO: 6023082 - DNA, 25 bp, Homo sapien
gaacactgtatatgtaatttttaaa

SEQ ID NO: 6023083 - DNA, 25 bp, Homo sapien
gccgccctttcctctgtgcccgtac

SEQ ID NO: 6023084 - DNA, 25 bp, Homo sapien
ttcttaagtggttcttgccaaactg

SEQ ID NO: 6023085 - DNA, 25 bp, Homo sapien
tcattctgatgagaagaaaacagcg

SEQ ID NO: 6023086 - DNA, 25 bp, Homo sapien
attcagaaaaagtccagtccctgca

SEQ ID NO: 6023087 - DNA, 25 bp, Homo sapien
cttacatctactgaacactgtatat

SEQ ID NO: 6023088 - DNA, 25 bp, Homo sapien
tgggtgtgagcacagatgctggcct

SEQ ID NO: 6023089 - DNA, 25 bp, Homo sapien
ggatgtttcaagattcagaaaaagt

SEQ ID NO: 6023090 - DNA, 25 bp, Homo sapien
gtcagcttggaccagcccgtgaggt

SEQ ID NO: 6023091 - DNA, 25 bp, Homo sapien
tccctctgtggtcatgactgggtgt

SEQ ID NO: 6023092 - DNA, 25 bp, Homo sapien
gtctctaacagtagagaaaacgccg

SEQ ID NO: 6023093 - DNA, 25 bp, Homo sapien
cagatgctggccttgggatcactgt

SEQ ID NO: 6023094 - DNA, 25 bp, Homo sapien
catgagctcatacagggctcactgt

SEQ ID NO: 6023095 - DNA, 25 bp, Homo sapien
ccagcccgtgaggtacagcaggctt

SEQ ID NO: 6023096 - DNA, 25 bp, Homo sapien
gaaggctggtaattcacttaattta

SEQ ID NO: 6023097 - DNA, 25 bp, Homo sapien
aaaaagtccagtccctgcatctagc

SEQ ID NO: 6023098 - DNA, 25 bp, Homo sapien
taagaaaactgttcagactggtatt

SEQ ID NO: 6023099 - DNA, 25 bp, Homo sapien
ttcttttcttaagtggttcttgcca

SEQ ID NO: 6023100 - DNA, 25 bp, Homo sapien
aggagatgggtggagctttctttgt

SEQ ID NO: 6023101 - DNA, 25 bp, Homo sapien
cttctcttatcctaaacaaaaagct

SEQ ID NO: 6023102 - DNA, 25 bp, Homo sapien
actcgggggatttagattgtgctaa

SEQ ID NO: 6023103 - DNA, 25 bp, Homo sapien
actctgaatgccacatgatcacgta

SEQ ID NO: 6023104 - DNA, 25 bp, Homo sapien
aaaacggctattcaggagatgggtg

SEQ ID NO: 6023105 - DNA, 25 bp, Homo sapien
acatgatcacgtaagcccaagcctc

SEQ ID NO: 6023106 - DNA, 25 bp, Homo sapien
gcgttttctctactgttagagacga

SEQ ID NO: 6023107 - DNA, 25 bp, Homo sapien
taaacatcctgggtttatgtcttaa

SEQ ID NO: 6023108 - DNA, 25 bp, Homo sapien
ctattcaggagatgggtggagcttt

SEQ ID NO: 6023109 - DNA, 25 bp, Homo sapien
gctagatgcagggactggacttttt

SEQ ID NO: 6023110 - DNA, 25 bp, Homo sapien
tcttgaaacatccaaaaagaattat

SEQ ID NO: 6023111 - DNA, 25 bp, Homo sapien
gccagcagtctgtatctctccatgt

SEQ ID NO: 6023112 - DNA, 25 bp, Homo sapien
aattacatatacagtgttcagtaga

SEQ ID NO: 6023113 - DNA, 25 bp, Homo sapien
atgtagaagaatcattttccttctg

SEQ ID NO: 6023114 - DNA, 25 bp, Homo sapien
agtgaattaccagccttctcttatc

SEQ ID NO: 6023115 - DNA, 25 bp, Homo sapien
gtacgggcacagaggaaagggcggc

SEQ ID NO: 6023116 - DNA, 25 bp, Homo sapien
aatcagttttgcgattacatgtaga

SEQ ID NO: 6023117 - DNA, 25 bp, Homo sapien
cggtttgctagatgcagggactgga

SEQ ID NO: 6023118 - DNA, 25 bp, Homo sapien
atcctgggtttatgtcttaagactt

SEQ ID NO: 6023119 - DNA, 25 bp, Homo sapien
gactttactctgaatgccacatgat

SEQ ID NO: 6023120 - DNA, 25 bp, Homo sapien
agtgttcagtagatgtaagtacggg

SEQ ID NO: 6023121 - DNA, 25 bp, Homo sapien
aaattaagtgaattaccagccttct

SEQ ID NO: 6023122 - DNA, 25 bp, Homo sapien
agtctgtatctctccatgtgcaaaa

SEQ ID NO: 6023123 - DNA, 25 bp, Homo sapien
aaagctactcgggggatttagattg

SEQ ID NO: 6023124 - DNA, 25 bp, Homo sapien
cttatcctaaacaaaaagctactcg

SEQ ID NO: 6023125 - DNA, 25 bp, Homo sapien
ctgcaagcgaactggatatatttac

SEQ ID NO: 6023126 - DNA, 25 bp, Homo sapien
tatagcttaaattcaaattttggaa

SEQ ID NO: 6023127 - DNA, 25 bp, Homo sapien
tccatgtgcaaaactcacagtgatc

SEQ ID NO: 6023128 - DNA, 25 bp, Homo sapien
gagacgacctatgccagcagtctgt

SEQ ID NO: 6023129 - DNA, 25 bp, Homo sapien
tttagattgtgctaatcggcgtttt

SEQ ID NO: 6023130 - DNA, 25 bp, Homo sapien
gaggaaagggcggcggtttgctaga

SEQ ID NO: 6023131 - DNA, 25 bp, Homo sapien
ttcataggtttataaaagtactctc

SEQ ID NO: 6023132 - DNA, 25 bp, Homo sapien
tcttaagactttactctgaatgcca

SEQ ID NO: 6023133 - DNA, 25 bp, Homo sapien
gactggactttttctgaatcttgaa

SEQ ID NO: 6023134 - DNA, 25 bp, Homo sapien
ttggttagaatcttcataggtttat

SEQ ID NO: 6023135 - DNA, 25 bp, Homo sapien
aaaattttggttagaatcttcatag

SEQ ID NO: 6023136 - DNA, 25 bp, Homo sapien
ggtttataaaagtactctctgcaag

SEQ ID NO: 6023137 - DNA, 25 bp, Homo sapien
atatacagtgttcagtagatgtaag

SEQ ID NO: 6023138 - DNA, 25 bp, Homo sapien
tactctctgcaagcgaactggatat

SEQ ID NO: 6023139 - DNA, 25 bp, Homo sapien
cagtagatgtaagtacgggcacaga

SEQ ID NO: 6023140 - DNA, 25 bp, Homo sapien
tctgaatcttgaaacatccaaaaag

SEQ ID NO: 6023141 - DNA, 25 bp, Homo sapien
agggcggcggtttgctagatgcagg

SEQ ID NO: 6023142 - DNA, 25 bp, Homo sapien
gggagaaatcagttttgcgattaca

SEQ ID NO: 6023143 - DNA, 25 bp, Homo sapien
tctctactgttagagacgacctatg

SEQ ID NO: 6023144 - DNA, 25 bp, Homo sapien
gcacagaggaaagggcggcggtttg

SEQ ID NO: 6023145 - DNA, 25 bp, Homo sapien
acctatgccagcagtctgtatctct

SEQ ID NO: 6023146 - DNA, 25 bp, Homo sapien
atgtaagtacgggcacagaggaaag

SEQ ID NO: 6023147 - DNA, 25 bp, Homo sapien
tttaaaaattacatatacagtgttc

SEQ ID NO: 6023148 - DNA, 25 bp, Homo sapien
tgcagggactggactttttctgaat

SEQ ID NO: 6023149 - DNA, 25 bp, Homo sapien
ccagaagggagaaatcagttttgcg

SEQ ID NO: 6023150 - DNA, 25 bp, Homo sapien
gatatatttacatttatagcttaaa

SEQ ID NO: 6023151 - DNA, 25 bp, Homo sapien
tgcaaaactcacagtgatcccaagg

SEQ ID NO: 6023152 - DNA, 25 bp, Homo sapien
agcccaagcctcccccagaagggag

SEQ ID NO: 6023153 - DNA, 25 bp, Homo sapien
taaaagtactctctgcaagcgaact

SEQ ID NO: 6023154 - DNA, 25 bp, Homo sapien
caaaaagaattataggatataaatt

SEQ ID NO: 6023155 - DNA, 25 bp, Homo sapien
taccagccttctcttatcctaaaca

SEQ ID NO: 6023156 - DNA, 25 bp, Homo sapien
tgggtggagctttctttgtaaagga

SEQ ID NO: 6023157 - DNA, 25 bp, Homo sapien
tatctctccatgtgcaaaactcaca

SEQ ID NO: 6023158 - DNA, 25 bp, Homo sapien
taatcggcgttttctctactgttag

SEQ ID NO: 6023159 - DNA, 25 bp, Homo sapien
tttatgtcttaagactttactctga

SEQ ID NO: 6023160 - DNA, 25 bp, Homo sapien
actttttctgaatcttgaaacatcc

SEQ ID NO: 6023161 - DNA, 25 bp, Homo sapien
cacgtaagcccaagcctcccccaga

SEQ ID NO: 6023162 - DNA, 25 bp, Homo sapien
gattacatgtagaagaatcattttc

SEQ ID NO: 6023163 - DNA, 25 bp, Homo sapien
aatgccacatgatcacgtaagccca

SEQ ID NO: 6023164 - DNA, 25 bp, Homo sapien
aacatccaaaaagaattataggata

SEQ ID NO: 6023165 - DNA, 25 bp, Homo sapien
ttttgcgattacatgtagaagaatc

SEQ ID NO: 6023166 - DNA, 25 bp, Homo sapien
actggatatatttacatttatagct

SEQ ID NO: 6023167 - DNA, 25 bp, Homo sapien
taggatataaatttaaattaagtga

SEQ ID NO: 6023168 - DNA, 25 bp, Homo sapien
cctcccccagaagggagaaatcagt

SEQ ID NO: 6023169 - DNA, 25 bp, Homo sapien
ctgttagagacgacctatgccagca

SEQ ID NO: 6023170 - DNA, 25 bp, Homo sapien
ttccaaaacggctattcaggagatg

SEQ ID NO: 6023171 - DNA, 25 bp, Homo sapien
agaatcttcataggtttataaaagt

SEQ ID NO: 6023172 - DNA, 25 bp, Homo sapien
tacatttatagcttaaattcaaatt

SEQ ID NO: 6023173 - DNA, 25 bp, Homo sapien
gggatttagattgtgctaatcggcg

SEQ ID NO: 6023174 - DNA, 25 bp, Homo sapien
cattttccttctgcgctttaaaaat

SEQ ID NO: 6023175 - DNA, 25 bp, Homo sapien
ttgtgctaatcggcgttttctctac

SEQ ID NO: 6023176 - DNA, 25 bp, Homo sapien
caagcctcccccagaagggagaaat

SEQ ID NO: 6023177 - DNA, 25 bp, Homo sapien
actgtcaccggcaacatctacatat

SEQ ID NO: 6023178 - DNA, 25 bp, Homo sapien
atgtctggagacttgtccccatccc

SEQ ID NO: 6023179 - DNA, 25 bp, Homo sapien
gagcagaaccggacactagcaggcc

SEQ ID NO: 6023180 - DNA, 25 bp, Homo sapien
tggcattcatgtgaccgggggctct

SEQ ID NO: 6023181 - DNA, 25 bp, Homo sapien
ccaggactcacagggtctggggagg

SEQ ID NO: 6023182 - DNA, 25 bp, Homo sapien
tcatgtgaccgggggctctgtgact

SEQ ID NO: 6023183 - DNA, 25 bp, Homo sapien
catctggccgagacagagacactag

SEQ ID NO: 6023184 - DNA, 25 bp, Homo sapien
ggcaaagcttggcatctggccgaga

SEQ ID NO: 6023185 - DNA, 25 bp, Homo sapien
agaaatagagccctaagggacttag

SEQ ID NO: 6023186 - DNA, 25 bp, Homo sapien
gagagctggaggctgaacctgggga

SEQ ID NO: 6023187 - DNA, 25 bp, Homo sapien
aaggagcagagggtccagcaccttc

SEQ ID NO: 6023188 - DNA, 25 bp, Homo sapien
agggcacctgggaaaggcaaggagc

SEQ ID NO: 6023189 - DNA, 25 bp, Homo sapien
gacttagcctcagacacctcttcag

SEQ ID NO: 6023190 - DNA, 25 bp, Homo sapien
tgcgaatggcattcatgtgaccggg

SEQ ID NO: 6023191 - DNA, 25 bp, Homo sapien
tgtccccatcccctgctggaccccc

SEQ ID NO: 6023192 - DNA, 25 bp, Homo sapien
gacacctcttcagagcagaaccgga

SEQ ID NO: 6023193 - DNA, 25 bp, Homo sapien
ctgaacctggggaacatggccaggt

SEQ ID NO: 6023194 - DNA, 25 bp, Homo sapien
gctctgagaaatagagccctaaggg

SEQ ID NO: 6023195 - DNA, 25 bp, Homo sapien
ctctgacagggccaaggaacctatt

SEQ ID NO: 6023196 - DNA, 25 bp, Homo sapien
cctggggaacatggccaggtggccc

SEQ ID NO: 6023197 - DNA, 25 bp, Homo sapien
gcctcagacacctcttcagagcaga

SEQ ID NO: 6023198 - DNA, 25 bp, Homo sapien
catcccctgctggacccccaacggc

SEQ ID NO: 6023199 - DNA, 25 bp, Homo sapien
aggatggcaaagcttggcatctggc

SEQ ID NO: 6023200 - DNA, 25 bp, Homo sapien
acaacagcagagtcccctggtccag

SEQ ID NO: 6023201 - DNA, 25 bp, Homo sapien
gagacttgtccccatcccctgctgg

SEQ ID NO: 6023202 - DNA, 25 bp, Homo sapien
cccctccttggaggaagtggtgcta

SEQ ID NO: 6023203 - DNA, 25 bp, Homo sapien
aaaggcaaggagcagagggtccagc

SEQ ID NO: 6023204 - DNA, 25 bp, Homo sapien
ggtgctacaacagcagagtcccctg

SEQ ID NO: 6023205 - DNA, 25 bp, Homo sapien
caagacctctgacagggccaaggaa

SEQ ID NO: 6023206 - DNA, 25 bp, Homo sapien
tctgagctgtctacaccctaccagg

SEQ ID NO: 6023207 - DNA, 25 bp, Homo sapien
tcttcagagcagaaccggacactag

SEQ ID NO: 6023208 - DNA, 25 bp, Homo sapien
ggatgccaagacctctgacagggcc

SEQ ID NO: 6023209 - DNA, 25 bp, Homo sapien
tcccctggtccaggccagagagctg

SEQ ID NO: 6023210 - DNA, 25 bp, Homo sapien
gcaccttctttctgaggctgctcta

SEQ ID NO: 6023211 - DNA, 25 bp, Homo sapien
aacatggccaggtggcccacggtgc

SEQ ID NO: 6023212 - DNA, 25 bp, Homo sapien
acactaggatgccaagacctctgac

SEQ ID NO: 6023213 - DNA, 25 bp, Homo sapien
ggtctggggaggctctgagaaatag

SEQ ID NO: 6023214 - DNA, 25 bp, Homo sapien
ctgtctacaccctaccaggaggatg

SEQ ID NO: 6023215 - DNA, 25 bp, Homo sapien
ccataccccactcctgaagagggag

SEQ ID NO: 6023216 - DNA, 25 bp, Homo sapien
aggccagagagctggaggctgaacc

SEQ ID NO: 6023217 - DNA, 25 bp, Homo sapien
ggccaggtggcccacggtgcgaatg

SEQ ID NO: 6023218 - DNA, 25 bp, Homo sapien
tccagctccccctgagcctccatac

SEQ ID NO: 6023219 - DNA, 25 bp, Homo sapien
ccacggtgcgaatggcattcatgtg

SEQ ID NO: 6023220 - DNA, 25 bp, Homo sapien
gccagtgctggggggaacacggggc

SEQ ID NO: 6023221 - DNA, 25 bp, Homo sapien
tacatatacaatgggccagtgctgg

SEQ ID NO: 6023222 - DNA, 25 bp, Homo sapien
gcagagggtccagcaccttctttct

SEQ ID NO: 6023223 - DNA, 25 bp, Homo sapien
accggcaacatctacatatacaatg

SEQ ID NO: 6023224 - DNA, 25 bp, Homo sapien
taccaggaggatggcaaagcttggc

SEQ ID NO: 6023225 - DNA, 25 bp, Homo sapien
ctaagggacttagcctcagacacct

SEQ ID NO: 6023226 - DNA, 25 bp, Homo sapien
gggaggctctgagaaatagagccct

SEQ ID NO: 6023227 - DNA, 25 bp, Homo sapien
cctgaagagggagctcctggccctt

SEQ ID NO: 6023228 - DNA, 25 bp, Homo sapien
tgcctgagggcacctgggaaaggca

SEQ ID NO: 6023229 - DNA, 25 bp, Homo sapien
acaccctaccaggaggatggcaaag

SEQ ID NO: 6023230 - DNA, 25 bp, Homo sapien
acagagacactaggatgccaagacc

SEQ ID NO: 6023231 - DNA, 25 bp, Homo sapien
ccaaggaacctatttgccacccgtg

SEQ ID NO: 6023232 - DNA, 25 bp, Homo sapien
gggctctgtgactgtcaccggcaac

SEQ ID NO: 6023233 - DNA, 25 bp, Homo sapien
tggaggctgaacctggggaacatgg

SEQ ID NO: 6023234 - DNA, 25 bp, Homo sapien
ggaagtggtgctacaacagcagagt

SEQ ID NO: 6023235 - DNA, 25 bp, Homo sapien
tgctctactcaccaggactcacagg

SEQ ID NO: 6023236 - DNA, 25 bp, Homo sapien
tctttctgaggctgctctactcacc

SEQ ID NO: 6023237 - DNA, 25 bp, Homo sapien
cccactcctgaagagggagctcctg

SEQ ID NO: 6023238 - DNA, 25 bp, Homo sapien
ctacccatgtctggagacttgtccc

SEQ ID NO: 6023239 - DNA, 25 bp, Homo sapien
cttggaggaagtggtgctacaacag

SEQ ID NO: 6023240 - DNA, 25 bp, Homo sapien
gagggagctcctggcccttctgagc

SEQ ID NO: 6023241 - DNA, 25 bp, Homo sapien
acggggccctggagaccctccagct

SEQ ID NO: 6023242 - DNA, 25 bp, Homo sapien
tctgtgactgtcaccggcaacatct

SEQ ID NO: 6023243 - DNA, 25 bp, Homo sapien
ggcccttctgagctgtctacaccct

SEQ ID NO: 6023244 - DNA, 25 bp, Homo sapien
cacccgtgcctgagggcacctggga

SEQ ID NO: 6023245 - DNA, 25 bp, Homo sapien
gccgagacagagacactaggatgcc

SEQ ID NO: 6023246 - DNA, 25 bp, Homo sapien
cctgggaaaggcaaggagcagaggg

SEQ ID NO: 6023247 - DNA, 25 bp, Homo sapien
ctcacagggtctggggaggctctga

SEQ ID NO: 6023248 - DNA, 25 bp, Homo sapien
gaccgggggctctgtgactgtcacc

SEQ ID NO: 6023249 - DNA, 25 bp, Homo sapien
tgaggctgctctactcaccaggact

SEQ ID NO: 6023250 - DNA, 25 bp, Homo sapien
acagggccaaggaacctatttgcca

SEQ ID NO: 6023251 - DNA, 25 bp, Homo sapien
tccccctgagcctccataccccact

SEQ ID NO: 6023252 - DNA, 25 bp, Homo sapien
atttgccacccgtgcctgagggcac

SEQ ID NO: 6023253 - DNA, 25 bp, Homo sapien
agaccctccagctccccctgagcct

SEQ ID NO: 6023254 - DNA, 25 bp, Homo sapien
aaccggacactagcaggccacagtg

SEQ ID NO: 6023255 - DNA, 25 bp, Homo sapien
agagccctaagggacttagcctcag

SEQ ID NO: 6023256 - DNA, 25 bp, Homo sapien
agcttggcatctggccgagacagag

SEQ ID NO: 6023257 - DNA, 25 bp, Homo sapien
aacatctacatatacaatgggccag

SEQ ID NO: 6023258 - DNA, 25 bp, Homo sapien
ggtccagcaccttctttctgaggct

SEQ ID NO: 6023259 - DNA, 25 bp, Homo sapien
gcagagtcccctggtccaggccaga

SEQ ID NO: 6023260 - DNA, 25 bp, Homo sapien
tgagcctccataccccactcctgaa

SEQ ID NO: 6023261 - DNA, 25 bp, Homo sapien
gtggcccacggtgcgaatggcattc

SEQ ID NO: 6023262 - DNA, 25 bp, Homo sapien
ccctggagaccctccagctccccct

SEQ ID NO: 6023263 - DNA, 25 bp, Homo sapien
gaacctatttgccacccgtgcctga

SEQ ID NO: 6023264 - DNA, 25 bp, Homo sapien
tactcaccaggactcacagggtctg

SEQ ID NO: 6023265 - DNA, 25 bp, Homo sapien
gctcctggcccttctgagctgtcta

SEQ ID NO: 6023266 - DNA, 25 bp, Homo sapien
gaaagaaggtgctggaccctctgct

SEQ ID NO: 6023267 - DNA, 25 bp, Homo sapien
cctgtgagtcctggtgagtagagca

SEQ ID NO: 6023268 - DNA, 25 bp, Homo sapien
gccttccttgtgtccgaggctcaat

SEQ ID NO: 6023269 - DNA, 25 bp, Homo sapien
ctgggatatccttgcgagtgaccct

SEQ ID NO: 6023270 - DNA, 25 bp, Homo sapien
tcacgagccttccttgtgtccgagg

SEQ ID NO: 6023271 - DNA, 25 bp, Homo sapien
aggccccatcctccccttctctcta

SEQ ID NO: 6023272 - DNA, 25 bp, Homo sapien
aggtgtctgaggctaagtcccttag

SEQ ID NO: 6023273 - DNA, 25 bp, Homo sapien
gcagggcgggggtcacgagccttcc

SEQ ID NO: 6023274 - DNA, 25 bp, Homo sapien
ctgaagaggtgtctgaggctaagtc

SEQ ID NO: 6023275 - DNA, 25 bp, Homo sapien
gcaccacaaagctttgcgaggtccc

SEQ ID NO: 6023276 - DNA, 25 bp, Homo sapien
caaagctttgcgaggtccctgggat

SEQ ID NO: 6023277 - DNA, 25 bp, Homo sapien
cctctcccccaggagcaagggaggg

SEQ ID NO: 6023278 - DNA, 25 bp, Homo sapien
gggaccagctccctcctctgccatg

SEQ ID NO: 6023279 - DNA, 25 bp, Homo sapien
gaccctgggaccagctccctcctct

SEQ ID NO: 6023280 - DNA, 25 bp, Homo sapien
agggctctatttctcagagcctccc

SEQ ID NO: 6023281 - DNA, 25 bp, Homo sapien
cctcctctgccatgtttagaacaca

SEQ ID NO: 6023282 - DNA, 25 bp, Homo sapien
ggcctgctagtgtccggttctgctc

SEQ ID NO: 6023283 - DNA, 25 bp, Homo sapien
atatgagctctcaaggcctctgaag

SEQ ID NO: 6023284 - DNA, 25 bp, Homo sapien
gaagcctctgggagccggtgggtct

SEQ ID NO: 6023285 - DNA, 25 bp, Homo sapien
ccttgtgtccgaggctcaatggccg

SEQ ID NO: 6023286 - DNA, 25 bp, Homo sapien
tctgctccttgcctttcccaggtgc

SEQ ID NO: 6023287 - DNA, 25 bp, Homo sapien
tctgaggctaagtcccttagggctc

SEQ ID NO: 6023288 - DNA, 25 bp, Homo sapien
tctgctctgaagaggtgtctgaggc

SEQ ID NO: 6023289 - DNA, 25 bp, Homo sapien
atggccgaagcctctgggagccggt

SEQ ID NO: 6023290 - DNA, 25 bp, Homo sapien
taacgctacccaaggccccatcctc

SEQ ID NO: 6023291 - DNA, 25 bp, Homo sapien
tctgaaggtagggatgagcaccaca

SEQ ID NO: 6023292 - DNA, 25 bp, Homo sapien
aactcataaatacacttgtcatttt

SEQ ID NO: 6023293 - DNA, 25 bp, Homo sapien
cttgctcaggcggtagtcagagtcc

SEQ ID NO: 6023294 - DNA, 25 bp, Homo sapien
ctgaaactaggtctcaggcttgctc

SEQ ID NO: 6023295 - DNA, 25 bp, Homo sapien
tctatcttggtccacgcaatatgag

SEQ ID NO: 6023296 - DNA, 25 bp, Homo sapien
cacgcaatatgagctctcaaggcct

SEQ ID NO: 6023297 - DNA, 25 bp, Homo sapien
ctagtgtccggttctgctctgaaga

SEQ ID NO: 6023298 - DNA, 25 bp, Homo sapien
gctctcaaggcctctgaaggtaggg

SEQ ID NO: 6023299 - DNA, 25 bp, Homo sapien
attacaactcataaatacacttgtc

SEQ ID NO: 6023300 - DNA, 25 bp, Homo sapien
actctcctccacacatgctaacgct

SEQ ID NO: 6023301 - DNA, 25 bp, Homo sapien
gctaagtcccttagggctctatttc

SEQ ID NO: 6023302 - DNA, 25 bp, Homo sapien
ctaggtctcaggcttgctcaggcgg

SEQ ID NO: 6023303 - DNA, 25 bp, Homo sapien
aggtagggatgagcaccacaaagct

SEQ ID NO: 6023304 - DNA, 25 bp, Homo sapien
aggagcaagggaggggttgctcctc

SEQ ID NO: 6023305 - DNA, 25 bp, Homo sapien
ggaccctctgctccttgcctttccc

SEQ ID NO: 6023306 - DNA, 25 bp, Homo sapien
gtgagtagagcagcctcagaaagaa

SEQ ID NO: 6023307 - DNA, 25 bp, Homo sapien
aaatacacttgtcatttttctcctg

SEQ ID NO: 6023308 - DNA, 25 bp, Homo sapien
agagcagcctcagaaagaaggtgct

SEQ ID NO: 6023309 - DNA, 25 bp, Homo sapien
ctcctccgcgcgacttcaccttccc

SEQ ID NO: 6023310 - DNA, 25 bp, Homo sapien
catttttctcctgttcccaaactct

SEQ ID NO: 6023311 - DNA, 25 bp, Homo sapien
tcagagcctccccagaccctgtgag

SEQ ID NO: 6023312 - DNA, 25 bp, Homo sapien
tctgggagccggtgggtctgaaact

SEQ ID NO: 6023313 - DNA, 25 bp, Homo sapien
ttcccccagggtctatcttggtcca

SEQ ID NO: 6023314 - DNA, 25 bp, Homo sapien
acttgtcatttttctcctgttccca

SEQ ID NO: 6023315 - DNA, 25 bp, Homo sapien
ctccacacatgctaacgctacccaa

SEQ ID NO: 6023316 - DNA, 25 bp, Homo sapien
gtagtcagagtcctgggcaggcact

SEQ ID NO: 6023317 - DNA, 25 bp, Homo sapien
gcctcagaaagaaggtgctggaccc

SEQ ID NO: 6023318 - DNA, 25 bp, Homo sapien
acatgctaacgctacccaaggcccc

SEQ ID NO: 6023319 - DNA, 25 bp, Homo sapien
ggcaggcactgtggcctgctagtgt

SEQ ID NO: 6023320 - DNA, 25 bp, Homo sapien
ttggtccacgcaatatgagctctca

SEQ ID NO: 6023321 - DNA, 25 bp, Homo sapien
tatccttgcgagtgaccctgggacc

SEQ ID NO: 6023322 - DNA, 25 bp, Homo sapien
cgggggtcacgagccttccttgtgt

SEQ ID NO: 6023323 - DNA, 25 bp, Homo sapien
gtcctggtgagtagagcagcctcag

SEQ ID NO: 6023324 - DNA, 25 bp, Homo sapien
caggcggtagtcagagtcctgggca

SEQ ID NO: 6023325 - DNA, 25 bp, Homo sapien
aggtccctgggatatccttgcgagt

SEQ ID NO: 6023326 - DNA, 25 bp, Homo sapien
tcctgttcccaaactctcctccaca

SEQ ID NO: 6023327 - DNA, 25 bp, Homo sapien
agccggtgggtctgaaactaggtct

SEQ ID NO: 6023328 - DNA, 25 bp, Homo sapien
ggggttgctcctccgcgcgacttca

SEQ ID NO: 6023329 - DNA, 25 bp, Homo sapien
tcctgggcaggcactgtggcctgct

SEQ ID NO: 6023330 - DNA, 25 bp, Homo sapien
cgcgcgacttcaccttcccccaggg

SEQ ID NO: 6023331 - DNA, 25 bp, Homo sapien
ccccaggagcaagggaggggttgct

SEQ ID NO: 6023332 - DNA, 25 bp, Homo sapien
ccagggtctatcttggtccacgcaa

SEQ ID NO: 6023333 - DNA, 25 bp, Homo sapien
tcccaaactctcctccacacatgct

SEQ ID NO: 6023334 - DNA, 25 bp, Homo sapien
aagggaggggttgctcctccgcgcg

SEQ ID NO: 6023335 - DNA, 25 bp, Homo sapien
gtccgaggctcaatggccgaagcct

SEQ ID NO: 6023336 - DNA, 25 bp, Homo sapien
ggatgagcaccacaaagctttgcga

SEQ ID NO: 6023337 - DNA, 25 bp, Homo sapien
cctccccagaccctgtgagtcctgg

SEQ ID NO: 6023338 - DNA, 25 bp, Homo sapien
cactgtggcctgctagtgtccggtt

SEQ ID NO: 6023339 - DNA, 25 bp, Homo sapien
ctatttctcagagcctccccagacc

SEQ ID NO: 6023340 - DNA, 25 bp, Homo sapien
ccttgcctttcccaggtgccctcag

SEQ ID NO: 6023341 - DNA, 25 bp, Homo sapien
ggctcaatggccgaagcctctggga

SEQ ID NO: 6023342 - DNA, 25 bp, Homo sapien
ccagaccctgtgagtcctggtgagt

SEQ ID NO: 6023343 - DNA, 25 bp, Homo sapien
aaggcctctgaaggtagggatgagc

SEQ ID NO: 6023344 - DNA, 25 bp, Homo sapien
gtgggtctgaaactaggtctcaggc

SEQ ID NO: 6023345 - DNA, 25 bp, Homo sapien
cccttctctctatcctctcccccag

SEQ ID NO: 6023346 - DNA, 25 bp, Homo sapien
tgtttagaacacagagaggcagggc

SEQ ID NO: 6023347 - DNA, 25 bp, Homo sapien
ctcaggcttgctcaggcggtagtca

SEQ ID NO: 6023348 - DNA, 25 bp, Homo sapien
tcccttagggctctatttctcagag

SEQ ID NO: 6023349 - DNA, 25 bp, Homo sapien
cagagtcctgggcaggcactgtggc

SEQ ID NO: 6023350 - DNA, 25 bp, Homo sapien
tctctatcctctcccccaggagcaa

SEQ ID NO: 6023351 - DNA, 25 bp, Homo sapien
atcctccccttctctctatcctctc

SEQ ID NO: 6023352 - DNA, 25 bp, Homo sapien
tcaccttcccccagggtctatcttg

SEQ ID NO: 6023353 - DNA, 25 bp, Homo sapien
tttgcgaggtccctgggatatcctt

SEQ ID NO: 6023354 - DNA, 25 bp, Homo sapien
agctccctcctctgccatgtttaga

SEQ ID NO: 6023355 - DNA, 25 bp, Homo sapien
aggtgctggaccctctgctccttgc

SEQ ID NO: 6023356 - DNA, 25 bp, Homo sapien
tgcgagtgaccctgggaccagctcc

SEQ ID NO: 6023357 - DNA, 25 bp, Homo sapien
ctgccatgtttagaacacagagagg

SEQ ID NO: 6023358 - DNA, 25 bp, Homo sapien
tccggttctgctctgaagaggtgtc

SEQ ID NO: 6023359 - DNA, 25 bp, Homo sapien
cctttcccaggtgccctcaggcacg

SEQ ID NO: 6023360 - DNA, 25 bp, Homo sapien
ctgcccttgtaatcctagagtcacc

SEQ ID NO: 6023361 - DNA, 25 bp, Homo sapien
catagagggatttttgtgctgttgt

SEQ ID NO: 6023362 - DNA, 25 bp, Homo sapien
gtggccagagttgtgactcatagag

SEQ ID NO: 6023363 - DNA, 25 bp, Homo sapien
ggatgaatatattgattaaaagggt

SEQ ID NO: 6023364 - DNA, 25 bp, Homo sapien
acctattagattcagtcatgctgtg

SEQ ID NO: 6023365 - DNA, 25 bp, Homo sapien
tcctaggtggccagagttgtgactc

SEQ ID NO: 6023366 - DNA, 25 bp, Homo sapien
ggcatttatttggatgaatatattg

SEQ ID NO: 6023367 - DNA, 25 bp, Homo sapien
tagagcctctggcttgtaacatttt

SEQ ID NO: 6023368 - DNA, 25 bp, Homo sapien
gtgactcatagagggatttttgtgc

SEQ ID NO: 6023369 - DNA, 25 bp, Homo sapien
ggagagagacactaactctaagatc

SEQ ID NO: 6023370 - DNA, 25 bp, Homo sapien
tatgtggggcatttatttggatgaa

SEQ ID NO: 6023371 - DNA, 25 bp, Homo sapien
atatattgattaaaagggtagggtg

SEQ ID NO: 6023372 - DNA, 25 bp, Homo sapien
tgattttagagcctctggcttgtaa

SEQ ID NO: 6023373 - DNA, 25 bp, Homo sapien
tgatccgattttaaaagagtaaaca

SEQ ID NO: 6023374 - DNA, 25 bp, Homo sapien
tgtttttactatagaaactattctg

SEQ ID NO: 6023375 - DNA, 25 bp, Homo sapien
ttgtgctgttgtgatcagtgaggtc

SEQ ID NO: 6023376 - DNA, 25 bp, Homo sapien
actaaagctatgtgtcaccttactg

SEQ ID NO: 6023377 - DNA, 25 bp, Homo sapien
gcttgtaacatttttataaaacaga

SEQ ID NO: 6023378 - DNA, 25 bp, Homo sapien
ccttactgagccagggtgtttcttg

SEQ ID NO: 6023379 - DNA, 25 bp, Homo sapien
ggatttttgtgctgttgtgatcagt

SEQ ID NO: 6023380 - DNA, 25 bp, Homo sapien
tgttgtgatcagtgaggtcttgggg

SEQ ID NO: 6023381 - DNA, 25 bp, Homo sapien
ttactggcaatacaactaatatgaa

SEQ ID NO: 6023382 - DNA, 25 bp, Homo sapien
actgaccactgccttactggcaata

SEQ ID NO: 6023383 - DNA, 25 bp, Homo sapien
ggaggtacctattagattcagtcat

SEQ ID NO: 6023384 - DNA, 25 bp, Homo sapien
tagggtggaggtacctattagattc

SEQ ID NO: 6023385 - DNA, 25 bp, Homo sapien
tcaagagggcatgggagggagagag

SEQ ID NO: 6023386 - DNA, 25 bp, Homo sapien
cagaattttgattcctaggtggcca

SEQ ID NO: 6023387 - DNA, 25 bp, Homo sapien
ctctcttatgatactgaccactgcc

SEQ ID NO: 6023388 - DNA, 25 bp, Homo sapien
atcatgatagatagatgaccaacct

SEQ ID NO: 6023389 - DNA, 25 bp, Homo sapien
gggcatgggagggagagagacacta

SEQ ID NO: 6023390 - DNA, 25 bp, Homo sapien
gctatgtgtcaccttactgagccag

SEQ ID NO: 6023391 - DNA, 25 bp, Homo sapien
cctctggcttgtaacatttttataa

SEQ ID NO: 6023392 - DNA, 25 bp, Homo sapien
catttttaatttctttcaaatatca

SEQ ID NO: 6023393 - DNA, 25 bp, Homo sapien
tgagccagggtgtttcttgttttgg

SEQ ID NO: 6023394 - DNA, 25 bp, Homo sapien
cagtcatgctgtgtctctgcctgaa

SEQ ID NO: 6023395 - DNA, 25 bp, Homo sapien
ttacccttatcactctcttatgata

SEQ ID NO: 6023396 - DNA, 25 bp, Homo sapien
agtcacctgtctttgcctcccagtt

SEQ ID NO: 6023397 - DNA, 25 bp, Homo sapien
ctgtctttgcctcccagttactggg

SEQ ID NO: 6023398 - DNA, 25 bp, Homo sapien
agagttgtgactcatagagggattt

SEQ ID NO: 6023399 - DNA, 25 bp, Homo sapien
acaggtgcagccatcatgatagata

SEQ ID NO: 6023400 - DNA, 25 bp, Homo sapien
tgttgattctgtttgtcttcttttg

SEQ ID NO: 6023401 - DNA, 25 bp, Homo sapien
tgctgtgtctctgcctgaagtggta

SEQ ID NO: 6023402 - DNA, 25 bp, Homo sapien
tcaaatatcaagagggcatgggagg

SEQ ID NO: 6023403 - DNA, 25 bp, Homo sapien
gcagccatcatgatagatagatgac

SEQ ID NO: 6023404 - DNA, 25 bp, Homo sapien
atagatagatgaccaacctgatccg

SEQ ID NO: 6023405 - DNA, 25 bp, Homo sapien
tcctagagtcacctgtctttgcctc

SEQ ID NO: 6023406 - DNA, 25 bp, Homo sapien
tatttggatgaatatattgattaaa

SEQ ID NO: 6023407 - DNA, 25 bp, Homo sapien
attctgtttgtcttcttttgtttgt

SEQ ID NO: 6023408 - DNA, 25 bp, Homo sapien
ataaaacagaattttgattcctagg

SEQ ID NO: 6023409 - DNA, 25 bp, Homo sapien
actattctgcccttgtaatcctaga

SEQ ID NO: 6023410 - DNA, 25 bp, Homo sapien
tgggagggagagagacactaactct

SEQ ID NO: 6023411 - DNA, 25 bp, Homo sapien
tttgattcctaggtggccagagttg

SEQ ID NO: 6023412 - DNA, 25 bp, Homo sapien
tatgatactgaccactgccttactg

SEQ ID NO: 6023413 - DNA, 25 bp, Homo sapien
tttactatagaaactattctgccct

SEQ ID NO: 6023414 - DNA, 25 bp, Homo sapien
tttaatttctttcaaatatcaagag

SEQ ID NO: 6023415 - DNA, 25 bp, Homo sapien
cctgaagtggtatttgggatttttg

SEQ ID NO: 6023416 - DNA, 25 bp, Homo sapien
atcttttttacccttatcactctct

SEQ ID NO: 6023417 - DNA, 25 bp, Homo sapien
gtgtcaccttactgagccagggtgt

SEQ ID NO: 6023418 - DNA, 25 bp, Homo sapien
ccaacctgatccgattttaaaagag

SEQ ID NO: 6023419 - DNA, 25 bp, Homo sapien
gggttgacaggtgcagccatcatga

SEQ ID NO: 6023420 - DNA, 25 bp, Homo sapien
tgcctcccagttactgggactaaag

SEQ ID NO: 6023421 - DNA, 25 bp, Homo sapien
caactaatatgaaaacatttttaat

SEQ ID NO: 6023422 - DNA, 25 bp, Homo sapien
agacactaactctaagatcatagca

SEQ ID NO: 6023423 - DNA, 25 bp, Homo sapien
agtggtatttgggatttttgttgat

SEQ ID NO: 6023424 - DNA, 25 bp, Homo sapien
catttttataaaacagaattttgat

SEQ ID NO: 6023425 - DNA, 25 bp, Homo sapien
tttctttcaaatatcaagagggcat

SEQ ID NO: 6023426 - DNA, 25 bp, Homo sapien
cactgccttactggcaatacaacta

SEQ ID NO: 6023427 - DNA, 25 bp, Homo sapien
atagaaactattctgcccttgtaat

SEQ ID NO: 6023428 - DNA, 25 bp, Homo sapien
taactctaagatcatagcaatatgt

SEQ ID NO: 6023429 - DNA, 25 bp, Homo sapien
ttgcttggtccttgggttgacaggt

SEQ ID NO: 6023430 - DNA, 25 bp, Homo sapien
taagatcatagcaatatgtggggca

SEQ ID NO: 6023431 - DNA, 25 bp, Homo sapien
ccagttactgggactaaagctatgt

SEQ ID NO: 6023432 - DNA, 25 bp, Homo sapien
gatttttgttgattctgtttgtctt

SEQ ID NO: 6023433 - DNA, 25 bp, Homo sapien
tagattcagtcatgctgtgtctctg

SEQ ID NO: 6023434 - DNA, 25 bp, Homo sapien
ttatcactctcttatgatactgacc

SEQ ID NO: 6023435 - DNA, 25 bp, Homo sapien
tggttttgattttagagcctctggc

SEQ ID NO: 6023436 - DNA, 25 bp, Homo sapien
gcaatacaactaatatgaaaacatt

SEQ ID NO: 6023437 - DNA, 25 bp, Homo sapien
actgggactaaagctatgtgtcacc

SEQ ID NO: 6023438 - DNA, 25 bp, Homo sapien
tatttgggatttttgttgattctgt

SEQ ID NO: 6023439 - DNA, 25 bp, Homo sapien
ttgtaatcctagagtcacctgtctt

SEQ ID NO: 6023440 - DNA, 25 bp, Homo sapien
agatgaccaacctgatccgatttta

SEQ ID NO: 6023441 - DNA, 25 bp, Homo sapien
tctctgcctgaagtggtatttggga

SEQ ID NO: 6023442 - DNA, 25 bp, Homo sapien
catagcaatatgtggggcatttatt

SEQ ID NO: 6023443 - DNA, 25 bp, Homo sapien
gtccttgggttgacaggtgcagcca

SEQ ID NO: 6023444 - DNA, 25 bp, Homo sapien
tttggattctcttttcctgcagaat

SEQ ID NO: 6023445 - DNA, 25 bp, Homo sapien
taattctaatacaaacgtgaactaa

SEQ ID NO: 6023446 - DNA, 25 bp, Homo sapien
tactgattaaaaaatataattctaa

SEQ ID NO: 6023447 - DNA, 25 bp, Homo sapien
tttcctgcagaatgtgcagtgacca

SEQ ID NO: 6023448 - DNA, 25 bp, Homo sapien
tgatttgaatagcaacaagtgaatt

SEQ ID NO: 6023449 - DNA, 25 bp, Homo sapien
tgtgcagtgaccaccaccatctggg

SEQ ID NO: 6023450 - DNA, 25 bp, Homo sapien
aatgttacaagccagaggctctaaa

SEQ ID NO: 6023451 - DNA, 25 bp, Homo sapien
gaacacagtgctgtggtccacagtc

SEQ ID NO: 6023452 - DNA, 25 bp, Homo sapien
cactcagaaatctagacaaaagatc

SEQ ID NO: 6023453 - DNA, 25 bp, Homo sapien
acaaacaaaagaagacaaacagaat

SEQ ID NO: 6023454 - DNA, 25 bp, Homo sapien
gaatagcaacaagtgaattaaaaat

SEQ ID NO: 6023455 - DNA, 25 bp, Homo sapien
tgatcacaacagcacaaaaatccct

SEQ ID NO: 6023456 - DNA, 25 bp, Homo sapien
gaaggcattgtggaatcaaggtcaa

SEQ ID NO: 6023457 - DNA, 25 bp, Homo sapien
tctatgagtcacaactctggccacc

SEQ ID NO: 6023458 - DNA, 25 bp, Homo sapien
caacaagtgaattaaaaataaactg

SEQ ID NO: 6023459 - DNA, 25 bp, Homo sapien
caggtgactctaggattacaagggc

SEQ ID NO: 6023460 - DNA, 25 bp, Homo sapien
gctcagtaaggtgacacatagcttt

SEQ ID NO: 6023461 - DNA, 25 bp, Homo sapien
gtgaccaccaccatctgggaacaca

SEQ ID NO: 6023462 - DNA, 25 bp, Homo sapien
accaccatctgggaacacagtgctg

SEQ ID NO: 6023463 - DNA, 25 bp, Homo sapien
caaaacaaatacaaaattactgatt

SEQ ID NO: 6023464 - DNA, 25 bp, Homo sapien
cagaggctctaaaatcaaaaccaaa

SEQ ID NO: 6023465 - DNA, 25 bp, Homo sapien
acaagccagaggctctaaaatcaaa

SEQ ID NO: 6023466 - DNA, 25 bp, Homo sapien
gtggtccacagtcacccggagtaac

SEQ ID NO: 6023467 - DNA, 25 bp, Homo sapien
ggagtaacaccattatcaggggcag

SEQ ID NO: 6023468 - DNA, 25 bp, Homo sapien
gtatgaacacattgatttgaatagc

SEQ ID NO: 6023469 - DNA, 25 bp, Homo sapien
gaaatctagacaaaagatcctgtta

SEQ ID NO: 6023470 - DNA, 25 bp, Homo sapien
gaaacaccctggctcagtaaggtga

SEQ ID NO: 6023471 - DNA, 25 bp, Homo sapien
caaacagtatgaacacattgatttg

SEQ ID NO: 6023472 - DNA, 25 bp, Homo sapien
agtcacaactctggccacctaggaa

SEQ ID NO: 6023473 - DNA, 25 bp, Homo sapien
ctggaaaacaaagaaatcacacaca

SEQ ID NO: 6023474 - DNA, 25 bp, Homo sapien
gggcagatccccaagacctcactga

SEQ ID NO: 6023475 - DNA, 25 bp, Homo sapien
cacagtcacccggagtaacaccatt

SEQ ID NO: 6023476 - DNA, 25 bp, Homo sapien
acaccattatcaggggcagatcccc

SEQ ID NO: 6023477 - DNA, 25 bp, Homo sapien
gttgttcaaacagtatgaacacatt

SEQ ID NO: 6023478 - DNA, 25 bp, Homo sapien
ttctcttttcctgcagaatgtgcag

SEQ ID NO: 6023479 - DNA, 25 bp, Homo sapien
tagctttagtcccagtaactgggag

SEQ ID NO: 6023480 - DNA, 25 bp, Homo sapien
aacaaagaaatcacacacaaacaaa

SEQ ID NO: 6023481 - DNA, 25 bp, Homo sapien
atctgggaacacagtgctgtggtcc

SEQ ID NO: 6023482 - DNA, 25 bp, Homo sapien
ggattacaagggcagaatagtttct

SEQ ID NO: 6023483 - DNA, 25 bp, Homo sapien
ggggtttggattctcttttcctgca

SEQ ID NO: 6023484 - DNA, 25 bp, Homo sapien
taatacaaacgtgaactaaagtaca

SEQ ID NO: 6023485 - DNA, 25 bp, Homo sapien
tataaaaatgttacaagccagaggc

SEQ ID NO: 6023486 - DNA, 25 bp, Homo sapien
actgggtgagaataggggtttggat

SEQ ID NO: 6023487 - DNA, 25 bp, Homo sapien
tgagaataggggtttggattctctt

SEQ ID NO: 6023488 - DNA, 25 bp, Homo sapien
aaacaagaaacaccctggctcagta

SEQ ID NO: 6023489 - DNA, 25 bp, Homo sapien
actctaggattacaagggcagaata

SEQ ID NO: 6023490 - DNA, 25 bp, Homo sapien
gaaatcacacacaaacaaaacaaat

SEQ ID NO: 6023491 - DNA, 25 bp, Homo sapien
cctgttacagaggaaggcattgtgg

SEQ ID NO: 6023492 - DNA, 25 bp, Homo sapien
cacaaaaatccctctatgagtcaca

SEQ ID NO: 6023493 - DNA, 25 bp, Homo sapien
caagggcagaatagtttctatagta

SEQ ID NO: 6023494 - DNA, 25 bp, Homo sapien
tgggaggcaaagacaggtgactcta

SEQ ID NO: 6023495 - DNA, 25 bp, Homo sapien
gaatcaaggtcaaactgggtgagaa

SEQ ID NO: 6023496 - DNA, 25 bp, Homo sapien
tgaactaaagtacactcagaaatct

SEQ ID NO: 6023497 - DNA, 25 bp, Homo sapien
tcacccggagtaacaccattatcag

SEQ ID NO: 6023498 - DNA, 25 bp, Homo sapien
gacacatagctttagtcccagtaac

SEQ ID NO: 6023499 - DNA, 25 bp, Homo sapien
attgtggaatcaaggtcaaactggg

SEQ ID NO: 6023500 - DNA, 25 bp, Homo sapien
cctcactgatcacaacagcacaaaa

SEQ ID NO: 6023501 - DNA, 25 bp, Homo sapien
ctaggaatcaaaattctgttttata

SEQ ID NO: 6023502 - DNA, 25 bp, Homo sapien
accctggctcagtaaggtgacacat

SEQ ID NO: 6023503 - DNA, 25 bp, Homo sapien
tagtcccagtaactgggaggcaaag

SEQ ID NO: 6023504 - DNA, 25 bp, Homo sapien
gatccccaagacctcactgatcaca

SEQ ID NO: 6023505 - DNA, 25 bp, Homo sapien
aaagtacactcagaaatctagacaa

SEQ ID NO: 6023506 - DNA, 25 bp, Homo sapien
aggtcaaactgggtgagaatagggg

SEQ ID NO: 6023507 - DNA, 25 bp, Homo sapien
aaagatcctgttacagaggaaggca

SEQ ID NO: 6023508 - DNA, 25 bp, Homo sapien
aatccctctatgagtcacaactctg

SEQ ID NO: 6023509 - DNA, 25 bp, Homo sapien
cacacaaacaaaacaaatacaaaat

SEQ ID NO: 6023510 - DNA, 25 bp, Homo sapien
tgttttataaaaatgttacaagcca

SEQ ID NO: 6023511 - DNA, 25 bp, Homo sapien
aaaatataattctaatacaaacgtg

SEQ ID NO: 6023512 - DNA, 25 bp, Homo sapien
tagacaaaagatcctgttacagagg

SEQ ID NO: 6023513 - DNA, 25 bp, Homo sapien
caaacgtgaactaaagtacactcag

SEQ ID NO: 6023514 - DNA, 25 bp, Homo sapien
caacagcacaaaaatccctctatga

SEQ ID NO: 6023515 - DNA, 25 bp, Homo sapien
gcagaatgtgcagtgaccaccacca

SEQ ID NO: 6023516 - DNA, 25 bp, Homo sapien
atcaaaattctgttttataaaaatg

SEQ ID NO: 6023517 - DNA, 25 bp, Homo sapien
cagaatagtttctatagtaaaaaca

SEQ ID NO: 6023518 - DNA, 25 bp, Homo sapien
taaactggaaaacaaagaaatcaca

SEQ ID NO: 6023519 - DNA, 25 bp, Homo sapien
acacattgatttgaatagcaacaag

SEQ ID NO: 6023520 - DNA, 25 bp, Homo sapien
tatcaggggcagatccccaagacct

SEQ ID NO: 6023521 - DNA, 25 bp, Homo sapien
cagtaactgggaggcaaagacaggt

SEQ ID NO: 6023522 - DNA, 25 bp, Homo sapien
agtgctgtggtccacagtcacccgg

SEQ ID NO: 6023523 - DNA, 25 bp, Homo sapien
caaagacaggtgactctaggattac

SEQ ID NO: 6023524 - DNA, 25 bp, Homo sapien
acagaggaaggcattgtggaatcaa

SEQ ID NO: 6023525 - DNA, 25 bp, Homo sapien
caagacctcactgatcacaacagca

SEQ ID NO: 6023526 - DNA, 25 bp, Homo sapien
caaaagaagacaaacagaatcaaca

SEQ ID NO: 6023527 - DNA, 25 bp, Homo sapien
ggccacctaggaatcaaaattctgt

SEQ ID NO: 6023528 - DNA, 25 bp, Homo sapien
aactctggccacctaggaatcaaaa

SEQ ID NO: 6023529 - DNA, 25 bp, Homo sapien
taaggtgacacatagctttagtccc

SEQ ID NO: 6023530 - DNA, 25 bp, Homo sapien
tcacgacagggacaggcacacctct

SEQ ID NO: 6023531 - DNA, 25 bp, Homo sapien
tgagtttatttttctatgaacgcgt

SEQ ID NO: 6023532 - DNA, 25 bp, Homo sapien
ttctctggcttttgctctcctggcc

SEQ ID NO: 6023533 - DNA, 25 bp, Homo sapien
agagcactggaatgtttggtgagtt

SEQ ID NO: 6023534 - DNA, 25 bp, Homo sapien
tgggacttagtttctatcttcttaa

SEQ ID NO: 6023535 - DNA, 25 bp, Homo sapien
tctgcttcacgacagggacaggcac

SEQ ID NO: 6023536 - DNA, 25 bp, Homo sapien
ttggcatgacaattgtatgaaagca

SEQ ID NO: 6023537 - DNA, 25 bp, Homo sapien
tggctaaaagtttccaagagagtcc

SEQ ID NO: 6023538 - DNA, 25 bp, Homo sapien
gaaaatcagtatagactttgtttca

SEQ ID NO: 6023539 - DNA, 25 bp, Homo sapien
caaagtatttggaaaagaagtatgg

SEQ ID NO: 6023540 - DNA, 25 bp, Homo sapien
gtcatatgttgagagagcactggaa

SEQ ID NO: 6023541 - DNA, 25 bp, Homo sapien
tcctggcctctccaagggtgtcatg

SEQ ID NO: 6023542 - DNA, 25 bp, Homo sapien
gtttcctgtccttgtcaccagtgaa

SEQ ID NO: 6023543 - DNA, 25 bp, Homo sapien
aacatccatgggacaggaaatgtgt

SEQ ID NO: 6023544 - DNA, 25 bp, Homo sapien
tgtgtttgctataaaattagagata

SEQ ID NO: 6023545 - DNA, 25 bp, Homo sapien
taacatgtcatatgttgagagagca

SEQ ID NO: 6023546 - DNA, 25 bp, Homo sapien
aattagagatataaggcaggggcag

SEQ ID NO: 6023547 - DNA, 25 bp, Homo sapien
gaacgcgtagcttgagtttggacaa

SEQ ID NO: 6023548 - DNA, 25 bp, Homo sapien
aaggatgaaaatctgtttccagctc

SEQ ID NO: 6023549 - DNA, 25 bp, Homo sapien
ttctatgaacgcgtagcttgagttt

SEQ ID NO: 6023550 - DNA, 25 bp, Homo sapien
tgcccaccatgcaaggatgaaaatc

SEQ ID NO: 6023551 - DNA, 25 bp, Homo sapien
aggcacacctctcaagtttaaaggg

SEQ ID NO: 6023552 - DNA, 25 bp, Homo sapien
tttcattaacatgtcatatgttgag

SEQ ID NO: 6023553 - DNA, 25 bp, Homo sapien
gtgtctgcccccacccctccaccca

SEQ ID NO: 6023554 - DNA, 25 bp, Homo sapien
caagggtgtcatgaaaatcagtata

SEQ ID NO: 6023555 - DNA, 25 bp, Homo sapien
ttaattaaatacaacatccatggga

SEQ ID NO: 6023556 - DNA, 25 bp, Homo sapien
gtgcggtctgcttcacgacagggac

SEQ ID NO: 6023557 - DNA, 25 bp, Homo sapien
caggaaatgtgtttgctataaaatt

SEQ ID NO: 6023558 - DNA, 25 bp, Homo sapien
tagtttctatcttcttaaggggagc

SEQ ID NO: 6023559 - DNA, 25 bp, Homo sapien
tgctctcctggcctctccaagggtg

SEQ ID NO: 6023560 - DNA, 25 bp, Homo sapien
tgtcctcagagtgtgtgacagccac

SEQ ID NO: 6023561 - DNA, 25 bp, Homo sapien
gtttcagtttcctgtccttgtcacc

SEQ ID NO: 6023562 - DNA, 25 bp, Homo sapien
aacctcactgcacaaagtatttgga

SEQ ID NO: 6023563 - DNA, 25 bp, Homo sapien
tggacaactagtaaggaatgcacca

SEQ ID NO: 6023564 - DNA, 25 bp, Homo sapien
cagtatagactttgtttcattaaca

SEQ ID NO: 6023565 - DNA, 25 bp, Homo sapien
ttgtatgaaagcaacctcactgcac

SEQ ID NO: 6023566 - DNA, 25 bp, Homo sapien
aagtttccaagagagtccgtgggat

SEQ ID NO: 6023567 - DNA, 25 bp, Homo sapien
ctggaatgtttggtgagtttatttt

SEQ ID NO: 6023568 - DNA, 25 bp, Homo sapien
gaaagcaacctcactgcacaaagta

SEQ ID NO: 6023569 - DNA, 25 bp, Homo sapien
gactttgtttcattaacatgtcata

SEQ ID NO: 6023570 - DNA, 25 bp, Homo sapien
aggcaggggcagcaatctgcccacc

SEQ ID NO: 6023571 - DNA, 25 bp, Homo sapien
ctcttggtaccctgtcctcagagtg

SEQ ID NO: 6023572 - DNA, 25 bp, Homo sapien
aaggaatgcaccaacactttggcat

SEQ ID NO: 6023573 - DNA, 25 bp, Homo sapien
acacagtcccccttctctggctttt

SEQ ID NO: 6023574 - DNA, 25 bp, Homo sapien
agggacaggcacacctctcaagttt

SEQ ID NO: 6023575 - DNA, 25 bp, Homo sapien
gagagtccgtgggattataggaaaa

SEQ ID NO: 6023576 - DNA, 25 bp, Homo sapien
gaagtatgggacttagtttctatct

SEQ ID NO: 6023577 - DNA, 25 bp, Homo sapien
tatttttctatgaacgcgtagcttg

SEQ ID NO: 6023578 - DNA, 25 bp, Homo sapien
tgcaccaacactttggcatgacaat

SEQ ID NO: 6023579 - DNA, 25 bp, Homo sapien
tcccccttctctggcttttgctctc

SEQ ID NO: 6023580 - DNA, 25 bp, Homo sapien
ctgtttccagctctcaagtggctaa

SEQ ID NO: 6023581 - DNA, 25 bp, Homo sapien
gtaccctgtcctcagagtgtgtgac

SEQ ID NO: 6023582 - DNA, 25 bp, Homo sapien
tgtcatgaaaatcagtatagacttt

SEQ ID NO: 6023583 - DNA, 25 bp, Homo sapien
actagtaaggaatgcaccaacactt

SEQ ID NO: 6023584 - DNA, 25 bp, Homo sapien
gaaaatctgtttccagctctcaagt

SEQ ID NO: 6023585 - DNA, 25 bp, Homo sapien
gggcagcaatctgcccaccatgcaa

SEQ ID NO: 6023586 - DNA, 25 bp, Homo sapien
gccgtttaattaaatacaacatcca

SEQ ID NO: 6023587 - DNA, 25 bp, Homo sapien
ctcaagtggctaaaagtttccaaga

SEQ ID NO: 6023588 - DNA, 25 bp, Homo sapien
ccagctctcaagtggctaaaagttt

SEQ ID NO: 6023589 - DNA, 25 bp, Homo sapien
gtagcttgagtttggacaactagta

SEQ ID NO: 6023590 - DNA, 25 bp, Homo sapien
tgcaaagtgtctgcccccacccctc

SEQ ID NO: 6023591 - DNA, 25 bp, Homo sapien
tgttgagagagcactggaatgtttg

SEQ ID NO: 6023592 - DNA, 25 bp, Homo sapien
tgagtttggacaactagtaaggaat

SEQ ID NO: 6023593 - DNA, 25 bp, Homo sapien
tgcccccacccctccacccaacaca

SEQ ID NO: 6023594 - DNA, 25 bp, Homo sapien
tgtccttgtcaccagtgaaggaaat

SEQ ID NO: 6023595 - DNA, 25 bp, Homo sapien
cctctccaagggtgtcatgaaaatc

SEQ ID NO: 6023596 - DNA, 25 bp, Homo sapien
tgacaattgtatgaaagcaacctca

SEQ ID NO: 6023597 - DNA, 25 bp, Homo sapien
ttccaagagagtccgtgggattata

SEQ ID NO: 6023598 - DNA, 25 bp, Homo sapien
ccatgcaaggatgaaaatctgtttc

SEQ ID NO: 6023599 - DNA, 25 bp, Homo sapien
agggcctcttggtaccctgtcctca

SEQ ID NO: 6023600 - DNA, 25 bp, Homo sapien
ggcttttgctctcctggcctctcca

SEQ ID NO: 6023601 - DNA, 25 bp, Homo sapien
cagtgaaggaaatgcaaagtgtctg

SEQ ID NO: 6023602 - DNA, 25 bp, Homo sapien
aaatacaacatccatgggacaggaa

SEQ ID NO: 6023603 - DNA, 25 bp, Homo sapien
cacccaacacagtcccccttctctg

SEQ ID NO: 6023604 - DNA, 25 bp, Homo sapien
catgggacaggaaatgtgtttgcta

SEQ ID NO: 6023605 - DNA, 25 bp, Homo sapien
gcaatctgcccaccatgcaaggatg

SEQ ID NO: 6023606 - DNA, 25 bp, Homo sapien
gtttggtgagtttatttttctatga

SEQ ID NO: 6023607 - DNA, 25 bp, Homo sapien
aacactttggcatgacaattgtatg

SEQ ID NO: 6023608 - DNA, 25 bp, Homo sapien
actgcacaaagtatttggaaaagaa

SEQ ID NO: 6023609 - DNA, 25 bp, Homo sapien
tgtcaccagtgaaggaaatgcaaag

SEQ ID NO: 6023610 - DNA, 25 bp, Homo sapien
attataggaaaaccagggcctcttg

SEQ ID NO: 6023611 - DNA, 25 bp, Homo sapien
agatataaggcaggggcagcaatct

SEQ ID NO: 6023612 - DNA, 25 bp, Homo sapien
aggaaatgcaaagtgtctgccccca

SEQ ID NO: 6023613 - DNA, 25 bp, Homo sapien
ccagtatgtacagcctaaacatcct

SEQ ID NO: 6023614 - DNA, 25 bp, Homo sapien
gattttcatccttgcatggtgggca

SEQ ID NO: 6023615 - DNA, 25 bp, Homo sapien
aatactttgtgcagtgaggttgctt

SEQ ID NO: 6023616 - DNA, 25 bp, Homo sapien
actctgaggacagggtaccaagagg

SEQ ID NO: 6023617 - DNA, 25 bp, Homo sapien
ttttatagcaaacacatttcctgtc

SEQ ID NO: 6023618 - DNA, 25 bp, Homo sapien
cctataatcccacggactctcttgg

SEQ ID NO: 6023619 - DNA, 25 bp, Homo sapien
gtgggcagattgctgcccctgcctt

SEQ ID NO: 6023620 - DNA, 25 bp, Homo sapien
catacagtttcctctgtctacaagc

SEQ ID NO: 6023621 - DNA, 25 bp, Homo sapien
acatcctcttatataacaaaagatt

SEQ ID NO: 6023622 - DNA, 25 bp, Homo sapien
tcctgtcccatggatgttgtattta

SEQ ID NO: 6023623 - DNA, 25 bp, Homo sapien
ctctaattttatagcaaacacattt

SEQ ID NO: 6023624 - DNA, 25 bp, Homo sapien
acagatgagtgtctgctatggacgc

SEQ ID NO: 6023625 - DNA, 25 bp, Homo sapien
tgcatggtgggcagattgctgcccc

SEQ ID NO: 6023626 - DNA, 25 bp, Homo sapien
gcaggcaatgatctaccccagtatg

SEQ ID NO: 6023627 - DNA, 25 bp, Homo sapien
agattgctgcccctgccttatatct

SEQ ID NO: 6023628 - DNA, 25 bp, Homo sapien
ttatatctctaattttatagcaaac

SEQ ID NO: 6023629 - DNA, 25 bp, Homo sapien
ttagccacttgagagctggaaacag

SEQ ID NO: 6023630 - DNA, 25 bp, Homo sapien
caattgtcatgccaaagtgttggtg

SEQ ID NO: 6023631 - DNA, 25 bp, Homo sapien
agccacggagaaggaagttatgcac

SEQ ID NO: 6023632 - DNA, 25 bp, Homo sapien
ctgctatggacgcatacatagagca

SEQ ID NO: 6023633 - DNA, 25 bp, Homo sapien
ataggggcaggcaatgatctacccc

SEQ ID NO: 6023634 - DNA, 25 bp, Homo sapien
acttcttttccaaatactttgtgca

SEQ ID NO: 6023635 - DNA, 25 bp, Homo sapien
tcatgccaaagtgttggtgcattcc

SEQ ID NO: 6023636 - DNA, 25 bp, Homo sapien
atcccacggactctcttggaaactt

SEQ ID NO: 6023637 - DNA, 25 bp, Homo sapien
atggacgcatacatagagcactgat

SEQ ID NO: 6023638 - DNA, 25 bp, Homo sapien
gctgcccctgccttatatctctaat

SEQ ID NO: 6023639 - DNA, 25 bp, Homo sapien
tatttctatgtataggggcaggcaa

SEQ ID NO: 6023640 - DNA, 25 bp, Homo sapien
aaacttttagccacttgagagctgg

SEQ ID NO: 6023641 - DNA, 25 bp, Homo sapien
aagaagatagaaactaagtcccata

SEQ ID NO: 6023642 - DNA, 25 bp, Homo sapien
ggctaacatacagtttcctctgtct

SEQ ID NO: 6023643 - DNA, 25 bp, Homo sapien
accttgcttacttcatttgagattt

SEQ ID NO: 6023644 - DNA, 25 bp, Homo sapien
gaggaaactgaaggctaacatacag

SEQ ID NO: 6023645 - DNA, 25 bp, Homo sapien
cagaaccttgcttacttcatttgag

SEQ ID NO: 6023646 - DNA, 25 bp, Homo sapien
tggctgtcacacactctgaggacag

SEQ ID NO: 6023647 - DNA, 25 bp, Homo sapien
ctgtctacaagccagccacggagaa

SEQ ID NO: 6023648 - DNA, 25 bp, Homo sapien
cacatttcctgtcccatggatgttg

SEQ ID NO: 6023649 - DNA, 25 bp, Homo sapien
tatgtataggggcaggcaatgatct

SEQ ID NO: 6023650 - DNA, 25 bp, Homo sapien
atagaaactaagtcccatacttctt

SEQ ID NO: 6023651 - DNA, 25 bp, Homo sapien
atagagcactgattacagtggctgt

SEQ ID NO: 6023652 - DNA, 25 bp, Homo sapien
ggagaaggaagttatgcacaattat

SEQ ID NO: 6023653 - DNA, 25 bp, Homo sapien
ggaagttatgcacaattatgcagca

SEQ ID NO: 6023654 - DNA, 25 bp, Homo sapien
tctaccccagtatgtacagcctaaa

SEQ ID NO: 6023655 - DNA, 25 bp, Homo sapien
tatgcacaattatgcagcatatttc

SEQ ID NO: 6023656 - DNA, 25 bp, Homo sapien
cactgattacagtggctgtcacaca

SEQ ID NO: 6023657 - DNA, 25 bp, Homo sapien
acttgagagctggaaacagattttc

SEQ ID NO: 6023658 - DNA, 25 bp, Homo sapien
agtttggtatatgaggaaactgaag

SEQ ID NO: 6023659 - DNA, 25 bp, Homo sapien
gttggtgcattccttactagttgtc

SEQ ID NO: 6023660 - DNA, 25 bp, Homo sapien
caagaggccctggttttcctataat

SEQ ID NO: 6023661 - DNA, 25 bp, Homo sapien
actgaaggctaacatacagtttcct

SEQ ID NO: 6023662 - DNA, 25 bp, Homo sapien
gatgttgtatttaattaaacggctc

SEQ ID NO: 6023663 - DNA, 25 bp, Homo sapien
ttcatacaattgtcatgccaaagtg

SEQ ID NO: 6023664 - DNA, 25 bp, Homo sapien
ttgtgcagtgaggttgctttcatac

SEQ ID NO: 6023665 - DNA, 25 bp, Homo sapien
ggactctcttggaaacttttagcca

SEQ ID NO: 6023666 - DNA, 25 bp, Homo sapien
aattatgcagcatatttctatgtat

SEQ ID NO: 6023667 - DNA, 25 bp, Homo sapien
cctgccttatatctctaattttata

SEQ ID NO: 6023668 - DNA, 25 bp, Homo sapien
tttccaaatactttgtgcagtgagg

SEQ ID NO: 6023669 - DNA, 25 bp, Homo sapien
tcttggaaacttttagccacttgag

SEQ ID NO: 6023670 - DNA, 25 bp, Homo sapien
gaaacagattttcatccttgcatgg

SEQ ID NO: 6023671 - DNA, 25 bp, Homo sapien
gctccccttaagaagatagaaacta

SEQ ID NO: 6023672 - DNA, 25 bp, Homo sapien
taacaaaagattacaaacccagcga

SEQ ID NO: 6023673 - DNA, 25 bp, Homo sapien
ttacagtggctgtcacacactctga

SEQ ID NO: 6023674 - DNA, 25 bp, Homo sapien
atattcacagatgagtgtctgctat

SEQ ID NO: 6023675 - DNA, 25 bp, Homo sapien
tgtacagcctaaacatcctcttata

SEQ ID NO: 6023676 - DNA, 25 bp, Homo sapien
cttacttcatttgagatttaaacgt

SEQ ID NO: 6023677 - DNA, 25 bp, Homo sapien
gttgctttcatacaattgtcatgcc

SEQ ID NO: 6023678 - DNA, 25 bp, Homo sapien
aaagattacaaacccagcgatattc

SEQ ID NO: 6023679 - DNA, 25 bp, Homo sapien
aggacagggtaccaagaggccctgg

SEQ ID NO: 6023680 - DNA, 25 bp, Homo sapien
agtgaggttgctttcatacaattgt

SEQ ID NO: 6023681 - DNA, 25 bp, Homo sapien
tcttatataacaaaagattacaaac

SEQ ID NO: 6023682 - DNA, 25 bp, Homo sapien
gcatacatagagcactgattacagt

SEQ ID NO: 6023683 - DNA, 25 bp, Homo sapien
gtatatgaggaaactgaaggctaac

SEQ ID NO: 6023684 - DNA, 25 bp, Homo sapien
caaagtgttggtgcattccttacta

SEQ ID NO: 6023685 - DNA, 25 bp, Homo sapien
agcaaacacatttcctgtcccatgg

SEQ ID NO: 6023686 - DNA, 25 bp, Homo sapien
ttttcctataatcccacggactctc

SEQ ID NO: 6023687 - DNA, 25 bp, Homo sapien
acaaacccagcgatattcacagatg

SEQ ID NO: 6023688 - DNA, 25 bp, Homo sapien
ccagcgatattcacagatgagtgtc

SEQ ID NO: 6023689 - DNA, 25 bp, Homo sapien
taaacgttttcagtttggtatatga

SEQ ID NO: 6023690 - DNA, 25 bp, Homo sapien
gtttcctctgtctacaagccagcca

SEQ ID NO: 6023691 - DNA, 25 bp, Homo sapien
gagtgtctgctatggacgcatacat

SEQ ID NO: 6023692 - DNA, 25 bp, Homo sapien
aatgatctaccccagtatgtacagc

SEQ ID NO: 6023693 - DNA, 25 bp, Homo sapien
gcctaaacatcctcttatataacaa

SEQ ID NO: 6023694 - DNA, 25 bp, Homo sapien
catccttgcatggtgggcagattgc

SEQ ID NO: 6023695 - DNA, 25 bp, Homo sapien
ccatacttcttttccaaatactttg

SEQ ID NO: 6023696 - DNA, 25 bp, Homo sapien
gcagcatatttctatgtataggggc

SEQ ID NO: 6023697 - DNA, 25 bp, Homo sapien
acaagccagccacggagaaggaagt

SEQ ID NO: 6023698 - DNA, 25 bp, Homo sapien
tcacacactctgaggacagggtacc

SEQ ID NO: 6023699 - DNA, 25 bp, Homo sapien
cgttttcagtttggtatatgaggaa

SEQ ID NO: 6023700 - DNA, 25 bp, Homo sapien
cccatggatgttgtatttaattaaa

SEQ ID NO: 6023701 - DNA, 25 bp, Homo sapien
gagctggaaacagattttcatcctt

SEQ ID NO: 6023702 - DNA, 25 bp, Homo sapien
catttgagatttaaacgttttcagt

SEQ ID NO: 6023703 - DNA, 25 bp, Homo sapien
catcaaccgcttctgttatggccag

SEQ ID NO: 6023704 - DNA, 25 bp, Homo sapien
aagcgggcacattcagcctgtcata

SEQ ID NO: 6023705 - DNA, 25 bp, Homo sapien
tgcacgtgacagagcgcaagtatct

SEQ ID NO: 6023706 - DNA, 25 bp, Homo sapien
aggaggtgcttgagtccagccaaga

SEQ ID NO: 6023707 - DNA, 25 bp, Homo sapien
gccatgctgagagagccacacccaa

SEQ ID NO: 6023708 - DNA, 25 bp, Homo sapien
aggaggaagggtcctttcagtcttg

SEQ ID NO: 6023709 - DNA, 25 bp, Homo sapien
tgccgttgcatatccatcgacttgg

SEQ ID NO: 6023710 - DNA, 25 bp, Homo sapien
ggattaagtcaaagcgggcacattc

SEQ ID NO: 6023711 - DNA, 25 bp, Homo sapien
gcaccgccatgcctggagaggaggt

SEQ ID NO: 6023712 - DNA, 25 bp, Homo sapien
cctttcagtcttgctccttctgcaa

SEQ ID NO: 6023713 - DNA, 25 bp, Homo sapien
cagcctgtcatagccatgctgagag

SEQ ID NO: 6023714 - DNA, 25 bp, Homo sapien
ctgcaacagccgcactatcatcaac

SEQ ID NO: 6023715 - DNA, 25 bp, Homo sapien
caggggcggggcaccgccatgcctg

SEQ ID NO: 6023716 - DNA, 25 bp, Homo sapien
gagccacacccaaaccacccgattc

SEQ ID NO: 6023717 - DNA, 25 bp, Homo sapien
ggtgcaaaactcagcccctgaagca

SEQ ID NO: 6023718 - DNA, 25 bp, Homo sapien
aaactcagcccctgaagcagaccat

SEQ ID NO: 6023719 - DNA, 25 bp, Homo sapien
gaagcagaccatccacgaggagggc

SEQ ID NO: 6023720 - DNA, 25 bp, Homo sapien
ggtcacacgcgtgaagcagtgccgt

SEQ ID NO: 6023721 - DNA, 25 bp, Homo sapien
gcccctgaagcagaccatccacgag

SEQ ID NO: 6023722 - DNA, 25 bp, Homo sapien
ccgcttctgttatggccagtgcaac

SEQ ID NO: 6023723 - DNA, 25 bp, Homo sapien
tccatcgacttggattaagtcaaag

SEQ ID NO: 6023724 - DNA, 25 bp, Homo sapien
tgcatatccatcgacttggattaag

SEQ ID NO: 6023725 - DNA, 25 bp, Homo sapien
ctggagaggaggtgcttgagtccag

SEQ ID NO: 6023726 - DNA, 25 bp, Homo sapien
ccatgcctggagaggaggtgcttga

SEQ ID NO: 6023727 - DNA, 25 bp, Homo sapien
agcgcaagtatctgaagcgagattg

SEQ ID NO: 6023728 - DNA, 25 bp, Homo sapien
tactgccaacagctgaggggaaaaa

SEQ ID NO: 6023729 - DNA, 25 bp, Homo sapien
agtcttgctccttctgcaagcccaa

SEQ ID NO: 6023730 - DNA, 25 bp, Homo sapien
ctccttctacatccccaggcacatc

SEQ ID NO: 6023731 - DNA, 25 bp, Homo sapien
ccaagaggccctgcacgtgacagag

SEQ ID NO: 6023732 - DNA, 25 bp, Homo sapien
gaaaagggtcacacgcgtgaagcag

SEQ ID NO: 6023733 - DNA, 25 bp, Homo sapien
aagcagtgccgttgcatatccatcg

SEQ ID NO: 6023734 - DNA, 25 bp, Homo sapien
tcaccaccatgatggtcacactcaa

SEQ ID NO: 6023735 - DNA, 25 bp, Homo sapien
aagggtcctttcagtcttgctcctt

SEQ ID NO: 6023736 - DNA, 25 bp, Homo sapien
gcggggcaccgccatgcctggagag

SEQ ID NO: 6023737 - DNA, 25 bp, Homo sapien
gctccttctgcaagcccaagaagtt

SEQ ID NO: 6023738 - DNA, 25 bp, Homo sapien
agtcaaagcgggcacattcagcctg

SEQ ID NO: 6023739 - DNA, 25 bp, Homo sapien
tgacagagcgcaagtatctgaagcg

SEQ ID NO: 6023740 - DNA, 25 bp, Homo sapien
ccacgaggagggctgcaacagccgc

SEQ ID NO: 6023741 - DNA, 25 bp, Homo sapien
cacaatgactctgagcagacccagt

SEQ ID NO: 6023742 - DNA, 25 bp, Homo sapien
cagccacccaccaagaagaaaaggg

SEQ ID NO: 6023743 - DNA, 25 bp, Homo sapien
tggccagtgcaactccttctacatc

SEQ ID NO: 6023744 - DNA, 25 bp, Homo sapien
ggagccattccgcctcctgacaagg

SEQ ID NO: 6023745 - DNA, 25 bp, Homo sapien
gcacattcagcctgtcatagccatg

SEQ ID NO: 6023746 - DNA, 25 bp, Homo sapien
gctcagcacaatgactctgagcaga

SEQ ID NO: 6023747 - DNA, 25 bp, Homo sapien
ggaccctactgccaacagctgaggg

SEQ ID NO: 6023748 - DNA, 25 bp, Homo sapien
cgcgtgaagcagtgccgttgcatat

SEQ ID NO: 6023749 - DNA, 25 bp, Homo sapien
tgaagcgagattggtgcaaaactca

SEQ ID NO: 6023750 - DNA, 25 bp, Homo sapien
ttccgcctcctgacaaggctcagca

SEQ ID NO: 6023751 - DNA, 25 bp, Homo sapien
ggtcacactcaactgtcctgagcta

SEQ ID NO: 6023752 - DNA, 25 bp, Homo sapien
acccagtccccaccacaacctggct

SEQ ID NO: 6023753 - DNA, 25 bp, Homo sapien
ggccctgcacgtgacagagcgcaag

SEQ ID NO: 6023754 - DNA, 25 bp, Homo sapien
ctgttatggccagtgcaactccttc

SEQ ID NO: 6023755 - DNA, 25 bp, Homo sapien
gagcagacccagtccccaccacaac

SEQ ID NO: 6023756 - DNA, 25 bp, Homo sapien
tcccaaggagccattccgcctcctg

SEQ ID NO: 6023757 - DNA, 25 bp, Homo sapien
gggccaggggcggggcaccgccatg

SEQ ID NO: 6023758 - DNA, 25 bp, Homo sapien
tgtcctgagctacagccacccacca

SEQ ID NO: 6023759 - DNA, 25 bp, Homo sapien
ctgagagagccacacccaaaccacc

SEQ ID NO: 6023760 - DNA, 25 bp, Homo sapien
cagccgcactatcatcaaccgcttc

SEQ ID NO: 6023761 - DNA, 25 bp, Homo sapien
tgcttgagtccagccaagaggccct

SEQ ID NO: 6023762 - DNA, 25 bp, Homo sapien
tacatccccaggcacatccgaaagg

SEQ ID NO: 6023763 - DNA, 25 bp, Homo sapien
gactctgagcagacccagtccccac

SEQ ID NO: 6023764 - DNA, 25 bp, Homo sapien
agaagttcaccaccatgatggtcac

SEQ ID NO: 6023765 - DNA, 25 bp, Homo sapien
gagctacagccacccaccaagaaga

SEQ ID NO: 6023766 - DNA, 25 bp, Homo sapien
cactatcatcaaccgcttctgttat

SEQ ID NO: 6023767 - DNA, 25 bp, Homo sapien
caaaccacccgattcctacttggct

SEQ ID NO: 6023768 - DNA, 25 bp, Homo sapien
gagattggtgcaaaactcagcccct

SEQ ID NO: 6023769 - DNA, 25 bp, Homo sapien
agcccaagaagttcaccaccatgat

SEQ ID NO: 6023770 - DNA, 25 bp, Homo sapien
caacagctgaggggaaaaagaaagg

SEQ ID NO: 6023771 - DNA, 25 bp, Homo sapien
catgatggtcacactcaactgtcct

SEQ ID NO: 6023772 - DNA, 25 bp, Homo sapien
agtatctgaagcgagattggtgcaa

SEQ ID NO: 6023773 - DNA, 25 bp, Homo sapien
tctgcaagcccaagaagttcaccac

SEQ ID NO: 6023774 - DNA, 25 bp, Homo sapien
ccacaacctggctccaggacccggg

SEQ ID NO: 6023775 - DNA, 25 bp, Homo sapien
ccccaggcacatccgaaaggaggaa

SEQ ID NO: 6023776 - DNA, 25 bp, Homo sapien
cacatccgaaaggaggaagggtcct

SEQ ID NO: 6023777 - DNA, 25 bp, Homo sapien
aggttcccaaggagccattccgcct

SEQ ID NO: 6023778 - DNA, 25 bp, Homo sapien
tcctggggaccctactgccaacagc

SEQ ID NO: 6023779 - DNA, 25 bp, Homo sapien
gaccatccacgaggagggctgcaac

SEQ ID NO: 6023780 - DNA, 25 bp, Homo sapien
gtcatagccatgctgagagagccac

SEQ ID NO: 6023781 - DNA, 25 bp, Homo sapien
cgacttggattaagtcaaagcgggc

SEQ ID NO: 6023782 - DNA, 25 bp, Homo sapien
gtccagccaagaggccctgcacgtg

SEQ ID NO: 6023783 - DNA, 25 bp, Homo sapien
actcaactgtcctgagctacagcca

SEQ ID NO: 6023784 - DNA, 25 bp, Homo sapien
tgcttctcctcctggggaccctact

SEQ ID NO: 6023785 - DNA, 25 bp, Homo sapien
ggagggctgcaacagccgcactatc

SEQ ID NO: 6023786 - DNA, 25 bp, Homo sapien
ctcctgacaaggctcagcacaatga

SEQ ID NO: 6023787 - DNA, 25 bp, Homo sapien
gtgcaactccttctacatccccagg

SEQ ID NO: 6023788 - DNA, 25 bp, Homo sapien
tccccaccacaacctggctccagga

SEQ ID NO: 6023789 - DNA, 25 bp, Homo sapien
ccaagaagaaaagggtcacacgcgt

SEQ ID NO: 6023790 - DNA, 25 bp, Homo sapien
tctcctcctggggaccctactgcca

SEQ ID NO: 6023791 - DNA, 25 bp, Homo sapien
gacaaggctcagcacaatgactctg

SEQ ID NO: 6023792 - DNA, 25 bp, Homo sapien
gggcatttccgaccatctgaagcag

SEQ ID NO: 6023793 - DNA, 25 bp, Homo sapien
ttaatttaggaacatgggctacgac

SEQ ID NO: 6023794 - DNA, 25 bp, Homo sapien
gcggtcaagtgaattaatttaggaa

SEQ ID NO: 6023795 - DNA, 25 bp, Homo sapien
ttcttctggcctctaggtttaagcc

SEQ ID NO: 6023796 - DNA, 25 bp, Homo sapien
ggagagcaaagaaagggatgggcta

SEQ ID NO: 6023797 - DNA, 25 bp, Homo sapien
tggtgtgggcatttccgaccatctg

SEQ ID NO: 6023798 - DNA, 25 bp, Homo sapien
tgctggttcttctggcctctaggtt

SEQ ID NO: 6023799 - DNA, 25 bp, Homo sapien
gaacacaatgacaaagccaactaca

SEQ ID NO: 6023800 - DNA, 25 bp, Homo sapien
tgaatgtgcccgctttgacttaatc

SEQ ID NO: 6023801 - DNA, 25 bp, Homo sapien
aagtcgatggatatgcaacggcact

SEQ ID NO: 6023802 - DNA, 25 bp, Homo sapien
tacgactgagatgtcagggagagca

SEQ ID NO: 6023803 - DNA, 25 bp, Homo sapien
ccacaggcacccatgcacactcatg

SEQ ID NO: 6023804 - DNA, 25 bp, Homo sapien
atggatatgcaacggcactgcttca

SEQ ID NO: 6023805 - DNA, 25 bp, Homo sapien
gtccagtggtgtgggcatttccgac

SEQ ID NO: 6023806 - DNA, 25 bp, Homo sapien
gtgcccaggaggcacatggaacaca

SEQ ID NO: 6023807 - DNA, 25 bp, Homo sapien
tgggctatgggagcatagggcgagc

SEQ ID NO: 6023808 - DNA, 25 bp, Homo sapien
agccctgcccctgtggatgtttggg

SEQ ID NO: 6023809 - DNA, 25 bp, Homo sapien
tccggctggtgtttggaaacaccca

SEQ ID NO: 6023810 - DNA, 25 bp, Homo sapien
tggtgtttggaaacacccacaggca

SEQ ID NO: 6023811 - DNA, 25 bp, Homo sapien
ttctagcaaaggctgtttccggctg

SEQ ID NO: 6023812 - DNA, 25 bp, Homo sapien
gacaaaagacttacacccgcggtca

SEQ ID NO: 6023813 - DNA, 25 bp, Homo sapien
gctatgacaggctgaatgtgcccgc

SEQ ID NO: 6023814 - DNA, 25 bp, Homo sapien
gtgtggctctctcagcatggctatg

SEQ ID NO: 6023815 - DNA, 25 bp, Homo sapien
gcatagggcgagcactgaacagttc

SEQ ID NO: 6023816 - DNA, 25 bp, Homo sapien
ggcactgcttcacgcgtgtgaccct

SEQ ID NO: 6023817 - DNA, 25 bp, Homo sapien
ctcccccattagtattcattctcaa

SEQ ID NO: 6023818 - DNA, 25 bp, Homo sapien
ggttcttcacaagacaaaagactta

SEQ ID NO: 6023819 - DNA, 25 bp, Homo sapien
tcacaagacaaaagacttacacccg

SEQ ID NO: 6023820 - DNA, 25 bp, Homo sapien
gtggatgtttgggtccagtggtgtg

SEQ ID NO: 6023821 - DNA, 25 bp, Homo sapien
ctctctcagcatggctatgacaggc

SEQ ID NO: 6023822 - DNA, 25 bp, Homo sapien
gcagcctccagccaggaagcaactg

SEQ ID NO: 6023823 - DNA, 25 bp, Homo sapien
cagttccgagtctaatgcagccctc

SEQ ID NO: 6023824 - DNA, 25 bp, Homo sapien
aagggatgggctatgggagcatagg

SEQ ID NO: 6023825 - DNA, 25 bp, Homo sapien
acacccgcggtcaagtgaattaatt

SEQ ID NO: 6023826 - DNA, 25 bp, Homo sapien
tctgaaggttcttcacaagacaaaa

SEQ ID NO: 6023827 - DNA, 25 bp, Homo sapien
agtgccttctagcaaaggctgtttc

SEQ ID NO: 6023828 - DNA, 25 bp, Homo sapien
gtttgggtgtggctctctcagcatg

SEQ ID NO: 6023829 - DNA, 25 bp, Homo sapien
gcaaaggctgtttccggctggtgtt

SEQ ID NO: 6023830 - DNA, 25 bp, Homo sapien
acaggctgaatgtgcccgctttgac

SEQ ID NO: 6023831 - DNA, 25 bp, Homo sapien
gtctccccacattctgaaggttctt

SEQ ID NO: 6023832 - DNA, 25 bp, Homo sapien
aactacagccctgcccctgtggatg

SEQ ID NO: 6023833 - DNA, 25 bp, Homo sapien
tattcattctcaagtgaaatcctgg

SEQ ID NO: 6023834 - DNA, 25 bp, Homo sapien
acactatgcataagcagcctccagc

SEQ ID NO: 6023835 - DNA, 25 bp, Homo sapien
gcccctgtggatgtttgggtccagt

SEQ ID NO: 6023836 - DNA, 25 bp, Homo sapien
gtttgggtccagtggtgtgggcatt

SEQ ID NO: 6023837 - DNA, 25 bp, Homo sapien
cattagtattcattctcaagtgaaa

SEQ ID NO: 6023838 - DNA, 25 bp, Homo sapien
ttccgaccatctgaagcagagtaac

SEQ ID NO: 6023839 - DNA, 25 bp, Homo sapien
taatgcagccctcagagttacctcc

SEQ ID NO: 6023840 - DNA, 25 bp, Homo sapien
gaagcagagtaacaggaagtgcctt

SEQ ID NO: 6023841 - DNA, 25 bp, Homo sapien
tatgggagcatagggcgagcactga

SEQ ID NO: 6023842 - DNA, 25 bp, Homo sapien
tgtcagggagagcaaagaaagggat

SEQ ID NO: 6023843 - DNA, 25 bp, Homo sapien
atgcacactcatgcgcatacactat

SEQ ID NO: 6023844 - DNA, 25 bp, Homo sapien
caaagaaagggatgggctatgggag

SEQ ID NO: 6023845 - DNA, 25 bp, Homo sapien
gcacccatgcacactcatgcgcata

SEQ ID NO: 6023846 - DNA, 25 bp, Homo sapien
agtgaaatcctggtgcccaggaggc

SEQ ID NO: 6023847 - DNA, 25 bp, Homo sapien
ctccagccaggaagcaactgctggt

SEQ ID NO: 6023848 - DNA, 25 bp, Homo sapien
gaatcgggtggtttgggtgtggctc

SEQ ID NO: 6023849 - DNA, 25 bp, Homo sapien
ccacattctgaaggttcttcacaag

SEQ ID NO: 6023850 - DNA, 25 bp, Homo sapien
ggcgagcactgaacagttccgagtc

SEQ ID NO: 6023851 - DNA, 25 bp, Homo sapien
cgggtggtttgggtgtggctctctc

SEQ ID NO: 6023852 - DNA, 25 bp, Homo sapien
gctgtttccggctggtgtttggaaa

SEQ ID NO: 6023853 - DNA, 25 bp, Homo sapien
ttctcaagtgaaatcctggtgccca

SEQ ID NO: 6023854 - DNA, 25 bp, Homo sapien
ctaggtttaagccaagtaggaatcg

SEQ ID NO: 6023855 - DNA, 25 bp, Homo sapien
agccaagtaggaatcgggtggtttg

SEQ ID NO: 6023856 - DNA, 25 bp, Homo sapien
cacatggaacacaatgacaaagcca

SEQ ID NO: 6023857 - DNA, 25 bp, Homo sapien
aggaggcacatggaacacaatgaca

SEQ ID NO: 6023858 - DNA, 25 bp, Homo sapien
agtgaattaatttaggaacatgggc

SEQ ID NO: 6023859 - DNA, 25 bp, Homo sapien
ccaggaagcaactgctggttcttct

SEQ ID NO: 6023860 - DNA, 25 bp, Homo sapien
ttggaaacacccacaggcacccatg

SEQ ID NO: 6023861 - DNA, 25 bp, Homo sapien
gcataagcagcctccagccaggaag

SEQ ID NO: 6023862 - DNA, 25 bp, Homo sapien
agacttacacccgcggtcaagtgaa

SEQ ID NO: 6023863 - DNA, 25 bp, Homo sapien
ccatctgaagcagagtaacaggaag

SEQ ID NO: 6023864 - DNA, 25 bp, Homo sapien
actcatgcgcatacactatgcataa

SEQ ID NO: 6023865 - DNA, 25 bp, Homo sapien
taggaacatgggctacgactgagat

SEQ ID NO: 6023866 - DNA, 25 bp, Homo sapien
atcctggtgcccaggaggcacatgg

SEQ ID NO: 6023867 - DNA, 25 bp, Homo sapien
gcgcatacactatgcataagcagcc

SEQ ID NO: 6023868 - DNA, 25 bp, Homo sapien
agttacctcccccattagtattcat

SEQ ID NO: 6023869 - DNA, 25 bp, Homo sapien
catgggctacgactgagatgtcagg

SEQ ID NO: 6023870 - DNA, 25 bp, Homo sapien
tgcccgctttgacttaatccaagtc

SEQ ID NO: 6023871 - DNA, 25 bp, Homo sapien
tgagatgtcagggagagcaaagaaa

SEQ ID NO: 6023872 - DNA, 25 bp, Homo sapien
cgagtctaatgcagccctcagagtt

SEQ ID NO: 6023873 - DNA, 25 bp, Homo sapien
agcaactgctggttcttctggcctc

SEQ ID NO: 6023874 - DNA, 25 bp, Homo sapien
gagtaacaggaagtgccttctagca

SEQ ID NO: 6023875 - DNA, 25 bp, Homo sapien
cactgaacagttccgagtctaatgc

SEQ ID NO: 6023876 - DNA, 25 bp, Homo sapien
tggcctctaggtttaagccaagtag

SEQ ID NO: 6023877 - DNA, 25 bp, Homo sapien
aaagccaactacagccctgcccctg

SEQ ID NO: 6023878 - DNA, 25 bp, Homo sapien
aatgacaaagccaactacagccctg

SEQ ID NO: 6023879 - DNA, 25 bp, Homo sapien
ctcagagttacctcccccattagta

SEQ ID NO: 6023880 - DNA, 25 bp, Homo sapien
taatccaagtcgatggatatgcaac

SEQ ID NO: 6023881 - DNA, 25 bp, Homo sapien
tgcaacggcactgcttcacgcgtgt

SEQ ID NO: 6023882 - DNA, 25 bp, Homo sapien
agcatggctatgacaggctgaatgt

SEQ ID NO: 6023883 - DNA, 25 bp, Homo sapien
tgcttcacgcgtgtgacccttttct

SEQ ID NO: 6023884 - DNA, 25 bp, Homo sapien
caggaagtgccttctagcaaaggct

SEQ ID NO: 6023885 - DNA, 25 bp, Homo sapien
ttcacattttcctatcaccttttct

SEQ ID NO: 6023886 - DNA, 25 bp, Homo sapien
tttgcagatctgctcagaactagca

SEQ ID NO: 6023887 - DNA, 25 bp, Homo sapien
atccctgactttggcaagctggagg

SEQ ID NO: 6023888 - DNA, 25 bp, Homo sapien
taagctcatccaggccgctcattac

SEQ ID NO: 6023889 - DNA, 25 bp, Homo sapien
accctgccctggttggctagagcag

SEQ ID NO: 6023890 - DNA, 25 bp, Homo sapien
taggatagaactatatcccaaaact

SEQ ID NO: 6023891 - DNA, 25 bp, Homo sapien
tgccgaaagctctgtaaatgtggca

SEQ ID NO: 6023892 - DNA, 25 bp, Homo sapien
taggcagtgccgaaagctctgtaaa

SEQ ID NO: 6023893 - DNA, 25 bp, Homo sapien
tatatcccaaaactcatcatctcta

SEQ ID NO: 6023894 - DNA, 25 bp, Homo sapien
acaacgtggttatcatttacctcag

SEQ ID NO: 6023895 - DNA, 25 bp, Homo sapien
tcattactccaatttgcagatctgc

SEQ ID NO: 6023896 - DNA, 25 bp, Homo sapien
tgctaggccaaagcctgcttgttct

SEQ ID NO: 6023897 - DNA, 25 bp, Homo sapien
agaagctgcaatagcagcagacggg

SEQ ID NO: 6023898 - DNA, 25 bp, Homo sapien
gtctggaattggtgaggcctgaggt

SEQ ID NO: 6023899 - DNA, 25 bp, Homo sapien
ttgacaacgaggtacagccatccgg

SEQ ID NO: 6023900 - DNA, 25 bp, Homo sapien
atacttctgctaggccaaagcctgc

SEQ ID NO: 6023901 - DNA, 25 bp, Homo sapien
cttcctaactccccctgatcacgtt

SEQ ID NO: 6023902 - DNA, 25 bp, Homo sapien
ggcaagctggaggagggcacctata

SEQ ID NO: 6023903 - DNA, 25 bp, Homo sapien
gactttggcaagctggaggagggca

SEQ ID NO: 6023904 - DNA, 25 bp, Homo sapien
cacaagttccatggcaaagcagtgg

SEQ ID NO: 6023905 - DNA, 25 bp, Homo sapien
tgctgggcccccagaagctgcaata

SEQ ID NO: 6023906 - DNA, 25 bp, Homo sapien
gggacttcacattttcctatcacct

SEQ ID NO: 6023907 - DNA, 25 bp, Homo sapien
agcagtggagggcaagggctgctat

SEQ ID NO: 6023908 - DNA, 25 bp, Homo sapien
aattggtgaggcctgaggttagcct

SEQ ID NO: 6023909 - DNA, 25 bp, Homo sapien
ctccaatttgcagatctgctcagaa

SEQ ID NO: 6023910 - DNA, 25 bp, Homo sapien
tgtggcattggccaccccaggtgag

SEQ ID NO: 6023911 - DNA, 25 bp, Homo sapien
tcctgccaatgttccgtcttaacac

SEQ ID NO: 6023912 - DNA, 25 bp, Homo sapien
tgaggcctgaggttagcctggggac

SEQ ID NO: 6023913 - DNA, 25 bp, Homo sapien
gctgctatacggttgacaacgaggt

SEQ ID NO: 6023914 - DNA, 25 bp, Homo sapien
acgaggtacagccatccggaccgga

SEQ ID NO: 6023915 - DNA, 25 bp, Homo sapien
gagggcacctatagctgcctggcca

SEQ ID NO: 6023916 - DNA, 25 bp, Homo sapien
ccaccaatgagctaggcagtgccga

SEQ ID NO: 6023917 - DNA, 25 bp, Homo sapien
gcctggccaccaatgagctaggcag

SEQ ID NO: 6023918 - DNA, 25 bp, Homo sapien
ccctgatcacgttcctgccaatgtt

SEQ ID NO: 6023919 - DNA, 25 bp, Homo sapien
gagaggatgctgtggggcacaagtt

SEQ ID NO: 6023920 - DNA, 25 bp, Homo sapien
taacaccacgaggtctggaattggt

SEQ ID NO: 6023921 - DNA, 25 bp, Homo sapien
gacgggaggcctgcgcagcagttct

SEQ ID NO: 6023922 - DNA, 25 bp, Homo sapien
aatgttccgtcttaacaccacgagg

SEQ ID NO: 6023923 - DNA, 25 bp, Homo sapien
gcccccagaagctgcaatagcagca

SEQ ID NO: 6023924 - DNA, 25 bp, Homo sapien
ggccgctcattactccaatttgcag

SEQ ID NO: 6023925 - DNA, 25 bp, Homo sapien
ccaaagcctgcttgttctctccttt

SEQ ID NO: 6023926 - DNA, 25 bp, Homo sapien
ttttcctatcaccttttctaagctc

SEQ ID NO: 6023927 - DNA, 25 bp, Homo sapien
tgaggttagcctggggacttcacat

SEQ ID NO: 6023928 - DNA, 25 bp, Homo sapien
tggcaaagcagtggagggcaagggc

SEQ ID NO: 6023929 - DNA, 25 bp, Homo sapien
ttttctacttctaactacaccctgc

SEQ ID NO: 6023930 - DNA, 25 bp, Homo sapien
aggcctgcgcagcagttctctggca

SEQ ID NO: 6023931 - DNA, 25 bp, Homo sapien
cctgcttgttctctcctttttctac

SEQ ID NO: 6023932 - DNA, 25 bp, Homo sapien
gtgaggggggagaggatgctgtggg

SEQ ID NO: 6023933 - DNA, 25 bp, Homo sapien
tggttatcatttacctcagccgtgc

SEQ ID NO: 6023934 - DNA, 25 bp, Homo sapien
tctggcatacttctgctaggccaaa

SEQ ID NO: 6023935 - DNA, 25 bp, Homo sapien
atccaggccgctcattactccaatt

SEQ ID NO: 6023936 - DNA, 25 bp, Homo sapien
atacggttgacaacgaggtacagcc

SEQ ID NO: 6023937 - DNA, 25 bp, Homo sapien
tacttctaactacaccctgccctgg

SEQ ID NO: 6023938 - DNA, 25 bp, Homo sapien
tatcaccttttctaagctcatccag

SEQ ID NO: 6023939 - DNA, 25 bp, Homo sapien
agcagctaggatagaactatatccc

SEQ ID NO: 6023940 - DNA, 25 bp, Homo sapien
agggcttcctaactccccctgatca

SEQ ID NO: 6023941 - DNA, 25 bp, Homo sapien
cttttctaagctcatccaggccgct

SEQ ID NO: 6023942 - DNA, 25 bp, Homo sapien
tcatttacctcagccgtgctgggcc

SEQ ID NO: 6023943 - DNA, 25 bp, Homo sapien
aagctctgtaaatgtggcattggcc

SEQ ID NO: 6023944 - DNA, 25 bp, Homo sapien
acctatagctgcctggccaccaatg

SEQ ID NO: 6023945 - DNA, 25 bp, Homo sapien
ctggaggagggcacctatagctgcc

SEQ ID NO: 6023946 - DNA, 25 bp, Homo sapien
ggaccggaagacaacgtggttatca

SEQ ID NO: 6023947 - DNA, 25 bp, Homo sapien
ccctggttggctagagcagctccag

SEQ ID NO: 6023948 - DNA, 25 bp, Homo sapien
tgcaatagcagcagacgggaggcct

SEQ ID NO: 6023949 - DNA, 25 bp, Homo sapien
taactacaccctgccctggttggct

SEQ ID NO: 6023950 - DNA, 25 bp, Homo sapien
agaactatatcccaaaactcatcat

SEQ ID NO: 6023951 - DNA, 25 bp, Homo sapien
ccgtcttaacaccacgaggtctgga

SEQ ID NO: 6023952 - DNA, 25 bp, Homo sapien
gcgcagcagttctctggcatacttc

SEQ ID NO: 6023953 - DNA, 25 bp, Homo sapien
ttggctagagcagctccagggcttc

SEQ ID NO: 6023954 - DNA, 25 bp, Homo sapien
tagctgcctggccaccaatgagcta

SEQ ID NO: 6023955 - DNA, 25 bp, Homo sapien
gcagcagacgggaggcctgcgcagc

SEQ ID NO: 6023956 - DNA, 25 bp, Homo sapien
tgctcagaactagcagctaggatag

SEQ ID NO: 6023957 - DNA, 25 bp, Homo sapien
cagatctgctcagaactagcagcta

SEQ ID NO: 6023958 - DNA, 25 bp, Homo sapien
gggggagaggatgctgtggggcaca

SEQ ID NO: 6023959 - DNA, 25 bp, Homo sapien
gcaagggctgctatacggttgacaa

SEQ ID NO: 6023960 - DNA, 25 bp, Homo sapien
cacgaggtctggaattggtgaggcc

SEQ ID NO: 6023961 - DNA, 25 bp, Homo sapien
cggaagacaacgtggttatcattta

SEQ ID NO: 6023962 - DNA, 25 bp, Homo sapien
tggggcacaagttccatggcaaagc

SEQ ID NO: 6023963 - DNA, 25 bp, Homo sapien
ggagggcaagggctgctatacggtt

SEQ ID NO: 6023964 - DNA, 25 bp, Homo sapien
agagcagctccagggcttcctaact

SEQ ID NO: 6023965 - DNA, 25 bp, Homo sapien
tctcctttttctacttctaactaca

SEQ ID NO: 6023966 - DNA, 25 bp, Homo sapien
agaactagcagctaggatagaacta

SEQ ID NO: 6023967 - DNA, 25 bp, Homo sapien
aactccccctgatcacgttcctgcc

SEQ ID NO: 6023968 - DNA, 25 bp, Homo sapien
cccaggtgaggggggagaggatgct

SEQ ID NO: 6023969 - DNA, 25 bp, Homo sapien
ccaaaactcatcatctctagtgcta

SEQ ID NO: 6023970 - DNA, 25 bp, Homo sapien
cagttctctggcatacttctgctag

SEQ ID NO: 6023971 - DNA, 25 bp, Homo sapien
tgtaaatgtggcattggccacccca

SEQ ID NO: 6023972 - DNA, 25 bp, Homo sapien
tacagccatccggaccggaagacaa

SEQ ID NO: 6023973 - DNA, 25 bp, Homo sapien
tcacgttcctgccaatgttccgtct

SEQ ID NO: 6023974 - DNA, 25 bp, Homo sapien
ccatccggaccggaagacaacgtgg

SEQ ID NO: 6023975 - DNA, 25 bp, Homo sapien
atgagctaggcagtgccgaaagctc

SEQ ID NO: 6023976 - DNA, 25 bp, Homo sapien
ttccatggcaaagcagtggagggca

SEQ ID NO: 6023977 - DNA, 25 bp, Homo sapien
atgctgtggggcacaagttccatgg

SEQ ID NO: 6023978 - DNA, 25 bp, Homo sapien
agcctggggacttcacattttccta

SEQ ID NO: 6023979 - DNA, 25 bp, Homo sapien
tgttctctcctttttctacttctaa

SEQ ID NO: 6023980 - DNA, 25 bp, Homo sapien
tctgagcagatctgcaaattggagt

SEQ ID NO: 6023981 - DNA, 25 bp, Homo sapien
tggagctgctctagccaaccagggc

SEQ ID NO: 6023982 - DNA, 25 bp, Homo sapien
atgctgtggggcttggggtgagagg

SEQ ID NO: 6023983 - DNA, 25 bp, Homo sapien
ttagcaggctgcccctgctaggagc

SEQ ID NO: 6023984 - DNA, 25 bp, Homo sapien
gggagttaggaagccctggagctgc

SEQ ID NO: 6023985 - DNA, 25 bp, Homo sapien
ccagacctcgtggtgttaagacgga

SEQ ID NO: 6023986 - DNA, 25 bp, Homo sapien
cctcaggcctcaccaattccagacc

SEQ ID NO: 6023987 - DNA, 25 bp, Homo sapien
gcaatgctgttagcagcaactagca

SEQ ID NO: 6023988 - DNA, 25 bp, Homo sapien
agagagcatctaaaaacaggaaagc

SEQ ID NO: 6023989 - DNA, 25 bp, Homo sapien
tgagttttgggatatagttctatcc

SEQ ID NO: 6023990 - DNA, 25 bp, Homo sapien
tacctcctttccagatcctgtactg

SEQ ID NO: 6023991 - DNA, 25 bp, Homo sapien
gcagcaactagcactagagatgatg

SEQ ID NO: 6023992 - DNA, 25 bp, Homo sapien
cggcctggatgagcttagaaaaggt

SEQ ID NO: 6023993 - DNA, 25 bp, Homo sapien
ccatatctcatcagagagcatctaa

SEQ ID NO: 6023994 - DNA, 25 bp, Homo sapien
gggcttggggtgagaggagagaaag

SEQ ID NO: 6023995 - DNA, 25 bp, Homo sapien
tggatgagcttagaaaaggtgatag

SEQ ID NO: 6023996 - DNA, 25 bp, Homo sapien
tgatttccatatctcatcagagagc

SEQ ID NO: 6023997 - DNA, 25 bp, Homo sapien
gagggatgatttccatatctcatca

SEQ ID NO: 6023998 - DNA, 25 bp, Homo sapien
gctagttctgagcagatctgcaaat

SEQ ID NO: 6023999 - DNA, 25 bp, Homo sapien
ggaaaatgtgaagtccccaggctaa

SEQ ID NO: 6024000 - DNA, 25 bp, Homo sapien
actagagatgatgagttttgggata

SEQ ID NO: 6024001 - DNA, 25 bp, Homo sapien
taagtgtctcaagaggcaggcacat

SEQ ID NO: 6024002 - DNA, 25 bp, Homo sapien
aatgagcggcctggatgagcttaga

SEQ ID NO: 6024003 - DNA, 25 bp, Homo sapien
gcccacctggatggcctccacaagc

SEQ ID NO: 6024004 - DNA, 25 bp, Homo sapien
atggcccgtggtacctcctttccag

SEQ ID NO: 6024005 - DNA, 25 bp, Homo sapien
gtgataggaaaatgtgaagtcccca

SEQ ID NO: 6024006 - DNA, 25 bp, Homo sapien
tttagcctgcccagccatggcccgt

SEQ ID NO: 6024007 - DNA, 25 bp, Homo sapien
gagagaaaggcccagtgagggatga

SEQ ID NO: 6024008 - DNA, 25 bp, Homo sapien
cacaagctctttacctccatggcta

SEQ ID NO: 6024009 - DNA, 25 bp, Homo sapien
aggctaacctcaggcctcaccaatt

SEQ ID NO: 6024010 - DNA, 25 bp, Homo sapien
cgtggtacctcctttccagatcctg

SEQ ID NO: 6024011 - DNA, 25 bp, Homo sapien
aacattggcaggaacgtgatcaggg

SEQ ID NO: 6024012 - DNA, 25 bp, Homo sapien
aagacattgttgttgccctgttagc

SEQ ID NO: 6024013 - DNA, 25 bp, Homo sapien
cagatctgcaaattggagtaatgag

SEQ ID NO: 6024014 - DNA, 25 bp, Homo sapien
cccagtgcccacctggatggcctcc

SEQ ID NO: 6024015 - DNA, 25 bp, Homo sapien
ttgccctgttagcaggctgcccctg

SEQ ID NO: 6024016 - DNA, 25 bp, Homo sapien
gtgttaagacggaacattggcagga

SEQ ID NO: 6024017 - DNA, 25 bp, Homo sapien
gcctcaccaattccagacctcgtgg

SEQ ID NO: 6024018 - DNA, 25 bp, Homo sapien
ttggggtgagaggagagaaaggccc

SEQ ID NO: 6024019 - DNA, 25 bp, Homo sapien
aagccctggagctgctctagccaac

SEQ ID NO: 6024020 - DNA, 25 bp, Homo sapien
gttaggaagccctggagctgctcta

SEQ ID NO: 6024021 - DNA, 25 bp, Homo sapien
ttggagtaatgagcggcctggatga

SEQ ID NO: 6024022 - DNA, 25 bp, Homo sapien
tgctctagccaaccagggcagggtg

SEQ ID NO: 6024023 - DNA, 25 bp, Homo sapien
acctccatggctagaactctcaaag

SEQ ID NO: 6024024 - DNA, 25 bp, Homo sapien
gtaggtcaggttaagacattgttgt

SEQ ID NO: 6024025 - DNA, 25 bp, Homo sapien
ctctttacctccatggctagaactc

SEQ ID NO: 6024026 - DNA, 25 bp, Homo sapien
aggagggggagtaagtgtctcaaga

SEQ ID NO: 6024027 - DNA, 25 bp, Homo sapien
gtccccaggctaacctcaggcctca

SEQ ID NO: 6024028 - DNA, 25 bp, Homo sapien
ttgttgttgccctgttagcaggctg

SEQ ID NO: 6024029 - DNA, 25 bp, Homo sapien
gatgatgagttttgggatatagttc

SEQ ID NO: 6024030 - DNA, 25 bp, Homo sapien
ctagctgctagttctgagcagatct

SEQ ID NO: 6024031 - DNA, 25 bp, Homo sapien
actagcactagagatgatgagtttt

SEQ ID NO: 6024032 - DNA, 25 bp, Homo sapien
gaaaaggtgataggaaaatgtgaag

SEQ ID NO: 6024033 - DNA, 25 bp, Homo sapien
ttctagcccagccccagtgcccacc

SEQ ID NO: 6024034 - DNA, 25 bp, Homo sapien
agcttagaaaaggtgataggaaaat

SEQ ID NO: 6024035 - DNA, 25 bp, Homo sapien
cagaggaggagggggagtaagtgtc

SEQ ID NO: 6024036 - DNA, 25 bp, Homo sapien
tccagacccccttctagcccagccc

SEQ ID NO: 6024037 - DNA, 25 bp, Homo sapien
cccagccccagtgcccacctggatg

SEQ ID NO: 6024038 - DNA, 25 bp, Homo sapien
aaaggcccagtgagggatgatttcc

SEQ ID NO: 6024039 - DNA, 25 bp, Homo sapien
ctgttagcagcaactagcactagag

SEQ ID NO: 6024040 - DNA, 25 bp, Homo sapien
ggcctccacaagctctttacctcca

SEQ ID NO: 6024041 - DNA, 25 bp, Homo sapien
catctaaaaacaggaaagcttttag

SEQ ID NO: 6024042 - DNA, 25 bp, Homo sapien
ttgggatatagttctatcctagctg

SEQ ID NO: 6024043 - DNA, 25 bp, Homo sapien
gggagtaagtgtctcaagaggcagg

SEQ ID NO: 6024044 - DNA, 25 bp, Homo sapien
caggttaagacattgttgttgccct

SEQ ID NO: 6024045 - DNA, 25 bp, Homo sapien
ctcgtggtgttaagacggaacattg

SEQ ID NO: 6024046 - DNA, 25 bp, Homo sapien
cgtgatcagggggagttaggaagcc

SEQ ID NO: 6024047 - DNA, 25 bp, Homo sapien
ctcatcagagagcatctaaaaacag

SEQ ID NO: 6024048 - DNA, 25 bp, Homo sapien
ggctgcccctgctaggagcacaggc

SEQ ID NO: 6024049 - DNA, 25 bp, Homo sapien
tgagaggagagaaaggcccagtgag

SEQ ID NO: 6024050 - DNA, 25 bp, Homo sapien
tctatcctagctgctagttctgagc

SEQ ID NO: 6024051 - DNA, 25 bp, Homo sapien
ctcaaagtaggtcaggttaagacat

SEQ ID NO: 6024052 - DNA, 25 bp, Homo sapien
tgcaaattggagtaatgagcggcct

SEQ ID NO: 6024053 - DNA, 25 bp, Homo sapien
agatcctgtactggccactccagac

SEQ ID NO: 6024054 - DNA, 25 bp, Homo sapien
cccagtgagggatgatttccatatc

SEQ ID NO: 6024055 - DNA, 25 bp, Homo sapien
aaagcttttagcctgcccagccatg

SEQ ID NO: 6024056 - DNA, 25 bp, Homo sapien
gcacaggcaatgctgttagcagcaa

SEQ ID NO: 6024057 - DNA, 25 bp, Homo sapien
agccatggcccgtggtacctccttt

SEQ ID NO: 6024058 - DNA, 25 bp, Homo sapien
taggagcacaggcaatgctgttagc

SEQ ID NO: 6024059 - DNA, 25 bp, Homo sapien
agaactctcaaagtaggtcaggtta

SEQ ID NO: 6024060 - DNA, 25 bp, Homo sapien
tatagttctatcctagctgctagtt

SEQ ID NO: 6024061 - DNA, 25 bp, Homo sapien
ccccttctagcccagccccagtgcc

SEQ ID NO: 6024062 - DNA, 25 bp, Homo sapien
ctggatggcctccacaagctcttta

SEQ ID NO: 6024063 - DNA, 25 bp, Homo sapien
tctcaagaggcaggcacatgctgtg

SEQ ID NO: 6024064 - DNA, 25 bp, Homo sapien
tgtgaagtccccaggctaacctcag

SEQ ID NO: 6024065 - DNA, 25 bp, Homo sapien
ctttccagatcctgtactggccact

SEQ ID NO: 6024066 - DNA, 25 bp, Homo sapien
agacggaacattggcaggaacgtga

SEQ ID NO: 6024067 - DNA, 25 bp, Homo sapien
ccctgctaggagcacaggcaatgct

SEQ ID NO: 6024068 - DNA, 25 bp, Homo sapien
atggctagaactctcaaagtaggtc

SEQ ID NO: 6024069 - DNA, 25 bp, Homo sapien
aacaggaaagcttttagcctgccca

SEQ ID NO: 6024070 - DNA, 25 bp, Homo sapien
ctgcccagccatggcccgtggtacc

SEQ ID NO: 6024071 - DNA, 25 bp, Homo sapien
ccaattccagacctcgtggtgttaa

SEQ ID NO: 6024072 - DNA, 25 bp, Homo sapien
tcagggggagttaggaagccctgga

SEQ ID NO: 6024073 - DNA, 25 bp, Homo sapien
gggccagctacttggaattaggtga

SEQ ID NO: 6024074 - DNA, 25 bp, Homo sapien
ctcaagttttggtgccccagccctg

SEQ ID NO: 6024075 - DNA, 25 bp, Homo sapien
gctacttggaattaggtgaactacc

SEQ ID NO: 6024076 - DNA, 25 bp, Homo sapien
ggatttcagatcttttgtgtttttc

SEQ ID NO: 6024077 - DNA, 25 bp, Homo sapien
tatccctgggacatcctgtcagttt

SEQ ID NO: 6024078 - DNA, 25 bp, Homo sapien
tgtttttctttcactgtttgaattc

SEQ ID NO: 6024079 - DNA, 25 bp, Homo sapien
gaaactggagaaattgttctcataa

SEQ ID NO: 6024080 - DNA, 25 bp, Homo sapien
taaactgagccagatgtgatgagcc

SEQ ID NO: 6024081 - DNA, 25 bp, Homo sapien
caccttagaggctggctcctcaagt

SEQ ID NO: 6024082 - DNA, 25 bp, Homo sapien
gaatggctccacagctcctatccct

SEQ ID NO: 6024083 - DNA, 25 bp, Homo sapien
gactgggagagggagctatgttgtt

SEQ ID NO: 6024084 - DNA, 25 bp, Homo sapien
taaatccctgtgtttcgtgcccatg

SEQ ID NO: 6024085 - DNA, 25 bp, Homo sapien
ttgaattctgtctgttgtttgttcc

SEQ ID NO: 6024086 - DNA, 25 bp, Homo sapien
agccctgaagcagggccagctactt

SEQ ID NO: 6024087 - DNA, 25 bp, Homo sapien
cactgtttgaattctgtctgttgtt

SEQ ID NO: 6024088 - DNA, 25 bp, Homo sapien
ccaccacaagcggacatctgtcatg

SEQ ID NO: 6024089 - DNA, 25 bp, Homo sapien
gcagaccaccagcagcagtgacttt

SEQ ID NO: 6024090 - DNA, 25 bp, Homo sapien
aatgtattcgttcccaccagcaggg

SEQ ID NO: 6024091 - DNA, 25 bp, Homo sapien
gttctctttgaagaaactggagaaa

SEQ ID NO: 6024092 - DNA, 25 bp, Homo sapien
cattcagctcaaaaagcgattggtg

SEQ ID NO: 6024093 - DNA, 25 bp, Homo sapien
tggctttcctctgctttttaaatcc

SEQ ID NO: 6024094 - DNA, 25 bp, Homo sapien
attgttctcataaatgtattcgttc

SEQ ID NO: 6024095 - DNA, 25 bp, Homo sapien
agcagggactgggagagggagctat

SEQ ID NO: 6024096 - DNA, 25 bp, Homo sapien
cctgtgtttcgtgcccatgggattc

SEQ ID NO: 6024097 - DNA, 25 bp, Homo sapien
ttcctctgctttttaaatccctgtg

SEQ ID NO: 6024098 - DNA, 25 bp, Homo sapien
tcagatcttttgtgtttttctcctc

SEQ ID NO: 6024099 - DNA, 25 bp, Homo sapien
ttgttccattcccatagttctctct

SEQ ID NO: 6024100 - DNA, 25 bp, Homo sapien
ctccacagctcctatccctgggaca

SEQ ID NO: 6024101 - DNA, 25 bp, Homo sapien
aacccccattcagctcaaaaagcga

SEQ ID NO: 6024102 - DNA, 25 bp, Homo sapien
ctgctttttaaatccctgtgtttcg

SEQ ID NO: 6024103 - DNA, 25 bp, Homo sapien
cctcattatggtgcccccaccacag

SEQ ID NO: 6024104 - DNA, 25 bp, Homo sapien
ggtgaactacccccacgtggcagac

SEQ ID NO: 6024105 - DNA, 25 bp, Homo sapien
ttttggtgccccagccctgaagcag

SEQ ID NO: 6024106 - DNA, 25 bp, Homo sapien
ctcataaatgtattcgttcccacca

SEQ ID NO: 6024107 - DNA, 25 bp, Homo sapien
gaagcagggccagctacttggaatt

SEQ ID NO: 6024108 - DNA, 25 bp, Homo sapien
cttttgtgtttttctcctctggttg

SEQ ID NO: 6024109 - DNA, 25 bp, Homo sapien
ctacccccacgtggcagaccaccag

SEQ ID NO: 6024110 - DNA, 25 bp, Homo sapien
ttaaagaaaagtcctcattatggtg

SEQ ID NO: 6024111 - DNA, 25 bp, Homo sapien
tggttataaactgagccagatgtga

SEQ ID NO: 6024112 - DNA, 25 bp, Homo sapien
cagcagtgactttgacttctggtct

SEQ ID NO: 6024113 - DNA, 25 bp, Homo sapien
tgttgttaaaacgaatcagtgaact

SEQ ID NO: 6024114 - DNA, 25 bp, Homo sapien
gagagggagctatgttgttaaaacg

SEQ ID NO: 6024115 - DNA, 25 bp, Homo sapien
tgacttctggtcttaaagcaacccc

SEQ ID NO: 6024116 - DNA, 25 bp, Homo sapien
gacatctgtcatgcccagcaccagg

SEQ ID NO: 6024117 - DNA, 25 bp, Homo sapien
tttgaagaaactggagaaattgttc

SEQ ID NO: 6024118 - DNA, 25 bp, Homo sapien
gctcaaaaagcgattggtggatttc

SEQ ID NO: 6024119 - DNA, 25 bp, Homo sapien
accagcctttgtgaatggctccaca

SEQ ID NO: 6024120 - DNA, 25 bp, Homo sapien
tctgtctgttgtttgttccattccc

SEQ ID NO: 6024121 - DNA, 25 bp, Homo sapien
agtgaacttaaagaaaagtcctcat

SEQ ID NO: 6024122 - DNA, 25 bp, Homo sapien
aaagcgattggtggatttcagatct

SEQ ID NO: 6024123 - DNA, 25 bp, Homo sapien
gagctatgttgttaaaacgaatcag

SEQ ID NO: 6024124 - DNA, 25 bp, Homo sapien
tatggtgcccccaccacagaatggc

SEQ ID NO: 6024125 - DNA, 25 bp, Homo sapien
aaaagtcctcattatggtgccccca

SEQ ID NO: 6024126 - DNA, 25 bp, Homo sapien
gatgtgatgagccaccacaagcgga

SEQ ID NO: 6024127 - DNA, 25 bp, Homo sapien
gaatggcaccttagaggctggctcc

SEQ ID NO: 6024128 - DNA, 25 bp, Homo sapien
tggtcttaaagcaacccccattcag

SEQ ID NO: 6024129 - DNA, 25 bp, Homo sapien
attggtggatttcagatcttttgtg

SEQ ID NO: 6024130 - DNA, 25 bp, Homo sapien
ggagaaattgttctcataaatgtat

SEQ ID NO: 6024131 - DNA, 25 bp, Homo sapien
cccaccagcagggactgggagaggg

SEQ ID NO: 6024132 - DNA, 25 bp, Homo sapien
tgactttgacttctggtcttaaagc

SEQ ID NO: 6024133 - DNA, 25 bp, Homo sapien
caagcggacatctgtcatgcccagc

SEQ ID NO: 6024134 - DNA, 25 bp, Homo sapien
gcccccaccacagaatggcacctta

SEQ ID NO: 6024135 - DNA, 25 bp, Homo sapien
taaagcaacccccattcagctcaaa

SEQ ID NO: 6024136 - DNA, 25 bp, Homo sapien
tggctcctcaagttttggtgcccca

SEQ ID NO: 6024137 - DNA, 25 bp, Homo sapien
caccaggttctctttgaagaaactg

SEQ ID NO: 6024138 - DNA, 25 bp, Homo sapien
tgggacatcctgtcagtttggttat

SEQ ID NO: 6024139 - DNA, 25 bp, Homo sapien
tgttgtttgttccattcccatagtt

SEQ ID NO: 6024140 - DNA, 25 bp, Homo sapien
atcctgtcagtttggttataaactg

SEQ ID NO: 6024141 - DNA, 25 bp, Homo sapien
tctttcactgtttgaattctgtctg

SEQ ID NO: 6024142 - DNA, 25 bp, Homo sapien
ttcgttcccaccagcagggactggg

SEQ ID NO: 6024143 - DNA, 25 bp, Homo sapien
cttatcaccagcctttgtgaatggc

SEQ ID NO: 6024144 - DNA, 25 bp, Homo sapien
gggattcttatcaccagcctttgtg

SEQ ID NO: 6024145 - DNA, 25 bp, Homo sapien
cattcccatagttctctctgcattt

SEQ ID NO: 6024146 - DNA, 25 bp, Homo sapien
gatgagccaccacaagcggacatct

SEQ ID NO: 6024147 - DNA, 25 bp, Homo sapien
tgtcatgcccagcaccaggttctct

SEQ ID NO: 6024148 - DNA, 25 bp, Homo sapien
caccagcagcagtgactttgacttc

SEQ ID NO: 6024149 - DNA, 25 bp, Homo sapien
tttcgtgcccatgggattcttatca

SEQ ID NO: 6024150 - DNA, 25 bp, Homo sapien
agctcctatccctgggacatcctgt

SEQ ID NO: 6024151 - DNA, 25 bp, Homo sapien
gcccatgggattcttatcaccagcc

SEQ ID NO: 6024152 - DNA, 25 bp, Homo sapien
accacagaatggcaccttagaggct

SEQ ID NO: 6024153 - DNA, 25 bp, Homo sapien
catagttctctctgcatttcctttt

SEQ ID NO: 6024154 - DNA, 25 bp, Homo sapien
tcagtttggttataaactgagccag

SEQ ID NO: 6024155 - DNA, 25 bp, Homo sapien
tgccccagccctgaagcagggccag

SEQ ID NO: 6024156 - DNA, 25 bp, Homo sapien
taaaacgaatcagtgaacttaaaga

SEQ ID NO: 6024157 - DNA, 25 bp, Homo sapien
ctttgtgaatggctccacagctcct

SEQ ID NO: 6024158 - DNA, 25 bp, Homo sapien
gagccagatgtgatgagccaccaca

SEQ ID NO: 6024159 - DNA, 25 bp, Homo sapien
cacgtggcagaccaccagcagcagt

SEQ ID NO: 6024160 - DNA, 25 bp, Homo sapien
agaggctggctcctcaagttttggt

SEQ ID NO: 6024161 - DNA, 25 bp, Homo sapien
gcccagcaccaggttctctttgaag

SEQ ID NO: 6024162 - DNA, 25 bp, Homo sapien
cgaatcagtgaacttaaagaaaagt

SEQ ID NO: 6024163 - DNA, 25 bp, Homo sapien
tgctttaagaccagaagtcaaagtc

SEQ ID NO: 6024164 - DNA, 25 bp, Homo sapien
gggttgctttaagaccagaagtcaa

SEQ ID NO: 6024165 - DNA, 25 bp, Homo sapien
tttatctttgtaaacaacgtacatg

SEQ ID NO: 6024166 - DNA, 25 bp, Homo sapien
tcacagcacaaaaaaaatactttaa

SEQ ID NO: 6024167 - DNA, 25 bp, Homo sapien
aaatgtttaaaaaggaaatgcagag

SEQ ID NO: 6024168 - DNA, 25 bp, Homo sapien
gggctggggcaccaaaacttgagga

SEQ ID NO: 6024169 - DNA, 25 bp, Homo sapien
ctttttgagctgaatgggggttgct

SEQ ID NO: 6024170 - DNA, 25 bp, Homo sapien
caaagtcactgctgctggtggtctg

SEQ ID NO: 6024171 - DNA, 25 bp, Homo sapien
tgcagagagaactatgggaatggaa

SEQ ID NO: 6024172 - DNA, 25 bp, Homo sapien
ctggtacagagtggcgtaacaaaac

SEQ ID NO: 6024173 - DNA, 25 bp, Homo sapien
ttaaaaaggaaatgcagagagaact

SEQ ID NO: 6024174 - DNA, 25 bp, Homo sapien
tggtctgccacgtgggggtagttca

SEQ ID NO: 6024175 - DNA, 25 bp, Homo sapien
tgcttcagggctggggcaccaaaac

SEQ ID NO: 6024176 - DNA, 25 bp, Homo sapien
aaacaacgtacatgaaccagatgta

SEQ ID NO: 6024177 - DNA, 25 bp, Homo sapien
aaaaaatacgcaattgcccagcaaa

SEQ ID NO: 6024178 - DNA, 25 bp, Homo sapien
taccaaatattaatccaaaatatat

SEQ ID NO: 6024179 - DNA, 25 bp, Homo sapien
tacgcaattgcccagcaaatgcaaa

SEQ ID NO: 6024180 - DNA, 25 bp, Homo sapien
caatcctggtacagagtggcgtaac

SEQ ID NO: 6024181 - DNA, 25 bp, Homo sapien
acagacacacgtcatggtctttggc

SEQ ID NO: 6024182 - DNA, 25 bp, Homo sapien
aacagacagaattcaaacagtgaaa

SEQ ID NO: 6024183 - DNA, 25 bp, Homo sapien
catggtctttggcagaaaacgttca

SEQ ID NO: 6024184 - DNA, 25 bp, Homo sapien
atccaccaatcgctttttgagctga

SEQ ID NO: 6024185 - DNA, 25 bp, Homo sapien
tgccacgtgggggtagttcacctaa

SEQ ID NO: 6024186 - DNA, 25 bp, Homo sapien
tgtttacactttaaatattcatgat

SEQ ID NO: 6024187 - DNA, 25 bp, Homo sapien
agtagctggccctgcttcagggctg

SEQ ID NO: 6024188 - DNA, 25 bp, Homo sapien
acacgtcatggtctttggcagaaaa

SEQ ID NO: 6024189 - DNA, 25 bp, Homo sapien
attccaagtagctggccctgcttca

SEQ ID NO: 6024190 - DNA, 25 bp, Homo sapien
cagagtggcgtaacaaaacagccat

SEQ ID NO: 6024191 - DNA, 25 bp, Homo sapien
aggaaatgcagagagaactatggga

SEQ ID NO: 6024192 - DNA, 25 bp, Homo sapien
tgaaccagatgtatttctcagcttt

SEQ ID NO: 6024193 - DNA, 25 bp, Homo sapien
aatggaacaaacaacagacagaatt

SEQ ID NO: 6024194 - DNA, 25 bp, Homo sapien
acgttcacagcacaaaaaaaatact

SEQ ID NO: 6024195 - DNA, 25 bp, Homo sapien
ctttcacaatatttttttgccttct

SEQ ID NO: 6024196 - DNA, 25 bp, Homo sapien
ggcgtaacaaaacagccatgtttac

SEQ ID NO: 6024197 - DNA, 25 bp, Homo sapien
accagaggagaaaaacacaaaagat

SEQ ID NO: 6024198 - DNA, 25 bp, Homo sapien
agctgaatgggggttgctttaagac

SEQ ID NO: 6024199 - DNA, 25 bp, Homo sapien
aaacacacagacacacgtcatggtc

SEQ ID NO: 6024200 - DNA, 25 bp, Homo sapien
tcaaacagtgaaagaaaaacaaaca

SEQ ID NO: 6024201 - DNA, 25 bp, Homo sapien
ccagcaaatgcaaatgtttaaaaag

SEQ ID NO: 6024202 - DNA, 25 bp, Homo sapien
tgctggtggtctgccacgtgggggt

SEQ ID NO: 6024203 - DNA, 25 bp, Homo sapien
acaaacaacagacagaattcaaaca

SEQ ID NO: 6024204 - DNA, 25 bp, Homo sapien
cagccatgtttacactttaaatatt

SEQ ID NO: 6024205 - DNA, 25 bp, Homo sapien
ggagaaaaacacaaaagatctgaaa

SEQ ID NO: 6024206 - DNA, 25 bp, Homo sapien
tggccctgcttcagggctggggcac

SEQ ID NO: 6024207 - DNA, 25 bp, Homo sapien
tcatgataacttaaacacacagaca

SEQ ID NO: 6024208 - DNA, 25 bp, Homo sapien
aaatattcatgataacttaaacaca

SEQ ID NO: 6024209 - DNA, 25 bp, Homo sapien
tctgaaatccaccaatcgctttttg

SEQ ID NO: 6024210 - DNA, 25 bp, Homo sapien
cagaattcaaacagtgaaagaaaaa

SEQ ID NO: 6024211 - DNA, 25 bp, Homo sapien
agatgtatttctcagctttacatag

SEQ ID NO: 6024212 - DNA, 25 bp, Homo sapien
gtagttcacctaattccaagtagct

SEQ ID NO: 6024213 - DNA, 25 bp, Homo sapien
attaatccaaaatatattaagttgt

SEQ ID NO: 6024214 - DNA, 25 bp, Homo sapien
gaatgggggttgctttaagaccaga

SEQ ID NO: 6024215 - DNA, 25 bp, Homo sapien
acaaaacagccatgtttacacttta

SEQ ID NO: 6024216 - DNA, 25 bp, Homo sapien
aagaccagaagtcaaagtcactgct

SEQ ID NO: 6024217 - DNA, 25 bp, Homo sapien
aatgcaaatgtttaaaaaggaaatg

SEQ ID NO: 6024218 - DNA, 25 bp, Homo sapien
agaagtcaaagtcactgctgctggt

SEQ ID NO: 6024219 - DNA, 25 bp, Homo sapien
cactttaaatattcatgataactta

SEQ ID NO: 6024220 - DNA, 25 bp, Homo sapien
gagaactatgggaatggaacaaaca

SEQ ID NO: 6024221 - DNA, 25 bp, Homo sapien
attaaaaaaatacgcaattgcccag

SEQ ID NO: 6024222 - DNA, 25 bp, Homo sapien
cagaaaacgttcacagcacaaaaaa

SEQ ID NO: 6024223 - DNA, 25 bp, Homo sapien
aattgcccagcaaatgcaaatgttt

SEQ ID NO: 6024224 - DNA, 25 bp, Homo sapien
tatgggaatggaacaaacaacagac

SEQ ID NO: 6024225 - DNA, 25 bp, Homo sapien
ctttggcagaaaacgttcacagcac

SEQ ID NO: 6024226 - DNA, 25 bp, Homo sapien
ctttgtaaacaacgtacatgaacca

SEQ ID NO: 6024227 - DNA, 25 bp, Homo sapien
aaaagatctgaaatccaccaatcgc

SEQ ID NO: 6024228 - DNA, 25 bp, Homo sapien
cgtacatgaaccagatgtatttctc

SEQ ID NO: 6024229 - DNA, 25 bp, Homo sapien
cacctaattccaagtagctggccct

SEQ ID NO: 6024230 - DNA, 25 bp, Homo sapien
gggcaccaaaacttgaggagccagc

SEQ ID NO: 6024231 - DNA, 25 bp, Homo sapien
atttctcagctttacataggggaaa

SEQ ID NO: 6024232 - DNA, 25 bp, Homo sapien
cagctttacataggggaaagggaat

SEQ ID NO: 6024233 - DNA, 25 bp, Homo sapien
taacttaaacacacagacacacgtc

SEQ ID NO: 6024234 - DNA, 25 bp, Homo sapien
aaacacaaaagatctgaaatccacc

SEQ ID NO: 6024235 - DNA, 25 bp, Homo sapien
cactgctgctggtggtctgccacgt

SEQ ID NO: 6024236 - DNA, 25 bp, Homo sapien
tctgcccatgggtgtgtttgttcct

SEQ ID NO: 6024237 - DNA, 25 bp, Homo sapien
tcaagacactaggaacaggaaaggg

SEQ ID NO: 6024238 - DNA, 25 bp, Homo sapien
ccaggcctcgcaaaaacacaaaaca

SEQ ID NO: 6024239 - DNA, 25 bp, Homo sapien
taccctaggagcttcggttgcaagt

SEQ ID NO: 6024240 - DNA, 25 bp, Homo sapien
taggaaaagttctggaatacgatgc

SEQ ID NO: 6024241 - DNA, 25 bp, Homo sapien
aacaggaaaggggccagctctgccc

SEQ ID NO: 6024242 - DNA, 25 bp, Homo sapien
tttgattggaattccagggaaatga

SEQ ID NO: 6024243 - DNA, 25 bp, Homo sapien
ctacgctttggctagttagtggcct

SEQ ID NO: 6024244 - DNA, 25 bp, Homo sapien
tttggctagttagtggcctctcctt

SEQ ID NO: 6024245 - DNA, 25 bp, Homo sapien
ctcgcaaaaacacaaaacaagacgg

SEQ ID NO: 6024246 - DNA, 25 bp, Homo sapien
catgggtgtgtttgttccttgttac

SEQ ID NO: 6024247 - DNA, 25 bp, Homo sapien
aggaacgaacaccccctgcttctag

SEQ ID NO: 6024248 - DNA, 25 bp, Homo sapien
aaaatcccctgccaggagactagtg

SEQ ID NO: 6024249 - DNA, 25 bp, Homo sapien
tggaattccagggaaatgaaagtgg

SEQ ID NO: 6024250 - DNA, 25 bp, Homo sapien
agctcatagcgagcctcccttaccc

SEQ ID NO: 6024251 - DNA, 25 bp, Homo sapien
gttatctcacctgaatctggtgtac

SEQ ID NO: 6024252 - DNA, 25 bp, Homo sapien
aacacaaaacaagacgggactgtat

SEQ ID NO: 6024253 - DNA, 25 bp, Homo sapien
acagaccctgcccaggttggactgt

SEQ ID NO: 6024254 - DNA, 25 bp, Homo sapien
tgtgtttgttccttgttactatgtt

SEQ ID NO: 6024255 - DNA, 25 bp, Homo sapien
tgaccgtcttggtggctgagtgact

SEQ ID NO: 6024256 - DNA, 25 bp, Homo sapien
cttcttgggctctcaagacactagg

SEQ ID NO: 6024257 - DNA, 25 bp, Homo sapien
gctgtgtaggaaaagttctggaata

SEQ ID NO: 6024258 - DNA, 25 bp, Homo sapien
aagccggcctcaagctcatagcgag

SEQ ID NO: 6024259 - DNA, 25 bp, Homo sapien
gctttttgggatacggtctcactct

SEQ ID NO: 6024260 - DNA, 25 bp, Homo sapien
cttggtggctgagtgactgttatct

SEQ ID NO: 6024261 - DNA, 25 bp, Homo sapien
aaacaagacgggactgtatttgatt

SEQ ID NO: 6024262 - DNA, 25 bp, Homo sapien
gcctcaagctcatagcgagcctccc

SEQ ID NO: 6024263 - DNA, 25 bp, Homo sapien
actgccaaaatcccctgccaggaga

SEQ ID NO: 6024264 - DNA, 25 bp, Homo sapien
tctgggccaggcctcgcaaaaacac

SEQ ID NO: 6024265 - DNA, 25 bp, Homo sapien
ccctgcttctagcttcttgggctct

SEQ ID NO: 6024266 - DNA, 25 bp, Homo sapien
gggctctcaagacactaggaacagg

SEQ ID NO: 6024267 - DNA, 25 bp, Homo sapien
tctccttgggctctgggccaggcct

SEQ ID NO: 6024268 - DNA, 25 bp, Homo sapien
tcccaggacaggatggggcacagaa

SEQ ID NO: 6024269 - DNA, 25 bp, Homo sapien
actaggaacaggaaaggggccagct

SEQ ID NO: 6024270 - DNA, 25 bp, Homo sapien
tgttactatgttttaaacctgaata

SEQ ID NO: 6024271 - DNA, 25 bp, Homo sapien
aaaggggccagctctgcccatgggt

SEQ ID NO: 6024272 - DNA, 25 bp, Homo sapien
gacgggactgtatttgattggaatt

SEQ ID NO: 6024273 - DNA, 25 bp, Homo sapien
acctgaatagagcactgccaaaatc

SEQ ID NO: 6024274 - DNA, 25 bp, Homo sapien
tggcggggcagccaccaccagtgtt

SEQ ID NO: 6024275 - DNA, 25 bp, Homo sapien
tttggctttttgggatacggtctca

SEQ ID NO: 6024276 - DNA, 25 bp, Homo sapien
ggagggctgtgtaggaaaagttctg

SEQ ID NO: 6024277 - DNA, 25 bp, Homo sapien
gctgaaggagggctgtgtaggaaaa

SEQ ID NO: 6024278 - DNA, 25 bp, Homo sapien
acgatgcttaaatgatacattattc

SEQ ID NO: 6024279 - DNA, 25 bp, Homo sapien
tgggctctgggccaggcctcgcaaa

SEQ ID NO: 6024280 - DNA, 25 bp, Homo sapien
ttagtggctgaaggagggctgtgta

SEQ ID NO: 6024281 - DNA, 25 bp, Homo sapien
gactagtgaccgtcttggtggctga

SEQ ID NO: 6024282 - DNA, 25 bp, Homo sapien
atagagcactgccaaaatcccctgc

SEQ ID NO: 6024283 - DNA, 25 bp, Homo sapien
aggttggactgtggcggggcagcca

SEQ ID NO: 6024284 - DNA, 25 bp, Homo sapien
tcacctgaatctggtgtacagaccc

SEQ ID NO: 6024285 - DNA, 25 bp, Homo sapien
tggaatacgatgcttaaatgataca

SEQ ID NO: 6024286 - DNA, 25 bp, Homo sapien
acaggatggggcacagaaggaacga

SEQ ID NO: 6024287 - DNA, 25 bp, Homo sapien
cccacctccatagctgttagtggct

SEQ ID NO: 6024288 - DNA, 25 bp, Homo sapien
tcactctagcccaagccggcctcaa

SEQ ID NO: 6024289 - DNA, 25 bp, Homo sapien
tattccccggggtgtgagctacgct

SEQ ID NO: 6024290 - DNA, 25 bp, Homo sapien
gccaccaccagtgtttgtcccggaa

SEQ ID NO: 6024291 - DNA, 25 bp, Homo sapien
tagcgagcctcccttaccctaggag

SEQ ID NO: 6024292 - DNA, 25 bp, Homo sapien
cttaaatgatacattattccccggg

SEQ ID NO: 6024293 - DNA, 25 bp, Homo sapien
ggtgtacagaccctgcccaggttgg

SEQ ID NO: 6024294 - DNA, 25 bp, Homo sapien
gactgtggcggggcagccaccacca

SEQ ID NO: 6024295 - DNA, 25 bp, Homo sapien
ccggggtgtgagctacgctttggct

SEQ ID NO: 6024296 - DNA, 25 bp, Homo sapien
ggctgagtgactgttatctcacctg

SEQ ID NO: 6024297 - DNA, 25 bp, Homo sapien
gtggcctctccttgggctctgggcc

SEQ ID NO: 6024298 - DNA, 25 bp, Homo sapien
tggggcacagaaggaacgaacaccc

SEQ ID NO: 6024299 - DNA, 25 bp, Homo sapien
gccagctctgcccatgggtgtgttt

SEQ ID NO: 6024300 - DNA, 25 bp, Homo sapien
actatgttttaaacctgaatagagc

SEQ ID NO: 6024301 - DNA, 25 bp, Homo sapien
agcctcccttaccctaggagcttcg

SEQ ID NO: 6024302 - DNA, 25 bp, Homo sapien
actgtatttgattggaattccaggg

SEQ ID NO: 6024303 - DNA, 25 bp, Homo sapien
tgtgagctacgctttggctagttag

SEQ ID NO: 6024304 - DNA, 25 bp, Homo sapien
agctgttagtggctgaaggagggct

SEQ ID NO: 6024305 - DNA, 25 bp, Homo sapien
ctccatagctgttagtggctgaagg

SEQ ID NO: 6024306 - DNA, 25 bp, Homo sapien
aagttctggaatacgatgcttaaat

SEQ ID NO: 6024307 - DNA, 25 bp, Homo sapien
gggcagccaccaccagtgtttgtcc

SEQ ID NO: 6024308 - DNA, 25 bp, Homo sapien
ttttaaacctgaatagagcactgcc

SEQ ID NO: 6024309 - DNA, 25 bp, Homo sapien
ccaggagactagtgaccgtcttggt

SEQ ID NO: 6024310 - DNA, 25 bp, Homo sapien
ggaacccccacctccatagctgtta

SEQ ID NO: 6024311 - DNA, 25 bp, Homo sapien
ttctagcttcttgggctctcaagac

SEQ ID NO: 6024312 - DNA, 25 bp, Homo sapien
gaatctggtgtacagaccctgccca

SEQ ID NO: 6024313 - DNA, 25 bp, Homo sapien
acagaaggaacgaacaccccctgct

SEQ ID NO: 6024314 - DNA, 25 bp, Homo sapien
cccctgccaggagactagtgaccgt

SEQ ID NO: 6024315 - DNA, 25 bp, Homo sapien
gtgactgttatctcacctgaatctg

SEQ ID NO: 6024316 - DNA, 25 bp, Homo sapien
tagcccaagccggcctcaagctcat

SEQ ID NO: 6024317 - DNA, 25 bp, Homo sapien
cctgcccaggttggactgtggcggg

SEQ ID NO: 6024318 - DNA, 25 bp, Homo sapien
aacaccccctgcttctagcttcttg

SEQ ID NO: 6024319 - DNA, 25 bp, Homo sapien
gatacattattccccggggtgtgag

SEQ ID NO: 6024320 - DNA, 25 bp, Homo sapien
acggtctcactctagcccaagccgg

SEQ ID NO: 6024321 - DNA, 25 bp, Homo sapien
tagttagtggcctctccttgggctc

SEQ ID NO: 6024322 - DNA, 25 bp, Homo sapien
tgggatacggtctcactctagccca

SEQ ID NO: 6024323 - DNA, 25 bp, Homo sapien
tggctgtgctagaccagggagcagg

SEQ ID NO: 6024324 - DNA, 25 bp, Homo sapien
gtgagaccgtatcccaaaaagccaa

SEQ ID NO: 6024325 - DNA, 25 bp, Homo sapien
gtagctcagtcactgcctacctgcg

SEQ ID NO: 6024326 - DNA, 25 bp, Homo sapien
agccaggagcagtggtgcacacttg

SEQ ID NO: 6024327 - DNA, 25 bp, Homo sapien
caaggagaggccactaactagccaa

SEQ ID NO: 6024328 - DNA, 25 bp, Homo sapien
agaggggtgtgtgtgtgttgtgtgt

SEQ ID NO: 6024329 - DNA, 25 bp, Homo sapien
tgagctaccacccccagggctcagg

SEQ ID NO: 6024330 - DNA, 25 bp, Homo sapien
ctcctagggtaagggaggctcgcta

SEQ ID NO: 6024331 - DNA, 25 bp, Homo sapien
gggctcaggcccctgcctctactag

SEQ ID NO: 6024332 - DNA, 25 bp, Homo sapien
atctagcttgctctctccccagatt

SEQ ID NO: 6024333 - DNA, 25 bp, Homo sapien
gcagcccatggctggccaccatctg

SEQ ID NO: 6024334 - DNA, 25 bp, Homo sapien
aggcccctgcctctactagcggtct

SEQ ID NO: 6024335 - DNA, 25 bp, Homo sapien
tggccaccatctggccagactctgc

SEQ ID NO: 6024336 - DNA, 25 bp, Homo sapien
gaccagggagcaggtcagcctgctc

SEQ ID NO: 6024337 - DNA, 25 bp, Homo sapien
aatcaaatacagtcccgtcttgttt

SEQ ID NO: 6024338 - DNA, 25 bp, Homo sapien
gggtctgaatctaggagggtggcct

SEQ ID NO: 6024339 - DNA, 25 bp, Homo sapien
acacttgcaaccgaagctcctaggg

SEQ ID NO: 6024340 - DNA, 25 bp, Homo sapien
tgcaaccgaagctcctagggtaagg

SEQ ID NO: 6024341 - DNA, 25 bp, Homo sapien
acttcagggtctgaatctaggaggg

SEQ ID NO: 6024342 - DNA, 25 bp, Homo sapien
gtgagcacttcagggtctgaatcta

SEQ ID NO: 6024343 - DNA, 25 bp, Homo sapien
tgtgtgtgttgtgtgtgtactgctg

SEQ ID NO: 6024344 - DNA, 25 bp, Homo sapien
ggcccagtgagcacttcagggtctg

SEQ ID NO: 6024345 - DNA, 25 bp, Homo sapien
ttgctctctccccagattcccactg

SEQ ID NO: 6024346 - DNA, 25 bp, Homo sapien
agggaggctcgctatgagcttgagg

SEQ ID NO: 6024347 - DNA, 25 bp, Homo sapien
tgctagaccagggagcaggtcagcc

SEQ ID NO: 6024348 - DNA, 25 bp, Homo sapien
actctgcttgtaatctagcttgctc

SEQ ID NO: 6024349 - DNA, 25 bp, Homo sapien
tactgctggccagaggcacagctct

SEQ ID NO: 6024350 - DNA, 25 bp, Homo sapien
gctcgctatgagcttgaggccggct

SEQ ID NO: 6024351 - DNA, 25 bp, Homo sapien
tactagcggtctgggtagaattaca

SEQ ID NO: 6024352 - DNA, 25 bp, Homo sapien
gcttgaggccggcttgggctagagt

SEQ ID NO: 6024353 - DNA, 25 bp, Homo sapien
cgaagctcctagggtaagggaggct

SEQ ID NO: 6024354 - DNA, 25 bp, Homo sapien
gaatctaggagggtggcctctggaa

SEQ ID NO: 6024355 - DNA, 25 bp, Homo sapien
cttgtaatctagcttgctctctccc

SEQ ID NO: 6024356 - DNA, 25 bp, Homo sapien
cctgctcccagcacaggaaagtaat

SEQ ID NO: 6024357 - DNA, 25 bp, Homo sapien
cccagcacaggaaagtaatgagcta

SEQ ID NO: 6024358 - DNA, 25 bp, Homo sapien
gaagaacaaaacagccaggagcagt

SEQ ID NO: 6024359 - DNA, 25 bp, Homo sapien
acctgcgtaggagcacctgtcaggg

SEQ ID NO: 6024360 - DNA, 25 bp, Homo sapien
ctgcctctactagcggtctgggtag

SEQ ID NO: 6024361 - DNA, 25 bp, Homo sapien
acaggaaagtaatgagctaccaccc

SEQ ID NO: 6024362 - DNA, 25 bp, Homo sapien
gagcagtggtgcacacttgcaaccg

SEQ ID NO: 6024363 - DNA, 25 bp, Homo sapien
ccagattcccactggctgtgctaga

SEQ ID NO: 6024364 - DNA, 25 bp, Homo sapien
gctagagtgagaccgtatcccaaaa

SEQ ID NO: 6024365 - DNA, 25 bp, Homo sapien
ggccagactctgcttgtaatctagc

SEQ ID NO: 6024366 - DNA, 25 bp, Homo sapien
tgtgtttttgcgaggcctggcccag

SEQ ID NO: 6024367 - DNA, 25 bp, Homo sapien
tggcccagagcccaaggagaggcca

SEQ ID NO: 6024368 - DNA, 25 bp, Homo sapien
ctttcagaagaacaaaacagccagg

SEQ ID NO: 6024369 - DNA, 25 bp, Homo sapien
tcatttccctggaattccaatcaaa

SEQ ID NO: 6024370 - DNA, 25 bp, Homo sapien
ttgttttgtgtttttgcgaggcctg

SEQ ID NO: 6024371 - DNA, 25 bp, Homo sapien
aggcctggcccagagcccaaggaga

SEQ ID NO: 6024372 - DNA, 25 bp, Homo sapien
tcccactggctgtgctagaccaggg

SEQ ID NO: 6024373 - DNA, 25 bp, Homo sapien
ccccagggctcaggcccctgcctct

SEQ ID NO: 6024374 - DNA, 25 bp, Homo sapien
gtcaggggcccagtgagcacttcag

SEQ ID NO: 6024375 - DNA, 25 bp, Homo sapien
ggagcaggtcagcctgctcccagca

SEQ ID NO: 6024376 - DNA, 25 bp, Homo sapien
atacagtcccgtcttgttttgtgtt

SEQ ID NO: 6024377 - DNA, 25 bp, Homo sapien
agctctgtagctcagtcactgccta

SEQ ID NO: 6024378 - DNA, 25 bp, Homo sapien
aagtaatgagctaccacccccaggg

SEQ ID NO: 6024379 - DNA, 25 bp, Homo sapien
gtggcctctggaagcacagcagccc

SEQ ID NO: 6024380 - DNA, 25 bp, Homo sapien
agagcccaaggagaggccactaact

SEQ ID NO: 6024381 - DNA, 25 bp, Homo sapien
gcttgggctagagtgagaccgtatc

SEQ ID NO: 6024382 - DNA, 25 bp, Homo sapien
tggccagaggcacagctctgtagct

SEQ ID NO: 6024383 - DNA, 25 bp, Homo sapien
tctggaagcacagcagcccatggct

SEQ ID NO: 6024384 - DNA, 25 bp, Homo sapien
tgagcaaaacagctttcagaagaac

SEQ ID NO: 6024385 - DNA, 25 bp, Homo sapien
gggtaagggaggctcgctatgagct

SEQ ID NO: 6024386 - DNA, 25 bp, Homo sapien
ctatgagcttgaggccggcttgggc

SEQ ID NO: 6024387 - DNA, 25 bp, Homo sapien
ctgcctacctgcgtaggagcacctg

SEQ ID NO: 6024388 - DNA, 25 bp, Homo sapien
taggagcacctgtcaggggcccagt

SEQ ID NO: 6024389 - DNA, 25 bp, Homo sapien
aggagctgagcaaaacagctttcag

SEQ ID NO: 6024390 - DNA, 25 bp, Homo sapien
aattacaggagctgagcaaaacagc

SEQ ID NO: 6024391 - DNA, 25 bp, Homo sapien
gaggcacagctctgtagctcagtca

SEQ ID NO: 6024392 - DNA, 25 bp, Homo sapien
ccctggaattccaatcaaatacagt

SEQ ID NO: 6024393 - DNA, 25 bp, Homo sapien
aattccaatcaaatacagtcccgtc

SEQ ID NO: 6024394 - DNA, 25 bp, Homo sapien
tggtgcacacttgcaaccgaagctc

SEQ ID NO: 6024395 - DNA, 25 bp, Homo sapien
gggtagaattacaggagctgagcaa

SEQ ID NO: 6024396 - DNA, 25 bp, Homo sapien
caaaacagccaggagcagtggtgca

SEQ ID NO: 6024397 - DNA, 25 bp, Homo sapien
aggagggtggcctctggaagcacag

SEQ ID NO: 6024398 - DNA, 25 bp, Homo sapien
aaacagctttcagaagaacaaaaca

SEQ ID NO: 6024399 - DNA, 25 bp, Homo sapien
tgtgtgtactgctggccagaggcac

SEQ ID NO: 6024400 - DNA, 25 bp, Homo sapien
tttgcgaggcctggcccagagccca

SEQ ID NO: 6024401 - DNA, 25 bp, Homo sapien
tctccccagattcccactggctgtg

SEQ ID NO: 6024402 - DNA, 25 bp, Homo sapien
agcacagcagcccatggctggccac

SEQ ID NO: 6024403 - DNA, 25 bp, Homo sapien
tgttgtgtgtgtactgctggccaga

SEQ ID NO: 6024404 - DNA, 25 bp, Homo sapien
catggctggccaccatctggccaga

SEQ ID NO: 6024405 - DNA, 25 bp, Homo sapien
ggccggcttgggctagagtgagacc

SEQ ID NO: 6024406 - DNA, 25 bp, Homo sapien
ccatctggccagactctgcttgtaa

SEQ ID NO: 6024407 - DNA, 25 bp, Homo sapien
cggtctgggtagaattacaggagct

SEQ ID NO: 6024408 - DNA, 25 bp, Homo sapien
ccgtcttgttttgtgtttttgcgag

SEQ ID NO: 6024409 - DNA, 25 bp, Homo sapien
gcacctgtcaggggcccagtgagca

SEQ ID NO: 6024410 - DNA, 25 bp, Homo sapien
ccactttcatttccctggaattcca

SEQ ID NO: 6024411 - DNA, 25 bp, Homo sapien
cagtcactgcctacctgcgtaggag

SEQ ID NO: 6024412 - DNA, 25 bp, Homo sapien
accacccccagggctcaggcccctg

SEQ ID NO: 6024413 - DNA, 25 bp, Homo sapien
ggtcagcctgctcccagcacaggaa

SEQ ID NO: 6024414 - DNA, 25 bp, Homo sapien
aatgtcaatttcattttgtggaggc

SEQ ID NO: 6024415 - DNA, 25 bp, Homo sapien
tctaactctggcctgccgactccat

SEQ ID NO: 6024416 - DNA, 25 bp, Homo sapien
gagtgctgaacaacaggcagctgag

SEQ ID NO: 6024417 - DNA, 25 bp, Homo sapien
caaggccactatgggatgaaggtta

SEQ ID NO: 6024418 - DNA, 25 bp, Homo sapien
cctgaggaaggcacagctagactac

SEQ ID NO: 6024419 - DNA, 25 bp, Homo sapien
tcagagagcacatctaactctggcc

SEQ ID NO: 6024420 - DNA, 25 bp, Homo sapien
gaacaacaggcagctgagaatgtca

SEQ ID NO: 6024421 - DNA, 25 bp, Homo sapien
gagagtcctctttcagagagcacat

SEQ ID NO: 6024422 - DNA, 25 bp, Homo sapien
ctgccgactccatctcattggccca

SEQ ID NO: 6024423 - DNA, 25 bp, Homo sapien
gccatcctgctagggtccactggaa

SEQ ID NO: 6024424 - DNA, 25 bp, Homo sapien
ctgagtgcctgggccatcctgctag

SEQ ID NO: 6024425 - DNA, 25 bp, Homo sapien
ccagttttagcttctgcttgagcca

SEQ ID NO: 6024426 - DNA, 25 bp, Homo sapien
attggcccaggaaggatccagtcta

SEQ ID NO: 6024427 - DNA, 25 bp, Homo sapien
ctttcagattgtggtttatatggga

SEQ ID NO: 6024428 - DNA, 25 bp, Homo sapien
taaatccccggggagctgaatggac

SEQ ID NO: 6024429 - DNA, 25 bp, Homo sapien
acatcgtcccaagagtgctgaacaa

SEQ ID NO: 6024430 - DNA, 25 bp, Homo sapien
ggtttatatgggaaattgttcatgg

SEQ ID NO: 6024431 - DNA, 25 bp, Homo sapien
aggttatgaactggatgaccatact

SEQ ID NO: 6024432 - DNA, 25 bp, Homo sapien
catggaccacatcctgaggaaggca

SEQ ID NO: 6024433 - DNA, 25 bp, Homo sapien
ggatgaaggttatgaactggatgac

SEQ ID NO: 6024434 - DNA, 25 bp, Homo sapien
catcgggtttgagggaattcaccca

SEQ ID NO: 6024435 - DNA, 25 bp, Homo sapien
cagccagagagtcctctttcagaga

SEQ ID NO: 6024436 - DNA, 25 bp, Homo sapien
ggatgaccatactgtgagagactga

SEQ ID NO: 6024437 - DNA, 25 bp, Homo sapien
gtcagtctgtactctctgttctcaa

SEQ ID NO: 6024438 - DNA, 25 bp, Homo sapien
ttcacccaaggccactatgggatga

SEQ ID NO: 6024439 - DNA, 25 bp, Homo sapien
aggaacagtggcagatgggaggaga

SEQ ID NO: 6024440 - DNA, 25 bp, Homo sapien
attttgtggaggcatcgggtttgag

SEQ ID NO: 6024441 - DNA, 25 bp, Homo sapien
agtctacctgcctcacttctgagtg

SEQ ID NO: 6024442 - DNA, 25 bp, Homo sapien
tggaggcatcgggtttgagggaatt

SEQ ID NO: 6024443 - DNA, 25 bp, Homo sapien
gcaattctttcagattgtggtttat

SEQ ID NO: 6024444 - DNA, 25 bp, Homo sapien
ctactgttaaatccccggggagctg

SEQ ID NO: 6024445 - DNA, 25 bp, Homo sapien
agagatcatggaccacatcctgagg

SEQ ID NO: 6024446 - DNA, 25 bp, Homo sapien
gattgtggtttatatgggaaattgt

SEQ ID NO: 6024447 - DNA, 25 bp, Homo sapien
atctcattggcccaggaaggatcca

SEQ ID NO: 6024448 - DNA, 25 bp, Homo sapien
tcaggcatagccttaacttccagta

SEQ ID NO: 6024449 - DNA, 25 bp, Homo sapien
ttagcttctgcttgagccaacccta

SEQ ID NO: 6024450 - DNA, 25 bp, Homo sapien
tgcttgagactatgctgttaggctc

SEQ ID NO: 6024451 - DNA, 25 bp, Homo sapien
ccacatcctgaggaaggcacagcta

SEQ ID NO: 6024452 - DNA, 25 bp, Homo sapien
ttctcaaggaacagtggcagatggg

SEQ ID NO: 6024453 - DNA, 25 bp, Homo sapien
agactgaactagattgggtgtatgg

SEQ ID NO: 6024454 - DNA, 25 bp, Homo sapien
ttctacagagatcatggaccacatc

SEQ ID NO: 6024455 - DNA, 25 bp, Homo sapien
tcacttctgagtgcctgggccatcc

SEQ ID NO: 6024456 - DNA, 25 bp, Homo sapien
aactagattgggtgtatggctggct

SEQ ID NO: 6024457 - DNA, 25 bp, Homo sapien
tccagtagcccctgcttgagactat

SEQ ID NO: 6024458 - DNA, 25 bp, Homo sapien
ggagagctggggcaattctttcaga

SEQ ID NO: 6024459 - DNA, 25 bp, Homo sapien
tgctagggtccactggaaaggaaaa

SEQ ID NO: 6024460 - DNA, 25 bp, Homo sapien
actatgggatgaaggttatgaactg

SEQ ID NO: 6024461 - DNA, 25 bp, Homo sapien
tctgcttgagccaaccctactgtta

SEQ ID NO: 6024462 - DNA, 25 bp, Homo sapien
tctctgttctcaaggaacagtggca

SEQ ID NO: 6024463 - DNA, 25 bp, Homo sapien
ttaacttccagtagcccctgcttga

SEQ ID NO: 6024464 - DNA, 25 bp, Homo sapien
gctgagaatgtcaatttcattttgt

SEQ ID NO: 6024465 - DNA, 25 bp, Homo sapien
tgaatggacaagcagccagagagtc

SEQ ID NO: 6024466 - DNA, 25 bp, Homo sapien
agactatgctgttaggctccagttt

SEQ ID NO: 6024467 - DNA, 25 bp, Homo sapien
aggaaaaatgccttctacagagatc

SEQ ID NO: 6024468 - DNA, 25 bp, Homo sapien
gcctgggccatcctgctagggtcca

SEQ ID NO: 6024469 - DNA, 25 bp, Homo sapien
tgctgttaggctccagttttagctt

SEQ ID NO: 6024470 - DNA, 25 bp, Homo sapien
tcccaagagtgctgaacaacaggca

SEQ ID NO: 6024471 - DNA, 25 bp, Homo sapien
cctgcctcacttctgagtgcctggg

SEQ ID NO: 6024472 - DNA, 25 bp, Homo sapien
tctggcctgccgactccatctcatt

SEQ ID NO: 6024473 - DNA, 25 bp, Homo sapien
tgagccaaccctactgttaaatccc

SEQ ID NO: 6024474 - DNA, 25 bp, Homo sapien
ccccggggagctgaatggacaagca

SEQ ID NO: 6024475 - DNA, 25 bp, Homo sapien
acagctagactacatcgtcccaaga

SEQ ID NO: 6024476 - DNA, 25 bp, Homo sapien
ccatactgtgagagactgaactaga

SEQ ID NO: 6024477 - DNA, 25 bp, Homo sapien
aatgccttctacagagatcatggac

SEQ ID NO: 6024478 - DNA, 25 bp, Homo sapien
tttctgacctaggtcagtctgtact

SEQ ID NO: 6024479 - DNA, 25 bp, Homo sapien
gctggctgtcactttctgacctagg

SEQ ID NO: 6024480 - DNA, 25 bp, Homo sapien
agcccctgcttgagactatgctgtt

SEQ ID NO: 6024481 - DNA, 25 bp, Homo sapien
tagactacatcgtcccaagagtgct

SEQ ID NO: 6024482 - DNA, 25 bp, Homo sapien
actagctcaggcatagccttaactt

SEQ ID NO: 6024483 - DNA, 25 bp, Homo sapien
agcacatctaactctggcctgccga

SEQ ID NO: 6024484 - DNA, 25 bp, Homo sapien
ctgtactctctgttctcaaggaaca

SEQ ID NO: 6024485 - DNA, 25 bp, Homo sapien
tatgggaaattgttcatggtcccca

SEQ ID NO: 6024486 - DNA, 25 bp, Homo sapien
ttgggtgtatggctggctgtcactt

SEQ ID NO: 6024487 - DNA, 25 bp, Homo sapien
tgaactggatgaccatactgtgaga

SEQ ID NO: 6024488 - DNA, 25 bp, Homo sapien
gactccatctcattggcccaggaag

SEQ ID NO: 6024489 - DNA, 25 bp, Homo sapien
taggctccagttttagcttctgctt

SEQ ID NO: 6024490 - DNA, 25 bp, Homo sapien
agggaattcacccaaggccactatg

SEQ ID NO: 6024491 - DNA, 25 bp, Homo sapien
aatttcattttgtggaggcatcggg

SEQ ID NO: 6024492 - DNA, 25 bp, Homo sapien
ctggaaaggaaaaatgccttctaca

SEQ ID NO: 6024493 - DNA, 25 bp, Homo sapien
gacaagcagccagagagtcctcttt

SEQ ID NO: 6024494 - DNA, 25 bp, Homo sapien
gtttgagggaattcacccaaggcca

SEQ ID NO: 6024495 - DNA, 25 bp, Homo sapien
gaaggcacagctagactacatcgtc

SEQ ID NO: 6024496 - DNA, 25 bp, Homo sapien
aggatccagtctacctgcctcactt

SEQ ID NO: 6024497 - DNA, 25 bp, Homo sapien
gatgggaggagagctggggcaattc

SEQ ID NO: 6024498 - DNA, 25 bp, Homo sapien
atagccttaacttccagtagcccct

SEQ ID NO: 6024499 - DNA, 25 bp, Homo sapien
agtggcagatgggaggagagctggg

SEQ ID NO: 6024500 - DNA, 25 bp, Homo sapien
tgtatggctggctgtcactttctga

SEQ ID NO: 6024501 - DNA, 25 bp, Homo sapien
tccactggaaaggaaaaatgccttc

SEQ ID NO: 6024502 - DNA, 25 bp, Homo sapien
cctctttcagagagcacatctaact

SEQ ID NO: 6024503 - DNA, 25 bp, Homo sapien
tgtcactttctgacctaggtcagtc

SEQ ID NO: 6024504 - DNA, 25 bp, Homo sapien
tgtgagagactgaactagattgggt

SEQ ID NO: 6024505 - DNA, 25 bp, Homo sapien
gctggggcaattctttcagattgtg

SEQ ID NO: 6024506 - DNA, 25 bp, Homo sapien
ggagctgaatggacaagcagccaga

SEQ ID NO: 6024507 - DNA, 25 bp, Homo sapien
acctaggtcagtctgtactctctgt

SEQ ID NO: 6024508 - DNA, 25 bp, Homo sapien
ccaggaaggatccagtctacctgcc

SEQ ID NO: 6024509 - DNA, 25 bp, Homo sapien
caggcagctgagaatgtcaatttca

SEQ ID NO: 6024510 - DNA, 25 bp, Homo sapien
ctagcaggatggcccaggcactcag

SEQ ID NO: 6024511 - DNA, 25 bp, Homo sapien
ggtcagaaagtgacagccagccata

SEQ ID NO: 6024512 - DNA, 25 bp, Homo sapien
ttccagtggaccctagcaggatggc

SEQ ID NO: 6024513 - DNA, 25 bp, Homo sapien
gcccaggcactcagaagtgaggcag

SEQ ID NO: 6024514 - DNA, 25 bp, Homo sapien
agatggagtcggcaggccagagtta

SEQ ID NO: 6024515 - DNA, 25 bp, Homo sapien
tggaccctagcaggatggcccaggc

SEQ ID NO: 6024516 - DNA, 25 bp, Homo sapien
gttaggatcatactcgtttgtagac

SEQ ID NO: 6024517 - DNA, 25 bp, Homo sapien
gagccggtcacttcttgcctctaca

SEQ ID NO: 6024518 - DNA, 25 bp, Homo sapien
ttcccatataaaccacaatctgaaa

SEQ ID NO: 6024519 - DNA, 25 bp, Homo sapien
tccttcctgggccaatgagatggag

SEQ ID NO: 6024520 - DNA, 25 bp, Homo sapien
aaagtgacagccagccatacaccca

SEQ ID NO: 6024521 - DNA, 25 bp, Homo sapien
tgaggcaggtagactggatccttcc

SEQ ID NO: 6024522 - DNA, 25 bp, Homo sapien
gcactcagaagtgaggcaggtagac

SEQ ID NO: 6024523 - DNA, 25 bp, Homo sapien
atctagttcagtctctcacagtatg

SEQ ID NO: 6024524 - DNA, 25 bp, Homo sapien
tcttgggacgatgtagtctagctgt

SEQ ID NO: 6024525 - DNA, 25 bp, Homo sapien
gcaaaggccttctgcagcatgcgtt

SEQ ID NO: 6024526 - DNA, 25 bp, Homo sapien
cagaagtgaggcaggtagactggat

SEQ ID NO: 6024527 - DNA, 25 bp, Homo sapien
ccttgagaacagagagtacagactg

SEQ ID NO: 6024528 - DNA, 25 bp, Homo sapien
gtcacttcttgcctctacacagttc

SEQ ID NO: 6024529 - DNA, 25 bp, Homo sapien
tcccatctgccactgttccttgaga

SEQ ID NO: 6024530 - DNA, 25 bp, Homo sapien
ctctacacagttcaaatgagcaaag

SEQ ID NO: 6024531 - DNA, 25 bp, Homo sapien
tctagctgtgccttcctcaggatgt

SEQ ID NO: 6024532 - DNA, 25 bp, Homo sapien
tcttgcctctacacagttcaaatga

SEQ ID NO: 6024533 - DNA, 25 bp, Homo sapien
tggtccatgatctctgtagaaggca

SEQ ID NO: 6024534 - DNA, 25 bp, Homo sapien
gagtcggcaggccagagttagatgt

SEQ ID NO: 6024535 - DNA, 25 bp, Homo sapien
tgcatctacagacatacattgagag

SEQ ID NO: 6024536 - DNA, 25 bp, Homo sapien
cagcattgacatgagccggtcactt

SEQ ID NO: 6024537 - DNA, 25 bp, Homo sapien
cctgggccaatgagatggagtcggc

SEQ ID NO: 6024538 - DNA, 25 bp, Homo sapien
tgtagacagcattgacatgagccgg

SEQ ID NO: 6024539 - DNA, 25 bp, Homo sapien
ggcaggccagagttagatgtgctct

SEQ ID NO: 6024540 - DNA, 25 bp, Homo sapien
tgacatgagccggtcacttcttgcc

SEQ ID NO: 6024541 - DNA, 25 bp, Homo sapien
cagtatggtcatccagttcataacc

SEQ ID NO: 6024542 - DNA, 25 bp, Homo sapien
ctgcctgttgttcagcactcttggg

SEQ ID NO: 6024543 - DNA, 25 bp, Homo sapien
atgcgttcacaatgcatctacagac

SEQ ID NO: 6024544 - DNA, 25 bp, Homo sapien
ccatagtggccttgggtgaattccc

SEQ ID NO: 6024545 - DNA, 25 bp, Homo sapien
ctctcacagtatggtcatccagttc

SEQ ID NO: 6024546 - DNA, 25 bp, Homo sapien
cagactgacctaggtcagaaagtga

SEQ ID NO: 6024547 - DNA, 25 bp, Homo sapien
ttcctcaggatgtggtccatgatct

SEQ ID NO: 6024548 - DNA, 25 bp, Homo sapien
gctggggaccatgaacaatttccca

SEQ ID NO: 6024549 - DNA, 25 bp, Homo sapien
ggatggcccaggcactcagaagtga

SEQ ID NO: 6024550 - DNA, 25 bp, Homo sapien
agagtacagactgacctaggtcaga

SEQ ID NO: 6024551 - DNA, 25 bp, Homo sapien
gtgaattccctcaaacccgatgcct

SEQ ID NO: 6024552 - DNA, 25 bp, Homo sapien
ccacaatctgaaagaattgccccag

SEQ ID NO: 6024553 - DNA, 25 bp, Homo sapien
tgaaattgacattctcagctgcctg

SEQ ID NO: 6024554 - DNA, 25 bp, Homo sapien
gaacaatttcccatataaaccacaa

SEQ ID NO: 6024555 - DNA, 25 bp, Homo sapien
ccagagttagatgtgctctctgaaa

SEQ ID NO: 6024556 - DNA, 25 bp, Homo sapien
tggccttgggtgaattccctcaaac

SEQ ID NO: 6024557 - DNA, 25 bp, Homo sapien
tctgaaagaattgccccagctctcc

SEQ ID NO: 6024558 - DNA, 25 bp, Homo sapien
aggtagactggatccttcctgggcc

SEQ ID NO: 6024559 - DNA, 25 bp, Homo sapien
acacccaatctagttcagtctctca

SEQ ID NO: 6024560 - DNA, 25 bp, Homo sapien
agccatacacccaatctagttcagt

SEQ ID NO: 6024561 - DNA, 25 bp, Homo sapien
tgcagcatgcgttcacaatgcatct

SEQ ID NO: 6024562 - DNA, 25 bp, Homo sapien
acagccagccatacacccaatctag

SEQ ID NO: 6024563 - DNA, 25 bp, Homo sapien
cataaccttcatcccatagtggcct

SEQ ID NO: 6024564 - DNA, 25 bp, Homo sapien
gccttctgcagcatgcgttcacaat

SEQ ID NO: 6024565 - DNA, 25 bp, Homo sapien
ctctcctcccatctgccactgttcc

SEQ ID NO: 6024566 - DNA, 25 bp, Homo sapien
tgacattctcagctgcctgttgttc

SEQ ID NO: 6024567 - DNA, 25 bp, Homo sapien
gaaggcatttttcctttccagtgga

SEQ ID NO: 6024568 - DNA, 25 bp, Homo sapien
gaccatgaacaatttcccatataaa

SEQ ID NO: 6024569 - DNA, 25 bp, Homo sapien
caaatgagcaaaggccttctgcagc

SEQ ID NO: 6024570 - DNA, 25 bp, Homo sapien
ccaatgagatggagtcggcaggcca

SEQ ID NO: 6024571 - DNA, 25 bp, Homo sapien
tgtgccttcctcaggatgtggtcca

SEQ ID NO: 6024572 - DNA, 25 bp, Homo sapien
tttcctttccagtggaccctagcag

SEQ ID NO: 6024573 - DNA, 25 bp, Homo sapien
tctgccactgttccttgagaacaga

SEQ ID NO: 6024574 - DNA, 25 bp, Homo sapien
ctcaaacccgatgcctccacaaaat

SEQ ID NO: 6024575 - DNA, 25 bp, Homo sapien
atcatactcgtttgtagacagcatt

SEQ ID NO: 6024576 - DNA, 25 bp, Homo sapien
aggatgtggtccatgatctctgtag

SEQ ID NO: 6024577 - DNA, 25 bp, Homo sapien
ctcgtttgtagacagcattgacatg

SEQ ID NO: 6024578 - DNA, 25 bp, Homo sapien
cccgatgcctccacaaaatgaaatt

SEQ ID NO: 6024579 - DNA, 25 bp, Homo sapien
acagttcaaatgagcaaaggccttc

SEQ ID NO: 6024580 - DNA, 25 bp, Homo sapien
tctgtagaaggcatttttcctttcc

SEQ ID NO: 6024581 - DNA, 25 bp, Homo sapien
ttcagtctctcacagtatggtcatc

SEQ ID NO: 6024582 - DNA, 25 bp, Homo sapien
tgtagtctagctgtgccttcctcag

SEQ ID NO: 6024583 - DNA, 25 bp, Homo sapien
tctcagctgcctgttgttcagcact

SEQ ID NO: 6024584 - DNA, 25 bp, Homo sapien
gcctccacaaaatgaaattgacatt

SEQ ID NO: 6024585 - DNA, 25 bp, Homo sapien
ccagttcataaccttcatcccatag

SEQ ID NO: 6024586 - DNA, 25 bp, Homo sapien
atgatctctgtagaaggcatttttc

SEQ ID NO: 6024587 - DNA, 25 bp, Homo sapien
ggtcatccagttcataaccttcatc

SEQ ID NO: 6024588 - DNA, 25 bp, Homo sapien
tacagacatacattgagaggctggg

SEQ ID NO: 6024589 - DNA, 25 bp, Homo sapien
tgagaggctggggaccatgaacaat

SEQ ID NO: 6024590 - DNA, 25 bp, Homo sapien
gttgttcagcactcttgggacgatg

SEQ ID NO: 6024591 - DNA, 25 bp, Homo sapien
gaacagagagtacagactgacctag

SEQ ID NO: 6024592 - DNA, 25 bp, Homo sapien
cagcactcttgggacgatgtagtct

SEQ ID NO: 6024593 - DNA, 25 bp, Homo sapien
ttcatcccatagtggccttgggtga

SEQ ID NO: 6024594 - DNA, 25 bp, Homo sapien
tataaaccacaatctgaaagaattg

SEQ ID NO: 6024595 - DNA, 25 bp, Homo sapien
tcacaatgcatctacagacatacat

SEQ ID NO: 6024596 - DNA, 25 bp, Homo sapien
catacattgagaggctggggaccat

SEQ ID NO: 6024597 - DNA, 25 bp, Homo sapien
ccagctctcctcccatctgccactg

SEQ ID NO: 6024598 - DNA, 25 bp, Homo sapien
acaaaatgaaattgacattctcagc

SEQ ID NO: 6024599 - DNA, 25 bp, Homo sapien
gacctaggtcagaaagtgacagcca

SEQ ID NO: 6024600 - DNA, 25 bp, Homo sapien
actgttccttgagaacagagagtac

SEQ ID NO: 6024601 - DNA, 25 bp, Homo sapien
actggatccttcctgggccaatgag

SEQ ID NO: 6024602 - DNA, 25 bp, Homo sapien
aaaacagttaggatcatactcgttt

SEQ ID NO: 6024603 - DNA, 25 bp, Homo sapien
caagtaaaacaacctgagatcagag

SEQ ID NO: 6024604 - DNA, 25 bp, Homo sapien
actcacaggccacgggtcacacaca

SEQ ID NO: 6024605 - DNA, 25 bp, Homo sapien
gattcattgtagtgataaaacactg

SEQ ID NO: 6024606 - DNA, 25 bp, Homo sapien
tgataaaacactgggcaggagcaac

SEQ ID NO: 6024607 - DNA, 25 bp, Homo sapien
atacaaccaacctcacaaacacctg

SEQ ID NO: 6024608 - DNA, 25 bp, Homo sapien
acacgtgcccatcatcaacaataag

SEQ ID NO: 6024609 - DNA, 25 bp, Homo sapien
aggcaagagctgatgcagaccgtgt

SEQ ID NO: 6024610 - DNA, 25 bp, Homo sapien
cagagaaccaacctatatactttgg

SEQ ID NO: 6024611 - DNA, 25 bp, Homo sapien
cagtggcgaatgcagtgtgtctccc

SEQ ID NO: 6024612 - DNA, 25 bp, Homo sapien
gtgagagagcagactgcacagagct

SEQ ID NO: 6024613 - DNA, 25 bp, Homo sapien
cattgtacccagataatcagtggcg

SEQ ID NO: 6024614 - DNA, 25 bp, Homo sapien
gtcgaggcgaatcttggctctgaaa

SEQ ID NO: 6024615 - DNA, 25 bp, Homo sapien
tgatttttaggccagataattcttc

SEQ ID NO: 6024616 - DNA, 25 bp, Homo sapien
gaggggaagggtttgtctccactca

SEQ ID NO: 6024617 - DNA, 25 bp, Homo sapien
ccagggttgcattaaatcactttta

SEQ ID NO: 6024618 - DNA, 25 bp, Homo sapien
gcgaatcttggctctgaaatgtatt

SEQ ID NO: 6024619 - DNA, 25 bp, Homo sapien
aggccacgggtcacacacaggccac

SEQ ID NO: 6024620 - DNA, 25 bp, Homo sapien
ctgagatcagagctgggaagcctca

SEQ ID NO: 6024621 - DNA, 25 bp, Homo sapien
acccagaggcaagagctgatgcaga

SEQ ID NO: 6024622 - DNA, 25 bp, Homo sapien
actttggtgtttggagagacggaca

SEQ ID NO: 6024623 - DNA, 25 bp, Homo sapien
tttggatcacgcttcaccatgctcc

SEQ ID NO: 6024624 - DNA, 25 bp, Homo sapien
gctgtaagaccttttggatcacgct

SEQ ID NO: 6024625 - DNA, 25 bp, Homo sapien
acagagctgtccacacgtgcccatc

SEQ ID NO: 6024626 - DNA, 25 bp, Homo sapien
tcacaaacacctgcgagacagagaa

SEQ ID NO: 6024627 - DNA, 25 bp, Homo sapien
gccatctcttctggtggtttctcgc

SEQ ID NO: 6024628 - DNA, 25 bp, Homo sapien
gccagaacccagaggcaagagctga

SEQ ID NO: 6024629 - DNA, 25 bp, Homo sapien
cgaatgcagtgtgtctccctgcact

SEQ ID NO: 6024630 - DNA, 25 bp, Homo sapien
cgggtcacacacaggccacgcgcgc

SEQ ID NO: 6024631 - DNA, 25 bp, Homo sapien
acacacaggccacgcgcgcaccagc

SEQ ID NO: 6024632 - DNA, 25 bp, Homo sapien
ggtctgtcttcttaggccgtgtcct

SEQ ID NO: 6024633 - DNA, 25 bp, Homo sapien
tactttgattcattgtagtgataaa

SEQ ID NO: 6024634 - DNA, 25 bp, Homo sapien
gtgtttggagagacggacattgtac

SEQ ID NO: 6024635 - DNA, 25 bp, Homo sapien
tcttctggtggtttctcgcactttg

SEQ ID NO: 6024636 - DNA, 25 bp, Homo sapien
gctgcagtgttgctgtaagaccttt

SEQ ID NO: 6024637 - DNA, 25 bp, Homo sapien
gcgagacagagaaccaacctatata

SEQ ID NO: 6024638 - DNA, 25 bp, Homo sapien
acccagataatcagtggcgaatgca

SEQ ID NO: 6024639 - DNA, 25 bp, Homo sapien
gtgtttgccatctcttctggtggtt

SEQ ID NO: 6024640 - DNA, 25 bp, Homo sapien
aaatcacttttaggtctgtcttctt

SEQ ID NO: 6024641 - DNA, 25 bp, Homo sapien
aacaacctgagatcagagctgggaa

SEQ ID NO: 6024642 - DNA, 25 bp, Homo sapien
gcccatcatcaacaataagaaacaa

SEQ ID NO: 6024643 - DNA, 25 bp, Homo sapien
ctctgggtgtttgccatctcttctg

SEQ ID NO: 6024644 - DNA, 25 bp, Homo sapien
cagataattcttccagggttgcatt

SEQ ID NO: 6024645 - DNA, 25 bp, Homo sapien
aggccacgcgcgcaccagcatggtc

SEQ ID NO: 6024646 - DNA, 25 bp, Homo sapien
atgctccaagtaaaacaacctgaga

SEQ ID NO: 6024647 - DNA, 25 bp, Homo sapien
agagcagactgcacagagctgtcca

SEQ ID NO: 6024648 - DNA, 25 bp, Homo sapien
cttttaggtctgtcttcttaggccg

SEQ ID NO: 6024649 - DNA, 25 bp, Homo sapien
gcctcaggtcgaggcgaatcttggc

SEQ ID NO: 6024650 - DNA, 25 bp, Homo sapien
tggagagacggacattgtacccaga

SEQ ID NO: 6024651 - DNA, 25 bp, Homo sapien
ccaacctcacaaacacctgcgagac

SEQ ID NO: 6024652 - DNA, 25 bp, Homo sapien
agcgaggccagaacccagaggcaag

SEQ ID NO: 6024653 - DNA, 25 bp, Homo sapien
attcttccagggttgcattaaatca

SEQ ID NO: 6024654 - DNA, 25 bp, Homo sapien
gacggacattgtacccagataatca

SEQ ID NO: 6024655 - DNA, 25 bp, Homo sapien
aagggtttgtctccactcacaggcc

SEQ ID NO: 6024656 - DNA, 25 bp, Homo sapien
acacctgcgagacagagaaccaacc

SEQ ID NO: 6024657 - DNA, 25 bp, Homo sapien
caccagcatggtcaagggaagcgag

SEQ ID NO: 6024658 - DNA, 25 bp, Homo sapien
taggccgtgtcctactttgattcat

SEQ ID NO: 6024659 - DNA, 25 bp, Homo sapien
accaacctatatactttggtgtttg

SEQ ID NO: 6024660 - DNA, 25 bp, Homo sapien
ataatcagtggcgaatgcagtgtgt

SEQ ID NO: 6024661 - DNA, 25 bp, Homo sapien
ttgtctccactcacaggccacgggt

SEQ ID NO: 6024662 - DNA, 25 bp, Homo sapien
ttaggccagataattcttccagggt

SEQ ID NO: 6024663 - DNA, 25 bp, Homo sapien
cggaaagctgcagtgttgctgtaag

SEQ ID NO: 6024664 - DNA, 25 bp, Homo sapien
tgcattaaatcacttttaggtctgt

SEQ ID NO: 6024665 - DNA, 25 bp, Homo sapien
ttctcgcactttgcggaaagctgca

SEQ ID NO: 6024666 - DNA, 25 bp, Homo sapien
cgcgcgcaccagcatggtcaaggga

SEQ ID NO: 6024667 - DNA, 25 bp, Homo sapien
tgtctccctgcactctgggtgtttg

SEQ ID NO: 6024668 - DNA, 25 bp, Homo sapien
ctgtccacacgtgcccatcatcaac

SEQ ID NO: 6024669 - DNA, 25 bp, Homo sapien
tgggaagcctcaggtcgaggcgaat

SEQ ID NO: 6024670 - DNA, 25 bp, Homo sapien
ttgtagtgataaaacactgggcagg

SEQ ID NO: 6024671 - DNA, 25 bp, Homo sapien
agaccttttggatcacgcttcacca

SEQ ID NO: 6024672 - DNA, 25 bp, Homo sapien
tcagagctgggaagcctcaggtcga

SEQ ID NO: 6024673 - DNA, 25 bp, Homo sapien
acactgggcaggagcaactcagagg

SEQ ID NO: 6024674 - DNA, 25 bp, Homo sapien
tcttcttaggccgtgtcctactttg

SEQ ID NO: 6024675 - DNA, 25 bp, Homo sapien
catcaacaataagaaacaagttaaa

SEQ ID NO: 6024676 - DNA, 25 bp, Homo sapien
ttcaccatgctccaagtaaaacaac

SEQ ID NO: 6024677 - DNA, 25 bp, Homo sapien
tcacgcttcaccatgctccaagtaa

SEQ ID NO: 6024678 - DNA, 25 bp, Homo sapien
caactcagaggggaagggtttgtct

SEQ ID NO: 6024679 - DNA, 25 bp, Homo sapien
cttggctctgaaatgtattgatttt

SEQ ID NO: 6024680 - DNA, 25 bp, Homo sapien
cagtgtgtctccctgcactctgggt

SEQ ID NO: 6024681 - DNA, 25 bp, Homo sapien
tctgaaatgtattgatttttaggcc

SEQ ID NO: 6024682 - DNA, 25 bp, Homo sapien
gtgttgctgtaagaccttttggatc

SEQ ID NO: 6024683 - DNA, 25 bp, Homo sapien
atgtattgatttttaggccagataa

SEQ ID NO: 6024684 - DNA, 25 bp, Homo sapien
gtaaaggtgagagagcagactgcac

SEQ ID NO: 6024685 - DNA, 25 bp, Homo sapien
gactgcacagagctgtccacacgtg

SEQ ID NO: 6024686 - DNA, 25 bp, Homo sapien
ggtggtttctcgcactttgcggaaa

SEQ ID NO: 6024687 - DNA, 25 bp, Homo sapien
catggtcaagggaagcgaggccaga

SEQ ID NO: 6024688 - DNA, 25 bp, Homo sapien
ctatatactttggtgtttggagaga

SEQ ID NO: 6024689 - DNA, 25 bp, Homo sapien
actttgcggaaagctgcagtgttgc

SEQ ID NO: 6024690 - DNA, 25 bp, Homo sapien
cctgcactctgggtgtttgccatct

SEQ ID NO: 6024691 - DNA, 25 bp, Homo sapien
caagggaagcgaggccagaacccag

SEQ ID NO: 6024692 - DNA, 25 bp, Homo sapien
gtgtcctactttgattcattgtagt

SEQ ID NO: 6024693 - DNA, 25 bp, Homo sapien
gtgacccgtggcctgtgagtggaga

SEQ ID NO: 6024694 - DNA, 25 bp, Homo sapien
acaagaactgcactcgtttataata

SEQ ID NO: 6024695 - DNA, 25 bp, Homo sapien
ctgggtttaccagcctcacacagag

SEQ ID NO: 6024696 - DNA, 25 bp, Homo sapien
tgtaagaaaaccagttgagtaagcc

SEQ ID NO: 6024697 - DNA, 25 bp, Homo sapien
aattatctggcctaaaaatcaatac

SEQ ID NO: 6024698 - DNA, 25 bp, Homo sapien
aaaaccagttgagtaagccacagag

SEQ ID NO: 6024699 - DNA, 25 bp, Homo sapien
tgttcccacacggtctgcatcagct

SEQ ID NO: 6024700 - DNA, 25 bp, Homo sapien
agagccaagattcgcctcgacctga

SEQ ID NO: 6024701 - DNA, 25 bp, Homo sapien
tggaagaattatctggcctaaaaat

SEQ ID NO: 6024702 - DNA, 25 bp, Homo sapien
aagccttaataccagagaaaaccat

SEQ ID NO: 6024703 - DNA, 25 bp, Homo sapien
ctgggttctggcctcgcttcccttg

SEQ ID NO: 6024704 - DNA, 25 bp, Homo sapien
gtggcctgtgtgtgacccgtggcct

SEQ ID NO: 6024705 - DNA, 25 bp, Homo sapien
catcatttggaatatcagttacata

SEQ ID NO: 6024706 - DNA, 25 bp, Homo sapien
agcccaccccgccatacacatcatt

SEQ ID NO: 6024707 - DNA, 25 bp, Homo sapien
cctaaaagtgatttaatgcaaccct

SEQ ID NO: 6024708 - DNA, 25 bp, Homo sapien
atctatcctcctctgggtttaccag

SEQ ID NO: 6024709 - DNA, 25 bp, Homo sapien
ccccgccatacacatcatttggaat

SEQ ID NO: 6024710 - DNA, 25 bp, Homo sapien
tgtctgtttttgttgtgagcagtgt

SEQ ID NO: 6024711 - DNA, 25 bp, Homo sapien
ttgcctctgggttctggcctcgctt

SEQ ID NO: 6024712 - DNA, 25 bp, Homo sapien
gtcacccctggccaggtggccctgg

SEQ ID NO: 6024713 - DNA, 25 bp, Homo sapien
caaccctggaagaattatctggcct

SEQ ID NO: 6024714 - DNA, 25 bp, Homo sapien
actgcactcgtttataatattctaa

SEQ ID NO: 6024715 - DNA, 25 bp, Homo sapien
agtgatttaatgcaaccctggaaga

SEQ ID NO: 6024716 - DNA, 25 bp, Homo sapien
gacagacctaaaagtgatttaatgc

SEQ ID NO: 6024717 - DNA, 25 bp, Homo sapien
gatgaaccgcctctaaccgatgcac

SEQ ID NO: 6024718 - DNA, 25 bp, Homo sapien
ctggcctaaaaatcaatacatttca

SEQ ID NO: 6024719 - DNA, 25 bp, Homo sapien
ttgtgagcagtgtcacccctggcca

SEQ ID NO: 6024720 - DNA, 25 bp, Homo sapien
cagctcttgcctctgggttctggcc

SEQ ID NO: 6024721 - DNA, 25 bp, Homo sapien
gtcacctggatgtgggactcagctg

SEQ ID NO: 6024722 - DNA, 25 bp, Homo sapien
tttttgttgtgagcagtgtcacccc

SEQ ID NO: 6024723 - DNA, 25 bp, Homo sapien
cccagtgttttatcactacaatgaa

SEQ ID NO: 6024724 - DNA, 25 bp, Homo sapien
taagaagacagacctaaaagtgatt

SEQ ID NO: 6024725 - DNA, 25 bp, Homo sapien
agttgagtaagccacagagatgaag

SEQ ID NO: 6024726 - DNA, 25 bp, Homo sapien
ccctggccaggtggccctgggtggt

SEQ ID NO: 6024727 - DNA, 25 bp, Homo sapien
tataatattctaaagccttaatacc

SEQ ID NO: 6024728 - DNA, 25 bp, Homo sapien
cgatgcacctgtgggccttgtctgt

SEQ ID NO: 6024729 - DNA, 25 bp, Homo sapien
tctggcctcgcttcccttgaccatg

SEQ ID NO: 6024730 - DNA, 25 bp, Homo sapien
caatgaatcaaagtaggacacggcc

SEQ ID NO: 6024731 - DNA, 25 bp, Homo sapien
cacggcctaagaagacagacctaaa

SEQ ID NO: 6024732 - DNA, 25 bp, Homo sapien
accagagaaaaccatctatcctcct

SEQ ID NO: 6024733 - DNA, 25 bp, Homo sapien
acccttcccctctgagttgctcctg

SEQ ID NO: 6024734 - DNA, 25 bp, Homo sapien
gaccatgctggtgcgcgcgtggcct

SEQ ID NO: 6024735 - DNA, 25 bp, Homo sapien
gcctcacacagagtcacctggatgt

SEQ ID NO: 6024736 - DNA, 25 bp, Homo sapien
cacagagtcacctggatgtgggact

SEQ ID NO: 6024737 - DNA, 25 bp, Homo sapien
cgcctcgacctgaggcttcccagct

SEQ ID NO: 6024738 - DNA, 25 bp, Homo sapien
ctcgtttataatattctaaagcctt

SEQ ID NO: 6024739 - DNA, 25 bp, Homo sapien
ttaccagcctcacacagagtcacct

SEQ ID NO: 6024740 - DNA, 25 bp, Homo sapien
tatcagttacatacaagaactgcac

SEQ ID NO: 6024741 - DNA, 25 bp, Homo sapien
ctcctgcccagtgttttatcactac

SEQ ID NO: 6024742 - DNA, 25 bp, Homo sapien
cctgtgagtggagacaaacccttcc

SEQ ID NO: 6024743 - DNA, 25 bp, Homo sapien
ggcttcccagctctgatctcaggtt

SEQ ID NO: 6024744 - DNA, 25 bp, Homo sapien
cttaataccagagaaaaccatctat

SEQ ID NO: 6024745 - DNA, 25 bp, Homo sapien
gtcagcaagcagtgttcccacacgg

SEQ ID NO: 6024746 - DNA, 25 bp, Homo sapien
ttacatacaagaactgcactcgttt

SEQ ID NO: 6024747 - DNA, 25 bp, Homo sapien
ctgcatcagctcttgcctctgggtt

SEQ ID NO: 6024748 - DNA, 25 bp, Homo sapien
ccttaagcccaccccgccatacaca

SEQ ID NO: 6024749 - DNA, 25 bp, Homo sapien
tcagctgatgaaccgcctctaaccg

SEQ ID NO: 6024750 - DNA, 25 bp, Homo sapien
ttggaatatcagttacatacaagaa

SEQ ID NO: 6024751 - DNA, 25 bp, Homo sapien
gtaagccacagagatgaagtcagca

SEQ ID NO: 6024752 - DNA, 25 bp, Homo sapien
catttcagagccaagattcgcctcg

SEQ ID NO: 6024753 - DNA, 25 bp, Homo sapien
ccaggtggccctgggtggtgtaaga

SEQ ID NO: 6024754 - DNA, 25 bp, Homo sapien
tcactacaatgaatcaaagtaggac

SEQ ID NO: 6024755 - DNA, 25 bp, Homo sapien
acctgtgggccttgtctgtttttgt

SEQ ID NO: 6024756 - DNA, 25 bp, Homo sapien
cgcctctaaccgatgcacctgtggg

SEQ ID NO: 6024757 - DNA, 25 bp, Homo sapien
tgggtggtgtaagaaaaccagttga

SEQ ID NO: 6024758 - DNA, 25 bp, Homo sapien
ttaatgcaaccctggaagaattatc

SEQ ID NO: 6024759 - DNA, 25 bp, Homo sapien
acacggtctgcatcagctcttgcct

SEQ ID NO: 6024760 - DNA, 25 bp, Homo sapien
gctggtgcgcgcgtggcctgtgtgt

SEQ ID NO: 6024761 - DNA, 25 bp, Homo sapien
cccctctgagttgctcctgcccagt

SEQ ID NO: 6024762 - DNA, 25 bp, Homo sapien
attctaaagccttaataccagagaa

SEQ ID NO: 6024763 - DNA, 25 bp, Homo sapien
aaaaccatctatcctcctctgggtt

SEQ ID NO: 6024764 - DNA, 25 bp, Homo sapien
taaaaatcaatacatttcagagcca

SEQ ID NO: 6024765 - DNA, 25 bp, Homo sapien
aagattcgcctcgacctgaggcttc

SEQ ID NO: 6024766 - DNA, 25 bp, Homo sapien
tgagttgctcctgcccagtgtttta

SEQ ID NO: 6024767 - DNA, 25 bp, Homo sapien
tcaatacatttcagagccaagattc

SEQ ID NO: 6024768 - DNA, 25 bp, Homo sapien
tcccttgaccatgctggtgcgcgcg

SEQ ID NO: 6024769 - DNA, 25 bp, Homo sapien
ctcgcttcccttgaccatgctggtg

SEQ ID NO: 6024770 - DNA, 25 bp, Homo sapien
tgggactcagctgatgaaccgcctc

SEQ ID NO: 6024771 - DNA, 25 bp, Homo sapien
tctaaccgatgcacctgtgggcctt

SEQ ID NO: 6024772 - DNA, 25 bp, Homo sapien
agacaaacccttcccctctgagttg

SEQ ID NO: 6024773 - DNA, 25 bp, Homo sapien
aagcagtgttcccacacggtctgca

SEQ ID NO: 6024774 - DNA, 25 bp, Homo sapien
ccgtggcctgtgagtggagacaaac

SEQ ID NO: 6024775 - DNA, 25 bp, Homo sapien
gtaggacacggcctaagaagacaga

SEQ ID NO: 6024776 - DNA, 25 bp, Homo sapien
gatgaagtcagcaagcagtgttccc

SEQ ID NO: 6024777 - DNA, 25 bp, Homo sapien
catacacatcatttggaatatcagt

SEQ ID NO: 6024778 - DNA, 25 bp, Homo sapien
cacagagatgaagtcagcaagcagt

SEQ ID NO: 6024779 - DNA, 25 bp, Homo sapien
gttttatcactacaatgaatcaaag

SEQ ID NO: 6024780 - DNA, 25 bp, Homo sapien
gacctgaggcttcccagctctgatc

SEQ ID NO: 6024781 - DNA, 25 bp, Homo sapien
gcgcgcgtggcctgtgtgtgacccg

SEQ ID NO: 6024782 - DNA, 25 bp, Homo sapien
tgtgtgtgacccgtggcctgtgagt

SEQ ID NO: 6024783 - DNA, 25 bp, Homo sapien
cctcctctgggtttaccagcctcac

SEQ ID NO: 6024784 - DNA, 25 bp, Homo sapien
agtggagacaaacccttcccctctg

SEQ ID NO: 6024785 - DNA, 25 bp, Homo sapien
gggccttgtctgtttttgttgtgag

SEQ ID NO: 6024786 - DNA, 25 bp, Homo sapien
atcaaagtaggacacggcctaagaa

SEQ ID NO: 6024787 - DNA, 25 bp, Homo sapien
tggatgtgggactcagctgatgaac

SEQ ID NO: 6024788 - DNA, 25 bp, Homo sapien
gcagtgtcacccctggccaggtggc

SEQ ID NO: 6024789 - DNA, 25 bp, Homo sapien
ctgacaaagccacccgggcagaagc

SEQ ID NO: 6024790 - DNA, 25 bp, Homo sapien
aagcctcctgaagatggatgtagac

SEQ ID NO: 6024791 - DNA, 25 bp, Homo sapien
ggcaatttggactgtttttgcccca

SEQ ID NO: 6024792 - DNA, 25 bp, Homo sapien
aggctgtttagctgccaggacaaca

SEQ ID NO: 6024793 - DNA, 25 bp, Homo sapien
ggaagctggtcacagggctgctgtg

SEQ ID NO: 6024794 - DNA, 25 bp, Homo sapien
gacagtgccccaggaaggttttcag

SEQ ID NO: 6024795 - DNA, 25 bp, Homo sapien
aaggtgaaattgcttgctgggaaga

SEQ ID NO: 6024796 - DNA, 25 bp, Homo sapien
gacaacactggcagagagaggctga

SEQ ID NO: 6024797 - DNA, 25 bp, Homo sapien
tgacccaccgtgttgcctctgttga

SEQ ID NO: 6024798 - DNA, 25 bp, Homo sapien
agttgatgactccttccttccttcc

SEQ ID NO: 6024799 - DNA, 25 bp, Homo sapien
tgttttggccaaagttgatgactcc

SEQ ID NO: 6024800 - DNA, 25 bp, Homo sapien
gtagcagcaggcaacagcctgatgc

SEQ ID NO: 6024801 - DNA, 25 bp, Homo sapien
cctgaagatggatgtagacacagat

SEQ ID NO: 6024802 - DNA, 25 bp, Homo sapien
ttttcaggcagtgccttgctccctg

SEQ ID NO: 6024803 - DNA, 25 bp, Homo sapien
tgtttttgccccaggctgtttagct

SEQ ID NO: 6024804 - DNA, 25 bp, Homo sapien
cagtactgtcatttccatcctggag

SEQ ID NO: 6024805 - DNA, 25 bp, Homo sapien
ggctctgacccaggaaactctcctt

SEQ ID NO: 6024806 - DNA, 25 bp, Homo sapien
tgtttggaatcagcattttataaaa

SEQ ID NO: 6024807 - DNA, 25 bp, Homo sapien
tgccccaggctgtttagctgccagg

SEQ ID NO: 6024808 - DNA, 25 bp, Homo sapien
ttggactgtttttgccccaggctgt

SEQ ID NO: 6024809 - DNA, 25 bp, Homo sapien
cctgatgcctgtgacagtgccccag

SEQ ID NO: 6024810 - DNA, 25 bp, Homo sapien
tctgttggaagctggtcacagggct

SEQ ID NO: 6024811 - DNA, 25 bp, Homo sapien
aaattgcttgctgggaagagggctc

SEQ ID NO: 6024812 - DNA, 25 bp, Homo sapien
acccaaatcagaaaggtgaaattgc

SEQ ID NO: 6024813 - DNA, 25 bp, Homo sapien
cgctgggctgcagtagcagcaggca

SEQ ID NO: 6024814 - DNA, 25 bp, Homo sapien
gccttgctccctggaccctgaccca

SEQ ID NO: 6024815 - DNA, 25 bp, Homo sapien
ctttttgttttggccaaagttgatg

SEQ ID NO: 6024816 - DNA, 25 bp, Homo sapien
ttgctgggaagagggctctgaccca

SEQ ID NO: 6024817 - DNA, 25 bp, Homo sapien
agagctcctgacaaagccacccggg

SEQ ID NO: 6024818 - DNA, 25 bp, Homo sapien
aaaaggaagcctcctgaagatggat

SEQ ID NO: 6024819 - DNA, 25 bp, Homo sapien
tgacctcattatggggattagggtg

SEQ ID NO: 6024820 - DNA, 25 bp, Homo sapien
cactggcagagagaggctgaggcgc

SEQ ID NO: 6024821 - DNA, 25 bp, Homo sapien
tctccgttctcccatgcagggcaat

SEQ ID NO: 6024822 - DNA, 25 bp, Homo sapien
ctgttgattggccagtactgtcatt

SEQ ID NO: 6024823 - DNA, 25 bp, Homo sapien
cagaagctttttgttttggccaaag

SEQ ID NO: 6024824 - DNA, 25 bp, Homo sapien
atcagaaaggtgaaattgcttgctg

SEQ ID NO: 6024825 - DNA, 25 bp, Homo sapien
gaagagggctctgacccaggaaact

SEQ ID NO: 6024826 - DNA, 25 bp, Homo sapien
agtacctctgttggaagctggtcac

SEQ ID NO: 6024827 - DNA, 25 bp, Homo sapien
tgtcatttccatcctggagaatgtg

SEQ ID NO: 6024828 - DNA, 25 bp, Homo sapien
gggattagggtgatcttcaaggcct

SEQ ID NO: 6024829 - DNA, 25 bp, Homo sapien
tttagctgccaggacaacactggca

SEQ ID NO: 6024830 - DNA, 25 bp, Homo sapien
aagaataaaaggaagcctcctgaag

SEQ ID NO: 6024831 - DNA, 25 bp, Homo sapien
catgcaagtacctctgttggaagct

SEQ ID NO: 6024832 - DNA, 25 bp, Homo sapien
ctccctggaccctgacccaccgtgt

SEQ ID NO: 6024833 - DNA, 25 bp, Homo sapien
agagcacatgcaagtacctctgttg

SEQ ID NO: 6024834 - DNA, 25 bp, Homo sapien
ttccatcctggagaatgtgtttgga

SEQ ID NO: 6024835 - DNA, 25 bp, Homo sapien
gcctgtgacagtgccccaggaaggt

SEQ ID NO: 6024836 - DNA, 25 bp, Homo sapien
attatggggattagggtgatcttca

SEQ ID NO: 6024837 - DNA, 25 bp, Homo sapien
gatcttcaaggcctttctggtctcc

SEQ ID NO: 6024838 - DNA, 25 bp, Homo sapien
tgccaggacaacactggcagagaga

SEQ ID NO: 6024839 - DNA, 25 bp, Homo sapien
cacagattgttgctagcctgacctc

SEQ ID NO: 6024840 - DNA, 25 bp, Homo sapien
tgctgtgagcccagagctcctgaca

SEQ ID NO: 6024841 - DNA, 25 bp, Homo sapien
ggaaggttttcaggcagtgccttgc

SEQ ID NO: 6024842 - DNA, 25 bp, Homo sapien
ggaccctgacccaccgtgttgcctc

SEQ ID NO: 6024843 - DNA, 25 bp, Homo sapien
agccacaagaataaaaggaagcctc

SEQ ID NO: 6024844 - DNA, 25 bp, Homo sapien
ggccaaagttgatgactccttcctt

SEQ ID NO: 6024845 - DNA, 25 bp, Homo sapien
agccacccgggcagaagctttttgt

SEQ ID NO: 6024846 - DNA, 25 bp, Homo sapien
tagggtgatcttcaaggcctttctg

SEQ ID NO: 6024847 - DNA, 25 bp, Homo sapien
gccccaggaaggttttcaggcagtg

SEQ ID NO: 6024848 - DNA, 25 bp, Homo sapien
accgtgttgcctctgttgattggcc

SEQ ID NO: 6024849 - DNA, 25 bp, Homo sapien
ttgcctctgttgattggccagtact

SEQ ID NO: 6024850 - DNA, 25 bp, Homo sapien
atgcagggcaatttggactgttttt

SEQ ID NO: 6024851 - DNA, 25 bp, Homo sapien
gacacctgtcggctgggagagcaca

SEQ ID NO: 6024852 - DNA, 25 bp, Homo sapien
ctgtcggctgggagagcacatgcaa

SEQ ID NO: 6024853 - DNA, 25 bp, Homo sapien
gagcccagagctcctgacaaagcca

SEQ ID NO: 6024854 - DNA, 25 bp, Homo sapien
ttaacaagccacaagaataaaagga

SEQ ID NO: 6024855 - DNA, 25 bp, Homo sapien
gctgggagagcacatgcaagtacct

SEQ ID NO: 6024856 - DNA, 25 bp, Homo sapien
ttctcccatgcagggcaatttggac

SEQ ID NO: 6024857 - DNA, 25 bp, Homo sapien
cccaggaaactctccttcccaagag

SEQ ID NO: 6024858 - DNA, 25 bp, Homo sapien
gatggatgtagacacagattgttgc

SEQ ID NO: 6024859 - DNA, 25 bp, Homo sapien
agaatgtgtttggaatcagcatttt

SEQ ID NO: 6024860 - DNA, 25 bp, Homo sapien
tgtagacacagattgttgctagcct

SEQ ID NO: 6024861 - DNA, 25 bp, Homo sapien
caacagcctgatgcctgtgacagtg

SEQ ID NO: 6024862 - DNA, 25 bp, Homo sapien
ctagcctgacctcattatggggatt

SEQ ID NO: 6024863 - DNA, 25 bp, Homo sapien
ttgttgctagcctgacctcattatg

SEQ ID NO: 6024864 - DNA, 25 bp, Homo sapien
attggccagtactgtcatttccatc

SEQ ID NO: 6024865 - DNA, 25 bp, Homo sapien
tgaggcgctgggctgcagtagcagc

SEQ ID NO: 6024866 - DNA, 25 bp, Homo sapien
gaggctgaggcgctgggctgcagta

SEQ ID NO: 6024867 - DNA, 25 bp, Homo sapien
tggtcacagggctgctgtgagccca

SEQ ID NO: 6024868 - DNA, 25 bp, Homo sapien
gctgcagtagcagcaggcaacagcc

SEQ ID NO: 6024869 - DNA, 25 bp, Homo sapien
cagggctgctgtgagcccagagctc

SEQ ID NO: 6024870 - DNA, 25 bp, Homo sapien
ttctggtctccgttctcccatgcag

SEQ ID NO: 6024871 - DNA, 25 bp, Homo sapien
ggcagtgccttgctccctggaccct

SEQ ID NO: 6024872 - DNA, 25 bp, Homo sapien
cctggagaatgtgtttggaatcagc

SEQ ID NO: 6024873 - DNA, 25 bp, Homo sapien
gaatcagcattttataaaaaaccca

SEQ ID NO: 6024874 - DNA, 25 bp, Homo sapien
cagagagaggctgaggcgctgggct

SEQ ID NO: 6024875 - DNA, 25 bp, Homo sapien
gcaggcaacagcctgatgcctgtga

SEQ ID NO: 6024876 - DNA, 25 bp, Homo sapien
caaggcctttctggtctccgttctc

SEQ ID NO: 6024877 - DNA, 25 bp, Homo sapien
ttccttcctctttaacaagccacaa

SEQ ID NO: 6024878 - DNA, 25 bp, Homo sapien
tcctctttaacaagccacaagaata

SEQ ID NO: 6024879 - DNA, 25 bp, Homo sapien
ttatctgacacctgtcggctgggag

SEQ ID NO: 6024880 - DNA, 25 bp, Homo sapien
ttccaattaaacactagcagcccaa

SEQ ID NO: 6024881 - DNA, 25 bp, Homo sapien
ttttgaaacactgtatggcaatata

SEQ ID NO: 6024882 - DNA, 25 bp, Homo sapien
gtttatatagaaattttcagtaatc

SEQ ID NO: 6024883 - DNA, 25 bp, Homo sapien
acatctctagcaaaatttagaatgt

SEQ ID NO: 6024884 - DNA, 25 bp, Homo sapien
ttataaaatgctgattccaaacaca

SEQ ID NO: 6024885 - DNA, 25 bp, Homo sapien
catctcttgggaaggagagtttcct

SEQ ID NO: 6024886 - DNA, 25 bp, Homo sapien
gaaaaccttcctggggcactgtcac

SEQ ID NO: 6024887 - DNA, 25 bp, Homo sapien
agtaatcaaaatacatctctagcaa

SEQ ID NO: 6024888 - DNA, 25 bp, Homo sapien
ccaatcaacagaggcaacacggtgg

SEQ ID NO: 6024889 - DNA, 25 bp, Homo sapien
ggttttttataaaatgctgattcca

SEQ ID NO: 6024890 - DNA, 25 bp, Homo sapien
caatatatttacagtttatatagaa

SEQ ID NO: 6024891 - DNA, 25 bp, Homo sapien
ggaaatgacagtactggccaatcaa

SEQ ID NO: 6024892 - DNA, 25 bp, Homo sapien
ttaagacagacaggttctcctatct

SEQ ID NO: 6024893 - DNA, 25 bp, Homo sapien
ggagacttcagtaccatttcagact

SEQ ID NO: 6024894 - DNA, 25 bp, Homo sapien
agccagcctccttaagaaaactcct

SEQ ID NO: 6024895 - DNA, 25 bp, Homo sapien
gccttctaccttaagttgaactcat

SEQ ID NO: 6024896 - DNA, 25 bp, Homo sapien
aggagagtttcctgggtcagagccc

SEQ ID NO: 6024897 - DNA, 25 bp, Homo sapien
tcaggctgttgcctgctgctactgc

SEQ ID NO: 6024898 - DNA, 25 bp, Homo sapien
agcaagaccaatagaaaaggagact

SEQ ID NO: 6024899 - DNA, 25 bp, Homo sapien
ctgctgctactgcagcccagcgcct

SEQ ID NO: 6024900 - DNA, 25 bp, Homo sapien
attctccaggatggaaatgacagta

SEQ ID NO: 6024901 - DNA, 25 bp, Homo sapien
aatgctgattccaaacacattctcc

SEQ ID NO: 6024902 - DNA, 25 bp, Homo sapien
ggttctcctatctcctggcatctct

SEQ ID NO: 6024903 - DNA, 25 bp, Homo sapien
ttcctggggcactgtcacaggcatc

SEQ ID NO: 6024904 - DNA, 25 bp, Homo sapien
ctgtcacaggcatcaggctgttgcc

SEQ ID NO: 6024905 - DNA, 25 bp, Homo sapien
caggatggaaatgacagtactggcc

SEQ ID NO: 6024906 - DNA, 25 bp, Homo sapien
cctatctcctggcatctcttgggaa

SEQ ID NO: 6024907 - DNA, 25 bp, Homo sapien
cttcccagcaagcaatttcaccttt

SEQ ID NO: 6024908 - DNA, 25 bp, Homo sapien
tagaaattttcagtaatcaaaatac

SEQ ID NO: 6024909 - DNA, 25 bp, Homo sapien
caggcatcaggctgttgcctgctgc

SEQ ID NO: 6024910 - DNA, 25 bp, Homo sapien
gtttcctgggtcagagccctcttcc

SEQ ID NO: 6024911 - DNA, 25 bp, Homo sapien
ttgggaaggagagtttcctgggtca

SEQ ID NO: 6024912 - DNA, 25 bp, Homo sapien
agcgcctcagcctctctctgccagt

SEQ ID NO: 6024913 - DNA, 25 bp, Homo sapien
aaaataagcaagaccaatagaaaag

SEQ ID NO: 6024914 - DNA, 25 bp, Homo sapien
accaatagaaaaggagacttcagta

SEQ ID NO: 6024915 - DNA, 25 bp, Homo sapien
tctctctgccagtgttgtcctggca

SEQ ID NO: 6024916 - DNA, 25 bp, Homo sapien
gtatggcaatatatttacagtttat

SEQ ID NO: 6024917 - DNA, 25 bp, Homo sapien
gggtcagagccctcttcccagcaag

SEQ ID NO: 6024918 - DNA, 25 bp, Homo sapien
cagcccagcgcctcagcctctctct

SEQ ID NO: 6024919 - DNA, 25 bp, Homo sapien
tcctggcatctcttgggaaggagag

SEQ ID NO: 6024920 - DNA, 25 bp, Homo sapien
ggtgggtcagggtccagggagcaag

SEQ ID NO: 6024921 - DNA, 25 bp, Homo sapien
cagacaggttctcctatctcctggc

SEQ ID NO: 6024922 - DNA, 25 bp, Homo sapien
gggagcaaggcactgcctgaaaacc

SEQ ID NO: 6024923 - DNA, 25 bp, Homo sapien
acagaggcaacacggtgggtcaggg

SEQ ID NO: 6024924 - DNA, 25 bp, Homo sapien
gggcactgtcacaggcatcaggctg

SEQ ID NO: 6024925 - DNA, 25 bp, Homo sapien
gattccaaacacattctccaggatg

SEQ ID NO: 6024926 - DNA, 25 bp, Homo sapien
caaaggaatattcagccagcctcct

SEQ ID NO: 6024927 - DNA, 25 bp, Homo sapien
caatttcacctttctgatttgggtt

SEQ ID NO: 6024928 - DNA, 25 bp, Homo sapien
tcagacttaagacagacaggttctc

SEQ ID NO: 6024929 - DNA, 25 bp, Homo sapien
agcaagcaatttcacctttctgatt

SEQ ID NO: 6024930 - DNA, 25 bp, Homo sapien
aaggcactgcctgaaaaccttcctg

SEQ ID NO: 6024931 - DNA, 25 bp, Homo sapien
ttcagtaccatttcagacttaagac

SEQ ID NO: 6024932 - DNA, 25 bp, Homo sapien
aacactgtatggcaatatatttaca

SEQ ID NO: 6024933 - DNA, 25 bp, Homo sapien
gacagtactggccaatcaacagagg

SEQ ID NO: 6024934 - DNA, 25 bp, Homo sapien
ttttataaaataagcaagaccaata

SEQ ID NO: 6024935 - DNA, 25 bp, Homo sapien
ctagcagcccaagccttctacctta

SEQ ID NO: 6024936 - DNA, 25 bp, Homo sapien
tcagggtccagggagcaaggcactg

SEQ ID NO: 6024937 - DNA, 25 bp, Homo sapien
ctagcaaaatttagaatgttaaatt

SEQ ID NO: 6024938 - DNA, 25 bp, Homo sapien
tttgaacaaaggaatattcagccag

SEQ ID NO: 6024939 - DNA, 25 bp, Homo sapien
tcagcctctctctgccagtgttgtc

SEQ ID NO: 6024940 - DNA, 25 bp, Homo sapien
aatattcagccagcctccttaagaa

SEQ ID NO: 6024941 - DNA, 25 bp, Homo sapien
ctgcctgaaaaccttcctggggcac

SEQ ID NO: 6024942 - DNA, 25 bp, Homo sapien
tactggccaatcaacagaggcaaca

SEQ ID NO: 6024943 - DNA, 25 bp, Homo sapien
ttacagtttatatagaaattttcag

SEQ ID NO: 6024944 - DNA, 25 bp, Homo sapien
ggtattttccaattaaacactagca

SEQ ID NO: 6024945 - DNA, 25 bp, Homo sapien
aaacacattctccaggatggaaatg

SEQ ID NO: 6024946 - DNA, 25 bp, Homo sapien
accatttcagacttaagacagacag

SEQ ID NO: 6024947 - DNA, 25 bp, Homo sapien
ttaaacactagcagcccaagccttc

SEQ ID NO: 6024948 - DNA, 25 bp, Homo sapien
cttcttttgaacaaaggaatattca

SEQ ID NO: 6024949 - DNA, 25 bp, Homo sapien
tgttgcctgctgctactgcagccca

SEQ ID NO: 6024950 - DNA, 25 bp, Homo sapien
gagccctcttcccagcaagcaattt

SEQ ID NO: 6024951 - DNA, 25 bp, Homo sapien
aatacgttttgaaacactgtatggc

SEQ ID NO: 6024952 - DNA, 25 bp, Homo sapien
caacacggtgggtcagggtccaggg

SEQ ID NO: 6024953 - DNA, 25 bp, Homo sapien
agaaaaggagacttcagtaccattt

SEQ ID NO: 6024954 - DNA, 25 bp, Homo sapien
caaaatacatctctagcaaaattta

SEQ ID NO: 6024955 - DNA, 25 bp, Homo sapien
gcccaagccttctaccttaagttga

SEQ ID NO: 6024956 - DNA, 25 bp, Homo sapien
ctactgcagcccagcgcctcagcct

SEQ ID NO: 6024957 - DNA, 25 bp, Homo sapien
gtccagggagcaaggcactgcctga

SEQ ID NO: 6024958 - DNA, 25 bp, Homo sapien
attttcagtaatcaaaatacatctc

SEQ ID NO: 6024959 - DNA, 25 bp, Homo sapien
taccttaagttgaactcattataaa

SEQ ID NO: 6024960 - DNA, 25 bp, Homo sapien
caccagccccaaacctgcactgcat

SEQ ID NO: 6024961 - DNA, 25 bp, Homo sapien
ctcccgaggcctcacattcaaaatt

SEQ ID NO: 6024962 - DNA, 25 bp, Homo sapien
aatagggagaaacctagctagccaa

SEQ ID NO: 6024963 - DNA, 25 bp, Homo sapien
gcctgtctgagcttaacaactagag

SEQ ID NO: 6024964 - DNA, 25 bp, Homo sapien
actctgggaatgagaccacagccca

SEQ ID NO: 6024965 - DNA, 25 bp, Homo sapien
agggcacgttgacaagccttccttc

SEQ ID NO: 6024966 - DNA, 25 bp, Homo sapien
ggagaacagaccgaggagcccgtct

SEQ ID NO: 6024967 - DNA, 25 bp, Homo sapien
cacattcaaaattggctgtgctggc

SEQ ID NO: 6024968 - DNA, 25 bp, Homo sapien
atcatgtggcagcatgggggtgggg

SEQ ID NO: 6024969 - DNA, 25 bp, Homo sapien
ttccttctcccctttctgtccttga

SEQ ID NO: 6024970 - DNA, 25 bp, Homo sapien
caaaattggctgtgctggcttggca

SEQ ID NO: 6024971 - DNA, 25 bp, Homo sapien
tttccctcctcactgtgaaataggg

SEQ ID NO: 6024972 - DNA, 25 bp, Homo sapien
tgggactttctgttactaacaggga

SEQ ID NO: 6024973 - DNA, 25 bp, Homo sapien
ccccaccgaagcacacatcaaacgg

SEQ ID NO: 6024974 - DNA, 25 bp, Homo sapien
cccatgggagaacagaccgaggagc

SEQ ID NO: 6024975 - DNA, 25 bp, Homo sapien
gaggtctgaggccttttcagaaacg

SEQ ID NO: 6024976 - DNA, 25 bp, Homo sapien
aggcctcacattcaaaattggctgt

SEQ ID NO: 6024977 - DNA, 25 bp, Homo sapien
aagagaactccaactcggactcaga

SEQ ID NO: 6024978 - DNA, 25 bp, Homo sapien
tctcaagattacactcccgaggcct

SEQ ID NO: 6024979 - DNA, 25 bp, Homo sapien
acacatcaaacggagccaatcacta

SEQ ID NO: 6024980 - DNA, 25 bp, Homo sapien
tagccaagtcttccattagaggtct

SEQ ID NO: 6024981 - DNA, 25 bp, Homo sapien
aacctcactgcccccaccgaagcac

SEQ ID NO: 6024982 - DNA, 25 bp, Homo sapien
ctgagcttaacaactagagccactc

SEQ ID NO: 6024983 - DNA, 25 bp, Homo sapien
tgaggccttttcagaaacggaccca

SEQ ID NO: 6024984 - DNA, 25 bp, Homo sapien
cgtggtagggcacgttgacaagcct

SEQ ID NO: 6024985 - DNA, 25 bp, Homo sapien
gctggaccaccagccccaaacctgc

SEQ ID NO: 6024986 - DNA, 25 bp, Homo sapien
cacgctgtcctgacggggctcctgg

SEQ ID NO: 6024987 - DNA, 25 bp, Homo sapien
agctagcgtggtagggcacgttgac

SEQ ID NO: 6024988 - DNA, 25 bp, Homo sapien
tttctgttactaacagggacagata

SEQ ID NO: 6024989 - DNA, 25 bp, Homo sapien
acagaccgaggagcccgtctctcaa

SEQ ID NO: 6024990 - DNA, 25 bp, Homo sapien
gacggggctcctggagcatggcagg

SEQ ID NO: 6024991 - DNA, 25 bp, Homo sapien
acagggacagataaaaccacagcag

SEQ ID NO: 6024992 - DNA, 25 bp, Homo sapien
ataggacagaagaagagaactccaa

SEQ ID NO: 6024993 - DNA, 25 bp, Homo sapien
ctgtgaaatagggagaaacctagct

SEQ ID NO: 6024994 - DNA, 25 bp, Homo sapien
gaggagcccgtctctcaagattaca

SEQ ID NO: 6024995 - DNA, 25 bp, Homo sapien
gattacactcccgaggcctcacatt

SEQ ID NO: 6024996 - DNA, 25 bp, Homo sapien
cttggcactgctgagctagcgtggt

SEQ ID NO: 6024997 - DNA, 25 bp, Homo sapien
aaaaccacagcaggctggaccacca

SEQ ID NO: 6024998 - DNA, 25 bp, Homo sapien
caagccttccttctcccctttctgt

SEQ ID NO: 6024999 - DNA, 25 bp, Homo sapien
ctcacccacgctgtcctgacggggc

SEQ ID NO: 6025000 - DNA, 25 bp, Homo sapien
cagcaggctggaccaccagccccaa

SEQ ID NO: 6025001 - DNA, 25 bp, Homo sapien
actgcccccaccgaagcacacatca

SEQ ID NO: 6025002 - DNA, 25 bp, Homo sapien
atcactacagccaatcatgtggcag

SEQ ID NO: 6025003 - DNA, 25 bp, Homo sapien
cagaagaagagaactccaactcgga

SEQ ID NO: 6025004 - DNA, 25 bp, Homo sapien
cagcccataggacagaagaagagaa

SEQ ID NO: 6025005 - DNA, 25 bp, Homo sapien
actcggactcagactctgactaaag

SEQ ID NO: 6025006 - DNA, 25 bp, Homo sapien
gaatgcccatgggagaacagaccga

SEQ ID NO: 6025007 - DNA, 25 bp, Homo sapien
ccactcggccctctcacccacgctg

SEQ ID NO: 6025008 - DNA, 25 bp, Homo sapien
tggctgtgctggcttggcactgctg

SEQ ID NO: 6025009 - DNA, 25 bp, Homo sapien
ccccaaacctgcactgcattgagat

SEQ ID NO: 6025010 - DNA, 25 bp, Homo sapien
cctagctagccaagtcttccattag

SEQ ID NO: 6025011 - DNA, 25 bp, Homo sapien
actcagactctgactaaaggcctgt

SEQ ID NO: 6025012 - DNA, 25 bp, Homo sapien
tgactttcaggaaccttttattcaa

SEQ ID NO: 6025013 - DNA, 25 bp, Homo sapien
cccgtctctcaagattacactcccg

SEQ ID NO: 6025014 - DNA, 25 bp, Homo sapien
tgtcctgacggggctcctggagcat

SEQ ID NO: 6025015 - DNA, 25 bp, Homo sapien
catgggggtggggtgggactttctg

SEQ ID NO: 6025016 - DNA, 25 bp, Homo sapien
cgttgacaagccttccttctcccct

SEQ ID NO: 6025017 - DNA, 25 bp, Homo sapien
actccaactcggactcagactctga

SEQ ID NO: 6025018 - DNA, 25 bp, Homo sapien
tggcaggaatgcccatgggagaaca

SEQ ID NO: 6025019 - DNA, 25 bp, Homo sapien
actgcattgagatgactttcaggaa

SEQ ID NO: 6025020 - DNA, 25 bp, Homo sapien
tgctggcttggcactgctgagctag

SEQ ID NO: 6025021 - DNA, 25 bp, Homo sapien
actctgactaaaggcctgtctgagc

SEQ ID NO: 6025022 - DNA, 25 bp, Homo sapien
aagaagtttccctcctcactgtgaa

SEQ ID NO: 6025023 - DNA, 25 bp, Homo sapien
ctcccctttctgtccttgagcccct

SEQ ID NO: 6025024 - DNA, 25 bp, Homo sapien
gagaaacctagctagccaagtcttc

SEQ ID NO: 6025025 - DNA, 25 bp, Homo sapien
tgtccttgagcccctttaacctcac

SEQ ID NO: 6025026 - DNA, 25 bp, Homo sapien
ttattcaagaagtttccctcctcac

SEQ ID NO: 6025027 - DNA, 25 bp, Homo sapien
ctaaaggcctgtctgagcttaacaa

SEQ ID NO: 6025028 - DNA, 25 bp, Homo sapien
ccattagaggtctgaggccttttca

SEQ ID NO: 6025029 - DNA, 25 bp, Homo sapien
ttgagatgactttcaggaacctttt

SEQ ID NO: 6025030 - DNA, 25 bp, Homo sapien
ggccctctcacccacgctgtcctga

SEQ ID NO: 6025031 - DNA, 25 bp, Homo sapien
ggcagcatgggggtggggtgggact

SEQ ID NO: 6025032 - DNA, 25 bp, Homo sapien
ggagcatggcaggaatgcccatggg

SEQ ID NO: 6025033 - DNA, 25 bp, Homo sapien
acagataaaaccacagcaggctgga

SEQ ID NO: 6025034 - DNA, 25 bp, Homo sapien
cgaagcacacatcaaacggagccaa

SEQ ID NO: 6025035 - DNA, 25 bp, Homo sapien
agtcttccattagaggtctgaggcc

SEQ ID NO: 6025036 - DNA, 25 bp, Homo sapien
gctcctggagcatggcaggaatgcc

SEQ ID NO: 6025037 - DNA, 25 bp, Homo sapien
acagccaatcatgtggcagcatggg

SEQ ID NO: 6025038 - DNA, 25 bp, Homo sapien
ggaatgagaccacagcccataggac

SEQ ID NO: 6025039 - DNA, 25 bp, Homo sapien
actgctgagctagcgtggtagggca

SEQ ID NO: 6025040 - DNA, 25 bp, Homo sapien
caaacggagccaatcactacagcca

SEQ ID NO: 6025041 - DNA, 25 bp, Homo sapien
ttactaacagggacagataaaacca

SEQ ID NO: 6025042 - DNA, 25 bp, Homo sapien
agaccacagcccataggacagaaga

SEQ ID NO: 6025043 - DNA, 25 bp, Homo sapien
ttaacaactagagccactcggccct

SEQ ID NO: 6025044 - DNA, 25 bp, Homo sapien
gagccaatcactacagccaatcatg

SEQ ID NO: 6025045 - DNA, 25 bp, Homo sapien
tgagcccctttaacctcactgcccc

SEQ ID NO: 6025046 - DNA, 25 bp, Homo sapien
actagagccactcggccctctcacc

SEQ ID NO: 6025047 - DNA, 25 bp, Homo sapien
tcctcactgtgaaatagggagaaac

SEQ ID NO: 6025048 - DNA, 25 bp, Homo sapien
acctgcactgcattgagatgacttt

SEQ ID NO: 6025049 - DNA, 25 bp, Homo sapien
tttctccctatttcacagtgaggag

SEQ ID NO: 6025050 - DNA, 25 bp, Homo sapien
cccagccacttgtgacttggtcact

SEQ ID NO: 6025051 - DNA, 25 bp, Homo sapien
ctgctgtggttttatctgtccctgt

SEQ ID NO: 6025052 - DNA, 25 bp, Homo sapien
tccccaggaagagagtgcttggctg

SEQ ID NO: 6025053 - DNA, 25 bp, Homo sapien
ggtcctgcccaggtgtccagaggaa

SEQ ID NO: 6025054 - DNA, 25 bp, Homo sapien
agtcccaccccacccccatgctgcc

SEQ ID NO: 6025055 - DNA, 25 bp, Homo sapien
tcctgaaagtcatctcaatgcagtg

SEQ ID NO: 6025056 - DNA, 25 bp, Homo sapien
catttgttacattgtttttgtatta

SEQ ID NO: 6025057 - DNA, 25 bp, Homo sapien
ctaatggaagacttggctagctagg

SEQ ID NO: 6025058 - DNA, 25 bp, Homo sapien
aaaggttcctgaaagtcatctcaat

SEQ ID NO: 6025059 - DNA, 25 bp, Homo sapien
cttaggttacagaaaagaccatttg

SEQ ID NO: 6025060 - DNA, 25 bp, Homo sapien
aagttagaaaacaccatcaaagaca

SEQ ID NO: 6025061 - DNA, 25 bp, Homo sapien
ttacaaatgcccaagacatgggccc

SEQ ID NO: 6025062 - DNA, 25 bp, Homo sapien
ggcctgcccagccacttgtgacttg

SEQ ID NO: 6025063 - DNA, 25 bp, Homo sapien
tatctgtccctgttagtaacagaaa

SEQ ID NO: 6025064 - DNA, 25 bp, Homo sapien
cacacacagtaaccgcccccaaggg

SEQ ID NO: 6025065 - DNA, 25 bp, Homo sapien
ttggctagctaggtttctccctatt

SEQ ID NO: 6025066 - DNA, 25 bp, Homo sapien
aagtcatctcaatgcagtgcaggtt

SEQ ID NO: 6025067 - DNA, 25 bp, Homo sapien
atgctgccacatgattggctgtagt

SEQ ID NO: 6025068 - DNA, 25 bp, Homo sapien
tgacttggtcactgccactatactg

SEQ ID NO: 6025069 - DNA, 25 bp, Homo sapien
ccacatgattggctgtagtgattgg

SEQ ID NO: 6025070 - DNA, 25 bp, Homo sapien
tccctgttagtaacagaaagtccca

SEQ ID NO: 6025071 - DNA, 25 bp, Homo sapien
tgggcccttattcatggggcctctt

SEQ ID NO: 6025072 - DNA, 25 bp, Homo sapien
ccgcccccaagggactacagagaag

SEQ ID NO: 6025073 - DNA, 25 bp, Homo sapien
ccccatgctgccacatgattggctg

SEQ ID NO: 6025074 - DNA, 25 bp, Homo sapien
ttagggtccccaggaagagagtgct

SEQ ID NO: 6025075 - DNA, 25 bp, Homo sapien
gtgattggctccgtttgatgtgtgc

SEQ ID NO: 6025076 - DNA, 25 bp, Homo sapien
gctgtagtgattggctccgtttgat

SEQ ID NO: 6025077 - DNA, 25 bp, Homo sapien
tgggtccgtttctgaaaaggcctca

SEQ ID NO: 6025078 - DNA, 25 bp, Homo sapien
tggtggtccagcctgctgtggtttt

SEQ ID NO: 6025079 - DNA, 25 bp, Homo sapien
catggggcctcttaggttacagaaa

SEQ ID NO: 6025080 - DNA, 25 bp, Homo sapien
ctcaatgcagtgcaggtttggggct

SEQ ID NO: 6025081 - DNA, 25 bp, Homo sapien
catgtcaccagtggtcctgcccagg

SEQ ID NO: 6025082 - DNA, 25 bp, Homo sapien
acagaaaagaccatttgttacattg

SEQ ID NO: 6025083 - DNA, 25 bp, Homo sapien
aagaccatttgttacattgtttttg

SEQ ID NO: 6025084 - DNA, 25 bp, Homo sapien
tcacagtgaggagggaaacttcttg

SEQ ID NO: 6025085 - DNA, 25 bp, Homo sapien
caggtttggggctggtggtccagcc

SEQ ID NO: 6025086 - DNA, 25 bp, Homo sapien
tgtctctgggccctagtaaacaaat

SEQ ID NO: 6025087 - DNA, 25 bp, Homo sapien
agaaaacaccatcaaagacacacac

SEQ ID NO: 6025088 - DNA, 25 bp, Homo sapien
tgaaaaggcctcagacctctaatgg

SEQ ID NO: 6025089 - DNA, 25 bp, Homo sapien
tccagcctgctgtggttttatctgt

SEQ ID NO: 6025090 - DNA, 25 bp, Homo sapien
gcctcttaggttacagaaaagacca

SEQ ID NO: 6025091 - DNA, 25 bp, Homo sapien
ggcctcagacctctaatggaagact

SEQ ID NO: 6025092 - DNA, 25 bp, Homo sapien
gtttgatgtgtgcttcggtgggggc

SEQ ID NO: 6025093 - DNA, 25 bp, Homo sapien
caccatcaaagacacacacagtaac

SEQ ID NO: 6025094 - DNA, 25 bp, Homo sapien
ggtcactgccactatactggttggc

SEQ ID NO: 6025095 - DNA, 25 bp, Homo sapien
tgccactatactggttggctccctg

SEQ ID NO: 6025096 - DNA, 25 bp, Homo sapien
tggggctggtggtccagcctgctgt

SEQ ID NO: 6025097 - DNA, 25 bp, Homo sapien
gtgtccagaggaagcactttgtctt

SEQ ID NO: 6025098 - DNA, 25 bp, Homo sapien
gcagtgcaggtttggggctggtggt

SEQ ID NO: 6025099 - DNA, 25 bp, Homo sapien
ttggctgggcctgcccagccacttg

SEQ ID NO: 6025100 - DNA, 25 bp, Homo sapien
cacttgtgacttggtcactgccact

SEQ ID NO: 6025101 - DNA, 25 bp, Homo sapien
tgattggctgtagtgattggctccg

SEQ ID NO: 6025102 - DNA, 25 bp, Homo sapien
aaaaggttacaaatgcccaagacat

SEQ ID NO: 6025103 - DNA, 25 bp, Homo sapien
caaagacacacacagtaaccgcccc

SEQ ID NO: 6025104 - DNA, 25 bp, Homo sapien
tatactggttggctccctgtctctg

SEQ ID NO: 6025105 - DNA, 25 bp, Homo sapien
tgtgtgcttcggtgggggcagtgag

SEQ ID NO: 6025106 - DNA, 25 bp, Homo sapien
cctatttcacagtgaggagggaaac

SEQ ID NO: 6025107 - DNA, 25 bp, Homo sapien
gaagacttggctagctaggtttctc

SEQ ID NO: 6025108 - DNA, 25 bp, Homo sapien
gagtgcttggctgggcctgcccagc

SEQ ID NO: 6025109 - DNA, 25 bp, Homo sapien
ggaagagagtgcttggctgggcctg

SEQ ID NO: 6025110 - DNA, 25 bp, Homo sapien
cttattcatggggcctcttaggtta

SEQ ID NO: 6025111 - DNA, 25 bp, Homo sapien
agaggaagcactttgtcttttaggg

SEQ ID NO: 6025112 - DNA, 25 bp, Homo sapien
tggttggctccctgtctctgggccc

SEQ ID NO: 6025113 - DNA, 25 bp, Homo sapien
ggctccgtttgatgtgtgcttcggt

SEQ ID NO: 6025114 - DNA, 25 bp, Homo sapien
tacagagaagtccatgtcaccagtg

SEQ ID NO: 6025115 - DNA, 25 bp, Homo sapien
tgaataaaaggttcctgaaagtcat

SEQ ID NO: 6025116 - DNA, 25 bp, Homo sapien
gcccaggtgtccagaggaagcactt

SEQ ID NO: 6025117 - DNA, 25 bp, Homo sapien
ccccacccccatgctgccacatgat

SEQ ID NO: 6025118 - DNA, 25 bp, Homo sapien
accagtggtcctgcccaggtgtcca

SEQ ID NO: 6025119 - DNA, 25 bp, Homo sapien
ctgggccctagtaaacaaatctttg

SEQ ID NO: 6025120 - DNA, 25 bp, Homo sapien
tggttttatctgtccctgttagtaa

SEQ ID NO: 6025121 - DNA, 25 bp, Homo sapien
agacctctaatggaagacttggcta

SEQ ID NO: 6025122 - DNA, 25 bp, Homo sapien
cagaaagtcccaccccacccccatg

SEQ ID NO: 6025123 - DNA, 25 bp, Homo sapien
ccccaagggactacagagaagtcca

SEQ ID NO: 6025124 - DNA, 25 bp, Homo sapien
gctccctgtctctgggccctagtaa

SEQ ID NO: 6025125 - DNA, 25 bp, Homo sapien
aagacatgggcccttattcatgggg

SEQ ID NO: 6025126 - DNA, 25 bp, Homo sapien
tgaggagggaaacttcttgaataaa

SEQ ID NO: 6025127 - DNA, 25 bp, Homo sapien
cgtttctgaaaaggcctcagacctc

SEQ ID NO: 6025128 - DNA, 25 bp, Homo sapien
atgcccaagacatgggcccttattc

SEQ ID NO: 6025129 - DNA, 25 bp, Homo sapien
gaagtccatgtcaccagtggtcctg

SEQ ID NO: 6025130 - DNA, 25 bp, Homo sapien
agggactacagagaagtccatgtca

SEQ ID NO: 6025131 - DNA, 25 bp, Homo sapien
agctaggtttctccctatttcacag

SEQ ID NO: 6025132 - DNA, 25 bp, Homo sapien
tggaggaacttgcaaatctggccac

SEQ ID NO: 6025133 - DNA, 25 bp, Homo sapien
gggctcatcaggaagacaaaaggct

SEQ ID NO: 6025134 - DNA, 25 bp, Homo sapien
gaccataactgacatagttctcaat

SEQ ID NO: 6025135 - DNA, 25 bp, Homo sapien
gctaattaaagcacagaaaggagct

SEQ ID NO: 6025136 - DNA, 25 bp, Homo sapien
taccatctatgctgagagtggatca

SEQ ID NO: 6025137 - DNA, 25 bp, Homo sapien
aggtcaccaaggaggagtgggatat

SEQ ID NO: 6025138 - DNA, 25 bp, Homo sapien
gtctgggaactatggaggaacttgc

SEQ ID NO: 6025139 - DNA, 25 bp, Homo sapien
gagactgactcccaatggctggaag

SEQ ID NO: 6025140 - DNA, 25 bp, Homo sapien
cgactggaagatttgagaaggagat

SEQ ID NO: 6025141 - DNA, 25 bp, Homo sapien
atttgacggtggagaggaagtattt

SEQ ID NO: 6025142 - DNA, 25 bp, Homo sapien
gtggaagccatgaataagtcacttg

SEQ ID NO: 6025143 - DNA, 25 bp, Homo sapien
caatggctggaagaccataactgac

SEQ ID NO: 6025144 - DNA, 25 bp, Homo sapien
agcctatgtgacactagaaattgga

SEQ ID NO: 6025145 - DNA, 25 bp, Homo sapien
tttcctatgcagtgattatgcctct

SEQ ID NO: 6025146 - DNA, 25 bp, Homo sapien
tggcacagcctatgtgacactagaa

SEQ ID NO: 6025147 - DNA, 25 bp, Homo sapien
tcttgccatcactaccatctatgct

SEQ ID NO: 6025148 - DNA, 25 bp, Homo sapien
cattagatttgacggtggagaggaa

SEQ ID NO: 6025149 - DNA, 25 bp, Homo sapien
catcactaccatctatgctgagagt

SEQ ID NO: 6025150 - DNA, 25 bp, Homo sapien
caggacctatcaaaaccaaaggagc

SEQ ID NO: 6025151 - DNA, 25 bp, Homo sapien
aatggggtagatatggaatgcgttt

SEQ ID NO: 6025152 - DNA, 25 bp, Homo sapien
cttcatttcccccagtgagagactg

SEQ ID NO: 6025153 - DNA, 25 bp, Homo sapien
ttcagccaggacctatcaaaaccaa

SEQ ID NO: 6025154 - DNA, 25 bp, Homo sapien
tatcaaaaccaaaggagcctttagc

SEQ ID NO: 6025155 - DNA, 25 bp, Homo sapien
gaatgcgtttcaacataattcagcc

SEQ ID NO: 6025156 - DNA, 25 bp, Homo sapien
gggtagatatggaatgcgtttcaac

SEQ ID NO: 6025157 - DNA, 25 bp, Homo sapien
gtaatgccaagttcttcagccaaat

SEQ ID NO: 6025158 - DNA, 25 bp, Homo sapien
tagccgtttggacccgactggaaga

SEQ ID NO: 6025159 - DNA, 25 bp, Homo sapien
aaagcagctaattaaagcacagaaa

SEQ ID NO: 6025160 - DNA, 25 bp, Homo sapien
gaagatttgagaaggagatgattga

SEQ ID NO: 6025161 - DNA, 25 bp, Homo sapien
aagacaaaaggctcctaagatgacc

SEQ ID NO: 6025162 - DNA, 25 bp, Homo sapien
gtggtcgtctgggaactatggagga

SEQ ID NO: 6025163 - DNA, 25 bp, Homo sapien
ccaagttcttcagccaaatcaggcg

SEQ ID NO: 6025164 - DNA, 25 bp, Homo sapien
aactgacatagttctcaatggcaca

SEQ ID NO: 6025165 - DNA, 25 bp, Homo sapien
gatatggaatgcgtttcaacataat

SEQ ID NO: 6025166 - DNA, 25 bp, Homo sapien
actctctaaagaaggtcaccaagga

SEQ ID NO: 6025167 - DNA, 25 bp, Homo sapien
tgcgtttcttgccatcactaccatc

SEQ ID NO: 6025168 - DNA, 25 bp, Homo sapien
cagctgaatggggtagatatggaat

SEQ ID NO: 6025169 - DNA, 25 bp, Homo sapien
acagaatcccctgtggtcgtctggg

SEQ ID NO: 6025170 - DNA, 25 bp, Homo sapien
tgattatgcctcttggattaatgga

SEQ ID NO: 6025171 - DNA, 25 bp, Homo sapien
actagaaattggaaagcagctaatt

SEQ ID NO: 6025172 - DNA, 25 bp, Homo sapien
aggctttgtaatgccaagttcttca

SEQ ID NO: 6025173 - DNA, 25 bp, Homo sapien
taaagcacagaaaggagctgcgttt

SEQ ID NO: 6025174 - DNA, 25 bp, Homo sapien
aaaggctcctaagatgaccacaact

SEQ ID NO: 6025175 - DNA, 25 bp, Homo sapien
tggacccgactggaagatttgagaa

SEQ ID NO: 6025176 - DNA, 25 bp, Homo sapien
aattcaactctctaaagaaggtcac

SEQ ID NO: 6025177 - DNA, 25 bp, Homo sapien
tcccctgtggtcgtctgggaactat

SEQ ID NO: 6025178 - DNA, 25 bp, Homo sapien
tggccactttcctatgcagtgatta

SEQ ID NO: 6025179 - DNA, 25 bp, Homo sapien
gccatgaataagtcacttgcagctg

SEQ ID NO: 6025180 - DNA, 25 bp, Homo sapien
gtttcaacataattcagccaggacc

SEQ ID NO: 6025181 - DNA, 25 bp, Homo sapien
ctatgctgagagtggatcaggcttt

SEQ ID NO: 6025182 - DNA, 25 bp, Homo sapien
cacttgcagctgaatggggtagata

SEQ ID NO: 6025183 - DNA, 25 bp, Homo sapien
atcaggaagacaaaaggctcctaag

SEQ ID NO: 6025184 - DNA, 25 bp, Homo sapien
tttcccccagtgagagactgactcc

SEQ ID NO: 6025185 - DNA, 25 bp, Homo sapien
ggaacttcatttcccccagtgagag

SEQ ID NO: 6025186 - DNA, 25 bp, Homo sapien
ttgagaaggagatgattgacagaat

SEQ ID NO: 6025187 - DNA, 25 bp, Homo sapien
taaagaaggtcaccaaggaggagtg

SEQ ID NO: 6025188 - DNA, 25 bp, Homo sapien
aagtatttctgtcaggtgaattcaa

SEQ ID NO: 6025189 - DNA, 25 bp, Homo sapien
gagaggaagtatttctgtcaggtga

SEQ ID NO: 6025190 - DNA, 25 bp, Homo sapien
tctcaatggcacagcctatgtgaca

SEQ ID NO: 6025191 - DNA, 25 bp, Homo sapien
ctggaagaccataactgacatagtt

SEQ ID NO: 6025192 - DNA, 25 bp, Homo sapien
ccaaggaggagtgggatataatcga

SEQ ID NO: 6025193 - DNA, 25 bp, Homo sapien
tcttcagccaaatcaggcgtggaag

SEQ ID NO: 6025194 - DNA, 25 bp, Homo sapien
acagaaaggagctgcgtttcttgcc

SEQ ID NO: 6025195 - DNA, 25 bp, Homo sapien
aacttgcaaatctggccactttcct

SEQ ID NO: 6025196 - DNA, 25 bp, Homo sapien
tgcctcttggattaatggagcagtc

SEQ ID NO: 6025197 - DNA, 25 bp, Homo sapien
tgtgacactagaaattggaaagcag

SEQ ID NO: 6025198 - DNA, 25 bp, Homo sapien
ttctgtcaggtgaattcaactctct

SEQ ID NO: 6025199 - DNA, 25 bp, Homo sapien
cacaacttcatctgtgaaacactaa

SEQ ID NO: 6025200 - DNA, 25 bp, Homo sapien
aattggaaagcagctaattaaagca

SEQ ID NO: 6025201 - DNA, 25 bp, Homo sapien
tgattgacagaatcccctgtggtcg

SEQ ID NO: 6025202 - DNA, 25 bp, Homo sapien
catagttctcaatggcacagcctat

SEQ ID NO: 6025203 - DNA, 25 bp, Homo sapien
tggatcaggctttgtaatgccaagt

SEQ ID NO: 6025204 - DNA, 25 bp, Homo sapien
aggagatgattgacagaatcccctg

SEQ ID NO: 6025205 - DNA, 25 bp, Homo sapien
caaatctggccactttcctatgcag

SEQ ID NO: 6025206 - DNA, 25 bp, Homo sapien
atgcagtgattatgcctcttggatt

SEQ ID NO: 6025207 - DNA, 25 bp, Homo sapien
acggtggagaggaagtatttctgtc

SEQ ID NO: 6025208 - DNA, 25 bp, Homo sapien
agcagtcattagatttgacggtgga

SEQ ID NO: 6025209 - DNA, 25 bp, Homo sapien
gatataatcgaagggctcatcagga

SEQ ID NO: 6025210 - DNA, 25 bp, Homo sapien
caggtgaattcaactctctaaagaa

SEQ ID NO: 6025211 - DNA, 25 bp, Homo sapien
atcgaagggctcatcaggaagacaa

SEQ ID NO: 6025212 - DNA, 25 bp, Homo sapien
gccaaatcaggcgtggaagccatga

SEQ ID NO: 6025213 - DNA, 25 bp, Homo sapien
acataattcagccaggacctatcaa

SEQ ID NO: 6025214 - DNA, 25 bp, Homo sapien
cagtgagagactgactcccaatggc

SEQ ID NO: 6025215 - DNA, 25 bp, Homo sapien
aataagtcacttgcagctgaatggg

SEQ ID NO: 6025216 - DNA, 25 bp, Homo sapien
gactcccaatggctggaagaccata

SEQ ID NO: 6025217 - DNA, 25 bp, Homo sapien
aggagctgcgtttcttgccatcact

SEQ ID NO: 6025218 - DNA, 25 bp, Homo sapien
tgagagtggatcaggctttgtaatg

SEQ ID NO: 6025219 - DNA, 25 bp, Homo sapien
tcctaagatgaccacaacttcatct

SEQ ID NO: 6025220 - DNA, 25 bp, Homo sapien
gaactatggaggaacttgcaaatct

SEQ ID NO: 6025221 - DNA, 25 bp, Homo sapien
gagtgggatataatcgaagggctca

SEQ ID NO: 6025222 - DNA, 25 bp, Homo sapien
taatggagcagtcattagatttgac

SEQ ID NO: 6025223 - DNA, 25 bp, Homo sapien
gatgaccacaacttcatctgtgaaa

SEQ ID NO: 6025224 - DNA, 25 bp, Homo sapien
tcaggcgtggaagccatgaataagt

SEQ ID NO: 6025225 - DNA, 25 bp, Homo sapien
ttggattaatggagcagtcattaga

SEQ ID NO: 6025226 - DNA, 25 bp, Homo sapien
gattatatcccactcctccttggtg

SEQ ID NO: 6025227 - DNA, 25 bp, Homo sapien
agaaatcatcaagcaaacaatttat

SEQ ID NO: 6025228 - DNA, 25 bp, Homo sapien
agaaatacttcctctccaccgtcaa

SEQ ID NO: 6025229 - DNA, 25 bp, Homo sapien
actttagtgtttcacagatgaagtt

SEQ ID NO: 6025230 - DNA, 25 bp, Homo sapien
ctcctccttggtgaccttctttaga

SEQ ID NO: 6025231 - DNA, 25 bp, Homo sapien
caacacaagaataatttgaaaaaga

SEQ ID NO: 6025232 - DNA, 25 bp, Homo sapien
tctgggtttgatcctcagaactaca

SEQ ID NO: 6025233 - DNA, 25 bp, Homo sapien
tcttcctgatgagcccttcgattat

SEQ ID NO: 6025234 - DNA, 25 bp, Homo sapien
atcccactcctccttggtgaccttc

SEQ ID NO: 6025235 - DNA, 25 bp, Homo sapien
attaatccaagaggcataatcactg

SEQ ID NO: 6025236 - DNA, 25 bp, Homo sapien
ttagggctgaggtgcaactcagaga

SEQ ID NO: 6025237 - DNA, 25 bp, Homo sapien
caagacaagtggaagaccacggtcc

SEQ ID NO: 6025238 - DNA, 25 bp, Homo sapien
tggccacccctgacctggcacactg

SEQ ID NO: 6025239 - DNA, 25 bp, Homo sapien
agttcctccatagttcccagacgac

SEQ ID NO: 6025240 - DNA, 25 bp, Homo sapien
aaatctaatgactgctccattaatc

SEQ ID NO: 6025241 - DNA, 25 bp, Homo sapien
tccatagttcccagacgaccacagg

SEQ ID NO: 6025242 - DNA, 25 bp, Homo sapien
cttcaatacagagtggccacccctg

SEQ ID NO: 6025243 - DNA, 25 bp, Homo sapien
acggtccatctgtagcactctagtc

SEQ ID NO: 6025244 - DNA, 25 bp, Homo sapien
cccctgacctggcacactgtttgca

SEQ ID NO: 6025245 - DNA, 25 bp, Homo sapien
accgtcaaatctaatgactgctcca

SEQ ID NO: 6025246 - DNA, 25 bp, Homo sapien
cagacgaccacaggggattctgtca

SEQ ID NO: 6025247 - DNA, 25 bp, Homo sapien
cgtgttttaaagaaaagatatcctg

SEQ ID NO: 6025248 - DNA, 25 bp, Homo sapien
cattttttagggctgaggtgcaact

SEQ ID NO: 6025249 - DNA, 25 bp, Homo sapien
cttttgtcttcctgatgagcccttc

SEQ ID NO: 6025250 - DNA, 25 bp, Homo sapien
tccctaactttagtgtttcacagat

SEQ ID NO: 6025251 - DNA, 25 bp, Homo sapien
acctgacagaaatacttcctctcca

SEQ ID NO: 6025252 - DNA, 25 bp, Homo sapien
tttgatcctcagaactacagaaatc

SEQ ID NO: 6025253 - DNA, 25 bp, Homo sapien
atcactgcataggaaagtggccaga

SEQ ID NO: 6025254 - DNA, 25 bp, Homo sapien
gatgagcccttcgattatatcccac

SEQ ID NO: 6025255 - DNA, 25 bp, Homo sapien
gcataggaaagtggccagatttgca

SEQ ID NO: 6025256 - DNA, 25 bp, Homo sapien
tatcctgtccaatttacccttcaat

SEQ ID NO: 6025257 - DNA, 25 bp, Homo sapien
cagagcagacactctgggtttgatc

SEQ ID NO: 6025258 - DNA, 25 bp, Homo sapien
cacgtggcaaacatcgaccattttt

SEQ ID NO: 6025259 - DNA, 25 bp, Homo sapien
atcgaccattttttagggctgaggt

SEQ ID NO: 6025260 - DNA, 25 bp, Homo sapien
tgctccattaatccaagaggcataa

SEQ ID NO: 6025261 - DNA, 25 bp, Homo sapien
tttgcaagttcctccatagttccca

SEQ ID NO: 6025262 - DNA, 25 bp, Homo sapien
tgaagttgtggtcatcttaggagcc

SEQ ID NO: 6025263 - DNA, 25 bp, Homo sapien
acctggcacactgtttgcacgtggc

SEQ ID NO: 6025264 - DNA, 25 bp, Homo sapien
tgcaactcagagatcgaaaatgagc

SEQ ID NO: 6025265 - DNA, 25 bp, Homo sapien
gccagatttgcaagttcctccatag

SEQ ID NO: 6025266 - DNA, 25 bp, Homo sapien
cacactgtttgcacgtggcaaacat

SEQ ID NO: 6025267 - DNA, 25 bp, Homo sapien
ccaagaggcataatcactgcatagg

SEQ ID NO: 6025268 - DNA, 25 bp, Homo sapien
gaaaagatatcctgtccaatttacc

SEQ ID NO: 6025269 - DNA, 25 bp, Homo sapien
tctccaccgtcaaatctaatgactg

SEQ ID NO: 6025270 - DNA, 25 bp, Homo sapien
cctttatctactgcgaaacaacaca

SEQ ID NO: 6025271 - DNA, 25 bp, Homo sapien
gcaaacatcgaccattttttagggc

SEQ ID NO: 6025272 - DNA, 25 bp, Homo sapien
tttaaagaaaagatatcctgtccaa

SEQ ID NO: 6025273 - DNA, 25 bp, Homo sapien
ctttcacctttatctactgcgaaac

SEQ ID NO: 6025274 - DNA, 25 bp, Homo sapien
cccccaagacaagtggaagaccacg

SEQ ID NO: 6025275 - DNA, 25 bp, Homo sapien
gtgtttcacagatgaagttgtggtc

SEQ ID NO: 6025276 - DNA, 25 bp, Homo sapien
acttcctctccaccgtcaaatctaa

SEQ ID NO: 6025277 - DNA, 25 bp, Homo sapien
aggagccttttgtcttcctgatgag

SEQ ID NO: 6025278 - DNA, 25 bp, Homo sapien
agttcccagacgaccacaggggatt

SEQ ID NO: 6025279 - DNA, 25 bp, Homo sapien
aactacagaaatcatcaagcaaaca

SEQ ID NO: 6025280 - DNA, 25 bp, Homo sapien
cacagatgaagttgtggtcatctta

SEQ ID NO: 6025281 - DNA, 25 bp, Homo sapien
tttacccttcaatacagagtggcca

SEQ ID NO: 6025282 - DNA, 25 bp, Homo sapien
agacactctgggtttgatcctcaga

SEQ ID NO: 6025283 - DNA, 25 bp, Homo sapien
cttggtgaccttctttagagagttg

SEQ ID NO: 6025284 - DNA, 25 bp, Homo sapien
ctttagagagttgaattcacctgac

SEQ ID NO: 6025285 - DNA, 25 bp, Homo sapien
catcaagcaaacaatttattaaccc

SEQ ID NO: 6025286 - DNA, 25 bp, Homo sapien
ctgaggtgcaactcagagatcgaaa

SEQ ID NO: 6025287 - DNA, 25 bp, Homo sapien
atcgaaaatgagcagagcagacact

SEQ ID NO: 6025288 - DNA, 25 bp, Homo sapien
catctgtagcactctagtccctaac

SEQ ID NO: 6025289 - DNA, 25 bp, Homo sapien
gaattcacctgacagaaatacttcc

SEQ ID NO: 6025290 - DNA, 25 bp, Homo sapien
aatgagcagagcagacactctgggt

SEQ ID NO: 6025291 - DNA, 25 bp, Homo sapien
tgtggtcatcttaggagccttttgt

SEQ ID NO: 6025292 - DNA, 25 bp, Homo sapien
aagcatctttcacctttatctactg

SEQ ID NO: 6025293 - DNA, 25 bp, Homo sapien
gtttgcacgtggcaaacatcgacca

SEQ ID NO: 6025294 - DNA, 25 bp, Homo sapien
catcttaggagccttttgtcttcct

SEQ ID NO: 6025295 - DNA, 25 bp, Homo sapien
tacagagtggccacccctgacctgg

SEQ ID NO: 6025296 - DNA, 25 bp, Homo sapien
gcgaaacaacacaagaataatttga

SEQ ID NO: 6025297 - DNA, 25 bp, Homo sapien
tctagtccctaactttagtgtttca

SEQ ID NO: 6025298 - DNA, 25 bp, Homo sapien
cctcagaactacagaaatcatcaag

SEQ ID NO: 6025299 - DNA, 25 bp, Homo sapien
tagcactctagtccctaactttagt

SEQ ID NO: 6025300 - DNA, 25 bp, Homo sapien
cccttcgattatatcccactcctcc

SEQ ID NO: 6025301 - DNA, 25 bp, Homo sapien
aagtggaagaccacggtccatctgt

SEQ ID NO: 6025302 - DNA, 25 bp, Homo sapien
gtccaatttacccttcaatacagag

SEQ ID NO: 6025303 - DNA, 25 bp, Homo sapien
gaccttctttagagagttgaattca

SEQ ID NO: 6025304 - DNA, 25 bp, Homo sapien
agagttgaattcacctgacagaaat

SEQ ID NO: 6025305 - DNA, 25 bp, Homo sapien
aagaccacggtccatctgtagcact

SEQ ID NO: 6025306 - DNA, 25 bp, Homo sapien
ggcataatcactgcataggaaagtg

SEQ ID NO: 6025307 - DNA, 25 bp, Homo sapien
tctactgcgaaacaacacaagaata

SEQ ID NO: 6025308 - DNA, 25 bp, Homo sapien
aaagtggccagatttgcaagttcct

SEQ ID NO: 6025309 - DNA, 25 bp, Homo sapien
tcagagatcgaaaatgagcagagca

SEQ ID NO: 6025310 - DNA, 25 bp, Homo sapien
aatgactgctccattaatccaagag

SEQ ID NO: 6025311 - DNA, 25 bp, Homo sapien
ctcctgttaatggagaaccatccag

SEQ ID NO: 6025312 - DNA, 25 bp, Homo sapien
ctcatggttctgatagggatgtatg

SEQ ID NO: 6025313 - DNA, 25 bp, Homo sapien
gtagtgaccaggctgcccatgagga

SEQ ID NO: 6025314 - DNA, 25 bp, Homo sapien
gacaaggtggcacccgtgctctacc

SEQ ID NO: 6025315 - DNA, 25 bp, Homo sapien
tcctcttcatcagtgctgcaggatc

SEQ ID NO: 6025316 - DNA, 25 bp, Homo sapien
cggcggttgcgcatagtgctgcagg

SEQ ID NO: 6025317 - DNA, 25 bp, Homo sapien
gccgagtccctgcagcatgacaagg

SEQ ID NO: 6025318 - DNA, 25 bp, Homo sapien
tccaattccagcagaaaccagacaa

SEQ ID NO: 6025319 - DNA, 25 bp, Homo sapien
gacctagccactgagcacagagcct

SEQ ID NO: 6025320 - DNA, 25 bp, Homo sapien
ctacctgagactgcagctgctggcc

SEQ ID NO: 6025321 - DNA, 25 bp, Homo sapien
catctggaggccctggaccggcggt

SEQ ID NO: 6025322 - DNA, 25 bp, Homo sapien
caggaggtccacctacctgagactg

SEQ ID NO: 6025323 - DNA, 25 bp, Homo sapien
aagcactctgaacatgcagcagagt

SEQ ID NO: 6025324 - DNA, 25 bp, Homo sapien
attcggacgggatcggtcatcccca

SEQ ID NO: 6025325 - DNA, 25 bp, Homo sapien
cgctccgtccttcccatagggaggg

SEQ ID NO: 6025326 - DNA, 25 bp, Homo sapien
ctgcccatgaggaaggaggagcaca

SEQ ID NO: 6025327 - DNA, 25 bp, Homo sapien
atgagctttccattctcgctcctct

SEQ ID NO: 6025328 - DNA, 25 bp, Homo sapien
tggagaaggacgggctgagcagtgt

SEQ ID NO: 6025329 - DNA, 25 bp, Homo sapien
gagcacagagcctccacggagaggt

SEQ ID NO: 6025330 - DNA, 25 bp, Homo sapien
cagcatgacaaggtggcacccgtgc

SEQ ID NO: 6025331 - DNA, 25 bp, Homo sapien
tccacggagaggtagtgaccaggct

SEQ ID NO: 6025332 - DNA, 25 bp, Homo sapien
catgaggaaggaggagcacagagcc

SEQ ID NO: 6025333 - DNA, 25 bp, Homo sapien
tggtggaggacgacctagccactga

SEQ ID NO: 6025334 - DNA, 25 bp, Homo sapien
atagggtgacctgcggcagggagca

SEQ ID NO: 6025335 - DNA, 25 bp, Homo sapien
gaaggaggagcacagagcctagcca

SEQ ID NO: 6025336 - DNA, 25 bp, Homo sapien
ggagcacagagcctagccacctgtg

SEQ ID NO: 6025337 - DNA, 25 bp, Homo sapien
catagggagggacctttaactcact

SEQ ID NO: 6025338 - DNA, 25 bp, Homo sapien
cagacaaagcactctgaacatgcag

SEQ ID NO: 6025339 - DNA, 25 bp, Homo sapien
cagtgaattcggacgggatcggtca

SEQ ID NO: 6025340 - DNA, 25 bp, Homo sapien
gaattcagtgaattcggacgggatc

SEQ ID NO: 6025341 - DNA, 25 bp, Homo sapien
gtccacctacctgagactgcagctg

SEQ ID NO: 6025342 - DNA, 25 bp, Homo sapien
agagcctccacggagaggtagtgac

SEQ ID NO: 6025343 - DNA, 25 bp, Homo sapien
atccccatagggtgacctgcggcag

SEQ ID NO: 6025344 - DNA, 25 bp, Homo sapien
ttctcgctcctcttcatcagtgctg

SEQ ID NO: 6025345 - DNA, 25 bp, Homo sapien
ggagcatggggtctccctcatggtt

SEQ ID NO: 6025346 - DNA, 25 bp, Homo sapien
ggctgagcagtgtggtggaggacga

SEQ ID NO: 6025347 - DNA, 25 bp, Homo sapien
tttgtacttaacaaaaggctcacac

SEQ ID NO: 6025348 - DNA, 25 bp, Homo sapien
tccagcagaaaccagacaaagcact

SEQ ID NO: 6025349 - DNA, 25 bp, Homo sapien
caaagaggaacacaaactgagcctg

SEQ ID NO: 6025350 - DNA, 25 bp, Homo sapien
ctcactattttgtacttaacaaaag

SEQ ID NO: 6025351 - DNA, 25 bp, Homo sapien
ggaggccctggaccggcggttgcgc

SEQ ID NO: 6025352 - DNA, 25 bp, Homo sapien
tgggcctccaattccagcagaaacc

SEQ ID NO: 6025353 - DNA, 25 bp, Homo sapien
tttccattctcgctcctcttcatca

SEQ ID NO: 6025354 - DNA, 25 bp, Homo sapien
acctgcggcagggagcatggggtct

SEQ ID NO: 6025355 - DNA, 25 bp, Homo sapien
gtgctgcaggatcaggaggtccacc

SEQ ID NO: 6025356 - DNA, 25 bp, Homo sapien
gcagctgctggccaaagaggaacac

SEQ ID NO: 6025357 - DNA, 25 bp, Homo sapien
ttaactcactattttgtacttaaca

SEQ ID NO: 6025358 - DNA, 25 bp, Homo sapien
tgctgcaggctgtgcgagactgtgt

SEQ ID NO: 6025359 - DNA, 25 bp, Homo sapien
gagactgcagctgctggccaaagag

SEQ ID NO: 6025360 - DNA, 25 bp, Homo sapien
aaaaggctcacactcctgttaatgg

SEQ ID NO: 6025361 - DNA, 25 bp, Homo sapien
ttgcgcatagtgctgcaggctgtgc

SEQ ID NO: 6025362 - DNA, 25 bp, Homo sapien
catagtgctgcaggctgtgcgagac

SEQ ID NO: 6025363 - DNA, 25 bp, Homo sapien
catgcagcagagtggccagcgctcc

SEQ ID NO: 6025364 - DNA, 25 bp, Homo sapien
gatagggatgtatgggcctccaatt

SEQ ID NO: 6025365 - DNA, 25 bp, Homo sapien
tgcgagactgtgtggagaaggacgg

SEQ ID NO: 6025366 - DNA, 25 bp, Homo sapien
tctaccagctgcatctggaggccct

SEQ ID NO: 6025367 - DNA, 25 bp, Homo sapien
tgggaaatactcacacgatgagctt

SEQ ID NO: 6025368 - DNA, 25 bp, Homo sapien
tcatcagtgctgcaggatcaggagg

SEQ ID NO: 6025369 - DNA, 25 bp, Homo sapien
tcggtcatccccatagggtgacctg

SEQ ID NO: 6025370 - DNA, 25 bp, Homo sapien
gtctccctcatggttctgataggga

SEQ ID NO: 6025371 - DNA, 25 bp, Homo sapien
gttctgatagggatgtatgggcctc

SEQ ID NO: 6025372 - DNA, 25 bp, Homo sapien
aggctgtgcgagactgtgtggagaa

SEQ ID NO: 6025373 - DNA, 25 bp, Homo sapien
cagctgcatctggaggccctggacc

SEQ ID NO: 6025374 - DNA, 25 bp, Homo sapien
cttaacaaaaggctcacactcctgt

SEQ ID NO: 6025375 - DNA, 25 bp, Homo sapien
ctagccacctgtgaattcagtgaat

SEQ ID NO: 6025376 - DNA, 25 bp, Homo sapien
acgggatcggtcatccccatagggt

SEQ ID NO: 6025377 - DNA, 25 bp, Homo sapien
caggatcaggaggtccacctacctg

SEQ ID NO: 6025378 - DNA, 25 bp, Homo sapien
acctgtgaattcagtgaattcggac

SEQ ID NO: 6025379 - DNA, 25 bp, Homo sapien
tctgaacatgcagcagagtggccag

SEQ ID NO: 6025380 - DNA, 25 bp, Homo sapien
gagaggtagtgaccaggctgcccat

SEQ ID NO: 6025381 - DNA, 25 bp, Homo sapien
gcagtgtggtggaggacgacctagc

SEQ ID NO: 6025382 - DNA, 25 bp, Homo sapien
ggccagcgctccgtccttcccatag

SEQ ID NO: 6025383 - DNA, 25 bp, Homo sapien
tggcacccgtgctctaccagctgca

SEQ ID NO: 6025384 - DNA, 25 bp, Homo sapien
gctggccaaagaggaacacaaactg

SEQ ID NO: 6025385 - DNA, 25 bp, Homo sapien
gaggacgacctagccactgagcaca

SEQ ID NO: 6025386 - DNA, 25 bp, Homo sapien
ggaacacaaactgagcctgctgatg

SEQ ID NO: 6025387 - DNA, 25 bp, Homo sapien
gcagagtggccagcgctccgtcctt

SEQ ID NO: 6025388 - DNA, 25 bp, Homo sapien
ctcacactcctgttaatggagaacc

SEQ ID NO: 6025389 - DNA, 25 bp, Homo sapien
accaggctgcccatgaggaaggagg

SEQ ID NO: 6025390 - DNA, 25 bp, Homo sapien
gccactgagcacagagcctccacgg

SEQ ID NO: 6025391 - DNA, 25 bp, Homo sapien
cacacgatgagctttccattctcgc

SEQ ID NO: 6025392 - DNA, 25 bp, Homo sapien
caaactgagcctgctgatggccgag

SEQ ID NO: 6025393 - DNA, 25 bp, Homo sapien
tccctgcagcatgacaaggtggcac

SEQ ID NO: 6025394 - DNA, 25 bp, Homo sapien
ctgatggccgagtccctgcagcatg

SEQ ID NO: 6025395 - DNA, 25 bp, Homo sapien
aatactcacacgatgagctttccat

SEQ ID NO: 6025396 - DNA, 25 bp, Homo sapien
aggacgggctgagcagtgtggtgga

SEQ ID NO: 6025397 - DNA, 25 bp, Homo sapien
gagcctgctgatggccgagtccctg

SEQ ID NO: 6025398 - DNA, 25 bp, Homo sapien
actgtgtggagaaggacgggctgag

SEQ ID NO: 6025399 - DNA, 25 bp, Homo sapien
agaaaccagacaaagcactctgaac

SEQ ID NO: 6025400 - DNA, 25 bp, Homo sapien
gatgtatgggcctccaattccagca

SEQ ID NO: 6025401 - DNA, 25 bp, Homo sapien
cagagcctagccacctgtgaattca

SEQ ID NO: 6025402 - DNA, 25 bp, Homo sapien
ctggaccggcggttgcgcatagtgc

SEQ ID NO: 6025403 - DNA, 25 bp, Homo sapien
ggcagggagcatggggtctccctca

SEQ ID NO: 6025404 - DNA, 25 bp, Homo sapien
catggggtctccctcatggttctga

SEQ ID NO: 6025405 - DNA, 25 bp, Homo sapien
ccgtgctctaccagctgcatctgga

SEQ ID NO: 6025406 - DNA, 25 bp, Homo sapien
cccatcgtccaaagctcagccaagg

SEQ ID NO: 6025407 - DNA, 25 bp, Homo sapien
gtccaaagctcagccaaggcaggcg

SEQ ID NO: 6025408 - DNA, 25 bp, Homo sapien
ctcagaggttatctctggtctgctg

SEQ ID NO: 6025409 - DNA, 25 bp, Homo sapien
aggcggtgcccaccaccaactaata

SEQ ID NO: 6025410 - DNA, 25 bp, Homo sapien
actaataaggctgactgctctgcag

SEQ ID NO: 6025411 - DNA, 25 bp, Homo sapien
gctggccactctgctgcatgttcag

SEQ ID NO: 6025412 - DNA, 25 bp, Homo sapien
ttctccattaacaggagtgtgagcc

SEQ ID NO: 6025413 - DNA, 25 bp, Homo sapien
tgttcagagtgctttgtctggtttc

SEQ ID NO: 6025414 - DNA, 25 bp, Homo sapien
ctgctggcctggggccaatgggctc

SEQ ID NO: 6025415 - DNA, 25 bp, Homo sapien
gcctggggccaatgggctctgtgta

SEQ ID NO: 6025416 - DNA, 25 bp, Homo sapien
gagctctacagtctttgagagagga

SEQ ID NO: 6025417 - DNA, 25 bp, Homo sapien
acccattcttgggtgcccatctgct

SEQ ID NO: 6025418 - DNA, 25 bp, Homo sapien
tccttgaagtggctcagaggttatc

SEQ ID NO: 6025419 - DNA, 25 bp, Homo sapien
tgcatagctggtcattggtatccaa

SEQ ID NO: 6025420 - DNA, 25 bp, Homo sapien
gacaagtgcatagctggtcattggt

SEQ ID NO: 6025421 - DNA, 25 bp, Homo sapien
ggctggcctgctggcctggggccaa

SEQ ID NO: 6025422 - DNA, 25 bp, Homo sapien
gagtgctttgtctggtttctgctgg

SEQ ID NO: 6025423 - DNA, 25 bp, Homo sapien
atctgctccgacacaggccatgatg

SEQ ID NO: 6025424 - DNA, 25 bp, Homo sapien
ccccatgctccctgccgcaggtcac

SEQ ID NO: 6025425 - DNA, 25 bp, Homo sapien
gatagaggagcagaaggtgggttgt

SEQ ID NO: 6025426 - DNA, 25 bp, Homo sapien
tgatcacatcatagaaggtccttga

SEQ ID NO: 6025427 - DNA, 25 bp, Homo sapien
aaggacggagcgctggccactctgc

SEQ ID NO: 6025428 - DNA, 25 bp, Homo sapien
tgcccaccaccaactaataaggctg

SEQ ID NO: 6025429 - DNA, 25 bp, Homo sapien
cattggtatccaaaaacccattctt

SEQ ID NO: 6025430 - DNA, 25 bp, Homo sapien
gcagcggacaagtgcatagctggtc

SEQ ID NO: 6025431 - DNA, 25 bp, Homo sapien
ccatgagggagaccccatgctccct

SEQ ID NO: 6025432 - DNA, 25 bp, Homo sapien
gctgcatgttcagagtgctttgtct

SEQ ID NO: 6025433 - DNA, 25 bp, Homo sapien
aattgggggccagagtgtgatcaca

SEQ ID NO: 6025434 - DNA, 25 bp, Homo sapien
catacatccctatcagaaccatgag

SEQ ID NO: 6025435 - DNA, 25 bp, Homo sapien
gtccatcgctgtctccccttcctag

SEQ ID NO: 6025436 - DNA, 25 bp, Homo sapien
aaggctgactgctctgcagcagcgg

SEQ ID NO: 6025437 - DNA, 25 bp, Homo sapien
ttcctagagctctacagtctttgag

SEQ ID NO: 6025438 - DNA, 25 bp, Homo sapien
ctatgggaaggacggagcgctggcc

SEQ ID NO: 6025439 - DNA, 25 bp, Homo sapien
caaggcaggcggtgcccaccaccaa

SEQ ID NO: 6025440 - DNA, 25 bp, Homo sapien
ccccaggatagaggagcagaaggtg

SEQ ID NO: 6025441 - DNA, 25 bp, Homo sapien
ttgacacccatcgtccaaagctcag

SEQ ID NO: 6025442 - DNA, 25 bp, Homo sapien
cttttgttaagtacaaaatagtgag

SEQ ID NO: 6025443 - DNA, 25 bp, Homo sapien
gaggcccatacatccctatcagaac

SEQ ID NO: 6025444 - DNA, 25 bp, Homo sapien
tgtgagccttttgttaagtacaaaa

SEQ ID NO: 6025445 - DNA, 25 bp, Homo sapien
ctccccttcctagagctctacagtc

SEQ ID NO: 6025446 - DNA, 25 bp, Homo sapien
catgatgtccatcgctgtctcccct

SEQ ID NO: 6025447 - DNA, 25 bp, Homo sapien
ggccaatgggctctgtgtagtgtct

SEQ ID NO: 6025448 - DNA, 25 bp, Homo sapien
tccctatcagaaccatgagggagac

SEQ ID NO: 6025449 - DNA, 25 bp, Homo sapien
ccgatcccgtccgaattcactgaat

SEQ ID NO: 6025450 - DNA, 25 bp, Homo sapien
gggatgaccgatcccgtccgaattc

SEQ ID NO: 6025451 - DNA, 25 bp, Homo sapien
gactgctctgcagcagcggacaagt

SEQ ID NO: 6025452 - DNA, 25 bp, Homo sapien
gctccctgccgcaggtcaccctatg

SEQ ID NO: 6025453 - DNA, 25 bp, Homo sapien
tcagaaccatgagggagaccccatg

SEQ ID NO: 6025454 - DNA, 25 bp, Homo sapien
tacagtctttgagagaggaggcccc

SEQ ID NO: 6025455 - DNA, 25 bp, Homo sapien
ctctggtctgctggatggttctcca

SEQ ID NO: 6025456 - DNA, 25 bp, Homo sapien
tgggctctgtgtagtgtcttgacac

SEQ ID NO: 6025457 - DNA, 25 bp, Homo sapien
ctgtgtagtgtcttgacacccatcg

SEQ ID NO: 6025458 - DNA, 25 bp, Homo sapien
agtgagttaaaggtccctccctatg

SEQ ID NO: 6025459 - DNA, 25 bp, Homo sapien
cggagcgctggccactctgctgcat

SEQ ID NO: 6025460 - DNA, 25 bp, Homo sapien
tcttgggtgcccatctgctccgaca

SEQ ID NO: 6025461 - DNA, 25 bp, Homo sapien
ggatggttctccattaacaggagtg

SEQ ID NO: 6025462 - DNA, 25 bp, Homo sapien
gttgtaattgggggccagagtgtga

SEQ ID NO: 6025463 - DNA, 25 bp, Homo sapien
agaaggtccttgaagtggctcagag

SEQ ID NO: 6025464 - DNA, 25 bp, Homo sapien
aggagtgtgagccttttgttaagta

SEQ ID NO: 6025465 - DNA, 25 bp, Homo sapien
caaaaacccattcttgggtgcccat

SEQ ID NO: 6025466 - DNA, 25 bp, Homo sapien
gaattggaggcccatacatccctat

SEQ ID NO: 6025467 - DNA, 25 bp, Homo sapien
gtgcccatctgctccgacacaggcc

SEQ ID NO: 6025468 - DNA, 25 bp, Homo sapien
ggagcagaaggtgggttgtaattgg

SEQ ID NO: 6025469 - DNA, 25 bp, Homo sapien
gctcagccaaggcaggcggtgccca

SEQ ID NO: 6025470 - DNA, 25 bp, Homo sapien
cctatggggatgaccgatcccgtcc

SEQ ID NO: 6025471 - DNA, 25 bp, Homo sapien
tgccgcaggtcaccctatggggatg

SEQ ID NO: 6025472 - DNA, 25 bp, Homo sapien
ccctccctatgggaaggacggagcg

SEQ ID NO: 6025473 - DNA, 25 bp, Homo sapien
ccaccaactaataaggctgactgct

SEQ ID NO: 6025474 - DNA, 25 bp, Homo sapien
catcatagaaggtccttgaagtggc

SEQ ID NO: 6025475 - DNA, 25 bp, Homo sapien
tatccaaaaacccattcttgggtgc

SEQ ID NO: 6025476 - DNA, 25 bp, Homo sapien
ctgctggaattggaggcccatacat

SEQ ID NO: 6025477 - DNA, 25 bp, Homo sapien
tgttaagtacaaaatagtgagttaa

SEQ ID NO: 6025478 - DNA, 25 bp, Homo sapien
tctgcagcagcggacaagtgcatag

SEQ ID NO: 6025479 - DNA, 25 bp, Homo sapien
ggttatctctggtctgctggatggt

SEQ ID NO: 6025480 - DNA, 25 bp, Homo sapien
ctttgagagaggaggccccaggata

SEQ ID NO: 6025481 - DNA, 25 bp, Homo sapien
gggagaccccatgctccctgccgca

SEQ ID NO: 6025482 - DNA, 25 bp, Homo sapien
agtgtcttgacacccatcgtccaaa

SEQ ID NO: 6025483 - DNA, 25 bp, Homo sapien
tccgacacaggccatgatgtccatc

SEQ ID NO: 6025484 - DNA, 25 bp, Homo sapien
gctggtcattggtatccaaaaaccc

SEQ ID NO: 6025485 - DNA, 25 bp, Homo sapien
cgctgtctccccttcctagagctct

SEQ ID NO: 6025486 - DNA, 25 bp, Homo sapien
cactctgctgcatgttcagagtgct

SEQ ID NO: 6025487 - DNA, 25 bp, Homo sapien
aagtggctcagaggttatctctggt

SEQ ID NO: 6025488 - DNA, 25 bp, Homo sapien
tttgtctggtttctgctggaattgg

SEQ ID NO: 6025489 - DNA, 25 bp, Homo sapien
tggtttctgctggaattggaggccc

SEQ ID NO: 6025490 - DNA, 25 bp, Homo sapien
aggtcaccctatggggatgaccgat

SEQ ID NO: 6025491 - DNA, 25 bp, Homo sapien
gggccagagtgtgatcacatcatag

SEQ ID NO: 6025492 - DNA, 25 bp, Homo sapien
tctgctggatggttctccattaaca

SEQ ID NO: 6025493 - DNA, 25 bp, Homo sapien
agagtgtgatcacatcatagaaggt

SEQ ID NO: 6025494 - DNA, 25 bp, Homo sapien
ccgtccgaattcactgaattcacag

SEQ ID NO: 6025495 - DNA, 25 bp, Homo sapien
aggaggccccaggatagaggagcag

SEQ ID NO: 6025496 - DNA, 25 bp, Homo sapien
acaggccatgatgtccatcgctgtc

SEQ ID NO: 6025497 - DNA, 25 bp, Homo sapien
attaacaggagtgtgagccttttgt

SEQ ID NO: 6025498 - DNA, 25 bp, Homo sapien
gatgatacagcaggtgatcatgagc

SEQ ID NO: 6025499 - DNA, 25 bp, Homo sapien
gccacaggaggtcttcagaccatga

SEQ ID NO: 6025500 - DNA, 25 bp, Homo sapien
agagctgcatgatgcatacgcggaa

SEQ ID NO: 6025501 - DNA, 25 bp, Homo sapien
accatgaggccagtatctgctccag

SEQ ID NO: 6025502 - DNA, 25 bp, Homo sapien
aggcgaagatcatgacaaccaccat

SEQ ID NO: 6025503 - DNA, 25 bp, Homo sapien
aagcccatttagcatcaaacttgac

SEQ ID NO: 6025504 - DNA, 25 bp, Homo sapien
gcgctcttggcaaagtaggcaggca

SEQ ID NO: 6025505 - DNA, 25 bp, Homo sapien
ctgctgggcaacagcatggatggcc

SEQ ID NO: 6025506 - DNA, 25 bp, Homo sapien
atcagggccacaggaggtcttcaga

SEQ ID NO: 6025507 - DNA, 25 bp, Homo sapien
cagaatccttctgctgctgggcaac

SEQ ID NO: 6025508 - DNA, 25 bp, Homo sapien
tgggtggaaggcatagcctgggttt

SEQ ID NO: 6025509 - DNA, 25 bp, Homo sapien
atttagcatcaaacttgacatttcc

SEQ ID NO: 6025510 - DNA, 25 bp, Homo sapien
tgcaaagcaggcgaagaacgtgtaa

SEQ ID NO: 6025511 - DNA, 25 bp, Homo sapien
aatagctagagggatgatacagcag

SEQ ID NO: 6025512 - DNA, 25 bp, Homo sapien
aacagtaggcgaagatcatgacaac

SEQ ID NO: 6025513 - DNA, 25 bp, Homo sapien
cagcagcccaaacccaggagaagat

SEQ ID NO: 6025514 - DNA, 25 bp, Homo sapien
ggtgcacaccaagcagcagcccaaa

SEQ ID NO: 6025515 - DNA, 25 bp, Homo sapien
gcatacgcggaactgtcggttcatg

SEQ ID NO: 6025516 - DNA, 25 bp, Homo sapien
tgccagtgggtggaaggcatagcct

SEQ ID NO: 6025517 - DNA, 25 bp, Homo sapien
gaccccagcagaaacagtaggcgaa

SEQ ID NO: 6025518 - DNA, 25 bp, Homo sapien
gtggacacctcagagccatcatcca

SEQ ID NO: 6025519 - DNA, 25 bp, Homo sapien
cagagaatgataatagctagaggga

SEQ ID NO: 6025520 - DNA, 25 bp, Homo sapien
gaagacatcagggccacaggaggtc

SEQ ID NO: 6025521 - DNA, 25 bp, Homo sapien
acagcaggtgatcatgagcaccacc

SEQ ID NO: 6025522 - DNA, 25 bp, Homo sapien
ttgtagatggtggcgctcttggcaa

SEQ ID NO: 6025523 - DNA, 25 bp, Homo sapien
cctcagagccatcatccaccttctt

SEQ ID NO: 6025524 - DNA, 25 bp, Homo sapien
ctcgcttccactgaagacatcaggg

SEQ ID NO: 6025525 - DNA, 25 bp, Homo sapien
caaatggtttacagacaaccaccca

SEQ ID NO: 6025526 - DNA, 25 bp, Homo sapien
gcatgatgcatacgcggaactgtcg

SEQ ID NO: 6025527 - DNA, 25 bp, Homo sapien
ccttctcggccttctgtgtggactc

SEQ ID NO: 6025528 - DNA, 25 bp, Homo sapien
tagagggatgatacagcaggtgatc

SEQ ID NO: 6025529 - DNA, 25 bp, Homo sapien
catgtaggactgaactccagggtcc

SEQ ID NO: 6025530 - DNA, 25 bp, Homo sapien
aactccagggtcctcgcttccactg

SEQ ID NO: 6025531 - DNA, 25 bp, Homo sapien
ggaggtcttcagaccatgaggccag

SEQ ID NO: 6025532 - DNA, 25 bp, Homo sapien
ctccagccaaagatgggaggtgcac

SEQ ID NO: 6025533 - DNA, 25 bp, Homo sapien
actgtcggttcatgaagacataaat

SEQ ID NO: 6025534 - DNA, 25 bp, Homo sapien
ggtgatcatgagcaccaccatgtag

SEQ ID NO: 6025535 - DNA, 25 bp, Homo sapien
atgggaggtgcacaccaagcagcag

SEQ ID NO: 6025536 - DNA, 25 bp, Homo sapien
cccaggagaagataatgccagcaga

SEQ ID NO: 6025537 - DNA, 25 bp, Homo sapien
agcagaaacagtaggcgaagatcat

SEQ ID NO: 6025538 - DNA, 25 bp, Homo sapien
acagcaatgtagcagagaatgataa

SEQ ID NO: 6025539 - DNA, 25 bp, Homo sapien
catccaccttctttccaaagagctg

SEQ ID NO: 6025540 - DNA, 25 bp, Homo sapien
aaatgacggggttgtagatggtggc

SEQ ID NO: 6025541 - DNA, 25 bp, Homo sapien
ccaaagatgggaggtgcacaccaag

SEQ ID NO: 6025542 - DNA, 25 bp, Homo sapien
ttggatgtggacacctcagagccat

SEQ ID NO: 6025543 - DNA, 25 bp, Homo sapien
gatggccaggtacacagcaatgtag

SEQ ID NO: 6025544 - DNA, 25 bp, Homo sapien
gaaggcatagcctgggtttgcagct

SEQ ID NO: 6025545 - DNA, 25 bp, Homo sapien
tgtaaggaccccagcagaaacagta

SEQ ID NO: 6025546 - DNA, 25 bp, Homo sapien
tctgtgtggactcagaatccttctg

SEQ ID NO: 6025547 - DNA, 25 bp, Homo sapien
acttgacatttccaaatggtttaca

SEQ ID NO: 6025548 - DNA, 25 bp, Homo sapien
acacttccttctcggccttctgtgt

SEQ ID NO: 6025549 - DNA, 25 bp, Homo sapien
gcaggcgaagaacgtgtaaggaccc

SEQ ID NO: 6025550 - DNA, 25 bp, Homo sapien
caggtacacagcaatgtagcagaga

SEQ ID NO: 6025551 - DNA, 25 bp, Homo sapien
catgagcaccaccatgtaggactga

SEQ ID NO: 6025552 - DNA, 25 bp, Homo sapien
aatgataatagctagagggatgata

SEQ ID NO: 6025553 - DNA, 25 bp, Homo sapien
ggttcatgaagacataaatgacggg

SEQ ID NO: 6025554 - DNA, 25 bp, Homo sapien
agcatggatggccaggtacacagca

SEQ ID NO: 6025555 - DNA, 25 bp, Homo sapien
catcaaacttgacatttccaaatgg

SEQ ID NO: 6025556 - DNA, 25 bp, Homo sapien
tggactcagaatccttctgctgctg

SEQ ID NO: 6025557 - DNA, 25 bp, Homo sapien
caagcagcagcccaaacccaggaga

SEQ ID NO: 6025558 - DNA, 25 bp, Homo sapien
accattctggacacttccttctcgg

SEQ ID NO: 6025559 - DNA, 25 bp, Homo sapien
cttggcaaagtaggcaggcatggct

SEQ ID NO: 6025560 - DNA, 25 bp, Homo sapien
tccactgaagacatcagggccacag

SEQ ID NO: 6025561 - DNA, 25 bp, Homo sapien
tgacaaccaccattctggacacttc

SEQ ID NO: 6025562 - DNA, 25 bp, Homo sapien
gtatctgctccagccaaagatggga

SEQ ID NO: 6025563 - DNA, 25 bp, Homo sapien
aggccagtatctgctccagccaaag

SEQ ID NO: 6025564 - DNA, 25 bp, Homo sapien
ggctgctgccagtgggtggaaggca

SEQ ID NO: 6025565 - DNA, 25 bp, Homo sapien
ctgggtttgcagctgcaaagcaggc

SEQ ID NO: 6025566 - DNA, 25 bp, Homo sapien
agccatcatccaccttctttccaaa

SEQ ID NO: 6025567 - DNA, 25 bp, Homo sapien
atgtagcagagaatgataatagcta

SEQ ID NO: 6025568 - DNA, 25 bp, Homo sapien
taatgccagcagaagcccatttagc

SEQ ID NO: 6025569 - DNA, 25 bp, Homo sapien
ggactgaactccagggtcctcgctt

SEQ ID NO: 6025570 - DNA, 25 bp, Homo sapien
ttccaaagagctgcatgatgcatac

SEQ ID NO: 6025571 - DNA, 25 bp, Homo sapien
agaagataatgccagcagaagccca

SEQ ID NO: 6025572 - DNA, 25 bp, Homo sapien
cttcagaccatgaggccagtatctg

SEQ ID NO: 6025573 - DNA, 25 bp, Homo sapien
ttctggacacttccttctcggcctt

SEQ ID NO: 6025574 - DNA, 25 bp, Homo sapien
ggcaacagcatggatggccaggtac

SEQ ID NO: 6025575 - DNA, 25 bp, Homo sapien
gcggaactgtcggttcatgaagaca

SEQ ID NO: 6025576 - DNA, 25 bp, Homo sapien
catagcctgggtttgcagctgcaaa

SEQ ID NO: 6025577 - DNA, 25 bp, Homo sapien
agaacgtgtaaggaccccagcagaa

SEQ ID NO: 6025578 - DNA, 25 bp, Homo sapien
ccttctgctgctgggcaacagcatg

SEQ ID NO: 6025579 - DNA, 25 bp, Homo sapien
agggtcctcgcttccactgaagaca

SEQ ID NO: 6025580 - DNA, 25 bp, Homo sapien
ccttctttccaaagagctgcatgat

SEQ ID NO: 6025581 - DNA, 25 bp, Homo sapien
agatcatgacaaccaccattctgga

SEQ ID NO: 6025582 - DNA, 25 bp, Homo sapien
aagtaggcaggcatggctgctgcca

SEQ ID NO: 6025583 - DNA, 25 bp, Homo sapien
atggtggcgctcttggcaaagtagg

SEQ ID NO: 6025584 - DNA, 25 bp, Homo sapien
catttccaaatggtttacagacaac

SEQ ID NO: 6025585 - DNA, 25 bp, Homo sapien
cccaaacccaggagaagataatgcc

SEQ ID NO: 6025586 - DNA, 25 bp, Homo sapien
cggccttctgtgtggactcagaatc

SEQ ID NO: 6025587 - DNA, 25 bp, Homo sapien
caccaccatgtaggactgaactcca

SEQ ID NO: 6025588 - DNA, 25 bp, Homo sapien
tgcagctgcaaagcaggcgaagaac

SEQ ID NO: 6025589 - DNA, 25 bp, Homo sapien
gacggggttgtagatggtggcgctc

SEQ ID NO: 6025590 - DNA, 25 bp, Homo sapien
cagcagaagcccatttagcatcaaa

SEQ ID NO: 6025591 - DNA, 25 bp, Homo sapien
ttaccgccaacgcgcaatatgcctt

SEQ ID NO: 6025592 - DNA, 25 bp, Homo sapien
ccggctaacgtatccacgccgtatt

SEQ ID NO: 6025593 - DNA, 25 bp, Homo sapien
gtgatacatatccagccatgcacac

SEQ ID NO: 6025594 - DNA, 25 bp, Homo sapien
ccgctttggacataccatccgtaat

SEQ ID NO: 6025595 - DNA, 25 bp, Homo sapien
gaagatccctttcttgttaccgcca

SEQ ID NO: 6025596 - DNA, 25 bp, Homo sapien
acgacggcgctgacgcgatcaaaga

SEQ ID NO: 6025597 - DNA, 25 bp, Homo sapien
gacgcgatcaaagacgcggtgatac

SEQ ID NO: 6025598 - DNA, 25 bp, Homo sapien
atgccttgcgaggtcgcaaaatcgg

SEQ ID NO: 6025599 - DNA, 25 bp, Homo sapien
ttcaggcacagcacatcaaagagat

SEQ ID NO: 6025600 - DNA, 25 bp, Homo sapien
gagcgtcgcagaacattacattgac

SEQ ID NO: 6025601 - DNA, 25 bp, Homo sapien
cgcgtcgggtcgagtttacgcgttg

SEQ ID NO: 6025602 - DNA, 25 bp, Homo sapien
gcgctgacgcgatcaaagacgcggt

SEQ ID NO: 6025603 - DNA, 25 bp, Homo sapien
acgcttgggtggtttttgtcacgcg

SEQ ID NO: 6025604 - DNA, 25 bp, Homo sapien
attgacgcaggtgatcggacgcgtc

SEQ ID NO: 6025605 - DNA, 25 bp, Homo sapien
tccacgccgtattcggtgatgataa

SEQ ID NO: 6025606 - DNA, 25 bp, Homo sapien
cactccacatgtcggtgtacattga

SEQ ID NO: 6025607 - DNA, 25 bp, Homo sapien
tctgccgtttccaaatcgccgcttt

SEQ ID NO: 6025608 - DNA, 25 bp, Homo sapien
acatcaaagagatcgctgatggtat

SEQ ID NO: 6025609 - DNA, 25 bp, Homo sapien
tcgttggcaatactccacatcacca

SEQ ID NO: 6025610 - DNA, 25 bp, Homo sapien
acctgttcaccgacgacggcgctga

SEQ ID NO: 6025611 - DNA, 25 bp, Homo sapien
tgcaccttgcggacgggtatccggt

SEQ ID NO: 6025612 - DNA, 25 bp, Homo sapien
gcggtcgcgagtgaagatccctttc

SEQ ID NO: 6025613 - DNA, 25 bp, Homo sapien
tccagtaccttctctgccgtttcca

SEQ ID NO: 6025614 - DNA, 25 bp, Homo sapien
catgccagtccagcgtttttgcagc

SEQ ID NO: 6025615 - DNA, 25 bp, Homo sapien
taccatccgtaataacggttcaggc

SEQ ID NO: 6025616 - DNA, 25 bp, Homo sapien
cgcaatatgccttgcgaggtcgcaa

SEQ ID NO: 6025617 - DNA, 25 bp, Homo sapien
tcttgttaccgccaacgcgcaatat

SEQ ID NO: 6025618 - DNA, 25 bp, Homo sapien
cgccagtggcgcgaaatattcccgt

SEQ ID NO: 6025619 - DNA, 25 bp, Homo sapien
ccgccgacttcggtttgcggtcgcg

SEQ ID NO: 6025620 - DNA, 25 bp, Homo sapien
actcttcactccacatgtcggtgta

SEQ ID NO: 6025621 - DNA, 25 bp, Homo sapien
gaagttcatgccagtccagcgtttt

SEQ ID NO: 6025622 - DNA, 25 bp, Homo sapien
tgatgcagtttctcctgccaggcca

SEQ ID NO: 6025623 - DNA, 25 bp, Homo sapien
cgcagaacattacattgacgcaggt

SEQ ID NO: 6025624 - DNA, 25 bp, Homo sapien
ctccacatcaccacgcttgggtggt

SEQ ID NO: 6025625 - DNA, 25 bp, Homo sapien
aacgtatccacgccgtattcggtga

SEQ ID NO: 6025626 - DNA, 25 bp, Homo sapien
gcgagtgaagatccctttcttgtta

SEQ ID NO: 6025627 - DNA, 25 bp, Homo sapien
ttccatacctgttcaccgacgacgg

SEQ ID NO: 6025628 - DNA, 25 bp, Homo sapien
atgataatcggctgatgcagtttct

SEQ ID NO: 6025629 - DNA, 25 bp, Homo sapien
tggtatcggtgtgagcgtcgcagaa

SEQ ID NO: 6025630 - DNA, 25 bp, Homo sapien
aaatcggcgaaattccatacctgtt

SEQ ID NO: 6025631 - DNA, 25 bp, Homo sapien
ccgtattcggtgatgataatcggct

SEQ ID NO: 6025632 - DNA, 25 bp, Homo sapien
tggcgcgaaatattcccgtgcacct

SEQ ID NO: 6025633 - DNA, 25 bp, Homo sapien
gacgcggtgatacatatccagccat

SEQ ID NO: 6025634 - DNA, 25 bp, Homo sapien
acattgagtgcagcccggctaacgt

SEQ ID NO: 6025635 - DNA, 25 bp, Homo sapien
atcaccacgcttgggtggtttttgt

SEQ ID NO: 6025636 - DNA, 25 bp, Homo sapien
tcaccgacgacggcgctgacgcgat

SEQ ID NO: 6025637 - DNA, 25 bp, Homo sapien
tgcttccgccagtggcgcgaaatat

SEQ ID NO: 6025638 - DNA, 25 bp, Homo sapien
agtttctcctgccaggccagaagtt

SEQ ID NO: 6025639 - DNA, 25 bp, Homo sapien
ggtatccggttcgttggcaatactc

SEQ ID NO: 6025640 - DNA, 25 bp, Homo sapien
acttcggtttgcggtcgcgagtgaa

SEQ ID NO: 6025641 - DNA, 25 bp, Homo sapien
cctttcttgttaccgccaacgcgca

SEQ ID NO: 6025642 - DNA, 25 bp, Homo sapien
ccaacgcgcaatatgccttgcgagg

SEQ ID NO: 6025643 - DNA, 25 bp, Homo sapien
tctttttccagtaccttctctgccg

SEQ ID NO: 6025644 - DNA, 25 bp, Homo sapien
cagaaaagccgccgacttcggtttg

SEQ ID NO: 6025645 - DNA, 25 bp, Homo sapien
tcctgccaggccagaagttcttttt

SEQ ID NO: 6025646 - DNA, 25 bp, Homo sapien
acattacattgacgcaggtgatcgg

SEQ ID NO: 6025647 - DNA, 25 bp, Homo sapien
cgagtttacgcgttgcttccgccag

SEQ ID NO: 6025648 - DNA, 25 bp, Homo sapien
gtttccaaatcgccgctttggacat

SEQ ID NO: 6025649 - DNA, 25 bp, Homo sapien
ttcccgtgcaccttgcggacgggta

SEQ ID NO: 6025650 - DNA, 25 bp, Homo sapien
ccgtaataacggttcaggcacagca

SEQ ID NO: 6025651 - DNA, 25 bp, Homo sapien
caggccagaagttctttttccagta

SEQ ID NO: 6025652 - DNA, 25 bp, Homo sapien
atcggctgatgcagtttctcctgcc

SEQ ID NO: 6025653 - DNA, 25 bp, Homo sapien
tggacataccatccgtaataacggt

SEQ ID NO: 6025654 - DNA, 25 bp, Homo sapien
gtgcagcccggctaacgtatccacg

SEQ ID NO: 6025655 - DNA, 25 bp, Homo sapien
atgcacactgatactcttcactcca

SEQ ID NO: 6025656 - DNA, 25 bp, Homo sapien
aagagatcgctgatggtatcggtgt

SEQ ID NO: 6025657 - DNA, 25 bp, Homo sapien
cagccatgcacactgatactcttca

SEQ ID NO: 6025658 - DNA, 25 bp, Homo sapien
cggtgtgagcgtcgcagaacattac

SEQ ID NO: 6025659 - DNA, 25 bp, Homo sapien
ccggttcgttggcaatactccacat

SEQ ID NO: 6025660 - DNA, 25 bp, Homo sapien
atcaaagacgcggtgatacatatcc

SEQ ID NO: 6025661 - DNA, 25 bp, Homo sapien
tcgggtcgagtttacgcgttgcttc

SEQ ID NO: 6025662 - DNA, 25 bp, Homo sapien
gtttgcggtcgcgagtgaagatccc

SEQ ID NO: 6025663 - DNA, 25 bp, Homo sapien
tacgcgttgcttccgccagtggcgc

SEQ ID NO: 6025664 - DNA, 25 bp, Homo sapien
catatccagccatgcacactgatac

SEQ ID NO: 6025665 - DNA, 25 bp, Homo sapien
tgcgaggtcgcaaaatcggcgaaat

SEQ ID NO: 6025666 - DNA, 25 bp, Homo sapien
gatcggacgcgtcgggtcgagttta

SEQ ID NO: 6025667 - DNA, 25 bp, Homo sapien
cggtgtacattgagtgcagcccggc

SEQ ID NO: 6025668 - DNA, 25 bp, Homo sapien
taacggttcaggcacagcacatcaa

SEQ ID NO: 6025669 - DNA, 25 bp, Homo sapien
gcaggtgatcggacgcgtcgggtcg

SEQ ID NO: 6025670 - DNA, 25 bp, Homo sapien
agtccagcgtttttgcagcagaaaa

SEQ ID NO: 6025671 - DNA, 25 bp, Homo sapien
gtcgcaaaatcggcgaaattccata

SEQ ID NO: 6025672 - DNA, 25 bp, Homo sapien
gcgaaattccatacctgttcaccga

SEQ ID NO: 6025673 - DNA, 25 bp, Homo sapien
ttgcagcagaaaagccgccgacttc

SEQ ID NO: 6025674 - DNA, 25 bp, Homo sapien
gcaatactccacatcaccacgcttg

SEQ ID NO: 6025675 - DNA, 25 bp, Homo sapien
acatgtcggtgtacattgagtgcag

SEQ ID NO: 6025676 - DNA, 25 bp, Homo sapien
accttctctgccgtttccaaatcgc

SEQ ID NO: 6025677 - DNA, 25 bp, Homo sapien
gcgtttttgcagcagaaaagccgcc

SEQ ID NO: 6025678 - DNA, 25 bp, Homo sapien
tcggtgatgataatcggctgatgca

SEQ ID NO: 6025679 - DNA, 25 bp, Homo sapien
cacagcacatcaaagagatcgctga

SEQ ID NO: 6025680 - DNA, 25 bp, Homo sapien
aaatcgccgctttggacataccatc

SEQ ID NO: 6025681 - DNA, 25 bp, Homo sapien
cgctgatggtatcggtgtgagcgtc

SEQ ID NO: 6025682 - DNA, 25 bp, Homo sapien
gaaatattcccgtgcaccttgcgga

SEQ ID NO: 6025683 - DNA, 25 bp, Homo sapien
gggtggtttttgtcacgcgctatca

SEQ ID NO: 6025684 - DNA, 25 bp, Homo sapien
actgatactcttcactccacatgtc

SEQ ID NO: 6025685 - DNA, 25 bp, Homo sapien
tgatgatttcttgggctccattccc

SEQ ID NO: 6025686 - DNA, 25 bp, Homo sapien
acaaagacatcaagcatcagagtga

SEQ ID NO: 6025687 - DNA, 25 bp, Homo sapien
agcatcagagtgaatccagcaatgc

SEQ ID NO: 6025688 - DNA, 25 bp, Homo sapien
attataatattggaagaatcttgtg

SEQ ID NO: 6025689 - DNA, 25 bp, Homo sapien
agcaaatttactttagtaggaactg

SEQ ID NO: 6025690 - DNA, 25 bp, Homo sapien
tatataaaactttgccagtatcatt

SEQ ID NO: 6025691 - DNA, 25 bp, Homo sapien
aaactttgccagtatcattgatgat

SEQ ID NO: 6025692 - DNA, 25 bp, Homo sapien
ccaggtttttctatggcattttata

SEQ ID NO: 6025693 - DNA, 25 bp, Homo sapien
ctttagttgcgaatgggttcttgac

SEQ ID NO: 6025694 - DNA, 25 bp, Homo sapien
cttaacataactagcaaatttactt

SEQ ID NO: 6025695 - DNA, 25 bp, Homo sapien
cattcccatgaaggacctactttta

SEQ ID NO: 6025696 - DNA, 25 bp, Homo sapien
aggaactggtggatccctttctgga

SEQ ID NO: 6025697 - DNA, 25 bp, Homo sapien
aggttagcggttatataatattcca

SEQ ID NO: 6025698 - DNA, 25 bp, Homo sapien
ccatgctgacaaaaagctcagaaat

SEQ ID NO: 6025699 - DNA, 25 bp, Homo sapien
ccaatggacaccctgtgttcagaga

SEQ ID NO: 6025700 - DNA, 25 bp, Homo sapien
tgacaaaaagctcagaaattacctt

SEQ ID NO: 6025701 - DNA, 25 bp, Homo sapien
cagacccttaacataactagcaaat

SEQ ID NO: 6025702 - DNA, 25 bp, Homo sapien
aatcacccaatggacaccctgtgtt

SEQ ID NO: 6025703 - DNA, 25 bp, Homo sapien
cttttaaaatgtgaaatgtcctcat

SEQ ID NO: 6025704 - DNA, 25 bp, Homo sapien
ctttagtaggaactggtggatccct

SEQ ID NO: 6025705 - DNA, 25 bp, Homo sapien
agtttatttaaccattcctgtattg

SEQ ID NO: 6025706 - DNA, 25 bp, Homo sapien
gggctccattcccatgaaggaccta

SEQ ID NO: 6025707 - DNA, 25 bp, Homo sapien
cttgtgtatataaaactttgccagt

SEQ ID NO: 6025708 - DNA, 25 bp, Homo sapien
aaagggatattctaccctcaaactg

SEQ ID NO: 6025709 - DNA, 25 bp, Homo sapien
tttaaccattcctgtattgttgact

SEQ ID NO: 6025710 - DNA, 25 bp, Homo sapien
ttttctatggcattttataccaaaa

SEQ ID NO: 6025711 - DNA, 25 bp, Homo sapien
actttttctttcagaattgccaggt

SEQ ID NO: 6025712 - DNA, 25 bp, Homo sapien
tgtgctagcaactggctgcaatcac

SEQ ID NO: 6025713 - DNA, 25 bp, Homo sapien
cagtaccaagcagcctgggtggggt

SEQ ID NO: 6025714 - DNA, 25 bp, Homo sapien
tggctgcaatcacccaatggacacc

SEQ ID NO: 6025715 - DNA, 25 bp, Homo sapien
tggtaactttttctttcagaattgc

SEQ ID NO: 6025716 - DNA, 25 bp, Homo sapien
tataatattccatttaatggatgca

SEQ ID NO: 6025717 - DNA, 25 bp, Homo sapien
ataactagcaaatttactttagtag

SEQ ID NO: 6025718 - DNA, 25 bp, Homo sapien
tattccatttaatggatgcagctca

SEQ ID NO: 6025719 - DNA, 25 bp, Homo sapien
tcactttataaaaagggatattcta

SEQ ID NO: 6025720 - DNA, 25 bp, Homo sapien
tataaaaagggatattctaccctca

SEQ ID NO: 6025721 - DNA, 25 bp, Homo sapien
ttgcgaatgggttcttgacaagatg

SEQ ID NO: 6025722 - DNA, 25 bp, Homo sapien
ttctaccctcaaactggaggggtga

SEQ ID NO: 6025723 - DNA, 25 bp, Homo sapien
tcctcatgtgttgtcactttataaa

SEQ ID NO: 6025724 - DNA, 25 bp, Homo sapien
ggctactttagttgcgaatgggttc

SEQ ID NO: 6025725 - DNA, 25 bp, Homo sapien
aagaaacacagtggctactttagtt

SEQ ID NO: 6025726 - DNA, 25 bp, Homo sapien
tgccagtatcattgatgatttcttg

SEQ ID NO: 6025727 - DNA, 25 bp, Homo sapien
aaatgtgaaatgtcctcatgtgttg

SEQ ID NO: 6025728 - DNA, 25 bp, Homo sapien
tctttcagaattgccaggtttttct

SEQ ID NO: 6025729 - DNA, 25 bp, Homo sapien
tgactatgtttttaattttcttcat

SEQ ID NO: 6025730 - DNA, 25 bp, Homo sapien
atttaatggatgcagctcagtttat

SEQ ID NO: 6025731 - DNA, 25 bp, Homo sapien
gaattgccaggtttttctatggcat

SEQ ID NO: 6025732 - DNA, 25 bp, Homo sapien
acacaagaaaacacaaagacatcaa

SEQ ID NO: 6025733 - DNA, 25 bp, Homo sapien
tggtggatccctttctggacacaag

SEQ ID NO: 6025734 - DNA, 25 bp, Homo sapien
tatcattgatgatttcttgggctcc

SEQ ID NO: 6025735 - DNA, 25 bp, Homo sapien
agcaactggctgcaatcacccaatg

SEQ ID NO: 6025736 - DNA, 25 bp, Homo sapien
tgtgttgtcactttataaaaaggga

SEQ ID NO: 6025737 - DNA, 25 bp, Homo sapien
ggaagaatcttgtgtatataaaact

SEQ ID NO: 6025738 - DNA, 25 bp, Homo sapien
ggatattctaccctcaaactggagg

SEQ ID NO: 6025739 - DNA, 25 bp, Homo sapien
aatccagcaatgcagtaccaagcag

SEQ ID NO: 6025740 - DNA, 25 bp, Homo sapien
tttcttgggctccattcccatgaag

SEQ ID NO: 6025741 - DNA, 25 bp, Homo sapien
gaaaacacaaagacatcaagcatca

SEQ ID NO: 6025742 - DNA, 25 bp, Homo sapien
cagctcagtttatttaaccattcct

SEQ ID NO: 6025743 - DNA, 25 bp, Homo sapien
ttctggacacaagaaaacacaaaga

SEQ ID NO: 6025744 - DNA, 25 bp, Homo sapien
aaacaggttagcggttatataatat

SEQ ID NO: 6025745 - DNA, 25 bp, Homo sapien
gaaatgtcctcatgtgttgtcactt

SEQ ID NO: 6025746 - DNA, 25 bp, Homo sapien
tggatgcagctcagtttatttaacc

SEQ ID NO: 6025747 - DNA, 25 bp, Homo sapien
gggtgaccatgctgacaaaaagctc

SEQ ID NO: 6025748 - DNA, 25 bp, Homo sapien
ctggaggggtgaccatgctgacaaa

SEQ ID NO: 6025749 - DNA, 25 bp, Homo sapien
cacagtggctactttagttgcgaat

SEQ ID NO: 6025750 - DNA, 25 bp, Homo sapien
ttacaaaagaaacacagtggctact

SEQ ID NO: 6025751 - DNA, 25 bp, Homo sapien
cattcctgtattgttgactatgttt

SEQ ID NO: 6025752 - DNA, 25 bp, Homo sapien
gtggggtgtgctagcaactggctgc

SEQ ID NO: 6025753 - DNA, 25 bp, Homo sapien
aatattggaagaatcttgtgtatat

SEQ ID NO: 6025754 - DNA, 25 bp, Homo sapien
gcctgggtggggtgtgctagcaact

SEQ ID NO: 6025755 - DNA, 25 bp, Homo sapien
gcaatgcagtaccaagcagcctggg

SEQ ID NO: 6025756 - DNA, 25 bp, Homo sapien
tgtattgttgactatgtttttaatt

SEQ ID NO: 6025757 - DNA, 25 bp, Homo sapien
caagcagcctgggtggggtgtgcta

SEQ ID NO: 6025758 - DNA, 25 bp, Homo sapien
acatcaagcatcagagtgaatccag

SEQ ID NO: 6025759 - DNA, 25 bp, Homo sapien
atggcattttataccaaaaacaggt

SEQ ID NO: 6025760 - DNA, 25 bp, Homo sapien
caagatgtttcccaataacccagac

SEQ ID NO: 6025761 - DNA, 25 bp, Homo sapien
cctcaaactggaggggtgaccatgc

SEQ ID NO: 6025762 - DNA, 25 bp, Homo sapien
tgaaggacctacttttaaaatgtga

SEQ ID NO: 6025763 - DNA, 25 bp, Homo sapien
agagtgaatccagcaatgcagtacc

SEQ ID NO: 6025764 - DNA, 25 bp, Homo sapien
tcttgacaagatgtttcccaataac

SEQ ID NO: 6025765 - DNA, 25 bp, Homo sapien
cggttatataatattccatttaatg

SEQ ID NO: 6025766 - DNA, 25 bp, Homo sapien
atccctttctggacacaagaaaaca

SEQ ID NO: 6025767 - DNA, 25 bp, Homo sapien
atgggttcttgacaagatgtttccc

SEQ ID NO: 6025768 - DNA, 25 bp, Homo sapien
aggactgcttctctcagacgtcctc

SEQ ID NO: 6025769 - DNA, 25 bp, Homo sapien
ctactaaagtaaatttgctagttat

SEQ ID NO: 6025770 - DNA, 25 bp, Homo sapien
gtcctcctgacctctccaacctggt

SEQ ID NO: 6025771 - DNA, 25 bp, Homo sapien
attgcagccagttgctagcacaccc

SEQ ID NO: 6025772 - DNA, 25 bp, Homo sapien
gctagcacaccccacccaggctgct

SEQ ID NO: 6025773 - DNA, 25 bp, Homo sapien
tgggtgattgcagccagttgctagc

SEQ ID NO: 6025774 - DNA, 25 bp, Homo sapien
ctgggttattgggaaacatcttgtc

SEQ ID NO: 6025775 - DNA, 25 bp, Homo sapien
acagggtgtccattgggtgattgca

SEQ ID NO: 6025776 - DNA, 25 bp, Homo sapien
atttcttggattgggggaatcctcg

SEQ ID NO: 6025777 - DNA, 25 bp, Homo sapien
tcaagaacccattcgcaactaaagt

SEQ ID NO: 6025778 - DNA, 25 bp, Homo sapien
cttctctcagacgtcctcctgacct

SEQ ID NO: 6025779 - DNA, 25 bp, Homo sapien
gccacaccctgccttcctcctccct

SEQ ID NO: 6025780 - DNA, 25 bp, Homo sapien
cctccctagaatgccactcttggga

SEQ ID NO: 6025781 - DNA, 25 bp, Homo sapien
ccagttgctagcacaccccacccag

SEQ ID NO: 6025782 - DNA, 25 bp, Homo sapien
ctgcattgctggattcactctgatg

SEQ ID NO: 6025783 - DNA, 25 bp, Homo sapien
taaaagtccaagttcggttcactca

SEQ ID NO: 6025784 - DNA, 25 bp, Homo sapien
ccctgccttcctcctccctagaatg

SEQ ID NO: 6025785 - DNA, 25 bp, Homo sapien
gactattcttcttcctccttgttcc

SEQ ID NO: 6025786 - DNA, 25 bp, Homo sapien
acaccccacccaggctgcttggtac

SEQ ID NO: 6025787 - DNA, 25 bp, Homo sapien
ctctccaacctggttcaggactatt

SEQ ID NO: 6025788 - DNA, 25 bp, Homo sapien
gcatgacattagagaccttagtctc

SEQ ID NO: 6025789 - DNA, 25 bp, Homo sapien
gcatctctgaacacagggtgtccat

SEQ ID NO: 6025790 - DNA, 25 bp, Homo sapien
ttgttcctcatagcatgacattaga

SEQ ID NO: 6025791 - DNA, 25 bp, Homo sapien
tcaataaaagtccaagttcggttca

SEQ ID NO: 6025792 - DNA, 25 bp, Homo sapien
actgactgtccagacacaagccaca

SEQ ID NO: 6025793 - DNA, 25 bp, Homo sapien
cagttcctactaaagtaaatttgct

SEQ ID NO: 6025794 - DNA, 25 bp, Homo sapien
ggctgcttggtactgcattgctgga

SEQ ID NO: 6025795 - DNA, 25 bp, Homo sapien
tgctagttatgttaagggtctgggt

SEQ ID NO: 6025796 - DNA, 25 bp, Homo sapien
tcctccttgttcctcatagcatgac

SEQ ID NO: 6025797 - DNA, 25 bp, Homo sapien
attcactctgatgcttgatgtcttt

SEQ ID NO: 6025798 - DNA, 25 bp, Homo sapien
gcttgatgtctttgtgttttcttgt

SEQ ID NO: 6025799 - DNA, 25 bp, Homo sapien
tagaatgccactcttgggaggactg

SEQ ID NO: 6025800 - DNA, 25 bp, Homo sapien
tagtctccaggacactgtactgggc

SEQ ID NO: 6025801 - DNA, 25 bp, Homo sapien
tgtctttgtgttttcttgtgtccag

SEQ ID NO: 6025802 - DNA, 25 bp, Homo sapien
tcgcaactaaagtagccactgtgtt

SEQ ID NO: 6025803 - DNA, 25 bp, Homo sapien
ggaaacatcttgtcaagaacccatt

SEQ ID NO: 6025804 - DNA, 25 bp, Homo sapien
tgggggaatcctcgagcaaaatctt

SEQ ID NO: 6025805 - DNA, 25 bp, Homo sapien
ttattgggaaacatcttgtcaagaa

SEQ ID NO: 6025806 - DNA, 25 bp, Homo sapien
acatgcctaccactgactgtccaga

SEQ ID NO: 6025807 - DNA, 25 bp, Homo sapien
aacctggttcaggactattcttctt

SEQ ID NO: 6025808 - DNA, 25 bp, Homo sapien
ctcatagcatgacattagagacctt

SEQ ID NO: 6025809 - DNA, 25 bp, Homo sapien
gaaagggatccaccagttcctacta

SEQ ID NO: 6025810 - DNA, 25 bp, Homo sapien
cattagagaccttagtctccaggac

SEQ ID NO: 6025811 - DNA, 25 bp, Homo sapien
tactgggcatctctgaacacagggt

SEQ ID NO: 6025812 - DNA, 25 bp, Homo sapien
tcttcttcctccttgttcctcatag

SEQ ID NO: 6025813 - DNA, 25 bp, Homo sapien
cacccaggctgcttggtactgcatt

SEQ ID NO: 6025814 - DNA, 25 bp, Homo sapien
tgctaactggatctccgcctactta

SEQ ID NO: 6025815 - DNA, 25 bp, Homo sapien
gttcaggactattcttcttcctcct

SEQ ID NO: 6025816 - DNA, 25 bp, Homo sapien
tgtccagaaagggatccaccagttc

SEQ ID NO: 6025817 - DNA, 25 bp, Homo sapien
gttcggttcactcatttccagttta

SEQ ID NO: 6025818 - DNA, 25 bp, Homo sapien
tagccactgtgtttcttttgtaaaa

SEQ ID NO: 6025819 - DNA, 25 bp, Homo sapien
gccactcttgggaggactgcttctc

SEQ ID NO: 6025820 - DNA, 25 bp, Homo sapien
ccaggacactgtactgggcatctct

SEQ ID NO: 6025821 - DNA, 25 bp, Homo sapien
atcttgtcaagaacccattcgcaac

SEQ ID NO: 6025822 - DNA, 25 bp, Homo sapien
aatgtcacatgcctaccactgactg

SEQ ID NO: 6025823 - DNA, 25 bp, Homo sapien
cactgtactgggcatctctgaacac

SEQ ID NO: 6025824 - DNA, 25 bp, Homo sapien
ctaccactgactgtccagacacaag

SEQ ID NO: 6025825 - DNA, 25 bp, Homo sapien
ctgacctctccaacctggttcagga

SEQ ID NO: 6025826 - DNA, 25 bp, Homo sapien
tgtgttttcttgtgtccagaaaggg

SEQ ID NO: 6025827 - DNA, 25 bp, Homo sapien
aatttgctagttatgttaagggtct

SEQ ID NO: 6025828 - DNA, 25 bp, Homo sapien
aatcctcgagcaaaatcttgggcct

SEQ ID NO: 6025829 - DNA, 25 bp, Homo sapien
gtccattgggtgattgcagccagtt

SEQ ID NO: 6025830 - DNA, 25 bp, Homo sapien
ttcttgtgtccagaaagggatccac

SEQ ID NO: 6025831 - DNA, 25 bp, Homo sapien
tcccaccagggaaatgtcacatgcc

SEQ ID NO: 6025832 - DNA, 25 bp, Homo sapien
cttcctcctccctagaatgccactc

SEQ ID NO: 6025833 - DNA, 25 bp, Homo sapien
ctaaagtagccactgtgtttctttt

SEQ ID NO: 6025834 - DNA, 25 bp, Homo sapien
aagtaaatttgctagttatgttaag

SEQ ID NO: 6025835 - DNA, 25 bp, Homo sapien
cgagcaaaatcttgggcctgctaac

SEQ ID NO: 6025836 - DNA, 25 bp, Homo sapien
tttttcccaccagggaaatgtcaca

SEQ ID NO: 6025837 - DNA, 25 bp, Homo sapien
ttcactcatttccagtttaaatttc

SEQ ID NO: 6025838 - DNA, 25 bp, Homo sapien
tcagacgtcctcctgacctctccaa

SEQ ID NO: 6025839 - DNA, 25 bp, Homo sapien
tctgatgcttgatgtctttgtgttt

SEQ ID NO: 6025840 - DNA, 25 bp, Homo sapien
cttgggaggactgcttctctcagac

SEQ ID NO: 6025841 - DNA, 25 bp, Homo sapien
ttggattgggggaatcctcgagcaa

SEQ ID NO: 6025842 - DNA, 25 bp, Homo sapien
tgctggattcactctgatgcttgat

SEQ ID NO: 6025843 - DNA, 25 bp, Homo sapien
gtccaagttcggttcactcatttcc

SEQ ID NO: 6025844 - DNA, 25 bp, Homo sapien
ctggatctccgcctacttatttttt

SEQ ID NO: 6025845 - DNA, 25 bp, Homo sapien
acacaagccacaccctgccttcctc

SEQ ID NO: 6025846 - DNA, 25 bp, Homo sapien
agaccttagtctccaggacactgta

SEQ ID NO: 6025847 - DNA, 25 bp, Homo sapien
catttccagtttaaatttcttggat

SEQ ID NO: 6025848 - DNA, 25 bp, Homo sapien
aaatcttgggcctgctaactggatc

SEQ ID NO: 6025849 - DNA, 25 bp, Homo sapien
cagggaaatgtcacatgcctaccac

SEQ ID NO: 6025850 - DNA, 25 bp, Homo sapien
gtccagacacaagccacaccctgcc

SEQ ID NO: 6025851 - DNA, 25 bp, Homo sapien
gatccaccagttcctactaaagtaa

SEQ ID NO: 6025852 - DNA, 25 bp, Homo sapien
ttggtactgcattgctggattcact

SEQ ID NO: 6025853 - DNA, 25 bp, Homo sapien
tgggcctgctaactggatctccgcc

SEQ ID NO: 6025854 - DNA, 25 bp, Homo sapien
acccattcgcaactaaagtagccac

SEQ ID NO: 6025855 - DNA, 25 bp, Homo sapien
ctgaacacagggtgtccattgggtg

SEQ ID NO: 6025856 - DNA, 25 bp, Homo sapien
aggaagagctggagaggcagcccaa

SEQ ID NO: 6025857 - DNA, 25 bp, Homo sapien
atcctggccaacgtgcgcgagcgcc

SEQ ID NO: 6025858 - DNA, 25 bp, Homo sapien
ccgtggacagtctgggcaccagtga

SEQ ID NO: 6025859 - DNA, 25 bp, Homo sapien
ggtacatagacttcctctaccaggt

SEQ ID NO: 6025860 - DNA, 25 bp, Homo sapien
ggctgtgactttcggcacctggaca

SEQ ID NO: 6025861 - DNA, 25 bp, Homo sapien
agtctttcgaggagctgcagagcca

SEQ ID NO: 6025862 - DNA, 25 bp, Homo sapien
agcccaagcgcttcggccggaagcg

SEQ ID NO: 6025863 - DNA, 25 bp, Homo sapien
ctccgtgtggcgcatggagggcgcg

SEQ ID NO: 6025864 - DNA, 25 bp, Homo sapien
gtgccatccacctccggagccgcaa

SEQ ID NO: 6025865 - DNA, 25 bp, Homo sapien
gacaagctcagcaagatccagacgc

SEQ ID NO: 6025866 - DNA, 25 bp, Homo sapien
tagcgccgcgccgtgccatccacct

SEQ ID NO: 6025867 - DNA, 25 bp, Homo sapien
tggctcacgagcgtctcagctacgc

SEQ ID NO: 6025868 - DNA, 25 bp, Homo sapien
ccggagccgcaagccaggacccacc

SEQ ID NO: 6025869 - DNA, 25 bp, Homo sapien
tccatgtccgcctcccactagcgcc

SEQ ID NO: 6025870 - DNA, 25 bp, Homo sapien
agctggagaggcagcccaagcgctt

SEQ ID NO: 6025871 - DNA, 25 bp, Homo sapien
aagatccagacgctcaagctggccg

SEQ ID NO: 6025872 - DNA, 25 bp, Homo sapien
ccggaagcggcgctacagcaagaaa

SEQ ID NO: 6025873 - DNA, 25 bp, Homo sapien
ccgccaggtacatagacttcctcta

SEQ ID NO: 6025874 - DNA, 25 bp, Homo sapien
ccaacgtgcgcgagcgccagcgcac

SEQ ID NO: 6025875 - DNA, 25 bp, Homo sapien
gctgcagctacgtggctcacgagcg

SEQ ID NO: 6025876 - DNA, 25 bp, Homo sapien
agcgccagcgcacccagtcgctcaa

SEQ ID NO: 6025877 - DNA, 25 bp, Homo sapien
tggatgcggccacggctgtgacttt

SEQ ID NO: 6025878 - DNA, 25 bp, Homo sapien
cgcgccgtgccatccacctccggag

SEQ ID NO: 6025879 - DNA, 25 bp, Homo sapien
agcgaagatggcagcccgaccccgg

SEQ ID NO: 6025880 - DNA, 25 bp, Homo sapien
accttgtggttcctcatgaccccag

SEQ ID NO: 6025881 - DNA, 25 bp, Homo sapien
ccgcaagccaggacccacctgcaca

SEQ ID NO: 6025882 - DNA, 25 bp, Homo sapien
agctgcagagccagcgcatcctggc

SEQ ID NO: 6025883 - DNA, 25 bp, Homo sapien
tagacttcctctaccaggttctcca

SEQ ID NO: 6025884 - DNA, 25 bp, Homo sapien
agagcgacgagatggacaataagat

SEQ ID NO: 6025885 - DNA, 25 bp, Homo sapien
agcgcggcaagaagggcagcccgag

SEQ ID NO: 6025886 - DNA, 25 bp, Homo sapien
cgccttctccgtgtggcgcatggag

SEQ ID NO: 6025887 - DNA, 25 bp, Homo sapien
tcgaggagctgcagagccagcgcat

SEQ ID NO: 6025888 - DNA, 25 bp, Homo sapien
agaggcagcccaagcgcttcggccg

SEQ ID NO: 6025889 - DNA, 25 bp, Homo sapien
tcccactagcgccgcgccgtgccat

SEQ ID NO: 6025890 - DNA, 25 bp, Homo sapien
agagccagcgcatcctggccaacgt

SEQ ID NO: 6025891 - DNA, 25 bp, Homo sapien
catggagggcgcgtggtccatgtcc

SEQ ID NO: 6025892 - DNA, 25 bp, Homo sapien
acgagatggacaataagatgaccag

SEQ ID NO: 6025893 - DNA, 25 bp, Homo sapien
ccttcgccgcgctgcgcaagatcat

SEQ ID NO: 6025894 - DNA, 25 bp, Homo sapien
ctcatgaccccagtgcccaagtgtt

SEQ ID NO: 6025895 - DNA, 25 bp, Homo sapien
atggcagcccgaccccgggtaagcg

SEQ ID NO: 6025896 - DNA, 25 bp, Homo sapien
agggcgcgtggtccatgtccgcctc

SEQ ID NO: 6025897 - DNA, 25 bp, Homo sapien
agctacgccttctccgtgtggcgca

SEQ ID NO: 6025898 - DNA, 25 bp, Homo sapien
tcctctaccaggttctccagagcga

SEQ ID NO: 6025899 - DNA, 25 bp, Homo sapien
gctacgtggctcacgagcgtctcag

SEQ ID NO: 6025900 - DNA, 25 bp, Homo sapien
acccacctgcacatctcaggcgcat

SEQ ID NO: 6025901 - DNA, 25 bp, Homo sapien
cgagcgtctcagctacgccttctcc

SEQ ID NO: 6025902 - DNA, 25 bp, Homo sapien
agctggccgccaggtacatagactt

SEQ ID NO: 6025903 - DNA, 25 bp, Homo sapien
cgctcccctctgacaagctcagcaa

SEQ ID NO: 6025904 - DNA, 25 bp, Homo sapien
agatcatccccacgctcccctctga

SEQ ID NO: 6025905 - DNA, 25 bp, Homo sapien
agggcagcccgagcgcgcagtcttt

SEQ ID NO: 6025906 - DNA, 25 bp, Homo sapien
agcgcatcctggccaacgtgcgcga

SEQ ID NO: 6025907 - DNA, 25 bp, Homo sapien
gcggaactggatgcggccacggctg

SEQ ID NO: 6025908 - DNA, 25 bp, Homo sapien
gcgcgcagtctttcgaggagctgca

SEQ ID NO: 6025909 - DNA, 25 bp, Homo sapien
accaggttctccagagcgacgagat

SEQ ID NO: 6025910 - DNA, 25 bp, Homo sapien
cctctgacaagctcagcaagatcca

SEQ ID NO: 6025911 - DNA, 25 bp, Homo sapien
ggcacctggacaaccttgtggttcc

SEQ ID NO: 6025912 - DNA, 25 bp, Homo sapien
gccaggacccacctgcacatctcag

SEQ ID NO: 6025913 - DNA, 25 bp, Homo sapien
ctcagcaagatccagacgctcaagc

SEQ ID NO: 6025914 - DNA, 25 bp, Homo sapien
aaatcgagcgaagatggcagcccga

SEQ ID NO: 6025915 - DNA, 25 bp, Homo sapien
tccgcctcccactagcgccgcgccg

SEQ ID NO: 6025916 - DNA, 25 bp, Homo sapien
tgcgcgagcgccagcgcacccagtc

SEQ ID NO: 6025917 - DNA, 25 bp, Homo sapien
tgaccagctgcagctacgtggctca

SEQ ID NO: 6025918 - DNA, 25 bp, Homo sapien
tctcaggcgcatgcggaactggatg

SEQ ID NO: 6025919 - DNA, 25 bp, Homo sapien
tctcagctacgccttctccgtgtgg

SEQ ID NO: 6025920 - DNA, 25 bp, Homo sapien
aagcggcgctacagcaagaaatcga

SEQ ID NO: 6025921 - DNA, 25 bp, Homo sapien
actttcggcacctggacaaccttgt

SEQ ID NO: 6025922 - DNA, 25 bp, Homo sapien
gcaagaagggcagcccgagcgcgca

SEQ ID NO: 6025923 - DNA, 25 bp, Homo sapien
ccagtgaggaagagctggagaggca

SEQ ID NO: 6025924 - DNA, 25 bp, Homo sapien
cttcggccggaagcggcgctacagc

SEQ ID NO: 6025925 - DNA, 25 bp, Homo sapien
agcgcacccagtcgctcaacgaggc

SEQ ID NO: 6025926 - DNA, 25 bp, Homo sapien
tggttcctcatgaccccagtgccca

SEQ ID NO: 6025927 - DNA, 25 bp, Homo sapien
cgcatgcggaactggatgcggccac

SEQ ID NO: 6025928 - DNA, 25 bp, Homo sapien
cagacgctcaagctggccgccaggt

SEQ ID NO: 6025929 - DNA, 25 bp, Homo sapien
tgggcaccagtgaggaagagctgga

SEQ ID NO: 6025930 - DNA, 25 bp, Homo sapien
gtggcgcatggagggcgcgtggtcc

SEQ ID NO: 6025931 - DNA, 25 bp, Homo sapien
ataagatgaccagctgcagctacgt

SEQ ID NO: 6025932 - DNA, 25 bp, Homo sapien
ttctccagagcgacgagatggacaa

SEQ ID NO: 6025933 - DNA, 25 bp, Homo sapien
gctcaagctggccgccaggtacata

SEQ ID NO: 6025934 - DNA, 25 bp, Homo sapien
agcaagaaatcgagcgaagatggca

SEQ ID NO: 6025935 - DNA, 25 bp, Homo sapien
tggacaataagatgaccagctgcag

SEQ ID NO: 6025936 - DNA, 25 bp, Homo sapien
ccccacgctcccctctgacaagctc

SEQ ID NO: 6025937 - DNA, 25 bp, Homo sapien
gctcaacgaggccttcgccgcgctg

SEQ ID NO: 6025938 - DNA, 25 bp, Homo sapien
tggacaaccttgtggttcctcatga

SEQ ID NO: 6025939 - DNA, 25 bp, Homo sapien
cgctacagcaagaaatcgagcgaag

SEQ ID NO: 6025940 - DNA, 25 bp, Homo sapien
gcccgagcgcgcagtctttcgagga

SEQ ID NO: 6025941 - DNA, 25 bp, Homo sapien
tccacctccggagccgcaagccagg

SEQ ID NO: 6025942 - DNA, 25 bp, Homo sapien
acgaggccttcgccgcgctgcgcaa

SEQ ID NO: 6025943 - DNA, 25 bp, Homo sapien
gggtaagcgcggcaagaagggcagc

SEQ ID NO: 6025944 - DNA, 25 bp, Homo sapien
ctgcacatctcaggcgcatgcggaa

SEQ ID NO: 6025945 - DNA, 25 bp, Homo sapien
acagtctgggcaccagtgaggaaga

SEQ ID NO: 6025946 - DNA, 25 bp, Homo sapien
ccgcgctgcgcaagatcatccccac

SEQ ID NO: 6025947 - DNA, 25 bp, Homo sapien
tgcgcaagatcatccccacgctccc

SEQ ID NO: 6025948 - DNA, 25 bp, Homo sapien
ggccacggctgtgactttcggcacc

SEQ ID NO: 6025949 - DNA, 25 bp, Homo sapien
gcgtggtccatgtccgcctcccact

SEQ ID NO: 6025950 - DNA, 25 bp, Homo sapien
ccagtcgctcaacgaggccttcgcc

SEQ ID NO: 6025951 - DNA, 25 bp, Homo sapien
taagcaacatatacactggacaggg

SEQ ID NO: 6025952 - DNA, 25 bp, Homo sapien
aatatatatccttacaaatgcattc

SEQ ID NO: 6025953 - DNA, 25 bp, Homo sapien
gcttcctcgaaacagtcacgggagg

SEQ ID NO: 6025954 - DNA, 25 bp, Homo sapien
gacagggaatagaaaacacggctag

SEQ ID NO: 6025955 - DNA, 25 bp, Homo sapien
aggaaggctgatgcccatcccctgg

SEQ ID NO: 6025956 - DNA, 25 bp, Homo sapien
ggcacttagagggaaatacaatcca

SEQ ID NO: 6025957 - DNA, 25 bp, Homo sapien
agagccttggtccagtttaaacagg

SEQ ID NO: 6025958 - DNA, 25 bp, Homo sapien
aagaaggcacttagagggaaataca

SEQ ID NO: 6025959 - DNA, 25 bp, Homo sapien
tagagggaaatacaatccaatatat

SEQ ID NO: 6025960 - DNA, 25 bp, Homo sapien
aaacacttgggcactggggtcatga

SEQ ID NO: 6025961 - DNA, 25 bp, Homo sapien
taaataaacaaataagcaacatata

SEQ ID NO: 6025962 - DNA, 25 bp, Homo sapien
tacaaatgcattcctgaagctagaa

SEQ ID NO: 6025963 - DNA, 25 bp, Homo sapien
tgcattcctgaagctagaactttcc

SEQ ID NO: 6025964 - DNA, 25 bp, Homo sapien
ccaggtgccgaaagtcacagccgtg

SEQ ID NO: 6025965 - DNA, 25 bp, Homo sapien
aggtctggggcgggagggatcttgg

SEQ ID NO: 6025966 - DNA, 25 bp, Homo sapien
agaagtcactggcaggaaggctgat

SEQ ID NO: 6025967 - DNA, 25 bp, Homo sapien
ttccaggcttcctcgaaacagtcac

SEQ ID NO: 6025968 - DNA, 25 bp, Homo sapien
tcttgggttcttgttctgagagcct

SEQ ID NO: 6025969 - DNA, 25 bp, Homo sapien
gctgatgcccatcccctgggtatct

SEQ ID NO: 6025970 - DNA, 25 bp, Homo sapien
agctggtaaaatatctcaataaata

SEQ ID NO: 6025971 - DNA, 25 bp, Homo sapien
cactggcaggaaggctgatgcccat

SEQ ID NO: 6025972 - DNA, 25 bp, Homo sapien
ccacaaggttgtccaggtgccgaaa

SEQ ID NO: 6025973 - DNA, 25 bp, Homo sapien
gccgcatccagttccgcatgcgcct

SEQ ID NO: 6025974 - DNA, 25 bp, Homo sapien
ccctgccaaacacttgggcactggg

SEQ ID NO: 6025975 - DNA, 25 bp, Homo sapien
tggcagtcacttagctggtaaaata

SEQ ID NO: 6025976 - DNA, 25 bp, Homo sapien
agatgagggcacagaagtcactggc

SEQ ID NO: 6025977 - DNA, 25 bp, Homo sapien
gctagaactttccagaaagattccc

SEQ ID NO: 6025978 - DNA, 25 bp, Homo sapien
ccctgggtatctgaggaggatgtga

SEQ ID NO: 6025979 - DNA, 25 bp, Homo sapien
aacccaggaggaaaatccaacagtg

SEQ ID NO: 6025980 - DNA, 25 bp, Homo sapien
ctgggtctctgtcccctgccaaaca

SEQ ID NO: 6025981 - DNA, 25 bp, Homo sapien
tccgcatgcgcctgagatgtgcagg

SEQ ID NO: 6025982 - DNA, 25 bp, Homo sapien
cctgaagctagaactttccagaaag

SEQ ID NO: 6025983 - DNA, 25 bp, Homo sapien
gtgaggagatgagggcacagaagtc

SEQ ID NO: 6025984 - DNA, 25 bp, Homo sapien
tcacttagctggtaaaatatctcaa

SEQ ID NO: 6025985 - DNA, 25 bp, Homo sapien
ggtcatgaggaaccacaaggttgtc

SEQ ID NO: 6025986 - DNA, 25 bp, Homo sapien
agtcacagccgtggccgcatccagt

SEQ ID NO: 6025987 - DNA, 25 bp, Homo sapien
gaaaatccaacagtgaggagatgag

SEQ ID NO: 6025988 - DNA, 25 bp, Homo sapien
cactggggtcatgaggaaccacaag

SEQ ID NO: 6025989 - DNA, 25 bp, Homo sapien
gaggaggatgtgaacctgggtctct

SEQ ID NO: 6025990 - DNA, 25 bp, Homo sapien
atggagacgtaaagaacaggagtat

SEQ ID NO: 6025991 - DNA, 25 bp, Homo sapien
accgcgtggcagtcacttagctggt

SEQ ID NO: 6025992 - DNA, 25 bp, Homo sapien
tcgaaacagtcacgggaggtctggg

SEQ ID NO: 6025993 - DNA, 25 bp, Homo sapien
aagaacaggagtatgcgggcaagaa

SEQ ID NO: 6025994 - DNA, 25 bp, Homo sapien
aaatatacattaaaagaaggcactt

SEQ ID NO: 6025995 - DNA, 25 bp, Homo sapien
cggctagctgagcaggccatggaga

SEQ ID NO: 6025996 - DNA, 25 bp, Homo sapien
gtatctgaggaggatgtgaacctgg

SEQ ID NO: 6025997 - DNA, 25 bp, Homo sapien
caatccaatatatatccttacaaat

SEQ ID NO: 6025998 - DNA, 25 bp, Homo sapien
acactggacagggaatagaaaacac

SEQ ID NO: 6025999 - DNA, 25 bp, Homo sapien
tttaaacaggttctacaagaatgca

SEQ ID NO: 6026000 - DNA, 25 bp, Homo sapien
ctacaagaatgcatttctgttttat

SEQ ID NO: 6026001 - DNA, 25 bp, Homo sapien
tacacaaccgcgtggcagtcactta

SEQ ID NO: 6026002 - DNA, 25 bp, Homo sapien
aggagtatgcgggcaagaattccag

SEQ ID NO: 6026003 - DNA, 25 bp, Homo sapien
caggaggaaaatccaacagtgagga

SEQ ID NO: 6026004 - DNA, 25 bp, Homo sapien
gaaatacaatccaatatatatcctt

SEQ ID NO: 6026005 - DNA, 25 bp, Homo sapien
gttatacacaaccgcgtggcagtca

SEQ ID NO: 6026006 - DNA, 25 bp, Homo sapien
gaacctgggtctctgtcccctgcca

SEQ ID NO: 6026007 - DNA, 25 bp, Homo sapien
atgcgggcaagaattccaggcttcc

SEQ ID NO: 6026008 - DNA, 25 bp, Homo sapien
gttcttgttctgagagccttggtcc

SEQ ID NO: 6026009 - DNA, 25 bp, Homo sapien
ggttgtccaggtgccgaaagtcaca

SEQ ID NO: 6026010 - DNA, 25 bp, Homo sapien
tatccttacaaatgcattcctgaag

SEQ ID NO: 6026011 - DNA, 25 bp, Homo sapien
gccgaaagtcacagccgtggccgca

SEQ ID NO: 6026012 - DNA, 25 bp, Homo sapien
agtcacgggaggtctggggcgggag

SEQ ID NO: 6026013 - DNA, 25 bp, Homo sapien
tccagtttaaacaggttctacaaga

SEQ ID NO: 6026014 - DNA, 25 bp, Homo sapien
caggttctacaagaatgcatttctg

SEQ ID NO: 6026015 - DNA, 25 bp, Homo sapien
aaaacacggctagctgagcaggcca

SEQ ID NO: 6026016 - DNA, 25 bp, Homo sapien
agggcacagaagtcactggcaggaa

SEQ ID NO: 6026017 - DNA, 25 bp, Homo sapien
tctgtcccctgccaaacacttgggc

SEQ ID NO: 6026018 - DNA, 25 bp, Homo sapien
gaatagaaaacacggctagctgagc

SEQ ID NO: 6026019 - DNA, 25 bp, Homo sapien
gctgagcaggccatggagacgtaaa

SEQ ID NO: 6026020 - DNA, 25 bp, Homo sapien
cccatcccctgggtatctgaggagg

SEQ ID NO: 6026021 - DNA, 25 bp, Homo sapien
ttgggcactggggtcatgaggaacc

SEQ ID NO: 6026022 - DNA, 25 bp, Homo sapien
gccgtggccgcatccagttccgcat

SEQ ID NO: 6026023 - DNA, 25 bp, Homo sapien
ccaacagtgaggagatgagggcaca

SEQ ID NO: 6026024 - DNA, 25 bp, Homo sapien
acatatacactggacagggaataga

SEQ ID NO: 6026025 - DNA, 25 bp, Homo sapien
acgtaaagaacaggagtatgcgggc

SEQ ID NO: 6026026 - DNA, 25 bp, Homo sapien
gagggatcttgggttcttgttctga

SEQ ID NO: 6026027 - DNA, 25 bp, Homo sapien
gttctgagagccttggtccagttta

SEQ ID NO: 6026028 - DNA, 25 bp, Homo sapien
gaggaaccacaaggttgtccaggtg

SEQ ID NO: 6026029 - DNA, 25 bp, Homo sapien
gaatgcatttctgttttatttaaaa

SEQ ID NO: 6026030 - DNA, 25 bp, Homo sapien
taaaatatctcaataaataaacaaa

SEQ ID NO: 6026031 - DNA, 25 bp, Homo sapien
aacaaataagcaacatatacactgg

SEQ ID NO: 6026032 - DNA, 25 bp, Homo sapien
acattaaaagaaggcacttagaggg

SEQ ID NO: 6026033 - DNA, 25 bp, Homo sapien
caggccatggagacgtaaagaacag

SEQ ID NO: 6026034 - DNA, 25 bp, Homo sapien
gcaagaattccaggcttcctcgaaa

SEQ ID NO: 6026035 - DNA, 25 bp, Homo sapien
tctcaataaataaacaaataagcaa

SEQ ID NO: 6026036 - DNA, 25 bp, Homo sapien
tccagttccgcatgcgcctgagatg

SEQ ID NO: 6026037 - DNA, 25 bp, Homo sapien
gatgcccttcagctcgatgcggttc

SEQ ID NO: 6026038 - DNA, 25 bp, Homo sapien
cttcagctcgatgcggttcaccagg

SEQ ID NO: 6026039 - DNA, 25 bp, Homo sapien
acgagggtgggccagggcacgggca

SEQ ID NO: 6026040 - DNA, 25 bp, Homo sapien
ggatgttgccgtcctccttgaagtc

SEQ ID NO: 6026041 - DNA, 25 bp, Homo sapien
gtcggcgagctgcacgctgccgtcc

SEQ ID NO: 6026042 - DNA, 25 bp, Homo sapien
cggccatgatatagacgttgtggct

SEQ ID NO: 6026043 - DNA, 25 bp, Homo sapien
aacttcacctcggcgcgggtcttgt

SEQ ID NO: 6026044 - DNA, 25 bp, Homo sapien
cacgggcagcttgccggtggtgcag

SEQ ID NO: 6026045 - DNA, 25 bp, Homo sapien
gatgggggtgttctgctggtagtgg

SEQ ID NO: 6026046 - DNA, 25 bp, Homo sapien
gccccaggatgttgccgtcctcctt

SEQ ID NO: 6026047 - DNA, 25 bp, Homo sapien
actccagcttgtgccccaggatgtt

SEQ ID NO: 6026048 - DNA, 25 bp, Homo sapien
tgtagttgccgtcgtccttgaagaa

SEQ ID NO: 6026049 - DNA, 25 bp, Homo sapien
ggaccatgtgatcgcgcttctcgtt

SEQ ID NO: 6026050 - DNA, 25 bp, Homo sapien
ggcgcgggtcttgtagttgccgtcg

SEQ ID NO: 6026051 - DNA, 25 bp, Homo sapien
ttgctcagggcggactgggtgctca

SEQ ID NO: 6026052 - DNA, 25 bp, Homo sapien
agcacggggccgtcgccgatggggg

SEQ ID NO: 6026053 - DNA, 25 bp, Homo sapien
tgatatagacgttgtggctgttgta

SEQ ID NO: 6026054 - DNA, 25 bp, Homo sapien
gggtagcggctgaagcactgcacgc

SEQ ID NO: 6026055 - DNA, 25 bp, Homo sapien
ctccttgaagtcgatgcccttcagc

SEQ ID NO: 6026056 - DNA, 25 bp, Homo sapien
tggttgtcgggcagcagcacggggc

SEQ ID NO: 6026057 - DNA, 25 bp, Homo sapien
gcgcttctcgttggggtctttgctc

SEQ ID NO: 6026058 - DNA, 25 bp, Homo sapien
gtggcatcgccctcgccctcgccgg

SEQ ID NO: 6026059 - DNA, 25 bp, Homo sapien
ggtgggccagggcacgggcagcttg

SEQ ID NO: 6026060 - DNA, 25 bp, Homo sapien
tgccggtggtgcagatgaacttcag

SEQ ID NO: 6026061 - DNA, 25 bp, Homo sapien
cgtccttgaagaagatggtgcgctc

SEQ ID NO: 6026062 - DNA, 25 bp, Homo sapien
tgcgctcctggacgtagccttcggg

SEQ ID NO: 6026063 - DNA, 25 bp, Homo sapien
cttcagggtcagcttgccgtaggtg

SEQ ID NO: 6026064 - DNA, 25 bp, Homo sapien
agggcggactgggtgctcaggtagt

SEQ ID NO: 6026065 - DNA, 25 bp, Homo sapien
gcggacttgaagaagtcgtgctgct

SEQ ID NO: 6026066 - DNA, 25 bp, Homo sapien
agacgttgtggctgttgtagttgta

SEQ ID NO: 6026067 - DNA, 25 bp, Homo sapien
tcgatgcggttcaccagggtgtcgc

SEQ ID NO: 6026068 - DNA, 25 bp, Homo sapien
gcttgtgccccaggatgttgccgtc

SEQ ID NO: 6026069 - DNA, 25 bp, Homo sapien
ggtgttctgctggtagtggtcggcg

SEQ ID NO: 6026070 - DNA, 25 bp, Homo sapien
gtggtcggggtagcggctgaagcac

SEQ ID NO: 6026071 - DNA, 25 bp, Homo sapien
cggttcaccagggtgtcgccctcga

SEQ ID NO: 6026072 - DNA, 25 bp, Homo sapien
gcggctgaagcactgcacgccgtag

SEQ ID NO: 6026073 - DNA, 25 bp, Homo sapien
cggtcacgaactccagcaggaccat

SEQ ID NO: 6026074 - DNA, 25 bp, Homo sapien
agttcaccttgatgccgttcttctg

SEQ ID NO: 6026075 - DNA, 25 bp, Homo sapien
cctggacgtagccttcgggcatggc

SEQ ID NO: 6026076 - DNA, 25 bp, Homo sapien
cggcggcggtcacgaactccagcag

SEQ ID NO: 6026077 - DNA, 25 bp, Homo sapien
tgccgttcttctgcttgtcggccat

SEQ ID NO: 6026078 - DNA, 25 bp, Homo sapien
tgccgtcgtccttgaagaagatggt

SEQ ID NO: 6026079 - DNA, 25 bp, Homo sapien
tggtgcagatgaacttcagggtcag

SEQ ID NO: 6026080 - DNA, 25 bp, Homo sapien
agttgtactccagcttgtgccccag

SEQ ID NO: 6026081 - DNA, 25 bp, Homo sapien
aagtcgtgctgcttcatgtggtcgg

SEQ ID NO: 6026082 - DNA, 25 bp, Homo sapien
tcgggcagcagcacggggccgtcgc

SEQ ID NO: 6026083 - DNA, 25 bp, Homo sapien
atcccggcggcggtcacgaactcca

SEQ ID NO: 6026084 - DNA, 25 bp, Homo sapien
gtgaaggtggtcacgagggtgggcc

SEQ ID NO: 6026085 - DNA, 25 bp, Homo sapien
gtgtcgccctcgaacttcacctcgg

SEQ ID NO: 6026086 - DNA, 25 bp, Homo sapien
ctgctggtagtggtcggcgagctgc

SEQ ID NO: 6026087 - DNA, 25 bp, Homo sapien
gtggtcacgagggtgggccagggca

SEQ ID NO: 6026088 - DNA, 25 bp, Homo sapien
tgccgtcctcgatgttgtggcggat

SEQ ID NO: 6026089 - DNA, 25 bp, Homo sapien
ggtcttgtagttgccgtcgtccttg

SEQ ID NO: 6026090 - DNA, 25 bp, Homo sapien
ttgaagaagtcgtgctgcttcatgt

SEQ ID NO: 6026091 - DNA, 25 bp, Homo sapien
actgcacgccgtaggtgaaggtggt

SEQ ID NO: 6026092 - DNA, 25 bp, Homo sapien
tgttgtagttgtactccagcttgtg

SEQ ID NO: 6026093 - DNA, 25 bp, Homo sapien
ggcggatcttgaagttcaccttgat

SEQ ID NO: 6026094 - DNA, 25 bp, Homo sapien
agatgaacttcagggtcagcttgcc

SEQ ID NO: 6026095 - DNA, 25 bp, Homo sapien
aggtagtggttgtcgggcagcagca

SEQ ID NO: 6026096 - DNA, 25 bp, Homo sapien
accagggtgtcgccctcgaacttca

SEQ ID NO: 6026097 - DNA, 25 bp, Homo sapien
ccttcgggcatggcggacttgaaga

SEQ ID NO: 6026098 - DNA, 25 bp, Homo sapien
cgccgtaggtgaaggtggtcacgag

SEQ ID NO: 6026099 - DNA, 25 bp, Homo sapien
agatggtgcgctcctggacgtagcc

SEQ ID NO: 6026100 - DNA, 25 bp, Homo sapien
ccttgatgccgttcttctgcttgtc

SEQ ID NO: 6026101 - DNA, 25 bp, Homo sapien
ccagcaggaccatgtgatcgcgctt

SEQ ID NO: 6026102 - DNA, 25 bp, Homo sapien
tcttctgcttgtcggccatgatata

SEQ ID NO: 6026103 - DNA, 25 bp, Homo sapien
gtagtggtcggcgagctgcacgctg

SEQ ID NO: 6026104 - DNA, 25 bp, Homo sapien
gaagtcgatgcccttcagctcgatg

SEQ ID NO: 6026105 - DNA, 25 bp, Homo sapien
cgaactccagcaggaccatgtgatc

SEQ ID NO: 6026106 - DNA, 25 bp, Homo sapien
tcgccgatgggggtgttctgctggt

SEQ ID NO: 6026107 - DNA, 25 bp, Homo sapien
tgttgtggcggatcttgaagttcac

SEQ ID NO: 6026108 - DNA, 25 bp, Homo sapien
gagctgcacgctgccgtcctcgatg

SEQ ID NO: 6026109 - DNA, 25 bp, Homo sapien
cttgccgtaggtggcatcgccctcg

SEQ ID NO: 6026110 - DNA, 25 bp, Homo sapien
gactgggtgctcaggtagtggttgt

SEQ ID NO: 6026111 - DNA, 25 bp, Homo sapien
tgtggctgttgtagttgtactccag

SEQ ID NO: 6026112 - DNA, 25 bp, Homo sapien
gtgctcaggtagtggttgtcgggca

SEQ ID NO: 6026113 - DNA, 25 bp, Homo sapien
acgtagccttcgggcatggcggact

SEQ ID NO: 6026114 - DNA, 25 bp, Homo sapien
gtgatcgcgcttctcgttggggtct

SEQ ID NO: 6026115 - DNA, 25 bp, Homo sapien
acctcggcgcgggtcttgtagttgc

SEQ ID NO: 6026116 - DNA, 25 bp, Homo sapien
tcgttggggtctttgctcagggcgg

SEQ ID NO: 6026117 - DNA, 25 bp, Homo sapien
tgaagaagatggtgcgctcctggac

SEQ ID NO: 6026118 - DNA, 25 bp, Homo sapien
tgccgtcctccttgaagtcgatgcc

SEQ ID NO: 6026119 - DNA, 25 bp, Homo sapien
gcttgtcggccatgatatagacgtt

SEQ ID NO: 6026120 - DNA, 25 bp, Homo sapien
gggtctttgctcagggcggactggg

SEQ ID NO: 6026121 - DNA, 25 bp, Homo sapien
gcacgctgccgtcctcgatgttgtg

SEQ ID NO: 6026122 - DNA, 25 bp, Homo sapien
tcttgaagttcaccttgatgccgtt

SEQ ID NO: 6026123 - DNA, 25 bp, Homo sapien
ggcatggcggacttgaagaagtcgt

SEQ ID NO: 6026124 - DNA, 25 bp, Homo sapien
gaagcactgcacgccgtaggtgaag

SEQ ID NO: 6026125 - DNA, 25 bp, Homo sapien
cctcgatgttgtggcggatcttgaa

SEQ ID NO: 6026126 - DNA, 25 bp, Homo sapien
ccagggcacgggcagcttgccggtg

SEQ ID NO: 6026127 - DNA, 25 bp, Homo sapien
ccctcgaacttcacctcggcgcggg

SEQ ID NO: 6026128 - DNA, 25 bp, Homo sapien
gtcagcttgccgtaggtggcatcgc

SEQ ID NO: 6026129 - DNA, 25 bp, Homo sapien
ggccgtcgccgatgggggtgttctg

SEQ ID NO: 6026130 - DNA, 25 bp, Homo sapien
cagcttgccggtggtgcagatgaac

SEQ ID NO: 6026131 - DNA, 25 bp, Homo sapien
tcgctccaatttcccacaacattag

SEQ ID NO: 6026132 - DNA, 25 bp, Homo sapien
attgctgttatctgatgagtatacg

SEQ ID NO: 6026133 - DNA, 25 bp, Homo sapien
aagaagtatatgtgcctactaacgc

SEQ ID NO: 6026134 - DNA, 25 bp, Homo sapien
gcttgaagaattgccggtcctattt

SEQ ID NO: 6026135 - DNA, 25 bp, Homo sapien
acattagtcaactccgttaggccct

SEQ ID NO: 6026136 - DNA, 25 bp, Homo sapien
gctttgttgtacgatctgactaagt

SEQ ID NO: 6026137 - DNA, 25 bp, Homo sapien
acaagtggatcgatcctaccccttg

SEQ ID NO: 6026138 - DNA, 25 bp, Homo sapien
cccacaacattagtcaactccgtta

SEQ ID NO: 6026139 - DNA, 25 bp, Homo sapien
cgagaaactagtgcgaagtagtgat

SEQ ID NO: 6026140 - DNA, 25 bp, Homo sapien
gcgcatttttcttcaaagctttgtt

SEQ ID NO: 6026141 - DNA, 25 bp, Homo sapien
gtatacgttgtcctggccacggcag

SEQ ID NO: 6026142 - DNA, 25 bp, Homo sapien
gttgtcctggccacggcagaagcac

SEQ ID NO: 6026143 - DNA, 25 bp, Homo sapien
actcgttttaggactggttcagaat

SEQ ID NO: 6026144 - DNA, 25 bp, Homo sapien
taataattggtattcctgcttgttg

SEQ ID NO: 6026145 - DNA, 25 bp, Homo sapien
aataaggcgcatttttcttcaaagc

SEQ ID NO: 6026146 - DNA, 25 bp, Homo sapien
gaagcacgcttatcgctccaatttc

SEQ ID NO: 6026147 - DNA, 25 bp, Homo sapien
tatatgtgcctactaacgcttgtct

SEQ ID NO: 6026148 - DNA, 25 bp, Homo sapien
gatcatatgcatagtaccgagaaac

SEQ ID NO: 6026149 - DNA, 25 bp, Homo sapien
atcttttaataattggtattcctgc

SEQ ID NO: 6026150 - DNA, 25 bp, Homo sapien
tcaggtattgctgttatctgatgag

SEQ ID NO: 6026151 - DNA, 25 bp, Homo sapien
tgatgagtatacgttgtcctggcca

SEQ ID NO: 6026152 - DNA, 25 bp, Homo sapien
tagtgatcaggtattgctgttatct

SEQ ID NO: 6026153 - DNA, 25 bp, Homo sapien
ttcctgcttgttgcttgaagaattg

SEQ ID NO: 6026154 - DNA, 25 bp, Homo sapien
ctaacgcttgtctttgtctctgtca

SEQ ID NO: 6026155 - DNA, 25 bp, Homo sapien
tttgtctctgtcactaaacactgga

SEQ ID NO: 6026156 - DNA, 25 bp, Homo sapien
atcctaccccttgcgctaaagaagt

SEQ ID NO: 6026157 - DNA, 25 bp, Homo sapien
gggccattttttatagcaaagattg

SEQ ID NO: 6026158 - DNA, 25 bp, Homo sapien
cctttgatattggatcatatgcata

SEQ ID NO: 6026159 - DNA, 25 bp, Homo sapien
tcatttcctttgatattggatcata

SEQ ID NO: 6026160 - DNA, 25 bp, Homo sapien
gattttgggccattttttatagcaa

SEQ ID NO: 6026161 - DNA, 25 bp, Homo sapien
gcgctaaagaagtatatgtgcctac

SEQ ID NO: 6026162 - DNA, 25 bp, Homo sapien
aaatgtcttccaatgtgagattttg

SEQ ID NO: 6026163 - DNA, 25 bp, Homo sapien
atgctatcatttcctttgatattgg

SEQ ID NO: 6026164 - DNA, 25 bp, Homo sapien
atgcttccttcagcactacccttta

SEQ ID NO: 6026165 - DNA, 25 bp, Homo sapien
ctatatgctgccactcctcaattgg

SEQ ID NO: 6026166 - DNA, 25 bp, Homo sapien
ctagtacctcctgtgatattatccc

SEQ ID NO: 6026167 - DNA, 25 bp, Homo sapien
gcgaagtagtgatcaggtattgctg

SEQ ID NO: 6026168 - DNA, 25 bp, Homo sapien
ttcagaattcctcaaaaattcatcc

SEQ ID NO: 6026169 - DNA, 25 bp, Homo sapien
atgtgagattttgggccatttttta

SEQ ID NO: 6026170 - DNA, 25 bp, Homo sapien
ggatcgatcctaccccttgcgctaa

SEQ ID NO: 6026171 - DNA, 25 bp, Homo sapien
gtcatcaaatgtcttccaatgtgag

SEQ ID NO: 6026172 - DNA, 25 bp, Homo sapien
tctcatccttcaatgctatcatttc

SEQ ID NO: 6026173 - DNA, 25 bp, Homo sapien
ttggtattcctgcttgttgcttgaa

SEQ ID NO: 6026174 - DNA, 25 bp, Homo sapien
gtcaactccgttaggcccttcattg

SEQ ID NO: 6026175 - DNA, 25 bp, Homo sapien
gtgatattatcccattccatgcggg

SEQ ID NO: 6026176 - DNA, 25 bp, Homo sapien
cgcttatcgctccaatttcccacaa

SEQ ID NO: 6026177 - DNA, 25 bp, Homo sapien
tttaggactggttcagaattcctca

SEQ ID NO: 6026178 - DNA, 25 bp, Homo sapien
ccttcagcactaccctttagctgtt

SEQ ID NO: 6026179 - DNA, 25 bp, Homo sapien
ttccatgcggggtatcgtatgcttc

SEQ ID NO: 6026180 - DNA, 25 bp, Homo sapien
atattggatcatatgcatagtaccg

SEQ ID NO: 6026181 - DNA, 25 bp, Homo sapien
gttatctgatgagtatacgttgtcc

SEQ ID NO: 6026182 - DNA, 25 bp, Homo sapien
ttgtacgatctgactaagttatctt

SEQ ID NO: 6026183 - DNA, 25 bp, Homo sapien
cctttagctgttctatatgctgcca

SEQ ID NO: 6026184 - DNA, 25 bp, Homo sapien
agaattgccggtcctatttactcgt

SEQ ID NO: 6026185 - DNA, 25 bp, Homo sapien
aaatatacaagtggatcgatcctac

SEQ ID NO: 6026186 - DNA, 25 bp, Homo sapien
acggcagaagcacgcttatcgctcc

SEQ ID NO: 6026187 - DNA, 25 bp, Homo sapien
atagcaaagattgaataaggcgcat

SEQ ID NO: 6026188 - DNA, 25 bp, Homo sapien
gattagtctcatccttcaatgctat

SEQ ID NO: 6026189 - DNA, 25 bp, Homo sapien
caattggattagtctcatccttcaa

SEQ ID NO: 6026190 - DNA, 25 bp, Homo sapien
ttttcttcaaagctttgttgtacga

SEQ ID NO: 6026191 - DNA, 25 bp, Homo sapien
gcggggtatcgtatgcttccttcag

SEQ ID NO: 6026192 - DNA, 25 bp, Homo sapien
cttgtctttgtctctgtcactaaac

SEQ ID NO: 6026193 - DNA, 25 bp, Homo sapien
tatcgtatgcttccttcagcactac

SEQ ID NO: 6026194 - DNA, 25 bp, Homo sapien
ccccttgcgctaaagaagtatatgt

SEQ ID NO: 6026195 - DNA, 25 bp, Homo sapien
actcctcaattggattagtctcatc

SEQ ID NO: 6026196 - DNA, 25 bp, Homo sapien
ccttcaatgctatcatttcctttga

SEQ ID NO: 6026197 - DNA, 25 bp, Homo sapien
gatctgactaagttatcttttaata

SEQ ID NO: 6026198 - DNA, 25 bp, Homo sapien
ttttttatagcaaagattgaataag

SEQ ID NO: 6026199 - DNA, 25 bp, Homo sapien
ttcattgaaagaaatgaggtcatca

SEQ ID NO: 6026200 - DNA, 25 bp, Homo sapien
aggcccttcattgaaagaaatgagg

SEQ ID NO: 6026201 - DNA, 25 bp, Homo sapien
aagattgaataaggcgcatttttct

SEQ ID NO: 6026202 - DNA, 25 bp, Homo sapien
ctggccacggcagaagcacgcttat

SEQ ID NO: 6026203 - DNA, 25 bp, Homo sapien
gaaagaaatgaggtcatcaaatgtc

SEQ ID NO: 6026204 - DNA, 25 bp, Homo sapien
gtagtctagtacctcctgtgatatt

SEQ ID NO: 6026205 - DNA, 25 bp, Homo sapien
ttcctcaaaaattcatccaaatata

SEQ ID NO: 6026206 - DNA, 25 bp, Homo sapien
aatgaggtcatcaaatgtcttccaa

SEQ ID NO: 6026207 - DNA, 25 bp, Homo sapien
gctgttctatatgctgccactcctc

SEQ ID NO: 6026208 - DNA, 25 bp, Homo sapien
actggttcagaattcctcaaaaatt

SEQ ID NO: 6026209 - DNA, 25 bp, Homo sapien
aaaaattcatccaaatatacaagtg

SEQ ID NO: 6026210 - DNA, 25 bp, Homo sapien
ttcaaagctttgttgtacgatctga

SEQ ID NO: 6026211 - DNA, 25 bp, Homo sapien
caatttcccacaacattagtcaact

SEQ ID NO: 6026212 - DNA, 25 bp, Homo sapien
cttgttgcttgaagaattgccggtc

SEQ ID NO: 6026213 - DNA, 25 bp, Homo sapien
tagtaccgagaaactagtgcgaagt

SEQ ID NO: 6026214 - DNA, 25 bp, Homo sapien
actagtgcgaagtagtgatcaggta

SEQ ID NO: 6026215 - DNA, 25 bp, Homo sapien
tcatccaaatatacaagtggatcga

SEQ ID NO: 6026216 - DNA, 25 bp, Homo sapien
cctcctgtgatattatcccattcca

SEQ ID NO: 6026217 - DNA, 25 bp, Homo sapien
atgcatagtaccgagaaactagtgc

SEQ ID NO: 6026218 - DNA, 25 bp, Homo sapien
cactaccctttagctgttctatatg

SEQ ID NO: 6026219 - DNA, 25 bp, Homo sapien
cttccaatgtgagattttgggccat

SEQ ID NO: 6026220 - DNA, 25 bp, Homo sapien
gctgccactcctcaattggattagt

SEQ ID NO: 6026221 - DNA, 25 bp, Homo sapien
tccgttaggcccttcattgaaagaa

SEQ ID NO: 6026222 - DNA, 25 bp, Homo sapien
tgcctactaacgcttgtctttgtct

SEQ ID NO: 6026223 - DNA, 25 bp, Homo sapien
atcagagacttcaggcggtcaacga

SEQ ID NO: 6026224 - DNA, 25 bp, Homo sapien
tccatccttgtcaatcaaggcgttg

SEQ ID NO: 6026225 - DNA, 25 bp, Homo sapien
aatccacgatctctttttccgtcat

SEQ ID NO: 6026226 - DNA, 25 bp, Homo sapien
cgatctctttttccgtcatcgtctt

SEQ ID NO: 6026227 - DNA, 25 bp, Homo sapien
accggcgtcatcgtcgggaagacct

SEQ ID NO: 6026228 - DNA, 25 bp, Homo sapien
tacttcgtccacaaacacaactcct

SEQ ID NO: 6026229 - DNA, 25 bp, Homo sapien
tacttaatcagagacttcaggcggt

SEQ ID NO: 6026230 - DNA, 25 bp, Homo sapien
caattcagcgggagccacctgatag

SEQ ID NO: 6026231 - DNA, 25 bp, Homo sapien
tccggattgtttacataaccggaca

SEQ ID NO: 6026232 - DNA, 25 bp, Homo sapien
cagatccacaaccttcgcttcaaaa

SEQ ID NO: 6026233 - DNA, 25 bp, Homo sapien
tcgtctttccgtgctccaaaacaac

SEQ ID NO: 6026234 - DNA, 25 bp, Homo sapien
cgcgcccggtttatcatccccctcg

SEQ ID NO: 6026235 - DNA, 25 bp, Homo sapien
tgatagcctttgtacttaatcagag

SEQ ID NO: 6026236 - DNA, 25 bp, Homo sapien
cgacgtaatccacgatctctttttc

SEQ ID NO: 6026237 - DNA, 25 bp, Homo sapien
tctctctgatttttcttgcgtcgag

SEQ ID NO: 6026238 - DNA, 25 bp, Homo sapien
ttggagcaagatggattccaattca

SEQ ID NO: 6026239 - DNA, 25 bp, Homo sapien
cacaaccttcgcttcaaaaaatgga

SEQ ID NO: 6026240 - DNA, 25 bp, Homo sapien
tttcgcggttgttacttgactggcg

SEQ ID NO: 6026241 - DNA, 25 bp, Homo sapien
aggcggtcaacgatgaagaagtgtt

SEQ ID NO: 6026242 - DNA, 25 bp, Homo sapien
atgttggggtgttggagcaagatgg

SEQ ID NO: 6026243 - DNA, 25 bp, Homo sapien
atgaagaagtgttcgtcttcgtccc

SEQ ID NO: 6026244 - DNA, 25 bp, Homo sapien
ttccgtgctccaaaacaacaacggc

SEQ ID NO: 6026245 - DNA, 25 bp, Homo sapien
gcgggaagttcaccggcgtcatcgt

SEQ ID NO: 6026246 - DNA, 25 bp, Homo sapien
gtctccagaatgtagccatccatcc

SEQ ID NO: 6026247 - DNA, 25 bp, Homo sapien
ccagcgttttcccggtatccagatc

SEQ ID NO: 6026248 - DNA, 25 bp, Homo sapien
tacataaccggacataatcatagga

SEQ ID NO: 6026249 - DNA, 25 bp, Homo sapien
aagacctgcgacacctgcgtcgaag

SEQ ID NO: 6026250 - DNA, 25 bp, Homo sapien
tcgaagatgttggggtgttggagca

SEQ ID NO: 6026251 - DNA, 25 bp, Homo sapien
ctcacacacagttcgcctctttgat

SEQ ID NO: 6026252 - DNA, 25 bp, Homo sapien
cttcgcttcaaaaaatggaacaact

SEQ ID NO: 6026253 - DNA, 25 bp, Homo sapien
tgctccaaaacaacaacggcggcgg

SEQ ID NO: 6026254 - DNA, 25 bp, Homo sapien
tgcgacacctgcgtcgaagatgttg

SEQ ID NO: 6026255 - DNA, 25 bp, Homo sapien
cccctcgggtgtaatcagaatagct

SEQ ID NO: 6026256 - DNA, 25 bp, Homo sapien
cctgcgtcgaagatgttggggtgtt

SEQ ID NO: 6026257 - DNA, 25 bp, Homo sapien
ggcggcgggaagttcaccggcgtca

SEQ ID NO: 6026258 - DNA, 25 bp, Homo sapien
gtcatcgtcgggaagacctgcgaca

SEQ ID NO: 6026259 - DNA, 25 bp, Homo sapien
agctatgtctccagaatgtagccat

SEQ ID NO: 6026260 - DNA, 25 bp, Homo sapien
agcgggagccacctgatagcctttg

SEQ ID NO: 6026261 - DNA, 25 bp, Homo sapien
tcttgcgtcgagttttccggtaaga

SEQ ID NO: 6026262 - DNA, 25 bp, Homo sapien
caagatggattccaattcagcggga

SEQ ID NO: 6026263 - DNA, 25 bp, Homo sapien
atcataggacctctcacacacagtt

SEQ ID NO: 6026264 - DNA, 25 bp, Homo sapien
ctttatgaggatctctctgattttt

SEQ ID NO: 6026265 - DNA, 25 bp, Homo sapien
ttcgcctctttgattaacgcccagc

SEQ ID NO: 6026266 - DNA, 25 bp, Homo sapien
cttgtcaatcaaggcgttggtcgct

SEQ ID NO: 6026267 - DNA, 25 bp, Homo sapien
ggacctctcacacacagttcgcctc

SEQ ID NO: 6026268 - DNA, 25 bp, Homo sapien
tagccatccatccttgtcaatcaag

SEQ ID NO: 6026269 - DNA, 25 bp, Homo sapien
tatcatccccctcgggtgtaatcag

SEQ ID NO: 6026270 - DNA, 25 bp, Homo sapien
tttcggtacttcgtccacaaacaca

SEQ ID NO: 6026271 - DNA, 25 bp, Homo sapien
agaatgtagccatccatccttgtca

SEQ ID NO: 6026272 - DNA, 25 bp, Homo sapien
tcgtcttcgtcccagtaagctatgt

SEQ ID NO: 6026273 - DNA, 25 bp, Homo sapien
gtccacaaacacaactcctccgcgc

SEQ ID NO: 6026274 - DNA, 25 bp, Homo sapien
cctttgtacttaatcagagacttca

SEQ ID NO: 6026275 - DNA, 25 bp, Homo sapien
ggattccaattcagcgggagccacc

SEQ ID NO: 6026276 - DNA, 25 bp, Homo sapien
ggtatccagatccacaaccttcgct

SEQ ID NO: 6026277 - DNA, 25 bp, Homo sapien
gcgttggtcgcttccggattgttta

SEQ ID NO: 6026278 - DNA, 25 bp, Homo sapien
taccgaccgcgcccggtttatcatc

SEQ ID NO: 6026279 - DNA, 25 bp, Homo sapien
gacttcaggcggtcaacgatgaaga

SEQ ID NO: 6026280 - DNA, 25 bp, Homo sapien
tacttgactggcgacgtaatccacg

SEQ ID NO: 6026281 - DNA, 25 bp, Homo sapien
ggttgttacttgactggcgacgtaa

SEQ ID NO: 6026282 - DNA, 25 bp, Homo sapien
aactcctccgcgcaactttttcgcg

SEQ ID NO: 6026283 - DNA, 25 bp, Homo sapien
taatcagaatagctgatgtagtctc

SEQ ID NO: 6026284 - DNA, 25 bp, Homo sapien
aagttcaccggcgtcatcgtcggga

SEQ ID NO: 6026285 - DNA, 25 bp, Homo sapien
tgaggatctctctgatttttcttgc

SEQ ID NO: 6026286 - DNA, 25 bp, Homo sapien
ttcgtcccagtaagctatgtctcca

SEQ ID NO: 6026287 - DNA, 25 bp, Homo sapien
cataatcataggacctctcacacac

SEQ ID NO: 6026288 - DNA, 25 bp, Homo sapien
tcaacgatgaagaagtgttcgtctt

SEQ ID NO: 6026289 - DNA, 25 bp, Homo sapien
tctttgattaacgcccagcgttttc

SEQ ID NO: 6026290 - DNA, 25 bp, Homo sapien
cgggtgtaatcagaatagctgatgt

SEQ ID NO: 6026291 - DNA, 25 bp, Homo sapien
tttttccgtcatcgtctttccgtgc

SEQ ID NO: 6026292 - DNA, 25 bp, Homo sapien
ttttcccggtatccagatccacaac

SEQ ID NO: 6026293 - DNA, 25 bp, Homo sapien
cgtcatcgtctttccgtgctccaaa

SEQ ID NO: 6026294 - DNA, 25 bp, Homo sapien
gtcgcttccggattgtttacataac

SEQ ID NO: 6026295 - DNA, 25 bp, Homo sapien
aaacacaactcctccgcgcaacttt

SEQ ID NO: 6026296 - DNA, 25 bp, Homo sapien
ctccgcgcaactttttcgcggttgt

SEQ ID NO: 6026297 - DNA, 25 bp, Homo sapien
aagtgttcgtcttcgtcccagtaag

SEQ ID NO: 6026298 - DNA, 25 bp, Homo sapien
atcaaggcgttggtcgcttccggat

SEQ ID NO: 6026299 - DNA, 25 bp, Homo sapien
tgatttttcttgcgtcgagttttcc

SEQ ID NO: 6026300 - DNA, 25 bp, Homo sapien
gggtgttggagcaagatggattcca

SEQ ID NO: 6026301 - DNA, 25 bp, Homo sapien
accggacataatcataggacctctc

SEQ ID NO: 6026302 - DNA, 25 bp, Homo sapien
attgtttacataaccggacataatc

SEQ ID NO: 6026303 - DNA, 25 bp, Homo sapien
gactggcgacgtaatccacgatctc

SEQ ID NO: 6026304 - DNA, 25 bp, Homo sapien
gtcgggaagacctgcgacacctgcg

SEQ ID NO: 6026305 - DNA, 25 bp, Homo sapien
agccacctgatagcctttgtactta

SEQ ID NO: 6026306 - DNA, 25 bp, Homo sapien
gaatagctgatgtagtctcagtgag

SEQ ID NO: 6026307 - DNA, 25 bp, Homo sapien
ccagtaagctatgtctccagaatgt

SEQ ID NO: 6026308 - DNA, 25 bp, Homo sapien
cacagttcgcctctttgattaacgc

SEQ ID NO: 6026309 - DNA, 25 bp, Homo sapien
catctacctttctcttcttttttgg

SEQ ID NO: 6026310 - DNA, 25 bp, Homo sapien
acgtcctcgccgtctaagtggagct

SEQ ID NO: 6026311 - DNA, 25 bp, Homo sapien
tcgtctagcgcgtcggcatgcgcca

SEQ ID NO: 6026312 - DNA, 25 bp, Homo sapien
gacttgtcatcgtcgtccttgtagt

SEQ ID NO: 6026313 - DNA, 25 bp, Homo sapien
tttgggcatgcttgttcgatagaag

SEQ ID NO: 6026314 - DNA, 25 bp, Homo sapien
aacatgtccagatcgaaatcgtcta

SEQ ID NO: 6026315 - DNA, 25 bp, Homo sapien
tcgccgtctaagtggagctcgtccc

SEQ ID NO: 6026316 - DNA, 25 bp, Homo sapien
tgttcgatagaagacagtagcttca

SEQ ID NO: 6026317 - DNA, 25 bp, Homo sapien
atcgccacgtcctcgccgtctaagt

SEQ ID NO: 6026318 - DNA, 25 bp, Homo sapien
tccagatcgaaatcgtctagcgcgt

SEQ ID NO: 6026319 - DNA, 25 bp, Homo sapien
catgcttgttcgatagaagacagta

SEQ ID NO: 6026320 - DNA, 25 bp, Homo sapien
ggaattcatctacctttctcttctt

SEQ ID NO: 6026321 - DNA, 25 bp, Homo sapien
tgttagcggccgcggatcccggacc

SEQ ID NO: 6026322 - DNA, 25 bp, Homo sapien
tcgaaatcgtctagcgcgtcggcat

SEQ ID NO: 6026323 - DNA, 25 bp, Homo sapien
ttgtagtcagccatgttagcggccg

SEQ ID NO: 6026324 - DNA, 25 bp, Homo sapien
gagatccccgggaattcatctacct

SEQ ID NO: 6026325 - DNA, 25 bp, Homo sapien
tctaagtggagctcgtcccccaggc

SEQ ID NO: 6026326 - DNA, 25 bp, Homo sapien
tgcgccatcgccacgtcctcgccgt

SEQ ID NO: 6026327 - DNA, 25 bp, Homo sapien
agcgcgtcggcatgcgccatcgcca

SEQ ID NO: 6026328 - DNA, 25 bp, Homo sapien
gcgagccatggacttgtcatcgtcg

SEQ ID NO: 6026329 - DNA, 25 bp, Homo sapien
cccgggaattcatctacctttctct

SEQ ID NO: 6026330 - DNA, 25 bp, Homo sapien
tcagccatgttagcggccgcggatc

SEQ ID NO: 6026331 - DNA, 25 bp, Homo sapien
tcatcgtcgtccttgtagtcagcca

SEQ ID NO: 6026332 - DNA, 25 bp, Homo sapien
tttctcttcttttttgggcatgctt

SEQ ID NO: 6026333 - DNA, 25 bp, Homo sapien
aggctgacatcggtcgggggggccg

SEQ ID NO: 6026334 - DNA, 25 bp, Homo sapien
catcggtcgggggggccgtcgagat

SEQ ID NO: 6026335 - DNA, 25 bp, Homo sapien
tccccgtcccccaacatgtccagat

SEQ ID NO: 6026336 - DNA, 25 bp, Homo sapien
tcccccaacatgtccagatcgaaat

SEQ ID NO: 6026337 - DNA, 25 bp, Homo sapien
tcgtccttgtagtcagccatgttag

SEQ ID NO: 6026338 - DNA, 25 bp, Homo sapien
ttcttttttgggcatgcttgttcga

SEQ ID NO: 6026339 - DNA, 25 bp, Homo sapien
tcggcatgcgccatcgccacgtcct

SEQ ID NO: 6026340 - DNA, 25 bp, Homo sapien
gtcccccaggctgacatcggtcggg

SEQ ID NO: 6026341 - DNA, 25 bp, Homo sapien
gccatggacttgtcatcgtcgtcct

SEQ ID NO: 6026342 - DNA, 25 bp, Homo sapien
tggagctcgtcccccaggctgacat

SEQ ID NO: 6026343 - DNA, 25 bp, Homo sapien
ggccgtcgagatccccgggaattca

SEQ ID NO: 6026344 - DNA, 25 bp, Homo sapien
gatgcccttcagctcgatgcggttc

SEQ ID NO: 6026345 - DNA, 25 bp, Homo sapien
ggatgttgccgtcctccttgaagtc

SEQ ID NO: 6026346 - DNA, 25 bp, Homo sapien
acgagggtgggccagggcacgggca

SEQ ID NO: 6026347 - DNA, 25 bp, Homo sapien
aacttcacctcggcgcgggtcttgt

SEQ ID NO: 6026348 - DNA, 25 bp, Homo sapien
ccgtaggtcagggtggtcacgaggg

SEQ ID NO: 6026349 - DNA, 25 bp, Homo sapien
gtcggcgagctgcacgctgccgtcc

SEQ ID NO: 6026350 - DNA, 25 bp, Homo sapien
cggccatgatatagacgttgtggct

SEQ ID NO: 6026351 - DNA, 25 bp, Homo sapien
tgtagttgccgtcgtccttgaagaa

SEQ ID NO: 6026352 - DNA, 25 bp, Homo sapien
gatgggggtgttctgctggtagtgg

SEQ ID NO: 6026353 - DNA, 25 bp, Homo sapien
cttcagctcgatgcggttcaccagg

SEQ ID NO: 6026354 - DNA, 25 bp, Homo sapien
gccccaggatgttgccgtcctcctt

SEQ ID NO: 6026355 - DNA, 25 bp, Homo sapien
actccagcttgtgccccaggatgtt

SEQ ID NO: 6026356 - DNA, 25 bp, Homo sapien
ggaccatgtgatcgcgcttctcgtt

SEQ ID NO: 6026357 - DNA, 25 bp, Homo sapien
cacgggcagcttgccggtggtgcag

SEQ ID NO: 6026358 - DNA, 25 bp, Homo sapien
ggcgcgggtcttgtagttgccgtcg

SEQ ID NO: 6026359 - DNA, 25 bp, Homo sapien
ttgctcagggcggactgggtgctca

SEQ ID NO: 6026360 - DNA, 25 bp, Homo sapien
tgatatagacgttgtggctgttgta

SEQ ID NO: 6026361 - DNA, 25 bp, Homo sapien
tgcacgccgtaggtcagggtggtca

SEQ ID NO: 6026362 - DNA, 25 bp, Homo sapien
gcgcttctcgttggggtctttgctc

SEQ ID NO: 6026363 - DNA, 25 bp, Homo sapien
tggttgtcgggcagcagcacggggc

SEQ ID NO: 6026364 - DNA, 25 bp, Homo sapien
ctccttgaagtcgatgcccttcagc

SEQ ID NO: 6026365 - DNA, 25 bp, Homo sapien
agcacggggccgtcgccgatggggg

SEQ ID NO: 6026366 - DNA, 25 bp, Homo sapien
gtggcatcgccctcgccctcgccgg

SEQ ID NO: 6026367 - DNA, 25 bp, Homo sapien
ggtgggccagggcacgggcagcttg

SEQ ID NO: 6026368 - DNA, 25 bp, Homo sapien
aagcactgcacgccgtaggtcaggg

SEQ ID NO: 6026369 - DNA, 25 bp, Homo sapien
cgtccttgaagaagatggtgcgctc

SEQ ID NO: 6026370 - DNA, 25 bp, Homo sapien
tgcgctcctggacgtagccttcggg

SEQ ID NO: 6026371 - DNA, 25 bp, Homo sapien
cttcagggtcagcttgccgtaggtg

SEQ ID NO: 6026372 - DNA, 25 bp, Homo sapien
agacgttgtggctgttgtagttgta

SEQ ID NO: 6026373 - DNA, 25 bp, Homo sapien
gcttgtgccccaggatgttgccgtc

SEQ ID NO: 6026374 - DNA, 25 bp, Homo sapien
gcggacttgaagaagtcgtgctgct

SEQ ID NO: 6026375 - DNA, 25 bp, Homo sapien
agggcggactgggtgctcaggtagt

SEQ ID NO: 6026376 - DNA, 25 bp, Homo sapien
tcgatgcggttcaccagggtgtcgc

SEQ ID NO: 6026377 - DNA, 25 bp, Homo sapien
ggtgttctgctggtagtggtcggcg

SEQ ID NO: 6026378 - DNA, 25 bp, Homo sapien
tgaagaagatggtgcgctcctggac

SEQ ID NO: 6026379 - DNA, 25 bp, Homo sapien
cggtcacgaactccagcaggaccat

SEQ ID NO: 6026380 - DNA, 25 bp, Homo sapien
agttcaccttgatgccgttcttctg

SEQ ID NO: 6026381 - DNA, 25 bp, Homo sapien
cggttcaccagggtgtcgccctcga

SEQ ID NO: 6026382 - DNA, 25 bp, Homo sapien
tgccgttcttctgcttgtcggccat

SEQ ID NO: 6026383 - DNA, 25 bp, Homo sapien
tgccgtcgtccttgaagaagatggt

SEQ ID NO: 6026384 - DNA, 25 bp, Homo sapien
agttgtactccagcttgtgccccag

SEQ ID NO: 6026385 - DNA, 25 bp, Homo sapien
tggtgcagatgaacttcagggtcag

SEQ ID NO: 6026386 - DNA, 25 bp, Homo sapien
atcccggcggcggtcacgaactcca

SEQ ID NO: 6026387 - DNA, 25 bp, Homo sapien
tcgggcagcagcacggggccgtcgc

SEQ ID NO: 6026388 - DNA, 25 bp, Homo sapien
cctggacgtagccttcgggcatggc

SEQ ID NO: 6026389 - DNA, 25 bp, Homo sapien
aagtcgtgctgcttcatgtggtcgg

SEQ ID NO: 6026390 - DNA, 25 bp, Homo sapien
gtcagggtggtcacgagggtgggcc

SEQ ID NO: 6026391 - DNA, 25 bp, Homo sapien
gtggtcacgagggtgggccagggca

SEQ ID NO: 6026392 - DNA, 25 bp, Homo sapien
tgccgtcctcgatgttgtggcggat

SEQ ID NO: 6026393 - DNA, 25 bp, Homo sapien
ctgctggtagtggtcggcgagctgc

SEQ ID NO: 6026394 - DNA, 25 bp, Homo sapien
ttgaagaagtcgtgctgcttcatgt

SEQ ID NO: 6026395 - DNA, 25 bp, Homo sapien
tgttgtagttgtactccagcttgtg

SEQ ID NO: 6026396 - DNA, 25 bp, Homo sapien
agatgaacttcagggtcagcttgcc

SEQ ID NO: 6026397 - DNA, 25 bp, Homo sapien
ggcggatcttgaagttcaccttgat

SEQ ID NO: 6026398 - DNA, 25 bp, Homo sapien
atgtggtcggggtagcggctgaagc

SEQ ID NO: 6026399 - DNA, 25 bp, Homo sapien
aggtagtggttgtcgggcagcagca

SEQ ID NO: 6026400 - DNA, 25 bp, Homo sapien
accagggtgtcgccctcgaacttca

SEQ ID NO: 6026401 - DNA, 25 bp, Homo sapien
ggtcttgtagttgccgtcgtccttg

SEQ ID NO: 6026402 - DNA, 25 bp, Homo sapien
ggtagcggctgaagcactgcacgcc

SEQ ID NO: 6026403 - DNA, 25 bp, Homo sapien
agatggtgcgctcctggacgtagcc

SEQ ID NO: 6026404 - DNA, 25 bp, Homo sapien
cgaactccagcaggaccatgtgatc

SEQ ID NO: 6026405 - DNA, 25 bp, Homo sapien
ccttcgggcatggcggacttgaaga

SEQ ID NO: 6026406 - DNA, 25 bp, Homo sapien
tgtggctgttgtagttgtactccag

SEQ ID NO: 6026407 - DNA, 25 bp, Homo sapien
ccagcaggaccatgtgatcgcgctt

SEQ ID NO: 6026408 - DNA, 25 bp, Homo sapien
tgccggtggtgcagatgaacttcag

SEQ ID NO: 6026409 - DNA, 25 bp, Homo sapien
tcttctgcttgtcggccatgatata

SEQ ID NO: 6026410 - DNA, 25 bp, Homo sapien
ggccgtcgccgatgggggtgttctg

SEQ ID NO: 6026411 - DNA, 25 bp, Homo sapien
cggcggcggtcacgaactccagcag

SEQ ID NO: 6026412 - DNA, 25 bp, Homo sapien
ccttgatgccgttcttctgcttgtc

SEQ ID NO: 6026413 - DNA, 25 bp, Homo sapien
gaagtcgatgcccttcagctcgatg

SEQ ID NO: 6026414 - DNA, 25 bp, Homo sapien
gtagtggtcggcgagctgcacgctg

SEQ ID NO: 6026415 - DNA, 25 bp, Homo sapien
gtgtcgccctcgaacttcacctcgg

SEQ ID NO: 6026416 - DNA, 25 bp, Homo sapien
gagctgcacgctgccgtcctcgatg

SEQ ID NO: 6026417 - DNA, 25 bp, Homo sapien
tgttgtggcggatcttgaagttcac

SEQ ID NO: 6026418 - DNA, 25 bp, Homo sapien
tcgccgatgggggtgttctgctggt

SEQ ID NO: 6026419 - DNA, 25 bp, Homo sapien
gactgggtgctcaggtagtggttgt

SEQ ID NO: 6026420 - DNA, 25 bp, Homo sapien
cttgccgtaggtggcatcgccctcg

SEQ ID NO: 6026421 - DNA, 25 bp, Homo sapien
gtgctcaggtagtggttgtcgggca

SEQ ID NO: 6026422 - DNA, 25 bp, Homo sapien
gcacgctgccgtcctcgatgttgtg

SEQ ID NO: 6026423 - DNA, 25 bp, Homo sapien
tcgttggggtctttgctcagggcgg

SEQ ID NO: 6026424 - DNA, 25 bp, Homo sapien
gtgatcgcgcttctcgttggggtct

SEQ ID NO: 6026425 - DNA, 25 bp, Homo sapien
acgtagccttcgggcatggcggact

SEQ ID NO: 6026426 - DNA, 25 bp, Homo sapien
acctcggcgcgggtcttgtagttgc

SEQ ID NO: 6026427 - DNA, 25 bp, Homo sapien
gcttgtcggccatgatatagacgtt

SEQ ID NO: 6026428 - DNA, 25 bp, Homo sapien
tcttgaagttcaccttgatgccgtt

SEQ ID NO: 6026429 - DNA, 25 bp, Homo sapien
tgccgtcctccttgaagtcgatgcc

SEQ ID NO: 6026430 - DNA, 25 bp, Homo sapien
gggtctttgctcagggcggactggg

SEQ ID NO: 6026431 - DNA, 25 bp, Homo sapien
ggcatggcggacttgaagaagtcgt

SEQ ID NO: 6026432 - DNA, 25 bp, Homo sapien
ccctcgaacttcacctcggcgcggg

SEQ ID NO: 6026433 - DNA, 25 bp, Homo sapien
ccagggcacgggcagcttgccggtg

SEQ ID NO: 6026434 - DNA, 25 bp, Homo sapien
cctcgatgttgtggcggatcttgaa

SEQ ID NO: 6026435 - DNA, 25 bp, Homo sapien
gtcagcttgccgtaggtggcatcgc

SEQ ID NO: 6026436 - DNA, 25 bp, Homo sapien
tcggggtagcggctgaagcactgca

SEQ ID NO: 6026437 - DNA, 25 bp, Homo sapien
cagcttgccggtggtgcagatgaac

SEQ ID NO: 6026438 - DNA, 25 bp, Homo sapien
cggctgaagcactgcacgccgtagg

SEQ ID NO: 6026439 - DNA, 25 bp, Homo sapien
agatcctcgccgtcgggcatgctcg

SEQ ID NO: 6026440 - DNA, 25 bp, Homo sapien
tcgagcacagctgcgcaaggaacgc

SEQ ID NO: 6026441 - DNA, 25 bp, Homo sapien
ctgatcgacaagaccggcttccatc

SEQ ID NO: 6026442 - DNA, 25 bp, Homo sapien
gagcccctgatgctcttcgtccaga

SEQ ID NO: 6026443 - DNA, 25 bp, Homo sapien
cgaatcgggagcggcgataccgtaa

SEQ ID NO: 6026444 - DNA, 25 bp, Homo sapien
agccagtcccttcccgcttcagtga

SEQ ID NO: 6026445 - DNA, 25 bp, Homo sapien
tgggtcacgacgagatcctcgccgt

SEQ ID NO: 6026446 - DNA, 25 bp, Homo sapien
acgacgagatcctcgccgtcgggca

SEQ ID NO: 6026447 - DNA, 25 bp, Homo sapien
gaacagttcggctggcgcgagcccc

SEQ ID NO: 6026448 - DNA, 25 bp, Homo sapien
aatgggcaggtagccggatcaagcg

SEQ ID NO: 6026449 - DNA, 25 bp, Homo sapien
ggtagccaacgctatgtcctgatag

SEQ ID NO: 6026450 - DNA, 25 bp, Homo sapien
gcctcgtcttgcagttcattcaggg

SEQ ID NO: 6026451 - DNA, 25 bp, Homo sapien
cccattcgccgccaagctcttcagc

SEQ ID NO: 6026452 - DNA, 25 bp, Homo sapien
cccgcttcagtgacaacgtcgagca

SEQ ID NO: 6026453 - DNA, 25 bp, Homo sapien
cgagtacgtgctcgctcgatgcgat

SEQ ID NO: 6026454 - DNA, 25 bp, Homo sapien
aatagcagccagtcccttcccgctt

SEQ ID NO: 6026455 - DNA, 25 bp, Homo sapien
accgtaaagcacgaggaagcggtca

SEQ ID NO: 6026456 - DNA, 25 bp, Homo sapien
gctcgatgcgatgtttcgcttggtg

SEQ ID NO: 6026457 - DNA, 25 bp, Homo sapien
tatgtcctgatagcggtccgccaca

SEQ ID NO: 6026458 - DNA, 25 bp, Homo sapien
cgcgctgcctcgtcttgcagttcat

SEQ ID NO: 6026459 - DNA, 25 bp, Homo sapien
tcttcagcaatatcacgggtagcca

SEQ ID NO: 6026460 - DNA, 25 bp, Homo sapien
gccacagtcgatgaatccagaaaag

SEQ ID NO: 6026461 - DNA, 25 bp, Homo sapien
caggcatcgccatgggtcacgacga

SEQ ID NO: 6026462 - DNA, 25 bp, Homo sapien
tgcgctgcgaatcgggagcggcgat

SEQ ID NO: 6026463 - DNA, 25 bp, Homo sapien
gtatgcagccgccgcattgcatcag

SEQ ID NO: 6026464 - DNA, 25 bp, Homo sapien
ctcttcgtccagatcatcctgatcg

SEQ ID NO: 6026465 - DNA, 25 bp, Homo sapien
caggtagccggatcaagcgtatgca

SEQ ID NO: 6026466 - DNA, 25 bp, Homo sapien
ggcacttcgcccaatagcagccagt

SEQ ID NO: 6026467 - DNA, 25 bp, Homo sapien
gatagccgcgctgcctcgtcttgca

SEQ ID NO: 6026468 - DNA, 25 bp, Homo sapien
ctgatgctcttcgtccagatcatcc

SEQ ID NO: 6026469 - DNA, 25 bp, Homo sapien
atcatcctgatcgacaagaccggct

SEQ ID NO: 6026470 - DNA, 25 bp, Homo sapien
ccatgatggatactttctcggcagg

SEQ ID NO: 6026471 - DNA, 25 bp, Homo sapien
tcagtgacaacgtcgagcacagctg

SEQ ID NO: 6026472 - DNA, 25 bp, Homo sapien
tcccttcccgcttcagtgacaacgt

SEQ ID NO: 6026473 - DNA, 25 bp, Homo sapien
atcctgccccggcacttcgcccaat

SEQ ID NO: 6026474 - DNA, 25 bp, Homo sapien
gtccgccacacccagccggccacag

SEQ ID NO: 6026475 - DNA, 25 bp, Homo sapien
accggcttccatccgagtacgtgct

SEQ ID NO: 6026476 - DNA, 25 bp, Homo sapien
tgctcgccttgagcctggcgaacag

SEQ ID NO: 6026477 - DNA, 25 bp, Homo sapien
gcggccattttccaccatgatattc

SEQ ID NO: 6026478 - DNA, 25 bp, Homo sapien
gcaatatcacgggtagccaacgcta

SEQ ID NO: 6026479 - DNA, 25 bp, Homo sapien
cgggagcggcgataccgtaaagcac

SEQ ID NO: 6026480 - DNA, 25 bp, Homo sapien
agccgccgcattgcatcagccatga

SEQ ID NO: 6026481 - DNA, 25 bp, Homo sapien
gcaaggtgagatgacaggagatcct

SEQ ID NO: 6026482 - DNA, 25 bp, Homo sapien
tcaagcgtatgcagccgccgcattg

SEQ ID NO: 6026483 - DNA, 25 bp, Homo sapien
gccggatcaagcgtatgcagccgcc

SEQ ID NO: 6026484 - DNA, 25 bp, Homo sapien
atcacgggtagccaacgctatgtcc

SEQ ID NO: 6026485 - DNA, 25 bp, Homo sapien
atattcggcaagcaggcatcgccat

SEQ ID NO: 6026486 - DNA, 25 bp, Homo sapien
cttgagcctggcgaacagttcggct

SEQ ID NO: 6026487 - DNA, 25 bp, Homo sapien
tggatactttctcggcaggagcaag

SEQ ID NO: 6026488 - DNA, 25 bp, Homo sapien
attttccaccatgatattcggcaag

SEQ ID NO: 6026489 - DNA, 25 bp, Homo sapien
ggaacgcccgtcgtggccagccacg

SEQ ID NO: 6026490 - DNA, 25 bp, Homo sapien
tcgccatgggtcacgacgagatcct

SEQ ID NO: 6026491 - DNA, 25 bp, Homo sapien
cgcattgcatcagccatgatggata

SEQ ID NO: 6026492 - DNA, 25 bp, Homo sapien
ggcgatgcgctgcgaatcgggagcg

SEQ ID NO: 6026493 - DNA, 25 bp, Homo sapien
catcagccatgatggatactttctc

SEQ ID NO: 6026494 - DNA, 25 bp, Homo sapien
acaacgtcgagcacagctgcgcaag

SEQ ID NO: 6026495 - DNA, 25 bp, Homo sapien
gacaggagatcctgccccggcactt

SEQ ID NO: 6026496 - DNA, 25 bp, Homo sapien
cctggcgaacagttcggctggcgcg

SEQ ID NO: 6026497 - DNA, 25 bp, Homo sapien
tgtttcgcttggtggtcgaatgggc

SEQ ID NO: 6026498 - DNA, 25 bp, Homo sapien
gtggccagccacgatagccgcgctg

SEQ ID NO: 6026499 - DNA, 25 bp, Homo sapien
ggcaagcaggcatcgccatgggtca

SEQ ID NO: 6026500 - DNA, 25 bp, Homo sapien
gtgctcgctcgatgcgatgtttcgc

SEQ ID NO: 6026501 - DNA, 25 bp, Homo sapien
gcttggtggtcgaatgggcaggtag

SEQ ID NO: 6026502 - DNA, 25 bp, Homo sapien
tgagatgacaggagatcctgccccg

SEQ ID NO: 6026503 - DNA, 25 bp, Homo sapien
gcgcaaggaacgcccgtcgtggcca

SEQ ID NO: 6026504 - DNA, 25 bp, Homo sapien
tcgcccaatagcagccagtcccttc

SEQ ID NO: 6026505 - DNA, 25 bp, Homo sapien
tttctcggcaggagcaaggtgagat

SEQ ID NO: 6026506 - DNA, 25 bp, Homo sapien
tccatccgagtacgtgctcgctcga

SEQ ID NO: 6026507 - DNA, 25 bp, Homo sapien
tgccccggcacttcgcccaatagca

SEQ ID NO: 6026508 - DNA, 25 bp, Homo sapien
cgggcatgctcgccttgagcctggc

SEQ ID NO: 6026509 - DNA, 25 bp, Homo sapien
tggcgcgagcccctgatgctcttcg

SEQ ID NO: 6026510 - DNA, 25 bp, Homo sapien
agaaaagcggccattttccaccatg

SEQ ID NO: 6026511 - DNA, 25 bp, Homo sapien
cagccggccacagtcgatgaatcca

SEQ ID NO: 6026512 - DNA, 25 bp, Homo sapien
cccgtcgtggccagccacgatagcc

SEQ ID NO: 6026513 - DNA, 25 bp, Homo sapien
tggtcgaatgggcaggtagccggat

SEQ ID NO: 6026514 - DNA, 25 bp, Homo sapien
gcaggagcaaggtgagatgacagga

SEQ ID NO: 6026515 - DNA, 25 bp, Homo sapien
cacacccagccggccacagtcgatg

SEQ ID NO: 6026516 - DNA, 25 bp, Homo sapien
gacaagaccggcttccatccgagta

SEQ ID NO: 6026517 - DNA, 25 bp, Homo sapien
ggcgataccgtaaagcacgaggaag

SEQ ID NO: 6026518 - DNA, 25 bp, Homo sapien
aagcacgaggaagcggtcagcccat

SEQ ID NO: 6026519 - DNA, 25 bp, Homo sapien
aggaagcggtcagcccattcgccgc

SEQ ID NO: 6026520 - DNA, 25 bp, Homo sapien
ggtcagcccattcgccgccaagctc

SEQ ID NO: 6026521 - DNA, 25 bp, Homo sapien
tcgccgccaagctcttcagcaatat

SEQ ID NO: 6026522 - DNA, 25 bp, Homo sapien
caacgctatgtcctgatagcggtcc

SEQ ID NO: 6026523 - DNA, 25 bp, Homo sapien
gtccagatcatcctgatcgacaaga

SEQ ID NO: 6026524 - DNA, 25 bp, Homo sapien
ccaagctcttcagcaatatcacggg

SEQ ID NO: 6026525 - DNA, 25 bp, Homo sapien
acagctgcgcaaggaacgcccgtcg

SEQ ID NO: 6026526 - DNA, 25 bp, Homo sapien
gtcgatgaatccagaaaagcggcca

SEQ ID NO: 6026527 - DNA, 25 bp, Homo sapien
ttcggctggcgcgagcccctgatgc

SEQ ID NO: 6026528 - DNA, 25 bp, Homo sapien
gaatccagaaaagcggccattttcc

SEQ ID NO: 6026529 - DNA, 25 bp, Homo sapien
tgcgatgtttcgcttggtggtcgaa

SEQ ID NO: 6026530 - DNA, 25 bp, Homo sapien
caccatgatattcggcaagcaggca

SEQ ID NO: 6026531 - DNA, 25 bp, Homo sapien
cgccgtcgggcatgctcgccttgag

SEQ ID NO: 6026532 - DNA, 25 bp, Homo sapien
agacttacaggctgatactctccgg

SEQ ID NO: 6026533 - DNA, 25 bp, Homo sapien
gttcccgcagcaatggatgccgctt

SEQ ID NO: 6026534 - DNA, 25 bp, Homo sapien
cgggacctgcacatttcagaaattg

SEQ ID NO: 6026535 - DNA, 25 bp, Homo sapien
gccggcgccggcgttccctgctgga

SEQ ID NO: 6026536 - DNA, 25 bp, Homo sapien
aagccaggctcatgccagaaaccga

SEQ ID NO: 6026537 - DNA, 25 bp, Homo sapien
tggatgccgcttcgggacctgcaca

SEQ ID NO: 6026538 - DNA, 25 bp, Homo sapien
ccccaggcccctgggcgcacatctc

SEQ ID NO: 6026539 - DNA, 25 bp, Homo sapien
catggctcccagaaacaagatcagc

SEQ ID NO: 6026540 - DNA, 25 bp, Homo sapien
aggagcagacacacacagccccagg

SEQ ID NO: 6026541 - DNA, 25 bp, Homo sapien
aagcccacattcgtgtcaaacgcta

SEQ ID NO: 6026542 - DNA, 25 bp, Homo sapien
gccctcaaggctatggccgccggcg

SEQ ID NO: 6026543 - DNA, 25 bp, Homo sapien
cacacagccccaggcccctgggcgc

SEQ ID NO: 6026544 - DNA, 25 bp, Homo sapien
ctttaggatataggtgcgggtgaca

SEQ ID NO: 6026545 - DNA, 25 bp, Homo sapien
cccctgggcgcacatctccagactc

SEQ ID NO: 6026546 - DNA, 25 bp, Homo sapien
agacaaagacaaggacggcatggct

SEQ ID NO: 6026547 - DNA, 25 bp, Homo sapien
ccagatctaccagctaacagacaaa

SEQ ID NO: 6026548 - DNA, 25 bp, Homo sapien
cgtgtcaaacgctaccgccagagca

SEQ ID NO: 6026549 - DNA, 25 bp, Homo sapien
cgcaccggggcggactgagacaatc

SEQ ID NO: 6026550 - DNA, 25 bp, Homo sapien
tcctccggtcccggactgtggagtc

SEQ ID NO: 6026551 - DNA, 25 bp, Homo sapien
gatgagacgacagttcctacccaga

SEQ ID NO: 6026552 - DNA, 25 bp, Homo sapien
atataggtgcgggtgacagcattga

SEQ ID NO: 6026553 - DNA, 25 bp, Homo sapien
gcagaggaacccaagaccaagccag

SEQ ID NO: 6026554 - DNA, 25 bp, Homo sapien
acccagactcttgatccattcctgg

SEQ ID NO: 6026555 - DNA, 25 bp, Homo sapien
gttccctgctggaggtcctccggtc

SEQ ID NO: 6026556 - DNA, 25 bp, Homo sapien
agacaatcctgcagagatctgcctg

SEQ ID NO: 6026557 - DNA, 25 bp, Homo sapien
actcttgatccattcctggacgagc

SEQ ID NO: 6026558 - DNA, 25 bp, Homo sapien
ggactgtggagtcctcccaggagca

SEQ ID NO: 6026559 - DNA, 25 bp, Homo sapien
ctggccccctacaagccagcaatca

SEQ ID NO: 6026560 - DNA, 25 bp, Homo sapien
ggcccaccagatctaccagctaaca

SEQ ID NO: 6026561 - DNA, 25 bp, Homo sapien
aaaccgagacttacaggctgatact

SEQ ID NO: 6026562 - DNA, 25 bp, Homo sapien
gcagcaatggatgccgcttcgggac

SEQ ID NO: 6026563 - DNA, 25 bp, Homo sapien
tgccagaaaccgagacttacaggct

SEQ ID NO: 6026564 - DNA, 25 bp, Homo sapien
cagactctttaggatataggtgcgg

SEQ ID NO: 6026565 - DNA, 25 bp, Homo sapien
acattcgtgtcaaacgctaccgcca

SEQ ID NO: 6026566 - DNA, 25 bp, Homo sapien
catgaaccagggttcccgcagcaat

SEQ ID NO: 6026567 - DNA, 25 bp, Homo sapien
ggcgcacatctccagactctttagg

SEQ ID NO: 6026568 - DNA, 25 bp, Homo sapien
aagaccaagccaggctcatgccaga

SEQ ID NO: 6026569 - DNA, 25 bp, Homo sapien
gaacccaagaccaagccaggctcat

SEQ ID NO: 6026570 - DNA, 25 bp, Homo sapien
ttcctggacgagcagaacacaactg

SEQ ID NO: 6026571 - DNA, 25 bp, Homo sapien
aatcagagaacttcgcaccggggcg

SEQ ID NO: 6026572 - DNA, 25 bp, Homo sapien
ccgcttcgggacctgcacatttcag

SEQ ID NO: 6026573 - DNA, 25 bp, Homo sapien
atttcagaaattggcccaccagatc

SEQ ID NO: 6026574 - DNA, 25 bp, Homo sapien
ccctacaagccagcaatcagagcga

SEQ ID NO: 6026575 - DNA, 25 bp, Homo sapien
gggaggcagaggaacccaagaccaa

SEQ ID NO: 6026576 - DNA, 25 bp, Homo sapien
cctaggggaggcagaggaacccaag

SEQ ID NO: 6026577 - DNA, 25 bp, Homo sapien
ctgcggaatcagagaacttcgcacc

SEQ ID NO: 6026578 - DNA, 25 bp, Homo sapien
ggactgagacaatcctgcagagatc

SEQ ID NO: 6026579 - DNA, 25 bp, Homo sapien
agatcagccctcaaggctatggccg

SEQ ID NO: 6026580 - DNA, 25 bp, Homo sapien
gtgacagcattgaacagtcgggcga

SEQ ID NO: 6026581 - DNA, 25 bp, Homo sapien
tcccgttggcgcctgcggaatcaga

SEQ ID NO: 6026582 - DNA, 25 bp, Homo sapien
cctcccaggagcagacacacacagc

SEQ ID NO: 6026583 - DNA, 25 bp, Homo sapien
tcccagaaacaagatcagccctcaa

SEQ ID NO: 6026584 - DNA, 25 bp, Homo sapien
tgcccctaggggaggcagaggaacc

SEQ ID NO: 6026585 - DNA, 25 bp, Homo sapien
ctaccagctaacagacaaagacaag

SEQ ID NO: 6026586 - DNA, 25 bp, Homo sapien
agacaaggacggcatggctcccaga

SEQ ID NO: 6026587 - DNA, 25 bp, Homo sapien
ggtcccggactgtggagtcctccca

SEQ ID NO: 6026588 - DNA, 25 bp, Homo sapien
ggacgagcagaacacaactggcccc

SEQ ID NO: 6026589 - DNA, 25 bp, Homo sapien
gttcctacccagactcttgatccat

SEQ ID NO: 6026590 - DNA, 25 bp, Homo sapien
ccagagcatgaaccagggttcccgc

SEQ ID NO: 6026591 - DNA, 25 bp, Homo sapien
agaacttcgcaccggggcggactga

SEQ ID NO: 6026592 - DNA, 25 bp, Homo sapien
ctcgctgatgagacgacagttccta

SEQ ID NO: 6026593 - DNA, 25 bp, Homo sapien
tcgggcgagtatcccgttggcgcct

SEQ ID NO: 6026594 - DNA, 25 bp, Homo sapien
agagatctgcctggctgcccctagg

SEQ ID NO: 6026595 - DNA, 25 bp, Homo sapien
tcctgcagagatctgcctggctgcc

SEQ ID NO: 6026596 - DNA, 25 bp, Homo sapien
agcattgaacagtcgggcgagtatc

SEQ ID NO: 6026597 - DNA, 25 bp, Homo sapien
taccctacgggactcgctgatgaga

SEQ ID NO: 6026598 - DNA, 25 bp, Homo sapien
aaggctatggccgccggcgccggcg

SEQ ID NO: 6026599 - DNA, 25 bp, Homo sapien
aaacgctaccgccagagcatgaacc

SEQ ID NO: 6026600 - DNA, 25 bp, Homo sapien
acaactggccccctacaagccagca

SEQ ID NO: 6026601 - DNA, 25 bp, Homo sapien
ctaccgccagagcatgaaccagggt

SEQ ID NO: 6026602 - DNA, 25 bp, Homo sapien
ccagggttcccgcagcaatggatgc

SEQ ID NO: 6026603 - DNA, 25 bp, Homo sapien
gatccattcctggacgagcagaaca

SEQ ID NO: 6026604 - DNA, 25 bp, Homo sapien
cgagtatcccgttggcgcctgcgga

SEQ ID NO: 6026605 - DNA, 25 bp, Homo sapien
gaaattggcccaccagatctaccag

SEQ ID NO: 6026606 - DNA, 25 bp, Homo sapien
gaacagtcgggcgagtatcccgttg

SEQ ID NO: 6026607 - DNA, 25 bp, Homo sapien
ggctcatgccagaaaccgagactta

SEQ ID NO: 6026608 - DNA, 25 bp, Homo sapien
gcaatcagagcgaagcccacattcg

SEQ ID NO: 6026609 - DNA, 25 bp, Homo sapien
tgctggaggtcctccggtcccggac

SEQ ID NO: 6026610 - DNA, 25 bp, Homo sapien
ggacggcatggctcccagaaacaag

SEQ ID NO: 6026611 - DNA, 25 bp, Homo sapien
aagccagcaatcagagcgaagccca

SEQ ID NO: 6026612 - DNA, 25 bp, Homo sapien
ctgcacatttcagaaattggcccac

SEQ ID NO: 6026613 - DNA, 25 bp, Homo sapien
acgacagttcctacccagactcttg

SEQ ID NO: 6026614 - DNA, 25 bp, Homo sapien
acgggactcgctgatgagacgacag

SEQ ID NO: 6026615 - DNA, 25 bp, Homo sapien
gaaacaagatcagccctcaaggcta

SEQ ID NO: 6026616 - DNA, 25 bp, Homo sapien
tggagtcctcccaggagcagacaca

SEQ ID NO: 6026617 - DNA, 25 bp, Homo sapien
agcagctaccctacgggactcgctg

SEQ ID NO: 6026618 - DNA, 25 bp, Homo sapien
gccggcgttccctgctggaggtcct

SEQ ID NO: 6026619 - DNA, 25 bp, Homo sapien
agagcgaagcccacattcgtgtcaa

SEQ ID NO: 6026620 - DNA, 25 bp, Homo sapien
catctccagactctttaggatatag

SEQ ID NO: 6026621 - DNA, 25 bp, Homo sapien
cggggcggactgagacaatcctgca

SEQ ID NO: 6026622 - DNA, 25 bp, Homo sapien
gctaacagacaaagacaaggacggc

SEQ ID NO: 6026623 - DNA, 25 bp, Homo sapien
gtgcgggtgacagcattgaacagtc

SEQ ID NO: 6026624 - DNA, 25 bp, Homo sapien
tggcgcctgcggaatcagagaactt

SEQ ID NO: 6026625 - DNA, 25 bp, Homo sapien
atggccgccggcgccggcgttccct

SEQ ID NO: 6026626 - DNA, 25 bp, Homo sapien
gcttggtcttgggttcctctgcctc

SEQ ID NO: 6026627 - DNA, 25 bp, Homo sapien
ggctggacaacaagcattgcacgtt

SEQ ID NO: 6026628 - DNA, 25 bp, Homo sapien
aagtagtaatgaggcttatgccccg

SEQ ID NO: 6026629 - DNA, 25 bp, Homo sapien
accttgctgagacattcacgtctta

SEQ ID NO: 6026630 - DNA, 25 bp, Homo sapien
aatatataacgtacaaaaatatctc

SEQ ID NO: 6026631 - DNA, 25 bp, Homo sapien
ttaaaatgcccttaatacaatatat

SEQ ID NO: 6026632 - DNA, 25 bp, Homo sapien
gaagttctctgattccgcaggcgcc

SEQ ID NO: 6026633 - DNA, 25 bp, Homo sapien
ttgacagcaacaaacttaaatacta

SEQ ID NO: 6026634 - DNA, 25 bp, Homo sapien
taggaaacacaatgttttttcttca

SEQ ID NO: 6026635 - DNA, 25 bp, Homo sapien
ttcaatgctgtcacccgcacctata

SEQ ID NO: 6026636 - DNA, 25 bp, Homo sapien
catgagcctggcttggtcttgggtt

SEQ ID NO: 6026637 - DNA, 25 bp, Homo sapien
tctgcctcccctaggggcagccagg

SEQ ID NO: 6026638 - DNA, 25 bp, Homo sapien
ctctgattccgcaggcgccaacggg

SEQ ID NO: 6026639 - DNA, 25 bp, Homo sapien
aatatctctatatatttgaagttac

SEQ ID NO: 6026640 - DNA, 25 bp, Homo sapien
cgactgttcaatgctgtcacccgca

SEQ ID NO: 6026641 - DNA, 25 bp, Homo sapien
gcaacaaacttaaatactatagtta

SEQ ID NO: 6026642 - DNA, 25 bp, Homo sapien
tgccccgtgagaaaccagtttatga

SEQ ID NO: 6026643 - DNA, 25 bp, Homo sapien
aatgttttttcttcatccacaggcg

SEQ ID NO: 6026644 - DNA, 25 bp, Homo sapien
ccgccccggtgcgaagttctctgat

SEQ ID NO: 6026645 - DNA, 25 bp, Homo sapien
ctcgcccgactgttcaatgctgtca

SEQ ID NO: 6026646 - DNA, 25 bp, Homo sapien
tcagtccgccccggtgcgaagttct

SEQ ID NO: 6026647 - DNA, 25 bp, Homo sapien
acacacacacacacggaaccaaaca

SEQ ID NO: 6026648 - DNA, 25 bp, Homo sapien
gggaaggtgacaatataatcacttt

SEQ ID NO: 6026649 - DNA, 25 bp, Homo sapien
agtggctcagacccctgcccggaga

SEQ ID NO: 6026650 - DNA, 25 bp, Homo sapien
gattgtctcagtccgccccggtgcg

SEQ ID NO: 6026651 - DNA, 25 bp, Homo sapien
tcaggcgctctccaccttacacaca

SEQ ID NO: 6026652 - DNA, 25 bp, Homo sapien
cacacacacggaaccaaacaacctt

SEQ ID NO: 6026653 - DNA, 25 bp, Homo sapien
ggcttatgccccgtgagaaaccagt

SEQ ID NO: 6026654 - DNA, 25 bp, Homo sapien
gtgagaaaccagtttatgagcgggc

SEQ ID NO: 6026655 - DNA, 25 bp, Homo sapien
taatacaatatataacgtacaaaaa

SEQ ID NO: 6026656 - DNA, 25 bp, Homo sapien
aaacaaccttacaccttgctgagac

SEQ ID NO: 6026657 - DNA, 25 bp, Homo sapien
gctgtcacccgcacctatatcctaa

SEQ ID NO: 6026658 - DNA, 25 bp, Homo sapien
aaataggggaaggtgacaatataat

SEQ ID NO: 6026659 - DNA, 25 bp, Homo sapien
ttttcttcatccacaggcgataatc

SEQ ID NO: 6026660 - DNA, 25 bp, Homo sapien
aggcgccaacgggatactcgcccga

SEQ ID NO: 6026661 - DNA, 25 bp, Homo sapien
ggcagccaggcagatctctgcagga

SEQ ID NO: 6026662 - DNA, 25 bp, Homo sapien
ctcgctaggttttggaaagttcaag

SEQ ID NO: 6026663 - DNA, 25 bp, Homo sapien
cctaggggcagccaggcagatctct

SEQ ID NO: 6026664 - DNA, 25 bp, Homo sapien
gcaaggcagtggctcagacccctgc

SEQ ID NO: 6026665 - DNA, 25 bp, Homo sapien
ccttacaccttgctgagacattcac

SEQ ID NO: 6026666 - DNA, 25 bp, Homo sapien
aaccaaacaaccttacaccttgctg

SEQ ID NO: 6026667 - DNA, 25 bp, Homo sapien
gtcttgggttcctctgcctccccta

SEQ ID NO: 6026668 - DNA, 25 bp, Homo sapien
taatgaggcttatgccccgtgagaa

SEQ ID NO: 6026669 - DNA, 25 bp, Homo sapien
tctgcaggattgtctcagtccgccc

SEQ ID NO: 6026670 - DNA, 25 bp, Homo sapien
tttatgagcgggcaaggcagtggct

SEQ ID NO: 6026671 - DNA, 25 bp, Homo sapien
agcattgcacgttcctcgctaggtt

SEQ ID NO: 6026672 - DNA, 25 bp, Homo sapien
ggttcctctgcctcccctaggggca

SEQ ID NO: 6026673 - DNA, 25 bp, Homo sapien
gagcgggcaaggcagtggctcagac

SEQ ID NO: 6026674 - DNA, 25 bp, Homo sapien
ctcccctaggggcagccaggcagat

SEQ ID NO: 6026675 - DNA, 25 bp, Homo sapien
agcctggcttggtcttgggttcctc

SEQ ID NO: 6026676 - DNA, 25 bp, Homo sapien
aaccagtttatgagcgggcaaggca

SEQ ID NO: 6026677 - DNA, 25 bp, Homo sapien
ccggagagtatcagcctgtaagtct

SEQ ID NO: 6026678 - DNA, 25 bp, Homo sapien
aaacacaatgttttttcttcatcca

SEQ ID NO: 6026679 - DNA, 25 bp, Homo sapien
tgcccttaatacaatatataacgta

SEQ ID NO: 6026680 - DNA, 25 bp, Homo sapien
ccaacgggatactcgcccgactgtt

SEQ ID NO: 6026681 - DNA, 25 bp, Homo sapien
ccctgcccggagagtatcagcctgt

SEQ ID NO: 6026682 - DNA, 25 bp, Homo sapien
tcatccacaggcgataatcaggcgc

SEQ ID NO: 6026683 - DNA, 25 bp, Homo sapien
acaacaagcattgcacgttcctcgc

SEQ ID NO: 6026684 - DNA, 25 bp, Homo sapien
ctctccaccttacacacacacacac

SEQ ID NO: 6026685 - DNA, 25 bp, Homo sapien
atagttacctttggctggacaacaa

SEQ ID NO: 6026686 - DNA, 25 bp, Homo sapien
cagatctctgcaggattgtctcagt

SEQ ID NO: 6026687 - DNA, 25 bp, Homo sapien
taagtctcggtttctggcatgagcc

SEQ ID NO: 6026688 - DNA, 25 bp, Homo sapien
aatataatcactttaaaatgccctt

SEQ ID NO: 6026689 - DNA, 25 bp, Homo sapien
agtatcagcctgtaagtctcggttt

SEQ ID NO: 6026690 - DNA, 25 bp, Homo sapien
tttggaaagttcaagtagtaatgag

SEQ ID NO: 6026691 - DNA, 25 bp, Homo sapien
atcactttaaaatgcccttaataca

SEQ ID NO: 6026692 - DNA, 25 bp, Homo sapien
gccaggcagatctctgcaggattgt

SEQ ID NO: 6026693 - DNA, 25 bp, Homo sapien
gcacgttcctcgctaggttttggaa

SEQ ID NO: 6026694 - DNA, 25 bp, Homo sapien
ttccgcaggcgccaacgggatactc

SEQ ID NO: 6026695 - DNA, 25 bp, Homo sapien
gataatcaggcgctctccaccttac

SEQ ID NO: 6026696 - DNA, 25 bp, Homo sapien
acaggcgataatcaggcgctctcca

SEQ ID NO: 6026697 - DNA, 25 bp, Homo sapien
aaccttgacagcaacaaacttaaat

SEQ ID NO: 6026698 - DNA, 25 bp, Homo sapien
cggtgcgaagttctctgattccgca

SEQ ID NO: 6026699 - DNA, 25 bp, Homo sapien
agcctgtaagtctcggtttctggca

SEQ ID NO: 6026700 - DNA, 25 bp, Homo sapien
taacgtacaaaaatatctctatata

SEQ ID NO: 6026701 - DNA, 25 bp, Homo sapien
ctgagacattcacgtcttaaaatag

SEQ ID NO: 6026702 - DNA, 25 bp, Homo sapien
ggatactcgcccgactgttcaatgc

SEQ ID NO: 6026703 - DNA, 25 bp, Homo sapien
aagttcaagtagtaatgaggcttat

SEQ ID NO: 6026704 - DNA, 25 bp, Homo sapien
tcagacccctgcccggagagtatca

SEQ ID NO: 6026705 - DNA, 25 bp, Homo sapien
tcggtttctggcatgagcctggctt

SEQ ID NO: 6026706 - DNA, 25 bp, Homo sapien
ggtgacaatataatcactttaaaat

SEQ ID NO: 6026707 - DNA, 25 bp, Homo sapien
acctttggctggacaacaagcattg

SEQ ID NO: 6026708 - DNA, 25 bp, Homo sapien
tctggcatgagcctggcttggtctt

SEQ ID NO: 6026709 - DNA, 25 bp, Homo sapien
aatactatagttacctttggctgga

SEQ ID NO: 6026710 - DNA, 25 bp, Homo sapien
caaaaatatctctatatatttgaag

SEQ ID NO: 6026711 - DNA, 25 bp, Homo sapien
cattcacgtcttaaaataggggaag

SEQ ID NO: 6026712 - DNA, 25 bp, Homo sapien
tctatatatttgaagttacaaaaaa

SEQ ID NO: 6026713 - DNA, 25 bp, Homo sapien
cgagtcgagttctggaagagtactg

SEQ ID NO: 6026714 - DNA, 25 bp, Homo sapien
actccagccttccttccgtggagct

SEQ ID NO: 6026715 - DNA, 25 bp, Homo sapien
gtgccattgtctttatatgaagctg

SEQ ID NO: 6026716 - DNA, 25 bp, Homo sapien
ctaggaaatttctttgcaagccgga

SEQ ID NO: 6026717 - DNA, 25 bp, Homo sapien
atgatggaagtgagtctgaagagga

SEQ ID NO: 6026718 - DNA, 25 bp, Homo sapien
tggagctcgagtgaggtttacggag

SEQ ID NO: 6026719 - DNA, 25 bp, Homo sapien
tcgagtgaggtttacggaggtgccc

SEQ ID NO: 6026720 - DNA, 25 bp, Homo sapien
tagttacttcatttggctccgttgg

SEQ ID NO: 6026721 - DNA, 25 bp, Homo sapien
ccattgccatgtttattcgatggaa

SEQ ID NO: 6026722 - DNA, 25 bp, Homo sapien
ccttcctcctgaactccagccttcc

SEQ ID NO: 6026723 - DNA, 25 bp, Homo sapien
ggagtttcctaccagttcactccag

SEQ ID NO: 6026724 - DNA, 25 bp, Homo sapien
cctgcaccttcctcctgaactccag

SEQ ID NO: 6026725 - DNA, 25 bp, Homo sapien
tcctgaactccagccttccttccgt

SEQ ID NO: 6026726 - DNA, 25 bp, Homo sapien
cttcatttggctccgttggcttgtg

SEQ ID NO: 6026727 - DNA, 25 bp, Homo sapien
aagctgccctcctcttccatggtag

SEQ ID NO: 6026728 - DNA, 25 bp, Homo sapien
agccggaaaggctacagcagaaaag

SEQ ID NO: 6026729 - DNA, 25 bp, Homo sapien
tgattgtaaactgtactcgtccgtg

SEQ ID NO: 6026730 - DNA, 25 bp, Homo sapien
agaggggagtgaccaagagaaggac

SEQ ID NO: 6026731 - DNA, 25 bp, Homo sapien
tgtcctgctggccattgccatgttt

SEQ ID NO: 6026732 - DNA, 25 bp, Homo sapien
aacgcgtgtaaagttctgtgcattt

SEQ ID NO: 6026733 - DNA, 25 bp, Homo sapien
tggaagagtactgggaagactccga

SEQ ID NO: 6026734 - DNA, 25 bp, Homo sapien
agtactgggaagactccgaggaaag

SEQ ID NO: 6026735 - DNA, 25 bp, Homo sapien
tttctaggtgaggagtttcctacca

SEQ ID NO: 6026736 - DNA, 25 bp, Homo sapien
accaagagaaggacgaagatgatgg

SEQ ID NO: 6026737 - DNA, 25 bp, Homo sapien
aaagctcgagtcgagttctggaaga

SEQ ID NO: 6026738 - DNA, 25 bp, Homo sapien
gaaaagggttcgaccgagtgagcac

SEQ ID NO: 6026739 - DNA, 25 bp, Homo sapien
agtctgaagaggagtactcggctcc

SEQ ID NO: 6026740 - DNA, 25 bp, Homo sapien
gctggccattgccatgtttattcga

SEQ ID NO: 6026741 - DNA, 25 bp, Homo sapien
gttctgtgcatttgattgtaaactg

SEQ ID NO: 6026742 - DNA, 25 bp, Homo sapien
gaggtttacggaggtgcccagattc

SEQ ID NO: 6026743 - DNA, 25 bp, Homo sapien
agttctggaagagtactgggaagac

SEQ ID NO: 6026744 - DNA, 25 bp, Homo sapien
ggaagcagcggcttaaatctaggaa

SEQ ID NO: 6026745 - DNA, 25 bp, Homo sapien
ctgtacacaccttagttacttcatt

SEQ ID NO: 6026746 - DNA, 25 bp, Homo sapien
agggcctttggagatcatgaccgaa

SEQ ID NO: 6026747 - DNA, 25 bp, Homo sapien
agaaggacgaagatgatggaagtga

SEQ ID NO: 6026748 - DNA, 25 bp, Homo sapien
ccgagtgagcacagaggggagtgac

SEQ ID NO: 6026749 - DNA, 25 bp, Homo sapien
tgtaaagttctgtgcatttgattgt

SEQ ID NO: 6026750 - DNA, 25 bp, Homo sapien
tgaccgaaagctcgagtcgagttct

SEQ ID NO: 6026751 - DNA, 25 bp, Homo sapien
gagcacagaggggagtgaccaagag

SEQ ID NO: 6026752 - DNA, 25 bp, Homo sapien
agatcatgaccgaaagctcgagtcg

SEQ ID NO: 6026753 - DNA, 25 bp, Homo sapien
ttagctcatttacatttggagaccc

SEQ ID NO: 6026754 - DNA, 25 bp, Homo sapien
caaagccctaatggaagtttagctc

SEQ ID NO: 6026755 - DNA, 25 bp, Homo sapien
ccgttggcttgtgtttctaggtgag

SEQ ID NO: 6026756 - DNA, 25 bp, Homo sapien
tacagcagaaaagggttcgaccgag

SEQ ID NO: 6026757 - DNA, 25 bp, Homo sapien
cagttcactccagtgccattgtctt

SEQ ID NO: 6026758 - DNA, 25 bp, Homo sapien
ccgctgcccactcctgcaccttcct

SEQ ID NO: 6026759 - DNA, 25 bp, Homo sapien
aaaggctacagcagaaaagggttcg

SEQ ID NO: 6026760 - DNA, 25 bp, Homo sapien
tcggctccgctgcccactcctgcac

SEQ ID NO: 6026761 - DNA, 25 bp, Homo sapien
ggaaagggaagcagcggcttaaatc

SEQ ID NO: 6026762 - DNA, 25 bp, Homo sapien
gtggaactgtacacaccttagttac

SEQ ID NO: 6026763 - DNA, 25 bp, Homo sapien
gccttccttccgtggagctcgagtg

SEQ ID NO: 6026764 - DNA, 25 bp, Homo sapien
aatttctttgcaagccggaaaggct

SEQ ID NO: 6026765 - DNA, 25 bp, Homo sapien
cgatggaaaaaatcaagggcctttg

SEQ ID NO: 6026766 - DNA, 25 bp, Homo sapien
tttggagatcatgaccgaaagctcg

SEQ ID NO: 6026767 - DNA, 25 bp, Homo sapien
ttaaatctaggaaatttctttgcaa

SEQ ID NO: 6026768 - DNA, 25 bp, Homo sapien
cctttaacgcgtgtaaagttctgtg

SEQ ID NO: 6026769 - DNA, 25 bp, Homo sapien
actccagtgccattgtctttatatg

SEQ ID NO: 6026770 - DNA, 25 bp, Homo sapien
aagaggagtactcggctccgctgcc

SEQ ID NO: 6026771 - DNA, 25 bp, Homo sapien
gtactcgtccgtgtggaactgtaca

SEQ ID NO: 6026772 - DNA, 25 bp, Homo sapien
cttgtgtttctaggtgaggagtttc

SEQ ID NO: 6026773 - DNA, 25 bp, Homo sapien
gaagtgagtctgaagaggagtactc

SEQ ID NO: 6026774 - DNA, 25 bp, Homo sapien
gcgctcaaagccctaatggaagttt

SEQ ID NO: 6026775 - DNA, 25 bp, Homo sapien
acaccttagttacttcatttggctc

SEQ ID NO: 6026776 - DNA, 25 bp, Homo sapien
aaatcaagggcctttggagatcatg

SEQ ID NO: 6026777 - DNA, 25 bp, Homo sapien
acgaagatgatggaagtgagtctga

SEQ ID NO: 6026778 - DNA, 25 bp, Homo sapien
ggaagtttagctcatttacatttgg

SEQ ID NO: 6026779 - DNA, 25 bp, Homo sapien
agcggcttaaatctaggaaatttct

SEQ ID NO: 6026780 - DNA, 25 bp, Homo sapien
ttattcgatggaaaaaatcaagggc

SEQ ID NO: 6026781 - DNA, 25 bp, Homo sapien
tttgcaagccggaaaggctacagca

SEQ ID NO: 6026782 - DNA, 25 bp, Homo sapien
ggtgaggagtttcctaccagttcac

SEQ ID NO: 6026783 - DNA, 25 bp, Homo sapien
cctaatggaagtttagctcatttac

SEQ ID NO: 6026784 - DNA, 25 bp, Homo sapien
gagtgaccaagagaaggacgaagat

SEQ ID NO: 6026785 - DNA, 25 bp, Homo sapien
tgcatttgattgtaaactgtactcg

SEQ ID NO: 6026786 - DNA, 25 bp, Homo sapien
gtccgtgtggaactgtacacacctt

SEQ ID NO: 6026787 - DNA, 25 bp, Homo sapien
taaactgtactcgtccgtgtggaac

SEQ ID NO: 6026788 - DNA, 25 bp, Homo sapien
ccatgtttattcgatggaaaaaatc

SEQ ID NO: 6026789 - DNA, 25 bp, Homo sapien
ggttcgaccgagtgagcacagaggg

SEQ ID NO: 6026790 - DNA, 25 bp, Homo sapien
ccctcctcttccatggtagcgctca

SEQ ID NO: 6026791 - DNA, 25 bp, Homo sapien
tggctccgttggcttgtgtttctag

SEQ ID NO: 6026792 - DNA, 25 bp, Homo sapien
atggtagcgctcaaagccctaatgg

SEQ ID NO: 6026793 - DNA, 25 bp, Homo sapien
cccactcctgcaccttcctcctgaa

SEQ ID NO: 6026794 - DNA, 25 bp, Homo sapien
catttacatttggagacccttttgg

SEQ ID NO: 6026795 - DNA, 25 bp, Homo sapien
cttccgtggagctcgagtgaggttt

SEQ ID NO: 6026796 - DNA, 25 bp, Homo sapien
aagactccgaggaaagggaagcagc

SEQ ID NO: 6026797 - DNA, 25 bp, Homo sapien
ttgtctttatatgaagctgccctcc

SEQ ID NO: 6026798 - DNA, 25 bp, Homo sapien
tcttccatggtagcgctcaaagccc

SEQ ID NO: 6026799 - DNA, 25 bp, Homo sapien
tccgaggaaagggaagcagcggctt

SEQ ID NO: 6026800 - DNA, 25 bp, Homo sapien
ttatatgaagctgccctcctcttcc

SEQ ID NO: 6026801 - DNA, 25 bp, Homo sapien
cagattcctttccctttaacgcgtg

SEQ ID NO: 6026802 - DNA, 25 bp, Homo sapien
cggaggtgcccagattcctttccct

SEQ ID NO: 6026803 - DNA, 25 bp, Homo sapien
tcctaccagttcactccagtgccat

SEQ ID NO: 6026804 - DNA, 25 bp, Homo sapien
aagtttctctttactgccacaggct

SEQ ID NO: 6026805 - DNA, 25 bp, Homo sapien
aaactcctcacctagaaacacaagc

SEQ ID NO: 6026806 - DNA, 25 bp, Homo sapien
cggaaacacaccaactgaagagaaa

SEQ ID NO: 6026807 - DNA, 25 bp, Homo sapien
ctgtgttcaagcagagaatagggct

SEQ ID NO: 6026808 - DNA, 25 bp, Homo sapien
taaagacaatggcactggagtgaac

SEQ ID NO: 6026809 - DNA, 25 bp, Homo sapien
caatggcactggagtgaactggtag

SEQ ID NO: 6026810 - DNA, 25 bp, Homo sapien
ttagcagctttttgttgtgtagcaa

SEQ ID NO: 6026811 - DNA, 25 bp, Homo sapien
aaagacactggcaatgggtgtggac

SEQ ID NO: 6026812 - DNA, 25 bp, Homo sapien
catggaagaggagggcagcttcata

SEQ ID NO: 6026813 - DNA, 25 bp, Homo sapien
ctctttactgccacaggctgagaat

SEQ ID NO: 6026814 - DNA, 25 bp, Homo sapien
cttccattagggctttgagcgctac

SEQ ID NO: 6026815 - DNA, 25 bp, Homo sapien
tcagattctgaaaaatagtgttcta

SEQ ID NO: 6026816 - DNA, 25 bp, Homo sapien
gctttttgttgtgtagcaaagtttc

SEQ ID NO: 6026817 - DNA, 25 bp, Homo sapien
tgtggactgggagaatactgtgttc

SEQ ID NO: 6026818 - DNA, 25 bp, Homo sapien
tgttgtgtagcaaagtttctcttta

SEQ ID NO: 6026819 - DNA, 25 bp, Homo sapien
tcaaatgcacagaactttacacgcg

SEQ ID NO: 6026820 - DNA, 25 bp, Homo sapien
aaatgtaaatgagctaaacttccat

SEQ ID NO: 6026821 - DNA, 25 bp, Homo sapien
agtaactaaggtgtgtacagttcca

SEQ ID NO: 6026822 - DNA, 25 bp, Homo sapien
cgctaccatggaagaggagggcagc

SEQ ID NO: 6026823 - DNA, 25 bp, Homo sapien
tgtaaccatctaaaaataagacatc

SEQ ID NO: 6026824 - DNA, 25 bp, Homo sapien
ttacaatcaaatgcacagaacttta

SEQ ID NO: 6026825 - DNA, 25 bp, Homo sapien
gccaacggagccaaatgaagtaact

SEQ ID NO: 6026826 - DNA, 25 bp, Homo sapien
gtgtacagttccacacggacgagta

SEQ ID NO: 6026827 - DNA, 25 bp, Homo sapien
ggagccaaatgaagtaactaaggtg

SEQ ID NO: 6026828 - DNA, 25 bp, Homo sapien
tgttagtgattttaaaaacatagag

SEQ ID NO: 6026829 - DNA, 25 bp, Homo sapien
ccaaagaaagacactggcaatgggt

SEQ ID NO: 6026830 - DNA, 25 bp, Homo sapien
actggcaatgggtgtggactgggag

SEQ ID NO: 6026831 - DNA, 25 bp, Homo sapien
tgcaatataatgttagtgattttaa

SEQ ID NO: 6026832 - DNA, 25 bp, Homo sapien
tcaagcagagaatagggctatttac

SEQ ID NO: 6026833 - DNA, 25 bp, Homo sapien
atagagggagatttagcagcttttt

SEQ ID NO: 6026834 - DNA, 25 bp, Homo sapien
ggagatttagcagctttttgttgtg

SEQ ID NO: 6026835 - DNA, 25 bp, Homo sapien
agactttttaaaatttctctcattg

SEQ ID NO: 6026836 - DNA, 25 bp, Homo sapien
agttccacacggacgagtacagttt

SEQ ID NO: 6026837 - DNA, 25 bp, Homo sapien
acaggctgagaatgctgaacaggaa

SEQ ID NO: 6026838 - DNA, 25 bp, Homo sapien
actgccacaggctgagaatgctgaa

SEQ ID NO: 6026839 - DNA, 25 bp, Homo sapien
tacagtttacaatcaaatgcacaga

SEQ ID NO: 6026840 - DNA, 25 bp, Homo sapien
aaaacatagagggagatttagcagc

SEQ ID NO: 6026841 - DNA, 25 bp, Homo sapien
ttagggctttgagcgctaccatgga

SEQ ID NO: 6026842 - DNA, 25 bp, Homo sapien
acacggacgagtacagtttacaatc

SEQ ID NO: 6026843 - DNA, 25 bp, Homo sapien
actgggagaatactgtgttcaagca

SEQ ID NO: 6026844 - DNA, 25 bp, Homo sapien
tctcattgcaatataatgttagtga

SEQ ID NO: 6026845 - DNA, 25 bp, Homo sapien
aatgggtgtggactgggagaatact

SEQ ID NO: 6026846 - DNA, 25 bp, Homo sapien
aaaagggtctccaaatgtaaatgag

SEQ ID NO: 6026847 - DNA, 25 bp, Homo sapien
gtgaactggtaggaaactcctcacc

SEQ ID NO: 6026848 - DNA, 25 bp, Homo sapien
taaggtgtgtacagttccacacgga

SEQ ID NO: 6026849 - DNA, 25 bp, Homo sapien
actggagtgaactggtaggaaactc

SEQ ID NO: 6026850 - DNA, 25 bp, Homo sapien
aaatgagctaaacttccattagggc

SEQ ID NO: 6026851 - DNA, 25 bp, Homo sapien
ttttaaaatttctctcattgcaata

SEQ ID NO: 6026852 - DNA, 25 bp, Homo sapien
cacaccaactgaagagaaatttaaa

SEQ ID NO: 6026853 - DNA, 25 bp, Homo sapien
aaggcaccaaagaaagacactggca

SEQ ID NO: 6026854 - DNA, 25 bp, Homo sapien
agaatactgtgttcaagcagagaat

SEQ ID NO: 6026855 - DNA, 25 bp, Homo sapien
aaatgaagtaactaaggtgtgtaca

SEQ ID NO: 6026856 - DNA, 25 bp, Homo sapien
gtctccaaatgtaaatgagctaaac

SEQ ID NO: 6026857 - DNA, 25 bp, Homo sapien
tgattttaaaaacatagagggagat

SEQ ID NO: 6026858 - DNA, 25 bp, Homo sapien
gtagcaaagtttctctttactgcca

SEQ ID NO: 6026859 - DNA, 25 bp, Homo sapien
tcacctagaaacacaagccaacgga

SEQ ID NO: 6026860 - DNA, 25 bp, Homo sapien
gacgagtacagtttacaatcaaatg

SEQ ID NO: 6026861 - DNA, 25 bp, Homo sapien
taacagtgtaaccatctaaaaataa

SEQ ID NO: 6026862 - DNA, 25 bp, Homo sapien
gtgttctaacagtgtaaccatctaa

SEQ ID NO: 6026863 - DNA, 25 bp, Homo sapien
agagaatagggctatttacatccac

SEQ ID NO: 6026864 - DNA, 25 bp, Homo sapien
tagggctatttacatccacaaaaaa

SEQ ID NO: 6026865 - DNA, 25 bp, Homo sapien
tataatgttagtgattttaaaaaca

SEQ ID NO: 6026866 - DNA, 25 bp, Homo sapien
aatttctctcattgcaatataatgt

SEQ ID NO: 6026867 - DNA, 25 bp, Homo sapien
tggtaggaaactcctcacctagaaa

SEQ ID NO: 6026868 - DNA, 25 bp, Homo sapien
acatcccggaaacacaccaactgaa

SEQ ID NO: 6026869 - DNA, 25 bp, Homo sapien
acaggaaaggcaccaaagaaagaca

SEQ ID NO: 6026870 - DNA, 25 bp, Homo sapien
tctgaaaaatagtgttctaacagtg

SEQ ID NO: 6026871 - DNA, 25 bp, Homo sapien
gctaaacttccattagggctttgag

SEQ ID NO: 6026872 - DNA, 25 bp, Homo sapien
agaaacacaagccaacggagccaaa

SEQ ID NO: 6026873 - DNA, 25 bp, Homo sapien
ggcagcttcatataaagacaatggc

SEQ ID NO: 6026874 - DNA, 25 bp, Homo sapien
gcacagaactttacacgcgttaaag

SEQ ID NO: 6026875 - DNA, 25 bp, Homo sapien
tttgagcgctaccatggaagaggag

SEQ ID NO: 6026876 - DNA, 25 bp, Homo sapien
aaatagtgttctaacagtgtaacca

SEQ ID NO: 6026877 - DNA, 25 bp, Homo sapien
tgagaatgctgaacaggaaaggcac

SEQ ID NO: 6026878 - DNA, 25 bp, Homo sapien
cacaagccaacggagccaaatgaag

SEQ ID NO: 6026879 - DNA, 25 bp, Homo sapien
gaggagggcagcttcatataaagac

SEQ ID NO: 6026880 - DNA, 25 bp, Homo sapien
catctaaaaataagacatcccggaa

SEQ ID NO: 6026881 - DNA, 25 bp, Homo sapien
aataagacatcccggaaacacacca

SEQ ID NO: 6026882 - DNA, 25 bp, Homo sapien
tgctgaacaggaaaggcaccaaaga

SEQ ID NO: 6026883 - DNA, 25 bp, Homo sapien
ttcatataaagacaatggcactgga

SEQ ID NO: 6026884 - DNA, 25 bp, Homo sapien
gctgcaggggagagacccagtcact

SEQ ID NO: 6026885 - DNA, 25 bp, Homo sapien
tttgtctctcctatgtggggctagg

SEQ ID NO: 6026886 - DNA, 25 bp, Homo sapien
agtcactccaggagactcctgagtt

SEQ ID NO: 6026887 - DNA, 25 bp, Homo sapien
tccgagagcttccaggccctgcaca

SEQ ID NO: 6026888 - DNA, 25 bp, Homo sapien
agggattcacccaggtggctacagg

SEQ ID NO: 6026889 - DNA, 25 bp, Homo sapien
gcagagagttgagggattcacccag

SEQ ID NO: 6026890 - DNA, 25 bp, Homo sapien
agccatcttggagcccaggtttccc

SEQ ID NO: 6026891 - DNA, 25 bp, Homo sapien
ttggagcccaggtttcccctggagc

SEQ ID NO: 6026892 - DNA, 25 bp, Homo sapien
ggtgagctggccgccttttccaaca

SEQ ID NO: 6026893 - DNA, 25 bp, Homo sapien
agttgagggattcacccaggtggct

SEQ ID NO: 6026894 - DNA, 25 bp, Homo sapien
ggcaaggggtgacctgaagagagct

SEQ ID NO: 6026895 - DNA, 25 bp, Homo sapien
tacaggccaggggaagtggctgcag

SEQ ID NO: 6026896 - DNA, 25 bp, Homo sapien
cgaagggaggcagatcaacagatga

SEQ ID NO: 6026897 - DNA, 25 bp, Homo sapien
gaagtggctgcaggggagagaccca

SEQ ID NO: 6026898 - DNA, 25 bp, Homo sapien
agactcctgagttaacactgggaag

SEQ ID NO: 6026899 - DNA, 25 bp, Homo sapien
gcagatggagggttctgctttgtct

SEQ ID NO: 6026900 - DNA, 25 bp, Homo sapien
taacactgggaagacattggccagt

SEQ ID NO: 6026901 - DNA, 25 bp, Homo sapien
ctggccgccttttccaacaccgaag

SEQ ID NO: 6026902 - DNA, 25 bp, Homo sapien
caaagaaataaccactcccactgcc

SEQ ID NO: 6026903 - DNA, 25 bp, Homo sapien
cctcgcagatcccttgcaccccaga

SEQ ID NO: 6026904 - DNA, 25 bp, Homo sapien
aaatgccctctgtcccagggatggg

SEQ ID NO: 6026905 - DNA, 25 bp, Homo sapien
actcccactgcccaacctaggtgag

SEQ ID NO: 6026906 - DNA, 25 bp, Homo sapien
gccttaaatgccctctgtcccaggg

SEQ ID NO: 6026907 - DNA, 25 bp, Homo sapien
cctggagcagatggagggttctgct

SEQ ID NO: 6026908 - DNA, 25 bp, Homo sapien
cctggctctggggagagtggcaagg

SEQ ID NO: 6026909 - DNA, 25 bp, Homo sapien
cagatgaggctggtgagctggccgc

SEQ ID NO: 6026910 - DNA, 25 bp, Homo sapien
tttcccctggagcagatggagggtt

SEQ ID NO: 6026911 - DNA, 25 bp, Homo sapien
gccagtcctagtcatctctcggtca

SEQ ID NO: 6026912 - DNA, 25 bp, Homo sapien
ggctaggagactcgccttaaatgcc

SEQ ID NO: 6026913 - DNA, 25 bp, Homo sapien
tccaggagactcctgagttaacact

SEQ ID NO: 6026914 - DNA, 25 bp, Homo sapien
agtaggtccgagagcttccaggccc

SEQ ID NO: 6026915 - DNA, 25 bp, Homo sapien
agcttccaggccctgcacagccctc

SEQ ID NO: 6026916 - DNA, 25 bp, Homo sapien
cctccccgttgtgaagaggcagtag

SEQ ID NO: 6026917 - DNA, 25 bp, Homo sapien
atgtggggctaggagactcgcctta

SEQ ID NO: 6026918 - DNA, 25 bp, Homo sapien
atggggcagctaatgaaacctcgca

SEQ ID NO: 6026919 - DNA, 25 bp, Homo sapien
aggctggtgagctggccgccttttc

SEQ ID NO: 6026920 - DNA, 25 bp, Homo sapien
aggctcctctccatggggcagctaa

SEQ ID NO: 6026921 - DNA, 25 bp, Homo sapien
cagctaatgaaacctcgcagatccc

SEQ ID NO: 6026922 - DNA, 25 bp, Homo sapien
tgggaagacattggccagtcctagt

SEQ ID NO: 6026923 - DNA, 25 bp, Homo sapien
aggagtggtggctcctggctctggg

SEQ ID NO: 6026924 - DNA, 25 bp, Homo sapien
ccaggggaagtggctgcaggggaga

SEQ ID NO: 6026925 - DNA, 25 bp, Homo sapien
ctctggggagagtggcaaggggtga

SEQ ID NO: 6026926 - DNA, 25 bp, Homo sapien
caggccctgcacagccctcctttct

SEQ ID NO: 6026927 - DNA, 25 bp, Homo sapien
cagatgagccatcttggagcccagg

SEQ ID NO: 6026928 - DNA, 25 bp, Homo sapien
atgaaacctcgcagatcccttgcac

SEQ ID NO: 6026929 - DNA, 25 bp, Homo sapien
gtggctcctggctctggggagagtg

SEQ ID NO: 6026930 - DNA, 25 bp, Homo sapien
ggagggttctgctttgtctctccta

SEQ ID NO: 6026931 - DNA, 25 bp, Homo sapien
gggagacagatgaggctggtgagct

SEQ ID NO: 6026932 - DNA, 25 bp, Homo sapien
cacaaggagccaaacacagccaata

SEQ ID NO: 6026933 - DNA, 25 bp, Homo sapien
taggtgaggagtggtggctcctggc

SEQ ID NO: 6026934 - DNA, 25 bp, Homo sapien
aggcagtagcatttagaagggagac

SEQ ID NO: 6026935 - DNA, 25 bp, Homo sapien
ttttccaacaccgaagggaggcaga

SEQ ID NO: 6026936 - DNA, 25 bp, Homo sapien
ttggcacacaaggagccaaacacag

SEQ ID NO: 6026937 - DNA, 25 bp, Homo sapien
gatcaacagatgagccatcttggag

SEQ ID NO: 6026938 - DNA, 25 bp, Homo sapien
gagccaaacacagccaataggcaga

SEQ ID NO: 6026939 - DNA, 25 bp, Homo sapien
tagcatttagaagggagacagatga

SEQ ID NO: 6026940 - DNA, 25 bp, Homo sapien
cagggatggggattggcacacaagg

SEQ ID NO: 6026941 - DNA, 25 bp, Homo sapien
cactgcccaacctaggtgaggagtg

SEQ ID NO: 6026942 - DNA, 25 bp, Homo sapien
acattggccagtcctagtcatctct

SEQ ID NO: 6026943 - DNA, 25 bp, Homo sapien
ttctgctttgtctctcctatgtggg

SEQ ID NO: 6026944 - DNA, 25 bp, Homo sapien
agatcccttgcaccccagaaccctc

SEQ ID NO: 6026945 - DNA, 25 bp, Homo sapien
ctgagttaacactgggaagacattg

SEQ ID NO: 6026946 - DNA, 25 bp, Homo sapien
ataaccactcccactgcccaaccta

SEQ ID NO: 6026947 - DNA, 25 bp, Homo sapien
gagactcgccttaaatgccctctgt

SEQ ID NO: 6026948 - DNA, 25 bp, Homo sapien
cagaaccctccccgttgtgaagagg

SEQ ID NO: 6026949 - DNA, 25 bp, Homo sapien
ctgcacagccctcctttctcacctg

SEQ ID NO: 6026950 - DNA, 25 bp, Homo sapien
ttagaagggagacagatgaggctgg

SEQ ID NO: 6026951 - DNA, 25 bp, Homo sapien
ttttatgctggccaaagaaataacc

SEQ ID NO: 6026952 - DNA, 25 bp, Homo sapien
gagagctatactggtgccaggctcc

SEQ ID NO: 6026953 - DNA, 25 bp, Homo sapien
catctctcggtcagtaggtccgaga

SEQ ID NO: 6026954 - DNA, 25 bp, Homo sapien
ggagagtggcaaggggtgacctgaa

SEQ ID NO: 6026955 - DNA, 25 bp, Homo sapien
aggggagagacccagtcactccagg

SEQ ID NO: 6026956 - DNA, 25 bp, Homo sapien
tcggtcagtaggtccgagagcttcc

SEQ ID NO: 6026957 - DNA, 25 bp, Homo sapien
gagacccagtcactccaggagactc

SEQ ID NO: 6026958 - DNA, 25 bp, Homo sapien
gggtgacctgaagagagctatactg

SEQ ID NO: 6026959 - DNA, 25 bp, Homo sapien
tctcctatgtggggctaggagactc

SEQ ID NO: 6026960 - DNA, 25 bp, Homo sapien
caataggcagagagttgagggattc

SEQ ID NO: 6026961 - DNA, 25 bp, Homo sapien
ctctccatggggcagctaatgaaac

SEQ ID NO: 6026962 - DNA, 25 bp, Homo sapien
gaggcagatcaacagatgagccatc

SEQ ID NO: 6026963 - DNA, 25 bp, Homo sapien
cctagtcatctctcggtcagtaggt

SEQ ID NO: 6026964 - DNA, 25 bp, Homo sapien
tatactggtgccaggctcctctcca

SEQ ID NO: 6026965 - DNA, 25 bp, Homo sapien
tgaagaggcagtagcatttagaagg

SEQ ID NO: 6026966 - DNA, 25 bp, Homo sapien
tcacccaggtggctacaggccaggg

SEQ ID NO: 6026967 - DNA, 25 bp, Homo sapien
tggggattggcacacaaggagccaa

SEQ ID NO: 6026968 - DNA, 25 bp, Homo sapien
gctggccaaagaaataaccactccc

SEQ ID NO: 6026969 - DNA, 25 bp, Homo sapien
caacaccgaagggaggcagatcaac

SEQ ID NO: 6026970 - DNA, 25 bp, Homo sapien
cctgaagagagctatactggtgcca

SEQ ID NO: 6026971 - DNA, 25 bp, Homo sapien
cccaggtttcccctggagcagatgg

SEQ ID NO: 6026972 - DNA, 25 bp, Homo sapien
acacagccaataggcagagagttga

SEQ ID NO: 6026973 - DNA, 25 bp, Homo sapien
ggtgccaggctcctctccatggggc

SEQ ID NO: 6026974 - DNA, 25 bp, Homo sapien
ccaacctaggtgaggagtggtggct

SEQ ID NO: 6026975 - DNA, 25 bp, Homo sapien
catttaaggcgagtctcctagcccc

SEQ ID NO: 6026976 - DNA, 25 bp, Homo sapien
cagagagaaaaaagccaccccaaca

SEQ ID NO: 6026977 - DNA, 25 bp, Homo sapien
tcagaaaacttgtttctccccaaca

SEQ ID NO: 6026978 - DNA, 25 bp, Homo sapien
gattgaggcaaattgtaaacattat

SEQ ID NO: 6026979 - DNA, 25 bp, Homo sapien
cggacctactgaccgagagatgact

SEQ ID NO: 6026980 - DNA, 25 bp, Homo sapien
gcggcatgggaaggcttctccatca

SEQ ID NO: 6026981 - DNA, 25 bp, Homo sapien
cctggaagctctcggacctactgac

SEQ ID NO: 6026982 - DNA, 25 bp, Homo sapien
tgtaaacattattcaaaacagagag

SEQ ID NO: 6026983 - DNA, 25 bp, Homo sapien
gatgactaggactggccaatgtctt

SEQ ID NO: 6026984 - DNA, 25 bp, Homo sapien
ttctccccaacacaggaccagttcc

SEQ ID NO: 6026985 - DNA, 25 bp, Homo sapien
ggtggatttttataaaagtgattga

SEQ ID NO: 6026986 - DNA, 25 bp, Homo sapien
ggatttggttgagtttttcaagcat

SEQ ID NO: 6026987 - DNA, 25 bp, Homo sapien
aggcccctgtgagcggcatgggaag

SEQ ID NO: 6026988 - DNA, 25 bp, Homo sapien
ccatacctgacttcagaaaacttgt

SEQ ID NO: 6026989 - DNA, 25 bp, Homo sapien
agctctcggacctactgaccgagag

SEQ ID NO: 6026990 - DNA, 25 bp, Homo sapien
caactctctgcctattggctgtgtt

SEQ ID NO: 6026991 - DNA, 25 bp, Homo sapien
ccgagagatgactaggactggccaa

SEQ ID NO: 6026992 - DNA, 25 bp, Homo sapien
tgggacagagggcatttaaggcgag

SEQ ID NO: 6026993 - DNA, 25 bp, Homo sapien
cccctgcagccacttcccctggcct

SEQ ID NO: 6026994 - DNA, 25 bp, Homo sapien
tccttgtgtgccaatccccatccct

SEQ ID NO: 6026995 - DNA, 25 bp, Homo sapien
cacctcctgcctccccccaggtgag

SEQ ID NO: 6026996 - DNA, 25 bp, Homo sapien
cagccccatacctgacttcagaaaa

SEQ ID NO: 6026997 - DNA, 25 bp, Homo sapien
gtctcctagccccacataggagaga

SEQ ID NO: 6026998 - DNA, 25 bp, Homo sapien
ctgacttcagaaaacttgtttctcc

SEQ ID NO: 6026999 - DNA, 25 bp, Homo sapien
acttcccctggcctgtagccacctg

SEQ ID NO: 6027000 - DNA, 25 bp, Homo sapien
tactgaccgagagatgactaggact

SEQ ID NO: 6027001 - DNA, 25 bp, Homo sapien
tgttaactcaggagtctcctggagt

SEQ ID NO: 6027002 - DNA, 25 bp, Homo sapien
gcagggcctggaagctctcggacct

SEQ ID NO: 6027003 - DNA, 25 bp, Homo sapien
cagacagcctcgaaggcctgagtgg

SEQ ID NO: 6027004 - DNA, 25 bp, Homo sapien
agctgccccacccagccccatacct

SEQ ID NO: 6027005 - DNA, 25 bp, Homo sapien
tggccaatgtcttcccagtgttaac

SEQ ID NO: 6027006 - DNA, 25 bp, Homo sapien
agccacctgggtgaatccctcaact

SEQ ID NO: 6027007 - DNA, 25 bp, Homo sapien
ctgcctccccccaggtgagaaagga

SEQ ID NO: 6027008 - DNA, 25 bp, Homo sapien
ccaggtgagaaaggagggctgtgca

SEQ ID NO: 6027009 - DNA, 25 bp, Homo sapien
tgtgccaatccccatccctgggaca

SEQ ID NO: 6027010 - DNA, 25 bp, Homo sapien
gacaaagcagaaccctccatctgct

SEQ ID NO: 6027011 - DNA, 25 bp, Homo sapien
ccacataggagagacaaagcagaac

SEQ ID NO: 6027012 - DNA, 25 bp, Homo sapien
ccaacacaggaccagttccaggtaa

SEQ ID NO: 6027013 - DNA, 25 bp, Homo sapien
accccaacacacagctgccccaccc

SEQ ID NO: 6027014 - DNA, 25 bp, Homo sapien
tgcattcccgtgaggcccctgtgag

SEQ ID NO: 6027015 - DNA, 25 bp, Homo sapien
tttggctccttgtgtgccaatcccc

SEQ ID NO: 6027016 - DNA, 25 bp, Homo sapien
tggctgctgcattcccgtgaggccc

SEQ ID NO: 6027017 - DNA, 25 bp, Homo sapien
ctagccccacataggagagacaaag

SEQ ID NO: 6027018 - DNA, 25 bp, Homo sapien
aggagagacaaagcagaaccctcca

SEQ ID NO: 6027019 - DNA, 25 bp, Homo sapien
ccctggcctgtagccacctgggtga

SEQ ID NO: 6027020 - DNA, 25 bp, Homo sapien
tggagtgactgggtctctcccctgc

SEQ ID NO: 6027021 - DNA, 25 bp, Homo sapien
caggaccagttccaggtaattgcat

SEQ ID NO: 6027022 - DNA, 25 bp, Homo sapien
cccacccagccccatacctgacttc

SEQ ID NO: 6027023 - DNA, 25 bp, Homo sapien
gagaaaggagggctgtgcagggcct

SEQ ID NO: 6027024 - DNA, 25 bp, Homo sapien
gctgtgcagggcctggaagctctcg

SEQ ID NO: 6027025 - DNA, 25 bp, Homo sapien
aggagggctgtgcagggcctggaag

SEQ ID NO: 6027026 - DNA, 25 bp, Homo sapien
gctgtgtttggctccttgtgtgcca

SEQ ID NO: 6027027 - DNA, 25 bp, Homo sapien
ttggttgagtttttcaagcatcttc

SEQ ID NO: 6027028 - DNA, 25 bp, Homo sapien
ctattggctgtgtttggctccttgt

SEQ ID NO: 6027029 - DNA, 25 bp, Homo sapien
tttttataaaagtgattgaggcaaa

SEQ ID NO: 6027030 - DNA, 25 bp, Homo sapien
ctgtgagcggcatgggaaggcttct

SEQ ID NO: 6027031 - DNA, 25 bp, Homo sapien
taaaagtgattgaggcaaattgtaa

SEQ ID NO: 6027032 - DNA, 25 bp, Homo sapien
aatccctcaactctctgcctattgg

SEQ ID NO: 6027033 - DNA, 25 bp, Homo sapien
tcccagtgttaactcaggagtctcc

SEQ ID NO: 6027034 - DNA, 25 bp, Homo sapien
ggcgggctggaggtggatttttata

SEQ ID NO: 6027035 - DNA, 25 bp, Homo sapien
gcagaaccctccatctgctccaggg

SEQ ID NO: 6027036 - DNA, 25 bp, Homo sapien
aaagccaccccaacacacagctgcc

SEQ ID NO: 6027037 - DNA, 25 bp, Homo sapien
catcttcagacagcctcgaaggcct

SEQ ID NO: 6027038 - DNA, 25 bp, Homo sapien
gactgggtctctcccctgcagccac

SEQ ID NO: 6027039 - DNA, 25 bp, Homo sapien
gagaggggcgggctggaggtggatt

SEQ ID NO: 6027040 - DNA, 25 bp, Homo sapien
caggtaattgcatggctgctgcatt

SEQ ID NO: 6027041 - DNA, 25 bp, Homo sapien
gtctcctggagtgactgggtctctc

SEQ ID NO: 6027042 - DNA, 25 bp, Homo sapien
aatccccatccctgggacagagggc

SEQ ID NO: 6027043 - DNA, 25 bp, Homo sapien
gcaaattgtaaacattattcaaaac

SEQ ID NO: 6027044 - DNA, 25 bp, Homo sapien
ttgtttctccccaacacaggaccag

SEQ ID NO: 6027045 - DNA, 25 bp, Homo sapien
aggcgagtctcctagccccacatag

SEQ ID NO: 6027046 - DNA, 25 bp, Homo sapien
tgggtgaatccctcaactctctgcc

SEQ ID NO: 6027047 - DNA, 25 bp, Homo sapien
cattattcaaaacagagagaaaaaa

SEQ ID NO: 6027048 - DNA, 25 bp, Homo sapien
tctgcctattggctgtgtttggctc

SEQ ID NO: 6027049 - DNA, 25 bp, Homo sapien
ctcaggagtctcctggagtgactgg

SEQ ID NO: 6027050 - DNA, 25 bp, Homo sapien
atgtcttcccagtgttaactcagga

SEQ ID NO: 6027051 - DNA, 25 bp, Homo sapien
gagaaaaaagccaccccaacacaca

SEQ ID NO: 6027052 - DNA, 25 bp, Homo sapien
acacacagctgccccacccagcccc

SEQ ID NO: 6027053 - DNA, 25 bp, Homo sapien
gggaaggcttctccatcacctcctg

SEQ ID NO: 6027054 - DNA, 25 bp, Homo sapien
gagtttttcaagcatcttcagacag

SEQ ID NO: 6027055 - DNA, 25 bp, Homo sapien
taggactggccaatgtcttcccagt

SEQ ID NO: 6027056 - DNA, 25 bp, Homo sapien
cagttccaggtaattgcatggctgc

SEQ ID NO: 6027057 - DNA, 25 bp, Homo sapien
cccgtgaggcccctgtgagcggcat

SEQ ID NO: 6027058 - DNA, 25 bp, Homo sapien
gtctctcccctgcagccacttcccc

SEQ ID NO: 6027059 - DNA, 25 bp, Homo sapien
gcctgtagccacctgggtgaatccc

SEQ ID NO: 6027060 - DNA, 25 bp, Homo sapien
catccctgggacagagggcatttaa

SEQ ID NO: 6027061 - DNA, 25 bp, Homo sapien
ttcaagcatcttcagacagcctcga

SEQ ID NO: 6027062 - DNA, 25 bp, Homo sapien
tgagtggggagaggggcgggctgga

SEQ ID NO: 6027063 - DNA, 25 bp, Homo sapien
attgcatggctgctgcattcccgtg

SEQ ID NO: 6027064 - DNA, 25 bp, Homo sapien
tcaaaacagagagaaaaaagccacc

SEQ ID NO: 6027065 - DNA, 25 bp, Homo sapien
ctggaggtggatttttataaaagtg

SEQ ID NO: 6027066 - DNA, 25 bp, Homo sapien
ccccccaggtgagaaaggagggctg

SEQ ID NO: 6027067 - DNA, 25 bp, Homo sapien
cagccacttcccctggcctgtagcc

SEQ ID NO: 6027068 - DNA, 25 bp, Homo sapien
agagggcatttaaggcgagtctcct

SEQ ID NO: 6027069 - DNA, 25 bp, Homo sapien
acgtcctcgccgtctaagtggagct

SEQ ID NO: 6027070 - DNA, 25 bp, Homo sapien
tcgtctagcgcgtcggcatgcgcca

SEQ ID NO: 6027071 - DNA, 25 bp, Homo sapien
caagggcatcggtaaacatctgctc

SEQ ID NO: 6027072 - DNA, 25 bp, Homo sapien
ccccaggctgacatcggtcgggggg

SEQ ID NO: 6027073 - DNA, 25 bp, Homo sapien
cgaagtcggccatatccagagcgcc

SEQ ID NO: 6027074 - DNA, 25 bp, Homo sapien
ctcgtcaattccaagggcatcggta

SEQ ID NO: 6027075 - DNA, 25 bp, Homo sapien
tcgccgtctaagtggagctcgtccc

SEQ ID NO: 6027076 - DNA, 25 bp, Homo sapien
atcgccacgtcctcgccgtctaagt

SEQ ID NO: 6027077 - DNA, 25 bp, Homo sapien
aacatgtccagatcgaaatcgtcta

SEQ ID NO: 6027078 - DNA, 25 bp, Homo sapien
tccagatcgaaatcgtctagcgcgt

SEQ ID NO: 6027079 - DNA, 25 bp, Homo sapien
tcgaaatcgtctagcgcgtcggcat

SEQ ID NO: 6027080 - DNA, 25 bp, Homo sapien
cggccatatccagagcgccgtaggg

SEQ ID NO: 6027081 - DNA, 25 bp, Homo sapien
tctaagtggagctcgtcccccaggc

SEQ ID NO: 6027082 - DNA, 25 bp, Homo sapien
tgcgccatcgccacgtcctcgccgt

SEQ ID NO: 6027083 - DNA, 25 bp, Homo sapien
caattccaagggcatcggtaaacat

SEQ ID NO: 6027084 - DNA, 25 bp, Homo sapien
agcgcgtcggcatgcgccatcgcca

SEQ ID NO: 6027085 - DNA, 25 bp, Homo sapien
tctgctcaaactcgaagtcggccat

SEQ ID NO: 6027086 - DNA, 25 bp, Homo sapien
tccccgtcccccaacatgtccagat

SEQ ID NO: 6027087 - DNA, 25 bp, Homo sapien
catcggtaaacatctgctcaaactc

SEQ ID NO: 6027088 - DNA, 25 bp, Homo sapien
tcccccaacatgtccagatcgaaat

SEQ ID NO: 6027089 - DNA, 25 bp, Homo sapien
agcgccgtagggggcggagtcgtgg

SEQ ID NO: 6027090 - DNA, 25 bp, Homo sapien
gctgacatcggtcgggggggcgact

SEQ ID NO: 6027091 - DNA, 25 bp, Homo sapien
atccagagcgccgtagggggcggag

SEQ ID NO: 6027092 - DNA, 25 bp, Homo sapien
tcggcatgcgccatcgccacgtcct

SEQ ID NO: 6027093 - DNA, 25 bp, Homo sapien
tggagctcgtcccccaggctgacat

SEQ ID NO: 6027094 - DNA, 25 bp, Homo sapien
cgtcccccaggctgacatcggtcgg

SEQ ID NO: 6027095 - DNA, 25 bp, Homo sapien
taaacatctgctcaaactcgaagtc

SEQ ID NO: 6027096 - DNA, 25 bp, Homo sapien
caaactcgaagtcggccatatccag

SEQ ID NO: 6027097 - DNA, 25 bp, Homo sapien
ctaacaaaaaaggtgtcatccgata

SEQ ID NO: 6027098 - DNA, 25 bp, Homo sapien
catagtgcagatcgttgtcaccttt

SEQ ID NO: 6027099 - DNA, 25 bp, Homo sapien
gaatcaatgcaactattaatgtgat

SEQ ID NO: 6027100 - DNA, 25 bp, Homo sapien
cgttgtcacctttagatctattatt

SEQ ID NO: 6027101 - DNA, 25 bp, Homo sapien
tattcttattactatccctaacaaa

SEQ ID NO: 6027102 - DNA, 25 bp, Homo sapien
ctatccctaacaaaaaaggtgtcat

SEQ ID NO: 6027103 - DNA, 25 bp, Homo sapien
cgattcctattagttcttatcttgt

SEQ ID NO: 6027104 - DNA, 25 bp, Homo sapien
tatccttaatgtaaggatcatagtg

SEQ ID NO: 6027105 - DNA, 25 bp, Homo sapien
gaaattataaatgtaactttcatta

SEQ ID NO: 6027106 - DNA, 25 bp, Homo sapien
attgtagttttgagttatatcgaaa

SEQ ID NO: 6027107 - DNA, 25 bp, Homo sapien
aatctttccgctttcactacaaatg

SEQ ID NO: 6027108 - DNA, 25 bp, Homo sapien
atgcaactattaatgtgattagtac

SEQ ID NO: 6027109 - DNA, 25 bp, Homo sapien
gttttgagttatatcgaaatcctta

SEQ ID NO: 6027110 - DNA, 25 bp, Homo sapien
acaaatgaaattataaatgtaactt

SEQ ID NO: 6027111 - DNA, 25 bp, Homo sapien
atacagatgtaagaacgaaaataag

SEQ ID NO: 6027112 - DNA, 25 bp, Homo sapien
ttggagctaactaaaagatcaacat

SEQ ID NO: 6027113 - DNA, 25 bp, Homo sapien
attaaattactacgattcctattag

SEQ ID NO: 6027114 - DNA, 25 bp, Homo sapien
taaaatcattgtcaatctcaaaaat

SEQ ID NO: 6027115 - DNA, 25 bp, Homo sapien
aatttttctaggtcactaaaatcat

SEQ ID NO: 6027116 - DNA, 25 bp, Homo sapien
tacattaatccataacaattgtcgc

SEQ ID NO: 6027117 - DNA, 25 bp, Homo sapien
caaaaaatatagaataactattctt

SEQ ID NO: 6027118 - DNA, 25 bp, Homo sapien
gtgtcatccgatatgaaattgcgaa

SEQ ID NO: 6027119 - DNA, 25 bp, Homo sapien
tttctaggtcactaaaatcattgtc

SEQ ID NO: 6027120 - DNA, 25 bp, Homo sapien
tatcttgtaatttttactttcacga

SEQ ID NO: 6027121 - DNA, 25 bp, Homo sapien
cattgtcaatctcaaaaattttttt

SEQ ID NO: 6027122 - DNA, 25 bp, Homo sapien
tactttcacgaatctttccgctttc

SEQ ID NO: 6027123 - DNA, 25 bp, Homo sapien
gattaaaaagttattatcaatacag

SEQ ID NO: 6027124 - DNA, 25 bp, Homo sapien
taactagaactacaataactataaa

SEQ ID NO: 6027125 - DNA, 25 bp, Homo sapien
tagaacgctcatcccaaccataaaa

SEQ ID NO: 6027126 - DNA, 25 bp, Homo sapien
ctattaatgtgattagtacaattat

SEQ ID NO: 6027127 - DNA, 25 bp, Homo sapien
attgtcgcattgaatccacaattga

SEQ ID NO: 6027128 - DNA, 25 bp, Homo sapien
taatgtaaggatcatagtgcagatc

SEQ ID NO: 6027129 - DNA, 25 bp, Homo sapien
atgtccttggagctaactaaaagat

SEQ ID NO: 6027130 - DNA, 25 bp, Homo sapien
atgtaagaacgaaaataagaatcaa

SEQ ID NO: 6027131 - DNA, 25 bp, Homo sapien
ctattatttagataactagaactac

SEQ ID NO: 6027132 - DNA, 25 bp, Homo sapien
gcattgaatccacaattgattgtag

SEQ ID NO: 6027133 - DNA, 25 bp, Homo sapien
taacaattgtcgcattgaatccaca

SEQ ID NO: 6027134 - DNA, 25 bp, Homo sapien
ttatcaaaaaatatagaataactat

SEQ ID NO: 6027135 - DNA, 25 bp, Homo sapien
ggtcactaaaatcattgtcaatctc

SEQ ID NO: 6027136 - DNA, 25 bp, Homo sapien
ttcactacaaatgaaattataaatg

SEQ ID NO: 6027137 - DNA, 25 bp, Homo sapien
atgtgattagtacaattatatttag

SEQ ID NO: 6027138 - DNA, 25 bp, Homo sapien
ttagtacaattatatttagtatcct

SEQ ID NO: 6027139 - DNA, 25 bp, Homo sapien
ctaactaaaagatcaacattattgg

SEQ ID NO: 6027140 - DNA, 25 bp, Homo sapien
cacctttagatctattatttagata

SEQ ID NO: 6027141 - DNA, 25 bp, Homo sapien
aagttattatcaatacagatgtaag

SEQ ID NO: 6027142 - DNA, 25 bp, Homo sapien
tccgctttcactacaaatgaaatta

SEQ ID NO: 6027143 - DNA, 25 bp, Homo sapien
ttactacgattcctattagttctta

SEQ ID NO: 6027144 - DNA, 25 bp, Homo sapien
ctagaagaataactagaacgctcat

SEQ ID NO: 6027145 - DNA, 25 bp, Homo sapien
ttgactttcttatacattaatccat

SEQ ID NO: 6027146 - DNA, 25 bp, Homo sapien
aatccacaattgattgtagttttga

SEQ ID NO: 6027147 - DNA, 25 bp, Homo sapien
gcagatcgttgtcacctttagatct

SEQ ID NO: 6027148 - DNA, 25 bp, Homo sapien
caattatatttagtatccttaatgt

SEQ ID NO: 6027149 - DNA, 25 bp, Homo sapien
tcaacattattggaataactagaag

SEQ ID NO: 6027150 - DNA, 25 bp, Homo sapien
gaataactattcttattactatccc

SEQ ID NO: 6027151 - DNA, 25 bp, Homo sapien
cattaaaattattactatcgattaa

SEQ ID NO: 6027152 - DNA, 25 bp, Homo sapien
gaataactagaacgctcatcccaac

SEQ ID NO: 6027153 - DNA, 25 bp, Homo sapien
gaacgaaaataagaatcaatgcaac

SEQ ID NO: 6027154 - DNA, 25 bp, Homo sapien
ctattagttcttatcttgtaatttt

SEQ ID NO: 6027155 - DNA, 25 bp, Homo sapien
tatcgaaatccttagaacttattaa

SEQ ID NO: 6027156 - DNA, 25 bp, Homo sapien
actatcgattaaaaagttattatca

SEQ ID NO: 6027157 - DNA, 25 bp, Homo sapien
gagttatatcgaaatccttagaact

SEQ ID NO: 6027158 - DNA, 25 bp, Homo sapien
tttagataactagaactacaataac

SEQ ID NO: 6027159 - DNA, 25 bp, Homo sapien
tagatctattatttagataactaga

SEQ ID NO: 6027160 - DNA, 25 bp, Homo sapien
gaataactagaagaataactagaac

SEQ ID NO: 6027161 - DNA, 25 bp, Homo sapien
ttcacgaatctttccgctttcacta

SEQ ID NO: 6027162 - DNA, 25 bp, Homo sapien
aaggatcatagtgcagatcgttgtc

SEQ ID NO: 6027163 - DNA, 25 bp, Homo sapien
ttcttatacattaatccataacaat

SEQ ID NO: 6027164 - DNA, 25 bp, Homo sapien
atgaaattgcgaatgtccttggagc

SEQ ID NO: 6027165 - DNA, 25 bp, Homo sapien
aaaaaggtgtcatccgatatgaaat

SEQ ID NO: 6027166 - DNA, 25 bp, Homo sapien
aatccataacaattgtcgcattgaa

SEQ ID NO: 6027167 - DNA, 25 bp, Homo sapien
ttatcaatacagatgtaagaacgaa

SEQ ID NO: 6027168 - DNA, 25 bp, Homo sapien
tcattttgactttcttatacattaa

SEQ ID NO: 6027169 - DNA, 25 bp, Homo sapien
tccgatatgaaattgcgaatgtcct

SEQ ID NO: 6027170 - DNA, 25 bp, Homo sapien
ttgcgaatgtccttggagctaacta

SEQ ID NO: 6027171 - DNA, 25 bp, Homo sapien
actttcattaaaattattactatcg

SEQ ID NO: 6027172 - DNA, 25 bp, Homo sapien
atttagtatccttaatgtaaggatc

SEQ ID NO: 6027173 - DNA, 25 bp, Homo sapien
ttattggaataactagaagaataac

SEQ ID NO: 6027174 - DNA, 25 bp, Homo sapien
aaaagatcaacattattggaataac

SEQ ID NO: 6027175 - DNA, 25 bp, Homo sapien
caattgattgtagttttgagttata

SEQ ID NO: 6027176 - DNA, 25 bp, Homo sapien
aaataagaatcaatgcaactattaa

SEQ ID NO: 6027177 - DNA, 25 bp, Homo sapien
taacagacaatggactcccttagcg

SEQ ID NO: 6027178 - DNA, 25 bp, Homo sapien
agacgacattgtggaatagcaaggg

SEQ ID NO: 6027179 - DNA, 25 bp, Homo sapien
ctccgcggcagccccttccaccata

SEQ ID NO: 6027180 - DNA, 25 bp, Homo sapien
tccgtcatcaccctccgcggcagcc

SEQ ID NO: 6027181 - DNA, 25 bp, Homo sapien
caggtaggagcgggctttgtcataa

SEQ ID NO: 6027182 - DNA, 25 bp, Homo sapien
tccatcaccctgaccccggggtcca

SEQ ID NO: 6027183 - DNA, 25 bp, Homo sapien
cttgggccttctcctgggtcatctg

SEQ ID NO: 6027184 - DNA, 25 bp, Homo sapien
tcaaagctgcacacagtcaccctga

SEQ ID NO: 6027185 - DNA, 25 bp, Homo sapien
tttgcgcctgcctccatcaccctga

SEQ ID NO: 6027186 - DNA, 25 bp, Homo sapien
tctactccatcgtcaaagctgcaca

SEQ ID NO: 6027187 - DNA, 25 bp, Homo sapien
ataggtggaaaccagggaggcaaat

SEQ ID NO: 6027188 - DNA, 25 bp, Homo sapien
tccttcaaaacctcagcaaatatat

SEQ ID NO: 6027189 - DNA, 25 bp, Homo sapien
tgggccgggtccaggggccattcca

SEQ ID NO: 6027190 - DNA, 25 bp, Homo sapien
caagggcagttcctcgccttaggtt

SEQ ID NO: 6027191 - DNA, 25 bp, Homo sapien
aagggaggtcttactacctccatat

SEQ ID NO: 6027192 - DNA, 25 bp, Homo sapien
tgtaaaaagaccatgaaataacaga

SEQ ID NO: 6027193 - DNA, 25 bp, Homo sapien
caatgttctcaaatttcgggttgga

SEQ ID NO: 6027194 - DNA, 25 bp, Homo sapien
cttagcgggccaggttgtgggccgg

SEQ ID NO: 6027195 - DNA, 25 bp, Homo sapien
ccttctcctgggtcatctgcggggc

SEQ ID NO: 6027196 - DNA, 25 bp, Homo sapien
cagggaggcaaatctactccatcgt

SEQ ID NO: 6027197 - DNA, 25 bp, Homo sapien
tgaccccggggtccagtgcttgggc

SEQ ID NO: 6027198 - DNA, 25 bp, Homo sapien
cccttccaccataggtggaaaccag

SEQ ID NO: 6027199 - DNA, 25 bp, Homo sapien
attccaaaggggagacgactcaatg

SEQ ID NO: 6027200 - DNA, 25 bp, Homo sapien
ctgcacacagtcaccctgatattgc

SEQ ID NO: 6027201 - DNA, 25 bp, Homo sapien
cctgcctccatcaccctgaccccgg

SEQ ID NO: 6027202 - DNA, 25 bp, Homo sapien
ggtgtaagacgacattgtggaatag

SEQ ID NO: 6027203 - DNA, 25 bp, Homo sapien
tcatctgcggggccctgctctatcg

SEQ ID NO: 6027204 - DNA, 25 bp, Homo sapien
gagctcttaaaccttctgcaatgtt

SEQ ID NO: 6027205 - DNA, 25 bp, Homo sapien
aagaccatgaaataacagacaatgg

SEQ ID NO: 6027206 - DNA, 25 bp, Homo sapien
gaacctccttgaccacgatgctttc

SEQ ID NO: 6027207 - DNA, 25 bp, Homo sapien
aaaacctcagcaaatatatgagttt

SEQ ID NO: 6027208 - DNA, 25 bp, Homo sapien
acgtgactcctagccaggagagctc

SEQ ID NO: 6027209 - DNA, 25 bp, Homo sapien
ttactacctccatatacgaacacac

SEQ ID NO: 6027210 - DNA, 25 bp, Homo sapien
aaggggagacgactcaatggtgtaa

SEQ ID NO: 6027211 - DNA, 25 bp, Homo sapien
ttgaccacgatgctttccaaaccac

SEQ ID NO: 6027212 - DNA, 25 bp, Homo sapien
gtagtcctttctacgtgactcctag

SEQ ID NO: 6027213 - DNA, 25 bp, Homo sapien
cagtgcttgggccttctcctgggtc

SEQ ID NO: 6027214 - DNA, 25 bp, Homo sapien
ctcaatggtgtaagacgacattgtg

SEQ ID NO: 6027215 - DNA, 25 bp, Homo sapien
ggctttgtcataacaaggtccttaa

SEQ ID NO: 6027216 - DNA, 25 bp, Homo sapien
agacgactcaatggtgtaagacgac

SEQ ID NO: 6027217 - DNA, 25 bp, Homo sapien
tccttaatcgcatccttcaaaacct

SEQ ID NO: 6027218 - DNA, 25 bp, Homo sapien
gactcccttagcgggccaggttgtg

SEQ ID NO: 6027219 - DNA, 25 bp, Homo sapien
accctgatattgcaggtaggagcgg

SEQ ID NO: 6027220 - DNA, 25 bp, Homo sapien
ttaaaccttctgcaatgttctcaaa

SEQ ID NO: 6027221 - DNA, 25 bp, Homo sapien
atgaaataacagacaatggactccc

SEQ ID NO: 6027222 - DNA, 25 bp, Homo sapien
cgatgctttccaaaccaccctcctt

SEQ ID NO: 6027223 - DNA, 25 bp, Homo sapien
aatatatgagtttgtaaaaagacca

SEQ ID NO: 6027224 - DNA, 25 bp, Homo sapien
tcagcaaatatatgagtttgtaaaa

SEQ ID NO: 6027225 - DNA, 25 bp, Homo sapien
cttctgcaatgttctcaaatttcgg

SEQ ID NO: 6027226 - DNA, 25 bp, Homo sapien
tccaccataggtggaaaccagggag

SEQ ID NO: 6027227 - DNA, 25 bp, Homo sapien
tcctagccaggagagctcttaaacc

SEQ ID NO: 6027228 - DNA, 25 bp, Homo sapien
tcgtcggtagtcctttctacgtgac

SEQ ID NO: 6027229 - DNA, 25 bp, Homo sapien
atctccgtcatctccgtcatcaccc

SEQ ID NO: 6027230 - DNA, 25 bp, Homo sapien
ggaaaccagggaggcaaatctactc

SEQ ID NO: 6027231 - DNA, 25 bp, Homo sapien
ccaggagagctcttaaaccttctgc

SEQ ID NO: 6027232 - DNA, 25 bp, Homo sapien
cattgtggaatagcaagggcagttc

SEQ ID NO: 6027233 - DNA, 25 bp, Homo sapien
ccttttttgcgcctgcctccatcac

SEQ ID NO: 6027234 - DNA, 25 bp, Homo sapien
caccctccttttttgcgcctgcctc

SEQ ID NO: 6027235 - DNA, 25 bp, Homo sapien
cctgggtcatctgcggggccctgct

SEQ ID NO: 6027236 - DNA, 25 bp, Homo sapien
atacgaacacaccggcgacccaagt

SEQ ID NO: 6027237 - DNA, 25 bp, Homo sapien
cagttcctcgccttaggttgtaaag

SEQ ID NO: 6027238 - DNA, 25 bp, Homo sapien
atcacctccttcatctccgtcatct

SEQ ID NO: 6027239 - DNA, 25 bp, Homo sapien
tgagtttgtaaaaagaccatgaaat

SEQ ID NO: 6027240 - DNA, 25 bp, Homo sapien
acagtcaccctgatattgcaggtag

SEQ ID NO: 6027241 - DNA, 25 bp, Homo sapien
tccaggggccattccaaaggggaga

SEQ ID NO: 6027242 - DNA, 25 bp, Homo sapien
ggttggaacctccttgaccacgatg

SEQ ID NO: 6027243 - DNA, 25 bp, Homo sapien
gtcataacaaggtccttaatcgcat

SEQ ID NO: 6027244 - DNA, 25 bp, Homo sapien
atcgcatccttcaaaacctcagcaa

SEQ ID NO: 6027245 - DNA, 25 bp, Homo sapien
gaggtcttactacctccatatacga

SEQ ID NO: 6027246 - DNA, 25 bp, Homo sapien
ggcaaatctactccatcgtcaaagc

SEQ ID NO: 6027247 - DNA, 25 bp, Homo sapien
gtcatctccgtcatcaccctccgcg

SEQ ID NO: 6027248 - DNA, 25 bp, Homo sapien
ggcagccccttccaccataggtgga

SEQ ID NO: 6027249 - DNA, 25 bp, Homo sapien
acaatggactcccttagcgggccag

SEQ ID NO: 6027250 - DNA, 25 bp, Homo sapien
tcaccctgaccccggggtccagtgc

SEQ ID NO: 6027251 - DNA, 25 bp, Homo sapien
tccttcatctccgtcatctccgtca

SEQ ID NO: 6027252 - DNA, 25 bp, Homo sapien
ctccatatacgaacacaccggcgac

SEQ ID NO: 6027253 - DNA, 25 bp, Homo sapien
ggagcgggctttgtcataacaaggt

SEQ ID NO: 6027254 - DNA, 25 bp, Homo sapien
ccatcgtcaaagctgcacacagtca

SEQ ID NO: 6027255 - DNA, 25 bp, Homo sapien
ggccattccaaaggggagacgactc

SEQ ID NO: 6027256 - DNA, 25 bp, Homo sapien
cacaccggcgacccaagttccttcg

SEQ ID NO: 6027257 - DNA, 25 bp, Homo sapien
atcaccctccgcggcagccccttcc

SEQ ID NO: 6027258 - DNA, 25 bp, Homo sapien
gggtccagtgcttgggccttctcct

SEQ ID NO: 6027259 - DNA, 25 bp, Homo sapien
ctttctacgtgactcctagccagga

SEQ ID NO: 6027260 - DNA, 25 bp, Homo sapien
acaaggtccttaatcgcatccttca

SEQ ID NO: 6027261 - DNA, 25 bp, Homo sapien
atattgcaggtaggagcgggctttg

SEQ ID NO: 6027262 - DNA, 25 bp, Homo sapien
tcatagaaacgccagcgaccgcgcg

SEQ ID NO: 6027263 - DNA, 25 bp, Homo sapien
tatcacgatcaaacccttttgcccg

SEQ ID NO: 6027264 - DNA, 25 bp, Homo sapien
ttctcgtcatagaaacgccagcgac

SEQ ID NO: 6027265 - DNA, 25 bp, Homo sapien
ccacggtttttctcaagctcaagat

SEQ ID NO: 6027266 - DNA, 25 bp, Homo sapien
tgcctttacctgtttatggttctcg

SEQ ID NO: 6027267 - DNA, 25 bp, Homo sapien
ataatgacagttggcaactatcacg

SEQ ID NO: 6027268 - DNA, 25 bp, Homo sapien
aaacgccagcgaccgcgcgtgcgtt

SEQ ID NO: 6027269 - DNA, 25 bp, Homo sapien
attttctcttcaccgcgcgataatg

SEQ ID NO: 6027270 - DNA, 25 bp, Homo sapien
tcaagctcaagatgagtggacactt

SEQ ID NO: 6027271 - DNA, 25 bp, Homo sapien
gacactttagcagttgaatatccca

SEQ ID NO: 6027272 - DNA, 25 bp, Homo sapien
cttcaccgcgcgataatgacagttg

SEQ ID NO: 6027273 - DNA, 25 bp, Homo sapien
cgttctattttctcttcaccgcgcg

SEQ ID NO: 6027274 - DNA, 25 bp, Homo sapien
tcaagatgagtggacactttagcag

SEQ ID NO: 6027275 - DNA, 25 bp, Homo sapien
tttttctcaagctcaagatgagtgg

SEQ ID NO: 6027276 - DNA, 25 bp, Homo sapien
cgcgcgataatgacagttggcaact

SEQ ID NO: 6027277 - DNA, 25 bp, Homo sapien
ggcaactatcacgatcaaacccttt

SEQ ID NO: 6027278 - DNA, 25 bp, Homo sapien
gcgaccgcgcgtgcgttctattttc

SEQ ID NO: 6027279 - DNA, 25 bp, Homo sapien
acctgtttatggttctcgtcataga

SEQ ID NO: 6027280 - DNA, 25 bp, Homo sapien
gatcaaacccttttgcccgccagta

SEQ ID NO: 6027281 - DNA, 25 bp, Homo sapien
cggctctgcctttacctgtttatgg

SEQ ID NO: 6027282 - DNA, 25 bp, Homo sapien
cgcgtgcgttctattttctcttcac

SEQ ID NO: 6027283 - DNA, 25 bp, Homo sapien
ttatggttctcgtcatagaaacgcc

SEQ ID NO: 6027284 - DNA, 25 bp, Homo sapien
tgagtggacactttagcagttgaat

SEQ ID NO: 6027285 - DNA, 25 bp, Homo sapien
cagtaaccacggtttttctcaagct

SEQ ID NO: 6027286 - DNA, 25 bp, Homo sapien
acagttggcaactatcacgatcaaa

SEQ ID NO: 6027287 - DNA, 25 bp, Homo sapien
cgtgtggacagacatgatggacagt

SEQ ID NO: 6027288 - DNA, 25 bp, Homo sapien
tctctctggggaccagttttctttc

SEQ ID NO: 6027289 - DNA, 25 bp, Homo sapien
gaggaagcagggtcaagtccttaaa

SEQ ID NO: 6027290 - DNA, 25 bp, Homo sapien
agccagcaagagtggcagagaaggc

SEQ ID NO: 6027291 - DNA, 25 bp, Homo sapien
tccctgatacacttcacactctggg

SEQ ID NO: 6027292 - DNA, 25 bp, Homo sapien
cacactctgggggttcaggaaccga

SEQ ID NO: 6027293 - DNA, 25 bp, Homo sapien
accagtcctagaatagtccccaggt

SEQ ID NO: 6027294 - DNA, 25 bp, Homo sapien
ccttgttctctctggggaccagttt

SEQ ID NO: 6027295 - DNA, 25 bp, Homo sapien
agagtctgcagggccattgtccacg

SEQ ID NO: 6027296 - DNA, 25 bp, Homo sapien
catctgcctgaagtgtgtacctacc

SEQ ID NO: 6027297 - DNA, 25 bp, Homo sapien
ctttgaaaagcaagttggacacata

SEQ ID NO: 6027298 - DNA, 25 bp, Homo sapien
ggctctgcgctggacctgctatgag

SEQ ID NO: 6027299 - DNA, 25 bp, Homo sapien
gggtcagctgagctcttggaagatc

SEQ ID NO: 6027300 - DNA, 25 bp, Homo sapien
agttggacacatagactctgagtac

SEQ ID NO: 6027301 - DNA, 25 bp, Homo sapien
agctgagctcttggaagatccctga

SEQ ID NO: 6027302 - DNA, 25 bp, Homo sapien
tgtcctgaggacacagaagagacca

SEQ ID NO: 6027303 - DNA, 25 bp, Homo sapien
cccaggtcactctcagctgacccac

SEQ ID NO: 6027304 - DNA, 25 bp, Homo sapien
cctgaagtgtgtacctaccactagg

SEQ ID NO: 6027305 - DNA, 25 bp, Homo sapien
cttaaactgatctttctaggggtca

SEQ ID NO: 6027306 - DNA, 25 bp, Homo sapien
cccaccagagtctgcagggccattg

SEQ ID NO: 6027307 - DNA, 25 bp, Homo sapien
aggaaccgagcctcttcttcaagtc

SEQ ID NO: 6027308 - DNA, 25 bp, Homo sapien
atagtccccaggtcactctcagctg

SEQ ID NO: 6027309 - DNA, 25 bp, Homo sapien
cctgtcaatagtacaattcttgtat

SEQ ID NO: 6027310 - DNA, 25 bp, Homo sapien
gctcttggaagatccctgatacact

SEQ ID NO: 6027311 - DNA, 25 bp, Homo sapien
tgtcccgaggaagcagggtcaagtc

SEQ ID NO: 6027312 - DNA, 25 bp, Homo sapien
cgagcctcttcttcaagtctccaag

SEQ ID NO: 6027313 - DNA, 25 bp, Homo sapien
acaattcttgtatgttctgggagtt

SEQ ID NO: 6027314 - DNA, 25 bp, Homo sapien
caagagtggcagagaaggcaagcca

SEQ ID NO: 6027315 - DNA, 25 bp, Homo sapien
agtgcaactgcccagaccttgactt

SEQ ID NO: 6027316 - DNA, 25 bp, Homo sapien
gacccacccaccagagtctgcaggg

SEQ ID NO: 6027317 - DNA, 25 bp, Homo sapien
cctcgggccactgtcaccagcagcg

SEQ ID NO: 6027318 - DNA, 25 bp, Homo sapien
gccactgtcaccagcagcgtgtgga

SEQ ID NO: 6027319 - DNA, 25 bp, Homo sapien
gtcaccagcagcgtgtggacagaca

SEQ ID NO: 6027320 - DNA, 25 bp, Homo sapien
tgcagggccattgtccacgcctgtg

SEQ ID NO: 6027321 - DNA, 25 bp, Homo sapien
ttctaggggtcagctgagctcttgg

SEQ ID NO: 6027322 - DNA, 25 bp, Homo sapien
tcctagaatagtccccaggtcactc

SEQ ID NO: 6027323 - DNA, 25 bp, Homo sapien
aatagtacaattcttgtatgttctg

SEQ ID NO: 6027324 - DNA, 25 bp, Homo sapien
ggaagatccctgatacacttcacac

SEQ ID NO: 6027325 - DNA, 25 bp, Homo sapien
gaggacacagaagagaccacgagac

SEQ ID NO: 6027326 - DNA, 25 bp, Homo sapien
acctaccactaggagccctggctct

SEQ ID NO: 6027327 - DNA, 25 bp, Homo sapien
gacagtgagtgtcctaggaaacccc

SEQ ID NO: 6027328 - DNA, 25 bp, Homo sapien
acacatagactctgagtaccctgtc

SEQ ID NO: 6027329 - DNA, 25 bp, Homo sapien
tcatgaagccagcaagagtggcaga

SEQ ID NO: 6027330 - DNA, 25 bp, Homo sapien
tgataggtaagcatctgcctgaagt

SEQ ID NO: 6027331 - DNA, 25 bp, Homo sapien
gaaacccccttacagctgtcctgag

SEQ ID NO: 6027332 - DNA, 25 bp, Homo sapien
caagccaggttacctcgggccactg

SEQ ID NO: 6027333 - DNA, 25 bp, Homo sapien
ttcaagtctccaagtgcaactgccc

SEQ ID NO: 6027334 - DNA, 25 bp, Homo sapien
acagaagagaccacgagaccctttt

SEQ ID NO: 6027335 - DNA, 25 bp, Homo sapien
ggctttccttgttctctctggggac

SEQ ID NO: 6027336 - DNA, 25 bp, Homo sapien
ctcttcttcaagtctccaagtgcaa

SEQ ID NO: 6027337 - DNA, 25 bp, Homo sapien
tgctcttgtcccgaggaagcagggt

SEQ ID NO: 6027338 - DNA, 25 bp, Homo sapien
gagaccacgagacccttttttcata

SEQ ID NO: 6027339 - DNA, 25 bp, Homo sapien
gtgtgtacctaccactaggagccct

SEQ ID NO: 6027340 - DNA, 25 bp, Homo sapien
cttgggggctttccttgttctctct

SEQ ID NO: 6027341 - DNA, 25 bp, Homo sapien
tcactctcagctgacccacccacca

SEQ ID NO: 6027342 - DNA, 25 bp, Homo sapien
actgcccagaccttgacttggagtg

SEQ ID NO: 6027343 - DNA, 25 bp, Homo sapien
tgtccacgcctgtgataggtaagca

SEQ ID NO: 6027344 - DNA, 25 bp, Homo sapien
cgcctgtgataggtaagcatctgcc

SEQ ID NO: 6027345 - DNA, 25 bp, Homo sapien
cttgtatgttctgggagtttgctct

SEQ ID NO: 6027346 - DNA, 25 bp, Homo sapien
ggttcaggaaccgagcctcttcttc

SEQ ID NO: 6027347 - DNA, 25 bp, Homo sapien
cagaccttgacttggagtgacagtg

SEQ ID NO: 6027348 - DNA, 25 bp, Homo sapien
agactctgagtaccctgtcaatagt

SEQ ID NO: 6027349 - DNA, 25 bp, Homo sapien
tcagctgacccacccaccagagtct

SEQ ID NO: 6027350 - DNA, 25 bp, Homo sapien
agaaggcaagccaggttacctcggg

SEQ ID NO: 6027351 - DNA, 25 bp, Homo sapien
cagcagcgtgtggacagacatgatg

SEQ ID NO: 6027352 - DNA, 25 bp, Homo sapien
tctgggggttcaggaaccgagcctc

SEQ ID NO: 6027353 - DNA, 25 bp, Homo sapien
gagccctggctctgcgctggacctg

SEQ ID NO: 6027354 - DNA, 25 bp, Homo sapien
tggagtgacagtgagtgtcctagga

SEQ ID NO: 6027355 - DNA, 25 bp, Homo sapien
gagtaccctgtcaatagtacaattc

SEQ ID NO: 6027356 - DNA, 25 bp, Homo sapien
ctatgagaccttgggggctttcctt

SEQ ID NO: 6027357 - DNA, 25 bp, Homo sapien
ctgatctttctaggggtcagctgag

SEQ ID NO: 6027358 - DNA, 25 bp, Homo sapien
cccttacagctgtcctgaggacaca

SEQ ID NO: 6027359 - DNA, 25 bp, Homo sapien
caagtccttaaactgatctttctag

SEQ ID NO: 6027360 - DNA, 25 bp, Homo sapien
ggccattgtccacgcctgtgatagg

SEQ ID NO: 6027361 - DNA, 25 bp, Homo sapien
aggttacctcgggccactgtcacca

SEQ ID NO: 6027362 - DNA, 25 bp, Homo sapien
ggagtttgctcttgtcccgaggaag

SEQ ID NO: 6027363 - DNA, 25 bp, Homo sapien
tctccaagtgcaactgcccagacct

SEQ ID NO: 6027364 - DNA, 25 bp, Homo sapien
ttcatatcatgaagccagcaagagt

SEQ ID NO: 6027365 - DNA, 25 bp, Homo sapien
cactaggagccctggctctgcgctg

SEQ ID NO: 6027366 - DNA, 25 bp, Homo sapien
tggcagagaaggcaagccaggttac

SEQ ID NO: 6027367 - DNA, 25 bp, Homo sapien
gttctgggagtttgctcttgtcccg

SEQ ID NO: 6027368 - DNA, 25 bp, Homo sapien
tacacttcacactctgggggttcag

SEQ ID NO: 6027369 - DNA, 25 bp, Homo sapien
tacagctgtcctgaggacacagaag

SEQ ID NO: 6027370 - DNA, 25 bp, Homo sapien
aaagcaagttggacacatagactct

SEQ ID NO: 6027371 - DNA, 25 bp, Homo sapien
ccttttttcatatcatgaagccagc

SEQ ID NO: 6027372 - DNA, 25 bp, Homo sapien
gcgctggacctgctatgagaccttg

SEQ ID NO: 6027373 - DNA, 25 bp, Homo sapien
cgagacccttttttcatatcatgaa

SEQ ID NO: 6027374 - DNA, 25 bp, Homo sapien
cagggtcaagtccttaaactgatct

SEQ ID NO: 6027375 - DNA, 25 bp, Homo sapien
ttgacttggagtgacagtgagtgtc

SEQ ID NO: 6027376 - DNA, 25 bp, Homo sapien
tcccctttgaaaagcaagttggaca

SEQ ID NO: 6027377 - DNA, 25 bp, Homo sapien
gtaagcatctgcctgaagtgtgtac

SEQ ID NO: 6027378 - DNA, 25 bp, Homo sapien
gacctgctatgagaccttgggggct

SEQ ID NO: 6027379 - DNA, 25 bp, Homo sapien
tgtctgtccacacgctgctggtgac

SEQ ID NO: 6027380 - DNA, 25 bp, Homo sapien
gtaacctggcttgccttctctgcca

SEQ ID NO: 6027381 - DNA, 25 bp, Homo sapien
tttcctaggacactcactgtcactc

SEQ ID NO: 6027382 - DNA, 25 bp, Homo sapien
tctttggtaccattgtgagcagtac

SEQ ID NO: 6027383 - DNA, 25 bp, Homo sapien
tcatgatatgaaaaaagggtctcgt

SEQ ID NO: 6027384 - DNA, 25 bp, Homo sapien
tggtgacagtggcccgaggtaacct

SEQ ID NO: 6027385 - DNA, 25 bp, Homo sapien
ggacactcactgtcactccaagtca

SEQ ID NO: 6027386 - DNA, 25 bp, Homo sapien
gtgctccctggggacgggggcagct

SEQ ID NO: 6027387 - DNA, 25 bp, Homo sapien
ccaggcacttgcaatgttcattggt

SEQ ID NO: 6027388 - DNA, 25 bp, Homo sapien
catcatgtctgtccacacgctgctg

SEQ ID NO: 6027389 - DNA, 25 bp, Homo sapien
atcccgtcagcatcttcctctcatt

SEQ ID NO: 6027390 - DNA, 25 bp, Homo sapien
actgtccatcatgtctgtccacacg

SEQ ID NO: 6027391 - DNA, 25 bp, Homo sapien
taaacctaggtgattctatctttgg

SEQ ID NO: 6027392 - DNA, 25 bp, Homo sapien
gtcctgcatgggacgtctgtcctca

SEQ ID NO: 6027393 - DNA, 25 bp, Homo sapien
taaaatagcacttccggtgtctaaa

SEQ ID NO: 6027394 - DNA, 25 bp, Homo sapien
tgcccatctcaagtctcttgtcctg

SEQ ID NO: 6027395 - DNA, 25 bp, Homo sapien
aagtacagataggaaaacttaacag

SEQ ID NO: 6027396 - DNA, 25 bp, Homo sapien
cagataggaaaacttaacagcatat

SEQ ID NO: 6027397 - DNA, 25 bp, Homo sapien
cagaaaggctgacttccccccactc

SEQ ID NO: 6027398 - DNA, 25 bp, Homo sapien
tacaagtacttgtaaacctaggtga

SEQ ID NO: 6027399 - DNA, 25 bp, Homo sapien
atgtgggttatctcgagtcctacaa

SEQ ID NO: 6027400 - DNA, 25 bp, Homo sapien
tcagcatcttcctctcattgcccat

SEQ ID NO: 6027401 - DNA, 25 bp, Homo sapien
agcacttccggtgtctaaatgtggg

SEQ ID NO: 6027402 - DNA, 25 bp, Homo sapien
gttatctcgagtcctacaagtactt

SEQ ID NO: 6027403 - DNA, 25 bp, Homo sapien
actccccagcctctgctgctccaag

SEQ ID NO: 6027404 - DNA, 25 bp, Homo sapien
ctgccactcttgctggcttcatgat

SEQ ID NO: 6027405 - DNA, 25 bp, Homo sapien
cagtggcccgaggtaacctggcttg

SEQ ID NO: 6027406 - DNA, 25 bp, Homo sapien
ctccctagtccccaggcacttgcaa

SEQ ID NO: 6027407 - DNA, 25 bp, Homo sapien
agcagtactccccagcctctgctgc

SEQ ID NO: 6027408 - DNA, 25 bp, Homo sapien
ggacgggggcagctggcagttgagg

SEQ ID NO: 6027409 - DNA, 25 bp, Homo sapien
tggcttgccttctctgccactcttg

SEQ ID NO: 6027410 - DNA, 25 bp, Homo sapien
aatgttcattggttcagggttagaa

SEQ ID NO: 6027411 - DNA, 25 bp, Homo sapien
ccccactccctagtccccaggcact

SEQ ID NO: 6027412 - DNA, 25 bp, Homo sapien
acttgcaatgttcattggttcaggg

SEQ ID NO: 6027413 - DNA, 25 bp, Homo sapien
gtggtaatcccgtcagcatcttcct

SEQ ID NO: 6027414 - DNA, 25 bp, Homo sapien
caagtcaaggtctgggcagttgcac

SEQ ID NO: 6027415 - DNA, 25 bp, Homo sapien
attctatctttggtaccattgtgag

SEQ ID NO: 6027416 - DNA, 25 bp, Homo sapien
ccagctagcagggagggtccccaga

SEQ ID NO: 6027417 - DNA, 25 bp, Homo sapien
taggtgattctatctttggtaccat

SEQ ID NO: 6027418 - DNA, 25 bp, Homo sapien
ctggcagttgaggtggtaatcccgt

SEQ ID NO: 6027419 - DNA, 25 bp, Homo sapien
cagcctctgctgctccaagcgggga

SEQ ID NO: 6027420 - DNA, 25 bp, Homo sapien
ccctggggacgggggcagctggcag

SEQ ID NO: 6027421 - DNA, 25 bp, Homo sapien
agccaaccagctagcagggagggtc

SEQ ID NO: 6027422 - DNA, 25 bp, Homo sapien
ccttctctgccactcttgctggctt

SEQ ID NO: 6027423 - DNA, 25 bp, Homo sapien
tgtgtcctcaggacagctgtaaggg

SEQ ID NO: 6027424 - DNA, 25 bp, Homo sapien
agcagggagggtccccagaaaggct

SEQ ID NO: 6027425 - DNA, 25 bp, Homo sapien
tcactgtcactccaagtcaaggtct

SEQ ID NO: 6027426 - DNA, 25 bp, Homo sapien
gttagaactgtttctgtggggtgct

SEQ ID NO: 6027427 - DNA, 25 bp, Homo sapien
gcggggagatgccagctagccaacc

SEQ ID NO: 6027428 - DNA, 25 bp, Homo sapien
ctccaagcggggagatgccagctag

SEQ ID NO: 6027429 - DNA, 25 bp, Homo sapien
gggcagctggcagttgaggtggtaa

SEQ ID NO: 6027430 - DNA, 25 bp, Homo sapien
gtctaaatgtgggttatctcgagtc

SEQ ID NO: 6027431 - DNA, 25 bp, Homo sapien
gagggtccccagaaaggctgacttc

SEQ ID NO: 6027432 - DNA, 25 bp, Homo sapien
gtcctcactgtccatcatgtctgtc

SEQ ID NO: 6027433 - DNA, 25 bp, Homo sapien
tccacacgctgctggtgacagtggc

SEQ ID NO: 6027434 - DNA, 25 bp, Homo sapien
agggggtttcctaggacactcactg

SEQ ID NO: 6027435 - DNA, 25 bp, Homo sapien
caggacagctgtaagggggtttcct

SEQ ID NO: 6027436 - DNA, 25 bp, Homo sapien
tcttcctctcattgcccatctcaag

SEQ ID NO: 6027437 - DNA, 25 bp, Homo sapien
aaaaagggtctcgtggtctcttctg

SEQ ID NO: 6027438 - DNA, 25 bp, Homo sapien
ctgtggggtgctccctggggacggg

SEQ ID NO: 6027439 - DNA, 25 bp, Homo sapien
ttcagggttagaactgtttctgtgg

SEQ ID NO: 6027440 - DNA, 25 bp, Homo sapien
ggtaccattgtgagcagtactcccc

SEQ ID NO: 6027441 - DNA, 25 bp, Homo sapien
gggtctcgtggtctcttctgtgtcc

SEQ ID NO: 6027442 - DNA, 25 bp, Homo sapien
agcatataaaatagcacttccggtg

SEQ ID NO: 6027443 - DNA, 25 bp, Homo sapien
ggaaaacttaacagcatataaaata

SEQ ID NO: 6027444 - DNA, 25 bp, Homo sapien
tctcattgcccatctcaagtctctt

SEQ ID NO: 6027445 - DNA, 25 bp, Homo sapien
attgtgagcagtactccccagcctc

SEQ ID NO: 6027446 - DNA, 25 bp, Homo sapien
gctgacttccccccactccctagtc

SEQ ID NO: 6027447 - DNA, 25 bp, Homo sapien
catgggacgtctgtcctcactgtcc

SEQ ID NO: 6027448 - DNA, 25 bp, Homo sapien
cccgaggtaacctggcttgccttct

SEQ ID NO: 6027449 - DNA, 25 bp, Homo sapien
tacttgtaaacctaggtgattctat

SEQ ID NO: 6027450 - DNA, 25 bp, Homo sapien
gagatgccagctagccaaccagcta

SEQ ID NO: 6027451 - DNA, 25 bp, Homo sapien
ccagctagccaaccagctagcaggg

SEQ ID NO: 6027452 - DNA, 25 bp, Homo sapien
cttaacagcatataaaatagcactt

SEQ ID NO: 6027453 - DNA, 25 bp, Homo sapien
ctcaagtctcttgtcctgcatggga

SEQ ID NO: 6027454 - DNA, 25 bp, Homo sapien
cgctgctggtgacagtggcccgagg

SEQ ID NO: 6027455 - DNA, 25 bp, Homo sapien
ctcttctgtgtcctcaggacagctg

SEQ ID NO: 6027456 - DNA, 25 bp, Homo sapien
tagtccccaggcacttgcaatgttc

SEQ ID NO: 6027457 - DNA, 25 bp, Homo sapien
ctcttgctggcttcatgatatgaaa

SEQ ID NO: 6027458 - DNA, 25 bp, Homo sapien
tcactccaagtcaaggtctgggcag

SEQ ID NO: 6027459 - DNA, 25 bp, Homo sapien
tccggtgtctaaatgtgggttatct

SEQ ID NO: 6027460 - DNA, 25 bp, Homo sapien
tcgagtcctacaagtacttgtaaac

SEQ ID NO: 6027461 - DNA, 25 bp, Homo sapien
cattggttcagggttagaactgttt

SEQ ID NO: 6027462 - DNA, 25 bp, Homo sapien
ctgctgctccaagcggggagatgcc

SEQ ID NO: 6027463 - DNA, 25 bp, Homo sapien
tatgaaaaaagggtctcgtggtctc

SEQ ID NO: 6027464 - DNA, 25 bp, Homo sapien
ctggcttcatgatatgaaaaaaggg

SEQ ID NO: 6027465 - DNA, 25 bp, Homo sapien
tctcttgtcctgcatgggacgtctg

SEQ ID NO: 6027466 - DNA, 25 bp, Homo sapien
gttgaggtggtaatcccgtcagcat

SEQ ID NO: 6027467 - DNA, 25 bp, Homo sapien
cgtggtctcttctgtgtcctcagga

SEQ ID NO: 6027468 - DNA, 25 bp, Homo sapien
acgtctgtcctcactgtccatcatg

SEQ ID NO: 6027469 - DNA, 25 bp, Homo sapien
aactgtttctgtggggtgctccctg

SEQ ID NO: 6027470 - DNA, 25 bp, Homo sapien
gcttcgaaactttccgggatgcaaa

SEQ ID NO: 6027471 - DNA, 25 bp, Homo sapien
ccttattttatagcttgttgctcta

SEQ ID NO: 6027472 - DNA, 25 bp, Homo sapien
gttatagctgaatattctatttcta

SEQ ID NO: 6027473 - DNA, 25 bp, Homo sapien
ttgaagaaccctgttctcttgtaga

SEQ ID NO: 6027474 - DNA, 25 bp, Homo sapien
aaccctgttctcttgtagactcatt

SEQ ID NO: 6027475 - DNA, 25 bp, Homo sapien
agtgaccatagataacaaagctgag

SEQ ID NO: 6027476 - DNA, 25 bp, Homo sapien
gttttgcttgaagaaccctgttctc

SEQ ID NO: 6027477 - DNA, 25 bp, Homo sapien
ttcttttgtctacatgttatcttat

SEQ ID NO: 6027478 - DNA, 25 bp, Homo sapien
aaacctgataccttattttatagct

SEQ ID NO: 6027479 - DNA, 25 bp, Homo sapien
agctgaggaaattgattcgttttcc

SEQ ID NO: 6027480 - DNA, 25 bp, Homo sapien
ttgtctgttttgcttgaagaaccct

SEQ ID NO: 6027481 - DNA, 25 bp, Homo sapien
tatcttattgattgttgttcatcac

SEQ ID NO: 6027482 - DNA, 25 bp, Homo sapien
acagagttccgccacaactctaagg

SEQ ID NO: 6027483 - DNA, 25 bp, Homo sapien
aaaaatgcagtaacatgacaatatt

SEQ ID NO: 6027484 - DNA, 25 bp, Homo sapien
atttctaagctgcactacatgattc

SEQ ID NO: 6027485 - DNA, 25 bp, Homo sapien
gcagctcgttcaagaccaatagaag

SEQ ID NO: 6027486 - DNA, 25 bp, Homo sapien
gcagtaacatgacaatattattgat

SEQ ID NO: 6027487 - DNA, 25 bp, Homo sapien
catagataacaaagctgaggaaatt

SEQ ID NO: 6027488 - DNA, 25 bp, Homo sapien
gcttttgttatagctgaatattcta

SEQ ID NO: 6027489 - DNA, 25 bp, Homo sapien
aagcaagtcttgagtctctacagag

SEQ ID NO: 6027490 - DNA, 25 bp, Homo sapien
tgtctacatgttatcttattgattg

SEQ ID NO: 6027491 - DNA, 25 bp, Homo sapien
tcaaggtcgttacatctaaaacctg

SEQ ID NO: 6027492 - DNA, 25 bp, Homo sapien
tacatcgagtatttgcttcggttag

SEQ ID NO: 6027493 - DNA, 25 bp, Homo sapien
ggatttctaagagcagctcgttcaa

SEQ ID NO: 6027494 - DNA, 25 bp, Homo sapien
gaccgtaagaattttcagtacatcg

SEQ ID NO: 6027495 - DNA, 25 bp, Homo sapien
tcgttacatctaaaacctgatacct

SEQ ID NO: 6027496 - DNA, 25 bp, Homo sapien
ttgtagactcattaaccgcttttgt

SEQ ID NO: 6027497 - DNA, 25 bp, Homo sapien
ctctaaggaggtcgaccgtaagaat

SEQ ID NO: 6027498 - DNA, 25 bp, Homo sapien
tgtttcttatgtgcttgaaaaatgc

SEQ ID NO: 6027499 - DNA, 25 bp, Homo sapien
tgcttcggttaggtactaaacagct

SEQ ID NO: 6027500 - DNA, 25 bp, Homo sapien
gcctctcctcgatcaaggtcgttac

SEQ ID NO: 6027501 - DNA, 25 bp, Homo sapien
tgttgttcatcactatgcttaattg

SEQ ID NO: 6027502 - DNA, 25 bp, Homo sapien
ttaaccgcttttgttatagctgaat

SEQ ID NO: 6027503 - DNA, 25 bp, Homo sapien
cttatgtgcttgaaaaatgcagtaa

SEQ ID NO: 6027504 - DNA, 25 bp, Homo sapien
ttattgattagcttgttttgtttgg

SEQ ID NO: 6027505 - DNA, 25 bp, Homo sapien
agtctctacagaggatttctaagag

SEQ ID NO: 6027506 - DNA, 25 bp, Homo sapien
tattctatttctaagctgcactaca

SEQ ID NO: 6027507 - DNA, 25 bp, Homo sapien
ttgatcaactcaaaagccctgccat

SEQ ID NO: 6027508 - DNA, 25 bp, Homo sapien
actatgcttaattgtttcttatgtg

SEQ ID NO: 6027509 - DNA, 25 bp, Homo sapien
gtactaaacagcttgatcaactcaa

SEQ ID NO: 6027510 - DNA, 25 bp, Homo sapien
gtcttgagtctctacagaggatttc

SEQ ID NO: 6027511 - DNA, 25 bp, Homo sapien
catctaaaacctgataccttatttt

SEQ ID NO: 6027512 - DNA, 25 bp, Homo sapien
catgttatcttattgattgttgttc

SEQ ID NO: 6027513 - DNA, 25 bp, Homo sapien
tccgggatgcaaaagcaagtcttga

SEQ ID NO: 6027514 - DNA, 25 bp, Homo sapien
tttcagtacatcgagtatttgcttc

SEQ ID NO: 6027515 - DNA, 25 bp, Homo sapien
aagctgcactacatgattcctaatt

SEQ ID NO: 6027516 - DNA, 25 bp, Homo sapien
cttaattgtttcttatgtgcttgaa

SEQ ID NO: 6027517 - DNA, 25 bp, Homo sapien
atagaagacaggaagagaatagaga

SEQ ID NO: 6027518 - DNA, 25 bp, Homo sapien
gacaggaagagaatagagatgattg

SEQ ID NO: 6027519 - DNA, 25 bp, Homo sapien
ccaacattgtctgttttgcttgaag

SEQ ID NO: 6027520 - DNA, 25 bp, Homo sapien
tgctctagtgaccatagataacaaa

SEQ ID NO: 6027521 - DNA, 25 bp, Homo sapien
agaccaatagaagacaggaagagaa

SEQ ID NO: 6027522 - DNA, 25 bp, Homo sapien
caatattattgattagcttgttttg

SEQ ID NO: 6027523 - DNA, 25 bp, Homo sapien
tgaggccaacattgtctgttttgct

SEQ ID NO: 6027524 - DNA, 25 bp, Homo sapien
attgattgttgttcatcactatgct

SEQ ID NO: 6027525 - DNA, 25 bp, Homo sapien
aaactttccgggatgcaaaagcaag

SEQ ID NO: 6027526 - DNA, 25 bp, Homo sapien
atagagatgattgtgtcaacagagt

SEQ ID NO: 6027527 - DNA, 25 bp, Homo sapien
tagttagcctctcctcgatcaaggt

SEQ ID NO: 6027528 - DNA, 25 bp, Homo sapien
ctaagagcagctcgttcaagaccaa

SEQ ID NO: 6027529 - DNA, 25 bp, Homo sapien
gcttgttgctctagtgaccatagat

SEQ ID NO: 6027530 - DNA, 25 bp, Homo sapien
cctaatttcttttgtctacatgtta

SEQ ID NO: 6027531 - DNA, 25 bp, Homo sapien
tgcttgaaaaatgcagtaacatgac

SEQ ID NO: 6027532 - DNA, 25 bp, Homo sapien
cactacatgattcctaatttctttt

SEQ ID NO: 6027533 - DNA, 25 bp, Homo sapien
actcattaaccgcttttgttatagc

SEQ ID NO: 6027534 - DNA, 25 bp, Homo sapien
gtgtcaacagagttccgccacaact

SEQ ID NO: 6027535 - DNA, 25 bp, Homo sapien
atgcaaaagcaagtcttgagtctct

SEQ ID NO: 6027536 - DNA, 25 bp, Homo sapien
gagtatttgcttcggttaggtacta

SEQ ID NO: 6027537 - DNA, 25 bp, Homo sapien
cgttcaagaccaatagaagacagga

SEQ ID NO: 6027538 - DNA, 25 bp, Homo sapien
catgacaatattattgattagcttg

SEQ ID NO: 6027539 - DNA, 25 bp, Homo sapien
gttccgccacaactctaaggaggtc

SEQ ID NO: 6027540 - DNA, 25 bp, Homo sapien
aactcaaaagccctgccatagttag

SEQ ID NO: 6027541 - DNA, 25 bp, Homo sapien
tttatagcttgttgctctagtgacc

SEQ ID NO: 6027542 - DNA, 25 bp, Homo sapien
aagaattttcagtacatcgagtatt

SEQ ID NO: 6027543 - DNA, 25 bp, Homo sapien
taaagataaaaaatgggagcttcga

SEQ ID NO: 6027544 - DNA, 25 bp, Homo sapien
ccacaactctaaggaggtcgaccgt

SEQ ID NO: 6027545 - DNA, 25 bp, Homo sapien
ggttaggtactaaacagcttgatca

SEQ ID NO: 6027546 - DNA, 25 bp, Homo sapien
atgattcctaatttcttttgtctac

SEQ ID NO: 6027547 - DNA, 25 bp, Homo sapien
attagcttgttttgtttggtctttg

SEQ ID NO: 6027548 - DNA, 25 bp, Homo sapien
atgattgtgtcaacagagttccgcc

SEQ ID NO: 6027549 - DNA, 25 bp, Homo sapien
aacagcttgatcaactcaaaagccc

SEQ ID NO: 6027550 - DNA, 25 bp, Homo sapien
taacaaagctgaggaaattgattcg

SEQ ID NO: 6027551 - DNA, 25 bp, Homo sapien
ctgataccttattttatagcttgtt

SEQ ID NO: 6027552 - DNA, 25 bp, Homo sapien
ctgccatagttagcctctcctcgat

SEQ ID NO: 6027553 - DNA, 25 bp, Homo sapien
gttctcttgtagactcattaaccgc

SEQ ID NO: 6027554 - DNA, 25 bp, Homo sapien
aagagaatagagatgattgtgtcaa

SEQ ID NO: 6027555 - DNA, 25 bp, Homo sapien
cctcgatcaaggtcgttacatctaa

SEQ ID NO: 6027556 - DNA, 25 bp, Homo sapien
tacagaggatttctaagagcagctc

SEQ ID NO: 6027557 - DNA, 25 bp, Homo sapien
ttcatcactatgcttaattgtttct

SEQ ID NO: 6027558 - DNA, 25 bp, Homo sapien
aaagccctgccatagttagcctctc

SEQ ID NO: 6027559 - DNA, 25 bp, Homo sapien
gctgaatattctatttctaagctgc

SEQ ID NO: 6027560 - DNA, 25 bp, Homo sapien
gccgggcgtcgttctgggctcatgg

SEQ ID NO: 6027561 - DNA, 25 bp, Homo sapien
cgacgagccagggatagcgctcccg

SEQ ID NO: 6027562 - DNA, 25 bp, Homo sapien
ccttccaggggcccgcgtaggcgat

SEQ ID NO: 6027563 - DNA, 25 bp, Homo sapien
gtccacctcggcgacgagccaggga

SEQ ID NO: 6027564 - DNA, 25 bp, Homo sapien
agcgaccacgctcttgaagccctgt

SEQ ID NO: 6027565 - DNA, 25 bp, Homo sapien
ccagctgccagaaacccacgtcatg

SEQ ID NO: 6027566 - DNA, 25 bp, Homo sapien
cacgctcgggtcgttgggcagcccg

SEQ ID NO: 6027567 - DNA, 25 bp, Homo sapien
gtacggaagttgaccgtgcttgtct

SEQ ID NO: 6027568 - DNA, 25 bp, Homo sapien
gcgtggagcccagtcccgtccgctg

SEQ ID NO: 6027569 - DNA, 25 bp, Homo sapien
gggcatatccgagcgcctcgtgcat

SEQ ID NO: 6027570 - DNA, 25 bp, Homo sapien
ctcctgcggttcctgcggctcggta

SEQ ID NO: 6027571 - DNA, 25 bp, Homo sapien
cggtcgactcggccgtccagtcgta

SEQ ID NO: 6027572 - DNA, 25 bp, Homo sapien
cggacggggcggtaccggcaggctg

SEQ ID NO: 6027573 - DNA, 25 bp, Homo sapien
cccgtgcttgaagccggccgcccgc

SEQ ID NO: 6027574 - DNA, 25 bp, Homo sapien
ccgtccactcctgcggttcctgcgg

SEQ ID NO: 6027575 - DNA, 25 bp, Homo sapien
gtaccggcaggctgaagtccagctg

SEQ ID NO: 6027576 - DNA, 25 bp, Homo sapien
ctcggtgacgggcaggaccggacgg

SEQ ID NO: 6027577 - DNA, 25 bp, Homo sapien
tcagatctcggtgacgggcaggacc

SEQ ID NO: 6027578 - DNA, 25 bp, Homo sapien
gatgccggcgacctcgccgtccacc

SEQ ID NO: 6027579 - DNA, 25 bp, Homo sapien
accgtgcttgtctcgatgtagtggt

SEQ ID NO: 6027580 - DNA, 25 bp, Homo sapien
cccgcgtaggcgatgccggcgacct

SEQ ID NO: 6027581 - DNA, 25 bp, Homo sapien
gccggcatgtccgcctcggtggcac

SEQ ID NO: 6027582 - DNA, 25 bp, Homo sapien
tgaagtccagctgccagaaacccac

SEQ ID NO: 6027583 - DNA, 25 bp, Homo sapien
ctcgtgcatgcgcacgctcgggtcg

SEQ ID NO: 6027584 - DNA, 25 bp, Homo sapien
cttgtctcgatgtagtggttgacga

SEQ ID NO: 6027585 - DNA, 25 bp, Homo sapien
cctgcggctcggtacggaagttgac

SEQ ID NO: 6027586 - DNA, 25 bp, Homo sapien
aagttgaccgtgcttgtctcgatgt

SEQ ID NO: 6027587 - DNA, 25 bp, Homo sapien
gctcatggtagatccccgggtaccg

SEQ ID NO: 6027588 - DNA, 25 bp, Homo sapien
tgcgtgccttccaggggcccgcgta

SEQ ID NO: 6027589 - DNA, 25 bp, Homo sapien
gatgacagcgaccacgctcttgaag

SEQ ID NO: 6027590 - DNA, 25 bp, Homo sapien
ggatagcgctcccgcagacggacga

SEQ ID NO: 6027591 - DNA, 25 bp, Homo sapien
cagtcgtaggcgttgcgtgccttcc

SEQ ID NO: 6027592 - DNA, 25 bp, Homo sapien
gtacacggtcgactcggccgtccag

SEQ ID NO: 6027593 - DNA, 25 bp, Homo sapien
gagacgtacacggtcgactcggccg

SEQ ID NO: 6027594 - DNA, 25 bp, Homo sapien
cctgtgcctccagggacttcagcag

SEQ ID NO: 6027595 - DNA, 25 bp, Homo sapien
tgtagagcgtggagcccagtcccgt

SEQ ID NO: 6027596 - DNA, 25 bp, Homo sapien
cctccagggacttcagcaggtgggt

SEQ ID NO: 6027597 - DNA, 25 bp, Homo sapien
gttgggcagcccgatgacagcgacc

SEQ ID NO: 6027598 - DNA, 25 bp, Homo sapien
cagcccgatgacagcgaccacgctc

SEQ ID NO: 6027599 - DNA, 25 bp, Homo sapien
ttgacgatggtgcagaccgccggca

SEQ ID NO: 6027600 - DNA, 25 bp, Homo sapien
tggcacggcggatgtcggccgggcg

SEQ ID NO: 6027601 - DNA, 25 bp, Homo sapien
tagtggttgacgatggtgcagaccg

SEQ ID NO: 6027602 - DNA, 25 bp, Homo sapien
ctcgccgtccacctcggcgacgagc

SEQ ID NO: 6027603 - DNA, 25 bp, Homo sapien
gctcggtacggaagttgaccgtgct

SEQ ID NO: 6027604 - DNA, 25 bp, Homo sapien
taggcgttgcgtgccttccaggggc

SEQ ID NO: 6027605 - DNA, 25 bp, Homo sapien
taggcgatgccggcgacctcgccgt

SEQ ID NO: 6027606 - DNA, 25 bp, Homo sapien
gggcggtaccggcaggctgaagtcc

SEQ ID NO: 6027607 - DNA, 25 bp, Homo sapien
cacgctcttgaagccctgtgcctcc

SEQ ID NO: 6027608 - DNA, 25 bp, Homo sapien
ccggccgcccgcagcatgccgcggg

SEQ ID NO: 6027609 - DNA, 25 bp, Homo sapien
acctcggcgacgagccagggatagc

SEQ ID NO: 6027610 - DNA, 25 bp, Homo sapien
ggcggatgtcggccgggcgtcgttc

SEQ ID NO: 6027611 - DNA, 25 bp, Homo sapien
tcagcaggtgggtgtagagcgtgga

SEQ ID NO: 6027612 - DNA, 25 bp, Homo sapien
gccagaaacccacgtcatgccagtt

SEQ ID NO: 6027613 - DNA, 25 bp, Homo sapien
gcctcggtggcacggcggatgtcgg

SEQ ID NO: 6027614 - DNA, 25 bp, Homo sapien
ttgaagccggccgcccgcagcatgc

SEQ ID NO: 6027615 - DNA, 25 bp, Homo sapien
cgtcgttctgggctcatggtagatc

SEQ ID NO: 6027616 - DNA, 25 bp, Homo sapien
atggtgcagaccgccggcatgtccg

SEQ ID NO: 6027617 - DNA, 25 bp, Homo sapien
gcaggctgaagtccagctgccagaa

SEQ ID NO: 6027618 - DNA, 25 bp, Homo sapien
cggttcctgcggctcggtacggaag

SEQ ID NO: 6027619 - DNA, 25 bp, Homo sapien
ccgtccagtcgtaggcgttgcgtgc

SEQ ID NO: 6027620 - DNA, 25 bp, Homo sapien
aacccacgtcatgccagttcccgtg

SEQ ID NO: 6027621 - DNA, 25 bp, Homo sapien
agcccagtcccgtccgctggtggcg

SEQ ID NO: 6027622 - DNA, 25 bp, Homo sapien
ggacgaggtcgtccgtccactcctg

SEQ ID NO: 6027623 - DNA, 25 bp, Homo sapien
cccgcagcatgccgcggggggcata

SEQ ID NO: 6027624 - DNA, 25 bp, Homo sapien
cagaccgccggcatgtccgcctcgg

SEQ ID NO: 6027625 - DNA, 25 bp, Homo sapien
catgcgcacgctcgggtcgttgggc

SEQ ID NO: 6027626 - DNA, 25 bp, Homo sapien
gggacttcagcaggtgggtgtagag

SEQ ID NO: 6027627 - DNA, 25 bp, Homo sapien
actcggccgtccagtcgtaggcgtt

SEQ ID NO: 6027628 - DNA, 25 bp, Homo sapien
ctggtggcggggggagacgtacacg

SEQ ID NO: 6027629 - DNA, 25 bp, Homo sapien
ttgaagccctgtgcctccagggact

SEQ ID NO: 6027630 - DNA, 25 bp, Homo sapien
agccagggatagcgctcccgcagac

SEQ ID NO: 6027631 - DNA, 25 bp, Homo sapien
gccagttcccgtgcttgaagccggc

SEQ ID NO: 6027632 - DNA, 25 bp, Homo sapien
atatccgagcgcctcgtgcatgcgc

SEQ ID NO: 6027633 - DNA, 25 bp, Homo sapien
cgctcccgcagacggacgaggtcgt

SEQ ID NO: 6027634 - DNA, 25 bp, Homo sapien
gcatgccgcggggggcatatccgag

SEQ ID NO: 6027635 - DNA, 25 bp, Homo sapien
aggtcgtccgtccactcctgcggtt

SEQ ID NO: 6027636 - DNA, 25 bp, Homo sapien
tgtcggccgggcgtcgttctgggct

SEQ ID NO: 6027637 - DNA, 25 bp, Homo sapien
ggtgggtgtagagcgtggagcccag

SEQ ID NO: 6027638 - DNA, 25 bp, Homo sapien
cgcggggggcatatccgagcgcctc

SEQ ID NO: 6027639 - DNA, 25 bp, Homo sapien
ggcgacctcgccgtccacctcggcg

SEQ ID NO: 6027640 - DNA, 25 bp, Homo sapien
ttctgggctcatggtagatccccgg

SEQ ID NO: 6027641 - DNA, 25 bp, Homo sapien
atgtccgcctcggtggcacggcgga

SEQ ID NO: 6027642 - DNA, 25 bp, Homo sapien
tccgctggtggcggggggagacgta

SEQ ID NO: 6027643 - DNA, 25 bp, Homo sapien
cgtcatgccagttcccgtgcttgaa

SEQ ID NO: 6027644 - DNA, 25 bp, Homo sapien
caggggcccgcgtaggcgatgccgg

SEQ ID NO: 6027645 - DNA, 25 bp, Homo sapien
tcgatgtagtggttgacgatggtgc

SEQ ID NO: 6027646 - DNA, 25 bp, Homo sapien
gcagacggacgaggtcgtccgtcca

SEQ ID NO: 6027647 - DNA, 25 bp, Homo sapien
cgggtcgttgggcagcccgatgaca

SEQ ID NO: 6027648 - DNA, 25 bp, Homo sapien
gagcgcctcgtgcatgcgcacgctc

SEQ ID NO: 6027649 - DNA, 25 bp, Homo sapien
tgagaatataaaaggaagacaaaac

SEQ ID NO: 6027650 - DNA, 25 bp, Homo sapien
caagactctgtttagagagtactct

SEQ ID NO: 6027651 - DNA, 25 bp, Homo sapien
gccatatatgaattaaaatctgtaa

SEQ ID NO: 6027652 - DNA, 25 bp, Homo sapien
ttattatattggaagagaatggtga

SEQ ID NO: 6027653 - DNA, 25 bp, Homo sapien
aatcatataataatagaatactaag

SEQ ID NO: 6027654 - DNA, 25 bp, Homo sapien
atataattaagggaaccattgaatg

SEQ ID NO: 6027655 - DNA, 25 bp, Homo sapien
catgtcaaatctaaagttttcttta

SEQ ID NO: 6027656 - DNA, 25 bp, Homo sapien
aagagaatggtgaaaattttgtcac

SEQ ID NO: 6027657 - DNA, 25 bp, Homo sapien
gaagattagtatgcaaaagaacaaa

SEQ ID NO: 6027658 - DNA, 25 bp, Homo sapien
tgccccacgcagctcaagtttctat

SEQ ID NO: 6027659 - DNA, 25 bp, Homo sapien
gtactctattttgtaggtgaagatt

SEQ ID NO: 6027660 - DNA, 25 bp, Homo sapien
gaaaaattagtagaagtatagaaca

SEQ ID NO: 6027661 - DNA, 25 bp, Homo sapien
tagagagtactctattttgtaggtg

SEQ ID NO: 6027662 - DNA, 25 bp, Homo sapien
ggaaccattgaatgtcaaagatgtt

SEQ ID NO: 6027663 - DNA, 25 bp, Homo sapien
tagtatgcaaaagaacaaaagaaaa

SEQ ID NO: 6027664 - DNA, 25 bp, Homo sapien
gtaggtgaagattagtatgcaaaag

SEQ ID NO: 6027665 - DNA, 25 bp, Homo sapien
caatgagacagaaaaaattaagcat

SEQ ID NO: 6027666 - DNA, 25 bp, Homo sapien
atggtgaaaattttgtcacatgtca

SEQ ID NO: 6027667 - DNA, 25 bp, Homo sapien
tgataagaaagacatcaactaattt

SEQ ID NO: 6027668 - DNA, 25 bp, Homo sapien
agatgttattttctagaactatgtc

SEQ ID NO: 6027669 - DNA, 25 bp, Homo sapien
tatagttgagaatataaaaggaaga

SEQ ID NO: 6027670 - DNA, 25 bp, Homo sapien
tgagaaaatcatataataatagaat

SEQ ID NO: 6027671 - DNA, 25 bp, Homo sapien
ggaagatagctccattctttattat

SEQ ID NO: 6027672 - DNA, 25 bp, Homo sapien
tattggaagagaatggtgaaaattt

SEQ ID NO: 6027673 - DNA, 25 bp, Homo sapien
cttgattttaatgaattaaattgag

SEQ ID NO: 6027674 - DNA, 25 bp, Homo sapien
tgattaggaagatagctccattctt

SEQ ID NO: 6027675 - DNA, 25 bp, Homo sapien
tagctccattctttattatattgga

SEQ ID NO: 6027676 - DNA, 25 bp, Homo sapien
aaaattttgtcacatgtcaaatcta

SEQ ID NO: 6027677 - DNA, 25 bp, Homo sapien
tctgtttagagagtactctattttg

SEQ ID NO: 6027678 - DNA, 25 bp, Homo sapien
aacattaatgtggtattgatttttc

SEQ ID NO: 6027679 - DNA, 25 bp, Homo sapien
tgattttactagaaaagagagggaa

SEQ ID NO: 6027680 - DNA, 25 bp, Homo sapien
tgtcaaagatgttattttctagaac

SEQ ID NO: 6027681 - DNA, 25 bp, Homo sapien
gaaagacatcaactaatttcaaaaa

SEQ ID NO: 6027682 - DNA, 25 bp, Homo sapien
gacagaaaaaattaagcatgcccca

SEQ ID NO: 6027683 - DNA, 25 bp, Homo sapien
cttacgtggatatgattaggaagat

SEQ ID NO: 6027684 - DNA, 25 bp, Homo sapien
agagggaagaaaattaacaggattg

SEQ ID NO: 6027685 - DNA, 25 bp, Homo sapien
ttaaaatctgtaaacattaatgtgg

SEQ ID NO: 6027686 - DNA, 25 bp, Homo sapien
atagaatactaagccatatatgaat

SEQ ID NO: 6027687 - DNA, 25 bp, Homo sapien
attgaatgtcaaagatgttattttc

SEQ ID NO: 6027688 - DNA, 25 bp, Homo sapien
agaagtatagaacaaatgtgataag

SEQ ID NO: 6027689 - DNA, 25 bp, Homo sapien
tgaattaaattgagaaaatcatata

SEQ ID NO: 6027690 - DNA, 25 bp, Homo sapien
caagtttctatctcaatcttacgtg

SEQ ID NO: 6027691 - DNA, 25 bp, Homo sapien
ctcatttaaactttatagttgagaa

SEQ ID NO: 6027692 - DNA, 25 bp, Homo sapien
tttttcttcaaattctagctcaata

SEQ ID NO: 6027693 - DNA, 25 bp, Homo sapien
ctcaatatataattaagggaaccat

SEQ ID NO: 6027694 - DNA, 25 bp, Homo sapien
tatgaattaaaatctgtaaacatta

SEQ ID NO: 6027695 - DNA, 25 bp, Homo sapien
cattctttattatattggaagagaa

SEQ ID NO: 6027696 - DNA, 25 bp, Homo sapien
tattttgtaggtgaagattagtatg

SEQ ID NO: 6027697 - DNA, 25 bp, Homo sapien
attaagggaaccattgaatgtcaaa

SEQ ID NO: 6027698 - DNA, 25 bp, Homo sapien
gcagctcaagtttctatctcaatct

SEQ ID NO: 6027699 - DNA, 25 bp, Homo sapien
ttagtagaagtatagaacaaatgtg

SEQ ID NO: 6027700 - DNA, 25 bp, Homo sapien
ttcaaattctagctcaatatataat

SEQ ID NO: 6027701 - DNA, 25 bp, Homo sapien
atagaacaaatgtgataagaaagac

SEQ ID NO: 6027702 - DNA, 25 bp, Homo sapien
taagcatgccccacgcagctcaagt

SEQ ID NO: 6027703 - DNA, 25 bp, Homo sapien
agacaaaactttccaagactctgtt

SEQ ID NO: 6027704 - DNA, 25 bp, Homo sapien
tattgatttttcttcaaattctagc

SEQ ID NO: 6027705 - DNA, 25 bp, Homo sapien
tggatatgattaggaagatagctcc

SEQ ID NO: 6027706 - DNA, 25 bp, Homo sapien
aatgtggtattgatttttcttcaaa

SEQ ID NO: 6027707 - DNA, 25 bp, Homo sapien
cttaaatgattttactagaaaagag

SEQ ID NO: 6027708 - DNA, 25 bp, Homo sapien
ttgtcacatgtcaaatctaaagttt

SEQ ID NO: 6027709 - DNA, 25 bp, Homo sapien
tctatctcaatcttacgtggatatg

SEQ ID NO: 6027710 - DNA, 25 bp, Homo sapien
ctcaatcttacgtggatatgattag

SEQ ID NO: 6027711 - DNA, 25 bp, Homo sapien
taaattgagaaaatcatataataat

SEQ ID NO: 6027712 - DNA, 25 bp, Homo sapien
tataataatagaatactaagccata

SEQ ID NO: 6027713 - DNA, 25 bp, Homo sapien
tctgtaaacattaatgtggtattga

SEQ ID NO: 6027714 - DNA, 25 bp, Homo sapien
ctagaactatgtctcatttaaactt

SEQ ID NO: 6027715 - DNA, 25 bp, Homo sapien
taaactttatagttgagaatataaa

SEQ ID NO: 6027716 - DNA, 25 bp, Homo sapien
gattacttgattttaatgaattaaa

SEQ ID NO: 6027717 - DNA, 25 bp, Homo sapien
tttaatgaattaaattgagaaaatc

SEQ ID NO: 6027718 - DNA, 25 bp, Homo sapien
ttctagctcaatatataattaaggg

SEQ ID NO: 6027719 - DNA, 25 bp, Homo sapien
tactaagccatatatgaattaaaat

SEQ ID NO: 6027720 - DNA, 25 bp, Homo sapien
tatttgaaattctgattacttgatt

SEQ ID NO: 6027721 - DNA, 25 bp, Homo sapien
tattttctagaactatgtctcattt

SEQ ID NO: 6027722 - DNA, 25 bp, Homo sapien
aattctgattacttgattttaatga

SEQ ID NO: 6027723 - DNA, 25 bp, Homo sapien
ctatgtctcatttaaactttatagt

SEQ ID NO: 6027724 - DNA, 25 bp, Homo sapien
actttccaagactctgtttagagag

SEQ ID NO: 6027725 - DNA, 25 bp, Homo sapien
aaaaattaagcatgccccacgcagc

SEQ ID NO: 6027726 - DNA, 25 bp, Homo sapien
caaatgtgataagaaagacatcaac

SEQ ID NO: 6027727 - DNA, 25 bp, Homo sapien
gcccagaaggcctgttaacaaagaa

SEQ ID NO: 6027728 - DNA, 25 bp, Homo sapien
ctagaagccagcatgattgaaaaca

SEQ ID NO: 6027729 - DNA, 25 bp, Homo sapien
ttggtatatgtaattacatggatac

SEQ ID NO: 6027730 - DNA, 25 bp, Homo sapien
atatactatcttccctgcctgtatt

SEQ ID NO: 6027731 - DNA, 25 bp, Homo sapien
tggcaatctggaagatttttttttc

SEQ ID NO: 6027732 - DNA, 25 bp, Homo sapien
attacatggatactattaaaataga

SEQ ID NO: 6027733 - DNA, 25 bp, Homo sapien
aacccctagattttgacttgcacta

SEQ ID NO: 6027734 - DNA, 25 bp, Homo sapien
taaatggttctttgccagtttaagc

SEQ ID NO: 6027735 - DNA, 25 bp, Homo sapien
tagattttgacttgcactacaaatt

SEQ ID NO: 6027736 - DNA, 25 bp, Homo sapien
ctttgtcttggtatatgtaattaca

SEQ ID NO: 6027737 - DNA, 25 bp, Homo sapien
caatacaggtttttcctttgtcttg

SEQ ID NO: 6027738 - DNA, 25 bp, Homo sapien
tgtattgtccatttaatgacatgag

SEQ ID NO: 6027739 - DNA, 25 bp, Homo sapien
tggatactattaaaatagacgggtc

SEQ ID NO: 6027740 - DNA, 25 bp, Homo sapien
tgaccgtgaagtggctgttgatcta

SEQ ID NO: 6027741 - DNA, 25 bp, Homo sapien
aatcagtggcaatctggaagatttt

SEQ ID NO: 6027742 - DNA, 25 bp, Homo sapien
cagatctgtttttccaaactattaa

SEQ ID NO: 6027743 - DNA, 25 bp, Homo sapien
gtttaagcaagccggtgaaatgttg

SEQ ID NO: 6027744 - DNA, 25 bp, Homo sapien
ttttttatatactatcttccctgcc

SEQ ID NO: 6027745 - DNA, 25 bp, Homo sapien
taattgtaaatggttctttgccagt

SEQ ID NO: 6027746 - DNA, 25 bp, Homo sapien
tgaagtggctgttgatctacaatac

SEQ ID NO: 6027747 - DNA, 25 bp, Homo sapien
cctttagctggccagtacctttgaa

SEQ ID NO: 6027748 - DNA, 25 bp, Homo sapien
tttttcctttgtcttggtatatgta

SEQ ID NO: 6027749 - DNA, 25 bp, Homo sapien
acttggaatcagtggcaatctggaa

SEQ ID NO: 6027750 - DNA, 25 bp, Homo sapien
aaatagacgggtctagaagccagca

SEQ ID NO: 6027751 - DNA, 25 bp, Homo sapien
catatgcccagaaggcctgttaaca

SEQ ID NO: 6027752 - DNA, 25 bp, Homo sapien
ctattaaaatagacgggtctagaag

SEQ ID NO: 6027753 - DNA, 25 bp, Homo sapien
acttttttttttaatgatcattcag

SEQ ID NO: 6027754 - DNA, 25 bp, Homo sapien
gtatatttgtttcctttagctggcc

SEQ ID NO: 6027755 - DNA, 25 bp, Homo sapien
tccctgcctgtattttatgtattgt

SEQ ID NO: 6027756 - DNA, 25 bp, Homo sapien
gatttagattgaacttaaatttgga

SEQ ID NO: 6027757 - DNA, 25 bp, Homo sapien
tgcactacaaattcaatttttttta

SEQ ID NO: 6027758 - DNA, 25 bp, Homo sapien
atgattgaaaacacactgcagatct

SEQ ID NO: 6027759 - DNA, 25 bp, Homo sapien
gctggccagtacctttgaataaaac

SEQ ID NO: 6027760 - DNA, 25 bp, Homo sapien
ggctgttgatctacaatacaggttt

SEQ ID NO: 6027761 - DNA, 25 bp, Homo sapien
gacctgttttgatatgtattgtcag

SEQ ID NO: 6027762 - DNA, 25 bp, Homo sapien
cagattgtatatttgtttcctttag

SEQ ID NO: 6027763 - DNA, 25 bp, Homo sapien
tccaaactattaaatcgaaacagta

SEQ ID NO: 6027764 - DNA, 25 bp, Homo sapien
taatgatcattcagattgtatattt

SEQ ID NO: 6027765 - DNA, 25 bp, Homo sapien
catttttaatattctgtaataatgg

SEQ ID NO: 6027766 - DNA, 25 bp, Homo sapien
ttttatgtattgtccatttaatgac

SEQ ID NO: 6027767 - DNA, 25 bp, Homo sapien
tcgaaacagtaactactttacatgt

SEQ ID NO: 6027768 - DNA, 25 bp, Homo sapien
gacttttgaccgtgaagtggctgtt

SEQ ID NO: 6027769 - DNA, 25 bp, Homo sapien
ggttctttgccagtttaagcaagcc

SEQ ID NO: 6027770 - DNA, 25 bp, Homo sapien
gctacctgggtccattcctccccca

SEQ ID NO: 6027771 - DNA, 25 bp, Homo sapien
cagtaactactttacatgtaatgtg

SEQ ID NO: 6027772 - DNA, 25 bp, Homo sapien
gtagatcttaccacatttttaatat

SEQ ID NO: 6027773 - DNA, 25 bp, Homo sapien
ttgtttcctttagctggccagtacc

SEQ ID NO: 6027774 - DNA, 25 bp, Homo sapien
acgggtctagaagccagcatgattg

SEQ ID NO: 6027775 - DNA, 25 bp, Homo sapien
tcattcagattgtatatttgtttcc

SEQ ID NO: 6027776 - DNA, 25 bp, Homo sapien
ggttatgatttagattgaacttaaa

SEQ ID NO: 6027777 - DNA, 25 bp, Homo sapien
aagaaaacttggaatcagtggcaat

SEQ ID NO: 6027778 - DNA, 25 bp, Homo sapien
gtccatttaatgacatgagctacct

SEQ ID NO: 6027779 - DNA, 25 bp, Homo sapien
acatgagctacctgggtccattcct

SEQ ID NO: 6027780 - DNA, 25 bp, Homo sapien
gaaaacacactgcagatctgttttt

SEQ ID NO: 6027781 - DNA, 25 bp, Homo sapien
taacaaagaaaacttggaatcagtg

SEQ ID NO: 6027782 - DNA, 25 bp, Homo sapien
ttaatgacatgagctacctgggtcc

SEQ ID NO: 6027783 - DNA, 25 bp, Homo sapien
ttttttaatgatcattcagattgta

SEQ ID NO: 6027784 - DNA, 25 bp, Homo sapien
ttctgtaataatggttatgatttag

SEQ ID NO: 6027785 - DNA, 25 bp, Homo sapien
cttaccacatttttaatattctgta

SEQ ID NO: 6027786 - DNA, 25 bp, Homo sapien
ttgtcagacttttgaccgtgaagtg

SEQ ID NO: 6027787 - DNA, 25 bp, Homo sapien
ttttgatatgtattgtcagactttt

SEQ ID NO: 6027788 - DNA, 25 bp, Homo sapien
cggtgaaatgttgacctgttttgat

SEQ ID NO: 6027789 - DNA, 25 bp, Homo sapien
ctattaaatcgaaacagtaactact

SEQ ID NO: 6027790 - DNA, 25 bp, Homo sapien
ttgacttgcactacaaattcaattt

SEQ ID NO: 6027791 - DNA, 25 bp, Homo sapien
taatattctgtaataatggttatga

SEQ ID NO: 6027792 - DNA, 25 bp, Homo sapien
tatgtattgtcagacttttgaccgt

SEQ ID NO: 6027793 - DNA, 25 bp, Homo sapien
gcaagccggtgaaatgttgacctgt

SEQ ID NO: 6027794 - DNA, 25 bp, Homo sapien
gccagcatgattgaaaacacactgc

SEQ ID NO: 6027795 - DNA, 25 bp, Homo sapien
tgatctacaatacaggtttttcctt

SEQ ID NO: 6027796 - DNA, 25 bp, Homo sapien
acactgcagatctgtttttccaaac

SEQ ID NO: 6027797 - DNA, 25 bp, Homo sapien
cctgtattttatgtattgtccattt

SEQ ID NO: 6027798 - DNA, 25 bp, Homo sapien
aataatggttatgatttagattgaa

SEQ ID NO: 6027799 - DNA, 25 bp, Homo sapien
aatgttgacctgttttgatatgtat

SEQ ID NO: 6027800 - DNA, 25 bp, Homo sapien
ctactttacatgtaatgtgtagatc

SEQ ID NO: 6027801 - DNA, 25 bp, Homo sapien
tatcttccctgcctgtattttatgt

SEQ ID NO: 6027802 - DNA, 25 bp, Homo sapien
tacatgtaatgtgtagatcttacca

SEQ ID NO: 6027803 - DNA, 25 bp, Homo sapien
ttgccagtttaagcaagccggtgaa

SEQ ID NO: 6027804 - DNA, 25 bp, Homo sapien
tatgtaattacatggatactattaa

SEQ ID NO: 6027805 - DNA, 25 bp, Homo sapien
taatgtgtagatcttaccacatttt

SEQ ID NO: 6027806 - DNA, 25 bp, Homo sapien
cagaaccatccatcccagaagcccc

SEQ ID NO: 6027807 - DNA, 25 bp, Homo sapien
ttgaatttgtagtgcaagtcaaaat

SEQ ID NO: 6027808 - DNA, 25 bp, Homo sapien
atcttttggaaaatagaaggaactg

SEQ ID NO: 6027809 - DNA, 25 bp, Homo sapien
gaggaatggacccaggtagctcatg

SEQ ID NO: 6027810 - DNA, 25 bp, Homo sapien
tctgagttgagattcttaaacccta

SEQ ID NO: 6027811 - DNA, 25 bp, Homo sapien
aaaggtgcttcctttgaactgtctg

SEQ ID NO: 6027812 - DNA, 25 bp, Homo sapien
agaaaaaggtgcttcctttgaactg

SEQ ID NO: 6027813 - DNA, 25 bp, Homo sapien
caccgctcacccgccacatgactca

SEQ ID NO: 6027814 - DNA, 25 bp, Homo sapien
ctggccagctaaaggaaacaaatat

SEQ ID NO: 6027815 - DNA, 25 bp, Homo sapien
tgtcattaaatggacaatacataaa

SEQ ID NO: 6027816 - DNA, 25 bp, Homo sapien
tgcaagtcaaaatctaggggtttta

SEQ ID NO: 6027817 - DNA, 25 bp, Homo sapien
aggaaacaaatatacaatctgaatg

SEQ ID NO: 6027818 - DNA, 25 bp, Homo sapien
catccatcccagaagccccaccgct

SEQ ID NO: 6027819 - DNA, 25 bp, Homo sapien
gttttattcaaaggtactggccagc

SEQ ID NO: 6027820 - DNA, 25 bp, Homo sapien
aattatgaataaaatgacgagtgct

SEQ ID NO: 6027821 - DNA, 25 bp, Homo sapien
tcacccgccacatgactcacactga

SEQ ID NO: 6027822 - DNA, 25 bp, Homo sapien
tgacgcagaaaaggctgaaacactg

SEQ ID NO: 6027823 - DNA, 25 bp, Homo sapien
attcaaaggtactggccagctaaag

SEQ ID NO: 6027824 - DNA, 25 bp, Homo sapien
tttgaactgtctgcttttgaacggc

SEQ ID NO: 6027825 - DNA, 25 bp, Homo sapien
ggctgaaacactgtggagctcaaac

SEQ ID NO: 6027826 - DNA, 25 bp, Homo sapien
tttgtgcgaacttctgtgttcacac

SEQ ID NO: 6027827 - DNA, 25 bp, Homo sapien
catgactcacactgacgcagaaaag

SEQ ID NO: 6027828 - DNA, 25 bp, Homo sapien
taaatggacaatacataaaatacag

SEQ ID NO: 6027829 - DNA, 25 bp, Homo sapien
agaaacttttcctagcccagtcact

SEQ ID NO: 6027830 - DNA, 25 bp, Homo sapien
ctgtctgcttttgaacggcaaagag

SEQ ID NO: 6027831 - DNA, 25 bp, Homo sapien
aggtactggccagctaaaggaaaca

SEQ ID NO: 6027832 - DNA, 25 bp, Homo sapien
ttgagattcttaaaccctagctaag

SEQ ID NO: 6027833 - DNA, 25 bp, Homo sapien
taaaaaaaattgaatttgtagtgca

SEQ ID NO: 6027834 - DNA, 25 bp, Homo sapien
cataaatataggagttaaagaaact

SEQ ID NO: 6027835 - DNA, 25 bp, Homo sapien
gaagatagtatataaaaaaaattga

SEQ ID NO: 6027836 - DNA, 25 bp, Homo sapien
atggacccaggtagctcatgtcatt

SEQ ID NO: 6027837 - DNA, 25 bp, Homo sapien
ggatgaaattatgaataaaatgacg

SEQ ID NO: 6027838 - DNA, 25 bp, Homo sapien
aaaaattgaatttgtagtgcaagtc

SEQ ID NO: 6027839 - DNA, 25 bp, Homo sapien
ttgtagtgcaagtcaaaatctaggg

SEQ ID NO: 6027840 - DNA, 25 bp, Homo sapien
tcccagaagccccaccgctcacccg

SEQ ID NO: 6027841 - DNA, 25 bp, Homo sapien
tgggggaggaatggacccaggtagc

SEQ ID NO: 6027842 - DNA, 25 bp, Homo sapien
agctcatgtcattaaatggacaata

SEQ ID NO: 6027843 - DNA, 25 bp, Homo sapien
gtggagctcaaacctagctttttgg

SEQ ID NO: 6027844 - DNA, 25 bp, Homo sapien
tgaacggcaaagagagtccataaat

SEQ ID NO: 6027845 - DNA, 25 bp, Homo sapien
gccacatgactcacactgacgcaga

SEQ ID NO: 6027846 - DNA, 25 bp, Homo sapien
aacactgtggagctcaaacctagct

SEQ ID NO: 6027847 - DNA, 25 bp, Homo sapien
gcttcctttgaactgtctgcttttg

SEQ ID NO: 6027848 - DNA, 25 bp, Homo sapien
taagactctgagttgagattcttaa

SEQ ID NO: 6027849 - DNA, 25 bp, Homo sapien
ttcacacagaaccatccatcccaga

SEQ ID NO: 6027850 - DNA, 25 bp, Homo sapien
actgtgtgtcttttaatacacccca

SEQ ID NO: 6027851 - DNA, 25 bp, Homo sapien
tcacactgacgcagaaaaggctgaa

SEQ ID NO: 6027852 - DNA, 25 bp, Homo sapien
aaccctagctaagcctacatttgtg

SEQ ID NO: 6027853 - DNA, 25 bp, Homo sapien
ctttgaaaaactcaaccaaactgtg

SEQ ID NO: 6027854 - DNA, 25 bp, Homo sapien
acataaaatacaggcagggaagata

SEQ ID NO: 6027855 - DNA, 25 bp, Homo sapien
tcagggaaataatggatgaaattat

SEQ ID NO: 6027856 - DNA, 25 bp, Homo sapien
agctaagcctacatttgtgcgaact

SEQ ID NO: 6027857 - DNA, 25 bp, Homo sapien
gcaaagagagtccataaatatagga

SEQ ID NO: 6027858 - DNA, 25 bp, Homo sapien
agtcactaagactctgagttgagat

SEQ ID NO: 6027859 - DNA, 25 bp, Homo sapien
aagccccaccgctcacccgccacat

SEQ ID NO: 6027860 - DNA, 25 bp, Homo sapien
aatgacgagtgctggcctggacttt

SEQ ID NO: 6027861 - DNA, 25 bp, Homo sapien
agagtccataaatataggagttaaa

SEQ ID NO: 6027862 - DNA, 25 bp, Homo sapien
ggcagggaagatagtatataaaaaa

SEQ ID NO: 6027863 - DNA, 25 bp, Homo sapien
aaaactcaaccaaactgtgtgtctt

SEQ ID NO: 6027864 - DNA, 25 bp, Homo sapien
caaccaaactgtgtgtcttttaata

SEQ ID NO: 6027865 - DNA, 25 bp, Homo sapien
gcctacatttgtgcgaacttctgtg

SEQ ID NO: 6027866 - DNA, 25 bp, Homo sapien
agaaaaggctgaaacactgtggagc

SEQ ID NO: 6027867 - DNA, 25 bp, Homo sapien
gagtgctggcctggactttttcccc

SEQ ID NO: 6027868 - DNA, 25 bp, Homo sapien
ctcaaacctagctttttgggctttg

SEQ ID NO: 6027869 - DNA, 25 bp, Homo sapien
cgaacttctgtgttcacacagaacc

SEQ ID NO: 6027870 - DNA, 25 bp, Homo sapien
tagcccagtcactaagactctgagt

SEQ ID NO: 6027871 - DNA, 25 bp, Homo sapien
agctaaaggaaacaaatatacaatc

SEQ ID NO: 6027872 - DNA, 25 bp, Homo sapien
aatacaggcagggaagatagtatat

SEQ ID NO: 6027873 - DNA, 25 bp, Homo sapien
ccaggtagctcatgtcattaaatgg

SEQ ID NO: 6027874 - DNA, 25 bp, Homo sapien
gtgtcttttaatacaccccatgagc

SEQ ID NO: 6027875 - DNA, 25 bp, Homo sapien
tacaccccatgagcaccaaaaaaac

SEQ ID NO: 6027876 - DNA, 25 bp, Homo sapien
catgagcaccaaaaaaaccaattaa

SEQ ID NO: 6027877 - DNA, 25 bp, Homo sapien
gaataaaatgacgagtgctggcctg

SEQ ID NO: 6027878 - DNA, 25 bp, Homo sapien
gacaatacataaaatacaggcaggg

SEQ ID NO: 6027879 - DNA, 25 bp, Homo sapien
gcttttgaacggcaaagagagtcca

SEQ ID NO: 6027880 - DNA, 25 bp, Homo sapien
gaaataatggatgaaattatgaata

SEQ ID NO: 6027881 - DNA, 25 bp, Homo sapien
tttaatacaccccatgagcaccaaa

SEQ ID NO: 6027882 - DNA, 25 bp, Homo sapien
ttcttaaaccctagctaagcctaca

SEQ ID NO: 6027883 - DNA, 25 bp, Homo sapien
ttttcctagcccagtcactaagact

SEQ ID NO: 6027884 - DNA, 25 bp, Homo sapien
tctgtgttcacacagaaccatccat

SEQ ID NO: 6027885 - DNA, 25 bp, Homo sapien
tatatatacaaagaggatgttttga

SEQ ID NO: 6027886 - DNA, 25 bp, Homo sapien
aggtgggatggccaaggagaccgtt

SEQ ID NO: 6027887 - DNA, 25 bp, Homo sapien
aaactagctgctgctttgaagaata

SEQ ID NO: 6027888 - DNA, 25 bp, Homo sapien
tatctctgtttgcagatagtcaagg

SEQ ID NO: 6027889 - DNA, 25 bp, Homo sapien
aagaatagttatatggttgctactt

SEQ ID NO: 6027890 - DNA, 25 bp, Homo sapien
atggcacgtgcgacgtcggatcatg

SEQ ID NO: 6027891 - DNA, 25 bp, Homo sapien
tttgcttgccaatataaatgctttg

SEQ ID NO: 6027892 - DNA, 25 bp, Homo sapien
tctgtaatgaagtcatcatcagatt

SEQ ID NO: 6027893 - DNA, 25 bp, Homo sapien
atggttgctactttgcattctgtaa

SEQ ID NO: 6027894 - DNA, 25 bp, Homo sapien
tttggagaagttatttgacacagaa

SEQ ID NO: 6027895 - DNA, 25 bp, Homo sapien
tgttgatcctgaatatcaggttaat

SEQ ID NO: 6027896 - DNA, 25 bp, Homo sapien
caaagagatattggtaacatatctc

SEQ ID NO: 6027897 - DNA, 25 bp, Homo sapien
agggctcttcttcaaagagatattg

SEQ ID NO: 6027898 - DNA, 25 bp, Homo sapien
tcatcatcagattcagattcatcag

SEQ ID NO: 6027899 - DNA, 25 bp, Homo sapien
tcctgaatatcaggttaatcaaaac

SEQ ID NO: 6027900 - DNA, 25 bp, Homo sapien
tgatgttaattggtgtttgtgtttg

SEQ ID NO: 6027901 - DNA, 25 bp, Homo sapien
ataactaagtataacacttttcttg

SEQ ID NO: 6027902 - DNA, 25 bp, Homo sapien
tataaatgctttgtgtttgatgtta

SEQ ID NO: 6027903 - DNA, 25 bp, Homo sapien
gtaacatatctctgtttgcagatag

SEQ ID NO: 6027904 - DNA, 25 bp, Homo sapien
gactcactataagcaatgtgtatat

SEQ ID NO: 6027905 - DNA, 25 bp, Homo sapien
tgccaatataaatgctttgtgtttg

SEQ ID NO: 6027906 - DNA, 25 bp, Homo sapien
gtaaaacatcgaatcactgtttaat

SEQ ID NO: 6027907 - DNA, 25 bp, Homo sapien
aacacttttcttgactcactataag

SEQ ID NO: 6027908 - DNA, 25 bp, Homo sapien
agctcttgttgaaaaacttgtaagg

SEQ ID NO: 6027909 - DNA, 25 bp, Homo sapien
tgttcttgttgatcctgaatatcag

SEQ ID NO: 6027910 - DNA, 25 bp, Homo sapien
gacgtcggatcatgcctttaatgct

SEQ ID NO: 6027911 - DNA, 25 bp, Homo sapien
tgtttgttttcacgtttcagggtca

SEQ ID NO: 6027912 - DNA, 25 bp, Homo sapien
atgaacatcttagcggattttggag

SEQ ID NO: 6027913 - DNA, 25 bp, Homo sapien
atgggaaaatataggtgggatggcc

SEQ ID NO: 6027914 - DNA, 25 bp, Homo sapien
tgcctttaatgctacaatttgggat

SEQ ID NO: 6027915 - DNA, 25 bp, Homo sapien
cacgtttcagggtcaagggctaggt

SEQ ID NO: 6027916 - DNA, 25 bp, Homo sapien
cttcttcaaagagatattggtaaca

SEQ ID NO: 6027917 - DNA, 25 bp, Homo sapien
tgtttgcagatagtcaaggtaaaac

SEQ ID NO: 6027918 - DNA, 25 bp, Homo sapien
tcagattcatcaggtgcttataact

SEQ ID NO: 6027919 - DNA, 25 bp, Homo sapien
gtgtatatatatacaaagaggatgt

SEQ ID NO: 6027920 - DNA, 25 bp, Homo sapien
agttatatggttgctactttgcatt

SEQ ID NO: 6027921 - DNA, 25 bp, Homo sapien
tttcttgactcactataagcaatgt

SEQ ID NO: 6027922 - DNA, 25 bp, Homo sapien
taatgctacaatttgggatgttctt

SEQ ID NO: 6027923 - DNA, 25 bp, Homo sapien
catcgaatcactgtttaatctgcaa

SEQ ID NO: 6027924 - DNA, 25 bp, Homo sapien
tgtgtttgatgttaattggtgtttg

SEQ ID NO: 6027925 - DNA, 25 bp, Homo sapien
tagtttttgcttgccaatataaatg

SEQ ID NO: 6027926 - DNA, 25 bp, Homo sapien
cttgtaagggctcttcttcaaagag

SEQ ID NO: 6027927 - DNA, 25 bp, Homo sapien
atcttagcggattttggagaagtta

SEQ ID NO: 6027928 - DNA, 25 bp, Homo sapien
tgcatttagtttttgcttgccaata

SEQ ID NO: 6027929 - DNA, 25 bp, Homo sapien
gctactttgcattctgtaatgaagt

SEQ ID NO: 6027930 - DNA, 25 bp, Homo sapien
tcatcaggtgcttataactaagtat

SEQ ID NO: 6027931 - DNA, 25 bp, Homo sapien
gaggatgttttgatgaacatcttag

SEQ ID NO: 6027932 - DNA, 25 bp, Homo sapien
tatggtttttgcatttagtttttgc

SEQ ID NO: 6027933 - DNA, 25 bp, Homo sapien
gatggccaaggagaccgttagtgaa

SEQ ID NO: 6027934 - DNA, 25 bp, Homo sapien
tggttatcttatgggaaaatatagg

SEQ ID NO: 6027935 - DNA, 25 bp, Homo sapien
gagaagcagcaggagaagaagctta

SEQ ID NO: 6027936 - DNA, 25 bp, Homo sapien
tacaaagaggatgttttgatgaaca

SEQ ID NO: 6027937 - DNA, 25 bp, Homo sapien
gaagttatttgacacagaaggcggg

SEQ ID NO: 6027938 - DNA, 25 bp, Homo sapien
ttgcattctgtaatgaagtcatcat

SEQ ID NO: 6027939 - DNA, 25 bp, Homo sapien
tgtttgtgtttgttttcacgtttca

SEQ ID NO: 6027940 - DNA, 25 bp, Homo sapien
gtcaaggtaaaacatcgaatcactg

SEQ ID NO: 6027941 - DNA, 25 bp, Homo sapien
gctaggtaaagctcttgttgaaaaa

SEQ ID NO: 6027942 - DNA, 25 bp, Homo sapien
tcaaaacaaatgatatggtttttgc

SEQ ID NO: 6027943 - DNA, 25 bp, Homo sapien
aagtataacacttttcttgactcac

SEQ ID NO: 6027944 - DNA, 25 bp, Homo sapien
gctgctgctttgaagaatagttata

SEQ ID NO: 6027945 - DNA, 25 bp, Homo sapien
cagaaggcggggatggggagaagca

SEQ ID NO: 6027946 - DNA, 25 bp, Homo sapien
tcagattcagattcatcaggtgctt

SEQ ID NO: 6027947 - DNA, 25 bp, Homo sapien
ggcggggatggggagaagcagcagg

SEQ ID NO: 6027948 - DNA, 25 bp, Homo sapien
gcagcaggagaagaagcttattggt

SEQ ID NO: 6027949 - DNA, 25 bp, Homo sapien
ctataagcaatgtgtatatatatac

SEQ ID NO: 6027950 - DNA, 25 bp, Homo sapien
ggttaatcaaaacaaatgatatggt

SEQ ID NO: 6027951 - DNA, 25 bp, Homo sapien
atattggtaacatatctctgtttgc

SEQ ID NO: 6027952 - DNA, 25 bp, Homo sapien
ggtgcttataactaagtataacact

SEQ ID NO: 6027953 - DNA, 25 bp, Homo sapien
atgctttgtgtttgatgttaattgg

SEQ ID NO: 6027954 - DNA, 25 bp, Homo sapien
ggagaagaagcttattggtatggca

SEQ ID NO: 6027955 - DNA, 25 bp, Homo sapien
gttttgatgaacatcttagcggatt

SEQ ID NO: 6027956 - DNA, 25 bp, Homo sapien
atgaagtcatcatcagattcagatt

SEQ ID NO: 6027957 - DNA, 25 bp, Homo sapien
caaatgatatggtttttgcatttag

SEQ ID NO: 6027958 - DNA, 25 bp, Homo sapien
ttagtgaaactagctgctgctttga

SEQ ID NO: 6027959 - DNA, 25 bp, Homo sapien
gcggattttggagaagttatttgac

SEQ ID NO: 6027960 - DNA, 25 bp, Homo sapien
gatggggagaagcagcaggagaaga

SEQ ID NO: 6027961 - DNA, 25 bp, Homo sapien
aaatataggtgggatggccaaggag

SEQ ID NO: 6027962 - DNA, 25 bp, Homo sapien
ggatcatgcctttaatgctacaatt

SEQ ID NO: 6027963 - DNA, 25 bp, Homo sapien
tatcttatgggaaaatataggtggg

SEQ ID NO: 6027964 - DNA, 25 bp, Homo sapien
tcaagggctaggtaaagctcttgtt

SEQ ID NO: 6027965 - DNA, 25 bp, Homo sapien
agaccgttagtgaaactagctgctg

SEQ ID NO: 6027966 - DNA, 25 bp, Homo sapien
atatcaggttaatcaaaacaaatga

SEQ ID NO: 6027967 - DNA, 25 bp, Homo sapien
gaagcttattggtatggcacgtgcg

SEQ ID NO: 6027968 - DNA, 25 bp, Homo sapien
cagatagtcaaggtaaaacatcgaa

SEQ ID NO: 6027969 - DNA, 25 bp, Homo sapien
tacaatttgggatgttcttgttgat

SEQ ID NO: 6027970 - DNA, 25 bp, Homo sapien
gcaatgtgtatatatatacaaagag

SEQ ID NO: 6027971 - DNA, 25 bp, Homo sapien
tattggtatggcacgtgcgacgtcg

SEQ ID NO: 6027972 - DNA, 25 bp, Homo sapien
ttgggatgttcttgttgatcctgaa

SEQ ID NO: 6027973 - DNA, 25 bp, Homo sapien
cagggtcaagggctaggtaaagctc

SEQ ID NO: 6027974 - DNA, 25 bp, Homo sapien
cgtgcgacgtcggatcatgccttta

SEQ ID NO: 6027975 - DNA, 25 bp, Homo sapien
gtttttgcatttagtttttgcttgc

SEQ ID NO: 6027976 - DNA, 25 bp, Homo sapien
ccaaggagaccgttagtgaaactag

SEQ ID NO: 6027977 - DNA, 25 bp, Homo sapien
taattggtgtttgtgtttgttttca

SEQ ID NO: 6027978 - DNA, 25 bp, Homo sapien
gctttgaagaatagttatatggttg

SEQ ID NO: 6027979 - DNA, 25 bp, Homo sapien
actcttcaggcgtccctactgggtt

SEQ ID NO: 6027980 - DNA, 25 bp, Homo sapien
ctgggttgatttcgtagctgtaatc

SEQ ID NO: 6027981 - DNA, 25 bp, Homo sapien
cagcttagaatcattggtaggccac

SEQ ID NO: 6027982 - DNA, 25 bp, Homo sapien
tcaagacaaaatcacgccattgacc

SEQ ID NO: 6027983 - DNA, 25 bp, Homo sapien
ggtgatgtaagacaaacagtggtca

SEQ ID NO: 6027984 - DNA, 25 bp, Homo sapien
tgtgtaagccgatggattcagttgg

SEQ ID NO: 6027985 - DNA, 25 bp, Homo sapien
ttgtggcattcacgtatgagtcgta

SEQ ID NO: 6027986 - DNA, 25 bp, Homo sapien
tgcgctttcttctcgtgagtgttga

SEQ ID NO: 6027987 - DNA, 25 bp, Homo sapien
aatagcttcatagatgcgataattt

SEQ ID NO: 6027988 - DNA, 25 bp, Homo sapien
cacgccattgacctttattgaagtc

SEQ ID NO: 6027989 - DNA, 25 bp, Homo sapien
ataatttcttcttcagaaccgtttg

SEQ ID NO: 6027990 - DNA, 25 bp, Homo sapien
cgtagccttttgtttggtcagagtc

SEQ ID NO: 6027991 - DNA, 25 bp, Homo sapien
tggattcagttggattttcgggaac

SEQ ID NO: 6027992 - DNA, 25 bp, Homo sapien
ttgagtcatgatcgacggaggtgat

SEQ ID NO: 6027993 - DNA, 25 bp, Homo sapien
ttgctggataatcgcgatacactct

SEQ ID NO: 6027994 - DNA, 25 bp, Homo sapien
gttaatacccgtcgcatcgatatct

SEQ ID NO: 6027995 - DNA, 25 bp, Homo sapien
cattcacgtatgagtcgtaccaatg

SEQ ID NO: 6027996 - DNA, 25 bp, Homo sapien
tcattgtaaagatcaacgtgcgctt

SEQ ID NO: 6027997 - DNA, 25 bp, Homo sapien
tcgggaacttaatatgttcgttatc

SEQ ID NO: 6027998 - DNA, 25 bp, Homo sapien
agaatcattggtaggccacgctctg

SEQ ID NO: 6027999 - DNA, 25 bp, Homo sapien
aatattgttaatacccgtcgcatcg

SEQ ID NO: 6028000 - DNA, 25 bp, Homo sapien
agaagttgcggcaaatatctttggc

SEQ ID NO: 6028001 - DNA, 25 bp, Homo sapien
aaatctttgtggcattcacgtatga

SEQ ID NO: 6028002 - DNA, 25 bp, Homo sapien
acccgtcgcatcgatatcttgctgg

SEQ ID NO: 6028003 - DNA, 25 bp, Homo sapien
attggtaggccacgctctgcagccc

SEQ ID NO: 6028004 - DNA, 25 bp, Homo sapien
cgctctgcagcccattctgtcgttg

SEQ ID NO: 6028005 - DNA, 25 bp, Homo sapien
tcgtagctgtaatcaattcggcgat

SEQ ID NO: 6028006 - DNA, 25 bp, Homo sapien
cagagtcgtcaaaaatctttgtggc

SEQ ID NO: 6028007 - DNA, 25 bp, Homo sapien
gacataaacaggagcgccaccttgt

SEQ ID NO: 6028008 - DNA, 25 bp, Homo sapien
caattcggcgattggtgtctttgtg

SEQ ID NO: 6028009 - DNA, 25 bp, Homo sapien
cgtttgcttcaaaaccacaacaaat

SEQ ID NO: 6028010 - DNA, 25 bp, Homo sapien
ctttggctttatttgagtcatgatc

SEQ ID NO: 6028011 - DNA, 25 bp, Homo sapien
ttcatagatgcgataatttcttctt

SEQ ID NO: 6028012 - DNA, 25 bp, Homo sapien
gtggtcaatcttagtcacatcgtag

SEQ ID NO: 6028013 - DNA, 25 bp, Homo sapien
tcagtcgcaacttcattgtaaagat

SEQ ID NO: 6028014 - DNA, 25 bp, Homo sapien
ctttatttgagtcatgatcgacgga

SEQ ID NO: 6028015 - DNA, 25 bp, Homo sapien
tcaacgtgcgctttcttctcgtgag

SEQ ID NO: 6028016 - DNA, 25 bp, Homo sapien
ctgtaatcaattcggcgattggtgt

SEQ ID NO: 6028017 - DNA, 25 bp, Homo sapien
gatgcgataatttcttcttcagaac

SEQ ID NO: 6028018 - DNA, 25 bp, Homo sapien
ggcctttcaagacaaaatcacgcca

SEQ ID NO: 6028019 - DNA, 25 bp, Homo sapien
gcttcaaaaccacaacaaatattgt

SEQ ID NO: 6028020 - DNA, 25 bp, Homo sapien
gcgatacactcttcaggcgtcccta

SEQ ID NO: 6028021 - DNA, 25 bp, Homo sapien
tttggtcagagtcgtcaaaaatctt

SEQ ID NO: 6028022 - DNA, 25 bp, Homo sapien
gcaacttcattgtaaagatcaacgt

SEQ ID NO: 6028023 - DNA, 25 bp, Homo sapien
gatatcttgctggataatcgcgata

SEQ ID NO: 6028024 - DNA, 25 bp, Homo sapien
cccattctgtcgttgacgctgactc

SEQ ID NO: 6028025 - DNA, 25 bp, Homo sapien
atcagactggaatagcttcatagat

SEQ ID NO: 6028026 - DNA, 25 bp, Homo sapien
cgcgacgacataaacaggagcgcca

SEQ ID NO: 6028027 - DNA, 25 bp, Homo sapien
atgatccagcttagaatcattggta

SEQ ID NO: 6028028 - DNA, 25 bp, Homo sapien
aggccacgctctgcagcccattctg

SEQ ID NO: 6028029 - DNA, 25 bp, Homo sapien
cgcatcgatatcttgctggataatc

SEQ ID NO: 6028030 - DNA, 25 bp, Homo sapien
tgaagtcgtagccttttgtttggtc

SEQ ID NO: 6028031 - DNA, 25 bp, Homo sapien
aacaggagcgccaccttgtgtgtaa

SEQ ID NO: 6028032 - DNA, 25 bp, Homo sapien
tccctactgggttgatttcgtagct

SEQ ID NO: 6028033 - DNA, 25 bp, Homo sapien
cgtcaaaaatctttgtggcattcac

SEQ ID NO: 6028034 - DNA, 25 bp, Homo sapien
cttttgtttggtcagagtcgtcaaa

SEQ ID NO: 6028035 - DNA, 25 bp, Homo sapien
tgcggcaaatatctttggctttatt

SEQ ID NO: 6028036 - DNA, 25 bp, Homo sapien
caaacagtggtcaatcttagtcaca

SEQ ID NO: 6028037 - DNA, 25 bp, Homo sapien
tggtgtctttgtggcctttcaagac

SEQ ID NO: 6028038 - DNA, 25 bp, Homo sapien
gccatgttcagtcgcaacttcattg

SEQ ID NO: 6028039 - DNA, 25 bp, Homo sapien
aaatatctttggctttatttgagtc

SEQ ID NO: 6028040 - DNA, 25 bp, Homo sapien
aatcttagtcacatcgtagccatgt

SEQ ID NO: 6028041 - DNA, 25 bp, Homo sapien
caggcgtccctactgggttgatttc

SEQ ID NO: 6028042 - DNA, 25 bp, Homo sapien
ataatcgcgatacactcttcaggcg

SEQ ID NO: 6028043 - DNA, 25 bp, Homo sapien
gacggaggtgatgtaagacaaacag

SEQ ID NO: 6028044 - DNA, 25 bp, Homo sapien
tcttcttcagaaccgtttgcttcaa

SEQ ID NO: 6028045 - DNA, 25 bp, Homo sapien
ttgacgctgactccgcgacgacata

SEQ ID NO: 6028046 - DNA, 25 bp, Homo sapien
cagaaccgtttgcttcaaaaccaca

SEQ ID NO: 6028047 - DNA, 25 bp, Homo sapien
atcgtagccatgttcagtcgcaact

SEQ ID NO: 6028048 - DNA, 25 bp, Homo sapien
ctgcagcccattctgtcgttgacgc

SEQ ID NO: 6028049 - DNA, 25 bp, Homo sapien
gactggaatagcttcatagatgcga

SEQ ID NO: 6028050 - DNA, 25 bp, Homo sapien
tgactccgcgacgacataaacagga

SEQ ID NO: 6028051 - DNA, 25 bp, Homo sapien
tcgtgagtgttgatgatccagctta

SEQ ID NO: 6028052 - DNA, 25 bp, Homo sapien
ctgtcgttgacgctgactccgcgac

SEQ ID NO: 6028053 - DNA, 25 bp, Homo sapien
agcgccaccttgtgtgtaagccgat

SEQ ID NO: 6028054 - DNA, 25 bp, Homo sapien
taaagatcaacgtgcgctttcttct

SEQ ID NO: 6028055 - DNA, 25 bp, Homo sapien
gtaagacaaacagtggtcaatctta

SEQ ID NO: 6028056 - DNA, 25 bp, Homo sapien
cgtatgagtcgtaccaatgacccaa

SEQ ID NO: 6028057 - DNA, 25 bp, Homo sapien
gtgttgatgatccagcttagaatca

SEQ ID NO: 6028058 - DNA, 25 bp, Homo sapien
agtcacatcgtagccatgttcagtc

SEQ ID NO: 6028059 - DNA, 25 bp, Homo sapien
caaaatcacgccattgacctttatt

SEQ ID NO: 6028060 - DNA, 25 bp, Homo sapien
ctttgtggcctttcaagacaaaatc

SEQ ID NO: 6028061 - DNA, 25 bp, Homo sapien
accttgtgtgtaagccgatggattc

SEQ ID NO: 6028062 - DNA, 25 bp, Homo sapien
attgacctttattgaagtcgtagcc

SEQ ID NO: 6028063 - DNA, 25 bp, Homo sapien
agccgatggattcagttggattttc

SEQ ID NO: 6028064 - DNA, 25 bp, Homo sapien
gacccaagaagttgcggcaaatatc

SEQ ID NO: 6028065 - DNA, 25 bp, Homo sapien
atgatcgacggaggtgatgtaagac

SEQ ID NO: 6028066 - DNA, 25 bp, Homo sapien
accaatgacccaagaagttgcggca

SEQ ID NO: 6028067 - DNA, 25 bp, Homo sapien
ctttattgaagtcgtagccttttgt

SEQ ID NO: 6028068 - DNA, 25 bp, Homo sapien
ggcgattggtgtctttgtggccttt

SEQ ID NO: 6028069 - DNA, 25 bp, Homo sapien
tgatttcgtagctgtaatcaattcg

SEQ ID NO: 6028070 - DNA, 25 bp, Homo sapien
agtcgtaccaatgacccaagaagtt

SEQ ID NO: 6028071 - DNA, 25 bp, Homo sapien
ttcttctcgtgagtgttgatgatcc

SEQ ID NO: 6028072 - DNA, 25 bp, Homo sapien
caacaaatattgttaatacccgtcg

SEQ ID NO: 6028073 - DNA, 25 bp, Homo sapien
ccttgctgcttcaccatctacattt

SEQ ID NO: 6028074 - DNA, 25 bp, Homo sapien
taacagagattttaggaaaactata

SEQ ID NO: 6028075 - DNA, 25 bp, Homo sapien
aacacgagtggaagccctaacttag

SEQ ID NO: 6028076 - DNA, 25 bp, Homo sapien
tgtgggttaacagagattttaggaa

SEQ ID NO: 6028077 - DNA, 25 bp, Homo sapien
cagcgtcagcttgtgtcgaacctga

SEQ ID NO: 6028078 - DNA, 25 bp, Homo sapien
cgagtggaagccctaacttagccgc

SEQ ID NO: 6028079 - DNA, 25 bp, Homo sapien
tcaatcgcaactcgcgctgcctgag

SEQ ID NO: 6028080 - DNA, 25 bp, Homo sapien
ataggtccgcggcaccacaacactc

SEQ ID NO: 6028081 - DNA, 25 bp, Homo sapien
gcgtgcttctgcccttgctgcttca

SEQ ID NO: 6028082 - DNA, 25 bp, Homo sapien
agtacccagtagtgaatgcatcatt

SEQ ID NO: 6028083 - DNA, 25 bp, Homo sapien
tctaccattttttgctcaaagtcgg

SEQ ID NO: 6028084 - DNA, 25 bp, Homo sapien
cacggacaaactcttccaaatacac

SEQ ID NO: 6028085 - DNA, 25 bp, Homo sapien
tacattttggttgaccagcagcgtc

SEQ ID NO: 6028086 - DNA, 25 bp, Homo sapien
ggtatttgggtaagattcacggaca

SEQ ID NO: 6028087 - DNA, 25 bp, Homo sapien
ccgatggcattttctgacaacagct

SEQ ID NO: 6028088 - DNA, 25 bp, Homo sapien
accatctacattttggttgaccagc

SEQ ID NO: 6028089 - DNA, 25 bp, Homo sapien
tttctttgcgcgtttgagtcgtccc

SEQ ID NO: 6028090 - DNA, 25 bp, Homo sapien
cgtgcgctttatcttccatcgactc

SEQ ID NO: 6028091 - DNA, 25 bp, Homo sapien
cagcttgtgtcgaacctgactaaca

SEQ ID NO: 6028092 - DNA, 25 bp, Homo sapien
gtactttcttcataagtaccgatgg

SEQ ID NO: 6028093 - DNA, 25 bp, Homo sapien
attttttgctcaaagtcggtatttg

SEQ ID NO: 6028094 - DNA, 25 bp, Homo sapien
tttggatggcagtacccagtagtga

SEQ ID NO: 6028095 - DNA, 25 bp, Homo sapien
aacagctctaccattttttgctcaa

SEQ ID NO: 6028096 - DNA, 25 bp, Homo sapien
tcacaaattgcgcaggaccgccttc

SEQ ID NO: 6028097 - DNA, 25 bp, Homo sapien
gacactcactgaacaactgaaactg

SEQ ID NO: 6028098 - DNA, 25 bp, Homo sapien
ctttatcttccatcgactcaaaaga

SEQ ID NO: 6028099 - DNA, 25 bp, Homo sapien
tacgcgtgtgggttaacagagattt

SEQ ID NO: 6028100 - DNA, 25 bp, Homo sapien
tcgactcaaaagacatcaataggtc

SEQ ID NO: 6028101 - DNA, 25 bp, Homo sapien
gcaggaccgccttcagtgtacgcgt

SEQ ID NO: 6028102 - DNA, 25 bp, Homo sapien
tttgagtcgtcccatttaaacacga

SEQ ID NO: 6028103 - DNA, 25 bp, Homo sapien
tgaatgcatcattgatgatcttgtg

SEQ ID NO: 6028104 - DNA, 25 bp, Homo sapien
tgatgatcttgtgacactcactgaa

SEQ ID NO: 6028105 - DNA, 25 bp, Homo sapien
atacacgcgtgcttctgcccttgct

SEQ ID NO: 6028106 - DNA, 25 bp, Homo sapien
taaccgctctttcgtgcgctttatc

SEQ ID NO: 6028107 - DNA, 25 bp, Homo sapien
tcagtgtacgcgtgtgggttaacag

SEQ ID NO: 6028108 - DNA, 25 bp, Homo sapien
cgcgctgcctgagtactttcttcat

SEQ ID NO: 6028109 - DNA, 25 bp, Homo sapien
accatgtgcctgagcaacttcgtgg

SEQ ID NO: 6028110 - DNA, 25 bp, Homo sapien
cttccaaatacacgcgtgcttctgc

SEQ ID NO: 6028111 - DNA, 25 bp, Homo sapien
catttaaacacgagtggaagcccta

SEQ ID NO: 6028112 - DNA, 25 bp, Homo sapien
tattcttttctttgcgcgtttgagt

SEQ ID NO: 6028113 - DNA, 25 bp, Homo sapien
gctcaaagtcggtatttgggtaaga

SEQ ID NO: 6028114 - DNA, 25 bp, Homo sapien
taccacatcgataaccgctctttcg

SEQ ID NO: 6028115 - DNA, 25 bp, Homo sapien
gtgtcgaacctgactaacatcgaca

SEQ ID NO: 6028116 - DNA, 25 bp, Homo sapien
ccgccttcagtgtacgcgtgtgggt

SEQ ID NO: 6028117 - DNA, 25 bp, Homo sapien
acatcaataggtccgcggcaccaca

SEQ ID NO: 6028118 - DNA, 25 bp, Homo sapien
aagtaccgatggcattttctgacaa

SEQ ID NO: 6028119 - DNA, 25 bp, Homo sapien
ctaacttagccgcccattcaaccac

SEQ ID NO: 6028120 - DNA, 25 bp, Homo sapien
tagccgcccattcaaccacttcttt

SEQ ID NO: 6028121 - DNA, 25 bp, Homo sapien
caaaagacatcaataggtccgcggc

SEQ ID NO: 6028122 - DNA, 25 bp, Homo sapien
tcgcattcacaaattgcgcaggacc

SEQ ID NO: 6028123 - DNA, 25 bp, Homo sapien
agcaacttcgtggtacaaaccggcg

SEQ ID NO: 6028124 - DNA, 25 bp, Homo sapien
ttgggtaagattcacggacaaactc

SEQ ID NO: 6028125 - DNA, 25 bp, Homo sapien
tcgtcccatttaaacacgagtggaa

SEQ ID NO: 6028126 - DNA, 25 bp, Homo sapien
ccgcggcaccacaacactcaatcgc

SEQ ID NO: 6028127 - DNA, 25 bp, Homo sapien
caaactcttccaaatacacgcgtgc

SEQ ID NO: 6028128 - DNA, 25 bp, Homo sapien
aacctgactaacatcgacaccatgt

SEQ ID NO: 6028129 - DNA, 25 bp, Homo sapien
cttccatcgactcaaaagacatcaa

SEQ ID NO: 6028130 - DNA, 25 bp, Homo sapien
gaagccctaacttagccgcccattc

SEQ ID NO: 6028131 - DNA, 25 bp, Homo sapien
gcaactcgcgctgcctgagtacttt

SEQ ID NO: 6028132 - DNA, 25 bp, Homo sapien
gatggcagtacccagtagtgaatgc

SEQ ID NO: 6028133 - DNA, 25 bp, Homo sapien
cttctttgctcgtcgcattcacaaa

SEQ ID NO: 6028134 - DNA, 25 bp, Homo sapien
gaccagcagcgtcagcttgtgtcga

SEQ ID NO: 6028135 - DNA, 25 bp, Homo sapien
atcgacaccatgtgcctgagcaact

SEQ ID NO: 6028136 - DNA, 25 bp, Homo sapien
caaccacttctttgctcgtcgcatt

SEQ ID NO: 6028137 - DNA, 25 bp, Homo sapien
ctctttcgtgcgctttatcttccat

SEQ ID NO: 6028138 - DNA, 25 bp, Homo sapien
tcttcataagtaccgatggcatttt

SEQ ID NO: 6028139 - DNA, 25 bp, Homo sapien
ttggttgaccagcagcgtcagcttg

SEQ ID NO: 6028140 - DNA, 25 bp, Homo sapien
catcattgatgatcttgtgacactc

SEQ ID NO: 6028141 - DNA, 25 bp, Homo sapien
aacactcaatcgcaactcgcgctgc

SEQ ID NO: 6028142 - DNA, 25 bp, Homo sapien
tctgacaacagctctaccatttttt

SEQ ID NO: 6028143 - DNA, 25 bp, Homo sapien
agtcggtatttgggtaagattcacg

SEQ ID NO: 6028144 - DNA, 25 bp, Homo sapien
tgcgcgtttgagtcgtcccatttaa

SEQ ID NO: 6028145 - DNA, 25 bp, Homo sapien
actaacatcgacaccatgtgcctga

SEQ ID NO: 6028146 - DNA, 25 bp, Homo sapien
tgcctgagcaacttcgtggtacaaa

SEQ ID NO: 6028147 - DNA, 25 bp, Homo sapien
aattgcgcaggaccgccttcagtgt

SEQ ID NO: 6028148 - DNA, 25 bp, Homo sapien
cactgaacaactgaaactgagaatc

SEQ ID NO: 6028149 - DNA, 25 bp, Homo sapien
tgcttcaccatctacattttggttg

SEQ ID NO: 6028150 - DNA, 25 bp, Homo sapien
ttctgcccttgctgcttcaccatct

SEQ ID NO: 6028151 - DNA, 25 bp, Homo sapien
ccggcgtattcttttctttgcgcgt

SEQ ID NO: 6028152 - DNA, 25 bp, Homo sapien
gagaatccgttggtcgattaaagaa

SEQ ID NO: 6028153 - DNA, 25 bp, Homo sapien
gcattttctgacaacagctctacca

SEQ ID NO: 6028154 - DNA, 25 bp, Homo sapien
gcctgagtactttcttcataagtac

SEQ ID NO: 6028155 - DNA, 25 bp, Homo sapien
aagattcacggacaaactcttccaa

SEQ ID NO: 6028156 - DNA, 25 bp, Homo sapien
caccacaacactcaatcgcaactcg

SEQ ID NO: 6028157 - DNA, 25 bp, Homo sapien
aaaaatcattgtttggatggcagta

SEQ ID NO: 6028158 - DNA, 25 bp, Homo sapien
cccattcaaccacttctttgctcgt

SEQ ID NO: 6028159 - DNA, 25 bp, Homo sapien
gaaactgagaatccgttggtcgatt

SEQ ID NO: 6028160 - DNA, 25 bp, Homo sapien
tgctcgtcgcattcacaaattgcgc

SEQ ID NO: 6028161 - DNA, 25 bp, Homo sapien
acaactgaaactgagaatccgttgg

SEQ ID NO: 6028162 - DNA, 25 bp, Homo sapien
catcgataaccgctctttcgtgcgc

SEQ ID NO: 6028163 - DNA, 25 bp, Homo sapien
cagtagtgaatgcatcattgatgat

SEQ ID NO: 6028164 - DNA, 25 bp, Homo sapien
tcttgtgacactcactgaacaactg

SEQ ID NO: 6028165 - DNA, 25 bp, Homo sapien
aactataaaaatcattgtttggatg

SEQ ID NO: 6028166 - DNA, 25 bp, Homo sapien
acagtcacccatttcattgctgtct

SEQ ID NO: 6028167 - DNA, 25 bp, Homo sapien
tctacgaaagagacgtgagactcac

SEQ ID NO: 6028168 - DNA, 25 bp, Homo sapien
ataagcttttggcttgaagaaatgt

SEQ ID NO: 6028169 - DNA, 25 bp, Homo sapien
aaagagacgtgagactcacacgctg

SEQ ID NO: 6028170 - DNA, 25 bp, Homo sapien
ctctcttctccttcccttcaaagaa

SEQ ID NO: 6028171 - DNA, 25 bp, Homo sapien
tcacccatttcattgctgtctacga

SEQ ID NO: 6028172 - DNA, 25 bp, Homo sapien
aattgaccccgaggagctctgtgcc

SEQ ID NO: 6028173 - DNA, 25 bp, Homo sapien
gcctgcgtggggttcgaaagtgggc

SEQ ID NO: 6028174 - DNA, 25 bp, Homo sapien
gggctcgcctgcgtggggttcgaaa

SEQ ID NO: 6028175 - DNA, 25 bp, Homo sapien
gaaatgtactagttgagtgaattaa

SEQ ID NO: 6028176 - DNA, 25 bp, Homo sapien
tctccttcccttcaaagaactcgga

SEQ ID NO: 6028177 - DNA, 25 bp, Homo sapien
tattaagcactcataagcttttggc

SEQ ID NO: 6028178 - DNA, 25 bp, Homo sapien
tctgaaccatcagaagacacaaaac

SEQ ID NO: 6028179 - DNA, 25 bp, Homo sapien
ggcggggggagggatgatgcagtcc

SEQ ID NO: 6028180 - DNA, 25 bp, Homo sapien
gaattaaaggttaatcagagagtga

SEQ ID NO: 6028181 - DNA, 25 bp, Homo sapien
cagccgcccaccctgcttctgagag

SEQ ID NO: 6028182 - DNA, 25 bp, Homo sapien
tgtccctcttttctgaaccatcaga

SEQ ID NO: 6028183 - DNA, 25 bp, Homo sapien
agagtgagcagggatgtgccctgtg

SEQ ID NO: 6028184 - DNA, 25 bp, Homo sapien
ccccagtattaagcactcataagct

SEQ ID NO: 6028185 - DNA, 25 bp, Homo sapien
cttgaagaaatgtactagttgagtg

SEQ ID NO: 6028186 - DNA, 25 bp, Homo sapien
aaaggttaatcagagagtgagcagg

SEQ ID NO: 6028187 - DNA, 25 bp, Homo sapien
tggtttaattgaccccgaggagctc

SEQ ID NO: 6028188 - DNA, 25 bp, Homo sapien
tagtactgtccctcttttctgaacc

SEQ ID NO: 6028189 - DNA, 25 bp, Homo sapien
acgtgagactcacacgctgttctcg

SEQ ID NO: 6028190 - DNA, 25 bp, Homo sapien
tgacaggtagctgggacctaggcta

SEQ ID NO: 6028191 - DNA, 25 bp, Homo sapien
gcaacgtggcagatgtctgaggaat

SEQ ID NO: 6028192 - DNA, 25 bp, Homo sapien
tataaaacacgatagtactgtccct

SEQ ID NO: 6028193 - DNA, 25 bp, Homo sapien
aagcttataaaacacgatagtactg

SEQ ID NO: 6028194 - DNA, 25 bp, Homo sapien
tctgcgctctcttctccttcccttc

SEQ ID NO: 6028195 - DNA, 25 bp, Homo sapien
ctaggctatcttattatgaaggttg

SEQ ID NO: 6028196 - DNA, 25 bp, Homo sapien
cagaaacaagactgcaatggggggc

SEQ ID NO: 6028197 - DNA, 25 bp, Homo sapien
gcccaccctgcttctgagagctcgg

SEQ ID NO: 6028198 - DNA, 25 bp, Homo sapien
agctcgggcggctcgccttcgtggg

SEQ ID NO: 6028199 - DNA, 25 bp, Homo sapien
ccttcgtggggctcgcctgcgtggg

SEQ ID NO: 6028200 - DNA, 25 bp, Homo sapien
caactgtcaccaaagcttataaaac

SEQ ID NO: 6028201 - DNA, 25 bp, Homo sapien
cctgcttctgagagctcgggcggct

SEQ ID NO: 6028202 - DNA, 25 bp, Homo sapien
gtatatttgtgtatgtagtgtaacg

SEQ ID NO: 6028203 - DNA, 25 bp, Homo sapien
ttttggcttgaagaaatgtactagt

SEQ ID NO: 6028204 - DNA, 25 bp, Homo sapien
gtggggttcgaaagtgggctgctcc

SEQ ID NO: 6028205 - DNA, 25 bp, Homo sapien
gatgtgccctgtgcaacgtggcaga

SEQ ID NO: 6028206 - DNA, 25 bp, Homo sapien
agcagggatgtgccctgtgcaacgt

SEQ ID NO: 6028207 - DNA, 25 bp, Homo sapien
ggctcgccttcgtggggctcgcctg

SEQ ID NO: 6028208 - DNA, 25 bp, Homo sapien
ggggggcggggggagggatgatgca

SEQ ID NO: 6028209 - DNA, 25 bp, Homo sapien
ctgttagtgacacaacggtgacagg

SEQ ID NO: 6028210 - DNA, 25 bp, Homo sapien
tgttttgcttgttgtatatttgtgt

SEQ ID NO: 6028211 - DNA, 25 bp, Homo sapien
gggatgatgcagtccttatacaaaa

SEQ ID NO: 6028212 - DNA, 25 bp, Homo sapien
gcttgttgtatatttgtgtatgtag

SEQ ID NO: 6028213 - DNA, 25 bp, Homo sapien
actcggagaggccagaaacaagact

SEQ ID NO: 6028214 - DNA, 25 bp, Homo sapien
aatcagagagtgagcagggatgtgc

SEQ ID NO: 6028215 - DNA, 25 bp, Homo sapien
gtgacacaacggtgacaggtagctg

SEQ ID NO: 6028216 - DNA, 25 bp, Homo sapien
tactagttgagtgaattaaaggtta

SEQ ID NO: 6028217 - DNA, 25 bp, Homo sapien
tccccagccgcccaccctgcttctg

SEQ ID NO: 6028218 - DNA, 25 bp, Homo sapien
atttcattgctgtctacgaaagaga

SEQ ID NO: 6028219 - DNA, 25 bp, Homo sapien
atacaaaaccgacaactgtcaccaa

SEQ ID NO: 6028220 - DNA, 25 bp, Homo sapien
gcactcataagcttttggcttgaag

SEQ ID NO: 6028221 - DNA, 25 bp, Homo sapien
caaagaactcggagaggccagaaac

SEQ ID NO: 6028222 - DNA, 25 bp, Homo sapien
ttctcgctttctccccagtattaag

SEQ ID NO: 6028223 - DNA, 25 bp, Homo sapien
acgctgttctcgctttctccccagt

SEQ ID NO: 6028224 - DNA, 25 bp, Homo sapien
tgtgccttttcaaccctccccagcc

SEQ ID NO: 6028225 - DNA, 25 bp, Homo sapien
aaccgacaactgtcaccaaagctta

SEQ ID NO: 6028226 - DNA, 25 bp, Homo sapien
atgcagtccttatacaaaaccgaca

SEQ ID NO: 6028227 - DNA, 25 bp, Homo sapien
ttcgaaagtgggctgctcctggatt

SEQ ID NO: 6028228 - DNA, 25 bp, Homo sapien
gaagacacaaaactgttagtgacac

SEQ ID NO: 6028229 - DNA, 25 bp, Homo sapien
tgaggaatggtttaattgaccccga

SEQ ID NO: 6028230 - DNA, 25 bp, Homo sapien
tatgtagtgtaacgaatttgtacca

SEQ ID NO: 6028231 - DNA, 25 bp, Homo sapien
acacgatagtactgtccctcttttc

SEQ ID NO: 6028232 - DNA, 25 bp, Homo sapien
ctggattctgcgctctcttctcctt

SEQ ID NO: 6028233 - DNA, 25 bp, Homo sapien
tctgagagctcgggcggctcgcctt

SEQ ID NO: 6028234 - DNA, 25 bp, Homo sapien
gactcacacgctgttctcgctttct

SEQ ID NO: 6028235 - DNA, 25 bp, Homo sapien
tggcagatgtctgaggaatggttta

SEQ ID NO: 6028236 - DNA, 25 bp, Homo sapien
caacggtgacaggtagctgggacct

SEQ ID NO: 6028237 - DNA, 25 bp, Homo sapien
ccatcagaagacacaaaactgttag

SEQ ID NO: 6028238 - DNA, 25 bp, Homo sapien
acaaaactgttagtgacacaacggt

SEQ ID NO: 6028239 - DNA, 25 bp, Homo sapien
tgagtgaattaaaggttaatcagag

SEQ ID NO: 6028240 - DNA, 25 bp, Homo sapien
tatcttattatgaaggttgttttgc

SEQ ID NO: 6028241 - DNA, 25 bp, Homo sapien
ctttctccccagtattaagcactca

SEQ ID NO: 6028242 - DNA, 25 bp, Homo sapien
ttgctgtctacgaaagagacgtgag

SEQ ID NO: 6028243 - DNA, 25 bp, Homo sapien
ggagctctgtgccttttcaaccctc

SEQ ID NO: 6028244 - DNA, 25 bp, Homo sapien
tcccttcaaagaactcggagaggcc

SEQ ID NO: 6028245 - DNA, 25 bp, Homo sapien
ccccgaggagctctgtgccttttca

SEQ ID NO: 6028246 - DNA, 25 bp, Homo sapien
ccctgtgcaacgtggcagatgtctg

SEQ ID NO: 6028247 - DNA, 25 bp, Homo sapien
tccttatacaaaaccgacaactgtc

SEQ ID NO: 6028248 - DNA, 25 bp, Homo sapien
agaggccagaaacaagactgcaatg

SEQ ID NO: 6028249 - DNA, 25 bp, Homo sapien
gaaggttgttttgcttgttgtatat

SEQ ID NO: 6028250 - DNA, 25 bp, Homo sapien
agtgggctgctcctggattctgcgc

SEQ ID NO: 6028251 - DNA, 25 bp, Homo sapien
ggtagctgggacctaggctatctta

SEQ ID NO: 6028252 - DNA, 25 bp, Homo sapien
tattatgaaggttgttttgcttgtt

SEQ ID NO: 6028253 - DNA, 25 bp, Homo sapien
tgggacctaggctatcttattatga

SEQ ID NO: 6028254 - DNA, 25 bp, Homo sapien
tttgtgtatgtagtgtaacgaattt

SEQ ID NO: 6028255 - DNA, 25 bp, Homo sapien
gatgtctgaggaatggtttaattga

SEQ ID NO: 6028256 - DNA, 25 bp, Homo sapien
gggagggatgatgcagtccttatac

SEQ ID NO: 6028257 - DNA, 25 bp, Homo sapien
tcttttctgaaccatcagaagacac

SEQ ID NO: 6028258 - DNA, 25 bp, Homo sapien
ctgctcctggattctgcgctctctt

SEQ ID NO: 6028259 - DNA, 25 bp, Homo sapien
tcaccaaagcttataaaacacgata

SEQ ID NO: 6028260 - DNA, 25 bp, Homo sapien
gaagctaaacagtagttacggacag

SEQ ID NO: 6028261 - DNA, 25 bp, Homo sapien
aagagggacagtactatcgtgtttt

SEQ ID NO: 6028262 - DNA, 25 bp, Homo sapien
gaaatccacttccttagcaactgac

SEQ ID NO: 6028263 - DNA, 25 bp, Homo sapien
tgacagttgtcggttttgtataagg

SEQ ID NO: 6028264 - DNA, 25 bp, Homo sapien
ttacttcgcaagacttcagcagcta

SEQ ID NO: 6028265 - DNA, 25 bp, Homo sapien
atggtacaaattcgttacactacat

SEQ ID NO: 6028266 - DNA, 25 bp, Homo sapien
tataagctttggtgacagttgtcgg

SEQ ID NO: 6028267 - DNA, 25 bp, Homo sapien
aactgaccacttctccaggtatcac

SEQ ID NO: 6028268 - DNA, 25 bp, Homo sapien
actatcgtgttttataagctttggt

SEQ ID NO: 6028269 - DNA, 25 bp, Homo sapien
cgcagaacgactatacaggtgaggt

SEQ ID NO: 6028270 - DNA, 25 bp, Homo sapien
gccaatgaaacatctacatttcaat

SEQ ID NO: 6028271 - DNA, 25 bp, Homo sapien
gttgtcggttttgtataaggactgc

SEQ ID NO: 6028272 - DNA, 25 bp, Homo sapien
aaacagtagttacggacagtcctct

SEQ ID NO: 6028273 - DNA, 25 bp, Homo sapien
ccccccgccccccattgcagtcttg

SEQ ID NO: 6028274 - DNA, 25 bp, Homo sapien
tcagaaaagagggacagtactatcg

SEQ ID NO: 6028275 - DNA, 25 bp, Homo sapien
gagtgactaactgggccaaattctt

SEQ ID NO: 6028276 - DNA, 25 bp, Homo sapien
atttcttcaggtgtggtttttgcca

SEQ ID NO: 6028277 - DNA, 25 bp, Homo sapien
gccacaccttttcagacagccaatg

SEQ ID NO: 6028278 - DNA, 25 bp, Homo sapien
tacacagagtgactaactgggccaa

SEQ ID NO: 6028279 - DNA, 25 bp, Homo sapien
tacacaaatatacaacaagcaaaac

SEQ ID NO: 6028280 - DNA, 25 bp, Homo sapien
agtcttgtttctggcctctccgagt

SEQ ID NO: 6028281 - DNA, 25 bp, Homo sapien
ggacagtcctctatggtacaaattc

SEQ ID NO: 6028282 - DNA, 25 bp, Homo sapien
tagcctaggtcccagctacctgtca

SEQ ID NO: 6028283 - DNA, 25 bp, Homo sapien
tgtggtttttgccacaaagcagttt

SEQ ID NO: 6028284 - DNA, 25 bp, Homo sapien
gccacaaagcagtttttaagtagat

SEQ ID NO: 6028285 - DNA, 25 bp, Homo sapien
gcctctccgagttctttgaagggaa

SEQ ID NO: 6028286 - DNA, 25 bp, Homo sapien
aacagttttgtgtcttctgatggtt

SEQ ID NO: 6028287 - DNA, 25 bp, Homo sapien
cacttctccaggtatcaccagctta

SEQ ID NO: 6028288 - DNA, 25 bp, Homo sapien
gatggttcagaaaagagggacagta

SEQ ID NO: 6028289 - DNA, 25 bp, Homo sapien
cattgcagtcttgtttctggcctct

SEQ ID NO: 6028290 - DNA, 25 bp, Homo sapien
gtcacggggagtttacttcgcaaga

SEQ ID NO: 6028291 - DNA, 25 bp, Homo sapien
acaaccttcataataagatagccta

SEQ ID NO: 6028292 - DNA, 25 bp, Homo sapien
ataagatagcctaggtcccagctac

SEQ ID NO: 6028293 - DNA, 25 bp, Homo sapien
agttacggacagtcctctatggtac

SEQ ID NO: 6028294 - DNA, 25 bp, Homo sapien
tttgtgtcttctgatggttcagaaa

SEQ ID NO: 6028295 - DNA, 25 bp, Homo sapien
cgcaagacttcagcagctagattcc

SEQ ID NO: 6028296 - DNA, 25 bp, Homo sapien
tcctctatggtacaaattcgttaca

SEQ ID NO: 6028297 - DNA, 25 bp, Homo sapien
cgggattacacagagtgactaactg

SEQ ID NO: 6028298 - DNA, 25 bp, Homo sapien
gacagtactatcgtgttttataagc

SEQ ID NO: 6028299 - DNA, 25 bp, Homo sapien
ttcataataagatagcctaggtccc

SEQ ID NO: 6028300 - DNA, 25 bp, Homo sapien
ggtcccagctacctgtcaccgttgt

SEQ ID NO: 6028301 - DNA, 25 bp, Homo sapien
agtagatctctctaggaaggacaag

SEQ ID NO: 6028302 - DNA, 25 bp, Homo sapien
tgaggtgcagaaacccctactggga

SEQ ID NO: 6028303 - DNA, 25 bp, Homo sapien
attcttaaaatttcttcaggtgtgg

SEQ ID NO: 6028304 - DNA, 25 bp, Homo sapien
tccaggtatcaccagcttaactgac

SEQ ID NO: 6028305 - DNA, 25 bp, Homo sapien
cagcttaactgacatcggtcacggg

SEQ ID NO: 6028306 - DNA, 25 bp, Homo sapien
aactgacatcggtcacggggagttt

SEQ ID NO: 6028307 - DNA, 25 bp, Homo sapien
tacaggtgaggtgcagaaaccccta

SEQ ID NO: 6028308 - DNA, 25 bp, Homo sapien
tatcaccagcttaactgacatcggt

SEQ ID NO: 6028309 - DNA, 25 bp, Homo sapien
gtcactaacagttttgtgtcttctg

SEQ ID NO: 6028310 - DNA, 25 bp, Homo sapien
gccccccattgcagtcttgtttctg

SEQ ID NO: 6028311 - DNA, 25 bp, Homo sapien
aagcagtttttaagtagatctctct

SEQ ID NO: 6028312 - DNA, 25 bp, Homo sapien
cgttacactacatacacaaatatac

SEQ ID NO: 6028313 - DNA, 25 bp, Homo sapien
taggaaggacaagccacaccttttc

SEQ ID NO: 6028314 - DNA, 25 bp, Homo sapien
acgactatacaggtgaggtgcagaa

SEQ ID NO: 6028315 - DNA, 25 bp, Homo sapien
gtataaggactgcatcatccctccc

SEQ ID NO: 6028316 - DNA, 25 bp, Homo sapien
gcagctagattccgggattacacag

SEQ ID NO: 6028317 - DNA, 25 bp, Homo sapien
aaatatacaacaagcaaaacaacct

SEQ ID NO: 6028318 - DNA, 25 bp, Homo sapien
tgtgtagaagctaaacagtagttac

SEQ ID NO: 6028319 - DNA, 25 bp, Homo sapien
tcttctgatggttcagaaaagaggg

SEQ ID NO: 6028320 - DNA, 25 bp, Homo sapien
tctctctaggaaggacaagccacac

SEQ ID NO: 6028321 - DNA, 25 bp, Homo sapien
ctttggtgacagttgtcggttttgt

SEQ ID NO: 6028322 - DNA, 25 bp, Homo sapien
acaacaagcaaaacaaccttcataa

SEQ ID NO: 6028323 - DNA, 25 bp, Homo sapien
gtgttttataagctttggtgacagt

SEQ ID NO: 6028324 - DNA, 25 bp, Homo sapien
tctacatttcaatgtgtagaagcta

SEQ ID NO: 6028325 - DNA, 25 bp, Homo sapien
agctacctgtcaccgttgtgtcact

SEQ ID NO: 6028326 - DNA, 25 bp, Homo sapien
ccgttgtgtcactaacagttttgtg

SEQ ID NO: 6028327 - DNA, 25 bp, Homo sapien
tttttaagtagatctctctaggaag

SEQ ID NO: 6028328 - DNA, 25 bp, Homo sapien
cagacagccaatgaaacatctacat

SEQ ID NO: 6028329 - DNA, 25 bp, Homo sapien
gggagtttacttcgcaagacttcag

SEQ ID NO: 6028330 - DNA, 25 bp, Homo sapien
ggttttgtataaggactgcatcatc

SEQ ID NO: 6028331 - DNA, 25 bp, Homo sapien
tactgggaaatccacttccttagca

SEQ ID NO: 6028332 - DNA, 25 bp, Homo sapien
cacttccttagcaactgaccacttc

SEQ ID NO: 6028333 - DNA, 25 bp, Homo sapien
ggacaagccacaccttttcagacag

SEQ ID NO: 6028334 - DNA, 25 bp, Homo sapien
gaaacatctacatttcaatgtgtag

SEQ ID NO: 6028335 - DNA, 25 bp, Homo sapien
cttagcaactgaccacttctccagg

SEQ ID NO: 6028336 - DNA, 25 bp, Homo sapien
tttctggcctctccgagttctttga

SEQ ID NO: 6028337 - DNA, 25 bp, Homo sapien
acttcagcagctagattccgggatt

SEQ ID NO: 6028338 - DNA, 25 bp, Homo sapien
ccttttcagacagccaatgaaacat

SEQ ID NO: 6028339 - DNA, 25 bp, Homo sapien
agcaaaacaaccttcataataagat

SEQ ID NO: 6028340 - DNA, 25 bp, Homo sapien
caaattcgttacactacatacacaa

SEQ ID NO: 6028341 - DNA, 25 bp, Homo sapien
actacatacacaaatatacaacaag

SEQ ID NO: 6028342 - DNA, 25 bp, Homo sapien
catcggtcacggggagtttacttcg

SEQ ID NO: 6028343 - DNA, 25 bp, Homo sapien
gcagaaacccctactgggaaatcca

SEQ ID NO: 6028344 - DNA, 25 bp, Homo sapien
tttcaatgtgtagaagctaaacagt

SEQ ID NO: 6028345 - DNA, 25 bp, Homo sapien
agattccgggattacacagagtgac

SEQ ID NO: 6028346 - DNA, 25 bp, Homo sapien
ctgtcaccgttgtgtcactaacagt

SEQ ID NO: 6028347 - DNA, 25 bp, Homo sapien
ttcaggtgtggtttttgccacaaag

SEQ ID NO: 6028348 - DNA, 25 bp, Homo sapien
atcagggtcttccaccctggtacgt

SEQ ID NO: 6028349 - DNA, 25 bp, Homo sapien
tactggtaacgacttaaattgcttg

SEQ ID NO: 6028350 - DNA, 25 bp, Homo sapien
atgcagagattgaatattacctctg

SEQ ID NO: 6028351 - DNA, 25 bp, Homo sapien
cagtgtggagctggcgattgccttt

SEQ ID NO: 6028352 - DNA, 25 bp, Homo sapien
cacctttaattttcctgccaccatt

SEQ ID NO: 6028353 - DNA, 25 bp, Homo sapien
tgatccctctgcaccacgtgtctta

SEQ ID NO: 6028354 - DNA, 25 bp, Homo sapien
taccgattcattcctgtgctcttgg

SEQ ID NO: 6028355 - DNA, 25 bp, Homo sapien
ttgcttgtgaccactgagaaacaca

SEQ ID NO: 6028356 - DNA, 25 bp, Homo sapien
tgaatatgcagagattgaatattac

SEQ ID NO: 6028357 - DNA, 25 bp, Homo sapien
catctaggaaaacctctatgatgtt

SEQ ID NO: 6028358 - DNA, 25 bp, Homo sapien
cattatattcctaacccttcacctt

SEQ ID NO: 6028359 - DNA, 25 bp, Homo sapien
agattgaatattacctctgccccta

SEQ ID NO: 6028360 - DNA, 25 bp, Homo sapien
ctcttggtgtatctatccatcggta

SEQ ID NO: 6028361 - DNA, 25 bp, Homo sapien
gcccctatcagggtcttccaccctg

SEQ ID NO: 6028362 - DNA, 25 bp, Homo sapien
aattttcctgccaccattctgatcc

SEQ ID NO: 6028363 - DNA, 25 bp, Homo sapien
cctaaagctcggtactgccatctag

SEQ ID NO: 6028364 - DNA, 25 bp, Homo sapien
gctcggtactgccatctaggaaaac

SEQ ID NO: 6028365 - DNA, 25 bp, Homo sapien
caccacgtgtcttagaattaaggat

SEQ ID NO: 6028366 - DNA, 25 bp, Homo sapien
tgttgagggaattaggtttgcaaag

SEQ ID NO: 6028367 - DNA, 25 bp, Homo sapien
ccatggtgttgaacaatgcatgttt

SEQ ID NO: 6028368 - DNA, 25 bp, Homo sapien
acctctgcccctatcagggtcttcc

SEQ ID NO: 6028369 - DNA, 25 bp, Homo sapien
tgttgaacaatgcatgttttttatc

SEQ ID NO: 6028370 - DNA, 25 bp, Homo sapien
gtgtcttagaattaaggatccaaaa

SEQ ID NO: 6028371 - DNA, 25 bp, Homo sapien
cctccaccaagaaattctaaatttg

SEQ ID NO: 6028372 - DNA, 25 bp, Homo sapien
atcggtaatgctcagtgtggagctg

SEQ ID NO: 6028373 - DNA, 25 bp, Homo sapien
ggaaaacctctatgatgtttgttct

SEQ ID NO: 6028374 - DNA, 25 bp, Homo sapien
gggaacacatagtactggtaacgac

SEQ ID NO: 6028375 - DNA, 25 bp, Homo sapien
tccccgaaattacaactgcattata

SEQ ID NO: 6028376 - DNA, 25 bp, Homo sapien
gggcttccccgaaattacaactgca

SEQ ID NO: 6028377 - DNA, 25 bp, Homo sapien
ggagaagggatgttgagggaattag

SEQ ID NO: 6028378 - DNA, 25 bp, Homo sapien
aaacacagcaatcgtaagtaaatag

SEQ ID NO: 6028379 - DNA, 25 bp, Homo sapien
tgatgtttgttctgttgtccttttt

SEQ ID NO: 6028380 - DNA, 25 bp, Homo sapien
aatattacctctgcccctatcaggg

SEQ ID NO: 6028381 - DNA, 25 bp, Homo sapien
actgagaaacacagcaatcgtaagt

SEQ ID NO: 6028382 - DNA, 25 bp, Homo sapien
gtgaccactgagaaacacagcaatc

SEQ ID NO: 6028383 - DNA, 25 bp, Homo sapien
aaattctaaatttgaatatgcagag

SEQ ID NO: 6028384 - DNA, 25 bp, Homo sapien
cttaaattgcttgtgaccactgaga

SEQ ID NO: 6028385 - DNA, 25 bp, Homo sapien
caccctggtacgtcgtatataaact

SEQ ID NO: 6028386 - DNA, 25 bp, Homo sapien
gggatgttgagggaattaggtttgc

SEQ ID NO: 6028387 - DNA, 25 bp, Homo sapien
cgtatataaactgtattaaaactgg

SEQ ID NO: 6028388 - DNA, 25 bp, Homo sapien
cggtgagggaacacatagtactggt

SEQ ID NO: 6028389 - DNA, 25 bp, Homo sapien
acaatgcatgttttttatcctaaag

SEQ ID NO: 6028390 - DNA, 25 bp, Homo sapien
taacgacttaaattgcttgtgacca

SEQ ID NO: 6028391 - DNA, 25 bp, Homo sapien
aatgctcagtgtggagctggcgatt

SEQ ID NO: 6028392 - DNA, 25 bp, Homo sapien
tgttttccggtgagggaacacatag

SEQ ID NO: 6028393 - DNA, 25 bp, Homo sapien
ttccccttaccgattcattcctgtg

SEQ ID NO: 6028394 - DNA, 25 bp, Homo sapien
aagttaccatggtgttgaacaatgc

SEQ ID NO: 6028395 - DNA, 25 bp, Homo sapien
taaatttgaatatgcagagattgaa

SEQ ID NO: 6028396 - DNA, 25 bp, Homo sapien
cctctatgatgtttgttctgttgtc

SEQ ID NO: 6028397 - DNA, 25 bp, Homo sapien
cctgtgctcttggtgtatctatcca

SEQ ID NO: 6028398 - DNA, 25 bp, Homo sapien
ttttatcctaaagctcggtactgcc

SEQ ID NO: 6028399 - DNA, 25 bp, Homo sapien
cctctgcaccacgtgtcttagaatt

SEQ ID NO: 6028400 - DNA, 25 bp, Homo sapien
caccaagaaattctaaatttgaata

SEQ ID NO: 6028401 - DNA, 25 bp, Homo sapien
gtcttccaccctggtacgtcgtata

SEQ ID NO: 6028402 - DNA, 25 bp, Homo sapien
agctggcgattgcctttgggggggg

SEQ ID NO: 6028403 - DNA, 25 bp, Homo sapien
catgttttttatcctaaagctcggt

SEQ ID NO: 6028404 - DNA, 25 bp, Homo sapien
ctatccatcggtaatgctcagtgtg

SEQ ID NO: 6028405 - DNA, 25 bp, Homo sapien
caactgcattatattcctaaccctt

SEQ ID NO: 6028406 - DNA, 25 bp, Homo sapien
gtgtatctatccatcggtaatgctc

SEQ ID NO: 6028407 - DNA, 25 bp, Homo sapien
ctgccaccattctgatccctctgca

SEQ ID NO: 6028408 - DNA, 25 bp, Homo sapien
acatagtactggtaacgacttaaat

SEQ ID NO: 6028409 - DNA, 25 bp, Homo sapien
gtacgtcgtatataaactgtattaa

SEQ ID NO: 6028410 - DNA, 25 bp, Homo sapien
tactgccatctaggaaaacctctat

SEQ ID NO: 6028411 - DNA, 25 bp, Homo sapien
ttcattcctgtgctcttggtgtatc

SEQ ID NO: 6028412 - DNA, 25 bp, Homo sapien
tagaattaaggatccaaaagaagaa

SEQ ID NO: 6028413 - DNA, 25 bp, Homo sapien
ccattctgatccctctgcaccacgt

SEQ ID NO: 6028414 - DNA, 25 bp, Homo sapien
aaattacaactgcattatattccta

SEQ ID NO: 6028415 - DNA, 25 bp, Homo sapien
agcaatcgtaagtaaatagaaaagt

SEQ ID NO: 6028416 - DNA, 25 bp, Homo sapien
tctaagacacgtggtgcagagggat

SEQ ID NO: 6028417 - DNA, 25 bp, Homo sapien
ggatgggctgcaggagtggattcct

SEQ ID NO: 6028418 - DNA, 25 bp, Homo sapien
cttaattctaagacacgtggtgcag

SEQ ID NO: 6028419 - DNA, 25 bp, Homo sapien
atctctgcatattcaaatttagaat

SEQ ID NO: 6028420 - DNA, 25 bp, Homo sapien
gagatacaacaatgatgcagattta

SEQ ID NO: 6028421 - DNA, 25 bp, Homo sapien
ttattttctgaagcatacaatttat

SEQ ID NO: 6028422 - DNA, 25 bp, Homo sapien
gctgcaggagtggattcctcatgac

SEQ ID NO: 6028423 - DNA, 25 bp, Homo sapien
tctgaagcatacaatttataaaaaa

SEQ ID NO: 6028424 - DNA, 25 bp, Homo sapien
acatgcattgttcaacaccatggta

SEQ ID NO: 6028425 - DNA, 25 bp, Homo sapien
aacatcatagaggttttcctagatg

SEQ ID NO: 6028426 - DNA, 25 bp, Homo sapien
aatataatgcagttgtaatttcggg

SEQ ID NO: 6028427 - DNA, 25 bp, Homo sapien
tatatacaaagtacagcaactggta

SEQ ID NO: 6028428 - DNA, 25 bp, Homo sapien
ataggggagatacaacaatgatgca

SEQ ID NO: 6028429 - DNA, 25 bp, Homo sapien
caaagtacagcaactggtaagaaac

SEQ ID NO: 6028430 - DNA, 25 bp, Homo sapien
tatacgacgtaccagggtggaagac

SEQ ID NO: 6028431 - DNA, 25 bp, Homo sapien
cgtaccagggtggaagaccctgata

SEQ ID NO: 6028432 - DNA, 25 bp, Homo sapien
agtttatatacgacgtaccagggtg

SEQ ID NO: 6028433 - DNA, 25 bp, Homo sapien
aaattctatatacaaagtacagcaa

SEQ ID NO: 6028434 - DNA, 25 bp, Homo sapien
tgggctgcgggagcgggttcctggt

SEQ ID NO: 6028435 - DNA, 25 bp, Homo sapien
ttaggataaaaaacatgcattgttc

SEQ ID NO: 6028436 - DNA, 25 bp, Homo sapien
tcctggtgagcaatgtattctatac

SEQ ID NO: 6028437 - DNA, 25 bp, Homo sapien
aagaccctgataggggcagaggtaa

SEQ ID NO: 6028438 - DNA, 25 bp, Homo sapien
tattctatacatttcttggataggg

SEQ ID NO: 6028439 - DNA, 25 bp, Homo sapien
gagggatcagaatggtggcaggaaa

SEQ ID NO: 6028440 - DNA, 25 bp, Homo sapien
aaaaaggacaacagaacaaacatca

SEQ ID NO: 6028441 - DNA, 25 bp, Homo sapien
tgataggggcagaggtaatattcaa

SEQ ID NO: 6028442 - DNA, 25 bp, Homo sapien
taaaaaacatgcattgttcaacacc

SEQ ID NO: 6028443 - DNA, 25 bp, Homo sapien
ttcttttggatccttaattctaaga

SEQ ID NO: 6028444 - DNA, 25 bp, Homo sapien
aataaattattttctgaagcataca

SEQ ID NO: 6028445 - DNA, 25 bp, Homo sapien
tattcaatctctgcatattcaaatt

SEQ ID NO: 6028446 - DNA, 25 bp, Homo sapien
tggtggcaggaaaattaaaggtgaa

SEQ ID NO: 6028447 - DNA, 25 bp, Homo sapien
catttcttggatgggctgcaggagt

SEQ ID NO: 6028448 - DNA, 25 bp, Homo sapien
gaggtaatattcaatctctgcatat

SEQ ID NO: 6028449 - DNA, 25 bp, Homo sapien
taaaaataaattattttctgaagca

SEQ ID NO: 6028450 - DNA, 25 bp, Homo sapien
taaaaaattctatatacaaagtaca

SEQ ID NO: 6028451 - DNA, 25 bp, Homo sapien
cacatttcaaaatgggctgcgggag

SEQ ID NO: 6028452 - DNA, 25 bp, Homo sapien
cgagctttaggataaaaaacatgca

SEQ ID NO: 6028453 - DNA, 25 bp, Homo sapien
gttttcctagatggcagtaccgagc

SEQ ID NO: 6028454 - DNA, 25 bp, Homo sapien
tcatgaccaatgtattctatacatt

SEQ ID NO: 6028455 - DNA, 25 bp, Homo sapien
gggcagaggtaatattcaatctctg

SEQ ID NO: 6028456 - DNA, 25 bp, Homo sapien
tggatccttaattctaagacacgtg

SEQ ID NO: 6028457 - DNA, 25 bp, Homo sapien
tgtattctatacatttcttggatgg

SEQ ID NO: 6028458 - DNA, 25 bp, Homo sapien
gagcaatgtattctatacatttctt

SEQ ID NO: 6028459 - DNA, 25 bp, Homo sapien
gcagtaccgagctttaggataaaaa

SEQ ID NO: 6028460 - DNA, 25 bp, Homo sapien
gggtggaagaccctgataggggcag

SEQ ID NO: 6028461 - DNA, 25 bp, Homo sapien
tgaagggttaggaatataatgcagt

SEQ ID NO: 6028462 - DNA, 25 bp, Homo sapien
cagttttaatacagtttatatacga

SEQ ID NO: 6028463 - DNA, 25 bp, Homo sapien
gcatacaatttataaaaaattctat

SEQ ID NO: 6028464 - DNA, 25 bp, Homo sapien
caaatttagaatttcttggtggagg

SEQ ID NO: 6028465 - DNA, 25 bp, Homo sapien
taatacagtttatatacgacgtacc

SEQ ID NO: 6028466 - DNA, 25 bp, Homo sapien
acagggcacatttcaaaatgggctg

SEQ ID NO: 6028467 - DNA, 25 bp, Homo sapien
gcgggttcctggtgagcaatgtatt

SEQ ID NO: 6028468 - DNA, 25 bp, Homo sapien
tctatacatttcttggatgggctgc

SEQ ID NO: 6028469 - DNA, 25 bp, Homo sapien
attgttcaacaccatggtaactttt

SEQ ID NO: 6028470 - DNA, 25 bp, Homo sapien
tcaaaatgggctgcgggagcgggtt

SEQ ID NO: 6028471 - DNA, 25 bp, Homo sapien
ggagtggattcctcatgaccaatgt

SEQ ID NO: 6028472 - DNA, 25 bp, Homo sapien
tcttggataggggagatacaacaat

SEQ ID NO: 6028473 - DNA, 25 bp, Homo sapien
tgcagttgtaatttcggggaagccc

SEQ ID NO: 6028474 - DNA, 25 bp, Homo sapien
caacaatgatgcagatttaaaactt

SEQ ID NO: 6028475 - DNA, 25 bp, Homo sapien
cagcaactggtaagaaaccccagtt

SEQ ID NO: 6028476 - DNA, 25 bp, Homo sapien
tcagaatggtggcaggaaaattaaa

SEQ ID NO: 6028477 - DNA, 25 bp, Homo sapien
tagatggcagtaccgagctttagga

SEQ ID NO: 6028478 - DNA, 25 bp, Homo sapien
gcgggagcgggttcctggtgagcaa

SEQ ID NO: 6028479 - DNA, 25 bp, Homo sapien
gacaacagaacaaacatcatagagg

SEQ ID NO: 6028480 - DNA, 25 bp, Homo sapien
tgatgcagatttaaaacttttaatt

SEQ ID NO: 6028481 - DNA, 25 bp, Homo sapien
tacatttcttggataggggagatac

SEQ ID NO: 6028482 - DNA, 25 bp, Homo sapien
gattcctcatgaccaatgtattcta

SEQ ID NO: 6028483 - DNA, 25 bp, Homo sapien
agaacaaacatcatagaggttttcc

SEQ ID NO: 6028484 - DNA, 25 bp, Homo sapien
aaggtgaagggttaggaatataatg

SEQ ID NO: 6028485 - DNA, 25 bp, Homo sapien
gttaggaatataatgcagttgtaat

SEQ ID NO: 6028486 - DNA, 25 bp, Homo sapien
ccaatgtattctatacatttcttgg

SEQ ID NO: 6028487 - DNA, 25 bp, Homo sapien
atagaggttttcctagatggcagta

SEQ ID NO: 6028488 - DNA, 25 bp, Homo sapien
ggtgcagagggatcagaatggtggc

SEQ ID NO: 6028489 - DNA, 25 bp, Homo sapien
acacgtggtgcagagggatcagaat

SEQ ID NO: 6028490 - DNA, 25 bp, Homo sapien
cttctttgacatcagtgatgagagt

SEQ ID NO: 6028491 - DNA, 25 bp, Homo sapien
ttgcaatgatgagaggatggcagca

SEQ ID NO: 6028492 - DNA, 25 bp, Homo sapien
tttaaatgaatggacaacaatgtac

SEQ ID NO: 6028493 - DNA, 25 bp, Homo sapien
cctacctcctcgctgctctctgcat

SEQ ID NO: 6028494 - DNA, 25 bp, Homo sapien
aaagctgacagtgccggtggtgccc

SEQ ID NO: 6028495 - DNA, 25 bp, Homo sapien
gtgcccttcggagttcgagtacaac

SEQ ID NO: 6028496 - DNA, 25 bp, Homo sapien
ggttgacaccagcaagccagacata

SEQ ID NO: 6028497 - DNA, 25 bp, Homo sapien
tggaagcggatgtgaatatcagcag

SEQ ID NO: 6028498 - DNA, 25 bp, Homo sapien
caacaacccagaagtccaggttgac

SEQ ID NO: 6028499 - DNA, 25 bp, Homo sapien
gtacctgtttgcagtgacaggaaat

SEQ ID NO: 6028500 - DNA, 25 bp, Homo sapien
catcctgtttctcgctgtgcaggga

SEQ ID NO: 6028501 - DNA, 25 bp, Homo sapien
aagcaggtacctgtttgcagtgaca

SEQ ID NO: 6028502 - DNA, 25 bp, Homo sapien
gttcatcatcagaaagttcaaaggc

SEQ ID NO: 6028503 - DNA, 25 bp, Homo sapien
gaagtggaagcggatgtgaatatca

SEQ ID NO: 6028504 - DNA, 25 bp, Homo sapien
ggaagagtgccaacgagaaagctga

SEQ ID NO: 6028505 - DNA, 25 bp, Homo sapien
agagacaaagccctacctcctcgct

SEQ ID NO: 6028506 - DNA, 25 bp, Homo sapien
caaagccctacctcctcgctgctct

SEQ ID NO: 6028507 - DNA, 25 bp, Homo sapien
cagtgatgagagtagtggagaggga

SEQ ID NO: 6028508 - DNA, 25 bp, Homo sapien
tgacatcagtgatgagagtagtgga

SEQ ID NO: 6028509 - DNA, 25 bp, Homo sapien
tcagcagtgcccttcggagttcgag

SEQ ID NO: 6028510 - DNA, 25 bp, Homo sapien
tgaatatcagcagtgcccttcggag

SEQ ID NO: 6028511 - DNA, 25 bp, Homo sapien
catcagaaagttcaaaggcaccaag

SEQ ID NO: 6028512 - DNA, 25 bp, Homo sapien
ggccaaccagggcaacaacccagaa

SEQ ID NO: 6028513 - DNA, 25 bp, Homo sapien
gtacaacgccactgaccattctggg

SEQ ID NO: 6028514 - DNA, 25 bp, Homo sapien
cccagaagtccaggttgacaccagc

SEQ ID NO: 6028515 - DNA, 25 bp, Homo sapien
tgacagtgccggtggtgcccatgca

SEQ ID NO: 6028516 - DNA, 25 bp, Homo sapien
tggtgcccatgcagagacaaagccc

SEQ ID NO: 6028517 - DNA, 25 bp, Homo sapien
aggcaaaagcaggtacctgtttgca

SEQ ID NO: 6028518 - DNA, 25 bp, Homo sapien
aaatgacgtggacttctttgacatc

SEQ ID NO: 6028519 - DNA, 25 bp, Homo sapien
tgaaaatgaggatgactgctggaat

SEQ ID NO: 6028520 - DNA, 25 bp, Homo sapien
ccagggcaacaacccagaagtccag

SEQ ID NO: 6028521 - DNA, 25 bp, Homo sapien
cggatgtgaatatcagcagtgccct

SEQ ID NO: 6028522 - DNA, 25 bp, Homo sapien
tgatgagaggatggcagcaggaaat

SEQ ID NO: 6028523 - DNA, 25 bp, Homo sapien
gttcgagtacaacgccactgaccat

SEQ ID NO: 6028524 - DNA, 25 bp, Homo sapien
gctgtgcagggagagtggagataat

SEQ ID NO: 6028525 - DNA, 25 bp, Homo sapien
caagccagacatactgatccttcgt

SEQ ID NO: 6028526 - DNA, 25 bp, Homo sapien
ccttcgggttatgaccagtaaaatg

SEQ ID NO: 6028527 - DNA, 25 bp, Homo sapien
agacatactgatccttcgtcagatc

SEQ ID NO: 6028528 - DNA, 25 bp, Homo sapien
aggaaatggattggccaaccagggc

SEQ ID NO: 6028529 - DNA, 25 bp, Homo sapien
catcctagtgactttgctttttaaa

SEQ ID NO: 6028530 - DNA, 25 bp, Homo sapien
tgaatggacaacaatgtacagtttt

SEQ ID NO: 6028531 - DNA, 25 bp, Homo sapien
gtgactttgctttttaaatgaatgg

SEQ ID NO: 6028532 - DNA, 25 bp, Homo sapien
gagagggaagtggaagcggatgtga

SEQ ID NO: 6028533 - DNA, 25 bp, Homo sapien
aattgtcaaactctgagtaaaagcg

SEQ ID NO: 6028534 - DNA, 25 bp, Homo sapien
caaactctgagtaaaagcgttcatc

SEQ ID NO: 6028535 - DNA, 25 bp, Homo sapien
gaccagtaaaatgaagaatgcttac

SEQ ID NO: 6028536 - DNA, 25 bp, Homo sapien
gaagaatgcttacaatggaaatgac

SEQ ID NO: 6028537 - DNA, 25 bp, Homo sapien
tgaccattctgggaagagtgccaac

SEQ ID NO: 6028538 - DNA, 25 bp, Homo sapien
caaaggcaccaagttctcacttttt

SEQ ID NO: 6028539 - DNA, 25 bp, Homo sapien
cgtggacttctttgacatcagtgat

SEQ ID NO: 6028540 - DNA, 25 bp, Homo sapien
ggttatgaccagtaaaatgaagaat

SEQ ID NO: 6028541 - DNA, 25 bp, Homo sapien
tttctcgctgtgcagggagagtgga

SEQ ID NO: 6028542 - DNA, 25 bp, Homo sapien
gagagtggagataattgtcaaactc

SEQ ID NO: 6028543 - DNA, 25 bp, Homo sapien
tgactgctggaatggcaaaggcaaa

SEQ ID NO: 6028544 - DNA, 25 bp, Homo sapien
ctggaatggcaaaggcaaaagcagg

SEQ ID NO: 6028545 - DNA, 25 bp, Homo sapien
aaagttcaaaggcaccaagttctca

SEQ ID NO: 6028546 - DNA, 25 bp, Homo sapien
agtgacaggaaatggattggccaac

SEQ ID NO: 6028547 - DNA, 25 bp, Homo sapien
gctgctctctgcatcctgtttctcg

SEQ ID NO: 6028548 - DNA, 25 bp, Homo sapien
atggcccttcgggttatgaccagta

SEQ ID NO: 6028549 - DNA, 25 bp, Homo sapien
gtagtggagagggaagtggaagcgg

SEQ ID NO: 6028550 - DNA, 25 bp, Homo sapien
tggcaaaggcaaaagcaggtacctg

SEQ ID NO: 6028551 - DNA, 25 bp, Homo sapien
caccagcaagccagacatactgatc

SEQ ID NO: 6028552 - DNA, 25 bp, Homo sapien
aatgtacagtttttactgtgtggcc

SEQ ID NO: 6028553 - DNA, 25 bp, Homo sapien
taaaatgaagaatgcttacaatgga

SEQ ID NO: 6028554 - DNA, 25 bp, Homo sapien
gccggtggtgcccatgcagagacaa

SEQ ID NO: 6028555 - DNA, 25 bp, Homo sapien
tgaggatgactgctggaatggcaaa

SEQ ID NO: 6028556 - DNA, 25 bp, Homo sapien
ccatgcagagacaaagccctacctc

SEQ ID NO: 6028557 - DNA, 25 bp, Homo sapien
agtgccaacgagaaagctgacagtg

SEQ ID NO: 6028558 - DNA, 25 bp, Homo sapien
ggagataattgtcaaactctgagta

SEQ ID NO: 6028559 - DNA, 25 bp, Homo sapien
tgcttacaatggaaatgacgtggac

SEQ ID NO: 6028560 - DNA, 25 bp, Homo sapien
caatggaaatgacgtggacttcttt

SEQ ID NO: 6028561 - DNA, 25 bp, Homo sapien
cgccactgaccattctgggaagagt

SEQ ID NO: 6028562 - DNA, 25 bp, Homo sapien
attctgggaagagtgccaacgagaa

SEQ ID NO: 6028563 - DNA, 25 bp, Homo sapien
ggcagcaggaaatgaaaatgaggat

SEQ ID NO: 6028564 - DNA, 25 bp, Homo sapien
aggaaatgaaaatgaggatgactgc

SEQ ID NO: 6028565 - DNA, 25 bp, Homo sapien
agtccaggttgacaccagcaagcca

SEQ ID NO: 6028566 - DNA, 25 bp, Homo sapien
gacaacaatgtacagtttttactgt

SEQ ID NO: 6028567 - DNA, 25 bp, Homo sapien
ctgagtaaaagcgttcatcatcaga

SEQ ID NO: 6028568 - DNA, 25 bp, Homo sapien
tggattggccaaccagggcaacaac

SEQ ID NO: 6028569 - DNA, 25 bp, Homo sapien
ccttcgtcagatcatggcccttcgg

SEQ ID NO: 6028570 - DNA, 25 bp, Homo sapien
cagggagagtggagataattgtcaa

SEQ ID NO: 6028571 - DNA, 25 bp, Homo sapien
ctcctcgctgctctctgcatcctgt

SEQ ID NO: 6028572 - DNA, 25 bp, Homo sapien
gtttgcagtgacaggaaatggattg

SEQ ID NO: 6028573 - DNA, 25 bp, Homo sapien
aacgagaaagctgacagtgccggtg

SEQ ID NO: 6028574 - DNA, 25 bp, Homo sapien
ttgctttttaaatgaatggacaaca

SEQ ID NO: 6028575 - DNA, 25 bp, Homo sapien
tttaaccatcctagtgactttgctt

SEQ ID NO: 6028576 - DNA, 25 bp, Homo sapien
aaaagcgttcatcatcagaaagttc

SEQ ID NO: 6028577 - DNA, 25 bp, Homo sapien
ttcggagttcgagtacaacgccact

SEQ ID NO: 6028578 - DNA, 25 bp, Homo sapien
caccgtttgcaatgatgagaggatg

SEQ ID NO: 6028579 - DNA, 25 bp, Homo sapien
tgagagtagtggagagggaagtgga

SEQ ID NO: 6028580 - DNA, 25 bp, Homo sapien
tctctgcatcctgtttctcgctgtg

SEQ ID NO: 6028581 - DNA, 25 bp, Homo sapien
gaggatggcagcaggaaatgaaaat

SEQ ID NO: 6028582 - DNA, 25 bp, Homo sapien
actgatccttcgtcagatcatggcc

SEQ ID NO: 6028583 - DNA, 25 bp, Homo sapien
tccctgcacagcgagaaacaggatg

SEQ ID NO: 6028584 - DNA, 25 bp, Homo sapien
aacaagatcaccaatgcacaactaa

SEQ ID NO: 6028585 - DNA, 25 bp, Homo sapien
cactgctagccacgcagaacacgag

SEQ ID NO: 6028586 - DNA, 25 bp, Homo sapien
cttctgtacagctatttaatatttc

SEQ ID NO: 6028587 - DNA, 25 bp, Homo sapien
cagagagcagcgaggaggtagggct

SEQ ID NO: 6028588 - DNA, 25 bp, Homo sapien
taaaccagtggccacacagtaaaaa

SEQ ID NO: 6028589 - DNA, 25 bp, Homo sapien
gagcaaaacaaagtcaacattgctt

SEQ ID NO: 6028590 - DNA, 25 bp, Homo sapien
taaaaagcaaagtcactaggatggt

SEQ ID NO: 6028591 - DNA, 25 bp, Homo sapien
aaaaagtgagaacttggtgcctttg

SEQ ID NO: 6028592 - DNA, 25 bp, Homo sapien
ctggttttcttgtgagaaacaaggt

SEQ ID NO: 6028593 - DNA, 25 bp, Homo sapien
acaaataaaatgagagaagccaaca

SEQ ID NO: 6028594 - DNA, 25 bp, Homo sapien
ttgacaattatctccactctccctg

SEQ ID NO: 6028595 - DNA, 25 bp, Homo sapien
ccccgctgtcccctcaaactgaatg

SEQ ID NO: 6028596 - DNA, 25 bp, Homo sapien
cgcagaacacgagtctcaaaggagg

SEQ ID NO: 6028597 - DNA, 25 bp, Homo sapien
acgtacatgttacatgccaagaaag

SEQ ID NO: 6028598 - DNA, 25 bp, Homo sapien
aggatgcagagagcagcgaggaggt

SEQ ID NO: 6028599 - DNA, 25 bp, Homo sapien
gtaaaaactgtacattgttgtccat

SEQ ID NO: 6028600 - DNA, 25 bp, Homo sapien
ttgaactttctgatgatgaacgctt

SEQ ID NO: 6028601 - DNA, 25 bp, Homo sapien
gccaacaaagaaaacaagatcacca

SEQ ID NO: 6028602 - DNA, 25 bp, Homo sapien
ttcttgtgagaaacaaggtgagacc

SEQ ID NO: 6028603 - DNA, 25 bp, Homo sapien
attgcttaaaccagtggccacacag

SEQ ID NO: 6028604 - DNA, 25 bp, Homo sapien
cagagtttgacaattatctccactc

SEQ ID NO: 6028605 - DNA, 25 bp, Homo sapien
acagggataaatggaaattttccag

SEQ ID NO: 6028606 - DNA, 25 bp, Homo sapien
acagcgagaaacaggatgcagagag

SEQ ID NO: 6028607 - DNA, 25 bp, Homo sapien
tagccacgcagaacacgagtctcaa

SEQ ID NO: 6028608 - DNA, 25 bp, Homo sapien
aacgcttttactcagagtttgacaa

SEQ ID NO: 6028609 - DNA, 25 bp, Homo sapien
agtggccacacagtaaaaactgtac

SEQ ID NO: 6028610 - DNA, 25 bp, Homo sapien
aaagaaaacaagatcaccaatgcac

SEQ ID NO: 6028611 - DNA, 25 bp, Homo sapien
taaataaacctgcttctgtacagct

SEQ ID NO: 6028612 - DNA, 25 bp, Homo sapien
aagataacatgataaataaacctgc

SEQ ID NO: 6028613 - DNA, 25 bp, Homo sapien
gctaaaataacagggataaatggaa

SEQ ID NO: 6028614 - DNA, 25 bp, Homo sapien
aaccccacaaataaaatgagagaag

SEQ ID NO: 6028615 - DNA, 25 bp, Homo sapien
tttactcagagtttgacaattatct

SEQ ID NO: 6028616 - DNA, 25 bp, Homo sapien
aaaatgagagaagccaacaaagaaa

SEQ ID NO: 6028617 - DNA, 25 bp, Homo sapien
agtctcaaaggaggggggaggtgag

SEQ ID NO: 6028618 - DNA, 25 bp, Homo sapien
tttctgatgatgaacgcttttactc

SEQ ID NO: 6028619 - DNA, 25 bp, Homo sapien
gttctgtacctacactgctagccac

SEQ ID NO: 6028620 - DNA, 25 bp, Homo sapien
cattgttgtccattcatttaaaaag

SEQ ID NO: 6028621 - DNA, 25 bp, Homo sapien
caactaactacagttctgtacctac

SEQ ID NO: 6028622 - DNA, 25 bp, Homo sapien
gtcaacattgcttaaaccagtggcc

SEQ ID NO: 6028623 - DNA, 25 bp, Homo sapien
atcaccaatgcacaactaactacag

SEQ ID NO: 6028624 - DNA, 25 bp, Homo sapien
agagaagccaacaaagaaaacaaga

SEQ ID NO: 6028625 - DNA, 25 bp, Homo sapien
ttcttttaataagataacatgataa

SEQ ID NO: 6028626 - DNA, 25 bp, Homo sapien
catgccaagaaaggaccctggtttt

SEQ ID NO: 6028627 - DNA, 25 bp, Homo sapien
agtgagaacttggtgcctttgaact

SEQ ID NO: 6028628 - DNA, 25 bp, Homo sapien
gtgcctttgaactttctgatgatga

SEQ ID NO: 6028629 - DNA, 25 bp, Homo sapien
tgtcccctcaaactgaatgagcaaa

SEQ ID NO: 6028630 - DNA, 25 bp, Homo sapien
ttaaaggcaggaggccccgctgtcc

SEQ ID NO: 6028631 - DNA, 25 bp, Homo sapien
tgagaccataattggaaaagaaaaa

SEQ ID NO: 6028632 - DNA, 25 bp, Homo sapien
gaccctggttttcttgtgagaaaca

SEQ ID NO: 6028633 - DNA, 25 bp, Homo sapien
caggaggccccgctgtcccctcaaa

SEQ ID NO: 6028634 - DNA, 25 bp, Homo sapien
tatttcagaaatacgtacatgttac

SEQ ID NO: 6028635 - DNA, 25 bp, Homo sapien
acaaggtgagaccataattggaaaa

SEQ ID NO: 6028636 - DNA, 25 bp, Homo sapien
agaaacaggatgcagagagcagcga

SEQ ID NO: 6028637 - DNA, 25 bp, Homo sapien
aacaaagtcaacattgcttaaacca

SEQ ID NO: 6028638 - DNA, 25 bp, Homo sapien
gcaaagtcactaggatggttaaaaa

SEQ ID NO: 6028639 - DNA, 25 bp, Homo sapien
tacctacactgctagccacgcagaa

SEQ ID NO: 6028640 - DNA, 25 bp, Homo sapien
tgagaaacaaggtgagaccataatt

SEQ ID NO: 6028641 - DNA, 25 bp, Homo sapien
tacagctatttaatatttcagaaat

SEQ ID NO: 6028642 - DNA, 25 bp, Homo sapien
actgtacattgttgtccattcattt

SEQ ID NO: 6028643 - DNA, 25 bp, Homo sapien
acacgagtctcaaaggaggggggag

SEQ ID NO: 6028644 - DNA, 25 bp, Homo sapien
taataagataacatgataaataaac

SEQ ID NO: 6028645 - DNA, 25 bp, Homo sapien
gataaatggaaattttccagcttgt

SEQ ID NO: 6028646 - DNA, 25 bp, Homo sapien
tatttaatatttcagaaatacgtac

SEQ ID NO: 6028647 - DNA, 25 bp, Homo sapien
aacctgcttctgtacagctatttaa

SEQ ID NO: 6028648 - DNA, 25 bp, Homo sapien
actacagttctgtacctacactgct

SEQ ID NO: 6028649 - DNA, 25 bp, Homo sapien
cacacagtaaaaactgtacattgtt

SEQ ID NO: 6028650 - DNA, 25 bp, Homo sapien
ctcaaactgaatgagcaaaacaaag

SEQ ID NO: 6028651 - DNA, 25 bp, Homo sapien
atgttacatgccaagaaaggaccct

SEQ ID NO: 6028652 - DNA, 25 bp, Homo sapien
atgatgaacgcttttactcagagtt

SEQ ID NO: 6028653 - DNA, 25 bp, Homo sapien
ttatctccactctccctgcacagcg

SEQ ID NO: 6028654 - DNA, 25 bp, Homo sapien
aatgcacaactaactacagttctgt

SEQ ID NO: 6028655 - DNA, 25 bp, Homo sapien
ttcatttaaaaagcaaagtcactag

SEQ ID NO: 6028656 - DNA, 25 bp, Homo sapien
agaaatacgtacatgttacatgcca

SEQ ID NO: 6028657 - DNA, 25 bp, Homo sapien
tggaaattttccagcttgtttgggc

SEQ ID NO: 6028658 - DNA, 25 bp, Homo sapien
aacttggtgcctttgaactttctga

SEQ ID NO: 6028659 - DNA, 25 bp, Homo sapien
acatgataaataaacctgcttctgt

SEQ ID NO: 6028660 - DNA, 25 bp, Homo sapien
ccactctccctgcacagcgagaaac

SEQ ID NO: 6028661 - DNA, 25 bp, Homo sapien
ctttttcttttaataagataacatg

SEQ ID NO: 6028662 - DNA, 25 bp, Homo sapien
tgtccattcatttaaaaagcaaagt

SEQ ID NO: 6028663 - DNA, 25 bp, Homo sapien
ctgaatgagcaaaacaaagtcaaca

SEQ ID NO: 6028664 - DNA, 25 bp, Homo sapien
tgtagtgtatctacttgatcgatca

SEQ ID NO: 6028665 - DNA, 25 bp, Homo sapien
ggttgggtaatgctcccattgattc

SEQ ID NO: 6028666 - DNA, 25 bp, Homo sapien
agccattggttataggtaatagctt

SEQ ID NO: 6028667 - DNA, 25 bp, Homo sapien
tttaaacaggagctgttcacctttg

SEQ ID NO: 6028668 - DNA, 25 bp, Homo sapien
gcatctttaattgatggaaagatca

SEQ ID NO: 6028669 - DNA, 25 bp, Homo sapien
ccggctcgatgtctattgtagatat

SEQ ID NO: 6028670 - DNA, 25 bp, Homo sapien
actataatttatgttagaggcgaag

SEQ ID NO: 6028671 - DNA, 25 bp, Homo sapien
caaaagtcttgcgtccaaccaacag

SEQ ID NO: 6028672 - DNA, 25 bp, Homo sapien
aatttatgttagaggcgaagtcttg

SEQ ID NO: 6028673 - DNA, 25 bp, Homo sapien
ctgttcacctttggcactccatgga

SEQ ID NO: 6028674 - DNA, 25 bp, Homo sapien
ataggtaatagctttaaacaggagc

SEQ ID NO: 6028675 - DNA, 25 bp, Homo sapien
tttcaggaaagtaaacatcaccttc

SEQ ID NO: 6028676 - DNA, 25 bp, Homo sapien
cttgttaacccttttgccagatttg

SEQ ID NO: 6028677 - DNA, 25 bp, Homo sapien
tcgatcaggcttttgtatatctccc

SEQ ID NO: 6028678 - DNA, 25 bp, Homo sapien
acttgatcgatcaggcttttgtata

SEQ ID NO: 6028679 - DNA, 25 bp, Homo sapien
caatgtttccgccacctgctcaggg

SEQ ID NO: 6028680 - DNA, 25 bp, Homo sapien
ttttgccagatttggtaactataat

SEQ ID NO: 6028681 - DNA, 25 bp, Homo sapien
gatatatgtagtgtatctacttgat

SEQ ID NO: 6028682 - DNA, 25 bp, Homo sapien
gacgcctaacgcctggcacagcgga

SEQ ID NO: 6028683 - DNA, 25 bp, Homo sapien
tggttataggtaatagctttaaaca

SEQ ID NO: 6028684 - DNA, 25 bp, Homo sapien
aaactggcctaaaattgctggggat

SEQ ID NO: 6028685 - DNA, 25 bp, Homo sapien
gcctaaaattgctggggatttcagg

SEQ ID NO: 6028686 - DNA, 25 bp, Homo sapien
caccacctgaaacaatgacatgatc

SEQ ID NO: 6028687 - DNA, 25 bp, Homo sapien
aggtttgcgaatccgttgctgccac

SEQ ID NO: 6028688 - DNA, 25 bp, Homo sapien
gggccattcccgataactccattct

SEQ ID NO: 6028689 - DNA, 25 bp, Homo sapien
cctttggcactccatggaatatcag

SEQ ID NO: 6028690 - DNA, 25 bp, Homo sapien
caggagctgttcacctttggcactc

SEQ ID NO: 6028691 - DNA, 25 bp, Homo sapien
gtatctacttgatcgatcaggcttt

SEQ ID NO: 6028692 - DNA, 25 bp, Homo sapien
cctgctcagggatcaccgaaatctt

SEQ ID NO: 6028693 - DNA, 25 bp, Homo sapien
cgatgtctattgtagatatatgtag

SEQ ID NO: 6028694 - DNA, 25 bp, Homo sapien
ctaacgcctggcacagcggatcgca

SEQ ID NO: 6028695 - DNA, 25 bp, Homo sapien
ggcacaaaaggcgtgacaggtttgc

SEQ ID NO: 6028696 - DNA, 25 bp, Homo sapien
atatcagggccattcccgataactc

SEQ ID NO: 6028697 - DNA, 25 bp, Homo sapien
ttgattcaaaagtcttgcgtccaac

SEQ ID NO: 6028698 - DNA, 25 bp, Homo sapien
cgttgctgccacttgttaacccttt

SEQ ID NO: 6028699 - DNA, 25 bp, Homo sapien
aaacatcaccttccggctcgatgtc

SEQ ID NO: 6028700 - DNA, 25 bp, Homo sapien
caatgacatgatccgttattttctt

SEQ ID NO: 6028701 - DNA, 25 bp, Homo sapien
gaaagtaaacatcaccttccggctc

SEQ ID NO: 6028702 - DNA, 25 bp, Homo sapien
caccttccggctcgatgtctattgt

SEQ ID NO: 6028703 - DNA, 25 bp, Homo sapien
atgatccgttattttctttaggttg

SEQ ID NO: 6028704 - DNA, 25 bp, Homo sapien
ttaattgatggaaagatcaatacgt

SEQ ID NO: 6028705 - DNA, 25 bp, Homo sapien
ggatcgcaaacctggcgcggctttt

SEQ ID NO: 6028706 - DNA, 25 bp, Homo sapien
cagggatcaccgaaatcttcatatg

SEQ ID NO: 6028707 - DNA, 25 bp, Homo sapien
aaacttgaacgtgttacgaccgcat

SEQ ID NO: 6028708 - DNA, 25 bp, Homo sapien
agcatccaatgtttccgccacctgc

SEQ ID NO: 6028709 - DNA, 25 bp, Homo sapien
ctcccattgattcaaaagtcttgcg

SEQ ID NO: 6028710 - DNA, 25 bp, Homo sapien
gtccaaccaacagccattggttata

SEQ ID NO: 6028711 - DNA, 25 bp, Homo sapien
catggaatatcagggccattcccga

SEQ ID NO: 6028712 - DNA, 25 bp, Homo sapien
aggcttttgtatatctccccaccac

SEQ ID NO: 6028713 - DNA, 25 bp, Homo sapien
tggggatttcaggaaagtaaacatc

SEQ ID NO: 6028714 - DNA, 25 bp, Homo sapien
gttaaagcatctttaattgatggaa

SEQ ID NO: 6028715 - DNA, 25 bp, Homo sapien
tctccccaccacctgaaacaatgac

SEQ ID NO: 6028716 - DNA, 25 bp, Homo sapien
tgttacgaccgcatactttcggttg

SEQ ID NO: 6028717 - DNA, 25 bp, Homo sapien
aaatcttcatatgacgcctaacgcc

SEQ ID NO: 6028718 - DNA, 25 bp, Homo sapien
ccaacagccattggttataggtaat

SEQ ID NO: 6028719 - DNA, 25 bp, Homo sapien
tatcgaattctcagcatccaatgtt

SEQ ID NO: 6028720 - DNA, 25 bp, Homo sapien
gcttttggcacaaaaggcgtgacag

SEQ ID NO: 6028721 - DNA, 25 bp, Homo sapien
gcactccatggaatatcagggccat

SEQ ID NO: 6028722 - DNA, 25 bp, Homo sapien
cgaatccgttgctgccacttgttaa

SEQ ID NO: 6028723 - DNA, 25 bp, Homo sapien
aaaaggcgtgacaggtttgcgaatc

SEQ ID NO: 6028724 - DNA, 25 bp, Homo sapien
ttgtcagatgtaaaacttgaacgtg

SEQ ID NO: 6028725 - DNA, 25 bp, Homo sapien
tcttgcgtccaaccaacagccattg

SEQ ID NO: 6028726 - DNA, 25 bp, Homo sapien
ctgaaacaatgacatgatccgttat

SEQ ID NO: 6028727 - DNA, 25 bp, Homo sapien
cacagcggatcgcaaacctggcgcg

SEQ ID NO: 6028728 - DNA, 25 bp, Homo sapien
gatgtaaaacttgaacgtgttacga

SEQ ID NO: 6028729 - DNA, 25 bp, Homo sapien
tgtatatctccccaccacctgaaac

SEQ ID NO: 6028730 - DNA, 25 bp, Homo sapien
ttctcattgtcagatgtaaaacttg

SEQ ID NO: 6028731 - DNA, 25 bp, Homo sapien
actttcggttgggtaatgctcccat

SEQ ID NO: 6028732 - DNA, 25 bp, Homo sapien
aattgctggggatttcaggaaagta

SEQ ID NO: 6028733 - DNA, 25 bp, Homo sapien
tggtaactataatttatgttagagg

SEQ ID NO: 6028734 - DNA, 25 bp, Homo sapien
cgtgacaggtttgcgaatccgttgc

SEQ ID NO: 6028735 - DNA, 25 bp, Homo sapien
aagatcaatacgttctcattgtcag

SEQ ID NO: 6028736 - DNA, 25 bp, Homo sapien
cctggcacagcggatcgcaaacctg

SEQ ID NO: 6028737 - DNA, 25 bp, Homo sapien
caaacctggcgcggcttttggcaca

SEQ ID NO: 6028738 - DNA, 25 bp, Homo sapien
aatacgttctcattgtcagatgtaa

SEQ ID NO: 6028739 - DNA, 25 bp, Homo sapien
tcatatgacgcctaacgcctggcac

SEQ ID NO: 6028740 - DNA, 25 bp, Homo sapien
gccacctgctcagggatcaccgaaa

SEQ ID NO: 6028741 - DNA, 25 bp, Homo sapien
tggcgcggcttttggcacaaaaggc

SEQ ID NO: 6028742 - DNA, 25 bp, Homo sapien
tcaccgaaatcttcatatgacgcct

SEQ ID NO: 6028743 - DNA, 25 bp, Homo sapien
tgttagaggcgaagtcttgggtaaa

SEQ ID NO: 6028744 - DNA, 25 bp, Homo sapien
ctgccacttgttaacccttttgcca

SEQ ID NO: 6028745 - DNA, 25 bp, Homo sapien
attctcagcatccaatgtttccgcc

SEQ ID NO: 6028746 - DNA, 25 bp, Homo sapien
aggttggttaaagcatctttaattg

SEQ ID NO: 6028747 - DNA, 25 bp, Homo sapien
cgcatactttcggttgggtaatgct

SEQ ID NO: 6028748 - DNA, 25 bp, Homo sapien
tgaacgtgttacgaccgcatacttt

SEQ ID NO: 6028749 - DNA, 25 bp, Homo sapien
cagatttggtaactataatttatgt

SEQ ID NO: 6028750 - DNA, 25 bp, Homo sapien
gtttccgccacctgctcagggatca

SEQ ID NO: 6028751 - DNA, 25 bp, Homo sapien
ctattgtagatatatgtagtgtatc

SEQ ID NO: 6028752 - DNA, 25 bp, Homo sapien
gtaatgctcccattgattcaaaagt

SEQ ID NO: 6028753 - DNA, 25 bp, Homo sapien
aatagctttaaacaggagctgttca

SEQ ID NO: 6028754 - DNA, 25 bp, Homo sapien
gatggaaagatcaatacgttctcat

SEQ ID NO: 6028755 - DNA, 25 bp, Homo sapien
gtatccatgacacgctatttctacc

SEQ ID NO: 6028756 - DNA, 25 bp, Homo sapien
tgacacgctatttctacctttttcc

SEQ ID NO: 6028757 - DNA, 25 bp, Homo sapien
aggttcaacactcatttgaggtccc

SEQ ID NO: 6028758 - DNA, 25 bp, Homo sapien
acccagatgcccactattgagagag

SEQ ID NO: 6028759 - DNA, 25 bp, Homo sapien
catttgaggtcccaggtgaactgac

SEQ ID NO: 6028760 - DNA, 25 bp, Homo sapien
agtcaagtattgctgtagctgagaa

SEQ ID NO: 6028761 - DNA, 25 bp, Homo sapien
aatttactcacaaggaagatcttat

SEQ ID NO: 6028762 - DNA, 25 bp, Homo sapien
aatatcataaggctagataatttcc

SEQ ID NO: 6028763 - DNA, 25 bp, Homo sapien
atgaaaagtatagattcgttccttc

SEQ ID NO: 6028764 - DNA, 25 bp, Homo sapien
agtatagattcgttccttccttcca

SEQ ID NO: 6028765 - DNA, 25 bp, Homo sapien
gaaacctgatacgtaaaattttgca

SEQ ID NO: 6028766 - DNA, 25 bp, Homo sapien
catgcagttcccagtcaagtattgc

SEQ ID NO: 6028767 - DNA, 25 bp, Homo sapien
gctcatcttttactttattttatta

SEQ ID NO: 6028768 - DNA, 25 bp, Homo sapien
tgatacgtaaaattttgcatgaaaa

SEQ ID NO: 6028769 - DNA, 25 bp, Homo sapien
cagttagatattttatacaatatca

SEQ ID NO: 6028770 - DNA, 25 bp, Homo sapien
agtaagaatttactcacaaggaaga

SEQ ID NO: 6028771 - DNA, 25 bp, Homo sapien
aaaaagacactaaagaacaaagatg

SEQ ID NO: 6028772 - DNA, 25 bp, Homo sapien
gttcccagtcaagtattgctgtagc

SEQ ID NO: 6028773 - DNA, 25 bp, Homo sapien
tcttctttgtaaaatgaataaagga

SEQ ID NO: 6028774 - DNA, 25 bp, Homo sapien
tggaacttcttctttgtaaaatgaa

SEQ ID NO: 6028775 - DNA, 25 bp, Homo sapien
atttttcgaaaggttcaacactcat

SEQ ID NO: 6028776 - DNA, 25 bp, Homo sapien
aagaacaaagatgatacaccttttg

SEQ ID NO: 6028777 - DNA, 25 bp, Homo sapien
gatgaaccactttcacctataaatt

SEQ ID NO: 6028778 - DNA, 25 bp, Homo sapien
taaattagtagtaagaatttactca

SEQ ID NO: 6028779 - DNA, 25 bp, Homo sapien
aatttatatttgcacatttttgtaa

SEQ ID NO: 6028780 - DNA, 25 bp, Homo sapien
gtattgctgtagctgagaagaaaag

SEQ ID NO: 6028781 - DNA, 25 bp, Homo sapien
tatttgcacatttttgtaaaatgaa

SEQ ID NO: 6028782 - DNA, 25 bp, Homo sapien
caaatctgctcatcttttactttat

SEQ ID NO: 6028783 - DNA, 25 bp, Homo sapien
tatacaatatcataaggctagataa

SEQ ID NO: 6028784 - DNA, 25 bp, Homo sapien
tggtgttatcatttggaggaaattt

SEQ ID NO: 6028785 - DNA, 25 bp, Homo sapien
gacactaaagaacatgtctgaacat

SEQ ID NO: 6028786 - DNA, 25 bp, Homo sapien
aactctcatgcagttcccagtcaag

SEQ ID NO: 6028787 - DNA, 25 bp, Homo sapien
aacactcatttgaggtcccaggtga

SEQ ID NO: 6028788 - DNA, 25 bp, Homo sapien
acatgtctgaacatatcctggaact

SEQ ID NO: 6028789 - DNA, 25 bp, Homo sapien
aaaaagtactgttggtgttatcatt

SEQ ID NO: 6028790 - DNA, 25 bp, Homo sapien
tccaagatcccaggatttttaaatg

SEQ ID NO: 6028791 - DNA, 25 bp, Homo sapien
agaaaattccaagatcccaggattt

SEQ ID NO: 6028792 - DNA, 25 bp, Homo sapien
ctagataatttccataggttatttt

SEQ ID NO: 6028793 - DNA, 25 bp, Homo sapien
acaggcaactctcatgcagttccca

SEQ ID NO: 6028794 - DNA, 25 bp, Homo sapien
ctgtagctgagaagaaaagaaaatt

SEQ ID NO: 6028795 - DNA, 25 bp, Homo sapien
gttccttccttccaaatctgctcat

SEQ ID NO: 6028796 - DNA, 25 bp, Homo sapien
acactaaagaacaaagatgatacac

SEQ ID NO: 6028797 - DNA, 25 bp, Homo sapien
gatacaccttttgatgaaccacttt

SEQ ID NO: 6028798 - DNA, 25 bp, Homo sapien
gattcgttccttccttccaaatctg

SEQ ID NO: 6028799 - DNA, 25 bp, Homo sapien
gatcccaggatttttaaatgtgtaa

SEQ ID NO: 6028800 - DNA, 25 bp, Homo sapien
tgcttcaaaaagtactgttggtgtt

SEQ ID NO: 6028801 - DNA, 25 bp, Homo sapien
cacctataaattagtagtaagaatt

SEQ ID NO: 6028802 - DNA, 25 bp, Homo sapien
actattgagagagtatccatgacac

SEQ ID NO: 6028803 - DNA, 25 bp, Homo sapien
atatcctggaacttcttctttgtaa

SEQ ID NO: 6028804 - DNA, 25 bp, Homo sapien
tttttcccgggaattagcacaggca

SEQ ID NO: 6028805 - DNA, 25 bp, Homo sapien
atgcccactattgagagagtatcca

SEQ ID NO: 6028806 - DNA, 25 bp, Homo sapien
ttagtagtaagaatttactcacaag

SEQ ID NO: 6028807 - DNA, 25 bp, Homo sapien
gaactgacccagatgcccactattg

SEQ ID NO: 6028808 - DNA, 25 bp, Homo sapien
gtaaaattttgcatgaaaagtatag

SEQ ID NO: 6028809 - DNA, 25 bp, Homo sapien
cactttcacctataaattagtagta

SEQ ID NO: 6028810 - DNA, 25 bp, Homo sapien
gaaaaagacactaaagaacatgtct

SEQ ID NO: 6028811 - DNA, 25 bp, Homo sapien
ccttttgatgaaccactttcaccta

SEQ ID NO: 6028812 - DNA, 25 bp, Homo sapien
acttttcagttagatattttataca

SEQ ID NO: 6028813 - DNA, 25 bp, Homo sapien
ctcacaaggaagatcttatctacaa

SEQ ID NO: 6028814 - DNA, 25 bp, Homo sapien
ttttgcatgaaaagtatagattcgt

SEQ ID NO: 6028815 - DNA, 25 bp, Homo sapien
ataaggctagataatttccataggt

SEQ ID NO: 6028816 - DNA, 25 bp, Homo sapien
ttcgaaaggttcaacactcatttga

SEQ ID NO: 6028817 - DNA, 25 bp, Homo sapien
agaaaagaaaattccaagatcccag

SEQ ID NO: 6028818 - DNA, 25 bp, Homo sapien
tatcatttggaggaaatttttcgaa

SEQ ID NO: 6028819 - DNA, 25 bp, Homo sapien
taaagaacatgtctgaacatatcct

SEQ ID NO: 6028820 - DNA, 25 bp, Homo sapien
ctgaacatatcctggaacttcttct

SEQ ID NO: 6028821 - DNA, 25 bp, Homo sapien
ccgggaattagcacaggcaactctc

SEQ ID NO: 6028822 - DNA, 25 bp, Homo sapien
ccaggtgaactgacccagatgccca

SEQ ID NO: 6028823 - DNA, 25 bp, Homo sapien
tgtgtaaaacttttcagttagatat

SEQ ID NO: 6028824 - DNA, 25 bp, Homo sapien
gaggtcccaggtgaactgacccaga

SEQ ID NO: 6028825 - DNA, 25 bp, Homo sapien
aaagatgatacaccttttgatgaac

SEQ ID NO: 6028826 - DNA, 25 bp, Homo sapien
attagcacaggcaactctcatgcag

SEQ ID NO: 6028827 - DNA, 25 bp, Homo sapien
ctgagaagaaaagaaaattccaaga

SEQ ID NO: 6028828 - DNA, 25 bp, Homo sapien
cacatttttgtaaaatgaataaagg

SEQ ID NO: 6028829 - DNA, 25 bp, Homo sapien
tattttatacaatatcataaggcta

SEQ ID NO: 6028830 - DNA, 25 bp, Homo sapien
gagagagtatccatgacacgctatt

SEQ ID NO: 6028831 - DNA, 25 bp, Homo sapien
tccttccaaatctgctcatctttta

SEQ ID NO: 6028832 - DNA, 25 bp, Homo sapien
tactgttggtgttatcatttggagg

SEQ ID NO: 6028833 - DNA, 25 bp, Homo sapien
agaagaagttccaggatatgttcag

SEQ ID NO: 6028834 - DNA, 25 bp, Homo sapien
ccactaggcatgaaaaccatgtatg

SEQ ID NO: 6028835 - DNA, 25 bp, Homo sapien
tccttgtgagtaaattcttactact

SEQ ID NO: 6028836 - DNA, 25 bp, Homo sapien
tcacatacttgtagaagaattcaat

SEQ ID NO: 6028837 - DNA, 25 bp, Homo sapien
tagaatttcatagaatattttgtct

SEQ ID NO: 6028838 - DNA, 25 bp, Homo sapien
tcagctacattgtagataagatctt

SEQ ID NO: 6028839 - DNA, 25 bp, Homo sapien
catagcataaatttgtcaattataa

SEQ ID NO: 6028840 - DNA, 25 bp, Homo sapien
tgttcagacatgttctttagtgtct

SEQ ID NO: 6028841 - DNA, 25 bp, Homo sapien
caattatatcctaagaaattgattg

SEQ ID NO: 6028842 - DNA, 25 bp, Homo sapien
ctttattcattttacaaaaatgtgc

SEQ ID NO: 6028843 - DNA, 25 bp, Homo sapien
tcaaaaggtgtatcatctttgttct

SEQ ID NO: 6028844 - DNA, 25 bp, Homo sapien
ttataaacatagcataaatttgtca

SEQ ID NO: 6028845 - DNA, 25 bp, Homo sapien
aggatatgttcagacatgttcttta

SEQ ID NO: 6028846 - DNA, 25 bp, Homo sapien
gaatggtaggtagccactaggcatg

SEQ ID NO: 6028847 - DNA, 25 bp, Homo sapien
agatcttccttgtgagtaaattctt

SEQ ID NO: 6028848 - DNA, 25 bp, Homo sapien
attgattgaaaggaatggtaggtag

SEQ ID NO: 6028849 - DNA, 25 bp, Homo sapien
ggtgtatcatctttgttctttagtg

SEQ ID NO: 6028850 - DNA, 25 bp, Homo sapien
tattcctaaaagatgattagtttta

SEQ ID NO: 6028851 - DNA, 25 bp, Homo sapien
tttgtctcaaaattgtctttaatgc

SEQ ID NO: 6028852 - DNA, 25 bp, Homo sapien
aaacatagcataaatttgtcaatta

SEQ ID NO: 6028853 - DNA, 25 bp, Homo sapien
cagtggacataaacctctttatctt

SEQ ID NO: 6028854 - DNA, 25 bp, Homo sapien
gccagagacaaacagtggacataaa

SEQ ID NO: 6028855 - DNA, 25 bp, Homo sapien
acttgtagaagaattcaattttgca

SEQ ID NO: 6028856 - DNA, 25 bp, Homo sapien
taggatttatttcaataacactaat

SEQ ID NO: 6028857 - DNA, 25 bp, Homo sapien
atgtgtgagtatatcttattacaaa

SEQ ID NO: 6028858 - DNA, 25 bp, Homo sapien
gaaagtggttcatcaaaaggtgtat

SEQ ID NO: 6028859 - DNA, 25 bp, Homo sapien
ttatttcaataacactaatagacag

SEQ ID NO: 6028860 - DNA, 25 bp, Homo sapien
taagaaattgattgaaaggaatggt

SEQ ID NO: 6028861 - DNA, 25 bp, Homo sapien
gaaaaattataaacatagcataaat

SEQ ID NO: 6028862 - DNA, 25 bp, Homo sapien
agttccaggatatgttcagacatgt

SEQ ID NO: 6028863 - DNA, 25 bp, Homo sapien
tttgcatagaatttcatagaatatt

SEQ ID NO: 6028864 - DNA, 25 bp, Homo sapien
gattagttttacctacatatgcaac

SEQ ID NO: 6028865 - DNA, 25 bp, Homo sapien
caattataaacatagcataaatttg

SEQ ID NO: 6028866 - DNA, 25 bp, Homo sapien
cctctttatcttattcctaaaagat

SEQ ID NO: 6028867 - DNA, 25 bp, Homo sapien
aggtagccactaggcatgaaaacca

SEQ ID NO: 6028868 - DNA, 25 bp, Homo sapien
ggttcatcaaaaggtgtatcatctt

SEQ ID NO: 6028869 - DNA, 25 bp, Homo sapien
catttctcagctacattgtagataa

SEQ ID NO: 6028870 - DNA, 25 bp, Homo sapien
aaagatgattagttttacctacata

SEQ ID NO: 6028871 - DNA, 25 bp, Homo sapien
catgttctttagtgtctttttcctt

SEQ ID NO: 6028872 - DNA, 25 bp, Homo sapien
ttcaattttgcatagaatttcatag

SEQ ID NO: 6028873 - DNA, 25 bp, Homo sapien
caataacactaatagacagaatctt

SEQ ID NO: 6028874 - DNA, 25 bp, Homo sapien
ttcattttacaaagaagaagttcca

SEQ ID NO: 6028875 - DNA, 25 bp, Homo sapien
aatttgtcaattatatcctaagaaa

SEQ ID NO: 6028876 - DNA, 25 bp, Homo sapien
tcaaaattgtctttaatgctttaaa

SEQ ID NO: 6028877 - DNA, 25 bp, Homo sapien
atgtatgccagagacaaacagtgga

SEQ ID NO: 6028878 - DNA, 25 bp, Homo sapien
catctttgttctttagtgtcttttt

SEQ ID NO: 6028879 - DNA, 25 bp, Homo sapien
ttaagagaaaaattataaacatagc

SEQ ID NO: 6028880 - DNA, 25 bp, Homo sapien
tatcttattcctaaaagatgattag

SEQ ID NO: 6028881 - DNA, 25 bp, Homo sapien
acattgtagataagatcttccttgt

SEQ ID NO: 6028882 - DNA, 25 bp, Homo sapien
atgcaacagtttcatttctcagcta

SEQ ID NO: 6028883 - DNA, 25 bp, Homo sapien
cagtttcatttctcagctacattgt

SEQ ID NO: 6028884 - DNA, 25 bp, Homo sapien
aatcttaaatgtgtatgtgtgagta

SEQ ID NO: 6028885 - DNA, 25 bp, Homo sapien
ttacaaagaagaagttccaggatat

SEQ ID NO: 6028886 - DNA, 25 bp, Homo sapien
tagataagatcttccttgtgagtaa

SEQ ID NO: 6028887 - DNA, 25 bp, Homo sapien
gaatattttgtctcaaaattgtctt

SEQ ID NO: 6028888 - DNA, 25 bp, Homo sapien
gcatttaagagaaaaattataaaca

SEQ ID NO: 6028889 - DNA, 25 bp, Homo sapien
ttttacctacatatgcaacagtttc

SEQ ID NO: 6028890 - DNA, 25 bp, Homo sapien
ctacatatgcaacagtttcatttct

SEQ ID NO: 6028891 - DNA, 25 bp, Homo sapien
aattcttactactaatttataggtg

SEQ ID NO: 6028892 - DNA, 25 bp, Homo sapien
gacaaacagtggacataaacctctt

SEQ ID NO: 6028893 - DNA, 25 bp, Homo sapien
atatcctaagaaattgattgaaagg

SEQ ID NO: 6028894 - DNA, 25 bp, Homo sapien
ggcttcatcacatacttgtagaaga

SEQ ID NO: 6028895 - DNA, 25 bp, Homo sapien
aaaaccatgtatgccagagacaaac

SEQ ID NO: 6028896 - DNA, 25 bp, Homo sapien
cactaatagacagaatcttaaatgt

SEQ ID NO: 6028897 - DNA, 25 bp, Homo sapien
agcataaatttgtcaattatatcct

SEQ ID NO: 6028898 - DNA, 25 bp, Homo sapien
gaagaattcaattttgcatagaatt

SEQ ID NO: 6028899 - DNA, 25 bp, Homo sapien
aggtgggcttcatcacatacttgta

SEQ ID NO: 6028900 - DNA, 25 bp, Homo sapien
gcataaatttgtcaattataaacat

SEQ ID NO: 6028901 - DNA, 25 bp, Homo sapien
ggcatgaaaaccatgtatgccagag

SEQ ID NO: 6028902 - DNA, 25 bp, Homo sapien
agacagaatcttaaatgtgtatgtg

SEQ ID NO: 6028903 - DNA, 25 bp, Homo sapien
tcctttattcattttacaaagaaga

SEQ ID NO: 6028904 - DNA, 25 bp, Homo sapien
ttcatagaatattttgtctcaaaat

SEQ ID NO: 6028905 - DNA, 25 bp, Homo sapien
atttgtcaattataaacatagcata

SEQ ID NO: 6028906 - DNA, 25 bp, Homo sapien
aatgtgtatgtgtgagtatatctta

SEQ ID NO: 6028907 - DNA, 25 bp, Homo sapien
taatttataggtgaaagtggttcat

SEQ ID NO: 6028908 - DNA, 25 bp, Homo sapien
tgaaaggaatggtaggtagccacta

SEQ ID NO: 6028909 - DNA, 25 bp, Homo sapien
tgagtaaattcttactactaattta

SEQ ID NO: 6028910 - DNA, 25 bp, Homo sapien
tgtttctaggatttatttcaataac

SEQ ID NO: 6028911 - DNA, 25 bp, Homo sapien
cataaacctctttatcttattccta

SEQ ID NO: 6028912 - DNA, 25 bp, Homo sapien
ataggtgaaagtggttcatcaaaag

SEQ ID NO: 6028913 - DNA, 25 bp, Homo sapien
tactactaatttataggtgaaagtg

SEQ ID NO: 6028914 - DNA, 25 bp, Homo sapien
cccagaaaccttggttgctttgaga

SEQ ID NO: 6028915 - DNA, 25 bp, Homo sapien
acgacaagactttgaaggtcaaggc

SEQ ID NO: 6028916 - DNA, 25 bp, Homo sapien
agaaatcagaactggtaccaccacc

SEQ ID NO: 6028917 - DNA, 25 bp, Homo sapien
gtctgtcattgacaacgccagaaag

SEQ ID NO: 6028918 - DNA, 25 bp, Homo sapien
ggtaccatcggtccaaagaccaaca

SEQ ID NO: 6028919 - DNA, 25 bp, Homo sapien
agtacgctaaggcttgtgacgacaa

SEQ ID NO: 6028920 - DNA, 25 bp, Homo sapien
cgttgatgatggtgttttgtctttc

SEQ ID NO: 6028921 - DNA, 25 bp, Homo sapien
cattgctttggacaccaagggtcca

SEQ ID NO: 6028922 - DNA, 25 bp, Homo sapien
aagatctgttcccacaagggtgtca

SEQ ID NO: 6028923 - DNA, 25 bp, Homo sapien
tagaatcatctacgttgatgatggt

SEQ ID NO: 6028924 - DNA, 25 bp, Homo sapien
tgaaggtcaaggctttgaacgccgg

SEQ ID NO: 6028925 - DNA, 25 bp, Homo sapien
caccaagggtccagaaatcagaact

SEQ ID NO: 6028926 - DNA, 25 bp, Homo sapien
ggaagatttgagattcggtgtcaag

SEQ ID NO: 6028927 - DNA, 25 bp, Homo sapien
cagaactggtaccaccaccaacgat

SEQ ID NO: 6028928 - DNA, 25 bp, Homo sapien
ctgttcccacaagggtgtcaactta

SEQ ID NO: 6028929 - DNA, 25 bp, Homo sapien
cttctctcacggttcttacgaatac

SEQ ID NO: 6028930 - DNA, 25 bp, Homo sapien
tttgtctgaaaaggacaaggaagat

SEQ ID NO: 6028931 - DNA, 25 bp, Homo sapien
agtccgaagaattgtacccaggtag

SEQ ID NO: 6028932 - DNA, 25 bp, Homo sapien
ttcttacgaataccacaagtctgtc

SEQ ID NO: 6028933 - DNA, 25 bp, Homo sapien
ccaaggtcatctccgctggtagaat

SEQ ID NO: 6028934 - DNA, 25 bp, Homo sapien
tgtacgttgactacaagaacatcac

SEQ ID NO: 6028935 - DNA, 25 bp, Homo sapien
agaagaacctccatcattggtacca

SEQ ID NO: 6028936 - DNA, 25 bp, Homo sapien
gggtccagaaatcagaactggtacc

SEQ ID NO: 6028937 - DNA, 25 bp, Homo sapien
agactttgaaggtcaaggctttgaa

SEQ ID NO: 6028938 - DNA, 25 bp, Homo sapien
cgatttgccagctttgtctgaaaag

SEQ ID NO: 6028939 - DNA, 25 bp, Homo sapien
tttgagaaaggctggtttgaacatt

SEQ ID NO: 6028940 - DNA, 25 bp, Homo sapien
atgttgactacccaatcccaccaaa

SEQ ID NO: 6028941 - DNA, 25 bp, Homo sapien
caaggctttgaacgccggtaagatc

SEQ ID NO: 6028942 - DNA, 25 bp, Homo sapien
tggtaccaccaccaacgatgttgac

SEQ ID NO: 6028943 - DNA, 25 bp, Homo sapien
tgtcaagaacggtgtccacatggtc

SEQ ID NO: 6028944 - DNA, 25 bp, Homo sapien
catctccgctggtagaatcatctac

SEQ ID NO: 6028945 - DNA, 25 bp, Homo sapien
gtcaacttaccaggtaccgatgtcg

SEQ ID NO: 6028946 - DNA, 25 bp, Homo sapien
ctaaggcttgtgacgacaagatcat

SEQ ID NO: 6028947 - DNA, 25 bp, Homo sapien
gccagctttgtctgaaaaggacaag

SEQ ID NO: 6028948 - DNA, 25 bp, Homo sapien
caacgatgttgactacccaatccca

SEQ ID NO: 6028949 - DNA, 25 bp, Homo sapien
cgatgtcgatttgccagctttgtct

SEQ ID NO: 6028950 - DNA, 25 bp, Homo sapien
tcacggttcttacgaataccacaag

SEQ ID NO: 6028951 - DNA, 25 bp, Homo sapien
attggccattgctttggacaccaag

SEQ ID NO: 6028952 - DNA, 25 bp, Homo sapien
agatcatgtacgttgactacaagaa

SEQ ID NO: 6028953 - DNA, 25 bp, Homo sapien
ccacaagtctgtcattgacaacgcc

SEQ ID NO: 6028954 - DNA, 25 bp, Homo sapien
tatgaacttctctcacggttcttac

SEQ ID NO: 6028955 - DNA, 25 bp, Homo sapien
caagttttggaagtcgttgacgaca

SEQ ID NO: 6028956 - DNA, 25 bp, Homo sapien
catctacgttgatgatggtgttttg

SEQ ID NO: 6028957 - DNA, 25 bp, Homo sapien
aaccttggttgctttgagaaaggct

SEQ ID NO: 6028958 - DNA, 25 bp, Homo sapien
ggttctgacttgagaagaacctcca

SEQ ID NO: 6028959 - DNA, 25 bp, Homo sapien
tcgttgacgacaagactttgaaggt

SEQ ID NO: 6028960 - DNA, 25 bp, Homo sapien
acatcaccaaggtcatctccgctgg

SEQ ID NO: 6028961 - DNA, 25 bp, Homo sapien
attgtacccaggtagaccattggcc

SEQ ID NO: 6028962 - DNA, 25 bp, Homo sapien
cgaagaattgtacccaggtagacca

SEQ ID NO: 6028963 - DNA, 25 bp, Homo sapien
acgacaagatcatgtacgttgacta

SEQ ID NO: 6028964 - DNA, 25 bp, Homo sapien
ttaccaggtaccgatgtcgatttgc

SEQ ID NO: 6028965 - DNA, 25 bp, Homo sapien
ttgactacaagaacatcaccaaggt

SEQ ID NO: 6028966 - DNA, 25 bp, Homo sapien
atgacaagtacgctaaggcttgtga

SEQ ID NO: 6028967 - DNA, 25 bp, Homo sapien
gacttgagaagaacctccatcattg

SEQ ID NO: 6028968 - DNA, 25 bp, Homo sapien
caatcccaccaaaccacgaaatgat

SEQ ID NO: 6028969 - DNA, 25 bp, Homo sapien
gttgctggttctgacttgagaagaa

SEQ ID NO: 6028970 - DNA, 25 bp, Homo sapien
cattgacaacgccagaaagtccgaa

SEQ ID NO: 6028971 - DNA, 25 bp, Homo sapien
ttgaacgccggtaagatctgttccc

SEQ ID NO: 6028972 - DNA, 25 bp, Homo sapien
caacaacccagaaaccttggttgct

SEQ ID NO: 6028973 - DNA, 25 bp, Homo sapien
aacgttgttgctggttctgacttga

SEQ ID NO: 6028974 - DNA, 25 bp, Homo sapien
atcattggtaccatcggtccaaaga

SEQ ID NO: 6028975 - DNA, 25 bp, Homo sapien
cgctggtagaatcatctacgttgat

SEQ ID NO: 6028976 - DNA, 25 bp, Homo sapien
accacgaaatgatcttcaccaccga

SEQ ID NO: 6028977 - DNA, 25 bp, Homo sapien
tttgagattcggtgtcaagaacggt

SEQ ID NO: 6028978 - DNA, 25 bp, Homo sapien
caacgccagaaagtccgaagaattg

SEQ ID NO: 6028979 - DNA, 25 bp, Homo sapien
tagaccattggccattgctttggac

SEQ ID NO: 6028980 - DNA, 25 bp, Homo sapien
aaatgatcttcaccaccgatgacaa

SEQ ID NO: 6028981 - DNA, 25 bp, Homo sapien
tggttgctttgagaaaggctggttt

SEQ ID NO: 6028982 - DNA, 25 bp, Homo sapien
cttgtgacgacaagatcatgtacgt

SEQ ID NO: 6028983 - DNA, 25 bp, Homo sapien
ggacaaggaagatttgagattcggt

SEQ ID NO: 6028984 - DNA, 25 bp, Homo sapien
cagaaagtccgaagaattgtaccca

SEQ ID NO: 6028985 - DNA, 25 bp, Homo sapien
acctccatcattggtaccatcggtc

SEQ ID NO: 6028986 - DNA, 25 bp, Homo sapien
tggtttgaacattgtccgtatgaac

SEQ ID NO: 6028987 - DNA, 25 bp, Homo sapien
tggaagtcgttgacgacaagacttt

SEQ ID NO: 6028988 - DNA, 25 bp, Homo sapien
tttggacaccaagggtccagaaatc

SEQ ID NO: 6028989 - DNA, 25 bp, Homo sapien
tgtccgtatgaacttctctcacggt

SEQ ID NO: 6028990 - DNA, 25 bp, Homo sapien
gccggtaagatctgttcccacaagg

SEQ ID NO: 6028991 - DNA, 25 bp, Homo sapien
caccaccaacgatgttgactaccca

SEQ ID NO: 6028992 - DNA, 25 bp, Homo sapien
tcggtccaaagaccaacaacccaga

SEQ ID NO: 6028993 - DNA, 25 bp, Homo sapien
ccaccgatgacaagtacgctaaggc

SEQ ID NO: 6028994 - DNA, 25 bp, Homo sapien
cgaataccacaagtctgtcattgac

SEQ ID NO: 6028995 - DNA, 25 bp, Homo sapien
tgatggtgttttgtctttccaagtt

SEQ ID NO: 6028996 - DNA, 25 bp, Homo sapien
caccaaaccacgaaatgatcttcac

SEQ ID NO: 6028997 - DNA, 25 bp, Homo sapien
aaaggctggtttgaacattgtccgt

SEQ ID NO: 6028998 - DNA, 25 bp, Homo sapien
acaagaacatcaccaaggtcatctc

SEQ ID NO: 6028999 - DNA, 25 bp, Homo sapien
aggtaccgatgtcgatttgccagct

SEQ ID NO: 6029000 - DNA, 25 bp, Homo sapien
gaacattgtccgtatgaacttctct

SEQ ID NO: 6029001 - DNA, 25 bp, Homo sapien
cccaggtagaccattggccattgct

SEQ ID NO: 6029002 - DNA, 25 bp, Homo sapien
attcggtgtcaagaacggtgtccac

SEQ ID NO: 6029003 - DNA, 25 bp, Homo sapien
cacaagggtgtcaacttaccaggta

SEQ ID NO: 6029004 - DNA, 25 bp, Homo sapien
tgaaaaggacaaggaagatttgaga

SEQ ID NO: 6029005 - DNA, 25 bp, Homo sapien
tcttcaccaccgatgacaagtacgc

SEQ ID NO: 6029006 - DNA, 25 bp, Homo sapien
tccaagatagcgttaccgacatcgg

SEQ ID NO: 6029007 - DNA, 25 bp, Homo sapien
ccttggatggaaacgtaagtgtcac

SEQ ID NO: 6029008 - DNA, 25 bp, Homo sapien
tcaccagacaacataacacagtcag

SEQ ID NO: 6029009 - DNA, 25 bp, Homo sapien
gacacctctgtacaagtgagagaat

SEQ ID NO: 6029010 - DNA, 25 bp, Homo sapien
gggttgtaagtcatggattccaaca

SEQ ID NO: 6029011 - DNA, 25 bp, Homo sapien
tcagctctggttggtcttgggttgt

SEQ ID NO: 6029012 - DNA, 25 bp, Homo sapien
caccggccttgaaaccttggatgga

SEQ ID NO: 6029013 - DNA, 25 bp, Homo sapien
gatagccttggccttttgttcgaaa

SEQ ID NO: 6029014 - DNA, 25 bp, Homo sapien
agctcttgggcatctggtaaccaag

SEQ ID NO: 6029015 - DNA, 25 bp, Homo sapien
ttggccttttgttcgaaaacagcag

SEQ ID NO: 6029016 - DNA, 25 bp, Homo sapien
atggaaacgtaagtgtcacccttct

SEQ ID NO: 6029017 - DNA, 25 bp, Homo sapien
tgttcagcaatgacagcggtttcag

SEQ ID NO: 6029018 - DNA, 25 bp, Homo sapien
cagtcagcaccatccaagatagcgt

SEQ ID NO: 6029019 - DNA, 25 bp, Homo sapien
ggagtacagtttctcatgtcatcgt

SEQ ID NO: 6029020 - DNA, 25 bp, Homo sapien
atggattccaacatttgggtagcac

SEQ ID NO: 6029021 - DNA, 25 bp, Homo sapien
agtggtaacggcgttgattgggtag

SEQ ID NO: 6029022 - DNA, 25 bp, Homo sapien
gggcatctggtaaccaagatgattg

SEQ ID NO: 6029023 - DNA, 25 bp, Homo sapien
acgtaagtgtcacccttcttcaaga

SEQ ID NO: 6029024 - DNA, 25 bp, Homo sapien
tgggaagacacctctgtacaagtga

SEQ ID NO: 6029025 - DNA, 25 bp, Homo sapien
tcagagacaggttccttttcgaaaa

SEQ ID NO: 6029026 - DNA, 25 bp, Homo sapien
accagcaccggccttgaaaccttgg

SEQ ID NO: 6029027 - DNA, 25 bp, Homo sapien
ggcaagtaagcgatagcttgttcag

SEQ ID NO: 6029028 - DNA, 25 bp, Homo sapien
ttcggtggtggaggttggctttgga

SEQ ID NO: 6029029 - DNA, 25 bp, Homo sapien
tccaacatttgggtagcacagataa

SEQ ID NO: 6029030 - DNA, 25 bp, Homo sapien
tcgaaaacagcagcgacagcggagg

SEQ ID NO: 6029031 - DNA, 25 bp, Homo sapien
ataacacagtcagcaccatccaaga

SEQ ID NO: 6029032 - DNA, 25 bp, Homo sapien
cggaggcagcgacggtttcggtggt

SEQ ID NO: 6029033 - DNA, 25 bp, Homo sapien
taagtcatggattccaacatttggg

SEQ ID NO: 6029034 - DNA, 25 bp, Homo sapien
ggctttggagtacagtttctcatgt

SEQ ID NO: 6029035 - DNA, 25 bp, Homo sapien
agagaatctagcagctcttgggcat

SEQ ID NO: 6029036 - DNA, 25 bp, Homo sapien
gcggtttcaccagacaacataacac

SEQ ID NO: 6029037 - DNA, 25 bp, Homo sapien
tcatcgtagtttggcaagtaagcga

SEQ ID NO: 6029038 - DNA, 25 bp, Homo sapien
tcatcagtccagtcagagacaggtt

SEQ ID NO: 6029039 - DNA, 25 bp, Homo sapien
tttggtctgtacttggaaaccaatc

SEQ ID NO: 6029040 - DNA, 25 bp, Homo sapien
ctcatgtcatcgtagtttggcaagt

SEQ ID NO: 6029041 - DNA, 25 bp, Homo sapien
caagtgagagaatctagcagctctt

SEQ ID NO: 6029042 - DNA, 25 bp, Homo sapien
ggtaccggaagtggacaagacaatg

SEQ ID NO: 6029043 - DNA, 25 bp, Homo sapien
tcaacatcatcagtccagtcagaga

SEQ ID NO: 6029044 - DNA, 25 bp, Homo sapien
tagtttggcaagtaagcgatagctt

SEQ ID NO: 6029045 - DNA, 25 bp, Homo sapien
acagcagcgacagcggaggcagcga

SEQ ID NO: 6029046 - DNA, 25 bp, Homo sapien
ggacaagacaatgatagccttggcc

SEQ ID NO: 6029047 - DNA, 25 bp, Homo sapien
atgattggacagtttggtctgtact

SEQ ID NO: 6029048 - DNA, 25 bp, Homo sapien
ttaccgacatcggaaacttcagctc

SEQ ID NO: 6029049 - DNA, 25 bp, Homo sapien
ccgaagttgatacgggcttcaacat

SEQ ID NO: 6029050 - DNA, 25 bp, Homo sapien
cgggcttcaacatcatcagtccagt

SEQ ID NO: 6029051 - DNA, 25 bp, Homo sapien
ggtcttgggttgtaagtcatggatt

SEQ ID NO: 6029052 - DNA, 25 bp, Homo sapien
tctagcagctcttgggcatctggta

SEQ ID NO: 6029053 - DNA, 25 bp, Homo sapien
ctggtaaccaagatgattggacagt

SEQ ID NO: 6029054 - DNA, 25 bp, Homo sapien
ggacagtttggtctgtacttggaaa

SEQ ID NO: 6029055 - DNA, 25 bp, Homo sapien
cagcgacggtttcggtggtggaggt

SEQ ID NO: 6029056 - DNA, 25 bp, Homo sapien
gaaacttcagctctggttggtcttg

SEQ ID NO: 6029057 - DNA, 25 bp, Homo sapien
ttgatacgggcttcaacatcatcag

SEQ ID NO: 6029058 - DNA, 25 bp, Homo sapien
cagtttctcatgtcatcgtagtttg

SEQ ID NO: 6029059 - DNA, 25 bp, Homo sapien
cgacagcggaggcagcgacggtttc

SEQ ID NO: 6029060 - DNA, 25 bp, Homo sapien
gacagcggtttcagccatagtggta

SEQ ID NO: 6029061 - DNA, 25 bp, Homo sapien
agccatagtggtaacggcgttgatt

SEQ ID NO: 6029062 - DNA, 25 bp, Homo sapien
ctggttggtcttgggttgtaagtca

SEQ ID NO: 6029063 - DNA, 25 bp, Homo sapien
gccttttcaataccgaagttgatac

SEQ ID NO: 6029064 - DNA, 25 bp, Homo sapien
ggaagtggacaagacaatgatagcc

SEQ ID NO: 6029065 - DNA, 25 bp, Homo sapien
atagcgttaccgacatcggaaactt

SEQ ID NO: 6029066 - DNA, 25 bp, Homo sapien
tctgtacaagtgagagaatctagca

SEQ ID NO: 6029067 - DNA, 25 bp, Homo sapien
gacaacataacacagtcagcaccat

SEQ ID NO: 6029068 - DNA, 25 bp, Homo sapien
tcgaaaacgaatgggaagacacctc

SEQ ID NO: 6029069 - DNA, 25 bp, Homo sapien
gataccgaattccttagccttttca

SEQ ID NO: 6029070 - DNA, 25 bp, Homo sapien
caatcttggggtggtaccggaagtg

SEQ ID NO: 6029071 - DNA, 25 bp, Homo sapien
gaggttggctttggagtacagtttc

SEQ ID NO: 6029072 - DNA, 25 bp, Homo sapien
gacaatgatagccttggccttttgt

SEQ ID NO: 6029073 - DNA, 25 bp, Homo sapien
cttagccttttcaataccgaagttg

SEQ ID NO: 6029074 - DNA, 25 bp, Homo sapien
gtccagtcagagacaggttcctttt

SEQ ID NO: 6029075 - DNA, 25 bp, Homo sapien
gtggtggaggttggctttggagtac

SEQ ID NO: 6029076 - DNA, 25 bp, Homo sapien
ttttgttcgaaaacagcagcgacag

SEQ ID NO: 6029077 - DNA, 25 bp, Homo sapien
atagcttgttcagcaatgacagcgg

SEQ ID NO: 6029078 - DNA, 25 bp, Homo sapien
gcaccatccaagatagcgttaccga

SEQ ID NO: 6029079 - DNA, 25 bp, Homo sapien
cccttggcggtttcaccagacaaca

SEQ ID NO: 6029080 - DNA, 25 bp, Homo sapien
cttcaagataccgaattccttagcc

SEQ ID NO: 6029081 - DNA, 25 bp, Homo sapien
taagcgatagcttgttcagcaatga

SEQ ID NO: 6029082 - DNA, 25 bp, Homo sapien
tcaataccgaagttgatacgggctt

SEQ ID NO: 6029083 - DNA, 25 bp, Homo sapien
accaagatgattggacagtttggtc

SEQ ID NO: 6029084 - DNA, 25 bp, Homo sapien
gcaatgacagcggtttcagccatag

SEQ ID NO: 6029085 - DNA, 25 bp, Homo sapien
catttgggtagcacagataactggc

SEQ ID NO: 6029086 - DNA, 25 bp, Homo sapien
acatcggaaacttcagctctggttg

SEQ ID NO: 6029087 - DNA, 25 bp, Homo sapien
ggtttcagccatagtggtaacggcg

SEQ ID NO: 6029088 - DNA, 25 bp, Homo sapien
ctgtacttggaaaccaatcttgggg

SEQ ID NO: 6029089 - DNA, 25 bp, Homo sapien
cccttcttcaagataccgaattcct

SEQ ID NO: 6029090 - DNA, 25 bp, Homo sapien
gtgtcacccttcttcaagataccga

SEQ ID NO: 6029091 - DNA, 25 bp, Homo sapien
aacgaatgggaagacacctctgtac

SEQ ID NO: 6029092 - DNA, 25 bp, Homo sapien
acgctgcgtgaaataaagatcctga

SEQ ID NO: 6029093 - DNA, 25 bp, Homo sapien
taccaaaccttgagagcagtgaaag

SEQ ID NO: 6029094 - DNA, 25 bp, Homo sapien
gatgctgagtgacgatcatatacaa

SEQ ID NO: 6029095 - DNA, 25 bp, Homo sapien
ttcgaacgtcatccatcgtgattta

SEQ ID NO: 6029096 - DNA, 25 bp, Homo sapien
tttatataccaaaccttgagagcag

SEQ ID NO: 6029097 - DNA, 25 bp, Homo sapien
cagcaaagcggcatgaccgagtatg

SEQ ID NO: 6029098 - DNA, 25 bp, Homo sapien
tcgaaccattcgataagcctttgtt

SEQ ID NO: 6029099 - DNA, 25 bp, Homo sapien
tactcaagggccatggacgtgtggt

SEQ ID NO: 6029100 - DNA, 25 bp, Homo sapien
aatctccacccagatgctgagtgac

SEQ ID NO: 6029101 - DNA, 25 bp, Homo sapien
agtgaaagtgctgcatggttcgaac

SEQ ID NO: 6029102 - DNA, 25 bp, Homo sapien
ccagttgaagtcgttactgggagag

SEQ ID NO: 6029103 - DNA, 25 bp, Homo sapien
gcaagaatcattgacgagtcagccg

SEQ ID NO: 6029104 - DNA, 25 bp, Homo sapien
acctctgccaaatactcaagggcca

SEQ ID NO: 6029105 - DNA, 25 bp, Homo sapien
tcgtggcaataaaaaagatcgaacc

SEQ ID NO: 6029106 - DNA, 25 bp, Homo sapien
cacacgttggtacagggcgccagag

SEQ ID NO: 6029107 - DNA, 25 bp, Homo sapien
cggacaattcagagcccacaggtca

SEQ ID NO: 6029108 - DNA, 25 bp, Homo sapien
tttacaccgtgtaatctccacccag

SEQ ID NO: 6029109 - DNA, 25 bp, Homo sapien
tacataattcaagagctaatgcaga

SEQ ID NO: 6029110 - DNA, 25 bp, Homo sapien
aatatcataacaatcttcaacattc

SEQ ID NO: 6029111 - DNA, 25 bp, Homo sapien
attcagagcccacaggtcagcaaag

SEQ ID NO: 6029112 - DNA, 25 bp, Homo sapien
gagagggtgcatacggtgtggtatg

SEQ ID NO: 6029113 - DNA, 25 bp, Homo sapien
agcggcatgaccgagtatgtggcca

SEQ ID NO: 6029114 - DNA, 25 bp, Homo sapien
gaggtgatgttaacctctgccaaat

SEQ ID NO: 6029115 - DNA, 25 bp, Homo sapien
aaaagatcgaaccattcgataagcc

SEQ ID NO: 6029116 - DNA, 25 bp, Homo sapien
ggtttagcaagaatcattgacgagt

SEQ ID NO: 6029117 - DNA, 25 bp, Homo sapien
gacagatttacaccgtgtaatctcc

SEQ ID NO: 6029118 - DNA, 25 bp, Homo sapien
accttgagagcagtgaaagtgctgc

SEQ ID NO: 6029119 - DNA, 25 bp, Homo sapien
ataagcccacgggagaaatcgtggc

SEQ ID NO: 6029120 - DNA, 25 bp, Homo sapien
agtatgtgatttcggtttagcaaga

SEQ ID NO: 6029121 - DNA, 25 bp, Homo sapien
tacagggcgccagaggtgatgttaa

SEQ ID NO: 6029122 - DNA, 25 bp, Homo sapien
ggtatgttctgcaacgcataagccc

SEQ ID NO: 6029123 - DNA, 25 bp, Homo sapien
cgtgaaataaagatcctgaagcact

SEQ ID NO: 6029124 - DNA, 25 bp, Homo sapien
gccaaatactcaagggccatggacg

SEQ ID NO: 6029125 - DNA, 25 bp, Homo sapien
caacgccctgactcgttcgaaaact

SEQ ID NO: 6029126 - DNA, 25 bp, Homo sapien
gaggtctacataattcaagagctaa

SEQ ID NO: 6029127 - DNA, 25 bp, Homo sapien
ttcaagcacgaaaatatcataacaa

SEQ ID NO: 6029128 - DNA, 25 bp, Homo sapien
cataaactccaactgtgacttgaaa

SEQ ID NO: 6029129 - DNA, 25 bp, Homo sapien
tatacaatattttatataccaaacc

SEQ ID NO: 6029130 - DNA, 25 bp, Homo sapien
gagaaatcgtggcaataaaaaagat

SEQ ID NO: 6029131 - DNA, 25 bp, Homo sapien
ccacgggagaaatcgtggcaataaa

SEQ ID NO: 6029132 - DNA, 25 bp, Homo sapien
cgagtatgtggccacacgttggtac

SEQ ID NO: 6029133 - DNA, 25 bp, Homo sapien
ttcaatgaggtctacataattcaag

SEQ ID NO: 6029134 - DNA, 25 bp, Homo sapien
tacgtacgctgcgtgaaataaagat

SEQ ID NO: 6029135 - DNA, 25 bp, Homo sapien
atcttcaacattcaacgccctgact

SEQ ID NO: 6029136 - DNA, 25 bp, Homo sapien
atcattgacgagtcagccgcggaca

SEQ ID NO: 6029137 - DNA, 25 bp, Homo sapien
cctgactcgttcgaaaacttcaatg

SEQ ID NO: 6029138 - DNA, 25 bp, Homo sapien
atgttaacctctgccaaatactcaa

SEQ ID NO: 6029139 - DNA, 25 bp, Homo sapien
caataaaaaagatcgaaccattcga

SEQ ID NO: 6029140 - DNA, 25 bp, Homo sapien
gacttccagttgaagtcgttactgg

SEQ ID NO: 6029141 - DNA, 25 bp, Homo sapien
ataacaatcttcaacattcaacgcc

SEQ ID NO: 6029142 - DNA, 25 bp, Homo sapien
cacgaaaatatcataacaatcttca

SEQ ID NO: 6029143 - DNA, 25 bp, Homo sapien
tccaaccttctcataaactccaact

SEQ ID NO: 6029144 - DNA, 25 bp, Homo sapien
ctgtgacttgaaagtatgtgatttc

SEQ ID NO: 6029145 - DNA, 25 bp, Homo sapien
ctttgttcgcattacgtacgctgcg

SEQ ID NO: 6029146 - DNA, 25 bp, Homo sapien
taaagccctccaaccttctcataaa

SEQ ID NO: 6029147 - DNA, 25 bp, Homo sapien
ataaagatcctgaagcacttcaagc

SEQ ID NO: 6029148 - DNA, 25 bp, Homo sapien
cggtgtggtatgttctgcaacgcat

SEQ ID NO: 6029149 - DNA, 25 bp, Homo sapien
agagcagtgaaagtgctgcatggtt

SEQ ID NO: 6029150 - DNA, 25 bp, Homo sapien
gatttcggtttagcaagaatcattg

SEQ ID NO: 6029151 - DNA, 25 bp, Homo sapien
ttctgcaacgcataagcccacggga

SEQ ID NO: 6029152 - DNA, 25 bp, Homo sapien
ccttctcataaactccaactgtgac

SEQ ID NO: 6029153 - DNA, 25 bp, Homo sapien
tgcatacggtgtggtatgttctgca

SEQ ID NO: 6029154 - DNA, 25 bp, Homo sapien
cttgaaagtatgtgatttcggttta

SEQ ID NO: 6029155 - DNA, 25 bp, Homo sapien
aagcacttcaagcacgaaaatatca

SEQ ID NO: 6029156 - DNA, 25 bp, Homo sapien
tactgggagagggtgcatacggtgt

SEQ ID NO: 6029157 - DNA, 25 bp, Homo sapien
aatgcagacagatttacaccgtgta

SEQ ID NO: 6029158 - DNA, 25 bp, Homo sapien
ctccaactgtgacttgaaagtatgt

SEQ ID NO: 6029159 - DNA, 25 bp, Homo sapien
tcgcattacgtacgctgcgtgaaat

SEQ ID NO: 6029160 - DNA, 25 bp, Homo sapien
acaggtcagcaaagcggcatgaccg

SEQ ID NO: 6029161 - DNA, 25 bp, Homo sapien
agtgctgcatggttcgaacgtcatc

SEQ ID NO: 6029162 - DNA, 25 bp, Homo sapien
ataagcctttgttcgcattacgtac

SEQ ID NO: 6029163 - DNA, 25 bp, Homo sapien
tgatttaaagccctccaaccttctc

SEQ ID NO: 6029164 - DNA, 25 bp, Homo sapien
gaaaacttcaatgaggtctacataa

SEQ ID NO: 6029165 - DNA, 25 bp, Homo sapien
cacccagatgctgagtgacgatcat

SEQ ID NO: 6029166 - DNA, 25 bp, Homo sapien
agtcgttactgggagagggtgcata

SEQ ID NO: 6029167 - DNA, 25 bp, Homo sapien
caatattttatataccaaaccttga

SEQ ID NO: 6029168 - DNA, 25 bp, Homo sapien
cgtcatccatcgtgatttaaagccc

SEQ ID NO: 6029169 - DNA, 25 bp, Homo sapien
atgtggccacacgttggtacagggc

SEQ ID NO: 6029170 - DNA, 25 bp, Homo sapien
ccatcgtgatttaaagccctccaac

SEQ ID NO: 6029171 - DNA, 25 bp, Homo sapien
agcccacaggtcagcaaagcggcat

SEQ ID NO: 6029172 - DNA, 25 bp, Homo sapien
acattcaacgccctgactcgttcga

SEQ ID NO: 6029173 - DNA, 25 bp, Homo sapien
ccgtgtaatctccacccagatgctg

SEQ ID NO: 6029174 - DNA, 25 bp, Homo sapien
atcctgaagcacttcaagcacgaaa

SEQ ID NO: 6029175 - DNA, 25 bp, Homo sapien
agagctaatgcagacagatttacac

SEQ ID NO: 6029176 - DNA, 25 bp, Homo sapien
gcatggttcgaacgtcatccatcgt

SEQ ID NO: 6029177 - DNA, 25 bp, Homo sapien
gacgagtcagccgcggacaattcag

SEQ ID NO: 6029178 - DNA, 25 bp, Homo sapien
tcagccgcggacaattcagagccca

SEQ ID NO: 6029179 - DNA, 25 bp, Homo sapien
catgaccgagtatgtggccacacgt

SEQ ID NO: 6029180 - DNA, 25 bp, Homo sapien
tcgttcgaaaacttcaatgaggtct

SEQ ID NO: 6029181 - DNA, 25 bp, Homo sapien
aacgcataagcccacgggagaaatc

SEQ ID NO: 6029182 - DNA, 25 bp, Homo sapien
cattcgataagcctttgttcgcatt

SEQ ID NO: 6029183 - DNA, 25 bp, Homo sapien
gcgccagaggtgatgttaacctctg

SEQ ID NO: 6029184 - DNA, 25 bp, Homo sapien
aattcaagagctaatgcagacagat

SEQ ID NO: 6029185 - DNA, 25 bp, Homo sapien
gagtgacgatcatatacaatatttt

SEQ ID NO: 6029186 - DNA, 25 bp, Homo sapien
gggtgactctatacaccgcaaatca

SEQ ID NO: 6029187 - DNA, 25 bp, Homo sapien
agtgatcaaactcgaagaagctggg

SEQ ID NO: 6029188 - DNA, 25 bp, Homo sapien
atttggcagaggttaacatcacctc

SEQ ID NO: 6029189 - DNA, 25 bp, Homo sapien
acctgtgggctctgaattgtccgcg

SEQ ID NO: 6029190 - DNA, 25 bp, Homo sapien
tcgggttgactcgagggaacatctt

SEQ ID NO: 6029191 - DNA, 25 bp, Homo sapien
tgaggtctttcgtcgttagtgcctc

SEQ ID NO: 6029192 - DNA, 25 bp, Homo sapien
gtttggatcgtggtatgtttgcaaa

SEQ ID NO: 6029193 - DNA, 25 bp, Homo sapien
atactcggtcatgccgctttgctga

SEQ ID NO: 6029194 - DNA, 25 bp, Homo sapien
ctctctagccctgggtgactctata

SEQ ID NO: 6029195 - DNA, 25 bp, Homo sapien
agggtcaaaaacaagcatacgctgt

SEQ ID NO: 6029196 - DNA, 25 bp, Homo sapien
tgggtgggatgggttcgccttcagg

SEQ ID NO: 6029197 - DNA, 25 bp, Homo sapien
tacatccgcaggaccacacgtccat

SEQ ID NO: 6029198 - DNA, 25 bp, Homo sapien
ctttcgtcgttagtgcctccttgta

SEQ ID NO: 6029199 - DNA, 25 bp, Homo sapien
tgaggtgtaccgatgataccgaata

SEQ ID NO: 6029200 - DNA, 25 bp, Homo sapien
accacacgtccatggcccttgagta

SEQ ID NO: 6029201 - DNA, 25 bp, Homo sapien
atacggatgctccagtgcctcctta

SEQ ID NO: 6029202 - DNA, 25 bp, Homo sapien
aaaaacaagcatacgctgtaaaaga

SEQ ID NO: 6029203 - DNA, 25 bp, Homo sapien
ggtcatgccgctttgctgacctgtg

SEQ ID NO: 6029204 - DNA, 25 bp, Homo sapien
tctctgccagggaagattggccgtc

SEQ ID NO: 6029205 - DNA, 25 bp, Homo sapien
gtaccgatgataccgaatatcagta

SEQ ID NO: 6029206 - DNA, 25 bp, Homo sapien
ggtacatgggaagcgactttatgta

SEQ ID NO: 6029207 - DNA, 25 bp, Homo sapien
gcgagaatacatccgcaggaccaca

SEQ ID NO: 6029208 - DNA, 25 bp, Homo sapien
cgtcttaagaaaagttcagcgagaa

SEQ ID NO: 6029209 - DNA, 25 bp, Homo sapien
cgtccatggcccttgagtatttggc

SEQ ID NO: 6029210 - DNA, 25 bp, Homo sapien
tatgtactctctagccctgggtgac

SEQ ID NO: 6029211 - DNA, 25 bp, Homo sapien
agttcagcgagaatacatccgcagg

SEQ ID NO: 6029212 - DNA, 25 bp, Homo sapien
gataatctctgccagggaagattgg

SEQ ID NO: 6029213 - DNA, 25 bp, Homo sapien
tgcctttcgggttgactcgagggaa

SEQ ID NO: 6029214 - DNA, 25 bp, Homo sapien
tacaccgcaaatcattatctgagtg

SEQ ID NO: 6029215 - DNA, 25 bp, Homo sapien
tggcccttgagtatttggcagaggt

SEQ ID NO: 6029216 - DNA, 25 bp, Homo sapien
gccgctttgctgacctgtgggctct

SEQ ID NO: 6029217 - DNA, 25 bp, Homo sapien
tggccacatactcggtcatgccgct

SEQ ID NO: 6029218 - DNA, 25 bp, Homo sapien
ctctatacaccgcaaatcattatct

SEQ ID NO: 6029219 - DNA, 25 bp, Homo sapien
ttgctgacctgtgggctctgaattg

SEQ ID NO: 6029220 - DNA, 25 bp, Homo sapien
agcagtaatcctcttcgcagggtca

SEQ ID NO: 6029221 - DNA, 25 bp, Homo sapien
cgaatatcagtagtagttgatggcg

SEQ ID NO: 6029222 - DNA, 25 bp, Homo sapien
ttcgccttcaggttcgtcgtttgga

SEQ ID NO: 6029223 - DNA, 25 bp, Homo sapien
acgctgtaaaagatctatgcctttc

SEQ ID NO: 6029224 - DNA, 25 bp, Homo sapien
acatcttctccagtggcgcggcagg

SEQ ID NO: 6029225 - DNA, 25 bp, Homo sapien
aagcatacgctgtaaaagatctatg

SEQ ID NO: 6029226 - DNA, 25 bp, Homo sapien
cggcagggtacatgggaagcgactt

SEQ ID NO: 6029227 - DNA, 25 bp, Homo sapien
tggcgcggcagggtacatgggaagc

SEQ ID NO: 6029228 - DNA, 25 bp, Homo sapien
gaagctgggtgggatgggttcgcct

SEQ ID NO: 6029229 - DNA, 25 bp, Homo sapien
tcgttagtgcctccttgtagtgatc

SEQ ID NO: 6029230 - DNA, 25 bp, Homo sapien
ttcttgctaaaccgaaatcacatac

SEQ ID NO: 6029231 - DNA, 25 bp, Homo sapien
tgactcgagggaacatcttctccag

SEQ ID NO: 6029232 - DNA, 25 bp, Homo sapien
atcgtggtatgtttgcaaatacgga

SEQ ID NO: 6029233 - DNA, 25 bp, Homo sapien
gtatgtttgcaaatacggatgctcc

SEQ ID NO: 6029234 - DNA, 25 bp, Homo sapien
actcgtcaatgattcttgctaaacc

SEQ ID NO: 6029235 - DNA, 25 bp, Homo sapien
atcacatactttcaagtcacagttg

SEQ ID NO: 6029236 - DNA, 25 bp, Homo sapien
tactttcaagtcacagttggagttt

SEQ ID NO: 6029237 - DNA, 25 bp, Homo sapien
caaactcgaagaagctgggtgggat

SEQ ID NO: 6029238 - DNA, 25 bp, Homo sapien
ctccttagcagtaatcctcttcgca

SEQ ID NO: 6029239 - DNA, 25 bp, Homo sapien
cagaggttaacatcacctctggcgc

SEQ ID NO: 6029240 - DNA, 25 bp, Homo sapien
cgaagaagctgggtgggatgggttc

SEQ ID NO: 6029241 - DNA, 25 bp, Homo sapien
ttcaggttcgtcgtttggatcgtgg

SEQ ID NO: 6029242 - DNA, 25 bp, Homo sapien
ttgagtatttggcagaggttaacat

SEQ ID NO: 6029243 - DNA, 25 bp, Homo sapien
tgctaaaccgaaatcacatactttc

SEQ ID NO: 6029244 - DNA, 25 bp, Homo sapien
gggaagcgactttatgtactctcta

SEQ ID NO: 6029245 - DNA, 25 bp, Homo sapien
aagaaaagttcagcgagaatacatc

SEQ ID NO: 6029246 - DNA, 25 bp, Homo sapien
gtgcctccttgtagtgatcaaactc

SEQ ID NO: 6029247 - DNA, 25 bp, Homo sapien
tgtccgcggctgactcgtcaatgat

SEQ ID NO: 6029248 - DNA, 25 bp, Homo sapien
ccttgtagtgatcaaactcgaagaa

SEQ ID NO: 6029249 - DNA, 25 bp, Homo sapien
gatggcgataatctctgccagggaa

SEQ ID NO: 6029250 - DNA, 25 bp, Homo sapien
acctctggcgccctgtaccaacgtg

SEQ ID NO: 6029251 - DNA, 25 bp, Homo sapien
tgataccgaatatcagtagtagttg

SEQ ID NO: 6029252 - DNA, 25 bp, Homo sapien
taaaagatctatgcctttcgggttg

SEQ ID NO: 6029253 - DNA, 25 bp, Homo sapien
tcagtagtagttgatggcgataatc

SEQ ID NO: 6029254 - DNA, 25 bp, Homo sapien
gtagttgatggcgataatctctgcc

SEQ ID NO: 6029255 - DNA, 25 bp, Homo sapien
tcattatctgagtgaggtgtaccga

SEQ ID NO: 6029256 - DNA, 25 bp, Homo sapien
cggctgactcgtcaatgattcttgc

SEQ ID NO: 6029257 - DNA, 25 bp, Homo sapien
ggcgccctgtaccaacgtgtggcca

SEQ ID NO: 6029258 - DNA, 25 bp, Homo sapien
ttaacatcacctctggcgccctgta

SEQ ID NO: 6029259 - DNA, 25 bp, Homo sapien
tctccagtggcgcggcagggtacat

SEQ ID NO: 6029260 - DNA, 25 bp, Homo sapien
cgcaggaccacacgtccatggccct

SEQ ID NO: 6029261 - DNA, 25 bp, Homo sapien
cgcaaatcattatctgagtgaggtg

SEQ ID NO: 6029262 - DNA, 25 bp, Homo sapien
gagggaacatcttctccagtggcgc

SEQ ID NO: 6029263 - DNA, 25 bp, Homo sapien
attggccgtcttaagaaaagttcag

SEQ ID NO: 6029264 - DNA, 25 bp, Homo sapien
ttcgtcgtttggatcgtggtatgtt

SEQ ID NO: 6029265 - DNA, 25 bp, Homo sapien
ccagggaagattggccgtcttaaga

SEQ ID NO: 6029266 - DNA, 25 bp, Homo sapien
aatcctcttcgcagggtcaaaaaca

SEQ ID NO: 6029267 - DNA, 25 bp, Homo sapien
tgtaccaacgtgtggccacatactc

SEQ ID NO: 6029268 - DNA, 25 bp, Homo sapien
atgctccagtgcctccttagcagta

SEQ ID NO: 6029269 - DNA, 25 bp, Homo sapien
accgaaatcacatactttcaagtca

SEQ ID NO: 6029270 - DNA, 25 bp, Homo sapien
cttcgcagggtcaaaaacaagcata

SEQ ID NO: 6029271 - DNA, 25 bp, Homo sapien
cagtgcctccttagcagtaatcctc

SEQ ID NO: 6029272 - DNA, 25 bp, Homo sapien
agccctgggtgactctatacaccgc

SEQ ID NO: 6029273 - DNA, 25 bp, Homo sapien
ttgcaaatacggatgctccagtgcc

SEQ ID NO: 6029274 - DNA, 25 bp, Homo sapien
ctgaattgtccgcggctgactcgtc

SEQ ID NO: 6029275 - DNA, 25 bp, Homo sapien
gatgggttcgccttcaggttcgtcg

SEQ ID NO: 6029276 - DNA, 25 bp, Homo sapien
gatctatgcctttcgggttgactcg

SEQ ID NO: 6029277 - DNA, 25 bp, Homo sapien
tctgagtgaggtgtaccgatgatac

SEQ ID NO: 6029278 - DNA, 25 bp, Homo sapien
tgggctctgaattgtccgcggctga

SEQ ID NO: 6029279 - DNA, 25 bp, Homo sapien
cgactttatgtactctctagccctg

SEQ ID NO: 6029280 - DNA, 25 bp, Homo sapien
aacgtgtggccacatactcggtcat

SEQ ID NO: 6029281 - DNA, 25 bp, Homo sapien
tatatgcagaaccaagtgttttaaa

SEQ ID NO: 6029282 - DNA, 25 bp, Homo sapien
ttggtgtgtaccagtattctaataa

SEQ ID NO: 6029283 - DNA, 25 bp, Homo sapien
ttgcatctgcaagaaagatcactac

SEQ ID NO: 6029284 - DNA, 25 bp, Homo sapien
cgcgacgaagatgtgtatattatcc

SEQ ID NO: 6029285 - DNA, 25 bp, Homo sapien
gtcatcacaatggatctccatgcct

SEQ ID NO: 6029286 - DNA, 25 bp, Homo sapien
ttttccatatgcaagacaagacaag

SEQ ID NO: 6029287 - DNA, 25 bp, Homo sapien
gatttcttgatggaattattaattt

SEQ ID NO: 6029288 - DNA, 25 bp, Homo sapien
cagatttcgacaatgctattttggt

SEQ ID NO: 6029289 - DNA, 25 bp, Homo sapien
ggaataggtgaacaagaaattaatg

SEQ ID NO: 6029290 - DNA, 25 bp, Homo sapien
ctgaacaaatatcgaaaaagttagg

SEQ ID NO: 6029291 - DNA, 25 bp, Homo sapien
tattccactttccaaagttggtgtg

SEQ ID NO: 6029292 - DNA, 25 bp, Homo sapien
aggtgagagccttcgcgacgaagat

SEQ ID NO: 6029293 - DNA, 25 bp, Homo sapien
aatttattgcaaactgctggtgctg

SEQ ID NO: 6029294 - DNA, 25 bp, Homo sapien
aagacaagacaagaaagataaatcc

SEQ ID NO: 6029295 - DNA, 25 bp, Homo sapien
attatccaaactggaataggtgaac

SEQ ID NO: 6029296 - DNA, 25 bp, Homo sapien
caaactggaataggtgaacaagaaa

SEQ ID NO: 6029297 - DNA, 25 bp, Homo sapien
atcccgggcgcccattaccgcaaag

SEQ ID NO: 6029298 - DNA, 25 bp, Homo sapien
gatctccatgcctcccaaattcaag

SEQ ID NO: 6029299 - DNA, 25 bp, Homo sapien
ggaaaacagatttcgacaatgctat

SEQ ID NO: 6029300 - DNA, 25 bp, Homo sapien
gcacatagactctcagcttcaactc

SEQ ID NO: 6029301 - DNA, 25 bp, Homo sapien
agaaacctctgtcaccataggtgag

SEQ ID NO: 6029302 - DNA, 25 bp, Homo sapien
taattttaattcatgcttgccaaat

SEQ ID NO: 6029303 - DNA, 25 bp, Homo sapien
ggtgctgatcatgtcatcacaatgg

SEQ ID NO: 6029304 - DNA, 25 bp, Homo sapien
atcaaattgctagcgggaaactccc

SEQ ID NO: 6029305 - DNA, 25 bp, Homo sapien
cactttccaaagttggtgtgtacca

SEQ ID NO: 6029306 - DNA, 25 bp, Homo sapien
tcgagaagatatggctataaatagt

SEQ ID NO: 6029307 - DNA, 25 bp, Homo sapien
aattatattagagcccggaaaacag

SEQ ID NO: 6029308 - DNA, 25 bp, Homo sapien
ggtgaacaagaaattaatgatttct

SEQ ID NO: 6029309 - DNA, 25 bp, Homo sapien
atatgcaagacaagacaagaaagat

SEQ ID NO: 6029310 - DNA, 25 bp, Homo sapien
cataatgcacatagactctcagctt

SEQ ID NO: 6029311 - DNA, 25 bp, Homo sapien
acaacctatatgcagaaccaagtgt

SEQ ID NO: 6029312 - DNA, 25 bp, Homo sapien
gatcatgtcatcacaatggatctcc

SEQ ID NO: 6029313 - DNA, 25 bp, Homo sapien
agacaagaaagataaatcccgggcg

SEQ ID NO: 6029314 - DNA, 25 bp, Homo sapien
catgcctcccaaattcaagggtttt

SEQ ID NO: 6029315 - DNA, 25 bp, Homo sapien
atttggctgaacaaatatcgaaaaa

SEQ ID NO: 6029316 - DNA, 25 bp, Homo sapien
gccaaattgcatctgcaagaaagat

SEQ ID NO: 6029317 - DNA, 25 bp, Homo sapien
ccggttgacaacctatatgcagaac

SEQ ID NO: 6029318 - DNA, 25 bp, Homo sapien
gagcccggaaaacagatttcgacaa

SEQ ID NO: 6029319 - DNA, 25 bp, Homo sapien
ctgtaatacccaattttccatatgc

SEQ ID NO: 6029320 - DNA, 25 bp, Homo sapien
accgcaaagttggttgccaatttat

SEQ ID NO: 6029321 - DNA, 25 bp, Homo sapien
gctataaatagtatcaaattgctag

SEQ ID NO: 6029322 - DNA, 25 bp, Homo sapien
caagtgttttaaattatattagagc

SEQ ID NO: 6029323 - DNA, 25 bp, Homo sapien
gtgtatattatccaaactggaatag

SEQ ID NO: 6029324 - DNA, 25 bp, Homo sapien
actgctggtgctgatcatgtcatca

SEQ ID NO: 6029325 - DNA, 25 bp, Homo sapien
tgtaccagtattctaataaagaaac

SEQ ID NO: 6029326 - DNA, 25 bp, Homo sapien
aattaatgatttcttgatggaatta

SEQ ID NO: 6029327 - DNA, 25 bp, Homo sapien
actcccatcctgatttggctgaaca

SEQ ID NO: 6029328 - DNA, 25 bp, Homo sapien
ttgcaaactgctggtgctgatcatg

SEQ ID NO: 6029329 - DNA, 25 bp, Homo sapien
ccacaaggcttctccagcaaaaatg

SEQ ID NO: 6029330 - DNA, 25 bp, Homo sapien
atgcttgccaaattgcatctgcaag

SEQ ID NO: 6029331 - DNA, 25 bp, Homo sapien
gaattcagagtctcgagaagatatg

SEQ ID NO: 6029332 - DNA, 25 bp, Homo sapien
tattagagcccggaaaacagatttc

SEQ ID NO: 6029333 - DNA, 25 bp, Homo sapien
aatagtatcaaattgctagcgggaa

SEQ ID NO: 6029334 - DNA, 25 bp, Homo sapien
agagtctcgagaagatatggctata

SEQ ID NO: 6029335 - DNA, 25 bp, Homo sapien
tttccatatcccggttgacaaccta

SEQ ID NO: 6029336 - DNA, 25 bp, Homo sapien
ctctgtcaccataggtgagagcctt

SEQ ID NO: 6029337 - DNA, 25 bp, Homo sapien
gaagatgtgtatattatccaaactg

SEQ ID NO: 6029338 - DNA, 25 bp, Homo sapien
tggaattattaattttaattcatgc

SEQ ID NO: 6029339 - DNA, 25 bp, Homo sapien
aataaagaaacctctgtcaccatag

SEQ ID NO: 6029340 - DNA, 25 bp, Homo sapien
cgggaaactcccatcctgatttggc

SEQ ID NO: 6029341 - DNA, 25 bp, Homo sapien
agaaagataaatcccgggcgcccat

SEQ ID NO: 6029342 - DNA, 25 bp, Homo sapien
caagaaattaatgatttcttgatgg

SEQ ID NO: 6029343 - DNA, 25 bp, Homo sapien
ccaaagttggtgtgtaccagtattc

SEQ ID NO: 6029344 - DNA, 25 bp, Homo sapien
gatatggctataaatagtatcaaat

SEQ ID NO: 6029345 - DNA, 25 bp, Homo sapien
agccttcgcgacgaagatgtgtata

SEQ ID NO: 6029346 - DNA, 25 bp, Homo sapien
gaaagatcactactgtaatacccaa

SEQ ID NO: 6029347 - DNA, 25 bp, Homo sapien
taattcatgcttgccaaattgcatc

SEQ ID NO: 6029348 - DNA, 25 bp, Homo sapien
tccagcaaaaatgaattcagagtct

SEQ ID NO: 6029349 - DNA, 25 bp, Homo sapien
caccataggtgagagccttcgcgac

SEQ ID NO: 6029350 - DNA, 25 bp, Homo sapien
tcagcttcaactccacaaggcttct

SEQ ID NO: 6029351 - DNA, 25 bp, Homo sapien
ttattaattttaattcatgcttgcc

SEQ ID NO: 6029352 - DNA, 25 bp, Homo sapien
tcgacaatgctattttggtgtcgcc

SEQ ID NO: 6029353 - DNA, 25 bp, Homo sapien
tcaactccacaaggcttctccagca

SEQ ID NO: 6029354 - DNA, 25 bp, Homo sapien
aaaaatgaattcagagtctcgagaa

SEQ ID NO: 6029355 - DNA, 25 bp, Homo sapien
tacccaattttccatatgcaagaca

SEQ ID NO: 6029356 - DNA, 25 bp, Homo sapien
agactctcagcttcaactccacaag

SEQ ID NO: 6029357 - DNA, 25 bp, Homo sapien
acaatggatctccatgcctcccaaa

SEQ ID NO: 6029358 - DNA, 25 bp, Homo sapien
cgggcgcccattaccgcaaagttgg

SEQ ID NO: 6029359 - DNA, 25 bp, Homo sapien
tattctaataaagaaacctctgtca

SEQ ID NO: 6029360 - DNA, 25 bp, Homo sapien
atcctgatttggctgaacaaatatc

SEQ ID NO: 6029361 - DNA, 25 bp, Homo sapien
cagaaccaagtgttttaaattatat

SEQ ID NO: 6029362 - DNA, 25 bp, Homo sapien
aagttggttgccaatttattgcaaa

SEQ ID NO: 6029363 - DNA, 25 bp, Homo sapien
catatcccggttgacaacctatatg

SEQ ID NO: 6029364 - DNA, 25 bp, Homo sapien
ggcttctccagcaaaaatgaattca

SEQ ID NO: 6029365 - DNA, 25 bp, Homo sapien
cccattaccgcaaagttggttgcca

SEQ ID NO: 6029366 - DNA, 25 bp, Homo sapien
gttgccaatttattgcaaactgctg

SEQ ID NO: 6029367 - DNA, 25 bp, Homo sapien
ctgcaagaaagatcactactgtaat

SEQ ID NO: 6029368 - DNA, 25 bp, Homo sapien
tgctagcgggaaactcccatcctga

SEQ ID NO: 6029369 - DNA, 25 bp, Homo sapien
tcactactgtaatacccaattttcc

SEQ ID NO: 6029370 - DNA, 25 bp, Homo sapien
ggtcagcaataggtaaatccaaatc

SEQ ID NO: 6029371 - DNA, 25 bp, Homo sapien
aaatagcattgtcgaaatctgtttt

SEQ ID NO: 6029372 - DNA, 25 bp, Homo sapien
agcaccagcagtttgcaataaattg

SEQ ID NO: 6029373 - DNA, 25 bp, Homo sapien
accgtgtgtaacaatagctataact

SEQ ID NO: 6029374 - DNA, 25 bp, Homo sapien
cttatagcttcagcgaacgtgggac

SEQ ID NO: 6029375 - DNA, 25 bp, Homo sapien
gaaaataccgtgtgtaacaatagct

SEQ ID NO: 6029376 - DNA, 25 bp, Homo sapien
tcaccattgtgtagtcttcttatag

SEQ ID NO: 6029377 - DNA, 25 bp, Homo sapien
ctactctcttagcaccacctgcatc

SEQ ID NO: 6029378 - DNA, 25 bp, Homo sapien
tgtaacaatagctataacttctttg

SEQ ID NO: 6029379 - DNA, 25 bp, Homo sapien
ttgcaataaattggcaaccaacttt

SEQ ID NO: 6029380 - DNA, 25 bp, Homo sapien
cattgtgatgacatgatcagcacca

SEQ ID NO: 6029381 - DNA, 25 bp, Homo sapien
aaacaattctagacaatctactatt

SEQ ID NO: 6029382 - DNA, 25 bp, Homo sapien
aacaagcaccatttttgaaacctcg

SEQ ID NO: 6029383 - DNA, 25 bp, Homo sapien
ctgaaccggagaaaataccgtgtgt

SEQ ID NO: 6029384 - DNA, 25 bp, Homo sapien
caccatttttgaaacctcgttagct

SEQ ID NO: 6029385 - DNA, 25 bp, Homo sapien
tgcatataggttgtcaaccgggata

SEQ ID NO: 6029386 - DNA, 25 bp, Homo sapien
agctttttgcctctctttgtgaatc

SEQ ID NO: 6029387 - DNA, 25 bp, Homo sapien
aaatctaacttgtcagccaaagcag

SEQ ID NO: 6029388 - DNA, 25 bp, Homo sapien
cgaacgtgggactaatatcgatctg

SEQ ID NO: 6029389 - DNA, 25 bp, Homo sapien
tgctccatcaacgtatcacaagctt

SEQ ID NO: 6029390 - DNA, 25 bp, Homo sapien
cgaaatctgttttccgggctctaat

SEQ ID NO: 6029391 - DNA, 25 bp, Homo sapien
ttgtgtagtcttcttatagcttcag

SEQ ID NO: 6029392 - DNA, 25 bp, Homo sapien
tctcttgctgaaccggagaaaatac

SEQ ID NO: 6029393 - DNA, 25 bp, Homo sapien
ctactatttcttagcttttctcttg

SEQ ID NO: 6029394 - DNA, 25 bp, Homo sapien
gtatcacaagcttttaccaacgtac

SEQ ID NO: 6029395 - DNA, 25 bp, Homo sapien
ctgcatcaggcgacaccaaaatagc

SEQ ID NO: 6029396 - DNA, 25 bp, Homo sapien
gctctaatataatttaaaacacttg

SEQ ID NO: 6029397 - DNA, 25 bp, Homo sapien
aatctaccggaacggtatttgtgca

SEQ ID NO: 6029398 - DNA, 25 bp, Homo sapien
atcaccaacaagcaccatttttgaa

SEQ ID NO: 6029399 - DNA, 25 bp, Homo sapien
tcttagcaccacctgcatcaggcga

SEQ ID NO: 6029400 - DNA, 25 bp, Homo sapien
tgggactaatatcgatctggtcagc

SEQ ID NO: 6029401 - DNA, 25 bp, Homo sapien
cgatctggtcagcaataggtaaatc

SEQ ID NO: 6029402 - DNA, 25 bp, Homo sapien
agcagtttgcaataaattggcaacc

SEQ ID NO: 6029403 - DNA, 25 bp, Homo sapien
taataaacatgatttattggtaaca

SEQ ID NO: 6029404 - DNA, 25 bp, Homo sapien
aaacccttgaatttgggaggcatgg

SEQ ID NO: 6029405 - DNA, 25 bp, Homo sapien
catatcatcaactaataaacatgat

SEQ ID NO: 6029406 - DNA, 25 bp, Homo sapien
ttaccaacgtaccacaagtatccgc

SEQ ID NO: 6029407 - DNA, 25 bp, Homo sapien
ggcatggagatccattgtgatgaca

SEQ ID NO: 6029408 - DNA, 25 bp, Homo sapien
cggtatttgtgcaaacaattctaga

SEQ ID NO: 6029409 - DNA, 25 bp, Homo sapien
caagcttttaccaacgtaccacaag

SEQ ID NO: 6029410 - DNA, 25 bp, Homo sapien
atcaacgtatcacaagcttttacca

SEQ ID NO: 6029411 - DNA, 25 bp, Homo sapien
tgaaacctcgttagctttttgcctc

SEQ ID NO: 6029412 - DNA, 25 bp, Homo sapien
tataacttctttggcaccatgctcc

SEQ ID NO: 6029413 - DNA, 25 bp, Homo sapien
gacaatctactatttcttagctttt

SEQ ID NO: 6029414 - DNA, 25 bp, Homo sapien
ttctagacaatctactatttcttag

SEQ ID NO: 6029415 - DNA, 25 bp, Homo sapien
aaagcagctactctcttagcaccac

SEQ ID NO: 6029416 - DNA, 25 bp, Homo sapien
aacacttggttctgcatataggttg

SEQ ID NO: 6029417 - DNA, 25 bp, Homo sapien
aaatttaaatctaacttgtcagcca

SEQ ID NO: 6029418 - DNA, 25 bp, Homo sapien
gagatccattgtgatgacatgatca

SEQ ID NO: 6029419 - DNA, 25 bp, Homo sapien
cttcagcgaacgtgggactaatatc

SEQ ID NO: 6029420 - DNA, 25 bp, Homo sapien
cattgtcgaaatctgttttccgggc

SEQ ID NO: 6029421 - DNA, 25 bp, Homo sapien
ctcgttagctttttgcctctctttg

SEQ ID NO: 6029422 - DNA, 25 bp, Homo sapien
ccggaacggtatttgtgcaaacaat

SEQ ID NO: 6029423 - DNA, 25 bp, Homo sapien
caataggtaaatccaaatctaccgg

SEQ ID NO: 6029424 - DNA, 25 bp, Homo sapien
caccacctgcatcaggcgacaccaa

SEQ ID NO: 6029425 - DNA, 25 bp, Homo sapien
tcaactaataaacatgatttattgg

SEQ ID NO: 6029426 - DNA, 25 bp, Homo sapien
gtgaatcaaagcaaaatttaaatct

SEQ ID NO: 6029427 - DNA, 25 bp, Homo sapien
cggagaaaataccgtgtgtaacaat

SEQ ID NO: 6029428 - DNA, 25 bp, Homo sapien
acatgatttattggtaacatcacca

SEQ ID NO: 6029429 - DNA, 25 bp, Homo sapien
taatatcgatctggtcagcaatagg

SEQ ID NO: 6029430 - DNA, 25 bp, Homo sapien
aacttgtcagccaaagcagctactc

SEQ ID NO: 6029431 - DNA, 25 bp, Homo sapien
atgatcagcaccagcagtttgcaat

SEQ ID NO: 6029432 - DNA, 25 bp, Homo sapien
atccgccatatcatcaactaataaa

SEQ ID NO: 6029433 - DNA, 25 bp, Homo sapien
agtcttcttatagcttcagcgaacg

SEQ ID NO: 6029434 - DNA, 25 bp, Homo sapien
ggtaacatcaccaacaagcaccatt

SEQ ID NO: 6029435 - DNA, 25 bp, Homo sapien
taaattggcaaccaactttgcggta

SEQ ID NO: 6029436 - DNA, 25 bp, Homo sapien
atataatttaaaacacttggttctg

SEQ ID NO: 6029437 - DNA, 25 bp, Homo sapien
gatgacatgatcagcaccagcagtt

SEQ ID NO: 6029438 - DNA, 25 bp, Homo sapien
tttattggtaacatcaccaacaagc

SEQ ID NO: 6029439 - DNA, 25 bp, Homo sapien
agcttttctcttgctgaaccggaga

SEQ ID NO: 6029440 - DNA, 25 bp, Homo sapien
acaccaaaatagcattgtcgaaatc

SEQ ID NO: 6029441 - DNA, 25 bp, Homo sapien
ttgggaggcatggagatccattgtg

SEQ ID NO: 6029442 - DNA, 25 bp, Homo sapien
ttgcctctctttgtgaatcaaagca

SEQ ID NO: 6029443 - DNA, 25 bp, Homo sapien
ctctttgtgaatcaaagcaaaattt

SEQ ID NO: 6029444 - DNA, 25 bp, Homo sapien
atttaaaacacttggttctgcatat

SEQ ID NO: 6029445 - DNA, 25 bp, Homo sapien
ttctttggcaccatgctccatcaac

SEQ ID NO: 6029446 - DNA, 25 bp, Homo sapien
acggattcaccattgtgtagtcttc

SEQ ID NO: 6029447 - DNA, 25 bp, Homo sapien
acaagtatccgccatatcatcaact

SEQ ID NO: 6029448 - DNA, 25 bp, Homo sapien
ctgttttccgggctctaatataatt

SEQ ID NO: 6029449 - DNA, 25 bp, Homo sapien
caaagcaaaatttaaatctaacttg

SEQ ID NO: 6029450 - DNA, 25 bp, Homo sapien
tcagccaaagcagctactctcttag

SEQ ID NO: 6029451 - DNA, 25 bp, Homo sapien
ggcaccatgctccatcaacgtatca

SEQ ID NO: 6029452 - DNA, 25 bp, Homo sapien
taggttgtcaaccgggatatggaaa

SEQ ID NO: 6029453 - DNA, 25 bp, Homo sapien
tttcttagcttttctcttgctgaac

SEQ ID NO: 6029454 - DNA, 25 bp, Homo sapien
tggttctgcatataggttgtcaacc

SEQ ID NO: 6029455 - DNA, 25 bp, Homo sapien
caggcgacaccaaaatagcattgtc

SEQ ID NO: 6029456 - DNA, 25 bp, Homo sapien
ttgtgcaaacaattctagacaatct

SEQ ID NO: 6029457 - DNA, 25 bp, Homo sapien
ttgaatttgggaggcatggagatcc

SEQ ID NO: 6029458 - DNA, 25 bp, Homo sapien
cgtaccacaagtatccgccatatca

SEQ ID NO: 6029459 - DNA, 25 bp, Homo sapien
aatagctataacttctttggcacca

SEQ ID NO: 6029460 - DNA, 25 bp, Homo sapien
aagcttggtgcttagaatccatccc

SEQ ID NO: 6029461 - DNA, 25 bp, Homo sapien
cgcaagaattgaaatcttttgataa

SEQ ID NO: 6029462 - DNA, 25 bp, Homo sapien
aatgaggataatcttaaaaataggc

SEQ ID NO: 6029463 - DNA, 25 bp, Homo sapien
tatgctgccgttaggctcgatcaac

SEQ ID NO: 6029464 - DNA, 25 bp, Homo sapien
gatcaacctattttaccacagaatg

SEQ ID NO: 6029465 - DNA, 25 bp, Homo sapien
gagctaaaagaccttggttaggtca

SEQ ID NO: 6029466 - DNA, 25 bp, Homo sapien
tccaaaatgctatctatgtcctggt

SEQ ID NO: 6029467 - DNA, 25 bp, Homo sapien
caagcccacagctccattgtatgat

SEQ ID NO: 6029468 - DNA, 25 bp, Homo sapien
acaatccactaaccgattcatggat

SEQ ID NO: 6029469 - DNA, 25 bp, Homo sapien
tttctccacacagagctaaaagacc

SEQ ID NO: 6029470 - DNA, 25 bp, Homo sapien
tctatgtcctggtaacaaaagagct

SEQ ID NO: 6029471 - DNA, 25 bp, Homo sapien
atccacatggccaagcttggtgctt

SEQ ID NO: 6029472 - DNA, 25 bp, Homo sapien
tgcttacaagcccacagctccattg

SEQ ID NO: 6029473 - DNA, 25 bp, Homo sapien
ccattccacaaatgaaacaatcaga

SEQ ID NO: 6029474 - DNA, 25 bp, Homo sapien
cctattttaccacagaatgattcca

SEQ ID NO: 6029475 - DNA, 25 bp, Homo sapien
tccattgtatgatccaaaatgctat

SEQ ID NO: 6029476 - DNA, 25 bp, Homo sapien
ctgcttaaagtgcaatctgtgagag

SEQ ID NO: 6029477 - DNA, 25 bp, Homo sapien
atcataatctaaccattccacaaat

SEQ ID NO: 6029478 - DNA, 25 bp, Homo sapien
gagaaaatcataagcctttcaaata

SEQ ID NO: 6029479 - DNA, 25 bp, Homo sapien
aaaacaaaggtacagccatgggttg

SEQ ID NO: 6029480 - DNA, 25 bp, Homo sapien
tggtaacctaaacccaagatatgaa

SEQ ID NO: 6029481 - DNA, 25 bp, Homo sapien
acttacatccacatggccaagcttg

SEQ ID NO: 6029482 - DNA, 25 bp, Homo sapien
agccccaatcataatctaaccattc

SEQ ID NO: 6029483 - DNA, 25 bp, Homo sapien
attcttggcaagcattgactgacga

SEQ ID NO: 6029484 - DNA, 25 bp, Homo sapien
ctagtgaagtttcgcaagaattgaa

SEQ ID NO: 6029485 - DNA, 25 bp, Homo sapien
ccagagaagcaagagaaaatcataa

SEQ ID NO: 6029486 - DNA, 25 bp, Homo sapien
ccgattcatggatcttagtttctcc

SEQ ID NO: 6029487 - DNA, 25 bp, Homo sapien
gtcatatgttttagccccaatcata

SEQ ID NO: 6029488 - DNA, 25 bp, Homo sapien
gttaggtcaacaggaggctgcttac

SEQ ID NO: 6029489 - DNA, 25 bp, Homo sapien
ttaccacagaatgattccaatgagg

SEQ ID NO: 6029490 - DNA, 25 bp, Homo sapien
gacgttacaatccactaaccgattc

SEQ ID NO: 6029491 - DNA, 25 bp, Homo sapien
tgtttcgtcatatgttttagcccca

SEQ ID NO: 6029492 - DNA, 25 bp, Homo sapien
aagcaagagaaaatcataagccttt

SEQ ID NO: 6029493 - DNA, 25 bp, Homo sapien
caaatatgtccaaatatttgaaaac

SEQ ID NO: 6029494 - DNA, 25 bp, Homo sapien
cagccatgggttgttccaacttaca

SEQ ID NO: 6029495 - DNA, 25 bp, Homo sapien
cagaatgattccaatgaggataatc

SEQ ID NO: 6029496 - DNA, 25 bp, Homo sapien
ggtgcttagaatccatccctagtga

SEQ ID NO: 6029497 - DNA, 25 bp, Homo sapien
ccatccctagtgaagtttcgcaaga

SEQ ID NO: 6029498 - DNA, 25 bp, Homo sapien
ttccccaatgattatgctgccgtta

SEQ ID NO: 6029499 - DNA, 25 bp, Homo sapien
aatgattatgctgccgttaggctcg

SEQ ID NO: 6029500 - DNA, 25 bp, Homo sapien
tcttagtttctccacacagagctaa

SEQ ID NO: 6029501 - DNA, 25 bp, Homo sapien
aggctcgatcaacctattttaccac

SEQ ID NO: 6029502 - DNA, 25 bp, Homo sapien
aatcagatctggttcatattgttaa

SEQ ID NO: 6029503 - DNA, 25 bp, Homo sapien
accttggttaggtcaacaggaggct

SEQ ID NO: 6029504 - DNA, 25 bp, Homo sapien
caaatatttgaaaacaaaggtacag

SEQ ID NO: 6029505 - DNA, 25 bp, Homo sapien
gataatcttaaaaataggctgctta

SEQ ID NO: 6029506 - DNA, 25 bp, Homo sapien
cttaaaaataggctgcttaaagtgc

SEQ ID NO: 6029507 - DNA, 25 bp, Homo sapien
cacagctccattgtatgatccaaaa

SEQ ID NO: 6029508 - DNA, 25 bp, Homo sapien
tgaaatcttttgataaatataaacg

SEQ ID NO: 6029509 - DNA, 25 bp, Homo sapien
ttcatattgttaattcttggcaagc

SEQ ID NO: 6029510 - DNA, 25 bp, Homo sapien
atctggttcatattgttaattcttg

SEQ ID NO: 6029511 - DNA, 25 bp, Homo sapien
ggcaagcattgactgacgatctctc

SEQ ID NO: 6029512 - DNA, 25 bp, Homo sapien
ccaagatatgaatcaacgtatattt

SEQ ID NO: 6029513 - DNA, 25 bp, Homo sapien
tcaacgtatattttccccaatgatt

SEQ ID NO: 6029514 - DNA, 25 bp, Homo sapien
tgataaatataaacgtgaacacaat

SEQ ID NO: 6029515 - DNA, 25 bp, Homo sapien
tgaaacaatcagatctggttcatat

SEQ ID NO: 6029516 - DNA, 25 bp, Homo sapien
caatctgtgagaggcaattgtttcg

SEQ ID NO: 6029517 - DNA, 25 bp, Homo sapien
tcataagcctttcaaatatgtccaa

SEQ ID NO: 6029518 - DNA, 25 bp, Homo sapien
gtatgatccaaaatgctatctatgt

SEQ ID NO: 6029519 - DNA, 25 bp, Homo sapien
cccatagacgttacaatccactaac

SEQ ID NO: 6029520 - DNA, 25 bp, Homo sapien
gattccaatgaggataatcttaaaa

SEQ ID NO: 6029521 - DNA, 25 bp, Homo sapien
taacaaaagagctactggtaaccta

SEQ ID NO: 6029522 - DNA, 25 bp, Homo sapien
gtgagaggcaattgtttcgtcatat

SEQ ID NO: 6029523 - DNA, 25 bp, Homo sapien
gccgttaggctcgatcaacctattt

SEQ ID NO: 6029524 - DNA, 25 bp, Homo sapien
catggatcttagtttctccacacag

SEQ ID NO: 6029525 - DNA, 25 bp, Homo sapien
cacacagagctaaaagaccttggtt

SEQ ID NO: 6029526 - DNA, 25 bp, Homo sapien
gttccaacttacatccacatggcca

SEQ ID NO: 6029527 - DNA, 25 bp, Homo sapien
ggaggctgcttacaagcccacagct

SEQ ID NO: 6029528 - DNA, 25 bp, Homo sapien
aaggtacagccatgggttgttccaa

SEQ ID NO: 6029529 - DNA, 25 bp, Homo sapien
tgggttgttccaacttacatccaca

SEQ ID NO: 6029530 - DNA, 25 bp, Homo sapien
tatgaatcaacgtatattttcccca

SEQ ID NO: 6029531 - DNA, 25 bp, Homo sapien
cattcccatagacgttacaatccac

SEQ ID NO: 6029532 - DNA, 25 bp, Homo sapien
ggcaattgtttcgtcatatgtttta

SEQ ID NO: 6029533 - DNA, 25 bp, Homo sapien
ctaaacccaagatatgaatcaacgt

SEQ ID NO: 6029534 - DNA, 25 bp, Homo sapien
tcctggtaacaaaagagctactggt

SEQ ID NO: 6029535 - DNA, 25 bp, Homo sapien
tatattttccccaatgattatgctg

SEQ ID NO: 6029536 - DNA, 25 bp, Homo sapien
cactaaccgattcatggatcttagt

SEQ ID NO: 6029537 - DNA, 25 bp, Homo sapien
ctgacgatctctccagagaagcaag

SEQ ID NO: 6029538 - DNA, 25 bp, Homo sapien
ttgttaattcttggcaagcattgac

SEQ ID NO: 6029539 - DNA, 25 bp, Homo sapien
atggccaagcttggtgcttagaatc

SEQ ID NO: 6029540 - DNA, 25 bp, Homo sapien
aagtttcgcaagaattgaaatcttt

SEQ ID NO: 6029541 - DNA, 25 bp, Homo sapien
atctaaccattccacaaatgaaaca

SEQ ID NO: 6029542 - DNA, 25 bp, Homo sapien
tatgtccaaatatttgaaaacaaag

SEQ ID NO: 6029543 - DNA, 25 bp, Homo sapien
tcttttgataaatataaacgtgaac

SEQ ID NO: 6029544 - DNA, 25 bp, Homo sapien
atgctatctatgtcctggtaacaaa

SEQ ID NO: 6029545 - DNA, 25 bp, Homo sapien
cattgactgacgatctctccagaga

SEQ ID NO: 6029546 - DNA, 25 bp, Homo sapien
tgttttagccccaatcataatctaa

SEQ ID NO: 6029547 - DNA, 25 bp, Homo sapien
aaagtgcaatctgtgagaggcaatt

SEQ ID NO: 6029548 - DNA, 25 bp, Homo sapien
tatttgaaaacaaaggtacagccat

SEQ ID NO: 6029549 - DNA, 25 bp, Homo sapien
cacaaatgaaacaatcagatctggt

SEQ ID NO: 6029550 - DNA, 25 bp, Homo sapien
aataggctgcttaaagtgcaatctg

SEQ ID NO: 6029551 - DNA, 25 bp, Homo sapien
tcaacaggaggctgcttacaagccc

SEQ ID NO: 6029552 - DNA, 25 bp, Homo sapien
gcctttcaaatatgtccaaatattt

SEQ ID NO: 6029553 - DNA, 25 bp, Homo sapien
tagaatccatccctagtgaagtttc

SEQ ID NO: 6029554 - DNA, 25 bp, Homo sapien
atctctccagagaagcaagagaaaa

SEQ ID NO: 6029555 - DNA, 25 bp, Homo sapien
aaaggagcctgatggatacccattg

SEQ ID NO: 6029556 - DNA, 25 bp, Homo sapien
taaaatcgaggcgaggtcctccttc

SEQ ID NO: 6029557 - DNA, 25 bp, Homo sapien
ctaagcaccaagcttggccatgtgg

SEQ ID NO: 6029558 - DNA, 25 bp, Homo sapien
tattactcaattcatcaccagtcgc

SEQ ID NO: 6029559 - DNA, 25 bp, Homo sapien
cactacgactcttgacttctctctt

SEQ ID NO: 6029560 - DNA, 25 bp, Homo sapien
caaacaaatcagtattgtgttcacg

SEQ ID NO: 6029561 - DNA, 25 bp, Homo sapien
ttgattctaatttgacgtaatcggc

SEQ ID NO: 6029562 - DNA, 25 bp, Homo sapien
aattatcatacttaatagttagttg

SEQ ID NO: 6029563 - DNA, 25 bp, Homo sapien
tgacgtaatcggcaaacaaatcagt

SEQ ID NO: 6029564 - DNA, 25 bp, Homo sapien
ctcagtaaaggtgggtagaaatgca

SEQ ID NO: 6029565 - DNA, 25 bp, Homo sapien
gcattcaaaggagcctgatggatac

SEQ ID NO: 6029566 - DNA, 25 bp, Homo sapien
ttgctttaaaatcgaggcgaggtcc

SEQ ID NO: 6029567 - DNA, 25 bp, Homo sapien
gcaagcttcttctttgaaatgacca

SEQ ID NO: 6029568 - DNA, 25 bp, Homo sapien
tggctgtacctttgttttcaaatat

SEQ ID NO: 6029569 - DNA, 25 bp, Homo sapien
ggtagaaatgcatgtgaaaccaact

SEQ ID NO: 6029570 - DNA, 25 bp, Homo sapien
cctccttcaccatttggttaaattg

SEQ ID NO: 6029571 - DNA, 25 bp, Homo sapien
tagggatggattctaagcaccaagc

SEQ ID NO: 6029572 - DNA, 25 bp, Homo sapien
aatcagtattgtgttcacgtttata

SEQ ID NO: 6029573 - DNA, 25 bp, Homo sapien
attctccactacgactcttgacttc

SEQ ID NO: 6029574 - DNA, 25 bp, Homo sapien
tcaaatggccagatggcccagtatg

SEQ ID NO: 6029575 - DNA, 25 bp, Homo sapien
tggatgtaagttggaacaacccatg

SEQ ID NO: 6029576 - DNA, 25 bp, Homo sapien
catacttaatagttagttgctttaa

SEQ ID NO: 6029577 - DNA, 25 bp, Homo sapien
ctaatttgacgtaatcggcaaacaa

SEQ ID NO: 6029578 - DNA, 25 bp, Homo sapien
tcgtttcaaataaattatcatactt

SEQ ID NO: 6029579 - DNA, 25 bp, Homo sapien
ggattcattctccactacgactctt

SEQ ID NO: 6029580 - DNA, 25 bp, Homo sapien
aataaaggattcattctccactacg

SEQ ID NO: 6029581 - DNA, 25 bp, Homo sapien
aaggtgggtagaaatgcatgtgaaa

SEQ ID NO: 6029582 - DNA, 25 bp, Homo sapien
cccattgagtatgggaaactcgttt

SEQ ID NO: 6029583 - DNA, 25 bp, Homo sapien
tgaggctcacctaacaattcaaaac

SEQ ID NO: 6029584 - DNA, 25 bp, Homo sapien
ttccgaacagtagctgatctcagta

SEQ ID NO: 6029585 - DNA, 25 bp, Homo sapien
tcgaggcgaggtcctccttcaccat

SEQ ID NO: 6029586 - DNA, 25 bp, Homo sapien
ggccagatggcccagtatggaacaa

SEQ ID NO: 6029587 - DNA, 25 bp, Homo sapien
gttaaatctctttgaggctcaccta

SEQ ID NO: 6029588 - DNA, 25 bp, Homo sapien
cagcagcttgttccgaagttaaatc

SEQ ID NO: 6029589 - DNA, 25 bp, Homo sapien
cctttgttttcaaatatttggacat

SEQ ID NO: 6029590 - DNA, 25 bp, Homo sapien
tgacttctctcttgattctaatttg

SEQ ID NO: 6029591 - DNA, 25 bp, Homo sapien
attgaggcaagcttcttctttgaaa

SEQ ID NO: 6029592 - DNA, 25 bp, Homo sapien
acagtagctgatctcagtaaaggtg

SEQ ID NO: 6029593 - DNA, 25 bp, Homo sapien
atttcaattcttgcgaaacttcact

SEQ ID NO: 6029594 - DNA, 25 bp, Homo sapien
tttatcaaaagatttcaattcttgc

SEQ ID NO: 6029595 - DNA, 25 bp, Homo sapien
cttggccatgtggatgtaagttgga

SEQ ID NO: 6029596 - DNA, 25 bp, Homo sapien
aacaacaataaaggattcattctcc

SEQ ID NO: 6029597 - DNA, 25 bp, Homo sapien
tgttcacgtttatatttatcaaaag

SEQ ID NO: 6029598 - DNA, 25 bp, Homo sapien
ccaaccaagaatttccgaacagtag

SEQ ID NO: 6029599 - DNA, 25 bp, Homo sapien
aatgcatgtgaaaccaactattact

SEQ ID NO: 6029600 - DNA, 25 bp, Homo sapien
ttggctaattgaggcaagcttcttc

SEQ ID NO: 6029601 - DNA, 25 bp, Homo sapien
gactcttgacttctctcttgattct

SEQ ID NO: 6029602 - DNA, 25 bp, Homo sapien
cttcactagggatggattctaagca

SEQ ID NO: 6029603 - DNA, 25 bp, Homo sapien
gagtatgggaaactcgtttcaaata

SEQ ID NO: 6029604 - DNA, 25 bp, Homo sapien
gctgatctcagtaaaggtgggtaga

SEQ ID NO: 6029605 - DNA, 25 bp, Homo sapien
tattgtgttcacgtttatatttatc

SEQ ID NO: 6029606 - DNA, 25 bp, Homo sapien
taagttggaacaacccatggctgta

SEQ ID NO: 6029607 - DNA, 25 bp, Homo sapien
tccgaagttaaatctctttgaggct

SEQ ID NO: 6029608 - DNA, 25 bp, Homo sapien
ccagtatggaacaacaacaataaag

SEQ ID NO: 6029609 - DNA, 25 bp, Homo sapien
ttcttagtttttcagcagcttgttc

SEQ ID NO: 6029610 - DNA, 25 bp, Homo sapien
caaaagatttcaattcttgcgaaac

SEQ ID NO: 6029611 - DNA, 25 bp, Homo sapien
accaactattactcaattcatcacc

SEQ ID NO: 6029612 - DNA, 25 bp, Homo sapien
tggatacccattgagtatgggaaac

SEQ ID NO: 6029613 - DNA, 25 bp, Homo sapien
attcttgcgaaacttcactagggat

SEQ ID NO: 6029614 - DNA, 25 bp, Homo sapien
catttggttaaattggctaattgag

SEQ ID NO: 6029615 - DNA, 25 bp, Homo sapien
cgaggtcctccttcaccatttggtt

SEQ ID NO: 6029616 - DNA, 25 bp, Homo sapien
gcctgatggatacccattgagtatg

SEQ ID NO: 6029617 - DNA, 25 bp, Homo sapien
tatttggacatatttgaaaggctta

SEQ ID NO: 6029618 - DNA, 25 bp, Homo sapien
gtttttcagcagcttgttccgaagt

SEQ ID NO: 6029619 - DNA, 25 bp, Homo sapien
tggattctaagcaccaagcttggcc

SEQ ID NO: 6029620 - DNA, 25 bp, Homo sapien
tctctcttgattctaatttgacgta

SEQ ID NO: 6029621 - DNA, 25 bp, Homo sapien
tctctttgaggctcacctaacaatt

SEQ ID NO: 6029622 - DNA, 25 bp, Homo sapien
ttcttctttgaaatgaccaaggtct

SEQ ID NO: 6029623 - DNA, 25 bp, Homo sapien
gaaactcgtttcaaataaattatca

SEQ ID NO: 6029624 - DNA, 25 bp, Homo sapien
taatagttagttgctttaaaatcga

SEQ ID NO: 6029625 - DNA, 25 bp, Homo sapien
tcacctaacaattcaaaaccaacca

SEQ ID NO: 6029626 - DNA, 25 bp, Homo sapien
acccatggctgtacctttgttttca

SEQ ID NO: 6029627 - DNA, 25 bp, Homo sapien
tttgaaatgaccaaggtctcaaatg

SEQ ID NO: 6029628 - DNA, 25 bp, Homo sapien
agttagttgctttaaaatcgaggcg

SEQ ID NO: 6029629 - DNA, 25 bp, Homo sapien
caaatatttggacatatttgaaagg

SEQ ID NO: 6029630 - DNA, 25 bp, Homo sapien
caaataaattatcatacttaatagt

SEQ ID NO: 6029631 - DNA, 25 bp, Homo sapien
tgtgaaaccaactattactcaattc

SEQ ID NO: 6029632 - DNA, 25 bp, Homo sapien
ccagtcgcattcaaaggagcctgat

SEQ ID NO: 6029633 - DNA, 25 bp, Homo sapien
aaggtctcaaatggccagatggccc

SEQ ID NO: 6029634 - DNA, 25 bp, Homo sapien
tggaacaacaacaataaaggattca

SEQ ID NO: 6029635 - DNA, 25 bp, Homo sapien
cttcaccatttggttaaattggcta

SEQ ID NO: 6029636 - DNA, 25 bp, Homo sapien
aagaatttccgaacagtagctgatc

SEQ ID NO: 6029637 - DNA, 25 bp, Homo sapien
atgaccaaggtctcaaatggccaga

SEQ ID NO: 6029638 - DNA, 25 bp, Homo sapien
gttaaattggctaattgaggcaagc

SEQ ID NO: 6029639 - DNA, 25 bp, Homo sapien
ccatgtggatgtaagttggaacaac

SEQ ID NO: 6029640 - DNA, 25 bp, Homo sapien
cgtttatatttatcaaaagatttca

SEQ ID NO: 6029641 - DNA, 25 bp, Homo sapien
cttgttccgaagttaaatctctttg

SEQ ID NO: 6029642 - DNA, 25 bp, Homo sapien
accaagcttggccatgtggatgtaa

SEQ ID NO: 6029643 - DNA, 25 bp, Homo sapien
ctaaatttcttagtttttcagcagc

SEQ ID NO: 6029644 - DNA, 25 bp, Homo sapien
catcaccagtcgcattcaaaggagc

SEQ ID NO: 6029645 - DNA, 25 bp, Homo sapien
gcgaaacttcactagggatggattc

SEQ ID NO: 6029646 - DNA, 25 bp, Homo sapien
ggaacaacccatggctgtacctttg

SEQ ID NO: 6029647 - DNA, 25 bp, Homo sapien
gatggcccagtatggaacaacaaca

SEQ ID NO: 6029648 - DNA, 25 bp, Homo sapien
aatcggcaaacaaatcagtattgtg

SEQ ID NO: 6029649 - DNA, 25 bp, Homo sapien
tcaattcatcaccagtcgcattcaa

SEQ ID NO: 6029650 - DNA, 25 bp, Homo sapien
ccgacaagtgctccattcatttggc

SEQ ID NO: 6029651 - DNA, 25 bp, Homo sapien
ttctttacgctagagaccactattt

SEQ ID NO: 6029652 - DNA, 25 bp, Homo sapien
tattttatccatgtttgccgctaaa

SEQ ID NO: 6029653 - DNA, 25 bp, Homo sapien
acgaagagatgcttcaagatactgt

SEQ ID NO: 6029654 - DNA, 25 bp, Homo sapien
cgctaaacacggtgcgaagcatgtt

SEQ ID NO: 6029655 - DNA, 25 bp, Homo sapien
ttcctaaagttgacatcataatttc

SEQ ID NO: 6029656 - DNA, 25 bp, Homo sapien
tatacgagtccatgatggacaccgt

SEQ ID NO: 6029657 - DNA, 25 bp, Homo sapien
tggaagactctcagtataaagacga

SEQ ID NO: 6029658 - DNA, 25 bp, Homo sapien
atactgttcgtaccttatcttacag

SEQ ID NO: 6029659 - DNA, 25 bp, Homo sapien
ccttatcttacagaaacgcaattat

SEQ ID NO: 6029660 - DNA, 25 bp, Homo sapien
ggtctgatctttcccgacaagtgct

SEQ ID NO: 6029661 - DNA, 25 bp, Homo sapien
agatggcgaaggaattggtagagtt

SEQ ID NO: 6029662 - DNA, 25 bp, Homo sapien
actatggtattcacgaagagatgct

SEQ ID NO: 6029663 - DNA, 25 bp, Homo sapien
ttcaagatactgttcgtaccttatc

SEQ ID NO: 6029664 - DNA, 25 bp, Homo sapien
cgaaggaattggtagagttgaacgg

SEQ ID NO: 6029665 - DNA, 25 bp, Homo sapien
gtattcacgaagagatgcttcaaga

SEQ ID NO: 6029666 - DNA, 25 bp, Homo sapien
gcatgttatcggtgttgatatgtca

SEQ ID NO: 6029667 - DNA, 25 bp, Homo sapien
agtccatgatggacaccgttcttta

SEQ ID NO: 6029668 - DNA, 25 bp, Homo sapien
agtataaagacgagaagttgaacta

SEQ ID NO: 6029669 - DNA, 25 bp, Homo sapien
ccggtttggaagactctcagtataa

SEQ ID NO: 6029670 - DNA, 25 bp, Homo sapien
tggtagaaggcggtctgatctttcc

SEQ ID NO: 6029671 - DNA, 25 bp, Homo sapien
tgaactactggcaagacgtttacgg

SEQ ID NO: 6029672 - DNA, 25 bp, Homo sapien
agcactacttcaattcgtacgatca

SEQ ID NO: 6029673 - DNA, 25 bp, Homo sapien
tattgagatggcgaaggaattggta

SEQ ID NO: 6029674 - DNA, 25 bp, Homo sapien
ccattcatttggccggtttggaaga

SEQ ID NO: 6029675 - DNA, 25 bp, Homo sapien
acatcataatttctgaatggatggg

SEQ ID NO: 6029676 - DNA, 25 bp, Homo sapien
agattgttttagacgtcggttgcgg

SEQ ID NO: 6029677 - DNA, 25 bp, Homo sapien
gtttgccgctaaacacggtgcgaag

SEQ ID NO: 6029678 - DNA, 25 bp, Homo sapien
acgctagagaccactatttggtaga

SEQ ID NO: 6029679 - DNA, 25 bp, Homo sapien
gatcaccttgctaagaggcaagttg

SEQ ID NO: 6029680 - DNA, 25 bp, Homo sapien
actatttggtagaaggcggtctgat

SEQ ID NO: 6029681 - DNA, 25 bp, Homo sapien
gcaagttggaggacgttcatttacc

SEQ ID NO: 6029682 - DNA, 25 bp, Homo sapien
gaaacgcaattatccaaaataagga

SEQ ID NO: 6029683 - DNA, 25 bp, Homo sapien
tgaacggattcagcgacaagatcac

SEQ ID NO: 6029684 - DNA, 25 bp, Homo sapien
taccctttcctaaagttgacatcat

SEQ ID NO: 6029685 - DNA, 25 bp, Homo sapien
aggatctttttaaggacaagattgt

SEQ ID NO: 6029686 - DNA, 25 bp, Homo sapien
agatgcttcaagatactgttcgtac

SEQ ID NO: 6029687 - DNA, 25 bp, Homo sapien
ttgcggtaccggtattttatccatg

SEQ ID NO: 6029688 - DNA, 25 bp, Homo sapien
ttctactatacgagtccatgatgga

SEQ ID NO: 6029689 - DNA, 25 bp, Homo sapien
gagaccactatttggtagaaggcgg

SEQ ID NO: 6029690 - DNA, 25 bp, Homo sapien
taatttctgaatggatgggttactt

SEQ ID NO: 6029691 - DNA, 25 bp, Homo sapien
aagcattattgagatggcgaaggaa

SEQ ID NO: 6029692 - DNA, 25 bp, Homo sapien
atttggccggtttggaagactctca

SEQ ID NO: 6029693 - DNA, 25 bp, Homo sapien
cttacagaaacgcaattatccaaaa

SEQ ID NO: 6029694 - DNA, 25 bp, Homo sapien
atccatgtttgccgctaaacacggt

SEQ ID NO: 6029695 - DNA, 25 bp, Homo sapien
aaaccaagctaagtgaaagcgaaca

SEQ ID NO: 6029696 - DNA, 25 bp, Homo sapien
caattatccaaaataaggatctttt

SEQ ID NO: 6029697 - DNA, 25 bp, Homo sapien
cgacaagatcaccttgctaagaggc

SEQ ID NO: 6029698 - DNA, 25 bp, Homo sapien
gtgaaagcgaacagcactacttcaa

SEQ ID NO: 6029699 - DNA, 25 bp, Homo sapien
tgatggacaccgttctttacgctag

SEQ ID NO: 6029700 - DNA, 25 bp, Homo sapien
actctcagtataaagacgagaagtt

SEQ ID NO: 6029701 - DNA, 25 bp, Homo sapien
agctaagtgaaagcgaacagcacta

SEQ ID NO: 6029702 - DNA, 25 bp, Homo sapien
aagttgacatcataatttctgaatg

SEQ ID NO: 6029703 - DNA, 25 bp, Homo sapien
aggacaagattgttttagacgtcgg

SEQ ID NO: 6029704 - DNA, 25 bp, Homo sapien
tatcggtgttgatatgtcaagcatt

SEQ ID NO: 6029705 - DNA, 25 bp, Homo sapien
acgggtttgattattcgccatttgt

SEQ ID NO: 6029706 - DNA, 25 bp, Homo sapien
gaaggcggtctgatctttcccgaca

SEQ ID NO: 6029707 - DNA, 25 bp, Homo sapien
aattggtagagttgaacggattcag

SEQ ID NO: 6029708 - DNA, 25 bp, Homo sapien
gttactttctactatacgagtccat

SEQ ID NO: 6029709 - DNA, 25 bp, Homo sapien
acaccgttctttacgctagagacca

SEQ ID NO: 6029710 - DNA, 25 bp, Homo sapien
aagacgagaagttgaactactggca

SEQ ID NO: 6029711 - DNA, 25 bp, Homo sapien
tatgtcaagcattattgagatggcg

SEQ ID NO: 6029712 - DNA, 25 bp, Homo sapien
ccatttgttccgttggtcttacacg

SEQ ID NO: 6029713 - DNA, 25 bp, Homo sapien
ttcgtaccttatcttacagaaacgc

SEQ ID NO: 6029714 - DNA, 25 bp, Homo sapien
gttccgttggtcttacacgagccca

SEQ ID NO: 6029715 - DNA, 25 bp, Homo sapien
ggatgggttactttctactatacga

SEQ ID NO: 6029716 - DNA, 25 bp, Homo sapien
agaagttgaactactggcaagacgt

SEQ ID NO: 6029717 - DNA, 25 bp, Homo sapien
taccggtattttatccatgtttgcc

SEQ ID NO: 6029718 - DNA, 25 bp, Homo sapien
tctttcccgacaagtgctccattca

SEQ ID NO: 6029719 - DNA, 25 bp, Homo sapien
ttacacgagcccatcgtcgacaccg

SEQ ID NO: 6029720 - DNA, 25 bp, Homo sapien
ttgattattcgccatttgttccgtt

SEQ ID NO: 6029721 - DNA, 25 bp, Homo sapien
gcgaacagcactacttcaattcgta

SEQ ID NO: 6029722 - DNA, 25 bp, Homo sapien
ctggcaagacgtttacgggtttgat

SEQ ID NO: 6029723 - DNA, 25 bp, Homo sapien
cttgctaagaggcaagttggaggac

SEQ ID NO: 6029724 - DNA, 25 bp, Homo sapien
tagagttgaacggattcagcgacaa

SEQ ID NO: 6029725 - DNA, 25 bp, Homo sapien
tattcgccatttgttccgttggtct

SEQ ID NO: 6029726 - DNA, 25 bp, Homo sapien
ctgaatggatgggttactttctact

SEQ ID NO: 6029727 - DNA, 25 bp, Homo sapien
ttggtcttacacgagcccatcgtcg

SEQ ID NO: 6029728 - DNA, 25 bp, Homo sapien
acgatcactatggtattcacgaaga

SEQ ID NO: 6029729 - DNA, 25 bp, Homo sapien
attcgtacgatcactatggtattca

SEQ ID NO: 6029730 - DNA, 25 bp, Homo sapien
tgttgatatgtcaagcattattgag

SEQ ID NO: 6029731 - DNA, 25 bp, Homo sapien
agtgctccattcatttggccggttt

SEQ ID NO: 6029732 - DNA, 25 bp, Homo sapien
acttcaattcgtacgatcactatgg

SEQ ID NO: 6029733 - DNA, 25 bp, Homo sapien
acacggtgcgaagcatgttatcggt

SEQ ID NO: 6029734 - DNA, 25 bp, Homo sapien
attcagcgacaagatcaccttgcta

SEQ ID NO: 6029735 - DNA, 25 bp, Homo sapien
cagaaaaaaccaagctaagtgaaag

SEQ ID NO: 6029736 - DNA, 25 bp, Homo sapien
taagaggcaagttggaggacgttca

SEQ ID NO: 6029737 - DNA, 25 bp, Homo sapien
tgcgaagcatgttatcggtgttgat

SEQ ID NO: 6029738 - DNA, 25 bp, Homo sapien
tactcttaaacgctagatctgatat

SEQ ID NO: 6029739 - DNA, 25 bp, Homo sapien
agaaattttgatatttagatctctg

SEQ ID NO: 6029740 - DNA, 25 bp, Homo sapien
gctagatctgatatttttactgtat

SEQ ID NO: 6029741 - DNA, 25 bp, Homo sapien
agatcagaccgccttctaccaaata

SEQ ID NO: 6029742 - DNA, 25 bp, Homo sapien
tagtggtctctagcgtaaagaacgg

SEQ ID NO: 6029743 - DNA, 25 bp, Homo sapien
ccttctaccaaatagtggtctctag

SEQ ID NO: 6029744 - DNA, 25 bp, Homo sapien
cgtaaagaacggtgtccatcatgga

SEQ ID NO: 6029745 - DNA, 25 bp, Homo sapien
ccagtagttcaacttctcgtcttta

SEQ ID NO: 6029746 - DNA, 25 bp, Homo sapien
gactataccattaatcatatcttgt

SEQ ID NO: 6029747 - DNA, 25 bp, Homo sapien
tcgtgtaagaccaacggaacaaatg

SEQ ID NO: 6029748 - DNA, 25 bp, Homo sapien
tggagcacttgtcgggaaagatcag

SEQ ID NO: 6029749 - DNA, 25 bp, Homo sapien
ttccagtgagtgtatggagcatgag

SEQ ID NO: 6029750 - DNA, 25 bp, Homo sapien
accattaatcatatcttgtctcttg

SEQ ID NO: 6029751 - DNA, 25 bp, Homo sapien
tcagggaaataaaatattgtttgct

SEQ ID NO: 6029752 - DNA, 25 bp, Homo sapien
tggtgtcaccagtttcagcatctag

SEQ ID NO: 6029753 - DNA, 25 bp, Homo sapien
gatctctgttattcttctcgtttgg

SEQ ID NO: 6029754 - DNA, 25 bp, Homo sapien
tggtgcagggaaaacaatgtcgaac

SEQ ID NO: 6029755 - DNA, 25 bp, Homo sapien
acttgtcgggaaagatcagaccgcc

SEQ ID NO: 6029756 - DNA, 25 bp, Homo sapien
tcaaattcgatcaatttgtctgagg

SEQ ID NO: 6029757 - DNA, 25 bp, Homo sapien
aacggaacaaatggcgaataatcaa

SEQ ID NO: 6029758 - DNA, 25 bp, Homo sapien
agaccgccttctaccaaatagtggt

SEQ ID NO: 6029759 - DNA, 25 bp, Homo sapien
gagtcttccaaaccggccaaatgaa

SEQ ID NO: 6029760 - DNA, 25 bp, Homo sapien
cttcaatggtgtcaccagtttcagc

SEQ ID NO: 6029761 - DNA, 25 bp, Homo sapien
aatcatatcttgtctcttggccgtc

SEQ ID NO: 6029762 - DNA, 25 bp, Homo sapien
ctctagcgtaaagaacggtgtccat

SEQ ID NO: 6029763 - DNA, 25 bp, Homo sapien
tgttattcttctcgtttggagagca

SEQ ID NO: 6029764 - DNA, 25 bp, Homo sapien
ccaaaccggccaaatgaatggagca

SEQ ID NO: 6029765 - DNA, 25 bp, Homo sapien
gtcgatgccattcgattcgaacttg

SEQ ID NO: 6029766 - DNA, 25 bp, Homo sapien
gagagcaaaccaattcaccttcaat

SEQ ID NO: 6029767 - DNA, 25 bp, Homo sapien
tcttctcgtttggagagcaaaccaa

SEQ ID NO: 6029768 - DNA, 25 bp, Homo sapien
cgattcgaacttgtaagaaattttg

SEQ ID NO: 6029769 - DNA, 25 bp, Homo sapien
gtttgcttccagtgagtgtatggag

SEQ ID NO: 6029770 - DNA, 25 bp, Homo sapien
ccaggtgactataccattaatcata

SEQ ID NO: 6029771 - DNA, 25 bp, Homo sapien
attaccgtcgatgccattcgattcg

SEQ ID NO: 6029772 - DNA, 25 bp, Homo sapien
cggccaaatgaatggagcacttgtc

SEQ ID NO: 6029773 - DNA, 25 bp, Homo sapien
gtggtgttgacattgtttctttcca

SEQ ID NO: 6029774 - DNA, 25 bp, Homo sapien
atcaaacccgtaaacgtcttgccag

SEQ ID NO: 6029775 - DNA, 25 bp, Homo sapien
gtcttgccagtagttcaacttctcg

SEQ ID NO: 6029776 - DNA, 25 bp, Homo sapien
taaagttactcttaaacgctagatc

SEQ ID NO: 6029777 - DNA, 25 bp, Homo sapien
gcatgaggaccagtggagaactcaa

SEQ ID NO: 6029778 - DNA, 25 bp, Homo sapien
aacaggtctcttaccctttggtgca

SEQ ID NO: 6029779 - DNA, 25 bp, Homo sapien
cttctcgtctttatactgagagtct

SEQ ID NO: 6029780 - DNA, 25 bp, Homo sapien
gcatctagatcatcagggaaataaa

SEQ ID NO: 6029781 - DNA, 25 bp, Homo sapien
cgaacttgtaagaaattttgatatt

SEQ ID NO: 6029782 - DNA, 25 bp, Homo sapien
ctttccacggtgtcgacgatgggct

SEQ ID NO: 6029783 - DNA, 25 bp, Homo sapien
tatggagcatgaggaccagtggaga

SEQ ID NO: 6029784 - DNA, 25 bp, Homo sapien
aactcaacaggtctcttaccctttg

SEQ ID NO: 6029785 - DNA, 25 bp, Homo sapien
accctttggtgcagggaaaacaatg

SEQ ID NO: 6029786 - DNA, 25 bp, Homo sapien
tcttgaattaccgtcgatgccattc

SEQ ID NO: 6029787 - DNA, 25 bp, Homo sapien
tttgatatttagatctctgttattc

SEQ ID NO: 6029788 - DNA, 25 bp, Homo sapien
agatcatcagggaaataaaatattg

SEQ ID NO: 6029789 - DNA, 25 bp, Homo sapien
attcaccttcaatggtgtcaccagt

SEQ ID NO: 6029790 - DNA, 25 bp, Homo sapien
gttcaacttctcgtctttatactga

SEQ ID NO: 6029791 - DNA, 25 bp, Homo sapien
ttgacattgtttctttccacggtgt

SEQ ID NO: 6029792 - DNA, 25 bp, Homo sapien
tatttagatctctgttattcttctc

SEQ ID NO: 6029793 - DNA, 25 bp, Homo sapien
cgggaaagatcagaccgccttctac

SEQ ID NO: 6029794 - DNA, 25 bp, Homo sapien
gccattcgattcgaacttgtaagaa

SEQ ID NO: 6029795 - DNA, 25 bp, Homo sapien
ctgtatttaaatcaaattcgatcaa

SEQ ID NO: 6029796 - DNA, 25 bp, Homo sapien
tgtaagaaattttgatatttagatc

SEQ ID NO: 6029797 - DNA, 25 bp, Homo sapien
atgggctcgtgtaagaccaacggaa

SEQ ID NO: 6029798 - DNA, 25 bp, Homo sapien
aacaatgtcgaaccaggtgactata

SEQ ID NO: 6029799 - DNA, 25 bp, Homo sapien
acggtgtcgacgatgggctcgtgta

SEQ ID NO: 6029800 - DNA, 25 bp, Homo sapien
gtcgaaccaggtgactataccatta

SEQ ID NO: 6029801 - DNA, 25 bp, Homo sapien
gtggagaactcaacaggtctcttac

SEQ ID NO: 6029802 - DNA, 25 bp, Homo sapien
atcttgtctcttggccgtcaattta

SEQ ID NO: 6029803 - DNA, 25 bp, Homo sapien
ttaaatcaaattcgatcaatttgtc

SEQ ID NO: 6029804 - DNA, 25 bp, Homo sapien
tctcttggccgtcaatttaaagtta

SEQ ID NO: 6029805 - DNA, 25 bp, Homo sapien
cgtttggagagcaaaccaattcacc

SEQ ID NO: 6029806 - DNA, 25 bp, Homo sapien
tttactgtatttaaatcaaattcga

SEQ ID NO: 6029807 - DNA, 25 bp, Homo sapien
tcaccagtttcagcatctagatcat

SEQ ID NO: 6029808 - DNA, 25 bp, Homo sapien
aaaccaattcaccttcaatggtgtc

SEQ ID NO: 6029809 - DNA, 25 bp, Homo sapien
gtttcagcatctagatcatcaggga

SEQ ID NO: 6029810 - DNA, 25 bp, Homo sapien
ttgtttctttccacggtgtcgacga

SEQ ID NO: 6029811 - DNA, 25 bp, Homo sapien
tcgatcaatttgtctgaggtggtgt

SEQ ID NO: 6029812 - DNA, 25 bp, Homo sapien
tcgacgatgggctcgtgtaagacca

SEQ ID NO: 6029813 - DNA, 25 bp, Homo sapien
caaatggcgaataatcaaacccgta

SEQ ID NO: 6029814 - DNA, 25 bp, Homo sapien
gaacggtgtccatcatggactcgta

SEQ ID NO: 6029815 - DNA, 25 bp, Homo sapien
tgagtgtatggagcatgaggaccag

SEQ ID NO: 6029816 - DNA, 25 bp, Homo sapien
tactgagagtcttccaaaccggcca

SEQ ID NO: 6029817 - DNA, 25 bp, Homo sapien
tctgcttcttgaattaccgtcgatg

SEQ ID NO: 6029818 - DNA, 25 bp, Homo sapien
accaaatagtggtctctagcgtaaa

SEQ ID NO: 6029819 - DNA, 25 bp, Homo sapien
agggaaaacaatgtcgaaccaggtg

SEQ ID NO: 6029820 - DNA, 25 bp, Homo sapien
aatttgtctgaggtggtgttgacat

SEQ ID NO: 6029821 - DNA, 25 bp, Homo sapien
aagaccaacggaacaaatggcgaat

SEQ ID NO: 6029822 - DNA, 25 bp, Homo sapien
tctttatactgagagtcttccaaac

SEQ ID NO: 6029823 - DNA, 25 bp, Homo sapien
taaacgctagatctgatatttttac

SEQ ID NO: 6029824 - DNA, 25 bp, Homo sapien
aaataaaatattgtttgcttccagt

SEQ ID NO: 6029825 - DNA, 25 bp, Homo sapien
tctcttaccctttggtgcagggaaa

SEQ ID NO: 6029826 - DNA, 25 bp, Homo sapien
cgtaaacgtcttgccagtagttcaa

SEQ ID NO: 6029827 - DNA, 25 bp, Homo sapien
tctgaggtggtgttgacattgtttc

SEQ ID NO: 6029828 - DNA, 25 bp, Homo sapien
ggaccagtggagaactcaacaggtc

SEQ ID NO: 6029829 - DNA, 25 bp, Homo sapien
aatgaatggagcacttgtcgggaaa

SEQ ID NO: 6029830 - DNA, 25 bp, Homo sapien
aatattgtttgcttccagtgagtgt

SEQ ID NO: 6029831 - DNA, 25 bp, Homo sapien
tggaagtagaactacaaataaagga

SEQ ID NO: 6029832 - DNA, 25 bp, Homo sapien
tactctcaatcataacaatatcatg

SEQ ID NO: 6029833 - DNA, 25 bp, Homo sapien
atgtaccacaagcatctatgagaaa

SEQ ID NO: 6029834 - DNA, 25 bp, Homo sapien
tcaacatagcttgaacagtacaaca

SEQ ID NO: 6029835 - DNA, 25 bp, Homo sapien
gatactaatgggaatcctaatgact

SEQ ID NO: 6029836 - DNA, 25 bp, Homo sapien
tggctggatccaatgaataatatga

SEQ ID NO: 6029837 - DNA, 25 bp, Homo sapien
attccatgcttcctcaaggttcgtc

SEQ ID NO: 6029838 - DNA, 25 bp, Homo sapien
tcctttaacaatttggcatttcatc

SEQ ID NO: 6029839 - DNA, 25 bp, Homo sapien
cgggattaatgaacaccttaggtca

SEQ ID NO: 6029840 - DNA, 25 bp, Homo sapien
ccaggccgggattaatgaacacctt

SEQ ID NO: 6029841 - DNA, 25 bp, Homo sapien
ttcaagaattcatttgttcctttta

SEQ ID NO: 6029842 - DNA, 25 bp, Homo sapien
ttggcatttcatccccaccaacagt

SEQ ID NO: 6029843 - DNA, 25 bp, Homo sapien
tcatgaatggggcaactgctaatga

SEQ ID NO: 6029844 - DNA, 25 bp, Homo sapien
gatccaatgaataatatgacaaata

SEQ ID NO: 6029845 - DNA, 25 bp, Homo sapien
tcgatgtcatcaatgtctaatatga

SEQ ID NO: 6029846 - DNA, 25 bp, Homo sapien
gaatggaagcattggaagtagaact

SEQ ID NO: 6029847 - DNA, 25 bp, Homo sapien
tcaatgaatacctataattaccaga

SEQ ID NO: 6029848 - DNA, 25 bp, Homo sapien
tctggtgaaagaaacgatgccaggc

SEQ ID NO: 6029849 - DNA, 25 bp, Homo sapien
aatggggcaactgctaatgattatt

SEQ ID NO: 6029850 - DNA, 25 bp, Homo sapien
aattcatttgttccttttaatcatg

SEQ ID NO: 6029851 - DNA, 25 bp, Homo sapien
tcccttaacgggtcaacatagcttg

SEQ ID NO: 6029852 - DNA, 25 bp, Homo sapien
aatacctataattaccagaatgtac

SEQ ID NO: 6029853 - DNA, 25 bp, Homo sapien
gctaatgattattggctggatccaa

SEQ ID NO: 6029854 - DNA, 25 bp, Homo sapien
atgtctaatatgaccgctaaaacct

SEQ ID NO: 6029855 - DNA, 25 bp, Homo sapien
acggcattcaagaattcatttgttc

SEQ ID NO: 6029856 - DNA, 25 bp, Homo sapien
gaaagaaacgatgccaggccgggat

SEQ ID NO: 6029857 - DNA, 25 bp, Homo sapien
gattattggctggatccaatgaata

SEQ ID NO: 6029858 - DNA, 25 bp, Homo sapien
aacatgcccccatcaatgaatacct

SEQ ID NO: 6029859 - DNA, 25 bp, Homo sapien
aggcgagtaaaatgaataattccat

SEQ ID NO: 6029860 - DNA, 25 bp, Homo sapien
aatatgacaaataacaaggatacta

SEQ ID NO: 6029861 - DNA, 25 bp, Homo sapien
acgatgccaggccgggattaatgaa

SEQ ID NO: 6029862 - DNA, 25 bp, Homo sapien
aatatgaccgctaaaacctcaatca

SEQ ID NO: 6029863 - DNA, 25 bp, Homo sapien
aatcctaatgactcgatgtcatcaa

SEQ ID NO: 6029864 - DNA, 25 bp, Homo sapien
caatcataacaatatcatgaatggg

SEQ ID NO: 6029865 - DNA, 25 bp, Homo sapien
tcaacagcaatgagatgaattcaaa

SEQ ID NO: 6029866 - DNA, 25 bp, Homo sapien
attcaaataaagatgacagaatgga

SEQ ID NO: 6029867 - DNA, 25 bp, Homo sapien
cacaagcatctatgagaaatactct

SEQ ID NO: 6029868 - DNA, 25 bp, Homo sapien
tgaataattccatgcttcctcaagg

SEQ ID NO: 6029869 - DNA, 25 bp, Homo sapien
atgaataatatgacaaataacaagg

SEQ ID NO: 6029870 - DNA, 25 bp, Homo sapien
aagcattggaagtagaactacaaat

SEQ ID NO: 6029871 - DNA, 25 bp, Homo sapien
tttcatccccaccaacagtcacagc

SEQ ID NO: 6029872 - DNA, 25 bp, Homo sapien
aaatttcaacatgcccccatcaatg

SEQ ID NO: 6029873 - DNA, 25 bp, Homo sapien
accgctaaaacctcaatcaatagta

SEQ ID NO: 6029874 - DNA, 25 bp, Homo sapien
atgacagaatggaagcattggaagt

SEQ ID NO: 6029875 - DNA, 25 bp, Homo sapien
tgacagcgctctcaatgaataatgt

SEQ ID NO: 6029876 - DNA, 25 bp, Homo sapien
gctagtcccttaacgggtcaacata

SEQ ID NO: 6029877 - DNA, 25 bp, Homo sapien
cccccatcaatgaatacctataatt

SEQ ID NO: 6029878 - DNA, 25 bp, Homo sapien
acaaataacaaggatactaatggga

SEQ ID NO: 6029879 - DNA, 25 bp, Homo sapien
aatagtacggcattcaagaattcat

SEQ ID NO: 6029880 - DNA, 25 bp, Homo sapien
gaacagtacaacaaatttcaacatg

SEQ ID NO: 6029881 - DNA, 25 bp, Homo sapien
tataattaccagaatgtaccacaag

SEQ ID NO: 6029882 - DNA, 25 bp, Homo sapien
ataaagatgacagaatggaagcatt

SEQ ID NO: 6029883 - DNA, 25 bp, Homo sapien
ggaaagtcaaatcgaatcactcgag

SEQ ID NO: 6029884 - DNA, 25 bp, Homo sapien
caacaagccctatacgaatctggtg

SEQ ID NO: 6029885 - DNA, 25 bp, Homo sapien
tgcttcctcaaggttcgtcggctag

SEQ ID NO: 6029886 - DNA, 25 bp, Homo sapien
tacaacaaatttcaacatgccccca

SEQ ID NO: 6029887 - DNA, 25 bp, Homo sapien
caacagtcacagcaacaagccctat

SEQ ID NO: 6029888 - DNA, 25 bp, Homo sapien
tttgttccttttaatcatgtgacag

SEQ ID NO: 6029889 - DNA, 25 bp, Homo sapien
gcaatgagatgaattcaaataaaga

SEQ ID NO: 6029890 - DNA, 25 bp, Homo sapien
ataatgtcaacagcaatgagatgaa

SEQ ID NO: 6029891 - DNA, 25 bp, Homo sapien
tcatcaatgtctaatatgaccgcta

SEQ ID NO: 6029892 - DNA, 25 bp, Homo sapien
taggtcaggcgagtaaaatgaataa

SEQ ID NO: 6029893 - DNA, 25 bp, Homo sapien
tacgaatctggtgaaagaaacgatg

SEQ ID NO: 6029894 - DNA, 25 bp, Homo sapien
aacaaggatactaatgggaatccta

SEQ ID NO: 6029895 - DNA, 25 bp, Homo sapien
gcaactgctaatgattattggctgg

SEQ ID NO: 6029896 - DNA, 25 bp, Homo sapien
aaaacctcaatcaatagtacggcat

SEQ ID NO: 6029897 - DNA, 25 bp, Homo sapien
gagaaatactctcaatcataacaat

SEQ ID NO: 6029898 - DNA, 25 bp, Homo sapien
tagaactacaaataaaggaaagtca

SEQ ID NO: 6029899 - DNA, 25 bp, Homo sapien
ctcaaggttcgtcggctagtccctt

SEQ ID NO: 6029900 - DNA, 25 bp, Homo sapien
tcaaatcgaatcactcgagaacgaa

SEQ ID NO: 6029901 - DNA, 25 bp, Homo sapien
ctacaaataaaggaaagtcaaatcg

SEQ ID NO: 6029902 - DNA, 25 bp, Homo sapien
gtaaaatgaataattccatgcttcc

SEQ ID NO: 6029903 - DNA, 25 bp, Homo sapien
acaatatcatgaatggggcaactgc

SEQ ID NO: 6029904 - DNA, 25 bp, Homo sapien
catctatgagaaatactctcaatca

SEQ ID NO: 6029905 - DNA, 25 bp, Homo sapien
aacgggtcaacatagcttgaacagt

SEQ ID NO: 6029906 - DNA, 25 bp, Homo sapien
ccccaccaacagtcacagcaacaag

SEQ ID NO: 6029907 - DNA, 25 bp, Homo sapien
tcaatcaatagtacggcattcaaga

SEQ ID NO: 6029908 - DNA, 25 bp, Homo sapien
ataaaggaaagtcaaatcgaatcac

SEQ ID NO: 6029909 - DNA, 25 bp, Homo sapien
tcacagcaacaagccctatacgaat

SEQ ID NO: 6029910 - DNA, 25 bp, Homo sapien
aacaatttggcatttcatccccacc

SEQ ID NO: 6029911 - DNA, 25 bp, Homo sapien
aatgactcgatgtcatcaatgtcta

SEQ ID NO: 6029912 - DNA, 25 bp, Homo sapien
taatgaacaccttaggtcaggcgag

SEQ ID NO: 6029913 - DNA, 25 bp, Homo sapien
accagaatgtaccacaagcatctat

SEQ ID NO: 6029914 - DNA, 25 bp, Homo sapien
agatgaattcaaataaagatgacag

SEQ ID NO: 6029915 - DNA, 25 bp, Homo sapien
aatcatgtgacagcgctctcaatga

SEQ ID NO: 6029916 - DNA, 25 bp, Homo sapien
acaccttaggtcaggcgagtaaaat

SEQ ID NO: 6029917 - DNA, 25 bp, Homo sapien
cgctctcaatgaataatgtcaacag

SEQ ID NO: 6029918 - DNA, 25 bp, Homo sapien
gccctatacgaatctggtgaaagaa

SEQ ID NO: 6029919 - DNA, 25 bp, Homo sapien
caatgaataatgtcaacagcaatga

SEQ ID NO: 6029920 - DNA, 25 bp, Homo sapien
ccttttaatcatgtgacagcgctct

SEQ ID NO: 6029921 - DNA, 25 bp, Homo sapien
aatgggaatcctaatgactcgatgt

SEQ ID NO: 6029922 - DNA, 25 bp, Homo sapien
tagcttgaacagtacaacaaatttc

SEQ ID NO: 6029923 - DNA, 25 bp, Homo sapien
tttatttgtagttctacttccaatg

SEQ ID NO: 6029924 - DNA, 25 bp, Homo sapien
ttgctgttgacattattcattgaga

SEQ ID NO: 6029925 - DNA, 25 bp, Homo sapien
attttgtgagcaatcgattctgcat

SEQ ID NO: 6029926 - DNA, 25 bp, Homo sapien
tcatacctgccatacttagtcactg

SEQ ID NO: 6029927 - DNA, 25 bp, Homo sapien
tctgccatatgctaacatcttggcc

SEQ ID NO: 6029928 - DNA, 25 bp, Homo sapien
tgtagttctacttccaatgcttcca

SEQ ID NO: 6029929 - DNA, 25 bp, Homo sapien
tcatctttatttgaattcatctcat

SEQ ID NO: 6029930 - DNA, 25 bp, Homo sapien
gtctctgctaactccttttcctttg

SEQ ID NO: 6029931 - DNA, 25 bp, Homo sapien
tccttttcctttgcatgcagtgacg

SEQ ID NO: 6029932 - DNA, 25 bp, Homo sapien
tccaaggaagctggcaattcgaaag

SEQ ID NO: 6029933 - DNA, 25 bp, Homo sapien
catacttatgctcattctgcttgta

SEQ ID NO: 6029934 - DNA, 25 bp, Homo sapien
gcttccaaagatgcgattttttctc

SEQ ID NO: 6029935 - DNA, 25 bp, Homo sapien
tatggcagttttccttctcatactt

SEQ ID NO: 6029936 - DNA, 25 bp, Homo sapien
gaatttgttggatttagcgccagtg

SEQ ID NO: 6029937 - DNA, 25 bp, Homo sapien
gctaactccttttcctttgcatgca

SEQ ID NO: 6029938 - DNA, 25 bp, Homo sapien
gccagtgcagttaatatactttcca

SEQ ID NO: 6029939 - DNA, 25 bp, Homo sapien
gcagttaatatactttccagatttt

SEQ ID NO: 6029940 - DNA, 25 bp, Homo sapien
aaggaacaaatgaattcttgaatgc

SEQ ID NO: 6029941 - DNA, 25 bp, Homo sapien
agattttctttcgtctctgctaact

SEQ ID NO: 6029942 - DNA, 25 bp, Homo sapien
cttggccatttctttgttctcgttt

SEQ ID NO: 6029943 - DNA, 25 bp, Homo sapien
ctgaatatcacttccaaggaagctg

SEQ ID NO: 6029944 - DNA, 25 bp, Homo sapien
atatgctaacatcttggccatttct

SEQ ID NO: 6029945 - DNA, 25 bp, Homo sapien
tttagcctttgaatttcgttctcga

SEQ ID NO: 6029946 - DNA, 25 bp, Homo sapien
taacatcttggccatttctttgttc

SEQ ID NO: 6029947 - DNA, 25 bp, Homo sapien
aatcttaccaccattttgtgagcaa

SEQ ID NO: 6029948 - DNA, 25 bp, Homo sapien
atctcattgctgttgacattattca

SEQ ID NO: 6029949 - DNA, 25 bp, Homo sapien
gcttccattctgtcatctttatttg

SEQ ID NO: 6029950 - DNA, 25 bp, Homo sapien
gaagctggcaattcgaaagtttggg

SEQ ID NO: 6029951 - DNA, 25 bp, Homo sapien
ctgccatacttagtcactgaatttg

SEQ ID NO: 6029952 - DNA, 25 bp, Homo sapien
cattgagagcgctgtcacatgatta

SEQ ID NO: 6029953 - DNA, 25 bp, Homo sapien
agcgctgtcacatgattaaaaggaa

SEQ ID NO: 6029954 - DNA, 25 bp, Homo sapien
aatatactttccagattttctttcg

SEQ ID NO: 6029955 - DNA, 25 bp, Homo sapien
gtcactgaatttgttggatttagcg

SEQ ID NO: 6029956 - DNA, 25 bp, Homo sapien
gcatgcagtgacgatgacagttttc

SEQ ID NO: 6029957 - DNA, 25 bp, Homo sapien
cgaaagtttggggtatatggcagtt

SEQ ID NO: 6029958 - DNA, 25 bp, Homo sapien
ttggccaactgcagttcaatttggg

SEQ ID NO: 6029959 - DNA, 25 bp, Homo sapien
agattttcttttttggccaactgca

SEQ ID NO: 6029960 - DNA, 25 bp, Homo sapien
tcttttttggccaactgcagttcaa

SEQ ID NO: 6029961 - DNA, 25 bp, Homo sapien
aaatgggcttccaaagatgcgattt

SEQ ID NO: 6029962 - DNA, 25 bp, Homo sapien
agtgattcgatttgactttccttta

SEQ ID NO: 6029963 - DNA, 25 bp, Homo sapien
agttttccttctcatacttatgctc

SEQ ID NO: 6029964 - DNA, 25 bp, Homo sapien
ttatttgaattcatctcattgctgt

SEQ ID NO: 6029965 - DNA, 25 bp, Homo sapien
tcgatttgactttcctttatttgta

SEQ ID NO: 6029966 - DNA, 25 bp, Homo sapien
tacttagtcactgaatttgttggat

SEQ ID NO: 6029967 - DNA, 25 bp, Homo sapien
aagatgcgattttttctcttaattc

SEQ ID NO: 6029968 - DNA, 25 bp, Homo sapien
agttcaatttgggtctcttttgatc

SEQ ID NO: 6029969 - DNA, 25 bp, Homo sapien
tcctttgcatgcagtgacgatgaca

SEQ ID NO: 6029970 - DNA, 25 bp, Homo sapien
ttttgatctgccatatgctaacatc

SEQ ID NO: 6029971 - DNA, 25 bp, Homo sapien
aactgcagttcaatttgggtctctt

SEQ ID NO: 6029972 - DNA, 25 bp, Homo sapien
atcgattctgcatcatacctgccat

SEQ ID NO: 6029973 - DNA, 25 bp, Homo sapien
tttctaatcttaccaccattttgtg

SEQ ID NO: 6029974 - DNA, 25 bp, Homo sapien
ccttctcatacttatgctcattctg

SEQ ID NO: 6029975 - DNA, 25 bp, Homo sapien
atttcgttctcgagtgattcgattt

SEQ ID NO: 6029976 - DNA, 25 bp, Homo sapien
gggtatatggcagttttccttctca

SEQ ID NO: 6029977 - DNA, 25 bp, Homo sapien
ttctcgagtgattcgatttgacttt

SEQ ID NO: 6029978 - DNA, 25 bp, Homo sapien
gcttgtagtttagcccctcgttgaa

SEQ ID NO: 6029979 - DNA, 25 bp, Homo sapien
gtcacatgattaaaaggaacaaatg

SEQ ID NO: 6029980 - DNA, 25 bp, Homo sapien
tgagcaatcgattctgcatcatacc

SEQ ID NO: 6029981 - DNA, 25 bp, Homo sapien
tatgctcattctgcttgtagtttag

SEQ ID NO: 6029982 - DNA, 25 bp, Homo sapien
tccaatgcttccattctgtcatctt

SEQ ID NO: 6029983 - DNA, 25 bp, Homo sapien
tttagcgccagtgcagttaatatac

SEQ ID NO: 6029984 - DNA, 25 bp, Homo sapien
ttgacattattcattgagagcgctg

SEQ ID NO: 6029985 - DNA, 25 bp, Homo sapien
catttctttgttctcgtttgttaag

SEQ ID NO: 6029986 - DNA, 25 bp, Homo sapien
ggtctcttttgatctgccatatgct

SEQ ID NO: 6029987 - DNA, 25 bp, Homo sapien
gaattcatctcattgctgttgacat

SEQ ID NO: 6029988 - DNA, 25 bp, Homo sapien
tgattaaaaggaacaaatgaattct

SEQ ID NO: 6029989 - DNA, 25 bp, Homo sapien
gatgacagttttctgaatatcactt

SEQ ID NO: 6029990 - DNA, 25 bp, Homo sapien
ctttgaatttcgttctcgagtgatt

SEQ ID NO: 6029991 - DNA, 25 bp, Homo sapien
atcacttccaaggaagctggcaatt

SEQ ID NO: 6029992 - DNA, 25 bp, Homo sapien
tctgcatcatacctgccatacttag

SEQ ID NO: 6029993 - DNA, 25 bp, Homo sapien
agttttctgaatatcacttccaagg

SEQ ID NO: 6029994 - DNA, 25 bp, Homo sapien
attattcattgagagcgctgtcaca

SEQ ID NO: 6029995 - DNA, 25 bp, Homo sapien
cattctgcttgtagtttagcccctc

SEQ ID NO: 6029996 - DNA, 25 bp, Homo sapien
agtgacgatgacagttttctgaata

SEQ ID NO: 6029997 - DNA, 25 bp, Homo sapien
tctacttccaatgcttccattctgt

SEQ ID NO: 6029998 - DNA, 25 bp, Homo sapien
gcaattcgaaagtttggggtatatg

SEQ ID NO: 6029999 - DNA, 25 bp, Homo sapien
aatttgggtctcttttgatctgcca

SEQ ID NO: 6030000 - DNA, 25 bp, Homo sapien
tgactttcctttatttgtagttcta

SEQ ID NO: 6030001 - DNA, 25 bp, Homo sapien
attctgtcatctttatttgaattca

SEQ ID NO: 6030002 - DNA, 25 bp, Homo sapien
gttggatttagcgccagtgcagtta

SEQ ID NO: 6030003 - DNA, 25 bp, Homo sapien
aagccaaatgggcttccaaagatgc

SEQ ID NO: 6030004 - DNA, 25 bp, Homo sapien
tctttcgtctctgctaactcctttt

SEQ ID NO: 6030005 - DNA, 25 bp, Homo sapien
cgattttttctcttaattctagatt

SEQ ID NO: 6030006 - DNA, 25 bp, Homo sapien
accaccattttgtgagcaatcgatt

SEQ ID NO: 6030007 - DNA, 25 bp, Homo sapien
ctttccagattttctttcgtctctg

SEQ ID NO: 6030008 - DNA, 25 bp, Homo sapien
ctttgaagccaaatgggcttccaaa

SEQ ID NO: 6030009 - DNA, 25 bp, Homo sapien
tgatacacaagctgtgacacatgct

SEQ ID NO: 6030010 - DNA, 25 bp, Homo sapien
tgctttcttaagtatgggatctgcg

SEQ ID NO: 6030011 - DNA, 25 bp, Homo sapien
gcgactatattatctatagtgttga

SEQ ID NO: 6030012 - DNA, 25 bp, Homo sapien
ttagtaagatcgtcgcaacgtatgg

SEQ ID NO: 6030013 - DNA, 25 bp, Homo sapien
cattggtataattggtctgggtgat

SEQ ID NO: 6030014 - DNA, 25 bp, Homo sapien
tagttattatcaatcacagatcaca

SEQ ID NO: 6030015 - DNA, 25 bp, Homo sapien
cgtatggaccatcttctaaggttgg

SEQ ID NO: 6030016 - DNA, 25 bp, Homo sapien
gtcaaacgagttgtaagctgccgga

SEQ ID NO: 6030017 - DNA, 25 bp, Homo sapien
gcctattatacgctaataaatttac

SEQ ID NO: 6030018 - DNA, 25 bp, Homo sapien
tggggtgttatatgttgtgataggg

SEQ ID NO: 6030019 - DNA, 25 bp, Homo sapien
gctaataaatttacagatgctggat

SEQ ID NO: 6030020 - DNA, 25 bp, Homo sapien
ttacccaaggactgcgacatcatta

SEQ ID NO: 6030021 - DNA, 25 bp, Homo sapien
agatcgtcgcaacgtatggaccatc

SEQ ID NO: 6030022 - DNA, 25 bp, Homo sapien
tattatgatgaactgaaagaaaaat

SEQ ID NO: 6030023 - DNA, 25 bp, Homo sapien
gctggatggggtgttatatgttgtg

SEQ ID NO: 6030024 - DNA, 25 bp, Homo sapien
tctatagtgttgaagcatccaatat

SEQ ID NO: 6030025 - DNA, 25 bp, Homo sapien
atgaactgaaagaaaaatatgcctc

SEQ ID NO: 6030026 - DNA, 25 bp, Homo sapien
cagaatcttttgagttcgttaattc

SEQ ID NO: 6030027 - DNA, 25 bp, Homo sapien
tgccggaaatcgaggctttcgaaaa

SEQ ID NO: 6030028 - DNA, 25 bp, Homo sapien
acatgctgctttcttaagtatggga

SEQ ID NO: 6030029 - DNA, 25 bp, Homo sapien
tcgcaacgtatggaccatcttctaa

SEQ ID NO: 6030030 - DNA, 25 bp, Homo sapien
tatccaggcaaagcgactatattat

SEQ ID NO: 6030031 - DNA, 25 bp, Homo sapien
aagcatccaatattagtaagatcgt

SEQ ID NO: 6030032 - DNA, 25 bp, Homo sapien
ttggtctgggtgatatgggcctatt

SEQ ID NO: 6030033 - DNA, 25 bp, Homo sapien
gcaagtttatttgacatatgaagag

SEQ ID NO: 6030034 - DNA, 25 bp, Homo sapien
caagattaccgctgatacacaagct

SEQ ID NO: 6030035 - DNA, 25 bp, Homo sapien
ttttgagttcgttaattctgttatg

SEQ ID NO: 6030036 - DNA, 25 bp, Homo sapien
cattcccttcatgggcctaaagtta

SEQ ID NO: 6030037 - DNA, 25 bp, Homo sapien
aaccactagttattatcaatcacag

SEQ ID NO: 6030038 - DNA, 25 bp, Homo sapien
gttcgttaattctgttatggcatgt

SEQ ID NO: 6030039 - DNA, 25 bp, Homo sapien
ttatttgacatatgaagagcatgac

SEQ ID NO: 6030040 - DNA, 25 bp, Homo sapien
aatggtcatttggtatccaggcaaa

SEQ ID NO: 6030041 - DNA, 25 bp, Homo sapien
tgaaagaaaaatatgcctcagctaa

SEQ ID NO: 6030042 - DNA, 25 bp, Homo sapien
tgtgacacatgctgctttcttaagt

SEQ ID NO: 6030043 - DNA, 25 bp, Homo sapien
gatctgcgtgggcaaagataaagat

SEQ ID NO: 6030044 - DNA, 25 bp, Homo sapien
gttatggcatgtttgaaaagtaagc

SEQ ID NO: 6030045 - DNA, 25 bp, Homo sapien
tatacgctaataaatttacagatgc

SEQ ID NO: 6030046 - DNA, 25 bp, Homo sapien
aagtatttacccaaggactgcgaca

SEQ ID NO: 6030047 - DNA, 25 bp, Homo sapien
ttgaaaagtaagcaagtttatttga

SEQ ID NO: 6030048 - DNA, 25 bp, Homo sapien
gcatgacaagattaccgctgataca

SEQ ID NO: 6030049 - DNA, 25 bp, Homo sapien
tataattggtctgggtgatatgggc

SEQ ID NO: 6030050 - DNA, 25 bp, Homo sapien
cttaagtatgggatctgcgtgggca

SEQ ID NO: 6030051 - DNA, 25 bp, Homo sapien
cgagttgtaagctgccggaaatcga

SEQ ID NO: 6030052 - DNA, 25 bp, Homo sapien
gtaagctgccggaaatcgaggcttt

SEQ ID NO: 6030053 - DNA, 25 bp, Homo sapien
tgaagagcatgacaagattaccgct

SEQ ID NO: 6030054 - DNA, 25 bp, Homo sapien
cagctaaattcgaactggtgaaaaa

SEQ ID NO: 6030055 - DNA, 25 bp, Homo sapien
tatgggatctgcgtgggcaaagata

SEQ ID NO: 6030056 - DNA, 25 bp, Homo sapien
taattctgttatggcatgtttgaaa

SEQ ID NO: 6030057 - DNA, 25 bp, Homo sapien
ttcatgggcctaaagttaatactga

SEQ ID NO: 6030058 - DNA, 25 bp, Homo sapien
ccaatattagtaagatcgtcgcaac

SEQ ID NO: 6030059 - DNA, 25 bp, Homo sapien
gttatatgttgtgatagggaagaat

SEQ ID NO: 6030060 - DNA, 25 bp, Homo sapien
aaggccaaccactagttattatcaa

SEQ ID NO: 6030061 - DNA, 25 bp, Homo sapien
caaagataaagatttatccttggac

SEQ ID NO: 6030062 - DNA, 25 bp, Homo sapien
aaatttacagatgctggatggggtg

SEQ ID NO: 6030063 - DNA, 25 bp, Homo sapien
aattcgaactggtgaaaaatggtca

SEQ ID NO: 6030064 - DNA, 25 bp, Homo sapien
gcatgtttgaaaagtaagcaagttt

SEQ ID NO: 6030065 - DNA, 25 bp, Homo sapien
acaagctgtgacacatgctgctttc

SEQ ID NO: 6030066 - DNA, 25 bp, Homo sapien
cgtgggcaaagataaagatttatcc

SEQ ID NO: 6030067 - DNA, 25 bp, Homo sapien
accgtgcattcccttcatgggccta

SEQ ID NO: 6030068 - DNA, 25 bp, Homo sapien
atactgaaggccaaccactagttat

SEQ ID NO: 6030069 - DNA, 25 bp, Homo sapien
aaaaatatgcctcagctaaattcga

SEQ ID NO: 6030070 - DNA, 25 bp, Homo sapien
gtgttgaagcatccaatattagtaa

SEQ ID NO: 6030071 - DNA, 25 bp, Homo sapien
caattgttgggggtcaaacgagttg

SEQ ID NO: 6030072 - DNA, 25 bp, Homo sapien
gaagaatattatgatgaactgaaag

SEQ ID NO: 6030073 - DNA, 25 bp, Homo sapien
aaggactgcgacatcattaccgtgc

SEQ ID NO: 6030074 - DNA, 25 bp, Homo sapien
tgcgacatcattaccgtgcattccc

SEQ ID NO: 6030075 - DNA, 25 bp, Homo sapien
gtgaaaaatggtcatttggtatcca

SEQ ID NO: 6030076 - DNA, 25 bp, Homo sapien
aagttaatactgaaggccaaccact

SEQ ID NO: 6030077 - DNA, 25 bp, Homo sapien
gacatatgaagagcatgacaagatt

SEQ ID NO: 6030078 - DNA, 25 bp, Homo sapien
tgttgtgatagggaagaatattatg

SEQ ID NO: 6030079 - DNA, 25 bp, Homo sapien
aaaagtcattggtataattggtctg

SEQ ID NO: 6030080 - DNA, 25 bp, Homo sapien
ggcctaaagttaatactgaaggcca

SEQ ID NO: 6030081 - DNA, 25 bp, Homo sapien
gatagggaagaatattatgatgaac

SEQ ID NO: 6030082 - DNA, 25 bp, Homo sapien
aagtaagcaagtttatttgacatat

SEQ ID NO: 6030083 - DNA, 25 bp, Homo sapien
tgggggtcaaacgagttgtaagctg

SEQ ID NO: 6030084 - DNA, 25 bp, Homo sapien
atatgggcctattatacgctaataa

SEQ ID NO: 6030085 - DNA, 25 bp, Homo sapien
acagatgctggatggggtgttatat

SEQ ID NO: 6030086 - DNA, 25 bp, Homo sapien
cttctaaggttggaacaattgttgg

SEQ ID NO: 6030087 - DNA, 25 bp, Homo sapien
atcattaccgtgcattcccttcatg

SEQ ID NO: 6030088 - DNA, 25 bp, Homo sapien
gccacaaaagtcattggtataattg

SEQ ID NO: 6030089 - DNA, 25 bp, Homo sapien
tgggtgatatgggcctattatacgc

SEQ ID NO: 6030090 - DNA, 25 bp, Homo sapien
atgcctcagctaaattcgaactggt

SEQ ID NO: 6030091 - DNA, 25 bp, Homo sapien
atattatctatagtgttgaagcatc

SEQ ID NO: 6030092 - DNA, 25 bp, Homo sapien
gatcacagtacccagaatcttttga

SEQ ID NO: 6030093 - DNA, 25 bp, Homo sapien
atcacagatcacagtacccagaatc

SEQ ID NO: 6030094 - DNA, 25 bp, Homo sapien
catttggtatccaggcaaagcgact

SEQ ID NO: 6030095 - DNA, 25 bp, Homo sapien
ttatcaatcacagatcacagtaccc

SEQ ID NO: 6030096 - DNA, 25 bp, Homo sapien
gaccatcttctaaggttggaacaat

SEQ ID NO: 6030097 - DNA, 25 bp, Homo sapien
agtacccagaatcttttgagttcgt

SEQ ID NO: 6030098 - DNA, 25 bp, Homo sapien
gaactggtgaaaaatggtcatttgg

SEQ ID NO: 6030099 - DNA, 25 bp, Homo sapien
taccgctgatacacaagctgtgaca

SEQ ID NO: 6030100 - DNA, 25 bp, Homo sapien
ggcaaagcgactatattatctatag

SEQ ID NO: 6030101 - DNA, 25 bp, Homo sapien
aatcgccaacaatgataaatgtgaa

SEQ ID NO: 6030102 - DNA, 25 bp, Homo sapien
atgatttatcatggatagctgcatc

SEQ ID NO: 6030103 - DNA, 25 bp, Homo sapien
catcttttatgaatgatttatcatg

SEQ ID NO: 6030104 - DNA, 25 bp, Homo sapien
ctatcagtaagttcttgttctttgt

SEQ ID NO: 6030105 - DNA, 25 bp, Homo sapien
attgttgctgttaccaatgctgctt

SEQ ID NO: 6030106 - DNA, 25 bp, Homo sapien
gctgctttttgatagcgaatatttc

SEQ ID NO: 6030107 - DNA, 25 bp, Homo sapien
actcagaatggtttttatcatctcg

SEQ ID NO: 6030108 - DNA, 25 bp, Homo sapien
tcggacacacccaggaatattctga

SEQ ID NO: 6030109 - DNA, 25 bp, Homo sapien
acaaccgagctccattctctagccg

SEQ ID NO: 6030110 - DNA, 25 bp, Homo sapien
gaaataacaaattctaaatcatctt

SEQ ID NO: 6030111 - DNA, 25 bp, Homo sapien
agaacttttgaacactctgaaattg

SEQ ID NO: 6030112 - DNA, 25 bp, Homo sapien
gcattggctcaaagaacttttgaac

SEQ ID NO: 6030113 - DNA, 25 bp, Homo sapien
tatcaaaattggcaaaagaaacaac

SEQ ID NO: 6030114 - DNA, 25 bp, Homo sapien
cttgcaattgttgctgttaccaatg

SEQ ID NO: 6030115 - DNA, 25 bp, Homo sapien
gagctccattctctagccgaaataa

SEQ ID NO: 6030116 - DNA, 25 bp, Homo sapien
tctggaagcattggctcaaagaact

SEQ ID NO: 6030117 - DNA, 25 bp, Homo sapien
caacaatgataaatgtgaattcggc

SEQ ID NO: 6030118 - DNA, 25 bp, Homo sapien
gcttttaatagtctatcagtaagtt

SEQ ID NO: 6030119 - DNA, 25 bp, Homo sapien
caaattctaaatcatcttttatgaa

SEQ ID NO: 6030120 - DNA, 25 bp, Homo sapien
ttgccaatgagattagcctctggaa

SEQ ID NO: 6030121 - DNA, 25 bp, Homo sapien
atctcgttgccaatgagattagcct

SEQ ID NO: 6030122 - DNA, 25 bp, Homo sapien
gttgcatattgaagaatttgctgat

SEQ ID NO: 6030123 - DNA, 25 bp, Homo sapien
aacaaatcatatgatcatatggatc

SEQ ID NO: 6030124 - DNA, 25 bp, Homo sapien
tgcttagcttttaatagtctatcag

SEQ ID NO: 6030125 - DNA, 25 bp, Homo sapien
ttagcctctggaagcattggctcaa

SEQ ID NO: 6030126 - DNA, 25 bp, Homo sapien
attcggcactggcttgcaattgttg

SEQ ID NO: 6030127 - DNA, 25 bp, Homo sapien
ccaaatacaaattgcttagctttta

SEQ ID NO: 6030128 - DNA, 25 bp, Homo sapien
gctttttgtatatatcaaaattggc

SEQ ID NO: 6030129 - DNA, 25 bp, Homo sapien
tcatatgatcatatggatcaatacc

SEQ ID NO: 6030130 - DNA, 25 bp, Homo sapien
agcgaatatttctctaaaatcgtgt

SEQ ID NO: 6030131 - DNA, 25 bp, Homo sapien
tctgttgcactggttgcatattgaa

SEQ ID NO: 6030132 - DNA, 25 bp, Homo sapien
atcaacaatcgccaacaatgataaa

SEQ ID NO: 6030133 - DNA, 25 bp, Homo sapien
atcgtgtcatccaatagtaagagac

SEQ ID NO: 6030134 - DNA, 25 bp, Homo sapien
gtaagttcttgttctttgttatcta

SEQ ID NO: 6030135 - DNA, 25 bp, Homo sapien
accaatgctgctttttgatagcgaa

SEQ ID NO: 6030136 - DNA, 25 bp, Homo sapien
ctgcatcaattgtctgttctaataa

SEQ ID NO: 6030137 - DNA, 25 bp, Homo sapien
gtcactagaatgactcagaatggtt

SEQ ID NO: 6030138 - DNA, 25 bp, Homo sapien
tgtatatatcaaaattggcaaaaga

SEQ ID NO: 6030139 - DNA, 25 bp, Homo sapien
aatagtaagagaccagtatgctttc

SEQ ID NO: 6030140 - DNA, 25 bp, Homo sapien
agaatgactcagaatggtttttatc

SEQ ID NO: 6030141 - DNA, 25 bp, Homo sapien
tatttctctaaaatcgtgtcatcca

SEQ ID NO: 6030142 - DNA, 25 bp, Homo sapien
gctgttaccaatgctgctttttgat

SEQ ID NO: 6030143 - DNA, 25 bp, Homo sapien
aagagaccagtatgctttccaaata

SEQ ID NO: 6030144 - DNA, 25 bp, Homo sapien
tgctttccaaatacaaattgcttag

SEQ ID NO: 6030145 - DNA, 25 bp, Homo sapien
tcatccaatagtaagagaccagtat

SEQ ID NO: 6030146 - DNA, 25 bp, Homo sapien
aaagaaacaaccgagctccattctc

SEQ ID NO: 6030147 - DNA, 25 bp, Homo sapien
aaactaaatagttctgttgcactgg

SEQ ID NO: 6030148 - DNA, 25 bp, Homo sapien
tttgatagcgaatatttctctaaaa

SEQ ID NO: 6030149 - DNA, 25 bp, Homo sapien
cactctgaaattgctttttgtatat

SEQ ID NO: 6030150 - DNA, 25 bp, Homo sapien
tatggatcaataccaagttgaaacc

SEQ ID NO: 6030151 - DNA, 25 bp, Homo sapien
ttatgaatgatttatcatggatagc

SEQ ID NO: 6030152 - DNA, 25 bp, Homo sapien
aatagttctgttgcactggttgcat

SEQ ID NO: 6030153 - DNA, 25 bp, Homo sapien
acacccaggaatattctgaataatg

SEQ ID NO: 6030154 - DNA, 25 bp, Homo sapien
ctagccgaaataacaaattctaaat

SEQ ID NO: 6030155 - DNA, 25 bp, Homo sapien
tctgttctaataagccaggttttaa

SEQ ID NO: 6030156 - DNA, 25 bp, Homo sapien
atcaataccaagttgaaaccacgaa

SEQ ID NO: 6030157 - DNA, 25 bp, Homo sapien
acaaattgcttagcttttaatagtc

SEQ ID NO: 6030158 - DNA, 25 bp, Homo sapien
ataatggcgtcgaacaaatcatatg

SEQ ID NO: 6030159 - DNA, 25 bp, Homo sapien
ggatagctgcatcaattgtctgttc

SEQ ID NO: 6030160 - DNA, 25 bp, Homo sapien
tatcatggatagctgcatcaattgt

SEQ ID NO: 6030161 - DNA, 25 bp, Homo sapien
atgagattagcctctggaagcattg

SEQ ID NO: 6030162 - DNA, 25 bp, Homo sapien
tattgaagaatttgctgatgtgcac

SEQ ID NO: 6030163 - DNA, 25 bp, Homo sapien
ttggcaaaagaaacaaccgagctcc

SEQ ID NO: 6030164 - DNA, 25 bp, Homo sapien
attctgaataatggcgtcgaacaaa

SEQ ID NO: 6030165 - DNA, 25 bp, Homo sapien
tcttgttctttgttatctatcatta

SEQ ID NO: 6030166 - DNA, 25 bp, Homo sapien
ttgaaaccacgaatcaacaatcgcc

SEQ ID NO: 6030167 - DNA, 25 bp, Homo sapien
agatattcggacacacccaggaata

SEQ ID NO: 6030168 - DNA, 25 bp, Homo sapien
tttgaacactctgaaattgcttttt

SEQ ID NO: 6030169 - DNA, 25 bp, Homo sapien
tgatcatatggatcaataccaagtt

SEQ ID NO: 6030170 - DNA, 25 bp, Homo sapien
gaaattgctttttgtatatatcaaa

SEQ ID NO: 6030171 - DNA, 25 bp, Homo sapien
tctttgttatctatcattaaactaa

SEQ ID NO: 6030172 - DNA, 25 bp, Homo sapien
atgtgaattcggcactggcttgcaa

SEQ ID NO: 6030173 - DNA, 25 bp, Homo sapien
tctaaaatcgtgtcatccaatagta

SEQ ID NO: 6030174 - DNA, 25 bp, Homo sapien
tgataaatgtgaattcggcactggc

SEQ ID NO: 6030175 - DNA, 25 bp, Homo sapien
tatctatcattaaactaaatagttc

SEQ ID NO: 6030176 - DNA, 25 bp, Homo sapien
gctcaaagaacttttgaacactctg

SEQ ID NO: 6030177 - DNA, 25 bp, Homo sapien
aggaatattctgaataatggcgtcg

SEQ ID NO: 6030178 - DNA, 25 bp, Homo sapien
ccacgaatcaacaatcgccaacaat

SEQ ID NO: 6030179 - DNA, 25 bp, Homo sapien
ccagtatgctttccaaatacaaatt

SEQ ID NO: 6030180 - DNA, 25 bp, Homo sapien
caattgtctgttctaataagccagg

SEQ ID NO: 6030181 - DNA, 25 bp, Homo sapien
aaaaaagatattcggacacacccag

SEQ ID NO: 6030182 - DNA, 25 bp, Homo sapien
cattctctagccgaaataacaaatt

SEQ ID NO: 6030183 - DNA, 25 bp, Homo sapien
cactggcttgcaattgttgctgtta

SEQ ID NO: 6030184 - DNA, 25 bp, Homo sapien
tgctgatgtgcacttgggtttgtta

SEQ ID NO: 6030185 - DNA, 25 bp, Homo sapien
aatagtctatcagtaagttcttgtt

SEQ ID NO: 6030186 - DNA, 25 bp, Homo sapien
ttttatcatctcgttgccaatgaga

SEQ ID NO: 6030187 - DNA, 25 bp, Homo sapien
gcgtcgaacaaatcatatgatcata

SEQ ID NO: 6030188 - DNA, 25 bp, Homo sapien
aatggtttttatcatctcgttgcca

SEQ ID NO: 6030189 - DNA, 25 bp, Homo sapien
accaagttgaaaccacgaatcaaca

SEQ ID NO: 6030190 - DNA, 25 bp, Homo sapien
gcactggttgcatattgaagaattt

SEQ ID NO: 6030191 - DNA, 25 bp, Homo sapien
agaatttgctgatgtgcacttgggt

SEQ ID NO: 6030192 - DNA, 25 bp, Homo sapien
tcattaaactaaatagttctgttgc

SEQ ID NO: 6030193 - DNA, 25 bp, Homo sapien
attgggcgtctggagctactttaca

SEQ ID NO: 6030194 - DNA, 25 bp, Homo sapien
aataacaacacaagtgaggagaatg

SEQ ID NO: 6030195 - DNA, 25 bp, Homo sapien
ttcatccacagtggaaacttctact

SEQ ID NO: 6030196 - DNA, 25 bp, Homo sapien
accgccactgaagctgatttgttat

SEQ ID NO: 6030197 - DNA, 25 bp, Homo sapien
atccttcattgatccttccactact

SEQ ID NO: 6030198 - DNA, 25 bp, Homo sapien
atttgccctgtcattaaatgctaca

SEQ ID NO: 6030199 - DNA, 25 bp, Homo sapien
gattaatattaatggaatatccttc

SEQ ID NO: 6030200 - DNA, 25 bp, Homo sapien
acgattgaggagatatggtcaaaac

SEQ ID NO: 6030201 - DNA, 25 bp, Homo sapien
agctccacctcaagtagtaataaca

SEQ ID NO: 6030202 - DNA, 25 bp, Homo sapien
cagaattttccttgtttgttggtga

SEQ ID NO: 6030203 - DNA, 25 bp, Homo sapien
ccggatactgttttgtcgaatttga

SEQ ID NO: 6030204 - DNA, 25 bp, Homo sapien
caatctgcatcaaacagcactgatc

SEQ ID NO: 6030205 - DNA, 25 bp, Homo sapien
tttccttgtttgttggtgatctttc

SEQ ID NO: 6030206 - DNA, 25 bp, Homo sapien
agtgaggagaatgctgaaaaccagc

SEQ ID NO: 6030207 - DNA, 25 bp, Homo sapien
ttgtttgttggtgatctttctccca

SEQ ID NO: 6030208 - DNA, 25 bp, Homo sapien
tggaatatccttcattgatccttcc

SEQ ID NO: 6030209 - DNA, 25 bp, Homo sapien
aatttgttgattccttgtagctcca

SEQ ID NO: 6030210 - DNA, 25 bp, Homo sapien
cgtccttcgacgaggccacgattga

SEQ ID NO: 6030211 - DNA, 25 bp, Homo sapien
gatctttctcccaccgccactgaag

SEQ ID NO: 6030212 - DNA, 25 bp, Homo sapien
actgttttgtcgaatttgaaactca

SEQ ID NO: 6030213 - DNA, 25 bp, Homo sapien
ggaaaatccatatattattccattg

SEQ ID NO: 6030214 - DNA, 25 bp, Homo sapien
gagctactttacaaagttctatacc

SEQ ID NO: 6030215 - DNA, 25 bp, Homo sapien
tccatatattattccattgcctcct

SEQ ID NO: 6030216 - DNA, 25 bp, Homo sapien
gttggtgatctttctcccaccgcca

SEQ ID NO: 6030217 - DNA, 25 bp, Homo sapien
aaccagcaatctgcatcaaacagca

SEQ ID NO: 6030218 - DNA, 25 bp, Homo sapien
tccaacgttcaaaaggactttcaga

SEQ ID NO: 6030219 - DNA, 25 bp, Homo sapien
ctactgaacccccaagaacgttatg

SEQ ID NO: 6030220 - DNA, 25 bp, Homo sapien
aggccacgattgaggagatatggtc

SEQ ID NO: 6030221 - DNA, 25 bp, Homo sapien
gagaatgctgaaaaccagcaatctg

SEQ ID NO: 6030222 - DNA, 25 bp, Homo sapien
caagaacgttatggatgggagattt

SEQ ID NO: 6030223 - DNA, 25 bp, Homo sapien
cctgtcattaaatgctacaccttta

SEQ ID NO: 6030224 - DNA, 25 bp, Homo sapien
agtagtaataacaacacaagtgagg

SEQ ID NO: 6030225 - DNA, 25 bp, Homo sapien
tattaatggaatatccttcattgat

SEQ ID NO: 6030226 - DNA, 25 bp, Homo sapien
aacacaagtgaggagaatgctgaaa

SEQ ID NO: 6030227 - DNA, 25 bp, Homo sapien
actgatcagttagataattcccaaa

SEQ ID NO: 6030228 - DNA, 25 bp, Homo sapien
aacagcactgatcagttagataatt

SEQ ID NO: 6030229 - DNA, 25 bp, Homo sapien
ctttacaaagttctataccatctac

SEQ ID NO: 6030230 - DNA, 25 bp, Homo sapien
gctgaaaaccagcaatctgcatcaa

SEQ ID NO: 6030231 - DNA, 25 bp, Homo sapien
tgaacccccaagaacgttatggatg

SEQ ID NO: 6030232 - DNA, 25 bp, Homo sapien
gatgggagatttggatccgtccttc

SEQ ID NO: 6030233 - DNA, 25 bp, Homo sapien
gcatcaaacagcactgatcagttag

SEQ ID NO: 6030234 - DNA, 25 bp, Homo sapien
tctcccaccgccactgaagctgatt

SEQ ID NO: 6030235 - DNA, 25 bp, Homo sapien
atatggtcaaaactggataaaaaag

SEQ ID NO: 6030236 - DNA, 25 bp, Homo sapien
ctataccatctaccccagaattttc

SEQ ID NO: 6030237 - DNA, 25 bp, Homo sapien
ttgattccttgtagctccacctcaa

SEQ ID NO: 6030238 - DNA, 25 bp, Homo sapien
agacaggaaaatccatatattattc

SEQ ID NO: 6030239 - DNA, 25 bp, Homo sapien
gataattcccaaatgattaatatta

SEQ ID NO: 6030240 - DNA, 25 bp, Homo sapien
ttgtcgaatttgaaactcaaaagga

SEQ ID NO: 6030241 - DNA, 25 bp, Homo sapien
actactcaattacatcatgccggat

SEQ ID NO: 6030242 - DNA, 25 bp, Homo sapien
ccttccactactcaattacatcatg

SEQ ID NO: 6030243 - DNA, 25 bp, Homo sapien
tggatccgtccttcgacgaggccac

SEQ ID NO: 6030244 - DNA, 25 bp, Homo sapien
agatttggatccgtccttcgacgag

SEQ ID NO: 6030245 - DNA, 25 bp, Homo sapien
cccaaatgattaatattaatggaat

SEQ ID NO: 6030246 - DNA, 25 bp, Homo sapien
atcatgccggatactgttttgtcga

SEQ ID NO: 6030247 - DNA, 25 bp, Homo sapien
caattacatcatgccggatactgtt

SEQ ID NO: 6030248 - DNA, 25 bp, Homo sapien
aaggacgctaaatttgccctgtcat

SEQ ID NO: 6030249 - DNA, 25 bp, Homo sapien
cacagtggaaacttctactgaaccc

SEQ ID NO: 6030250 - DNA, 25 bp, Homo sapien
tccattgcctccttcatccacagtg

SEQ ID NO: 6030251 - DNA, 25 bp, Homo sapien
aaagttctataccatctaccccaga

SEQ ID NO: 6030252 - DNA, 25 bp, Homo sapien
tcgacgaggccacgattgaggagat

SEQ ID NO: 6030253 - DNA, 25 bp, Homo sapien
attaaatgctacacctttacctaat

SEQ ID NO: 6030254 - DNA, 25 bp, Homo sapien
catctaccccagaattttccttgtt

SEQ ID NO: 6030255 - DNA, 25 bp, Homo sapien
aaggactttcagattgaattgggcg

SEQ ID NO: 6030256 - DNA, 25 bp, Homo sapien
tttcagattgaattgggcgtctgga

SEQ ID NO: 6030257 - DNA, 25 bp, Homo sapien
gttcaaaaggactttcagattgaat

SEQ ID NO: 6030258 - DNA, 25 bp, Homo sapien
gaatttgaaactcaaaaggacgcta

SEQ ID NO: 6030259 - DNA, 25 bp, Homo sapien
acctcaagtagtaataacaacacaa

SEQ ID NO: 6030260 - DNA, 25 bp, Homo sapien
gaggagatatggtcaaaactggata

SEQ ID NO: 6030261 - DNA, 25 bp, Homo sapien
cagttagataattcccaaatgatta

SEQ ID NO: 6030262 - DNA, 25 bp, Homo sapien
tatcgttaaactaattagagccaaa

SEQ ID NO: 6030263 - DNA, 25 bp, Homo sapien
attgaattgggcgtctggagctact

SEQ ID NO: 6030264 - DNA, 25 bp, Homo sapien
cgttatggatgggagatttggatcc

SEQ ID NO: 6030265 - DNA, 25 bp, Homo sapien
cgtctggagctactttacaaagttc

SEQ ID NO: 6030266 - DNA, 25 bp, Homo sapien
gctaaatttgccctgtcattaaatg

SEQ ID NO: 6030267 - DNA, 25 bp, Homo sapien
ccttgtagctccacctcaagtagta

SEQ ID NO: 6030268 - DNA, 25 bp, Homo sapien
gcctccttcatccacagtggaaact

SEQ ID NO: 6030269 - DNA, 25 bp, Homo sapien
attgatccttccactactcaattac

SEQ ID NO: 6030270 - DNA, 25 bp, Homo sapien
ctcaaaaggacgctaaatttgccct

SEQ ID NO: 6030271 - DNA, 25 bp, Homo sapien
tattattccattgcctccttcatcc

SEQ ID NO: 6030272 - DNA, 25 bp, Homo sapien
attaggatgcttgttcatgatgctc

SEQ ID NO: 6030273 - DNA, 25 bp, Homo sapien
taagttattagtagcattggagaat

SEQ ID NO: 6030274 - DNA, 25 bp, Homo sapien
agttgcatagaaattgacatcgcgt

SEQ ID NO: 6030275 - DNA, 25 bp, Homo sapien
cattagatctctgcagattaacgag

SEQ ID NO: 6030276 - DNA, 25 bp, Homo sapien
cgccatttgctccatagaaaagtta

SEQ ID NO: 6030277 - DNA, 25 bp, Homo sapien
atagaaattgacatcgcgttcccaa

SEQ ID NO: 6030278 - DNA, 25 bp, Homo sapien
atatttaagggaggagtcatcatcc

SEQ ID NO: 6030279 - DNA, 25 bp, Homo sapien
tcccattccgtatggtactggattt

SEQ ID NO: 6030280 - DNA, 25 bp, Homo sapien
catagaaaagttaccatcctgttgc

SEQ ID NO: 6030281 - DNA, 25 bp, Homo sapien
aacattgttcctattaggatgcttg

SEQ ID NO: 6030282 - DNA, 25 bp, Homo sapien
acgtcatacatatttgcaccgtttc

SEQ ID NO: 6030283 - DNA, 25 bp, Homo sapien
ctggacacgtcatacatatttgcac

SEQ ID NO: 6030284 - DNA, 25 bp, Homo sapien
gttgtgcgccatttgctccatagaa

SEQ ID NO: 6030285 - DNA, 25 bp, Homo sapien
ttgccattgggcagttgcatagaaa

SEQ ID NO: 6030286 - DNA, 25 bp, Homo sapien
acgggacattagatctctgcagatt

SEQ ID NO: 6030287 - DNA, 25 bp, Homo sapien
ggtcgctatggctgccattcttgtt

SEQ ID NO: 6030288 - DNA, 25 bp, Homo sapien
aatagttgttgtgcgccatttgctc

SEQ ID NO: 6030289 - DNA, 25 bp, Homo sapien
atcgcgttcccaaattgaggtaagt

SEQ ID NO: 6030290 - DNA, 25 bp, Homo sapien
tcctgtgataatcgtaattattgta

SEQ ID NO: 6030291 - DNA, 25 bp, Homo sapien
tacatatttgcaccgtttcccattc

SEQ ID NO: 6030292 - DNA, 25 bp, Homo sapien
tatggctgccattcttgttcctgtg

SEQ ID NO: 6030293 - DNA, 25 bp, Homo sapien
ttgctccatagaaaagttaccatcc

SEQ ID NO: 6030294 - DNA, 25 bp, Homo sapien
tccgtatggtactggatttacgttc

SEQ ID NO: 6030295 - DNA, 25 bp, Homo sapien
ggtttgtgttcatgcttgaggccgt

SEQ ID NO: 6030296 - DNA, 25 bp, Homo sapien
catgttcatgttagaattcatgatc

SEQ ID NO: 6030297 - DNA, 25 bp, Homo sapien
acagtgcaccgtcttcttgcatata

SEQ ID NO: 6030298 - DNA, 25 bp, Homo sapien
tccgcatattgttcaagaatttgtt

SEQ ID NO: 6030299 - DNA, 25 bp, Homo sapien
ggagaattggttgcccgtcggatgg

SEQ ID NO: 6030300 - DNA, 25 bp, Homo sapien
tgccattcttgttcctgtgataatc

SEQ ID NO: 6030301 - DNA, 25 bp, Homo sapien
accatcctgttgctgctgctgctgc

SEQ ID NO: 6030302 - DNA, 25 bp, Homo sapien
agttgtaatagttgttgtgcgccat

SEQ ID NO: 6030303 - DNA, 25 bp, Homo sapien
caccgtcttcttgcatatacgggac

SEQ ID NO: 6030304 - DNA, 25 bp, Homo sapien
catgttcatgttcatgttagaattc

SEQ ID NO: 6030305 - DNA, 25 bp, Homo sapien
ccgtttcccattccgtatggtactg

SEQ ID NO: 6030306 - DNA, 25 bp, Homo sapien
cgtaattattgtagttgtaatagtt

SEQ ID NO: 6030307 - DNA, 25 bp, Homo sapien
ttgctgttgccattgggcagttgca

SEQ ID NO: 6030308 - DNA, 25 bp, Homo sapien
gttcatgatgctcgatttcgaatta

SEQ ID NO: 6030309 - DNA, 25 bp, Homo sapien
gcatatacgggacattagatctctg

SEQ ID NO: 6030310 - DNA, 25 bp, Homo sapien
ccaaattgaggtaagttattagtag

SEQ ID NO: 6030311 - DNA, 25 bp, Homo sapien
ggagtcatcatcctggacacgtcat

SEQ ID NO: 6030312 - DNA, 25 bp, Homo sapien
cgccttttatcttccgcatattgtt

SEQ ID NO: 6030313 - DNA, 25 bp, Homo sapien
attgtagttgtaatagttgttgtgc

SEQ ID NO: 6030314 - DNA, 25 bp, Homo sapien
gatgctcgatttcgaattattggaa

SEQ ID NO: 6030315 - DNA, 25 bp, Homo sapien
ttgggcagttgcatagaaattgaca

SEQ ID NO: 6030316 - DNA, 25 bp, Homo sapien
ttgaggtaagttattagtagcattg

SEQ ID NO: 6030317 - DNA, 25 bp, Homo sapien
gctgctgctgctgatgtaaaaagag

SEQ ID NO: 6030318 - DNA, 25 bp, Homo sapien
atgatcatgtttgtgttagggtttg

SEQ ID NO: 6030319 - DNA, 25 bp, Homo sapien
tatgagggacttgaatattggtgtg

SEQ ID NO: 6030320 - DNA, 25 bp, Homo sapien
ttatcttccgcatattgttcaagaa

SEQ ID NO: 6030321 - DNA, 25 bp, Homo sapien
caagaatttgtttggagttatcgac

SEQ ID NO: 6030322 - DNA, 25 bp, Homo sapien
tgaatattggtgtgggtacagtgca

SEQ ID NO: 6030323 - DNA, 25 bp, Homo sapien
tacgttcatgttcatgttcatgtta

SEQ ID NO: 6030324 - DNA, 25 bp, Homo sapien
tgttagggtttgtgttcatgcttga

SEQ ID NO: 6030325 - DNA, 25 bp, Homo sapien
gcccgtcggatggagcgagtatgag

SEQ ID NO: 6030326 - DNA, 25 bp, Homo sapien
attggtgtgggtacagtgcaccgtc

SEQ ID NO: 6030327 - DNA, 25 bp, Homo sapien
tttgcaccgtttcccattccgtatg

SEQ ID NO: 6030328 - DNA, 25 bp, Homo sapien
gtgttcatgcttgaggccgttttat

SEQ ID NO: 6030329 - DNA, 25 bp, Homo sapien
cggatggagcgagtatgagggactt

SEQ ID NO: 6030330 - DNA, 25 bp, Homo sapien
aaagttaccatcctgttgctgctgc

SEQ ID NO: 6030331 - DNA, 25 bp, Homo sapien
tattgttcaagaatttgtttggagt

SEQ ID NO: 6030332 - DNA, 25 bp, Homo sapien
gttttattgctgttgccattgggca

SEQ ID NO: 6030333 - DNA, 25 bp, Homo sapien
agcattggagaattggttgcccgtc

SEQ ID NO: 6030334 - DNA, 25 bp, Homo sapien
atcatcctggacacgtcatacatat

SEQ ID NO: 6030335 - DNA, 25 bp, Homo sapien
atctctgcagattaacgaggtcgct

SEQ ID NO: 6030336 - DNA, 25 bp, Homo sapien
gcagattaacgaggtcgctatggct

SEQ ID NO: 6030337 - DNA, 25 bp, Homo sapien
gatgtaaaaagagtcgccttttatc

SEQ ID NO: 6030338 - DNA, 25 bp, Homo sapien
atgttagaattcatgatcatgtttg

SEQ ID NO: 6030339 - DNA, 25 bp, Homo sapien
tcttgttcctgtgataatcgtaatt

SEQ ID NO: 6030340 - DNA, 25 bp, Homo sapien
gaattcatgatcatgtttgtgttag

SEQ ID NO: 6030341 - DNA, 25 bp, Homo sapien
ttggttgcccgtcggatggagcgag

SEQ ID NO: 6030342 - DNA, 25 bp, Homo sapien
taacgaggtcgctatggctgccatt

SEQ ID NO: 6030343 - DNA, 25 bp, Homo sapien
gttcctattaggatgcttgttcatg

SEQ ID NO: 6030344 - DNA, 25 bp, Homo sapien
cgatttcgaattattggaattcggg

SEQ ID NO: 6030345 - DNA, 25 bp, Homo sapien
gctgctgatgtaaaaagagtcgcct

SEQ ID NO: 6030346 - DNA, 25 bp, Homo sapien
gggctatatttaagggaggagtcat

SEQ ID NO: 6030347 - DNA, 25 bp, Homo sapien
attgacatcgcgttcccaaattgag

SEQ ID NO: 6030348 - DNA, 25 bp, Homo sapien
cgaattattggaattcggggctata

SEQ ID NO: 6030349 - DNA, 25 bp, Homo sapien
ggacttgaatattggtgtgggtaca

SEQ ID NO: 6030350 - DNA, 25 bp, Homo sapien
attagtagcattggagaattggttg

SEQ ID NO: 6030351 - DNA, 25 bp, Homo sapien
aagagtcgccttttatcttccgcat

SEQ ID NO: 6030352 - DNA, 25 bp, Homo sapien
atgtttgtgttagggtttgtgttca

SEQ ID NO: 6030353 - DNA, 25 bp, Homo sapien
atgcttgttcatgatgctcgatttc

SEQ ID NO: 6030354 - DNA, 25 bp, Homo sapien
tggtactggatttacgttcatgttc

SEQ ID NO: 6030355 - DNA, 25 bp, Homo sapien
gtgggtacagtgcaccgtcttcttg

SEQ ID NO: 6030356 - DNA, 25 bp, Homo sapien
tggatttacgttcatgttcatgttc

SEQ ID NO: 6030357 - DNA, 25 bp, Homo sapien
gagcgagtatgagggacttgaatat

SEQ ID NO: 6030358 - DNA, 25 bp, Homo sapien
atgcttgaggccgttttattgctgt

SEQ ID NO: 6030359 - DNA, 25 bp, Homo sapien
aagggaggagtcatcatcctggaca

SEQ ID NO: 6030360 - DNA, 25 bp, Homo sapien
gataatcgtaattattgtagttgta

SEQ ID NO: 6030361 - DNA, 25 bp, Homo sapien
gaggccgttttattgctgttgccat

SEQ ID NO: 6030362 - DNA, 25 bp, Homo sapien
cttcttgcatatacgggacattaga

SEQ ID NO: 6030363 - DNA, 25 bp, Homo sapien
ttggagtggaaggacgacaagactc

SEQ ID NO: 6030364 - DNA, 25 bp, Homo sapien
tttcacaaacagactatttcgacac

SEQ ID NO: 6030365 - DNA, 25 bp, Homo sapien
ccggatctggacgtgaatggcacaa

SEQ ID NO: 6030366 - DNA, 25 bp, Homo sapien
acactactacatctgcgaaattgca

SEQ ID NO: 6030367 - DNA, 25 bp, Homo sapien
tgataacggtactgaaaaacttgta

SEQ ID NO: 6030368 - DNA, 25 bp, Homo sapien
gataacttggtgtatatccacgctg

SEQ ID NO: 6030369 - DNA, 25 bp, Homo sapien
cgattaacacacatggagtgtccac

SEQ ID NO: 6030370 - DNA, 25 bp, Homo sapien
ctgcgagaaaatgatattgtaggag

SEQ ID NO: 6030371 - DNA, 25 bp, Homo sapien
ttgccaggacttgtgtgacggtgat

SEQ ID NO: 6030372 - DNA, 25 bp, Homo sapien
aattgcaagaatttcaatcgcagta

SEQ ID NO: 6030373 - DNA, 25 bp, Homo sapien
ctacatctgcgaaattgcaagaatt

SEQ ID NO: 6030374 - DNA, 25 bp, Homo sapien
cagagactgcgagaaaatgatattg

SEQ ID NO: 6030375 - DNA, 25 bp, Homo sapien
tcttctccgattaacacacatggag

SEQ ID NO: 6030376 - DNA, 25 bp, Homo sapien
tatgtcagagactgcgagaaaatga

SEQ ID NO: 6030377 - DNA, 25 bp, Homo sapien
atggagtgtccactacggtaccttc

SEQ ID NO: 6030378 - DNA, 25 bp, Homo sapien
aaccgatccattatgtcagagactg

SEQ ID NO: 6030379 - DNA, 25 bp, Homo sapien
ggatcaaacgatgcttcgccggatc

SEQ ID NO: 6030380 - DNA, 25 bp, Homo sapien
gaattgtgcttgcaagattgccagg

SEQ ID NO: 6030381 - DNA, 25 bp, Homo sapien
tcgacacagttcataaccgacaatc

SEQ ID NO: 6030382 - DNA, 25 bp, Homo sapien
actatttcgacacagttcataaccg

SEQ ID NO: 6030383 - DNA, 25 bp, Homo sapien
tgtctctttcacaaacagactattt

SEQ ID NO: 6030384 - DNA, 25 bp, Homo sapien
gaaaatgatattgtaggagatcttt

SEQ ID NO: 6030385 - DNA, 25 bp, Homo sapien
gacttttcccagtggtcggttgatg

SEQ ID NO: 6030386 - DNA, 25 bp, Homo sapien
ttggtgtatatccacgctggaggtg

SEQ ID NO: 6030387 - DNA, 25 bp, Homo sapien
acttgtacactactacatctgcgaa

SEQ ID NO: 6030388 - DNA, 25 bp, Homo sapien
aggacgacaagactcaagaggacat

SEQ ID NO: 6030389 - DNA, 25 bp, Homo sapien
cgcagtacacaaggctgaggatgga

SEQ ID NO: 6030390 - DNA, 25 bp, Homo sapien
ctgcgaaattgcaagaatttcaatc

SEQ ID NO: 6030391 - DNA, 25 bp, Homo sapien
caccgtcaaggagagaatccccggt

SEQ ID NO: 6030392 - DNA, 25 bp, Homo sapien
agagacagcaagttggagtggaagg

SEQ ID NO: 6030393 - DNA, 25 bp, Homo sapien
tgaatggcacaatattgatgaataa

SEQ ID NO: 6030394 - DNA, 25 bp, Homo sapien
ggaagaaaccgatccattatgtcag

SEQ ID NO: 6030395 - DNA, 25 bp, Homo sapien
aacgatgcttcgccggatctggacg

SEQ ID NO: 6030396 - DNA, 25 bp, Homo sapien
ttgccggaattgtgcttgcaagatt

SEQ ID NO: 6030397 - DNA, 25 bp, Homo sapien
ctggacgtgaatggcacaatattga

SEQ ID NO: 6030398 - DNA, 25 bp, Homo sapien
atgaagaccagctcaagctcttctc

SEQ ID NO: 6030399 - DNA, 25 bp, Homo sapien
ggttgatgatgtgataacttggtgt

SEQ ID NO: 6030400 - DNA, 25 bp, Homo sapien
tgaaaaacttgtacactactacatc

SEQ ID NO: 6030401 - DNA, 25 bp, Homo sapien
tcaagctcttctccgattaacacac

SEQ ID NO: 6030402 - DNA, 25 bp, Homo sapien
ataaccgacaatcaccgtcaaggag

SEQ ID NO: 6030403 - DNA, 25 bp, Homo sapien
aatgaagacttttcccagtggtcgg

SEQ ID NO: 6030404 - DNA, 25 bp, Homo sapien
tttgaataaggccataaaattcaag

SEQ ID NO: 6030405 - DNA, 25 bp, Homo sapien
agtggaaggacgacaagactcaaga

SEQ ID NO: 6030406 - DNA, 25 bp, Homo sapien
atactgatcaataagatgagagaca

SEQ ID NO: 6030407 - DNA, 25 bp, Homo sapien
ttcaagatactgatcaataagatga

SEQ ID NO: 6030408 - DNA, 25 bp, Homo sapien
tccattatgtcagagactgcgagaa

SEQ ID NO: 6030409 - DNA, 25 bp, Homo sapien
taccttcttcaaacaacacaattat

SEQ ID NO: 6030410 - DNA, 25 bp, Homo sapien
aggacatgataacggtactgaaaaa

SEQ ID NO: 6030411 - DNA, 25 bp, Homo sapien
caattatacccagtagtgacggtgt

SEQ ID NO: 6030412 - DNA, 25 bp, Homo sapien
tatatccacgctggaggtggaagaa

SEQ ID NO: 6030413 - DNA, 25 bp, Homo sapien
agcaagttggagtggaaggacgaca

SEQ ID NO: 6030414 - DNA, 25 bp, Homo sapien
gtactgaaaaacttgtacactacta

SEQ ID NO: 6030415 - DNA, 25 bp, Homo sapien
acacacatggagtgtccactacggt

SEQ ID NO: 6030416 - DNA, 25 bp, Homo sapien
atcaataagatgagagacagcaagt

SEQ ID NO: 6030417 - DNA, 25 bp, Homo sapien
gcttcgccggatctggacgtgaatg

SEQ ID NO: 6030418 - DNA, 25 bp, Homo sapien
gtagtgacggtgtgtctctttcaca

SEQ ID NO: 6030419 - DNA, 25 bp, Homo sapien
cagttcataaccgacaatcaccgtc

SEQ ID NO: 6030420 - DNA, 25 bp, Homo sapien
tacccagtagtgacggtgtgtctct

SEQ ID NO: 6030421 - DNA, 25 bp, Homo sapien
aagaatttcaatcgcagtacacaag

SEQ ID NO: 6030422 - DNA, 25 bp, Homo sapien
tacggtaccttcttcaaacaacaca

SEQ ID NO: 6030423 - DNA, 25 bp, Homo sapien
ggacttgtgtgacggtgatttgaat

SEQ ID NO: 6030424 - DNA, 25 bp, Homo sapien
ggaggtggaagaaaccgatccatta

SEQ ID NO: 6030425 - DNA, 25 bp, Homo sapien
atgaataatgaagacttttcccagt

SEQ ID NO: 6030426 - DNA, 25 bp, Homo sapien
gatcttttgccggaattgtgcttgc

SEQ ID NO: 6030427 - DNA, 25 bp, Homo sapien
tgcttgcaagattgccaggacttgt

SEQ ID NO: 6030428 - DNA, 25 bp, Homo sapien
ctcaagaggacatgataacggtact

SEQ ID NO: 6030429 - DNA, 25 bp, Homo sapien
tcccagtggtcggttgatgatgtga

SEQ ID NO: 6030430 - DNA, 25 bp, Homo sapien
gcacaatattgatgaataatgaaga

SEQ ID NO: 6030431 - DNA, 25 bp, Homo sapien
gtaggagatcttttgccggaattgt

SEQ ID NO: 6030432 - DNA, 25 bp, Homo sapien
atggatgtcttggacgtaatgaaga

SEQ ID NO: 6030433 - DNA, 25 bp, Homo sapien
cggtgatttgaataaggccataaaa

SEQ ID NO: 6030434 - DNA, 25 bp, Homo sapien
ttcaatcgcagtacacaaggctgag

SEQ ID NO: 6030435 - DNA, 25 bp, Homo sapien
gtggtcggttgatgatgtgataact

SEQ ID NO: 6030436 - DNA, 25 bp, Homo sapien
cttcaaacaacacaattatacccag

SEQ ID NO: 6030437 - DNA, 25 bp, Homo sapien
taaggccataaaattcaagatactg

SEQ ID NO: 6030438 - DNA, 25 bp, Homo sapien
ctgaggatggatgtcttggacgtaa

SEQ ID NO: 6030439 - DNA, 25 bp, Homo sapien
acaacacaattatacccagtagtga

SEQ ID NO: 6030440 - DNA, 25 bp, Homo sapien
tgtccactacggtaccttcttcaaa

SEQ ID NO: 6030441 - DNA, 25 bp, Homo sapien
caagattgccaggacttgtgtgacg

SEQ ID NO: 6030442 - DNA, 25 bp, Homo sapien
gtcttggacgtaatgaagaccagct

SEQ ID NO: 6030443 - DNA, 25 bp, Homo sapien
tattgatgaataatgaagacttttc

SEQ ID NO: 6030444 - DNA, 25 bp, Homo sapien
cataaaattcaagatactgatcaat

SEQ ID NO: 6030445 - DNA, 25 bp, Homo sapien
cacgctggaggtggaagaaaccgat

SEQ ID NO: 6030446 - DNA, 25 bp, Homo sapien
gacaatcaccgtcaaggagagaatc

SEQ ID NO: 6030447 - DNA, 25 bp, Homo sapien
tgatgtgataacttggtgtatatcc

SEQ ID NO: 6030448 - DNA, 25 bp, Homo sapien
aagatgagagacagcaagttggagt

SEQ ID NO: 6030449 - DNA, 25 bp, Homo sapien
gatattgtaggagatcttttgccgg

SEQ ID NO: 6030450 - DNA, 25 bp, Homo sapien
cacaaggctgaggatggatgtcttg

SEQ ID NO: 6030451 - DNA, 25 bp, Homo sapien
acggtgtgtctctttcacaaacaga

SEQ ID NO: 6030452 - DNA, 25 bp, Homo sapien
aaacagactatttcgacacagttca

SEQ ID NO: 6030453 - DNA, 25 bp, Homo sapien
gacgtaatgaagaccagctcaagct

SEQ ID NO: 6030454 - DNA, 25 bp, Homo sapien
gtgtgacggtgatttgaataaggcc

SEQ ID NO: 6030455 - DNA, 25 bp, Homo sapien
accagctcaagctcttctccgatta

SEQ ID NO: 6030456 - DNA, 25 bp, Homo sapien
acaagactcaagaggacatgataac

SEQ ID NO: 6030457 - DNA, 25 bp, Homo sapien
gcagatgggtgagattggtttgtag

SEQ ID NO: 6030458 - DNA, 25 bp, Homo sapien
gcggggtgcaaaccctgttgcttta

SEQ ID NO: 6030459 - DNA, 25 bp, Homo sapien
cgttcatcattgctacttcttcgaa

SEQ ID NO: 6030460 - DNA, 25 bp, Homo sapien
tttgaagaaggtaccgtagtggaca

SEQ ID NO: 6030461 - DNA, 25 bp, Homo sapien
cttcgaaatcacctcttcttcttaa

SEQ ID NO: 6030462 - DNA, 25 bp, Homo sapien
tccccatagcaaatgaccaagacat

SEQ ID NO: 6030463 - DNA, 25 bp, Homo sapien
gtcactactgggtataattgtgttg

SEQ ID NO: 6030464 - DNA, 25 bp, Homo sapien
tcttgatccccatagcaaatgacca

SEQ ID NO: 6030465 - DNA, 25 bp, Homo sapien
ttttcgttcaattctaacagcctct

SEQ ID NO: 6030466 - DNA, 25 bp, Homo sapien
acttccgttcatcattgctacttct

SEQ ID NO: 6030467 - DNA, 25 bp, Homo sapien
tcttaacataatggcggggtgcaaa

SEQ ID NO: 6030468 - DNA, 25 bp, Homo sapien
tgtgtcgaaatagtctgtttgtgaa

SEQ ID NO: 6030469 - DNA, 25 bp, Homo sapien
agcctctcttgatccccatagcaaa

SEQ ID NO: 6030470 - DNA, 25 bp, Homo sapien
taggtgatggccccggtgtgttcgc

SEQ ID NO: 6030471 - DNA, 25 bp, Homo sapien
actttgtttttgctatccttgtgca

SEQ ID NO: 6030472 - DNA, 25 bp, Homo sapien
ctctccttgacggtgattgtcggtt

SEQ ID NO: 6030473 - DNA, 25 bp, Homo sapien
cggagaagagcttgagctggtcttc

SEQ ID NO: 6030474 - DNA, 25 bp, Homo sapien
actgggtataattgtgttgtttgaa

SEQ ID NO: 6030475 - DNA, 25 bp, Homo sapien
gtcggttatgaactgtgtcgaaata

SEQ ID NO: 6030476 - DNA, 25 bp, Homo sapien
acaggcttttcgttcaattctaaca

SEQ ID NO: 6030477 - DNA, 25 bp, Homo sapien
tttttgctatccttgtgcaaagatt

SEQ ID NO: 6030478 - DNA, 25 bp, Homo sapien
aagagacacaccgtcactactgggt

SEQ ID NO: 6030479 - DNA, 25 bp, Homo sapien
tcctgatctgctaagttatgtcttt

SEQ ID NO: 6030480 - DNA, 25 bp, Homo sapien
gaaatagtctgtttgtgaaagagac

SEQ ID NO: 6030481 - DNA, 25 bp, Homo sapien
tgcaaaccctgttgctttaagttct

SEQ ID NO: 6030482 - DNA, 25 bp, Homo sapien
gattggtttgtagatatttggggta

SEQ ID NO: 6030483 - DNA, 25 bp, Homo sapien
ccctgttgctttaagttcttgaata

SEQ ID NO: 6030484 - DNA, 25 bp, Homo sapien
ataatggcggggtgcaaaccctgtt

SEQ ID NO: 6030485 - DNA, 25 bp, Homo sapien
tagcaaatgaccaagacatattgtc

SEQ ID NO: 6030486 - DNA, 25 bp, Homo sapien
ttaacgcctcgttaggtgatggccc

SEQ ID NO: 6030487 - DNA, 25 bp, Homo sapien
tgtcttttcattgcgtttttcaaga

SEQ ID NO: 6030488 - DNA, 25 bp, Homo sapien
tcattacgtccaagacatccatcct

SEQ ID NO: 6030489 - DNA, 25 bp, Homo sapien
aagttatgtcttttcattgcgtttt

SEQ ID NO: 6030490 - DNA, 25 bp, Homo sapien
tcgcaggagtcttctttagatgcac

SEQ ID NO: 6030491 - DNA, 25 bp, Homo sapien
atgaccaagacatattgtctccaat

SEQ ID NO: 6030492 - DNA, 25 bp, Homo sapien
tatgaactgtgtcgaaatagtctgt

SEQ ID NO: 6030493 - DNA, 25 bp, Homo sapien
taccgtagtggacactccatgtgtg

SEQ ID NO: 6030494 - DNA, 25 bp, Homo sapien
tctttagatgcacgcaactgtttta

SEQ ID NO: 6030495 - DNA, 25 bp, Homo sapien
tggtcttcattacgtccaagacatc

SEQ ID NO: 6030496 - DNA, 25 bp, Homo sapien
aaagattttgagtgggaaagactgg

SEQ ID NO: 6030497 - DNA, 25 bp, Homo sapien
cctcgttaggtgatggccccggtgt

SEQ ID NO: 6030498 - DNA, 25 bp, Homo sapien
gcgtttttcaagatccgttcgcagg

SEQ ID NO: 6030499 - DNA, 25 bp, Homo sapien
agaaggtaccgtagtggacactcca

SEQ ID NO: 6030500 - DNA, 25 bp, Homo sapien
ctccaatcctgatctgctaagttat

SEQ ID NO: 6030501 - DNA, 25 bp, Homo sapien
gttaatcggagaagagcttgagctg

SEQ ID NO: 6030502 - DNA, 25 bp, Homo sapien
tgctttaagttcttgaatatgatca

SEQ ID NO: 6030503 - DNA, 25 bp, Homo sapien
gagtcttctttagatgcacgcaact

SEQ ID NO: 6030504 - DNA, 25 bp, Homo sapien
atgtgtgttaatcggagaagagctt

SEQ ID NO: 6030505 - DNA, 25 bp, Homo sapien
gggtgagattggtttgtagatattt

SEQ ID NO: 6030506 - DNA, 25 bp, Homo sapien
aagacatattgtctccaatcctgat

SEQ ID NO: 6030507 - DNA, 25 bp, Homo sapien
cacaccgtcactactgggtataatt

SEQ ID NO: 6030508 - DNA, 25 bp, Homo sapien
atccgttcgcaggagtcttctttag

SEQ ID NO: 6030509 - DNA, 25 bp, Homo sapien
ttcaattctaacagcctctcttgat

SEQ ID NO: 6030510 - DNA, 25 bp, Homo sapien
gggattctctccttgacggtgattg

SEQ ID NO: 6030511 - DNA, 25 bp, Homo sapien
tgttcgctgttgaaacggcagatgg

SEQ ID NO: 6030512 - DNA, 25 bp, Homo sapien
tgggaaagactgggttgcctaaata

SEQ ID NO: 6030513 - DNA, 25 bp, Homo sapien
ctgttgaaacggcagatgggtgaga

SEQ ID NO: 6030514 - DNA, 25 bp, Homo sapien
tttgagtgggaaagactgggttgcc

SEQ ID NO: 6030515 - DNA, 25 bp, Homo sapien
aagttcttgaatatgatcacaggct

SEQ ID NO: 6030516 - DNA, 25 bp, Homo sapien
ttcaagatccgttcgcaggagtctt

SEQ ID NO: 6030517 - DNA, 25 bp, Homo sapien
gtccaagacatccatcctcagcctt

SEQ ID NO: 6030518 - DNA, 25 bp, Homo sapien
gaaacggcagatgggtgagattggt

SEQ ID NO: 6030519 - DNA, 25 bp, Homo sapien
tgtgttgtttgaagaaggtaccgta

SEQ ID NO: 6030520 - DNA, 25 bp, Homo sapien
gatgcacgcaactgttttaacgcct

SEQ ID NO: 6030521 - DNA, 25 bp, Homo sapien
ttgtgaaagagacacaccgtcacta

SEQ ID NO: 6030522 - DNA, 25 bp, Homo sapien
ttcattgcgtttttcaagatccgtt

SEQ ID NO: 6030523 - DNA, 25 bp, Homo sapien
cactccatgtgtgttaatcggagaa

SEQ ID NO: 6030524 - DNA, 25 bp, Homo sapien
ttgaatatgatcacaggcttttcgt

SEQ ID NO: 6030525 - DNA, 25 bp, Homo sapien
tattgtctccaatcctgatctgcta

SEQ ID NO: 6030526 - DNA, 25 bp, Homo sapien
tcattgctacttcttcgaaatcacc

SEQ ID NO: 6030527 - DNA, 25 bp, Homo sapien
agagcttgagctggtcttcattacg

SEQ ID NO: 6030528 - DNA, 25 bp, Homo sapien
accggggattctctccttgacggtg

SEQ ID NO: 6030529 - DNA, 25 bp, Homo sapien
ctatccttgtgcaaagattttgagt

SEQ ID NO: 6030530 - DNA, 25 bp, Homo sapien
gtctgtttgtgaaagagacacaccg

SEQ ID NO: 6030531 - DNA, 25 bp, Homo sapien
ttgtgcaaagattttgagtgggaaa

SEQ ID NO: 6030532 - DNA, 25 bp, Homo sapien
aatcacctcttcttcttaacataat

SEQ ID NO: 6030533 - DNA, 25 bp, Homo sapien
ctcttcttcttaacataatggcggg

SEQ ID NO: 6030534 - DNA, 25 bp, Homo sapien
ttgagctggtcttcattacgtccaa

SEQ ID NO: 6030535 - DNA, 25 bp, Homo sapien
ccggtgtgttcgctgttgaaacggc

SEQ ID NO: 6030536 - DNA, 25 bp, Homo sapien
cgcaactgttttaacgcctcgttag

SEQ ID NO: 6030537 - DNA, 25 bp, Homo sapien
agtggacactccatgtgtgttaatc

SEQ ID NO: 6030538 - DNA, 25 bp, Homo sapien
atggccccggtgtgttcgctgttga

SEQ ID NO: 6030539 - DNA, 25 bp, Homo sapien
atgatcacaggcttttcgttcaatt

SEQ ID NO: 6030540 - DNA, 25 bp, Homo sapien
tataattgtgttgtttgaagaaggt

SEQ ID NO: 6030541 - DNA, 25 bp, Homo sapien
gtgattgtcggttatgaactgtgtc

SEQ ID NO: 6030542 - DNA, 25 bp, Homo sapien
ctacttcttcgaaatcacctcttct

SEQ ID NO: 6030543 - DNA, 25 bp, Homo sapien
ttgacggtgattgtcggttatgaac

SEQ ID NO: 6030544 - DNA, 25 bp, Homo sapien
tctaacagcctctcttgatccccat

SEQ ID NO: 6030545 - DNA, 25 bp, Homo sapien
tctgctaagttatgtcttttcattg

SEQ ID NO: 6030546 - DNA, 25 bp, Homo sapien
ctgttttaacgcctcgttaggtgat

SEQ ID NO: 6030547 - DNA, 25 bp, Homo sapien
ttttaacccaattgccattggatag

SEQ ID NO: 6030548 - DNA, 25 bp, Homo sapien
gaatagattccattgttccaacgtt

SEQ ID NO: 6030549 - DNA, 25 bp, Homo sapien
gcaagggccaaaccaggaaacaata

SEQ ID NO: 6030550 - DNA, 25 bp, Homo sapien
aatagggttgatggctatccaaaac

SEQ ID NO: 6030551 - DNA, 25 bp, Homo sapien
tttcgacgtggtgatgattggctgc

SEQ ID NO: 6030552 - DNA, 25 bp, Homo sapien
cagacacatcaacaacagtcacttg

SEQ ID NO: 6030553 - DNA, 25 bp, Homo sapien
tcaggacgatgaaacgttgatggaa

SEQ ID NO: 6030554 - DNA, 25 bp, Homo sapien
attatttcaggcgaaagctaaacaa

SEQ ID NO: 6030555 - DNA, 25 bp, Homo sapien
tgatgattggctgcttaacagaaaa

SEQ ID NO: 6030556 - DNA, 25 bp, Homo sapien
catgttactaatattgagaataggg

SEQ ID NO: 6030557 - DNA, 25 bp, Homo sapien
caagaaatcaccgttttatccaggt

SEQ ID NO: 6030558 - DNA, 25 bp, Homo sapien
gattgatctccaaaccaggtttcct

SEQ ID NO: 6030559 - DNA, 25 bp, Homo sapien
taaaagcagacacatcaacaacagt

SEQ ID NO: 6030560 - DNA, 25 bp, Homo sapien
acgtatcattcaaaccctctagaga

SEQ ID NO: 6030561 - DNA, 25 bp, Homo sapien
ttgttccaacgttgaatcactggat

SEQ ID NO: 6030562 - DNA, 25 bp, Homo sapien
cccaattgccattggatagattgat

SEQ ID NO: 6030563 - DNA, 25 bp, Homo sapien
tcaaaaaatcaatgaacttactaaa

SEQ ID NO: 6030564 - DNA, 25 bp, Homo sapien
aagtcgctaccgcaacagcatgtta

SEQ ID NO: 6030565 - DNA, 25 bp, Homo sapien
caacagcatgttactaatattgaga

SEQ ID NO: 6030566 - DNA, 25 bp, Homo sapien
gaattggtttttgttcctattgaca

SEQ ID NO: 6030567 - DNA, 25 bp, Homo sapien
tgccattggatagattgatctccaa

SEQ ID NO: 6030568 - DNA, 25 bp, Homo sapien
cattcaaaccctctagagacttcca

SEQ ID NO: 6030569 - DNA, 25 bp, Homo sapien
ctaccgcaacagcatgttactaata

SEQ ID NO: 6030570 - DNA, 25 bp, Homo sapien
tacattcatgggaagtcgctaccgc

SEQ ID NO: 6030571 - DNA, 25 bp, Homo sapien
caacgttgaatcactggatacagaa

SEQ ID NO: 6030572 - DNA, 25 bp, Homo sapien
gccaaaccaggaaacaatagaaatg

SEQ ID NO: 6030573 - DNA, 25 bp, Homo sapien
aaaccctctagagacttccatacaa

SEQ ID NO: 6030574 - DNA, 25 bp, Homo sapien
aataaatcaatttgccactacgcca

SEQ ID NO: 6030575 - DNA, 25 bp, Homo sapien
cagaacgaaaatttgactttcgacg

SEQ ID NO: 6030576 - DNA, 25 bp, Homo sapien
gacttccatacaaacgattactcga

SEQ ID NO: 6030577 - DNA, 25 bp, Homo sapien
tttagatcaggacgatgaaacgttg

SEQ ID NO: 6030578 - DNA, 25 bp, Homo sapien
agaagaagtgaagaattggtttttg

SEQ ID NO: 6030579 - DNA, 25 bp, Homo sapien
cagaaaatcagtttatttacccaat

SEQ ID NO: 6030580 - DNA, 25 bp, Homo sapien
tggtttttgttcctattgacaagaa

SEQ ID NO: 6030581 - DNA, 25 bp, Homo sapien
attccattgttccaacgttgaatca

SEQ ID NO: 6030582 - DNA, 25 bp, Homo sapien
ttcaggcgaaagctaaacaaataaa

SEQ ID NO: 6030583 - DNA, 25 bp, Homo sapien
tcaatttgccactacgccatttggg

SEQ ID NO: 6030584 - DNA, 25 bp, Homo sapien
tttgactttcgacgtggtgatgatt

SEQ ID NO: 6030585 - DNA, 25 bp, Homo sapien
aaaacttcagaaattatttcaggcg

SEQ ID NO: 6030586 - DNA, 25 bp, Homo sapien
catcaacaacagtcacttgcaaggg

SEQ ID NO: 6030587 - DNA, 25 bp, Homo sapien
caatgaacttactaaacttttgaat

SEQ ID NO: 6030588 - DNA, 25 bp, Homo sapien
atcaccgttttatccaggtttagat

SEQ ID NO: 6030589 - DNA, 25 bp, Homo sapien
accaggtttcctgttcatctgggcc

SEQ ID NO: 6030590 - DNA, 25 bp, Homo sapien
catttgggtgtaaaatcggaataga

SEQ ID NO: 6030591 - DNA, 25 bp, Homo sapien
ccaattttaacccaattgccattgg

SEQ ID NO: 6030592 - DNA, 25 bp, Homo sapien
tgaaatctaaacacgtatcattcaa

SEQ ID NO: 6030593 - DNA, 25 bp, Homo sapien
tactaaacttttgaataatgaaata

SEQ ID NO: 6030594 - DNA, 25 bp, Homo sapien
caattctcaaaaaatcaatgaactt

SEQ ID NO: 6030595 - DNA, 25 bp, Homo sapien
gcttaacagaaaatcagtttattta

SEQ ID NO: 6030596 - DNA, 25 bp, Homo sapien
ttggctgcttaacagaaaatcagtt

SEQ ID NO: 6030597 - DNA, 25 bp, Homo sapien
gaataatgaaatatgggctaaaaag

SEQ ID NO: 6030598 - DNA, 25 bp, Homo sapien
aagtttagaagaagtgaagaattgg

SEQ ID NO: 6030599 - DNA, 25 bp, Homo sapien
aataactacattcatgggaagtcgc

SEQ ID NO: 6030600 - DNA, 25 bp, Homo sapien
aacgattactcgaataactacattc

SEQ ID NO: 6030601 - DNA, 25 bp, Homo sapien
ttgatggctatccaaaacttcagaa

SEQ ID NO: 6030602 - DNA, 25 bp, Homo sapien
gaaacaatagaaatgaaatctaaac

SEQ ID NO: 6030603 - DNA, 25 bp, Homo sapien
tattgacaagaaatcaccgttttat

SEQ ID NO: 6030604 - DNA, 25 bp, Homo sapien
actaatattgagaatagggttgatg

SEQ ID NO: 6030605 - DNA, 25 bp, Homo sapien
tcagaaattatttcaggcgaaagct

SEQ ID NO: 6030606 - DNA, 25 bp, Homo sapien
ctgggccaattctcaaaaaatcaat

SEQ ID NO: 6030607 - DNA, 25 bp, Homo sapien
cgaaagctaaacaaataaatcaatt

SEQ ID NO: 6030608 - DNA, 25 bp, Homo sapien
ctccaaaccaggtttcctgttcatc

SEQ ID NO: 6030609 - DNA, 25 bp, Homo sapien
tgttcctattgacaagaaatcaccg

SEQ ID NO: 6030610 - DNA, 25 bp, Homo sapien
tacgccatttgggtgtaaaatcgga

SEQ ID NO: 6030611 - DNA, 25 bp, Homo sapien
taaacaaataaatcaatttgccact

SEQ ID NO: 6030612 - DNA, 25 bp, Homo sapien
aaccaggaaacaatagaaatgaaat

SEQ ID NO: 6030613 - DNA, 25 bp, Homo sapien
gttcatctgggccaattctcaaaaa

SEQ ID NO: 6030614 - DNA, 25 bp, Homo sapien
tactcgaataactacattcatggga

SEQ ID NO: 6030615 - DNA, 25 bp, Homo sapien
acttttgaataatgaaatatgggct

SEQ ID NO: 6030616 - DNA, 25 bp, Homo sapien
attgagaatagggttgatggctatc

SEQ ID NO: 6030617 - DNA, 25 bp, Homo sapien
gttttatccaggtttagatcaggac

SEQ ID NO: 6030618 - DNA, 25 bp, Homo sapien
ggtgtaaaatcggaatagattccat

SEQ ID NO: 6030619 - DNA, 25 bp, Homo sapien
cgtggtgatgattggctgcttaaca

SEQ ID NO: 6030620 - DNA, 25 bp, Homo sapien
tcacttgcaagggccaaaccaggaa

SEQ ID NO: 6030621 - DNA, 25 bp, Homo sapien
cgatgaaacgttgatggaaaaaatg

SEQ ID NO: 6030622 - DNA, 25 bp, Homo sapien
catgggaagtcgctaccgcaacagc

SEQ ID NO: 6030623 - DNA, 25 bp, Homo sapien
tttcctgttcatctgggccaattct

SEQ ID NO: 6030624 - DNA, 25 bp, Homo sapien
ctggatacagaacgaaaatttgact

SEQ ID NO: 6030625 - DNA, 25 bp, Homo sapien
tgaaatatgggctaaaaagtttaga

SEQ ID NO: 6030626 - DNA, 25 bp, Homo sapien
tgccactacgccatttgggtgtaaa

SEQ ID NO: 6030627 - DNA, 25 bp, Homo sapien
tggatagattgatctccaaaccagg

SEQ ID NO: 6030628 - DNA, 25 bp, Homo sapien
cgaaaatttgactttcgacgtggtg

SEQ ID NO: 6030629 - DNA, 25 bp, Homo sapien
caacagtcacttgcaagggccaaac

SEQ ID NO: 6030630 - DNA, 25 bp, Homo sapien
gaatcactggatacagaacgaaaat

SEQ ID NO: 6030631 - DNA, 25 bp, Homo sapien
ctaaacacgtatcattcaaaccctc

SEQ ID NO: 6030632 - DNA, 25 bp, Homo sapien
tagaaatgaaatctaaacacgtatc

SEQ ID NO: 6030633 - DNA, 25 bp, Homo sapien
tccaggtttagatcaggacgatgaa

SEQ ID NO: 6030634 - DNA, 25 bp, Homo sapien
gctatccaaaacttcagaaattatt

SEQ ID NO: 6030635 - DNA, 25 bp, Homo sapien
catacaaacgattactcgaataact

SEQ ID NO: 6030636 - DNA, 25 bp, Homo sapien
aaatcggaatagattccattgttcc

SEQ ID NO: 6030637 - DNA, 25 bp, Homo sapien
tctagagacttccatacaaacgatt

SEQ ID NO: 6030638 - DNA, 25 bp, Homo sapien
ccattgcattttttccatcaacgtt

SEQ ID NO: 6030639 - DNA, 25 bp, Homo sapien
ctagtcgcggtagagaagttttctg

SEQ ID NO: 6030640 - DNA, 25 bp, Homo sapien
agcccatatttcattattcaaaagt

SEQ ID NO: 6030641 - DNA, 25 bp, Homo sapien
tagtaagttcattgattttttgaga

SEQ ID NO: 6030642 - DNA, 25 bp, Homo sapien
acctggtttggagatcaatctatcc

SEQ ID NO: 6030643 - DNA, 25 bp, Homo sapien
gcaatacgatacaaatgggatggta

SEQ ID NO: 6030644 - DNA, 25 bp, Homo sapien
aacggtgatttcttgtcaataggaa

SEQ ID NO: 6030645 - DNA, 25 bp, Homo sapien
gtcttactttgacgggtgtctcgta

SEQ ID NO: 6030646 - DNA, 25 bp, Homo sapien
aatatgtaatcgtctagtcgcggta

SEQ ID NO: 6030647 - DNA, 25 bp, Homo sapien
caacgtttcatcgtcctgatctaaa

SEQ ID NO: 6030648 - DNA, 25 bp, Homo sapien
gggtgtctcgtaaccagtccttgca

SEQ ID NO: 6030649 - DNA, 25 bp, Homo sapien
agttatccaacataacatctgggct

SEQ ID NO: 6030650 - DNA, 25 bp, Homo sapien
aaataaactgattttctgttaagca

SEQ ID NO: 6030651 - DNA, 25 bp, Homo sapien
tcttgggtgagaagttatccaacat

SEQ ID NO: 6030652 - DNA, 25 bp, Homo sapien
tcaatctcattttttaatgggatat

SEQ ID NO: 6030653 - DNA, 25 bp, Homo sapien
acctggataaaacggtgatttcttg

SEQ ID NO: 6030654 - DNA, 25 bp, Homo sapien
aatgggatattcgaacctaaattag

SEQ ID NO: 6030655 - DNA, 25 bp, Homo sapien
tctatccaatggcaattgggttaaa

SEQ ID NO: 6030656 - DNA, 25 bp, Homo sapien
tcattttttaatgggatattcgaac

SEQ ID NO: 6030657 - DNA, 25 bp, Homo sapien
gatttcttgtcaataggaacaaaaa

SEQ ID NO: 6030658 - DNA, 25 bp, Homo sapien
tctaaactttttagcccatatttca

SEQ ID NO: 6030659 - DNA, 25 bp, Homo sapien
ctcgtaaccagtccttgcaggaata

SEQ ID NO: 6030660 - DNA, 25 bp, Homo sapien
gtttcgatactcaagtcagtgtcta

SEQ ID NO: 6030661 - DNA, 25 bp, Homo sapien
gatcaatctatccaatggcaattgg

SEQ ID NO: 6030662 - DNA, 25 bp, Homo sapien
tcttaacagctcaatctcatttttt

SEQ ID NO: 6030663 - DNA, 25 bp, Homo sapien
tacctgtgatacacatccaacagtg

SEQ ID NO: 6030664 - DNA, 25 bp, Homo sapien
ctatctcttctttatatctcttggg

SEQ ID NO: 6030665 - DNA, 25 bp, Homo sapien
ttactgtacctgtgatacacatcca

SEQ ID NO: 6030666 - DNA, 25 bp, Homo sapien
taacccagccaggtcttactttgac

SEQ ID NO: 6030667 - DNA, 25 bp, Homo sapien
tccttcgtttcgatactcaagtcag

SEQ ID NO: 6030668 - DNA, 25 bp, Homo sapien
taagatgtccatctgtagacctcct

SEQ ID NO: 6030669 - DNA, 25 bp, Homo sapien
gtccatctgtagacctccttactgt

SEQ ID NO: 6030670 - DNA, 25 bp, Homo sapien
ccttgcaggaataatatgtaatcgt

SEQ ID NO: 6030671 - DNA, 25 bp, Homo sapien
aagtcagtgtctacgttacaatgaa

SEQ ID NO: 6030672 - DNA, 25 bp, Homo sapien
caaaagtttagtaagttcattgatt

SEQ ID NO: 6030673 - DNA, 25 bp, Homo sapien
caaaaaccaattcttcacttcttct

SEQ ID NO: 6030674 - DNA, 25 bp, Homo sapien
taacatctgggctcactataaccca

SEQ ID NO: 6030675 - DNA, 25 bp, Homo sapien
atctaaacctggataaaacggtgat

SEQ ID NO: 6030676 - DNA, 25 bp, Homo sapien
aggaataatatgtaatcgtctagtc

SEQ ID NO: 6030677 - DNA, 25 bp, Homo sapien
gcccagatgaacaggaaacctggtt

SEQ ID NO: 6030678 - DNA, 25 bp, Homo sapien
ttcatcgtcctgatctaaacctgga

SEQ ID NO: 6030679 - DNA, 25 bp, Homo sapien
gaacctaaattagctatctcttctt

SEQ ID NO: 6030680 - DNA, 25 bp, Homo sapien
cgatacaaatgggatggtacagcac

SEQ ID NO: 6030681 - DNA, 25 bp, Homo sapien
tgatacacatccaacagtgccattg

SEQ ID NO: 6030682 - DNA, 25 bp, Homo sapien
gtcctgatctaaacctggataaaac

SEQ ID NO: 6030683 - DNA, 25 bp, Homo sapien
aggaaacctggtttggagatcaatc

SEQ ID NO: 6030684 - DNA, 25 bp, Homo sapien
taatcgtctagtcgcggtagagaag

SEQ ID NO: 6030685 - DNA, 25 bp, Homo sapien
gagaagttttctgcaatacgataca

SEQ ID NO: 6030686 - DNA, 25 bp, Homo sapien
acctccttactgtacctgtgataca

SEQ ID NO: 6030687 - DNA, 25 bp, Homo sapien
cttctttatatctcttgggtgagaa

SEQ ID NO: 6030688 - DNA, 25 bp, Homo sapien
gcggtagagaagttttctgcaatac

SEQ ID NO: 6030689 - DNA, 25 bp, Homo sapien
gtgagaagttatccaacataacatc

SEQ ID NO: 6030690 - DNA, 25 bp, Homo sapien
tcactataacccagccaggtcttac

SEQ ID NO: 6030691 - DNA, 25 bp, Homo sapien
gaattggcccagatgaacaggaaac

SEQ ID NO: 6030692 - DNA, 25 bp, Homo sapien
caatgaataagatgtccatctgtag

SEQ ID NO: 6030693 - DNA, 25 bp, Homo sapien
attgattttttgagaattggcccag

SEQ ID NO: 6030694 - DNA, 25 bp, Homo sapien
atgaacaggaaacctggtttggaga

SEQ ID NO: 6030695 - DNA, 25 bp, Homo sapien
atattcgaacctaaattagctatct

SEQ ID NO: 6030696 - DNA, 25 bp, Homo sapien
agccaggtcttactttgacgggtgt

SEQ ID NO: 6030697 - DNA, 25 bp, Homo sapien
ctgggctcactataacccagccagg

SEQ ID NO: 6030698 - DNA, 25 bp, Homo sapien
tatatctcttgggtgagaagttatc

SEQ ID NO: 6030699 - DNA, 25 bp, Homo sapien
tatttcattattcaaaagtttagta

SEQ ID NO: 6030700 - DNA, 25 bp, Homo sapien
aaatgggatggtacagcaccattag

SEQ ID NO: 6030701 - DNA, 25 bp, Homo sapien
tgtcaataggaacaaaaaccaattc

SEQ ID NO: 6030702 - DNA, 25 bp, Homo sapien
tttgacgggtgtctcgtaaccagtc

SEQ ID NO: 6030703 - DNA, 25 bp, Homo sapien
agttcattgattttttgagaattgg

SEQ ID NO: 6030704 - DNA, 25 bp, Homo sapien
accagtccttgcaggaataatatgt

SEQ ID NO: 6030705 - DNA, 25 bp, Homo sapien
caattcttcacttcttctaaacttt

SEQ ID NO: 6030706 - DNA, 25 bp, Homo sapien
acatccaacagtgccattgcatttt

SEQ ID NO: 6030707 - DNA, 25 bp, Homo sapien
gatggtacagcaccattagtggtgt

SEQ ID NO: 6030708 - DNA, 25 bp, Homo sapien
ccaacataacatctgggctcactat

SEQ ID NO: 6030709 - DNA, 25 bp, Homo sapien
acagtgccattgcattttttccatc

SEQ ID NO: 6030710 - DNA, 25 bp, Homo sapien
acagcaccattagtggtgtccttcg

SEQ ID NO: 6030711 - DNA, 25 bp, Homo sapien
acgttacaatgaataagatgtccat

SEQ ID NO: 6030712 - DNA, 25 bp, Homo sapien
aattagctatctcttctttatatct

SEQ ID NO: 6030713 - DNA, 25 bp, Homo sapien
tttttgagaattggcccagatgaac

SEQ ID NO: 6030714 - DNA, 25 bp, Homo sapien
gtgtctacgttacaatgaataagat

SEQ ID NO: 6030715 - DNA, 25 bp, Homo sapien
ccattagtggtgtccttcgtttcga

SEQ ID NO: 6030716 - DNA, 25 bp, Homo sapien
ttttctgcaatacgatacaaatggg

SEQ ID NO: 6030717 - DNA, 25 bp, Homo sapien
atactcaagtcagtgtctacgttac

SEQ ID NO: 6030718 - DNA, 25 bp, Homo sapien
ctttttagcccatatttcattattc

SEQ ID NO: 6030719 - DNA, 25 bp, Homo sapien
tttggagatcaatctatccaatggc

SEQ ID NO: 6030720 - DNA, 25 bp, Homo sapien
caatggcaattgggttaaaattggg

SEQ ID NO: 6030721 - DNA, 25 bp, Homo sapien
ttccatcaacgtttcatcgtcctga

SEQ ID NO: 6030722 - DNA, 25 bp, Homo sapien
attgggtaaataaactgattttctg

SEQ ID NO: 6030723 - DNA, 25 bp, Homo sapien
ctgtagacctccttactgtacctgt

SEQ ID NO: 6030724 - DNA, 25 bp, Homo sapien
aacagctcaatctcattttttaatg

SEQ ID NO: 6030725 - DNA, 25 bp, Homo sapien
cattttttccatcaacgtttcatcg

SEQ ID NO: 6030726 - DNA, 25 bp, Homo sapien
gtggtgtccttcgtttcgatactca

SEQ ID NO: 6030727 - DNA, 25 bp, Homo sapien
ggataaaacggtgatttcttgtcaa

SEQ ID NO: 6030728 - DNA, 25 bp, Homo sapien
agcattgtacgcacaaggtttgtct

SEQ ID NO: 6030729 - DNA, 25 bp, Homo sapien
cagggtactggtttcgtcaaaattg

SEQ ID NO: 6030730 - DNA, 25 bp, Homo sapien
agttcgctcttatctgcaaatatct

SEQ ID NO: 6030731 - DNA, 25 bp, Homo sapien
ggacattatgattggtgatgaggca

SEQ ID NO: 6030732 - DNA, 25 bp, Homo sapien
tttgggattacgcctttttcgagca

SEQ ID NO: 6030733 - DNA, 25 bp, Homo sapien
tgaaaaatagggaaaaaatgtgtga

SEQ ID NO: 6030734 - DNA, 25 bp, Homo sapien
tgaggtaatgttcgaaaaatacgat

SEQ ID NO: 6030735 - DNA, 25 bp, Homo sapien
gattacgcctttttcgagcaaatga

SEQ ID NO: 6030736 - DNA, 25 bp, Homo sapien
atcttgagggcggaagaacgtgcca

SEQ ID NO: 6030737 - DNA, 25 bp, Homo sapien
gagaatttcccagattacacgtttc

SEQ ID NO: 6030738 - DNA, 25 bp, Homo sapien
tcgagcaaatgaaactaccatccac

SEQ ID NO: 6030739 - DNA, 25 bp, Homo sapien
gggcggaagaacgtgccagcgttgc

SEQ ID NO: 6030740 - DNA, 25 bp, Homo sapien
ccacttaacaagaagattagatgtt

SEQ ID NO: 6030741 - DNA, 25 bp, Homo sapien
ttccggtgacggtgttactcatata

SEQ ID NO: 6030742 - DNA, 25 bp, Homo sapien
ccagattacacgtttccttctattg

SEQ ID NO: 6030743 - DNA, 25 bp, Homo sapien
tttgtcttcaggagtcgtcgtcgat

SEQ ID NO: 6030744 - DNA, 25 bp, Homo sapien
ttcaggagtcgtcgtcgattccggt

SEQ ID NO: 6030745 - DNA, 25 bp, Homo sapien
gtttacgaatctgtcgttttgagcc

SEQ ID NO: 6030746 - DNA, 25 bp, Homo sapien
aagtgaagttcgctcttatctgcaa

SEQ ID NO: 6030747 - DNA, 25 bp, Homo sapien
ttactaacggaacctccaatgaatc

SEQ ID NO: 6030748 - DNA, 25 bp, Homo sapien
tatcctatggaaaacggtattatta

SEQ ID NO: 6030749 - DNA, 25 bp, Homo sapien
cgtcgattccggtgacggtgttact

SEQ ID NO: 6030750 - DNA, 25 bp, Homo sapien
aagaacgtgccagcgttgctacacc

SEQ ID NO: 6030751 - DNA, 25 bp, Homo sapien
gcgttgctacaccattaaaggacat

SEQ ID NO: 6030752 - DNA, 25 bp, Homo sapien
acggaacctccaatgaatccgctga

SEQ ID NO: 6030753 - DNA, 25 bp, Homo sapien
tcatatagtcccagtttacgaatct

SEQ ID NO: 6030754 - DNA, 25 bp, Homo sapien
ccaagctgttctagcattgtacgca

SEQ ID NO: 6030755 - DNA, 25 bp, Homo sapien
cgggtagagacgttactaggcattt

SEQ ID NO: 6030756 - DNA, 25 bp, Homo sapien
aagattagatgttgcgggtagagac

SEQ ID NO: 6030757 - DNA, 25 bp, Homo sapien
tatgattggtgatgaggcaagtgaa

SEQ ID NO: 6030758 - DNA, 25 bp, Homo sapien
cggagtttatgttgccatccaagct

SEQ ID NO: 6030759 - DNA, 25 bp, Homo sapien
ttactaggcatttgattgatctgct

SEQ ID NO: 6030760 - DNA, 25 bp, Homo sapien
catccacctccaacggtaagatttt

SEQ ID NO: 6030761 - DNA, 25 bp, Homo sapien
cggtattattaagaattggacagat

SEQ ID NO: 6030762 - DNA, 25 bp, Homo sapien
tttccttctattgttggtagaccca

SEQ ID NO: 6030763 - DNA, 25 bp, Homo sapien
gtcgttttgagccacttaacaagaa

SEQ ID NO: 6030764 - DNA, 25 bp, Homo sapien
aatgtgtgaggtaatgttcgaaaaa

SEQ ID NO: 6030765 - DNA, 25 bp, Homo sapien
tgaatccgctgaaaaatagggaaaa

SEQ ID NO: 6030766 - DNA, 25 bp, Homo sapien
gcctttttcgagcaaatgaaactac

SEQ ID NO: 6030767 - DNA, 25 bp, Homo sapien
aaatgaaactaccatccacctccaa

SEQ ID NO: 6030768 - DNA, 25 bp, Homo sapien
ggaaaaaatgtgtgaggtaatgttc

SEQ ID NO: 6030769 - DNA, 25 bp, Homo sapien
agtcccagtttacgaatctgtcgtt

SEQ ID NO: 6030770 - DNA, 25 bp, Homo sapien
atatcttatcctatggaaaacggta

SEQ ID NO: 6030771 - DNA, 25 bp, Homo sapien
tgttactcatatagtcccagtttac

SEQ ID NO: 6030772 - DNA, 25 bp, Homo sapien
cctccaatgaatccgctgaaaaata

SEQ ID NO: 6030773 - DNA, 25 bp, Homo sapien
aattggacagatatggaacttcttt

SEQ ID NO: 6030774 - DNA, 25 bp, Homo sapien
acaaggtttgtcttcaggagtcgtc

SEQ ID NO: 6030775 - DNA, 25 bp, Homo sapien
gtgccagcgttgctacaccattaaa

SEQ ID NO: 6030776 - DNA, 25 bp, Homo sapien
cattaaaggacattatgattggtga

SEQ ID NO: 6030777 - DNA, 25 bp, Homo sapien
ctttctcgtcgtggttatgcattta

SEQ ID NO: 6030778 - DNA, 25 bp, Homo sapien
aacaagaagattagatgttgcgggt

SEQ ID NO: 6030779 - DNA, 25 bp, Homo sapien
gctggcgagaatttcccagattaca

SEQ ID NO: 6030780 - DNA, 25 bp, Homo sapien
gcatttaacagaactgcagatttcg

SEQ ID NO: 6030781 - DNA, 25 bp, Homo sapien
tgccatccaagctgttctagcattg

SEQ ID NO: 6030782 - DNA, 25 bp, Homo sapien
aaaattggtcgtgctggcgagaatt

SEQ ID NO: 6030783 - DNA, 25 bp, Homo sapien
gtacgcacaaggtttgtcttcagga

SEQ ID NO: 6030784 - DNA, 25 bp, Homo sapien
tcttatctgcaaatatcttatccta

SEQ ID NO: 6030785 - DNA, 25 bp, Homo sapien
tgttctagcattgtacgcacaaggt

SEQ ID NO: 6030786 - DNA, 25 bp, Homo sapien
agtcgtcgtcgattccggtgacggt

SEQ ID NO: 6030787 - DNA, 25 bp, Homo sapien
attaagaattggacagatatggaac

SEQ ID NO: 6030788 - DNA, 25 bp, Homo sapien
ctgcaaatatcttatcctatggaaa

SEQ ID NO: 6030789 - DNA, 25 bp, Homo sapien
atggaacttctttgggattacgcct

SEQ ID NO: 6030790 - DNA, 25 bp, Homo sapien
gaatctgtcgttttgagccacttaa

SEQ ID NO: 6030791 - DNA, 25 bp, Homo sapien
tggtgatgaggcaagtgaagttcgc

SEQ ID NO: 6030792 - DNA, 25 bp, Homo sapien
ctacaccattaaaggacattatgat

SEQ ID NO: 6030793 - DNA, 25 bp, Homo sapien
tacacgtttccttctattgttggta

SEQ ID NO: 6030794 - DNA, 25 bp, Homo sapien
gagacgttactaggcatttgattga

SEQ ID NO: 6030795 - DNA, 25 bp, Homo sapien
tgattgatctgctttctcgtcgtgg

SEQ ID NO: 6030796 - DNA, 25 bp, Homo sapien
ttttggcggagtttatgttgccatc

SEQ ID NO: 6030797 - DNA, 25 bp, Homo sapien
atagggaaaaaatgtgtgaggtaat

SEQ ID NO: 6030798 - DNA, 25 bp, Homo sapien
actggtttcgtcaaaattggtcgtg

SEQ ID NO: 6030799 - DNA, 25 bp, Homo sapien
agacccatcttgagggcggaagaac

SEQ ID NO: 6030800 - DNA, 25 bp, Homo sapien
tgttggtagacccatcttgagggcg

SEQ ID NO: 6030801 - DNA, 25 bp, Homo sapien
tgaggcaagtgaagttcgctcttat

SEQ ID NO: 6030802 - DNA, 25 bp, Homo sapien
acagatatggaacttctttgggatt

SEQ ID NO: 6030803 - DNA, 25 bp, Homo sapien
gatctgctttctcgtcgtggttatg

SEQ ID NO: 6030804 - DNA, 25 bp, Homo sapien
atacgattttggcggagtttatgtt

SEQ ID NO: 6030805 - DNA, 25 bp, Homo sapien
tttgagccacttaacaagaagatta

SEQ ID NO: 6030806 - DNA, 25 bp, Homo sapien
ggcatttgattgatctgctttctcg

SEQ ID NO: 6030807 - DNA, 25 bp, Homo sapien
atgttcgaaaaatacgattttggcg

SEQ ID NO: 6030808 - DNA, 25 bp, Homo sapien
ttcgtcaaaattggtcgtgctggcg

SEQ ID NO: 6030809 - DNA, 25 bp, Homo sapien
ttatgttgccatccaagctgttcta

SEQ ID NO: 6030810 - DNA, 25 bp, Homo sapien
actaccatccacctccaacggtaag

SEQ ID NO: 6030811 - DNA, 25 bp, Homo sapien
tgacggtgttactcatatagtccca

SEQ ID NO: 6030812 - DNA, 25 bp, Homo sapien
atgttgcgggtagagacgttactag

SEQ ID NO: 6030813 - DNA, 25 bp, Homo sapien
ggtcgtgctggcgagaatttcccag

SEQ ID NO: 6030814 - DNA, 25 bp, Homo sapien
cgtcgtggttatgcatttaacagaa

SEQ ID NO: 6030815 - DNA, 25 bp, Homo sapien
ggttatgcatttaacagaactgcag

SEQ ID NO: 6030816 - DNA, 25 bp, Homo sapien
ttctattgttggtagacccatcttg

SEQ ID NO: 6030817 - DNA, 25 bp, Homo sapien
ctgttaaatgcataaccacgacgag

SEQ ID NO: 6030818 - DNA, 25 bp, Homo sapien
acattctggtgcttcaaatctctct

SEQ ID NO: 6030819 - DNA, 25 bp, Homo sapien
gaaagcagatcaatcaaatgcctag

SEQ ID NO: 6030820 - DNA, 25 bp, Homo sapien
tcctgccatctggtaactcatacga

SEQ ID NO: 6030821 - DNA, 25 bp, Homo sapien
gcagttctgttaaatgcataaccac

SEQ ID NO: 6030822 - DNA, 25 bp, Homo sapien
tgtttcaattctttctctaatctcg

SEQ ID NO: 6030823 - DNA, 25 bp, Homo sapien
cttgtcccactttgattgtcctgcc

SEQ ID NO: 6030824 - DNA, 25 bp, Homo sapien
cgacgagaaagcagatcaatcaaat

SEQ ID NO: 6030825 - DNA, 25 bp, Homo sapien
caagggcggttgtttctctagccaa

SEQ ID NO: 6030826 - DNA, 25 bp, Homo sapien
tagccaattttgtatctaggtctaa

SEQ ID NO: 6030827 - DNA, 25 bp, Homo sapien
gtttcgaaatctgcagttctgttaa

SEQ ID NO: 6030828 - DNA, 25 bp, Homo sapien
acatcagccgattgcacagtattaa

SEQ ID NO: 6030829 - DNA, 25 bp, Homo sapien
gccgattgcacagtattaaataaca

SEQ ID NO: 6030830 - DNA, 25 bp, Homo sapien
agaacaatggccttatacagggaac

SEQ ID NO: 6030831 - DNA, 25 bp, Homo sapien
aatttatcaagtcttgaagggtcat

SEQ ID NO: 6030832 - DNA, 25 bp, Homo sapien
ccatatgctttctccttggaggatc

SEQ ID NO: 6030833 - DNA, 25 bp, Homo sapien
gccaggttgttcaacgtcaaccaaa

SEQ ID NO: 6030834 - DNA, 25 bp, Homo sapien
tttctctagccaattttgtatctag

SEQ ID NO: 6030835 - DNA, 25 bp, Homo sapien
ctaaaccataattgtttcaattctt

SEQ ID NO: 6030836 - DNA, 25 bp, Homo sapien
catctggtaactcatacgattccac

SEQ ID NO: 6030837 - DNA, 25 bp, Homo sapien
tcaacgtcaaccaaaccaggttgga

SEQ ID NO: 6030838 - DNA, 25 bp, Homo sapien
tatcagccatgatactagctaaaac

SEQ ID NO: 6030839 - DNA, 25 bp, Homo sapien
gaaccacctgaaagaacaatggcct

SEQ ID NO: 6030840 - DNA, 25 bp, Homo sapien
gctttctccttggaggatcttcaat

SEQ ID NO: 6030841 - DNA, 25 bp, Homo sapien
aaatctgcagttctgttaaatgcat

SEQ ID NO: 6030842 - DNA, 25 bp, Homo sapien
ggtctaaatcatatgaaacataaca

SEQ ID NO: 6030843 - DNA, 25 bp, Homo sapien
taaccacgacgagaaagcagatcaa

SEQ ID NO: 6030844 - DNA, 25 bp, Homo sapien
tgattgtcctgccatctggtaactc

SEQ ID NO: 6030845 - DNA, 25 bp, Homo sapien
attctaactttgaatttatcaagtc

SEQ ID NO: 6030846 - DNA, 25 bp, Homo sapien
cgcacagtttcgaaatctgcagttc

SEQ ID NO: 6030847 - DNA, 25 bp, Homo sapien
ggtcattgtgtaaaactctactaaa

SEQ ID NO: 6030848 - DNA, 25 bp, Homo sapien
gaacaaacattctggtgcttcaaat

SEQ ID NO: 6030849 - DNA, 25 bp, Homo sapien
tgaaaaccatatgctttctccttgg

SEQ ID NO: 6030850 - DNA, 25 bp, Homo sapien
tccttggaggatcttcaattctaac

SEQ ID NO: 6030851 - DNA, 25 bp, Homo sapien
atactagctaaaacggcaccaccaa

SEQ ID NO: 6030852 - DNA, 25 bp, Homo sapien
caaaccaggttggaacaaacattct

SEQ ID NO: 6030853 - DNA, 25 bp, Homo sapien
tatctaggtctaaatcatatgaaac

SEQ ID NO: 6030854 - DNA, 25 bp, Homo sapien
ttcaaatctctcttgtcccactttg

SEQ ID NO: 6030855 - DNA, 25 bp, Homo sapien
ccgctttcttgccattcttgcttag

SEQ ID NO: 6030856 - DNA, 25 bp, Homo sapien
cataattgtttcaattctttctcta

SEQ ID NO: 6030857 - DNA, 25 bp, Homo sapien
atatcaacatcagccgattgcacag

SEQ ID NO: 6030858 - DNA, 25 bp, Homo sapien
cacatgtggtctttatcagccatga

SEQ ID NO: 6030859 - DNA, 25 bp, Homo sapien
agggaacttctgatatcaacatcag

SEQ ID NO: 6030860 - DNA, 25 bp, Homo sapien
attttgtatctaggtctaaatcata

SEQ ID NO: 6030861 - DNA, 25 bp, Homo sapien
cattcttgcttagacaaccacatgt

SEQ ID NO: 6030862 - DNA, 25 bp, Homo sapien
gccatgatactagctaaaacggcac

SEQ ID NO: 6030863 - DNA, 25 bp, Homo sapien
ttctctaatctcgaaggcagccctg

SEQ ID NO: 6030864 - DNA, 25 bp, Homo sapien
agatcaatcaaatgcctagtaacgt

SEQ ID NO: 6030865 - DNA, 25 bp, Homo sapien
tcaagtcttgaagggtcattgtgta

SEQ ID NO: 6030866 - DNA, 25 bp, Homo sapien
gtattaaataacagctcgcccacgc

SEQ ID NO: 6030867 - DNA, 25 bp, Homo sapien
cctgaaagaacaatggccttataca

SEQ ID NO: 6030868 - DNA, 25 bp, Homo sapien
gcccacgccaggttgttcaacgtca

SEQ ID NO: 6030869 - DNA, 25 bp, Homo sapien
attccacaagggcggttgtttctct

SEQ ID NO: 6030870 - DNA, 25 bp, Homo sapien
ttgaagggtcattgtgtaaaactct

SEQ ID NO: 6030871 - DNA, 25 bp, Homo sapien
aggttggaacaaacattctggtgct

SEQ ID NO: 6030872 - DNA, 25 bp, Homo sapien
actttgaatttatcaagtcttgaag

SEQ ID NO: 6030873 - DNA, 25 bp, Homo sapien
aatttttcctttatctgacgcacag

SEQ ID NO: 6030874 - DNA, 25 bp, Homo sapien
tgcttagacaaccacatgtggtctt

SEQ ID NO: 6030875 - DNA, 25 bp, Homo sapien
tcttgccattcttgcttagacaacc

SEQ ID NO: 6030876 - DNA, 25 bp, Homo sapien
gggtacatacttgaaccacctgaaa

SEQ ID NO: 6030877 - DNA, 25 bp, Homo sapien
gacaaccacatgtggtctttatcag

SEQ ID NO: 6030878 - DNA, 25 bp, Homo sapien
cggttgtttctctagccaattttgt

SEQ ID NO: 6030879 - DNA, 25 bp, Homo sapien
aattctttctctaatctcgaaggca

SEQ ID NO: 6030880 - DNA, 25 bp, Homo sapien
tctctcttgtcccactttgattgtc

SEQ ID NO: 6030881 - DNA, 25 bp, Homo sapien
tgcctagtaacgtctctacccgcaa

SEQ ID NO: 6030882 - DNA, 25 bp, Homo sapien
aatgcataaccacgacgagaaagca

SEQ ID NO: 6030883 - DNA, 25 bp, Homo sapien
tggcccgctttcttgccattcttgc

SEQ ID NO: 6030884 - DNA, 25 bp, Homo sapien
tggtctttatcagccatgatactag

SEQ ID NO: 6030885 - DNA, 25 bp, Homo sapien
aatctcgaaggcagccctgggtaca

SEQ ID NO: 6030886 - DNA, 25 bp, Homo sapien
agctcgcccacgccaggttgttcaa

SEQ ID NO: 6030887 - DNA, 25 bp, Homo sapien
taacataatttttcctttatctgac

SEQ ID NO: 6030888 - DNA, 25 bp, Homo sapien
tcctttatctgacgcacagtttcga

SEQ ID NO: 6030889 - DNA, 25 bp, Homo sapien
cttctgatatcaacatcagccgatt

SEQ ID NO: 6030890 - DNA, 25 bp, Homo sapien
gtaactcatacgattccacaagggc

SEQ ID NO: 6030891 - DNA, 25 bp, Homo sapien
actctactaaaccataattgtttca

SEQ ID NO: 6030892 - DNA, 25 bp, Homo sapien
aataacagctcgcccacgccaggtt

SEQ ID NO: 6030893 - DNA, 25 bp, Homo sapien
tggtgcttcaaatctctcttgtccc

SEQ ID NO: 6030894 - DNA, 25 bp, Homo sapien
gaggatcttcaattctaactttgaa

SEQ ID NO: 6030895 - DNA, 25 bp, Homo sapien
tgcacagtattaaataacagctcgc

SEQ ID NO: 6030896 - DNA, 25 bp, Homo sapien
gaaggcagccctgggtacatacttg

SEQ ID NO: 6030897 - DNA, 25 bp, Homo sapien
caccaatgaaaaccatatgctttct

SEQ ID NO: 6030898 - DNA, 25 bp, Homo sapien
atacttgaaccacctgaaagaacaa

SEQ ID NO: 6030899 - DNA, 25 bp, Homo sapien
agccctgggtacatacttgaaccac

SEQ ID NO: 6030900 - DNA, 25 bp, Homo sapien
cggcaccaccaatgaaaaccatatg

SEQ ID NO: 6030901 - DNA, 25 bp, Homo sapien
tgtgtaaaactctactaaaccataa

SEQ ID NO: 6030902 - DNA, 25 bp, Homo sapien
atctgacgcacagtttcgaaatctg

SEQ ID NO: 6030903 - DNA, 25 bp, Homo sapien
ccactttgattgtcctgccatctgg

SEQ ID NO: 6030904 - DNA, 25 bp, Homo sapien
catacgattccacaagggcggttgt

SEQ ID NO: 6030905 - DNA, 25 bp, Homo sapien
atcaaatgcctagtaacgtctctac

SEQ ID NO: 6030906 - DNA, 25 bp, Homo sapien
ttatacagggaacttctgatatcaa

SEQ ID NO: 6030907 - DNA, 25 bp, Homo sapien
gctaaaacggcaccaccaatgaaaa

SEQ ID NO: 6030908 - DNA, 25 bp, Homo sapien
atggccttatacagggaacttctga

SEQ ID NO: 6030909 - DNA, 25 bp, Homo sapien
gaatttccagaaagagaaacgaaga

SEQ ID NO: 6030910 - DNA, 25 bp, Homo sapien
attgcacggtgtctccttcaagaag

SEQ ID NO: 6030911 - DNA, 25 bp, Homo sapien
agctgtcaaggaaattaagaagttc

SEQ ID NO: 6030912 - DNA, 25 bp, Homo sapien
tatctggaagagaggtgtcaagggt

SEQ ID NO: 6030913 - DNA, 25 bp, Homo sapien
tcaagggtgttgaatacagattaag

SEQ ID NO: 6030914 - DNA, 25 bp, Homo sapien
aggtgtcaagggtgttgaatacaga

SEQ ID NO: 6030915 - DNA, 25 bp, Homo sapien
ccaagctatctggaagagaggtgtc

SEQ ID NO: 6030916 - DNA, 25 bp, Homo sapien
ctgttgttgtcgaagaagatgctta

SEQ ID NO: 6030917 - DNA, 25 bp, Homo sapien
gaagagaggtgtcaagggtgttgaa

SEQ ID NO: 6030918 - DNA, 25 bp, Homo sapien
tgtccgtctagctccagaattgaac

SEQ ID NO: 6030919 - DNA, 25 bp, Homo sapien
caagaagagagctccaagagctgtc

SEQ ID NO: 6030920 - DNA, 25 bp, Homo sapien
acacatgggtactgatgatgtccgt

SEQ ID NO: 6030921 - DNA, 25 bp, Homo sapien
taagaagttcgccaagttacacatg

SEQ ID NO: 6030922 - DNA, 25 bp, Homo sapien
ctccttcaagaagagagctccaaga

SEQ ID NO: 6030923 - DNA, 25 bp, Homo sapien
atacaccattaacttgcacaaaaga

SEQ ID NO: 6030924 - DNA, 25 bp, Homo sapien
cagaaagagaaacgaagaagaagac

SEQ ID NO: 6030925 - DNA, 25 bp, Homo sapien
ttgcttctgccaagggtctacaaac

SEQ ID NO: 6030926 - DNA, 25 bp, Homo sapien
gattaagattgagaatttccagaaa

SEQ ID NO: 6030927 - DNA, 25 bp, Homo sapien
gattgagaatttccagaaagagaaa

SEQ ID NO: 6030928 - DNA, 25 bp, Homo sapien
cattaacttgcacaaaagattgcac

SEQ ID NO: 6030929 - DNA, 25 bp, Homo sapien
ctgccaagggtctacaaactgttgt

SEQ ID NO: 6030930 - DNA, 25 bp, Homo sapien
gttcgccaagttacacatgggtact

SEQ ID NO: 6030931 - DNA, 25 bp, Homo sapien
caaggaaattaagaagttcgccaag

SEQ ID NO: 6030932 - DNA, 25 bp, Homo sapien
caaaagattgcacggtgtctccttc

SEQ ID NO: 6030933 - DNA, 25 bp, Homo sapien
tccaagagctgtcaaggaaattaag

SEQ ID NO: 6030934 - DNA, 25 bp, Homo sapien
attgaaccaagctatctggaagaga

SEQ ID NO: 6030935 - DNA, 25 bp, Homo sapien
tgatgatgtccgtctagctccagaa

SEQ ID NO: 6030936 - DNA, 25 bp, Homo sapien
agaacccattgttctcctacgttga

SEQ ID NO: 6030937 - DNA, 25 bp, Homo sapien
gggtactgatgatgtccgtctagct

SEQ ID NO: 6030938 - DNA, 25 bp, Homo sapien
gagaaacgaagaagaagacgccaag

SEQ ID NO: 6030939 - DNA, 25 bp, Homo sapien
tacaaactgttgttgtcgaagaaga

SEQ ID NO: 6030940 - DNA, 25 bp, Homo sapien
aacctgtcttagttgcttctgccaa

SEQ ID NO: 6030941 - DNA, 25 bp, Homo sapien
acgttgaacctgtcttagttgcttc

SEQ ID NO: 6030942 - DNA, 25 bp, Homo sapien
aagaagacgccaagaacccattgtt

SEQ ID NO: 6030943 - DNA, 25 bp, Homo sapien
cggtgtctccttcaagaagagagct

SEQ ID NO: 6030944 - DNA, 25 bp, Homo sapien
acgccaagaacccattgttctccta

SEQ ID NO: 6030945 - DNA, 25 bp, Homo sapien
tccagaattgaaccaagctatctgg

SEQ ID NO: 6030946 - DNA, 25 bp, Homo sapien
aatacagattaagattgagaatttc

SEQ ID NO: 6030947 - DNA, 25 bp, Homo sapien
cattgttctcctacgttgaacctgt

SEQ ID NO: 6030948 - DNA, 25 bp, Homo sapien
tcttagttgcttctgccaagggtct

SEQ ID NO: 6030949 - DNA, 25 bp, Homo sapien
tctcctacgttgaacctgtcttagt

SEQ ID NO: 6030950 - DNA, 25 bp, Homo sapien
agggtctacaaactgttgttgtcga

SEQ ID NO: 6030951 - DNA, 25 bp, Homo sapien
gtgttgaatacagattaagattgag

SEQ ID NO: 6030952 - DNA, 25 bp, Homo sapien
tctagctccagaattgaaccaagct

SEQ ID NO: 6030953 - DNA, 25 bp, Homo sapien
caagttacacatgggtactgatgat

SEQ ID NO: 6030954 - DNA, 25 bp, Homo sapien
cttgcacaaaagattgcacggtgtc

SEQ ID NO: 6030955 - DNA, 25 bp, Homo sapien
cgaagaagaagacgccaagaaccca

SEQ ID NO: 6030956 - DNA, 25 bp, Homo sapien
gagagctccaagagctgtcaaggaa

SEQ ID NO: 6030957 - DNA, 25 bp, Homo sapien
cttgacacctctcttccagatagct

SEQ ID NO: 6030958 - DNA, 25 bp, Homo sapien
tgggttcttggcgtcttcttcttcg

SEQ ID NO: 6030959 - DNA, 25 bp, Homo sapien
acaccgtgcaatcttttgtgcaagt

SEQ ID NO: 6030960 - DNA, 25 bp, Homo sapien
gctctcttcttgaaggagacaccgt

SEQ ID NO: 6030961 - DNA, 25 bp, Homo sapien
gaacaatgggttcttggcgtcttct

SEQ ID NO: 6030962 - DNA, 25 bp, Homo sapien
tacccatgtgtaacttggcgaactt

SEQ ID NO: 6030963 - DNA, 25 bp, Homo sapien
tggcgtcttcttcttcgtttctctt

SEQ ID NO: 6030964 - DNA, 25 bp, Homo sapien
acctctcttccagatagcttggttc

SEQ ID NO: 6030965 - DNA, 25 bp, Homo sapien
ttcaacgtaggagaacaatgggttc

SEQ ID NO: 6030966 - DNA, 25 bp, Homo sapien
cttggagctctcttcttgaaggaga

SEQ ID NO: 6030967 - DNA, 25 bp, Homo sapien
tcacgagtgacaacgtctttcaaac

SEQ ID NO: 6030968 - DNA, 25 bp, Homo sapien
ttcttgaaggagacaccgtgcaatc

SEQ ID NO: 6030969 - DNA, 25 bp, Homo sapien
aactaagacaggttcaacgtaggag

SEQ ID NO: 6030970 - DNA, 25 bp, Homo sapien
ttaatttccttgacagctcttggag

SEQ ID NO: 6030971 - DNA, 25 bp, Homo sapien
tccttgacagctcttggagctctct

SEQ ID NO: 6030972 - DNA, 25 bp, Homo sapien
ttggttcaattctggagctagacgg

SEQ ID NO: 6030973 - DNA, 25 bp, Homo sapien
aacacccttgacacctctcttccag

SEQ ID NO: 6030974 - DNA, 25 bp, Homo sapien
gatagcttggttcaattctggagct

SEQ ID NO: 6030975 - DNA, 25 bp, Homo sapien
gaacttcttaatttccttgacagct

SEQ ID NO: 6030976 - DNA, 25 bp, Homo sapien
tctggaaattctcaatcttaatctg

SEQ ID NO: 6030977 - DNA, 25 bp, Homo sapien
agacccttggcagaagcaactaaga

SEQ ID NO: 6030978 - DNA, 25 bp, Homo sapien
acagctcttggagctctcttcttga

SEQ ID NO: 6030979 - DNA, 25 bp, Homo sapien
taatctgtattcaacacccttgaca

SEQ ID NO: 6030980 - DNA, 25 bp, Homo sapien
gaagcaactaagacaggttcaacgt

SEQ ID NO: 6030981 - DNA, 25 bp, Homo sapien
ttggcagaagcaactaagacaggtt

SEQ ID NO: 6030982 - DNA, 25 bp, Homo sapien
ttcttcttcgtttctctttctggaa

SEQ ID NO: 6030983 - DNA, 25 bp, Homo sapien
tgtgtaacttggcgaacttcttaat

SEQ ID NO: 6030984 - DNA, 25 bp, Homo sapien
cttccagatagcttggttcaattct

SEQ ID NO: 6030985 - DNA, 25 bp, Homo sapien
cttttgtgcaagttaatggtgtatt

SEQ ID NO: 6030986 - DNA, 25 bp, Homo sapien
ttcgtttctctttctggaaattctc

SEQ ID NO: 6030987 - DNA, 25 bp, Homo sapien
tggagctagacggacatcatcagta

SEQ ID NO: 6030988 - DNA, 25 bp, Homo sapien
ttaatggtgtattcacgagtgacaa

SEQ ID NO: 6030989 - DNA, 25 bp, Homo sapien
tctctttctggaaattctcaatctt

SEQ ID NO: 6030990 - DNA, 25 bp, Homo sapien
aaggagacaccgtgcaatcttttgt

SEQ ID NO: 6030991 - DNA, 25 bp, Homo sapien
caatcttaatctgtattcaacaccc

SEQ ID NO: 6030992 - DNA, 25 bp, Homo sapien
tgcaatcttttgtgcaagttaatgg

SEQ ID NO: 6030993 - DNA, 25 bp, Homo sapien
cgtaggagaacaatgggttcttggc

SEQ ID NO: 6030994 - DNA, 25 bp, Homo sapien
gtgtattcacgagtgacaacgtctt

SEQ ID NO: 6030995 - DNA, 25 bp, Homo sapien
aattctcaatcttaatctgtattca

SEQ ID NO: 6030996 - DNA, 25 bp, Homo sapien
gtattcaacacccttgacacctctc

SEQ ID NO: 6030997 - DNA, 25 bp, Homo sapien
ctagacggacatcatcagtacccat

SEQ ID NO: 6030998 - DNA, 25 bp, Homo sapien
gtgacaacgtctttcaaaccggcca

SEQ ID NO: 6030999 - DNA, 25 bp, Homo sapien
caattctggagctagacggacatca

SEQ ID NO: 6031000 - DNA, 25 bp, Homo sapien
gacaggttcaacgtaggagaacaat

SEQ ID NO: 6031001 - DNA, 25 bp, Homo sapien
ggacatcatcagtacccatgtgtaa

SEQ ID NO: 6031002 - DNA, 25 bp, Homo sapien
tgcaagttaatggtgtattcacgag

SEQ ID NO: 6031003 - DNA, 25 bp, Homo sapien
catcagtacccatgtgtaacttggc

SEQ ID NO: 6031004 - DNA, 25 bp, Homo sapien
cttggcgaacttcttaatttccttg

SEQ ID NO: 6031005 - DNA, 25 bp, Homo sapien
acgtgttgcagttcgaggagaatgt

SEQ ID NO: 6031006 - DNA, 25 bp, Homo sapien
tacccaagtatatgggttttatgac

SEQ ID NO: 6031007 - DNA, 25 bp, Homo sapien
tgggttttatgacgaatgtttgaga

SEQ ID NO: 6031008 - DNA, 25 bp, Homo sapien
atacgaaggcgcgttctaatgacga

SEQ ID NO: 6031009 - DNA, 25 bp, Homo sapien
aatgcgagccactatcagaagacga

SEQ ID NO: 6031010 - DNA, 25 bp, Homo sapien
tcaattatcaccgactctcgacgaa

SEQ ID NO: 6031011 - DNA, 25 bp, Homo sapien
tgatgacggcaaaaataatacgaag

SEQ ID NO: 6031012 - DNA, 25 bp, Homo sapien
ctagttgccatgaaagtcagatatc

SEQ ID NO: 6031013 - DNA, 25 bp, Homo sapien
aattactatacttaggggcaatcac

SEQ ID NO: 6031014 - DNA, 25 bp, Homo sapien
tttgagaaagtacggcagtgcgaac

SEQ ID NO: 6031015 - DNA, 25 bp, Homo sapien
tacacggtcaattccatgacttgtt

SEQ ID NO: 6031016 - DNA, 25 bp, Homo sapien
cactaaaactgaccaatacaaatat

SEQ ID NO: 6031017 - DNA, 25 bp, Homo sapien
caaatataaatcagcttgaccaatg

SEQ ID NO: 6031018 - DNA, 25 bp, Homo sapien
gggtatagcagatcataaatcctcc

SEQ ID NO: 6031019 - DNA, 25 bp, Homo sapien
accaatggattgagcatttgagtaa

SEQ ID NO: 6031020 - DNA, 25 bp, Homo sapien
gtcctcgggtatagcagatcataaa

SEQ ID NO: 6031021 - DNA, 25 bp, Homo sapien
aaataatacgaaggcgcgttctaat

SEQ ID NO: 6031022 - DNA, 25 bp, Homo sapien
gtcaattccatgacttgttagaact

SEQ ID NO: 6031023 - DNA, 25 bp, Homo sapien
gatagaggatattattctgttgaga

SEQ ID NO: 6031024 - DNA, 25 bp, Homo sapien
ctgacaccaattaccttttcatggg

SEQ ID NO: 6031025 - DNA, 25 bp, Homo sapien
gtggtccttgtcctgacaccaatta

SEQ ID NO: 6031026 - DNA, 25 bp, Homo sapien
ttaccatttgtggtgacgtacacgg

SEQ ID NO: 6031027 - DNA, 25 bp, Homo sapien
cagatgaagagttggaagattttaa

SEQ ID NO: 6031028 - DNA, 25 bp, Homo sapien
ccaattaccttttcatgggtgatta

SEQ ID NO: 6031029 - DNA, 25 bp, Homo sapien
aactgaccaatacaaatataaatca

SEQ ID NO: 6031030 - DNA, 25 bp, Homo sapien
taaatcagcttgaccaatggattga

SEQ ID NO: 6031031 - DNA, 25 bp, Homo sapien
ggatattattctgttgagaccgtat

SEQ ID NO: 6031032 - DNA, 25 bp, Homo sapien
caaaccactaaaactgaccaataca

SEQ ID NO: 6031033 - DNA, 25 bp, Homo sapien
ttttcaagattggtggtccttgtcc

SEQ ID NO: 6031034 - DNA, 25 bp, Homo sapien
gactctcgacgaagacatgaatagt

SEQ ID NO: 6031035 - DNA, 25 bp, Homo sapien
tcataaatcctccaaaccactaaaa

SEQ ID NO: 6031036 - DNA, 25 bp, Homo sapien
cggcaaaaataatacgaaggcgcgt

SEQ ID NO: 6031037 - DNA, 25 bp, Homo sapien
tatacttaggggcaatcacgagtct

SEQ ID NO: 6031038 - DNA, 25 bp, Homo sapien
cacgagtctaggcagattacccaag

SEQ ID NO: 6031039 - DNA, 25 bp, Homo sapien
aagacgatgtagcacgactatgtaa

SEQ ID NO: 6031040 - DNA, 25 bp, Homo sapien
aaatggcggtggacgtgttgcagtt

SEQ ID NO: 6031041 - DNA, 25 bp, Homo sapien
tatgtaaaatggcggtggacgtgtt

SEQ ID NO: 6031042 - DNA, 25 bp, Homo sapien
acttgttagaacttttcaagattgg

SEQ ID NO: 6031043 - DNA, 25 bp, Homo sapien
atcaccgactctcgacgaagacatg

SEQ ID NO: 6031044 - DNA, 25 bp, Homo sapien
ttaacgtgcctgttaccatttgtgg

SEQ ID NO: 6031045 - DNA, 25 bp, Homo sapien
tacgtggatagaggatattattctg

SEQ ID NO: 6031046 - DNA, 25 bp, Homo sapien
atgttaaaccaattaacgtgcctgt

SEQ ID NO: 6031047 - DNA, 25 bp, Homo sapien
cgacgaagacatgaatagtgatgac

SEQ ID NO: 6031048 - DNA, 25 bp, Homo sapien
tcctccaaaccactaaaactgacca

SEQ ID NO: 6031049 - DNA, 25 bp, Homo sapien
agtatatgggttttatgacgaatgt

SEQ ID NO: 6031050 - DNA, 25 bp, Homo sapien
ttcgaggagaatgttaaaccaatta

SEQ ID NO: 6031051 - DNA, 25 bp, Homo sapien
ccacatagaattactatacttaggg

SEQ ID NO: 6031052 - DNA, 25 bp, Homo sapien
ccaatacaaatataaatcagcttga

SEQ ID NO: 6031053 - DNA, 25 bp, Homo sapien
ggcaatcacgagtctaggcagatta

SEQ ID NO: 6031054 - DNA, 25 bp, Homo sapien
agacatgaatagtgatgacggcaaa

SEQ ID NO: 6031055 - DNA, 25 bp, Homo sapien
tttgtggtgacgtacacggtcaatt

SEQ ID NO: 6031056 - DNA, 25 bp, Homo sapien
cttaggggcaatcacgagtctaggc

SEQ ID NO: 6031057 - DNA, 25 bp, Homo sapien
ttcagatgaagatcaattatcaccg

SEQ ID NO: 6031058 - DNA, 25 bp, Homo sapien
cgaatgtttgagaaagtacggcagt

SEQ ID NO: 6031059 - DNA, 25 bp, Homo sapien
accttttcatgggtgattacgtgga

SEQ ID NO: 6031060 - DNA, 25 bp, Homo sapien
tgcctgttaccatttgtggtgacgt

SEQ ID NO: 6031061 - DNA, 25 bp, Homo sapien
gttctaatgacgaagacacagatga

SEQ ID NO: 6031062 - DNA, 25 bp, Homo sapien
agcatttgagtaaatgcgagccact

SEQ ID NO: 6031063 - DNA, 25 bp, Homo sapien
aaccaattaacgtgcctgttaccat

SEQ ID NO: 6031064 - DNA, 25 bp, Homo sapien
ggattgagcatttgagtaaatgcga

SEQ ID NO: 6031065 - DNA, 25 bp, Homo sapien
gtgacgtacacggtcaattccatga

SEQ ID NO: 6031066 - DNA, 25 bp, Homo sapien
tatcagaagacgatgtagcacgact

SEQ ID NO: 6031067 - DNA, 25 bp, Homo sapien
gaatagtgatgacggcaaaaataat

SEQ ID NO: 6031068 - DNA, 25 bp, Homo sapien
gccatgaaagtcagatatccacata

SEQ ID NO: 6031069 - DNA, 25 bp, Homo sapien
tattctgttgagaccgtatcttacc

SEQ ID NO: 6031070 - DNA, 25 bp, Homo sapien
agattggtggtccttgtcctgacac

SEQ ID NO: 6031071 - DNA, 25 bp, Homo sapien
gagaatgttaaaccaattaacgtgc

SEQ ID NO: 6031072 - DNA, 25 bp, Homo sapien
tcttacctagttgccatgaaagtca

SEQ ID NO: 6031073 - DNA, 25 bp, Homo sapien
tccatgacttgttagaacttttcaa

SEQ ID NO: 6031074 - DNA, 25 bp, Homo sapien
tgagtaaatgcgagccactatcaga

SEQ ID NO: 6031075 - DNA, 25 bp, Homo sapien
cacgactatgtaaaatggcggtgga

SEQ ID NO: 6031076 - DNA, 25 bp, Homo sapien
aggcgcgttctaatgacgaagacac

SEQ ID NO: 6031077 - DNA, 25 bp, Homo sapien
atgtagcacgactatgtaaaatggc

SEQ ID NO: 6031078 - DNA, 25 bp, Homo sapien
agcagatcataaatcctccaaacca

SEQ ID NO: 6031079 - DNA, 25 bp, Homo sapien
agcttgaccaatggattgagcattt

SEQ ID NO: 6031080 - DNA, 25 bp, Homo sapien
gttgagaccgtatcttacctagttg

SEQ ID NO: 6031081 - DNA, 25 bp, Homo sapien
ggtgattacgtggatagaggatatt

SEQ ID NO: 6031082 - DNA, 25 bp, Homo sapien
accgtatcttacctagttgccatga

SEQ ID NO: 6031083 - DNA, 25 bp, Homo sapien
tagaacttttcaagattggtggtcc

SEQ ID NO: 6031084 - DNA, 25 bp, Homo sapien
atgacgaagacacagatgaagagtt

SEQ ID NO: 6031085 - DNA, 25 bp, Homo sapien
agatatccacatagaattactatac

SEQ ID NO: 6031086 - DNA, 25 bp, Homo sapien
gcagattacccaagtatatgggttt

SEQ ID NO: 6031087 - DNA, 25 bp, Homo sapien
gtctaggcagattacccaagtatat

SEQ ID NO: 6031088 - DNA, 25 bp, Homo sapien
ttgcagttcgaggagaatgttaaac

SEQ ID NO: 6031089 - DNA, 25 bp, Homo sapien
agccactatcagaagacgatgtagc

SEQ ID NO: 6031090 - DNA, 25 bp, Homo sapien
accggggtcctcgggtatagcagat

SEQ ID NO: 6031091 - DNA, 25 bp, Homo sapien
cggtggacgtgttgcagttcgagga

SEQ ID NO: 6031092 - DNA, 25 bp, Homo sapien
cttgtcctgacaccaattacctttt

SEQ ID NO: 6031093 - DNA, 25 bp, Homo sapien
ttcatgggtgattacgtggatagag

SEQ ID NO: 6031094 - DNA, 25 bp, Homo sapien
ttatgacgaatgtttgagaaagtac

SEQ ID NO: 6031095 - DNA, 25 bp, Homo sapien
aaagtcagatatccacatagaatta

SEQ ID NO: 6031096 - DNA, 25 bp, Homo sapien
tgaagatcaattatcaccgactctc

SEQ ID NO: 6031097 - DNA, 25 bp, Homo sapien
aagacacagatgaagagttggaaga

SEQ ID NO: 6031098 - DNA, 25 bp, Homo sapien
tggtgagctcttgctattagtgata

SEQ ID NO: 6031099 - DNA, 25 bp, Homo sapien
tgaccaaaagtgaagcctgcacctc

SEQ ID NO: 6031100 - DNA, 25 bp, Homo sapien
gaattgctcactgatgtcttgacca

SEQ ID NO: 6031101 - DNA, 25 bp, Homo sapien
attagtgtgattgaattgctcactg

SEQ ID NO: 6031102 - DNA, 25 bp, Homo sapien
accaattggtgagctcttgctatta

SEQ ID NO: 6031103 - DNA, 25 bp, Homo sapien
tctcggactgattccccatccgcct

SEQ ID NO: 6031104 - DNA, 25 bp, Homo sapien
tcgaatagatcggtaaacattttcc

SEQ ID NO: 6031105 - DNA, 25 bp, Homo sapien
acacgttcgcactgccgtactttct

SEQ ID NO: 6031106 - DNA, 25 bp, Homo sapien
aaataatcgaatagatcggtaaaca

SEQ ID NO: 6031107 - DNA, 25 bp, Homo sapien
atttggagcactgaaaatggtgaca

SEQ ID NO: 6031108 - DNA, 25 bp, Homo sapien
ctattgtctctatcatgggtgagag

SEQ ID NO: 6031109 - DNA, 25 bp, Homo sapien
tctgcctagactcgtgattgcccct

SEQ ID NO: 6031110 - DNA, 25 bp, Homo sapien
taggtcattagtgtgattgaattgc

SEQ ID NO: 6031111 - DNA, 25 bp, Homo sapien
tgctattagtgataggtcattagtg

SEQ ID NO: 6031112 - DNA, 25 bp, Homo sapien
tttcatccacctccataatagcggc

SEQ ID NO: 6031113 - DNA, 25 bp, Homo sapien
cataatagcggcctggttaccacat

SEQ ID NO: 6031114 - DNA, 25 bp, Homo sapien
tagtgataggtcattagtgtgattg

SEQ ID NO: 6031115 - DNA, 25 bp, Homo sapien
gcacttcctgtattctatttaaatc

SEQ ID NO: 6031116 - DNA, 25 bp, Homo sapien
agctcttgctattagtgataggtca

SEQ ID NO: 6031117 - DNA, 25 bp, Homo sapien
cagatggatcgtattgtaagaattg

SEQ ID NO: 6031118 - DNA, 25 bp, Homo sapien
cgcctctatcatcaggatcggacca

SEQ ID NO: 6031119 - DNA, 25 bp, Homo sapien
tcaaacattcgtcataaaacccata

SEQ ID NO: 6031120 - DNA, 25 bp, Homo sapien
tgcccctaagtatagtaattctatg

SEQ ID NO: 6031121 - DNA, 25 bp, Homo sapien
gatcgtattgtaagaattgcctatt

SEQ ID NO: 6031122 - DNA, 25 bp, Homo sapien
tgagaccaagaatatccttccatta

SEQ ID NO: 6031123 - DNA, 25 bp, Homo sapien
aacagaagattttattatccaccaa

SEQ ID NO: 6031124 - DNA, 25 bp, Homo sapien
tctctatcatgggtgagagacctcc

SEQ ID NO: 6031125 - DNA, 25 bp, Homo sapien
caagaatatccttccattaccaatt

SEQ ID NO: 6031126 - DNA, 25 bp, Homo sapien
attgtaagaattgcctattatggtt

SEQ ID NO: 6031127 - DNA, 25 bp, Homo sapien
taaacattttccacacgttcgcact

SEQ ID NO: 6031128 - DNA, 25 bp, Homo sapien
ttggttcaccgggtctcacagatgg

SEQ ID NO: 6031129 - DNA, 25 bp, Homo sapien
catagaaggtcacacattggacctt

SEQ ID NO: 6031130 - DNA, 25 bp, Homo sapien
attcgtcataaaacccatatacttg

SEQ ID NO: 6031131 - DNA, 25 bp, Homo sapien
agcggcctggttaccacatctataa

SEQ ID NO: 6031132 - DNA, 25 bp, Homo sapien
ttttccacacgttcgcactgccgta

SEQ ID NO: 6031133 - DNA, 25 bp, Homo sapien
cctgtattctatttaaatctctaac

SEQ ID NO: 6031134 - DNA, 25 bp, Homo sapien
caccgggtctcacagatggatcgta

SEQ ID NO: 6031135 - DNA, 25 bp, Homo sapien
cgtgattgcccctaagtatagtaat

SEQ ID NO: 6031136 - DNA, 25 bp, Homo sapien
ctggttaccacatctataacaataa

SEQ ID NO: 6031137 - DNA, 25 bp, Homo sapien
tagtaattctatgtggatatctgac

SEQ ID NO: 6031138 - DNA, 25 bp, Homo sapien
tccattaccaattggtgagctcttg

SEQ ID NO: 6031139 - DNA, 25 bp, Homo sapien
aggtcacacattggaccttcgtgag

SEQ ID NO: 6031140 - DNA, 25 bp, Homo sapien
gtgagagacctccatgcaaacagaa

SEQ ID NO: 6031141 - DNA, 25 bp, Homo sapien
tatggttttcatccacctccataat

SEQ ID NO: 6031142 - DNA, 25 bp, Homo sapien
acccatatacttgggtaatctgcct

SEQ ID NO: 6031143 - DNA, 25 bp, Homo sapien
cgtgaggcacttcctgtattctatt

SEQ ID NO: 6031144 - DNA, 25 bp, Homo sapien
cagtaacggggaaataatcgaatag

SEQ ID NO: 6031145 - DNA, 25 bp, Homo sapien
tgctggtgagaccaagaatatcctt

SEQ ID NO: 6031146 - DNA, 25 bp, Homo sapien
gtgacaacattttgctggtgagacc

SEQ ID NO: 6031147 - DNA, 25 bp, Homo sapien
catgcaaacagaagattttattatc

SEQ ID NO: 6031148 - DNA, 25 bp, Homo sapien
acattttgctggtgagaccaagaat

SEQ ID NO: 6031149 - DNA, 25 bp, Homo sapien
gggtaatctgcctagactcgtgatt

SEQ ID NO: 6031150 - DNA, 25 bp, Homo sapien
agaattgcctattatggttttcatc

SEQ ID NO: 6031151 - DNA, 25 bp, Homo sapien
agattttattatccaccaaggcagt

SEQ ID NO: 6031152 - DNA, 25 bp, Homo sapien
catccgcctctatcatcaggatcgg

SEQ ID NO: 6031153 - DNA, 25 bp, Homo sapien
accacatctataacaataatttgga

SEQ ID NO: 6031154 - DNA, 25 bp, Homo sapien
ttctatgtggatatctgactttcat

SEQ ID NO: 6031155 - DNA, 25 bp, Homo sapien
tgccgtactttctcaaacattcgtc

SEQ ID NO: 6031156 - DNA, 25 bp, Homo sapien
gtgattgaattgctcactgatgtct

SEQ ID NO: 6031157 - DNA, 25 bp, Homo sapien
taaatctctaacttgatctattgtc

SEQ ID NO: 6031158 - DNA, 25 bp, Homo sapien
acaataatttggagcactgaaaatg

SEQ ID NO: 6031159 - DNA, 25 bp, Homo sapien
cacctccataatagcggcctggtta

SEQ ID NO: 6031160 - DNA, 25 bp, Homo sapien
aagcctgcacctctcggactgattc

SEQ ID NO: 6031161 - DNA, 25 bp, Homo sapien
gatgtcttgaccaaaagtgaagcct

SEQ ID NO: 6031162 - DNA, 25 bp, Homo sapien
ggaccttcgtgaggcacttcctgta

SEQ ID NO: 6031163 - DNA, 25 bp, Homo sapien
tcaggatcggaccatagaaggtcac

SEQ ID NO: 6031164 - DNA, 25 bp, Homo sapien
tcatgggtgagagacctccatgcaa

SEQ ID NO: 6031165 - DNA, 25 bp, Homo sapien
ttccccatccgcctctatcatcagg

SEQ ID NO: 6031166 - DNA, 25 bp, Homo sapien
tattatccaccaaggcagtaacggg

SEQ ID NO: 6031167 - DNA, 25 bp, Homo sapien
gacctccatgcaaacagaagatttt

SEQ ID NO: 6031168 - DNA, 25 bp, Homo sapien
actttctcaaacattcgtcataaaa

SEQ ID NO: 6031169 - DNA, 25 bp, Homo sapien
ctatcatcaggatcggaccatagaa

SEQ ID NO: 6031170 - DNA, 25 bp, Homo sapien
agatcggtaaacattttccacacgt

SEQ ID NO: 6031171 - DNA, 25 bp, Homo sapien
cataaaacccatatacttgggtaat

SEQ ID NO: 6031172 - DNA, 25 bp, Homo sapien
tcgcactgccgtactttctcaaaca

SEQ ID NO: 6031173 - DNA, 25 bp, Homo sapien
taagtatagtaattctatgtggata

SEQ ID NO: 6031174 - DNA, 25 bp, Homo sapien
gtggatatctgactttcatggcaac

SEQ ID NO: 6031175 - DNA, 25 bp, Homo sapien
aaagtgaagcctgcacctctcggac

SEQ ID NO: 6031176 - DNA, 25 bp, Homo sapien
gacggttggttcaccgggtctcaca

SEQ ID NO: 6031177 - DNA, 25 bp, Homo sapien
tagactcgtgattgcccctaagtat

SEQ ID NO: 6031178 - DNA, 25 bp, Homo sapien
atacttgggtaatctgcctagactc

SEQ ID NO: 6031179 - DNA, 25 bp, Homo sapien
tctatttaaatctctaacttgatct

SEQ ID NO: 6031180 - DNA, 25 bp, Homo sapien
cacattggaccttcgtgaggcactt

SEQ ID NO: 6031181 - DNA, 25 bp, Homo sapien
tatccttccattaccaattggtgag

SEQ ID NO: 6031182 - DNA, 25 bp, Homo sapien
cttgatctattgtctctatcatggg

SEQ ID NO: 6031183 - DNA, 25 bp, Homo sapien
aaaatggtgacaacattttgctggt

SEQ ID NO: 6031184 - DNA, 25 bp, Homo sapien
ggactgattccccatccgcctctat

SEQ ID NO: 6031185 - DNA, 25 bp, Homo sapien
tctataacaataatttggagcactg

SEQ ID NO: 6031186 - DNA, 25 bp, Homo sapien
agcactgaaaatggtgacaacattt

SEQ ID NO: 6031187 - DNA, 25 bp, Homo sapien
tcggaccatagaaggtcacacattg

SEQ ID NO: 6031188 - DNA, 25 bp, Homo sapien
gtctcacagatggatcgtattgtaa

SEQ ID NO: 6031189 - DNA, 25 bp, Homo sapien
ctcactgatgtcttgaccaaaagtg

SEQ ID NO: 6031190 - DNA, 25 bp, Homo sapien
acggggaaataatcgaatagatcgg

SEQ ID NO: 6031191 - DNA, 25 bp, Homo sapien
ctctaacttgatctattgtctctat

SEQ ID NO: 6031192 - DNA, 25 bp, Homo sapien
gcctattatggttttcatccacctc

SEQ ID NO: 6031193 - DNA, 25 bp, Homo sapien
caggcgtcttttgcaattgcaaaag

SEQ ID NO: 6031194 - DNA, 25 bp, Homo sapien
gattataaagaaaagttaacatgtc

SEQ ID NO: 6031195 - DNA, 25 bp, Homo sapien
gtgttgctcaaagtcgagaagggac

SEQ ID NO: 6031196 - DNA, 25 bp, Homo sapien
gattggtgcaaataagaaatgtatg

SEQ ID NO: 6031197 - DNA, 25 bp, Homo sapien
taccacaaaaagtgaaatacgataa

SEQ ID NO: 6031198 - DNA, 25 bp, Homo sapien
caccactggagaaccgtcgatctgc

SEQ ID NO: 6031199 - DNA, 25 bp, Homo sapien
atgggccacgcctaagtttggagct

SEQ ID NO: 6031200 - DNA, 25 bp, Homo sapien
gtgtgcatatatcttttgtaagatc

SEQ ID NO: 6031201 - DNA, 25 bp, Homo sapien
cgcctggtgttgctcaaagtcgaga

SEQ ID NO: 6031202 - DNA, 25 bp, Homo sapien
gccaaatccacaatgggccacgcct

SEQ ID NO: 6031203 - DNA, 25 bp, Homo sapien
tatcactatggatcagtttaaaccg

SEQ ID NO: 6031204 - DNA, 25 bp, Homo sapien
aaggagaagaacgaagcttattttg

SEQ ID NO: 6031205 - DNA, 25 bp, Homo sapien
aaaccgctgcatccgctacgcctgg

SEQ ID NO: 6031206 - DNA, 25 bp, Homo sapien
aaagaaaagttaacatgtctttgcg

SEQ ID NO: 6031207 - DNA, 25 bp, Homo sapien
aaccaatctagaccagatcatttgc

SEQ ID NO: 6031208 - DNA, 25 bp, Homo sapien
aagttaacatgtctttgcgaagata

SEQ ID NO: 6031209 - DNA, 25 bp, Homo sapien
gaagatagagtatttgaagagcgtg

SEQ ID NO: 6031210 - DNA, 25 bp, Homo sapien
cacgcctaagtttggagctttcatt

SEQ ID NO: 6031211 - DNA, 25 bp, Homo sapien
atgtatggattgtggtgcgccaaat

SEQ ID NO: 6031212 - DNA, 25 bp, Homo sapien
tggagaaccgtcgatctgcaacacc

SEQ ID NO: 6031213 - DNA, 25 bp, Homo sapien
cttccaagttatcagcaacctctca

SEQ ID NO: 6031214 - DNA, 25 bp, Homo sapien
tggattttgatgcttccaagttatc

SEQ ID NO: 6031215 - DNA, 25 bp, Homo sapien
cctctcaaaccgctgcatccgctac

SEQ ID NO: 6031216 - DNA, 25 bp, Homo sapien
aagaagaaccaatctagaccagatc

SEQ ID NO: 6031217 - DNA, 25 bp, Homo sapien
tgcaaataagaaatgtatggattgt

SEQ ID NO: 6031218 - DNA, 25 bp, Homo sapien
aagggacaccactggagaaccgtcg

SEQ ID NO: 6031219 - DNA, 25 bp, Homo sapien
ttcatttgccttgaatgtgccggta

SEQ ID NO: 6031220 - DNA, 25 bp, Homo sapien
aacaccagcaaactctagtaatggt

SEQ ID NO: 6031221 - DNA, 25 bp, Homo sapien
catagagggcttggtgtgcatatat

SEQ ID NO: 6031222 - DNA, 25 bp, Homo sapien
agcaaactctagtaatggtgccaat

SEQ ID NO: 6031223 - DNA, 25 bp, Homo sapien
ccggtatccatagagggcttggtgt

SEQ ID NO: 6031224 - DNA, 25 bp, Homo sapien
accgtcgatctgcaacaccagcaaa

SEQ ID NO: 6031225 - DNA, 25 bp, Homo sapien
ccgctacgcctggtgttgctcaaag

SEQ ID NO: 6031226 - DNA, 25 bp, Homo sapien
atatatcttttgtaagatctatcac

SEQ ID NO: 6031227 - DNA, 25 bp, Homo sapien
ctcaaagtcgagaagggacaccact

SEQ ID NO: 6031228 - DNA, 25 bp, Homo sapien
atctgcaacaccagcaaactctagt

SEQ ID NO: 6031229 - DNA, 25 bp, Homo sapien
tgaatggttcaagtcgcataatatt

SEQ ID NO: 6031230 - DNA, 25 bp, Homo sapien
cgataaccccgtcgcagaggattat

SEQ ID NO: 6031231 - DNA, 25 bp, Homo sapien
tggtaacgaacctttgactgaatgg

SEQ ID NO: 6031232 - DNA, 25 bp, Homo sapien
acatgtctttgcgaagatagagtat

SEQ ID NO: 6031233 - DNA, 25 bp, Homo sapien
cagatcatttgcccccttctcaagg

SEQ ID NO: 6031234 - DNA, 25 bp, Homo sapien
gggcttggtgtgcatatatcttttg

SEQ ID NO: 6031235 - DNA, 25 bp, Homo sapien
tttgactgaatggttcaagtcgcat

SEQ ID NO: 6031236 - DNA, 25 bp, Homo sapien
ggattgtggtgcgccaaatccacaa

SEQ ID NO: 6031237 - DNA, 25 bp, Homo sapien
tgagtttaccacaaaaagtgaaata

SEQ ID NO: 6031238 - DNA, 25 bp, Homo sapien
tttgaagagcgtgagcatttggatt

SEQ ID NO: 6031239 - DNA, 25 bp, Homo sapien
tctagaccagatcatttgccccctt

SEQ ID NO: 6031240 - DNA, 25 bp, Homo sapien
cgaacctttgactgaatggttcaag

SEQ ID NO: 6031241 - DNA, 25 bp, Homo sapien
tccacaatgggccacgcctaagttt

SEQ ID NO: 6031242 - DNA, 25 bp, Homo sapien
catttgcccccttctcaaggtggta

SEQ ID NO: 6031243 - DNA, 25 bp, Homo sapien
gttcaagtcgcataatattgacctg

SEQ ID NO: 6031244 - DNA, 25 bp, Homo sapien
aagatctatcactatggatcagttt

SEQ ID NO: 6031245 - DNA, 25 bp, Homo sapien
ttcaaaaggagaagaacgaagctta

SEQ ID NO: 6031246 - DNA, 25 bp, Homo sapien
cttttgtaagatctatcactatgga

SEQ ID NO: 6031247 - DNA, 25 bp, Homo sapien
agagtatttgaagagcgtgagcatt

SEQ ID NO: 6031248 - DNA, 25 bp, Homo sapien
taatggtgccaattttcaaaaggag

SEQ ID NO: 6031249 - DNA, 25 bp, Homo sapien
gctgagctgggcaagaagaaccaat

SEQ ID NO: 6031250 - DNA, 25 bp, Homo sapien
tcttttgcaattgcaaaagattggt

SEQ ID NO: 6031251 - DNA, 25 bp, Homo sapien
ggagctttcatttgccttgaatgtg

SEQ ID NO: 6031252 - DNA, 25 bp, Homo sapien
gcagaggattataaagaaaagttaa

SEQ ID NO: 6031253 - DNA, 25 bp, Homo sapien
tattttgctgagctgggcaagaaga

SEQ ID NO: 6031254 - DNA, 25 bp, Homo sapien
gtcgcataatattgacctgagttta

SEQ ID NO: 6031255 - DNA, 25 bp, Homo sapien
gtcgagaagggacaccactggagaa

SEQ ID NO: 6031256 - DNA, 25 bp, Homo sapien
ctctagtaatggtgccaattttcaa

SEQ ID NO: 6031257 - DNA, 25 bp, Homo sapien
gaagcttattttgctgagctgggca

SEQ ID NO: 6031258 - DNA, 25 bp, Homo sapien
ctgcatccgctacgcctggtgttgc

SEQ ID NO: 6031259 - DNA, 25 bp, Homo sapien
aatgtgccggtatccatagagggct

SEQ ID NO: 6031260 - DNA, 25 bp, Homo sapien
gaaatacgataaccccgtcgcagag

SEQ ID NO: 6031261 - DNA, 25 bp, Homo sapien
tggtgcgccaaatccacaatgggcc

SEQ ID NO: 6031262 - DNA, 25 bp, Homo sapien
ttgatgcttccaagttatcagcaac

SEQ ID NO: 6031263 - DNA, 25 bp, Homo sapien
aagtttggagctttcatttgccttg

SEQ ID NO: 6031264 - DNA, 25 bp, Homo sapien
tgccaattttcaaaaggagaagaac

SEQ ID NO: 6031265 - DNA, 25 bp, Homo sapien
cagcaacctctcaaaccgctgcatc

SEQ ID NO: 6031266 - DNA, 25 bp, Homo sapien
agcatttggattttgatgcttccaa

SEQ ID NO: 6031267 - DNA, 25 bp, Homo sapien
tatggatcagtttaaaccggaggaa

SEQ ID NO: 6031268 - DNA, 25 bp, Homo sapien
tgccttgaatgtgccggtatccata

SEQ ID NO: 6031269 - DNA, 25 bp, Homo sapien
gcaattgcaaaagattggtgcaaat

SEQ ID NO: 6031270 - DNA, 25 bp, Homo sapien
cccgtcgcagaggattataaagaaa

SEQ ID NO: 6031271 - DNA, 25 bp, Homo sapien
agttatcagcaacctctcaaaccgc

SEQ ID NO: 6031272 - DNA, 25 bp, Homo sapien
taagaaatgtatggattgtggtgcg

SEQ ID NO: 6031273 - DNA, 25 bp, Homo sapien
agcgtgagcatttggattttgatgc

SEQ ID NO: 6031274 - DNA, 25 bp, Homo sapien
ctgggcaagaagaaccaatctagac

SEQ ID NO: 6031275 - DNA, 25 bp, Homo sapien
aagaacgaagcttattttgctgagc

SEQ ID NO: 6031276 - DNA, 25 bp, Homo sapien
ctttgcgaagatagagtatttgaag

SEQ ID NO: 6031277 - DNA, 25 bp, Homo sapien
tgacctgagtttaccacaaaaagtg

SEQ ID NO: 6031278 - DNA, 25 bp, Homo sapien
taatattgacctgagtttaccacaa

SEQ ID NO: 6031279 - DNA, 25 bp, Homo sapien
gcaaaagattggtgcaaataagaaa

SEQ ID NO: 6031280 - DNA, 25 bp, Homo sapien
ggccaaactgggcagctgctctctt

SEQ ID NO: 6031281 - DNA, 25 bp, Homo sapien
ctgctcaatgttcccaaaggatcag

SEQ ID NO: 6031282 - DNA, 25 bp, Homo sapien
tttgatattctgtatgggttgtatt

SEQ ID NO: 6031283 - DNA, 25 bp, Homo sapien
tggtgttgcagatcgacggttctcc

SEQ ID NO: 6031284 - DNA, 25 bp, Homo sapien
aaagccctgatatttaccaccttga

SEQ ID NO: 6031285 - DNA, 25 bp, Homo sapien
agtattgctggaccctgcagaccgt

SEQ ID NO: 6031286 - DNA, 25 bp, Homo sapien
taccaccttgagaagggggcaaatg

SEQ ID NO: 6031287 - DNA, 25 bp, Homo sapien
caatcttttgatattctgtatgggt

SEQ ID NO: 6031288 - DNA, 25 bp, Homo sapien
ggcaaatgatctggtctagattggt

SEQ ID NO: 6031289 - DNA, 25 bp, Homo sapien
gagaagaggccccatcctctgctca

SEQ ID NO: 6031290 - DNA, 25 bp, Homo sapien
tactagagtttgctggtgttgcaga

SEQ ID NO: 6031291 - DNA, 25 bp, Homo sapien
attcttcttatcgttattatcaatc

SEQ ID NO: 6031292 - DNA, 25 bp, Homo sapien
ttttagtgaagttactaaatgcttg

SEQ ID NO: 6031293 - DNA, 25 bp, Homo sapien
atgcttggaatccataactactcgt

SEQ ID NO: 6031294 - DNA, 25 bp, Homo sapien
tatgggttgtattccctgctgtaga

SEQ ID NO: 6031295 - DNA, 25 bp, Homo sapien
taagcttcgttcttctccttttgaa

SEQ ID NO: 6031296 - DNA, 25 bp, Homo sapien
ccttgagaagggggcaaatgatctg

SEQ ID NO: 6031297 - DNA, 25 bp, Homo sapien
tgaagttactaaatgcttggaatcc

SEQ ID NO: 6031298 - DNA, 25 bp, Homo sapien
ggatcagcttgaaaattttccaggc

SEQ ID NO: 6031299 - DNA, 25 bp, Homo sapien
ggttctccagtggtgtcccttctcg

SEQ ID NO: 6031300 - DNA, 25 bp, Homo sapien
gattggttcttcttgcccagctcag

SEQ ID NO: 6031301 - DNA, 25 bp, Homo sapien
tctccttttgaaaattggcaccatt

SEQ ID NO: 6031302 - DNA, 25 bp, Homo sapien
tggaggttttgcgggtgtacttcca

SEQ ID NO: 6031303 - DNA, 25 bp, Homo sapien
gaggccccatcctctgctcaatgtt

SEQ ID NO: 6031304 - DNA, 25 bp, Homo sapien
caccattactagagtttgctggtgt

SEQ ID NO: 6031305 - DNA, 25 bp, Homo sapien
acttccaaagccctgatatttacca

SEQ ID NO: 6031306 - DNA, 25 bp, Homo sapien
cctctgcattaccattgaaattttt

SEQ ID NO: 6031307 - DNA, 25 bp, Homo sapien
gacaactctccggattgccattgct

SEQ ID NO: 6031308 - DNA, 25 bp, Homo sapien
acgtcctcgaacgatttggttacag

SEQ ID NO: 6031309 - DNA, 25 bp, Homo sapien
tcttgtggaggttttgcgggtgtac

SEQ ID NO: 6031310 - DNA, 25 bp, Homo sapien
ttcgtttcttctgacaactctccgg

SEQ ID NO: 6031311 - DNA, 25 bp, Homo sapien
aagggggcaaatgatctggtctaga

SEQ ID NO: 6031312 - DNA, 25 bp, Homo sapien
ctgatatttaccaccttgagaaggg

SEQ ID NO: 6031313 - DNA, 25 bp, Homo sapien
agtttgctggtgttgcagatcgacg

SEQ ID NO: 6031314 - DNA, 25 bp, Homo sapien
gcgctggagaagaggccccatcctc

SEQ ID NO: 6031315 - DNA, 25 bp, Homo sapien
tttgaaaattggcaccattactaga

SEQ ID NO: 6031316 - DNA, 25 bp, Homo sapien
tgcagatcgacggttctccagtggt

SEQ ID NO: 6031317 - DNA, 25 bp, Homo sapien
tattatcaatcttttgatattctgt

SEQ ID NO: 6031318 - DNA, 25 bp, Homo sapien
agaccgttcttgtggaggttttgcg

SEQ ID NO: 6031319 - DNA, 25 bp, Homo sapien
aatgttcccaaaggatcagcttgaa

SEQ ID NO: 6031320 - DNA, 25 bp, Homo sapien
attctgtatgggttgtattccctgc

SEQ ID NO: 6031321 - DNA, 25 bp, Homo sapien
cattgaaatttttagtgaagttact

SEQ ID NO: 6031322 - DNA, 25 bp, Homo sapien
tgatctggtctagattggttcttct

SEQ ID NO: 6031323 - DNA, 25 bp, Homo sapien
ttgagcaacaccaggcgtagcggat

SEQ ID NO: 6031324 - DNA, 25 bp, Homo sapien
cattaccattgaaatttttagtgaa

SEQ ID NO: 6031325 - DNA, 25 bp, Homo sapien
agctcagcaaaataagcttcgttct

SEQ ID NO: 6031326 - DNA, 25 bp, Homo sapien
cttatcgttattatcaatcttttga

SEQ ID NO: 6031327 - DNA, 25 bp, Homo sapien
cccaaaggatcagcttgaaaatttt

SEQ ID NO: 6031328 - DNA, 25 bp, Homo sapien
ccttctcgactttgagcaacaccag

SEQ ID NO: 6031329 - DNA, 25 bp, Homo sapien
gctctcttcgtttcttctgacaact

SEQ ID NO: 6031330 - DNA, 25 bp, Homo sapien
gattgccattgctggacgtgaggct

SEQ ID NO: 6031331 - DNA, 25 bp, Homo sapien
tcgaacgatttggttacagcgctgg

SEQ ID NO: 6031332 - DNA, 25 bp, Homo sapien
ttgcccagctcagcaaaataagctt

SEQ ID NO: 6031333 - DNA, 25 bp, Homo sapien
ttccaggctcaaagtattgctggac

SEQ ID NO: 6031334 - DNA, 25 bp, Homo sapien
gcagctgctctcttcgtttcttctg

SEQ ID NO: 6031335 - DNA, 25 bp, Homo sapien
gggtgtacttccaaagccctgatat

SEQ ID NO: 6031336 - DNA, 25 bp, Homo sapien
aaattttccaggctcaaagtattgc

SEQ ID NO: 6031337 - DNA, 25 bp, Homo sapien
tcgactttgagcaacaccaggcgta

SEQ ID NO: 6031338 - DNA, 25 bp, Homo sapien
tcttctgacaactctccggattgcc

SEQ ID NO: 6031339 - DNA, 25 bp, Homo sapien
ctgtagagctatcctctgcattacc

SEQ ID NO: 6031340 - DNA, 25 bp, Homo sapien
aattggcaccattactagagtttgc

SEQ ID NO: 6031341 - DNA, 25 bp, Homo sapien
aacaccaggcgtagcggatgcagcg

SEQ ID NO: 6031342 - DNA, 25 bp, Homo sapien
gcttgaaaattttccaggctcaaag

SEQ ID NO: 6031343 - DNA, 25 bp, Homo sapien
ccctgcagaccgttcttgtggaggt

SEQ ID NO: 6031344 - DNA, 25 bp, Homo sapien
acttttggccaaactgggcagctgc

SEQ ID NO: 6031345 - DNA, 25 bp, Homo sapien
catcctctgctcaatgttcccaaag

SEQ ID NO: 6031346 - DNA, 25 bp, Homo sapien
ctggacgtgaggcttaataaccgtt

SEQ ID NO: 6031347 - DNA, 25 bp, Homo sapien
cataactactcgtttcttgaaactt

SEQ ID NO: 6031348 - DNA, 25 bp, Homo sapien
ggtctagattggttcttcttgccca

SEQ ID NO: 6031349 - DNA, 25 bp, Homo sapien
ttgcgggtgtacttccaaagccctg

SEQ ID NO: 6031350 - DNA, 25 bp, Homo sapien
atcgacggttctccagtggtgtccc

SEQ ID NO: 6031351 - DNA, 25 bp, Homo sapien
agctatcctctgcattaccattgaa

SEQ ID NO: 6031352 - DNA, 25 bp, Homo sapien
ttgtattccctgctgtagagctatc

SEQ ID NO: 6031353 - DNA, 25 bp, Homo sapien
ccagtggtgtcccttctcgactttg

SEQ ID NO: 6031354 - DNA, 25 bp, Homo sapien
ggtgtcccttctcgactttgagcaa

SEQ ID NO: 6031355 - DNA, 25 bp, Homo sapien
ttgaaacttttggccaaactgggca

SEQ ID NO: 6031356 - DNA, 25 bp, Homo sapien
tctccggattgccattgctggacgt

SEQ ID NO: 6031357 - DNA, 25 bp, Homo sapien
tactaaatgcttggaatccataact

SEQ ID NO: 6031358 - DNA, 25 bp, Homo sapien
ccattgctggacgtgaggcttaata

SEQ ID NO: 6031359 - DNA, 25 bp, Homo sapien
ggaatccataactactcgtttcttg

SEQ ID NO: 6031360 - DNA, 25 bp, Homo sapien
ttcttcttgcccagctcagcaaaat

SEQ ID NO: 6031361 - DNA, 25 bp, Homo sapien
gcgtagcggatgcagcggtttgaga

SEQ ID NO: 6031362 - DNA, 25 bp, Homo sapien
gatttggttacagcgctggagaaga

SEQ ID NO: 6031363 - DNA, 25 bp, Homo sapien
gctggaccctgcagaccgttcttgt

SEQ ID NO: 6031364 - DNA, 25 bp, Homo sapien
aactgggcagctgctctcttcgttt

SEQ ID NO: 6031365 - DNA, 25 bp, Homo sapien
gcaaaataagcttcgttcttctcct

SEQ ID NO: 6031366 - DNA, 25 bp, Homo sapien
gttcttctccttttgaaaattggca

SEQ ID NO: 6031367 - DNA, 25 bp, Homo sapien
gttacagcgctggagaagaggcccc

SEQ ID NO: 6031368 - DNA, 25 bp, Homo sapien
tccctgctgtagagctatcctctgc

SEQ ID NO: 6031369 - DNA, 25 bp, Homo sapien
gctcaaagtattgctggaccctgca

SEQ ID NO: 6031370 - DNA, 25 bp, Homo sapien
ttaggcttacaaagaattgcctggg

SEQ ID NO: 6031371 - DNA, 25 bp, Homo sapien
gaggaaataaagatacaagtggacg

SEQ ID NO: 6031372 - DNA, 25 bp, Homo sapien
gcacaaacaacttttgctcaaatgc

SEQ ID NO: 6031373 - DNA, 25 bp, Homo sapien
tctaaaggtctaattattcaattta

SEQ ID NO: 6031374 - DNA, 25 bp, Homo sapien
atatctatggatgacgatgattccg

SEQ ID NO: 6031375 - DNA, 25 bp, Homo sapien
tcgattattaatggaatcaatattg

SEQ ID NO: 6031376 - DNA, 25 bp, Homo sapien
tgaaagaattcaaaacttgggaaga

SEQ ID NO: 6031377 - DNA, 25 bp, Homo sapien
cgaattagacaatctgggccatttt

SEQ ID NO: 6031378 - DNA, 25 bp, Homo sapien
catttcttccccaacaagaccgaat

SEQ ID NO: 6031379 - DNA, 25 bp, Homo sapien
accgaattggtcaacactctgagcg

SEQ ID NO: 6031380 - DNA, 25 bp, Homo sapien
aattccatatatctcatcttgatag

SEQ ID NO: 6031381 - DNA, 25 bp, Homo sapien
tctaaatattacaacacaaacctat

SEQ ID NO: 6031382 - DNA, 25 bp, Homo sapien
gtggacgataaagacgaaaattcca

SEQ ID NO: 6031383 - DNA, 25 bp, Homo sapien
aacaagaccgaattggtcaacactc

SEQ ID NO: 6031384 - DNA, 25 bp, Homo sapien
agaattgagttatctaaatattaca

SEQ ID NO: 6031385 - DNA, 25 bp, Homo sapien
gatgaagatgacgaggaaataaaga

SEQ ID NO: 6031386 - DNA, 25 bp, Homo sapien
taattattcaatttatcgaccaggc

SEQ ID NO: 6031387 - DNA, 25 bp, Homo sapien
tttttaaagggttcttctgctgcat

SEQ ID NO: 6031388 - DNA, 25 bp, Homo sapien
gaccaggcacaaacaacttttgctc

SEQ ID NO: 6031389 - DNA, 25 bp, Homo sapien
aatattgatgaagatgacgaggaaa

SEQ ID NO: 6031390 - DNA, 25 bp, Homo sapien
gacgatgattccgatttttctaaag

SEQ ID NO: 6031391 - DNA, 25 bp, Homo sapien
atacaagtggacgataaagacgaaa

SEQ ID NO: 6031392 - DNA, 25 bp, Homo sapien
ttggagttcaaactggcgagaattg

SEQ ID NO: 6031393 - DNA, 25 bp, Homo sapien
ttggtcaacactctgagcgataaat

SEQ ID NO: 6031394 - DNA, 25 bp, Homo sapien
attaatggaatcaatattgatgaag

SEQ ID NO: 6031395 - DNA, 25 bp, Homo sapien
gataaatcgattattaatggaatca

SEQ ID NO: 6031396 - DNA, 25 bp, Homo sapien
ttcaatttatcgaccaggcacaaac

SEQ ID NO: 6031397 - DNA, 25 bp, Homo sapien
accagtctaggttggagttcaaact

SEQ ID NO: 6031398 - DNA, 25 bp, Homo sapien
gcctgggtttgtgaaagaattcaaa

SEQ ID NO: 6031399 - DNA, 25 bp, Homo sapien
tcttaccgaattagacaatctgggc

SEQ ID NO: 6031400 - DNA, 25 bp, Homo sapien
ttaaatgaaattatatctatggatg

SEQ ID NO: 6031401 - DNA, 25 bp, Homo sapien
cagctggacggtgaaaaaaatctta

SEQ ID NO: 6031402 - DNA, 25 bp, Homo sapien
aacactctgagcgataaatcgatta

SEQ ID NO: 6031403 - DNA, 25 bp, Homo sapien
atggaacatttcttccccaacaaga

SEQ ID NO: 6031404 - DNA, 25 bp, Homo sapien
ttgatagcaaaagctttgaaccagt

SEQ ID NO: 6031405 - DNA, 25 bp, Homo sapien
acaacttttgctcaaatgcaacgac

SEQ ID NO: 6031406 - DNA, 25 bp, Homo sapien
ctgagcgataaatcgattattaatg

SEQ ID NO: 6031407 - DNA, 25 bp, Homo sapien
ctggcgagaattgagttatctaaat

SEQ ID NO: 6031408 - DNA, 25 bp, Homo sapien
aaggtctaattattcaatttatcga

SEQ ID NO: 6031409 - DNA, 25 bp, Homo sapien
atggatgacgatgattccgattttt

SEQ ID NO: 6031410 - DNA, 25 bp, Homo sapien
tcttctgctgcattaggcttacaaa

SEQ ID NO: 6031411 - DNA, 25 bp, Homo sapien
tttgctcaaatgcaacgacagctgg

SEQ ID NO: 6031412 - DNA, 25 bp, Homo sapien
atatatctcatcttgatagcaaaag

SEQ ID NO: 6031413 - DNA, 25 bp, Homo sapien
ttacaaagaattgcctgggtttgtg

SEQ ID NO: 6031414 - DNA, 25 bp, Homo sapien
aaaatcttaccgaattagacaatct

SEQ ID NO: 6031415 - DNA, 25 bp, Homo sapien
ataaagatacaagtggacgataaag

SEQ ID NO: 6031416 - DNA, 25 bp, Homo sapien
gctttgaaccagtctaggttggagt

SEQ ID NO: 6031417 - DNA, 25 bp, Homo sapien
caaatgcaacgacagctggacggtg

SEQ ID NO: 6031418 - DNA, 25 bp, Homo sapien
ggaatcaatattgatgaagatgacg

SEQ ID NO: 6031419 - DNA, 25 bp, Homo sapien
ttcaaactggcgagaattgagttat

SEQ ID NO: 6031420 - DNA, 25 bp, Homo sapien
gatgacgaggaaataaagatacaag

SEQ ID NO: 6031421 - DNA, 25 bp, Homo sapien
agacaatctgggccattttttaaag

SEQ ID NO: 6031422 - DNA, 25 bp, Homo sapien
gcaaaagctttgaaccagtctaggt

SEQ ID NO: 6031423 - DNA, 25 bp, Homo sapien
gagttatctaaatattacaacacaa

SEQ ID NO: 6031424 - DNA, 25 bp, Homo sapien
ctcatcttgatagcaaaagctttga

SEQ ID NO: 6031425 - DNA, 25 bp, Homo sapien
tctaggttggagttcaaactggcga

SEQ ID NO: 6031426 - DNA, 25 bp, Homo sapien
gacgaaaattccatatatctcatct

SEQ ID NO: 6031427 - DNA, 25 bp, Homo sapien
caacgacagctggacggtgaaaaaa

SEQ ID NO: 6031428 - DNA, 25 bp, Homo sapien
gaccatcttaaatgaaattatatct

SEQ ID NO: 6031429 - DNA, 25 bp, Homo sapien
ttatcgaccaggcacaaacaacttt

SEQ ID NO: 6031430 - DNA, 25 bp, Homo sapien
gaaattatatctatggatgacgatg

SEQ ID NO: 6031431 - DNA, 25 bp, Homo sapien
ttccccaacaagaccgaattggtca

SEQ ID NO: 6031432 - DNA, 25 bp, Homo sapien
gataaagacgaaaattccatatatc

SEQ ID NO: 6031433 - DNA, 25 bp, Homo sapien
agaattgcctgggtttgtgaaagaa

SEQ ID NO: 6031434 - DNA, 25 bp, Homo sapien
gctgcattaggcttacaaagaattg

SEQ ID NO: 6031435 - DNA, 25 bp, Homo sapien
tgattccgatttttctaaaggtcta

SEQ ID NO: 6031436 - DNA, 25 bp, Homo sapien
aagggttcttctgctgcattaggct

SEQ ID NO: 6031437 - DNA, 25 bp, Homo sapien
tcttcatcaatattgattccattaa

SEQ ID NO: 6031438 - DNA, 25 bp, Homo sapien
ttcacaaacccaggcaattctttgt

SEQ ID NO: 6031439 - DNA, 25 bp, Homo sapien
ttttcgtctttatcgtccacttgta

SEQ ID NO: 6031440 - DNA, 25 bp, Homo sapien
tgatttctgagggaatagtagacat

SEQ ID NO: 6031441 - DNA, 25 bp, Homo sapien
gttgcatttgagcaaaagttgtttg

SEQ ID NO: 6031442 - DNA, 25 bp, Homo sapien
caatattgattccattaataatcga

SEQ ID NO: 6031443 - DNA, 25 bp, Homo sapien
atttatcgctcagagtgttgaccaa

SEQ ID NO: 6031444 - DNA, 25 bp, Homo sapien
acttgtatctttatttcctcgtcat

SEQ ID NO: 6031445 - DNA, 25 bp, Homo sapien
cgctcagagtgttgaccaattcggt

SEQ ID NO: 6031446 - DNA, 25 bp, Homo sapien
tggcccagattgtctaattcggtaa

SEQ ID NO: 6031447 - DNA, 25 bp, Homo sapien
tctttatcgtccacttgtatcttta

SEQ ID NO: 6031448 - DNA, 25 bp, Homo sapien
ggtcgataaattgaataattagacc

SEQ ID NO: 6031449 - DNA, 25 bp, Homo sapien
gattccattaataatcgatttatcg

SEQ ID NO: 6031450 - DNA, 25 bp, Homo sapien
gagatatatggaattttcgtcttta

SEQ ID NO: 6031451 - DNA, 25 bp, Homo sapien
taatcgatttatcgctcagagtgtt

SEQ ID NO: 6031452 - DNA, 25 bp, Homo sapien
agacctttagaaaaatcggaatcat

SEQ ID NO: 6031453 - DNA, 25 bp, Homo sapien
ctcaattctcgccagtttgaactcc

SEQ ID NO: 6031454 - DNA, 25 bp, Homo sapien
tttgagcaaaagttgtttgtgcctg

SEQ ID NO: 6031455 - DNA, 25 bp, Homo sapien
tgctatcaagatgagatatatggaa

SEQ ID NO: 6031456 - DNA, 25 bp, Homo sapien
attcggtcttgttggggaagaaatg

SEQ ID NO: 6031457 - DNA, 25 bp, Homo sapien
ttagaaaaatcggaatcatcgtcat

SEQ ID NO: 6031458 - DNA, 25 bp, Homo sapien
atttcctcgtcatcttcatcaatat

SEQ ID NO: 6031459 - DNA, 25 bp, Homo sapien
aaatcggaatcatcgtcatccatag

SEQ ID NO: 6031460 - DNA, 25 bp, Homo sapien
cgtcatccatagatataatttcatt

SEQ ID NO: 6031461 - DNA, 25 bp, Homo sapien
gaatcatcgtcatccatagatataa

SEQ ID NO: 6031462 - DNA, 25 bp, Homo sapien
agattgtctaattcggtaagatttt

SEQ ID NO: 6031463 - DNA, 25 bp, Homo sapien
catagatataatttcatttaagatg

SEQ ID NO: 6031464 - DNA, 25 bp, Homo sapien
gctgtcgttgcatttgagcaaaagt

SEQ ID NO: 6031465 - DNA, 25 bp, Homo sapien
tttgaattctttcacaaacccaggc

SEQ ID NO: 6031466 - DNA, 25 bp, Homo sapien
ggcaattctttgtaagcctaatgca

SEQ ID NO: 6031467 - DNA, 25 bp, Homo sapien
tcgtcatcttcatcaatattgattc

SEQ ID NO: 6031468 - DNA, 25 bp, Homo sapien
agcttttgctatcaagatgagatat

SEQ ID NO: 6031469 - DNA, 25 bp, Homo sapien
gttcaaagcttttgctatcaagatg

SEQ ID NO: 6031470 - DNA, 25 bp, Homo sapien
gtgcctggtcgataaattgaataat

SEQ ID NO: 6031471 - DNA, 25 bp, Homo sapien
cagtttgaactccaacctagactgg

SEQ ID NO: 6031472 - DNA, 25 bp, Homo sapien
ttgtttgtgcctggtcgataaattg

SEQ ID NO: 6031473 - DNA, 25 bp, Homo sapien
atctttatttcctcgtcatcttcat

SEQ ID NO: 6031474 - DNA, 25 bp, Homo sapien
ttaagatggtccaattgatgatttc

SEQ ID NO: 6031475 - DNA, 25 bp, Homo sapien
cttgttggggaagaaatgttccatt

SEQ ID NO: 6031476 - DNA, 25 bp, Homo sapien
tttcaccgtccagctgtcgttgcat

SEQ ID NO: 6031477 - DNA, 25 bp, Homo sapien
tataatttcatttaagatggtccaa

SEQ ID NO: 6031478 - DNA, 25 bp, Homo sapien
tgaccaattcggtcttgttggggaa

SEQ ID NO: 6031479 - DNA, 25 bp, Homo sapien
caagatgagatatatggaattttcg

SEQ ID NO: 6031480 - DNA, 25 bp, Homo sapien
cgtccagctgtcgttgcatttgagc

SEQ ID NO: 6031481 - DNA, 25 bp, Homo sapien
caacctagactggttcaaagctttt

SEQ ID NO: 6031482 - DNA, 25 bp, Homo sapien
tggtccaattgatgatttctgaggg

SEQ ID NO: 6031483 - DNA, 25 bp, Homo sapien
tctttgtaagcctaatgcagcagaa

SEQ ID NO: 6031484 - DNA, 25 bp, Homo sapien
tcgtccacttgtatctttatttcct

SEQ ID NO: 6031485 - DNA, 25 bp, Homo sapien
agatttttttcaccgtccagctgtc

SEQ ID NO: 6031486 - DNA, 25 bp, Homo sapien
tctcgccagtttgaactccaaccta

SEQ ID NO: 6031487 - DNA, 25 bp, Homo sapien
aattgatgatttctgagggaatagt

SEQ ID NO: 6031488 - DNA, 25 bp, Homo sapien
gtaagcctaatgcagcagaagaacc

SEQ ID NO: 6031489 - DNA, 25 bp, Homo sapien
agactggttcaaagcttttgctatc

SEQ ID NO: 6031490 - DNA, 25 bp, Homo sapien
tcccaagttttgaattctttcacaa

SEQ ID NO: 6031491 - DNA, 25 bp, Homo sapien
ttcatttaagatggtccaattgatg

SEQ ID NO: 6031492 - DNA, 25 bp, Homo sapien
aaaaaatggcccagattgtctaatt

SEQ ID NO: 6031493 - DNA, 25 bp, Homo sapien
aattctttcacaaacccaggcaatt

SEQ ID NO: 6031494 - DNA, 25 bp, Homo sapien
gaactccaacctagactggttcaaa

SEQ ID NO: 6031495 - DNA, 25 bp, Homo sapien
cagcagaagaaccctttaaaaaatg

SEQ ID NO: 6031496 - DNA, 25 bp, Homo sapien
gagtgttgaccaattcggtcttgtt

SEQ ID NO: 6031497 - DNA, 25 bp, Homo sapien
ctttaaaaaatggcccagattgtct

SEQ ID NO: 6031498 - DNA, 25 bp, Homo sapien
cattaataatcgatttatcgctcag

SEQ ID NO: 6031499 - DNA, 25 bp, Homo sapien
tatggaattttcgtctttatcgtcc

SEQ ID NO: 6031500 - DNA, 25 bp, Homo sapien
ctaatgcagcagaagaaccctttaa

SEQ ID NO: 6031501 - DNA, 25 bp, Homo sapien
caaaagttgtttgtgcctggtcgat

SEQ ID NO: 6031502 - DNA, 25 bp, Homo sapien
aacccaggcaattctttgtaagcct

SEQ ID NO: 6031503 - DNA, 25 bp, Homo sapien
taaattgaataattagacctttaga

SEQ ID NO: 6031504 - DNA, 25 bp, Homo sapien
taattcagaaccaaaaattggtatg

SEQ ID NO: 6031505 - DNA, 25 bp, Homo sapien
taagatgcagaagcttgttcccgat

SEQ ID NO: 6031506 - DNA, 25 bp, Homo sapien
gaaaaaaatgaaaatattcatatcc

SEQ ID NO: 6031507 - DNA, 25 bp, Homo sapien
cagttttagtacgagctactgatga

SEQ ID NO: 6031508 - DNA, 25 bp, Homo sapien
ttagtacgagctactgatgatgact

SEQ ID NO: 6031509 - DNA, 25 bp, Homo sapien
ataaaaggcaactacaacaagcaaa

SEQ ID NO: 6031510 - DNA, 25 bp, Homo sapien
ggcaactacaacaagcaaaagaaaa

SEQ ID NO: 6031511 - DNA, 25 bp, Homo sapien
aggaaaagacaaatcccaaactgat

SEQ ID NO: 6031512 - DNA, 25 bp, Homo sapien
ccgtccgagattctcattcgctgtc

SEQ ID NO: 6031513 - DNA, 25 bp, Homo sapien
agatgtccgtccgagattctcattc

SEQ ID NO: 6031514 - DNA, 25 bp, Homo sapien
aaattggtatgggtataaaggatga

SEQ ID NO: 6031515 - DNA, 25 bp, Homo sapien
agcgactacttggtgcatcataggc

SEQ ID NO: 6031516 - DNA, 25 bp, Homo sapien
gaaagactgcatggaaaaacctcgt

SEQ ID NO: 6031517 - DNA, 25 bp, Homo sapien
aagacaaatcccaaactgatgaaac

SEQ ID NO: 6031518 - DNA, 25 bp, Homo sapien
tgataagtaagtgggagcgtgataa

SEQ ID NO: 6031519 - DNA, 25 bp, Homo sapien
agaagggaagaagcccggcaatgat

SEQ ID NO: 6031520 - DNA, 25 bp, Homo sapien
tgctttagatattgacaataattca

SEQ ID NO: 6031521 - DNA, 25 bp, Homo sapien
gtgcatcataggcaaaaagcaaaag

SEQ ID NO: 6031522 - DNA, 25 bp, Homo sapien
atcaaccatggtactataaggatac

SEQ ID NO: 6031523 - DNA, 25 bp, Homo sapien
atgaactgataagtaagtgggagcg

SEQ ID NO: 6031524 - DNA, 25 bp, Homo sapien
agatattgacaataattcagaacca

SEQ ID NO: 6031525 - DNA, 25 bp, Homo sapien
agatggtacggttactcagggaaag

SEQ ID NO: 6031526 - DNA, 25 bp, Homo sapien
ctcattcgctgtcattttgtaggaa

SEQ ID NO: 6031527 - DNA, 25 bp, Homo sapien
aaactaatcagaccccagaagatgt

SEQ ID NO: 6031528 - DNA, 25 bp, Homo sapien
tgtggggaagcagggcataaggaga

SEQ ID NO: 6031529 - DNA, 25 bp, Homo sapien
ctgcatggaaaaacctcgtaagatg

SEQ ID NO: 6031530 - DNA, 25 bp, Homo sapien
tacggttactcagggaaagaataca

SEQ ID NO: 6031531 - DNA, 25 bp, Homo sapien
atggcacagttttagtacgagctac

SEQ ID NO: 6031532 - DNA, 25 bp, Homo sapien
agcaaaagggggtgctttagatatt

SEQ ID NO: 6031533 - DNA, 25 bp, Homo sapien
aaaatgaaaatattcatatccccag

SEQ ID NO: 6031534 - DNA, 25 bp, Homo sapien
cacaaaaaaataatggcacagtttt

SEQ ID NO: 6031535 - DNA, 25 bp, Homo sapien
tgatacgagcactgcagaaggagga

SEQ ID NO: 6031536 - DNA, 25 bp, Homo sapien
ctattaacagaaataaaaggcaact

SEQ ID NO: 6031537 - DNA, 25 bp, Homo sapien
catggtactataaggatacccccaa

SEQ ID NO: 6031538 - DNA, 25 bp, Homo sapien
gcccggcaatgatgatacgagcact

SEQ ID NO: 6031539 - DNA, 25 bp, Homo sapien
tgggactccagaaaagatagatggt

SEQ ID NO: 6031540 - DNA, 25 bp, Homo sapien
gaagcactattaacagaaataaaag

SEQ ID NO: 6031541 - DNA, 25 bp, Homo sapien
ttagaaatcaaccatggtactataa

SEQ ID NO: 6031542 - DNA, 25 bp, Homo sapien
gaacaagaagggaagaagcccggca

SEQ ID NO: 6031543 - DNA, 25 bp, Homo sapien
tccccaggtatattagaaatcaacc

SEQ ID NO: 6031544 - DNA, 25 bp, Homo sapien
gaagaagcccggcaatgatgatacg

SEQ ID NO: 6031545 - DNA, 25 bp, Homo sapien
gagttcaaactaatcagaccccaga

SEQ ID NO: 6031546 - DNA, 25 bp, Homo sapien
cattttgtaggaattgtggggaagc

SEQ ID NO: 6031547 - DNA, 25 bp, Homo sapien
tacttggtgcatcataggcaaaaag

SEQ ID NO: 6031548 - DNA, 25 bp, Homo sapien
gagattctcattcgctgtcattttg

SEQ ID NO: 6031549 - DNA, 25 bp, Homo sapien
actcagggaaagaatacaatgaact

SEQ ID NO: 6031550 - DNA, 25 bp, Homo sapien
gatgactgggactccagaaaagata

SEQ ID NO: 6031551 - DNA, 25 bp, Homo sapien
ttcatatccccaggtatattagaaa

SEQ ID NO: 6031552 - DNA, 25 bp, Homo sapien
gagcactgcagaaggaggagaaaaa

SEQ ID NO: 6031553 - DNA, 25 bp, Homo sapien
gcagaagcttgttcccgatttaaat

SEQ ID NO: 6031554 - DNA, 25 bp, Homo sapien
ggaaaaacctcgtaagatgcagaag

SEQ ID NO: 6031555 - DNA, 25 bp, Homo sapien
cgagctactgatgatgactgggact

SEQ ID NO: 6031556 - DNA, 25 bp, Homo sapien
cccagaagatgtccgtccgagattc

SEQ ID NO: 6031557 - DNA, 25 bp, Homo sapien
aaagatagatggtacggttactcag

SEQ ID NO: 6031558 - DNA, 25 bp, Homo sapien
tccagaaaagatagatggtacggtt

SEQ ID NO: 6031559 - DNA, 25 bp, Homo sapien
gagcgtgataaaagaaataaaataa

SEQ ID NO: 6031560 - DNA, 25 bp, Homo sapien
gcttgttcccgatttaaattcacaa

SEQ ID NO: 6031561 - DNA, 25 bp, Homo sapien
agggggtgctttagatattgacaat

SEQ ID NO: 6031562 - DNA, 25 bp, Homo sapien
tgcagaaggaggagaaaaaagcgac

SEQ ID NO: 6031563 - DNA, 25 bp, Homo sapien
tacaacaagcaaaagaaaaaaatga

SEQ ID NO: 6031564 - DNA, 25 bp, Homo sapien
aatcccaaactgatgaaacactatg

SEQ ID NO: 6031565 - DNA, 25 bp, Homo sapien
ggtatattagaaatcaaccatggta

SEQ ID NO: 6031566 - DNA, 25 bp, Homo sapien
ggtataaaggatgagttcaaactaa

SEQ ID NO: 6031567 - DNA, 25 bp, Homo sapien
aaggatgagttcaaactaatcagac

SEQ ID NO: 6031568 - DNA, 25 bp, Homo sapien
gaaaaaagcgactacttggtgcatc

SEQ ID NO: 6031569 - DNA, 25 bp, Homo sapien
aaaatattcatatccccaggtatat

SEQ ID NO: 6031570 - DNA, 25 bp, Homo sapien
actgatgatgactgggactccagaa

SEQ ID NO: 6031571 - DNA, 25 bp, Homo sapien
cataggcaaaaagcaaaagggggtg

SEQ ID NO: 6031572 - DNA, 25 bp, Homo sapien
cgctgtcattttgtaggaattgtgg

SEQ ID NO: 6031573 - DNA, 25 bp, Homo sapien
cagaaccaaaaattggtatgggtat

SEQ ID NO: 6031574 - DNA, 25 bp, Homo sapien
ggaaagaatacaatgaactgataag

SEQ ID NO: 6031575 - DNA, 25 bp, Homo sapien
aatacaatgaactgataagtaagtg

SEQ ID NO: 6031576 - DNA, 25 bp, Homo sapien
taaggagaaagactgcatggaaaaa

SEQ ID NO: 6031577 - DNA, 25 bp, Homo sapien
tgacaataattcagaaccaaaaatt

SEQ ID NO: 6031578 - DNA, 25 bp, Homo sapien
aggaggagaaaaaagcgactacttg

SEQ ID NO: 6031579 - DNA, 25 bp, Homo sapien
aaaataatggcacagttttagtacg

SEQ ID NO: 6031580 - DNA, 25 bp, Homo sapien
taagtgggagcgtgataaaagaaat

SEQ ID NO: 6031581 - DNA, 25 bp, Homo sapien
ggtatgggtataaaggatgagttca

SEQ ID NO: 6031582 - DNA, 25 bp, Homo sapien
aggaattgtggggaagcagggcata

SEQ ID NO: 6031583 - DNA, 25 bp, Homo sapien
acctcgtaagatgcagaagcttgtt

SEQ ID NO: 6031584 - DNA, 25 bp, Homo sapien
caatgatgatacgagcactgcagaa

SEQ ID NO: 6031585 - DNA, 25 bp, Homo sapien
gaagcagggcataaggagaaagact

SEQ ID NO: 6031586 - DNA, 25 bp, Homo sapien
tcagaccccagaagatgtccgtccg

SEQ ID NO: 6031587 - DNA, 25 bp, Homo sapien
taaattcacaaaaaaataatggcac

SEQ ID NO: 6031588 - DNA, 25 bp, Homo sapien
acagaaataaaaggcaactacaaca

SEQ ID NO: 6031589 - DNA, 25 bp, Homo sapien
agggcataaggagaaagactgcatg

SEQ ID NO: 6031590 - DNA, 25 bp, Homo sapien
tattcatatttagtaggattggcga

SEQ ID NO: 6031591 - DNA, 25 bp, Homo sapien
ttttcatcaactgcgcccagtgttt

SEQ ID NO: 6031592 - DNA, 25 bp, Homo sapien
accatctactttcctagcttccaga

SEQ ID NO: 6031593 - DNA, 25 bp, Homo sapien
tcgttgatgtcctatacaactgaga

SEQ ID NO: 6031594 - DNA, 25 bp, Homo sapien
tatacaactgagaattatcagcatc

SEQ ID NO: 6031595 - DNA, 25 bp, Homo sapien
tcaactgcgcccagtgtttcagttt

SEQ ID NO: 6031596 - DNA, 25 bp, Homo sapien
atctcttcatctgtatcccatagtg

SEQ ID NO: 6031597 - DNA, 25 bp, Homo sapien
aatcttgatttaggatcataattac

SEQ ID NO: 6031598 - DNA, 25 bp, Homo sapien
cgttgaatttatgtcgttcaagtaa

SEQ ID NO: 6031599 - DNA, 25 bp, Homo sapien
ttacttatcagttcattgtattctt

SEQ ID NO: 6031600 - DNA, 25 bp, Homo sapien
tttttccttatcctcaatttcatca

SEQ ID NO: 6031601 - DNA, 25 bp, Homo sapien
ttattttatttcttttatcacgctc

SEQ ID NO: 6031602 - DNA, 25 bp, Homo sapien
tttgatttttcatcaactgcgccca

SEQ ID NO: 6031603 - DNA, 25 bp, Homo sapien
ttccttagcgtgagatctagcaaac

SEQ ID NO: 6031604 - DNA, 25 bp, Homo sapien
tctaacttcattagttctatctctt

SEQ ID NO: 6031605 - DNA, 25 bp, Homo sapien
gttcattgtattctttccctgagta

SEQ ID NO: 6031606 - DNA, 25 bp, Homo sapien
ccttcacctgtcaaatgtctgcgga

SEQ ID NO: 6031607 - DNA, 25 bp, Homo sapien
actgagaattatcagcatcatcttt

SEQ ID NO: 6031608 - DNA, 25 bp, Homo sapien
tcatctgtatcccatagtgtttcat

SEQ ID NO: 6031609 - DNA, 25 bp, Homo sapien
gtcgttcaagtaagcagccttatct

SEQ ID NO: 6031610 - DNA, 25 bp, Homo sapien
cttttatcacgctcccacttactta

SEQ ID NO: 6031611 - DNA, 25 bp, Homo sapien
tcccgttttttcttcagatattcat

SEQ ID NO: 6031612 - DNA, 25 bp, Homo sapien
tatttagtaggattggcgactaaaa

SEQ ID NO: 6031613 - DNA, 25 bp, Homo sapien
ctcaatttcatcacgtatacccatt

SEQ ID NO: 6031614 - DNA, 25 bp, Homo sapien
tgtatcccatagtgtttcatcagtt

SEQ ID NO: 6031615 - DNA, 25 bp, Homo sapien
cttctctcaatctcgttgatgtcct

SEQ ID NO: 6031616 - DNA, 25 bp, Homo sapien
ccttatcttctctcaatctcgttga

SEQ ID NO: 6031617 - DNA, 25 bp, Homo sapien
tcacgctcccacttacttatcagtt

SEQ ID NO: 6031618 - DNA, 25 bp, Homo sapien
catctttcttcaatgaacctacgga

SEQ ID NO: 6031619 - DNA, 25 bp, Homo sapien
atttatgtcgttcaagtaagcagcc

SEQ ID NO: 6031620 - DNA, 25 bp, Homo sapien
ttcatcacgtatacccatttcctta

SEQ ID NO: 6031621 - DNA, 25 bp, Homo sapien
ctttgtaccatctactttcctagct

SEQ ID NO: 6031622 - DNA, 25 bp, Homo sapien
ccatagtgtttcatcagtttgggat

SEQ ID NO: 6031623 - DNA, 25 bp, Homo sapien
tcaatctcgttgatgtcctatacaa

SEQ ID NO: 6031624 - DNA, 25 bp, Homo sapien
tttttcttcagatattcatatttag

SEQ ID NO: 6031625 - DNA, 25 bp, Homo sapien
tccttgtaaagttctaacttcatta

SEQ ID NO: 6031626 - DNA, 25 bp, Homo sapien
agttctatctcttcatctgtatccc

SEQ ID NO: 6031627 - DNA, 25 bp, Homo sapien
tcccacttacttatcagttcattgt

SEQ ID NO: 6031628 - DNA, 25 bp, Homo sapien
atgtcctatacaactgagaattatc

SEQ ID NO: 6031629 - DNA, 25 bp, Homo sapien
tgtttcatcagtttgggatttgtct

SEQ ID NO: 6031630 - DNA, 25 bp, Homo sapien
aatgctgacaatcttgggctgcttg

SEQ ID NO: 6031631 - DNA, 25 bp, Homo sapien
agtgtttcagttttgtacaatcttg

SEQ ID NO: 6031632 - DNA, 25 bp, Homo sapien
agattgctttgtaccatctactttc

SEQ ID NO: 6031633 - DNA, 25 bp, Homo sapien
atcagtttgggatttgtcttttcct

SEQ ID NO: 6031634 - DNA, 25 bp, Homo sapien
tgttgtactttttccttatcctcaa

SEQ ID NO: 6031635 - DNA, 25 bp, Homo sapien
actctccgttgaatttatgtcgttc

SEQ ID NO: 6031636 - DNA, 25 bp, Homo sapien
gatttaggatcataattactctccg

SEQ ID NO: 6031637 - DNA, 25 bp, Homo sapien
acgtatacccatttccttagcgtga

SEQ ID NO: 6031638 - DNA, 25 bp, Homo sapien
ttccagatctccaatgctgacaatc

SEQ ID NO: 6031639 - DNA, 25 bp, Homo sapien
aagcagccttatcttctctcaatct

SEQ ID NO: 6031640 - DNA, 25 bp, Homo sapien
aacatttttgatttttcatcaactg

SEQ ID NO: 6031641 - DNA, 25 bp, Homo sapien
taaagttctaacttcattagttcta

SEQ ID NO: 6031642 - DNA, 25 bp, Homo sapien
caagtaagcagccttatcttctctc

SEQ ID NO: 6031643 - DNA, 25 bp, Homo sapien
ctgcttggtttcttcttgttcccgt

SEQ ID NO: 6031644 - DNA, 25 bp, Homo sapien
gacaatcttgggctgcttggtttct

SEQ ID NO: 6031645 - DNA, 25 bp, Homo sapien
ctgcggaacatttttgatttttcat

SEQ ID NO: 6031646 - DNA, 25 bp, Homo sapien
ttcattagttctatctcttcatctg

SEQ ID NO: 6031647 - DNA, 25 bp, Homo sapien
tttaggccttcacctgtcaaatgtc

SEQ ID NO: 6031648 - DNA, 25 bp, Homo sapien
tgtattctttccctgagtaaccgta

SEQ ID NO: 6031649 - DNA, 25 bp, Homo sapien
cctagcttccagatctccaatgctg

SEQ ID NO: 6031650 - DNA, 25 bp, Homo sapien
gcgcccagtgtttcagttttgtaca

SEQ ID NO: 6031651 - DNA, 25 bp, Homo sapien
acccatttccttagcgtgagatcta

SEQ ID NO: 6031652 - DNA, 25 bp, Homo sapien
atctccaatgctgacaatcttgggc

SEQ ID NO: 6031653 - DNA, 25 bp, Homo sapien
aaatgtctgcggaacatttttgatt

SEQ ID NO: 6031654 - DNA, 25 bp, Homo sapien
atgaacctacggaatccttgtaaag

SEQ ID NO: 6031655 - DNA, 25 bp, Homo sapien
tcagttttgtacaatcttgatttag

SEQ ID NO: 6031656 - DNA, 25 bp, Homo sapien
ttgtacaatcttgatttaggatcat

SEQ ID NO: 6031657 - DNA, 25 bp, Homo sapien
taggattggcgactaaaacatgttg

SEQ ID NO: 6031658 - DNA, 25 bp, Homo sapien
aattatcagcatcatctttcttcaa

SEQ ID NO: 6031659 - DNA, 25 bp, Homo sapien
agcaaactggttcaattcgtttaat

SEQ ID NO: 6031660 - DNA, 25 bp, Homo sapien
cagcatcatctttcttcaatgaacc

SEQ ID NO: 6031661 - DNA, 25 bp, Homo sapien
ttcagatattcatatttagtaggat

SEQ ID NO: 6031662 - DNA, 25 bp, Homo sapien
tactttcctagcttccagatctcca

SEQ ID NO: 6031663 - DNA, 25 bp, Homo sapien
cctgtcaaatgtctgcggaacattt

SEQ ID NO: 6031664 - DNA, 25 bp, Homo sapien
cttgggctgcttggtttcttcttgt

SEQ ID NO: 6031665 - DNA, 25 bp, Homo sapien
tcttcaatgaacctacggaatcctt

SEQ ID NO: 6031666 - DNA, 25 bp, Homo sapien
ttatttcttttatcacgctcccact

SEQ ID NO: 6031667 - DNA, 25 bp, Homo sapien
tggcgactaaaacatgttgtacttt

SEQ ID NO: 6031668 - DNA, 25 bp, Homo sapien
gttcctcagattgctttgtaccatc

SEQ ID NO: 6031669 - DNA, 25 bp, Homo sapien
taattactctccgttgaatttatgt

SEQ ID NO: 6031670 - DNA, 25 bp, Homo sapien
cttatcctcaatttcatcacgtata

SEQ ID NO: 6031671 - DNA, 25 bp, Homo sapien
ggatcataattactctccgttgaat

SEQ ID NO: 6031672 - DNA, 25 bp, Homo sapien
agatctagcaaactggttcaattcg

SEQ ID NO: 6031673 - DNA, 25 bp, Homo sapien
agcgtgagatctagcaaactggttc

SEQ ID NO: 6031674 - DNA, 25 bp, Homo sapien
ttaattttaggccttcacctgtcaa

SEQ ID NO: 6031675 - DNA, 25 bp, Homo sapien
cacagacgccggctcacttgctgaa

SEQ ID NO: 6031676 - DNA, 25 bp, Homo sapien
gatgatgaaggtaatgaagattccg

SEQ ID NO: 6031677 - DNA, 25 bp, Homo sapien
gacgccggctcacttgctgaaaagg

SEQ ID NO: 6031678 - DNA, 25 bp, Homo sapien
acgaccaactcaggaaactttcgca

SEQ ID NO: 6031679 - DNA, 25 bp, Homo sapien
tttctcgcagtcgtagtagggccaa

SEQ ID NO: 6031680 - DNA, 25 bp, Homo sapien
tatctatacgcaaaaacgaccaact

SEQ ID NO: 6031681 - DNA, 25 bp, Homo sapien
aagatcttgcagattcaggtaaaaa

SEQ ID NO: 6031682 - DNA, 25 bp, Homo sapien
gtagtagggccaaccataatgattt

SEQ ID NO: 6031683 - DNA, 25 bp, Homo sapien
atatcgtatatacagggaatgaaag

SEQ ID NO: 6031684 - DNA, 25 bp, Homo sapien
ttgcatacccatgcgcaacaacaag

SEQ ID NO: 6031685 - DNA, 25 bp, Homo sapien
ggttctgtccttggttataatgctt

SEQ ID NO: 6031686 - DNA, 25 bp, Homo sapien
cttctaatcagagtaaagatgcaga

SEQ ID NO: 6031687 - DNA, 25 bp, Homo sapien
aagattggaccaactcaaaagggat

SEQ ID NO: 6031688 - DNA, 25 bp, Homo sapien
agcaaaagacaacaatagatcgaaa

SEQ ID NO: 6031689 - DNA, 25 bp, Homo sapien
acaatggcaacacattaaagtacat

SEQ ID NO: 6031690 - DNA, 25 bp, Homo sapien
ggctcacttgctgaaaaggtcgcac

SEQ ID NO: 6031691 - DNA, 25 bp, Homo sapien
tgcgaacagcaacaatggcaacaca

SEQ ID NO: 6031692 - DNA, 25 bp, Homo sapien
tccttggttataatgctttacctaa

SEQ ID NO: 6031693 - DNA, 25 bp, Homo sapien
atgatttgttaagcaattcaagaaa

SEQ ID NO: 6031694 - DNA, 25 bp, Homo sapien
ggaagattgcctctggcagcaaaag

SEQ ID NO: 6031695 - DNA, 25 bp, Homo sapien
ggaccaactcaaaagggatgcgaac

SEQ ID NO: 6031696 - DNA, 25 bp, Homo sapien
gagggaaggaggtgtcacccacaaa

SEQ ID NO: 6031697 - DNA, 25 bp, Homo sapien
acccatgcgcaacaacaaggaagat

SEQ ID NO: 6031698 - DNA, 25 bp, Homo sapien
gaaggtaatgaagattccgagagta

SEQ ID NO: 6031699 - DNA, 25 bp, Homo sapien
tttcccgaaacttctaatcagagta

SEQ ID NO: 6031700 - DNA, 25 bp, Homo sapien
ttataatgctttacctaaaatgaaa

SEQ ID NO: 6031701 - DNA, 25 bp, Homo sapien
actccaaagtgcacttttaaaacag

SEQ ID NO: 6031702 - DNA, 25 bp, Homo sapien
caatagatcgaaaagctttattttt

SEQ ID NO: 6031703 - DNA, 25 bp, Homo sapien
tgaaagttccggcattaactttcca

SEQ ID NO: 6031704 - DNA, 25 bp, Homo sapien
atgcagacttaccacaactacagaa

SEQ ID NO: 6031705 - DNA, 25 bp, Homo sapien
gcagtcgtagtagggccaaccataa

SEQ ID NO: 6031706 - DNA, 25 bp, Homo sapien
cttgctgaaaaggtcgcactctaat

SEQ ID NO: 6031707 - DNA, 25 bp, Homo sapien
ttttaaaagatcttgcagattcagg

SEQ ID NO: 6031708 - DNA, 25 bp, Homo sapien
tgttaagcaattcaagaaagttaca

SEQ ID NO: 6031709 - DNA, 25 bp, Homo sapien
acctgtaagattggaccaactcaaa

SEQ ID NO: 6031710 - DNA, 25 bp, Homo sapien
atacactatctatacgcaaaaacga

SEQ ID NO: 6031711 - DNA, 25 bp, Homo sapien
tacagaatacactatctatacgcaa

SEQ ID NO: 6031712 - DNA, 25 bp, Homo sapien
gcgcaacaacaaggaagattgcctc

SEQ ID NO: 6031713 - DNA, 25 bp, Homo sapien
aatgaagattccgagagtaaacttg

SEQ ID NO: 6031714 - DNA, 25 bp, Homo sapien
gcaacacattaaagtacatacaagg

SEQ ID NO: 6031715 - DNA, 25 bp, Homo sapien
cagcaacaatggcaacacattaaag

SEQ ID NO: 6031716 - DNA, 25 bp, Homo sapien
cattaaagtacatacaaggagggaa

SEQ ID NO: 6031717 - DNA, 25 bp, Homo sapien
aatgaagagagttccgacgatgatg

SEQ ID NO: 6031718 - DNA, 25 bp, Homo sapien
gcattaactttccacagacgccggc

SEQ ID NO: 6031719 - DNA, 25 bp, Homo sapien
cagggaatgaaagttccggcattaa

SEQ ID NO: 6031720 - DNA, 25 bp, Homo sapien
aaaaggttgcatacccatgcgcaac

SEQ ID NO: 6031721 - DNA, 25 bp, Homo sapien
caacaaggaagattgcctctggcag

SEQ ID NO: 6031722 - DNA, 25 bp, Homo sapien
aggaaactttcgcaaatttctcgca

SEQ ID NO: 6031723 - DNA, 25 bp, Homo sapien
gtctagttttaaaagatcttgcaga

SEQ ID NO: 6031724 - DNA, 25 bp, Homo sapien
gattccgagagtaaacttggcaaaa

SEQ ID NO: 6031725 - DNA, 25 bp, Homo sapien
tctggcagcaaaagacaacaataga

SEQ ID NO: 6031726 - DNA, 25 bp, Homo sapien
agacaacaatagatcgaaaagcttt

SEQ ID NO: 6031727 - DNA, 25 bp, Homo sapien
agtacatacaaggagggaaggaggt

SEQ ID NO: 6031728 - DNA, 25 bp, Homo sapien
gtaaagatgcagacttaccacaact

SEQ ID NO: 6031729 - DNA, 25 bp, Homo sapien
aagggatgcgaacagcaacaatggc

SEQ ID NO: 6031730 - DNA, 25 bp, Homo sapien
taaaaccacctgtaagattggacca

SEQ ID NO: 6031731 - DNA, 25 bp, Homo sapien
attgcctctggcagcaaaagacaac

SEQ ID NO: 6031732 - DNA, 25 bp, Homo sapien
gtgtcacccacaaaaaggttgcata

SEQ ID NO: 6031733 - DNA, 25 bp, Homo sapien
tccgacgatgatgaaggtaatgaag

SEQ ID NO: 6031734 - DNA, 25 bp, Homo sapien
gcaattcaagaaagttacaaaagta

SEQ ID NO: 6031735 - DNA, 25 bp, Homo sapien
ttgcagattcaggtaaaaatgaaga

SEQ ID NO: 6031736 - DNA, 25 bp, Homo sapien
atcagagtaaagatgcagacttacc

SEQ ID NO: 6031737 - DNA, 25 bp, Homo sapien
actttcgcaaatttctcgcagtcgt

SEQ ID NO: 6031738 - DNA, 25 bp, Homo sapien
acttaccacaactacagaatacact

SEQ ID NO: 6031739 - DNA, 25 bp, Homo sapien
gttccggcattaactttccacagac

SEQ ID NO: 6031740 - DNA, 25 bp, Homo sapien
tacgcaaaaacgaccaactcaggaa

SEQ ID NO: 6031741 - DNA, 25 bp, Homo sapien
tggcaaaaaactccaaagtgcactt

SEQ ID NO: 6031742 - DNA, 25 bp, Homo sapien
gcaaatttctcgcagtcgtagtagg

SEQ ID NO: 6031743 - DNA, 25 bp, Homo sapien
actcaaaagggatgcgaacagcaac

SEQ ID NO: 6031744 - DNA, 25 bp, Homo sapien
gggccaaccataatgatttgttaag

SEQ ID NO: 6031745 - DNA, 25 bp, Homo sapien
gtaaaaatgaagagagttccgacga

SEQ ID NO: 6031746 - DNA, 25 bp, Homo sapien
accataatgatttgttaagcaattc

SEQ ID NO: 6031747 - DNA, 25 bp, Homo sapien
tgctttacctaaaatgaaaagtcta

SEQ ID NO: 6031748 - DNA, 25 bp, Homo sapien
attcaggtaaaaatgaagagagttc

SEQ ID NO: 6031749 - DNA, 25 bp, Homo sapien
tcgcactctaatattttaaaaccac

SEQ ID NO: 6031750 - DNA, 25 bp, Homo sapien
cccacaaaaaggttgcatacccatg

SEQ ID NO: 6031751 - DNA, 25 bp, Homo sapien
tatatacagggaatgaaagttccgg

SEQ ID NO: 6031752 - DNA, 25 bp, Homo sapien
actttccacagacgccggctcactt

SEQ ID NO: 6031753 - DNA, 25 bp, Homo sapien
tacaaggagggaaggaggtgtcacc

SEQ ID NO: 6031754 - DNA, 25 bp, Homo sapien
caactcaggaaactttcgcaaattt

SEQ ID NO: 6031755 - DNA, 25 bp, Homo sapien
gaaaaggtcgcactctaatatttta

SEQ ID NO: 6031756 - DNA, 25 bp, Homo sapien
cacaactacagaatacactatctat

SEQ ID NO: 6031757 - DNA, 25 bp, Homo sapien
ccgaaacttctaatcagagtaaaga

SEQ ID NO: 6031758 - DNA, 25 bp, Homo sapien
gagagttccgacgatgatgaaggta

SEQ ID NO: 6031759 - DNA, 25 bp, Homo sapien
ctttatgagttgttgcagaccacct

SEQ ID NO: 6031760 - DNA, 25 bp, Homo sapien
agttcttagacagcagtggtaacgc

SEQ ID NO: 6031761 - DNA, 25 bp, Homo sapien
atcagttttatcacttttatcgttt

SEQ ID NO: 6031762 - DNA, 25 bp, Homo sapien
gagttgttgcagaccaccttgctca

SEQ ID NO: 6031763 - DNA, 25 bp, Homo sapien
ctaactccatggttgggacggcggc

SEQ ID NO: 6031764 - DNA, 25 bp, Homo sapien
gcagtggtaacgctgcaccttcttc

SEQ ID NO: 6031765 - DNA, 25 bp, Homo sapien
ccttcatcatcgtcggaactctctt

SEQ ID NO: 6031766 - DNA, 25 bp, Homo sapien
ctaggccaccatttaattcattttc

SEQ ID NO: 6031767 - DNA, 25 bp, Homo sapien
cttcgctgtacactaactccatggt

SEQ ID NO: 6031768 - DNA, 25 bp, Homo sapien
gaatcttcattaccttcatcatcgt

SEQ ID NO: 6031769 - DNA, 25 bp, Homo sapien
cggcggcaacttctttgaagttctt

SEQ ID NO: 6031770 - DNA, 25 bp, Homo sapien
gtcaagcttatatggtgagttgaac

SEQ ID NO: 6031771 - DNA, 25 bp, Homo sapien
ctttgaagttcttagacagcagtgg

SEQ ID NO: 6031772 - DNA, 25 bp, Homo sapien
tgtcatcttcgtcttccaagtcaag

SEQ ID NO: 6031773 - DNA, 25 bp, Homo sapien
gaccaccttgctcattaaatagtcc

SEQ ID NO: 6031774 - DNA, 25 bp, Homo sapien
ctgcaccttcttcttgattccgagt

SEQ ID NO: 6031775 - DNA, 25 bp, Homo sapien
aatcaactttatctggggtgtcatc

SEQ ID NO: 6031776 - DNA, 25 bp, Homo sapien
gaatagccttctggtacatacggta

SEQ ID NO: 6031777 - DNA, 25 bp, Homo sapien
ttcatcaatttgttctagtgggagt

SEQ ID NO: 6031778 - DNA, 25 bp, Homo sapien
ttctagtgggagtaaatcaacttta

SEQ ID NO: 6031779 - DNA, 25 bp, Homo sapien
tacggtaacggctcctgcctctgtg

SEQ ID NO: 6031780 - DNA, 25 bp, Homo sapien
tggtgagttgaacgtcttcagcttt

SEQ ID NO: 6031781 - DNA, 25 bp, Homo sapien
cctctgtggtgctatttcgatatca

SEQ ID NO: 6031782 - DNA, 25 bp, Homo sapien
atcgaggccttcttcgctgtacact

SEQ ID NO: 6031783 - DNA, 25 bp, Homo sapien
ggtacatacggtaacggctcctgcc

SEQ ID NO: 6031784 - DNA, 25 bp, Homo sapien
aatttgttctagtgggagtaaatca

SEQ ID NO: 6031785 - DNA, 25 bp, Homo sapien
actctcttcatttttacctgaatct

SEQ ID NO: 6031786 - DNA, 25 bp, Homo sapien
cattaaatagtcctaggccaccatt

SEQ ID NO: 6031787 - DNA, 25 bp, Homo sapien
aggaatcctgttttaaaagtgcact

SEQ ID NO: 6031788 - DNA, 25 bp, Homo sapien
tgttgaaatggggaatagccttctg

SEQ ID NO: 6031789 - DNA, 25 bp, Homo sapien
ttcatttttacctgaatctgcaaga

SEQ ID NO: 6031790 - DNA, 25 bp, Homo sapien
caacttctttgaagttcttagacag

SEQ ID NO: 6031791 - DNA, 25 bp, Homo sapien
gccttcttcatcaatttgttctagt

SEQ ID NO: 6031792 - DNA, 25 bp, Homo sapien
ggccttcttcgctgtacactaactc

SEQ ID NO: 6031793 - DNA, 25 bp, Homo sapien
tcaccgtcggaggaatcctgtttta

SEQ ID NO: 6031794 - DNA, 25 bp, Homo sapien
tgcactttggagttttttgccaagt

SEQ ID NO: 6031795 - DNA, 25 bp, Homo sapien
cttcttcttgattccgagtgatgca

SEQ ID NO: 6031796 - DNA, 25 bp, Homo sapien
ttcaatatcatcttgttgaaatggg

SEQ ID NO: 6031797 - DNA, 25 bp, Homo sapien
gatatcatagtcatcagttttatca

SEQ ID NO: 6031798 - DNA, 25 bp, Homo sapien
ctcctgcctctgtggtgctatttcg

SEQ ID NO: 6031799 - DNA, 25 bp, Homo sapien
ttgccaagtttactctcggaatctt

SEQ ID NO: 6031800 - DNA, 25 bp, Homo sapien
tgatgcactcagtctcatctttttc

SEQ ID NO: 6031801 - DNA, 25 bp, Homo sapien
tagacagcagtggtaacgctgcacc

SEQ ID NO: 6031802 - DNA, 25 bp, Homo sapien
tgggagtaaatcaactttatctggg

SEQ ID NO: 6031803 - DNA, 25 bp, Homo sapien
atagtcctaggccaccatttaattc

SEQ ID NO: 6031804 - DNA, 25 bp, Homo sapien
aaatggggaatagccttctggtaca

SEQ ID NO: 6031805 - DNA, 25 bp, Homo sapien
tcggaactctcttcatttttacctg

SEQ ID NO: 6031806 - DNA, 25 bp, Homo sapien
tttacctgaatctgcaagatctttt

SEQ ID NO: 6031807 - DNA, 25 bp, Homo sapien
ctttatctggggtgtcatcttcgtc

SEQ ID NO: 6031808 - DNA, 25 bp, Homo sapien
tgcaagatcttttaaaactagactt

SEQ ID NO: 6031809 - DNA, 25 bp, Homo sapien
atagtcatcagttttatcactttta

SEQ ID NO: 6031810 - DNA, 25 bp, Homo sapien
ggagttctttatgagttgttgcaga

SEQ ID NO: 6031811 - DNA, 25 bp, Homo sapien
gttgcagaccaccttgctcattaaa

SEQ ID NO: 6031812 - DNA, 25 bp, Homo sapien
gttgaacgtcttcagcttttcaata

SEQ ID NO: 6031813 - DNA, 25 bp, Homo sapien
ttaattcattttcaccgtcggagga

SEQ ID NO: 6031814 - DNA, 25 bp, Homo sapien
gtaacgctgcaccttcttcttgatt

SEQ ID NO: 6031815 - DNA, 25 bp, Homo sapien
cttatatggtgagttgaacgtcttc

SEQ ID NO: 6031816 - DNA, 25 bp, Homo sapien
tcatcttgttgaaatggggaatagc

SEQ ID NO: 6031817 - DNA, 25 bp, Homo sapien
agtttactctcggaatcttcattac

SEQ ID NO: 6031818 - DNA, 25 bp, Homo sapien
tcatcgtcggaactctcttcatttt

SEQ ID NO: 6031819 - DNA, 25 bp, Homo sapien
actcagtctcatctttttcgccttc

SEQ ID NO: 6031820 - DNA, 25 bp, Homo sapien
tttttgctcattcttcgtggagttc

SEQ ID NO: 6031821 - DNA, 25 bp, Homo sapien
cgtcttcagcttttcaatatcatct

SEQ ID NO: 6031822 - DNA, 25 bp, Homo sapien
ctctcggaatcttcattaccttcat

SEQ ID NO: 6031823 - DNA, 25 bp, Homo sapien
ttgggacggcggcaacttctttgaa

SEQ ID NO: 6031824 - DNA, 25 bp, Homo sapien
cttgattccgagtgatgcactcagt

SEQ ID NO: 6031825 - DNA, 25 bp, Homo sapien
ttccaagtcaagcttatatggtgag

SEQ ID NO: 6031826 - DNA, 25 bp, Homo sapien
cttcgtggagttctttatgagttgt

SEQ ID NO: 6031827 - DNA, 25 bp, Homo sapien
tttttcgccttcttcatcaatttgt

SEQ ID NO: 6031828 - DNA, 25 bp, Homo sapien
aacggctcctgcctctgtggtgcta

SEQ ID NO: 6031829 - DNA, 25 bp, Homo sapien
tttagttttttgctcattcttcgtg

SEQ ID NO: 6031830 - DNA, 25 bp, Homo sapien
tggtgctatttcgatatcatagtca

SEQ ID NO: 6031831 - DNA, 25 bp, Homo sapien
ccatggttgggacggcggcaacttc

SEQ ID NO: 6031832 - DNA, 25 bp, Homo sapien
ccttctggtacatacggtaacggct

SEQ ID NO: 6031833 - DNA, 25 bp, Homo sapien
caccatttaattcattttcaccgtc

SEQ ID NO: 6031834 - DNA, 25 bp, Homo sapien
tatttcgatatcatagtcatcagtt

SEQ ID NO: 6031835 - DNA, 25 bp, Homo sapien
tcattaccttcatcatcgtcggaac

SEQ ID NO: 6031836 - DNA, 25 bp, Homo sapien
tcattttcaccgtcggaggaatcct

SEQ ID NO: 6031837 - DNA, 25 bp, Homo sapien
ctcattcttcgtggagttctttatg

SEQ ID NO: 6031838 - DNA, 25 bp, Homo sapien
ctggggtgtcatcttcgtcttccaa

SEQ ID NO: 6031839 - DNA, 25 bp, Homo sapien
cttgctcattaaatagtcctaggcc

SEQ ID NO: 6031840 - DNA, 25 bp, Homo sapien
tgaatctgcaagatcttttaaaact

SEQ ID NO: 6031841 - DNA, 25 bp, Homo sapien
cttcgtcttccaagtcaagcttata

SEQ ID NO: 6031842 - DNA, 25 bp, Homo sapien
tccgagtgatgcactcagtctcatc

SEQ ID NO: 6031843 - DNA, 25 bp, Homo sapien
tctcatctttttcgccttcttcatc

SEQ ID NO: 6031844 - DNA, 25 bp, Homo sapien
ctgttttaaaagtgcactttggagt

SEQ ID NO: 6031845 - DNA, 25 bp, Homo sapien
tgtacactaactccatggttgggac

SEQ ID NO: 6031846 - DNA, 25 bp, Homo sapien
cagcttttcaatatcatcttgttga

SEQ ID NO: 6031847 - DNA, 25 bp, Homo sapien
tcaagcttaacgtccacatcgatgg

SEQ ID NO: 6031848 - DNA, 25 bp, Homo sapien
aggatttggtgaatattatagagag

SEQ ID NO: 6031849 - DNA, 25 bp, Homo sapien
gaaaaaagccctagatacgatcaat

SEQ ID NO: 6031850 - DNA, 25 bp, Homo sapien
tttcacgctgtggattacgacaagc

SEQ ID NO: 6031851 - DNA, 25 bp, Homo sapien
aaagtcaaagagattctacgacaac

SEQ ID NO: 6031852 - DNA, 25 bp, Homo sapien
tgctcagttggtcgaagaactggat

SEQ ID NO: 6031853 - DNA, 25 bp, Homo sapien
gttgcaattcgtcgattggttctat

SEQ ID NO: 6031854 - DNA, 25 bp, Homo sapien
acaccacaaacgtgacttagcttgg

SEQ ID NO: 6031855 - DNA, 25 bp, Homo sapien
cgacaacaccacaaacgtgacttag

SEQ ID NO: 6031856 - DNA, 25 bp, Homo sapien
caagatgcattattaaataatttgc

SEQ ID NO: 6031857 - DNA, 25 bp, Homo sapien
cgcctgaaagtcaaagagattctac

SEQ ID NO: 6031858 - DNA, 25 bp, Homo sapien
cgagaaaagagaccgcgctataaaa

SEQ ID NO: 6031859 - DNA, 25 bp, Homo sapien
attcgtcgattggttctattgctac

SEQ ID NO: 6031860 - DNA, 25 bp, Homo sapien
gaaagcaagcatgataataaggaca

SEQ ID NO: 6031861 - DNA, 25 bp, Homo sapien
tttcagatttcgaatcggtactgaa

SEQ ID NO: 6031862 - DNA, 25 bp, Homo sapien
agcggagaaagcaagcatgataata

SEQ ID NO: 6031863 - DNA, 25 bp, Homo sapien
gttctattgctaccgcctgaaagtc

SEQ ID NO: 6031864 - DNA, 25 bp, Homo sapien
gttggtcgaagaactggatttcgtg

SEQ ID NO: 6031865 - DNA, 25 bp, Homo sapien
ctagagagaagcttttgagcaaaac

SEQ ID NO: 6031866 - DNA, 25 bp, Homo sapien
aaataatttgcaaaaattaagtgca

SEQ ID NO: 6031867 - DNA, 25 bp, Homo sapien
cagtgggaaaaaagccctagatacg

SEQ ID NO: 6031868 - DNA, 25 bp, Homo sapien
attgccaacgaacacaatgatgaag

SEQ ID NO: 6031869 - DNA, 25 bp, Homo sapien
cttcaccaaggaacgtcgtcatcgt

SEQ ID NO: 6031870 - DNA, 25 bp, Homo sapien
gattacgacaagcttcaccaaggaa

SEQ ID NO: 6031871 - DNA, 25 bp, Homo sapien
aaggacagttttgcagccattgcca

SEQ ID NO: 6031872 - DNA, 25 bp, Homo sapien
tttgcaaaaattaagtgcaatctcc

SEQ ID NO: 6031873 - DNA, 25 bp, Homo sapien
taagtgcaatctcccgcagaaaaga

SEQ ID NO: 6031874 - DNA, 25 bp, Homo sapien
ccagcactagagagaagcttttgag

SEQ ID NO: 6031875 - DNA, 25 bp, Homo sapien
aaagaaagcggagaaagcaagcatg

SEQ ID NO: 6031876 - DNA, 25 bp, Homo sapien
agttttgcagccattgccaacgaac

SEQ ID NO: 6031877 - DNA, 25 bp, Homo sapien
gttttgcaagatgcattattaaata

SEQ ID NO: 6031878 - DNA, 25 bp, Homo sapien
cgaagaactggatttcgtgttgcaa

SEQ ID NO: 6031879 - DNA, 25 bp, Homo sapien
gatcaatgcgataagttgcatattg

SEQ ID NO: 6031880 - DNA, 25 bp, Homo sapien
gcagccattgccaacgaacacaatg

SEQ ID NO: 6031881 - DNA, 25 bp, Homo sapien
tgcgataagttgcatattgtgaagc

SEQ ID NO: 6031882 - DNA, 25 bp, Homo sapien
cacaatgatgaagaagaagagattg

SEQ ID NO: 6031883 - DNA, 25 bp, Homo sapien
tttgagcaaaacaaaacaactgacg

SEQ ID NO: 6031884 - DNA, 25 bp, Homo sapien
tgacttagcttggaacgacgagaaa

SEQ ID NO: 6031885 - DNA, 25 bp, Homo sapien
gtattgtggaaatgacctacaaata

SEQ ID NO: 6031886 - DNA, 25 bp, Homo sapien
aatgaacgaggacatatatgctcag

SEQ ID NO: 6031887 - DNA, 25 bp, Homo sapien
gcatattgtgaagcttgataaacaa

SEQ ID NO: 6031888 - DNA, 25 bp, Homo sapien
caaggaacgtcgtcatcgtcaagct

SEQ ID NO: 6031889 - DNA, 25 bp, Homo sapien
gaacgacgagaaaagagaccgcgct

SEQ ID NO: 6031890 - DNA, 25 bp, Homo sapien
agccctagatacgatcaatgcgata

SEQ ID NO: 6031891 - DNA, 25 bp, Homo sapien
caaacgtgacttagcttggaacgac

SEQ ID NO: 6031892 - DNA, 25 bp, Homo sapien
aagcatgataataaggacagttttg

SEQ ID NO: 6031893 - DNA, 25 bp, Homo sapien
gcgctataaaatttcacgctgtgga

SEQ ID NO: 6031894 - DNA, 25 bp, Homo sapien
acgtcgtcatcgtcaagcttaacgt

SEQ ID NO: 6031895 - DNA, 25 bp, Homo sapien
gagaccgcgctataaaatttcacgc

SEQ ID NO: 6031896 - DNA, 25 bp, Homo sapien
aaaaagccagcactagagagaagct

SEQ ID NO: 6031897 - DNA, 25 bp, Homo sapien
cgcagaaaagaaagcggagaaagca

SEQ ID NO: 6031898 - DNA, 25 bp, Homo sapien
aaaaattaagtgcaatctcccgcag

SEQ ID NO: 6031899 - DNA, 25 bp, Homo sapien
gagattgaatttgaggatttggtga

SEQ ID NO: 6031900 - DNA, 25 bp, Homo sapien
gaagaagagattgaatttgaggatt

SEQ ID NO: 6031901 - DNA, 25 bp, Homo sapien
gataataaggacagttttgcagcca

SEQ ID NO: 6031902 - DNA, 25 bp, Homo sapien
atattatagagagcaaagtttcaga

SEQ ID NO: 6031903 - DNA, 25 bp, Homo sapien
tcatcgtcaagcttaacgtccacat

SEQ ID NO: 6031904 - DNA, 25 bp, Homo sapien
agatacgatcaatgcgataagttgc

SEQ ID NO: 6031905 - DNA, 25 bp, Homo sapien
tgctaccgcctgaaagtcaaagaga

SEQ ID NO: 6031906 - DNA, 25 bp, Homo sapien
cgattggttctattgctaccgcctg

SEQ ID NO: 6031907 - DNA, 25 bp, Homo sapien
aaagagattctacgacaacaccaca

SEQ ID NO: 6031908 - DNA, 25 bp, Homo sapien
ttaacgtccacatcgatggaaaaag

SEQ ID NO: 6031909 - DNA, 25 bp, Homo sapien
gaatttgaggatttggtgaatatta

SEQ ID NO: 6031910 - DNA, 25 bp, Homo sapien
actggatttcgtgttgcaattcgtc

SEQ ID NO: 6031911 - DNA, 25 bp, Homo sapien
gcttgataaacaaatgaacgaggac

SEQ ID NO: 6031912 - DNA, 25 bp, Homo sapien
tttcgtgttgcaattcgtcgattgg

SEQ ID NO: 6031913 - DNA, 25 bp, Homo sapien
tggaaatgacctacaaataccccga

SEQ ID NO: 6031914 - DNA, 25 bp, Homo sapien
taaacaaatgaacgaggacatatat

SEQ ID NO: 6031915 - DNA, 25 bp, Homo sapien
aatcggtactgaaatgtagtattgt

SEQ ID NO: 6031916 - DNA, 25 bp, Homo sapien
attctacgacaacaccacaaacgtg

SEQ ID NO: 6031917 - DNA, 25 bp, Homo sapien
tagagagcaaagtttcagatttcga

SEQ ID NO: 6031918 - DNA, 25 bp, Homo sapien
tggtgaatattatagagagcaaagt

SEQ ID NO: 6031919 - DNA, 25 bp, Homo sapien
gacaagcttcaccaaggaacgtcgt

SEQ ID NO: 6031920 - DNA, 25 bp, Homo sapien
gatgaagaagaagagattgaatttg

SEQ ID NO: 6031921 - DNA, 25 bp, Homo sapien
tcgatggaaaaagccagcactagag

SEQ ID NO: 6031922 - DNA, 25 bp, Homo sapien
gcaaagtttcagatttcgaatcggt

SEQ ID NO: 6031923 - DNA, 25 bp, Homo sapien
tgtgaagcttgataaacaaatgaac

SEQ ID NO: 6031924 - DNA, 25 bp, Homo sapien
tactgaaatgtagtattgtggaaat

SEQ ID NO: 6031925 - DNA, 25 bp, Homo sapien
taaaatttcacgctgtggattacga

SEQ ID NO: 6031926 - DNA, 25 bp, Homo sapien
agaagcttttgagcaaaacaaaaca

SEQ ID NO: 6031927 - DNA, 25 bp, Homo sapien
tccacatcgatggaaaaagccagca

SEQ ID NO: 6031928 - DNA, 25 bp, Homo sapien
gctgtggattacgacaagcttcacc

SEQ ID NO: 6031929 - DNA, 25 bp, Homo sapien
atctcccgcagaaaagaaagcggag

SEQ ID NO: 6031930 - DNA, 25 bp, Homo sapien
aatgtagtattgtggaaatgaccta

SEQ ID NO: 6031931 - DNA, 25 bp, Homo sapien
atttcgaatcggtactgaaatgtag

SEQ ID NO: 6031932 - DNA, 25 bp, Homo sapien
aacgaacacaatgatgaagaagaag

SEQ ID NO: 6031933 - DNA, 25 bp, Homo sapien
cgaggacatatatgctcagttggtc

SEQ ID NO: 6031934 - DNA, 25 bp, Homo sapien
taagttgcatattgtgaagcttgat

SEQ ID NO: 6031935 - DNA, 25 bp, Homo sapien
catatatgctcagttggtcgaagaa

SEQ ID NO: 6031936 - DNA, 25 bp, Homo sapien
agcttggaacgacgagaaaagagac

SEQ ID NO: 6031937 - DNA, 25 bp, Homo sapien
atcgatgtggacgttaagcttgacg

SEQ ID NO: 6031938 - DNA, 25 bp, Homo sapien
agcagccagaggccgagtttaacag

SEQ ID NO: 6031939 - DNA, 25 bp, Homo sapien
gaattgagtgtacttgtcatcgatt

SEQ ID NO: 6031940 - DNA, 25 bp, Homo sapien
tactactgacggctgatacagatgc

SEQ ID NO: 6031941 - DNA, 25 bp, Homo sapien
cagaggttgctgaggatgtagttgt

SEQ ID NO: 6031942 - DNA, 25 bp, Homo sapien
gacatctcgtttctcttgatgggag

SEQ ID NO: 6031943 - DNA, 25 bp, Homo sapien
tgaccaaatcggcagttttcttgaa

SEQ ID NO: 6031944 - DNA, 25 bp, Homo sapien
cgaatggttccacagaggttgctga

SEQ ID NO: 6031945 - DNA, 25 bp, Homo sapien
agtgtacttgtcatcgatttgtgtt

SEQ ID NO: 6031946 - DNA, 25 bp, Homo sapien
ggtttcgaattgagtgtacttgtca

SEQ ID NO: 6031947 - DNA, 25 bp, Homo sapien
tttgggctctcaattcatccaaatt

SEQ ID NO: 6031948 - DNA, 25 bp, Homo sapien
gaggagcctgcatagcttttaacta

SEQ ID NO: 6031949 - DNA, 25 bp, Homo sapien
gctgatacagatgcgaatggttcca

SEQ ID NO: 6031950 - DNA, 25 bp, Homo sapien
cagatgcgaatggttccacagaggt

SEQ ID NO: 6031951 - DNA, 25 bp, Homo sapien
acgacgccatagaacccacgagacg

SEQ ID NO: 6031952 - DNA, 25 bp, Homo sapien
ttttccatcgatgtggacgttaagc

SEQ ID NO: 6031953 - DNA, 25 bp, Homo sapien
aacttgaaaatacgacgccatagaa

SEQ ID NO: 6031954 - DNA, 25 bp, Homo sapien
taaaattccggactgcaaaatttga

SEQ ID NO: 6031955 - DNA, 25 bp, Homo sapien
ctctcaattcatccaaattcaggtc

SEQ ID NO: 6031956 - DNA, 25 bp, Homo sapien
aggatgtagttgtagtggctagaat

SEQ ID NO: 6031957 - DNA, 25 bp, Homo sapien
tccggactgcaaaatttgatttcct

SEQ ID NO: 6031958 - DNA, 25 bp, Homo sapien
cctgcatagcttttaactagaccta

SEQ ID NO: 6031959 - DNA, 25 bp, Homo sapien
gactgggtgcttgaagagaggacga

SEQ ID NO: 6031960 - DNA, 25 bp, Homo sapien
acccacgagacgcagcataggagga

SEQ ID NO: 6031961 - DNA, 25 bp, Homo sapien
catagaacccacgagacgcagcata

SEQ ID NO: 6031962 - DNA, 25 bp, Homo sapien
ttaactagacctagggtgacgagta

SEQ ID NO: 6031963 - DNA, 25 bp, Homo sapien
ggcattttccagtactttgaccaaa

SEQ ID NO: 6031964 - DNA, 25 bp, Homo sapien
gacgttccttggtgaagcttgtcgt

SEQ ID NO: 6031965 - DNA, 25 bp, Homo sapien
aaatcggcagttttcttgaagacgg

SEQ ID NO: 6031966 - DNA, 25 bp, Homo sapien
gtggacgttaagcttgacgatgacg

SEQ ID NO: 6031967 - DNA, 25 bp, Homo sapien
ttccagtactttgaccaaatcggca

SEQ ID NO: 6031968 - DNA, 25 bp, Homo sapien
aaaagcttctctctagtgctggctt

SEQ ID NO: 6031969 - DNA, 25 bp, Homo sapien
caggtaacttgaaaatacgacgcca

SEQ ID NO: 6031970 - DNA, 25 bp, Homo sapien
ttgctcaaaagcttctctctagtgc

SEQ ID NO: 6031971 - DNA, 25 bp, Homo sapien
attcatccaaattcaggtcactttg

SEQ ID NO: 6031972 - DNA, 25 bp, Homo sapien
gttaagcttgacgatgacgacgttc

SEQ ID NO: 6031973 - DNA, 25 bp, Homo sapien
ttaaggaattggtttgggctctcaa

SEQ ID NO: 6031974 - DNA, 25 bp, Homo sapien
gttccacagaggttgctgaggatgt

SEQ ID NO: 6031975 - DNA, 25 bp, Homo sapien
ttcgtcagttgttttgttttgctca

SEQ ID NO: 6031976 - DNA, 25 bp, Homo sapien
cttgtcatcgatttgtgttaaggaa

SEQ ID NO: 6031977 - DNA, 25 bp, Homo sapien
ctgacggctgatacagatgcgaatg

SEQ ID NO: 6031978 - DNA, 25 bp, Homo sapien
cgagacgcagcataggaggaaccca

SEQ ID NO: 6031979 - DNA, 25 bp, Homo sapien
tgggtgcatttagcacaagactggg

SEQ ID NO: 6031980 - DNA, 25 bp, Homo sapien
cccttgaaaaacttgaatagcagcc

SEQ ID NO: 6031981 - DNA, 25 bp, Homo sapien
gaagacggtttcgaattgagtgtac

SEQ ID NO: 6031982 - DNA, 25 bp, Homo sapien
aaaaacttgaatagcagccagaggc

SEQ ID NO: 6031983 - DNA, 25 bp, Homo sapien
gcagcataggaggaacccaagtgat

SEQ ID NO: 6031984 - DNA, 25 bp, Homo sapien
ctggctttttccatcgatgtggacg

SEQ ID NO: 6031985 - DNA, 25 bp, Homo sapien
taggaggaacccaagtgataaatag

SEQ ID NO: 6031986 - DNA, 25 bp, Homo sapien
gtgcttgaagagaggacgaggagcc

SEQ ID NO: 6031987 - DNA, 25 bp, Homo sapien
gaacccaagtgataaatagacatct

SEQ ID NO: 6031988 - DNA, 25 bp, Homo sapien
tagcttttaactagacctagggtga

SEQ ID NO: 6031989 - DNA, 25 bp, Homo sapien
cactttgtaaaattccggactgcaa

SEQ ID NO: 6031990 - DNA, 25 bp, Homo sapien
gatgacgacgttccttggtgaagct

SEQ ID NO: 6031991 - DNA, 25 bp, Homo sapien
ttgctgaggatgtagttgtagtggc

SEQ ID NO: 6031992 - DNA, 25 bp, Homo sapien
aggacgaggagcctgcatagctttt

SEQ ID NO: 6031993 - DNA, 25 bp, Homo sapien
tagttgtagtggctagaatgggtgc

SEQ ID NO: 6031994 - DNA, 25 bp, Homo sapien
ttcttgaagacggtttcgaattgag

SEQ ID NO: 6031995 - DNA, 25 bp, Homo sapien
catttagcacaagactgggtgcttg

SEQ ID NO: 6031996 - DNA, 25 bp, Homo sapien
ctgcaaaatttgatttcctctcacc

SEQ ID NO: 6031997 - DNA, 25 bp, Homo sapien
atcgatttgtgttaaggaattggtt

SEQ ID NO: 6031998 - DNA, 25 bp, Homo sapien
tttgttttgctcaaaagcttctctc

SEQ ID NO: 6031999 - DNA, 25 bp, Homo sapien
atttcctctcaccaagttattcgtc

SEQ ID NO: 6032000 - DNA, 25 bp, Homo sapien
tatacccttgaaaaacttgaatagc

SEQ ID NO: 6032001 - DNA, 25 bp, Homo sapien
caagttattcgtcagttgttttgtt

SEQ ID NO: 6032002 - DNA, 25 bp, Homo sapien
ctcttgatgggaggcattttccagt

SEQ ID NO: 6032003 - DNA, 25 bp, Homo sapien
ttctctctagtgctggctttttcca

SEQ ID NO: 6032004 - DNA, 25 bp, Homo sapien
taaatagacatctcgtttctcttga

SEQ ID NO: 6032005 - DNA, 25 bp, Homo sapien
tctcaccaagttattcgtcagttgt

SEQ ID NO: 6032006 - DNA, 25 bp, Homo sapien
tcgtttctcttgatgggaggcattt

SEQ ID NO: 6032007 - DNA, 25 bp, Homo sapien
ctagaatgggtgcatttagcacaag

SEQ ID NO: 6032008 - DNA, 25 bp, Homo sapien
aagtgataaatagacatctcgtttc

SEQ ID NO: 6032009 - DNA, 25 bp, Homo sapien
gaagagaggacgaggagcctgcata

SEQ ID NO: 6032010 - DNA, 25 bp, Homo sapien
tcaggtcactttgtaaaattccgga

SEQ ID NO: 6032011 - DNA, 25 bp, Homo sapien
aatttgatttcctctcaccaagtta

SEQ ID NO: 6032012 - DNA, 25 bp, Homo sapien
aattggtttgggctctcaattcatc

SEQ ID NO: 6032013 - DNA, 25 bp, Homo sapien
ttgaatagcagccagaggccgagtt

SEQ ID NO: 6032014 - DNA, 25 bp, Homo sapien
tagggtgacgagtatacccttgaaa

SEQ ID NO: 6032015 - DNA, 25 bp, Homo sapien
atgggaggcattttccagtactttg

SEQ ID NO: 6032016 - DNA, 25 bp, Homo sapien
cttgacgatgacgacgttccttggt

SEQ ID NO: 6032017 - DNA, 25 bp, Homo sapien
tagacctagggtgacgagtataccc

SEQ ID NO: 6032018 - DNA, 25 bp, Homo sapien
cagaggccgagtttaacaggtaact

SEQ ID NO: 6032019 - DNA, 25 bp, Homo sapien
tagtggctagaatgggtgcatttag

SEQ ID NO: 6032020 - DNA, 25 bp, Homo sapien
gcacaagactgggtgcttgaagaga

SEQ ID NO: 6032021 - DNA, 25 bp, Homo sapien
atcgacagcccgctggatactactg

SEQ ID NO: 6032022 - DNA, 25 bp, Homo sapien
gcagttttcttgaagacggtttcga

SEQ ID NO: 6032023 - DNA, 25 bp, Homo sapien
ctagtgctggctttttccatcgatg

SEQ ID NO: 6032024 - DNA, 25 bp, Homo sapien
ggcctcatcgacagcccgctggata

SEQ ID NO: 6032025 - DNA, 25 bp, Homo sapien
gctggatactactgacggctgatac

SEQ ID NO: 6032026 - DNA, 25 bp, Homo sapien
tactttgaccaaatcggcagttttc

SEQ ID NO: 6032027 - DNA, 25 bp, Homo sapien
aaaatacgacgccatagaacccacg

SEQ ID NO: 6032028 - DNA, 25 bp, Homo sapien
ccaaattcaggtcactttgtaaaat

SEQ ID NO: 6032029 - DNA, 25 bp, Homo sapien
tgtgttaaggaattggtttgggctc

SEQ ID NO: 6032030 - DNA, 25 bp, Homo sapien
cagcccgctggatactactgacggc

SEQ ID NO: 6032031 - DNA, 25 bp, Homo sapien
agttgttttgttttgctcaaaagct

SEQ ID NO: 6032032 - DNA, 25 bp, Homo sapien
agaattaggtcatgacaaagatgaa

SEQ ID NO: 6032033 - DNA, 25 bp, Homo sapien
aacaaaaatcatagaattaggtcat

SEQ ID NO: 6032034 - DNA, 25 bp, Homo sapien
tctgtgtatagtctttcaagcaaaa

SEQ ID NO: 6032035 - DNA, 25 bp, Homo sapien
tcaaacgagtttgcctattcttgaa

SEQ ID NO: 6032036 - DNA, 25 bp, Homo sapien
tgcaaaagagtttgaaaaatggaaa

SEQ ID NO: 6032037 - DNA, 25 bp, Homo sapien
atataatgaatacaaacaaattttg

SEQ ID NO: 6032038 - DNA, 25 bp, Homo sapien
tgaaactaagaaggaaaacatagaa

SEQ ID NO: 6032039 - DNA, 25 bp, Homo sapien
caggatgataggtggcgcacttgtt

SEQ ID NO: 6032040 - DNA, 25 bp, Homo sapien
agcaaaatataatgaatacaaacaa

SEQ ID NO: 6032041 - DNA, 25 bp, Homo sapien
gaaagacgctgagccgacgagaaaa

SEQ ID NO: 6032042 - DNA, 25 bp, Homo sapien
gcctattcttgaaactaagaaggaa

SEQ ID NO: 6032043 - DNA, 25 bp, Homo sapien
tacaaacaaattttggaagaattgc

SEQ ID NO: 6032044 - DNA, 25 bp, Homo sapien
aaaaaagacaataagattcaagtcg

SEQ ID NO: 6032045 - DNA, 25 bp, Homo sapien
ctttgtgttttctctgtgtatagtc

SEQ ID NO: 6032046 - DNA, 25 bp, Homo sapien
gagaaaatgttacaggatgataggt

SEQ ID NO: 6032047 - DNA, 25 bp, Homo sapien
tgatgttcaaacgagtttgcctatt

SEQ ID NO: 6032048 - DNA, 25 bp, Homo sapien
cataaaaacactgaaagacgctgag

SEQ ID NO: 6032049 - DNA, 25 bp, Homo sapien
gagtttgcctattcttgaaactaag

SEQ ID NO: 6032050 - DNA, 25 bp, Homo sapien
tgacaaagatgaacacactatagtc

SEQ ID NO: 6032051 - DNA, 25 bp, Homo sapien
acaaattttggaagaattgcaaaca

SEQ ID NO: 6032052 - DNA, 25 bp, Homo sapien
gaaagaaaccttaatacaaactgca

SEQ ID NO: 6032053 - DNA, 25 bp, Homo sapien
taagaaggaaaacatagaaggtaca

SEQ ID NO: 6032054 - DNA, 25 bp, Homo sapien
gaagaattgcaaacaaaaatcatag

SEQ ID NO: 6032055 - DNA, 25 bp, Homo sapien
tttggaagaattgcaaacaaaaatc

SEQ ID NO: 6032056 - DNA, 25 bp, Homo sapien
gccgacgagaaaatgttacaggatg

SEQ ID NO: 6032057 - DNA, 25 bp, Homo sapien
atgttacaggatgataggtggcgca

SEQ ID NO: 6032058 - DNA, 25 bp, Homo sapien
cgctgagccgacgagaaaatgttac

SEQ ID NO: 6032059 - DNA, 25 bp, Homo sapien
gaaagtgatgttcaaacgagtttgc

SEQ ID NO: 6032060 - DNA, 25 bp, Homo sapien
ccttaatacaaactgcaaaagagtt

SEQ ID NO: 6032061 - DNA, 25 bp, Homo sapien
aatgaatacaaacaaattttggaag

SEQ ID NO: 6032062 - DNA, 25 bp, Homo sapien
ctttcaagcaaaatataatgaatac

SEQ ID NO: 6032063 - DNA, 25 bp, Homo sapien
acacactatagtcataaaaacactg

SEQ ID NO: 6032064 - DNA, 25 bp, Homo sapien
tatagtctttcaagcaaaatataat

SEQ ID NO: 6032065 - DNA, 25 bp, Homo sapien
agatgaacacactatagtcataaaa

SEQ ID NO: 6032066 - DNA, 25 bp, Homo sapien
aggtcatgacaaagatgaacacact

SEQ ID NO: 6032067 - DNA, 25 bp, Homo sapien
gaaaacatagaaggtacaataagta

SEQ ID NO: 6032068 - DNA, 25 bp, Homo sapien
cttgttgaaagtgatgttcaaacga

SEQ ID NO: 6032069 - DNA, 25 bp, Homo sapien
aatcatagaattaggtcatgacaaa

SEQ ID NO: 6032070 - DNA, 25 bp, Homo sapien
aatggaaaaaagacaataagattca

SEQ ID NO: 6032071 - DNA, 25 bp, Homo sapien
tatagtcataaaaacactgaaagac

SEQ ID NO: 6032072 - DNA, 25 bp, Homo sapien
tacaaactgcaaaagagtttgaaaa

SEQ ID NO: 6032073 - DNA, 25 bp, Homo sapien
gttttctctgtgtatagtctttcaa

SEQ ID NO: 6032074 - DNA, 25 bp, Homo sapien
ttgcaaacaaaaatcatagaattag

SEQ ID NO: 6032075 - DNA, 25 bp, Homo sapien
tagaaggtacaataagtaaaatgaa

SEQ ID NO: 6032076 - DNA, 25 bp, Homo sapien
ataggtggcgcacttgttgaaagtg

SEQ ID NO: 6032077 - DNA, 25 bp, Homo sapien
aacactgaaagacgctgagccgacg

SEQ ID NO: 6032078 - DNA, 25 bp, Homo sapien
ggcgcacttgttgaaagtgatgttc

SEQ ID NO: 6032079 - DNA, 25 bp, Homo sapien
gacaataagattcaagtcgttaaaa

SEQ ID NO: 6032080 - DNA, 25 bp, Homo sapien
tcggctcagcgtctttcagtgtttt

SEQ ID NO: 6032081 - DNA, 25 bp, Homo sapien
tttcagtgtttttatgactatagtg

SEQ ID NO: 6032082 - DNA, 25 bp, Homo sapien
tgtcatgacctaattctatgatttt

SEQ ID NO: 6032083 - DNA, 25 bp, Homo sapien
cagtttgtattaaggtttctttcat

SEQ ID NO: 6032084 - DNA, 25 bp, Homo sapien
tcctgtaacattttctcgtcggctc

SEQ ID NO: 6032085 - DNA, 25 bp, Homo sapien
ttttgcttgaaagactatacacaga

SEQ ID NO: 6032086 - DNA, 25 bp, Homo sapien
ctatcatcctgtaacattttctcgt

SEQ ID NO: 6032087 - DNA, 25 bp, Homo sapien
agcgtctttcagtgtttttatgact

SEQ ID NO: 6032088 - DNA, 25 bp, Homo sapien
catttttcaaactcttttgcagttt

SEQ ID NO: 6032089 - DNA, 25 bp, Homo sapien
tcaaactcttttgcagtttgtatta

SEQ ID NO: 6032090 - DNA, 25 bp, Homo sapien
gtttgaacatcactttcaacaagtg

SEQ ID NO: 6032091 - DNA, 25 bp, Homo sapien
ctatagtgtgttcatctttgtcatg

SEQ ID NO: 6032092 - DNA, 25 bp, Homo sapien
catctttgtcatgacctaattctat

SEQ ID NO: 6032093 - DNA, 25 bp, Homo sapien
tgcaattcttccaaaatttgtttgt

SEQ ID NO: 6032094 - DNA, 25 bp, Homo sapien
aacattttctcgtcggctcagcgtc

SEQ ID NO: 6032095 - DNA, 25 bp, Homo sapien
tttccatttttcaaactcttttgca

SEQ ID NO: 6032096 - DNA, 25 bp, Homo sapien
cacaaagattgttagtaagataaaa

SEQ ID NO: 6032097 - DNA, 25 bp, Homo sapien
ttgaaagactatacacagagaaaac

SEQ ID NO: 6032098 - DNA, 25 bp, Homo sapien
ctcttttgcagtttgtattaaggtt

SEQ ID NO: 6032099 - DNA, 25 bp, Homo sapien
cattttacttattgtaccttctatg

SEQ ID NO: 6032100 - DNA, 25 bp, Homo sapien
ttgtttgcaattcttccaaaatttg

SEQ ID NO: 6032101 - DNA, 25 bp, Homo sapien
tcttccaaaatttgtttgtattcat

SEQ ID NO: 6032102 - DNA, 25 bp, Homo sapien
ttctcgtcggctcagcgtctttcag

SEQ ID NO: 6032103 - DNA, 25 bp, Homo sapien
caagtgcgccacctatcatcctgta

SEQ ID NO: 6032104 - DNA, 25 bp, Homo sapien
tgtaccttctatgttttccttctta

SEQ ID NO: 6032105 - DNA, 25 bp, Homo sapien
tccttcttagtttcaagaataggca

SEQ ID NO: 6032106 - DNA, 25 bp, Homo sapien
gtttgtattcattatattttgcttg

SEQ ID NO: 6032107 - DNA, 25 bp, Homo sapien
acatcactttcaacaagtgcgccac

SEQ ID NO: 6032108 - DNA, 25 bp, Homo sapien
gacctaattctatgatttttgtttg

SEQ ID NO: 6032109 - DNA, 25 bp, Homo sapien
tatattttgcttgaaagactataca

SEQ ID NO: 6032110 - DNA, 25 bp, Homo sapien
tgtgttcatctttgtcatgacctaa

SEQ ID NO: 6032111 - DNA, 25 bp, Homo sapien
tagtaagataaaattggctacatgc

SEQ ID NO: 6032112 - DNA, 25 bp, Homo sapien
tcaagaataggcaaactcgtttgaa

SEQ ID NO: 6032113 - DNA, 25 bp, Homo sapien
ataggcaaactcgtttgaacatcac

SEQ ID NO: 6032114 - DNA, 25 bp, Homo sapien
gattgttagtaagataaaattggct

SEQ ID NO: 6032115 - DNA, 25 bp, Homo sapien
acacagagaaaacacaaagattgtt

SEQ ID NO: 6032116 - DNA, 25 bp, Homo sapien
attctatgatttttgtttgcaattc

SEQ ID NO: 6032117 - DNA, 25 bp, Homo sapien
attcattatattttgcttgaaagac

SEQ ID NO: 6032118 - DNA, 25 bp, Homo sapien
tatgttttccttcttagtttcaaga

SEQ ID NO: 6032119 - DNA, 25 bp, Homo sapien
agaaaacacaaagattgttagtaag

SEQ ID NO: 6032120 - DNA, 25 bp, Homo sapien
tgtttttatgactatagtgtgttca

SEQ ID NO: 6032121 - DNA, 25 bp, Homo sapien
cgccacctatcatcctgtaacattt

SEQ ID NO: 6032122 - DNA, 25 bp, Homo sapien
tgatttttgtttgcaattcttccaa

SEQ ID NO: 6032123 - DNA, 25 bp, Homo sapien
ttagtttcaagaataggcaaactcg

SEQ ID NO: 6032124 - DNA, 25 bp, Homo sapien
tatgactatagtgtgttcatctttg

SEQ ID NO: 6032125 - DNA, 25 bp, Homo sapien
caaaatttgtttgtattcattatat

SEQ ID NO: 6032126 - DNA, 25 bp, Homo sapien
aaactcgtttgaacatcactttcaa

SEQ ID NO: 6032127 - DNA, 25 bp, Homo sapien
gactatacacagagaaaacacaaag

SEQ ID NO: 6032128 - DNA, 25 bp, Homo sapien
tacttattgtaccttctatgttttc

SEQ ID NO: 6032129 - DNA, 25 bp, Homo sapien
ctttcaacaagtgcgccacctatca

SEQ ID NO: 6032130 - DNA, 25 bp, Homo sapien
tcctgaccatagttaagaatttatt

SEQ ID NO: 6032131 - DNA, 25 bp, Homo sapien
cattcaatggacccaaaaagagaaa

SEQ ID NO: 6032132 - DNA, 25 bp, Homo sapien
acactttaatttccaacaagaatga

SEQ ID NO: 6032133 - DNA, 25 bp, Homo sapien
gcaaagcaacgtggcaaatggaaac

SEQ ID NO: 6032134 - DNA, 25 bp, Homo sapien
agagaaaaactattgaaattataca

SEQ ID NO: 6032135 - DNA, 25 bp, Homo sapien
cgctagtcaagttgactaacgaaat

SEQ ID NO: 6032136 - DNA, 25 bp, Homo sapien
gatattgaagaacggtataaagacc

SEQ ID NO: 6032137 - DNA, 25 bp, Homo sapien
tcaagttgactaacgaaatacaaaa

SEQ ID NO: 6032138 - DNA, 25 bp, Homo sapien
ttttcagaagctattcaagagtccc

SEQ ID NO: 6032139 - DNA, 25 bp, Homo sapien
agtacgatcgattcaagaaaacgca

SEQ ID NO: 6032140 - DNA, 25 bp, Homo sapien
gttaagaatttattcccagagtaca

SEQ ID NO: 6032141 - DNA, 25 bp, Homo sapien
tgcagctaatacacactttaatttc

SEQ ID NO: 6032142 - DNA, 25 bp, Homo sapien
tattgaaattatacagagataccgt

SEQ ID NO: 6032143 - DNA, 25 bp, Homo sapien
aatttattcccagagtacagaacaa

SEQ ID NO: 6032144 - DNA, 25 bp, Homo sapien
aggtcgaacaaataaggatgatgga

SEQ ID NO: 6032145 - DNA, 25 bp, Homo sapien
aagaaggcaaagcaacgtggcaaat

SEQ ID NO: 6032146 - DNA, 25 bp, Homo sapien
ctgaataaattggaaagtaaaactg

SEQ ID NO: 6032147 - DNA, 25 bp, Homo sapien
gcatcaacgatatcctgaccatagt

SEQ ID NO: 6032148 - DNA, 25 bp, Homo sapien
aacgagctgacaaatttaagaaggc

SEQ ID NO: 6032149 - DNA, 25 bp, Homo sapien
aaaaactattgaaattatacagaga

SEQ ID NO: 6032150 - DNA, 25 bp, Homo sapien
atcgattcaagaaaacgcaggtcga

SEQ ID NO: 6032151 - DNA, 25 bp, Homo sapien
aagtggatctgctggtaccagtgct

SEQ ID NO: 6032152 - DNA, 25 bp, Homo sapien
ataccgttctgaataaattggaaag

SEQ ID NO: 6032153 - DNA, 25 bp, Homo sapien
taaggatgatggaggatgagatatt

SEQ ID NO: 6032154 - DNA, 25 bp, Homo sapien
tgcatgatatcgagaagctccttga

SEQ ID NO: 6032155 - DNA, 25 bp, Homo sapien
acagagataccgttctgaataaatt

SEQ ID NO: 6032156 - DNA, 25 bp, Homo sapien
taaaactgggaattttcagaagcta

SEQ ID NO: 6032157 - DNA, 25 bp, Homo sapien
atatcgagaagctccttgacgaaaa

SEQ ID NO: 6032158 - DNA, 25 bp, Homo sapien
tcaagaaaacgcaggtcgaacaaat

SEQ ID NO: 6032159 - DNA, 25 bp, Homo sapien
ccacacatggcgcattcaatggacc

SEQ ID NO: 6032160 - DNA, 25 bp, Homo sapien
ggaataatcttcgaatatcgctagt

SEQ ID NO: 6032161 - DNA, 25 bp, Homo sapien
ttcccagagtacagaacaacactaa

SEQ ID NO: 6032162 - DNA, 25 bp, Homo sapien
acttagtctacacggtttggaaatg

SEQ ID NO: 6032163 - DNA, 25 bp, Homo sapien
ggatgagatattgaagaacggtata

SEQ ID NO: 6032164 - DNA, 25 bp, Homo sapien
aaatgctggcaaaagtggatctgct

SEQ ID NO: 6032165 - DNA, 25 bp, Homo sapien
tgggaattttcagaagctattcaag

SEQ ID NO: 6032166 - DNA, 25 bp, Homo sapien
atcttcgaatatcgctagtcaagtt

SEQ ID NO: 6032167 - DNA, 25 bp, Homo sapien
cagtgctactataactacgactacg

SEQ ID NO: 6032168 - DNA, 25 bp, Homo sapien
actacgccacacatggcgcattcaa

SEQ ID NO: 6032169 - DNA, 25 bp, Homo sapien
tggtaccagtgctactataactacg

SEQ ID NO: 6032170 - DNA, 25 bp, Homo sapien
gtataaagaccggtgcatcgcaact

SEQ ID NO: 6032171 - DNA, 25 bp, Homo sapien
ctaacgaaatacaaaacaatttgct

SEQ ID NO: 6032172 - DNA, 25 bp, Homo sapien
gaaatacaaaacaatttgctaatca

SEQ ID NO: 6032173 - DNA, 25 bp, Homo sapien
agaccggtgcatcgcaactgcaacc

SEQ ID NO: 6032174 - DNA, 25 bp, Homo sapien
gtctacacggtttggaaatgcatga

SEQ ID NO: 6032175 - DNA, 25 bp, Homo sapien
aggaatcaacatgattgggaataat

SEQ ID NO: 6032176 - DNA, 25 bp, Homo sapien
gatggaggatgagatattgaagaac

SEQ ID NO: 6032177 - DNA, 25 bp, Homo sapien
acgatatcctgaccatagttaagaa

SEQ ID NO: 6032178 - DNA, 25 bp, Homo sapien
ctaatcaacgagctgacaaatttaa

SEQ ID NO: 6032179 - DNA, 25 bp, Homo sapien
taatttccaacaagaatgaagaact

SEQ ID NO: 6032180 - DNA, 25 bp, Homo sapien
tggacaacttagtctacacggtttg

SEQ ID NO: 6032181 - DNA, 25 bp, Homo sapien
ctgacaaatttaagaaggcaaagca

SEQ ID NO: 6032182 - DNA, 25 bp, Homo sapien
aactgggcatcaacgatatcctgac

SEQ ID NO: 6032183 - DNA, 25 bp, Homo sapien
aaacgcaggtcgaacaaataaggat

SEQ ID NO: 6032184 - DNA, 25 bp, Homo sapien
acatgcaaatgctggcaaaagtgga

SEQ ID NO: 6032185 - DNA, 25 bp, Homo sapien
atggcgcattcaatggacccaaaaa

SEQ ID NO: 6032186 - DNA, 25 bp, Homo sapien
caaaacaatttgctaatcaacgagc

SEQ ID NO: 6032187 - DNA, 25 bp, Homo sapien
caacatgattgggaataatcttcga

SEQ ID NO: 6032188 - DNA, 25 bp, Homo sapien
gcaactgcaaccacatgcaaatgct

SEQ ID NO: 6032189 - DNA, 25 bp, Homo sapien
acggtttggaaatgcatgatatcga

SEQ ID NO: 6032190 - DNA, 25 bp, Homo sapien
aacaaataaggatgatggaggatga

SEQ ID NO: 6032191 - DNA, 25 bp, Homo sapien
taatacacactttaatttccaacaa

SEQ ID NO: 6032192 - DNA, 25 bp, Homo sapien
aaacgatggacaacttagtctacac

SEQ ID NO: 6032193 - DNA, 25 bp, Homo sapien
aactacgactacgccacacatggcg

SEQ ID NO: 6032194 - DNA, 25 bp, Homo sapien
aattatacagagataccgttctgaa

SEQ ID NO: 6032195 - DNA, 25 bp, Homo sapien
aatttgctaatcaacgagctgacaa

SEQ ID NO: 6032196 - DNA, 25 bp, Homo sapien
gagtacagaacaacactaaacgatg

SEQ ID NO: 6032197 - DNA, 25 bp, Homo sapien
agaacggtataaagaccggtgcatc

SEQ ID NO: 6032198 - DNA, 25 bp, Homo sapien
ggcaaatggaaacaggaaactgggc

SEQ ID NO: 6032199 - DNA, 25 bp, Homo sapien
agaagctccttgacgaaaagtacga

SEQ ID NO: 6032200 - DNA, 25 bp, Homo sapien
caggaaactgggcatcaacgatatc

SEQ ID NO: 6032201 - DNA, 25 bp, Homo sapien
tactataactacgactacgccacac

SEQ ID NO: 6032202 - DNA, 25 bp, Homo sapien
atctgctggtaccagtgctactata

SEQ ID NO: 6032203 - DNA, 25 bp, Homo sapien
gcaaccacatgcaaatgctggcaaa

SEQ ID NO: 6032204 - DNA, 25 bp, Homo sapien
accatagttaagaatttattcccag

SEQ ID NO: 6032205 - DNA, 25 bp, Homo sapien
caacgtggcaaatggaaacaggaaa

SEQ ID NO: 6032206 - DNA, 25 bp, Homo sapien
tgcatcgcaactgcaaccacatgca

SEQ ID NO: 6032207 - DNA, 25 bp, Homo sapien
agaacaacactaaacgatggacaac

SEQ ID NO: 6032208 - DNA, 25 bp, Homo sapien
acactaaacgatggacaacttagtc

SEQ ID NO: 6032209 - DNA, 25 bp, Homo sapien
aatttaagaaggcaaagcaacgtgg

SEQ ID NO: 6032210 - DNA, 25 bp, Homo sapien
tggaaatgcatgatatcgagaagct

SEQ ID NO: 6032211 - DNA, 25 bp, Homo sapien
taggaacgggggaggaatcaacatg

SEQ ID NO: 6032212 - DNA, 25 bp, Homo sapien
cgggggaggaatcaacatgattggg

SEQ ID NO: 6032213 - DNA, 25 bp, Homo sapien
acgaaaagtacgatcgattcaagaa

SEQ ID NO: 6032214 - DNA, 25 bp, Homo sapien
tggcaaaagtggatctgctggtacc

SEQ ID NO: 6032215 - DNA, 25 bp, Homo sapien
ccaacaagaatgaagaactggttag

SEQ ID NO: 6032216 - DNA, 25 bp, Homo sapien
gattgggaataatcttcgaatatcg

SEQ ID NO: 6032217 - DNA, 25 bp, Homo sapien
tggaaacaggaaactgggcatcaac

SEQ ID NO: 6032218 - DNA, 25 bp, Homo sapien
gaatatcgctagtcaagttgactaa

SEQ ID NO: 6032219 - DNA, 25 bp, Homo sapien
tccttgacgaaaagtacgatcgatt

SEQ ID NO: 6032220 - DNA, 25 bp, Homo sapien
agaatgaagaactggttaggaacgg

SEQ ID NO: 6032221 - DNA, 25 bp, Homo sapien
cgttgatgcccagtttcctgtttcc

SEQ ID NO: 6032222 - DNA, 25 bp, Homo sapien
tattcagaacggtatctctgtataa

SEQ ID NO: 6032223 - DNA, 25 bp, Homo sapien
agaatcagctgcagttcatgaacgc

SEQ ID NO: 6032224 - DNA, 25 bp, Homo sapien
ggcgtagtcgtagttatagtagcac

SEQ ID NO: 6032225 - DNA, 25 bp, Homo sapien
cgatcgtacttttcgtcaaggagct

SEQ ID NO: 6032226 - DNA, 25 bp, Homo sapien
tttctctttttgggtccattgaatg

SEQ ID NO: 6032227 - DNA, 25 bp, Homo sapien
atttccagtcgtccgtaccaatgac

SEQ ID NO: 6032228 - DNA, 25 bp, Homo sapien
ggatatcgttgatgcccagtttcct

SEQ ID NO: 6032229 - DNA, 25 bp, Homo sapien
tctttttgggtccattgaatgcgcc

SEQ ID NO: 6032230 - DNA, 25 bp, Homo sapien
tatgtcttcgtaatttatctcattc

SEQ ID NO: 6032231 - DNA, 25 bp, Homo sapien
ctgtataatttcaatagtttttctc

SEQ ID NO: 6032232 - DNA, 25 bp, Homo sapien
agttcatgaacgctgccgggcgttt

SEQ ID NO: 6032233 - DNA, 25 bp, Homo sapien
tcaatatctcatcctccatcatcct

SEQ ID NO: 6032234 - DNA, 25 bp, Homo sapien
gacctgcgttttcttgaatcgatcg

SEQ ID NO: 6032235 - DNA, 25 bp, Homo sapien
tgccgggcgtttcgttctttatgtc

SEQ ID NO: 6032236 - DNA, 25 bp, Homo sapien
tgcatttccaaaccgtgtagactaa

SEQ ID NO: 6032237 - DNA, 25 bp, Homo sapien
tgcgatgcaccggtctttataccgt

SEQ ID NO: 6032238 - DNA, 25 bp, Homo sapien
tccaaaccgtgtagactaagttgtc

SEQ ID NO: 6032239 - DNA, 25 bp, Homo sapien
atgtgtggcgtagtcgtagttatag

SEQ ID NO: 6032240 - DNA, 25 bp, Homo sapien
atttgcatgtggttgcagttgcgat

SEQ ID NO: 6032241 - DNA, 25 bp, Homo sapien
cagttttactttccaatttattcag

SEQ ID NO: 6032242 - DNA, 25 bp, Homo sapien
agaacggtatctctgtataatttca

SEQ ID NO: 6032243 - DNA, 25 bp, Homo sapien
atccaattcaaactgcacttgtcta

SEQ ID NO: 6032244 - DNA, 25 bp, Homo sapien
ttgaatcgatcgtacttttcgtcaa

SEQ ID NO: 6032245 - DNA, 25 bp, Homo sapien
agttatagtagcactggtaccagca

SEQ ID NO: 6032246 - DNA, 25 bp, Homo sapien
gcgtttcgttctttatgtcttcgta

SEQ ID NO: 6032247 - DNA, 25 bp, Homo sapien
tacttttcgtcaaggagcttctcga

SEQ ID NO: 6032248 - DNA, 25 bp, Homo sapien
ccgtgtagactaagttgtccatcgt

SEQ ID NO: 6032249 - DNA, 25 bp, Homo sapien
actgcacttgtctagccaatttcca

SEQ ID NO: 6032250 - DNA, 25 bp, Homo sapien
atcatccttatttgttcgacctgcg

SEQ ID NO: 6032251 - DNA, 25 bp, Homo sapien
cattgaatgcgccatgtgtggcgta

SEQ ID NO: 6032252 - DNA, 25 bp, Homo sapien
tctcatcctccatcatccttatttg

SEQ ID NO: 6032253 - DNA, 25 bp, Homo sapien
cgtatcatccaattcaaactgcact

SEQ ID NO: 6032254 - DNA, 25 bp, Homo sapien
aatgacctttcgcattacaccgtcc

SEQ ID NO: 6032255 - DNA, 25 bp, Homo sapien
aattcttaactatggtcaggatatc

SEQ ID NO: 6032256 - DNA, 25 bp, Homo sapien
agactaagttgtccatcgtttagtg

SEQ ID NO: 6032257 - DNA, 25 bp, Homo sapien
cctttcgcattacaccgtccgttat

SEQ ID NO: 6032258 - DNA, 25 bp, Homo sapien
tagcttctgaaaattcccagtttta

SEQ ID NO: 6032259 - DNA, 25 bp, Homo sapien
acttttgccagcatttgcatgtggt

SEQ ID NO: 6032260 - DNA, 25 bp, Homo sapien
agatccacttttgccagcatttgca

SEQ ID NO: 6032261 - DNA, 25 bp, Homo sapien
taactatggtcaggatatcgttgat

SEQ ID NO: 6032262 - DNA, 25 bp, Homo sapien
tctgtactctgggaataaattctta

SEQ ID NO: 6032263 - DNA, 25 bp, Homo sapien
tctcattcttgataatgctaccatc

SEQ ID NO: 6032264 - DNA, 25 bp, Homo sapien
tccatcgtttagtgttgttctgtac

SEQ ID NO: 6032265 - DNA, 25 bp, Homo sapien
agttgtccatcgtttagtgttgttc

SEQ ID NO: 6032266 - DNA, 25 bp, Homo sapien
tccgttatgctcttttgaagaatca

SEQ ID NO: 6032267 - DNA, 25 bp, Homo sapien
actctgggaataaattcttaactat

SEQ ID NO: 6032268 - DNA, 25 bp, Homo sapien
ttttgaagaatcagctgcagttcat

SEQ ID NO: 6032269 - DNA, 25 bp, Homo sapien
gtttagtgttgttctgtactctggg

SEQ ID NO: 6032270 - DNA, 25 bp, Homo sapien
gtcgtccgtaccaatgacctttcgc

SEQ ID NO: 6032271 - DNA, 25 bp, Homo sapien
ggtctttataccgttcttcaatatc

SEQ ID NO: 6032272 - DNA, 25 bp, Homo sapien
cgtaccaatgacctttcgcattaca

SEQ ID NO: 6032273 - DNA, 25 bp, Homo sapien
atgctcttttgaagaatcagctgca

SEQ ID NO: 6032274 - DNA, 25 bp, Homo sapien
ccaatttattcagaacggtatctct

SEQ ID NO: 6032275 - DNA, 25 bp, Homo sapien
tgaacgctgccgggcgtttcgttct

SEQ ID NO: 6032276 - DNA, 25 bp, Homo sapien
tgggtccattgaatgcgccatgtgt

SEQ ID NO: 6032277 - DNA, 25 bp, Homo sapien
gtatctctgtataatttcaatagtt

SEQ ID NO: 6032278 - DNA, 25 bp, Homo sapien
ggaataaattcttaactatggtcag

SEQ ID NO: 6032279 - DNA, 25 bp, Homo sapien
ttcaaactgcacttgtctagccaat

SEQ ID NO: 6032280 - DNA, 25 bp, Homo sapien
agtcgtagttatagtagcactggta

SEQ ID NO: 6032281 - DNA, 25 bp, Homo sapien
cttatttgttcgacctgcgttttct

SEQ ID NO: 6032282 - DNA, 25 bp, Homo sapien
ttctcgatatcatgcatttccaaac

SEQ ID NO: 6032283 - DNA, 25 bp, Homo sapien
atatcatgcatttccaaaccgtgta

SEQ ID NO: 6032284 - DNA, 25 bp, Homo sapien
tcttgataatgctaccatcgggact

SEQ ID NO: 6032285 - DNA, 25 bp, Homo sapien
tagccaatttccagtcgtccgtacc

SEQ ID NO: 6032286 - DNA, 25 bp, Homo sapien
cttgaatagcttctgaaaattccca

SEQ ID NO: 6032287 - DNA, 25 bp, Homo sapien
cgttcttcaatatctcatcctccat

SEQ ID NO: 6032288 - DNA, 25 bp, Homo sapien
atgcgccatgtgtggcgtagtcgta

SEQ ID NO: 6032289 - DNA, 25 bp, Homo sapien
tggtcaggatatcgttgatgcccag

SEQ ID NO: 6032290 - DNA, 25 bp, Homo sapien
tgttcgacctgcgttttcttgaatc

SEQ ID NO: 6032291 - DNA, 25 bp, Homo sapien
atgtggttgcagttgcgatgcaccg

SEQ ID NO: 6032292 - DNA, 25 bp, Homo sapien
acaccgtccgttatgctcttttgaa

SEQ ID NO: 6032293 - DNA, 25 bp, Homo sapien
actggtaccagcagatccacttttg

SEQ ID NO: 6032294 - DNA, 25 bp, Homo sapien
agtagcactggtaccagcagatcca

SEQ ID NO: 6032295 - DNA, 25 bp, Homo sapien
tcctccatcatccttatttgttcga

SEQ ID NO: 6032296 - DNA, 25 bp, Homo sapien
ttataccgttcttcaatatctcatc

SEQ ID NO: 6032297 - DNA, 25 bp, Homo sapien
cgttttcttgaatcgatcgtacttt

SEQ ID NO: 6032298 - DNA, 25 bp, Homo sapien
tcgtcaaggagcttctcgatatcat

SEQ ID NO: 6032299 - DNA, 25 bp, Homo sapien
ctttccaatttattcagaacggtat

SEQ ID NO: 6032300 - DNA, 25 bp, Homo sapien
tgcaccggtctttataccgttcttc

SEQ ID NO: 6032301 - DNA, 25 bp, Homo sapien
cttcgtaatttatctcattcttgat

SEQ ID NO: 6032302 - DNA, 25 bp, Homo sapien
cgcattacaccgtccgttatgctct

SEQ ID NO: 6032303 - DNA, 25 bp, Homo sapien
aggagcttctcgatatcatgcattt

SEQ ID NO: 6032304 - DNA, 25 bp, Homo sapien
gttctttatgtcttcgtaatttatc

SEQ ID NO: 6032305 - DNA, 25 bp, Homo sapien
tgttgttctgtactctgggaataaa

SEQ ID NO: 6032306 - DNA, 25 bp, Homo sapien
tgcagttgcgatgcaccggtcttta

SEQ ID NO: 6032307 - DNA, 25 bp, Homo sapien
accatcgggactcttgaatagcttc

SEQ ID NO: 6032308 - DNA, 25 bp, Homo sapien
gggactcttgaatagcttctgaaaa

SEQ ID NO: 6032309 - DNA, 25 bp, Homo sapien
aatttatctcattcttgataatgct

SEQ ID NO: 6032310 - DNA, 25 bp, Homo sapien
gccagcatttgcatgtggttgcagt

SEQ ID NO: 6032311 - DNA, 25 bp, Homo sapien
taatgctaccatcgggactcttgaa

SEQ ID NO: 6032312 - DNA, 25 bp, Homo sapien
accagcagatccacttttgccagca

SEQ ID NO: 6032313 - DNA, 25 bp, Homo sapien
cttgtctagccaatttccagtcgtc

SEQ ID NO: 6032314 - DNA, 25 bp, Homo sapien
agctgcagttcatgaacgctgccgg

SEQ ID NO: 6032315 - DNA, 25 bp, Homo sapien
atgttttggctatggctaaagttga

SEQ ID NO: 6032316 - DNA, 25 bp, Homo sapien
gtgtggatatgtccgctttgaagga

SEQ ID NO: 6032317 - DNA, 25 bp, Homo sapien
gatttctcaatctttgctggctagc

SEQ ID NO: 6032318 - DNA, 25 bp, Homo sapien
caaatccacgtacaggaccccaaat

SEQ ID NO: 6032319 - DNA, 25 bp, Homo sapien
aagactgatttctcaatctttgctg

SEQ ID NO: 6032320 - DNA, 25 bp, Homo sapien
agaaattcctgcttatgaattcgat

SEQ ID NO: 6032321 - DNA, 25 bp, Homo sapien
cctttatttcatctatgaccgctac

SEQ ID NO: 6032322 - DNA, 25 bp, Homo sapien
tccggtagaatcagaaagggacctg

SEQ ID NO: 6032323 - DNA, 25 bp, Homo sapien
ggtgctatgggtcttttgtcatctg

SEQ ID NO: 6032324 - DNA, 25 bp, Homo sapien
aaacttagaaattcctgcttatgaa

SEQ ID NO: 6032325 - DNA, 25 bp, Homo sapien
ccaattggtgaagccggtgattttg

SEQ ID NO: 6032326 - DNA, 25 bp, Homo sapien
tcctgcttatgaattcgatggtgat

SEQ ID NO: 6032327 - DNA, 25 bp, Homo sapien
ggctagcaaatccacgtacaggacc

SEQ ID NO: 6032328 - DNA, 25 bp, Homo sapien
gacacagaactcctcatgaaattca

SEQ ID NO: 6032329 - DNA, 25 bp, Homo sapien
caggaccccaaattttgatgacgtt

SEQ ID NO: 6032330 - DNA, 25 bp, Homo sapien
caaatggcaaggtaagcctgtgttc

SEQ ID NO: 6032331 - DNA, 25 bp, Homo sapien
tggctaaagttgaagttaatttagc

SEQ ID NO: 6032332 - DNA, 25 bp, Homo sapien
ttaacttccaaaagactgatttctc

SEQ ID NO: 6032333 - DNA, 25 bp, Homo sapien
cctcatgaaattcaggaagccaaca

SEQ ID NO: 6032334 - DNA, 25 bp, Homo sapien
cttttgtcatctgcaggtgccaaat

SEQ ID NO: 6032335 - DNA, 25 bp, Homo sapien
ggcaaggtaagcctgtgttcattag

SEQ ID NO: 6032336 - DNA, 25 bp, Homo sapien
ttccaaaagactgatttctcaatct

SEQ ID NO: 6032337 - DNA, 25 bp, Homo sapien
ctgggtatttgtactcacttaggtt

SEQ ID NO: 6032338 - DNA, 25 bp, Homo sapien
ccaacagtgtggatatgtccgcttt

SEQ ID NO: 6032339 - DNA, 25 bp, Homo sapien
acgatgctgataaaggccgttctta

SEQ ID NO: 6032340 - DNA, 25 bp, Homo sapien
aaggccgttcttatgcttactttat

SEQ ID NO: 6032341 - DNA, 25 bp, Homo sapien
agccaatgtctttaacttccaaaag

SEQ ID NO: 6032342 - DNA, 25 bp, Homo sapien
tttcatctatgaccgctactgccga

SEQ ID NO: 6032343 - DNA, 25 bp, Homo sapien
ctgtgttcattagacacagaactcc

SEQ ID NO: 6032344 - DNA, 25 bp, Homo sapien
gttgtcaaatggcaaggtaagcctg

SEQ ID NO: 6032345 - DNA, 25 bp, Homo sapien
tggctatggctaaagttgaagttaa

SEQ ID NO: 6032346 - DNA, 25 bp, Homo sapien
ttaggttgtgttccaattggtgaag

SEQ ID NO: 6032347 - DNA, 25 bp, Homo sapien
tatgtccgctttgaaggacccacag

SEQ ID NO: 6032348 - DNA, 25 bp, Homo sapien
ctatgaccgctactgccgatgtttt

SEQ ID NO: 6032349 - DNA, 25 bp, Homo sapien
atggtcggtgctatgggtcttttgt

SEQ ID NO: 6032350 - DNA, 25 bp, Homo sapien
tgattttggtggttggttctgtcct

SEQ ID NO: 6032351 - DNA, 25 bp, Homo sapien
tgtctttaacttccaaaagactgat

SEQ ID NO: 6032352 - DNA, 25 bp, Homo sapien
atttgtactcacttaggttgtgttc

SEQ ID NO: 6032353 - DNA, 25 bp, Homo sapien
tggttctgtccttgccatggttcac

SEQ ID NO: 6032354 - DNA, 25 bp, Homo sapien
aacgtggttgtcaaatggcaaggta

SEQ ID NO: 6032355 - DNA, 25 bp, Homo sapien
gttcttatgcttactttatggtcgg

SEQ ID NO: 6032356 - DNA, 25 bp, Homo sapien
cattatgatatttccggtagaatca

SEQ ID NO: 6032357 - DNA, 25 bp, Homo sapien
ctgataaaggccgttcttatgctta

SEQ ID NO: 6032358 - DNA, 25 bp, Homo sapien
gtgaagccggtgattttggtggttg

SEQ ID NO: 6032359 - DNA, 25 bp, Homo sapien
tagaaacctttatttcatctatgac

SEQ ID NO: 6032360 - DNA, 25 bp, Homo sapien
aaaataacgatgctgataaaggccg

SEQ ID NO: 6032361 - DNA, 25 bp, Homo sapien
tgtccttgccatggttcacattatg

SEQ ID NO: 6032362 - DNA, 25 bp, Homo sapien
tggttaattatgctgggtatttgta

SEQ ID NO: 6032363 - DNA, 25 bp, Homo sapien
tcatctgcaggtgccaaatcaaccg

SEQ ID NO: 6032364 - DNA, 25 bp, Homo sapien
tgctgacagagtcaaagaccctcaa

SEQ ID NO: 6032365 - DNA, 25 bp, Homo sapien
tgccatggttcacattatgatattt

SEQ ID NO: 6032366 - DNA, 25 bp, Homo sapien
gatatttccggtagaatcagaaagg

SEQ ID NO: 6032367 - DNA, 25 bp, Homo sapien
ttgaagttaatttagcggctatccc

SEQ ID NO: 6032368 - DNA, 25 bp, Homo sapien
caggtgccaaatcaaccgtagaaac

SEQ ID NO: 6032369 - DNA, 25 bp, Homo sapien
ctgccgatgttttggctatggctaa

SEQ ID NO: 6032370 - DNA, 25 bp, Homo sapien
gtaagcctgtgttcattagacacag

SEQ ID NO: 6032371 - DNA, 25 bp, Homo sapien
atgggtcttttgtcatctgcaggtg

SEQ ID NO: 6032372 - DNA, 25 bp, Homo sapien
cccacagaccgatgctgacagagtc

SEQ ID NO: 6032373 - DNA, 25 bp, Homo sapien
ccggtgattttggtggttggttctg

SEQ ID NO: 6032374 - DNA, 25 bp, Homo sapien
gaaattcaggaagccaacagtgtgg

SEQ ID NO: 6032375 - DNA, 25 bp, Homo sapien
tgtgttccaattggtgaagccggtg

SEQ ID NO: 6032376 - DNA, 25 bp, Homo sapien
tttgctggctagcaaatccacgtac

SEQ ID NO: 6032377 - DNA, 25 bp, Homo sapien
gtaaaaacgtggttgtcaaatggca

SEQ ID NO: 6032378 - DNA, 25 bp, Homo sapien
tcattagacacagaactcctcatga

SEQ ID NO: 6032379 - DNA, 25 bp, Homo sapien
actcacttaggttgtgttccaattg

SEQ ID NO: 6032380 - DNA, 25 bp, Homo sapien
cagagtcaaagaccctcaatggtta

SEQ ID NO: 6032381 - DNA, 25 bp, Homo sapien
atgcttactttatggtcggtgctat

SEQ ID NO: 6032382 - DNA, 25 bp, Homo sapien
ggtggttggttctgtccttgccatg

SEQ ID NO: 6032383 - DNA, 25 bp, Homo sapien
cacgtacaggaccccaaattttgat

SEQ ID NO: 6032384 - DNA, 25 bp, Homo sapien
gcttcaagccaatgtctttaacttc

SEQ ID NO: 6032385 - DNA, 25 bp, Homo sapien
tagcggctatcccattgggtaaaaa

SEQ ID NO: 6032386 - DNA, 25 bp, Homo sapien
cgctttgaaggacccacagaccgat

SEQ ID NO: 6032387 - DNA, 25 bp, Homo sapien
agaatcagaaagggacctgccccct

SEQ ID NO: 6032388 - DNA, 25 bp, Homo sapien
aggaagccaacagtgtggatatgtc

SEQ ID NO: 6032389 - DNA, 25 bp, Homo sapien
ccgctactgccgatgttttggctat

SEQ ID NO: 6032390 - DNA, 25 bp, Homo sapien
actttatggtcggtgctatgggtct

SEQ ID NO: 6032391 - DNA, 25 bp, Homo sapien
agaactcctcatgaaattcaggaag

SEQ ID NO: 6032392 - DNA, 25 bp, Homo sapien
cctcaatggttaattatgctgggta

SEQ ID NO: 6032393 - DNA, 25 bp, Homo sapien
ggttcacattatgatatttccggta

SEQ ID NO: 6032394 - DNA, 25 bp, Homo sapien
tcaatctttgctggctagcaaatcc

SEQ ID NO: 6032395 - DNA, 25 bp, Homo sapien
taaaggaaaataacgatgctgataa

SEQ ID NO: 6032396 - DNA, 25 bp, Homo sapien
gaccgatgctgacagagtcaaagac

SEQ ID NO: 6032397 - DNA, 25 bp, Homo sapien
gaaggacccacagaccgatgctgac

SEQ ID NO: 6032398 - DNA, 25 bp, Homo sapien
attatgctgggtatttgtactcact

SEQ ID NO: 6032399 - DNA, 25 bp, Homo sapien
ttaatttagcggctatcccattggg

SEQ ID NO: 6032400 - DNA, 25 bp, Homo sapien
aaagaccctcaatggttaattatgc

SEQ ID NO: 6032401 - DNA, 25 bp, Homo sapien
gggtctttgactctgtcagcatcgg

SEQ ID NO: 6032402 - DNA, 25 bp, Homo sapien
aagtgagtacaaatacccagcataa

SEQ ID NO: 6032403 - DNA, 25 bp, Homo sapien
taaagacattggcttgaagcaggtc

SEQ ID NO: 6032404 - DNA, 25 bp, Homo sapien
gggtccttcaaagcggacatatcca

SEQ ID NO: 6032405 - DNA, 25 bp, Homo sapien
ttgactctgtcagcatcggtctgtg

SEQ ID NO: 6032406 - DNA, 25 bp, Homo sapien
tcaccggcttcaccaattggaacac

SEQ ID NO: 6032407 - DNA, 25 bp, Homo sapien
tttttacccaatgggatagccgcta

SEQ ID NO: 6032408 - DNA, 25 bp, Homo sapien
ttcaaagcggacatatccacactgt

SEQ ID NO: 6032409 - DNA, 25 bp, Homo sapien
ccctttctgattctaccggaaatat

SEQ ID NO: 6032410 - DNA, 25 bp, Homo sapien
gtctgtgggtccttcaaagcggaca

SEQ ID NO: 6032411 - DNA, 25 bp, Homo sapien
ttaccttgccatttgacaaccacgt

SEQ ID NO: 6032412 - DNA, 25 bp, Homo sapien
agcataattaaccattgagggtctt

SEQ ID NO: 6032413 - DNA, 25 bp, Homo sapien
cataagaacggcctttatcagcatc

SEQ ID NO: 6032414 - DNA, 25 bp, Homo sapien
atttcatgaggagttctgtgtctaa

SEQ ID NO: 6032415 - DNA, 25 bp, Homo sapien
atagatgaaataaaggtttctacgg

SEQ ID NO: 6032416 - DNA, 25 bp, Homo sapien
ccataaagtaagcataagaacggcc

SEQ ID NO: 6032417 - DNA, 25 bp, Homo sapien
gtacaaatacccagcataattaacc

SEQ ID NO: 6032418 - DNA, 25 bp, Homo sapien
aaagacccatagcaccgaccataaa

SEQ ID NO: 6032419 - DNA, 25 bp, Homo sapien
gcatcggtctgtgggtccttcaaag

SEQ ID NO: 6032420 - DNA, 25 bp, Homo sapien
ctaccggaaatatcataatgtgaac

SEQ ID NO: 6032421 - DNA, 25 bp, Homo sapien
acatcggcagtagcggtcatagatg

SEQ ID NO: 6032422 - DNA, 25 bp, Homo sapien
cgtggatttgctagccagcaaagat

SEQ ID NO: 6032423 - DNA, 25 bp, Homo sapien
ccaattggaacacaacctaagtgag

SEQ ID NO: 6032424 - DNA, 25 bp, Homo sapien
cagaaccaaccaccaaaatcaccgg

SEQ ID NO: 6032425 - DNA, 25 bp, Homo sapien
gcttcaccaattggaacacaaccta

SEQ ID NO: 6032426 - DNA, 25 bp, Homo sapien
cattggcttgaagcaggtcttgaca

SEQ ID NO: 6032427 - DNA, 25 bp, Homo sapien
caccgaccataaagtaagcataaga

SEQ ID NO: 6032428 - DNA, 25 bp, Homo sapien
ccatagcaccgaccataaagtaagc

SEQ ID NO: 6032429 - DNA, 25 bp, Homo sapien
gttctgtgtctaatgaacacaggct

SEQ ID NO: 6032430 - DNA, 25 bp, Homo sapien
gggggcaggtccctttctgattcta

SEQ ID NO: 6032431 - DNA, 25 bp, Homo sapien
acttcaactttagccatagccaaaa

SEQ ID NO: 6032432 - DNA, 25 bp, Homo sapien
aacgtcatcaaaatttggggtcctg

SEQ ID NO: 6032433 - DNA, 25 bp, Homo sapien
caaagattgagaaatcagtcttttg

SEQ ID NO: 6032434 - DNA, 25 bp, Homo sapien
atgaacacaggcttaccttgccatt

SEQ ID NO: 6032435 - DNA, 25 bp, Homo sapien
cctgcagatgacaaaagacccatag

SEQ ID NO: 6032436 - DNA, 25 bp, Homo sapien
cctttatcagcatcgttattttcct

SEQ ID NO: 6032437 - DNA, 25 bp, Homo sapien
ccatagccaaaacatcggcagtagc

SEQ ID NO: 6032438 - DNA, 25 bp, Homo sapien
tgagaaatcagtcttttggaagtta

SEQ ID NO: 6032439 - DNA, 25 bp, Homo sapien
gcaggtccctttctgattctaccgg

SEQ ID NO: 6032440 - DNA, 25 bp, Homo sapien
gttgatttggcacctgcagatgaca

SEQ ID NO: 6032441 - DNA, 25 bp, Homo sapien
tgaggagttctgtgtctaatgaaca

SEQ ID NO: 6032442 - DNA, 25 bp, Homo sapien
ggaagttaaagacattggcttgaag

SEQ ID NO: 6032443 - DNA, 25 bp, Homo sapien
atgggatagccgctaaattaacttc

SEQ ID NO: 6032444 - DNA, 25 bp, Homo sapien
ctgattctaccggaaatatcataat

SEQ ID NO: 6032445 - DNA, 25 bp, Homo sapien
caaaatcaccggcttcaccaattgg

SEQ ID NO: 6032446 - DNA, 25 bp, Homo sapien
atcaaaatttggggtcctgtacgtg

SEQ ID NO: 6032447 - DNA, 25 bp, Homo sapien
ccatggcaaggacagaaccaaccac

SEQ ID NO: 6032448 - DNA, 25 bp, Homo sapien
tcagcatcgttattttcctttaaaa

SEQ ID NO: 6032449 - DNA, 25 bp, Homo sapien
gatgacaaaagacccatagcaccga

SEQ ID NO: 6032450 - DNA, 25 bp, Homo sapien
caaccaccaaaatcaccggcttcac

SEQ ID NO: 6032451 - DNA, 25 bp, Homo sapien
atagccgctaaattaacttcaactt

SEQ ID NO: 6032452 - DNA, 25 bp, Homo sapien
tcttttggaagttaaagacattggc

SEQ ID NO: 6032453 - DNA, 25 bp, Homo sapien
gaaatatcataatgtgaaccatggc

SEQ ID NO: 6032454 - DNA, 25 bp, Homo sapien
caaggacagaaccaaccaccaaaat

SEQ ID NO: 6032455 - DNA, 25 bp, Homo sapien
tggggtcctgtacgtggatttgcta

SEQ ID NO: 6032456 - DNA, 25 bp, Homo sapien
aaattaacttcaactttagccatag

SEQ ID NO: 6032457 - DNA, 25 bp, Homo sapien
tcataatgtgaaccatggcaaggac

SEQ ID NO: 6032458 - DNA, 25 bp, Homo sapien
tgtctaatgaacacaggcttacctt

SEQ ID NO: 6032459 - DNA, 25 bp, Homo sapien
agccagcaaagattgagaaatcagt

SEQ ID NO: 6032460 - DNA, 25 bp, Homo sapien
ggaacacaacctaagtgagtacaaa

SEQ ID NO: 6032461 - DNA, 25 bp, Homo sapien
attaaccattgagggtctttgactc

SEQ ID NO: 6032462 - DNA, 25 bp, Homo sapien
tgtgaaccatggcaaggacagaacc

SEQ ID NO: 6032463 - DNA, 25 bp, Homo sapien
agtaagcataagaacggcctttatc

SEQ ID NO: 6032464 - DNA, 25 bp, Homo sapien
gcagtagcggtcatagatgaaataa

SEQ ID NO: 6032465 - DNA, 25 bp, Homo sapien
tacccaatgggatagccgctaaatt

SEQ ID NO: 6032466 - DNA, 25 bp, Homo sapien
atcagtcttttggaagttaaagaca

SEQ ID NO: 6032467 - DNA, 25 bp, Homo sapien
acaggcttaccttgccatttgacaa

SEQ ID NO: 6032468 - DNA, 25 bp, Homo sapien
gcggacatatccacactgttggctt

SEQ ID NO: 6032469 - DNA, 25 bp, Homo sapien
gaacggcctttatcagcatcgttat

SEQ ID NO: 6032470 - DNA, 25 bp, Homo sapien
tcctgaatttcatgaggagttctgt

SEQ ID NO: 6032471 - DNA, 25 bp, Homo sapien
caacctaagtgagtacaaataccca

SEQ ID NO: 6032472 - DNA, 25 bp, Homo sapien
ttggcttcctgaatttcatgaggag

SEQ ID NO: 6032473 - DNA, 25 bp, Homo sapien
cattgagggtctttgactctgtcag

SEQ ID NO: 6032474 - DNA, 25 bp, Homo sapien
gcggtcatagatgaaataaaggttt

SEQ ID NO: 6032475 - DNA, 25 bp, Homo sapien
ctgtcagcatcggtctgtgggtcct

SEQ ID NO: 6032476 - DNA, 25 bp, Homo sapien
atatccacactgttggcttcctgaa

SEQ ID NO: 6032477 - DNA, 25 bp, Homo sapien
tctacggttgatttggcacctgcag

SEQ ID NO: 6032478 - DNA, 25 bp, Homo sapien
actttagccatagccaaaacatcgg

SEQ ID NO: 6032479 - DNA, 25 bp, Homo sapien
ttggcacctgcagatgacaaaagac

SEQ ID NO: 6032480 - DNA, 25 bp, Homo sapien
tgccatttgacaaccacgtttttac

SEQ ID NO: 6032481 - DNA, 25 bp, Homo sapien
atacccagcataattaaccattgag

SEQ ID NO: 6032482 - DNA, 25 bp, Homo sapien
ccaaaacatcggcagtagcggtcat

SEQ ID NO: 6032483 - DNA, 25 bp, Homo sapien
tttgctagccagcaaagattgagaa

SEQ ID NO: 6032484 - DNA, 25 bp, Homo sapien
cctgtacgtggatttgctagccagc

SEQ ID NO: 6032485 - DNA, 25 bp, Homo sapien
ataagcaggaatttctaagtttaag

SEQ ID NO: 6032486 - DNA, 25 bp, Homo sapien
acactgttggcttcctgaatttcat

SEQ ID NO: 6032487 - DNA, 25 bp, Homo sapien
ccaaatcattggtcagtccttttct

SEQ ID NO: 6032488 - DNA, 25 bp, Homo sapien
ccactcctgggtttactggagagac

SEQ ID NO: 6032489 - DNA, 25 bp, Homo sapien
ttttaaccatctgaataccatgaca

SEQ ID NO: 6032490 - DNA, 25 bp, Homo sapien
tatcgctattccagctggtaacttt

SEQ ID NO: 6032491 - DNA, 25 bp, Homo sapien
tatccgcacaacctgattgatctgt

SEQ ID NO: 6032492 - DNA, 25 bp, Homo sapien
gcaacagggtgaccgcatcttgttt

SEQ ID NO: 6032493 - DNA, 25 bp, Homo sapien
gaataccatgacatatccgcacaac

SEQ ID NO: 6032494 - DNA, 25 bp, Homo sapien
cagattttaaaaatactcccagcgt

SEQ ID NO: 6032495 - DNA, 25 bp, Homo sapien
taccaaggcaacaaagatggttggc

SEQ ID NO: 6032496 - DNA, 25 bp, Homo sapien
gggccccagaagaaagctgatggcc

SEQ ID NO: 6032497 - DNA, 25 bp, Homo sapien
tggcttgggtccgtggccctgaaac

SEQ ID NO: 6032498 - DNA, 25 bp, Homo sapien
ctacagatggcgcaatcgcaacaag

SEQ ID NO: 6032499 - DNA, 25 bp, Homo sapien
tatgagaaggacttcggccaaatca

SEQ ID NO: 6032500 - DNA, 25 bp, Homo sapien
ccatctgaataccatgacatatccg

SEQ ID NO: 6032501 - DNA, 25 bp, Homo sapien
aaagctgatggccagggctcgtaat

SEQ ID NO: 6032502 - DNA, 25 bp, Homo sapien
cagaagaaagctgatggccagggct

SEQ ID NO: 6032503 - DNA, 25 bp, Homo sapien
ttggtgagtgactcttcggataaca

SEQ ID NO: 6032504 - DNA, 25 bp, Homo sapien
tattccagctggtaactttccaagg

SEQ ID NO: 6032505 - DNA, 25 bp, Homo sapien
atggcgcaatcgcaacaagacaagt

SEQ ID NO: 6032506 - DNA, 25 bp, Homo sapien
agtatcgctggaacgttgcttacgg

SEQ ID NO: 6032507 - DNA, 25 bp, Homo sapien
tgggtccgtggccctgaaaccatac

SEQ ID NO: 6032508 - DNA, 25 bp, Homo sapien
gatctgtcgtttttggtgagtgact

SEQ ID NO: 6032509 - DNA, 25 bp, Homo sapien
ttactggagagacgtggatgtcgaa

SEQ ID NO: 6032510 - DNA, 25 bp, Homo sapien
tggttggcaacagggtgaccgcatc

SEQ ID NO: 6032511 - DNA, 25 bp, Homo sapien
accatgggcgtgttactatccaatc

SEQ ID NO: 6032512 - DNA, 25 bp, Homo sapien
tcttcccatgttttttaaccatctg

SEQ ID NO: 6032513 - DNA, 25 bp, Homo sapien
cgttcttctcgatatcgctattcca

SEQ ID NO: 6032514 - DNA, 25 bp, Homo sapien
aacatcgaaatctatgagaaggact

SEQ ID NO: 6032515 - DNA, 25 bp, Homo sapien
atgacatatccgcacaacctgattg

SEQ ID NO: 6032516 - DNA, 25 bp, Homo sapien
gaaatctatgagaaggacttcggcc

SEQ ID NO: 6032517 - DNA, 25 bp, Homo sapien
cattggtcagtccttttctgatcgt

SEQ ID NO: 6032518 - DNA, 25 bp, Homo sapien
tcgtttttggtgagtgactcttcgg

SEQ ID NO: 6032519 - DNA, 25 bp, Homo sapien
cacaacctgattgatctgtcgtttt

SEQ ID NO: 6032520 - DNA, 25 bp, Homo sapien
cacagtaagtatcgctggaacgttg

SEQ ID NO: 6032521 - DNA, 25 bp, Homo sapien
aaagatggttggcaacagggtgacc

SEQ ID NO: 6032522 - DNA, 25 bp, Homo sapien
cctgaaaccataccactcctgggtt

SEQ ID NO: 6032523 - DNA, 25 bp, Homo sapien
caatcgcaacaagacaagtccaaaa

SEQ ID NO: 6032524 - DNA, 25 bp, Homo sapien
ccgcatcttgttttgcgtgccactg

SEQ ID NO: 6032525 - DNA, 25 bp, Homo sapien
tctttctcacaagactcgtgctttc

SEQ ID NO: 6032526 - DNA, 25 bp, Homo sapien
caagccctatgttccagattttaaa

SEQ ID NO: 6032527 - DNA, 25 bp, Homo sapien
cgtggccctgaaaccataccactcc

SEQ ID NO: 6032528 - DNA, 25 bp, Homo sapien
tgagcatcttcccatgttttttaac

SEQ ID NO: 6032529 - DNA, 25 bp, Homo sapien
catgttttttaaccatctgaatacc

SEQ ID NO: 6032530 - DNA, 25 bp, Homo sapien
gccactgagagatgcttctgagcat

SEQ ID NO: 6032531 - DNA, 25 bp, Homo sapien
tcacaagactcgtgctttcgttctt

SEQ ID NO: 6032532 - DNA, 25 bp, Homo sapien
ggataacaccatgggcgtgttacta

SEQ ID NO: 6032533 - DNA, 25 bp, Homo sapien
cagggctcgtaattggcttgggtcc

SEQ ID NO: 6032534 - DNA, 25 bp, Homo sapien
tcagtccttttctgatcgtcacggg

SEQ ID NO: 6032535 - DNA, 25 bp, Homo sapien
tcgtaattggcttgggtccgtggcc

SEQ ID NO: 6032536 - DNA, 25 bp, Homo sapien
agctggtaactttccaaggaatctt

SEQ ID NO: 6032537 - DNA, 25 bp, Homo sapien
ctgattgatctgtcgtttttggtga

SEQ ID NO: 6032538 - DNA, 25 bp, Homo sapien
ctgggtttactggagagacgtggat

SEQ ID NO: 6032539 - DNA, 25 bp, Homo sapien
aatcttcaagccctatgttccagat

SEQ ID NO: 6032540 - DNA, 25 bp, Homo sapien
tatgttccagattttaaaaatactc

SEQ ID NO: 6032541 - DNA, 25 bp, Homo sapien
taactttccaaggaatcttcaagcc

SEQ ID NO: 6032542 - DNA, 25 bp, Homo sapien
acgttgcttacggtgttctttctca

SEQ ID NO: 6032543 - DNA, 25 bp, Homo sapien
aaggacttcggccaaatcattggtc

SEQ ID NO: 6032544 - DNA, 25 bp, Homo sapien
tgcttacggtgttctttctcacaag

SEQ ID NO: 6032545 - DNA, 25 bp, Homo sapien
gatggccagggctcgtaattggctt

SEQ ID NO: 6032546 - DNA, 25 bp, Homo sapien
cggtgttctttctcacaagactcgt

SEQ ID NO: 6032547 - DNA, 25 bp, Homo sapien
gctggaacgttgcttacggtgttct

SEQ ID NO: 6032548 - DNA, 25 bp, Homo sapien
tgcttctgagcatcttcccatgttt

SEQ ID NO: 6032549 - DNA, 25 bp, Homo sapien
gggtgaccgcatcttgttttgcgtg

SEQ ID NO: 6032550 - DNA, 25 bp, Homo sapien
ttgcgtgccactgagagatgcttct

SEQ ID NO: 6032551 - DNA, 25 bp, Homo sapien
caacaagacaagtccaaaaggtttg

SEQ ID NO: 6032552 - DNA, 25 bp, Homo sapien
tagagttctacgacctacgaaatta

SEQ ID NO: 6032553 - DNA, 25 bp, Homo sapien
cgcccagggccccagaagaaagctg

SEQ ID NO: 6032554 - DNA, 25 bp, Homo sapien
gtttggtaacatcgaaatctatgag

SEQ ID NO: 6032555 - DNA, 25 bp, Homo sapien
tgatcgtcacgggtttggcgcccag

SEQ ID NO: 6032556 - DNA, 25 bp, Homo sapien
accataccactcctgggtttactgg

SEQ ID NO: 6032557 - DNA, 25 bp, Homo sapien
gagagatgcttctgagcatcttccc

SEQ ID NO: 6032558 - DNA, 25 bp, Homo sapien
gacctacgaaattaccaaggcaaca

SEQ ID NO: 6032559 - DNA, 25 bp, Homo sapien
ccaaggaatcttcaagccctatgtt

SEQ ID NO: 6032560 - DNA, 25 bp, Homo sapien
ggcaacaaagatggttggcaacagg

SEQ ID NO: 6032561 - DNA, 25 bp, Homo sapien
taaaaatactcccagcgtagagttc

SEQ ID NO: 6032562 - DNA, 25 bp, Homo sapien
cttgttttgcgtgccactgagagat

SEQ ID NO: 6032563 - DNA, 25 bp, Homo sapien
ttactatccaatctacagatggcgc

SEQ ID NO: 6032564 - DNA, 25 bp, Homo sapien
ctcttcggataacaccatgggcgtg

SEQ ID NO: 6032565 - DNA, 25 bp, Homo sapien
tgctttcgttcttctcgatatcgct

SEQ ID NO: 6032566 - DNA, 25 bp, Homo sapien
ggcgtgttactatccaatctacaga

SEQ ID NO: 6032567 - DNA, 25 bp, Homo sapien
ccagcgtagagttctacgacctacg

SEQ ID NO: 6032568 - DNA, 25 bp, Homo sapien
atactcccagcgtagagttctacga

SEQ ID NO: 6032569 - DNA, 25 bp, Homo sapien
gagagacgtggatgtcgaaaccatc

SEQ ID NO: 6032570 - DNA, 25 bp, Homo sapien
gactcgtgctttcgttcttctcgat

SEQ ID NO: 6032571 - DNA, 25 bp, Homo sapien
agtgactcttcggataacaccatgg

SEQ ID NO: 6032572 - DNA, 25 bp, Homo sapien
cttttctgatcgtcacgggtttggc

SEQ ID NO: 6032573 - DNA, 25 bp, Homo sapien
cttcggccaaatcattggtcagtcc

SEQ ID NO: 6032574 - DNA, 25 bp, Homo sapien
ccctaccacagtaagtatcgctgga

SEQ ID NO: 6032575 - DNA, 25 bp, Homo sapien
cgaaattaccaaggcaacaaagatg

SEQ ID NO: 6032576 - DNA, 25 bp, Homo sapien
gtttggcgcccagggccccagaaga

SEQ ID NO: 6032577 - DNA, 25 bp, Homo sapien
tccaatctacagatggcgcaatcgc

SEQ ID NO: 6032578 - DNA, 25 bp, Homo sapien
tctcgatatcgctattccagctggt

SEQ ID NO: 6032579 - DNA, 25 bp, Homo sapien
cctaccgaatgcttctgtctctgcg

SEQ ID NO: 6032580 - DNA, 25 bp, Homo sapien
agtccaccagctccgagccatctcc

SEQ ID NO: 6032581 - DNA, 25 bp, Homo sapien
ccatccaagccatgtgctttaagtc

SEQ ID NO: 6032582 - DNA, 25 bp, Homo sapien
ctctgcgtgcttttcaaaggagaat

SEQ ID NO: 6032583 - DNA, 25 bp, Homo sapien
tctcccagatcttgttgtaaaattc

SEQ ID NO: 6032584 - DNA, 25 bp, Homo sapien
gacataatggggcaagccgatgaca

SEQ ID NO: 6032585 - DNA, 25 bp, Homo sapien
gcgggttgccgtcgagctgttgttg

SEQ ID NO: 6032586 - DNA, 25 bp, Homo sapien
ttaagtcgtcgctggaaggttcgta

SEQ ID NO: 6032587 - DNA, 25 bp, Homo sapien
cgtccaattccatttcgtcttctgg

SEQ ID NO: 6032588 - DNA, 25 bp, Homo sapien
tctagtttccgcttctcctcttcag

SEQ ID NO: 6032589 - DNA, 25 bp, Homo sapien
ttgttgtaaaattcgcgaattctct

SEQ ID NO: 6032590 - DNA, 25 bp, Homo sapien
ggagaatgcaggaaagtgtgagcct

SEQ ID NO: 6032591 - DNA, 25 bp, Homo sapien
tgttttttaagattgaatctctttc

SEQ ID NO: 6032592 - DNA, 25 bp, Homo sapien
agtcaatgttttttaagattgaatc

SEQ ID NO: 6032593 - DNA, 25 bp, Homo sapien
aagccgatgacattgtaattcatcc

SEQ ID NO: 6032594 - DNA, 25 bp, Homo sapien
tggttgtttggtgagacaaagtcac

SEQ ID NO: 6032595 - DNA, 25 bp, Homo sapien
gagaatcgagacccctccaataccg

SEQ ID NO: 6032596 - DNA, 25 bp, Homo sapien
ttgaatctctttcttcgttccattg

SEQ ID NO: 6032597 - DNA, 25 bp, Homo sapien
ttcaaaggagaatgcaggaaagtgt

SEQ ID NO: 6032598 - DNA, 25 bp, Homo sapien
tttagctttcgcgagaatcgagacc

SEQ ID NO: 6032599 - DNA, 25 bp, Homo sapien
tggaaggttcgtagatgtgccagat

SEQ ID NO: 6032600 - DNA, 25 bp, Homo sapien
cagatcttgttgtaaaattcgcgaa

SEQ ID NO: 6032601 - DNA, 25 bp, Homo sapien
cttgttcttgtcgttgtcatcaaga

SEQ ID NO: 6032602 - DNA, 25 bp, Homo sapien
ctttattgttcaaagtggagtcaat

SEQ ID NO: 6032603 - DNA, 25 bp, Homo sapien
cgagacccctccaataccgtccaat

SEQ ID NO: 6032604 - DNA, 25 bp, Homo sapien
ctgttgctgttgctgctgctgctgt

SEQ ID NO: 6032605 - DNA, 25 bp, Homo sapien
tccattggtctctgacatcttcaaa

SEQ ID NO: 6032606 - DNA, 25 bp, Homo sapien
tgtgctttaagtcgtcgctggaagg

SEQ ID NO: 6032607 - DNA, 25 bp, Homo sapien
cctttgagtccaccagctccgagcc

SEQ ID NO: 6032608 - DNA, 25 bp, Homo sapien
ttccgcttctcctcttcagccatcc

SEQ ID NO: 6032609 - DNA, 25 bp, Homo sapien
ttgttgctgttgctgttgctgctgc

SEQ ID NO: 6032610 - DNA, 25 bp, Homo sapien
aagtcaccctttgagtccaccagct

SEQ ID NO: 6032611 - DNA, 25 bp, Homo sapien
taaaattcgcgaattctctcttctt

SEQ ID NO: 6032612 - DNA, 25 bp, Homo sapien
tgttcaaagtggagtcaatgttttt

SEQ ID NO: 6032613 - DNA, 25 bp, Homo sapien
aggatgttttttcttgttcttgtcg

SEQ ID NO: 6032614 - DNA, 25 bp, Homo sapien
ggagagcctaccgaatgcttctgtc

SEQ ID NO: 6032615 - DNA, 25 bp, Homo sapien
cgagccatctccctcttcagaccag

SEQ ID NO: 6032616 - DNA, 25 bp, Homo sapien
ttctcctcttcagccatccaagcca

SEQ ID NO: 6032617 - DNA, 25 bp, Homo sapien
aagtggagtcaatgttttttaagat

SEQ ID NO: 6032618 - DNA, 25 bp, Homo sapien
ttctgtctctgcgtgcttttcaaag

SEQ ID NO: 6032619 - DNA, 25 bp, Homo sapien
tgttctgaatactttagctttcgcg

SEQ ID NO: 6032620 - DNA, 25 bp, Homo sapien
tcccctgcgggttgccgtcgagctg

SEQ ID NO: 6032621 - DNA, 25 bp, Homo sapien
ggtctctgacatcttcaaatccaat

SEQ ID NO: 6032622 - DNA, 25 bp, Homo sapien
gaatgcttctgtctctgcgtgcttt

SEQ ID NO: 6032623 - DNA, 25 bp, Homo sapien
cagctccgagccatctccctcttca

SEQ ID NO: 6032624 - DNA, 25 bp, Homo sapien
gttgtcatcaagaggtttcccctgc

SEQ ID NO: 6032625 - DNA, 25 bp, Homo sapien
tgccgtcgagctgttgttgctgttg

SEQ ID NO: 6032626 - DNA, 25 bp, Homo sapien
cttcgttccattggtctctgacatc

SEQ ID NO: 6032627 - DNA, 25 bp, Homo sapien
atgacattgtaattcatcctgcggg

SEQ ID NO: 6032628 - DNA, 25 bp, Homo sapien
tcttcaaatccaatctcccagatct

SEQ ID NO: 6032629 - DNA, 25 bp, Homo sapien
gtgcttttcaaaggagaatgcagga

SEQ ID NO: 6032630 - DNA, 25 bp, Homo sapien
cctcttcagaccagtctacagtgac

SEQ ID NO: 6032631 - DNA, 25 bp, Homo sapien
aaagtgtgagcctgttctgaatact

SEQ ID NO: 6032632 - DNA, 25 bp, Homo sapien
aagccatgtgctttaagtcgtcgct

SEQ ID NO: 6032633 - DNA, 25 bp, Homo sapien
caataccgtccaattccatttcgtc

SEQ ID NO: 6032634 - DNA, 25 bp, Homo sapien
taagattgaatctctttcttcgttc

SEQ ID NO: 6032635 - DNA, 25 bp, Homo sapien
cagaccagtctacagtgactttatt

SEQ ID NO: 6032636 - DNA, 25 bp, Homo sapien
atcaagaggtttcccctgcgggttg

SEQ ID NO: 6032637 - DNA, 25 bp, Homo sapien
tttcgcgagaatcgagacccctcca

SEQ ID NO: 6032638 - DNA, 25 bp, Homo sapien
ttcatcctgcgggagagcctaccga

SEQ ID NO: 6032639 - DNA, 25 bp, Homo sapien
tgacatcttcaaatccaatctccca

SEQ ID NO: 6032640 - DNA, 25 bp, Homo sapien
attctctcttcttctagtttccgct

SEQ ID NO: 6032641 - DNA, 25 bp, Homo sapien
agtctacagtgactttattgttcaa

SEQ ID NO: 6032642 - DNA, 25 bp, Homo sapien
ctgcgggagagcctaccgaatgctt

SEQ ID NO: 6032643 - DNA, 25 bp, Homo sapien
ctctttcttcgttccattggtctct

SEQ ID NO: 6032644 - DNA, 25 bp, Homo sapien
cttgtcgttgtcatcaagaggtttc

SEQ ID NO: 6032645 - DNA, 25 bp, Homo sapien
gttcgtagatgtgccagatgacata

SEQ ID NO: 6032646 - DNA, 25 bp, Homo sapien
tcgcgaattctctcttcttctagtt

SEQ ID NO: 6032647 - DNA, 25 bp, Homo sapien
tgcaggaaagtgtgagcctgttctg

SEQ ID NO: 6032648 - DNA, 25 bp, Homo sapien
ccagatgacataatggggcaagccg

SEQ ID NO: 6032649 - DNA, 25 bp, Homo sapien
ttgtaattcatcctgcgggagagcc

SEQ ID NO: 6032650 - DNA, 25 bp, Homo sapien
cttcagccatccaagccatgtgctt

SEQ ID NO: 6032651 - DNA, 25 bp, Homo sapien
ttttttcttgttcttgtcgttgtca

SEQ ID NO: 6032652 - DNA, 25 bp, Homo sapien
tcgtcgctggaaggttcgtagatgt

SEQ ID NO: 6032653 - DNA, 25 bp, Homo sapien
tgagcctgttctgaatactttagct

SEQ ID NO: 6032654 - DNA, 25 bp, Homo sapien
gagacaaagtcaccctttgagtcca

SEQ ID NO: 6032655 - DNA, 25 bp, Homo sapien
tgttgttgttgttggttgtttggtg

SEQ ID NO: 6032656 - DNA, 25 bp, Homo sapien
gagctgttgttgctgttgctgttgc

SEQ ID NO: 6032657 - DNA, 25 bp, Homo sapien
ccctccaataccgtccaattccatt

SEQ ID NO: 6032658 - DNA, 25 bp, Homo sapien
ctgttgctgctgctgctgttgttgt

SEQ ID NO: 6032659 - DNA, 25 bp, Homo sapien
tttggtgagacaaagtcaccctttg

SEQ ID NO: 6032660 - DNA, 25 bp, Homo sapien
ctgctgctgctgttgttgttgttgt

SEQ ID NO: 6032661 - DNA, 25 bp, Homo sapien
gaatactttagctttcgcgagaatc

SEQ ID NO: 6032662 - DNA, 25 bp, Homo sapien
gatgtgccagatgacataatggggc

SEQ ID NO: 6032663 - DNA, 25 bp, Homo sapien
tggggcaagccgatgacattgtaat

SEQ ID NO: 6032664 - DNA, 25 bp, Homo sapien
catctccctcttcagaccagtctac

SEQ ID NO: 6032665 - DNA, 25 bp, Homo sapien
tcttcttctagtttccgcttctcct

SEQ ID NO: 6032666 - DNA, 25 bp, Homo sapien
atccaatctcccagatcttgttgta

SEQ ID NO: 6032667 - DNA, 25 bp, Homo sapien
tgttgttggttgtttggtgagacaa

SEQ ID NO: 6032668 - DNA, 25 bp, Homo sapien
cagtgactttattgttcaaagtgga

SEQ ID NO: 6032669 - DNA, 25 bp, Homo sapien
gctaccaaagagaggaagtcgaacg

SEQ ID NO: 6032670 - DNA, 25 bp, Homo sapien
actacagaacgtactgaatctgcct

SEQ ID NO: 6032671 - DNA, 25 bp, Homo sapien
tttagagaccaagaccaagcttgct

SEQ ID NO: 6032672 - DNA, 25 bp, Homo sapien
aatatctactgatgggtattccaga

SEQ ID NO: 6032673 - DNA, 25 bp, Homo sapien
accacagcaacaaacagccgccgca

SEQ ID NO: 6032674 - DNA, 25 bp, Homo sapien
gtcgaacgagccttgagagcagcct

SEQ ID NO: 6032675 - DNA, 25 bp, Homo sapien
cctgcagccactgctcccgaaggct

SEQ ID NO: 6032676 - DNA, 25 bp, Homo sapien
tcaatccatttcttgtgaagaatct

SEQ ID NO: 6032677 - DNA, 25 bp, Homo sapien
aatccagatagagcggtggaatatc

SEQ ID NO: 6032678 - DNA, 25 bp, Homo sapien
aaaatctgcgtcaaccggaaccaca

SEQ ID NO: 6032679 - DNA, 25 bp, Homo sapien
aattgctcctgagagcgccactacc

SEQ ID NO: 6032680 - DNA, 25 bp, Homo sapien
tttaataatccagatagagcggtgg

SEQ ID NO: 6032681 - DNA, 25 bp, Homo sapien
tctacaccgggattcgtggtgggaa

SEQ ID NO: 6032682 - DNA, 25 bp, Homo sapien
cgagaccatcgagagaatcatggaa

SEQ ID NO: 6032683 - DNA, 25 bp, Homo sapien
tccaaaaccgtatcggaatgcgggc

SEQ ID NO: 6032684 - DNA, 25 bp, Homo sapien
aaccggaaccacagcaacaaacagc

SEQ ID NO: 6032685 - DNA, 25 bp, Homo sapien
gctaaaagatggggaccaagttgtc

SEQ ID NO: 6032686 - DNA, 25 bp, Homo sapien
cccggaagagaaaattctacagaag

SEQ ID NO: 6032687 - DNA, 25 bp, Homo sapien
gaccaagcttgctcaatccatttct

SEQ ID NO: 6032688 - DNA, 25 bp, Homo sapien
tcctgagagcgccactacccccgga

SEQ ID NO: 6032689 - DNA, 25 bp, Homo sapien
gaccaagaccaagcttgctcaatcc

SEQ ID NO: 6032690 - DNA, 25 bp, Homo sapien
ttcaaacacaattttagagaccaag

SEQ ID NO: 6032691 - DNA, 25 bp, Homo sapien
ttccagaaaatctgcgtcaaccgga

SEQ ID NO: 6032692 - DNA, 25 bp, Homo sapien
gcttgctcaatccatttcttgtgaa

SEQ ID NO: 6032693 - DNA, 25 bp, Homo sapien
tatcggaatgcgggctaaaagatgg

SEQ ID NO: 6032694 - DNA, 25 bp, Homo sapien
tggggaccaagttgtcttcatggtt

SEQ ID NO: 6032695 - DNA, 25 bp, Homo sapien
cacaaccgcaagaagaacaaaccgc

SEQ ID NO: 6032696 - DNA, 25 bp, Homo sapien
cacaattttagagaccaagaccaag

SEQ ID NO: 6032697 - DNA, 25 bp, Homo sapien
ccaaagtaacagaacctccaattgc

SEQ ID NO: 6032698 - DNA, 25 bp, Homo sapien
gtgctacaagattccaaaaccgtat

SEQ ID NO: 6032699 - DNA, 25 bp, Homo sapien
tgggaaccgagaggaacgagaccat

SEQ ID NO: 6032700 - DNA, 25 bp, Homo sapien
gcaagaagaacaaaccgccactaca

SEQ ID NO: 6032701 - DNA, 25 bp, Homo sapien
ccaagttgtcttcatggtttctcaa

SEQ ID NO: 6032702 - DNA, 25 bp, Homo sapien
aatgggctaccaaagagaggaagtc

SEQ ID NO: 6032703 - DNA, 25 bp, Homo sapien
tctgcctctacaccgggattcgtgg

SEQ ID NO: 6032704 - DNA, 25 bp, Homo sapien
tgtcttcatggtttctcaaaaaaag

SEQ ID NO: 6032705 - DNA, 25 bp, Homo sapien
atgcgggctaaaagatggggaccaa

SEQ ID NO: 6032706 - DNA, 25 bp, Homo sapien
acggatgcttctgcagctcctgcag

SEQ ID NO: 6032707 - DNA, 25 bp, Homo sapien
ggtaaagtgctacaagattccaaaa

SEQ ID NO: 6032708 - DNA, 25 bp, Homo sapien
gcttctgcagctcctgcagccactg

SEQ ID NO: 6032709 - DNA, 25 bp, Homo sapien
aaagatggggaccaagttgtcttca

SEQ ID NO: 6032710 - DNA, 25 bp, Homo sapien
catcgagagaatcatggaaatgggc

SEQ ID NO: 6032711 - DNA, 25 bp, Homo sapien
tgggtattccagaaaatctgcgtca

SEQ ID NO: 6032712 - DNA, 25 bp, Homo sapien
tactcgggtaaagtgctacaagatt

SEQ ID NO: 6032713 - DNA, 25 bp, Homo sapien
agagcgccactacccccggaagaga

SEQ ID NO: 6032714 - DNA, 25 bp, Homo sapien
gctcccgaaggctcacaaccgcaag

SEQ ID NO: 6032715 - DNA, 25 bp, Homo sapien
tctcaaaaaaagtccacgaagacca

SEQ ID NO: 6032716 - DNA, 25 bp, Homo sapien
ttgagagcagcctttaataatccag

SEQ ID NO: 6032717 - DNA, 25 bp, Homo sapien
gaacgtactgaatctgcctctacac

SEQ ID NO: 6032718 - DNA, 25 bp, Homo sapien
acagccgccgcagcggaacaaccat

SEQ ID NO: 6032719 - DNA, 25 bp, Homo sapien
tagatctggaaccttcaaacacaat

SEQ ID NO: 6032720 - DNA, 25 bp, Homo sapien
cggtggaatatctactgatgggtat

SEQ ID NO: 6032721 - DNA, 25 bp, Homo sapien
catttcttgtgaagaatctcaaata

SEQ ID NO: 6032722 - DNA, 25 bp, Homo sapien
gaagaccaaagtaacagaacctcca

SEQ ID NO: 6032723 - DNA, 25 bp, Homo sapien
catggtttctcaaaaaaagtccacg

SEQ ID NO: 6032724 - DNA, 25 bp, Homo sapien
aattctacagaagcatcccccagta

SEQ ID NO: 6032725 - DNA, 25 bp, Homo sapien
tcgtggtgggaaccgagaggaacga

SEQ ID NO: 6032726 - DNA, 25 bp, Homo sapien
gcatcccccagtacggatgcttctg

SEQ ID NO: 6032727 - DNA, 25 bp, Homo sapien
cccagtacggatgcttctgcagctc

SEQ ID NO: 6032728 - DNA, 25 bp, Homo sapien
gccactgctcccgaaggctcacaac

SEQ ID NO: 6032729 - DNA, 25 bp, Homo sapien
gcaacaaacagccgccgcagcggaa

SEQ ID NO: 6032730 - DNA, 25 bp, Homo sapien
catggaaatgggctaccaaagagag

SEQ ID NO: 6032731 - DNA, 25 bp, Homo sapien
acagaagcatcccccagtacggatg

SEQ ID NO: 6032732 - DNA, 25 bp, Homo sapien
gatctactcgggtaaagtgctacaa

SEQ ID NO: 6032733 - DNA, 25 bp, Homo sapien
gagaatcatggaaatgggctaccaa

SEQ ID NO: 6032734 - DNA, 25 bp, Homo sapien
ttcctttagatctggaaccttcaaa

SEQ ID NO: 6032735 - DNA, 25 bp, Homo sapien
actgaatctgcctctacaccgggat

SEQ ID NO: 6032736 - DNA, 25 bp, Homo sapien
tcaaataaaactgatctactcgggt

SEQ ID NO: 6032737 - DNA, 25 bp, Homo sapien
agagaaaattctacagaagcatccc

SEQ ID NO: 6032738 - DNA, 25 bp, Homo sapien
aggaagtcgaacgagccttgagagc

SEQ ID NO: 6032739 - DNA, 25 bp, Homo sapien
gaaggctcacaaccgcaagaagaac

SEQ ID NO: 6032740 - DNA, 25 bp, Homo sapien
ttgtgaagaatctcaaataaaactg

SEQ ID NO: 6032741 - DNA, 25 bp, Homo sapien
atagagcggtggaatatctactgat

SEQ ID NO: 6032742 - DNA, 25 bp, Homo sapien
aacctccaattgctcctgagagcgc

SEQ ID NO: 6032743 - DNA, 25 bp, Homo sapien
cgagccttgagagcagcctttaata

SEQ ID NO: 6032744 - DNA, 25 bp, Homo sapien
aaccgccactacagaacgtactgaa

SEQ ID NO: 6032745 - DNA, 25 bp, Homo sapien
aaccgagaggaacgagaccatcgag

SEQ ID NO: 6032746 - DNA, 25 bp, Homo sapien
gcagctcctgcagccactgctcccg

SEQ ID NO: 6032747 - DNA, 25 bp, Homo sapien
aaagagaggaagtcgaacgagcctt

SEQ ID NO: 6032748 - DNA, 25 bp, Homo sapien
agaatctcaaataaaactgatctac

SEQ ID NO: 6032749 - DNA, 25 bp, Homo sapien
tgcgtcaaccggaaccacagcaaca

SEQ ID NO: 6032750 - DNA, 25 bp, Homo sapien
agaacaaaccgccactacagaacgt

SEQ ID NO: 6032751 - DNA, 25 bp, Homo sapien
caagattccaaaaccgtatcggaat

SEQ ID NO: 6032752 - DNA, 25 bp, Homo sapien
cgggattcgtggtgggaaccgagag

SEQ ID NO: 6032753 - DNA, 25 bp, Homo sapien
gaggaacgagaccatcgagagaatc

SEQ ID NO: 6032754 - DNA, 25 bp, Homo sapien
tggaaccttcaaacacaattttaga

SEQ ID NO: 6032755 - DNA, 25 bp, Homo sapien
gccgcagcggaacaaccatcgacag

SEQ ID NO: 6032756 - DNA, 25 bp, Homo sapien
tactgatgggtattccagaaaatct

SEQ ID NO: 6032757 - DNA, 25 bp, Homo sapien
gcagcctttaataatccagatagag

SEQ ID NO: 6032758 - DNA, 25 bp, Homo sapien
taacagaacctccaattgctcctga

SEQ ID NO: 6032759 - DNA, 25 bp, Homo sapien
gtccacgaagaccaaagtaacagaa

SEQ ID NO: 6032760 - DNA, 25 bp, Homo sapien
aaaactgatctactcgggtaaagtg

SEQ ID NO: 6032761 - DNA, 25 bp, Homo sapien
accgtatcggaatgcgggctaaaag

SEQ ID NO: 6032762 - DNA, 25 bp, Homo sapien
tcaacgatagtaaatcttctacagt

SEQ ID NO: 6032763 - DNA, 25 bp, Homo sapien
ttatcgcacgcaaaatacacctgga

SEQ ID NO: 6032764 - DNA, 25 bp, Homo sapien
caatggaacctggaggtccaccttg

SEQ ID NO: 6032765 - DNA, 25 bp, Homo sapien
tacctgaaacgacctgtctcaacga

SEQ ID NO: 6032766 - DNA, 25 bp, Homo sapien
aaacacttctgggtttgccatgata

SEQ ID NO: 6032767 - DNA, 25 bp, Homo sapien
tcaccttcaccttgtcccagtcctg

SEQ ID NO: 6032768 - DNA, 25 bp, Homo sapien
aaatacacctggataacaagatctc

SEQ ID NO: 6032769 - DNA, 25 bp, Homo sapien
accttgcgcagcatctgtagctcct

SEQ ID NO: 6032770 - DNA, 25 bp, Homo sapien
aagcccaattcacagaggcgcgaaa

SEQ ID NO: 6032771 - DNA, 25 bp, Homo sapien
tgatcgtcttcgggggtatagtcaa

SEQ ID NO: 6032772 - DNA, 25 bp, Homo sapien
ttgaggatatctagcacttatgttt

SEQ ID NO: 6032773 - DNA, 25 bp, Homo sapien
atagcttgatcgtcttcgggggtat

SEQ ID NO: 6032774 - DNA, 25 bp, Homo sapien
tatgttttccaacaatggggctaaa

SEQ ID NO: 6032775 - DNA, 25 bp, Homo sapien
aaacgacctgtctcaacgatagtaa

SEQ ID NO: 6032776 - DNA, 25 bp, Homo sapien
gctgtggttccggttgacgcagatt

SEQ ID NO: 6032777 - DNA, 25 bp, Homo sapien
agtcctgcagcagcagcctctcctg

SEQ ID NO: 6032778 - DNA, 25 bp, Homo sapien
gaggtccaccttgcgcagcatctgt

SEQ ID NO: 6032779 - DNA, 25 bp, Homo sapien
caacatggacacaaacacttctggg

SEQ ID NO: 6032780 - DNA, 25 bp, Homo sapien
tcgtttttatcgcacgcaaaataca

SEQ ID NO: 6032781 - DNA, 25 bp, Homo sapien
ctctccttccaccatatcatccgca

SEQ ID NO: 6032782 - DNA, 25 bp, Homo sapien
ttccaccatatcatccgcaccttcc

SEQ ID NO: 6032783 - DNA, 25 bp, Homo sapien
gtaacttctatatcctctccttcca

SEQ ID NO: 6032784 - DNA, 25 bp, Homo sapien
gtttgccatgatatgttcacgtaat

SEQ ID NO: 6032785 - DNA, 25 bp, Homo sapien
gcttgtgcaaataagtcgtcttcag

SEQ ID NO: 6032786 - DNA, 25 bp, Homo sapien
ttgtgccaagcgcaccggatgaagc

SEQ ID NO: 6032787 - DNA, 25 bp, Homo sapien
tggcggctgtcgatggttgttccgc

SEQ ID NO: 6032788 - DNA, 25 bp, Homo sapien
catatcatccgcaccttccataaca

SEQ ID NO: 6032789 - DNA, 25 bp, Homo sapien
ccgccttgggcagcttgtgcaaata

SEQ ID NO: 6032790 - DNA, 25 bp, Homo sapien
cttcagccggttgttccgcagtggt

SEQ ID NO: 6032791 - DNA, 25 bp, Homo sapien
tatatcctctccttccaccatatca

SEQ ID NO: 6032792 - DNA, 25 bp, Homo sapien
ttccaacaatggggctaaagcttct

SEQ ID NO: 6032793 - DNA, 25 bp, Homo sapien
catctgtagctcctccagttgtgcc

SEQ ID NO: 6032794 - DNA, 25 bp, Homo sapien
ctgtcgatggttgttccgctgcggc

SEQ ID NO: 6032795 - DNA, 25 bp, Homo sapien
gaaccttcaccttcaccttgtccca

SEQ ID NO: 6032796 - DNA, 25 bp, Homo sapien
tcaccttgtcccagtcctgcagcag

SEQ ID NO: 6032797 - DNA, 25 bp, Homo sapien
ttccgctgcggcggctgtttgttgc

SEQ ID NO: 6032798 - DNA, 25 bp, Homo sapien
gctaaagcttctgggttacctgaaa

SEQ ID NO: 6032799 - DNA, 25 bp, Homo sapien
atatctagcacttatgttttccaac

SEQ ID NO: 6032800 - DNA, 25 bp, Homo sapien
tttgttgctgtggttccggttgacg

SEQ ID NO: 6032801 - DNA, 25 bp, Homo sapien
ctttcaaagcccaattcacagaggc

SEQ ID NO: 6032802 - DNA, 25 bp, Homo sapien
ccggttgttccgcagtggtggcggc

SEQ ID NO: 6032803 - DNA, 25 bp, Homo sapien
agatctctttcaaagcccaattcac

SEQ ID NO: 6032804 - DNA, 25 bp, Homo sapien
catattgtcacccacggcttctagc

SEQ ID NO: 6032805 - DNA, 25 bp, Homo sapien
cgcgaaatagcttgatcgtcttcgg

SEQ ID NO: 6032806 - DNA, 25 bp, Homo sapien
gcattaccgccttgggcagcttgtg

SEQ ID NO: 6032807 - DNA, 25 bp, Homo sapien
ctgcggcggctgtttgttgctgtgg

SEQ ID NO: 6032808 - DNA, 25 bp, Homo sapien
tggttgttccgctgcggcggctgtt

SEQ ID NO: 6032809 - DNA, 25 bp, Homo sapien
tgaggccaatggaacctggaggtcc

SEQ ID NO: 6032810 - DNA, 25 bp, Homo sapien
ctacagtgaggccaatggaacctgg

SEQ ID NO: 6032811 - DNA, 25 bp, Homo sapien
accttccataacatcttgcatattg

SEQ ID NO: 6032812 - DNA, 25 bp, Homo sapien
agcacttatgttttccaacaatggg

SEQ ID NO: 6032813 - DNA, 25 bp, Homo sapien
gctgcagcttcttcgtttttatcgc

SEQ ID NO: 6032814 - DNA, 25 bp, Homo sapien
aacctggaggtccaccttgcgcagc

SEQ ID NO: 6032815 - DNA, 25 bp, Homo sapien
tagtcaacttggaaagaaccttcac

SEQ ID NO: 6032816 - DNA, 25 bp, Homo sapien
ctgggttacctgaaacgacctgtct

SEQ ID NO: 6032817 - DNA, 25 bp, Homo sapien
atcttgcatattgtcacccacggct

SEQ ID NO: 6032818 - DNA, 25 bp, Homo sapien
aattcacagaggcgcgaaatagctt

SEQ ID NO: 6032819 - DNA, 25 bp, Homo sapien
gcttcttcgtttttatcgcacgcaa

SEQ ID NO: 6032820 - DNA, 25 bp, Homo sapien
tagctcctccagttgtgccaagcgc

SEQ ID NO: 6032821 - DNA, 25 bp, Homo sapien
gcgcagcatctgtagctcctccagt

SEQ ID NO: 6032822 - DNA, 25 bp, Homo sapien
aagtcgtcttcagccggttgttccg

SEQ ID NO: 6032823 - DNA, 25 bp, Homo sapien
aatcttctacagtgaggccaatgga

SEQ ID NO: 6032824 - DNA, 25 bp, Homo sapien
atgttcacgtaattgaggatatcta

SEQ ID NO: 6032825 - DNA, 25 bp, Homo sapien
ccaagcgcaccggatgaagcattac

SEQ ID NO: 6032826 - DNA, 25 bp, Homo sapien
cagaggcgcgaaatagcttgatcgt

SEQ ID NO: 6032827 - DNA, 25 bp, Homo sapien
tgtcccagtcctgcagcagcagcct

SEQ ID NO: 6032828 - DNA, 25 bp, Homo sapien
acgtaattgaggatatctagcactt

SEQ ID NO: 6032829 - DNA, 25 bp, Homo sapien
gcaccggatgaagcattaccgcctt

SEQ ID NO: 6032830 - DNA, 25 bp, Homo sapien
ataacaagatctctttcaaagccca

SEQ ID NO: 6032831 - DNA, 25 bp, Homo sapien
tctcctgtaacttctatatcctctc

SEQ ID NO: 6032832 - DNA, 25 bp, Homo sapien
cacggcttctagcaacatggacaca

SEQ ID NO: 6032833 - DNA, 25 bp, Homo sapien
gcagcctctcctgtaacttctatat

SEQ ID NO: 6032834 - DNA, 25 bp, Homo sapien
ggacacaaacacttctgggtttgcc

SEQ ID NO: 6032835 - DNA, 25 bp, Homo sapien
cataacatcttgcatattgtcaccc

SEQ ID NO: 6032836 - DNA, 25 bp, Homo sapien
gcaaataagtcgtcttcagccggtt

SEQ ID NO: 6032837 - DNA, 25 bp, Homo sapien
gtcacccacggcttctagcaacatg

SEQ ID NO: 6032838 - DNA, 25 bp, Homo sapien
ttctgggtttgccatgatatgttca

SEQ ID NO: 6032839 - DNA, 25 bp, Homo sapien
tcttcgggggtatagtcaacttgga

SEQ ID NO: 6032840 - DNA, 25 bp, Homo sapien
ttctagcaacatggacacaaacact

SEQ ID NO: 6032841 - DNA, 25 bp, Homo sapien
atccgcaccttccataacatcttgc

SEQ ID NO: 6032842 - DNA, 25 bp, Homo sapien
acctggataacaagatctctttcaa

SEQ ID NO: 6032843 - DNA, 25 bp, Homo sapien
tgggcagcttgtgcaaataagtcgt

SEQ ID NO: 6032844 - DNA, 25 bp, Homo sapien
gatgaagcattaccgccttgggcag

SEQ ID NO: 6032845 - DNA, 25 bp, Homo sapien
cggctgtttgttgctgtggttccgg

SEQ ID NO: 6032846 - DNA, 25 bp, Homo sapien
catgatatgttcacgtaattgagga

SEQ ID NO: 6032847 - DNA, 25 bp, Homo sapien
ctccagttgtgccaagcgcaccgga

SEQ ID NO: 6032848 - DNA, 25 bp, Homo sapien
atagtaaatcttctacagtgaggcc

SEQ ID NO: 6032849 - DNA, 25 bp, Homo sapien
caatggggctaaagcttctgggtta

SEQ ID NO: 6032850 - DNA, 25 bp, Homo sapien
gttccgcagtggtggcggctgtcga

SEQ ID NO: 6032851 - DNA, 25 bp, Homo sapien
cacgcaaaatacacctggataacaa

SEQ ID NO: 6032852 - DNA, 25 bp, Homo sapien
cagtggtggcggctgtcgatggttg

SEQ ID NO: 6032853 - DNA, 25 bp, Homo sapien
gcagcagcagcctctcctgtaactt

SEQ ID NO: 6032854 - DNA, 25 bp, Homo sapien
cctgtctcaacgatagtaaatcttc

SEQ ID NO: 6032855 - DNA, 25 bp, Homo sapien
caccgttaggctcgaacagaccgtt

SEQ ID NO: 6032856 - DNA, 25 bp, Homo sapien
atggggaaatcttcgactccatctc

SEQ ID NO: 6032857 - DNA, 25 bp, Homo sapien
attggaagaactggtccgcatcaaa

SEQ ID NO: 6032858 - DNA, 25 bp, Homo sapien
gaatgccgctgcacaatctggcgtg

SEQ ID NO: 6032859 - DNA, 25 bp, Homo sapien
tacggtgaagatgttgacaccgtta

SEQ ID NO: 6032860 - DNA, 25 bp, Homo sapien
cagggctcacgtttacactcacgaa

SEQ ID NO: 6032861 - DNA, 25 bp, Homo sapien
ccagaatctggaatgccgctgcaca

SEQ ID NO: 6032862 - DNA, 25 bp, Homo sapien
cagagatgatggaggccgctttaga

SEQ ID NO: 6032863 - DNA, 25 bp, Homo sapien
atcaccgctgctaacgacttgcggt

SEQ ID NO: 6032864 - DNA, 25 bp, Homo sapien
tgtgtctctgggactttgtccaacc

SEQ ID NO: 6032865 - DNA, 25 bp, Homo sapien
gctggcaaagaagcaggtttgttct

SEQ ID NO: 6032866 - DNA, 25 bp, Homo sapien
aaactacattgtgacggtgccagaa

SEQ ID NO: 6032867 - DNA, 25 bp, Homo sapien
cttccaacggtgactacttgacctt

SEQ ID NO: 6032868 - DNA, 25 bp, Homo sapien
tcacgtttacactcacgaagccgct

SEQ ID NO: 6032869 - DNA, 25 bp, Homo sapien
ttatccattggaagaactggtccgc

SEQ ID NO: 6032870 - DNA, 25 bp, Homo sapien
cgaacagaccgttgcccgcatggct

SEQ ID NO: 6032871 - DNA, 25 bp, Homo sapien
ctggaaaacactttacacggtattg

SEQ ID NO: 6032872 - DNA, 25 bp, Homo sapien
gactggcgatcttgtctcaagcgat

SEQ ID NO: 6032873 - DNA, 25 bp, Homo sapien
ggtgcccccaccagattgatttctc

SEQ ID NO: 6032874 - DNA, 25 bp, Homo sapien
tttacactcacgaagccgctggact

SEQ ID NO: 6032875 - DNA, 25 bp, Homo sapien
agattgccatcagaactcacttgat

SEQ ID NO: 6032876 - DNA, 25 bp, Homo sapien
agaggcctctatcggtgacgctgtc

SEQ ID NO: 6032877 - DNA, 25 bp, Homo sapien
agcaatatggggaaatcttcgactc

SEQ ID NO: 6032878 - DNA, 25 bp, Homo sapien
acggtgactacttgaccttggaaga

SEQ ID NO: 6032879 - DNA, 25 bp, Homo sapien
aaatcttcgactccatctccatctg

SEQ ID NO: 6032880 - DNA, 25 bp, Homo sapien
cgcatggctggcaaagaagcaggtt

SEQ ID NO: 6032881 - DNA, 25 bp, Homo sapien
ttgcggtcagacacattcaccactc

SEQ ID NO: 6032882 - DNA, 25 bp, Homo sapien
ctcacgaagccgctggactggcgat

SEQ ID NO: 6032883 - DNA, 25 bp, Homo sapien
cgctggactggcgatcttgtctcaa

SEQ ID NO: 6032884 - DNA, 25 bp, Homo sapien
tctggaatgccgctgcacaatctgg

SEQ ID NO: 6032885 - DNA, 25 bp, Homo sapien
ggaggccgctttagaggcctctatc

SEQ ID NO: 6032886 - DNA, 25 bp, Homo sapien
cgaagccgctggactggcgatcttg

SEQ ID NO: 6032887 - DNA, 25 bp, Homo sapien
ccactccaactgcagagatgatgga

SEQ ID NO: 6032888 - DNA, 25 bp, Homo sapien
ttgcccgcatggctggcaaagaagc

SEQ ID NO: 6032889 - DNA, 25 bp, Homo sapien
gctgtctacggtgaagatgttgaca

SEQ ID NO: 6032890 - DNA, 25 bp, Homo sapien
tggcgtgccattaaagcaatatggg

SEQ ID NO: 6032891 - DNA, 25 bp, Homo sapien
acggtgccagaatctggaatgccgc

SEQ ID NO: 6032892 - DNA, 25 bp, Homo sapien
ttcctgtggttccttccaacggtga

SEQ ID NO: 6032893 - DNA, 25 bp, Homo sapien
ccatcagaactcacttgatgcaacc

SEQ ID NO: 6032894 - DNA, 25 bp, Homo sapien
tgatattcacggtgcccccaccaga

SEQ ID NO: 6032895 - DNA, 25 bp, Homo sapien
tccaaccagattgccatcagaactc

SEQ ID NO: 6032896 - DNA, 25 bp, Homo sapien
atcaaagcttggtgtatggaaaatg

SEQ ID NO: 6032897 - DNA, 25 bp, Homo sapien
tgattacagggctcacgtttacact

SEQ ID NO: 6032898 - DNA, 25 bp, Homo sapien
agtcacactacgtcccagacgacgg

SEQ ID NO: 6032899 - DNA, 25 bp, Homo sapien
gaagatgttgacaccgttaggctcg

SEQ ID NO: 6032900 - DNA, 25 bp, Homo sapien
cattcaccactccaactgcagagat

SEQ ID NO: 6032901 - DNA, 25 bp, Homo sapien
gaccgttgcccgcatggctggcaaa

SEQ ID NO: 6032902 - DNA, 25 bp, Homo sapien
gcaggtttgttctgtgtctctggga

SEQ ID NO: 6032903 - DNA, 25 bp, Homo sapien
ctccatactctattctatgtgatta

SEQ ID NO: 6032904 - DNA, 25 bp, Homo sapien
cgatcttgtctcaagcgatggtggt

SEQ ID NO: 6032905 - DNA, 25 bp, Homo sapien
caactgcagagatgatggaggccgc

SEQ ID NO: 6032906 - DNA, 25 bp, Homo sapien
acatcaagtcacactacgtcccaga

SEQ ID NO: 6032907 - DNA, 25 bp, Homo sapien
aagcgatggtggttcctgtggttcc

SEQ ID NO: 6032908 - DNA, 25 bp, Homo sapien
cccaccagattgatttctctggaaa

SEQ ID NO: 6032909 - DNA, 25 bp, Homo sapien
gcttggtgtatggaaaatggtctca

SEQ ID NO: 6032910 - DNA, 25 bp, Homo sapien
tgtggttccttccaacggtgactac

SEQ ID NO: 6032911 - DNA, 25 bp, Homo sapien
gctgctaacgacttgcggtcagaca

SEQ ID NO: 6032912 - DNA, 25 bp, Homo sapien
tgcaacctccatactctattctatg

SEQ ID NO: 6032913 - DNA, 25 bp, Homo sapien
agattgatttctctggaaaacactt

SEQ ID NO: 6032914 - DNA, 25 bp, Homo sapien
cgctgcacaatctggcgtgccatta

SEQ ID NO: 6032915 - DNA, 25 bp, Homo sapien
actacgtcccagacgacggtgatat

SEQ ID NO: 6032916 - DNA, 25 bp, Homo sapien
actacttgaccttggaagacatcaa

SEQ ID NO: 6032917 - DNA, 25 bp, Homo sapien
tcccagacgacggtgatattcacgg

SEQ ID NO: 6032918 - DNA, 25 bp, Homo sapien
tcacggtgcccccaccagattgatt

SEQ ID NO: 6032919 - DNA, 25 bp, Homo sapien
acacggtattgtttatccattggaa

SEQ ID NO: 6032920 - DNA, 25 bp, Homo sapien
tctatgtgattacagggctcacgtt

SEQ ID NO: 6032921 - DNA, 25 bp, Homo sapien
tgtatggaaaatggtctcaaactac

SEQ ID NO: 6032922 - DNA, 25 bp, Homo sapien
taggctcgaacagaccgttgcccgc

SEQ ID NO: 6032923 - DNA, 25 bp, Homo sapien
tgtctcaagcgatggtggttcctgt

SEQ ID NO: 6032924 - DNA, 25 bp, Homo sapien
atttctctggaaaacactttacacg

SEQ ID NO: 6032925 - DNA, 25 bp, Homo sapien
cggtgacgctgtctacggtgaagat

SEQ ID NO: 6032926 - DNA, 25 bp, Homo sapien
tggaagacatcaagtcacactacgt

SEQ ID NO: 6032927 - DNA, 25 bp, Homo sapien
actctattctatgtgattacagggc

SEQ ID NO: 6032928 - DNA, 25 bp, Homo sapien
cgctttagaggcctctatcggtgac

SEQ ID NO: 6032929 - DNA, 25 bp, Homo sapien
tctgggactttgtccaaccagattg

SEQ ID NO: 6032930 - DNA, 25 bp, Homo sapien
tgatggaggccgctttagaggcctc

SEQ ID NO: 6032931 - DNA, 25 bp, Homo sapien
tggtggttcctgtggttccttccaa

SEQ ID NO: 6032932 - DNA, 25 bp, Homo sapien
ggtctcaaactacattgtgacggtg

SEQ ID NO: 6032933 - DNA, 25 bp, Homo sapien
tattgtttatccattggaagaactg

SEQ ID NO: 6032934 - DNA, 25 bp, Homo sapien
cactttacacggtattgtttatcca

SEQ ID NO: 6032935 - DNA, 25 bp, Homo sapien
cagacacattcaccactccaactgc

SEQ ID NO: 6032936 - DNA, 25 bp, Homo sapien
agaactggtccgcatcaaagcttgg

SEQ ID NO: 6032937 - DNA, 25 bp, Homo sapien
gaactcacttgatgcaacctccata

SEQ ID NO: 6032938 - DNA, 25 bp, Homo sapien
tgaccttggaagacatcaagtcaca

SEQ ID NO: 6032939 - DNA, 25 bp, Homo sapien
tgttgacaccgttaggctcgaacag

SEQ ID NO: 6032940 - DNA, 25 bp, Homo sapien
ctctatcggtgacgctgtctacggt

SEQ ID NO: 6032941 - DNA, 25 bp, Homo sapien
ggtccgcatcaaagcttggtgtatg

SEQ ID NO: 6032942 - DNA, 25 bp, Homo sapien
acgacggtgatattcacggtgcccc

SEQ ID NO: 6032943 - DNA, 25 bp, Homo sapien
cattgtgacggtgccagaatctgga

SEQ ID NO: 6032944 - DNA, 25 bp, Homo sapien
aaagaagcaggtttgttctgtgtct

SEQ ID NO: 6032945 - DNA, 25 bp, Homo sapien
ttgttctgtgtctctgggactttgt

SEQ ID NO: 6032946 - DNA, 25 bp, Homo sapien
actttgtccaaccagattgccatca

SEQ ID NO: 6032947 - DNA, 25 bp, Homo sapien
aacgacttgcggtcagacacattca

SEQ ID NO: 6032948 - DNA, 25 bp, Homo sapien
acaatctggcgtgccattaaagcaa

SEQ ID NO: 6032949 - DNA, 25 bp, Homo sapien
acttgatgcaacctccatactctat

SEQ ID NO: 6032950 - DNA, 25 bp, Homo sapien
gaaaatggtctcaaactacattgtg

SEQ ID NO: 6032951 - DNA, 25 bp, Homo sapien
ccagattgtctaataccaccacctt

SEQ ID NO: 6032952 - DNA, 25 bp, Homo sapien
gcattccagattctggcaccgtcac

SEQ ID NO: 6032953 - DNA, 25 bp, Homo sapien
tagtggaacgagactctaccaccca

SEQ ID NO: 6032954 - DNA, 25 bp, Homo sapien
agatggagtcgaagatttccccata

SEQ ID NO: 6032955 - DNA, 25 bp, Homo sapien
gttgatgtttacaagagccattcta

SEQ ID NO: 6032956 - DNA, 25 bp, Homo sapien
taggtccgttacagtcgaaaggatg

SEQ ID NO: 6032957 - DNA, 25 bp, Homo sapien
aaagacaaagttggtgtctgctgga

SEQ ID NO: 6032958 - DNA, 25 bp, Homo sapien
tagccatcataccagattgtctaat

SEQ ID NO: 6032959 - DNA, 25 bp, Homo sapien
agtcgaagatttccccatattgctt

SEQ ID NO: 6032960 - DNA, 25 bp, Homo sapien
aatattcggctaattcatgagccaa

SEQ ID NO: 6032961 - DNA, 25 bp, Homo sapien
accttgttgttttctgaaatgggtg

SEQ ID NO: 6032962 - DNA, 25 bp, Homo sapien
atcgttgttgatgtttacaagagcc

SEQ ID NO: 6032963 - DNA, 25 bp, Homo sapien
ctggtgacttgatagtggaacgaga

SEQ ID NO: 6032964 - DNA, 25 bp, Homo sapien
tattgctttaatggcacgccagatt

SEQ ID NO: 6032965 - DNA, 25 bp, Homo sapien
atagtcgaaggcctcggagatggcc

SEQ ID NO: 6032966 - DNA, 25 bp, Homo sapien
atgttctttagcatagtcgaaggcc

SEQ ID NO: 6032967 - DNA, 25 bp, Homo sapien
ggacccaataggagcacccatagac

SEQ ID NO: 6032968 - DNA, 25 bp, Homo sapien
gaaaggatgttctttagcatagtcg

SEQ ID NO: 6032969 - DNA, 25 bp, Homo sapien
agcgttgccatcaacgtcgacctcg

SEQ ID NO: 6032970 - DNA, 25 bp, Homo sapien
actttttccaaagtatctctggtga

SEQ ID NO: 6032971 - DNA, 25 bp, Homo sapien
caacgtcgacctcggtggattcact

SEQ ID NO: 6032972 - DNA, 25 bp, Homo sapien
tagcgggatgccctttgcctcacaa

SEQ ID NO: 6032973 - DNA, 25 bp, Homo sapien
tccgttacagtcgaaaggatgttct

SEQ ID NO: 6032974 - DNA, 25 bp, Homo sapien
tgctggagactctagcgggatgccc

SEQ ID NO: 6032975 - DNA, 25 bp, Homo sapien
tgggtggccttcttgacaaacttaa

SEQ ID NO: 6032976 - DNA, 25 bp, Homo sapien
atagacagatggagatggagtcgaa

SEQ ID NO: 6032977 - DNA, 25 bp, Homo sapien
ccaaccaagacggacccaataggag

SEQ ID NO: 6032978 - DNA, 25 bp, Homo sapien
gcacgccagattgtgcagcggcatt

SEQ ID NO: 6032979 - DNA, 25 bp, Homo sapien
tgcagcggcattccagattctggca

SEQ ID NO: 6032980 - DNA, 25 bp, Homo sapien
tcataccagattgtctaataccacc

SEQ ID NO: 6032981 - DNA, 25 bp, Homo sapien
cctcacaatattcggctaattcatg

SEQ ID NO: 6032982 - DNA, 25 bp, Homo sapien
ccatagacttggatagacagatgga

SEQ ID NO: 6032983 - DNA, 25 bp, Homo sapien
aaagttggtgtctgctggagactct

SEQ ID NO: 6032984 - DNA, 25 bp, Homo sapien
acttggatagacagatggagatgga

SEQ ID NO: 6032985 - DNA, 25 bp, Homo sapien
cagcaattgggacttccaatcgttg

SEQ ID NO: 6032986 - DNA, 25 bp, Homo sapien
tgggtccattctagcggccttcagg

SEQ ID NO: 6032987 - DNA, 25 bp, Homo sapien
tctgaaatgggtggccttcttgaca

SEQ ID NO: 6032988 - DNA, 25 bp, Homo sapien
ccattctagccatcataccagattg

SEQ ID NO: 6032989 - DNA, 25 bp, Homo sapien
cggctaattcatgagccaaagagtg

SEQ ID NO: 6032990 - DNA, 25 bp, Homo sapien
ggtgtctgctggagactctagcggg

SEQ ID NO: 6032991 - DNA, 25 bp, Homo sapien
cttcttaacaaggacatctgggtcc

SEQ ID NO: 6032992 - DNA, 25 bp, Homo sapien
aataggagcacccatagacttggat

SEQ ID NO: 6032993 - DNA, 25 bp, Homo sapien
cgagtacagcaattgggacttccaa

SEQ ID NO: 6032994 - DNA, 25 bp, Homo sapien
gacctcggtggattcactacggtaa

SEQ ID NO: 6032995 - DNA, 25 bp, Homo sapien
aacaaggacatctgggtccattcta

SEQ ID NO: 6032996 - DNA, 25 bp, Homo sapien
cctttgcctcacaatattcggctaa

SEQ ID NO: 6032997 - DNA, 25 bp, Homo sapien
cttccaatcgttgttgatgtttaca

SEQ ID NO: 6032998 - DNA, 25 bp, Homo sapien
gacatctgggtccattctagcggcc

SEQ ID NO: 6032999 - DNA, 25 bp, Homo sapien
tttagcatagtcgaaggcctcggag

SEQ ID NO: 6033000 - DNA, 25 bp, Homo sapien
gatgccctttgcctcacaatattcg

SEQ ID NO: 6033001 - DNA, 25 bp, Homo sapien
tccaaagtatctctggtgacttgat

SEQ ID NO: 6033002 - DNA, 25 bp, Homo sapien
gaaggcctcggagatggccaatttg

SEQ ID NO: 6033003 - DNA, 25 bp, Homo sapien
gtggattcactacggtaaatctggg

SEQ ID NO: 6033004 - DNA, 25 bp, Homo sapien
cagattctggcaccgtcacaatgta

SEQ ID NO: 6033005 - DNA, 25 bp, Homo sapien
actctaccacccattagcttaacgt

SEQ ID NO: 6033006 - DNA, 25 bp, Homo sapien
ttgggacttccaatcgttgttgatg

SEQ ID NO: 6033007 - DNA, 25 bp, Homo sapien
gagcacccatagacttggatagaca

SEQ ID NO: 6033008 - DNA, 25 bp, Homo sapien
ccacccattagcttaacgttgtact

SEQ ID NO: 6033009 - DNA, 25 bp, Homo sapien
tgccatcaacgtcgacctcggtgga

SEQ ID NO: 6033010 - DNA, 25 bp, Homo sapien
caagagccattctagccatcatacc

SEQ ID NO: 6033011 - DNA, 25 bp, Homo sapien
ttgttttctgaaatgggtggccttc

SEQ ID NO: 6033012 - DNA, 25 bp, Homo sapien
caatttgactttttccaaagtatct

SEQ ID NO: 6033013 - DNA, 25 bp, Homo sapien
gtatctctggtgacttgatagtgga

SEQ ID NO: 6033014 - DNA, 25 bp, Homo sapien
ttaatggcacgccagattgtgcagc

SEQ ID NO: 6033015 - DNA, 25 bp, Homo sapien
attcatgagccaaagagtgcgagta

SEQ ID NO: 6033016 - DNA, 25 bp, Homo sapien
ctcggagatggccaatttgactttt

SEQ ID NO: 6033017 - DNA, 25 bp, Homo sapien
gagccaaagagtgcgagtacagcaa

SEQ ID NO: 6033018 - DNA, 25 bp, Homo sapien
taccaccaccttgttgttttctgaa

SEQ ID NO: 6033019 - DNA, 25 bp, Homo sapien
cattctagcggccttcaggttaata

SEQ ID NO: 6033020 - DNA, 25 bp, Homo sapien
ccaagacggacccaataggagcacc

SEQ ID NO: 6033021 - DNA, 25 bp, Homo sapien
cttcaggttaataaagacaaagttg

SEQ ID NO: 6033022 - DNA, 25 bp, Homo sapien
agcggccttcaggttaataaagaca

SEQ ID NO: 6033023 - DNA, 25 bp, Homo sapien
ttaataaagacaaagttggtgtctg

SEQ ID NO: 6033024 - DNA, 25 bp, Homo sapien
cattagcttaacgttgtacttcaaa

SEQ ID NO: 6033025 - DNA, 25 bp, Homo sapien
agatggagatggagtcgaagatttc

SEQ ID NO: 6033026 - DNA, 25 bp, Homo sapien
tccccatattgctttaatggcacgc

SEQ ID NO: 6033027 - DNA, 25 bp, Homo sapien
acttgatagtggaacgagactctac

SEQ ID NO: 6033028 - DNA, 25 bp, Homo sapien
acagtcgaaaggatgttctttagca

SEQ ID NO: 6033029 - DNA, 25 bp, Homo sapien
agagtgcgagtacagcaattgggac

SEQ ID NO: 6033030 - DNA, 25 bp, Homo sapien
caaacccttcttaacaaggacatct

SEQ ID NO: 6033031 - DNA, 25 bp, Homo sapien
tcactacggtaaatctgggtaggtc

SEQ ID NO: 6033032 - DNA, 25 bp, Homo sapien
gtttacaagagccattctagccatc

SEQ ID NO: 6033033 - DNA, 25 bp, Homo sapien
aacgagactctaccacccattagct

SEQ ID NO: 6033034 - DNA, 25 bp, Homo sapien
gatggccaatttgactttttccaaa

SEQ ID NO: 6033035 - DNA, 25 bp, Homo sapien
tgtctaataccaccaccttgttgtt

SEQ ID NO: 6033036 - DNA, 25 bp, Homo sapien
cagattgtgcagcggcattccagat

SEQ ID NO: 6033037 - DNA, 25 bp, Homo sapien
agatttccccatattgctttaatgg

SEQ ID NO: 6033038 - DNA, 25 bp, Homo sapien
agactctagcgggatgccctttgcc

SEQ ID NO: 6033039 - DNA, 25 bp, Homo sapien
atctgggtaggtccgttacagtcga

SEQ ID NO: 6033040 - DNA, 25 bp, Homo sapien
tagagctcgtcgaagaggcaatagg

SEQ ID NO: 6033041 - DNA, 25 bp, Homo sapien
taatacaaacagtgcaacgaattta

SEQ ID NO: 6033042 - DNA, 25 bp, Homo sapien
aaattttatgccgatcctttcgcta

SEQ ID NO: 6033043 - DNA, 25 bp, Homo sapien
cagaatcttcatcaccacatctatt

SEQ ID NO: 6033044 - DNA, 25 bp, Homo sapien
tgattcgttttccattaagggtatc

SEQ ID NO: 6033045 - DNA, 25 bp, Homo sapien
cttcacgtatggctaccgaccattc

SEQ ID NO: 6033046 - DNA, 25 bp, Homo sapien
ggtcatcgccatcgggggctccatc

SEQ ID NO: 6033047 - DNA, 25 bp, Homo sapien
attagagaattctcttcatagagct

SEQ ID NO: 6033048 - DNA, 25 bp, Homo sapien
caggctacgcgacacagtttgatgg

SEQ ID NO: 6033049 - DNA, 25 bp, Homo sapien
tatttgttctttaatgctgttctat

SEQ ID NO: 6033050 - DNA, 25 bp, Homo sapien
tgtgtataatacaaacagtgcaacg

SEQ ID NO: 6033051 - DNA, 25 bp, Homo sapien
cgccttaccaaaataatgtctataa

SEQ ID NO: 6033052 - DNA, 25 bp, Homo sapien
atttaatctggattctgtactacgg

SEQ ID NO: 6033053 - DNA, 25 bp, Homo sapien
ctgcttcagcaggtgtcatcttact

SEQ ID NO: 6033054 - DNA, 25 bp, Homo sapien
tgcggatggtcccaagaaagctgct

SEQ ID NO: 6033055 - DNA, 25 bp, Homo sapien
ttacttggtggggtatagtatacca

SEQ ID NO: 6033056 - DNA, 25 bp, Homo sapien
gtgtcatcttactttccatcataaa

SEQ ID NO: 6033057 - DNA, 25 bp, Homo sapien
ataatgcttccccaaccaatagatg

SEQ ID NO: 6033058 - DNA, 25 bp, Homo sapien
tgcatccaccaatgaatccttccca

SEQ ID NO: 6033059 - DNA, 25 bp, Homo sapien
ataatgtctataatgatgctatacg

SEQ ID NO: 6033060 - DNA, 25 bp, Homo sapien
tcgttttccattaagggtatcaggc

SEQ ID NO: 6033061 - DNA, 25 bp, Homo sapien
cgtatggctaccgaccattctttta

SEQ ID NO: 6033062 - DNA, 25 bp, Homo sapien
tttccatcataaatttaatctggat

SEQ ID NO: 6033063 - DNA, 25 bp, Homo sapien
ccaagaaagctgctgcttcagcagg

SEQ ID NO: 6033064 - DNA, 25 bp, Homo sapien
tcgtcgaagaggcaataggaacaca

SEQ ID NO: 6033065 - DNA, 25 bp, Homo sapien
agtgtatgcggatggtcccaagaaa

SEQ ID NO: 6033066 - DNA, 25 bp, Homo sapien
gttctattgttttgatttagtcgat

SEQ ID NO: 6033067 - DNA, 25 bp, Homo sapien
tcatctgcatccaccaatgaatcct

SEQ ID NO: 6033068 - DNA, 25 bp, Homo sapien
atcgtgggtcatcgccatcgggggc

SEQ ID NO: 6033069 - DNA, 25 bp, Homo sapien
aagctgctgcttcagcaggtgtcat

SEQ ID NO: 6033070 - DNA, 25 bp, Homo sapien
tgcaacgaatttagtgtatgcggat

SEQ ID NO: 6033071 - DNA, 25 bp, Homo sapien
tcattacagaatcttcatcaccaca

SEQ ID NO: 6033072 - DNA, 25 bp, Homo sapien
ctttggcaattgtatcgtgggtcat

SEQ ID NO: 6033073 - DNA, 25 bp, Homo sapien
caccaatgaatccttcccacgtttt

SEQ ID NO: 6033074 - DNA, 25 bp, Homo sapien
cattaagggtatcaggccttcgcca

SEQ ID NO: 6033075 - DNA, 25 bp, Homo sapien
tctaattatttgttctttaatgctg

SEQ ID NO: 6033076 - DNA, 25 bp, Homo sapien
accaaaataatgtctataatgatgc

SEQ ID NO: 6033077 - DNA, 25 bp, Homo sapien
tggattgattcgttttccattaagg

SEQ ID NO: 6033078 - DNA, 25 bp, Homo sapien
tataccaatttctaattatttgttc

SEQ ID NO: 6033079 - DNA, 25 bp, Homo sapien
atgaaaaaattttatgccgatcctt

SEQ ID NO: 6033080 - DNA, 25 bp, Homo sapien
actacggcggtgataatgcttcccc

SEQ ID NO: 6033081 - DNA, 25 bp, Homo sapien
gaatttagtgtatgcggatggtccc

SEQ ID NO: 6033082 - DNA, 25 bp, Homo sapien
tccatctcatctgcatccaccaatg

SEQ ID NO: 6033083 - DNA, 25 bp, Homo sapien
gccatcgggggctccatctcatctg

SEQ ID NO: 6033084 - DNA, 25 bp, Homo sapien
tcttcatagagctcgtcgaagaggc

SEQ ID NO: 6033085 - DNA, 25 bp, Homo sapien
caataggaacacaacgccttaccaa

SEQ ID NO: 6033086 - DNA, 25 bp, Homo sapien
atggtcccaagaaagctgctgcttc

SEQ ID NO: 6033087 - DNA, 25 bp, Homo sapien
tcataaatttaatctggattctgta

SEQ ID NO: 6033088 - DNA, 25 bp, Homo sapien
tctataatgatgctatacgagactc

SEQ ID NO: 6033089 - DNA, 25 bp, Homo sapien
ccaaccaatagatggattgattcgt

SEQ ID NO: 6033090 - DNA, 25 bp, Homo sapien
caattgtatcgtgggtcatcgccat

SEQ ID NO: 6033091 - DNA, 25 bp, Homo sapien
tctttaatgctgttctattgttttg

SEQ ID NO: 6033092 - DNA, 25 bp, Homo sapien
aatagatggattgattcgttttcca

SEQ ID NO: 6033093 - DNA, 25 bp, Homo sapien
caatttctttggcaattgtatcgtg

SEQ ID NO: 6033094 - DNA, 25 bp, Homo sapien
cacagtttgatggatatccacagca

SEQ ID NO: 6033095 - DNA, 25 bp, Homo sapien
aatgctgttctattgttttgattta

SEQ ID NO: 6033096 - DNA, 25 bp, Homo sapien
ggtatagtataccaatttctaatta

SEQ ID NO: 6033097 - DNA, 25 bp, Homo sapien
gcggtgataatgcttccccaaccaa

SEQ ID NO: 6033098 - DNA, 25 bp, Homo sapien
tcgctatatcatcaatttctttggc

SEQ ID NO: 6033099 - DNA, 25 bp, Homo sapien
cttcatcaccacatctattgcagtg

SEQ ID NO: 6033100 - DNA, 25 bp, Homo sapien
gggggctccatctcatctgcatcca

SEQ ID NO: 6033101 - DNA, 25 bp, Homo sapien
tgcagtggcatttgtgtataataca

SEQ ID NO: 6033102 - DNA, 25 bp, Homo sapien
ttcgccattagagaattctcttcat

SEQ ID NO: 6033103 - DNA, 25 bp, Homo sapien
atgatgctatacgagactcaggcta

SEQ ID NO: 6033104 - DNA, 25 bp, Homo sapien
aagaggcaataggaacacaacgcct

SEQ ID NO: 6033105 - DNA, 25 bp, Homo sapien
acgcgacacagtttgatggatatcc

SEQ ID NO: 6033106 - DNA, 25 bp, Homo sapien
gctaccgaccattcttttaaaatga

SEQ ID NO: 6033107 - DNA, 25 bp, Homo sapien
tatcatcaatttctttggcaattgt

SEQ ID NO: 6033108 - DNA, 25 bp, Homo sapien
tctggattctgtactacggcggtga

SEQ ID NO: 6033109 - DNA, 25 bp, Homo sapien
atgaatccttcccacgttttacttg

SEQ ID NO: 6033110 - DNA, 25 bp, Homo sapien
ctatacgagactcaggctacgcgac

SEQ ID NO: 6033111 - DNA, 25 bp, Homo sapien
atctattgcagtggcatttgtgtat

SEQ ID NO: 6033112 - DNA, 25 bp, Homo sapien
gggtatcaggccttcgccattagag

SEQ ID NO: 6033113 - DNA, 25 bp, Homo sapien
tcttactttccatcataaatttaat

SEQ ID NO: 6033114 - DNA, 25 bp, Homo sapien
gaattctcttcatagagctcgtcga

SEQ ID NO: 6033115 - DNA, 25 bp, Homo sapien
tatgccgatcctttcgctatatcat

SEQ ID NO: 6033116 - DNA, 25 bp, Homo sapien
aaacagtgcaacgaatttagtgtat

SEQ ID NO: 6033117 - DNA, 25 bp, Homo sapien
cctcgtaaaccttcacgtatggcta

SEQ ID NO: 6033118 - DNA, 25 bp, Homo sapien
gatcctttcgctatatcatcaattt

SEQ ID NO: 6033119 - DNA, 25 bp, Homo sapien
cagcaggtgtcatcttactttccat

SEQ ID NO: 6033120 - DNA, 25 bp, Homo sapien
caggccttcgccattagagaattct

SEQ ID NO: 6033121 - DNA, 25 bp, Homo sapien
ttgttttgatttagtcgatcattac

SEQ ID NO: 6033122 - DNA, 25 bp, Homo sapien
tggtggggtatagtataccaatttc

SEQ ID NO: 6033123 - DNA, 25 bp, Homo sapien
gcttccccaaccaatagatggattg

SEQ ID NO: 6033124 - DNA, 25 bp, Homo sapien
caccacatctattgcagtggcattt

SEQ ID NO: 6033125 - DNA, 25 bp, Homo sapien
tgatttagtcgatcattacagaatc

SEQ ID NO: 6033126 - DNA, 25 bp, Homo sapien
gtaaaccttcacgtatggctaccga

SEQ ID NO: 6033127 - DNA, 25 bp, Homo sapien
ggcatttgtgtataatacaaacagt

SEQ ID NO: 6033128 - DNA, 25 bp, Homo sapien
ttctgtactacggcggtgataatgc

SEQ ID NO: 6033129 - DNA, 25 bp, Homo sapien
gagactcaggctacgcgacacagtt

SEQ ID NO: 6033130 - DNA, 25 bp, Homo sapien
agtcgatcattacagaatcttcatc

SEQ ID NO: 6033131 - DNA, 25 bp, Homo sapien
acacaacgccttaccaaaataatgt

SEQ ID NO: 6033132 - DNA, 25 bp, Homo sapien
agtgaagattaacggcttctgaagt

SEQ ID NO: 6033133 - DNA, 25 bp, Homo sapien
tgaaaaatcagtatcgaacgtatta

SEQ ID NO: 6033134 - DNA, 25 bp, Homo sapien
ccttcttgccttccaccatctgcct

SEQ ID NO: 6033135 - DNA, 25 bp, Homo sapien
agaagatacataatttgtgtgagaa

SEQ ID NO: 6033136 - DNA, 25 bp, Homo sapien
tgagaaggttgctgctgtggatatc

SEQ ID NO: 6033137 - DNA, 25 bp, Homo sapien
ggatatccatcaaactgtgtcgcgt

SEQ ID NO: 6033138 - DNA, 25 bp, Homo sapien
tgttcaagtgaagattaacggcttc

SEQ ID NO: 6033139 - DNA, 25 bp, Homo sapien
ctattgcctcttcgacgagctctat

SEQ ID NO: 6033140 - DNA, 25 bp, Homo sapien
gtcgcgtagcctgagtctcgtatag

SEQ ID NO: 6033141 - DNA, 25 bp, Homo sapien
gtttgattattgctattatcattgg

SEQ ID NO: 6033142 - DNA, 25 bp, Homo sapien
cagacccaaagtgtctcccatcgta

SEQ ID NO: 6033143 - DNA, 25 bp, Homo sapien
ccatcgtagtttccgtattgccatt

SEQ ID NO: 6033144 - DNA, 25 bp, Homo sapien
ggttgctgctgtggatatccatcaa

SEQ ID NO: 6033145 - DNA, 25 bp, Homo sapien
gtgcttttgccttgtaaatgaaatt

SEQ ID NO: 6033146 - DNA, 25 bp, Homo sapien
tcaccgtttgcccttcttgccttcc

SEQ ID NO: 6033147 - DNA, 25 bp, Homo sapien
tgcttggaataatacctgtttcacc

SEQ ID NO: 6033148 - DNA, 25 bp, Homo sapien
attctcaaaaccagccaatgccgta

SEQ ID NO: 6033149 - DNA, 25 bp, Homo sapien
tcagcgtcgtatgggtacagtgctt

SEQ ID NO: 6033150 - DNA, 25 bp, Homo sapien
ttattgctattatcattggtttcct

SEQ ID NO: 6033151 - DNA, 25 bp, Homo sapien
tctgccttcaatgtcagagacttgt

SEQ ID NO: 6033152 - DNA, 25 bp, Homo sapien
tctaatggcgaaggcctgataccct

SEQ ID NO: 6033153 - DNA, 25 bp, Homo sapien
atcgaacgtattacctatattagta

SEQ ID NO: 6033154 - DNA, 25 bp, Homo sapien
cattattttggtaaggcgttgtgtt

SEQ ID NO: 6033155 - DNA, 25 bp, Homo sapien
gtttgcccttcttgccttccaccat

SEQ ID NO: 6033156 - DNA, 25 bp, Homo sapien
cgtattgccatttgaaaaatcagta

SEQ ID NO: 6033157 - DNA, 25 bp, Homo sapien
ttggtaaggcgttgtgttcctattg

SEQ ID NO: 6033158 - DNA, 25 bp, Homo sapien
tcaaatgagatttcgtaagcatcat

SEQ ID NO: 6033159 - DNA, 25 bp, Homo sapien
tgtgttcctattgcctcttcgacga

SEQ ID NO: 6033160 - DNA, 25 bp, Homo sapien
gccatttgaaaaatcagtatcgaac

SEQ ID NO: 6033161 - DNA, 25 bp, Homo sapien
tcaccgatatcgctatacagaccca

SEQ ID NO: 6033162 - DNA, 25 bp, Homo sapien
aactgtgtcgcgtagcctgagtctc

SEQ ID NO: 6033163 - DNA, 25 bp, Homo sapien
tgctgtggatatccatcaaactgtg

SEQ ID NO: 6033164 - DNA, 25 bp, Homo sapien
tacataatttgtgtgagaaggttgc

SEQ ID NO: 6033165 - DNA, 25 bp, Homo sapien
gcatcatcgtcatcagcgtcgtatg

SEQ ID NO: 6033166 - DNA, 25 bp, Homo sapien
tcgtcatcagcgtcgtatgggtaca

SEQ ID NO: 6033167 - DNA, 25 bp, Homo sapien
ctgagtattctcaaaaccagccaat

SEQ ID NO: 6033168 - DNA, 25 bp, Homo sapien
aaaaccagccaatgccgtagaagat

SEQ ID NO: 6033169 - DNA, 25 bp, Homo sapien
tgtaaatgaaattatcatcaccgat

SEQ ID NO: 6033170 - DNA, 25 bp, Homo sapien
cctgtttcaccgtttgcccttcttg

SEQ ID NO: 6033171 - DNA, 25 bp, Homo sapien
gcgaaggcctgatacccttaatgga

SEQ ID NO: 6033172 - DNA, 25 bp, Homo sapien
cctcttcgacgagctctatgaagag

SEQ ID NO: 6033173 - DNA, 25 bp, Homo sapien
gtagagtgttcaagtgaagattaac

SEQ ID NO: 6033174 - DNA, 25 bp, Homo sapien
tgccgtagaagatacataatttgtg

SEQ ID NO: 6033175 - DNA, 25 bp, Homo sapien
gctatacagacccaaagtgtctccc

SEQ ID NO: 6033176 - DNA, 25 bp, Homo sapien
gtttccttcgcgttgcttgcgctat

SEQ ID NO: 6033177 - DNA, 25 bp, Homo sapien
tgccttccaccatctgccttcaatg

SEQ ID NO: 6033178 - DNA, 25 bp, Homo sapien
tcgtaagcatcatcgtcatcagcgt

SEQ ID NO: 6033179 - DNA, 25 bp, Homo sapien
gttgttgtagagtgttcaagtgaag

SEQ ID NO: 6033180 - DNA, 25 bp, Homo sapien
agccaatgccgtagaagatacataa

SEQ ID NO: 6033181 - DNA, 25 bp, Homo sapien
ttcattttgttcaaatgagatttcg

SEQ ID NO: 6033182 - DNA, 25 bp, Homo sapien
ccatcaaactgtgtcgcgtagcctg

SEQ ID NO: 6033183 - DNA, 25 bp, Homo sapien
tgcttgcgctattgatacgttgttg

SEQ ID NO: 6033184 - DNA, 25 bp, Homo sapien
ttatcatcaccgatatcgctataca

SEQ ID NO: 6033185 - DNA, 25 bp, Homo sapien
tcattggtttccttcgcgttgcttg

SEQ ID NO: 6033186 - DNA, 25 bp, Homo sapien
tattggtttgattattgctattatc

SEQ ID NO: 6033187 - DNA, 25 bp, Homo sapien
ttgccttgtaaatgaaattatcatc

SEQ ID NO: 6033188 - DNA, 25 bp, Homo sapien
tgaagtatttggctgagtattctca

SEQ ID NO: 6033189 - DNA, 25 bp, Homo sapien
cgtatgggtacagtgcttttgcctt

SEQ ID NO: 6033190 - DNA, 25 bp, Homo sapien
tatttggctgagtattctcaaaacc

SEQ ID NO: 6033191 - DNA, 25 bp, Homo sapien
atttgtgtgagaaggttgctgctgt

SEQ ID NO: 6033192 - DNA, 25 bp, Homo sapien
cgctattgatacgttgttgtagagt

SEQ ID NO: 6033193 - DNA, 25 bp, Homo sapien
gaataatacctgtttcaccgtttgc

SEQ ID NO: 6033194 - DNA, 25 bp, Homo sapien
ggtacagtgcttttgccttgtaaat

SEQ ID NO: 6033195 - DNA, 25 bp, Homo sapien
cgacgagctctatgaagagaattct

SEQ ID NO: 6033196 - DNA, 25 bp, Homo sapien
gagtctcgtatagcatcattataga

SEQ ID NO: 6033197 - DNA, 25 bp, Homo sapien
tattagtattggtttgattattgct

SEQ ID NO: 6033198 - DNA, 25 bp, Homo sapien
atcagtatcgaacgtattacctata

SEQ ID NO: 6033199 - DNA, 25 bp, Homo sapien
tagcctgagtctcgtatagcatcat

SEQ ID NO: 6033200 - DNA, 25 bp, Homo sapien
tgatacgttgttgtagagtgttcaa

SEQ ID NO: 6033201 - DNA, 25 bp, Homo sapien
ggcttctgaagtatttggctgagta

SEQ ID NO: 6033202 - DNA, 25 bp, Homo sapien
gaattctctaatggcgaaggcctga

SEQ ID NO: 6033203 - DNA, 25 bp, Homo sapien
attaacggcttctgaagtatttggc

SEQ ID NO: 6033204 - DNA, 25 bp, Homo sapien
gagatttcgtaagcatcatcgtcat

SEQ ID NO: 6033205 - DNA, 25 bp, Homo sapien
gttgaacataattgcttggaataat

SEQ ID NO: 6033206 - DNA, 25 bp, Homo sapien
taggatttcattttgttcaaatgag

SEQ ID NO: 6033207 - DNA, 25 bp, Homo sapien
ttcaatgtcagagacttgtaggatt

SEQ ID NO: 6033208 - DNA, 25 bp, Homo sapien
gacttgtaggatttcattttgttca

SEQ ID NO: 6033209 - DNA, 25 bp, Homo sapien
catcattatagacattattttggta

SEQ ID NO: 6033210 - DNA, 25 bp, Homo sapien
gtcagagacttgtaggatttcattt

SEQ ID NO: 6033211 - DNA, 25 bp, Homo sapien
ccaccatctgccttcaatgtcagag

SEQ ID NO: 6033212 - DNA, 25 bp, Homo sapien
tagtttccgtattgccatttgaaaa

SEQ ID NO: 6033213 - DNA, 25 bp, Homo sapien
tgaaattatcatcaccgatatcgct

SEQ ID NO: 6033214 - DNA, 25 bp, Homo sapien
tgtctcccatcgtagtttccgtatt

SEQ ID NO: 6033215 - DNA, 25 bp, Homo sapien
cataattgcttggaataatacctgt

SEQ ID NO: 6033216 - DNA, 25 bp, Homo sapien
aggcgttgtgttcctattgcctctt

SEQ ID NO: 6033217 - DNA, 25 bp, Homo sapien
ttcgcgttgcttgcgctattgatac

SEQ ID NO: 6033218 - DNA, 25 bp, Homo sapien
cgtatagcatcattatagacattat

SEQ ID NO: 6033219 - DNA, 25 bp, Homo sapien
gctctatgaagagaattctctaatg

SEQ ID NO: 6033220 - DNA, 25 bp, Homo sapien
tatagacattattttggtaaggcgt

SEQ ID NO: 6033221 - DNA, 25 bp, Homo sapien
ttttgttcaaatgagatttcgtaag

SEQ ID NO: 6033222 - DNA, 25 bp, Homo sapien
tgaagagaattctctaatggcgaag

SEQ ID NO: 6033223 - DNA, 25 bp, Homo sapien
ctattatcattggtttccttcgcgt

SEQ ID NO: 6033224 - DNA, 25 bp, Homo sapien
caaagtgtctcccatcgtagtttcc

SEQ ID NO: 6033225 - DNA, 25 bp, Homo sapien
cgtattacctatattagtattggtt

SEQ ID NO: 6033226 - DNA, 25 bp, Homo sapien
gatatcgctatacagacccaaagtg

SEQ ID NO: 6033227 - DNA, 25 bp, Homo sapien
acctatattagtattggtttgatta

SEQ ID NO: 6033228 - DNA, 25 bp, Homo sapien
cccaagaagaatgacgaagagtatt

SEQ ID NO: 6033229 - DNA, 25 bp, Homo sapien
tgtaaaacggaaacgtggcacctca

SEQ ID NO: 6033230 - DNA, 25 bp, Homo sapien
atcctgcagtaaaaagattgaagga

SEQ ID NO: 6033231 - DNA, 25 bp, Homo sapien
acgaagatcctgcagtaaaaagatt

SEQ ID NO: 6033232 - DNA, 25 bp, Homo sapien
acctcatctggatctgagaaaaaga

SEQ ID NO: 6033233 - DNA, 25 bp, Homo sapien
cgtggcacctcatctggatctgaga

SEQ ID NO: 6033234 - DNA, 25 bp, Homo sapien
aacattgcgtggagtatcttctgga

SEQ ID NO: 6033235 - DNA, 25 bp, Homo sapien
taacaagccaggtttcaaaagttca

SEQ ID NO: 6033236 - DNA, 25 bp, Homo sapien
gaaagcatcccctggcgcaacattg

SEQ ID NO: 6033237 - DNA, 25 bp, Homo sapien
gaaacaagcggaaaataatgagaaa

SEQ ID NO: 6033238 - DNA, 25 bp, Homo sapien
aaatcatcagactcacccaagcccg

SEQ ID NO: 6033239 - DNA, 25 bp, Homo sapien
cgtcaagctcaacttgcccacaaat

SEQ ID NO: 6033240 - DNA, 25 bp, Homo sapien
agcataaaatcatcagactcaccca

SEQ ID NO: 6033241 - DNA, 25 bp, Homo sapien
gtctattggagcaagtcatgcgcca

SEQ ID NO: 6033242 - DNA, 25 bp, Homo sapien
actcaagccagttgtaaggaagaaa

SEQ ID NO: 6033243 - DNA, 25 bp, Homo sapien
gctgaggcggcaggaactgttaaag

SEQ ID NO: 6033244 - DNA, 25 bp, Homo sapien
atgaaggtggccttggaattaggtt

SEQ ID NO: 6033245 - DNA, 25 bp, Homo sapien
tggcgcaacattgcgtggagtatct

SEQ ID NO: 6033246 - DNA, 25 bp, Homo sapien
caagcccgtcaagctcaacttgccc

SEQ ID NO: 6033247 - DNA, 25 bp, Homo sapien
aagaatgacgaagagtattccttgt

SEQ ID NO: 6033248 - DNA, 25 bp, Homo sapien
gaatgacgatgatgaaggtggcctt

SEQ ID NO: 6033249 - DNA, 25 bp, Homo sapien
ataatgagaaacagcccccaaaagt

SEQ ID NO: 6033250 - DNA, 25 bp, Homo sapien
taggtttaagaggtctattggagca

SEQ ID NO: 6033251 - DNA, 25 bp, Homo sapien
gctaatgaaacaagcggaaaataat

SEQ ID NO: 6033252 - DNA, 25 bp, Homo sapien
gcgtggagtatcttctggaggcaat

SEQ ID NO: 6033253 - DNA, 25 bp, Homo sapien
caagtgcaagatccattacccaaga

SEQ ID NO: 6033254 - DNA, 25 bp, Homo sapien
taaggaagaaacctgaacctatcaa

SEQ ID NO: 6033255 - DNA, 25 bp, Homo sapien
attacataagagacgaagatcctgc

SEQ ID NO: 6033256 - DNA, 25 bp, Homo sapien
ccattacccaagaagaatgacgaag

SEQ ID NO: 6033257 - DNA, 25 bp, Homo sapien
aaacctgaacctatcaaaaagatgt

SEQ ID NO: 6033258 - DNA, 25 bp, Homo sapien
gtcatttgaagagctaatgaaacaa

SEQ ID NO: 6033259 - DNA, 25 bp, Homo sapien
cggaaacgtggcacctcatctggat

SEQ ID NO: 6033260 - DNA, 25 bp, Homo sapien
tgttacccaaaaattacataagaga

SEQ ID NO: 6033261 - DNA, 25 bp, Homo sapien
gtatcttctggaggcaatagcataa

SEQ ID NO: 6033262 - DNA, 25 bp, Homo sapien
ttcaaaaagaccacaaaagaaagca

SEQ ID NO: 6033263 - DNA, 25 bp, Homo sapien
gcatcaaaagcccaagtgcaagatc

SEQ ID NO: 6033264 - DNA, 25 bp, Homo sapien
tcacccaagcccgtcaagctcaact

SEQ ID NO: 6033265 - DNA, 25 bp, Homo sapien
ccacaaatggatttgctcaacctaa

SEQ ID NO: 6033266 - DNA, 25 bp, Homo sapien
agaatggtgctttggctaaaaaaag

SEQ ID NO: 6033267 - DNA, 25 bp, Homo sapien
gaacctatcaaaaagatgtcatttg

SEQ ID NO: 6033268 - DNA, 25 bp, Homo sapien
tcagactcacccaagcccgtcaagc

SEQ ID NO: 6033269 - DNA, 25 bp, Homo sapien
taagaggtctattggagcaagtcat

SEQ ID NO: 6033270 - DNA, 25 bp, Homo sapien
gaaaatagaaaggaatgacgatgat

SEQ ID NO: 6033271 - DNA, 25 bp, Homo sapien
atcaaaaagatgtcatttgaagagc

SEQ ID NO: 6033272 - DNA, 25 bp, Homo sapien
tgttaaagaatggtgctttggctaa

SEQ ID NO: 6033273 - DNA, 25 bp, Homo sapien
aggaactgttaaagaatggtgcttt

SEQ ID NO: 6033274 - DNA, 25 bp, Homo sapien
tggagcaagtcatgcgccactcaag

SEQ ID NO: 6033275 - DNA, 25 bp, Homo sapien
aacgcccacattttaacaagccagg

SEQ ID NO: 6033276 - DNA, 25 bp, Homo sapien
gcggaaaataatgagaaacagcccc

SEQ ID NO: 6033277 - DNA, 25 bp, Homo sapien
atcccctggcgcaacattgcgtgga

SEQ ID NO: 6033278 - DNA, 25 bp, Homo sapien
ccaaaaattacataagagacgaaga

SEQ ID NO: 6033279 - DNA, 25 bp, Homo sapien
acgatgatgaaggtggccttggaat

SEQ ID NO: 6033280 - DNA, 25 bp, Homo sapien
aagtcatgcgccactcaagccagtt

SEQ ID NO: 6033281 - DNA, 25 bp, Homo sapien
caagatccattacccaagaagaatg

SEQ ID NO: 6033282 - DNA, 25 bp, Homo sapien
tctgagaaaaagaaaatagaaagga

SEQ ID NO: 6033283 - DNA, 25 bp, Homo sapien
aaagcccaagtgcaagatccattac

SEQ ID NO: 6033284 - DNA, 25 bp, Homo sapien
tgaagagctaatgaaacaagcggaa

SEQ ID NO: 6033285 - DNA, 25 bp, Homo sapien
acttgcccacaaatggatttgctca

SEQ ID NO: 6033286 - DNA, 25 bp, Homo sapien
tgaaggagctgaggcggcaggaact

SEQ ID NO: 6033287 - DNA, 25 bp, Homo sapien
tgctttggctaaaaaaagtggtgta

SEQ ID NO: 6033288 - DNA, 25 bp, Homo sapien
acgactgcatcaaaagcccaagtgc

SEQ ID NO: 6033289 - DNA, 25 bp, Homo sapien
acaaaagaaagcatcccctggcgca

SEQ ID NO: 6033290 - DNA, 25 bp, Homo sapien
gacgaagagtattccttgttaccca

SEQ ID NO: 6033291 - DNA, 25 bp, Homo sapien
aaatcaacgactgcatcaaaagccc

SEQ ID NO: 6033292 - DNA, 25 bp, Homo sapien
tgcgccactcaagccagttgtaagg

SEQ ID NO: 6033293 - DNA, 25 bp, Homo sapien
gcggcaggaactgttaaagaatggt

SEQ ID NO: 6033294 - DNA, 25 bp, Homo sapien
tctggaggcaatagcataaaatcat

SEQ ID NO: 6033295 - DNA, 25 bp, Homo sapien
tctggatctgagaaaaagaaaatag

SEQ ID NO: 6033296 - DNA, 25 bp, Homo sapien
taagagacgaagatcctgcagtaaa

SEQ ID NO: 6033297 - DNA, 25 bp, Homo sapien
agaaaggaatgacgatgatgaaggt

SEQ ID NO: 6033298 - DNA, 25 bp, Homo sapien
cacattttaacaagccaggtttcaa

SEQ ID NO: 6033299 - DNA, 25 bp, Homo sapien
aaagattgaaggagctgaggcggca

SEQ ID NO: 6033300 - DNA, 25 bp, Homo sapien
gctcaacttgcccacaaatggattt

SEQ ID NO: 6033301 - DNA, 25 bp, Homo sapien
aagaccacaaaagaaagcatcccct

SEQ ID NO: 6033302 - DNA, 25 bp, Homo sapien
ggcaatagcataaaatcatcagact

SEQ ID NO: 6033303 - DNA, 25 bp, Homo sapien
cagcccccaaaagttaagtcatcgg

SEQ ID NO: 6033304 - DNA, 25 bp, Homo sapien
aaagatgtcatttgaagagctaatg

SEQ ID NO: 6033305 - DNA, 25 bp, Homo sapien
cagtaaaaagattgaaggagctgag

SEQ ID NO: 6033306 - DNA, 25 bp, Homo sapien
gccagttgtaaggaagaaacctgaa

SEQ ID NO: 6033307 - DNA, 25 bp, Homo sapien
tgatgattttatgctattgcctcca

SEQ ID NO: 6033308 - DNA, 25 bp, Homo sapien
tcttcatgcttttttaaccaagctt

SEQ ID NO: 6033309 - DNA, 25 bp, Homo sapien
tgtttcattagctcttcaaatgaca

SEQ ID NO: 6033310 - DNA, 25 bp, Homo sapien
gatcatatccgggaccattgctgtg

SEQ ID NO: 6033311 - DNA, 25 bp, Homo sapien
cttctataaaatcatccatatcgtt

SEQ ID NO: 6033312 - DNA, 25 bp, Homo sapien
attattttccgcttgtttcattagc

SEQ ID NO: 6033313 - DNA, 25 bp, Homo sapien
tatcttcttcatcatagtcatcctg

SEQ ID NO: 6033314 - DNA, 25 bp, Homo sapien
tcctcctcttccaagatttccatct

SEQ ID NO: 6033315 - DNA, 25 bp, Homo sapien
ttttatgctattgcctccagaagat

SEQ ID NO: 6033316 - DNA, 25 bp, Homo sapien
aggttgagcaaatccatttgtgggc

SEQ ID NO: 6033317 - DNA, 25 bp, Homo sapien
aaatttcgtcacgatcatatccggg

SEQ ID NO: 6033318 - DNA, 25 bp, Homo sapien
cgatgacttaacttttgggggctgt

SEQ ID NO: 6033319 - DNA, 25 bp, Homo sapien
gtttcgatttgctgtggtaaccttc

SEQ ID NO: 6033320 - DNA, 25 bp, Homo sapien
agaagatactccacgcaatgttgcg

SEQ ID NO: 6033321 - DNA, 25 bp, Homo sapien
tgctgtgtttcgatttgctgtggta

SEQ ID NO: 6033322 - DNA, 25 bp, Homo sapien
tcatttgcttccatatcatcatcct

SEQ ID NO: 6033323 - DNA, 25 bp, Homo sapien
tcttccaagatttccatctcatttg

SEQ ID NO: 6033324 - DNA, 25 bp, Homo sapien
cttcatcatagtcatcctggtatct

SEQ ID NO: 6033325 - DNA, 25 bp, Homo sapien
tcctctaaccttgccatttttcttg

SEQ ID NO: 6033326 - DNA, 25 bp, Homo sapien
tatcgttatcttcttcatcatagtc

SEQ ID NO: 6033327 - DNA, 25 bp, Homo sapien
cgtcacgatcatatccgggaccatt

SEQ ID NO: 6033328 - DNA, 25 bp, Homo sapien
tagcccaaatttcgtcacgatcata

SEQ ID NO: 6033329 - DNA, 25 bp, Homo sapien
tgagtctgatgattttatgctattg

SEQ ID NO: 6033330 - DNA, 25 bp, Homo sapien
agcaaatccatttgtgggcaagttg

SEQ ID NO: 6033331 - DNA, 25 bp, Homo sapien
catcttcatcgtcttctataaaatc

SEQ ID NO: 6033332 - DNA, 25 bp, Homo sapien
tttctcattattttccgcttgtttc

SEQ ID NO: 6033333 - DNA, 25 bp, Homo sapien
accgcttcttgcctctattgaacat

SEQ ID NO: 6033334 - DNA, 25 bp, Homo sapien
gccatttttcttgccatttcctcct

SEQ ID NO: 6033335 - DNA, 25 bp, Homo sapien
taatcgtattctgaccgcttcttgc

SEQ ID NO: 6033336 - DNA, 25 bp, Homo sapien
ggtatcttgatttctgttttctaga

SEQ ID NO: 6033337 - DNA, 25 bp, Homo sapien
tgaaacctggcttgttaaaatgtgg

SEQ ID NO: 6033338 - DNA, 25 bp, Homo sapien
tttcttgccatttcctcctcttcca

SEQ ID NO: 6033339 - DNA, 25 bp, Homo sapien
tggcttgttaaaatgtgggcgttcc

SEQ ID NO: 6033340 - DNA, 25 bp, Homo sapien
gcaatgttgcgccaggggatgcttt

SEQ ID NO: 6033341 - DNA, 25 bp, Homo sapien
gagcttgacgggcttgggtgagtct

SEQ ID NO: 6033342 - DNA, 25 bp, Homo sapien
gggctgtttctcattattttccgct

SEQ ID NO: 6033343 - DNA, 25 bp, Homo sapien
gcctccagaagatactccacgcaat

SEQ ID NO: 6033344 - DNA, 25 bp, Homo sapien
gccatttcctcctcttccaagattt

SEQ ID NO: 6033345 - DNA, 25 bp, Homo sapien
aagatttccatctcatttgcttcca

SEQ ID NO: 6033346 - DNA, 25 bp, Homo sapien
taaaatcatccatatcgttatcttc

SEQ ID NO: 6033347 - DNA, 25 bp, Homo sapien
tcatcgtaatcgtattctgaccgct

SEQ ID NO: 6033348 - DNA, 25 bp, Homo sapien
tatccgggaccattgctgtgtttcg

SEQ ID NO: 6033349 - DNA, 25 bp, Homo sapien
caggggatgctttcttttgtggtct

SEQ ID NO: 6033350 - DNA, 25 bp, Homo sapien
attctgaccgcttcttgcctctatt

SEQ ID NO: 6033351 - DNA, 25 bp, Homo sapien
atttgctgtggtaaccttcatcttc

SEQ ID NO: 6033352 - DNA, 25 bp, Homo sapien
ggaccattgctgtgtttcgatttgc

SEQ ID NO: 6033353 - DNA, 25 bp, Homo sapien
tgtgggcaagttgagcttgacgggc

SEQ ID NO: 6033354 - DNA, 25 bp, Homo sapien
tcaagctcatcgtaatcgtattctg

SEQ ID NO: 6033355 - DNA, 25 bp, Homo sapien
tccatttgtgggcaagttgagcttg

SEQ ID NO: 6033356 - DNA, 25 bp, Homo sapien
atatcatcatcctcaagctcatcgt

SEQ ID NO: 6033357 - DNA, 25 bp, Homo sapien
ctcctcttcatgcttttttaaccaa

SEQ ID NO: 6033358 - DNA, 25 bp, Homo sapien
tccgcttgtttcattagctcttcaa

SEQ ID NO: 6033359 - DNA, 25 bp, Homo sapien
catcgtcttctataaaatcatccat

SEQ ID NO: 6033360 - DNA, 25 bp, Homo sapien
cttttgggggctgtttctcattatt

SEQ ID NO: 6033361 - DNA, 25 bp, Homo sapien
tactccacgcaatgttgcgccaggg

SEQ ID NO: 6033362 - DNA, 25 bp, Homo sapien
tcctcacgtttatcctctaaccttg

SEQ ID NO: 6033363 - DNA, 25 bp, Homo sapien
caagcttcctcacgtttatcctcta

SEQ ID NO: 6033364 - DNA, 25 bp, Homo sapien
catagtcatcctggtatcttgattt

SEQ ID NO: 6033365 - DNA, 25 bp, Homo sapien
ctgttttctagattctaacttttct

SEQ ID NO: 6033366 - DNA, 25 bp, Homo sapien
gcttccatatcatcatcctcaagct

SEQ ID NO: 6033367 - DNA, 25 bp, Homo sapien
aaccttcatcttcatcgtcttctat

SEQ ID NO: 6033368 - DNA, 25 bp, Homo sapien
gacgggcttgggtgagtctgatgat

SEQ ID NO: 6033369 - DNA, 25 bp, Homo sapien
tcatcctcaagctcatcgtaatcgt

SEQ ID NO: 6033370 - DNA, 25 bp, Homo sapien
tgatttctgttttctagattctaac

SEQ ID NO: 6033371 - DNA, 25 bp, Homo sapien
tgctttcttttgtggtctttttgaa

SEQ ID NO: 6033372 - DNA, 25 bp, Homo sapien
ctctattgaacatagcccaaatttc

SEQ ID NO: 6033373 - DNA, 25 bp, Homo sapien
ttaaccaagcttcctcacgtttatc

SEQ ID NO: 6033374 - DNA, 25 bp, Homo sapien
tgaacttttgaaacctggcttgtta

SEQ ID NO: 6033375 - DNA, 25 bp, Homo sapien
ttcttttaatctcctattaggttga

SEQ ID NO: 6033376 - DNA, 25 bp, Homo sapien
catccatatcgttatcttcttcatc

SEQ ID NO: 6033377 - DNA, 25 bp, Homo sapien
tccatctcatttgcttccatatcat

SEQ ID NO: 6033378 - DNA, 25 bp, Homo sapien
tgtggtaaccttcatcttcatcgtc

SEQ ID NO: 6033379 - DNA, 25 bp, Homo sapien
ttgcgccaggggatgctttcttttg

SEQ ID NO: 6033380 - DNA, 25 bp, Homo sapien
tcttgcctctattgaacatagccca

SEQ ID NO: 6033381 - DNA, 25 bp, Homo sapien
tgcttttttaaccaagcttcctcac

SEQ ID NO: 6033382 - DNA, 25 bp, Homo sapien
cttgggtgagtctgatgattttatg

SEQ ID NO: 6033383 - DNA, 25 bp, Homo sapien
taatctcctattaggttgagcaaat

SEQ ID NO: 6033384 - DNA, 25 bp, Homo sapien
catcctggtatcttgatttctgttt

SEQ ID NO: 6033385 - DNA, 25 bp, Homo sapien
cctattaggttgagcaaatccattt

SEQ ID NO: 6033386 - DNA, 25 bp, Homo sapien
cgtttatcctctaaccttgccattt

SEQ ID NO: 6033387 - DNA, 25 bp, Homo sapien
aaccttgccatttttcttgccattt

SEQ ID NO: 6033388 - DNA, 25 bp, Homo sapien
gctattgcctccagaagatactcca

SEQ ID NO: 6033389 - DNA, 25 bp, Homo sapien
tgaacatagcccaaatttcgtcacg

SEQ ID NO: 6033390 - DNA, 25 bp, Homo sapien
caagttgagcttgacgggcttgggt

SEQ ID NO: 6033391 - DNA, 25 bp, Homo sapien
tccccggtattgaaatagatgagga

SEQ ID NO: 6033392 - DNA, 25 bp, Homo sapien
atacggaagcgcaaaagagaggtat

SEQ ID NO: 6033393 - DNA, 25 bp, Homo sapien
cttccaaaaggctaaggatgacgct

SEQ ID NO: 6033394 - DNA, 25 bp, Homo sapien
agagtaactcccgttgatgggttgg

SEQ ID NO: 6033395 - DNA, 25 bp, Homo sapien
aaaagagaggtattgacgtcaacgg

SEQ ID NO: 6033396 - DNA, 25 bp, Homo sapien
taacactgcatgtgtagaaaaaaga

SEQ ID NO: 6033397 - DNA, 25 bp, Homo sapien
gcaaattaggcggtacctgtcttaa

SEQ ID NO: 6033398 - DNA, 25 bp, Homo sapien
caggtgctctttcgttaaaggaaat

SEQ ID NO: 6033399 - DNA, 25 bp, Homo sapien
taagaacatcatagtcgccacgggc

SEQ ID NO: 6033400 - DNA, 25 bp, Homo sapien
aactggaggtattgagcttctgttc

SEQ ID NO: 6033401 - DNA, 25 bp, Homo sapien
aagcgcaaaagagaggtattgacgt

SEQ ID NO: 6033402 - DNA, 25 bp, Homo sapien
caaggaagaccacatactagatgtt

SEQ ID NO: 6033403 - DNA, 25 bp, Homo sapien
ggtacctgtcttaacgttggatgta

SEQ ID NO: 6033404 - DNA, 25 bp, Homo sapien
ttcattcgaagacgaaacgaagatc

SEQ ID NO: 6033405 - DNA, 25 bp, Homo sapien
tgtagaaaaaagaggcaaattaggc

SEQ ID NO: 6033406 - DNA, 25 bp, Homo sapien
aaagaggcaaattaggcggtacctg

SEQ ID NO: 6033407 - DNA, 25 bp, Homo sapien
tgtcttaacgttggatgtatcccct

SEQ ID NO: 6033408 - DNA, 25 bp, Homo sapien
taatggttcattcgaagacgaaacg

SEQ ID NO: 6033409 - DNA, 25 bp, Homo sapien
ttacgtggctgctatcaaagctgct

SEQ ID NO: 6033410 - DNA, 25 bp, Homo sapien
tgacgctgttaagcaattaactgga

SEQ ID NO: 6033411 - DNA, 25 bp, Homo sapien
tgggttggaaggcactgtcaaggaa

SEQ ID NO: 6033412 - DNA, 25 bp, Homo sapien
aaaaaattgtctcttcaacaggtgc

SEQ ID NO: 6033413 - DNA, 25 bp, Homo sapien
aaatagatgaggaaaaaattgtctc

SEQ ID NO: 6033414 - DNA, 25 bp, Homo sapien
tgccttttcgtccacagtcaggaca

SEQ ID NO: 6033415 - DNA, 25 bp, Homo sapien
gtgatatcaaaattaacgtagcaaa

SEQ ID NO: 6033416 - DNA, 25 bp, Homo sapien
taaggatgacgctgttaagcaatta

SEQ ID NO: 6033417 - DNA, 25 bp, Homo sapien
taaaggtaatggttcattcgaagac

SEQ ID NO: 6033418 - DNA, 25 bp, Homo sapien
cacgggctctgaagttacacccttc

SEQ ID NO: 6033419 - DNA, 25 bp, Homo sapien
tcaaaattaacgtagcaaacttcca

SEQ ID NO: 6033420 - DNA, 25 bp, Homo sapien
cacagtcaggacattgaccattaac

SEQ ID NO: 6033421 - DNA, 25 bp, Homo sapien
ggaaggcactgtcaaggaagaccac

SEQ ID NO: 6033422 - DNA, 25 bp, Homo sapien
cccttccccggtattgaaatagatg

SEQ ID NO: 6033423 - DNA, 25 bp, Homo sapien
gggatttaacactgcatgtgtagaa

SEQ ID NO: 6033424 - DNA, 25 bp, Homo sapien
ggctgctatcaaagctgctcaattg

SEQ ID NO: 6033425 - DNA, 25 bp, Homo sapien
aacgttggatgtatcccctccaaag

SEQ ID NO: 6033426 - DNA, 25 bp, Homo sapien
cattaacaagtcacatgatgtagtc

SEQ ID NO: 6033427 - DNA, 25 bp, Homo sapien
agctgctcaattgggatttaacact

SEQ ID NO: 6033428 - DNA, 25 bp, Homo sapien
aattctcatttattccaccaaatgc

SEQ ID NO: 6033429 - DNA, 25 bp, Homo sapien
cgttgatgggttggaaggcactgtc

SEQ ID NO: 6033430 - DNA, 25 bp, Homo sapien
ttcgtccacagtcaggacattgacc

SEQ ID NO: 6033431 - DNA, 25 bp, Homo sapien
agtcgccacgggctctgaagttaca

SEQ ID NO: 6033432 - DNA, 25 bp, Homo sapien
tatcaaagctgctcaattgggattt

SEQ ID NO: 6033433 - DNA, 25 bp, Homo sapien
atttattccaccaaatgcatacgga

SEQ ID NO: 6033434 - DNA, 25 bp, Homo sapien
ggatgtatcccctccaaagcacttc

SEQ ID NO: 6033435 - DNA, 25 bp, Homo sapien
ctattataaaggtaatggttcattc

SEQ ID NO: 6033436 - DNA, 25 bp, Homo sapien
gcacttctaaataattctcatttat

SEQ ID NO: 6033437 - DNA, 25 bp, Homo sapien
ttgtctcttcaacaggtgctctttc

SEQ ID NO: 6033438 - DNA, 25 bp, Homo sapien
aaatgcatacggaagcgcaaaagag

SEQ ID NO: 6033439 - DNA, 25 bp, Homo sapien
tcaattgggatttaacactgcatgt

SEQ ID NO: 6033440 - DNA, 25 bp, Homo sapien
acatgatgtagtcatcatcggtggt

SEQ ID NO: 6033441 - DNA, 25 bp, Homo sapien
cggtggtggccctgctggttacgtg

SEQ ID NO: 6033442 - DNA, 25 bp, Homo sapien
tccaccaaatgcatacggaagcgca

SEQ ID NO: 6033443 - DNA, 25 bp, Homo sapien
atgaggaaaaaattgtctcttcaac

SEQ ID NO: 6033444 - DNA, 25 bp, Homo sapien
catcatagtcgccacgggctctgaa

SEQ ID NO: 6033445 - DNA, 25 bp, Homo sapien
tgcatgtgtagaaaaaagaggcaaa

SEQ ID NO: 6033446 - DNA, 25 bp, Homo sapien
agcaaacttccaaaaggctaaggat

SEQ ID NO: 6033447 - DNA, 25 bp, Homo sapien
tgtagtcatcatcggtggtggccct

SEQ ID NO: 6033448 - DNA, 25 bp, Homo sapien
tgctggttacgtggctgctatcaaa

SEQ ID NO: 6033449 - DNA, 25 bp, Homo sapien
atcccctccaaagcacttctaaata

SEQ ID NO: 6033450 - DNA, 25 bp, Homo sapien
gcaattaactggaggtattgagctt

SEQ ID NO: 6033451 - DNA, 25 bp, Homo sapien
aggtcacctattataaaggtaatgg

SEQ ID NO: 6033452 - DNA, 25 bp, Homo sapien
caagaaaaataaggtcacctattat

SEQ ID NO: 6033453 - DNA, 25 bp, Homo sapien
actcccgttgatgggttggaaggca

SEQ ID NO: 6033454 - DNA, 25 bp, Homo sapien
aagatcagagtaactcccgttgatg

SEQ ID NO: 6033455 - DNA, 25 bp, Homo sapien
tctgttcaagaaaaataaggtcacc

SEQ ID NO: 6033456 - DNA, 25 bp, Homo sapien
tccaaagcacttctaaataattctc

SEQ ID NO: 6033457 - DNA, 25 bp, Homo sapien
agaccacatactagatgttaagaac

SEQ ID NO: 6033458 - DNA, 25 bp, Homo sapien
catcatcggtggtggccctgctggt

SEQ ID NO: 6033459 - DNA, 25 bp, Homo sapien
gaaacgaagatcagagtaactcccg

SEQ ID NO: 6033460 - DNA, 25 bp, Homo sapien
gaaattcccaaaagattaaccatca

SEQ ID NO: 6033461 - DNA, 25 bp, Homo sapien
cttcaacaggtgctctttcgttaaa

SEQ ID NO: 6033462 - DNA, 25 bp, Homo sapien
tgagcttctgttcaagaaaaataag

SEQ ID NO: 6033463 - DNA, 25 bp, Homo sapien
aggtattgagcttctgttcaagaaa

SEQ ID NO: 6033464 - DNA, 25 bp, Homo sapien
cgaagacgaaacgaagatcagagta

SEQ ID NO: 6033465 - DNA, 25 bp, Homo sapien
ttgacgtcaacggtgatatcaaaat

SEQ ID NO: 6033466 - DNA, 25 bp, Homo sapien
attgaccattaacaagtcacatgat

SEQ ID NO: 6033467 - DNA, 25 bp, Homo sapien
tcaacggtgatatcaaaattaacgt

SEQ ID NO: 6033468 - DNA, 25 bp, Homo sapien
agatgttaagaacatcatagtcgcc

SEQ ID NO: 6033469 - DNA, 25 bp, Homo sapien
ctaaataattctcatttattccacc

SEQ ID NO: 6033470 - DNA, 25 bp, Homo sapien
caagtcacatgatgtagtcatcatc

SEQ ID NO: 6033471 - DNA, 25 bp, Homo sapien
cactgtcaaggaagaccacatacta

SEQ ID NO: 6033472 - DNA, 25 bp, Homo sapien
tgttaagcaattaactggaggtatt

SEQ ID NO: 6033473 - DNA, 25 bp, Homo sapien
catactagatgttaagaacatcata

SEQ ID NO: 6033474 - DNA, 25 bp, Homo sapien
aaaggctaaggatgacgctgttaag

SEQ ID NO: 6033475 - DNA, 25 bp, Homo sapien
tggccctgctggttacgtggctgct

SEQ ID NO: 6033476 - DNA, 25 bp, Homo sapien
caggacattgaccattaacaagtca

SEQ ID NO: 6033477 - DNA, 25 bp, Homo sapien
aagcgtgccttttcgtccacagtca

SEQ ID NO: 6033478 - DNA, 25 bp, Homo sapien
gaggtattgacgtcaacggtgatat

SEQ ID NO: 6033479 - DNA, 25 bp, Homo sapien
gtattgaaatagatgaggaaaaaat

SEQ ID NO: 6033480 - DNA, 25 bp, Homo sapien
aagtaggatgagcatggcagaccct

SEQ ID NO: 6033481 - DNA, 25 bp, Homo sapien
gaattaaattggtcatcaatgacta

SEQ ID NO: 6033482 - DNA, 25 bp, Homo sapien
taccttcctcttcggctttgtgagc

SEQ ID NO: 6033483 - DNA, 25 bp, Homo sapien
ccagttttcaacatttcgacagctg

SEQ ID NO: 6033484 - DNA, 25 bp, Homo sapien
gacagctgcaataccttcctcttcg

SEQ ID NO: 6033485 - DNA, 25 bp, Homo sapien
ataatgtgagcccccaaaatacgct

SEQ ID NO: 6033486 - DNA, 25 bp, Homo sapien
aatccaatcttttcagcccctaagc

SEQ ID NO: 6033487 - DNA, 25 bp, Homo sapien
tcttggttggtcttggctcttgaat

SEQ ID NO: 6033488 - DNA, 25 bp, Homo sapien
ctgcggaagcgccatattctaaggc

SEQ ID NO: 6033489 - DNA, 25 bp, Homo sapien
tggaccaaatgtaacatctcctacc

SEQ ID NO: 6033490 - DNA, 25 bp, Homo sapien
acccatgctacttctgggtgagaat

SEQ ID NO: 6033491 - DNA, 25 bp, Homo sapien
tctgggtgagaatacatgaccgaag

SEQ ID NO: 6033492 - DNA, 25 bp, Homo sapien
tgaattggccgcaaaggggaactta

SEQ ID NO: 6033493 - DNA, 25 bp, Homo sapien
ggctttgtgagccagcattggacca

SEQ ID NO: 6033494 - DNA, 25 bp, Homo sapien
tcctaccactttaatgtgtgggaac

SEQ ID NO: 6033495 - DNA, 25 bp, Homo sapien
tgccggcttctttcaattgctcttc

SEQ ID NO: 6033496 - DNA, 25 bp, Homo sapien
ttgttatagttgacatgaccgtgac

SEQ ID NO: 6033497 - DNA, 25 bp, Homo sapien
atacgctcggtcttggaatcgatca

SEQ ID NO: 6033498 - DNA, 25 bp, Homo sapien
ttagcttccttaaatgcttcggaca

SEQ ID NO: 6033499 - DNA, 25 bp, Homo sapien
tcaccggcatttggaccgataatgt

SEQ ID NO: 6033500 - DNA, 25 bp, Homo sapien
catttcgacagctgcaataccttcc

SEQ ID NO: 6033501 - DNA, 25 bp, Homo sapien
ctaaggctaagccagcttcagcaat

SEQ ID NO: 6033502 - DNA, 25 bp, Homo sapien
cccttttgtctacttctaatccaat

SEQ ID NO: 6033503 - DNA, 25 bp, Homo sapien
tggctcttgaattggccgcaaaggg

SEQ ID NO: 6033504 - DNA, 25 bp, Homo sapien
ttcaacatttcgacagctgcaatac

SEQ ID NO: 6033505 - DNA, 25 bp, Homo sapien
tcttcggttttaccaacccatgcta

SEQ ID NO: 6033506 - DNA, 25 bp, Homo sapien
ggaatgttgttatagttgacatgac

SEQ ID NO: 6033507 - DNA, 25 bp, Homo sapien
tcaattgctcttcggttttaccaac

SEQ ID NO: 6033508 - DNA, 25 bp, Homo sapien
gtaaggtcttctaccaacagcaacc

SEQ ID NO: 6033509 - DNA, 25 bp, Homo sapien
cagcttcagcaatcatttcaccggc

SEQ ID NO: 6033510 - DNA, 25 bp, Homo sapien
ctaagccagcttcagcaatcatttc

SEQ ID NO: 6033511 - DNA, 25 bp, Homo sapien
tcttctaccaacagcaaccagcaaa

SEQ ID NO: 6033512 - DNA, 25 bp, Homo sapien
cccaaaatacgctcggtcttggaat

SEQ ID NO: 6033513 - DNA, 25 bp, Homo sapien
catcttctgcggaagcgccatattc

SEQ ID NO: 6033514 - DNA, 25 bp, Homo sapien
aacatctcctaccactttaatgtgt

SEQ ID NO: 6033515 - DNA, 25 bp, Homo sapien
aagcgccatattctaaggctaagcc

SEQ ID NO: 6033516 - DNA, 25 bp, Homo sapien
ctgcaataccttcctcttcggcttt

SEQ ID NO: 6033517 - DNA, 25 bp, Homo sapien
ttggaatcgatcaaaatcttcacga

SEQ ID NO: 6033518 - DNA, 25 bp, Homo sapien
tcatcaatgactaggcgtccccttt

SEQ ID NO: 6033519 - DNA, 25 bp, Homo sapien
catattctaaggctaagccagcttc

SEQ ID NO: 6033520 - DNA, 25 bp, Homo sapien
ctcttcggctttgtgagccagcatt

SEQ ID NO: 6033521 - DNA, 25 bp, Homo sapien
aatgcttcggacaaagtaggatgag

SEQ ID NO: 6033522 - DNA, 25 bp, Homo sapien
tcttttcagcccctaagccagcaat

SEQ ID NO: 6033523 - DNA, 25 bp, Homo sapien
tcggtcttggaatcgatcaaaatct

SEQ ID NO: 6033524 - DNA, 25 bp, Homo sapien
cttctttcaattgctcttcggtttt

SEQ ID NO: 6033525 - DNA, 25 bp, Homo sapien
ggaccgataatgtgagcccccaaaa

SEQ ID NO: 6033526 - DNA, 25 bp, Homo sapien
gaacttaccaattttatagtcaatg

SEQ ID NO: 6033527 - DNA, 25 bp, Homo sapien
ttttatagtcaatgccggcttcttt

SEQ ID NO: 6033528 - DNA, 25 bp, Homo sapien
cagcaatgtaaggtcttctaccaac

SEQ ID NO: 6033529 - DNA, 25 bp, Homo sapien
ttaccaacccatgctacttctgggt

SEQ ID NO: 6033530 - DNA, 25 bp, Homo sapien
acttctaatccaatcttttcagccc

SEQ ID NO: 6033531 - DNA, 25 bp, Homo sapien
accaacagcaaccagcaaaacttca

SEQ ID NO: 6033532 - DNA, 25 bp, Homo sapien
gctacttctgggtgagaatacatga

SEQ ID NO: 6033533 - DNA, 25 bp, Homo sapien
tgtctacttctaatccaatcttttc

SEQ ID NO: 6033534 - DNA, 25 bp, Homo sapien
tagttgacatgaccgtgaccagttt

SEQ ID NO: 6033535 - DNA, 25 bp, Homo sapien
aatgtgtgggaacttggaattaaat

SEQ ID NO: 6033536 - DNA, 25 bp, Homo sapien
cagcaatcatttcaccggcatttgg

SEQ ID NO: 6033537 - DNA, 25 bp, Homo sapien
aacttggaattaaattggtcatcaa

SEQ ID NO: 6033538 - DNA, 25 bp, Homo sapien
gtgagccagcattggaccaaatgta

SEQ ID NO: 6033539 - DNA, 25 bp, Homo sapien
taccaattttatagtcaatgccggc

SEQ ID NO: 6033540 - DNA, 25 bp, Homo sapien
tgagcccccaaaatacgctcggtct

SEQ ID NO: 6033541 - DNA, 25 bp, Homo sapien
tacatgaccgaaggaatgttgttat

SEQ ID NO: 6033542 - DNA, 25 bp, Homo sapien
tcagtgtcttggttggtcttggctc

SEQ ID NO: 6033543 - DNA, 25 bp, Homo sapien
tgagaatacatgaccgaaggaatgt

SEQ ID NO: 6033544 - DNA, 25 bp, Homo sapien
aaatgtaacatctcctaccacttta

SEQ ID NO: 6033545 - DNA, 25 bp, Homo sapien
agaccctagcaacatcttctgcgga

SEQ ID NO: 6033546 - DNA, 25 bp, Homo sapien
atgactaggcgtccccttttgtcta

SEQ ID NO: 6033547 - DNA, 25 bp, Homo sapien
catgttagcttccttaaatgcttcg

SEQ ID NO: 6033548 - DNA, 25 bp, Homo sapien
agcaaccagcaaaacttcagcttcc

SEQ ID NO: 6033549 - DNA, 25 bp, Homo sapien
agtcaatgccggcttctttcaattg

SEQ ID NO: 6033550 - DNA, 25 bp, Homo sapien
gatgagcatggcagaccctagcaac

SEQ ID NO: 6033551 - DNA, 25 bp, Homo sapien
aattggtcatcaatgactaggcgtc

SEQ ID NO: 6033552 - DNA, 25 bp, Homo sapien
tcgatcaaaatcttcacgaaacctt

SEQ ID NO: 6033553 - DNA, 25 bp, Homo sapien
cagcccctaagccagcaatgtaagg

SEQ ID NO: 6033554 - DNA, 25 bp, Homo sapien
cactttaatgtgtgggaacttggaa

SEQ ID NO: 6033555 - DNA, 25 bp, Homo sapien
cagcattggaccaaatgtaacatct

SEQ ID NO: 6033556 - DNA, 25 bp, Homo sapien
gcatttggaccgataatgtgagccc

SEQ ID NO: 6033557 - DNA, 25 bp, Homo sapien
aaaatcttcacgaaaccttcagtgt

SEQ ID NO: 6033558 - DNA, 25 bp, Homo sapien
catggcagaccctagcaacatcttc

SEQ ID NO: 6033559 - DNA, 25 bp, Homo sapien
aaaccttcagtgtcttggttggtct

SEQ ID NO: 6033560 - DNA, 25 bp, Homo sapien
tccttaaatgcttcggacaaagtag

SEQ ID NO: 6033561 - DNA, 25 bp, Homo sapien
acatgaccgtgaccagttttcaaca

SEQ ID NO: 6033562 - DNA, 25 bp, Homo sapien
tcatttcaccggcatttggaccgat

SEQ ID NO: 6033563 - DNA, 25 bp, Homo sapien
ttcacgaaaccttcagtgtcttggt

SEQ ID NO: 6033564 - DNA, 25 bp, Homo sapien
tggtcttggctcttgaattggccgc

SEQ ID NO: 6033565 - DNA, 25 bp, Homo sapien
ccgtgaccagttttcaacatttcga

SEQ ID NO: 6033566 - DNA, 25 bp, Homo sapien
tcggacaaagtaggatgagcatggc

SEQ ID NO: 6033567 - DNA, 25 bp, Homo sapien
tgggaacttggaattaaattggtca

SEQ ID NO: 6033568 - DNA, 25 bp, Homo sapien
cagcaaaacttcagcttccaaattt

SEQ ID NO: 6033569 - DNA, 25 bp, Homo sapien
ctaagccagcaatgtaaggtcttct

SEQ ID NO: 6033570 - DNA, 25 bp, Homo sapien
accgaaggaatgttgttatagttga

SEQ ID NO: 6033571 - DNA, 25 bp, Homo sapien
aacttcagcttccaaattttcttgc

SEQ ID NO: 6033572 - DNA, 25 bp, Homo sapien
tagcaacatcttctgcggaagcgcc

SEQ ID NO: 6033573 - DNA, 25 bp, Homo sapien
cggaacccatggatagcaaggtgac

SEQ ID NO: 6033574 - DNA, 25 bp, Homo sapien
tgttgtttccctttgaagagatgaa

SEQ ID NO: 6033575 - DNA, 25 bp, Homo sapien
aacctttatgagttcatgcaaatgc

SEQ ID NO: 6033576 - DNA, 25 bp, Homo sapien
aataactcacaaacaagtgcggaac

SEQ ID NO: 6033577 - DNA, 25 bp, Homo sapien
ccctattacgatttgctaaatccca

SEQ ID NO: 6033578 - DNA, 25 bp, Homo sapien
attgattttggcatctcttatgaca

SEQ ID NO: 6033579 - DNA, 25 bp, Homo sapien
attaaacaaactgggcaacaaatgt

SEQ ID NO: 6033580 - DNA, 25 bp, Homo sapien
atatactaatcaattggacgtcaat

SEQ ID NO: 6033581 - DNA, 25 bp, Homo sapien
taagcacatcttacctcttctagag

SEQ ID NO: 6033582 - DNA, 25 bp, Homo sapien
aaacaataccagcaccgtatcccca

SEQ ID NO: 6033583 - DNA, 25 bp, Homo sapien
cgtcaatcggtattctttgtccttt

SEQ ID NO: 6033584 - DNA, 25 bp, Homo sapien
tatcatgctaacaaacaataccagc

SEQ ID NO: 6033585 - DNA, 25 bp, Homo sapien
tttgctaaatcccagtatcccaatt

SEQ ID NO: 6033586 - DNA, 25 bp, Homo sapien
tctactagaactgctaggatttata

SEQ ID NO: 6033587 - DNA, 25 bp, Homo sapien
tttgaagagatgaacctttatgagt

SEQ ID NO: 6033588 - DNA, 25 bp, Homo sapien
attgcattcttacatgagaacaaga

SEQ ID NO: 6033589 - DNA, 25 bp, Homo sapien
catgagaacaagatcattcaccgcg

SEQ ID NO: 6033590 - DNA, 25 bp, Homo sapien
atcattcaccgcgacatcaaaccgc

SEQ ID NO: 6033591 - DNA, 25 bp, Homo sapien
cgaagtatcgatattaaacaaactg

SEQ ID NO: 6033592 - DNA, 25 bp, Homo sapien
atagcaaggtgacggatataagcac

SEQ ID NO: 6033593 - DNA, 25 bp, Homo sapien
gccacataacgccaaattcgaagta

SEQ ID NO: 6033594 - DNA, 25 bp, Homo sapien
agaactgctaggatttataggtcgg

SEQ ID NO: 6033595 - DNA, 25 bp, Homo sapien
gagatgaacctttatgagttcatgc

SEQ ID NO: 6033596 - DNA, 25 bp, Homo sapien
caaaccgcaaaatatcatgctaaca

SEQ ID NO: 6033597 - DNA, 25 bp, Homo sapien
taacgccaaattcgaagtatcgata

SEQ ID NO: 6033598 - DNA, 25 bp, Homo sapien
cggcaaatggttgaagggattgcat

SEQ ID NO: 6033599 - DNA, 25 bp, Homo sapien
caaactgggcaacaaatgtaagcac

SEQ ID NO: 6033600 - DNA, 25 bp, Homo sapien
aggtcggatacatatgccattaaat

SEQ ID NO: 6033601 - DNA, 25 bp, Homo sapien
gcactagatttcgatatcccgccac

SEQ ID NO: 6033602 - DNA, 25 bp, Homo sapien
cagtatcccaattgttgcggacccc

SEQ ID NO: 6033603 - DNA, 25 bp, Homo sapien
caaattcgaagtatcgatattaaac

SEQ ID NO: 6033604 - DNA, 25 bp, Homo sapien
atcgatattaaacaaactgggcaac

SEQ ID NO: 6033605 - DNA, 25 bp, Homo sapien
tcacaaacaagtgcggaacccatgg

SEQ ID NO: 6033606 - DNA, 25 bp, Homo sapien
cggatataagcacaggaatttacaa

SEQ ID NO: 6033607 - DNA, 25 bp, Homo sapien
caccgtatccccaaagttgtacata

SEQ ID NO: 6033608 - DNA, 25 bp, Homo sapien
atttataggtcggatacatatgcca

SEQ ID NO: 6033609 - DNA, 25 bp, Homo sapien
attaaatgtctagcactagatttcg

SEQ ID NO: 6033610 - DNA, 25 bp, Homo sapien
tttggcatctcttatgacatggcaa

SEQ ID NO: 6033611 - DNA, 25 bp, Homo sapien
aaatccctattacgatttgctaaat

SEQ ID NO: 6033612 - DNA, 25 bp, Homo sapien
ccatggatagcaaggtgacggatat

SEQ ID NO: 6033613 - DNA, 25 bp, Homo sapien
tctaaggctaccgataataatgacc

SEQ ID NO: 6033614 - DNA, 25 bp, Homo sapien
tatgacatggcaaataactcacaaa

SEQ ID NO: 6033615 - DNA, 25 bp, Homo sapien
atggttgaagggattgcattcttac

SEQ ID NO: 6033616 - DNA, 25 bp, Homo sapien
aacaagatcattcaccgcgacatca

SEQ ID NO: 6033617 - DNA, 25 bp, Homo sapien
aaatcccagtatcccaattgttgcg

SEQ ID NO: 6033618 - DNA, 25 bp, Homo sapien
taatcaattggacgtcaatcggtat

SEQ ID NO: 6033619 - DNA, 25 bp, Homo sapien
tacgatttgctaaatcccagtatcc

SEQ ID NO: 6033620 - DNA, 25 bp, Homo sapien
caccgcgacatcaaaccgcaaaata

SEQ ID NO: 6033621 - DNA, 25 bp, Homo sapien
tctagagtctaaggctaccgataat

SEQ ID NO: 6033622 - DNA, 25 bp, Homo sapien
cactataaaagagatagaagaaaaa

SEQ ID NO: 6033623 - DNA, 25 bp, Homo sapien
tatgagttcatgcaaatgcactata

SEQ ID NO: 6033624 - DNA, 25 bp, Homo sapien
atatcccgccacataacgccaaatt

SEQ ID NO: 6033625 - DNA, 25 bp, Homo sapien
ttcttacatgagaacaagatcattc

SEQ ID NO: 6033626 - DNA, 25 bp, Homo sapien
gctaccgataataatgacctattgt

SEQ ID NO: 6033627 - DNA, 25 bp, Homo sapien
catcttacctcttctagagtctaag

SEQ ID NO: 6033628 - DNA, 25 bp, Homo sapien
gatttcgatatcccgccacataacg

SEQ ID NO: 6033629 - DNA, 25 bp, Homo sapien
tattgttgttgtttccctttgaaga

SEQ ID NO: 6033630 - DNA, 25 bp, Homo sapien
ccccgttcagaaatatactaatcaa

SEQ ID NO: 6033631 - DNA, 25 bp, Homo sapien
gctaggatttataggtcggatacat

SEQ ID NO: 6033632 - DNA, 25 bp, Homo sapien
gcaaaatatcatgctaacaaacaat

SEQ ID NO: 6033633 - DNA, 25 bp, Homo sapien
tgtctagcactagatttcgatatcc

SEQ ID NO: 6033634 - DNA, 25 bp, Homo sapien
ttccctttgaagagatgaaccttta

SEQ ID NO: 6033635 - DNA, 25 bp, Homo sapien
cagttggtcaaatctactagaactg

SEQ ID NO: 6033636 - DNA, 25 bp, Homo sapien
caaatgtaagcacatcttacctctt

SEQ ID NO: 6033637 - DNA, 25 bp, Homo sapien
caaatgcactataaaagagatagaa

SEQ ID NO: 6033638 - DNA, 25 bp, Homo sapien
gatacatatgccattaaatgtctag

SEQ ID NO: 6033639 - DNA, 25 bp, Homo sapien
atgacctattgttgttgtttccctt

SEQ ID NO: 6033640 - DNA, 25 bp, Homo sapien
gctaacaaacaataccagcaccgta

SEQ ID NO: 6033641 - DNA, 25 bp, Homo sapien
tgtcctttttccggcaaatggttga

SEQ ID NO: 6033642 - DNA, 25 bp, Homo sapien
gtcaaatctactagaactgctagga

SEQ ID NO: 6033643 - DNA, 25 bp, Homo sapien
attggacgtcaatcggtattctttg

SEQ ID NO: 6033644 - DNA, 25 bp, Homo sapien
acaagtgcggaacccatggatagca

SEQ ID NO: 6033645 - DNA, 25 bp, Homo sapien
tcagaaatatactaatcaattggac

SEQ ID NO: 6033646 - DNA, 25 bp, Homo sapien
atctcttatgacatggcaaataact

SEQ ID NO: 6033647 - DNA, 25 bp, Homo sapien
taccagcaccgtatccccaaagttg

SEQ ID NO: 6033648 - DNA, 25 bp, Homo sapien
gggcaacaaatgtaagcacatctta

SEQ ID NO: 6033649 - DNA, 25 bp, Homo sapien
ttcatgcaaatgcactataaaagag

SEQ ID NO: 6033650 - DNA, 25 bp, Homo sapien
tacataattgattttggcatctctt

SEQ ID NO: 6033651 - DNA, 25 bp, Homo sapien
aggtgacggatataagcacaggaat

SEQ ID NO: 6033652 - DNA, 25 bp, Homo sapien
tccccaaagttgtacataattgatt

SEQ ID NO: 6033653 - DNA, 25 bp, Homo sapien
atggcaaataactcacaaacaagtg

SEQ ID NO: 6033654 - DNA, 25 bp, Homo sapien
tatgccattaaatgtctagcactag

SEQ ID NO: 6033655 - DNA, 25 bp, Homo sapien
aagttgtacataattgattttggca

SEQ ID NO: 6033656 - DNA, 25 bp, Homo sapien
acctcttctagagtctaaggctacc

SEQ ID NO: 6033657 - DNA, 25 bp, Homo sapien
gacatcaaaccgcaaaatatcatgc

SEQ ID NO: 6033658 - DNA, 25 bp, Homo sapien
gataataatgacctattgttgttgt

SEQ ID NO: 6033659 - DNA, 25 bp, Homo sapien
gaagggattgcattcttacatgaga

SEQ ID NO: 6033660 - DNA, 25 bp, Homo sapien
gaaataattatcaacaacgaccaca

SEQ ID NO: 6033661 - DNA, 25 bp, Homo sapien
gtcgctgccgtcatcaatcatggcc

SEQ ID NO: 6033662 - DNA, 25 bp, Homo sapien
caaaaagcacttctggggccttgta

SEQ ID NO: 6033663 - DNA, 25 bp, Homo sapien
ggatacggtgctggtattgtttgtt

SEQ ID NO: 6033664 - DNA, 25 bp, Homo sapien
ggttccgcacttgtttgtgagttat

SEQ ID NO: 6033665 - DNA, 25 bp, Homo sapien
taagagatgccaaaatcaattatgt

SEQ ID NO: 6033666 - DNA, 25 bp, Homo sapien
cggtgctggtattgtttgttagcat

SEQ ID NO: 6033667 - DNA, 25 bp, Homo sapien
cttgactttgacatccgcaatctcg

SEQ ID NO: 6033668 - DNA, 25 bp, Homo sapien
ccatgggttccgcacttgtttgtga

SEQ ID NO: 6033669 - DNA, 25 bp, Homo sapien
ggtattgtttgttagcatgatattt

SEQ ID NO: 6033670 - DNA, 25 bp, Homo sapien
gatgccaaaatcaattatgtacaac

SEQ ID NO: 6033671 - DNA, 25 bp, Homo sapien
tgaaaatgaaaccatccccaggata

SEQ ID NO: 6033672 - DNA, 25 bp, Homo sapien
cttttcgaatattgagcaaatcagt

SEQ ID NO: 6033673 - DNA, 25 bp, Homo sapien
catggccggaacgtgccccatacgg

SEQ ID NO: 6033674 - DNA, 25 bp, Homo sapien
caaaatcaattatgtacaactttgg

SEQ ID NO: 6033675 - DNA, 25 bp, Homo sapien
ttcccatttctgaatggacggtatg

SEQ ID NO: 6033676 - DNA, 25 bp, Homo sapien
tccatctgagttcatgtcgtcgctg

SEQ ID NO: 6033677 - DNA, 25 bp, Homo sapien
tgctatccatgggttccgcacttgt

SEQ ID NO: 6033678 - DNA, 25 bp, Homo sapien
actttggggatacggtgctggtatt

SEQ ID NO: 6033679 - DNA, 25 bp, Homo sapien
tttggtgaaaatgaaaccatcccca

SEQ ID NO: 6033680 - DNA, 25 bp, Homo sapien
cttctgcttgactttgacatccgca

SEQ ID NO: 6033681 - DNA, 25 bp, Homo sapien
gcacttgtttgtgagttatttgcca

SEQ ID NO: 6033682 - DNA, 25 bp, Homo sapien
cataccaacaaatgcatcaaccgag

SEQ ID NO: 6033683 - DNA, 25 bp, Homo sapien
tgaaaccatccccaggatacaatta

SEQ ID NO: 6033684 - DNA, 25 bp, Homo sapien
aacctcttcccatttctgaatggac

SEQ ID NO: 6033685 - DNA, 25 bp, Homo sapien
ccatctttcgtttggtgaaaatgaa

SEQ ID NO: 6033686 - DNA, 25 bp, Homo sapien
tatccgtcaccttgctatccatggg

SEQ ID NO: 6033687 - DNA, 25 bp, Homo sapien
atacggcttgtttctctctggaacc

SEQ ID NO: 6033688 - DNA, 25 bp, Homo sapien
ttcgtttggtgaaaatgaaaccatc

SEQ ID NO: 6033689 - DNA, 25 bp, Homo sapien
aatgaacttctgcttgactttgaca

SEQ ID NO: 6033690 - DNA, 25 bp, Homo sapien
tcgaggcatattcctctcaacaatg

SEQ ID NO: 6033691 - DNA, 25 bp, Homo sapien
acaattaatgaacttctgcttgact

SEQ ID NO: 6033692 - DNA, 25 bp, Homo sapien
atctttctcctggtccagtacatac

SEQ ID NO: 6033693 - DNA, 25 bp, Homo sapien
ctgtacatctttctcctggtccagt

SEQ ID NO: 6033694 - DNA, 25 bp, Homo sapien
acagctccatctttcgtttggtgaa

SEQ ID NO: 6033695 - DNA, 25 bp, Homo sapien
accaaacataccaacaaatgcatca

SEQ ID NO: 6033696 - DNA, 25 bp, Homo sapien
accacacgtccacgccaccatcata

SEQ ID NO: 6033697 - DNA, 25 bp, Homo sapien
gctaatctgtacatctttctcctgg

SEQ ID NO: 6033698 - DNA, 25 bp, Homo sapien
tttgacatccgcaatctcgtccagt

SEQ ID NO: 6033699 - DNA, 25 bp, Homo sapien
tctgaaatcgcttccatctgagttc

SEQ ID NO: 6033700 - DNA, 25 bp, Homo sapien
tttgccatgtcataagagatgccaa

SEQ ID NO: 6033701 - DNA, 25 bp, Homo sapien
gtccagtcgaggcatattcctctca

SEQ ID NO: 6033702 - DNA, 25 bp, Homo sapien
atcaatcatggccggaacgtgcccc

SEQ ID NO: 6033703 - DNA, 25 bp, Homo sapien
aatggacggtatgcccaacttttcg

SEQ ID NO: 6033704 - DNA, 25 bp, Homo sapien
catattcctctcaacaatgctaatc

SEQ ID NO: 6033705 - DNA, 25 bp, Homo sapien
agcattttactccaaaaagcacttc

SEQ ID NO: 6033706 - DNA, 25 bp, Homo sapien
atcgcttccatctgagttcatgtcg

SEQ ID NO: 6033707 - DNA, 25 bp, Homo sapien
atctgcaccaaacataccaacaaat

SEQ ID NO: 6033708 - DNA, 25 bp, Homo sapien
atgtacaactttggggatacggtgc

SEQ ID NO: 6033709 - DNA, 25 bp, Homo sapien
cttgtttctctctggaaccactgag

SEQ ID NO: 6033710 - DNA, 25 bp, Homo sapien
tgcatcaaccgagccgtgttgcgca

SEQ ID NO: 6033711 - DNA, 25 bp, Homo sapien
cctctcaacaatgctaatctgtaca

SEQ ID NO: 6033712 - DNA, 25 bp, Homo sapien
caggatacaattaatgaacttctgc

SEQ ID NO: 6033713 - DNA, 25 bp, Homo sapien
aacaatgctaatctgtacatctttc

SEQ ID NO: 6033714 - DNA, 25 bp, Homo sapien
aatctcgtccagtcgaggcatattc

SEQ ID NO: 6033715 - DNA, 25 bp, Homo sapien
catcatagcattttactccaaaaag

SEQ ID NO: 6033716 - DNA, 25 bp, Homo sapien
tcaccttgctatccatgggttccgc

SEQ ID NO: 6033717 - DNA, 25 bp, Homo sapien
ttactccaaaaagcacttctggggc

SEQ ID NO: 6033718 - DNA, 25 bp, Homo sapien
gtccagtacatacttgccatcgcca

SEQ ID NO: 6033719 - DNA, 25 bp, Homo sapien
tcctgtgcttatatccgtcaccttg

SEQ ID NO: 6033720 - DNA, 25 bp, Homo sapien
catgtcgtcgctgccgtcatcaatc

SEQ ID NO: 6033721 - DNA, 25 bp, Homo sapien
gagttatttgccatgtcataagaga

SEQ ID NO: 6033722 - DNA, 25 bp, Homo sapien
atccgcaatctcgtccagtcgaggc

SEQ ID NO: 6033723 - DNA, 25 bp, Homo sapien
acgtccacgccaccatcatagcatt

SEQ ID NO: 6033724 - DNA, 25 bp, Homo sapien
tttctgaatggacggtatgcccaac

SEQ ID NO: 6033725 - DNA, 25 bp, Homo sapien
cggtatgcccaacttttcgaatatt

SEQ ID NO: 6033726 - DNA, 25 bp, Homo sapien
tacatacttgccatcgccatctgca

SEQ ID NO: 6033727 - DNA, 25 bp, Homo sapien
cttgccatcgccatctgcaccaaac

SEQ ID NO: 6033728 - DNA, 25 bp, Homo sapien
tgagcaaatcagtctgaaatcgctt

SEQ ID NO: 6033729 - DNA, 25 bp, Homo sapien
tgccccatacggcttgtttctctct

SEQ ID NO: 6033730 - DNA, 25 bp, Homo sapien
ttctggggccttgtaaattcctgtg

SEQ ID NO: 6033731 - DNA, 25 bp, Homo sapien
gccgtcatcaatcatggccggaacg

SEQ ID NO: 6033732 - DNA, 25 bp, Homo sapien
ctcctggtccagtacatacttgcca

SEQ ID NO: 6033733 - DNA, 25 bp, Homo sapien
tggaaccactgagaaataattatca

SEQ ID NO: 6033734 - DNA, 25 bp, Homo sapien
aacaaatgcatcaaccgagccgtgt

SEQ ID NO: 6033735 - DNA, 25 bp, Homo sapien
catccccaggatacaattaatgaac

SEQ ID NO: 6033736 - DNA, 25 bp, Homo sapien
tgagttcatgtcgtcgctgccgtca

SEQ ID NO: 6033737 - DNA, 25 bp, Homo sapien
tctctctggaaccactgagaaataa

SEQ ID NO: 6033738 - DNA, 25 bp, Homo sapien
gccgtgttgcgcaacctcttcccat

SEQ ID NO: 6033739 - DNA, 25 bp, Homo sapien
gtaaattcctgtgcttatatccgtc

SEQ ID NO: 6033740 - DNA, 25 bp, Homo sapien
gcccaacttttcgaatattgagcaa

SEQ ID NO: 6033741 - DNA, 25 bp, Homo sapien
cactgagaaataattatcaacaacg

SEQ ID NO: 6033742 - DNA, 25 bp, Homo sapien
atcgccatctgcaccaaacatacca

SEQ ID NO: 6033743 - DNA, 25 bp, Homo sapien
cggaacgtgccccatacggcttgtt

SEQ ID NO: 6033744 - DNA, 25 bp, Homo sapien
aaccgagccgtgttgcgcaacctct

SEQ ID NO: 6033745 - DNA, 25 bp, Homo sapien
ttgcgcaacctcttcccatttctga

SEQ ID NO: 6033746 - DNA, 25 bp, Homo sapien
acgccaccatcatagcattttactc

SEQ ID NO: 6033747 - DNA, 25 bp, Homo sapien
ggccttgtaaattcctgtgcttata

SEQ ID NO: 6033748 - DNA, 25 bp, Homo sapien
aatcagtctgaaatcgcttccatct

SEQ ID NO: 6033749 - DNA, 25 bp, Homo sapien
attatcaacaacgaccacacgtcca

SEQ ID NO: 6033750 - DNA, 25 bp, Homo sapien
gtttgtgagttatttgccatgtcat

SEQ ID NO: 6033751 - DNA, 25 bp, Homo sapien
gaatattgagcaaatcagtctgaaa

SEQ ID NO: 6033752 - DNA, 25 bp, Homo sapien
atgtcataagagatgccaaaatcaa

SEQ ID NO: 6033753 - DNA, 25 bp, Homo sapien
caattatgtacaactttggggatac

SEQ ID NO: 6033754 - DNA, 25 bp, Homo sapien
tgcttatatccgtcaccttgctatc

SEQ ID NO: 6033755 - DNA, 25 bp, Homo sapien
ctggtatgtgtaaagccggttttgc

SEQ ID NO: 6033756 - DNA, 25 bp, Homo sapien
tccggtgatggtgttactcacgtcg

SEQ ID NO: 6033757 - DNA, 25 bp, Homo sapien
gacaccaaggtatcatggtcggtat

SEQ ID NO: 6033758 - DNA, 25 bp, Homo sapien
tcatggtcggtatgggtcaaaaaga

SEQ ID NO: 6033759 - DNA, 25 bp, Homo sapien
ctggcatcataccttctacaacgaa

SEQ ID NO: 6033760 - DNA, 25 bp, Homo sapien
aaaagactcctacgttggtgatgaa

SEQ ID NO: 6033761 - DNA, 25 bp, Homo sapien
caacgaattgagagttgccccagaa

SEQ ID NO: 6033762 - DNA, 25 bp, Homo sapien
acgctcctcgtgctgtcttcccatc

SEQ ID NO: 6033763 - DNA, 25 bp, Homo sapien
aaagatctggcatcataccttctac

SEQ ID NO: 6033764 - DNA, 25 bp, Homo sapien
acggtattgtcaccaactgggacga

SEQ ID NO: 6033765 - DNA, 25 bp, Homo sapien
gtcaaaaagactcctacgttggtga

SEQ ID NO: 6033766 - DNA, 25 bp, Homo sapien
tatggaaaagatctggcatcatacc

SEQ ID NO: 6033767 - DNA, 25 bp, Homo sapien
tgatgaagctcaatccaagagaggt

SEQ ID NO: 6033768 - DNA, 25 bp, Homo sapien
attgagagttgccccagaagaacac

SEQ ID NO: 6033769 - DNA, 25 bp, Homo sapien
ctgactacttgatgaagatcttgag

SEQ ID NO: 6033770 - DNA, 25 bp, Homo sapien
cccagaagaacaccctgttcttttg

SEQ ID NO: 6033771 - DNA, 25 bp, Homo sapien
agttgccccagaagaacaccctgtt

SEQ ID NO: 6033772 - DNA, 25 bp, Homo sapien
atgggtcaaaaagactcctacgttg

SEQ ID NO: 6033773 - DNA, 25 bp, Homo sapien
acgttccagccttctacgtttccat

SEQ ID NO: 6033774 - DNA, 25 bp, Homo sapien
gaccaagacaccaaggtatcatggt

SEQ ID NO: 6033775 - DNA, 25 bp, Homo sapien
aagctccaatgaaccctaaatcaaa

SEQ ID NO: 6033776 - DNA, 25 bp, Homo sapien
caagccgttttgtccttgtactctt

SEQ ID NO: 6033777 - DNA, 25 bp, Homo sapien
gaaaagatgactcaaattatgtttg

SEQ ID NO: 6033778 - DNA, 25 bp, Homo sapien
tgaagatcttgagtgaacgtggtta

SEQ ID NO: 6033779 - DNA, 25 bp, Homo sapien
ggacgatatggaaaagatctggcat

SEQ ID NO: 6033780 - DNA, 25 bp, Homo sapien
ctcctacgttggtgatgaagctcaa

SEQ ID NO: 6033781 - DNA, 25 bp, Homo sapien
ctacgtttccatccaagccgttttg

SEQ ID NO: 6033782 - DNA, 25 bp, Homo sapien
ctgtcttcccatctatcgtcggtag

SEQ ID NO: 6033783 - DNA, 25 bp, Homo sapien
atccaagagaggtatcttgacttta

SEQ ID NO: 6033784 - DNA, 25 bp, Homo sapien
acttgatgaagatcttgagtgaacg

SEQ ID NO: 6033785 - DNA, 25 bp, Homo sapien
cttccggtagaactactggtattgt

SEQ ID NO: 6033786 - DNA, 25 bp, Homo sapien
accctaaatcaaacagagaaaagat

SEQ ID NO: 6033787 - DNA, 25 bp, Homo sapien
aaggtatcatggtcggtatgggtca

SEQ ID NO: 6033788 - DNA, 25 bp, Homo sapien
tccatccaagccgttttgtccttgt

SEQ ID NO: 6033789 - DNA, 25 bp, Homo sapien
tgtgtaaagccggttttgccggtga

SEQ ID NO: 6033790 - DNA, 25 bp, Homo sapien
tcttgagtgaacgtggttactcttt

SEQ ID NO: 6033791 - DNA, 25 bp, Homo sapien
caactgggacgatatggaaaagatc

SEQ ID NO: 6033792 - DNA, 25 bp, Homo sapien
tcccatctatcgtcggtagaccaag

SEQ ID NO: 6033793 - DNA, 25 bp, Homo sapien
ttgtcaccaactgggacgatatgga

SEQ ID NO: 6033794 - DNA, 25 bp, Homo sapien
ttgaacacggtattgtcaccaactg

SEQ ID NO: 6033795 - DNA, 25 bp, Homo sapien
gtgacgacgctcctcgtgctgtctt

SEQ ID NO: 6033796 - DNA, 25 bp, Homo sapien
tatgtttgaaactttcaacgttcca

SEQ ID NO: 6033797 - DNA, 25 bp, Homo sapien
tctccaccactgctgaaagagaaat

SEQ ID NO: 6033798 - DNA, 25 bp, Homo sapien
tcaaattatgtttgaaactttcaac

SEQ ID NO: 6033799 - DNA, 25 bp, Homo sapien
tgagaatcgatttggccggtagaga

SEQ ID NO: 6033800 - DNA, 25 bp, Homo sapien
cgctggtttctctctacctcacgcc

SEQ ID NO: 6033801 - DNA, 25 bp, Homo sapien
ttgccggtgacgacgctcctcgtgc

SEQ ID NO: 6033802 - DNA, 25 bp, Homo sapien
ttcttttgactgaagctccaatgaa

SEQ ID NO: 6033803 - DNA, 25 bp, Homo sapien
attgttttggattccggtgatggtg

SEQ ID NO: 6033804 - DNA, 25 bp, Homo sapien
tgactttacgttacccaattgaaca

SEQ ID NO: 6033805 - DNA, 25 bp, Homo sapien
tgtactcttccggtagaactactgg

SEQ ID NO: 6033806 - DNA, 25 bp, Homo sapien
agccttctacgtttccatccaagcc

SEQ ID NO: 6033807 - DNA, 25 bp, Homo sapien
accctgttcttttgactgaagctcc

SEQ ID NO: 6033808 - DNA, 25 bp, Homo sapien
gagaggtatcttgactttacgttac

SEQ ID NO: 6033809 - DNA, 25 bp, Homo sapien
tcgatttggccggtagagatttgac

SEQ ID NO: 6033810 - DNA, 25 bp, Homo sapien
ccattttgagaatcgatttggccgg

SEQ ID NO: 6033811 - DNA, 25 bp, Homo sapien
ggtagagatttgactgactacttga

SEQ ID NO: 6033812 - DNA, 25 bp, Homo sapien
tttctctctacctcacgccattttg

SEQ ID NO: 6033813 - DNA, 25 bp, Homo sapien
tgttactcacgtcgttccaatttac

SEQ ID NO: 6033814 - DNA, 25 bp, Homo sapien
agaactactggtattgttttggatt

SEQ ID NO: 6033815 - DNA, 25 bp, Homo sapien
acggttctggtatgtgtaaagccgg

SEQ ID NO: 6033816 - DNA, 25 bp, Homo sapien
gtggttactctttctccaccactgc

SEQ ID NO: 6033817 - DNA, 25 bp, Homo sapien
tcacgtcgttccaatttacgctggt

SEQ ID NO: 6033818 - DNA, 25 bp, Homo sapien
aagaacaccctgttcttttgactga

SEQ ID NO: 6033819 - DNA, 25 bp, Homo sapien
ctcacgccattttgagaatcgattt

SEQ ID NO: 6033820 - DNA, 25 bp, Homo sapien
actggtattgttttggattccggtg

SEQ ID NO: 6033821 - DNA, 25 bp, Homo sapien
gatttgactgactacttgatgaaga

SEQ ID NO: 6033822 - DNA, 25 bp, Homo sapien
tgtccttgtactcttccggtagaac

SEQ ID NO: 6033823 - DNA, 25 bp, Homo sapien
gatgactcaaattatgtttgaaact

SEQ ID NO: 6033824 - DNA, 25 bp, Homo sapien
gtgaacgtggttactctttctccac

SEQ ID NO: 6033825 - DNA, 25 bp, Homo sapien
ttggattccggtgatggtgttactc

SEQ ID NO: 6033826 - DNA, 25 bp, Homo sapien
tcggtagaccaagacaccaaggtat

SEQ ID NO: 6033827 - DNA, 25 bp, Homo sapien
cggttttgccggtgacgacgctcct

SEQ ID NO: 6033828 - DNA, 25 bp, Homo sapien
tcataccttctacaacgaattgaga

SEQ ID NO: 6033829 - DNA, 25 bp, Homo sapien
ctcgtgctgtcttcccatctatcgt

SEQ ID NO: 6033830 - DNA, 25 bp, Homo sapien
ttggccggtagagatttgactgact

SEQ ID NO: 6033831 - DNA, 25 bp, Homo sapien
aacagagaaaagatgactcaaatta

SEQ ID NO: 6033832 - DNA, 25 bp, Homo sapien
tgaaactttcaacgttccagccttc

SEQ ID NO: 6033833 - DNA, 25 bp, Homo sapien
actctttctccaccactgctgaaag

SEQ ID NO: 6033834 - DNA, 25 bp, Homo sapien
gataacggttctggtatgtgtaaag

SEQ ID NO: 6033835 - DNA, 25 bp, Homo sapien
tcggtatgggtcaaaaagactccta

SEQ ID NO: 6033836 - DNA, 25 bp, Homo sapien
cgttggtgatgaagctcaatccaag

SEQ ID NO: 6033837 - DNA, 25 bp, Homo sapien
aaatcaaacagagaaaagatgactc

SEQ ID NO: 6033838 - DNA, 25 bp, Homo sapien
cgttccaatttacgctggtttctct

SEQ ID NO: 6033839 - DNA, 25 bp, Homo sapien
tctacctcacgccattttgagaatc

SEQ ID NO: 6033840 - DNA, 25 bp, Homo sapien
gatggtgttactcacgtcgttccaa

SEQ ID NO: 6033841 - DNA, 25 bp, Homo sapien
tgactgaagctccaatgaaccctaa

SEQ ID NO: 6033842 - DNA, 25 bp, Homo sapien
atcttgactttacgttacccaattg

SEQ ID NO: 6033843 - DNA, 25 bp, Homo sapien
cttctacaacgaattgagagttgcc

SEQ ID NO: 6033844 - DNA, 25 bp, Homo sapien
caatgaaccctaaatcaaacagaga

SEQ ID NO: 6033845 - DNA, 25 bp, Homo sapien
aatttacgctggtttctctctacct

SEQ ID NO: 6033846 - DNA, 25 bp, Homo sapien
agctcaatccaagagaggtatcttg

SEQ ID NO: 6033847 - DNA, 25 bp, Homo sapien
ctatcgtcggtagaccaagacacca

SEQ ID NO: 6033848 - DNA, 25 bp, Homo sapien
cgttacccaattgaacacggtattg

SEQ ID NO: 6033849 - DNA, 25 bp, Homo sapien
ccactgctgaaagagaaattgtccg

SEQ ID NO: 6033850 - DNA, 25 bp, Homo sapien
acccaattgaacacggtattgtcac

SEQ ID NO: 6033851 - DNA, 25 bp, Homo sapien
ctttcaacgttccagccttctacgt

SEQ ID NO: 6033852 - DNA, 25 bp, Homo sapien
tgatggagttgtaagtagtttggtc

SEQ ID NO: 6033853 - DNA, 25 bp, Homo sapien
gttttgagatccacatttgttggaa

SEQ ID NO: 6033854 - DNA, 25 bp, Homo sapien
cagcggtttgcatttcttgttcgaa

SEQ ID NO: 6033855 - DNA, 25 bp, Homo sapien
attcttgttttgagatccacatttg

SEQ ID NO: 6033856 - DNA, 25 bp, Homo sapien
gagttgtaagtagtttggtcaatac

SEQ ID NO: 6033857 - DNA, 25 bp, Homo sapien
cgtaggatttttcaattgaagaaga

SEQ ID NO: 6033858 - DNA, 25 bp, Homo sapien
tttcttgttcgaagtccaaggcgac

SEQ ID NO: 6033859 - DNA, 25 bp, Homo sapien
caaaacagaaggatggaacaaagct

SEQ ID NO: 6033860 - DNA, 25 bp, Homo sapien
taacatagtttttccttgatgtcac

SEQ ID NO: 6033861 - DNA, 25 bp, Homo sapien
tgtcacggacaatttctctttcagc

SEQ ID NO: 6033862 - DNA, 25 bp, Homo sapien
agtactttctttctggaggagcaat

SEQ ID NO: 6033863 - DNA, 25 bp, Homo sapien
agaaggatggaacaaagcttctggg

SEQ ID NO: 6033864 - DNA, 25 bp, Homo sapien
aagccaagatagaaccaccaatcca

SEQ ID NO: 6033865 - DNA, 25 bp, Homo sapien
acttcatgatggagttgtaagtagt

SEQ ID NO: 6033866 - DNA, 25 bp, Homo sapien
catcacacttcatgatggagttgta

SEQ ID NO: 6033867 - DNA, 25 bp, Homo sapien
caattgaagaagattgagcagcggt

SEQ ID NO: 6033868 - DNA, 25 bp, Homo sapien
tccaaacccaaaacagaaggatgga

SEQ ID NO: 6033869 - DNA, 25 bp, Homo sapien
tggtaccaccggacataacgatgtt

SEQ ID NO: 6033870 - DNA, 25 bp, Homo sapien
gcattctttcggcaatacctgggaa

SEQ ID NO: 6033871 - DNA, 25 bp, Homo sapien
gcgacgtaacatagtttttccttga

SEQ ID NO: 6033872 - DNA, 25 bp, Homo sapien
atttttcaattgaagaagattgagc

SEQ ID NO: 6033873 - DNA, 25 bp, Homo sapien
gagccaaagcggtgatttccttttg

SEQ ID NO: 6033874 - DNA, 25 bp, Homo sapien
aagcttctggggctctgaatctttc

SEQ ID NO: 6033875 - DNA, 25 bp, Homo sapien
tggagaaagagtaaccacgttcact

SEQ ID NO: 6033876 - DNA, 25 bp, Homo sapien
tcttcatcaagtagtcagtcaaatc

SEQ ID NO: 6033877 - DNA, 25 bp, Homo sapien
tctcaaaatggcgtgaggtagagag

SEQ ID NO: 6033878 - DNA, 25 bp, Homo sapien
catctggaagttcgtaggatttttc

SEQ ID NO: 6033879 - DNA, 25 bp, Homo sapien
gtttggtcaataccggcagattcca

SEQ ID NO: 6033880 - DNA, 25 bp, Homo sapien
tcaaagaagccaagatagaaccacc

SEQ ID NO: 6033881 - DNA, 25 bp, Homo sapien
aaccaccaatccagacggagtactt

SEQ ID NO: 6033882 - DNA, 25 bp, Homo sapien
attccttacggacatcgacatcaca

SEQ ID NO: 6033883 - DNA, 25 bp, Homo sapien
gttcgaagtccaaggcgacgtaaca

SEQ ID NO: 6033884 - DNA, 25 bp, Homo sapien
agatagaaccaccaatccagacgga

SEQ ID NO: 6033885 - DNA, 25 bp, Homo sapien
caatagtgatgacttgaccatctgg

SEQ ID NO: 6033886 - DNA, 25 bp, Homo sapien
gagcaatgatcttgaccttcatgga

SEQ ID NO: 6033887 - DNA, 25 bp, Homo sapien
agatccacatttgttggaaggtagt

SEQ ID NO: 6033888 - DNA, 25 bp, Homo sapien
caatccagacggagtactttctttc

SEQ ID NO: 6033889 - DNA, 25 bp, Homo sapien
gaagttcgtaggatttttcaattga

SEQ ID NO: 6033890 - DNA, 25 bp, Homo sapien
catcgacatcacacttcatgatgga

SEQ ID NO: 6033891 - DNA, 25 bp, Homo sapien
ggacaatttctctttcagcagtggt

SEQ ID NO: 6033892 - DNA, 25 bp, Homo sapien
tacggacatcgacatcacacttcat

SEQ ID NO: 6033893 - DNA, 25 bp, Homo sapien
cttgaccatctggaagttcgtagga

SEQ ID NO: 6033894 - DNA, 25 bp, Homo sapien
ccttttgcattctttcggcaatacc

SEQ ID NO: 6033895 - DNA, 25 bp, Homo sapien
atctttcgttaccaatagtgatgac

SEQ ID NO: 6033896 - DNA, 25 bp, Homo sapien
tgatgacttgaccatctggaagttc

SEQ ID NO: 6033897 - DNA, 25 bp, Homo sapien
ctggggctctgaatctttcgttacc

SEQ ID NO: 6033898 - DNA, 25 bp, Homo sapien
tgaccttcatggaagatggagccaa

SEQ ID NO: 6033899 - DNA, 25 bp, Homo sapien
caataccggcagattccaaacccaa

SEQ ID NO: 6033900 - DNA, 25 bp, Homo sapien
aatggcgtgaggtagagagaaacca

SEQ ID NO: 6033901 - DNA, 25 bp, Homo sapien
aaccacgttcactcaagatcttcat

SEQ ID NO: 6033902 - DNA, 25 bp, Homo sapien
agtttttccttgatgtcacggacaa

SEQ ID NO: 6033903 - DNA, 25 bp, Homo sapien
aagaagattgagcagcggtttgcat

SEQ ID NO: 6033904 - DNA, 25 bp, Homo sapien
cactttcgtcgtattcttgttttga

SEQ ID NO: 6033905 - DNA, 25 bp, Homo sapien
cgttaccaatagtgatgacttgacc

SEQ ID NO: 6033906 - DNA, 25 bp, Homo sapien
tgatttccttttgcattctttcggc

SEQ ID NO: 6033907 - DNA, 25 bp, Homo sapien
ctggaggagcaatgatcttgacctt

SEQ ID NO: 6033908 - DNA, 25 bp, Homo sapien
attgagcagcggtttgcatttcttg

SEQ ID NO: 6033909 - DNA, 25 bp, Homo sapien
cagtggtggagaaagagtaaccacg

SEQ ID NO: 6033910 - DNA, 25 bp, Homo sapien
acataacgatgttaccgtataattc

SEQ ID NO: 6033911 - DNA, 25 bp, Homo sapien
cgtataattccttacggacatcgac

SEQ ID NO: 6033912 - DNA, 25 bp, Homo sapien
atcaagtagtcagtcaaatctctac

SEQ ID NO: 6033913 - DNA, 25 bp, Homo sapien
agtccaaggcgacgtaacatagttt

SEQ ID NO: 6033914 - DNA, 25 bp, Homo sapien
gcagattccaaacccaaaacagaag

SEQ ID NO: 6033915 - DNA, 25 bp, Homo sapien
aggtagtcaaagaagccaagataga

SEQ ID NO: 6033916 - DNA, 25 bp, Homo sapien
tcatggaagatggagccaaagcggt

SEQ ID NO: 6033917 - DNA, 25 bp, Homo sapien
gttcactcaagatcttcatcaagta

SEQ ID NO: 6033918 - DNA, 25 bp, Homo sapien
gtcaaatctctaccggccaaatcga

SEQ ID NO: 6033919 - DNA, 25 bp, Homo sapien
cgtcgtattcttgttttgagatcca

SEQ ID NO: 6033920 - DNA, 25 bp, Homo sapien
aagcggtgatttccttttgcattct

SEQ ID NO: 6033921 - DNA, 25 bp, Homo sapien
taagtagtttggtcaataccggcag

SEQ ID NO: 6033922 - DNA, 25 bp, Homo sapien
ctctgaatctttcgttaccaatagt

SEQ ID NO: 6033923 - DNA, 25 bp, Homo sapien
caccggacataacgatgttaccgta

SEQ ID NO: 6033924 - DNA, 25 bp, Homo sapien
tctaccggccaaatcgattctcaaa

SEQ ID NO: 6033925 - DNA, 25 bp, Homo sapien
agacggagtactttctttctggagg

SEQ ID NO: 6033926 - DNA, 25 bp, Homo sapien
tttcagcagtggtggagaaagagta

SEQ ID NO: 6033927 - DNA, 25 bp, Homo sapien
ggaacaaagcttctggggctctgaa

SEQ ID NO: 6033928 - DNA, 25 bp, Homo sapien
acatggtggtaccaccggacataac

SEQ ID NO: 6033929 - DNA, 25 bp, Homo sapien
tttgcatttcttgttcgaagtccaa

SEQ ID NO: 6033930 - DNA, 25 bp, Homo sapien
ggccaaatcgattctcaaaatggcg

SEQ ID NO: 6033931 - DNA, 25 bp, Homo sapien
acatttgttggaaggtagtcaaaga

SEQ ID NO: 6033932 - DNA, 25 bp, Homo sapien
ctgggaacatggtggtaccaccgga

SEQ ID NO: 6033933 - DNA, 25 bp, Homo sapien
cgatgttaccgtataattccttacg

SEQ ID NO: 6033934 - DNA, 25 bp, Homo sapien
tgatcttgaccttcatggaagatgg

SEQ ID NO: 6033935 - DNA, 25 bp, Homo sapien
ttctttctggaggagcaatgatctt

SEQ ID NO: 6033936 - DNA, 25 bp, Homo sapien
tagtcagtcaaatctctaccggcca

SEQ ID NO: 6033937 - DNA, 25 bp, Homo sapien
tttctctttcagcagtggtggagaa

SEQ ID NO: 6033938 - DNA, 25 bp, Homo sapien
aagagtaaccacgttcactcaagat

SEQ ID NO: 6033939 - DNA, 25 bp, Homo sapien
aagatggagccaaagcggtgatttc

SEQ ID NO: 6033940 - DNA, 25 bp, Homo sapien
atcgattctcaaaatggcgtgaggt

SEQ ID NO: 6033941 - DNA, 25 bp, Homo sapien
caatacctgggaacatggtggtacc

SEQ ID NO: 6033942 - DNA, 25 bp, Homo sapien
tcaagatcttcatcaagtagtcagt

SEQ ID NO: 6033943 - DNA, 25 bp, Homo sapien
tccttgatgtcacggacaatttctc

SEQ ID NO: 6033944 - DNA, 25 bp, Homo sapien
tttcggcaatacctgggaacatggt

SEQ ID NO: 6033945 - DNA, 25 bp, Homo sapien
gttggaaggtagtcaaagaagccaa

SEQ ID NO: 6033946 - DNA, 25 bp, Homo sapien
aaggtcctctatttgggtgtgtctg

SEQ ID NO: 6033947 - DNA, 25 bp, Homo sapien
ctttttatgaggcaggtggaaattt

SEQ ID NO: 6033948 - DNA, 25 bp, Homo sapien
tttagcatctatcaaggtaaatgga

SEQ ID NO: 6033949 - DNA, 25 bp, Homo sapien
agtgcagcaggcaaggtcctctatt

SEQ ID NO: 6033950 - DNA, 25 bp, Homo sapien
ctttacgttcactggtgggattata

SEQ ID NO: 6033951 - DNA, 25 bp, Homo sapien
tttgggaggaatgtcaattggcgac

SEQ ID NO: 6033952 - DNA, 25 bp, Homo sapien
tcgatgctttttatgaggcaggtgg

SEQ ID NO: 6033953 - DNA, 25 bp, Homo sapien
tggtattagagtttcccctctcatt

SEQ ID NO: 6033954 - DNA, 25 bp, Homo sapien
gacgttggtggtggtaaaagcgcaa

SEQ ID NO: 6033955 - DNA, 25 bp, Homo sapien
tctacagagttaggacgtctcagag

SEQ ID NO: 6033956 - DNA, 25 bp, Homo sapien
ttggcgacgcttggtctgaaatcct

SEQ ID NO: 6033957 - DNA, 25 bp, Homo sapien
gatcggtgaatggatggtttcaaga

SEQ ID NO: 6033958 - DNA, 25 bp, Homo sapien
acgcttggtctgaaatcctaggatc

SEQ ID NO: 6033959 - DNA, 25 bp, Homo sapien
agttctttctaaaagtgctggtatt

SEQ ID NO: 6033960 - DNA, 25 bp, Homo sapien
gaaatttcattgatactgcaaataa

SEQ ID NO: 6033961 - DNA, 25 bp, Homo sapien
tagagtttcccctctcattttggga

SEQ ID NO: 6033962 - DNA, 25 bp, Homo sapien
aggacgtctcagagttctttctaaa

SEQ ID NO: 6033963 - DNA, 25 bp, Homo sapien
tctcagagttctttctaaaagtgct

SEQ ID NO: 6033964 - DNA, 25 bp, Homo sapien
cttggatcggtgaatggatggtttc

SEQ ID NO: 6033965 - DNA, 25 bp, Homo sapien
attatcaaaacgaacagtcagaagc

SEQ ID NO: 6033966 - DNA, 25 bp, Homo sapien
taggatcaatgagcaaggagcgagc

SEQ ID NO: 6033967 - DNA, 25 bp, Homo sapien
gcaggcaaggtcctctatttgggtg

SEQ ID NO: 6033968 - DNA, 25 bp, Homo sapien
gaaaattacgcgaccagattgtaat

SEQ ID NO: 6033969 - DNA, 25 bp, Homo sapien
agttgctcgatgctttttatgaggc

SEQ ID NO: 6033970 - DNA, 25 bp, Homo sapien
caatcacaagcgtagtttgcatgtg

SEQ ID NO: 6033971 - DNA, 25 bp, Homo sapien
gtggtggtaaaagcgcaaactactg

SEQ ID NO: 6033972 - DNA, 25 bp, Homo sapien
ggatggtttcaagaaaattacgcga

SEQ ID NO: 6033973 - DNA, 25 bp, Homo sapien
ctgactataagaaatacgacgttgg

SEQ ID NO: 6033974 - DNA, 25 bp, Homo sapien
aagtgctggtattagagtttcccct

SEQ ID NO: 6033975 - DNA, 25 bp, Homo sapien
tacgcgaccagattgtaatcgccac

SEQ ID NO: 6033976 - DNA, 25 bp, Homo sapien
ttcccctctcattttgggaggaatg

SEQ ID NO: 6033977 - DNA, 25 bp, Homo sapien
ttgtaatcgccaccaagtttaccac

SEQ ID NO: 6033978 - DNA, 25 bp, Homo sapien
caaataattatcaaaacgaacagtc

SEQ ID NO: 6033979 - DNA, 25 bp, Homo sapien
ttgcaaactgattggattgatatac

SEQ ID NO: 6033980 - DNA, 25 bp, Homo sapien
tcattgatactgcaaataattatca

SEQ ID NO: 6033981 - DNA, 25 bp, Homo sapien
atgaggcaggtggaaatttcattga

SEQ ID NO: 6033982 - DNA, 25 bp, Homo sapien
actgtggcaatcacaagcgtagttt

SEQ ID NO: 6033983 - DNA, 25 bp, Homo sapien
ataagaaatacgacgttggtggtgg

SEQ ID NO: 6033984 - DNA, 25 bp, Homo sapien
tgaatggatggtttcaagaaaatta

SEQ ID NO: 6033985 - DNA, 25 bp, Homo sapien
cgcaaattgcaaactgattggattg

SEQ ID NO: 6033986 - DNA, 25 bp, Homo sapien
gtaaaaccccttttagcatctatca

SEQ ID NO: 6033987 - DNA, 25 bp, Homo sapien
agcgagcttttgagttgctcgatgc

SEQ ID NO: 6033988 - DNA, 25 bp, Homo sapien
cttttgagttgctcgatgcttttta

SEQ ID NO: 6033989 - DNA, 25 bp, Homo sapien
tcgccaccaagtttaccactgacta

SEQ ID NO: 6033990 - DNA, 25 bp, Homo sapien
aacagtcagaagcttggatcggtga

SEQ ID NO: 6033991 - DNA, 25 bp, Homo sapien
gagtgtgagggattctctccgcaaa

SEQ ID NO: 6033992 - DNA, 25 bp, Homo sapien
tctcattttgggaggaatgtcaatt

SEQ ID NO: 6033993 - DNA, 25 bp, Homo sapien
atacgcctgcctgggttgtttctgc

SEQ ID NO: 6033994 - DNA, 25 bp, Homo sapien
agagttaggacgtctcagagttctt

SEQ ID NO: 6033995 - DNA, 25 bp, Homo sapien
ggcaaattactacgctaaatctcat

SEQ ID NO: 6033996 - DNA, 25 bp, Homo sapien
ggttgtttctgcggcaaattactac

SEQ ID NO: 6033997 - DNA, 25 bp, Homo sapien
taaaagcgcaaactactgtggcaat

SEQ ID NO: 6033998 - DNA, 25 bp, Homo sapien
ggattatatgagttctatcgaagaa

SEQ ID NO: 6033999 - DNA, 25 bp, Homo sapien
tctctccgcaaattgcaaactgatt

SEQ ID NO: 6034000 - DNA, 25 bp, Homo sapien
ttctatcgaagaagttatggatagt

SEQ ID NO: 6034001 - DNA, 25 bp, Homo sapien
tgtcaattggcgacgcttggtctga

SEQ ID NO: 6034002 - DNA, 25 bp, Homo sapien
ttctaaaagtgctggtattagagtt

SEQ ID NO: 6034003 - DNA, 25 bp, Homo sapien
cgcaaactactgtggcaatcacaag

SEQ ID NO: 6034004 - DNA, 25 bp, Homo sapien
actgattggattgatatactttacg

SEQ ID NO: 6034005 - DNA, 25 bp, Homo sapien
tagtttgcatgtgagtgtgagggat

SEQ ID NO: 6034006 - DNA, 25 bp, Homo sapien
gagggattctctccgcaaattgcaa

SEQ ID NO: 6034007 - DNA, 25 bp, Homo sapien
tttcaagaaaattacgcgaccagat

SEQ ID NO: 6034008 - DNA, 25 bp, Homo sapien
caagcgtagtttgcatgtgagtgtg

SEQ ID NO: 6034009 - DNA, 25 bp, Homo sapien
ccaagtttaccactgactataagaa

SEQ ID NO: 6034010 - DNA, 25 bp, Homo sapien
ggatagtttacacattctagtgcag

SEQ ID NO: 6034011 - DNA, 25 bp, Homo sapien
accccttttagcatctatcaaggta

SEQ ID NO: 6034012 - DNA, 25 bp, Homo sapien
agttatggatagtttacacattcta

SEQ ID NO: 6034013 - DNA, 25 bp, Homo sapien
ttaccactgactataagaaatacga

SEQ ID NO: 6034014 - DNA, 25 bp, Homo sapien
atactgcaaataattatcaaaacga

SEQ ID NO: 6034015 - DNA, 25 bp, Homo sapien
gcaaggagcgagcttttgagttgct

SEQ ID NO: 6034016 - DNA, 25 bp, Homo sapien
ctcatggtaaaaccccttttagcat

SEQ ID NO: 6034017 - DNA, 25 bp, Homo sapien
cgaagaagttatggatagtttacac

SEQ ID NO: 6034018 - DNA, 25 bp, Homo sapien
cattctagtgcagcaggcaaggtcc

SEQ ID NO: 6034019 - DNA, 25 bp, Homo sapien
tggattgatatactttacgttcact

SEQ ID NO: 6034020 - DNA, 25 bp, Homo sapien
gttcactggtgggattatatgagtt

SEQ ID NO: 6034021 - DNA, 25 bp, Homo sapien
tgtctgatacgcctgcctgggttgt

SEQ ID NO: 6034022 - DNA, 25 bp, Homo sapien
aaaacgaacagtcagaagcttggat

SEQ ID NO: 6034023 - DNA, 25 bp, Homo sapien
gcatgtgagtgtgagggattctctc

SEQ ID NO: 6034024 - DNA, 25 bp, Homo sapien
caggtggaaatttcattgatactgc

SEQ ID NO: 6034025 - DNA, 25 bp, Homo sapien
gaggaatgtcaattggcgacgcttg

SEQ ID NO: 6034026 - DNA, 25 bp, Homo sapien
aaatcctaggatcaatgagcaagga

SEQ ID NO: 6034027 - DNA, 25 bp, Homo sapien
caatgagcaaggagcgagcttttga

SEQ ID NO: 6034028 - DNA, 25 bp, Homo sapien
tgcctgggttgtttctgcggcaaat

SEQ ID NO: 6034029 - DNA, 25 bp, Homo sapien
ctggtgggattatatgagttctatc

SEQ ID NO: 6034030 - DNA, 25 bp, Homo sapien
ggtctgaaatcctaggatcaatgag

SEQ ID NO: 6034031 - DNA, 25 bp, Homo sapien
gatatactttacgttcactggtggg

SEQ ID NO: 6034032 - DNA, 25 bp, Homo sapien
tatgagttctatcgaagaagttatg

SEQ ID NO: 6034033 - DNA, 25 bp, Homo sapien
ttgggtgtgtctgatacgcctgcct

SEQ ID NO: 6034034 - DNA, 25 bp, Homo sapien
ttactacgctaaatctcatggtaaa

SEQ ID NO: 6034035 - DNA, 25 bp, Homo sapien
accagattgtaatcgccaccaagtt

SEQ ID NO: 6034036 - DNA, 25 bp, Homo sapien
cgctaaatctcatggtaaaacccct

SEQ ID NO: 6034037 - DNA, 25 bp, Homo sapien
ttctgcggcaaattactacgctaaa

SEQ ID NO: 6034038 - DNA, 25 bp, Homo sapien
ctctatttgggtgtgtctgatacgc

SEQ ID NO: 6034039 - DNA, 25 bp, Homo sapien
cagaagcttggatcggtgaatggat

SEQ ID NO: 6034040 - DNA, 25 bp, Homo sapien
tttacacattctagtgcagcaggca

SEQ ID NO: 6034041 - DNA, 25 bp, Homo sapien
ctaataccagcacttttagaaagaa

SEQ ID NO: 6034042 - DNA, 25 bp, Homo sapien
ggcaggcgtatcagacacacccaaa

SEQ ID NO: 6034043 - DNA, 25 bp, Homo sapien
tggtcgcgtaattttcttgaaacca

SEQ ID NO: 6034044 - DNA, 25 bp, Homo sapien
aaatttccacctgcctcataaaaag

SEQ ID NO: 6034045 - DNA, 25 bp, Homo sapien
tttgccgcagaaacaacccaggcag

SEQ ID NO: 6034046 - DNA, 25 bp, Homo sapien
cttttagaaagaactctgagacgtc

SEQ ID NO: 6034047 - DNA, 25 bp, Homo sapien
agaactcatataatcccaccagtga

SEQ ID NO: 6034048 - DNA, 25 bp, Homo sapien
cgattacaatctggtcgcgtaattt

SEQ ID NO: 6034049 - DNA, 25 bp, Homo sapien
gggttttaccatgagatttagcgta

SEQ ID NO: 6034050 - DNA, 25 bp, Homo sapien
gcaatttgcggagagaatccctcac

SEQ ID NO: 6034051 - DNA, 25 bp, Homo sapien
gcaactcaaaagctcgctccttgct

SEQ ID NO: 6034052 - DNA, 25 bp, Homo sapien
tcattgatcctaggatttcagacca

SEQ ID NO: 6034053 - DNA, 25 bp, Homo sapien
cacctgcctcataaaaagcatcgag

SEQ ID NO: 6034054 - DNA, 25 bp, Homo sapien
aacgtaaagtatatcaatccaatca

SEQ ID NO: 6034055 - DNA, 25 bp, Homo sapien
aatgagaggggaaactctaatacca

SEQ ID NO: 6034056 - DNA, 25 bp, Homo sapien
ttaccatgagatttagcgtagtaat

SEQ ID NO: 6034057 - DNA, 25 bp, Homo sapien
aatgtgtaaactatccataacttct

SEQ ID NO: 6034058 - DNA, 25 bp, Homo sapien
ccagtgaacgtaaagtatatcaatc

SEQ ID NO: 6034059 - DNA, 25 bp, Homo sapien
gtaattttcttgaaaccatccattc

SEQ ID NO: 6034060 - DNA, 25 bp, Homo sapien
taaactatccataacttcttcgata

SEQ ID NO: 6034061 - DNA, 25 bp, Homo sapien
tcaatgaaatttccacctgcctcat

SEQ ID NO: 6034062 - DNA, 25 bp, Homo sapien
ccaccaccaacgtcgtatttcttat

SEQ ID NO: 6034063 - DNA, 25 bp, Homo sapien
ttcgatagaactcatataatcccac

SEQ ID NO: 6034064 - DNA, 25 bp, Homo sapien
agtggtaaacttggtggcgattaca

SEQ ID NO: 6034065 - DNA, 25 bp, Homo sapien
gcctgctgcactagaatgtgtaaac

SEQ ID NO: 6034066 - DNA, 25 bp, Homo sapien
atagaggaccttgcctgctgcacta

SEQ ID NO: 6034067 - DNA, 25 bp, Homo sapien
gccaattgacattcctcccaaaatg

SEQ ID NO: 6034068 - DNA, 25 bp, Homo sapien
caaaagctcgctccttgctcattga

SEQ ID NO: 6034069 - DNA, 25 bp, Homo sapien
ggatttcagaccaagcgtcgccaat

SEQ ID NO: 6034070 - DNA, 25 bp, Homo sapien
aacttcttcgatagaactcatataa

SEQ ID NO: 6034071 - DNA, 25 bp, Homo sapien
catcgagcaactcaaaagctcgctc

SEQ ID NO: 6034072 - DNA, 25 bp, Homo sapien
gccacagtagtttgcgcttttacca

SEQ ID NO: 6034073 - DNA, 25 bp, Homo sapien
ggtggcgattacaatctggtcgcgt

SEQ ID NO: 6034074 - DNA, 25 bp, Homo sapien
ttagcgtagtaatttgccgcagaaa

SEQ ID NO: 6034075 - DNA, 25 bp, Homo sapien
aagtatatcaatccaatcagtttgc

SEQ ID NO: 6034076 - DNA, 25 bp, Homo sapien
gagacgtcctaactctgtagatggt

SEQ ID NO: 6034077 - DNA, 25 bp, Homo sapien
ccaacgtcgtatttcttatagtcag

SEQ ID NO: 6034078 - DNA, 25 bp, Homo sapien
tagtttgcgcttttaccaccaccaa

SEQ ID NO: 6034079 - DNA, 25 bp, Homo sapien
atccaagcttctgactgttcgtttt

SEQ ID NO: 6034080 - DNA, 25 bp, Homo sapien
gaaaccatccattcaccgatccaag

SEQ ID NO: 6034081 - DNA, 25 bp, Homo sapien
ccctcacactcacatgcaaactacg

SEQ ID NO: 6034082 - DNA, 25 bp, Homo sapien
ccaatcagtttgcaatttgcggaga

SEQ ID NO: 6034083 - DNA, 25 bp, Homo sapien
tgagatttagcgtagtaatttgccg

SEQ ID NO: 6034084 - DNA, 25 bp, Homo sapien
cacatgcaaactacgcttgtgattg

SEQ ID NO: 6034085 - DNA, 25 bp, Homo sapien
acgcttgtgattgccacagtagttt

SEQ ID NO: 6034086 - DNA, 25 bp, Homo sapien
acccaggcaggcgtatcagacacac

SEQ ID NO: 6034087 - DNA, 25 bp, Homo sapien
gtgattgccacagtagtttgcgctt

SEQ ID NO: 6034088 - DNA, 25 bp, Homo sapien
agaggggaaactctaataccagcac

SEQ ID NO: 6034089 - DNA, 25 bp, Homo sapien
gataattatttgcagtatcaatgaa

SEQ ID NO: 6034090 - DNA, 25 bp, Homo sapien
aacaacccaggcaggcgtatcagac

SEQ ID NO: 6034091 - DNA, 25 bp, Homo sapien
actgttcgttttgataattatttgc

SEQ ID NO: 6034092 - DNA, 25 bp, Homo sapien
agtaatttgccgcagaaacaaccca

SEQ ID NO: 6034093 - DNA, 25 bp, Homo sapien
gaaactctaataccagcacttttag

SEQ ID NO: 6034094 - DNA, 25 bp, Homo sapien
aagcgtcgccaattgacattcctcc

SEQ ID NO: 6034095 - DNA, 25 bp, Homo sapien
tcctaactctgtagatggttcagga

SEQ ID NO: 6034096 - DNA, 25 bp, Homo sapien
gcagaaacaacccaggcaggcgtat

SEQ ID NO: 6034097 - DNA, 25 bp, Homo sapien
cgttttgataattatttgcagtatc

SEQ ID NO: 6034098 - DNA, 25 bp, Homo sapien
atccattcaccgatccaagcttctg

SEQ ID NO: 6034099 - DNA, 25 bp, Homo sapien
cctcataaaaagcatcgagcaactc

SEQ ID NO: 6034100 - DNA, 25 bp, Homo sapien
aactctgagacgtcctaactctgta

SEQ ID NO: 6034101 - DNA, 25 bp, Homo sapien
gatggttcaggagcaggagcaaata

SEQ ID NO: 6034102 - DNA, 25 bp, Homo sapien
atcctaggatttcagaccaagcgtc

SEQ ID NO: 6034103 - DNA, 25 bp, Homo sapien
caatctggtcgcgtaattttcttga

SEQ ID NO: 6034104 - DNA, 25 bp, Homo sapien
gaaagaactctgagacgtcctaact

SEQ ID NO: 6034105 - DNA, 25 bp, Homo sapien
ctcgctccttgctcattgatcctag

SEQ ID NO: 6034106 - DNA, 25 bp, Homo sapien
aaactacgcttgtgattgccacagt

SEQ ID NO: 6034107 - DNA, 25 bp, Homo sapien
gcttctgactgttcgttttgataat

SEQ ID NO: 6034108 - DNA, 25 bp, Homo sapien
tgacattcctcccaaaatgagaggg

SEQ ID NO: 6034109 - DNA, 25 bp, Homo sapien
aaacttggtggcgattacaatctgg

SEQ ID NO: 6034110 - DNA, 25 bp, Homo sapien
atccataacttcttcgatagaactc

SEQ ID NO: 6034111 - DNA, 25 bp, Homo sapien
atagtcagtggtaaacttggtggcg

SEQ ID NO: 6034112 - DNA, 25 bp, Homo sapien
gagaatccctcacactcacatgcaa

SEQ ID NO: 6034113 - DNA, 25 bp, Homo sapien
ctctgtagatggttcaggagcagga

SEQ ID NO: 6034114 - DNA, 25 bp, Homo sapien
gaccttgcctgctgcactagaatgt

SEQ ID NO: 6034115 - DNA, 25 bp, Homo sapien
catataatcccaccagtgaacgtaa

SEQ ID NO: 6034116 - DNA, 25 bp, Homo sapien
atcccaccagtgaacgtaaagtata

SEQ ID NO: 6034117 - DNA, 25 bp, Homo sapien
acccaaatagaggaccttgcctgct

SEQ ID NO: 6034118 - DNA, 25 bp, Homo sapien
ccttgctcattgatcctaggatttc

SEQ ID NO: 6034119 - DNA, 25 bp, Homo sapien
tcaccgatccaagcttctgactgtt

SEQ ID NO: 6034120 - DNA, 25 bp, Homo sapien
ccagcacttttagaaagaactctga

SEQ ID NO: 6034121 - DNA, 25 bp, Homo sapien
tttcttatagtcagtggtaaacttg

SEQ ID NO: 6034122 - DNA, 25 bp, Homo sapien
ttcttgaaaccatccattcaccgat

SEQ ID NO: 6034123 - DNA, 25 bp, Homo sapien
cacactcacatgcaaactacgcttg

SEQ ID NO: 6034124 - DNA, 25 bp, Homo sapien
atcaatccaatcagtttgcaatttg

SEQ ID NO: 6034125 - DNA, 25 bp, Homo sapien
aaaaagcatcgagcaactcaaaagc

SEQ ID NO: 6034126 - DNA, 25 bp, Homo sapien
cagtttgcaatttgcggagagaatc

SEQ ID NO: 6034127 - DNA, 25 bp, Homo sapien
cgtatcagacacacccaaatagagg

SEQ ID NO: 6034128 - DNA, 25 bp, Homo sapien
cactagaatgtgtaaactatccata

SEQ ID NO: 6034129 - DNA, 25 bp, Homo sapien
cagaccaagcgtcgccaattgacat

SEQ ID NO: 6034130 - DNA, 25 bp, Homo sapien
gcagtatcaatgaaatttccacctg

SEQ ID NO: 6034131 - DNA, 25 bp, Homo sapien
tatttgcagtatcaatgaaatttcc

SEQ ID NO: 6034132 - DNA, 25 bp, Homo sapien
agacacacccaaatagaggaccttg

SEQ ID NO: 6034133 - DNA, 25 bp, Homo sapien
tgcggagagaatccctcacactcac

SEQ ID NO: 6034134 - DNA, 25 bp, Homo sapien
gtcgtatttcttatagtcagtggta

SEQ ID NO: 6034135 - DNA, 25 bp, Homo sapien
tatttttgcccaatgacatgctagt

SEQ ID NO: 6034136 - DNA, 25 bp, Homo sapien
cgaaagttgtgacatggctcatatc

SEQ ID NO: 6034137 - DNA, 25 bp, Homo sapien
tacgaaatgctgatcaatattaaac

SEQ ID NO: 6034138 - DNA, 25 bp, Homo sapien
catggctcatatcgaatatgcaaag

SEQ ID NO: 6034139 - DNA, 25 bp, Homo sapien
cacgtactgtttgacagagcacata

SEQ ID NO: 6034140 - DNA, 25 bp, Homo sapien
caacaacaatggtacaattcattgc

SEQ ID NO: 6034141 - DNA, 25 bp, Homo sapien
cattccttcaatgataatttgaaac

SEQ ID NO: 6034142 - DNA, 25 bp, Homo sapien
cagtcattgggcaagaatcctgagg

SEQ ID NO: 6034143 - DNA, 25 bp, Homo sapien
cgatgtgcggactaaattcattata

SEQ ID NO: 6034144 - DNA, 25 bp, Homo sapien
ggagaataatgatattttgaagttt

SEQ ID NO: 6034145 - DNA, 25 bp, Homo sapien
ggttcggtccatcacgtcaacggga

SEQ ID NO: 6034146 - DNA, 25 bp, Homo sapien
atgctgatcaatattaaaccgttgg

SEQ ID NO: 6034147 - DNA, 25 bp, Homo sapien
gaccctttggattccgtggtcgatc

SEQ ID NO: 6034148 - DNA, 25 bp, Homo sapien
tcattgcattccttcaatgataatt

SEQ ID NO: 6034149 - DNA, 25 bp, Homo sapien
taaaccagaaatcgggcaactgcaa

SEQ ID NO: 6034150 - DNA, 25 bp, Homo sapien
ataaccaagctagaaacatcgttca

SEQ ID NO: 6034151 - DNA, 25 bp, Homo sapien
tcgttcaagaatttcatgagtcatg

SEQ ID NO: 6034152 - DNA, 25 bp, Homo sapien
caacgggatccctattgatttcgac

SEQ ID NO: 6034153 - DNA, 25 bp, Homo sapien
tcttacttccaatcacagtacgaaa

SEQ ID NO: 6034154 - DNA, 25 bp, Homo sapien
tttatataccccgaagagcagtcat

SEQ ID NO: 6034155 - DNA, 25 bp, Homo sapien
cgttggtcgtgggtcacttcgacct

SEQ ID NO: 6034156 - DNA, 25 bp, Homo sapien
attgaggccaagtttatataccccg

SEQ ID NO: 6034157 - DNA, 25 bp, Homo sapien
ggtccatcacgtcaacgggatccct

SEQ ID NO: 6034158 - DNA, 25 bp, Homo sapien
atccctattgatttcgaccaacaac

SEQ ID NO: 6034159 - DNA, 25 bp, Homo sapien
catgaaggagaataatgatattttg

SEQ ID NO: 6034160 - DNA, 25 bp, Homo sapien
ttgtgacatggctcatatcgaatat

SEQ ID NO: 6034161 - DNA, 25 bp, Homo sapien
accaagaattgaggccaagtttata

SEQ ID NO: 6034162 - DNA, 25 bp, Homo sapien
gggcaactgcaacgaagaaaccgga

SEQ ID NO: 6034163 - DNA, 25 bp, Homo sapien
tttggattccgtggtcgatcaagtg

SEQ ID NO: 6034164 - DNA, 25 bp, Homo sapien
cattttctcctgtcttacttccaat

SEQ ID NO: 6034165 - DNA, 25 bp, Homo sapien
cgaatatgcaaagcgactcatgaag

SEQ ID NO: 6034166 - DNA, 25 bp, Homo sapien
ctttcacacgtactgtttgacagag

SEQ ID NO: 6034167 - DNA, 25 bp, Homo sapien
attgatttcgaccaacaacaatggt

SEQ ID NO: 6034168 - DNA, 25 bp, Homo sapien
atgacatgctagtaaaccagaaatc

SEQ ID NO: 6034169 - DNA, 25 bp, Homo sapien
ctgtttgacagagcacataccaaga

SEQ ID NO: 6034170 - DNA, 25 bp, Homo sapien
gcggactaaattcattataggaatg

SEQ ID NO: 6034171 - DNA, 25 bp, Homo sapien
ttccgtggtcgatcaagtggtcaac

SEQ ID NO: 6034172 - DNA, 25 bp, Homo sapien
aagaatcctgaggaagtcataacca

SEQ ID NO: 6034173 - DNA, 25 bp, Homo sapien
tacaattcattgcattccttcaatg

SEQ ID NO: 6034174 - DNA, 25 bp, Homo sapien
gctgatagacccgatgtgcggacta

SEQ ID NO: 6034175 - DNA, 25 bp, Homo sapien
tcacgtcaacgggatccctattgat

SEQ ID NO: 6034176 - DNA, 25 bp, Homo sapien
tcgtgggtcacttcgacctttacaa

SEQ ID NO: 6034177 - DNA, 25 bp, Homo sapien
ctgcaacgaagaaaccggagttcct

SEQ ID NO: 6034178 - DNA, 25 bp, Homo sapien
ttgaaacattttctcctgtcttact

SEQ ID NO: 6034179 - DNA, 25 bp, Homo sapien
gccaagtttatataccccgaagagc

SEQ ID NO: 6034180 - DNA, 25 bp, Homo sapien
taccccgaagagcagtcattgggca

SEQ ID NO: 6034181 - DNA, 25 bp, Homo sapien
gaagagcagtcattgggcaagaatc

SEQ ID NO: 6034182 - DNA, 25 bp, Homo sapien
gaagtcataaccaagctagaaacat

SEQ ID NO: 6034183 - DNA, 25 bp, Homo sapien
aagactcgttatgctgatagacccg

SEQ ID NO: 6034184 - DNA, 25 bp, Homo sapien
gaaacatcgttcaagaatttcatga

SEQ ID NO: 6034185 - DNA, 25 bp, Homo sapien
aagctagaaacatcgttcaagaatt

SEQ ID NO: 6034186 - DNA, 25 bp, Homo sapien
ttcaatgataatttgaaacattttc

SEQ ID NO: 6034187 - DNA, 25 bp, Homo sapien
gcgactcatgaaggagaataatgat

SEQ ID NO: 6034188 - DNA, 25 bp, Homo sapien
tgtgtgggttcggtccatcacgtca

SEQ ID NO: 6034189 - DNA, 25 bp, Homo sapien
cgttatgctgatagacccgatgtgc

SEQ ID NO: 6034190 - DNA, 25 bp, Homo sapien
gataatttgaaacattttctcctgt

SEQ ID NO: 6034191 - DNA, 25 bp, Homo sapien
aggaatggagatcgaaagttgtgac

SEQ ID NO: 6034192 - DNA, 25 bp, Homo sapien
gaaatcgggcaactgcaacgaagaa

SEQ ID NO: 6034193 - DNA, 25 bp, Homo sapien
tgatattttgaagttttgtgtgggt

SEQ ID NO: 6034194 - DNA, 25 bp, Homo sapien
tcatatcgaatatgcaaagcgactc

SEQ ID NO: 6034195 - DNA, 25 bp, Homo sapien
aagaatttcatgagtcatgcgcaag

SEQ ID NO: 6034196 - DNA, 25 bp, Homo sapien
cctcaactttcacacgtactgtttg

SEQ ID NO: 6034197 - DNA, 25 bp, Homo sapien
tgcaaagcgactcatgaaggagaat

SEQ ID NO: 6034198 - DNA, 25 bp, Homo sapien
gaaatcaagactcgttatgctgata

SEQ ID NO: 6034199 - DNA, 25 bp, Homo sapien
gacagagcacataccaagaattgag

SEQ ID NO: 6034200 - DNA, 25 bp, Homo sapien
tagacccgatgtgcggactaaattc

SEQ ID NO: 6034201 - DNA, 25 bp, Homo sapien
agtcatgcgcaagaaatcaagactc

SEQ ID NO: 6034202 - DNA, 25 bp, Homo sapien
ggtcaacctcaactttcacacgtac

SEQ ID NO: 6034203 - DNA, 25 bp, Homo sapien
caatggtacaattcattgcattcct

SEQ ID NO: 6034204 - DNA, 25 bp, Homo sapien
tcacagtacgaaatgctgatcaata

SEQ ID NO: 6034205 - DNA, 25 bp, Homo sapien
agttttgtgtgggttcggtccatca

SEQ ID NO: 6034206 - DNA, 25 bp, Homo sapien
ttcgaccaacaacaatggtacaatt

SEQ ID NO: 6034207 - DNA, 25 bp, Homo sapien
ggagatcgaaagttgtgacatggct

SEQ ID NO: 6034208 - DNA, 25 bp, Homo sapien
cgaagaaaccggagttcctgtagct

SEQ ID NO: 6034209 - DNA, 25 bp, Homo sapien
taaattcattataggaatggagatc

SEQ ID NO: 6034210 - DNA, 25 bp, Homo sapien
tgcccaatgacatgctagtaaacca

SEQ ID NO: 6034211 - DNA, 25 bp, Homo sapien
gcacataccaagaattgaggccaag

SEQ ID NO: 6034212 - DNA, 25 bp, Homo sapien
ttccaatcacagtacgaaatgctga

SEQ ID NO: 6034213 - DNA, 25 bp, Homo sapien
tcaagtggtcaacctcaactttcac

SEQ ID NO: 6034214 - DNA, 25 bp, Homo sapien
ctcctgtcttacttccaatcacagt

SEQ ID NO: 6034215 - DNA, 25 bp, Homo sapien
cattataggaatggagatcgaaagt

SEQ ID NO: 6034216 - DNA, 25 bp, Homo sapien
gcgcaagaaatcaagactcgttatg

SEQ ID NO: 6034217 - DNA, 25 bp, Homo sapien
ttcatgagtcatgcgcaagaaatca

SEQ ID NO: 6034218 - DNA, 25 bp, Homo sapien
atcaatattaaaccgttggtcgtgg

SEQ ID NO: 6034219 - DNA, 25 bp, Homo sapien
ttgggcaagaatcctgaggaagtca

SEQ ID NO: 6034220 - DNA, 25 bp, Homo sapien
tacaaattatttttgcccaatgaca

SEQ ID NO: 6034221 - DNA, 25 bp, Homo sapien
cctgaggaagtcataaccaagctag

SEQ ID NO: 6034222 - DNA, 25 bp, Homo sapien
tgctagtaaaccagaaatcgggcaa

SEQ ID NO: 6034223 - DNA, 25 bp, Homo sapien
ggtcgatcaagtggtcaacctcaac

SEQ ID NO: 6034224 - DNA, 25 bp, Homo sapien
ttgcagttgcccgatttctggttta

SEQ ID NO: 6034225 - DNA, 25 bp, Homo sapien
tttaccttgtcatagcacacaccca

SEQ ID NO: 6034226 - DNA, 25 bp, Homo sapien
ttgttgttggtcgaaatcaataggg

SEQ ID NO: 6034227 - DNA, 25 bp, Homo sapien
caattgcgccgccataggagtctat

SEQ ID NO: 6034228 - DNA, 25 bp, Homo sapien
gattggctttcctcaaggtagcaaa

SEQ ID NO: 6034229 - DNA, 25 bp, Homo sapien
acaactgcatcgtatatttctggcc

SEQ ID NO: 6034230 - DNA, 25 bp, Homo sapien
catttcgtactgtgattggaagtaa

SEQ ID NO: 6034231 - DNA, 25 bp, Homo sapien
tcacttagaacaaatctggatccac

SEQ ID NO: 6034232 - DNA, 25 bp, Homo sapien
agattctctggtgattggctttcct

SEQ ID NO: 6034233 - DNA, 25 bp, Homo sapien
cgatttctggtttactagcatgtca

SEQ ID NO: 6034234 - DNA, 25 bp, Homo sapien
tatatttctggccattcactgatga

SEQ ID NO: 6034235 - DNA, 25 bp, Homo sapien
ccgtgtgcgtcatcacttagaacaa

SEQ ID NO: 6034236 - DNA, 25 bp, Homo sapien
atgtttcaaattatcattgaaggaa

SEQ ID NO: 6034237 - DNA, 25 bp, Homo sapien
tcctcgaggcgctttcttaatgcgg

SEQ ID NO: 6034238 - DNA, 25 bp, Homo sapien
tactagcatgtcattgggcaaaaat

SEQ ID NO: 6034239 - DNA, 25 bp, Homo sapien
aatgcggacgtattgatttcaattg

SEQ ID NO: 6034240 - DNA, 25 bp, Homo sapien
acccacttgcgccacgccgtgtgcg

SEQ ID NO: 6034241 - DNA, 25 bp, Homo sapien
tgtaaatttcttacaactgcatcgt

SEQ ID NO: 6034242 - DNA, 25 bp, Homo sapien
ccagattacataaggttttgctggg

SEQ ID NO: 6034243 - DNA, 25 bp, Homo sapien
gatcagcatttcgtactgtgattgg

SEQ ID NO: 6034244 - DNA, 25 bp, Homo sapien
aggcgctttcttaatgcggacgtat

SEQ ID NO: 6034245 - DNA, 25 bp, Homo sapien
actgatgacgtccagtgaagctaca

SEQ ID NO: 6034246 - DNA, 25 bp, Homo sapien
tgtagcacgtctactatgtatttct

SEQ ID NO: 6034247 - DNA, 25 bp, Homo sapien
cggtttaatattgatcagcatttcg

SEQ ID NO: 6034248 - DNA, 25 bp, Homo sapien
caaattatcattgaaggaatgcaat

SEQ ID NO: 6034249 - DNA, 25 bp, Homo sapien
gacgtccagtgaagctacaggaact

SEQ ID NO: 6034250 - DNA, 25 bp, Homo sapien
ttgatttcaattgcgccgccatagg

SEQ ID NO: 6034251 - DNA, 25 bp, Homo sapien
atatactctaattgtagcacgtcta

SEQ ID NO: 6034252 - DNA, 25 bp, Homo sapien
atcattgaaggaatgcaatgaattg

SEQ ID NO: 6034253 - DNA, 25 bp, Homo sapien
gcgccgccataggagtctataaatt

SEQ ID NO: 6034254 - DNA, 25 bp, Homo sapien
ccattcactgatgacgtccagtgaa

SEQ ID NO: 6034255 - DNA, 25 bp, Homo sapien
gttttgctggggtacggctcctcga

SEQ ID NO: 6034256 - DNA, 25 bp, Homo sapien
aatattgatcagcatttcgtactgt

SEQ ID NO: 6034257 - DNA, 25 bp, Homo sapien
ccacgaccaacggtttaatattgat

SEQ ID NO: 6034258 - DNA, 25 bp, Homo sapien
gagtctataaattgtaaatttctta

SEQ ID NO: 6034259 - DNA, 25 bp, Homo sapien
gaaggaatgcaatgaattgtaccat

SEQ ID NO: 6034260 - DNA, 25 bp, Homo sapien
gaattgcgaaatgggtaatctcttt

SEQ ID NO: 6034261 - DNA, 25 bp, Homo sapien
tcttgaccagattacataaggtttt

SEQ ID NO: 6034262 - DNA, 25 bp, Homo sapien
ttgtaaaggtcgaagtgacccacga

SEQ ID NO: 6034263 - DNA, 25 bp, Homo sapien
aatctggatccacagtgcttcttga

SEQ ID NO: 6034264 - DNA, 25 bp, Homo sapien
catgtcattgggcaaaaataatttg

SEQ ID NO: 6034265 - DNA, 25 bp, Homo sapien
tctggtgattggctttcctcaaggt

SEQ ID NO: 6034266 - DNA, 25 bp, Homo sapien
atgggtaatctctttacagttaaca

SEQ ID NO: 6034267 - DNA, 25 bp, Homo sapien
tgaattgtaccattgttgttggtcg

SEQ ID NO: 6034268 - DNA, 25 bp, Homo sapien
ctttcctcaaggtagcaaatatact

SEQ ID NO: 6034269 - DNA, 25 bp, Homo sapien
gaaatcaatagggatcccgttgacg

SEQ ID NO: 6034270 - DNA, 25 bp, Homo sapien
agctacaggaactccggtttcttcg

SEQ ID NO: 6034271 - DNA, 25 bp, Homo sapien
tctaattgtagcacgtctactatgt

SEQ ID NO: 6034272 - DNA, 25 bp, Homo sapien
tacggctcctcgaggcgctttctta

SEQ ID NO: 6034273 - DNA, 25 bp, Homo sapien
tttcttacaactgcatcgtatattt

SEQ ID NO: 6034274 - DNA, 25 bp, Homo sapien
gaagtaagacaggagaaaatgtttc

SEQ ID NO: 6034275 - DNA, 25 bp, Homo sapien
tgcgaaatgggtaatctctttacag

SEQ ID NO: 6034276 - DNA, 25 bp, Homo sapien
ccataggagtctataaattgtaaat

SEQ ID NO: 6034277 - DNA, 25 bp, Homo sapien
gagaaaatgtttcaaattatcattg

SEQ ID NO: 6034278 - DNA, 25 bp, Homo sapien
tcaaggtagcaaatatactctaatt

SEQ ID NO: 6034279 - DNA, 25 bp, Homo sapien
gtaccattgttgttggtcgaaatca

SEQ ID NO: 6034280 - DNA, 25 bp, Homo sapien
actatgtatttctttaccttgtcat

SEQ ID NO: 6034281 - DNA, 25 bp, Homo sapien
gttgcccgatttctggtttactagc

SEQ ID NO: 6034282 - DNA, 25 bp, Homo sapien
gcatcgtatatttctggccattcac

SEQ ID NO: 6034283 - DNA, 25 bp, Homo sapien
tttacagttaacagattctctggtg

SEQ ID NO: 6034284 - DNA, 25 bp, Homo sapien
ttggtcgaaatcaatagggatcccg

SEQ ID NO: 6034285 - DNA, 25 bp, Homo sapien
tcttcgttgcagttgcccgatttct

SEQ ID NO: 6034286 - DNA, 25 bp, Homo sapien
gatcccgttgacgtgatggaccgaa

SEQ ID NO: 6034287 - DNA, 25 bp, Homo sapien
gtactgtgattggaagtaagacagg

SEQ ID NO: 6034288 - DNA, 25 bp, Homo sapien
tatttctttaccttgtcatagcaca

SEQ ID NO: 6034289 - DNA, 25 bp, Homo sapien
ctggggtacggctcctcgaggcgct

SEQ ID NO: 6034290 - DNA, 25 bp, Homo sapien
agtgcttcttgaccagattacataa

SEQ ID NO: 6034291 - DNA, 25 bp, Homo sapien
taaattgtaaatttcttacaactgc

SEQ ID NO: 6034292 - DNA, 25 bp, Homo sapien
gccacgccgtgtgcgtcatcactta

SEQ ID NO: 6034293 - DNA, 25 bp, Homo sapien
ttgtcatagcacacacccacttgcg

SEQ ID NO: 6034294 - DNA, 25 bp, Homo sapien
aggtcgaagtgacccacgaccaacg

SEQ ID NO: 6034295 - DNA, 25 bp, Homo sapien
gacgtattgatttcaattgcgccgc

SEQ ID NO: 6034296 - DNA, 25 bp, Homo sapien
cattgggcaaaaataatttgtaaag

SEQ ID NO: 6034297 - DNA, 25 bp, Homo sapien
agacaggagaaaatgtttcaaatta

SEQ ID NO: 6034298 - DNA, 25 bp, Homo sapien
aatctctttacagttaacagattct

SEQ ID NO: 6034299 - DNA, 25 bp, Homo sapien
tgattggaagtaagacaggagaaaa

SEQ ID NO: 6034300 - DNA, 25 bp, Homo sapien
aatagggatcccgttgacgtgatgg

SEQ ID NO: 6034301 - DNA, 25 bp, Homo sapien
acttgcgccacgccgtgtgcgtcat

SEQ ID NO: 6034302 - DNA, 25 bp, Homo sapien
agaacaaatctggatccacagtgct

SEQ ID NO: 6034303 - DNA, 25 bp, Homo sapien
gcgtcatcacttagaacaaatctgg

SEQ ID NO: 6034304 - DNA, 25 bp, Homo sapien
gttaacagattctctggtgattggc

SEQ ID NO: 6034305 - DNA, 25 bp, Homo sapien
ctggtttactagcatgtcattgggc

SEQ ID NO: 6034306 - DNA, 25 bp, Homo sapien
cataaggttttgctggggtacggct

SEQ ID NO: 6034307 - DNA, 25 bp, Homo sapien
aggaactccggtttcttcgttgcag

SEQ ID NO: 6034308 - DNA, 25 bp, Homo sapien
atgcaatgaattgtaccattgttgt

SEQ ID NO: 6034309 - DNA, 25 bp, Homo sapien
gaccaacggtttaatattgatcagc

SEQ ID NO: 6034310 - DNA, 25 bp, Homo sapien
tagcaaatatactctaattgtagca

SEQ ID NO: 6034311 - DNA, 25 bp, Homo sapien
gatccacagtgcttcttgaccagat

SEQ ID NO: 6034312 - DNA, 25 bp, Homo sapien
ccggtttcttcgttgcagttgcccg

SEQ ID NO: 6034313 - DNA, 25 bp, Homo sapien
acgtctactatgtatttctttacct

SEQ ID NO: 6034314 - DNA, 25 bp, Homo sapien
ttctggccattcactgatgacgtcc

SEQ ID NO: 6034315 - DNA, 25 bp, Homo sapien
cagtgaagctacaggaactccggtt

SEQ ID NO: 6034316 - DNA, 25 bp, Homo sapien
tttcttaatgcggacgtattgattt

SEQ ID NO: 6034317 - DNA, 25 bp, Homo sapien
tggtaactatttggccattgatttg

SEQ ID NO: 6034318 - DNA, 25 bp, Homo sapien
gagtcgtgttggtcaagttgagcgg

SEQ ID NO: 6034319 - DNA, 25 bp, Homo sapien
ccacatgacatgagaaccactaagc

SEQ ID NO: 6034320 - DNA, 25 bp, Homo sapien
gagttgcctattgaaattgtagcat

SEQ ID NO: 6034321 - DNA, 25 bp, Homo sapien
gcccaaggaattgatggatgaaatt

SEQ ID NO: 6034322 - DNA, 25 bp, Homo sapien
taccattaggtttcaccttctcgta

SEQ ID NO: 6034323 - DNA, 25 bp, Homo sapien
ctttatcgacgaattgaataaaggt

SEQ ID NO: 6034324 - DNA, 25 bp, Homo sapien
gtcgtcccattgctacaaaacgaaa

SEQ ID NO: 6034325 - DNA, 25 bp, Homo sapien
tcatcagttggaagatatgtttaca

SEQ ID NO: 6034326 - DNA, 25 bp, Homo sapien
cgactctttgaaggactttatggtc

SEQ ID NO: 6034327 - DNA, 25 bp, Homo sapien
caagagagagttgcctattgaaatt

SEQ ID NO: 6034328 - DNA, 25 bp, Homo sapien
acaagattaacgaaggtattttgca

SEQ ID NO: 6034329 - DNA, 25 bp, Homo sapien
gttggaagatatgtttacagttgac

SEQ ID NO: 6034330 - DNA, 25 bp, Homo sapien
cgacgaattgaataaaggtttgaca

SEQ ID NO: 6034331 - DNA, 25 bp, Homo sapien
cgtacccagcttcccaaaacaagat

SEQ ID NO: 6034332 - DNA, 25 bp, Homo sapien
agaattgctaaacaccaaggacacc

SEQ ID NO: 6034333 - DNA, 25 bp, Homo sapien
tgatttgggtggtactaacttaaga

SEQ ID NO: 6034334 - DNA, 25 bp, Homo sapien
aaactaccacatgacatgagaacca

SEQ ID NO: 6034335 - DNA, 25 bp, Homo sapien
ttatggtcctttattgccgactctt

SEQ ID NO: 6034336 - DNA, 25 bp, Homo sapien
gatggatgaaattcatcagttggaa

SEQ ID NO: 6034337 - DNA, 25 bp, Homo sapien
caaagaagggaggtaacattccaat

SEQ ID NO: 6034338 - DNA, 25 bp, Homo sapien
caatccaagtataaactaccacatg

SEQ ID NO: 6034339 - DNA, 25 bp, Homo sapien
tttgacaccactcaatccaagtata

SEQ ID NO: 6034340 - DNA, 25 bp, Homo sapien
cgagcaagaattgctaaacaccaag

SEQ ID NO: 6034341 - DNA, 25 bp, Homo sapien
agttgacagcgagaccttgagaaag

SEQ ID NO: 6034342 - DNA, 25 bp, Homo sapien
atacctttgacaccactcaatccaa

SEQ ID NO: 6034343 - DNA, 25 bp, Homo sapien
ggactttatggtcgagcaagaattg

SEQ ID NO: 6034344 - DNA, 25 bp, Homo sapien
tatggtcgagcaagaattgctaaac

SEQ ID NO: 6034345 - DNA, 25 bp, Homo sapien
gaccttgagaaaggttgttaagcac

SEQ ID NO: 6034346 - DNA, 25 bp, Homo sapien
tcccaacaggtaaagaatctggtaa

SEQ ID NO: 6034347 - DNA, 25 bp, Homo sapien
tggaattcccaacaggtaaagaatc

SEQ ID NO: 6034348 - DNA, 25 bp, Homo sapien
aagggtttcgatattccaaatgtcg

SEQ ID NO: 6034349 - DNA, 25 bp, Homo sapien
agggaggtaacattccaatgattcc

SEQ ID NO: 6034350 - DNA, 25 bp, Homo sapien
tgttggtcaagttgagcggtaacca

SEQ ID NO: 6034351 - DNA, 25 bp, Homo sapien
agaaccactaagcaccaagaggagt

SEQ ID NO: 6034352 - DNA, 25 bp, Homo sapien
aatttccaagagagagttgcctatt

SEQ ID NO: 6034353 - DNA, 25 bp, Homo sapien
attgaataaaggtttgacaaagaag

SEQ ID NO: 6034354 - DNA, 25 bp, Homo sapien
tcctttattgccgactctttgaagg

SEQ ID NO: 6034355 - DNA, 25 bp, Homo sapien
ctatttggccattgatttgggtggt

SEQ ID NO: 6034356 - DNA, 25 bp, Homo sapien
attccaatgattcccggttgggtca

SEQ ID NO: 6034357 - DNA, 25 bp, Homo sapien
gggtcatggaattcccaacaggtaa

SEQ ID NO: 6034358 - DNA, 25 bp, Homo sapien
caccaaggacaccttaccattaggt

SEQ ID NO: 6034359 - DNA, 25 bp, Homo sapien
gctaaacaccaaggacaccttacca

SEQ ID NO: 6034360 - DNA, 25 bp, Homo sapien
attaacgaaggtattttgcaaagat

SEQ ID NO: 6034361 - DNA, 25 bp, Homo sapien
accactcaatccaagtataaactac

SEQ ID NO: 6034362 - DNA, 25 bp, Homo sapien
caccaagaggagttatggtccttta

SEQ ID NO: 6034363 - DNA, 25 bp, Homo sapien
tgatgtgcccaaggaattgatggat

SEQ ID NO: 6034364 - DNA, 25 bp, Homo sapien
taggtttcaccttctcgtacccagc

SEQ ID NO: 6034365 - DNA, 25 bp, Homo sapien
gacatgagaaccactaagcaccaag

SEQ ID NO: 6034366 - DNA, 25 bp, Homo sapien
tgattcccggttgggtcatggaatt

SEQ ID NO: 6034367 - DNA, 25 bp, Homo sapien
ggccattgatttgggtggtactaac

SEQ ID NO: 6034368 - DNA, 25 bp, Homo sapien
gtaacattccaatgattcccggttg

SEQ ID NO: 6034369 - DNA, 25 bp, Homo sapien
gaaggtattttgcaaagatggacca

SEQ ID NO: 6034370 - DNA, 25 bp, Homo sapien
gctacaaaacgaaatttccaagaga

SEQ ID NO: 6034371 - DNA, 25 bp, Homo sapien
ggttgttaagcactttatcgacgaa

SEQ ID NO: 6034372 - DNA, 25 bp, Homo sapien
ttgacaaagaagggaggtaacattc

SEQ ID NO: 6034373 - DNA, 25 bp, Homo sapien
gggttccatggctgatgtgcccaag

SEQ ID NO: 6034374 - DNA, 25 bp, Homo sapien
aggtaaagaatctggtaactatttg

SEQ ID NO: 6034375 - DNA, 25 bp, Homo sapien
ttcaccttctcgtacccagcttccc

SEQ ID NO: 6034376 - DNA, 25 bp, Homo sapien
aagtataaactaccacatgacatga

SEQ ID NO: 6034377 - DNA, 25 bp, Homo sapien
ccacgatgtcgtcccattgctacaa

SEQ ID NO: 6034378 - DNA, 25 bp, Homo sapien
tagaaagggttccatggctgatgtg

SEQ ID NO: 6034379 - DNA, 25 bp, Homo sapien
gaggagttatggtcctttattgccg

SEQ ID NO: 6034380 - DNA, 25 bp, Homo sapien
cagcttcccaaaacaagattaacga

SEQ ID NO: 6034381 - DNA, 25 bp, Homo sapien
cgaaggccacgatgtcgtcccattg

SEQ ID NO: 6034382 - DNA, 25 bp, Homo sapien
taagcactttatcgacgaattgaat

SEQ ID NO: 6034383 - DNA, 25 bp, Homo sapien
tgaaattcatcagttggaagatatg

SEQ ID NO: 6034384 - DNA, 25 bp, Homo sapien
actaagcaccaagaggagttatggt

SEQ ID NO: 6034385 - DNA, 25 bp, Homo sapien
ccattgctacaaaacgaaatttcca

SEQ ID NO: 6034386 - DNA, 25 bp, Homo sapien
tattgccgactctttgaaggacttt

SEQ ID NO: 6034387 - DNA, 25 bp, Homo sapien
aaacgaaatttccaagagagagttg

SEQ ID NO: 6034388 - DNA, 25 bp, Homo sapien
gtaaccatacctttgacaccactca

SEQ ID NO: 6034389 - DNA, 25 bp, Homo sapien
tttgaaggactttatggtcgagcaa

SEQ ID NO: 6034390 - DNA, 25 bp, Homo sapien
gagaaaggttgttaagcactttatc

SEQ ID NO: 6034391 - DNA, 25 bp, Homo sapien
tcaagttgagcggtaaccatacctt

SEQ ID NO: 6034392 - DNA, 25 bp, Homo sapien
attttgcaaagatggaccaagggtt

SEQ ID NO: 6034393 - DNA, 25 bp, Homo sapien
attccaaatgtcgaaggccacgatg

SEQ ID NO: 6034394 - DNA, 25 bp, Homo sapien
agatatgtttacagttgacagcgag

SEQ ID NO: 6034395 - DNA, 25 bp, Homo sapien
cctattgaaattgtagcattgatta

SEQ ID NO: 6034396 - DNA, 25 bp, Homo sapien
aatgtcgaaggccacgatgtcgtcc

SEQ ID NO: 6034397 - DNA, 25 bp, Homo sapien
cagcgagaccttgagaaaggttgtt

SEQ ID NO: 6034398 - DNA, 25 bp, Homo sapien
tgagcggtaaccatacctttgacac

SEQ ID NO: 6034399 - DNA, 25 bp, Homo sapien
tactaacttaagagtcgtgttggtc

SEQ ID NO: 6034400 - DNA, 25 bp, Homo sapien
agaatctggtaactatttggccatt

SEQ ID NO: 6034401 - DNA, 25 bp, Homo sapien
ttctcgtacccagcttcccaaaaca

SEQ ID NO: 6034402 - DNA, 25 bp, Homo sapien
tggaccaagggtttcgatattccaa

SEQ ID NO: 6034403 - DNA, 25 bp, Homo sapien
catggctgatgtgcccaaggaattg

SEQ ID NO: 6034404 - DNA, 25 bp, Homo sapien
caaagatggaccaagggtttcgata

SEQ ID NO: 6034405 - DNA, 25 bp, Homo sapien
acttaagagtcgtgttggtcaagtt

SEQ ID NO: 6034406 - DNA, 25 bp, Homo sapien
gtttacagttgacagcgagaccttg

SEQ ID NO: 6034407 - DNA, 25 bp, Homo sapien
cggttgggtcatggaattcccaaca

SEQ ID NO: 6034408 - DNA, 25 bp, Homo sapien
ggaattgatggatgaaattcatcag

SEQ ID NO: 6034409 - DNA, 25 bp, Homo sapien
ttcgatattccaaatgtcgaaggcc

SEQ ID NO: 6034410 - DNA, 25 bp, Homo sapien
caaagtccttttggaagatgtcatc

SEQ ID NO: 6034411 - DNA, 25 bp, Homo sapien
aacctctcttttggcaaatagcggc

SEQ ID NO: 6034412 - DNA, 25 bp, Homo sapien
tacttggttcttggcaagaccaaat

SEQ ID NO: 6034413 - DNA, 25 bp, Homo sapien
gcaataacagcagcacctgcacctg

SEQ ID NO: 6034414 - DNA, 25 bp, Homo sapien
aacctgggtatttgttatagacaga

SEQ ID NO: 6034415 - DNA, 25 bp, Homo sapien
tcctcagctggaacaatcgtaattg

SEQ ID NO: 6034416 - DNA, 25 bp, Homo sapien
ccggaggtcatcttttcaaaagctt

SEQ ID NO: 6034417 - DNA, 25 bp, Homo sapien
cttttttcggacaatgcagcaataa

SEQ ID NO: 6034418 - DNA, 25 bp, Homo sapien
gattgttcgtcgacagcaacatcgt

SEQ ID NO: 6034419 - DNA, 25 bp, Homo sapien
ctcgattcttgctgggtaggaggta

SEQ ID NO: 6034420 - DNA, 25 bp, Homo sapien
aagtaacactagacgcaacaattca

SEQ ID NO: 6034421 - DNA, 25 bp, Homo sapien
tagatatctctcaaacccttagcgg

SEQ ID NO: 6034422 - DNA, 25 bp, Homo sapien
ggatctttgcttgcgtcaccagtcc

SEQ ID NO: 6034423 - DNA, 25 bp, Homo sapien
acaaagtcttctaatcaacttacgt

SEQ ID NO: 6034424 - DNA, 25 bp, Homo sapien
ccaggtcttggagattgttcgtcga

SEQ ID NO: 6034425 - DNA, 25 bp, Homo sapien
tgacaccaaagtccttttggaagat

SEQ ID NO: 6034426 - DNA, 25 bp, Homo sapien
ggtatttgttatagacagaaccgtc

SEQ ID NO: 6034427 - DNA, 25 bp, Homo sapien
caattcacccaagtagtaaccggag

SEQ ID NO: 6034428 - DNA, 25 bp, Homo sapien
acgcaacaattcacccaagtagtaa

SEQ ID NO: 6034429 - DNA, 25 bp, Homo sapien
tcgtcgacagcaacatcgtacttgg

SEQ ID NO: 6034430 - DNA, 25 bp, Homo sapien
catccatagatatctctcaaaccct

SEQ ID NO: 6034431 - DNA, 25 bp, Homo sapien
tcggacaatgcagcaataacagcag

SEQ ID NO: 6034432 - DNA, 25 bp, Homo sapien
ggttgtttcaacttgcttagatctt

SEQ ID NO: 6034433 - DNA, 25 bp, Homo sapien
tcttgtaacctctcttttggcaaat

SEQ ID NO: 6034434 - DNA, 25 bp, Homo sapien
gaggtatccatgatgtatggttgtt

SEQ ID NO: 6034435 - DNA, 25 bp, Homo sapien
atgtcatcagtatcttccaagtttt

SEQ ID NO: 6034436 - DNA, 25 bp, Homo sapien
caacatcaagcccttctcgtttaat

SEQ ID NO: 6034437 - DNA, 25 bp, Homo sapien
agcagctctggtaccgatcaattca

SEQ ID NO: 6034438 - DNA, 25 bp, Homo sapien
gcagagtggtcttgacaccaaagtc

SEQ ID NO: 6034439 - DNA, 25 bp, Homo sapien
atcatcctcgattcttgctgggtag

SEQ ID NO: 6034440 - DNA, 25 bp, Homo sapien
acatcgtacttggttcttggcaaga

SEQ ID NO: 6034441 - DNA, 25 bp, Homo sapien
gcacctgaaccatcctcagctggaa

SEQ ID NO: 6034442 - DNA, 25 bp, Homo sapien
tcttgctgggtaggaggtatccatg

SEQ ID NO: 6034443 - DNA, 25 bp, Homo sapien
ttttcaaaagcttgttgaccaggtc

SEQ ID NO: 6034444 - DNA, 25 bp, Homo sapien
aaagcttgttgaccaggtcttggag

SEQ ID NO: 6034445 - DNA, 25 bp, Homo sapien
cactagacgcaacaattcacccaag

SEQ ID NO: 6034446 - DNA, 25 bp, Homo sapien
cagcggcaatgtgaccagtcttgta

SEQ ID NO: 6034447 - DNA, 25 bp, Homo sapien
atgtatggttgtttcaacttgctta

SEQ ID NO: 6034448 - DNA, 25 bp, Homo sapien
aatgcagcaataacagcagcacctg

SEQ ID NO: 6034449 - DNA, 25 bp, Homo sapien
acagcaacatcgtacttggttcttg

SEQ ID NO: 6034450 - DNA, 25 bp, Homo sapien
tcttttggcaaatagcggcaatacc

SEQ ID NO: 6034451 - DNA, 25 bp, Homo sapien
aacagctaatctagcagctctggta

SEQ ID NO: 6034452 - DNA, 25 bp, Homo sapien
gtcatcttttcaaaagcttgttgac

SEQ ID NO: 6034453 - DNA, 25 bp, Homo sapien
gcgtcaccagtccatccatagatat

SEQ ID NO: 6034454 - DNA, 25 bp, Homo sapien
ttgcttgcgtcaccagtccatccat

SEQ ID NO: 6034455 - DNA, 25 bp, Homo sapien
aatagcggcaataccacaaacagct

SEQ ID NO: 6034456 - DNA, 25 bp, Homo sapien
gcaattcttttttcggacaatgcag

SEQ ID NO: 6034457 - DNA, 25 bp, Homo sapien
aatcaacttacgttctggcagagtg

SEQ ID NO: 6034458 - DNA, 25 bp, Homo sapien
aaatggatcatcctcgattcttgct

SEQ ID NO: 6034459 - DNA, 25 bp, Homo sapien
aaccgtcagcggcaatgtgaccagt

SEQ ID NO: 6034460 - DNA, 25 bp, Homo sapien
ctcgtttaattcaagtaacactaga

SEQ ID NO: 6034461 - DNA, 25 bp, Homo sapien
gctggaacaatcgtaattggatctt

SEQ ID NO: 6034462 - DNA, 25 bp, Homo sapien
gtaattggatctttgcttgcgtcac

SEQ ID NO: 6034463 - DNA, 25 bp, Homo sapien
acaatcgtaattggatctttgcttg

SEQ ID NO: 6034464 - DNA, 25 bp, Homo sapien
ttcaacttgcttagatcttgatcct

SEQ ID NO: 6034465 - DNA, 25 bp, Homo sapien
ccttttggaagatgtcatcagtatc

SEQ ID NO: 6034466 - DNA, 25 bp, Homo sapien
accgatcaattcacaaagtcttcta

SEQ ID NO: 6034467 - DNA, 25 bp, Homo sapien
caatgtgaccagtcttgtaacctct

SEQ ID NO: 6034468 - DNA, 25 bp, Homo sapien
agatcttgatccttcaacatcaagc

SEQ ID NO: 6034469 - DNA, 25 bp, Homo sapien
cttgaaacctgggtatttgttatag

SEQ ID NO: 6034470 - DNA, 25 bp, Homo sapien
agacagaaccgtcagcggcaatgtg

SEQ ID NO: 6034471 - DNA, 25 bp, Homo sapien
tggtcttgacaccaaagtccttttg

SEQ ID NO: 6034472 - DNA, 25 bp, Homo sapien
gcacctgcacctgaaccatcctcag

SEQ ID NO: 6034473 - DNA, 25 bp, Homo sapien
tgttgaccaggtcttggagattgtt

SEQ ID NO: 6034474 - DNA, 25 bp, Homo sapien
tgttatagacagaaccgtcagcggc

SEQ ID NO: 6034475 - DNA, 25 bp, Homo sapien
taatctagcagctctggtaccgatc

SEQ ID NO: 6034476 - DNA, 25 bp, Homo sapien
cttacgttctggcagagtggtcttg

SEQ ID NO: 6034477 - DNA, 25 bp, Homo sapien
ccagtccatccatagatatctctca

SEQ ID NO: 6034478 - DNA, 25 bp, Homo sapien
gttctggcagagtggtcttgacacc

SEQ ID NO: 6034479 - DNA, 25 bp, Homo sapien
cttggagattgttcgtcgacagcaa

SEQ ID NO: 6034480 - DNA, 25 bp, Homo sapien
caagcccttctcgtttaattcaagt

SEQ ID NO: 6034481 - DNA, 25 bp, Homo sapien
ggcaataccacaaacagctaatcta

SEQ ID NO: 6034482 - DNA, 25 bp, Homo sapien
tccatgatgtatggttgtttcaact

SEQ ID NO: 6034483 - DNA, 25 bp, Homo sapien
tcttccaagttttcaaatggatcat

SEQ ID NO: 6034484 - DNA, 25 bp, Homo sapien
tagtaaccggaggtcatcttttcaa

SEQ ID NO: 6034485 - DNA, 25 bp, Homo sapien
tctggtaccgatcaattcacaaagt

SEQ ID NO: 6034486 - DNA, 25 bp, Homo sapien
gaccagtcttgtaacctctcttttg

SEQ ID NO: 6034487 - DNA, 25 bp, Homo sapien
tcagtatcttccaagttttcaaatg

SEQ ID NO: 6034488 - DNA, 25 bp, Homo sapien
ggcaaatagcggcaataccacaaac

SEQ ID NO: 6034489 - DNA, 25 bp, Homo sapien
tcttctaatcaacttacgttctggc

SEQ ID NO: 6034490 - DNA, 25 bp, Homo sapien
cccaagtagtaaccggaggtcatct

SEQ ID NO: 6034491 - DNA, 25 bp, Homo sapien
ttgcttagatcttgatccttcaaca

SEQ ID NO: 6034492 - DNA, 25 bp, Homo sapien
ggaagatgtcatcagtatcttccaa

SEQ ID NO: 6034493 - DNA, 25 bp, Homo sapien
caattcacaaagtcttctaatcaac

SEQ ID NO: 6034494 - DNA, 25 bp, Homo sapien
acagcagcacctgcacctgaaccat

SEQ ID NO: 6034495 - DNA, 25 bp, Homo sapien
gaaccatcctcagctggaacaatcg

SEQ ID NO: 6034496 - DNA, 25 bp, Homo sapien
taattcaagtaacactagacgcaac

SEQ ID NO: 6034497 - DNA, 25 bp, Homo sapien
tctctcaaacccttagcggcggctt

SEQ ID NO: 6034498 - DNA, 25 bp, Homo sapien
accacaaacagctaatctagcagct

SEQ ID NO: 6034499 - DNA, 25 bp, Homo sapien
agcggcggcttccttgaaacctggg

SEQ ID NO: 6034500 - DNA, 25 bp, Homo sapien
tgatccttcaacatcaagcccttct

SEQ ID NO: 6034501 - DNA, 25 bp, Homo sapien
tgggtaggaggtatccatgatgtat

SEQ ID NO: 6034502 - DNA, 25 bp, Homo sapien
ccactttgtacccaacatctaccga

SEQ ID NO: 6034503 - DNA, 25 bp, Homo sapien
ttattgagaagaagaaaaaggcacc

SEQ ID NO: 6034504 - DNA, 25 bp, Homo sapien
ataaatcacgatttggacttacctc

SEQ ID NO: 6034505 - DNA, 25 bp, Homo sapien
gacaagttagaaataaatcacgatt

SEQ ID NO: 6034506 - DNA, 25 bp, Homo sapien
agccaaggcagacgaagatgttagt

SEQ ID NO: 6034507 - DNA, 25 bp, Homo sapien
ttgagatggattgattacatgcaaa

SEQ ID NO: 6034508 - DNA, 25 bp, Homo sapien
gcctgatgaagaaacccttaagaaa

SEQ ID NO: 6034509 - DNA, 25 bp, Homo sapien
tgaatttggtgttaagagacaacac

SEQ ID NO: 6034510 - DNA, 25 bp, Homo sapien
ggccaagaaggcagctaagaaggcc

SEQ ID NO: 6034511 - DNA, 25 bp, Homo sapien
aagcaagatcatccaagaggtaagc

SEQ ID NO: 6034512 - DNA, 25 bp, Homo sapien
ccttcattgtgtccactttgtaccc

SEQ ID NO: 6034513 - DNA, 25 bp, Homo sapien
agaagaagaaaaaggcacctgcggg

SEQ ID NO: 6034514 - DNA, 25 bp, Homo sapien
ttagtggcaagctccaaggatgtca

SEQ ID NO: 6034515 - DNA, 25 bp, Homo sapien
tttctttcactaaagaacaatctgc

SEQ ID NO: 6034516 - DNA, 25 bp, Homo sapien
tgctgatgccgcagccaaggcagac

SEQ ID NO: 6034517 - DNA, 25 bp, Homo sapien
gcaagctccaaggatgtcaagtcaa

SEQ ID NO: 6034518 - DNA, 25 bp, Homo sapien
ttggaagtgtcgagcactgacaagt

SEQ ID NO: 6034519 - DNA, 25 bp, Homo sapien
tctaccgacgttcacgtcttcgaag

SEQ ID NO: 6034520 - DNA, 25 bp, Homo sapien
caacatctaccgacgttcacgtctt

SEQ ID NO: 6034521 - DNA, 25 bp, Homo sapien
tgtacccaacatctaccgacgttca

SEQ ID NO: 6034522 - DNA, 25 bp, Homo sapien
tggtcaaatccaaccacacttagat

SEQ ID NO: 6034523 - DNA, 25 bp, Homo sapien
aatccaaccacacttagatcaattg

SEQ ID NO: 6034524 - DNA, 25 bp, Homo sapien
aattgagagaggaggcaaaggccaa

SEQ ID NO: 6034525 - DNA, 25 bp, Homo sapien
aaagaacaatctgctcaagctgccc

SEQ ID NO: 6034526 - DNA, 25 bp, Homo sapien
aacccttaagaaattgagagaggag

SEQ ID NO: 6034527 - DNA, 25 bp, Homo sapien
gctgcccaatgggaatcggttctaa

SEQ ID NO: 6034528 - DNA, 25 bp, Homo sapien
ggaatcggttctaaaatctggtcaa

SEQ ID NO: 6034529 - DNA, 25 bp, Homo sapien
gatcatccaagaggtaagcctgatg

SEQ ID NO: 6034530 - DNA, 25 bp, Homo sapien
ttggacttacctcatgaagttattg

SEQ ID NO: 6034531 - DNA, 25 bp, Homo sapien
aaaagccaaagccatccgcaataga

SEQ ID NO: 6034532 - DNA, 25 bp, Homo sapien
ggcaaaggccaagaaggcagctaag

SEQ ID NO: 6034533 - DNA, 25 bp, Homo sapien
caacaagagcaacaaaataaggccc

SEQ ID NO: 6034534 - DNA, 25 bp, Homo sapien
ttaagaaattgagagaggaggcaaa

SEQ ID NO: 6034535 - DNA, 25 bp, Homo sapien
aaggccccagaaaagccaaagccat

SEQ ID NO: 6034536 - DNA, 25 bp, Homo sapien
taaggatttagtggcaagctccaag

SEQ ID NO: 6034537 - DNA, 25 bp, Homo sapien
aggtaagcctgatgaagaaaccctt

SEQ ID NO: 6034538 - DNA, 25 bp, Homo sapien
tcaattgaatttggtgttaagagac

SEQ ID NO: 6034539 - DNA, 25 bp, Homo sapien
agcactgacaagttagaaataaatc

SEQ ID NO: 6034540 - DNA, 25 bp, Homo sapien
cttattatttcaaagtatccagttt

SEQ ID NO: 6034541 - DNA, 25 bp, Homo sapien
tatttcaaagtatccagtttctttc

SEQ ID NO: 6034542 - DNA, 25 bp, Homo sapien
caaagtatccagtttctttcactaa

SEQ ID NO: 6034543 - DNA, 25 bp, Homo sapien
tgttagtaagaaggctaaaaagcaa

SEQ ID NO: 6034544 - DNA, 25 bp, Homo sapien
cacgtcttcgaagtcgccttaccat

SEQ ID NO: 6034545 - DNA, 25 bp, Homo sapien
gagcaacaaaataaggccccagaaa

SEQ ID NO: 6034546 - DNA, 25 bp, Homo sapien
caatctgctcaagctgcccaatggg

SEQ ID NO: 6034547 - DNA, 25 bp, Homo sapien
tacagacatattttgagatggattg

SEQ ID NO: 6034548 - DNA, 25 bp, Homo sapien
tggcgctgctgatgccgcagccaag

SEQ ID NO: 6034549 - DNA, 25 bp, Homo sapien
ttagaaataaatcacgatttggact

SEQ ID NO: 6034550 - DNA, 25 bp, Homo sapien
cttagatcaattgaatttggtgtta

SEQ ID NO: 6034551 - DNA, 25 bp, Homo sapien
tgcgggtggcgctgctgatgccgca

SEQ ID NO: 6034552 - DNA, 25 bp, Homo sapien
tggattgattacatgcaaaacttgt

SEQ ID NO: 6034553 - DNA, 25 bp, Homo sapien
aacttgttggaagtgtcgagcactg

SEQ ID NO: 6034554 - DNA, 25 bp, Homo sapien
accacacttagatcaattgaatttg

SEQ ID NO: 6034555 - DNA, 25 bp, Homo sapien
tccaaggatgtcaagtcaacttata

SEQ ID NO: 6034556 - DNA, 25 bp, Homo sapien
ttgtgtccactttgtacccaacatc

SEQ ID NO: 6034557 - DNA, 25 bp, Homo sapien
catattttgagatggattgattaca

SEQ ID NO: 6034558 - DNA, 25 bp, Homo sapien
ttgattaaggatttagtggcaagct

SEQ ID NO: 6034559 - DNA, 25 bp, Homo sapien
gatgtcaagtcaacttataccacat

SEQ ID NO: 6034560 - DNA, 25 bp, Homo sapien
gacgttcacgtcttcgaagtcgcct

SEQ ID NO: 6034561 - DNA, 25 bp, Homo sapien
aagaaggctaaaaagcaagatcatc

SEQ ID NO: 6034562 - DNA, 25 bp, Homo sapien
gtgtcgagcactgacaagttagaaa

SEQ ID NO: 6034563 - DNA, 25 bp, Homo sapien
caatgggaatcggttctaaaatctg

SEQ ID NO: 6034564 - DNA, 25 bp, Homo sapien
aacaacaacaagagcaacaaaataa

SEQ ID NO: 6034565 - DNA, 25 bp, Homo sapien
tgaagaaacccttaagaaattgaga

SEQ ID NO: 6034566 - DNA, 25 bp, Homo sapien
aaaatctggtcaaatccaaccacac

SEQ ID NO: 6034567 - DNA, 25 bp, Homo sapien
agaggaggcaaaggccaagaaggca

SEQ ID NO: 6034568 - DNA, 25 bp, Homo sapien
tgccgcagccaaggcagacgaagat

SEQ ID NO: 6034569 - DNA, 25 bp, Homo sapien
gaaggcagctaagaaggccgccaac

SEQ ID NO: 6034570 - DNA, 25 bp, Homo sapien
acttataccacatacagacatattt

SEQ ID NO: 6034571 - DNA, 25 bp, Homo sapien
gctcaagctgcccaatgggaatcgg

SEQ ID NO: 6034572 - DNA, 25 bp, Homo sapien
gattacatgcaaaacttgttggaag

SEQ ID NO: 6034573 - DNA, 25 bp, Homo sapien
ggttctaaaatctggtcaaatccaa

SEQ ID NO: 6034574 - DNA, 25 bp, Homo sapien
cacgatttggacttacctcatgaag

SEQ ID NO: 6034575 - DNA, 25 bp, Homo sapien
tccaagaggtaagcctgatgaagaa

SEQ ID NO: 6034576 - DNA, 25 bp, Homo sapien
atccagtttctttcactaaagaaca

SEQ ID NO: 6034577 - DNA, 25 bp, Homo sapien
ggcacctgcgggtggcgctgctgat

SEQ ID NO: 6034578 - DNA, 25 bp, Homo sapien
gaaaaaggcacctgcgggtggcgct

SEQ ID NO: 6034579 - DNA, 25 bp, Homo sapien
accacatacagacatattttgagat

SEQ ID NO: 6034580 - DNA, 25 bp, Homo sapien
acaacaccttcattgtgtccacttt

SEQ ID NO: 6034581 - DNA, 25 bp, Homo sapien
acgccaaacaacaacaagagcaaca

SEQ ID NO: 6034582 - DNA, 25 bp, Homo sapien
ttacctcatgaagttattgagaaga

SEQ ID NO: 6034583 - DNA, 25 bp, Homo sapien
ttcgaagtcgccttaccattgatta

SEQ ID NO: 6034584 - DNA, 25 bp, Homo sapien
aagtcaacttataccacatacagac

SEQ ID NO: 6034585 - DNA, 25 bp, Homo sapien
tggtgttaagagacaacaccttcat

SEQ ID NO: 6034586 - DNA, 25 bp, Homo sapien
taagagacaacaccttcattgtgtc

SEQ ID NO: 6034587 - DNA, 25 bp, Homo sapien
cgccaacgccaaacaacaacaagag

SEQ ID NO: 6034588 - DNA, 25 bp, Homo sapien
agctaagaaggccgccaacgccaaa

SEQ ID NO: 6034589 - DNA, 25 bp, Homo sapien
ccagaaaagccaaagccatccgcaa

SEQ ID NO: 6034590 - DNA, 25 bp, Homo sapien
ggcagacgaagatgttagtaagaag

SEQ ID NO: 6034591 - DNA, 25 bp, Homo sapien
gtcgccttaccattgattaaggatt

SEQ ID NO: 6034592 - DNA, 25 bp, Homo sapien
catgaagttattgagaagaagaaaa

SEQ ID NO: 6034593 - DNA, 25 bp, Homo sapien
atgcaaaacttgttggaagtgtcga

SEQ ID NO: 6034594 - DNA, 25 bp, Homo sapien
cgaagatgttagtaagaaggctaaa

SEQ ID NO: 6034595 - DNA, 25 bp, Homo sapien
gctaaaaagcaagatcatccaagag

SEQ ID NO: 6034596 - DNA, 25 bp, Homo sapien
agaaggccgccaacgccaaacaaca

SEQ ID NO: 6034597 - DNA, 25 bp, Homo sapien
ttaccattgattaaggatttagtgg

SEQ ID NO: 6034598 - DNA, 25 bp, Homo sapien
tttggtggctcgacaaattcaactt

SEQ ID NO: 6034599 - DNA, 25 bp, Homo sapien
gcatagcgtccaaaggaaaatgctt

SEQ ID NO: 6034600 - DNA, 25 bp, Homo sapien
tcaccggccttagagtcctttggtg

SEQ ID NO: 6034601 - DNA, 25 bp, Homo sapien
ggttgtaagtgttcccagatcttct

SEQ ID NO: 6034602 - DNA, 25 bp, Homo sapien
ctcatgttaactggtttcaagttgc

SEQ ID NO: 6034603 - DNA, 25 bp, Homo sapien
tggggccttattttgttgctcttgt

SEQ ID NO: 6034604 - DNA, 25 bp, Homo sapien
ggctcgacaaattcaactttgtcgt

SEQ ID NO: 6034605 - DNA, 25 bp, Homo sapien
ttgcggatggctttggcttttctgg

SEQ ID NO: 6034606 - DNA, 25 bp, Homo sapien
gccttcttagctgccttcttggcct

SEQ ID NO: 6034607 - DNA, 25 bp, Homo sapien
ttggcggccttcttagctgccttct

SEQ ID NO: 6034608 - DNA, 25 bp, Homo sapien
gatggctttttgaataaaaccaaca

SEQ ID NO: 6034609 - DNA, 25 bp, Homo sapien
cgttcttgcatagcgtccaaaggaa

SEQ ID NO: 6034610 - DNA, 25 bp, Homo sapien
ttgttgctcttgttgttgtttggcg

SEQ ID NO: 6034611 - DNA, 25 bp, Homo sapien
tcgttagaaccacacaataccatag

SEQ ID NO: 6034612 - DNA, 25 bp, Homo sapien
gatttaatacctctcatgttaactg

SEQ ID NO: 6034613 - DNA, 25 bp, Homo sapien
aagaacaccttgtcaccggccttag

SEQ ID NO: 6034614 - DNA, 25 bp, Homo sapien
gttggtcaactttcttacaggatgg

SEQ ID NO: 6034615 - DNA, 25 bp, Homo sapien
gtgcttgatggctttttgaataaaa

SEQ ID NO: 6034616 - DNA, 25 bp, Homo sapien
gaaccacacaataccatagcagtgg

SEQ ID NO: 6034617 - DNA, 25 bp, Homo sapien
cttgggccttcttcatcaccgacat

SEQ ID NO: 6034618 - DNA, 25 bp, Homo sapien
tcgcccttagcgttggtcaactttc

SEQ ID NO: 6034619 - DNA, 25 bp, Homo sapien
accttgaatgattcgcccttagcgt

SEQ ID NO: 6034620 - DNA, 25 bp, Homo sapien
ccgacatcaattgtagagacatata

SEQ ID NO: 6034621 - DNA, 25 bp, Homo sapien
gccttagagtcctttggtggctcga

SEQ ID NO: 6034622 - DNA, 25 bp, Homo sapien
atacaacaacaacataacgttcttg

SEQ ID NO: 6034623 - DNA, 25 bp, Homo sapien
accatagcagtggatttaatacctc

SEQ ID NO: 6034624 - DNA, 25 bp, Homo sapien
cttagcgttggtcaactttcttaca

SEQ ID NO: 6034625 - DNA, 25 bp, Homo sapien
tgaataaaaccaacacggaaatcta

SEQ ID NO: 6034626 - DNA, 25 bp, Homo sapien
aggatggtccttttcttcttcgtct

SEQ ID NO: 6034627 - DNA, 25 bp, Homo sapien
tgcctcctctctcaatttcttaagg

SEQ ID NO: 6034628 - DNA, 25 bp, Homo sapien
aagtgttcccagatcttcttttttg

SEQ ID NO: 6034629 - DNA, 25 bp, Homo sapien
agttgcatacaacaacaacataacg

SEQ ID NO: 6034630 - DNA, 25 bp, Homo sapien
gtagagacatatagggagtcggcat

SEQ ID NO: 6034631 - DNA, 25 bp, Homo sapien
aattgcttcattggagcttcgtcac

SEQ ID NO: 6034632 - DNA, 25 bp, Homo sapien
ccttcaaagaacaccttgtcaccgg

SEQ ID NO: 6034633 - DNA, 25 bp, Homo sapien
tagtaaaatgaggttgtaagtgttc

SEQ ID NO: 6034634 - DNA, 25 bp, Homo sapien
acaaacagttcttgggccttcttca

SEQ ID NO: 6034635 - DNA, 25 bp, Homo sapien
aatgcttgaccaaaccagaacaaac

SEQ ID NO: 6034636 - DNA, 25 bp, Homo sapien
tgaccaaaccagaacaaacagttct

SEQ ID NO: 6034637 - DNA, 25 bp, Homo sapien
tcaattgtagagacatatagggagt

SEQ ID NO: 6034638 - DNA, 25 bp, Homo sapien
tagctgccttcttggcctttgcctc

SEQ ID NO: 6034639 - DNA, 25 bp, Homo sapien
cgtccaaaggaaaatgcttgaccaa

SEQ ID NO: 6034640 - DNA, 25 bp, Homo sapien
ttggcgttggcggccttcttagctg

SEQ ID NO: 6034641 - DNA, 25 bp, Homo sapien
acataacgttcttgcatagcgtcca

SEQ ID NO: 6034642 - DNA, 25 bp, Homo sapien
tctgggtgcttgatggctttttgaa

SEQ ID NO: 6034643 - DNA, 25 bp, Homo sapien
tcggcatctgggtgcttgatggctt

SEQ ID NO: 6034644 - DNA, 25 bp, Homo sapien
tgttgtttggcgttggcggccttct

SEQ ID NO: 6034645 - DNA, 25 bp, Homo sapien
tcaactttgtcgtcgttagaaccac

SEQ ID NO: 6034646 - DNA, 25 bp, Homo sapien
ataacttccaacccgtcatttgtag

SEQ ID NO: 6034647 - DNA, 25 bp, Homo sapien
ttaactggtttcaagttgcatacaa

SEQ ID NO: 6034648 - DNA, 25 bp, Homo sapien
agggagtcggcatctgggtgcttga

SEQ ID NO: 6034649 - DNA, 25 bp, Homo sapien
gcagtggatttaatacctctcatgt

SEQ ID NO: 6034650 - DNA, 25 bp, Homo sapien
tttctggggccttattttgttgctc

SEQ ID NO: 6034651 - DNA, 25 bp, Homo sapien
tcgtctttgaagataacttccaacc

SEQ ID NO: 6034652 - DNA, 25 bp, Homo sapien
catttgtagtaaaatgaggttgtaa

SEQ ID NO: 6034653 - DNA, 25 bp, Homo sapien
atacctctcatgttaactggtttca

SEQ ID NO: 6034654 - DNA, 25 bp, Homo sapien
caacaacataacgttcttgcatagc

SEQ ID NO: 6034655 - DNA, 25 bp, Homo sapien
ttgtcgtcgttagaaccacacaata

SEQ ID NO: 6034656 - DNA, 25 bp, Homo sapien
accagaacaaacagttcttgggcct

SEQ ID NO: 6034657 - DNA, 25 bp, Homo sapien
tggctttggcttttctggggcctta

SEQ ID NO: 6034658 - DNA, 25 bp, Homo sapien
tcgtcaccgaaaccttcaaagaaca

SEQ ID NO: 6034659 - DNA, 25 bp, Homo sapien
aaggaaaatgcttgaccaaaccaga

SEQ ID NO: 6034660 - DNA, 25 bp, Homo sapien
tccttttcttcttcgtctttgaaga

SEQ ID NO: 6034661 - DNA, 25 bp, Homo sapien
cttattttgttgctcttgttgttgt

SEQ ID NO: 6034662 - DNA, 25 bp, Homo sapien
ggattcaattgcttcattggagctt

SEQ ID NO: 6034663 - DNA, 25 bp, Homo sapien
gatcttcttttttggattcaattgc

SEQ ID NO: 6034664 - DNA, 25 bp, Homo sapien
aatctattgcggatggctttggctt

SEQ ID NO: 6034665 - DNA, 25 bp, Homo sapien
accttgtcaccggccttagagtcct

SEQ ID NO: 6034666 - DNA, 25 bp, Homo sapien
ggtttcaagttgcatacaacaacaa

SEQ ID NO: 6034667 - DNA, 25 bp, Homo sapien
ggagcttcgtcaccgaaaccttcaa

SEQ ID NO: 6034668 - DNA, 25 bp, Homo sapien
acccgtcatttgtagtaaaatgagg

SEQ ID NO: 6034669 - DNA, 25 bp, Homo sapien
tcttacaggatggtccttttcttct

SEQ ID NO: 6034670 - DNA, 25 bp, Homo sapien
gagtcctttggtggctcgacaaatt

SEQ ID NO: 6034671 - DNA, 25 bp, Homo sapien
tcttcttcgtctttgaagataactt

SEQ ID NO: 6034672 - DNA, 25 bp, Homo sapien
tcatcaccgacatcaattgtagaga

SEQ ID NO: 6034673 - DNA, 25 bp, Homo sapien
acatatagggagtcggcatctgggt

SEQ ID NO: 6034674 - DNA, 25 bp, Homo sapien
caactttcttacaggatggtccttt

SEQ ID NO: 6034675 - DNA, 25 bp, Homo sapien
gaaaccttcaaagaacaccttgtca

SEQ ID NO: 6034676 - DNA, 25 bp, Homo sapien
tggcctttgcctcctctctcaattt

SEQ ID NO: 6034677 - DNA, 25 bp, Homo sapien
ttgaagataacttccaacccgtcat

SEQ ID NO: 6034678 - DNA, 25 bp, Homo sapien
ctcttgttgttgtttggcgttggcg

SEQ ID NO: 6034679 - DNA, 25 bp, Homo sapien
aaatgaggttgtaagtgttcccaga

SEQ ID NO: 6034680 - DNA, 25 bp, Homo sapien
cacaataccatagcagtggatttaa

SEQ ID NO: 6034681 - DNA, 25 bp, Homo sapien
ctctctcaatttcttaagggtttct

SEQ ID NO: 6034682 - DNA, 25 bp, Homo sapien
cacggaaatctattgcggatggctt

SEQ ID NO: 6034683 - DNA, 25 bp, Homo sapien
cagttcttgggccttcttcatcacc

SEQ ID NO: 6034684 - DNA, 25 bp, Homo sapien
ccttcttcatcaccgacatcaattg

SEQ ID NO: 6034685 - DNA, 25 bp, Homo sapien
ccttcttggcctttgcctcctctct

SEQ ID NO: 6034686 - DNA, 25 bp, Homo sapien
acaaattcaactttgtcgtcgttag

SEQ ID NO: 6034687 - DNA, 25 bp, Homo sapien
aaccaacacggaaatctattgcgga

SEQ ID NO: 6034688 - DNA, 25 bp, Homo sapien
ttcccagatcttcttttttggattc

SEQ ID NO: 6034689 - DNA, 25 bp, Homo sapien
aatgattcgcccttagcgttggtca

SEQ ID NO: 6034690 - DNA, 25 bp, Homo sapien
ttttttggattcaattgcttcattg

SEQ ID NO: 6034691 - DNA, 25 bp, Homo sapien
ttcattggagcttcgtcaccgaaac

SEQ ID NO: 6034692 - DNA, 25 bp, Homo sapien
agttccctagaccttcccatgcgga

SEQ ID NO: 6034693 - DNA, 25 bp, Homo sapien
cgcttcaggtgccattgctgagaag

SEQ ID NO: 6034694 - DNA, 25 bp, Homo sapien
aagtggactcaatgggtcctatcag

SEQ ID NO: 6034695 - DNA, 25 bp, Homo sapien
ccgacatggacaagttccctagacc

SEQ ID NO: 6034696 - DNA, 25 bp, Homo sapien
tggcagagcttctgctagagaaacg

SEQ ID NO: 6034697 - DNA, 25 bp, Homo sapien
ttcgatcctgaatttcagcatctgt

SEQ ID NO: 6034698 - DNA, 25 bp, Homo sapien
gactctttcgatcctgaatttcagc

SEQ ID NO: 6034699 - DNA, 25 bp, Homo sapien
tgctagagaaacgattggccgtgtc

SEQ ID NO: 6034700 - DNA, 25 bp, Homo sapien
taagtctgtcggttgcattgtcgac

SEQ ID NO: 6034701 - DNA, 25 bp, Homo sapien
ctatcagatgtccagacgcctccgt

SEQ ID NO: 6034702 - DNA, 25 bp, Homo sapien
gctatcgacccctagagacgaaaag

SEQ ID NO: 6034703 - DNA, 25 bp, Homo sapien
gatggtcaaggaaatcgaaaagtac

SEQ ID NO: 6034704 - DNA, 25 bp, Homo sapien
tgcggacttcacgtactcggaaaag

SEQ ID NO: 6034705 - DNA, 25 bp, Homo sapien
agatgtccagacgcctccgttgctg

SEQ ID NO: 6034706 - DNA, 25 bp, Homo sapien
cgcctccgttgctggtttgatggtc

SEQ ID NO: 6034707 - DNA, 25 bp, Homo sapien
ttgcattgtcgacggtgttcctcca

SEQ ID NO: 6034708 - DNA, 25 bp, Homo sapien
agaaacgattggccgtgtcgcttca

SEQ ID NO: 6034709 - DNA, 25 bp, Homo sapien
attgaccagaagaagaccgggtcaa

SEQ ID NO: 6034710 - DNA, 25 bp, Homo sapien
accacatatggtgaatcgcattgta

SEQ ID NO: 6034711 - DNA, 25 bp, Homo sapien
ggatagagtggaaatccagtccggt

SEQ ID NO: 6034712 - DNA, 25 bp, Homo sapien
gaaatcaagatgaacagagactctt

SEQ ID NO: 6034713 - DNA, 25 bp, Homo sapien
tcgccatgatgatcaaaaacgagga

SEQ ID NO: 6034714 - DNA, 25 bp, Homo sapien
cgttgctggtttgatggtcaaggaa

SEQ ID NO: 6034715 - DNA, 25 bp, Homo sapien
cgaaaaggatagagtggaaatccag

SEQ ID NO: 6034716 - DNA, 25 bp, Homo sapien
aggtgccattgctgagaagttctta

SEQ ID NO: 6034717 - DNA, 25 bp, Homo sapien
tagaccttcccatgcggacttcacg

SEQ ID NO: 6034718 - DNA, 25 bp, Homo sapien
cgagatcgtagcctttgtgacacaa

SEQ ID NO: 6034719 - DNA, 25 bp, Homo sapien
agtggaaatccagtccggtaccgag

SEQ ID NO: 6034720 - DNA, 25 bp, Homo sapien
tttcagcatctgttgaacaccatca

SEQ ID NO: 6034721 - DNA, 25 bp, Homo sapien
tcctccaggaatgtcattaaccgaa

SEQ ID NO: 6034722 - DNA, 25 bp, Homo sapien
atctaagctatcgacccctagagac

SEQ ID NO: 6034723 - DNA, 25 bp, Homo sapien
aagatgaacagagactctttcgatc

SEQ ID NO: 6034724 - DNA, 25 bp, Homo sapien
ccgagttcggcaagactctaggtac

SEQ ID NO: 6034725 - DNA, 25 bp, Homo sapien
actcaatgggtcctatcagatgtcc

SEQ ID NO: 6034726 - DNA, 25 bp, Homo sapien
tggtttgatggtcaaggaaatcgaa

SEQ ID NO: 6034727 - DNA, 25 bp, Homo sapien
cagaagaagaccgggtcaatctaag

SEQ ID NO: 6034728 - DNA, 25 bp, Homo sapien
gaatcgcattgtaagtctgtcggtt

SEQ ID NO: 6034729 - DNA, 25 bp, Homo sapien
gccacaattgaccagaagaagaccg

SEQ ID NO: 6034730 - DNA, 25 bp, Homo sapien
ccggtaccgagttcggcaagactct

SEQ ID NO: 6034731 - DNA, 25 bp, Homo sapien
acacaaatcggggaaatcaagatga

SEQ ID NO: 6034732 - DNA, 25 bp, Homo sapien
accatcaccagggaaaaagtggact

SEQ ID NO: 6034733 - DNA, 25 bp, Homo sapien
agctcagaactctaatgtcgagatc

SEQ ID NO: 6034734 - DNA, 25 bp, Homo sapien
cctgaatttcagcatctgttgaaca

SEQ ID NO: 6034735 - DNA, 25 bp, Homo sapien
cattgctgagaagttcttagctcag

SEQ ID NO: 6034736 - DNA, 25 bp, Homo sapien
aaagacctcacgactactccgacat

SEQ ID NO: 6034737 - DNA, 25 bp, Homo sapien
aacagagactctttcgatcctgaat

SEQ ID NO: 6034738 - DNA, 25 bp, Homo sapien
tgagaagttcttagctcagaactct

SEQ ID NO: 6034739 - DNA, 25 bp, Homo sapien
cggtgttcctccaggaatgtcatta

SEQ ID NO: 6034740 - DNA, 25 bp, Homo sapien
ttgaacaccatcaccagggaaaaag

SEQ ID NO: 6034741 - DNA, 25 bp, Homo sapien
cacccatcgccatgatgatcaaaaa

SEQ ID NO: 6034742 - DNA, 25 bp, Homo sapien
gaactctaatgtcgagatcgtagcc

SEQ ID NO: 6034743 - DNA, 25 bp, Homo sapien
tgtcggttgcattgtcgacggtgtt

SEQ ID NO: 6034744 - DNA, 25 bp, Homo sapien
tggacaagttccctagaccttccca

SEQ ID NO: 6034745 - DNA, 25 bp, Homo sapien
gacccctagagacgaaaaggataga

SEQ ID NO: 6034746 - DNA, 25 bp, Homo sapien
catctgttgaacaccatcaccaggg

SEQ ID NO: 6034747 - DNA, 25 bp, Homo sapien
tgatgatcaaaaacgaggaccaaag

SEQ ID NO: 6034748 - DNA, 25 bp, Homo sapien
aaccgaagctgacattcagccacaa

SEQ ID NO: 6034749 - DNA, 25 bp, Homo sapien
aggaccaaagacctcacgactactc

SEQ ID NO: 6034750 - DNA, 25 bp, Homo sapien
gtcattaaccgaagctgacattcag

SEQ ID NO: 6034751 - DNA, 25 bp, Homo sapien
tttgtgacacaaatcggggaaatca

SEQ ID NO: 6034752 - DNA, 25 bp, Homo sapien
aacgaggaccaaagacctcacgact

SEQ ID NO: 6034753 - DNA, 25 bp, Homo sapien
actactccgacatggacaagttccc

SEQ ID NO: 6034754 - DNA, 25 bp, Homo sapien
taatgtcgagatcgtagcctttgtg

SEQ ID NO: 6034755 - DNA, 25 bp, Homo sapien
gtacggtatcaaggcctcctctggt

SEQ ID NO: 6034756 - DNA, 25 bp, Homo sapien
tgtcgacggtgttcctccaggaatg

SEQ ID NO: 6034757 - DNA, 25 bp, Homo sapien
caaggaaatcgaaaagtacagaggc

SEQ ID NO: 6034758 - DNA, 25 bp, Homo sapien
gttcttagctcagaactctaatgtc

SEQ ID NO: 6034759 - DNA, 25 bp, Homo sapien
gcctcctctggtggtggcagagctt

SEQ ID NO: 6034760 - DNA, 25 bp, Homo sapien
cgtagcctttgtgacacaaatcggg

SEQ ID NO: 6034761 - DNA, 25 bp, Homo sapien
cattcagccacaattgaccagaaga

SEQ ID NO: 6034762 - DNA, 25 bp, Homo sapien
gggtcaatctaagctatcgacccct

SEQ ID NO: 6034763 - DNA, 25 bp, Homo sapien
atcaaggcctcctctggtggtggca

SEQ ID NO: 6034764 - DNA, 25 bp, Homo sapien
tgggtcctatcagatgtccagacgc

SEQ ID NO: 6034765 - DNA, 25 bp, Homo sapien
tctggtggtggcagagcttctgcta

SEQ ID NO: 6034766 - DNA, 25 bp, Homo sapien
ccgtgtcgcttcaggtgccattgct

SEQ ID NO: 6034767 - DNA, 25 bp, Homo sapien
agcttctgctagagaaacgattggc

SEQ ID NO: 6034768 - DNA, 25 bp, Homo sapien
ccagacgcctccgttgctggtttga

SEQ ID NO: 6034769 - DNA, 25 bp, Homo sapien
tatggtgaatcgcattgtaagtctg

SEQ ID NO: 6034770 - DNA, 25 bp, Homo sapien
agctgacattcagccacaattgacc

SEQ ID NO: 6034771 - DNA, 25 bp, Homo sapien
tagagacgaaaaggatagagtggaa

SEQ ID NO: 6034772 - DNA, 25 bp, Homo sapien
ttcccatgcggacttcacgtactcg

SEQ ID NO: 6034773 - DNA, 25 bp, Homo sapien
atcggggaaatcaagatgaacagag

SEQ ID NO: 6034774 - DNA, 25 bp, Homo sapien
aggaatgtcattaaccgaagctgac

SEQ ID NO: 6034775 - DNA, 25 bp, Homo sapien
cattgtaagtctgtcggttgcattg

SEQ ID NO: 6034776 - DNA, 25 bp, Homo sapien
accagggaaaaagtggactcaatgg

SEQ ID NO: 6034777 - DNA, 25 bp, Homo sapien
tccagtccggtaccgagttcggcaa

SEQ ID NO: 6034778 - DNA, 25 bp, Homo sapien
tcggcaagactctaggtacacccat

SEQ ID NO: 6034779 - DNA, 25 bp, Homo sapien
agactctaggtacacccatcgccat

SEQ ID NO: 6034780 - DNA, 25 bp, Homo sapien
gaaaaagtggactcaatgggtccta

SEQ ID NO: 6034781 - DNA, 25 bp, Homo sapien
ctcacgactactccgacatggacaa

SEQ ID NO: 6034782 - DNA, 25 bp, Homo sapien
taggtacacccatcgccatgatgat

SEQ ID NO: 6034783 - DNA, 25 bp, Homo sapien
gattggccgtgtcgcttcaggtgcc

SEQ ID NO: 6034784 - DNA, 25 bp, Homo sapien
aagaccgggtcaatctaagctatcg

SEQ ID NO: 6034785 - DNA, 25 bp, Homo sapien
tcaaaaacgaggaccaaagacctca

SEQ ID NO: 6034786 - DNA, 25 bp, Homo sapien
agaaatagatgttctcaccattaga

SEQ ID NO: 6034787 - DNA, 25 bp, Homo sapien
tccctggtgatggtgttcaacagat

SEQ ID NO: 6034788 - DNA, 25 bp, Homo sapien
caagtttctcacgacacaagtgacg

SEQ ID NO: 6034789 - DNA, 25 bp, Homo sapien
tcaaagcatggctcaccgagaccgg

SEQ ID NO: 6034790 - DNA, 25 bp, Homo sapien
agtgacgacaccaccgatagagtcc

SEQ ID NO: 6034791 - DNA, 25 bp, Homo sapien
aacatggcttccaacttgtcaaagc

SEQ ID NO: 6034792 - DNA, 25 bp, Homo sapien
ctgaaaacctgagccaatttcgaaa

SEQ ID NO: 6034793 - DNA, 25 bp, Homo sapien
ggaatagctcttggagtgacagcag

SEQ ID NO: 6034794 - DNA, 25 bp, Homo sapien
acaataggaatagctcttggagtga

SEQ ID NO: 6034795 - DNA, 25 bp, Homo sapien
ggttttttgttcttgagagatagtg

SEQ ID NO: 6034796 - DNA, 25 bp, Homo sapien
ccctggaacagagacaccctgaaaa

SEQ ID NO: 6034797 - DNA, 25 bp, Homo sapien
tggtctttgttcttaatctgtttgt

SEQ ID NO: 6034798 - DNA, 25 bp, Homo sapien
gacacaagtgacgacaccaccgata

SEQ ID NO: 6034799 - DNA, 25 bp, Homo sapien
tgaatgggacagagaaatagatgtt

SEQ ID NO: 6034800 - DNA, 25 bp, Homo sapien
cacctgaattgttggtctttgttct

SEQ ID NO: 6034801 - DNA, 25 bp, Homo sapien
cctctgtacttttcgatttccttga

SEQ ID NO: 6034802 - DNA, 25 bp, Homo sapien
cccattgagtccactttttccctgg

SEQ ID NO: 6034803 - DNA, 25 bp, Homo sapien
cttcttcaccatcgtaagtggcggt

SEQ ID NO: 6034804 - DNA, 25 bp, Homo sapien
agatgttctcaccattagagatacc

SEQ ID NO: 6034805 - DNA, 25 bp, Homo sapien
acagcagggtcatgtctacccttag

SEQ ID NO: 6034806 - DNA, 25 bp, Homo sapien
gacaccaccgatagagtccttgttg

SEQ ID NO: 6034807 - DNA, 25 bp, Homo sapien
tccttgaccatcaaaccagcaacgg

SEQ ID NO: 6034808 - DNA, 25 bp, Homo sapien
agataccttcttcaccatcgtaagt

SEQ ID NO: 6034809 - DNA, 25 bp, Homo sapien
catctgataggacccattgagtcca

SEQ ID NO: 6034810 - DNA, 25 bp, Homo sapien
tacttttcgatttccttgaccatca

SEQ ID NO: 6034811 - DNA, 25 bp, Homo sapien
cgaaacccttggatgctggaatgga

SEQ ID NO: 6034812 - DNA, 25 bp, Homo sapien
caccttgtacaccacctgaattgtt

SEQ ID NO: 6034813 - DNA, 25 bp, Homo sapien
gtacaccacctgaattgttggtctt

SEQ ID NO: 6034814 - DNA, 25 bp, Homo sapien
aaaccagcaacggaggcgtctggac

SEQ ID NO: 6034815 - DNA, 25 bp, Homo sapien
gtgatggtgttcaacagatgctgaa

SEQ ID NO: 6034816 - DNA, 25 bp, Homo sapien
gagccaacatggcttccaacttgtc

SEQ ID NO: 6034817 - DNA, 25 bp, Homo sapien
tgggtcattgtgcttggaccctgga

SEQ ID NO: 6034818 - DNA, 25 bp, Homo sapien
caccatcgtaagtggcggttttttg

SEQ ID NO: 6034819 - DNA, 25 bp, Homo sapien
tctggacatctgataggacccattg

SEQ ID NO: 6034820 - DNA, 25 bp, Homo sapien
acaccagagcggtcatggcttccac

SEQ ID NO: 6034821 - DNA, 25 bp, Homo sapien
tctcacgacacaagtgacgacacca

SEQ ID NO: 6034822 - DNA, 25 bp, Homo sapien
gaatggacaacatagcatgagccaa

SEQ ID NO: 6034823 - DNA, 25 bp, Homo sapien
gctcttggagtgacagcagggtcat

SEQ ID NO: 6034824 - DNA, 25 bp, Homo sapien
tagcatgagccaacatggcttccaa

SEQ ID NO: 6034825 - DNA, 25 bp, Homo sapien
tgccttttggatcaaaagcgcgtca

SEQ ID NO: 6034826 - DNA, 25 bp, Homo sapien
catggctcaccgagaccggtaggca

SEQ ID NO: 6034827 - DNA, 25 bp, Homo sapien
agataccaccttgtacaccacctga

SEQ ID NO: 6034828 - DNA, 25 bp, Homo sapien
ggtaggcaagtttctcacgacacaa

SEQ ID NO: 6034829 - DNA, 25 bp, Homo sapien
gcaacggaggcgtctggacatctga

SEQ ID NO: 6034830 - DNA, 25 bp, Homo sapien
gcttccacaataggaatagctcttg

SEQ ID NO: 6034831 - DNA, 25 bp, Homo sapien
ttgttgcctctgtacttttcgattt

SEQ ID NO: 6034832 - DNA, 25 bp, Homo sapien
tcttaatctgtttgtttctttttca

SEQ ID NO: 6034833 - DNA, 25 bp, Homo sapien
gtgttcaacagatgctgaaattcag

SEQ ID NO: 6034834 - DNA, 25 bp, Homo sapien
gagcggtcatggcttccacaatagg

SEQ ID NO: 6034835 - DNA, 25 bp, Homo sapien
tcaccgagaccggtaggcaagtttc

SEQ ID NO: 6034836 - DNA, 25 bp, Homo sapien
tctcaccattagagataccaccttg

SEQ ID NO: 6034837 - DNA, 25 bp, Homo sapien
gtcatggcttccacaataggaatag

SEQ ID NO: 6034838 - DNA, 25 bp, Homo sapien
gtaaaatgggtcattgtgcttggac

SEQ ID NO: 6034839 - DNA, 25 bp, Homo sapien
ccttggatgctggaatggacaacat

SEQ ID NO: 6034840 - DNA, 25 bp, Homo sapien
gaggcgtctggacatctgataggac

SEQ ID NO: 6034841 - DNA, 25 bp, Homo sapien
aacagagacaccctgaaaacctgag

SEQ ID NO: 6034842 - DNA, 25 bp, Homo sapien
aattgttggtctttgttcttaatct

SEQ ID NO: 6034843 - DNA, 25 bp, Homo sapien
tcaaaagcgcgtcagccaacaccag

SEQ ID NO: 6034844 - DNA, 25 bp, Homo sapien
cagccaacaccagagcggtcatggc

SEQ ID NO: 6034845 - DNA, 25 bp, Homo sapien
tgagccaatttcgaaacccttggat

SEQ ID NO: 6034846 - DNA, 25 bp, Homo sapien
gcgcgtcagccaacaccagagcggt

SEQ ID NO: 6034847 - DNA, 25 bp, Homo sapien
accatcaaaccagcaacggaggcgt

SEQ ID NO: 6034848 - DNA, 25 bp, Homo sapien
gacaccctgaaaacctgagccaatt

SEQ ID NO: 6034849 - DNA, 25 bp, Homo sapien
ccttagcggctaagataccttcttc

SEQ ID NO: 6034850 - DNA, 25 bp, Homo sapien
aatttcgaaacccttggatgctgga

SEQ ID NO: 6034851 - DNA, 25 bp, Homo sapien
ggagtgacagcagggtcatgtctac

SEQ ID NO: 6034852 - DNA, 25 bp, Homo sapien
ggccactgacttgaatgggacagag

SEQ ID NO: 6034853 - DNA, 25 bp, Homo sapien
gcttccaacttgtcaaagcatggct

SEQ ID NO: 6034854 - DNA, 25 bp, Homo sapien
cttggaccctggaacagagacaccc

SEQ ID NO: 6034855 - DNA, 25 bp, Homo sapien
cattagagataccaccttgtacacc

SEQ ID NO: 6034856 - DNA, 25 bp, Homo sapien
aacttgtcaaagcatggctcaccga

SEQ ID NO: 6034857 - DNA, 25 bp, Homo sapien
ttgttcttgagagatagtggccact

SEQ ID NO: 6034858 - DNA, 25 bp, Homo sapien
gagtccactttttccctggtgatgg

SEQ ID NO: 6034859 - DNA, 25 bp, Homo sapien
ttgagagatagtggccactgacttg

SEQ ID NO: 6034860 - DNA, 25 bp, Homo sapien
ggacagagaaatagatgttctcacc

SEQ ID NO: 6034861 - DNA, 25 bp, Homo sapien
tcgatttccttgaccatcaaaccag

SEQ ID NO: 6034862 - DNA, 25 bp, Homo sapien
gagaccggtaggcaagtttctcacg

SEQ ID NO: 6034863 - DNA, 25 bp, Homo sapien
gataggacccattgagtccactttt

SEQ ID NO: 6034864 - DNA, 25 bp, Homo sapien
atgctggaatggacaacatagcatg

SEQ ID NO: 6034865 - DNA, 25 bp, Homo sapien
agtggcggttttttgttcttgagag

SEQ ID NO: 6034866 - DNA, 25 bp, Homo sapien
tgtctacccttagcggctaagatac

SEQ ID NO: 6034867 - DNA, 25 bp, Homo sapien
acaacatagcatgagccaacatggc

SEQ ID NO: 6034868 - DNA, 25 bp, Homo sapien
attgtgcttggaccctggaacagag

SEQ ID NO: 6034869 - DNA, 25 bp, Homo sapien
gatagtggccactgacttgaatggg

SEQ ID NO: 6034870 - DNA, 25 bp, Homo sapien
tcaaagtaaaatgggtcattgtgct

SEQ ID NO: 6034871 - DNA, 25 bp, Homo sapien
aacagatgctgaaattcaggatcga

SEQ ID NO: 6034872 - DNA, 25 bp, Homo sapien
accgatagagtccttgttgcctctg

SEQ ID NO: 6034873 - DNA, 25 bp, Homo sapien
tgacttgaatgggacagagaaatag

SEQ ID NO: 6034874 - DNA, 25 bp, Homo sapien
tttggatcaaaagcgcgtcagccaa

SEQ ID NO: 6034875 - DNA, 25 bp, Homo sapien
gggtcatgtctacccttagcggcta

SEQ ID NO: 6034876 - DNA, 25 bp, Homo sapien
cggctaagataccttcttcaccatc

SEQ ID NO: 6034877 - DNA, 25 bp, Homo sapien
actttttccctggtgatggtgttca

SEQ ID NO: 6034878 - DNA, 25 bp, Homo sapien
agagtccttgttgcctctgtacttt

SEQ ID NO: 6034879 - DNA, 25 bp, Homo sapien
ataagacaaattgtggatcttcggt

SEQ ID NO: 6034880 - DNA, 25 bp, Homo sapien
caaattgtggatcttcggttgattc

SEQ ID NO: 6034881 - DNA, 25 bp, Homo sapien
ttcacatcagggacatgacgtgaac

SEQ ID NO: 6034882 - DNA, 25 bp, Homo sapien
tagactataagacaaattgtggatc

SEQ ID NO: 6034883 - DNA, 25 bp, Homo sapien
acatgacgtgaacagaatggcgata

SEQ ID NO: 6034884 - DNA, 25 bp, Homo sapien
ggactctctatatttgatgttaacg

SEQ ID NO: 6034885 - DNA, 25 bp, Homo sapien
cagacgatttaaggttttgctacat

SEQ ID NO: 6034886 - DNA, 25 bp, Homo sapien
caaaagaagcctggcgagatttgtt

SEQ ID NO: 6034887 - DNA, 25 bp, Homo sapien
tggatttgttggaagcttagtcatg

SEQ ID NO: 6034888 - DNA, 25 bp, Homo sapien
tttgtttctaagtgccaacgacctg

SEQ ID NO: 6034889 - DNA, 25 bp, Homo sapien
tcagggacatgacgtgaacagaatg

SEQ ID NO: 6034890 - DNA, 25 bp, Homo sapien
gcgaagtacggcgatcatcttggct

SEQ ID NO: 6034891 - DNA, 25 bp, Homo sapien
accgtggctcgtttgtatcttgttt

SEQ ID NO: 6034892 - DNA, 25 bp, Homo sapien
cttgtttagactataagacaaattg

SEQ ID NO: 6034893 - DNA, 25 bp, Homo sapien
tccatgattatgctgagagattacg

SEQ ID NO: 6034894 - DNA, 25 bp, Homo sapien
aagcttagtcatgaatatccctcac

SEQ ID NO: 6034895 - DNA, 25 bp, Homo sapien
gatatctggatttgttggaagctta

SEQ ID NO: 6034896 - DNA, 25 bp, Homo sapien
tgttggaagcttagtcatgaatatc

SEQ ID NO: 6034897 - DNA, 25 bp, Homo sapien
atttaaggttttgctacatcgcagt

SEQ ID NO: 6034898 - DNA, 25 bp, Homo sapien
gctgagagattacgagtattttgag

SEQ ID NO: 6034899 - DNA, 25 bp, Homo sapien
gtggatcttcggttgattcagacga

SEQ ID NO: 6034900 - DNA, 25 bp, Homo sapien
ttgattcagacgatttaaggttttg

SEQ ID NO: 6034901 - DNA, 25 bp, Homo sapien
atttgatgttaacgtttctgcgaag

SEQ ID NO: 6034902 - DNA, 25 bp, Homo sapien
tctacagttgcttccctcttcacat

SEQ ID NO: 6034903 - DNA, 25 bp, Homo sapien
tcgcagttgccattctgtacatatg

SEQ ID NO: 6034904 - DNA, 25 bp, Homo sapien
ttttgagactatactagacaaaaga

SEQ ID NO: 6034905 - DNA, 25 bp, Homo sapien
gatacagaaaatactgtgatatctg

SEQ ID NO: 6034906 - DNA, 25 bp, Homo sapien
tatataatgtcgcaacaatgctaca

SEQ ID NO: 6034907 - DNA, 25 bp, Homo sapien
gactatactagacaaaagaagcctg

SEQ ID NO: 6034908 - DNA, 25 bp, Homo sapien
atcaaaacagtgctggatgatacag

SEQ ID NO: 6034909 - DNA, 25 bp, Homo sapien
tactcaatctcaggactctctatat

SEQ ID NO: 6034910 - DNA, 25 bp, Homo sapien
ttctgtacatatgcggatgccgatc

SEQ ID NO: 6034911 - DNA, 25 bp, Homo sapien
atattctactcaatctcaggactct

SEQ ID NO: 6034912 - DNA, 25 bp, Homo sapien
tctaagtgccaacgacctgaccgtg

SEQ ID NO: 6034913 - DNA, 25 bp, Homo sapien
taatctaccaaatactctctttgca

SEQ ID NO: 6034914 - DNA, 25 bp, Homo sapien
cttcggttgattcagacgatttaag

SEQ ID NO: 6034915 - DNA, 25 bp, Homo sapien
gcgagatttgtttctaagtgccaac

SEQ ID NO: 6034916 - DNA, 25 bp, Homo sapien
tactgtgatatctggatttgttgga

SEQ ID NO: 6034917 - DNA, 25 bp, Homo sapien
ctgagaagttgcttggctatataat

SEQ ID NO: 6034918 - DNA, 25 bp, Homo sapien
gcataggaaatttttcgaaagacat

SEQ ID NO: 6034919 - DNA, 25 bp, Homo sapien
cgtgaacagaatggcgataatattc

SEQ ID NO: 6034920 - DNA, 25 bp, Homo sapien
gattatgctgagagattacgagtat

SEQ ID NO: 6034921 - DNA, 25 bp, Homo sapien
cgcaacaacgattaatctaccaaat

SEQ ID NO: 6034922 - DNA, 25 bp, Homo sapien
agttgcttggctatataatgtcgca

SEQ ID NO: 6034923 - DNA, 25 bp, Homo sapien
agaatggcgataatattctactcaa

SEQ ID NO: 6034924 - DNA, 25 bp, Homo sapien
gcggatgccgatccaaagaagactt

SEQ ID NO: 6034925 - DNA, 25 bp, Homo sapien
agcctggcgagatttgtttctaagt

SEQ ID NO: 6034926 - DNA, 25 bp, Homo sapien
tggatgcgcaaacattatatcaaaa

SEQ ID NO: 6034927 - DNA, 25 bp, Homo sapien
ttgatactgagaagttgcttggcta

SEQ ID NO: 6034928 - DNA, 25 bp, Homo sapien
caacaatgctacaacggagctttcg

SEQ ID NO: 6034929 - DNA, 25 bp, Homo sapien
aatacattgatactgagaagttgct

SEQ ID NO: 6034930 - DNA, 25 bp, Homo sapien
ttggctatataatgtcgcaacaatg

SEQ ID NO: 6034931 - DNA, 25 bp, Homo sapien
gctacatcgcagttgccattctgta

SEQ ID NO: 6034932 - DNA, 25 bp, Homo sapien
ttgatgaatacattgatactgagaa

SEQ ID NO: 6034933 - DNA, 25 bp, Homo sapien
atgtcgcaacaatgctacaacggag

SEQ ID NO: 6034934 - DNA, 25 bp, Homo sapien
tctatatttgatgttaacgtttctg

SEQ ID NO: 6034935 - DNA, 25 bp, Homo sapien
acagtgctggatgatacagaaaata

SEQ ID NO: 6034936 - DNA, 25 bp, Homo sapien
ctggatgatacagaaaatactgtga

SEQ ID NO: 6034937 - DNA, 25 bp, Homo sapien
cattatatcaaaacagtgctggatg

SEQ ID NO: 6034938 - DNA, 25 bp, Homo sapien
actagacaaaagaagcctggcgaga

SEQ ID NO: 6034939 - DNA, 25 bp, Homo sapien
tccctcttcacatcagggacatgac

SEQ ID NO: 6034940 - DNA, 25 bp, Homo sapien
gaaaatactgtgatatctggatttg

SEQ ID NO: 6034941 - DNA, 25 bp, Homo sapien
ttgttgtccatgattatgctgagag

SEQ ID NO: 6034942 - DNA, 25 bp, Homo sapien
cgatcatcttggctggatgcgcaaa

SEQ ID NO: 6034943 - DNA, 25 bp, Homo sapien
gcgataatattctactcaatctcag

SEQ ID NO: 6034944 - DNA, 25 bp, Homo sapien
gttgcttccctcttcacatcaggga

SEQ ID NO: 6034945 - DNA, 25 bp, Homo sapien
ccaaagaagactttgatgaatacat

SEQ ID NO: 6034946 - DNA, 25 bp, Homo sapien
agattacgagtattttgagactata

SEQ ID NO: 6034947 - DNA, 25 bp, Homo sapien
gtacggcgatcatcttggctggatg

SEQ ID NO: 6034948 - DNA, 25 bp, Homo sapien
gtttctgcgaagtacggcgatcatc

SEQ ID NO: 6034949 - DNA, 25 bp, Homo sapien
atctcaggactctctatatttgatg

SEQ ID NO: 6034950 - DNA, 25 bp, Homo sapien
cgagtattttgagactatactagac

SEQ ID NO: 6034951 - DNA, 25 bp, Homo sapien
gaaatttttcgaaagacatctacag

SEQ ID NO: 6034952 - DNA, 25 bp, Homo sapien
aagacatctacagttgcttccctct

SEQ ID NO: 6034953 - DNA, 25 bp, Homo sapien
aacgattaatctaccaaatactctc

SEQ ID NO: 6034954 - DNA, 25 bp, Homo sapien
agtcatgaatatccctcacgcaaca

SEQ ID NO: 6034955 - DNA, 25 bp, Homo sapien
tttgcattgttgtccatgattatgc

SEQ ID NO: 6034956 - DNA, 25 bp, Homo sapien
actctctttgcattgttgtccatga

SEQ ID NO: 6034957 - DNA, 25 bp, Homo sapien
cgcaaacattatatcaaaacagtgc

SEQ ID NO: 6034958 - DNA, 25 bp, Homo sapien
tgtatcttgtttagactataagaca

SEQ ID NO: 6034959 - DNA, 25 bp, Homo sapien
tgtgactaaaaagcataggaaattt

SEQ ID NO: 6034960 - DNA, 25 bp, Homo sapien
tgttaacgtttctgcgaagtacggc

SEQ ID NO: 6034961 - DNA, 25 bp, Homo sapien
aagactttgatgaatacattgatac

SEQ ID NO: 6034962 - DNA, 25 bp, Homo sapien
tgccaacgacctgaccgtggctcgt

SEQ ID NO: 6034963 - DNA, 25 bp, Homo sapien
ccaaatactctctttgcattgttgt

SEQ ID NO: 6034964 - DNA, 25 bp, Homo sapien
cgacctgaccgtggctcgtttgtat

SEQ ID NO: 6034965 - DNA, 25 bp, Homo sapien
gccgatccaaagaagactttgatga

SEQ ID NO: 6034966 - DNA, 25 bp, Homo sapien
tcttggctggatgcgcaaacattat

SEQ ID NO: 6034967 - DNA, 25 bp, Homo sapien
ccctcacgcaacaacgattaatcta

SEQ ID NO: 6034968 - DNA, 25 bp, Homo sapien
ttgccattctgtacatatgcggatg

SEQ ID NO: 6034969 - DNA, 25 bp, Homo sapien
ggttttgctacatcgcagttgccat

SEQ ID NO: 6034970 - DNA, 25 bp, Homo sapien
gctcgtttgtatcttgtttagacta

SEQ ID NO: 6034971 - DNA, 25 bp, Homo sapien
acatatgcggatgccgatccaaaga

SEQ ID NO: 6034972 - DNA, 25 bp, Homo sapien
tttcgaaagacatctacagttgctt

SEQ ID NO: 6034973 - DNA, 25 bp, Homo sapien
gaatatccctcacgcaacaacgatt

SEQ ID NO: 6034974 - DNA, 25 bp, Homo sapien
gatcaagcaaataatttgtgactag

SEQ ID NO: 6034975 - DNA, 25 bp, Homo sapien
tttaagcaccaaaatgcgtaacacg

SEQ ID NO: 6034976 - DNA, 25 bp, Homo sapien
ttccaaactagagagtaaagctaag

SEQ ID NO: 6034977 - DNA, 25 bp, Homo sapien
cagattgatcatagctggcattcaa

SEQ ID NO: 6034978 - DNA, 25 bp, Homo sapien
tcttgaggtatgcataattctccat

SEQ ID NO: 6034979 - DNA, 25 bp, Homo sapien
cattgttgcgacattatatagccaa

SEQ ID NO: 6034980 - DNA, 25 bp, Homo sapien
tagctggcattcaattcgctttcaa

SEQ ID NO: 6034981 - DNA, 25 bp, Homo sapien
aagtcttctttggatcggcatccgc

SEQ ID NO: 6034982 - DNA, 25 bp, Homo sapien
aaatgcgtaacacgtatcagcgaac

SEQ ID NO: 6034983 - DNA, 25 bp, Homo sapien
tggcatagcattttccaatcctttg

SEQ ID NO: 6034984 - DNA, 25 bp, Homo sapien
tcatttttactaaagcctccagtta

SEQ ID NO: 6034985 - DNA, 25 bp, Homo sapien
gcgaacttgttctcccttccctgga

SEQ ID NO: 6034986 - DNA, 25 bp, Homo sapien
gttagtaagtgtagtgaatttaagc

SEQ ID NO: 6034987 - DNA, 25 bp, Homo sapien
agtgaatttaagcaccaaaatgcgt

SEQ ID NO: 6034988 - DNA, 25 bp, Homo sapien
ttctcagtatcaatgtattcatcaa

SEQ ID NO: 6034989 - DNA, 25 bp, Homo sapien
aagcctccagttaatgttttttgcg

SEQ ID NO: 6034990 - DNA, 25 bp, Homo sapien
ccttccctggaaaccgccatcatca

SEQ ID NO: 6034991 - DNA, 25 bp, Homo sapien
ttccaatcctttgttagtaagtgta

SEQ ID NO: 6034992 - DNA, 25 bp, Homo sapien
cagcgcacaagatgtgtaccctgag

SEQ ID NO: 6034993 - DNA, 25 bp, Homo sapien
cctgagtgtggttcattgtgggcac

SEQ ID NO: 6034994 - DNA, 25 bp, Homo sapien
acaagatgtgtaccctgagtgtggt

SEQ ID NO: 6034995 - DNA, 25 bp, Homo sapien
ttttttgcgttcgatcaagcaaata

SEQ ID NO: 6034996 - DNA, 25 bp, Homo sapien
catcatcagattgatcatagctggc

SEQ ID NO: 6034997 - DNA, 25 bp, Homo sapien
aagtgtagtgaatttaagcaccaaa

SEQ ID NO: 6034998 - DNA, 25 bp, Homo sapien
ggtgtcttctttaaacttgtctgat

SEQ ID NO: 6034999 - DNA, 25 bp, Homo sapien
gtgggcaccgaaagctccgttgtag

SEQ ID NO: 6035000 - DNA, 25 bp, Homo sapien
ggtatgcataattctccattaaatt

SEQ ID NO: 6035001 - DNA, 25 bp, Homo sapien
gcattcaattcgctttcaaatttca

SEQ ID NO: 6035002 - DNA, 25 bp, Homo sapien
cctagacagctgtgatataaatcag

SEQ ID NO: 6035003 - DNA, 25 bp, Homo sapien
ctttcaaatttcatacatccatggc

SEQ ID NO: 6035004 - DNA, 25 bp, Homo sapien
tgatataaatcagcatcttcttcgt

SEQ ID NO: 6035005 - DNA, 25 bp, Homo sapien
ggtagacagcgcacaagatgtgtac

SEQ ID NO: 6035006 - DNA, 25 bp, Homo sapien
aattcgctttcaaatttcatacatc

SEQ ID NO: 6035007 - DNA, 25 bp, Homo sapien
cctggaaaccgccatcatcagattg

SEQ ID NO: 6035008 - DNA, 25 bp, Homo sapien
gttgtagcattgttgcgacattata

SEQ ID NO: 6035009 - DNA, 25 bp, Homo sapien
tacagaatggcaactgcgatgtagc

SEQ ID NO: 6035010 - DNA, 25 bp, Homo sapien
cgtatcagcgaacttgttctccctt

SEQ ID NO: 6035011 - DNA, 25 bp, Homo sapien
tgtggttcattgtgggcaccgaaag

SEQ ID NO: 6035012 - DNA, 25 bp, Homo sapien
attatatagccaagcaacttctcag

SEQ ID NO: 6035013 - DNA, 25 bp, Homo sapien
aatagccaggttatggtgtcttctt

SEQ ID NO: 6035014 - DNA, 25 bp, Homo sapien
gtgtaccctgagtgtggttcattgt

SEQ ID NO: 6035015 - DNA, 25 bp, Homo sapien
gtatcaatgtattcatcaaagtctt

SEQ ID NO: 6035016 - DNA, 25 bp, Homo sapien
cttgatacttgcctatgtaatagcc

SEQ ID NO: 6035017 - DNA, 25 bp, Homo sapien
ctatgtaatagccaggttatggtgt

SEQ ID NO: 6035018 - DNA, 25 bp, Homo sapien
ttcattgtgggcaccgaaagctccg

SEQ ID NO: 6035019 - DNA, 25 bp, Homo sapien
tcatcaaagtcttctttggatcggc

SEQ ID NO: 6035020 - DNA, 25 bp, Homo sapien
tctccattaaatttcccctcaatta

SEQ ID NO: 6035021 - DNA, 25 bp, Homo sapien
caggttatggtgtcttctttaaact

SEQ ID NO: 6035022 - DNA, 25 bp, Homo sapien
atacatccatggcttgatacttgcc

SEQ ID NO: 6035023 - DNA, 25 bp, Homo sapien
gatcatagctggcattcaattcgct

SEQ ID NO: 6035024 - DNA, 25 bp, Homo sapien
aatatttcttgaggtatgcataatt

SEQ ID NO: 6035025 - DNA, 25 bp, Homo sapien
gtaacacgtatcagcgaacttgttc

SEQ ID NO: 6035026 - DNA, 25 bp, Homo sapien
cataattctccattaaatttcccct

SEQ ID NO: 6035027 - DNA, 25 bp, Homo sapien
tcttcgtcatttttactaaagcctc

SEQ ID NO: 6035028 - DNA, 25 bp, Homo sapien
tagccaagcaacttctcagtatcaa

SEQ ID NO: 6035029 - DNA, 25 bp, Homo sapien
accgaaagctccgttgtagcattgt

SEQ ID NO: 6035030 - DNA, 25 bp, Homo sapien
ttcccctcaattaatgctaacgcag

SEQ ID NO: 6035031 - DNA, 25 bp, Homo sapien
gagtaaagctaaggtagacagcgca

SEQ ID NO: 6035032 - DNA, 25 bp, Homo sapien
ttaatgttttttgcgttcgatcaag

SEQ ID NO: 6035033 - DNA, 25 bp, Homo sapien
ccatggcttgatacttgcctatgta

SEQ ID NO: 6035034 - DNA, 25 bp, Homo sapien
tcagtttggcatagcattttccaat

SEQ ID NO: 6035035 - DNA, 25 bp, Homo sapien
agcattttccaatcctttgttagta

SEQ ID NO: 6035036 - DNA, 25 bp, Homo sapien
gcatcttcttcgtcatttttactaa

SEQ ID NO: 6035037 - DNA, 25 bp, Homo sapien
catccgcatatgtacagaatggcaa

SEQ ID NO: 6035038 - DNA, 25 bp, Homo sapien
ttctttaaacttgtctgatagcttt

SEQ ID NO: 6035039 - DNA, 25 bp, Homo sapien
agctccgttgtagcattgttgcgac

SEQ ID NO: 6035040 - DNA, 25 bp, Homo sapien
tcctttgttagtaagtgtagtgaat

SEQ ID NO: 6035041 - DNA, 25 bp, Homo sapien
ctccagttaatgttttttgcgttcg

SEQ ID NO: 6035042 - DNA, 25 bp, Homo sapien
actagagagtaaagctaaggtagac

SEQ ID NO: 6035043 - DNA, 25 bp, Homo sapien
caaataatttgtgactagttcagtt

SEQ ID NO: 6035044 - DNA, 25 bp, Homo sapien
actagttcagtttggcatagcattt

SEQ ID NO: 6035045 - DNA, 25 bp, Homo sapien
atgtattcatcaaagtcttctttgg

SEQ ID NO: 6035046 - DNA, 25 bp, Homo sapien
aaatcagcatcttcttcgtcatttt

SEQ ID NO: 6035047 - DNA, 25 bp, Homo sapien
acttgcctatgtaatagccaggtta

SEQ ID NO: 6035048 - DNA, 25 bp, Homo sapien
gatcggcatccgcatatgtacagaa

SEQ ID NO: 6035049 - DNA, 25 bp, Homo sapien
tcaattaatgctaacgcagcgctcc

SEQ ID NO: 6035050 - DNA, 25 bp, Homo sapien
catatgtacagaatggcaactgcga

SEQ ID NO: 6035051 - DNA, 25 bp, Homo sapien
tgcgacattatatagccaagcaact

SEQ ID NO: 6035052 - DNA, 25 bp, Homo sapien
tagcttttccaaactagagagtaaa

SEQ ID NO: 6035053 - DNA, 25 bp, Homo sapien
gcgttcgatcaagcaaataatttgt

SEQ ID NO: 6035054 - DNA, 25 bp, Homo sapien
tttgtgactagttcagtttggcata

SEQ ID NO: 6035055 - DNA, 25 bp, Homo sapien
agcaacttctcagtatcaatgtatt

SEQ ID NO: 6035056 - DNA, 25 bp, Homo sapien
cagctgtgatataaatcagcatctt

SEQ ID NO: 6035057 - DNA, 25 bp, Homo sapien
gcaccaaaatgcgtaacacgtatca

SEQ ID NO: 6035058 - DNA, 25 bp, Homo sapien
ttaaatttcccctcaattaatgcta

SEQ ID NO: 6035059 - DNA, 25 bp, Homo sapien
aaccgccatcatcagattgatcata

SEQ ID NO: 6035060 - DNA, 25 bp, Homo sapien
tctttggatcggcatccgcatatgt

SEQ ID NO: 6035061 - DNA, 25 bp, Homo sapien
gtctgatagcttttccaaactagag

SEQ ID NO: 6035062 - DNA, 25 bp, Homo sapien
aatgctaacgcagcgctccctagac

SEQ ID NO: 6035063 - DNA, 25 bp, Homo sapien
aatttcatacatccatggcttgata

SEQ ID NO: 6035064 - DNA, 25 bp, Homo sapien
aaacttgtctgatagcttttccaaa

SEQ ID NO: 6035065 - DNA, 25 bp, Homo sapien
gcgctccctagacagctgtgatata

SEQ ID NO: 6035066 - DNA, 25 bp, Homo sapien
acgcagcgctccctagacagctgtg

SEQ ID NO: 6035067 - DNA, 25 bp, Homo sapien
agctaaggtagacagcgcacaagat

SEQ ID NO: 6035068 - DNA, 25 bp, Homo sapien
tgattaattcgtccgagaatgccaa

SEQ ID NO: 6035069 - DNA, 25 bp, Homo sapien
gacgacgatgccttttctaacgtta

SEQ ID NO: 6035070 - DNA, 25 bp, Homo sapien
gggccataataggtctgactacggc

SEQ ID NO: 6035071 - DNA, 25 bp, Homo sapien
tgacaaagccatcgtggagcattac

SEQ ID NO: 6035072 - DNA, 25 bp, Homo sapien
attttgatggggaatcggacaggtt

SEQ ID NO: 6035073 - DNA, 25 bp, Homo sapien
agaattaaaggagttgattaattcg

SEQ ID NO: 6035074 - DNA, 25 bp, Homo sapien
ggtaggtgtgcctctgttcatagaa

SEQ ID NO: 6035075 - DNA, 25 bp, Homo sapien
taaatgcggtgaatgtggtaatttc

SEQ ID NO: 6035076 - DNA, 25 bp, Homo sapien
tttgggtaaattcaggtatgatgaa

SEQ ID NO: 6035077 - DNA, 25 bp, Homo sapien
atgtggtaatttctacccaacttgg

SEQ ID NO: 6035078 - DNA, 25 bp, Homo sapien
gacaggtttgatgaaagaaatagaa

SEQ ID NO: 6035079 - DNA, 25 bp, Homo sapien
agcagagacgacgatgccttttcta

SEQ ID NO: 6035080 - DNA, 25 bp, Homo sapien
aatagaagtaggagcaggagcagat

SEQ ID NO: 6035081 - DNA, 25 bp, Homo sapien
tgccttttctaacgttaaatcacta

SEQ ID NO: 6035082 - DNA, 25 bp, Homo sapien
cgtggagcattacattagagacaag

SEQ ID NO: 6035083 - DNA, 25 bp, Homo sapien
gcctgaagactttggatccagaatg

SEQ ID NO: 6035084 - DNA, 25 bp, Homo sapien
ccaaagcagtggaagcagatattct

SEQ ID NO: 6035085 - DNA, 25 bp, Homo sapien
ctttgtggtaggtgtgcctctgttc

SEQ ID NO: 6035086 - DNA, 25 bp, Homo sapien
tcggttctggaatcctaaaaatgtc

SEQ ID NO: 6035087 - DNA, 25 bp, Homo sapien
agtaggagcaggagcagatctcatt

SEQ ID NO: 6035088 - DNA, 25 bp, Homo sapien
acatgttgacagagaattaaaggag

SEQ ID NO: 6035089 - DNA, 25 bp, Homo sapien
gagatgatgacaaagccatcgtgga

SEQ ID NO: 6035090 - DNA, 25 bp, Homo sapien
actggcagaactcaaggacatgggt

SEQ ID NO: 6035091 - DNA, 25 bp, Homo sapien
gatagatggacaagagaggatatcg

SEQ ID NO: 6035092 - DNA, 25 bp, Homo sapien
cgagaatgccaataaatgcggtgaa

SEQ ID NO: 6035093 - DNA, 25 bp, Homo sapien
ctcattccaaagcagtggaagcaga

SEQ ID NO: 6035094 - DNA, 25 bp, Homo sapien
tcactatcaatggatagatggacaa

SEQ ID NO: 6035095 - DNA, 25 bp, Homo sapien
gatgattttgatggggaatcggaca

SEQ ID NO: 6035096 - DNA, 25 bp, Homo sapien
tctaacgttaaatcactatcaatgg

SEQ ID NO: 6035097 - DNA, 25 bp, Homo sapien
ttcgtccgagaatgccaataaatgc

SEQ ID NO: 6035098 - DNA, 25 bp, Homo sapien
tgccaataaatgcggtgaatgtggt

SEQ ID NO: 6035099 - DNA, 25 bp, Homo sapien
aataaagcctgaagactttggatcc

SEQ ID NO: 6035100 - DNA, 25 bp, Homo sapien
agcagatctcattctttctataaag

SEQ ID NO: 6035101 - DNA, 25 bp, Homo sapien
aatgtcccttttccttttgatggag

SEQ ID NO: 6035102 - DNA, 25 bp, Homo sapien
agaactcaaggacatgggtttcggt

SEQ ID NO: 6035103 - DNA, 25 bp, Homo sapien
agcaggagcagatctcattctttct

SEQ ID NO: 6035104 - DNA, 25 bp, Homo sapien
aggcaataaggggaatgctcggttc

SEQ ID NO: 6035105 - DNA, 25 bp, Homo sapien
gaatgctcggttctggaatcctaaa

SEQ ID NO: 6035106 - DNA, 25 bp, Homo sapien
atattctaggcaactggcagaactc

SEQ ID NO: 6035107 - DNA, 25 bp, Homo sapien
aaagttttcggtagcagagacgacg

SEQ ID NO: 6035108 - DNA, 25 bp, Homo sapien
gtctgactacggcggttccagggac

SEQ ID NO: 6035109 - DNA, 25 bp, Homo sapien
aagcagatattctaggcaactggca

SEQ ID NO: 6035110 - DNA, 25 bp, Homo sapien
tttgatgaaagaaatagaagtagga

SEQ ID NO: 6035111 - DNA, 25 bp, Homo sapien
gaaagaaatagaagtaggagcagga

SEQ ID NO: 6035112 - DNA, 25 bp, Homo sapien
caaggacatgggtttcggtgataca

SEQ ID NO: 6035113 - DNA, 25 bp, Homo sapien
ctacggcggttccagggactcattc

SEQ ID NO: 6035114 - DNA, 25 bp, Homo sapien
taataggtctgactacggcggttcc

SEQ ID NO: 6035115 - DNA, 25 bp, Homo sapien
agagaggatatcgatgaattagtga

SEQ ID NO: 6035116 - DNA, 25 bp, Homo sapien
tcccttttccttttgatggagatga

SEQ ID NO: 6035117 - DNA, 25 bp, Homo sapien
taaattcaggtatgatgaaataaag

SEQ ID NO: 6035118 - DNA, 25 bp, Homo sapien
cattagagacaagtatattttgggt

SEQ ID NO: 6035119 - DNA, 25 bp, Homo sapien
gttaaatcactatcaatggatagat

SEQ ID NO: 6035120 - DNA, 25 bp, Homo sapien
cagtggaagcagatattctaggcaa

SEQ ID NO: 6035121 - DNA, 25 bp, Homo sapien
tgtgcctctgttcatagaaaagttt

SEQ ID NO: 6035122 - DNA, 25 bp, Homo sapien
cagggactcattccaaagcagtgga

SEQ ID NO: 6035123 - DNA, 25 bp, Homo sapien
cttggtgctcagttaatttgggggt

SEQ ID NO: 6035124 - DNA, 25 bp, Homo sapien
cagaatggatgattttgatggggaa

SEQ ID NO: 6035125 - DNA, 25 bp, Homo sapien
gatgaattagtgagtcttggaggca

SEQ ID NO: 6035126 - DNA, 25 bp, Homo sapien
gatggggaatcggacaggtttgatg

SEQ ID NO: 6035127 - DNA, 25 bp, Homo sapien
ttgatggagatgatgacaaagccat

SEQ ID NO: 6035128 - DNA, 25 bp, Homo sapien
tgacagagaattaaaggagttgatt

SEQ ID NO: 6035129 - DNA, 25 bp, Homo sapien
cggttccagggactcattccaaagc

SEQ ID NO: 6035130 - DNA, 25 bp, Homo sapien
tatattttgggtaaattcaggtatg

SEQ ID NO: 6035131 - DNA, 25 bp, Homo sapien
aatttctacccaacttggtgctcag

SEQ ID NO: 6035132 - DNA, 25 bp, Homo sapien
ttccttttgatggagatgatgacaa

SEQ ID NO: 6035133 - DNA, 25 bp, Homo sapien
tctgttcatagaaaagttttcggta

SEQ ID NO: 6035134 - DNA, 25 bp, Homo sapien
taaggggaatgctcggttctggaat

SEQ ID NO: 6035135 - DNA, 25 bp, Homo sapien
ttttcctttgtggtaggtgtgcctc

SEQ ID NO: 6035136 - DNA, 25 bp, Homo sapien
tctcattctttctataaagggggcc

SEQ ID NO: 6035137 - DNA, 25 bp, Homo sapien
ttagtgagtcttggaggcaataagg

SEQ ID NO: 6035138 - DNA, 25 bp, Homo sapien
taggcaactggcagaactcaaggac

SEQ ID NO: 6035139 - DNA, 25 bp, Homo sapien
acccaacttggtgctcagttaattt

SEQ ID NO: 6035140 - DNA, 25 bp, Homo sapien
tgatgaaataaagcctgaagacttt

SEQ ID NO: 6035141 - DNA, 25 bp, Homo sapien
ttcggtagcagagacgacgatgcct

SEQ ID NO: 6035142 - DNA, 25 bp, Homo sapien
catagaaaagttttcggtagcagag

SEQ ID NO: 6035143 - DNA, 25 bp, Homo sapien
tggacaagagaggatatcgatgaat

SEQ ID NO: 6035144 - DNA, 25 bp, Homo sapien
cggtgaatgtggtaatttctaccca

SEQ ID NO: 6035145 - DNA, 25 bp, Homo sapien
tcaatggatagatggacaagagagg

SEQ ID NO: 6035146 - DNA, 25 bp, Homo sapien
gaatcggacaggtttgatgaaagaa

SEQ ID NO: 6035147 - DNA, 25 bp, Homo sapien
aggagttgattaattcgtccgagaa

SEQ ID NO: 6035148 - DNA, 25 bp, Homo sapien
gacaagtatattttgggtaaattca

SEQ ID NO: 6035149 - DNA, 25 bp, Homo sapien
gcattacattagagacaagtatatt

SEQ ID NO: 6035150 - DNA, 25 bp, Homo sapien
agactttggatccagaatggatgat

SEQ ID NO: 6035151 - DNA, 25 bp, Homo sapien
tctttctataaagggggccataata

SEQ ID NO: 6035152 - DNA, 25 bp, Homo sapien
gatatcgatgaattagtgagtcttg

SEQ ID NO: 6035153 - DNA, 25 bp, Homo sapien
caggtatgatgaaataaagcctgaa

SEQ ID NO: 6035154 - DNA, 25 bp, Homo sapien
tcttggaggcaataaggggaatgct

SEQ ID NO: 6035155 - DNA, 25 bp, Homo sapien
taaagggggccataataggtctgac

SEQ ID NO: 6035156 - DNA, 25 bp, Homo sapien
agccatcgtggagcattacattaga

SEQ ID NO: 6035157 - DNA, 25 bp, Homo sapien
tggatccagaatggatgattttgat

SEQ ID NO: 6035158 - DNA, 25 bp, Homo sapien
ccggtagcaggatcgtaatactgtt

SEQ ID NO: 6035159 - DNA, 25 bp, Homo sapien
ccgatacactatttcttgaacttga

SEQ ID NO: 6035160 - DNA, 25 bp, Homo sapien
taatgcatctaaatttttgtttgta

SEQ ID NO: 6035161 - DNA, 25 bp, Homo sapien
gcgtgattacatttgtaccatcaaa

SEQ ID NO: 6035162 - DNA, 25 bp, Homo sapien
agttgatgttgtcgctgctgccgat

SEQ ID NO: 6035163 - DNA, 25 bp, Homo sapien
tgggcaggggcggagttgatgttgt

SEQ ID NO: 6035164 - DNA, 25 bp, Homo sapien
gcctgtgcctgtgcctgtgcctgag

SEQ ID NO: 6035165 - DNA, 25 bp, Homo sapien
acaaaagatgctgaatttgaagtaa

SEQ ID NO: 6035166 - DNA, 25 bp, Homo sapien
gctctattgatatttccgtgagcgg

SEQ ID NO: 6035167 - DNA, 25 bp, Homo sapien
gaatatctgcttccactgctttgga

SEQ ID NO: 6035168 - DNA, 25 bp, Homo sapien
gtttcctccttgcgacatttgctga

SEQ ID NO: 6035169 - DNA, 25 bp, Homo sapien
tgagcctgagcctgggcctgagcct

SEQ ID NO: 6035170 - DNA, 25 bp, Homo sapien
ctgctgttgcatagccatggcgtat

SEQ ID NO: 6035171 - DNA, 25 bp, Homo sapien
gccacttgttgtcgcacgtctcctg

SEQ ID NO: 6035172 - DNA, 25 bp, Homo sapien
tgttgctgctgttgcatagccatgg

SEQ ID NO: 6035173 - DNA, 25 bp, Homo sapien
tcgattgctctattgatatttccgt

SEQ ID NO: 6035174 - DNA, 25 bp, Homo sapien
ggacgataatgcatctaaatttttg

SEQ ID NO: 6035175 - DNA, 25 bp, Homo sapien
tgttgctgttgctgcatctgaagct

SEQ ID NO: 6035176 - DNA, 25 bp, Homo sapien
gcctgagcctgagcctgaacttgag

SEQ ID NO: 6035177 - DNA, 25 bp, Homo sapien
catcaaaaatagctggctgtgggcc

SEQ ID NO: 6035178 - DNA, 25 bp, Homo sapien
tgatctacatatatcattccggtag

SEQ ID NO: 6035179 - DNA, 25 bp, Homo sapien
cctccttgcgacatttgctgaaaag

SEQ ID NO: 6035180 - DNA, 25 bp, Homo sapien
agttctgccagttgcctagaatatc

SEQ ID NO: 6035181 - DNA, 25 bp, Homo sapien
gcctgagcctgaacttgagcctgtg

SEQ ID NO: 6035182 - DNA, 25 bp, Homo sapien
aaatagctggctgtgggccacttgt

SEQ ID NO: 6035183 - DNA, 25 bp, Homo sapien
tgttgtcgcacgtctcctgggcagg

SEQ ID NO: 6035184 - DNA, 25 bp, Homo sapien
ctgtgggccacttgttgtcgcacgt

SEQ ID NO: 6035185 - DNA, 25 bp, Homo sapien
agataatcgattgctctattgatat

SEQ ID NO: 6035186 - DNA, 25 bp, Homo sapien
ttgatatttccgtgagcggacgata

SEQ ID NO: 6035187 - DNA, 25 bp, Homo sapien
gatgctgaatttgaagtaaaatctg

SEQ ID NO: 6035188 - DNA, 25 bp, Homo sapien
tgcatctgaagctgttgcatctgga

SEQ ID NO: 6035189 - DNA, 25 bp, Homo sapien
ttgcatagccatggcgtattgctgc

SEQ ID NO: 6035190 - DNA, 25 bp, Homo sapien
tactgttgaagggtaccatcgaaaa

SEQ ID NO: 6035191 - DNA, 25 bp, Homo sapien
tcgaaaactgctggctttgcttgta

SEQ ID NO: 6035192 - DNA, 25 bp, Homo sapien
ttgtaccatcaaaaatagctggctg

SEQ ID NO: 6035193 - DNA, 25 bp, Homo sapien
tgcctgagcctgagcctgtgcgaca

SEQ ID NO: 6035194 - DNA, 25 bp, Homo sapien
acttgagcctgtgcctgtgcctgtg

SEQ ID NO: 6035195 - DNA, 25 bp, Homo sapien
gcctgaacttgagcctgtgcctgtg

SEQ ID NO: 6035196 - DNA, 25 bp, Homo sapien
gccatggcgtattgctgctgatcta

SEQ ID NO: 6035197 - DNA, 25 bp, Homo sapien
ccgaaacccatgtccttgagttctg

SEQ ID NO: 6035198 - DNA, 25 bp, Homo sapien
ctgctgccgatacactatttcttga

SEQ ID NO: 6035199 - DNA, 25 bp, Homo sapien
tcgtaatactgttgaagggtaccat

SEQ ID NO: 6035200 - DNA, 25 bp, Homo sapien
tgcctagaatatctgcttccactgc

SEQ ID NO: 6035201 - DNA, 25 bp, Homo sapien
cccatgtccttgagttctgccagtt

SEQ ID NO: 6035202 - DNA, 25 bp, Homo sapien
gaacttttttctagataatcgattg

SEQ ID NO: 6035203 - DNA, 25 bp, Homo sapien
gttgctgttgctgttgctgctgttg

SEQ ID NO: 6035204 - DNA, 25 bp, Homo sapien
tgaacttgaacttttttctagataa

SEQ ID NO: 6035205 - DNA, 25 bp, Homo sapien
gccagttgcctagaatatctgcttc

SEQ ID NO: 6035206 - DNA, 25 bp, Homo sapien
tgcctgtgcctgtgcctgagcctga

SEQ ID NO: 6035207 - DNA, 25 bp, Homo sapien
tgaaaagataatggcgcctgttgct

SEQ ID NO: 6035208 - DNA, 25 bp, Homo sapien
gggcggagttgatgttgtcgctgct

SEQ ID NO: 6035209 - DNA, 25 bp, Homo sapien
agcctgagcctgtgcgacagcaagc

SEQ ID NO: 6035210 - DNA, 25 bp, Homo sapien
atcattccggtagcaggatcgtaat

SEQ ID NO: 6035211 - DNA, 25 bp, Homo sapien
gataatggcgcctgttgctgttgct

SEQ ID NO: 6035212 - DNA, 25 bp, Homo sapien
ttgtttgtatcaccgaaacccatgt

SEQ ID NO: 6035213 - DNA, 25 bp, Homo sapien
gcgtattgctgctgatctacatata

SEQ ID NO: 6035214 - DNA, 25 bp, Homo sapien
atttgctgaaaagataatggcgcct

SEQ ID NO: 6035215 - DNA, 25 bp, Homo sapien
tgttgcatctggatctgctgtgctt

SEQ ID NO: 6035216 - DNA, 25 bp, Homo sapien
tgttgctgcatctgaagctgttgca

SEQ ID NO: 6035217 - DNA, 25 bp, Homo sapien
ttgctgttgctgctgttgcatagcc

SEQ ID NO: 6035218 - DNA, 25 bp, Homo sapien
cactatttcttgaacttgaactttt

SEQ ID NO: 6035219 - DNA, 25 bp, Homo sapien
tccttgagttctgccagttgcctag

SEQ ID NO: 6035220 - DNA, 25 bp, Homo sapien
tgtgcttgagcctgagcctgggcct

SEQ ID NO: 6035221 - DNA, 25 bp, Homo sapien
tgcctgtgcctgagcctgagcctgt

SEQ ID NO: 6035222 - DNA, 25 bp, Homo sapien
tctaaatttttgtttgtatcaccga

SEQ ID NO: 6035223 - DNA, 25 bp, Homo sapien
tgcgacagcaagctgttgctgttgc

SEQ ID NO: 6035224 - DNA, 25 bp, Homo sapien
gttgtcgctgctgccgatacactat

SEQ ID NO: 6035225 - DNA, 25 bp, Homo sapien
gcttgtacaaaagatgctgaatttg

SEQ ID NO: 6035226 - DNA, 25 bp, Homo sapien
gcctgagcctgagcctgagcctgaa

SEQ ID NO: 6035227 - DNA, 25 bp, Homo sapien
atctggatctgctgtgcttgagcct

SEQ ID NO: 6035228 - DNA, 25 bp, Homo sapien
acatatatcattccggtagcaggat

SEQ ID NO: 6035229 - DNA, 25 bp, Homo sapien
ggctttgcttgtacaaaagatgctg

SEQ ID NO: 6035230 - DNA, 25 bp, Homo sapien
agcctgggcctgagcctgagcctga

SEQ ID NO: 6035231 - DNA, 25 bp, Homo sapien
aatctggcgtgattacatttgtacc

SEQ ID NO: 6035232 - DNA, 25 bp, Homo sapien
gtatcaccgaaacccatgtccttga

SEQ ID NO: 6035233 - DNA, 25 bp, Homo sapien
gaatttgaagtaaaatctggcgtga

SEQ ID NO: 6035234 - DNA, 25 bp, Homo sapien
ggcgcctgttgctgttgctgcatct

SEQ ID NO: 6035235 - DNA, 25 bp, Homo sapien
gcaggatcgtaatactgttgaaggg

SEQ ID NO: 6035236 - DNA, 25 bp, Homo sapien
gaagtaaaatctggcgtgattacat

SEQ ID NO: 6035237 - DNA, 25 bp, Homo sapien
agcctgtgcgacagcaagctgttgc

SEQ ID NO: 6035238 - DNA, 25 bp, Homo sapien
tgcgacatttgctgaaaagataatg

SEQ ID NO: 6035239 - DNA, 25 bp, Homo sapien
tgctgctgatctacatatatcattc

SEQ ID NO: 6035240 - DNA, 25 bp, Homo sapien
ctggctgtgggccacttgttgtcgc

SEQ ID NO: 6035241 - DNA, 25 bp, Homo sapien
ttacatttgtaccatcaaaaatagc

SEQ ID NO: 6035242 - DNA, 25 bp, Homo sapien
tttccgtgagcggacgataatgcat

SEQ ID NO: 6035243 - DNA, 25 bp, Homo sapien
gtaccatcgaaaactgctggctttg

SEQ ID NO: 6035244 - DNA, 25 bp, Homo sapien
tgaagggtaccatcgaaaactgctg

SEQ ID NO: 6035245 - DNA, 25 bp, Homo sapien
actgctggctttgcttgtacaaaag

SEQ ID NO: 6035246 - DNA, 25 bp, Homo sapien
gcaagctgttgctgttgctgttgct

SEQ ID NO: 6035247 - DNA, 25 bp, Homo sapien
gtgagcggacgataatgcatctaaa

SEQ ID NO: 6035248 - DNA, 25 bp, Homo sapien
tgaagctgttgcatctggatctgct

SEQ ID NO: 6035249 - DNA, 25 bp, Homo sapien
ttttctagataatcgattgctctat

SEQ ID NO: 6035250 - DNA, 25 bp, Homo sapien
atctgctgtgcttgagcctgagcct

SEQ ID NO: 6035251 - DNA, 25 bp, Homo sapien
cggtttctgcttgcaattcatttac

SEQ ID NO: 6035252 - DNA, 25 bp, Homo sapien
gccccacgttagaattacaaggcac

SEQ ID NO: 6035253 - DNA, 25 bp, Homo sapien
caggttttaataatggaacagtaca

SEQ ID NO: 6035254 - DNA, 25 bp, Homo sapien
tcaaattctttaacactaaattgga

SEQ ID NO: 6035255 - DNA, 25 bp, Homo sapien
cactaaattggagccccacgttaga

SEQ ID NO: 6035256 - DNA, 25 bp, Homo sapien
ttactcttctatcgtatcactagag

SEQ ID NO: 6035257 - DNA, 25 bp, Homo sapien
tcccataggctggttgctacagacg

SEQ ID NO: 6035258 - DNA, 25 bp, Homo sapien
ttatgccttgttgctaccacttcat

SEQ ID NO: 6035259 - DNA, 25 bp, Homo sapien
tatattcgagaaattggatcttcta

SEQ ID NO: 6035260 - DNA, 25 bp, Homo sapien
cgtatcactagagaagatgagacta

SEQ ID NO: 6035261 - DNA, 25 bp, Homo sapien
attggagccccacgttagaattaca

SEQ ID NO: 6035262 - DNA, 25 bp, Homo sapien
atgacgctgatattttctcggtttc

SEQ ID NO: 6035263 - DNA, 25 bp, Homo sapien
gggtgcctcaaatgacagactactt

SEQ ID NO: 6035264 - DNA, 25 bp, Homo sapien
ctgcttgcaattcatttacggtaag

SEQ ID NO: 6035265 - DNA, 25 bp, Homo sapien
tttgtccataagtccggattgcacc

SEQ ID NO: 6035266 - DNA, 25 bp, Homo sapien
atttggaagtttcacccgtttgcag

SEQ ID NO: 6035267 - DNA, 25 bp, Homo sapien
cattccttttgggcattaaaatggg

SEQ ID NO: 6035268 - DNA, 25 bp, Homo sapien
acagacgtcaaagggaccacttaca

SEQ ID NO: 6035269 - DNA, 25 bp, Homo sapien
tctttaacactaaattggagcccca

SEQ ID NO: 6035270 - DNA, 25 bp, Homo sapien
tggatatctctgaacgaggactaat

SEQ ID NO: 6035271 - DNA, 25 bp, Homo sapien
tttgcagatgagtcaaattctttaa

SEQ ID NO: 6035272 - DNA, 25 bp, Homo sapien
caggtaaagctcatgacgctgatat

SEQ ID NO: 6035273 - DNA, 25 bp, Homo sapien
ctgttagataatgaaaatccaaaag

SEQ ID NO: 6035274 - DNA, 25 bp, Homo sapien
tgggataataagctgttagataatg

SEQ ID NO: 6035275 - DNA, 25 bp, Homo sapien
caggtgacggttacttaaaggtgtg

SEQ ID NO: 6035276 - DNA, 25 bp, Homo sapien
catgtcgatgtcttgcaagctattg

SEQ ID NO: 6035277 - DNA, 25 bp, Homo sapien
catttacggtaagttgttcaggtga

SEQ ID NO: 6035278 - DNA, 25 bp, Homo sapien
gggcattaaaatggggtgcctcaaa

SEQ ID NO: 6035279 - DNA, 25 bp, Homo sapien
aggctggttgctacagacgtcaaag

SEQ ID NO: 6035280 - DNA, 25 bp, Homo sapien
ttttctcggtttctgcttgcaattc

SEQ ID NO: 6035281 - DNA, 25 bp, Homo sapien
tcatattctcactttgtccataagt

SEQ ID NO: 6035282 - DNA, 25 bp, Homo sapien
gataatgaaaatccaaaagataagt

SEQ ID NO: 6035283 - DNA, 25 bp, Homo sapien
ttctatcgtatcactagagaagatg

SEQ ID NO: 6035284 - DNA, 25 bp, Homo sapien
gaaaatccaaaagataagtcatatt

SEQ ID NO: 6035285 - DNA, 25 bp, Homo sapien
tctctgaacgaggactaattgccac

SEQ ID NO: 6035286 - DNA, 25 bp, Homo sapien
acttcattttctggcgatttactct

SEQ ID NO: 6035287 - DNA, 25 bp, Homo sapien
gaaaaagcattccttttgggcatta

SEQ ID NO: 6035288 - DNA, 25 bp, Homo sapien
agactcagacatgaaaaagcattcc

SEQ ID NO: 6035289 - DNA, 25 bp, Homo sapien
ctactttcccataggctggttgcta

SEQ ID NO: 6035290 - DNA, 25 bp, Homo sapien
tcaaagggaccacttacatttggaa

SEQ ID NO: 6035291 - DNA, 25 bp, Homo sapien
ctatgactccaagtcaatttgccac

SEQ ID NO: 6035292 - DNA, 25 bp, Homo sapien
gcaattcatttacggtaagttgttc

SEQ ID NO: 6035293 - DNA, 25 bp, Homo sapien
cataagtccggattgcaccatgtcg

SEQ ID NO: 6035294 - DNA, 25 bp, Homo sapien
gactaattgccacaggttttaataa

SEQ ID NO: 6035295 - DNA, 25 bp, Homo sapien
ttgcaagctattgagagagatgcat

SEQ ID NO: 6035296 - DNA, 25 bp, Homo sapien
cacttacatttggaagtttcacccg

SEQ ID NO: 6035297 - DNA, 25 bp, Homo sapien
tcttctagactcagacatgaaaaag

SEQ ID NO: 6035298 - DNA, 25 bp, Homo sapien
gaagatgagactaaaaaagttatat

SEQ ID NO: 6035299 - DNA, 25 bp, Homo sapien
cttgttgctaccacttcattttctg

SEQ ID NO: 6035300 - DNA, 25 bp, Homo sapien
gtcaatttgccacttctgtggatat

SEQ ID NO: 6035301 - DNA, 25 bp, Homo sapien
gatgcatttgaattatgccttgttg

SEQ ID NO: 6035302 - DNA, 25 bp, Homo sapien
aagtttcacccgtttgcagatgagt

SEQ ID NO: 6035303 - DNA, 25 bp, Homo sapien
ttgccacttctgtggatatctctga

SEQ ID NO: 6035304 - DNA, 25 bp, Homo sapien
actagagaagatgagactaaaaaag

SEQ ID NO: 6035305 - DNA, 25 bp, Homo sapien
ttgcaccatgtcgatgtcttgcaag

SEQ ID NO: 6035306 - DNA, 25 bp, Homo sapien
gataagtcatattctcactttgtcc

SEQ ID NO: 6035307 - DNA, 25 bp, Homo sapien
ctgatattttctcggtttctgcttg

SEQ ID NO: 6035308 - DNA, 25 bp, Homo sapien
ccaaaagataagtcatattctcact

SEQ ID NO: 6035309 - DNA, 25 bp, Homo sapien
tccggattgcaccatgtcgatgtct

SEQ ID NO: 6035310 - DNA, 25 bp, Homo sapien
tctcactttgtccataagtccggat

SEQ ID NO: 6035311 - DNA, 25 bp, Homo sapien
cttctgtggatatctctgaacgagg

SEQ ID NO: 6035312 - DNA, 25 bp, Homo sapien
gacagactactttcccataggctgg

SEQ ID NO: 6035313 - DNA, 25 bp, Homo sapien
aattacaaggcactgtcgaatcgcc

SEQ ID NO: 6035314 - DNA, 25 bp, Homo sapien
gatgtcttgcaagctattgagagag

SEQ ID NO: 6035315 - DNA, 25 bp, Homo sapien
gagagagatgcatttgaattatgcc

SEQ ID NO: 6035316 - DNA, 25 bp, Homo sapien
ggaccacttacatttggaagtttca

SEQ ID NO: 6035317 - DNA, 25 bp, Homo sapien
aaggcactgtcgaatcgcctatgac

SEQ ID NO: 6035318 - DNA, 25 bp, Homo sapien
ctgtcgaatcgcctatgactccaag

SEQ ID NO: 6035319 - DNA, 25 bp, Homo sapien
aaggtgtgggataataagctgttag

SEQ ID NO: 6035320 - DNA, 25 bp, Homo sapien
aaaatggggtgcctcaaatgacaga

SEQ ID NO: 6035321 - DNA, 25 bp, Homo sapien
ggcgatttactcttctatcgtatca

SEQ ID NO: 6035322 - DNA, 25 bp, Homo sapien
tacttaaaggtgtgggataataagc

SEQ ID NO: 6035323 - DNA, 25 bp, Homo sapien
aataagctgttagataatgaaaatc

SEQ ID NO: 6035324 - DNA, 25 bp, Homo sapien
ttttctggcgatttactcttctatc

SEQ ID NO: 6035325 - DNA, 25 bp, Homo sapien
ttgccacaggttttaataatggaac

SEQ ID NO: 6035326 - DNA, 25 bp, Homo sapien
agacatgaaaaagcattccttttgg

SEQ ID NO: 6035327 - DNA, 25 bp, Homo sapien
tttgaattatgccttgttgctacca

SEQ ID NO: 6035328 - DNA, 25 bp, Homo sapien
aagctcatgacgctgatattttctc

SEQ ID NO: 6035329 - DNA, 25 bp, Homo sapien
cgagaaattggatcttctagactca

SEQ ID NO: 6035330 - DNA, 25 bp, Homo sapien
gctattgagagagatgcatttgaat

SEQ ID NO: 6035331 - DNA, 25 bp, Homo sapien
attggatcttctagactcagacatg

SEQ ID NO: 6035332 - DNA, 25 bp, Homo sapien
gctaccacttcattttctggcgatt

SEQ ID NO: 6035333 - DNA, 25 bp, Homo sapien
cacccgtttgcagatgagtcaaatt

SEQ ID NO: 6035334 - DNA, 25 bp, Homo sapien
ctccaagtcaatttgccacttctgt

SEQ ID NO: 6035335 - DNA, 25 bp, Homo sapien
aacgaggactaattgccacaggttt

SEQ ID NO: 6035336 - DNA, 25 bp, Homo sapien
cgttagaattacaaggcactgtcga

SEQ ID NO: 6035337 - DNA, 25 bp, Homo sapien
aaaagttatattcgagaaattggat

SEQ ID NO: 6035338 - DNA, 25 bp, Homo sapien
aatcgcctatgactccaagtcaatt

SEQ ID NO: 6035339 - DNA, 25 bp, Homo sapien
gttgctacagacgtcaaagggacca

SEQ ID NO: 6035340 - DNA, 25 bp, Homo sapien
gagactaaaaaagttatattcgaga

SEQ ID NO: 6035341 - DNA, 25 bp, Homo sapien
tcaaatgacagactactttcccata

SEQ ID NO: 6035342 - DNA, 25 bp, Homo sapien
agtcctcgttcagagatatccacag

SEQ ID NO: 6035343 - DNA, 25 bp, Homo sapien
tcccatccggcactgcataatgttt

SEQ ID NO: 6035344 - DNA, 25 bp, Homo sapien
tattaatcatagaatgctgagattc

SEQ ID NO: 6035345 - DNA, 25 bp, Homo sapien
aaaaacttcacgtcaaagacaccag

SEQ ID NO: 6035346 - DNA, 25 bp, Homo sapien
tcaccagaatcattaaacgatagac

SEQ ID NO: 6035347 - DNA, 25 bp, Homo sapien
accaaatgaatttgaatcgtgagca

SEQ ID NO: 6035348 - DNA, 25 bp, Homo sapien
ctgttccattattaaaacctgtggc

SEQ ID NO: 6035349 - DNA, 25 bp, Homo sapien
tcctcttcaatttcaatatcatcac

SEQ ID NO: 6035350 - DNA, 25 bp, Homo sapien
taaaacctgtggcaattagtcctcg

SEQ ID NO: 6035351 - DNA, 25 bp, Homo sapien
acatcccaaaatctcaatttaccat

SEQ ID NO: 6035352 - DNA, 25 bp, Homo sapien
caaaatctcaatttaccatcccatc

SEQ ID NO: 6035353 - DNA, 25 bp, Homo sapien
taaatcagctcccataccagatctc

SEQ ID NO: 6035354 - DNA, 25 bp, Homo sapien
tttcaaaaacttcacgtcaaagaca

SEQ ID NO: 6035355 - DNA, 25 bp, Homo sapien
caatgtagtgattctttcctttgtt

SEQ ID NO: 6035356 - DNA, 25 bp, Homo sapien
ctatgggttggtacggataaggagc

SEQ ID NO: 6035357 - DNA, 25 bp, Homo sapien
gatctgatggaattcgaattattaa

SEQ ID NO: 6035358 - DNA, 25 bp, Homo sapien
gcgtaatgtagatagttctgaaatt

SEQ ID NO: 6035359 - DNA, 25 bp, Homo sapien
ttaccatcccatccggcactgcata

SEQ ID NO: 6035360 - DNA, 25 bp, Homo sapien
gtagatagttctgaaatttgtactg

SEQ ID NO: 6035361 - DNA, 25 bp, Homo sapien
acaccaggttcagctaaagaatctc

SEQ ID NO: 6035362 - DNA, 25 bp, Homo sapien
attgtacaacgggcgtaatgtagat

SEQ ID NO: 6035363 - DNA, 25 bp, Homo sapien
aattcacccagacttgcctgcgagc

SEQ ID NO: 6035364 - DNA, 25 bp, Homo sapien
tctttcaccaaattcagtttcatat

SEQ ID NO: 6035365 - DNA, 25 bp, Homo sapien
ttcacgtcaaagacaccaggttcag

SEQ ID NO: 6035366 - DNA, 25 bp, Homo sapien
cctgtggcaattagtcctcgttcag

SEQ ID NO: 6035367 - DNA, 25 bp, Homo sapien
ttaaacgatagactcatgacccagc

SEQ ID NO: 6035368 - DNA, 25 bp, Homo sapien
ccggcactgcataatgtttcaccag

SEQ ID NO: 6035369 - DNA, 25 bp, Homo sapien
aagatatcctcttcaatttcaatat

SEQ ID NO: 6035370 - DNA, 25 bp, Homo sapien
accaaattcagtttcatatagagtg

SEQ ID NO: 6035371 - DNA, 25 bp, Homo sapien
ccatgttcatcaacagctaagatat

SEQ ID NO: 6035372 - DNA, 25 bp, Homo sapien
gcaattagtcctcgttcagagatat

SEQ ID NO: 6035373 - DNA, 25 bp, Homo sapien
ttgtttttacatcccaaaatctcaa

SEQ ID NO: 6035374 - DNA, 25 bp, Homo sapien
aatgtttcaccagaatcattaaacg

SEQ ID NO: 6035375 - DNA, 25 bp, Homo sapien
tagagtgatgcaaccaaatgaattt

SEQ ID NO: 6035376 - DNA, 25 bp, Homo sapien
tcaaagacaccaggttcagctaaag

SEQ ID NO: 6035377 - DNA, 25 bp, Homo sapien
aatgctgagattcaaaattgtacaa

SEQ ID NO: 6035378 - DNA, 25 bp, Homo sapien
gaatcattaaacgatagactcatga

SEQ ID NO: 6035379 - DNA, 25 bp, Homo sapien
gtgagcaatggctaataaggatcct

SEQ ID NO: 6035380 - DNA, 25 bp, Homo sapien
tgattctttcctttgtttttacatc

SEQ ID NO: 6035381 - DNA, 25 bp, Homo sapien
gctaaagaatctccatgttcatcaa

SEQ ID NO: 6035382 - DNA, 25 bp, Homo sapien
tacggataaggagcctattctttca

SEQ ID NO: 6035383 - DNA, 25 bp, Homo sapien
gatccttgaggagaaaatttcaccg

SEQ ID NO: 6035384 - DNA, 25 bp, Homo sapien
cattattaaaacctgtggcaattag

SEQ ID NO: 6035385 - DNA, 25 bp, Homo sapien
gagattcaaaattgtacaacgggcg

SEQ ID NO: 6035386 - DNA, 25 bp, Homo sapien
tgaatcgtgagcaatggctaataag

SEQ ID NO: 6035387 - DNA, 25 bp, Homo sapien
catattcaatgtagtgattctttcc

SEQ ID NO: 6035388 - DNA, 25 bp, Homo sapien
acccagctagaatgtgcaaattcac

SEQ ID NO: 6035389 - DNA, 25 bp, Homo sapien
tcatagaatgctgagattcaaaatt

SEQ ID NO: 6035390 - DNA, 25 bp, Homo sapien
acagcataaactttcatttaaatca

SEQ ID NO: 6035391 - DNA, 25 bp, Homo sapien
ttcatttaaatcagctcccatacca

SEQ ID NO: 6035392 - DNA, 25 bp, Homo sapien
tgtactgttccattattaaaacctg

SEQ ID NO: 6035393 - DNA, 25 bp, Homo sapien
taaactttcatttaaatcagctccc

SEQ ID NO: 6035394 - DNA, 25 bp, Homo sapien
gcttctatctaaacaaacacagcat

SEQ ID NO: 6035395 - DNA, 25 bp, Homo sapien
aatggctaataaggatccttgagga

SEQ ID NO: 6035396 - DNA, 25 bp, Homo sapien
tgtgcaaattcacccagacttgcct

SEQ ID NO: 6035397 - DNA, 25 bp, Homo sapien
tgaatttgaatcgtgagcaatggct

SEQ ID NO: 6035398 - DNA, 25 bp, Homo sapien
tggaattcgaattattaatcataga

SEQ ID NO: 6035399 - DNA, 25 bp, Homo sapien
taaggagcctattctttcaccaaat

SEQ ID NO: 6035400 - DNA, 25 bp, Homo sapien
gcctattctttcaccaaattcagtt

SEQ ID NO: 6035401 - DNA, 25 bp, Homo sapien
ctagaatgtgcaaattcacccagac

SEQ ID NO: 6035402 - DNA, 25 bp, Homo sapien
tcaatatcatcacaatgcatattca

SEQ ID NO: 6035403 - DNA, 25 bp, Homo sapien
acaaacacagcataaactttcattt

SEQ ID NO: 6035404 - DNA, 25 bp, Homo sapien
ctcaatttaccatcccatccggcac

SEQ ID NO: 6035405 - DNA, 25 bp, Homo sapien
ttcagtttcatatagagtgatgcaa

SEQ ID NO: 6035406 - DNA, 25 bp, Homo sapien
gaatctccatgttcatcaacagcta

SEQ ID NO: 6035407 - DNA, 25 bp, Homo sapien
tcgaattattaatcatagaatgctg

SEQ ID NO: 6035408 - DNA, 25 bp, Homo sapien
caacgggcgtaatgtagatagttct

SEQ ID NO: 6035409 - DNA, 25 bp, Homo sapien
gttggtacggataaggagcctattc

SEQ ID NO: 6035410 - DNA, 25 bp, Homo sapien
atctaaacaaacacagcataaactt

SEQ ID NO: 6035411 - DNA, 25 bp, Homo sapien
agttctgaaatttgtactgttccat

SEQ ID NO: 6035412 - DNA, 25 bp, Homo sapien
acaatgcatattcaatgtagtgatt

SEQ ID NO: 6035413 - DNA, 25 bp, Homo sapien
gatagactcatgacccagctagaat

SEQ ID NO: 6035414 - DNA, 25 bp, Homo sapien
cccagacttgcctgcgagctatggg

SEQ ID NO: 6035415 - DNA, 25 bp, Homo sapien
ctgcataatgtttcaccagaatcat

SEQ ID NO: 6035416 - DNA, 25 bp, Homo sapien
ttcaccgatctgatggaattcgaat

SEQ ID NO: 6035417 - DNA, 25 bp, Homo sapien
cttgcctgcgagctatgggttggta

SEQ ID NO: 6035418 - DNA, 25 bp, Homo sapien
ttcatatagagtgatgcaaccaaat

SEQ ID NO: 6035419 - DNA, 25 bp, Homo sapien
taccagatctccaaccttttttcaa

SEQ ID NO: 6035420 - DNA, 25 bp, Homo sapien
tgaggagaaaatttcaccgatctga

SEQ ID NO: 6035421 - DNA, 25 bp, Homo sapien
tcatcacaatgcatattcaatgtag

SEQ ID NO: 6035422 - DNA, 25 bp, Homo sapien
acagctaagatatcctcttcaattt

SEQ ID NO: 6035423 - DNA, 25 bp, Homo sapien
tcaaaattgtacaacgggcgtaatg

SEQ ID NO: 6035424 - DNA, 25 bp, Homo sapien
gaaaatttcaccgatctgatggaat

SEQ ID NO: 6035425 - DNA, 25 bp, Homo sapien
cgttcagagatatccacagaagtgg

SEQ ID NO: 6035426 - DNA, 25 bp, Homo sapien
gctcccataccagatctccaacctt

SEQ ID NO: 6035427 - DNA, 25 bp, Homo sapien
ctcatgacccagctagaatgtgcaa

SEQ ID NO: 6035428 - DNA, 25 bp, Homo sapien
gaaatttgtactgttccattattaa

SEQ ID NO: 6035429 - DNA, 25 bp, Homo sapien
ggttcagctaaagaatctccatgtt

SEQ ID NO: 6035430 - DNA, 25 bp, Homo sapien
tcaatttcaatatcatcacaatgca

SEQ ID NO: 6035431 - DNA, 25 bp, Homo sapien
gatgcaaccaaatgaatttgaatcg

SEQ ID NO: 6035432 - DNA, 25 bp, Homo sapien
tcatcaacagctaagatatcctctt

SEQ ID NO: 6035433 - DNA, 25 bp, Homo sapien
tgcgagctatgggttggtacggata

SEQ ID NO: 6035434 - DNA, 25 bp, Homo sapien
aataaggatccttgaggagaaaatt

SEQ ID NO: 6035435 - DNA, 25 bp, Homo sapien
ttttccactttaagtgatgaccatg

SEQ ID NO: 6035436 - DNA, 25 bp, Homo sapien
ctaacttttcaagagtacacaactg

SEQ ID NO: 6035437 - DNA, 25 bp, Homo sapien
tatccatagagacataaagccatca

SEQ ID NO: 6035438 - DNA, 25 bp, Homo sapien
acgcgatggtacagggcacccgaga

SEQ ID NO: 6035439 - DNA, 25 bp, Homo sapien
agcttttacggtatttccatgaaca

SEQ ID NO: 6035440 - DNA, 25 bp, Homo sapien
cagtgcacaagttatccatagagac

SEQ ID NO: 6035441 - DNA, 25 bp, Homo sapien
ggattcatgacggagtacgtcgcaa

SEQ ID NO: 6035442 - DNA, 25 bp, Homo sapien
agggagcgtacggaacagtatgttc

SEQ ID NO: 6035443 - DNA, 25 bp, Homo sapien
gatctcaaagtctgcgattttggac

SEQ ID NO: 6035444 - DNA, 25 bp, Homo sapien
attggataaagtaaggccagtatcc

SEQ ID NO: 6035445 - DNA, 25 bp, Homo sapien
gagtacacaactgcgatggatatat

SEQ ID NO: 6035446 - DNA, 25 bp, Homo sapien
agcgattcaagagaaacattggtag

SEQ ID NO: 6035447 - DNA, 25 bp, Homo sapien
agtaattaataatcagaatagcggg

SEQ ID NO: 6035448 - DNA, 25 bp, Homo sapien
ctagcgaggtgtttagctagcagta

SEQ ID NO: 6035449 - DNA, 25 bp, Homo sapien
ctaaacgctgtttatttagtcgaag

SEQ ID NO: 6035450 - DNA, 25 bp, Homo sapien
taaaggtagctatcaagaaaataca

SEQ ID NO: 6035451 - DNA, 25 bp, Homo sapien
atgacggagtacgtcgcaacgcgat

SEQ ID NO: 6035452 - DNA, 25 bp, Homo sapien
tttggactagcgaggtgtttagcta

SEQ ID NO: 6035453 - DNA, 25 bp, Homo sapien
tacgtgagatcaagcttttacggta

SEQ ID NO: 6035454 - DNA, 25 bp, Homo sapien
gaccatgttcaatactttacatacc

SEQ ID NO: 6035455 - DNA, 25 bp, Homo sapien
ataggtgagggagcgtacggaacag

SEQ ID NO: 6035456 - DNA, 25 bp, Homo sapien
tacggtatttccatgaacacgaaaa

SEQ ID NO: 6035457 - DNA, 25 bp, Homo sapien
taaagtaaggccagtatccatagac

SEQ ID NO: 6035458 - DNA, 25 bp, Homo sapien
aaggccagtatccatagacaaacta

SEQ ID NO: 6035459 - DNA, 25 bp, Homo sapien
tcaagaaaatacaaccgtttagcaa

SEQ ID NO: 6035460 - DNA, 25 bp, Homo sapien
gctgtttatttagtcgaagagttga

SEQ ID NO: 6035461 - DNA, 25 bp, Homo sapien
ttacaagaactatacgtgagatcaa

SEQ ID NO: 6035462 - DNA, 25 bp, Homo sapien
agcgggttttccactttaagtgatg

SEQ ID NO: 6035463 - DNA, 25 bp, Homo sapien
tcagaatagcgggttttccacttta

SEQ ID NO: 6035464 - DNA, 25 bp, Homo sapien
agtgatgaccatgttcaatacttta

SEQ ID NO: 6035465 - DNA, 25 bp, Homo sapien
ttactaaattccaattgtgatctca

SEQ ID NO: 6035466 - DNA, 25 bp, Homo sapien
gaaacattggtaggattcatgacgg

SEQ ID NO: 6035467 - DNA, 25 bp, Homo sapien
tttcaagagtacacaactgcgatgg

SEQ ID NO: 6035468 - DNA, 25 bp, Homo sapien
actttaagtgatgaccatgttcaat

SEQ ID NO: 6035469 - DNA, 25 bp, Homo sapien
gccttaaagtctattcacagtgcac

SEQ ID NO: 6035470 - DNA, 25 bp, Homo sapien
ttagctagcagtagcgattcaagag

SEQ ID NO: 6035471 - DNA, 25 bp, Homo sapien
cagcaattcataagccttccggcat

SEQ ID NO: 6035472 - DNA, 25 bp, Homo sapien
cgtacggaacagtatgttcagcaat

SEQ ID NO: 6035473 - DNA, 25 bp, Homo sapien
aacctgttactaaattccaattgtg

SEQ ID NO: 6035474 - DNA, 25 bp, Homo sapien
ccggcataaaggtagctatcaagaa

SEQ ID NO: 6035475 - DNA, 25 bp, Homo sapien
ttggtaggattcatgacggagtacg

SEQ ID NO: 6035476 - DNA, 25 bp, Homo sapien
actcgtagatttaataggtgaggga

SEQ ID NO: 6035477 - DNA, 25 bp, Homo sapien
cataaagccatcaaacctgttacta

SEQ ID NO: 6035478 - DNA, 25 bp, Homo sapien
catagacaaactaaacgctgtttat

SEQ ID NO: 6035479 - DNA, 25 bp, Homo sapien
aaagtctattcacagtgcacaagtt

SEQ ID NO: 6035480 - DNA, 25 bp, Homo sapien
gaactatacgtgagatcaagctttt

SEQ ID NO: 6035481 - DNA, 25 bp, Homo sapien
aaagtctgcgattttggactagcga

SEQ ID NO: 6035482 - DNA, 25 bp, Homo sapien
cccgagataatgctaacttttcaag

SEQ ID NO: 6035483 - DNA, 25 bp, Homo sapien
gaacagtatgttcagcaattcataa

SEQ ID NO: 6035484 - DNA, 25 bp, Homo sapien
tgcgattttggactagcgaggtgtt

SEQ ID NO: 6035485 - DNA, 25 bp, Homo sapien
gtcgcaacgcgatggtacagggcac

SEQ ID NO: 6035486 - DNA, 25 bp, Homo sapien
gccatcaaacctgttactaaattcc

SEQ ID NO: 6035487 - DNA, 25 bp, Homo sapien
aattccaattgtgatctcaaagtct

SEQ ID NO: 6035488 - DNA, 25 bp, Homo sapien
tatgttcagcaattcataagccttc

SEQ ID NO: 6035489 - DNA, 25 bp, Homo sapien
tatttagtcgaagagttgatggaaa

SEQ ID NO: 6035490 - DNA, 25 bp, Homo sapien
cgaaaacataataagtatattggat

SEQ ID NO: 6035491 - DNA, 25 bp, Homo sapien
acaagttatccatagagacataaag

SEQ ID NO: 6035492 - DNA, 25 bp, Homo sapien
tgtttgttacaagaactatacgtga

SEQ ID NO: 6035493 - DNA, 25 bp, Homo sapien
ctcagagccttaaagtctattcaca

SEQ ID NO: 6035494 - DNA, 25 bp, Homo sapien
tactttacataccaaatcctcagag

SEQ ID NO: 6035495 - DNA, 25 bp, Homo sapien
ttcataagccttccggcataaaggt

SEQ ID NO: 6035496 - DNA, 25 bp, Homo sapien
agtatccatagacaaactaaacgct

SEQ ID NO: 6035497 - DNA, 25 bp, Homo sapien
agggcacccgagataatgctaactt

SEQ ID NO: 6035498 - DNA, 25 bp, Homo sapien
agatcaagcttttacggtatttcca

SEQ ID NO: 6035499 - DNA, 25 bp, Homo sapien
gagttgatggaaaccgatttacaaa

SEQ ID NO: 6035500 - DNA, 25 bp, Homo sapien
agcagtagcgattcaagagaaacat

SEQ ID NO: 6035501 - DNA, 25 bp, Homo sapien
tcaagagaaacattggtaggattca

SEQ ID NO: 6035502 - DNA, 25 bp, Homo sapien
tgaacacgaaaacataataagtata

SEQ ID NO: 6035503 - DNA, 25 bp, Homo sapien
cataataagtatattggataaagta

SEQ ID NO: 6035504 - DNA, 25 bp, Homo sapien
acataccaaatcctcagagccttaa

SEQ ID NO: 6035505 - DNA, 25 bp, Homo sapien
agatttaataggtgagggagcgtac

SEQ ID NO: 6035506 - DNA, 25 bp, Homo sapien
tataaactcgtagatttaataggtg

SEQ ID NO: 6035507 - DNA, 25 bp, Homo sapien
tcccaatataaactcgtagatttaa

SEQ ID NO: 6035508 - DNA, 25 bp, Homo sapien
tagcaaaaaattgtttgttacaaga

SEQ ID NO: 6035509 - DNA, 25 bp, Homo sapien
agccttccggcataaaggtagctat

SEQ ID NO: 6035510 - DNA, 25 bp, Homo sapien
ataatgctaacttttcaagagtaca

SEQ ID NO: 6035511 - DNA, 25 bp, Homo sapien
caaatcctcagagccttaaagtcta

SEQ ID NO: 6035512 - DNA, 25 bp, Homo sapien
tagctatcaagaaaatacaaccgtt

SEQ ID NO: 6035513 - DNA, 25 bp, Homo sapien
gagtacgtcgcaacgcgatggtaca

SEQ ID NO: 6035514 - DNA, 25 bp, Homo sapien
aagtatattggataaagtaaggcca

SEQ ID NO: 6035515 - DNA, 25 bp, Homo sapien
gtcgaagagttgatggaaaccgatt

SEQ ID NO: 6035516 - DNA, 25 bp, Homo sapien
taataatcagaatagcgggttttcc

SEQ ID NO: 6035517 - DNA, 25 bp, Homo sapien
tagagacataaagccatcaaacctg

SEQ ID NO: 6035518 - DNA, 25 bp, Homo sapien
aggtgtttagctagcagtagcgatt

SEQ ID NO: 6035519 - DNA, 25 bp, Homo sapien
gttcaatactttacataccaaatcc

SEQ ID NO: 6035520 - DNA, 25 bp, Homo sapien
tattcacagtgcacaagttatccat

SEQ ID NO: 6035521 - DNA, 25 bp, Homo sapien
tacaaaaagtaattaataatcagaa

SEQ ID NO: 6035522 - DNA, 25 bp, Homo sapien
tggtacagggcacccgagataatgc

SEQ ID NO: 6035523 - DNA, 25 bp, Homo sapien
tttccatgaacacgaaaacataata

SEQ ID NO: 6035524 - DNA, 25 bp, Homo sapien
aattgtgatctcaaagtctgcgatt

SEQ ID NO: 6035525 - DNA, 25 bp, Homo sapien
tctggattcagatcggtctttgacc

SEQ ID NO: 6035526 - DNA, 25 bp, Homo sapien
tttctcttgaatcgctactgctagc

SEQ ID NO: 6035527 - DNA, 25 bp, Homo sapien
ttcgaaagatggagttcccaagact

SEQ ID NO: 6035528 - DNA, 25 bp, Homo sapien
ggaggatattccggctcatcacttg

SEQ ID NO: 6035529 - DNA, 25 bp, Homo sapien
ttaagtggaggatattccggctcat

SEQ ID NO: 6035530 - DNA, 25 bp, Homo sapien
tcttcctcctcttccggacgcatta

SEQ ID NO: 6035531 - DNA, 25 bp, Homo sapien
ttgatctgattaaagtcttcgaaag

SEQ ID NO: 6035532 - DNA, 25 bp, Homo sapien
cggagaccatttcagccaaaatgca

SEQ ID NO: 6035533 - DNA, 25 bp, Homo sapien
cagccaaaatgcatccgcatgacca

SEQ ID NO: 6035534 - DNA, 25 bp, Homo sapien
cttctagaattagccataattgatg

SEQ ID NO: 6035535 - DNA, 25 bp, Homo sapien
gggcacttcttcctcctcttccgga

SEQ ID NO: 6035536 - DNA, 25 bp, Homo sapien
tctagtaaatctatcatatctggat

SEQ ID NO: 6035537 - DNA, 25 bp, Homo sapien
ggtctcccatggcaagggtggcctc

SEQ ID NO: 6035538 - DNA, 25 bp, Homo sapien
tgtactcttgaaaagttagcattat

SEQ ID NO: 6035539 - DNA, 25 bp, Homo sapien
ttcttttgtcaggattgaattgaag

SEQ ID NO: 6035540 - DNA, 25 bp, Homo sapien
atgaccatatatccatcgcagttgt

SEQ ID NO: 6035541 - DNA, 25 bp, Homo sapien
gcaagggtggcctcataggtaagtt

SEQ ID NO: 6035542 - DNA, 25 bp, Homo sapien
aaatgcatccgcatgaccatatatc

SEQ ID NO: 6035543 - DNA, 25 bp, Homo sapien
ccatttcagccaaaatgcatccgca

SEQ ID NO: 6035544 - DNA, 25 bp, Homo sapien
gacgtactccgtcatgaatcctacc

SEQ ID NO: 6035545 - DNA, 25 bp, Homo sapien
atctcgggtgccctgtaccatcgcg

SEQ ID NO: 6035546 - DNA, 25 bp, Homo sapien
ctttagccctcttggatttgatctg

SEQ ID NO: 6035547 - DNA, 25 bp, Homo sapien
tttgctatatactctttagccctct

SEQ ID NO: 6035548 - DNA, 25 bp, Homo sapien
gctactgctagctaaacacctcgct

SEQ ID NO: 6035549 - DNA, 25 bp, Homo sapien
gtcatggtacattgccaggtaaggg

SEQ ID NO: 6035550 - DNA, 25 bp, Homo sapien
ggctcatcacttgggtcatggtaca

SEQ ID NO: 6035551 - DNA, 25 bp, Homo sapien
gcattatcttgttatccagtttcca

SEQ ID NO: 6035552 - DNA, 25 bp, Homo sapien
cgcttattcttttgtcaggattgaa

SEQ ID NO: 6035553 - DNA, 25 bp, Homo sapien
aagcatgtctttgagcatttctatg

SEQ ID NO: 6035554 - DNA, 25 bp, Homo sapien
cagacggtctcccatggcaagggtg

SEQ ID NO: 6035555 - DNA, 25 bp, Homo sapien
aattgatgatgatagtctctgcctg

SEQ ID NO: 6035556 - DNA, 25 bp, Homo sapien
tgattaaagtcttcgaaagatggag

SEQ ID NO: 6035557 - DNA, 25 bp, Homo sapien
cattttgtctagtaaatctatcata

SEQ ID NO: 6035558 - DNA, 25 bp, Homo sapien
tattccggctcatcacttgggtcat

SEQ ID NO: 6035559 - DNA, 25 bp, Homo sapien
tgccaggtaagggtgtcttaaagct

SEQ ID NO: 6035560 - DNA, 25 bp, Homo sapien
agccataattgatgatgatagtctc

SEQ ID NO: 6035561 - DNA, 25 bp, Homo sapien
cccatggcaagggtggcctcatagg

SEQ ID NO: 6035562 - DNA, 25 bp, Homo sapien
ccatcgcagttgtgtactcttgaaa

SEQ ID NO: 6035563 - DNA, 25 bp, Homo sapien
agatggagttcccaagacttctaga

SEQ ID NO: 6035564 - DNA, 25 bp, Homo sapien
ctccgtcatgaatcctaccaatgtt

SEQ ID NO: 6035565 - DNA, 25 bp, Homo sapien
gattgaattgaagcattttgtctag

SEQ ID NO: 6035566 - DNA, 25 bp, Homo sapien
tcctcttccggacgcattatcttgt

SEQ ID NO: 6035567 - DNA, 25 bp, Homo sapien
tgaatcgctactgctagctaaacac

SEQ ID NO: 6035568 - DNA, 25 bp, Homo sapien
gctagctaaacacctcgctagtcca

SEQ ID NO: 6035569 - DNA, 25 bp, Homo sapien
cgttgcgacgtactccgtcatgaat

SEQ ID NO: 6035570 - DNA, 25 bp, Homo sapien
gaattagccataattgatgatgata

SEQ ID NO: 6035571 - DNA, 25 bp, Homo sapien
ctcataggtaagtttgctatatact

SEQ ID NO: 6035572 - DNA, 25 bp, Homo sapien
atcatatctggattcagatcggtct

SEQ ID NO: 6035573 - DNA, 25 bp, Homo sapien
gagttcccaagacttctagaattag

SEQ ID NO: 6035574 - DNA, 25 bp, Homo sapien
ttcagatcggtctttgaccagacgg

SEQ ID NO: 6035575 - DNA, 25 bp, Homo sapien
tgcctgggaacaaaggcttcccgga

SEQ ID NO: 6035576 - DNA, 25 bp, Homo sapien
ccctcttggatttgatctgattaaa

SEQ ID NO: 6035577 - DNA, 25 bp, Homo sapien
ttctatgggcacttcttcctcctct

SEQ ID NO: 6035578 - DNA, 25 bp, Homo sapien
ttgaagcattttgtctagtaaatct

SEQ ID NO: 6035579 - DNA, 25 bp, Homo sapien
aagttagcattatctcgggtgccct

SEQ ID NO: 6035580 - DNA, 25 bp, Homo sapien
tcttgttatccagtttccaaaattc

SEQ ID NO: 6035581 - DNA, 25 bp, Homo sapien
catcgcgttgcgacgtactccgtca

SEQ ID NO: 6035582 - DNA, 25 bp, Homo sapien
atatatccatcgcagttgtgtactc

SEQ ID NO: 6035583 - DNA, 25 bp, Homo sapien
ggtggcctcataggtaagtttgcta

SEQ ID NO: 6035584 - DNA, 25 bp, Homo sapien
aagtcttcgaaagatggagttccca

SEQ ID NO: 6035585 - DNA, 25 bp, Homo sapien
ggtaagtttgctatatactctttag

SEQ ID NO: 6035586 - DNA, 25 bp, Homo sapien
atatactctttagccctcttggatt

SEQ ID NO: 6035587 - DNA, 25 bp, Homo sapien
tcggtctttgaccagacggtctccc

SEQ ID NO: 6035588 - DNA, 25 bp, Homo sapien
tccaaattaagtggaggatattccg

SEQ ID NO: 6035589 - DNA, 25 bp, Homo sapien
ctgtaccatcgcgttgcgacgtact

SEQ ID NO: 6035590 - DNA, 25 bp, Homo sapien
tgtcttaaagcttctgctgcgctta

SEQ ID NO: 6035591 - DNA, 25 bp, Homo sapien
ggtgccctgtaccatcgcgttgcga

SEQ ID NO: 6035592 - DNA, 25 bp, Homo sapien
caaaattcatcatccaaattaagtg

SEQ ID NO: 6035593 - DNA, 25 bp, Homo sapien
tgatgatagtctctgcctgggaaca

SEQ ID NO: 6035594 - DNA, 25 bp, Homo sapien
aaagcttctgctgcgcttattcttt

SEQ ID NO: 6035595 - DNA, 25 bp, Homo sapien
tggatttgatctgattaaagtcttc

SEQ ID NO: 6035596 - DNA, 25 bp, Homo sapien
tcatcatccaaattaagtggaggat

SEQ ID NO: 6035597 - DNA, 25 bp, Homo sapien
ttatccagtttccaaaattcatcat

SEQ ID NO: 6035598 - DNA, 25 bp, Homo sapien
cagttgtgtactcttgaaaagttag

SEQ ID NO: 6035599 - DNA, 25 bp, Homo sapien
agtttccaaaattcatcatccaaat

SEQ ID NO: 6035600 - DNA, 25 bp, Homo sapien
taagggtgtcttaaagcttctgctg

SEQ ID NO: 6035601 - DNA, 25 bp, Homo sapien
cttgaaaagttagcattatctcggg

SEQ ID NO: 6035602 - DNA, 25 bp, Homo sapien
ccaatgtttctcttgaatcgctact

SEQ ID NO: 6035603 - DNA, 25 bp, Homo sapien
taaacacctcgctagtccaaaatcg

SEQ ID NO: 6035604 - DNA, 25 bp, Homo sapien
atccgcatgaccatatatccatcgc

SEQ ID NO: 6035605 - DNA, 25 bp, Homo sapien
ccaagacttctagaattagccataa

SEQ ID NO: 6035606 - DNA, 25 bp, Homo sapien
aaatctatcatatctggattcagat

SEQ ID NO: 6035607 - DNA, 25 bp, Homo sapien
aaaggcttcccggagaccatttcag

SEQ ID NO: 6035608 - DNA, 25 bp, Homo sapien
gagcatttctatgggcacttcttcc

SEQ ID NO: 6035609 - DNA, 25 bp, Homo sapien
tttgaccagacggtctcccatggca

SEQ ID NO: 6035610 - DNA, 25 bp, Homo sapien
gtacattgccaggtaagggtgtctt

SEQ ID NO: 6035611 - DNA, 25 bp, Homo sapien
cacttgggtcatggtacattgccag

SEQ ID NO: 6035612 - DNA, 25 bp, Homo sapien
gcattatctcgggtgccctgtacca

SEQ ID NO: 6035613 - DNA, 25 bp, Homo sapien
gcttcccggagaccatttcagccaa

SEQ ID NO: 6035614 - DNA, 25 bp, Homo sapien
ctgctgcgcttattcttttgtcagg

SEQ ID NO: 6035615 - DNA, 25 bp, Homo sapien
tcctaccaatgtttctcttgaatcg

SEQ ID NO: 6035616 - DNA, 25 bp, Homo sapien
tgtctttgagcatttctatgggcac

SEQ ID NO: 6035617 - DNA, 25 bp, Homo sapien
ccggacgcattatcttgttatccag

SEQ ID NO: 6035618 - DNA, 25 bp, Homo sapien
tagtctctgcctgggaacaaaggct

SEQ ID NO: 6035619 - DNA, 25 bp, Homo sapien
tgtcaggattgaattgaagcatttt

SEQ ID NO: 6035620 - DNA, 25 bp, Homo sapien
catgaatcctaccaatgtttctctt

SEQ ID NO: 6035621 - DNA, 25 bp, Homo sapien
cggtgcaatttcttgttcgacaact

SEQ ID NO: 6035622 - DNA, 25 bp, Homo sapien
taggaacaattgaagaagacgaaat

SEQ ID NO: 6035623 - DNA, 25 bp, Homo sapien
ggcagaaggaataacaagaaaagga

SEQ ID NO: 6035624 - DNA, 25 bp, Homo sapien
tgccatcttacgagataataataac

SEQ ID NO: 6035625 - DNA, 25 bp, Homo sapien
agcttgttattagattgctacctcc

SEQ ID NO: 6035626 - DNA, 25 bp, Homo sapien
aggaataacaagaaaaggaacagag

SEQ ID NO: 6035627 - DNA, 25 bp, Homo sapien
cgatgatggtgataagcaagatatc

SEQ ID NO: 6035628 - DNA, 25 bp, Homo sapien
atggtgataagcaagatatccaggg

SEQ ID NO: 6035629 - DNA, 25 bp, Homo sapien
agagtattataactataaaagaaag

SEQ ID NO: 6035630 - DNA, 25 bp, Homo sapien
tttttgaaggtcattattctagtaa

SEQ ID NO: 6035631 - DNA, 25 bp, Homo sapien
taataacgatgatggtgataagcaa

SEQ ID NO: 6035632 - DNA, 25 bp, Homo sapien
gacaacttatcagacttggaaaaat

SEQ ID NO: 6035633 - DNA, 25 bp, Homo sapien
tattacaattccagatatgaaactg

SEQ ID NO: 6035634 - DNA, 25 bp, Homo sapien
aacttgtaaattcattgataataag

SEQ ID NO: 6035635 - DNA, 25 bp, Homo sapien
aacaatagcaaaggcagaaggaata

SEQ ID NO: 6035636 - DNA, 25 bp, Homo sapien
gacttggaaaaatgcgcaaatttca

SEQ ID NO: 6035637 - DNA, 25 bp, Homo sapien
aatgctacccacaacaatagcaaag

SEQ ID NO: 6035638 - DNA, 25 bp, Homo sapien
gaaaaagtaagaatgagacggtaga

SEQ ID NO: 6035639 - DNA, 25 bp, Homo sapien
tctagtaaagtattcaaaaactcga

SEQ ID NO: 6035640 - DNA, 25 bp, Homo sapien
gaaaggctagattgggtaaatcaac

SEQ ID NO: 6035641 - DNA, 25 bp, Homo sapien
caagaacagaggaaaaagtaagaat

SEQ ID NO: 6035642 - DNA, 25 bp, Homo sapien
ctataaaagaaaggctagattgggt

SEQ ID NO: 6035643 - DNA, 25 bp, Homo sapien
agaatgagaataaggttaataatgc

SEQ ID NO: 6035644 - DNA, 25 bp, Homo sapien
tcgacatattctcggtgcaatttct

SEQ ID NO: 6035645 - DNA, 25 bp, Homo sapien
gactgcagatgaattttttgccatc

SEQ ID NO: 6035646 - DNA, 25 bp, Homo sapien
aaaaactcgacatattctcggtgca

SEQ ID NO: 6035647 - DNA, 25 bp, Homo sapien
catcaaaaaaggatgccgcgctagt

SEQ ID NO: 6035648 - DNA, 25 bp, Homo sapien
aaggttaataatgctactaatgcta

SEQ ID NO: 6035649 - DNA, 25 bp, Homo sapien
caaatttgactgcagatgaattttt

SEQ ID NO: 6035650 - DNA, 25 bp, Homo sapien
ttataactataaaagaaaggctaga

SEQ ID NO: 6035651 - DNA, 25 bp, Homo sapien
aattcactcaaacatcaaaaaagga

SEQ ID NO: 6035652 - DNA, 25 bp, Homo sapien
taaagaaattcactcaaacatcaaa

SEQ ID NO: 6035653 - DNA, 25 bp, Homo sapien
ttattagattgctacctccaaattt

SEQ ID NO: 6035654 - DNA, 25 bp, Homo sapien
gagaataaggttaataatgctacta

SEQ ID NO: 6035655 - DNA, 25 bp, Homo sapien
atgaaggatttaagcttgttattag

SEQ ID NO: 6035656 - DNA, 25 bp, Homo sapien
gtaaagtattcaaaaactcgacata

SEQ ID NO: 6035657 - DNA, 25 bp, Homo sapien
ctcaaacatcaaaaaaggatgccgc

SEQ ID NO: 6035658 - DNA, 25 bp, Homo sapien
gctactaatgctacccacaacaata

SEQ ID NO: 6035659 - DNA, 25 bp, Homo sapien
ctacgtaaagaaattcactcaaaca

SEQ ID NO: 6035660 - DNA, 25 bp, Homo sapien
agtaagaatgagacggtagatccta

SEQ ID NO: 6035661 - DNA, 25 bp, Homo sapien
attttttgccatcttacgagataat

SEQ ID NO: 6035662 - DNA, 25 bp, Homo sapien
gaaaaggaacagagagtattataac

SEQ ID NO: 6035663 - DNA, 25 bp, Homo sapien
aaaaggatgccgcgctagtaggaac

SEQ ID NO: 6035664 - DNA, 25 bp, Homo sapien
aagatatccagggtaaactcaagta

SEQ ID NO: 6035665 - DNA, 25 bp, Homo sapien
aatgagacggtagatcctaaaaaga

SEQ ID NO: 6035666 - DNA, 25 bp, Homo sapien
aggcaggggaaataggtatcataac

SEQ ID NO: 6035667 - DNA, 25 bp, Homo sapien
ctggtgtttttttgaaggtcattat

SEQ ID NO: 6035668 - DNA, 25 bp, Homo sapien
cattgataataaggataatattaca

SEQ ID NO: 6035669 - DNA, 25 bp, Homo sapien
agaaaggcaggggaaataggtatca

SEQ ID NO: 6035670 - DNA, 25 bp, Homo sapien
tgggtaaatcaaccgagaatgaagg

SEQ ID NO: 6035671 - DNA, 25 bp, Homo sapien
ttgttcgacaacttatcagacttgg

SEQ ID NO: 6035672 - DNA, 25 bp, Homo sapien
tgtcgccctacgtaaagaaattcac

SEQ ID NO: 6035673 - DNA, 25 bp, Homo sapien
agcaaaggcagaaggaataacaaga

SEQ ID NO: 6035674 - DNA, 25 bp, Homo sapien
ataagcaagatatccagggtaaact

SEQ ID NO: 6035675 - DNA, 25 bp, Homo sapien
acggtagatcctaaaaagaatgaga

SEQ ID NO: 6035676 - DNA, 25 bp, Homo sapien
ggataatattacaattccagatatg

SEQ ID NO: 6035677 - DNA, 25 bp, Homo sapien
gaaaaatgcgcaaatttcattaaaa

SEQ ID NO: 6035678 - DNA, 25 bp, Homo sapien
tattctcggtgcaatttcttgttcg

SEQ ID NO: 6035679 - DNA, 25 bp, Homo sapien
taacaagaaaaggaacagagagtat

SEQ ID NO: 6035680 - DNA, 25 bp, Homo sapien
gaacagagagtattataactataaa

SEQ ID NO: 6035681 - DNA, 25 bp, Homo sapien
tacctccaaatttgactgcagatga

SEQ ID NO: 6035682 - DNA, 25 bp, Homo sapien
cttacgagataataataacgatgat

SEQ ID NO: 6035683 - DNA, 25 bp, Homo sapien
aataatgctactaatgctacccaca

SEQ ID NO: 6035684 - DNA, 25 bp, Homo sapien
agataataataacgatgatggtgat

SEQ ID NO: 6035685 - DNA, 25 bp, Homo sapien
cagatatgaaactgtcgccctacgt

SEQ ID NO: 6035686 - DNA, 25 bp, Homo sapien
gcgcaaatttcattaaaacttgtaa

SEQ ID NO: 6035687 - DNA, 25 bp, Homo sapien
gatttaagcttgttattagattgct

SEQ ID NO: 6035688 - DNA, 25 bp, Homo sapien
gtattcaaaaactcgacatattctc

SEQ ID NO: 6035689 - DNA, 25 bp, Homo sapien
ctagattgggtaaatcaaccgagaa

SEQ ID NO: 6035690 - DNA, 25 bp, Homo sapien
tccagggtaaactcaagtacagtga

SEQ ID NO: 6035691 - DNA, 25 bp, Homo sapien
cattattctagtaaagtattcaaaa

SEQ ID NO: 6035692 - DNA, 25 bp, Homo sapien
cattaaaacttgtaaattcattgat

SEQ ID NO: 6035693 - DNA, 25 bp, Homo sapien
gaaggtcattattctagtaaagtat

SEQ ID NO: 6035694 - DNA, 25 bp, Homo sapien
gtaaactcaagtacagtgactggtg

SEQ ID NO: 6035695 - DNA, 25 bp, Homo sapien
gattgctacctccaaatttgactgc

SEQ ID NO: 6035696 - DNA, 25 bp, Homo sapien
ccgagaatgaaggatttaagcttgt

SEQ ID NO: 6035697 - DNA, 25 bp, Homo sapien
cgctagtaggaacaattgaagaaga

SEQ ID NO: 6035698 - DNA, 25 bp, Homo sapien
gggaaataggtatcataacaagaac

SEQ ID NO: 6035699 - DNA, 25 bp, Homo sapien
taggtatcataacaagaacagagga

SEQ ID NO: 6035700 - DNA, 25 bp, Homo sapien
tcaagtacagtgactggtgtttttt

SEQ ID NO: 6035701 - DNA, 25 bp, Homo sapien
tcataacaagaacagaggaaaaagt

SEQ ID NO: 6035702 - DNA, 25 bp, Homo sapien
atgccgcgctagtaggaacaattga

SEQ ID NO: 6035703 - DNA, 25 bp, Homo sapien
aatcaaccgagaatgaaggatttaa

SEQ ID NO: 6035704 - DNA, 25 bp, Homo sapien
ttatcagacttggaaaaatgcgcaa

SEQ ID NO: 6035705 - DNA, 25 bp, Homo sapien
caattccagatatgaaactgtcgcc

SEQ ID NO: 6035706 - DNA, 25 bp, Homo sapien
acagaggaaaaagtaagaatgagac

SEQ ID NO: 6035707 - DNA, 25 bp, Homo sapien
taataaggataatattacaattcca

SEQ ID NO: 6035708 - DNA, 25 bp, Homo sapien
agatgaattttttgccatcttacga

SEQ ID NO: 6035709 - DNA, 25 bp, Homo sapien
acccacaacaatagcaaaggcagaa

SEQ ID NO: 6035710 - DNA, 25 bp, Homo sapien
cagtgactggtgtttttttgaaggt

SEQ ID NO: 6035711 - DNA, 25 bp, Homo sapien
tgaaactgtcgccctacgtaaagaa

SEQ ID NO: 6035712 - DNA, 25 bp, Homo sapien
aatttcttgttcgacaacttatcag

SEQ ID NO: 6035713 - DNA, 25 bp, Homo sapien
taaattcattgataataaggataat

SEQ ID NO: 6035714 - DNA, 25 bp, Homo sapien
gatcctaaaaagaatgagaataagg

SEQ ID NO: 6035715 - DNA, 25 bp, Homo sapien
tattcttgaccttatcaccagttcc

SEQ ID NO: 6035716 - DNA, 25 bp, Homo sapien
gtttgatatttttaacttctcttgc

SEQ ID NO: 6035717 - DNA, 25 bp, Homo sapien
ttcacgcttcttcttgcctctgttc

SEQ ID NO: 6035718 - DNA, 25 bp, Homo sapien
ggctgggtttgagcggatgatgact

SEQ ID NO: 6035719 - DNA, 25 bp, Homo sapien
tttttctaaagatttcaatacgcta

SEQ ID NO: 6035720 - DNA, 25 bp, Homo sapien
aaccagctctgttaacaccctttct

SEQ ID NO: 6035721 - DNA, 25 bp, Homo sapien
tttttctttggtatcttagcggatg

SEQ ID NO: 6035722 - DNA, 25 bp, Homo sapien
cattcagctgtttcattgaattcat

SEQ ID NO: 6035723 - DNA, 25 bp, Homo sapien
ccgcttcctcaataataaccacatt

SEQ ID NO: 6035724 - DNA, 25 bp, Homo sapien
tcttctttttgttcttattcttgac

SEQ ID NO: 6035725 - DNA, 25 bp, Homo sapien
tagcgcggcatccttttttgatgtt

SEQ ID NO: 6035726 - DNA, 25 bp, Homo sapien
acgattttcacgcttcttcttgcct

SEQ ID NO: 6035727 - DNA, 25 bp, Homo sapien
tagggcgacagtttcatatctggaa

SEQ ID NO: 6035728 - DNA, 25 bp, Homo sapien
gctctgttaacaccctttctgttct

SEQ ID NO: 6035729 - DNA, 25 bp, Homo sapien
atacgctaaaatcttggaatgagta

SEQ ID NO: 6035730 - DNA, 25 bp, Homo sapien
ttaacttctcttgcaaaagcatttt

SEQ ID NO: 6035731 - DNA, 25 bp, Homo sapien
attactgttcttggtcttagaaatg

SEQ ID NO: 6035732 - DNA, 25 bp, Homo sapien
ggcatccttttttgatgtttgagtg

SEQ ID NO: 6035733 - DNA, 25 bp, Homo sapien
gagaattctttttctaaagatttca

SEQ ID NO: 6035734 - DNA, 25 bp, Homo sapien
tcgtcttcttcaattgttcctacta

SEQ ID NO: 6035735 - DNA, 25 bp, Homo sapien
gcggatgatgactgaggctgagagg

SEQ ID NO: 6035736 - DNA, 25 bp, Homo sapien
tcctcaataataaccacattactgt

SEQ ID NO: 6035737 - DNA, 25 bp, Homo sapien
agttccaaccagctctgttaacacc

SEQ ID NO: 6035738 - DNA, 25 bp, Homo sapien
atatttttaacttctcttgcaaaag

SEQ ID NO: 6035739 - DNA, 25 bp, Homo sapien
tctttctgctattttattttctaac

SEQ ID NO: 6035740 - DNA, 25 bp, Homo sapien
aaccacattactgttcttggtctta

SEQ ID NO: 6035741 - DNA, 25 bp, Homo sapien
tctcttgcaaaagcattttcttctt

SEQ ID NO: 6035742 - DNA, 25 bp, Homo sapien
cttcttcttgcctctgttccgtttt

SEQ ID NO: 6035743 - DNA, 25 bp, Homo sapien
gctattttattttctaactctatgc

SEQ ID NO: 6035744 - DNA, 25 bp, Homo sapien
tcttcaattgttcctactagcgcgg

SEQ ID NO: 6035745 - DNA, 25 bp, Homo sapien
cattttcattcagctgtttcattga

SEQ ID NO: 6035746 - DNA, 25 bp, Homo sapien
ttattttctaactctatgctttttg

SEQ ID NO: 6035747 - DNA, 25 bp, Homo sapien
cttggaatgagtactcgtcattttc

SEQ ID NO: 6035748 - DNA, 25 bp, Homo sapien
aatttcgtcttcttcaattgttcct

SEQ ID NO: 6035749 - DNA, 25 bp, Homo sapien
tttctaactctatgctttttgagaa

SEQ ID NO: 6035750 - DNA, 25 bp, Homo sapien
tgaggctgagaggagtttgatattt

SEQ ID NO: 6035751 - DNA, 25 bp, Homo sapien
tctttacccgcttcctcaataataa

SEQ ID NO: 6035752 - DNA, 25 bp, Homo sapien
ttggaacgacggctgggtttgagcg

SEQ ID NO: 6035753 - DNA, 25 bp, Homo sapien
tgaatttctttacgtagggcgacag

SEQ ID NO: 6035754 - DNA, 25 bp, Homo sapien
atcaccagttccaaccagctctgtt

SEQ ID NO: 6035755 - DNA, 25 bp, Homo sapien
agaaatggtgcttttttcacgattt

SEQ ID NO: 6035756 - DNA, 25 bp, Homo sapien
gtttgagcggatgatgactgaggct

SEQ ID NO: 6035757 - DNA, 25 bp, Homo sapien
tgcttcctcttctttgaatttcttt

SEQ ID NO: 6035758 - DNA, 25 bp, Homo sapien
aacgacggctgggtttgagcggatg

SEQ ID NO: 6035759 - DNA, 25 bp, Homo sapien
cattgaattcataaatgttttaaaa

SEQ ID NO: 6035760 - DNA, 25 bp, Homo sapien
tgatgtttgagtgaatttctttacg

SEQ ID NO: 6035761 - DNA, 25 bp, Homo sapien
agcggatgcttcctcttctttgaat

SEQ ID NO: 6035762 - DNA, 25 bp, Homo sapien
taaagatttcaatacgctaaaatct

SEQ ID NO: 6035763 - DNA, 25 bp, Homo sapien
ggtcttagaaatggtgcttttttca

SEQ ID NO: 6035764 - DNA, 25 bp, Homo sapien
ctttctgttctttctgctattttat

SEQ ID NO: 6035765 - DNA, 25 bp, Homo sapien
gatgactgaggctgagaggagtttg

SEQ ID NO: 6035766 - DNA, 25 bp, Homo sapien
tttacgtagggcgacagtttcatat

SEQ ID NO: 6035767 - DNA, 25 bp, Homo sapien
gctgtttcattgaattcataaatgt

SEQ ID NO: 6035768 - DNA, 25 bp, Homo sapien
ttgagtgaatttctttacgtagggc

SEQ ID NO: 6035769 - DNA, 25 bp, Homo sapien
tatcttagcggatgcttcctcttct

SEQ ID NO: 6035770 - DNA, 25 bp, Homo sapien
ctttggtatcttagcggatgcttcc

SEQ ID NO: 6035771 - DNA, 25 bp, Homo sapien
cttttttgatgtttgagtgaatttc

SEQ ID NO: 6035772 - DNA, 25 bp, Homo sapien
gttcttggtcttagaaatggtgctt

SEQ ID NO: 6035773 - DNA, 25 bp, Homo sapien
gcattttcttcttcctttgtttcaa

SEQ ID NO: 6035774 - DNA, 25 bp, Homo sapien
actctatgctttttgagaattcttt

SEQ ID NO: 6035775 - DNA, 25 bp, Homo sapien
tcctactagcgcggcatcctttttt

SEQ ID NO: 6035776 - DNA, 25 bp, Homo sapien
taaaatcttggaatgagtactcgtc

SEQ ID NO: 6035777 - DNA, 25 bp, Homo sapien
ctcttctttgaatttctttttggcg

SEQ ID NO: 6035778 - DNA, 25 bp, Homo sapien
tgttcttattcttgaccttatcacc

SEQ ID NO: 6035779 - DNA, 25 bp, Homo sapien
tgagaggagtttgatatttttaact

SEQ ID NO: 6035780 - DNA, 25 bp, Homo sapien
aacaccctttctgttctttctgcta

SEQ ID NO: 6035781 - DNA, 25 bp, Homo sapien
aattgttcctactagcgcggcatcc

SEQ ID NO: 6035782 - DNA, 25 bp, Homo sapien
ggtgcttttttcacgattttcacgc

SEQ ID NO: 6035783 - DNA, 25 bp, Homo sapien
tttcaatacgctaaaatcttggaat

SEQ ID NO: 6035784 - DNA, 25 bp, Homo sapien
tttttcacgattttcacgcttcttc

SEQ ID NO: 6035785 - DNA, 25 bp, Homo sapien
atgagtactcgtcattttcattcag

SEQ ID NO: 6035786 - DNA, 25 bp, Homo sapien
ataataaccacattactgttcttgg

SEQ ID NO: 6035787 - DNA, 25 bp, Homo sapien
tgaccttatcaccagttccaaccag

SEQ ID NO: 6035788 - DNA, 25 bp, Homo sapien
actcgtcattttcattcagctgttt

SEQ ID NO: 6035789 - DNA, 25 bp, Homo sapien
tgctttttgagaattctttttctaa

SEQ ID NO: 6035790 - DNA, 25 bp, Homo sapien
gcaaaagcattttcttcttcctttg

SEQ ID NO: 6035791 - DNA, 25 bp, Homo sapien
tcatctttacgagaaggaaatccaa

SEQ ID NO: 6035792 - DNA, 25 bp, Homo sapien
gatccattcatggtagcagaatata

SEQ ID NO: 6035793 - DNA, 25 bp, Homo sapien
aaattgcaaagagattccacccatt

SEQ ID NO: 6035794 - DNA, 25 bp, Homo sapien
tgcttacctgaaacattatttttag

SEQ ID NO: 6035795 - DNA, 25 bp, Homo sapien
tctatccgaggtaaacagtaacaaa

SEQ ID NO: 6035796 - DNA, 25 bp, Homo sapien
tttcactgcttacctgaaacattat

SEQ ID NO: 6035797 - DNA, 25 bp, Homo sapien
aaatgctaccgacacataactattt

SEQ ID NO: 6035798 - DNA, 25 bp, Homo sapien
gtgaaaaaaataaaatgtcatcaat

SEQ ID NO: 6035799 - DNA, 25 bp, Homo sapien
aactgtgaaaaaaataaaatgtcat

SEQ ID NO: 6035800 - DNA, 25 bp, Homo sapien
gattctttacaactccctcgaggta

SEQ ID NO: 6035801 - DNA, 25 bp, Homo sapien
taccgacacataactatttaatgga

SEQ ID NO: 6035802 - DNA, 25 bp, Homo sapien
cgaggtaaattgcaaagagattcca

SEQ ID NO: 6035803 - DNA, 25 bp, Homo sapien
gttgaagttcatgagaaatttcact

SEQ ID NO: 6035804 - DNA, 25 bp, Homo sapien
tgttaaattgaataaattacaacta

SEQ ID NO: 6035805 - DNA, 25 bp, Homo sapien
aaaacaagaaagagacaattatcaa

SEQ ID NO: 6035806 - DNA, 25 bp, Homo sapien
taccattccaagagaaagttcaatt

SEQ ID NO: 6035807 - DNA, 25 bp, Homo sapien
ttcatggtagcagaatatacagatt

SEQ ID NO: 6035808 - DNA, 25 bp, Homo sapien
gttcatgagaaatttcactgcttac

SEQ ID NO: 6035809 - DNA, 25 bp, Homo sapien
agacaattatcaaatgattcaaccg

SEQ ID NO: 6035810 - DNA, 25 bp, Homo sapien
tggaaaaatttggattcgatagaga

SEQ ID NO: 6035811 - DNA, 25 bp, Homo sapien
cacataactatttaatggacacgca

SEQ ID NO: 6035812 - DNA, 25 bp, Homo sapien
aaatcgattctttacaactccctcg

SEQ ID NO: 6035813 - DNA, 25 bp, Homo sapien
attttctcatctttacgagaaggaa

SEQ ID NO: 6035814 - DNA, 25 bp, Homo sapien
ctagatcgatttttatcacaaaatg

SEQ ID NO: 6035815 - DNA, 25 bp, Homo sapien
gagaaagttcaattaacttgacacc

SEQ ID NO: 6035816 - DNA, 25 bp, Homo sapien
ttacaactccctcgaggtaaattgc

SEQ ID NO: 6035817 - DNA, 25 bp, Homo sapien
caaggaaaatgctttccataccatt

SEQ ID NO: 6035818 - DNA, 25 bp, Homo sapien
taacaaaatcgattctttacaactc

SEQ ID NO: 6035819 - DNA, 25 bp, Homo sapien
caaaatgttgttaaattgaataaat

SEQ ID NO: 6035820 - DNA, 25 bp, Homo sapien
ttctatattttctcatctttacgag

SEQ ID NO: 6035821 - DNA, 25 bp, Homo sapien
catgagggcgctgttaattgactgg

SEQ ID NO: 6035822 - DNA, 25 bp, Homo sapien
ctccctcgaggtaaattgcaaagag

SEQ ID NO: 6035823 - DNA, 25 bp, Homo sapien
cgatcctatagagccaaaaactgtg

SEQ ID NO: 6035824 - DNA, 25 bp, Homo sapien
actatttaatggacacgcaatctcc

SEQ ID NO: 6035825 - DNA, 25 bp, Homo sapien
aaaataaaatgtcatcaatggaaaa

SEQ ID NO: 6035826 - DNA, 25 bp, Homo sapien
aaatccaaatgctaccgacacataa

SEQ ID NO: 6035827 - DNA, 25 bp, Homo sapien
cctatcatttgaaaagctccatgag

SEQ ID NO: 6035828 - DNA, 25 bp, Homo sapien
gtagcagaatatacagattctatat

SEQ ID NO: 6035829 - DNA, 25 bp, Homo sapien
aatccaaattaataatgaagattgt

SEQ ID NO: 6035830 - DNA, 25 bp, Homo sapien
ttatcacaaaatgttgttaaattga

SEQ ID NO: 6035831 - DNA, 25 bp, Homo sapien
aatttggattcgatagagatggatg

SEQ ID NO: 6035832 - DNA, 25 bp, Homo sapien
agaaagagacaattatcaaatgatt

SEQ ID NO: 6035833 - DNA, 25 bp, Homo sapien
acagtaacaaaatcgattctttaca

SEQ ID NO: 6035834 - DNA, 25 bp, Homo sapien
aatctccctatcatttgaaaagctc

SEQ ID NO: 6035835 - DNA, 25 bp, Homo sapien
tggttggttgaagttcatgagaaat

SEQ ID NO: 6035836 - DNA, 25 bp, Homo sapien
acattatttttagcgatcaacctgc

SEQ ID NO: 6035837 - DNA, 25 bp, Homo sapien
acaactactatgcatcacttgcctg

SEQ ID NO: 6035838 - DNA, 25 bp, Homo sapien
gagaaatttcactgcttacctgaaa

SEQ ID NO: 6035839 - DNA, 25 bp, Homo sapien
tccaagagaaagttcaattaacttg

SEQ ID NO: 6035840 - DNA, 25 bp, Homo sapien
tacagattctatattttctcatctt

SEQ ID NO: 6035841 - DNA, 25 bp, Homo sapien
aggaaaatccaaattaataatgaag

SEQ ID NO: 6035842 - DNA, 25 bp, Homo sapien
tgacacctcactctacgaatgaaaa

SEQ ID NO: 6035843 - DNA, 25 bp, Homo sapien
attgaataaattacaactactatgc

SEQ ID NO: 6035844 - DNA, 25 bp, Homo sapien
gttcaattaacttgacacctcactc

SEQ ID NO: 6035845 - DNA, 25 bp, Homo sapien
ttgactggttggttgaagttcatga

SEQ ID NO: 6035846 - DNA, 25 bp, Homo sapien
ttacgagaaggaaatccaaatgcta

SEQ ID NO: 6035847 - DNA, 25 bp, Homo sapien
gattcgatagagatggatgatccat

SEQ ID NO: 6035848 - DNA, 25 bp, Homo sapien
gaaggaaatccaaatgctaccgaca

SEQ ID NO: 6035849 - DNA, 25 bp, Homo sapien
ttatcaaatgattcaaccgatccta

SEQ ID NO: 6035850 - DNA, 25 bp, Homo sapien
aatgattcaaccgatcctatagagc

SEQ ID NO: 6035851 - DNA, 25 bp, Homo sapien
ttcaaccgatcctatagagccaaaa

SEQ ID NO: 6035852 - DNA, 25 bp, Homo sapien
ggcgctgttaattgactggttggtt

SEQ ID NO: 6035853 - DNA, 25 bp, Homo sapien
aaatgtcatcaatggaaaaatttgg

SEQ ID NO: 6035854 - DNA, 25 bp, Homo sapien
actatgcatcacttgcctgttcatt

SEQ ID NO: 6035855 - DNA, 25 bp, Homo sapien
tgttaattgactggttggttgaagt

SEQ ID NO: 6035856 - DNA, 25 bp, Homo sapien
ttaatggacacgcaatctccctatc

SEQ ID NO: 6035857 - DNA, 25 bp, Homo sapien
aaatgctttccataccattccaaga

SEQ ID NO: 6035858 - DNA, 25 bp, Homo sapien
catcaatggaaaaatttggattcga

SEQ ID NO: 6035859 - DNA, 25 bp, Homo sapien
atttgaaaagctccatgagggcgct

SEQ ID NO: 6035860 - DNA, 25 bp, Homo sapien
caaagagattccacccatttggaaa

SEQ ID NO: 6035861 - DNA, 25 bp, Homo sapien
ttaacttgacacctcactctacgaa

SEQ ID NO: 6035862 - DNA, 25 bp, Homo sapien
catcacttgcctgttcattgcctgt

SEQ ID NO: 6035863 - DNA, 25 bp, Homo sapien
gacacgcaatctccctatcatttga

SEQ ID NO: 6035864 - DNA, 25 bp, Homo sapien
atggatgatccattcatggtagcag

SEQ ID NO: 6035865 - DNA, 25 bp, Homo sapien
gcgatcaacctgctagatcgatttt

SEQ ID NO: 6035866 - DNA, 25 bp, Homo sapien
aaagctccatgagggcgctgttaat

SEQ ID NO: 6035867 - DNA, 25 bp, Homo sapien
cgaggtaaacagtaacaaaatcgat

SEQ ID NO: 6035868 - DNA, 25 bp, Homo sapien
tataggcaaggaaaatgctttccat

SEQ ID NO: 6035869 - DNA, 25 bp, Homo sapien
gaatatacagattctatattttctc

SEQ ID NO: 6035870 - DNA, 25 bp, Homo sapien
tatagagccaaaaactgtgaaaaaa

SEQ ID NO: 6035871 - DNA, 25 bp, Homo sapien
aacctgctagatcgatttttatcac

SEQ ID NO: 6035872 - DNA, 25 bp, Homo sapien
ctcactctacgaatgaaaaaaaagt

SEQ ID NO: 6035873 - DNA, 25 bp, Homo sapien
cgatttttatcacaaaatgttgtta

SEQ ID NO: 6035874 - DNA, 25 bp, Homo sapien
taaattacaactactatgcatcact

SEQ ID NO: 6035875 - DNA, 25 bp, Homo sapien
agattgtataggcaaggaaaatgct

SEQ ID NO: 6035876 - DNA, 25 bp, Homo sapien
tttttagcgatcaacctgctagatc

SEQ ID NO: 6035877 - DNA, 25 bp, Homo sapien
cctgaaacattatttttagcgatca

SEQ ID NO: 6035878 - DNA, 25 bp, Homo sapien
atagagatggatgatccattcatgg

SEQ ID NO: 6035879 - DNA, 25 bp, Homo sapien
taatgaagattgtataggcaaggaa

SEQ ID NO: 6035880 - DNA, 25 bp, Homo sapien
tttccataccattccaagagaaagt

SEQ ID NO: 6035881 - DNA, 25 bp, Homo sapien
aattaataatgaagattgtataggc

SEQ ID NO: 6035882 - DNA, 25 bp, Homo sapien
tagttgtaatttattcaatttaaca

SEQ ID NO: 6035883 - DNA, 25 bp, Homo sapien
gttcactgataaaatccttaaacgc

SEQ ID NO: 6035884 - DNA, 25 bp, Homo sapien
tgatggcttcaggtggatgaattta

SEQ ID NO: 6035885 - DNA, 25 bp, Homo sapien
tgataaaatccttaaacgctggatc

SEQ ID NO: 6035886 - DNA, 25 bp, Homo sapien
gatgaatttggccatgttccttgtt

SEQ ID NO: 6035887 - DNA, 25 bp, Homo sapien
tgaaattctcctaatgaaatttagg

SEQ ID NO: 6035888 - DNA, 25 bp, Homo sapien
caggtacagcaatatcttcaactag

SEQ ID NO: 6035889 - DNA, 25 bp, Homo sapien
aatccttaaacgctggatctgattc

SEQ ID NO: 6035890 - DNA, 25 bp, Homo sapien
taggctttttgtatttaagtctcaa

SEQ ID NO: 6035891 - DNA, 25 bp, Homo sapien
gcagtaattgtcagcttttgaaatt

SEQ ID NO: 6035892 - DNA, 25 bp, Homo sapien
cgccactataatgaataaaagtttc

SEQ ID NO: 6035893 - DNA, 25 bp, Homo sapien
agtgatgcatagtagttgtaattta

SEQ ID NO: 6035894 - DNA, 25 bp, Homo sapien
aacgaatagctcagccttcctaatt

SEQ ID NO: 6035895 - DNA, 25 bp, Homo sapien
agtcacgtacgcaaaatttgttatt

SEQ ID NO: 6035896 - DNA, 25 bp, Homo sapien
gcatagtagttgtaatttattcaat

SEQ ID NO: 6035897 - DNA, 25 bp, Homo sapien
cattttgtgataaaaatcgatctag

SEQ ID NO: 6035898 - DNA, 25 bp, Homo sapien
ctaaaaataatgtttcaggtaagca

SEQ ID NO: 6035899 - DNA, 25 bp, Homo sapien
tgatcgctaaaaataatgtttcagg

SEQ ID NO: 6035900 - DNA, 25 bp, Homo sapien
agcttttgaaattctcctaatgaaa

SEQ ID NO: 6035901 - DNA, 25 bp, Homo sapien
tatcttcaactagttcactgataaa

SEQ ID NO: 6035902 - DNA, 25 bp, Homo sapien
atacatggacattgcagctaaatat

SEQ ID NO: 6035903 - DNA, 25 bp, Homo sapien
gtttggtagagatatgttataacct

SEQ ID NO: 6035904 - DNA, 25 bp, Homo sapien
aaatttacaggcaatgaacaggcaa

SEQ ID NO: 6035905 - DNA, 25 bp, Homo sapien
ggcgatatacatggacattgcagct

SEQ ID NO: 6035906 - DNA, 25 bp, Homo sapien
ccttgtttcaatgcagtaattgtca

SEQ ID NO: 6035907 - DNA, 25 bp, Homo sapien
taaacgctggatctgattcaatatc

SEQ ID NO: 6035908 - DNA, 25 bp, Homo sapien
ggcagcaccgtcagtcacgtacgca

SEQ ID NO: 6035909 - DNA, 25 bp, Homo sapien
acaggcaatgaacaggcaagtgatg

SEQ ID NO: 6035910 - DNA, 25 bp, Homo sapien
ggacattgcagctaaatatgatggc

SEQ ID NO: 6035911 - DNA, 25 bp, Homo sapien
atttaagtctcaaggaatctagatt

SEQ ID NO: 6035912 - DNA, 25 bp, Homo sapien
aatgaacaggcaagtgatgcatagt

SEQ ID NO: 6035913 - DNA, 25 bp, Homo sapien
ttttgtatttaagtctcaaggaatc

SEQ ID NO: 6035914 - DNA, 25 bp, Homo sapien
cctaattccttcgacagtggcagca

SEQ ID NO: 6035915 - DNA, 25 bp, Homo sapien
gacagtggcagcaccgtcagtcacg

SEQ ID NO: 6035916 - DNA, 25 bp, Homo sapien
catcccatttggaattttcattttt

SEQ ID NO: 6035917 - DNA, 25 bp, Homo sapien
caactagttcactgataaaatcctt

SEQ ID NO: 6035918 - DNA, 25 bp, Homo sapien
ctagattcgtatcaggtacagcaat

SEQ ID NO: 6035919 - DNA, 25 bp, Homo sapien
tcaatttaacaacattttgtgataa

SEQ ID NO: 6035920 - DNA, 25 bp, Homo sapien
catgttccttgtttcaatgcagtaa

SEQ ID NO: 6035921 - DNA, 25 bp, Homo sapien
caatgccgccactataatgaataaa

SEQ ID NO: 6035922 - DNA, 25 bp, Homo sapien
tttaatttttctggcgatatacatg

SEQ ID NO: 6035923 - DNA, 25 bp, Homo sapien
ttccatgatgaatttggccatgttc

SEQ ID NO: 6035924 - DNA, 25 bp, Homo sapien
tataatgaataaaagtttcatccca

SEQ ID NO: 6035925 - DNA, 25 bp, Homo sapien
attgtcagcttttgaaattctccta

SEQ ID NO: 6035926 - DNA, 25 bp, Homo sapien
cgaatattccatgatgaatttggcc

SEQ ID NO: 6035927 - DNA, 25 bp, Homo sapien
cttcaggtggatgaatttattacaa

SEQ ID NO: 6035928 - DNA, 25 bp, Homo sapien
gtgataaaaatcgatctagcaggtt

SEQ ID NO: 6035929 - DNA, 25 bp, Homo sapien
tagggggtttggtagagatatgtta

SEQ ID NO: 6035930 - DNA, 25 bp, Homo sapien
aggaatctagattcgtatcaggtac

SEQ ID NO: 6035931 - DNA, 25 bp, Homo sapien
ttattcaatttaacaacattttgtg

SEQ ID NO: 6035932 - DNA, 25 bp, Homo sapien
tttaacttcttcaaatttacaggca

SEQ ID NO: 6035933 - DNA, 25 bp, Homo sapien
gtggatgaatttattacaacaaatc

SEQ ID NO: 6035934 - DNA, 25 bp, Homo sapien
gtctcaaggaatctagattcgtatc

SEQ ID NO: 6035935 - DNA, 25 bp, Homo sapien
catgtttaggctttttgtatttaag

SEQ ID NO: 6035936 - DNA, 25 bp, Homo sapien
ctgattcaatatcaatgccgccact

SEQ ID NO: 6035937 - DNA, 25 bp, Homo sapien
gcaggttgatcgctaaaaataatgt

SEQ ID NO: 6035938 - DNA, 25 bp, Homo sapien
tgtaatttattcaatttaacaacat

SEQ ID NO: 6035939 - DNA, 25 bp, Homo sapien
gatctagcaggttgatcgctaaaaa

SEQ ID NO: 6035940 - DNA, 25 bp, Homo sapien
taaatatgatggcttcaggtggatg

SEQ ID NO: 6035941 - DNA, 25 bp, Homo sapien
taaagaacttagaacgaatagctca

SEQ ID NO: 6035942 - DNA, 25 bp, Homo sapien
acaaatcgaatattccatgatgaat

SEQ ID NO: 6035943 - DNA, 25 bp, Homo sapien
ttttctggcgatatacatggacatt

SEQ ID NO: 6035944 - DNA, 25 bp, Homo sapien
accgtcagtcacgtacgcaaaattt

SEQ ID NO: 6035945 - DNA, 25 bp, Homo sapien
taacaacattttgtgataaaaatcg

SEQ ID NO: 6035946 - DNA, 25 bp, Homo sapien
attacaacaaatcgaatattccatg

SEQ ID NO: 6035947 - DNA, 25 bp, Homo sapien
acttagaacgaatagctcagccttc

SEQ ID NO: 6035948 - DNA, 25 bp, Homo sapien
tatgttataacctaaagaacttaga

SEQ ID NO: 6035949 - DNA, 25 bp, Homo sapien
cagcaatatcttcaactagttcact

SEQ ID NO: 6035950 - DNA, 25 bp, Homo sapien
ttcttcaaatttacaggcaatgaac

SEQ ID NO: 6035951 - DNA, 25 bp, Homo sapien
gaatttattacaacaaatcgaatat

SEQ ID NO: 6035952 - DNA, 25 bp, Homo sapien
aaaatcgatctagcaggttgatcgc

SEQ ID NO: 6035953 - DNA, 25 bp, Homo sapien
caggcaagtgatgcatagtagttgt

SEQ ID NO: 6035954 - DNA, 25 bp, Homo sapien
tagctcagccttcctaattccttcg

SEQ ID NO: 6035955 - DNA, 25 bp, Homo sapien
aataaaccatgccatgtttaggctt

SEQ ID NO: 6035956 - DNA, 25 bp, Homo sapien
agccttcctaattccttcgacagtg

SEQ ID NO: 6035957 - DNA, 25 bp, Homo sapien
cttgaaataaaccatgccatgttta

SEQ ID NO: 6035958 - DNA, 25 bp, Homo sapien
tccttcgacagtggcagcaccgtca

SEQ ID NO: 6035959 - DNA, 25 bp, Homo sapien
ttcaatgcagtaattgtcagctttt

SEQ ID NO: 6035960 - DNA, 25 bp, Homo sapien
tgcagctaaatatgatggcttcagg

SEQ ID NO: 6035961 - DNA, 25 bp, Homo sapien
tagagatatgttataacctaaagaa

SEQ ID NO: 6035962 - DNA, 25 bp, Homo sapien
tttggccatgttccttgtttcaatg

SEQ ID NO: 6035963 - DNA, 25 bp, Homo sapien
gaataaaagtttcatcccatttgga

SEQ ID NO: 6035964 - DNA, 25 bp, Homo sapien
ttcatttttaatttttctggcgata

SEQ ID NO: 6035965 - DNA, 25 bp, Homo sapien
ctggatctgattcaatatcaatgcc

SEQ ID NO: 6035966 - DNA, 25 bp, Homo sapien
caatatcaatgccgccactataatg

SEQ ID NO: 6035967 - DNA, 25 bp, Homo sapien
tcgtatcaggtacagcaatatcttc

SEQ ID NO: 6035968 - DNA, 25 bp, Homo sapien
agtttcatcccatttggaattttca

SEQ ID NO: 6035969 - DNA, 25 bp, Homo sapien
ccatgccatgtttaggctttttgta

SEQ ID NO: 6035970 - DNA, 25 bp, Homo sapien
agagcccaaatgatgattctcgaag

SEQ ID NO: 6035971 - DNA, 25 bp, Homo sapien
atcaacagtaccgaggcatcataac

SEQ ID NO: 6035972 - DNA, 25 bp, Homo sapien
tcgcgatgccaataatatccttcta

SEQ ID NO: 6035973 - DNA, 25 bp, Homo sapien
tcacaatgaagagatgtttgttggt

SEQ ID NO: 6035974 - DNA, 25 bp, Homo sapien
gatcctttggcaagaaaattgttct

SEQ ID NO: 6035975 - DNA, 25 bp, Homo sapien
gagaaagttctgatagaaagagggt

SEQ ID NO: 6035976 - DNA, 25 bp, Homo sapien
acacctgacatgtgcgaggattggg

SEQ ID NO: 6035977 - DNA, 25 bp, Homo sapien
gacatgtgcgaggattgggaatacc

SEQ ID NO: 6035978 - DNA, 25 bp, Homo sapien
tggtccaagaaagaaaaatggagaa

SEQ ID NO: 6035979 - DNA, 25 bp, Homo sapien
tgatgttcgcgatgccaataatatc

SEQ ID NO: 6035980 - DNA, 25 bp, Homo sapien
ccacgtacctcttagcttcaagaaa

SEQ ID NO: 6035981 - DNA, 25 bp, Homo sapien
tcataacgtcaactgtagactggaa

SEQ ID NO: 6035982 - DNA, 25 bp, Homo sapien
ttgttctgggtctgatgttcgcgat

SEQ ID NO: 6035983 - DNA, 25 bp, Homo sapien
aattccgactaagaatgctattggc

SEQ ID NO: 6035984 - DNA, 25 bp, Homo sapien
aaccaatcaagacaggtaagagccc

SEQ ID NO: 6035985 - DNA, 25 bp, Homo sapien
attagagatgacaccggtgagaaag

SEQ ID NO: 6035986 - DNA, 25 bp, Homo sapien
gcaaatccacgtacctcttagcttc

SEQ ID NO: 6035987 - DNA, 25 bp, Homo sapien
cggacacttccttcacaatgaagag

SEQ ID NO: 6035988 - DNA, 25 bp, Homo sapien
cctgactcaagaaatttacaccatt

SEQ ID NO: 6035989 - DNA, 25 bp, Homo sapien
gaggcatcataacgtcaactgtaga

SEQ ID NO: 6035990 - DNA, 25 bp, Homo sapien
tagcttcaagaaatcaacagtaccg

SEQ ID NO: 6035991 - DNA, 25 bp, Homo sapien
atttgggaacttggcaagtaaggag

SEQ ID NO: 6035992 - DNA, 25 bp, Homo sapien
ccacttcctaagtcatttacacctg

SEQ ID NO: 6035993 - DNA, 25 bp, Homo sapien
tcaagaaatttacaccatttgtcgt

SEQ ID NO: 6035994 - DNA, 25 bp, Homo sapien
ccttctatttgggaacttggcaagt

SEQ ID NO: 6035995 - DNA, 25 bp, Homo sapien
aatttacaccatttgtcgttgcctc

SEQ ID NO: 6035996 - DNA, 25 bp, Homo sapien
cctaagtcatttacacctgacatgt

SEQ ID NO: 6035997 - DNA, 25 bp, Homo sapien
tttgtcgttgcctcaagaagaacac

SEQ ID NO: 6035998 - DNA, 25 bp, Homo sapien
agtaccgaggcatcataacgtcaac

SEQ ID NO: 6035999 - DNA, 25 bp, Homo sapien
tgaagagatgtttgttggtccaaga

SEQ ID NO: 6036000 - DNA, 25 bp, Homo sapien
gttgcctcaagaagaacacttgaaa

SEQ ID NO: 6036001 - DNA, 25 bp, Homo sapien
tatgaaccaataccacttcctaagt

SEQ ID NO: 6036002 - DNA, 25 bp, Homo sapien
tgccaataatatccttctatttggg

SEQ ID NO: 6036003 - DNA, 25 bp, Homo sapien
caggtaagagcccaaatgatgattc

SEQ ID NO: 6036004 - DNA, 25 bp, Homo sapien
tcaagacaggtaagagcccaaatga

SEQ ID NO: 6036005 - DNA, 25 bp, Homo sapien
acaccatttgtcgttgcctcaagaa

SEQ ID NO: 6036006 - DNA, 25 bp, Homo sapien
gaaaaagttgctcctgactcaagaa

SEQ ID NO: 6036007 - DNA, 25 bp, Homo sapien
cgtcaactgtagactggaaaccaat

SEQ ID NO: 6036008 - DNA, 25 bp, Homo sapien
gttttcaatcgctgcatcaattccg

SEQ ID NO: 6036009 - DNA, 25 bp, Homo sapien
tcaagaagaacacttgaaagtggtt

SEQ ID NO: 6036010 - DNA, 25 bp, Homo sapien
tacttaccggacacttccttcacaa

SEQ ID NO: 6036011 - DNA, 25 bp, Homo sapien
tgcggcatgcgaaactaaacttact

SEQ ID NO: 6036012 - DNA, 25 bp, Homo sapien
tgggtctgatgttcgcgatgccaat

SEQ ID NO: 6036013 - DNA, 25 bp, Homo sapien
cttgaaagtggtttgcttagtaaga

SEQ ID NO: 6036014 - DNA, 25 bp, Homo sapien
cgttggttttcaatcgctgcatcaa

SEQ ID NO: 6036015 - DNA, 25 bp, Homo sapien
tttctgtttacaccgttcattagag

SEQ ID NO: 6036016 - DNA, 25 bp, Homo sapien
agagggtggataagtgaagaaaaag

SEQ ID NO: 6036017 - DNA, 25 bp, Homo sapien
gactaagaatgctattggcaaatcc

SEQ ID NO: 6036018 - DNA, 25 bp, Homo sapien
ccaataccacttcctaagtcattta

SEQ ID NO: 6036019 - DNA, 25 bp, Homo sapien
caagtaaggagattgaagtggaaaa

SEQ ID NO: 6036020 - DNA, 25 bp, Homo sapien
atagaaagagggtggataagtgaag

SEQ ID NO: 6036021 - DNA, 25 bp, Homo sapien
gttgctcctgactcaagaaatttac

SEQ ID NO: 6036022 - DNA, 25 bp, Homo sapien
agaacacttgaaagtggtttgctta

SEQ ID NO: 6036023 - DNA, 25 bp, Homo sapien
tggataagtgaagaaaaagttgctc

SEQ ID NO: 6036024 - DNA, 25 bp, Homo sapien
cttccttcacaatgaagagatgttt

SEQ ID NO: 6036025 - DNA, 25 bp, Homo sapien
ctgtagactggaaaccaatcaagac

SEQ ID NO: 6036026 - DNA, 25 bp, Homo sapien
tgcatcaattccgactaagaatgct

SEQ ID NO: 6036027 - DNA, 25 bp, Homo sapien
caagaaatcaacagtaccgaggcat

SEQ ID NO: 6036028 - DNA, 25 bp, Homo sapien
attgaagtggaaaaccaagctgatt

SEQ ID NO: 6036029 - DNA, 25 bp, Homo sapien
agtgaagaaaaagttgctcctgact

SEQ ID NO: 6036030 - DNA, 25 bp, Homo sapien
taaacttacttatgaaccaatacca

SEQ ID NO: 6036031 - DNA, 25 bp, Homo sapien
gaatgctattggcaaatccacgtac

SEQ ID NO: 6036032 - DNA, 25 bp, Homo sapien
tgcgaggattgggaataccgtaaag

SEQ ID NO: 6036033 - DNA, 25 bp, Homo sapien
ctcgaagagaaagatcctttggcaa

SEQ ID NO: 6036034 - DNA, 25 bp, Homo sapien
agaaaattgttctgggtctgatgtt

SEQ ID NO: 6036035 - DNA, 25 bp, Homo sapien
ctattggcaaatccacgtacctctt

SEQ ID NO: 6036036 - DNA, 25 bp, Homo sapien
cttggcaagtaaggagattgaagtg

SEQ ID NO: 6036037 - DNA, 25 bp, Homo sapien
gagaaagatcctttggcaagaaaat

SEQ ID NO: 6036038 - DNA, 25 bp, Homo sapien
tcatttacacctgacatgtgcgagg

SEQ ID NO: 6036039 - DNA, 25 bp, Homo sapien
accggtgagaaagttctgatagaaa

SEQ ID NO: 6036040 - DNA, 25 bp, Homo sapien
ccgttcattagagatgacaccggtg

SEQ ID NO: 6036041 - DNA, 25 bp, Homo sapien
ttggcaagaaaattgttctgggtct

SEQ ID NO: 6036042 - DNA, 25 bp, Homo sapien
aaccaagctgattgcggcatgcgaa

SEQ ID NO: 6036043 - DNA, 25 bp, Homo sapien
ttacttatgaaccaataccacttcc

SEQ ID NO: 6036044 - DNA, 25 bp, Homo sapien
acctcttagcttcaagaaatcaaca

SEQ ID NO: 6036045 - DNA, 25 bp, Homo sapien
gatgtttgttggtccaagaaagaaa

SEQ ID NO: 6036046 - DNA, 25 bp, Homo sapien
aatcgctgcatcaattccgactaag

SEQ ID NO: 6036047 - DNA, 25 bp, Homo sapien
taatatccttctatttgggaacttg

SEQ ID NO: 6036048 - DNA, 25 bp, Homo sapien
aggagattgaagtggaaaaccaagc

SEQ ID NO: 6036049 - DNA, 25 bp, Homo sapien
gatgacaccggtgagaaagttctga

SEQ ID NO: 6036050 - DNA, 25 bp, Homo sapien
caaatgatgattctcgaagagaaag

SEQ ID NO: 6036051 - DNA, 25 bp, Homo sapien
gtggaaaaccaagctgattgcggca

SEQ ID NO: 6036052 - DNA, 25 bp, Homo sapien
actggaaaccaatcaagacaggtaa

SEQ ID NO: 6036053 - DNA, 25 bp, Homo sapien
gctgattgcggcatgcgaaactaaa

SEQ ID NO: 6036054 - DNA, 25 bp, Homo sapien
gttctgatagaaagagggtggataa

SEQ ID NO: 6036055 - DNA, 25 bp, Homo sapien
atgattctcgaagagaaagatcctt

SEQ ID NO: 6036056 - DNA, 25 bp, Homo sapien
tgcgaaactaaacttacttatgaac

SEQ ID NO: 6036057 - DNA, 25 bp, Homo sapien
tttacaccgttcattagagatgaca

SEQ ID NO: 6036058 - DNA, 25 bp, Homo sapien
gagtcaggagcaactttttcttcac

SEQ ID NO: 6036059 - DNA, 25 bp, Homo sapien
gcttcgatgtattattatcaacagc

SEQ ID NO: 6036060 - DNA, 25 bp, Homo sapien
gcccattgtagcgagcctcttttct

SEQ ID NO: 6036061 - DNA, 25 bp, Homo sapien
ggcttccggcctatgggaacacctg

SEQ ID NO: 6036062 - DNA, 25 bp, Homo sapien
gcaaaccactttcaagtgttcttct

SEQ ID NO: 6036063 - DNA, 25 bp, Homo sapien
attgtgctcaaaaacgaaaggccat

SEQ ID NO: 6036064 - DNA, 25 bp, Homo sapien
tggatggtccttcatgtcatacaag

SEQ ID NO: 6036065 - DNA, 25 bp, Homo sapien
aacgacaaatggtgtaaatttcttg

SEQ ID NO: 6036066 - DNA, 25 bp, Homo sapien
tgtcgttcatcgaattcaattgttt

SEQ ID NO: 6036067 - DNA, 25 bp, Homo sapien
ctgccacaatctagaatttggatcc

SEQ ID NO: 6036068 - DNA, 25 bp, Homo sapien
tttggaggtcttactaagcaaacca

SEQ ID NO: 6036069 - DNA, 25 bp, Homo sapien
tcatcgaattcaattgtttggtctg

SEQ ID NO: 6036070 - DNA, 25 bp, Homo sapien
tcctaagagccacaatgaggaagat

SEQ ID NO: 6036071 - DNA, 25 bp, Homo sapien
ctttcattagttggtcttgggacac

SEQ ID NO: 6036072 - DNA, 25 bp, Homo sapien
gtttcttgtgtgttcctcgattatt

SEQ ID NO: 6036073 - DNA, 25 bp, Homo sapien
tggttattctttaaatcaatagtgg

SEQ ID NO: 6036074 - DNA, 25 bp, Homo sapien
tgccatgtcatatatgtctggcacc

SEQ ID NO: 6036075 - DNA, 25 bp, Homo sapien
gattattggatggtccttcatgtca

SEQ ID NO: 6036076 - DNA, 25 bp, Homo sapien
caatctagaatttggatcctttttc

SEQ ID NO: 6036077 - DNA, 25 bp, Homo sapien
ggaagattgtgctcaaaaacgaaag

SEQ ID NO: 6036078 - DNA, 25 bp, Homo sapien
tgtagcgagcctcttttctttggag

SEQ ID NO: 6036079 - DNA, 25 bp, Homo sapien
gtcatatatgtctggcacctgccac

SEQ ID NO: 6036080 - DNA, 25 bp, Homo sapien
cagtcgtaggttctcgtttccagaa

SEQ ID NO: 6036081 - DNA, 25 bp, Homo sapien
gtttccagaacttccacaggctaga

SEQ ID NO: 6036082 - DNA, 25 bp, Homo sapien
gtccttcatgtcatacaaggcttga

SEQ ID NO: 6036083 - DNA, 25 bp, Homo sapien
ccacaggctagaggtggaattgttt

SEQ ID NO: 6036084 - DNA, 25 bp, Homo sapien
gagcctcttttctttggaggtctta

SEQ ID NO: 6036085 - DNA, 25 bp, Homo sapien
tactaagcaaaccactttcaagtgt

SEQ ID NO: 6036086 - DNA, 25 bp, Homo sapien
catgtcatacaaggcttgaaattga

SEQ ID NO: 6036087 - DNA, 25 bp, Homo sapien
tggatcctttttcgcccattgtagc

SEQ ID NO: 6036088 - DNA, 25 bp, Homo sapien
tttttcgcccattgtagcgagcctc

SEQ ID NO: 6036089 - DNA, 25 bp, Homo sapien
taaatcaatagtgggcttccggcct

SEQ ID NO: 6036090 - DNA, 25 bp, Homo sapien
cataccacgttaccaaatattgtag

SEQ ID NO: 6036091 - DNA, 25 bp, Homo sapien
aaatggtgtaaatttcttgagtcag

SEQ ID NO: 6036092 - DNA, 25 bp, Homo sapien
actttcaagtgttcttcttgaggca

SEQ ID NO: 6036093 - DNA, 25 bp, Homo sapien
ataaactgtcgttcatcgaattcaa

SEQ ID NO: 6036094 - DNA, 25 bp, Homo sapien
aagtgttcttcttgaggcaacgaca

SEQ ID NO: 6036095 - DNA, 25 bp, Homo sapien
tgaggcaacgacaaatggtgtaaat

SEQ ID NO: 6036096 - DNA, 25 bp, Homo sapien
tcttttcgccttcctaagagccaca

SEQ ID NO: 6036097 - DNA, 25 bp, Homo sapien
acacctgctttgataaactgtcgtt

SEQ ID NO: 6036098 - DNA, 25 bp, Homo sapien
ggtggaattgttttgtgaagcctcg

SEQ ID NO: 6036099 - DNA, 25 bp, Homo sapien
ttttctttggaggtcttactaagca

SEQ ID NO: 6036100 - DNA, 25 bp, Homo sapien
atgtattattatcaacagcttgcgt

SEQ ID NO: 6036101 - DNA, 25 bp, Homo sapien
ttgtgaagcctcgtttcttgtgtgt

SEQ ID NO: 6036102 - DNA, 25 bp, Homo sapien
tcttcttgaggcaacgacaaatggt

SEQ ID NO: 6036103 - DNA, 25 bp, Homo sapien
gctttgataaactgtcgttcatcga

SEQ ID NO: 6036104 - DNA, 25 bp, Homo sapien
ttcctcgattattggatggtccttc

SEQ ID NO: 6036105 - DNA, 25 bp, Homo sapien
agcctcgtttcttgtgtgttcctcg

SEQ ID NO: 6036106 - DNA, 25 bp, Homo sapien
caatgaggaagattgtgctcaaaaa

SEQ ID NO: 6036107 - DNA, 25 bp, Homo sapien
caaatattgtagatggttattcttt

SEQ ID NO: 6036108 - DNA, 25 bp, Homo sapien
ccctgatgatcttgccatgtcatat

SEQ ID NO: 6036109 - DNA, 25 bp, Homo sapien
tgcctagaacgaggcttcgatgtat

SEQ ID NO: 6036110 - DNA, 25 bp, Homo sapien
atgggaacacctgctttgataaact

SEQ ID NO: 6036111 - DNA, 25 bp, Homo sapien
cgtgcaccctgatgatcttgccatg

SEQ ID NO: 6036112 - DNA, 25 bp, Homo sapien
gttctcgtttccagaacttccacag

SEQ ID NO: 6036113 - DNA, 25 bp, Homo sapien
tgatcttgccatgtcatatatgtct

SEQ ID NO: 6036114 - DNA, 25 bp, Homo sapien
ttagttggtcttgggacacaacgcc

SEQ ID NO: 6036115 - DNA, 25 bp, Homo sapien
ctcaaaaacgaaaggccataccacg

SEQ ID NO: 6036116 - DNA, 25 bp, Homo sapien
attgtttggtctgtcggcatttcct

SEQ ID NO: 6036117 - DNA, 25 bp, Homo sapien
tttcttgagtcaggagcaacttttt

SEQ ID NO: 6036118 - DNA, 25 bp, Homo sapien
aacgaggcttcgatgtattattatc

SEQ ID NO: 6036119 - DNA, 25 bp, Homo sapien
aattgaatgggcgtgcaccctgatg

SEQ ID NO: 6036120 - DNA, 25 bp, Homo sapien
gtcggcatttcctgcctagaacgag

SEQ ID NO: 6036121 - DNA, 25 bp, Homo sapien
aatagtgggcttccggcctatggga

SEQ ID NO: 6036122 - DNA, 25 bp, Homo sapien
cgttaccaaatattgtagatggtta

SEQ ID NO: 6036123 - DNA, 25 bp, Homo sapien
tgtgtgttcctcgattattggatgg

SEQ ID NO: 6036124 - DNA, 25 bp, Homo sapien
tggtctgtcggcatttcctgcctag

SEQ ID NO: 6036125 - DNA, 25 bp, Homo sapien
aaggccataccacgttaccaaatat

SEQ ID NO: 6036126 - DNA, 25 bp, Homo sapien
cttgcgttccgtttacagcagtcgt

SEQ ID NO: 6036127 - DNA, 25 bp, Homo sapien
caacagcttgcgttccgtttacagc

SEQ ID NO: 6036128 - DNA, 25 bp, Homo sapien
tgtaaatttcttgagtcaggagcaa

SEQ ID NO: 6036129 - DNA, 25 bp, Homo sapien
agaatttggatcctttttcgcccat

SEQ ID NO: 6036130 - DNA, 25 bp, Homo sapien
atttcctgcctagaacgaggcttcg

SEQ ID NO: 6036131 - DNA, 25 bp, Homo sapien
tattatcaacagcttgcgttccgtt

SEQ ID NO: 6036132 - DNA, 25 bp, Homo sapien
agaacttccacaggctagaggtgga

SEQ ID NO: 6036133 - DNA, 25 bp, Homo sapien
tacaaggcttgaaattgaatgggcg

SEQ ID NO: 6036134 - DNA, 25 bp, Homo sapien
gctagaggtggaattgttttgtgaa

SEQ ID NO: 6036135 - DNA, 25 bp, Homo sapien
cggcctatgggaacacctgctttga

SEQ ID NO: 6036136 - DNA, 25 bp, Homo sapien
aatgggcgtgcaccctgatgatctt

SEQ ID NO: 6036137 - DNA, 25 bp, Homo sapien
ggtcttactaagcaaaccactttca

SEQ ID NO: 6036138 - DNA, 25 bp, Homo sapien
tgtagatggttattctttaaatcaa

SEQ ID NO: 6036139 - DNA, 25 bp, Homo sapien
tggcacctgccacaatctagaattt

SEQ ID NO: 6036140 - DNA, 25 bp, Homo sapien
tcgccttcctaagagccacaatgag

SEQ ID NO: 6036141 - DNA, 25 bp, Homo sapien
ttacagcagtcgtaggttctcgttt

SEQ ID NO: 6036142 - DNA, 25 bp, Homo sapien
aattcaattgtttggtctgtcggca

SEQ ID NO: 6036143 - DNA, 25 bp, Homo sapien
attgttttgtgaagcctcgtttctt

SEQ ID NO: 6036144 - DNA, 25 bp, Homo sapien
gcttgaaattgaatgggcgtgcacc

SEQ ID NO: 6036145 - DNA, 25 bp, Homo sapien
ttccgtttacagcagtcgtaggttc

SEQ ID NO: 6036146 - DNA, 25 bp, Homo sapien
tatgtctggcacctgccacaatcta

SEQ ID NO: 6036147 - DNA, 25 bp, Homo sapien
attctttaaatcaatagtgggcttc

SEQ ID NO: 6036148 - DNA, 25 bp, Homo sapien
gagccacaatgaggaagattgtgct

SEQ ID NO: 6036149 - DNA, 25 bp, Homo sapien
ttgctgatttcttgaaagcaggttg

SEQ ID NO: 6036150 - DNA, 25 bp, Homo sapien
tggaagtggtgaactatagggccaa

SEQ ID NO: 6036151 - DNA, 25 bp, Homo sapien
tgattgccaatttggtggtgtcgac

SEQ ID NO: 6036152 - DNA, 25 bp, Homo sapien
gtaccgcgcccactggaagacctca

SEQ ID NO: 6036153 - DNA, 25 bp, Homo sapien
atctatcctttaatgcaagcgttgg

SEQ ID NO: 6036154 - DNA, 25 bp, Homo sapien
gaacccacaaatcatcaaagatgtt

SEQ ID NO: 6036155 - DNA, 25 bp, Homo sapien
tgcaagcgttggacgaacaattctt

SEQ ID NO: 6036156 - DNA, 25 bp, Homo sapien
ttcttttagcagacttgcacgcctt

SEQ ID NO: 6036157 - DNA, 25 bp, Homo sapien
cagagaaaaatttttgtcttagcgg

SEQ ID NO: 6036158 - DNA, 25 bp, Homo sapien
tgaccatcaaagctatcttgagaag

SEQ ID NO: 6036159 - DNA, 25 bp, Homo sapien
agactataccatggatatctttaga

SEQ ID NO: 6036160 - DNA, 25 bp, Homo sapien
actatagggccaaatactatgaatt

SEQ ID NO: 6036161 - DNA, 25 bp, Homo sapien
ccaatttggtggtgtcgaccagaga

SEQ ID NO: 6036162 - DNA, 25 bp, Homo sapien
aattcttagatgttgattgccaatt

SEQ ID NO: 6036163 - DNA, 25 bp, Homo sapien
acaaatcatcaaagatgttctcgaa

SEQ ID NO: 6036164 - DNA, 25 bp, Homo sapien
tcaaagctatcttgagaagcatcaa

SEQ ID NO: 6036165 - DNA, 25 bp, Homo sapien
gccaatccattattgagtgggctta

SEQ ID NO: 6036166 - DNA, 25 bp, Homo sapien
acgcctttttggacaacatgaaggc

SEQ ID NO: 6036167 - DNA, 25 bp, Homo sapien
ccaagcttgctgatttcttgaaagc

SEQ ID NO: 6036168 - DNA, 25 bp, Homo sapien
gacctcattgtggttattttgttcc

SEQ ID NO: 6036169 - DNA, 25 bp, Homo sapien
gcatcaatgttccaattgaaaagct

SEQ ID NO: 6036170 - DNA, 25 bp, Homo sapien
ttcttaccagctaactccagactat

SEQ ID NO: 6036171 - DNA, 25 bp, Homo sapien
cgttggacgaacaattcttagatgt

SEQ ID NO: 6036172 - DNA, 25 bp, Homo sapien
tgtcgaccagagaaaaatttttgtc

SEQ ID NO: 6036173 - DNA, 25 bp, Homo sapien
caagtcgccaatccattattgagtg

SEQ ID NO: 6036174 - DNA, 25 bp, Homo sapien
agatgttctcgaagtacaaaagaga

SEQ ID NO: 6036175 - DNA, 25 bp, Homo sapien
tggtgaactatagggccaaatacta

SEQ ID NO: 6036176 - DNA, 25 bp, Homo sapien
tttcacaaaacgatgctaaaagggc

SEQ ID NO: 6036177 - DNA, 25 bp, Homo sapien
tgtcttagcggaagaaaatttacca

SEQ ID NO: 6036178 - DNA, 25 bp, Homo sapien
tgactgttcttttagcagacttgca

SEQ ID NO: 6036179 - DNA, 25 bp, Homo sapien
agtcttgaacccacaaatcatcaaa

SEQ ID NO: 6036180 - DNA, 25 bp, Homo sapien
acgaacaattcttagatgttgattg

SEQ ID NO: 6036181 - DNA, 25 bp, Homo sapien
tggtggtgtcgaccagagaaaaatt

SEQ ID NO: 6036182 - DNA, 25 bp, Homo sapien
ctggaagacctcattgtggttattt

SEQ ID NO: 6036183 - DNA, 25 bp, Homo sapien
tgaaagcaggttgtgaagtgactgt

SEQ ID NO: 6036184 - DNA, 25 bp, Homo sapien
acattgtttcacaaaacgatgctaa

SEQ ID NO: 6036185 - DNA, 25 bp, Homo sapien
tgagaagcatcaatgttccaattga

SEQ ID NO: 6036186 - DNA, 25 bp, Homo sapien
gtgaagtgactgttcttttagcaga

SEQ ID NO: 6036187 - DNA, 25 bp, Homo sapien
aaaacgatgctaaaagggcaggcgc

SEQ ID NO: 6036188 - DNA, 25 bp, Homo sapien
gggcttatctatcctttaatgcaag

SEQ ID NO: 6036189 - DNA, 25 bp, Homo sapien
aggcgctgatgttgtcaagcaagtc

SEQ ID NO: 6036190 - DNA, 25 bp, Homo sapien
atttcttgaaagcaggttgtgaagt

SEQ ID NO: 6036191 - DNA, 25 bp, Homo sapien
gggccaaatactatgaattgaccat

SEQ ID NO: 6036192 - DNA, 25 bp, Homo sapien
gaacttgcaagaagtcttgaaccca

SEQ ID NO: 6036193 - DNA, 25 bp, Homo sapien
ctatgaccaagcttgctgatttctt

SEQ ID NO: 6036194 - DNA, 25 bp, Homo sapien
tctcgaagtacaaaagagacatttg

SEQ ID NO: 6036195 - DNA, 25 bp, Homo sapien
tagcagacttgcacgcctttttgga

SEQ ID NO: 6036196 - DNA, 25 bp, Homo sapien
tctcattaccaagaacttgcaagaa

SEQ ID NO: 6036197 - DNA, 25 bp, Homo sapien
tgaaggcgccattggaagtggtgaa

SEQ ID NO: 6036198 - DNA, 25 bp, Homo sapien
gttcggtctcattaccaagaacttg

SEQ ID NO: 6036199 - DNA, 25 bp, Homo sapien
ttagattatccaacattgtttcaca

SEQ ID NO: 6036200 - DNA, 25 bp, Homo sapien
gacatttgaaattatactggggtac

SEQ ID NO: 6036201 - DNA, 25 bp, Homo sapien
ttgaaattatactggggtaccgcgc

SEQ ID NO: 6036202 - DNA, 25 bp, Homo sapien
gcaagaagtcttgaacccacaaatc

SEQ ID NO: 6036203 - DNA, 25 bp, Homo sapien
taaaatttgttgttggctcttctta

SEQ ID NO: 6036204 - DNA, 25 bp, Homo sapien
tgttgttggctcttcttaccagcta

SEQ ID NO: 6036205 - DNA, 25 bp, Homo sapien
tgatgttgtcaagcaagtcgccaat

SEQ ID NO: 6036206 - DNA, 25 bp, Homo sapien
acttgcacgcctttttggacaacat

SEQ ID NO: 6036207 - DNA, 25 bp, Homo sapien
gaggcgttcggtctcattaccaaga

SEQ ID NO: 6036208 - DNA, 25 bp, Homo sapien
tgtcaagcaagtcgccaatccatta

SEQ ID NO: 6036209 - DNA, 25 bp, Homo sapien
gatatctttagattatccaacattg

SEQ ID NO: 6036210 - DNA, 25 bp, Homo sapien
ttgttcctatgaccaagcttgctga

SEQ ID NO: 6036211 - DNA, 25 bp, Homo sapien
caggttgtgaagtgactgttctttt

SEQ ID NO: 6036212 - DNA, 25 bp, Homo sapien
taccatggatatctttagattatcc

SEQ ID NO: 6036213 - DNA, 25 bp, Homo sapien
atgaattgaccatcaaagctatctt

SEQ ID NO: 6036214 - DNA, 25 bp, Homo sapien
cctttaatgcaagcgttggacgaac

SEQ ID NO: 6036215 - DNA, 25 bp, Homo sapien
agtacaaaagagacatttgaaatta

SEQ ID NO: 6036216 - DNA, 25 bp, Homo sapien
catcaaagatgttctcgaagtacaa

SEQ ID NO: 6036217 - DNA, 25 bp, Homo sapien
caattgaaaagctaaaatttgttgt

SEQ ID NO: 6036218 - DNA, 25 bp, Homo sapien
ctggggtaccgcgcccactggaaga

SEQ ID NO: 6036219 - DNA, 25 bp, Homo sapien
tatccaacattgtttcacaaaacga

SEQ ID NO: 6036220 - DNA, 25 bp, Homo sapien
atgctaaaagggcaggcgctgatgt

SEQ ID NO: 6036221 - DNA, 25 bp, Homo sapien
tagatgttgattgccaatttggtgg

SEQ ID NO: 6036222 - DNA, 25 bp, Homo sapien
taccaagaacttgcaagaagtcttg

SEQ ID NO: 6036223 - DNA, 25 bp, Homo sapien
ctatcttgagaagcatcaatgttcc

SEQ ID NO: 6036224 - DNA, 25 bp, Homo sapien
aactccagactataccatggatatc

SEQ ID NO: 6036225 - DNA, 25 bp, Homo sapien
aatactatgaattgaccatcaaagc

SEQ ID NO: 6036226 - DNA, 25 bp, Homo sapien
aaagctaaaatttgttgttggctct

SEQ ID NO: 6036227 - DNA, 25 bp, Homo sapien
cgccattggaagtggtgaactatag

SEQ ID NO: 6036228 - DNA, 25 bp, Homo sapien
cgcccactggaagacctcattgtgg

SEQ ID NO: 6036229 - DNA, 25 bp, Homo sapien
aaagagacatttgaaattatactgg

SEQ ID NO: 6036230 - DNA, 25 bp, Homo sapien
ccattattgagtgggcttatctatc

SEQ ID NO: 6036231 - DNA, 25 bp, Homo sapien
ttttggacaacatgaaggcgccatt

SEQ ID NO: 6036232 - DNA, 25 bp, Homo sapien
aaagggcaggcgctgatgttgtcaa

SEQ ID NO: 6036233 - DNA, 25 bp, Homo sapien
attatactggggtaccgcgcccact

SEQ ID NO: 6036234 - DNA, 25 bp, Homo sapien
tggctcttcttaccagctaactcca

SEQ ID NO: 6036235 - DNA, 25 bp, Homo sapien
atgttccaattgaaaagctaaaatt

SEQ ID NO: 6036236 - DNA, 25 bp, Homo sapien
attgtggttattttgttcctatgac

SEQ ID NO: 6036237 - DNA, 25 bp, Homo sapien
ttgagtgggcttatctatcctttaa

SEQ ID NO: 6036238 - DNA, 25 bp, Homo sapien
ccagctaactccagactataccatg

SEQ ID NO: 6036239 - DNA, 25 bp, Homo sapien
acaacatgaaggcgccattggaagt

SEQ ID NO: 6036240 - DNA, 25 bp, Homo sapien
gttattttgttcctatgaccaagct

SEQ ID NO: 6036241 - DNA, 25 bp, Homo sapien
gaacttttctggtctatcaatgaag

SEQ ID NO: 6036242 - DNA, 25 bp, Homo sapien
cgctaagacaaaaatttttctctgg

SEQ ID NO: 6036243 - DNA, 25 bp, Homo sapien
ggcagacattttaccaccttgagcc

SEQ ID NO: 6036244 - DNA, 25 bp, Homo sapien
ttctctggtcgacaccaccaaattg

SEQ ID NO: 6036245 - DNA, 25 bp, Homo sapien
aatttttctctggtcgacaccacca

SEQ ID NO: 6036246 - DNA, 25 bp, Homo sapien
aatgaagaattcgaagtgatttgta

SEQ ID NO: 6036247 - DNA, 25 bp, Homo sapien
tgcaatgacatattggacaaatgac

SEQ ID NO: 6036248 - DNA, 25 bp, Homo sapien
aaatgacagtaaaccattctcttcg

SEQ ID NO: 6036249 - DNA, 25 bp, Homo sapien
gatagcgtcagcaacaccaattttt

SEQ ID NO: 6036250 - DNA, 25 bp, Homo sapien
gtcagcaacaccaatttttagatca

SEQ ID NO: 6036251 - DNA, 25 bp, Homo sapien
caatttcatttcttcgaaggatttg

SEQ ID NO: 6036252 - DNA, 25 bp, Homo sapien
atttgtaccaaacttcaattcttgg

SEQ ID NO: 6036253 - DNA, 25 bp, Homo sapien
ttggacaaatgacagtaaaccattc

SEQ ID NO: 6036254 - DNA, 25 bp, Homo sapien
ttgaaattccttgttgttggcaaat

SEQ ID NO: 6036255 - DNA, 25 bp, Homo sapien
tgctttggttcttccaaaaggtcga

SEQ ID NO: 6036256 - DNA, 25 bp, Homo sapien
tgatctttttcttaacttgctttgg

SEQ ID NO: 6036257 - DNA, 25 bp, Homo sapien
gaaccatagggttcattaaatgtgc

SEQ ID NO: 6036258 - DNA, 25 bp, Homo sapien
catttcttcgaaggatttgtaggta

SEQ ID NO: 6036259 - DNA, 25 bp, Homo sapien
ctcttttcttgtagcccaaacttgg

SEQ ID NO: 6036260 - DNA, 25 bp, Homo sapien
ttcttgtctgattggctccaatagc

SEQ ID NO: 6036261 - DNA, 25 bp, Homo sapien
tctgattggctccaatagctcgttg

SEQ ID NO: 6036262 - DNA, 25 bp, Homo sapien
ctcgttgatagcgtcagcaacacca

SEQ ID NO: 6036263 - DNA, 25 bp, Homo sapien
ttaccggggctacaaaatgcactat

SEQ ID NO: 6036264 - DNA, 25 bp, Homo sapien
gattggtgcaatgacatattggaca

SEQ ID NO: 6036265 - DNA, 25 bp, Homo sapien
agcctttttcgacttttgtggtgtg

SEQ ID NO: 6036266 - DNA, 25 bp, Homo sapien
cttcaattcttggattggtgcaatg

SEQ ID NO: 6036267 - DNA, 25 bp, Homo sapien
gggctacaaaatgcactattgatct

SEQ ID NO: 6036268 - DNA, 25 bp, Homo sapien
tctatcaatgaagaattcgaagtga

SEQ ID NO: 6036269 - DNA, 25 bp, Homo sapien
atcaggtggggacaatttttcttct

SEQ ID NO: 6036270 - DNA, 25 bp, Homo sapien
gaagtgatttgtaccaaacttcaat

SEQ ID NO: 6036271 - DNA, 25 bp, Homo sapien
tggctccaatagctcgttgatagcg

SEQ ID NO: 6036272 - DNA, 25 bp, Homo sapien
ttttcgacttttgtggtgtggcaac

SEQ ID NO: 6036273 - DNA, 25 bp, Homo sapien
atcagaggcagacattttaccacct

SEQ ID NO: 6036274 - DNA, 25 bp, Homo sapien
accaccgaacttttctggtctatca

SEQ ID NO: 6036275 - DNA, 25 bp, Homo sapien
gacaaaaatttttctctggtcgaca

SEQ ID NO: 6036276 - DNA, 25 bp, Homo sapien
gtggtgtggcaactggataaccctt

SEQ ID NO: 6036277 - DNA, 25 bp, Homo sapien
caaacctggaaccatagggttcatt

SEQ ID NO: 6036278 - DNA, 25 bp, Homo sapien
cactattgatctttttcttaacttg

SEQ ID NO: 6036279 - DNA, 25 bp, Homo sapien
aacaccaatttttagatcaggtggg

SEQ ID NO: 6036280 - DNA, 25 bp, Homo sapien
gacgttaccggggctacaaaatgca

SEQ ID NO: 6036281 - DNA, 25 bp, Homo sapien
gttgttggcaaattcttgtctgatt

SEQ ID NO: 6036282 - DNA, 25 bp, Homo sapien
ggcctcttgaaattccttgttgttg

SEQ ID NO: 6036283 - DNA, 25 bp, Homo sapien
caatagctcgttgatagcgtcagca

SEQ ID NO: 6036284 - DNA, 25 bp, Homo sapien
ttctggtctatcaatgaagaattcg

SEQ ID NO: 6036285 - DNA, 25 bp, Homo sapien
tcgaaggatttgtaggtaattggac

SEQ ID NO: 6036286 - DNA, 25 bp, Homo sapien
atctcgttggtcttagtagcgcctg

SEQ ID NO: 6036287 - DNA, 25 bp, Homo sapien
ttttgaattcggatcagaggcagac

SEQ ID NO: 6036288 - DNA, 25 bp, Homo sapien
gtcgatttttgaattcggatcagag

SEQ ID NO: 6036289 - DNA, 25 bp, Homo sapien
ggcaaattcttgtctgattggctcc

SEQ ID NO: 6036290 - DNA, 25 bp, Homo sapien
acttttgtggtgtggcaactggata

SEQ ID NO: 6036291 - DNA, 25 bp, Homo sapien
ttggtcttagtagcgcctgggtact

SEQ ID NO: 6036292 - DNA, 25 bp, Homo sapien
gatttgtaggtaattggaccaccga

SEQ ID NO: 6036293 - DNA, 25 bp, Homo sapien
ttcttggattggtgcaatgacatat

SEQ ID NO: 6036294 - DNA, 25 bp, Homo sapien
cattttaccaccttgagccaaacct

SEQ ID NO: 6036295 - DNA, 25 bp, Homo sapien
tctcttcgacgttaccggggctaca

SEQ ID NO: 6036296 - DNA, 25 bp, Homo sapien
ttcggaggcctcttgaaattccttg

SEQ ID NO: 6036297 - DNA, 25 bp, Homo sapien
atttttagatcaggtggggacaatt

SEQ ID NO: 6036298 - DNA, 25 bp, Homo sapien
gacatattggacaaatgacagtaaa

SEQ ID NO: 6036299 - DNA, 25 bp, Homo sapien
tagtagcgcctgggtacttagtacc

SEQ ID NO: 6036300 - DNA, 25 bp, Homo sapien
tagggttcattaaatgtgctctttt

SEQ ID NO: 6036301 - DNA, 25 bp, Homo sapien
taccaccttgagccaaacctggaac

SEQ ID NO: 6036302 - DNA, 25 bp, Homo sapien
gaattcgaagtgatttgtaccaaac

SEQ ID NO: 6036303 - DNA, 25 bp, Homo sapien
aatgtgctcttttcttgtagcccaa

SEQ ID NO: 6036304 - DNA, 25 bp, Homo sapien
attcggatcagaggcagacatttta

SEQ ID NO: 6036305 - DNA, 25 bp, Homo sapien
tcattaaatgtgctcttttcttgta

SEQ ID NO: 6036306 - DNA, 25 bp, Homo sapien
ttccttgttgttggcaaattcttgt

SEQ ID NO: 6036307 - DNA, 25 bp, Homo sapien
tggtaaattttcttccgctaagaca

SEQ ID NO: 6036308 - DNA, 25 bp, Homo sapien
accaaacttcaattcttggattggt

SEQ ID NO: 6036309 - DNA, 25 bp, Homo sapien
tcttaacttgctttggttcttccaa

SEQ ID NO: 6036310 - DNA, 25 bp, Homo sapien
tggcaactggataacccttttcgga

SEQ ID NO: 6036311 - DNA, 25 bp, Homo sapien
ttgagccaaacctggaaccataggg

SEQ ID NO: 6036312 - DNA, 25 bp, Homo sapien
caaaatgcactattgatctttttct

SEQ ID NO: 6036313 - DNA, 25 bp, Homo sapien
cagtaaaccattctcttcgacgtta

SEQ ID NO: 6036314 - DNA, 25 bp, Homo sapien
aaaagccaatttcatttcttcgaag

SEQ ID NO: 6036315 - DNA, 25 bp, Homo sapien
tagggaaagacttagtaagaagatg

SEQ ID NO: 6036316 - DNA, 25 bp, Homo sapien
tacctagcgtgccgctctctaattt

SEQ ID NO: 6036317 - DNA, 25 bp, Homo sapien
cattagaggaacatttgtttaacgg

SEQ ID NO: 6036318 - DNA, 25 bp, Homo sapien
gtaacaagttcttaaacgatatcag

SEQ ID NO: 6036319 - DNA, 25 bp, Homo sapien
agatagagacagaattattagatgc

SEQ ID NO: 6036320 - DNA, 25 bp, Homo sapien
gagatctatccgtggtacaagatga

SEQ ID NO: 6036321 - DNA, 25 bp, Homo sapien
ttgatcctgtcagagatctatccgt

SEQ ID NO: 6036322 - DNA, 25 bp, Homo sapien
atcgacttttttccaagcaataaca

SEQ ID NO: 6036323 - DNA, 25 bp, Homo sapien
tatccgtggtacaagatgaactcat

SEQ ID NO: 6036324 - DNA, 25 bp, Homo sapien
gacacgtagaggggatatttcaagt

SEQ ID NO: 6036325 - DNA, 25 bp, Homo sapien
tcttgaaagacttagaatttctgga

SEQ ID NO: 6036326 - DNA, 25 bp, Homo sapien
ttcaagtggtgagaggattcttaaa

SEQ ID NO: 6036327 - DNA, 25 bp, Homo sapien
tggtgagaggattcttaaaggaaga

SEQ ID NO: 6036328 - DNA, 25 bp, Homo sapien
tggtacaagatgaactcatcttgaa

SEQ ID NO: 6036329 - DNA, 25 bp, Homo sapien
tatcagacacgtagaggggatattt

SEQ ID NO: 6036330 - DNA, 25 bp, Homo sapien
tgagaatggtttcgaagaattctaa

SEQ ID NO: 6036331 - DNA, 25 bp, Homo sapien
attctaaagaacatcaggaaatgaa

SEQ ID NO: 6036332 - DNA, 25 bp, Homo sapien
aactcatcttgaaagacttagaatt

SEQ ID NO: 6036333 - DNA, 25 bp, Homo sapien
ctgggctcaccagaggcgcatctca

SEQ ID NO: 6036334 - DNA, 25 bp, Homo sapien
agaggattcttaaaggaagacatca

SEQ ID NO: 6036335 - DNA, 25 bp, Homo sapien
agacagaattattagatgcattaga

SEQ ID NO: 6036336 - DNA, 25 bp, Homo sapien
gaacactcacaatatatgatattgc

SEQ ID NO: 6036337 - DNA, 25 bp, Homo sapien
ctgtcagagatctatccgtggtaca

SEQ ID NO: 6036338 - DNA, 25 bp, Homo sapien
tagatgcattagaggaacatttgtt

SEQ ID NO: 6036339 - DNA, 25 bp, Homo sapien
cggcatttcaaagatcattggaacc

SEQ ID NO: 6036340 - DNA, 25 bp, Homo sapien
ctcaaaattgggaaatcctgcaaat

SEQ ID NO: 6036341 - DNA, 25 bp, Homo sapien
ttcttaaaggaagacatcacccata

SEQ ID NO: 6036342 - DNA, 25 bp, Homo sapien
tcaccagaggcgcatctcaaggcca

SEQ ID NO: 6036343 - DNA, 25 bp, Homo sapien
ttatccattcgctaccattgacgca

SEQ ID NO: 6036344 - DNA, 25 bp, Homo sapien
acaaactcaaaattgggaaatcctg

SEQ ID NO: 6036345 - DNA, 25 bp, Homo sapien
aaagacttagtaagaagatgagaat

SEQ ID NO: 6036346 - DNA, 25 bp, Homo sapien
ttttttccaagcaataacaaactca

SEQ ID NO: 6036347 - DNA, 25 bp, Homo sapien
gacgcagaatgtgccaaagtcaata

SEQ ID NO: 6036348 - DNA, 25 bp, Homo sapien
aagacttagaatttctggaaaacat

SEQ ID NO: 6036349 - DNA, 25 bp, Homo sapien
gacatcacccatatagaaggtaatg

SEQ ID NO: 6036350 - DNA, 25 bp, Homo sapien
ccaacttcagggatagtagggcttg

SEQ ID NO: 6036351 - DNA, 25 bp, Homo sapien
gtgcgaaatgcgtacctggaacact

SEQ ID NO: 6036352 - DNA, 25 bp, Homo sapien
atcaggaaatgaagatagagacaga

SEQ ID NO: 6036353 - DNA, 25 bp, Homo sapien
gcaataacaaactcaaaattgggaa

SEQ ID NO: 6036354 - DNA, 25 bp, Homo sapien
gaatatatcagagtgcgaaatgcgt

SEQ ID NO: 6036355 - DNA, 25 bp, Homo sapien
agttcttaaacgatatcagacacgt

SEQ ID NO: 6036356 - DNA, 25 bp, Homo sapien
cgctctctaatttattgagaatata

SEQ ID NO: 6036357 - DNA, 25 bp, Homo sapien
tcaatatacctagcgtgccgctctc

SEQ ID NO: 6036358 - DNA, 25 bp, Homo sapien
tagaatttctggaaaacattaggga

SEQ ID NO: 6036359 - DNA, 25 bp, Homo sapien
taaacgatatcagacacgtagaggg

SEQ ID NO: 6036360 - DNA, 25 bp, Homo sapien
tcacaatatatgatattgctgggct

SEQ ID NO: 6036361 - DNA, 25 bp, Homo sapien
atcagagtgcgaaatgcgtacctgg

SEQ ID NO: 6036362 - DNA, 25 bp, Homo sapien
agaagatgagaatggtttcgaagaa

SEQ ID NO: 6036363 - DNA, 25 bp, Homo sapien
gggaggatatcgaataatccaactt

SEQ ID NO: 6036364 - DNA, 25 bp, Homo sapien
taccattgacgcagaatgtgccaaa

SEQ ID NO: 6036365 - DNA, 25 bp, Homo sapien
tggtaaatcgacttttttccaagca

SEQ ID NO: 6036366 - DNA, 25 bp, Homo sapien
aagatgaactcatcttgaaagactt

SEQ ID NO: 6036367 - DNA, 25 bp, Homo sapien
tgcaaattatccattcgctaccatt

SEQ ID NO: 6036368 - DNA, 25 bp, Homo sapien
aatgcgtacctggaacactcacaat

SEQ ID NO: 6036369 - DNA, 25 bp, Homo sapien
tggtttcgaagaattctaaagaaca

SEQ ID NO: 6036370 - DNA, 25 bp, Homo sapien
aaatcctgcaaattatccattcgct

SEQ ID NO: 6036371 - DNA, 25 bp, Homo sapien
attgggaaatcctgcaaattatcca

SEQ ID NO: 6036372 - DNA, 25 bp, Homo sapien
ttcaaagatcattggaacctggatg

SEQ ID NO: 6036373 - DNA, 25 bp, Homo sapien
ggatatttcaagtggtgagaggatt

SEQ ID NO: 6036374 - DNA, 25 bp, Homo sapien
caaggccatggtttgggtaacaagt

SEQ ID NO: 6036375 - DNA, 25 bp, Homo sapien
tacctggaacactcacaatatatga

SEQ ID NO: 6036376 - DNA, 25 bp, Homo sapien
aattattagatgcattagaggaaca

SEQ ID NO: 6036377 - DNA, 25 bp, Homo sapien
gcatctcaaggccatggtttgggta

SEQ ID NO: 6036378 - DNA, 25 bp, Homo sapien
gtaatgttgatcctgtcagagatct

SEQ ID NO: 6036379 - DNA, 25 bp, Homo sapien
attcgctaccattgacgcagaatgt

SEQ ID NO: 6036380 - DNA, 25 bp, Homo sapien
agaggcgcatctcaaggccatggtt

SEQ ID NO: 6036381 - DNA, 25 bp, Homo sapien
ctaatttattgagaatatatcagag

SEQ ID NO: 6036382 - DNA, 25 bp, Homo sapien
atatcgaataatccaacttcaggga

SEQ ID NO: 6036383 - DNA, 25 bp, Homo sapien
aagaacatcaggaaatgaagataga

SEQ ID NO: 6036384 - DNA, 25 bp, Homo sapien
tgctaatgttggtaaatcgactttt

SEQ ID NO: 6036385 - DNA, 25 bp, Homo sapien
aataatccaacttcagggatagtag

SEQ ID NO: 6036386 - DNA, 25 bp, Homo sapien
agggcttgctaatgttggtaaatcg

SEQ ID NO: 6036387 - DNA, 25 bp, Homo sapien
aatgtgccaaagtcaatatacctag

SEQ ID NO: 6036388 - DNA, 25 bp, Homo sapien
ttagtaagaagatgagaatggtttc

SEQ ID NO: 6036389 - DNA, 25 bp, Homo sapien
ttccaagcaataacaaactcaaaat

SEQ ID NO: 6036390 - DNA, 25 bp, Homo sapien
tatatgatattgctgggctcaccag

SEQ ID NO: 6036391 - DNA, 25 bp, Homo sapien
aaggaagacatcacccatatagaag

SEQ ID NO: 6036392 - DNA, 25 bp, Homo sapien
tagaggggatatttcaagtggtgag

SEQ ID NO: 6036393 - DNA, 25 bp, Homo sapien
tattgagaatatatcagagtgcgaa

SEQ ID NO: 6036394 - DNA, 25 bp, Homo sapien
atattgctgggctcaccagaggcgc

SEQ ID NO: 6036395 - DNA, 25 bp, Homo sapien
ccaaagtcaatatacctagcgtgcc

SEQ ID NO: 6036396 - DNA, 25 bp, Homo sapien
aaatgaagatagagacagaattatt

SEQ ID NO: 6036397 - DNA, 25 bp, Homo sapien
gcgtgccgctctctaatttattgag

SEQ ID NO: 6036398 - DNA, 25 bp, Homo sapien
cccatatagaaggtaatgttgatcc

SEQ ID NO: 6036399 - DNA, 25 bp, Homo sapien
aaaatccggcatttcaaagatcatt

SEQ ID NO: 6036400 - DNA, 25 bp, Homo sapien
tagaaggtaatgttgatcctgtcag

SEQ ID NO: 6036401 - DNA, 25 bp, Homo sapien
cgaagaattctaaagaacatcagga

SEQ ID NO: 6036402 - DNA, 25 bp, Homo sapien
tcagggatagtagggcttgctaatg

SEQ ID NO: 6036403 - DNA, 25 bp, Homo sapien
gatagtagggcttgctaatgttggt

SEQ ID NO: 6036404 - DNA, 25 bp, Homo sapien
taatatttctgacaaatttattttc

SEQ ID NO: 6036405 - DNA, 25 bp, Homo sapien
tcagcgctgataaatgtttcacgca

SEQ ID NO: 6036406 - DNA, 25 bp, Homo sapien
agtaggaatttatctcctggcgaaa

SEQ ID NO: 6036407 - DNA, 25 bp, Homo sapien
ttgaggtgaaacatttagcaatatc

SEQ ID NO: 6036408 - DNA, 25 bp, Homo sapien
ttcaaaattttgacttcatccaggt

SEQ ID NO: 6036409 - DNA, 25 bp, Homo sapien
caatatcaaagttggtttggaggtt

SEQ ID NO: 6036410 - DNA, 25 bp, Homo sapien
cattctataatatttctgacaaatt

SEQ ID NO: 6036411 - DNA, 25 bp, Homo sapien
tattttattacatcagcgctgataa

SEQ ID NO: 6036412 - DNA, 25 bp, Homo sapien
gctaattaagttcaacaactttctc

SEQ ID NO: 6036413 - DNA, 25 bp, Homo sapien
cccgcggcctcttgagcggtggttc

SEQ ID NO: 6036414 - DNA, 25 bp, Homo sapien
cctcccttatattccattggtgaac

SEQ ID NO: 6036415 - DNA, 25 bp, Homo sapien
taaggcaatgtcattgtcctgcata

SEQ ID NO: 6036416 - DNA, 25 bp, Homo sapien
aatttatctcctggcgaaaattcgt

SEQ ID NO: 6036417 - DNA, 25 bp, Homo sapien
gtaatcttgaggtgaaacatttagc

SEQ ID NO: 6036418 - DNA, 25 bp, Homo sapien
tgcgattcaaattctgcactgaaaa

SEQ ID NO: 6036419 - DNA, 25 bp, Homo sapien
tggtatcttccttgatcttgtcaaa

SEQ ID NO: 6036420 - DNA, 25 bp, Homo sapien
tttctgacaaatttattttcattcc

SEQ ID NO: 6036421 - DNA, 25 bp, Homo sapien
tcccttagattttagtaaagactca

SEQ ID NO: 6036422 - DNA, 25 bp, Homo sapien
tgcctgcacgtttgataagtccctt

SEQ ID NO: 6036423 - DNA, 25 bp, Homo sapien
attttgacttcatccaggttccaat

SEQ ID NO: 6036424 - DNA, 25 bp, Homo sapien
aaactaactgttgatcagaaacatt

SEQ ID NO: 6036425 - DNA, 25 bp, Homo sapien
aatgtcattgtcctgcataatatat

SEQ ID NO: 6036426 - DNA, 25 bp, Homo sapien
tggttccctcccttatattccattg

SEQ ID NO: 6036427 - DNA, 25 bp, Homo sapien
tgcttattcaaaattttgacttcat

SEQ ID NO: 6036428 - DNA, 25 bp, Homo sapien
gtgggccgcatgtaaagaagctaat

SEQ ID NO: 6036429 - DNA, 25 bp, Homo sapien
tgacgctatgcctttacattccatc

SEQ ID NO: 6036430 - DNA, 25 bp, Homo sapien
tctgcactgaaaagtaggaatttat

SEQ ID NO: 6036431 - DNA, 25 bp, Homo sapien
tccattggtgaacttcttgtgggcc

SEQ ID NO: 6036432 - DNA, 25 bp, Homo sapien
taagttcaacaactttctcatttct

SEQ ID NO: 6036433 - DNA, 25 bp, Homo sapien
aatgtttcacgcaagtcgctatgga

SEQ ID NO: 6036434 - DNA, 25 bp, Homo sapien
aaagactcatttagcggtggttcca

SEQ ID NO: 6036435 - DNA, 25 bp, Homo sapien
tcgtcatattttattacatcagcgc

SEQ ID NO: 6036436 - DNA, 25 bp, Homo sapien
ggtgaacttcttgtgggccgcatgt

SEQ ID NO: 6036437 - DNA, 25 bp, Homo sapien
ttatattccattggtgaacttcttg

SEQ ID NO: 6036438 - DNA, 25 bp, Homo sapien
aatatattgtttgcctgcacgtttg

SEQ ID NO: 6036439 - DNA, 25 bp, Homo sapien
cattccatcaattgcgattcaaatt

SEQ ID NO: 6036440 - DNA, 25 bp, Homo sapien
aaacattggtatcttccttgatctt

SEQ ID NO: 6036441 - DNA, 25 bp, Homo sapien
tgaaacatttagcaatatcaaagtt

SEQ ID NO: 6036442 - DNA, 25 bp, Homo sapien
tttcattcctaacgtaatcttgagg

SEQ ID NO: 6036443 - DNA, 25 bp, Homo sapien
tagattttagtaaagactcatttag

SEQ ID NO: 6036444 - DNA, 25 bp, Homo sapien
ggcgaaaattcgttaatccattcta

SEQ ID NO: 6036445 - DNA, 25 bp, Homo sapien
atcaattgcgattcaaattctgcac

SEQ ID NO: 6036446 - DNA, 25 bp, Homo sapien
tgagcggtggttccctcccttatat

SEQ ID NO: 6036447 - DNA, 25 bp, Homo sapien
atcttcttcagatcgtcatatttta

SEQ ID NO: 6036448 - DNA, 25 bp, Homo sapien
attacacccgcggcctcttgagcgg

SEQ ID NO: 6036449 - DNA, 25 bp, Homo sapien
tttagtaaagactcatttagcggtg

SEQ ID NO: 6036450 - DNA, 25 bp, Homo sapien
tcatttctagtattatttgcggtat

SEQ ID NO: 6036451 - DNA, 25 bp, Homo sapien
ctttctcatttctagtattatttgc

SEQ ID NO: 6036452 - DNA, 25 bp, Homo sapien
attgtcctgcataatatattgtttg

SEQ ID NO: 6036453 - DNA, 25 bp, Homo sapien
cacgtttgataagtcccttagattt

SEQ ID NO: 6036454 - DNA, 25 bp, Homo sapien
acttcatccaggttccaatgatctt

SEQ ID NO: 6036455 - DNA, 25 bp, Homo sapien
cgcatgtaaagaagctaattaagtt

SEQ ID NO: 6036456 - DNA, 25 bp, Homo sapien
aagttatgcttattcaaaattttga

SEQ ID NO: 6036457 - DNA, 25 bp, Homo sapien
agcggtggttccatcttcttcagat

SEQ ID NO: 6036458 - DNA, 25 bp, Homo sapien
ttatttgcggtatcgcagaaactaa

SEQ ID NO: 6036459 - DNA, 25 bp, Homo sapien
tgacaaatttattttcattcctaac

SEQ ID NO: 6036460 - DNA, 25 bp, Homo sapien
cctaacgtaatcttgaggtgaaaca

SEQ ID NO: 6036461 - DNA, 25 bp, Homo sapien
gatcttgtcaaaatactctgacgct

SEQ ID NO: 6036462 - DNA, 25 bp, Homo sapien
tccaggttccaatgatctttgaaat

SEQ ID NO: 6036463 - DNA, 25 bp, Homo sapien
ctgcataatatattgtttgcctgca

SEQ ID NO: 6036464 - DNA, 25 bp, Homo sapien
taaagaagctaattaagttcaacaa

SEQ ID NO: 6036465 - DNA, 25 bp, Homo sapien
attgtttgcctgcacgtttgataag

SEQ ID NO: 6036466 - DNA, 25 bp, Homo sapien
cttccttgatcttgtcaaaatactc

SEQ ID NO: 6036467 - DNA, 25 bp, Homo sapien
atttagcaatatcaaagttggtttg

SEQ ID NO: 6036468 - DNA, 25 bp, Homo sapien
ctttacattccatcaattgcgattc

SEQ ID NO: 6036469 - DNA, 25 bp, Homo sapien
ggttccatcttcttcagatcgtcat

SEQ ID NO: 6036470 - DNA, 25 bp, Homo sapien
tcgcagaaactaactgttgatcaga

SEQ ID NO: 6036471 - DNA, 25 bp, Homo sapien
tctcctggcgaaaattcgttaatcc

SEQ ID NO: 6036472 - DNA, 25 bp, Homo sapien
actgttgatcagaaacattggtatc

SEQ ID NO: 6036473 - DNA, 25 bp, Homo sapien
gcggtatcgcagaaactaactgttg

SEQ ID NO: 6036474 - DNA, 25 bp, Homo sapien
ctgaaaagtaggaatttatctcctg

SEQ ID NO: 6036475 - DNA, 25 bp, Homo sapien
gtcaaaatactctgacgctatgcct

SEQ ID NO: 6036476 - DNA, 25 bp, Homo sapien
tcatttagcggtggttccatcttct

SEQ ID NO: 6036477 - DNA, 25 bp, Homo sapien
attacatcagcgctgataaatgttt

SEQ ID NO: 6036478 - DNA, 25 bp, Homo sapien
ctagtattatttgcggtatcgcaga

SEQ ID NO: 6036479 - DNA, 25 bp, Homo sapien
gaggttaaaaagttatgcttattca

SEQ ID NO: 6036480 - DNA, 25 bp, Homo sapien
aagtcgctatggattacacccgcgg

SEQ ID NO: 6036481 - DNA, 25 bp, Homo sapien
tgataagtcccttagattttagtaa

SEQ ID NO: 6036482 - DNA, 25 bp, Homo sapien
tcaaattctgcactgaaaagtagga

SEQ ID NO: 6036483 - DNA, 25 bp, Homo sapien
ttcagatcgtcatattttattacat

SEQ ID NO: 6036484 - DNA, 25 bp, Homo sapien
ttccaatgatctttgaaatgccgga

SEQ ID NO: 6036485 - DNA, 25 bp, Homo sapien
tcacgcaagtcgctatggattacac

SEQ ID NO: 6036486 - DNA, 25 bp, Homo sapien
cttcttgtgggccgcatgtaaagaa

SEQ ID NO: 6036487 - DNA, 25 bp, Homo sapien
atactctgacgctatgcctttacat

SEQ ID NO: 6036488 - DNA, 25 bp, Homo sapien
aattcgttaatccattctataatat

SEQ ID NO: 6036489 - DNA, 25 bp, Homo sapien
gatcagaaacattggtatcttcctt

SEQ ID NO: 6036490 - DNA, 25 bp, Homo sapien
tgatctttgaaatgccggatttttt

SEQ ID NO: 6036491 - DNA, 25 bp, Homo sapien
ctgataaatgtttcacgcaagtcgc

SEQ ID NO: 6036492 - DNA, 25 bp, Homo sapien
ctatggattacacccgcggcctctt

SEQ ID NO: 6036493 - DNA, 25 bp, Homo sapien
gcctcttgagcggtggttccctccc

SEQ ID NO: 6036494 - DNA, 25 bp, Homo sapien
taatccattctataatatttctgac

SEQ ID NO: 6036495 - DNA, 25 bp, Homo sapien
caacaactttctcatttctagtatt

SEQ ID NO: 6036496 - DNA, 25 bp, Homo sapien
tcatcagttcaagttgaaaagatgc

SEQ ID NO: 6036497 - DNA, 25 bp, Homo sapien
cacttgaactccaatggtcactcca

SEQ ID NO: 6036498 - DNA, 25 bp, Homo sapien
cctaaaagacggtccattcacttga

SEQ ID NO: 6036499 - DNA, 25 bp, Homo sapien
actacagtgagagatatcttctact

SEQ ID NO: 6036500 - DNA, 25 bp, Homo sapien
aacgtagtccagtggctggacgtta

SEQ ID NO: 6036501 - DNA, 25 bp, Homo sapien
acaaggcaggaattggtcaaagcac

SEQ ID NO: 6036502 - DNA, 25 bp, Homo sapien
caggaattggtcaaagcactcactc

SEQ ID NO: 6036503 - DNA, 25 bp, Homo sapien
gtgaaaatgaaccaaagatgcaaaa

SEQ ID NO: 6036504 - DNA, 25 bp, Homo sapien
aaaaacactacagtgagagatatct

SEQ ID NO: 6036505 - DNA, 25 bp, Homo sapien
aagcagtcctgacattcacacaaca

SEQ ID NO: 6036506 - DNA, 25 bp, Homo sapien
caaagatgcaaaagcaaacaatttt

SEQ ID NO: 6036507 - DNA, 25 bp, Homo sapien
ttcgcctttccccattgatatttat

SEQ ID NO: 6036508 - DNA, 25 bp, Homo sapien
acaacattggacttccctttgaatg

SEQ ID NO: 6036509 - DNA, 25 bp, Homo sapien
gttcaagttgaaaagatgcgcaatc

SEQ ID NO: 6036510 - DNA, 25 bp, Homo sapien
taaacttattgaaagtcgttatgga

SEQ ID NO: 6036511 - DNA, 25 bp, Homo sapien
gtgagagatatcttctactccaacg

SEQ ID NO: 6036512 - DNA, 25 bp, Homo sapien
cctgacattcacacaacattggact

SEQ ID NO: 6036513 - DNA, 25 bp, Homo sapien
ggctcatattaagcatttcctgtca

SEQ ID NO: 6036514 - DNA, 25 bp, Homo sapien
aaaaggcgatacaagcagtcctgac

SEQ ID NO: 6036515 - DNA, 25 bp, Homo sapien
aaagatgcgcaatccttttaaactt

SEQ ID NO: 6036516 - DNA, 25 bp, Homo sapien
tggcccgcatctatgcactcatcag

SEQ ID NO: 6036517 - DNA, 25 bp, Homo sapien
aatggtcactccaacggaactccct

SEQ ID NO: 6036518 - DNA, 25 bp, Homo sapien
ctcactcctaaaagacggtccattc

SEQ ID NO: 6036519 - DNA, 25 bp, Homo sapien
gcatttcctgtcattggcggctaat

SEQ ID NO: 6036520 - DNA, 25 bp, Homo sapien
gtccagtggctggacgttatacgct

SEQ ID NO: 6036521 - DNA, 25 bp, Homo sapien
gatatcttctactccaacgtggaat

SEQ ID NO: 6036522 - DNA, 25 bp, Homo sapien
caaagacaagcaaacgtagtccagt

SEQ ID NO: 6036523 - DNA, 25 bp, Homo sapien
ttgtttcaaagacaagcaaacgtag

SEQ ID NO: 6036524 - DNA, 25 bp, Homo sapien
ttctactccaacgtggaattgtttc

SEQ ID NO: 6036525 - DNA, 25 bp, Homo sapien
tggctggacgttatacgctttaatt

SEQ ID NO: 6036526 - DNA, 25 bp, Homo sapien
ttggtcaaagcactcactcctaaaa

SEQ ID NO: 6036527 - DNA, 25 bp, Homo sapien
tgacatgtgaaaatgaaccaaagat

SEQ ID NO: 6036528 - DNA, 25 bp, Homo sapien
attcacacaacattggacttccctt

SEQ ID NO: 6036529 - DNA, 25 bp, Homo sapien
ttcaaacgcagatgttttggctcat

SEQ ID NO: 6036530 - DNA, 25 bp, Homo sapien
tccattcacttgaactccaatggtc

SEQ ID NO: 6036531 - DNA, 25 bp, Homo sapien
tatacgctttaatttcaagctctct

SEQ ID NO: 6036532 - DNA, 25 bp, Homo sapien
agacggtccattcacttgaactcca

SEQ ID NO: 6036533 - DNA, 25 bp, Homo sapien
tatttcaatcgtctttcaaaacaaa

SEQ ID NO: 6036534 - DNA, 25 bp, Homo sapien
accgctaggtaaaaacactacagtg

SEQ ID NO: 6036535 - DNA, 25 bp, Homo sapien
tgcaaaagcaaacaattttccctgg

SEQ ID NO: 6036536 - DNA, 25 bp, Homo sapien
ccattgatatttatgacaatattct

SEQ ID NO: 6036537 - DNA, 25 bp, Homo sapien
tccaagaaaatccttaaacattata

SEQ ID NO: 6036538 - DNA, 25 bp, Homo sapien
gtggaattgtttcaaagacaagcaa

SEQ ID NO: 6036539 - DNA, 25 bp, Homo sapien
ggctaattcattagagcaacatcaa

SEQ ID NO: 6036540 - DNA, 25 bp, Homo sapien
cctgtcattggcggctaattcatta

SEQ ID NO: 6036541 - DNA, 25 bp, Homo sapien
agagcaacatcaacagcctatttca

SEQ ID NO: 6036542 - DNA, 25 bp, Homo sapien
acatcaacagcctatttcaatcgtc

SEQ ID NO: 6036543 - DNA, 25 bp, Homo sapien
tccctgttcaaacgcagatgttttg

SEQ ID NO: 6036544 - DNA, 25 bp, Homo sapien
gcatctatgcactcatcagttcaag

SEQ ID NO: 6036545 - DNA, 25 bp, Homo sapien
aaagcactcactcctaaaagacggt

SEQ ID NO: 6036546 - DNA, 25 bp, Homo sapien
agtttattcgcctttccccattgat

SEQ ID NO: 6036547 - DNA, 25 bp, Homo sapien
ctttccccattgatatttatgacaa

SEQ ID NO: 6036548 - DNA, 25 bp, Homo sapien
tattaagcatttcctgtcattggcg

SEQ ID NO: 6036549 - DNA, 25 bp, Homo sapien
cgcagatgttttggctcatattaag

SEQ ID NO: 6036550 - DNA, 25 bp, Homo sapien
cgatacaagcagtcctgacattcac

SEQ ID NO: 6036551 - DNA, 25 bp, Homo sapien
gacgttatacgctttaatttcaagc

SEQ ID NO: 6036552 - DNA, 25 bp, Homo sapien
ctttaatttcaagctctctccaaga

SEQ ID NO: 6036553 - DNA, 25 bp, Homo sapien
aactccaatggtcactccaacggaa

SEQ ID NO: 6036554 - DNA, 25 bp, Homo sapien
ttggacttccctttgaatggcccgc

SEQ ID NO: 6036555 - DNA, 25 bp, Homo sapien
ttgaatggcccgcatctatgcactc

SEQ ID NO: 6036556 - DNA, 25 bp, Homo sapien
cggaactccctgttcaaacgcagat

SEQ ID NO: 6036557 - DNA, 25 bp, Homo sapien
tccaacgtggaattgtttcaaagac

SEQ ID NO: 6036558 - DNA, 25 bp, Homo sapien
attataccagctcaaaagggtttag

SEQ ID NO: 6036559 - DNA, 25 bp, Homo sapien
caattttccctggtaagccctgtct

SEQ ID NO: 6036560 - DNA, 25 bp, Homo sapien
atattctgacatgtgaaaatgaacc

SEQ ID NO: 6036561 - DNA, 25 bp, Homo sapien
ttcattagagcaacatcaacagcct

SEQ ID NO: 6036562 - DNA, 25 bp, Homo sapien
cactccaacggaactccctgttcaa

SEQ ID NO: 6036563 - DNA, 25 bp, Homo sapien
atgaaccaaagatgcaaaagcaaac

SEQ ID NO: 6036564 - DNA, 25 bp, Homo sapien
tgttttggctcatattaagcatttc

SEQ ID NO: 6036565 - DNA, 25 bp, Homo sapien
caagcaaacgtagtccagtggctgg

SEQ ID NO: 6036566 - DNA, 25 bp, Homo sapien
tttcaagctctctccaagaaaatcc

SEQ ID NO: 6036567 - DNA, 25 bp, Homo sapien
atgacaatattctgacatgtgaaaa

SEQ ID NO: 6036568 - DNA, 25 bp, Homo sapien
ctaggtaaaaacactacagtgagag

SEQ ID NO: 6036569 - DNA, 25 bp, Homo sapien
ttccctttgaatggcccgcatctat

SEQ ID NO: 6036570 - DNA, 25 bp, Homo sapien
acagcctatttcaatcgtctttcaa

SEQ ID NO: 6036571 - DNA, 25 bp, Homo sapien
atatttatgacaatattctgacatg

SEQ ID NO: 6036572 - DNA, 25 bp, Homo sapien
aaatccttaaacattataccagctc

SEQ ID NO: 6036573 - DNA, 25 bp, Homo sapien
gctctctccaagaaaatccttaaac

SEQ ID NO: 6036574 - DNA, 25 bp, Homo sapien
agttgaaaagatgcgcaatcctttt

SEQ ID NO: 6036575 - DNA, 25 bp, Homo sapien
ttaaacattataccagctcaaaagg

SEQ ID NO: 6036576 - DNA, 25 bp, Homo sapien
attggcggctaattcattagagcaa

SEQ ID NO: 6036577 - DNA, 25 bp, Homo sapien
atgcactcatcagttcaagttgaaa

SEQ ID NO: 6036578 - DNA, 25 bp, Homo sapien
gcgcaatccttttaaacttattgaa

SEQ ID NO: 6036579 - DNA, 25 bp, Homo sapien
ctatgatgacgttctttaatggtga

SEQ ID NO: 6036580 - DNA, 25 bp, Homo sapien
agtcagagatgctatcaaattcttg

SEQ ID NO: 6036581 - DNA, 25 bp, Homo sapien
tgacgttctttaatggtgaagttgc

SEQ ID NO: 6036582 - DNA, 25 bp, Homo sapien
gacattctatgatgacgttctttaa

SEQ ID NO: 6036583 - DNA, 25 bp, Homo sapien
aattgtttgcttttgcatctttggt

SEQ ID NO: 6036584 - DNA, 25 bp, Homo sapien
caagaaatctggaaatcccttacct

SEQ ID NO: 6036585 - DNA, 25 bp, Homo sapien
agacagggcttaccagggaaaattg

SEQ ID NO: 6036586 - DNA, 25 bp, Homo sapien
gaaaaatggaattagacagggctta

SEQ ID NO: 6036587 - DNA, 25 bp, Homo sapien
gttatgcacttcattattttgtgcc

SEQ ID NO: 6036588 - DNA, 25 bp, Homo sapien
cattcgagtgagtataatttagggc

SEQ ID NO: 6036589 - DNA, 25 bp, Homo sapien
tcgtgcaaatataagcgttgcgttc

SEQ ID NO: 6036590 - DNA, 25 bp, Homo sapien
tatcaaattcttggctaaggagtag

SEQ ID NO: 6036591 - DNA, 25 bp, Homo sapien
ttgccatcgtgcaaatataagcgtt

SEQ ID NO: 6036592 - DNA, 25 bp, Homo sapien
agtgagtataatttagggctatgct

SEQ ID NO: 6036593 - DNA, 25 bp, Homo sapien
caaaacttgcgtaatacgaattcct

SEQ ID NO: 6036594 - DNA, 25 bp, Homo sapien
agtccgatatcaatttggagcaata

SEQ ID NO: 6036595 - DNA, 25 bp, Homo sapien
aagcgttgcgttcattcgagtgagt

SEQ ID NO: 6036596 - DNA, 25 bp, Homo sapien
ttaggaataaccttgtcaagaaatc

SEQ ID NO: 6036597 - DNA, 25 bp, Homo sapien
caataattgaatggatttgttatgc

SEQ ID NO: 6036598 - DNA, 25 bp, Homo sapien
attattttgtgccaaaacttgcgta

SEQ ID NO: 6036599 - DNA, 25 bp, Homo sapien
gagcatggtatttgtactcaacttg

SEQ ID NO: 6036600 - DNA, 25 bp, Homo sapien
ttgtccctaacttgatgaccgcatc

SEQ ID NO: 6036601 - DNA, 25 bp, Homo sapien
tctttaatggtgaagttgcaatatc

SEQ ID NO: 6036602 - DNA, 25 bp, Homo sapien
ttatttactaatttggtgaagacag

SEQ ID NO: 6036603 - DNA, 25 bp, Homo sapien
tttccactattacaatattacacat

SEQ ID NO: 6036604 - DNA, 25 bp, Homo sapien
aaatcccttacctgtaatgagcatg

SEQ ID NO: 6036605 - DNA, 25 bp, Homo sapien
catcggtaaatatagaacagtccga

SEQ ID NO: 6036606 - DNA, 25 bp, Homo sapien
atatcaatttggagcaatattgttc

SEQ ID NO: 6036607 - DNA, 25 bp, Homo sapien
tcatttcagctttcttttggaaaaa

SEQ ID NO: 6036608 - DNA, 25 bp, Homo sapien
ttagggctatgctaatcccataggg

SEQ ID NO: 6036609 - DNA, 25 bp, Homo sapien
attcttggctaaggagtagtcgcgc

SEQ ID NO: 6036610 - DNA, 25 bp, Homo sapien
cttacctgtaatgagcatggtattt

SEQ ID NO: 6036611 - DNA, 25 bp, Homo sapien
tgtaatgagcatggtatttgtactc

SEQ ID NO: 6036612 - DNA, 25 bp, Homo sapien
atcttggaaaaatggaattagacag

SEQ ID NO: 6036613 - DNA, 25 bp, Homo sapien
tacttgttgtccctaacttgatgac

SEQ ID NO: 6036614 - DNA, 25 bp, Homo sapien
ggtatttgtactcaacttgtgataa

SEQ ID NO: 6036615 - DNA, 25 bp, Homo sapien
tatagtttgccatcgtgcaaatata

SEQ ID NO: 6036616 - DNA, 25 bp, Homo sapien
actaatttggtgaagacagcttctt

SEQ ID NO: 6036617 - DNA, 25 bp, Homo sapien
tgcgttcattcgagtgagtataatt

SEQ ID NO: 6036618 - DNA, 25 bp, Homo sapien
ctattacaatattacacatacttgt

SEQ ID NO: 6036619 - DNA, 25 bp, Homo sapien
aaatttcccgctgacattctatgat

SEQ ID NO: 6036620 - DNA, 25 bp, Homo sapien
tggaattagacagggcttaccaggg

SEQ ID NO: 6036621 - DNA, 25 bp, Homo sapien
ctgattcaaactcaataattgaatg

SEQ ID NO: 6036622 - DNA, 25 bp, Homo sapien
ttgaatggatttgttatgcacttca

SEQ ID NO: 6036623 - DNA, 25 bp, Homo sapien
ttcctttatagtttgccatcgtgca

SEQ ID NO: 6036624 - DNA, 25 bp, Homo sapien
cataggggtccgcatcggtaaatat

SEQ ID NO: 6036625 - DNA, 25 bp, Homo sapien
atttggagcaatattgttctagttt

SEQ ID NO: 6036626 - DNA, 25 bp, Homo sapien
ccagctgttggcagtcagagatgct

SEQ ID NO: 6036627 - DNA, 25 bp, Homo sapien
ggagtagtcgcgctgattcaaactc

SEQ ID NO: 6036628 - DNA, 25 bp, Homo sapien
gttggcagtcagagatgctatcaaa

SEQ ID NO: 6036629 - DNA, 25 bp, Homo sapien
gcttctttttccactattacaatat

SEQ ID NO: 6036630 - DNA, 25 bp, Homo sapien
tagaacagtccgatatcaatttgga

SEQ ID NO: 6036631 - DNA, 25 bp, Homo sapien
ccttgtcaagaaatctggaaatccc

SEQ ID NO: 6036632 - DNA, 25 bp, Homo sapien
caaactcaataattgaatggatttg

SEQ ID NO: 6036633 - DNA, 25 bp, Homo sapien
tgatgaccgcatcatcttggaaaaa

SEQ ID NO: 6036634 - DNA, 25 bp, Homo sapien
aagttgcaatatcccagctgttggc

SEQ ID NO: 6036635 - DNA, 25 bp, Homo sapien
ggtccgcatcggtaaatatagaaca

SEQ ID NO: 6036636 - DNA, 25 bp, Homo sapien
tataatttagggctatgctaatccc

SEQ ID NO: 6036637 - DNA, 25 bp, Homo sapien
ttggtgaagacagcttctttttcca

SEQ ID NO: 6036638 - DNA, 25 bp, Homo sapien
caacttgtgataattatttactaat

SEQ ID NO: 6036639 - DNA, 25 bp, Homo sapien
aaatataagcgttgcgttcattcga

SEQ ID NO: 6036640 - DNA, 25 bp, Homo sapien
tgcttttgcatctttggttcatttt

SEQ ID NO: 6036641 - DNA, 25 bp, Homo sapien
agcaatattgttctagtttttttag

SEQ ID NO: 6036642 - DNA, 25 bp, Homo sapien
aatcccataggggtccgcatcggta

SEQ ID NO: 6036643 - DNA, 25 bp, Homo sapien
caatattacacatacttgttgtccc

SEQ ID NO: 6036644 - DNA, 25 bp, Homo sapien
atggtgaagttgcaatatcccagct

SEQ ID NO: 6036645 - DNA, 25 bp, Homo sapien
agggaaaattgtttgcttttgcatc

SEQ ID NO: 6036646 - DNA, 25 bp, Homo sapien
agatgctatcaaattcttggctaag

SEQ ID NO: 6036647 - DNA, 25 bp, Homo sapien
gtgataattatttactaatttggtg

SEQ ID NO: 6036648 - DNA, 25 bp, Homo sapien
ttgtgccaaaacttgcgtaatacga

SEQ ID NO: 6036649 - DNA, 25 bp, Homo sapien
cccgctgacattctatgatgacgtt

SEQ ID NO: 6036650 - DNA, 25 bp, Homo sapien
taaatatagaacagtccgatatcaa

SEQ ID NO: 6036651 - DNA, 25 bp, Homo sapien
gtcgcgctgattcaaactcaataat

SEQ ID NO: 6036652 - DNA, 25 bp, Homo sapien
ctcgttcatttcagctttcttttgg

SEQ ID NO: 6036653 - DNA, 25 bp, Homo sapien
gaataaccttgtcaagaaatctgga

SEQ ID NO: 6036654 - DNA, 25 bp, Homo sapien
tacacatacttgttgtccctaactt

SEQ ID NO: 6036655 - DNA, 25 bp, Homo sapien
tatgctaatcccataggggtccgca

SEQ ID NO: 6036656 - DNA, 25 bp, Homo sapien
tgcatctttggttcattttcacatg

SEQ ID NO: 6036657 - DNA, 25 bp, Homo sapien
aatatcccagctgttggcagtcaga

SEQ ID NO: 6036658 - DNA, 25 bp, Homo sapien
cgcatcatcttggaaaaatggaatt

SEQ ID NO: 6036659 - DNA, 25 bp, Homo sapien
tacgaattcctttatagtttgccat

SEQ ID NO: 6036660 - DNA, 25 bp, Homo sapien
ctaacttgatgaccgcatcatcttg

SEQ ID NO: 6036661 - DNA, 25 bp, Homo sapien
atctggaaatcccttacctgtaatg

SEQ ID NO: 6036662 - DNA, 25 bp, Homo sapien
aagacagcttctttttccactatta

SEQ ID NO: 6036663 - DNA, 25 bp, Homo sapien
tgcgtaatacgaattcctttatagt

SEQ ID NO: 6036664 - DNA, 25 bp, Homo sapien
ggatttgttatgcacttcattattt

SEQ ID NO: 6036665 - DNA, 25 bp, Homo sapien
cacttcattattttgtgccaaaact

SEQ ID NO: 6036666 - DNA, 25 bp, Homo sapien
tgtactcaacttgtgataattattt

SEQ ID NO: 6036667 - DNA, 25 bp, Homo sapien
ggctaaggagtagtcgcgctgattc

SEQ ID NO: 6036668 - DNA, 25 bp, Homo sapien
ggctgaggtgcttccagaaccttct

SEQ ID NO: 6036669 - DNA, 25 bp, Homo sapien
gctgtcttacactaaagaaagtgaa

SEQ ID NO: 6036670 - DNA, 25 bp, Homo sapien
cgatcccaacaactgcaagctgtct

SEQ ID NO: 6036671 - DNA, 25 bp, Homo sapien
tgctaacctgattaccaggactgcg

SEQ ID NO: 6036672 - DNA, 25 bp, Homo sapien
agtggcccaattgggtttctctaag

SEQ ID NO: 6036673 - DNA, 25 bp, Homo sapien
tatgatgggaggcttttgcggttca

SEQ ID NO: 6036674 - DNA, 25 bp, Homo sapien
tgaccccacaagaggtggaaagacg

SEQ ID NO: 6036675 - DNA, 25 bp, Homo sapien
tggactactgtttgatgattgaacg

SEQ ID NO: 6036676 - DNA, 25 bp, Homo sapien
tccagccaagctcaggaaacaaacg

SEQ ID NO: 6036677 - DNA, 25 bp, Homo sapien
ccaacccaatcccacttggccgtgg

SEQ ID NO: 6036678 - DNA, 25 bp, Homo sapien
ctttctctattcttggagttagatg

SEQ ID NO: 6036679 - DNA, 25 bp, Homo sapien
tctctaagcaacgtatgttggacta

SEQ ID NO: 6036680 - DNA, 25 bp, Homo sapien
tggcaggtgttattttaggtaacga

SEQ ID NO: 6036681 - DNA, 25 bp, Homo sapien
ccgatatcggtagacatgtcaaata

SEQ ID NO: 6036682 - DNA, 25 bp, Homo sapien
gcaacaatattagaaacttcccctc

SEQ ID NO: 6036683 - DNA, 25 bp, Homo sapien
actgtttgatgattgaacgtcatcc

SEQ ID NO: 6036684 - DNA, 25 bp, Homo sapien
tgggaggcttttgcggttcattcct

SEQ ID NO: 6036685 - DNA, 25 bp, Homo sapien
gatgttcttggtgtcggtctttctc

SEQ ID NO: 6036686 - DNA, 25 bp, Homo sapien
gtcggtctttctctattcttggagt

SEQ ID NO: 6036687 - DNA, 25 bp, Homo sapien
ctctggtgcagcagttgtggcaggt

SEQ ID NO: 6036688 - DNA, 25 bp, Homo sapien
cgttatatgtgttgcgttgcaacaa

SEQ ID NO: 6036689 - DNA, 25 bp, Homo sapien
ggtggaaagacgtgagattccattg

SEQ ID NO: 6036690 - DNA, 25 bp, Homo sapien
caacaactgcaagctgtcttacact

SEQ ID NO: 6036691 - DNA, 25 bp, Homo sapien
aagtgaaggctattctacggtccca

SEQ ID NO: 6036692 - DNA, 25 bp, Homo sapien
acaagaggtggaaagacgtgagatt

SEQ ID NO: 6036693 - DNA, 25 bp, Homo sapien
ctgcaagctgtcttacactaaagaa

SEQ ID NO: 6036694 - DNA, 25 bp, Homo sapien
ttctacggtcccattgcgttctgat

SEQ ID NO: 6036695 - DNA, 25 bp, Homo sapien
tgatgattgaacgtcatccagacaa

SEQ ID NO: 6036696 - DNA, 25 bp, Homo sapien
ggactgcgttatatgtgttgcgttg

SEQ ID NO: 6036697 - DNA, 25 bp, Homo sapien
acgtctccaacccaatcccacttgg

SEQ ID NO: 6036698 - DNA, 25 bp, Homo sapien
accttctggtggtgaagataccggt

SEQ ID NO: 6036699 - DNA, 25 bp, Homo sapien
cattacctcccaccgatatcggtag

SEQ ID NO: 6036700 - DNA, 25 bp, Homo sapien
ttctgatgctaacctgattaccagg

SEQ ID NO: 6036701 - DNA, 25 bp, Homo sapien
cataaccgctgctatgatgggaggc

SEQ ID NO: 6036702 - DNA, 25 bp, Homo sapien
tccggaaccaaagttcacgtctcca

SEQ ID NO: 6036703 - DNA, 25 bp, Homo sapien
caagctcaggaaacaaacgacgatc

SEQ ID NO: 6036704 - DNA, 25 bp, Homo sapien
tcccccattacctcccaccgatatc

SEQ ID NO: 6036705 - DNA, 25 bp, Homo sapien
ccaaagttcacgtctccaacccaat

SEQ ID NO: 6036706 - DNA, 25 bp, Homo sapien
atcgactccagccaagctcaggaaa

SEQ ID NO: 6036707 - DNA, 25 bp, Homo sapien
ccacttggccgtggattgggttcct

SEQ ID NO: 6036708 - DNA, 25 bp, Homo sapien
tggtggtgaagataccggtctggtt

SEQ ID NO: 6036709 - DNA, 25 bp, Homo sapien
aaggctattctacggtcccattgcg

SEQ ID NO: 6036710 - DNA, 25 bp, Homo sapien
ggttatgatgttcttggtgtcggtc

SEQ ID NO: 6036711 - DNA, 25 bp, Homo sapien
tggattgggttcctctggtgcagca

SEQ ID NO: 6036712 - DNA, 25 bp, Homo sapien
aaacgacgatcccaacaactgcaag

SEQ ID NO: 6036713 - DNA, 25 bp, Homo sapien
attgcgttctgatgctaacctgatt

SEQ ID NO: 6036714 - DNA, 25 bp, Homo sapien
ccaatcccacttggccgtggattgg

SEQ ID NO: 6036715 - DNA, 25 bp, Homo sapien
cttggtgtcggtctttctctattct

SEQ ID NO: 6036716 - DNA, 25 bp, Homo sapien
taccaggactgcgttatatgtgttg

SEQ ID NO: 6036717 - DNA, 25 bp, Homo sapien
ccaattgggtttctctaagcaacgt

SEQ ID NO: 6036718 - DNA, 25 bp, Homo sapien
cagacaacataaccgctgctatgat

SEQ ID NO: 6036719 - DNA, 25 bp, Homo sapien
ctcccaccgatatcggtagacatgt

SEQ ID NO: 6036720 - DNA, 25 bp, Homo sapien
aagacgtgagattccattggctgag

SEQ ID NO: 6036721 - DNA, 25 bp, Homo sapien
ttggagttagatgtcaccatcgact

SEQ ID NO: 6036722 - DNA, 25 bp, Homo sapien
tcctaagggacttgaccccacaaga

SEQ ID NO: 6036723 - DNA, 25 bp, Homo sapien
ggtgcttccagaaccttctggtggt

SEQ ID NO: 6036724 - DNA, 25 bp, Homo sapien
ctattcttggagttagatgtcacca

SEQ ID NO: 6036725 - DNA, 25 bp, Homo sapien
ttagatgtcaccatcgactccagcc

SEQ ID NO: 6036726 - DNA, 25 bp, Homo sapien
tgaagataccggtctggttccccca

SEQ ID NO: 6036727 - DNA, 25 bp, Homo sapien
tcggtagacatgtcaaataccaatg

SEQ ID NO: 6036728 - DNA, 25 bp, Homo sapien
cagttgtggcaggtgttattttagg

SEQ ID NO: 6036729 - DNA, 25 bp, Homo sapien
gtcatccagacaacataaccgctgc

SEQ ID NO: 6036730 - DNA, 25 bp, Homo sapien
tggccgtggattgggttcctctggt

SEQ ID NO: 6036731 - DNA, 25 bp, Homo sapien
tgcggttcattcctaagggacttga

SEQ ID NO: 6036732 - DNA, 25 bp, Homo sapien
tgagattccattggctgaggtgctt

SEQ ID NO: 6036733 - DNA, 25 bp, Homo sapien
tccagaaccttctggtggtgaagat

SEQ ID NO: 6036734 - DNA, 25 bp, Homo sapien
tccattggctgaggtgcttccagaa

SEQ ID NO: 6036735 - DNA, 25 bp, Homo sapien
atgtgttgcgttgcaacaatattag

SEQ ID NO: 6036736 - DNA, 25 bp, Homo sapien
gggacttgaccccacaagaggtgga

SEQ ID NO: 6036737 - DNA, 25 bp, Homo sapien
taaagaaagtgaaggctattctacg

SEQ ID NO: 6036738 - DNA, 25 bp, Homo sapien
cgctgctatgatgggaggcttttgc

SEQ ID NO: 6036739 - DNA, 25 bp, Homo sapien
tgggttcctctggtgcagcagttgt

SEQ ID NO: 6036740 - DNA, 25 bp, Homo sapien
agcaacgtatgttggactactgttt

SEQ ID NO: 6036741 - DNA, 25 bp, Homo sapien
ttccgccaatatcggccctggttat

SEQ ID NO: 6036742 - DNA, 25 bp, Homo sapien
cctgattaccaggactgcgttatat

SEQ ID NO: 6036743 - DNA, 25 bp, Homo sapien
gtcaccatcgactccagccaagctc

SEQ ID NO: 6036744 - DNA, 25 bp, Homo sapien
ggtcccattgcgttctgatgctaac

SEQ ID NO: 6036745 - DNA, 25 bp, Homo sapien
gggtttctctaagcaacgtatgttg

SEQ ID NO: 6036746 - DNA, 25 bp, Homo sapien
gcttcttccgccaatatcggccctg

SEQ ID NO: 6036747 - DNA, 25 bp, Homo sapien
ttacactaaagaaagtgaaggctat

SEQ ID NO: 6036748 - DNA, 25 bp, Homo sapien
ggccctggttatgatgttcttggtg

SEQ ID NO: 6036749 - DNA, 25 bp, Homo sapien
aatatcggccctggttatgatgttc

SEQ ID NO: 6036750 - DNA, 25 bp, Homo sapien
tcattcctaagggacttgaccccac

SEQ ID NO: 6036751 - DNA, 25 bp, Homo sapien
tgcagcagttgtggcaggtgttatt

SEQ ID NO: 6036752 - DNA, 25 bp, Homo sapien
ttgaacgtcatccagacaacataac

SEQ ID NO: 6036753 - DNA, 25 bp, Homo sapien
agttcacgtctccaacccaatccca

SEQ ID NO: 6036754 - DNA, 25 bp, Homo sapien
gcttttgcggttcattcctaaggga

SEQ ID NO: 6036755 - DNA, 25 bp, Homo sapien
gtatgttggactactgtttgatgat

SEQ ID NO: 6036756 - DNA, 25 bp, Homo sapien
caggaaacaaacgacgatcccaaca

SEQ ID NO: 6036757 - DNA, 25 bp, Homo sapien
tgcgttgcaacaatattagaaactt

SEQ ID NO: 6036758 - DNA, 25 bp, Homo sapien
cctctggagtcggcggtggacaact

SEQ ID NO: 6036759 - DNA, 25 bp, Homo sapien
gcacttgatgccgtttttggcgaac

SEQ ID NO: 6036760 - DNA, 25 bp, Homo sapien
ccaggagcacttgatgccgtttttg

SEQ ID NO: 6036761 - DNA, 25 bp, Homo sapien
accagaaggttctggaagcacctca

SEQ ID NO: 6036762 - DNA, 25 bp, Homo sapien
taagatttccgtgagacctgggatc

SEQ ID NO: 6036763 - DNA, 25 bp, Homo sapien
atagttgggcctgcacctgacaagc

SEQ ID NO: 6036764 - DNA, 25 bp, Homo sapien
gtggtcaagacggccaatctttgta

SEQ ID NO: 6036765 - DNA, 25 bp, Homo sapien
gataatttcttgagagatttcttcg

SEQ ID NO: 6036766 - DNA, 25 bp, Homo sapien
tggaagcacctcagccaatggaatc

SEQ ID NO: 6036767 - DNA, 25 bp, Homo sapien
cctcttgtggggtcaagtcccttag

SEQ ID NO: 6036768 - DNA, 25 bp, Homo sapien
gatgatcgcaatacatttaatggcg

SEQ ID NO: 6036769 - DNA, 25 bp, Homo sapien
attaagtcggcattaggtgggtcca

SEQ ID NO: 6036770 - DNA, 25 bp, Homo sapien
tatttgacatgtctaccgatatcgg

SEQ ID NO: 6036771 - DNA, 25 bp, Homo sapien
caataggccagggtatgtggatggg

SEQ ID NO: 6036772 - DNA, 25 bp, Homo sapien
ctccagtagtttccaggagcacttg

SEQ ID NO: 6036773 - DNA, 25 bp, Homo sapien
agaacgcctctggagtcggcggtgg

SEQ ID NO: 6036774 - DNA, 25 bp, Homo sapien
ttcttgagagatttcttcgaaattc

SEQ ID NO: 6036775 - DNA, 25 bp, Homo sapien
atcttgcatagcagggtagattaag

SEQ ID NO: 6036776 - DNA, 25 bp, Homo sapien
gggtccatggtcaaagctgtggtca

SEQ ID NO: 6036777 - DNA, 25 bp, Homo sapien
aggcttttggaagaacgcctctgga

SEQ ID NO: 6036778 - DNA, 25 bp, Homo sapien
tagtttccaggagcacttgatgccg

SEQ ID NO: 6036779 - DNA, 25 bp, Homo sapien
ggaaccagaccggtatcttcaccac

SEQ ID NO: 6036780 - DNA, 25 bp, Homo sapien
cctgttgataatttcttgagagatt

SEQ ID NO: 6036781 - DNA, 25 bp, Homo sapien
acatgataagatttccgtgagacct

SEQ ID NO: 6036782 - DNA, 25 bp, Homo sapien
gacacgatcttgcatagcagggtag

SEQ ID NO: 6036783 - DNA, 25 bp, Homo sapien
tggaatctcacgtctttccacctct

SEQ ID NO: 6036784 - DNA, 25 bp, Homo sapien
ggacaactcgaactgtgggatgatc

SEQ ID NO: 6036785 - DNA, 25 bp, Homo sapien
gaaattctcagtggccaaagccaag

SEQ ID NO: 6036786 - DNA, 25 bp, Homo sapien
aagacggccaatctttgtagattga

SEQ ID NO: 6036787 - DNA, 25 bp, Homo sapien
ggtgacacatgataagatttccgtg

SEQ ID NO: 6036788 - DNA, 25 bp, Homo sapien
aggttctggaagcacctcagccaat

SEQ ID NO: 6036789 - DNA, 25 bp, Homo sapien
tcggcattaggtgggtccatggtca

SEQ ID NO: 6036790 - DNA, 25 bp, Homo sapien
ttggaagaacgcctctggagtcggc

SEQ ID NO: 6036791 - DNA, 25 bp, Homo sapien
tttccacctcttgtggggtcaagtc

SEQ ID NO: 6036792 - DNA, 25 bp, Homo sapien
aatggcggggttccattggtatttg

SEQ ID NO: 6036793 - DNA, 25 bp, Homo sapien
gcaaaagcctcccatcatagcagcg

SEQ ID NO: 6036794 - DNA, 25 bp, Homo sapien
atggtcaaagctgtggtcaagacgg

SEQ ID NO: 6036795 - DNA, 25 bp, Homo sapien
gtcaagtcccttaggaatgaaccgc

SEQ ID NO: 6036796 - DNA, 25 bp, Homo sapien
ggatggggtgacacatgataagatt

SEQ ID NO: 6036797 - DNA, 25 bp, Homo sapien
aaagctgtggtcaagacggccaatc

SEQ ID NO: 6036798 - DNA, 25 bp, Homo sapien
acatgtctaccgatatcggtgggag

SEQ ID NO: 6036799 - DNA, 25 bp, Homo sapien
ctcgaactgtgggatgatcgcaata

SEQ ID NO: 6036800 - DNA, 25 bp, Homo sapien
agattgaaaaccaagtcctgggttg

SEQ ID NO: 6036801 - DNA, 25 bp, Homo sapien
gacaagcagatacccaataggccag

SEQ ID NO: 6036802 - DNA, 25 bp, Homo sapien
tgtggggtcaagtcccttaggaatg

SEQ ID NO: 6036803 - DNA, 25 bp, Homo sapien
cgcaatacatttaatggcggggttc

SEQ ID NO: 6036804 - DNA, 25 bp, Homo sapien
ctttctataaggttggtggacacga

SEQ ID NO: 6036805 - DNA, 25 bp, Homo sapien
caatgtctttctataaggttggtgg

SEQ ID NO: 6036806 - DNA, 25 bp, Homo sapien
gccaatctttgtagattgaaaacca

SEQ ID NO: 6036807 - DNA, 25 bp, Homo sapien
cagccaatggaatctcacgtctttc

SEQ ID NO: 6036808 - DNA, 25 bp, Homo sapien
agggtagattaagtcggcattaggt

SEQ ID NO: 6036809 - DNA, 25 bp, Homo sapien
ctttgtagattgaaaaccaagtcct

SEQ ID NO: 6036810 - DNA, 25 bp, Homo sapien
ataaggttggtggacacgatcttgc

SEQ ID NO: 6036811 - DNA, 25 bp, Homo sapien
cgtttttggcgaacctgttgataat

SEQ ID NO: 6036812 - DNA, 25 bp, Homo sapien
ctcacgtctttccacctcttgtggg

SEQ ID NO: 6036813 - DNA, 25 bp, Homo sapien
gcacctgacaagcagatacccaata

SEQ ID NO: 6036814 - DNA, 25 bp, Homo sapien
gccaaagccaagatagttgggcctg

SEQ ID NO: 6036815 - DNA, 25 bp, Homo sapien
acatttaatggcggggttccattgg

SEQ ID NO: 6036816 - DNA, 25 bp, Homo sapien
cagaccggtatcttcaccaccagaa

SEQ ID NO: 6036817 - DNA, 25 bp, Homo sapien
gcctcccatcatagcagcggttatg

SEQ ID NO: 6036818 - DNA, 25 bp, Homo sapien
tatgtggatggggtgacacatgata

SEQ ID NO: 6036819 - DNA, 25 bp, Homo sapien
gagtcggcggtggacaactcgaact

SEQ ID NO: 6036820 - DNA, 25 bp, Homo sapien
aggaatgaaccgcaaaagcctccca

SEQ ID NO: 6036821 - DNA, 25 bp, Homo sapien
tgaaccgcaaaagcctcccatcata

SEQ ID NO: 6036822 - DNA, 25 bp, Homo sapien
tgggggaaccagaccggtatcttca

SEQ ID NO: 6036823 - DNA, 25 bp, Homo sapien
ggcggtggacaactcgaactgtggg

SEQ ID NO: 6036824 - DNA, 25 bp, Homo sapien
gggttccattggtatttgacatgtc

SEQ ID NO: 6036825 - DNA, 25 bp, Homo sapien
tgggatcaatgtctttctataaggt

SEQ ID NO: 6036826 - DNA, 25 bp, Homo sapien
tcagtggccaaagccaagatagttg

SEQ ID NO: 6036827 - DNA, 25 bp, Homo sapien
cattggtatttgacatgtctaccga

SEQ ID NO: 6036828 - DNA, 25 bp, Homo sapien
ccagggtatgtggatggggtgacac

SEQ ID NO: 6036829 - DNA, 25 bp, Homo sapien
gccaagatagttgggcctgcacctg

SEQ ID NO: 6036830 - DNA, 25 bp, Homo sapien
tcccttaggaatgaaccgcaaaagc

SEQ ID NO: 6036831 - DNA, 25 bp, Homo sapien
ttaggtgggtccatggtcaaagctg

SEQ ID NO: 6036832 - DNA, 25 bp, Homo sapien
ttggtggacacgatcttgcatagca

SEQ ID NO: 6036833 - DNA, 25 bp, Homo sapien
ttcaccaccagaaggttctggaagc

SEQ ID NO: 6036834 - DNA, 25 bp, Homo sapien
ttcttcgaaattctcagtggccaaa

SEQ ID NO: 6036835 - DNA, 25 bp, Homo sapien
ttccgtgagacctgggatcaatgtc

SEQ ID NO: 6036836 - DNA, 25 bp, Homo sapien
agagatttcttcgaaattctcagtg

SEQ ID NO: 6036837 - DNA, 25 bp, Homo sapien
ctaccgatatcggtgggaggtaatg

SEQ ID NO: 6036838 - DNA, 25 bp, Homo sapien
tgatgccgtttttggcgaacctgtt

SEQ ID NO: 6036839 - DNA, 25 bp, Homo sapien
agatacccaataggccagggtatgt

SEQ ID NO: 6036840 - DNA, 25 bp, Homo sapien
ggcaggctccagtagtttccaggag

SEQ ID NO: 6036841 - DNA, 25 bp, Homo sapien
ggcgaacctgttgataatttcttga

SEQ ID NO: 6036842 - DNA, 25 bp, Homo sapien
ggtatcttcaccaccagaaggttct

SEQ ID NO: 6036843 - DNA, 25 bp, Homo sapien
gcacctcagccaatggaatctcacg

SEQ ID NO: 6036844 - DNA, 25 bp, Homo sapien
gggcctgcacctgacaagcagatac

SEQ ID NO: 6036845 - DNA, 25 bp, Homo sapien
catagcagggtagattaagtcggca

SEQ ID NO: 6036846 - DNA, 25 bp, Homo sapien
ctgtgggatgatcgcaatacattta

SEQ ID NO: 6036847 - DNA, 25 bp, Homo sapien
gagacctgggatcaatgtctttcta

SEQ ID NO: 6036848 - DNA, 25 bp, Homo sapien
tgggcgccattactgtgggtataac

SEQ ID NO: 6036849 - DNA, 25 bp, Homo sapien
tattgaaaaatgttggaaagcccaa

SEQ ID NO: 6036850 - DNA, 25 bp, Homo sapien
ttggcattttcatggttcgagacaa

SEQ ID NO: 6036851 - DNA, 25 bp, Homo sapien
ggatctgaagtatgttgtcttcgaa

SEQ ID NO: 6036852 - DNA, 25 bp, Homo sapien
gcagagaaagcatggaccaagttgt

SEQ ID NO: 6036853 - DNA, 25 bp, Homo sapien
actggtaaacaggatctgaagtatg

SEQ ID NO: 6036854 - DNA, 25 bp, Homo sapien
tccgagttatttaagcattctcatg

SEQ ID NO: 6036855 - DNA, 25 bp, Homo sapien
aaaggtgttcttgctctagaaaaag

SEQ ID NO: 6036856 - DNA, 25 bp, Homo sapien
gctctagaaaaagatattgcccata

SEQ ID NO: 6036857 - DNA, 25 bp, Homo sapien
ggtgttgatccttccgagttattta

SEQ ID NO: 6036858 - DNA, 25 bp, Homo sapien
tggttcgagacaatattgaaaaatg

SEQ ID NO: 6036859 - DNA, 25 bp, Homo sapien
gttacgaatacggtgttgatccttc

SEQ ID NO: 6036860 - DNA, 25 bp, Homo sapien
agttacctgaaaggaaatgggctat

SEQ ID NO: 6036861 - DNA, 25 bp, Homo sapien
aaaggccggcaaagcaatgggcgcc

SEQ ID NO: 6036862 - DNA, 25 bp, Homo sapien
cccatagttacttggacacagtaag

SEQ ID NO: 6036863 - DNA, 25 bp, Homo sapien
ccttattcctggtgcagagaactta

SEQ ID NO: 6036864 - DNA, 25 bp, Homo sapien
accatagtgagtacaacagtggccg

SEQ ID NO: 6036865 - DNA, 25 bp, Homo sapien
gtggccgcagagaaagcatggacca

SEQ ID NO: 6036866 - DNA, 25 bp, Homo sapien
ccatatttggcattttcatggttcg

SEQ ID NO: 6036867 - DNA, 25 bp, Homo sapien
tttttccctaaattggatgatacag

SEQ ID NO: 6036868 - DNA, 25 bp, Homo sapien
gttcttgctctagaaaaagatattg

SEQ ID NO: 6036869 - DNA, 25 bp, Homo sapien
gaacttactgttatcgttagatgta

SEQ ID NO: 6036870 - DNA, 25 bp, Homo sapien
gaagtatgttgtcttcgaagatgca

SEQ ID NO: 6036871 - DNA, 25 bp, Homo sapien
ctgtgggtataacatcctcgtatga

SEQ ID NO: 6036872 - DNA, 25 bp, Homo sapien
atattgcccatagttacttggacac

SEQ ID NO: 6036873 - DNA, 25 bp, Homo sapien
tattgcgtcaagatttgcaattaac

SEQ ID NO: 6036874 - DNA, 25 bp, Homo sapien
cccgtgggcataaaggccggcaaag

SEQ ID NO: 6036875 - DNA, 25 bp, Homo sapien
tggacacagtaagccttattcctgg

SEQ ID NO: 6036876 - DNA, 25 bp, Homo sapien
gtataacatcctcgtatgacaagag

SEQ ID NO: 6036877 - DNA, 25 bp, Homo sapien
tcctggtgcagagaacttactgtta

SEQ ID NO: 6036878 - DNA, 25 bp, Homo sapien
cggtaagcctgatcccgagggttat

SEQ ID NO: 6036879 - DNA, 25 bp, Homo sapien
tggaccaagttgtgttacgaatacg

SEQ ID NO: 6036880 - DNA, 25 bp, Homo sapien
atcgttacctctggttctccatatt

SEQ ID NO: 6036881 - DNA, 25 bp, Homo sapien
gatacagacaataaaggtgttcttg

SEQ ID NO: 6036882 - DNA, 25 bp, Homo sapien
ttggatgatacagacaataaaggtg

SEQ ID NO: 6036883 - DNA, 25 bp, Homo sapien
tgcagagaacttactgttatcgtta

SEQ ID NO: 6036884 - DNA, 25 bp, Homo sapien
gtgatttattgcgtcaagatttgca

SEQ ID NO: 6036885 - DNA, 25 bp, Homo sapien
gaagaacggtaagcctgatcccgag

SEQ ID NO: 6036886 - DNA, 25 bp, Homo sapien
actgttatcgttagatgtagatact

SEQ ID NO: 6036887 - DNA, 25 bp, Homo sapien
tctcatggtgcaagaacacaagagg

SEQ ID NO: 6036888 - DNA, 25 bp, Homo sapien
caacagtggccgcagagaaagcatg

SEQ ID NO: 6036889 - DNA, 25 bp, Homo sapien
gatggtaccatagtgagtacaacag

SEQ ID NO: 6036890 - DNA, 25 bp, Homo sapien
aagcattctcatggtgcaagaacac

SEQ ID NO: 6036891 - DNA, 25 bp, Homo sapien
cggcaaagcaatgggcgccattact

SEQ ID NO: 6036892 - DNA, 25 bp, Homo sapien
ccattactgtgggtataacatcctc

SEQ ID NO: 6036893 - DNA, 25 bp, Homo sapien
catcctcgtatgacaagagcgtttt

SEQ ID NO: 6036894 - DNA, 25 bp, Homo sapien
gttacttggacacagtaagccttat

SEQ ID NO: 6036895 - DNA, 25 bp, Homo sapien
agggttattcaagagctcgtgattt

SEQ ID NO: 6036896 - DNA, 25 bp, Homo sapien
gatccttccgagttatttaagcatt

SEQ ID NO: 6036897 - DNA, 25 bp, Homo sapien
acctctggttctccatatttggcat

SEQ ID NO: 6036898 - DNA, 25 bp, Homo sapien
atcccgagggttattcaagagctcg

SEQ ID NO: 6036899 - DNA, 25 bp, Homo sapien
gaaaaagatattgcccatagttact

SEQ ID NO: 6036900 - DNA, 25 bp, Homo sapien
agtaagccttattcctggtgcagag

SEQ ID NO: 6036901 - DNA, 25 bp, Homo sapien
agcctgatcccgagggttattcaag

SEQ ID NO: 6036902 - DNA, 25 bp, Homo sapien
gtgagtacaacagtggccgcagaga

SEQ ID NO: 6036903 - DNA, 25 bp, Homo sapien
taaacaggatctgaagtatgttgtc

SEQ ID NO: 6036904 - DNA, 25 bp, Homo sapien
ggtgcaagaacacaagaggttttga

SEQ ID NO: 6036905 - DNA, 25 bp, Homo sapien
cgtcaagatttgcaattaactggta

SEQ ID NO: 6036906 - DNA, 25 bp, Homo sapien
aaagcatggaccaagttgtgttacg

SEQ ID NO: 6036907 - DNA, 25 bp, Homo sapien
gttttcattactgggtttgacgtga

SEQ ID NO: 6036908 - DNA, 25 bp, Homo sapien
tgggctatcgttacctctggttctc

SEQ ID NO: 6036909 - DNA, 25 bp, Homo sapien
agttgtgttacgaatacggtgttga

SEQ ID NO: 6036910 - DNA, 25 bp, Homo sapien
gatttgcaattaactggtaaacagg

SEQ ID NO: 6036911 - DNA, 25 bp, Homo sapien
cctaaattggatgatacagacaata

SEQ ID NO: 6036912 - DNA, 25 bp, Homo sapien
tgacgtgaagaacggtaagcctgat

SEQ ID NO: 6036913 - DNA, 25 bp, Homo sapien
gaatacggtgttgatccttccgagt

SEQ ID NO: 6036914 - DNA, 25 bp, Homo sapien
cctgaaaggaaatgggctatcgtta

SEQ ID NO: 6036915 - DNA, 25 bp, Homo sapien
attcaagagctcgtgatttattgcg

SEQ ID NO: 6036916 - DNA, 25 bp, Homo sapien
atcgttagatgtagatactgagact

SEQ ID NO: 6036917 - DNA, 25 bp, Homo sapien
agatactgagactcaaaaaaagtta

SEQ ID NO: 6036918 - DNA, 25 bp, Homo sapien
gacaataaaggtgttcttgctctag

SEQ ID NO: 6036919 - DNA, 25 bp, Homo sapien
agatgtagatactgagactcaaaaa

SEQ ID NO: 6036920 - DNA, 25 bp, Homo sapien
ggttctccatatttggcattttcat

SEQ ID NO: 6036921 - DNA, 25 bp, Homo sapien
ttttcatggttcgagacaatattga

SEQ ID NO: 6036922 - DNA, 25 bp, Homo sapien
ttatttaagcattctcatggtgcaa

SEQ ID NO: 6036923 - DNA, 25 bp, Homo sapien
cttcgaagatgcacccgtgggcata

SEQ ID NO: 6036924 - DNA, 25 bp, Homo sapien
gggcataaaggccggcaaagcaatg

SEQ ID NO: 6036925 - DNA, 25 bp, Homo sapien
gagctcgtgatttattgcgtcaaga

SEQ ID NO: 6036926 - DNA, 25 bp, Homo sapien
gacctagatggtaccatagtgagta

SEQ ID NO: 6036927 - DNA, 25 bp, Homo sapien
agcaatgggcgccattactgtgggt

SEQ ID NO: 6036928 - DNA, 25 bp, Homo sapien
agatgcacccgtgggcataaaggcc

SEQ ID NO: 6036929 - DNA, 25 bp, Homo sapien
aggaaatgggctatcgttacctctg

SEQ ID NO: 6036930 - DNA, 25 bp, Homo sapien
tgttgtcttcgaagatgcacccgtg

SEQ ID NO: 6036931 - DNA, 25 bp, Homo sapien
gagacaatattgaaaaatgttggaa

SEQ ID NO: 6036932 - DNA, 25 bp, Homo sapien
agaacacaagaggttttgagaaggt

SEQ ID NO: 6036933 - DNA, 25 bp, Homo sapien
caattaactggtaaacaggatctga

SEQ ID NO: 6036934 - DNA, 25 bp, Homo sapien
tgagactcaaaaaaagttacctgaa

SEQ ID NO: 6036935 - DNA, 25 bp, Homo sapien
attactgggtttgacgtgaagaacg

SEQ ID NO: 6036936 - DNA, 25 bp, Homo sapien
atgttggaaagcccaaagttttcat

SEQ ID NO: 6036937 - DNA, 25 bp, Homo sapien
cgggatcaggcttaccgttcttcac

SEQ ID NO: 6036938 - DNA, 25 bp, Homo sapien
tattgtctcgaaccatgaaaatgcc

SEQ ID NO: 6036939 - DNA, 25 bp, Homo sapien
tgtcaaatcacagactacataatct

SEQ ID NO: 6036940 - DNA, 25 bp, Homo sapien
atcacagactacataatctgctcct

SEQ ID NO: 6036941 - DNA, 25 bp, Homo sapien
aacgctcttgtcatacgaggatgtt

SEQ ID NO: 6036942 - DNA, 25 bp, Homo sapien
cacagtaatggcgcccattgctttg

SEQ ID NO: 6036943 - DNA, 25 bp, Homo sapien
tttaccagttaattgcaaatcttga

SEQ ID NO: 6036944 - DNA, 25 bp, Homo sapien
cacggaaacctgtgtcaaatcacag

SEQ ID NO: 6036945 - DNA, 25 bp, Homo sapien
atcttcgaagacaacatacttcaga

SEQ ID NO: 6036946 - DNA, 25 bp, Homo sapien
cttcagatcctgtttaccagttaat

SEQ ID NO: 6036947 - DNA, 25 bp, Homo sapien
ttgcaaatcttgacgcaataaatca

SEQ ID NO: 6036948 - DNA, 25 bp, Homo sapien
atgggcaatatctttttctagagca

SEQ ID NO: 6036949 - DNA, 25 bp, Homo sapien
gtaacgatagcccatttcctttcag

SEQ ID NO: 6036950 - DNA, 25 bp, Homo sapien
tctcaaaacctcttgtgttcttgca

SEQ ID NO: 6036951 - DNA, 25 bp, Homo sapien
cattgttcttaaccacggaaacctg

SEQ ID NO: 6036952 - DNA, 25 bp, Homo sapien
atcttgacgcaataaatcacgagct

SEQ ID NO: 6036953 - DNA, 25 bp, Homo sapien
tagagcaagaacacctttattgtct

SEQ ID NO: 6036954 - DNA, 25 bp, Homo sapien
aaggcttactgtgtccaagtaacta

SEQ ID NO: 6036955 - DNA, 25 bp, Homo sapien
gggtgcatcttcgaagacaacatac

SEQ ID NO: 6036956 - DNA, 25 bp, Homo sapien
aacctgtgtcaaatcacagactaca

SEQ ID NO: 6036957 - DNA, 25 bp, Homo sapien
agaatgcttaaataactcggaagga

SEQ ID NO: 6036958 - DNA, 25 bp, Homo sapien
tgcaccaggaataaggcttactgtg

SEQ ID NO: 6036959 - DNA, 25 bp, Homo sapien
cagtaagttctctgcaccaggaata

SEQ ID NO: 6036960 - DNA, 25 bp, Homo sapien
atgaaaactttgggctttccaacat

SEQ ID NO: 6036961 - DNA, 25 bp, Homo sapien
atacgaggatgttatacccacagta

SEQ ID NO: 6036962 - DNA, 25 bp, Homo sapien
ttgtgttcttgcaccatgagaatgc

SEQ ID NO: 6036963 - DNA, 25 bp, Homo sapien
cacgtcaaacccagtaatgaaaact

SEQ ID NO: 6036964 - DNA, 25 bp, Homo sapien
tgctttgccggcctttatgcccacg

SEQ ID NO: 6036965 - DNA, 25 bp, Homo sapien
aaatatggagaaccagaggtaacga

SEQ ID NO: 6036966 - DNA, 25 bp, Homo sapien
aacatacttcagatcctgtttacca

SEQ ID NO: 6036967 - DNA, 25 bp, Homo sapien
tgctcctgcgtcaaataaaacgctc

SEQ ID NO: 6036968 - DNA, 25 bp, Homo sapien
catgaaaatgccaaatatggagaac

SEQ ID NO: 6036969 - DNA, 25 bp, Homo sapien
tttttctagagcaagaacaccttta

SEQ ID NO: 6036970 - DNA, 25 bp, Homo sapien
aaataaaacgctcttgtcatacgag

SEQ ID NO: 6036971 - DNA, 25 bp, Homo sapien
atctaacgataacagtaagttctct

SEQ ID NO: 6036972 - DNA, 25 bp, Homo sapien
acctttattgtctgtatcatccaat

SEQ ID NO: 6036973 - DNA, 25 bp, Homo sapien
acgcaataaatcacgagctcttgaa

SEQ ID NO: 6036974 - DNA, 25 bp, Homo sapien
attgtctgtatcatccaatttaggg

SEQ ID NO: 6036975 - DNA, 25 bp, Homo sapien
cgataacagtaagttctctgcacca

SEQ ID NO: 6036976 - DNA, 25 bp, Homo sapien
agttaattgcaaatcttgacgcaat

SEQ ID NO: 6036977 - DNA, 25 bp, Homo sapien
aatggcgcccattgctttgccggcc

SEQ ID NO: 6036978 - DNA, 25 bp, Homo sapien
gcccattgctttgccggcctttatg

SEQ ID NO: 6036979 - DNA, 25 bp, Homo sapien
gacaataccgttttcattgttctta

SEQ ID NO: 6036980 - DNA, 25 bp, Homo sapien
accttctcaaaacctcttgtgttct

SEQ ID NO: 6036981 - DNA, 25 bp, Homo sapien
atctacatctaacgataacagtaag

SEQ ID NO: 6036982 - DNA, 25 bp, Homo sapien
aagaacacctttattgtctgtatca

SEQ ID NO: 6036983 - DNA, 25 bp, Homo sapien
tgccggcctttatgcccacgggtgc

SEQ ID NO: 6036984 - DNA, 25 bp, Homo sapien
cctttatgcccacgggtgcatcttc

SEQ ID NO: 6036985 - DNA, 25 bp, Homo sapien
tgcgtcaaataaaacgctcttgtca

SEQ ID NO: 6036986 - DNA, 25 bp, Homo sapien
ataatctgctcctgcgtcaaataaa

SEQ ID NO: 6036987 - DNA, 25 bp, Homo sapien
tgtatcatccaatttagggaaaaac

SEQ ID NO: 6036988 - DNA, 25 bp, Homo sapien
aatatctttttctagagcaagaaca

SEQ ID NO: 6036989 - DNA, 25 bp, Homo sapien
caggcttaccgttcttcacgtcaaa

SEQ ID NO: 6036990 - DNA, 25 bp, Homo sapien
aacatttttcaatattgtctcgaac

SEQ ID NO: 6036991 - DNA, 25 bp, Homo sapien
tcttgcaccatgagaatgcttaaat

SEQ ID NO: 6036992 - DNA, 25 bp, Homo sapien
ttgggctttccaacatttttcaata

SEQ ID NO: 6036993 - DNA, 25 bp, Homo sapien
gtccaagtaactatgggcaatatct

SEQ ID NO: 6036994 - DNA, 25 bp, Homo sapien
tcgaaccatgaaaatgccaaatatg

SEQ ID NO: 6036995 - DNA, 25 bp, Homo sapien
aatgccaaatatggagaaccagagg

SEQ ID NO: 6036996 - DNA, 25 bp, Homo sapien
ccagaggtaacgatagcccatttcc

SEQ ID NO: 6036997 - DNA, 25 bp, Homo sapien
ggagaaccagaggtaacgatagccc

SEQ ID NO: 6036998 - DNA, 25 bp, Homo sapien
gttctctgcaccaggaataaggctt

SEQ ID NO: 6036999 - DNA, 25 bp, Homo sapien
acgagctcttgaataaccctcggga

SEQ ID NO: 6037000 - DNA, 25 bp, Homo sapien
gaagacaacatacttcagatcctgt

SEQ ID NO: 6037001 - DNA, 25 bp, Homo sapien
atagcccatttcctttcaggtaact

SEQ ID NO: 6037002 - DNA, 25 bp, Homo sapien
ggatgttatacccacagtaatggcg

SEQ ID NO: 6037003 - DNA, 25 bp, Homo sapien
gactacataatctgctcctgcgtca

SEQ ID NO: 6037004 - DNA, 25 bp, Homo sapien
atcctgtttaccagttaattgcaaa

SEQ ID NO: 6037005 - DNA, 25 bp, Homo sapien
gtaactatgggcaatatctttttct

SEQ ID NO: 6037006 - DNA, 25 bp, Homo sapien
ctttttttgagtctcagtatctaca

SEQ ID NO: 6037007 - DNA, 25 bp, Homo sapien
taaatcacgagctcttgaataaccc

SEQ ID NO: 6037008 - DNA, 25 bp, Homo sapien
tactgtgtccaagtaactatgggca

SEQ ID NO: 6037009 - DNA, 25 bp, Homo sapien
tatacccacagtaatggcgcccatt

SEQ ID NO: 6037010 - DNA, 25 bp, Homo sapien
gttcttcacgtcaaacccagtaatg

SEQ ID NO: 6037011 - DNA, 25 bp, Homo sapien
tttcaatattgtctcgaaccatgaa

SEQ ID NO: 6037012 - DNA, 25 bp, Homo sapien
tcttgaataaccctcgggatcaggc

SEQ ID NO: 6037013 - DNA, 25 bp, Homo sapien
gcccacgggtgcatcttcgaagaca

SEQ ID NO: 6037014 - DNA, 25 bp, Homo sapien
ctttccaacatttttcaatattgtc

SEQ ID NO: 6037015 - DNA, 25 bp, Homo sapien
aggaataaggcttactgtgtccaag

SEQ ID NO: 6037016 - DNA, 25 bp, Homo sapien
aacctcttgtgttcttgcaccatga

SEQ ID NO: 6037017 - DNA, 25 bp, Homo sapien
caggtaactttttttgagtctcagt

SEQ ID NO: 6037018 - DNA, 25 bp, Homo sapien
accatgagaatgcttaaataactcg

SEQ ID NO: 6037019 - DNA, 25 bp, Homo sapien
ttgagtctcagtatctacatctaac

SEQ ID NO: 6037020 - DNA, 25 bp, Homo sapien
ataaccctcgggatcaggcttaccg

SEQ ID NO: 6037021 - DNA, 25 bp, Homo sapien
cttgtcatacgaggatgttataccc

SEQ ID NO: 6037022 - DNA, 25 bp, Homo sapien
tcttaaccacggaaacctgtgtcaa

SEQ ID NO: 6037023 - DNA, 25 bp, Homo sapien
ctcagtatctacatctaacgataac

SEQ ID NO: 6037024 - DNA, 25 bp, Homo sapien
agaacactcgctactggtgccccat

SEQ ID NO: 6037025 - DNA, 25 bp, Homo sapien
aacacttggttcctcaaggtaatgg

SEQ ID NO: 6037026 - DNA, 25 bp, Homo sapien
cgaatctgaagaattgatcaaactt

SEQ ID NO: 6037027 - DNA, 25 bp, Homo sapien
aagccttacggtaatctttctcttg

SEQ ID NO: 6037028 - DNA, 25 bp, Homo sapien
cgaggctcttctttatgttattact

SEQ ID NO: 6037029 - DNA, 25 bp, Homo sapien
tggggcactccacacatcaagcctt

SEQ ID NO: 6037030 - DNA, 25 bp, Homo sapien
tccaagggtttaggtgttggcactc

SEQ ID NO: 6037031 - DNA, 25 bp, Homo sapien
actggtttcaaagccgtacgtcttg

SEQ ID NO: 6037032 - DNA, 25 bp, Homo sapien
ctcgctactggtgccccattagatg

SEQ ID NO: 6037033 - DNA, 25 bp, Homo sapien
aaattctccatcagaacactcgcta

SEQ ID NO: 6037034 - DNA, 25 bp, Homo sapien
attgatcaaacttaccgggaaattg

SEQ ID NO: 6037035 - DNA, 25 bp, Homo sapien
cacatcaagccttacggtaatcttt

SEQ ID NO: 6037036 - DNA, 25 bp, Homo sapien
ccattatgcatttgaattatttgaa

SEQ ID NO: 6037037 - DNA, 25 bp, Homo sapien
ctacagaactcctcaaaatactatc

SEQ ID NO: 6037038 - DNA, 25 bp, Homo sapien
tgttcggccagacattcaccgatca

SEQ ID NO: 6037039 - DNA, 25 bp, Homo sapien
aggtttgaaagcctacagaactcct

SEQ ID NO: 6037040 - DNA, 25 bp, Homo sapien
cgctagaatttgtttgccaactttc

SEQ ID NO: 6037041 - DNA, 25 bp, Homo sapien
tggttactcattatacatcagacca

SEQ ID NO: 6037042 - DNA, 25 bp, Homo sapien
gcatccaaactaaaaattactagaa

SEQ ID NO: 6037043 - DNA, 25 bp, Homo sapien
actccacacatcaagccttacggta

SEQ ID NO: 6037044 - DNA, 25 bp, Homo sapien
gccgtacgtcttgaagcaacagact

SEQ ID NO: 6037045 - DNA, 25 bp, Homo sapien
tgaagaattgatcaaacttaccggg

SEQ ID NO: 6037046 - DNA, 25 bp, Homo sapien
ttactagaaacccaaatccatccaa

SEQ ID NO: 6037047 - DNA, 25 bp, Homo sapien
tccttggtcagccaaagaagggtgg

SEQ ID NO: 6037048 - DNA, 25 bp, Homo sapien
tttaggtgttggcactccctccgag

SEQ ID NO: 6037049 - DNA, 25 bp, Homo sapien
tatacatcagaccaacaatgattgg

SEQ ID NO: 6037050 - DNA, 25 bp, Homo sapien
catggcccgtatgaacaagtctgcc

SEQ ID NO: 6037051 - DNA, 25 bp, Homo sapien
tccatcagaacactcgctactggtg

SEQ ID NO: 6037052 - DNA, 25 bp, Homo sapien
tatgttgaccattccttggtcagcc

SEQ ID NO: 6037053 - DNA, 25 bp, Homo sapien
tcttctttatgttattacttctcca

SEQ ID NO: 6037054 - DNA, 25 bp, Homo sapien
gaagggtggggcactccacacatca

SEQ ID NO: 6037055 - DNA, 25 bp, Homo sapien
ccttattataagactggtttcaaag

SEQ ID NO: 6037056 - DNA, 25 bp, Homo sapien
gccagacattcaccgatcatatgtt

SEQ ID NO: 6037057 - DNA, 25 bp, Homo sapien
gaagcaacagactatgctacaagag

SEQ ID NO: 6037058 - DNA, 25 bp, Homo sapien
aggtaatggttactcattatacatc

SEQ ID NO: 6037059 - DNA, 25 bp, Homo sapien
tattacttctccagtcggtccttat

SEQ ID NO: 6037060 - DNA, 25 bp, Homo sapien
tctgcttgtgtattccattatgcat

SEQ ID NO: 6037061 - DNA, 25 bp, Homo sapien
ttagatgcatccaaactaaaaatta

SEQ ID NO: 6037062 - DNA, 25 bp, Homo sapien
aagccaagaccaaatgaagaattag

SEQ ID NO: 6037063 - DNA, 25 bp, Homo sapien
tcagaccaacaatgattggtacatc

SEQ ID NO: 6037064 - DNA, 25 bp, Homo sapien
ccgtatgaacaagtctgccgctaga

SEQ ID NO: 6037065 - DNA, 25 bp, Homo sapien
cttaccgggaaattgatcgaacaag

SEQ ID NO: 6037066 - DNA, 25 bp, Homo sapien
tcctcaaggtaatggttactcatta

SEQ ID NO: 6037067 - DNA, 25 bp, Homo sapien
ctcattatacatcagaccaacaatg

SEQ ID NO: 6037068 - DNA, 25 bp, Homo sapien
aatttgtttgccaactttcgaatct

SEQ ID NO: 6037069 - DNA, 25 bp, Homo sapien
tgcatttgaattatttgaaggtttg

SEQ ID NO: 6037070 - DNA, 25 bp, Homo sapien
actggtgccccattagatgcatcca

SEQ ID NO: 6037071 - DNA, 25 bp, Homo sapien
tcgaacaagataaacacttggttcc

SEQ ID NO: 6037072 - DNA, 25 bp, Homo sapien
aattagtgttcggccagacattcac

SEQ ID NO: 6037073 - DNA, 25 bp, Homo sapien
aactttcgaatctgaagaattgatc

SEQ ID NO: 6037074 - DNA, 25 bp, Homo sapien
tccggataagaacatggcccgtatg

SEQ ID NO: 6037075 - DNA, 25 bp, Homo sapien
attcaccgatcatatgttgaccatt

SEQ ID NO: 6037076 - DNA, 25 bp, Homo sapien
gaacaagtctgccgctagaatttgt

SEQ ID NO: 6037077 - DNA, 25 bp, Homo sapien
cgatcatatgttgaccattccttgg

SEQ ID NO: 6037078 - DNA, 25 bp, Homo sapien
agtcggtccttattataagactggt

SEQ ID NO: 6037079 - DNA, 25 bp, Homo sapien
tgattggtacatccaagggtttagg

SEQ ID NO: 6037080 - DNA, 25 bp, Homo sapien
tttgccaactttcgaatctgaagaa

SEQ ID NO: 6037081 - DNA, 25 bp, Homo sapien
gttccgtccggataagaacatggcc

SEQ ID NO: 6037082 - DNA, 25 bp, Homo sapien
tggttcctcaaggtaatggttactc

SEQ ID NO: 6037083 - DNA, 25 bp, Homo sapien
atgaagaattagtgttcggccagac

SEQ ID NO: 6037084 - DNA, 25 bp, Homo sapien
ggcactccctccgaggctcttcttt

SEQ ID NO: 6037085 - DNA, 25 bp, Homo sapien
tgaattatttgaaggtttgaaagcc

SEQ ID NO: 6037086 - DNA, 25 bp, Homo sapien
ttatgttattacttctccagtcggt

SEQ ID NO: 6037087 - DNA, 25 bp, Homo sapien
gtctgccgctagaatttgtttgcca

SEQ ID NO: 6037088 - DNA, 25 bp, Homo sapien
gaaagcctacagaactcctcaaaat

SEQ ID NO: 6037089 - DNA, 25 bp, Homo sapien
caccatgttccgtccggataagaac

SEQ ID NO: 6037090 - DNA, 25 bp, Homo sapien
cgtcttgaagcaacagactatgcta

SEQ ID NO: 6037091 - DNA, 25 bp, Homo sapien
aatctttctcttgacccatctgctt

SEQ ID NO: 6037092 - DNA, 25 bp, Homo sapien
tccctccgaggctcttctttatgtt

SEQ ID NO: 6037093 - DNA, 25 bp, Homo sapien
tctcttgacccatctgcttgtgtat

SEQ ID NO: 6037094 - DNA, 25 bp, Homo sapien
tataagactggtttcaaagccgtac

SEQ ID NO: 6037095 - DNA, 25 bp, Homo sapien
gaaacccaaatccatccaagccaag

SEQ ID NO: 6037096 - DNA, 25 bp, Homo sapien
aagataaacacttggttcctcaagg

SEQ ID NO: 6037097 - DNA, 25 bp, Homo sapien
gacccatctgcttgtgtattccatt

SEQ ID NO: 6037098 - DNA, 25 bp, Homo sapien
gccccattagatgcatccaaactaa

SEQ ID NO: 6037099 - DNA, 25 bp, Homo sapien
aactcctcaaaatactatcaccatg

SEQ ID NO: 6037100 - DNA, 25 bp, Homo sapien
taagaacatggcccgtatgaacaag

SEQ ID NO: 6037101 - DNA, 25 bp, Homo sapien
ccatccaagccaagaccaaatgaag

SEQ ID NO: 6037102 - DNA, 25 bp, Homo sapien
atttgaaggtttgaaagcctacaga

SEQ ID NO: 6037103 - DNA, 25 bp, Homo sapien
tcaaaatactatcaccatgttccgt

SEQ ID NO: 6037104 - DNA, 25 bp, Homo sapien
tactatcaccatgttccgtccggat

SEQ ID NO: 6037105 - DNA, 25 bp, Homo sapien
tacatccaagggtttaggtgttggc

SEQ ID NO: 6037106 - DNA, 25 bp, Homo sapien
tgtgtattccattatgcatttgaat

SEQ ID NO: 6037107 - DNA, 25 bp, Homo sapien
atcaaacttaccgggaaattgatcg

SEQ ID NO: 6037108 - DNA, 25 bp, Homo sapien
gccaaagaagggtggggcactccac

SEQ ID NO: 6037109 - DNA, 25 bp, Homo sapien
ggtgttggcactccctccgaggctc

SEQ ID NO: 6037110 - DNA, 25 bp, Homo sapien
caaatccatccaagccaagaccaaa

SEQ ID NO: 6037111 - DNA, 25 bp, Homo sapien
ttctccagtcggtccttattataag

SEQ ID NO: 6037112 - DNA, 25 bp, Homo sapien
caacaatgattggtacatccaaggg

SEQ ID NO: 6037113 - DNA, 25 bp, Homo sapien
aattgatcgaacaagataaacactt

SEQ ID NO: 6037114 - DNA, 25 bp, Homo sapien
gaccaaatgaagaattagtgttcgg

SEQ ID NO: 6037115 - DNA, 25 bp, Homo sapien
tacggtaatctttctcttgacccat

SEQ ID NO: 6037116 - DNA, 25 bp, Homo sapien
gaccattccttggtcagccaaagaa

SEQ ID NO: 6037117 - DNA, 25 bp, Homo sapien
ttcaaagccgtacgtcttgaagcaa

SEQ ID NO: 6037118 - DNA, 25 bp, Homo sapien
ccgggaaattgatcgaacaagataa

SEQ ID NO: 6037119 - DNA, 25 bp, Homo sapien
acgacagcagcagtaccagaaccga

SEQ ID NO: 6037120 - DNA, 25 bp, Homo sapien
tttgttggtaccctcttttggcagc

SEQ ID NO: 6037121 - DNA, 25 bp, Homo sapien
tttgtcacgagccaatgttaaaaca

SEQ ID NO: 6037122 - DNA, 25 bp, Homo sapien
ccacattgttcaccaggcaatagtg

SEQ ID NO: 6037123 - DNA, 25 bp, Homo sapien
gtaccagaaccgaaggcttctaata

SEQ ID NO: 6037124 - DNA, 25 bp, Homo sapien
ttcaccttgttttgctctagtggcg

SEQ ID NO: 6037125 - DNA, 25 bp, Homo sapien
catagattttgttggtaccctcttt

SEQ ID NO: 6037126 - DNA, 25 bp, Homo sapien
agatgcatggggcatagttagcacc

SEQ ID NO: 6037127 - DNA, 25 bp, Homo sapien
ccgaaggcttctaatagttcacctt

SEQ ID NO: 6037128 - DNA, 25 bp, Homo sapien
gatgtcccattcttgaggatctagt

SEQ ID NO: 6037129 - DNA, 25 bp, Homo sapien
tgaatatcttcgttgttccagccaa

SEQ ID NO: 6037130 - DNA, 25 bp, Homo sapien
tagcatagtctgttgcttcaagacg

SEQ ID NO: 6037131 - DNA, 25 bp, Homo sapien
ttgttccagccaatttccttgatag

SEQ ID NO: 6037132 - DNA, 25 bp, Homo sapien
gccaagctcttgtagcatagtctgt

SEQ ID NO: 6037133 - DNA, 25 bp, Homo sapien
gcacccaattttttgtcgccaacac

SEQ ID NO: 6037134 - DNA, 25 bp, Homo sapien
agagtctctggtaacaccttctaaa

SEQ ID NO: 6037135 - DNA, 25 bp, Homo sapien
ttgaggaaaacgaagaacacgttca

SEQ ID NO: 6037136 - DNA, 25 bp, Homo sapien
agtctgttgcttcaagacgtacggc

SEQ ID NO: 6037137 - DNA, 25 bp, Homo sapien
atggtaccatctaatggagcggtaa

SEQ ID NO: 6037138 - DNA, 25 bp, Homo sapien
cacctggccaagctcttgtagcata

SEQ ID NO: 6037139 - DNA, 25 bp, Homo sapien
ggaacatgaatatcttcgttgttcc

SEQ ID NO: 6037140 - DNA, 25 bp, Homo sapien
aataacgctcgttgatgtcccattc

SEQ ID NO: 6037141 - DNA, 25 bp, Homo sapien
tgctctagtggcgacttcagtaata

SEQ ID NO: 6037142 - DNA, 25 bp, Homo sapien
taattgactctaccgtattggatat

SEQ ID NO: 6037143 - DNA, 25 bp, Homo sapien
ccattcttgaggatctagtttgtca

SEQ ID NO: 6037144 - DNA, 25 bp, Homo sapien
gatgttcttttctgggccgaacaac

SEQ ID NO: 6037145 - DNA, 25 bp, Homo sapien
tcttcgttgttccagccaatttcct

SEQ ID NO: 6037146 - DNA, 25 bp, Homo sapien
ttttttgtcgccaacaccacctggc

SEQ ID NO: 6037147 - DNA, 25 bp, Homo sapien
tctaaaatggtaccatctaatggag

SEQ ID NO: 6037148 - DNA, 25 bp, Homo sapien
cagccaatttccttgataggtgaaa

SEQ ID NO: 6037149 - DNA, 25 bp, Homo sapien
tgccagtgactttgttgaggaaaac

SEQ ID NO: 6037150 - DNA, 25 bp, Homo sapien
ttgataggtgaaacgacagcagcag

SEQ ID NO: 6037151 - DNA, 25 bp, Homo sapien
agtgtaataacgctcgttgatgtcc

SEQ ID NO: 6037152 - DNA, 25 bp, Homo sapien
atggagcggtaaccaattccttctt

SEQ ID NO: 6037153 - DNA, 25 bp, Homo sapien
tggcagcttgtagttgaggtaagat

SEQ ID NO: 6037154 - DNA, 25 bp, Homo sapien
tttgaaaccagtcttataataagga

SEQ ID NO: 6037155 - DNA, 25 bp, Homo sapien
ggtaccctcttttggcagcttgtag

SEQ ID NO: 6037156 - DNA, 25 bp, Homo sapien
gctcgttgatgtcccattcttgagg

SEQ ID NO: 6037157 - DNA, 25 bp, Homo sapien
tacggctttgaaaccagtcttataa

SEQ ID NO: 6037158 - DNA, 25 bp, Homo sapien
ggcatagttagcacccaattttttg

SEQ ID NO: 6037159 - DNA, 25 bp, Homo sapien
tgggccgaacaaccatagattttgt

SEQ ID NO: 6037160 - DNA, 25 bp, Homo sapien
taatagttcaccttgttttgctcta

SEQ ID NO: 6037161 - DNA, 25 bp, Homo sapien
cagaaccgaaggcttctaatagttc

SEQ ID NO: 6037162 - DNA, 25 bp, Homo sapien
atctagtttgtcacgagccaatgtt

SEQ ID NO: 6037163 - DNA, 25 bp, Homo sapien
acgagccaatgttaaaacagagtct

SEQ ID NO: 6037164 - DNA, 25 bp, Homo sapien
ctcttttggcagcttgtagttgagg

SEQ ID NO: 6037165 - DNA, 25 bp, Homo sapien
taaaacagagtctctggtaacacct

SEQ ID NO: 6037166 - DNA, 25 bp, Homo sapien
tctggtaacaccttctaaaatggta

SEQ ID NO: 6037167 - DNA, 25 bp, Homo sapien
cggtaaccaattccttcttgccagt

SEQ ID NO: 6037168 - DNA, 25 bp, Homo sapien
agtggcgacttcagtaatagtgtaa

SEQ ID NO: 6037169 - DNA, 25 bp, Homo sapien
tgagcaacttgcttggtcaatgcac

SEQ ID NO: 6037170 - DNA, 25 bp, Homo sapien
catagtaccaacctcagtgatgttc

SEQ ID NO: 6037171 - DNA, 25 bp, Homo sapien
atttccttgataggtgaaacgacag

SEQ ID NO: 6037172 - DNA, 25 bp, Homo sapien
acaccacctggccaagctcttgtag

SEQ ID NO: 6037173 - DNA, 25 bp, Homo sapien
tagttagcacccaattttttgtcgc

SEQ ID NO: 6037174 - DNA, 25 bp, Homo sapien
cttttctgggccgaacaaccataga

SEQ ID NO: 6037175 - DNA, 25 bp, Homo sapien
ttgttttgctctagtggcgacttca

SEQ ID NO: 6037176 - DNA, 25 bp, Homo sapien
tgactttgttgaggaaaacgaagaa

SEQ ID NO: 6037177 - DNA, 25 bp, Homo sapien
gaaaacgaagaacacgttcatagta

SEQ ID NO: 6037178 - DNA, 25 bp, Homo sapien
aatagtggaacatgaatatcttcgt

SEQ ID NO: 6037179 - DNA, 25 bp, Homo sapien
ccgtattggatatcagcaatccatt

SEQ ID NO: 6037180 - DNA, 25 bp, Homo sapien
caatgttaaaacagagtctctggta

SEQ ID NO: 6037181 - DNA, 25 bp, Homo sapien
gaagaacacgttcatagtaccaacc

SEQ ID NO: 6037182 - DNA, 25 bp, Homo sapien
ctcagtgatgttcttttctgggccg

SEQ ID NO: 6037183 - DNA, 25 bp, Homo sapien
accaacctcagtgatgttcttttct

SEQ ID NO: 6037184 - DNA, 25 bp, Homo sapien
atccattgagcaacttgcttggtca

SEQ ID NO: 6037185 - DNA, 25 bp, Homo sapien
gaacaaccatagattttgttggtac

SEQ ID NO: 6037186 - DNA, 25 bp, Homo sapien
tgttcaccaggcaatagtggaacat

SEQ ID NO: 6037187 - DNA, 25 bp, Homo sapien
gcagcagtaccagaaccgaaggctt

SEQ ID NO: 6037188 - DNA, 25 bp, Homo sapien
agtaatagtgtaataacgctcgttg

SEQ ID NO: 6037189 - DNA, 25 bp, Homo sapien
ggtgaaacgacagcagcagtaccag

SEQ ID NO: 6037190 - DNA, 25 bp, Homo sapien
accagtcttataataaggaccgact

SEQ ID NO: 6037191 - DNA, 25 bp, Homo sapien
ttgcttcaagacgtacggctttgaa

SEQ ID NO: 6037192 - DNA, 25 bp, Homo sapien
cttataataaggaccgactggagaa

SEQ ID NO: 6037193 - DNA, 25 bp, Homo sapien
ccaattccttcttgccagtgacttt

SEQ ID NO: 6037194 - DNA, 25 bp, Homo sapien
gcatggggcatagttagcacccaat

SEQ ID NO: 6037195 - DNA, 25 bp, Homo sapien
tcagcaatccattgagcaacttgct

SEQ ID NO: 6037196 - DNA, 25 bp, Homo sapien
actctaccgtattggatatcagcaa

SEQ ID NO: 6037197 - DNA, 25 bp, Homo sapien
ccttcttgccagtgactttgttgag

SEQ ID NO: 6037198 - DNA, 25 bp, Homo sapien
caccttctaaaatggtaccatctaa

SEQ ID NO: 6037199 - DNA, 25 bp, Homo sapien
ttgaggatctagtttgtcacgagcc

SEQ ID NO: 6037200 - DNA, 25 bp, Homo sapien
cttgtagttgaggtaagatgcatgg

SEQ ID NO: 6037201 - DNA, 25 bp, Homo sapien
aatgcaccacattgttcaccaggca

SEQ ID NO: 6037202 - DNA, 25 bp, Homo sapien
cacgttcatagtaccaacctcagtg

SEQ ID NO: 6037203 - DNA, 25 bp, Homo sapien
ttaccataattgactctaccgtatt

SEQ ID NO: 6037204 - DNA, 25 bp, Homo sapien
ccatctaatggagcggtaaccaatt

SEQ ID NO: 6037205 - DNA, 25 bp, Homo sapien
ttggtcaatgcaccacattgttcac

SEQ ID NO: 6037206 - DNA, 25 bp, Homo sapien
tcgccaacaccacctggccaagctc

SEQ ID NO: 6037207 - DNA, 25 bp, Homo sapien
gacttcagtaatagtgtaataacgc

SEQ ID NO: 6037208 - DNA, 25 bp, Homo sapien
acttgcttggtcaatgcaccacatt

SEQ ID NO: 6037209 - DNA, 25 bp, Homo sapien
ccaggcaatagtggaacatgaatat

SEQ ID NO: 6037210 - DNA, 25 bp, Homo sapien
caagacgtacggctttgaaaccagt

SEQ ID NO: 6037211 - DNA, 25 bp, Homo sapien
gcttctaatagttcaccttgttttg

SEQ ID NO: 6037212 - DNA, 25 bp, Homo sapien
tggatatcagcaatccattgagcaa

SEQ ID NO: 6037213 - DNA, 25 bp, Homo sapien
ctcttgtagcatagtctgttgcttc

SEQ ID NO: 6037214 - DNA, 25 bp, Homo sapien
cgtgtgatatcaccggaagaggatg

SEQ ID NO: 6037215 - DNA, 25 bp, Homo sapien
gctcagacacgcaagcagctaggcc

SEQ ID NO: 6037216 - DNA, 25 bp, Homo sapien
agaagcgtttcgaagaggcagtgga

SEQ ID NO: 6037217 - DNA, 25 bp, Homo sapien
gcaacgtctccgcttactacaacgg

SEQ ID NO: 6037218 - DNA, 25 bp, Homo sapien
ggcagctgccatcacagctagcatc

SEQ ID NO: 6037219 - DNA, 25 bp, Homo sapien
ggcagttcagcacccccacagttgg

SEQ ID NO: 6037220 - DNA, 25 bp, Homo sapien
tactacaacggccaggagtacggca

SEQ ID NO: 6037221 - DNA, 25 bp, Homo sapien
ataaagcaaggcataaaggaagatg

SEQ ID NO: 6037222 - DNA, 25 bp, Homo sapien
ctccaaaggtaactaagcgtgtgat

SEQ ID NO: 6037223 - DNA, 25 bp, Homo sapien
gcacccccacagttgggaaagctac

SEQ ID NO: 6037224 - DNA, 25 bp, Homo sapien
ctaggccaaaaagccaaggattctt

SEQ ID NO: 6037225 - DNA, 25 bp, Homo sapien
gaccaacaggaaaggaacagtaatc

SEQ ID NO: 6037226 - DNA, 25 bp, Homo sapien
gttcagcacccccacagttgggaaa

SEQ ID NO: 6037227 - DNA, 25 bp, Homo sapien
tgttgaagaataacacgggtgacgc

SEQ ID NO: 6037228 - DNA, 25 bp, Homo sapien
aagctagaccaacaggaaaggaaca

SEQ ID NO: 6037229 - DNA, 25 bp, Homo sapien
tatctcaaaaggctagggaagaggc

SEQ ID NO: 6037230 - DNA, 25 bp, Homo sapien
tcctcgcaaagcatcttcaattggg

SEQ ID NO: 6037231 - DNA, 25 bp, Homo sapien
gtaatcctttgaaacgcctgttgaa

SEQ ID NO: 6037232 - DNA, 25 bp, Homo sapien
aagacgcgcttctgggcgtatctca

SEQ ID NO: 6037233 - DNA, 25 bp, Homo sapien
agaaggccgctctggacagagcatc

SEQ ID NO: 6037234 - DNA, 25 bp, Homo sapien
ccgctctggacagagcatccattga

SEQ ID NO: 6037235 - DNA, 25 bp, Homo sapien
agagccagagactttaatgagcttt

SEQ ID NO: 6037236 - DNA, 25 bp, Homo sapien
tcttgtccacggtgatgagagagaa

SEQ ID NO: 6037237 - DNA, 25 bp, Homo sapien
agagactttaatgagctttcggaca

SEQ ID NO: 6037238 - DNA, 25 bp, Homo sapien
ccggaagaggatgctcagacacgca

SEQ ID NO: 6037239 - DNA, 25 bp, Homo sapien
ccacagttgggaaagctacataaca

SEQ ID NO: 6037240 - DNA, 25 bp, Homo sapien
aagcagctaggccaaaaagccaagg

SEQ ID NO: 6037241 - DNA, 25 bp, Homo sapien
aagatgccttgtcgttaaaagacgc

SEQ ID NO: 6037242 - DNA, 25 bp, Homo sapien
gggtcagagaagagagggcaacgtc

SEQ ID NO: 6037243 - DNA, 25 bp, Homo sapien
aaaggtacgggagagccagagactt

SEQ ID NO: 6037244 - DNA, 25 bp, Homo sapien
caggagtacggcagttcagcacccc

SEQ ID NO: 6037245 - DNA, 25 bp, Homo sapien
ccatcggggaatttgatactgctaa

SEQ ID NO: 6037246 - DNA, 25 bp, Homo sapien
gcattggcagctgccatcacagcta

SEQ ID NO: 6037247 - DNA, 25 bp, Homo sapien
gctagggaagaggctccaaaggtaa

SEQ ID NO: 6037248 - DNA, 25 bp, Homo sapien
ctgctaagaagcgtttcgaagaggc

SEQ ID NO: 6037249 - DNA, 25 bp, Homo sapien
agtacgaaaggtacgggagagccag

SEQ ID NO: 6037250 - DNA, 25 bp, Homo sapien
tgatgagagagaagaaggccgctct

SEQ ID NO: 6037251 - DNA, 25 bp, Homo sapien
catagccatcggggaatttgatact

SEQ ID NO: 6037252 - DNA, 25 bp, Homo sapien
atgagaaggagctcttgtccacggt

SEQ ID NO: 6037253 - DNA, 25 bp, Homo sapien
ctttgaaacgcctgttgaagaataa

SEQ ID NO: 6037254 - DNA, 25 bp, Homo sapien
gattcttcctcgcaaagcatcttca

SEQ ID NO: 6037255 - DNA, 25 bp, Homo sapien
aagaggctccaaaggtaactaagcg

SEQ ID NO: 6037256 - DNA, 25 bp, Homo sapien
cttcaattgggggtttagtgaggct

SEQ ID NO: 6037257 - DNA, 25 bp, Homo sapien
acacgcaagcagctaggccaaaaag

SEQ ID NO: 6037258 - DNA, 25 bp, Homo sapien
caggaaaggaacagtaatcctttga

SEQ ID NO: 6037259 - DNA, 25 bp, Homo sapien
atcgtaatgagaaggagctcttgtc

SEQ ID NO: 6037260 - DNA, 25 bp, Homo sapien
gaacagtaatcctttgaaacgcctg

SEQ ID NO: 6037261 - DNA, 25 bp, Homo sapien
gagagggcaacgtctccgcttacta

SEQ ID NO: 6037262 - DNA, 25 bp, Homo sapien
aggagctcttgtccacggtgatgag

SEQ ID NO: 6037263 - DNA, 25 bp, Homo sapien
agagaagaaggccgctctggacaga

SEQ ID NO: 6037264 - DNA, 25 bp, Homo sapien
tttaatgagctttcggacaagctag

SEQ ID NO: 6037265 - DNA, 25 bp, Homo sapien
aacgcctgttgaagaataacacggg

SEQ ID NO: 6037266 - DNA, 25 bp, Homo sapien
gagctttcggacaagctagaccaac

SEQ ID NO: 6037267 - DNA, 25 bp, Homo sapien
aagaggcagtggatcgtaatgagaa

SEQ ID NO: 6037268 - DNA, 25 bp, Homo sapien
gagcatccattgagtacgaaaggta

SEQ ID NO: 6037269 - DNA, 25 bp, Homo sapien
cacagctagcatcatggtcagagaa

SEQ ID NO: 6037270 - DNA, 25 bp, Homo sapien
ataaaggaagatgccttgtcgttaa

SEQ ID NO: 6037271 - DNA, 25 bp, Homo sapien
ccattgagtacgaaaggtacgggag

SEQ ID NO: 6037272 - DNA, 25 bp, Homo sapien
ggccaagggtcagagaagagagggc

SEQ ID NO: 6037273 - DNA, 25 bp, Homo sapien
caaggcataaaggaagatgccttgt

SEQ ID NO: 6037274 - DNA, 25 bp, Homo sapien
ggtttagtgaggctgaaagaaggaa

SEQ ID NO: 6037275 - DNA, 25 bp, Homo sapien
gtttcgaagaggcagtggatcgtaa

SEQ ID NO: 6037276 - DNA, 25 bp, Homo sapien
aagctacataacataaagcaaggca

SEQ ID NO: 6037277 - DNA, 25 bp, Homo sapien
aagaaggaaagccatagccatcggg

SEQ ID NO: 6037278 - DNA, 25 bp, Homo sapien
cagtggatcgtaatgagaaggagct

SEQ ID NO: 6037279 - DNA, 25 bp, Homo sapien
gccaaggattcttcctcgcaaagca

SEQ ID NO: 6037280 - DNA, 25 bp, Homo sapien
gaggatgctcagacacgcaagcagc

SEQ ID NO: 6037281 - DNA, 25 bp, Homo sapien
ttgatactgctaagaagcgtttcga

SEQ ID NO: 6037282 - DNA, 25 bp, Homo sapien
gagaagagagggcaacgtctccgct

SEQ ID NO: 6037283 - DNA, 25 bp, Homo sapien
caaaaggctagggaagaggctccaa

SEQ ID NO: 6037284 - DNA, 25 bp, Homo sapien
tagtgaggctgaaagaaggaaagcc

SEQ ID NO: 6037285 - DNA, 25 bp, Homo sapien
cagagaacagaaggccaagggtcag

SEQ ID NO: 6037286 - DNA, 25 bp, Homo sapien
ccacggtgatgagagagaagaaggc

SEQ ID NO: 6037287 - DNA, 25 bp, Homo sapien
ttgggaaagctacataacataaagc

SEQ ID NO: 6037288 - DNA, 25 bp, Homo sapien
caaaaagccaaggattcttcctcgc

SEQ ID NO: 6037289 - DNA, 25 bp, Homo sapien
tcggacaagctagaccaacaggaaa

SEQ ID NO: 6037290 - DNA, 25 bp, Homo sapien
ggctgaaagaaggaaagccatagcc

SEQ ID NO: 6037291 - DNA, 25 bp, Homo sapien
tccgcttactacaacggccaggagt

SEQ ID NO: 6037292 - DNA, 25 bp, Homo sapien
tggacagagcatccattgagtacga

SEQ ID NO: 6037293 - DNA, 25 bp, Homo sapien
aggtaactaagcgtgtgatatcacc

SEQ ID NO: 6037294 - DNA, 25 bp, Homo sapien
cataacataaagcaaggcataaagg

SEQ ID NO: 6037295 - DNA, 25 bp, Homo sapien
acagaaggccaagggtcagagaaga

SEQ ID NO: 6037296 - DNA, 25 bp, Homo sapien
catggtcagagaacagaaggccaag

SEQ ID NO: 6037297 - DNA, 25 bp, Homo sapien
cgcttctgggcgtatctcaaaaggc

SEQ ID NO: 6037298 - DNA, 25 bp, Homo sapien
atatcaccggaagaggatgctcaga

SEQ ID NO: 6037299 - DNA, 25 bp, Homo sapien
gaaagccatagccatcggggaattt

SEQ ID NO: 6037300 - DNA, 25 bp, Homo sapien
gggaatttgatactgctaagaagcg

SEQ ID NO: 6037301 - DNA, 25 bp, Homo sapien
tacgggagagccagagactttaatg

SEQ ID NO: 6037302 - DNA, 25 bp, Homo sapien
tagcatcatggtcagagaacagaag

SEQ ID NO: 6037303 - DNA, 25 bp, Homo sapien
actaagcgtgtgatatcaccggaag

SEQ ID NO: 6037304 - DNA, 25 bp, Homo sapien
aacggccaggagtacggcagttcag

SEQ ID NO: 6037305 - DNA, 25 bp, Homo sapien
tgggcgtatctcaaaaggctaggga

SEQ ID NO: 6037306 - DNA, 25 bp, Homo sapien
tgccatcacagctagcatcatggtc

SEQ ID NO: 6037307 - DNA, 25 bp, Homo sapien
aaagcatcttcaattgggggtttag

SEQ ID NO: 6037308 - DNA, 25 bp, Homo sapien
cgttaaaagacgcgcttctgggcgt

SEQ ID NO: 6037309 - DNA, 25 bp, Homo sapien
ccttgtcgttaaaagacgcgcttct

SEQ ID NO: 6037310 - DNA, 25 bp, Homo sapien
ctgcttgtcattgtcgaccttggaa

SEQ ID NO: 6037311 - DNA, 25 bp, Homo sapien
ctccttcgccttagataacgagtcc

SEQ ID NO: 6037312 - DNA, 25 bp, Homo sapien
ttttccttgatcttcttcagctcgt

SEQ ID NO: 6037313 - DNA, 25 bp, Homo sapien
cagctcgtcaagacgtttttgcgcc

SEQ ID NO: 6037314 - DNA, 25 bp, Homo sapien
tccatcttaaatcgtccatttcgtc

SEQ ID NO: 6037315 - DNA, 25 bp, Homo sapien
ttgcgcctcgcttggctctgaagaa

SEQ ID NO: 6037316 - DNA, 25 bp, Homo sapien
ttaaatcgtccatttcgtccttgga

SEQ ID NO: 6037317 - DNA, 25 bp, Homo sapien
tcctgttggtctagcttgtccgaaa

SEQ ID NO: 6037318 - DNA, 25 bp, Homo sapien
gccgtactgtttcaagtcctccttc

SEQ ID NO: 6037319 - DNA, 25 bp, Homo sapien
ggaaagttgagcggctgtttcaccc

SEQ ID NO: 6037320 - DNA, 25 bp, Homo sapien
tctggctacccgttcagcaatctgt

SEQ ID NO: 6037321 - DNA, 25 bp, Homo sapien
ctcttctctaccaaactcctgtgcc

SEQ ID NO: 6037322 - DNA, 25 bp, Homo sapien
atttcgtccttggaaagttgagcgg

SEQ ID NO: 6037323 - DNA, 25 bp, Homo sapien
ggcttcatcgtactttttcaacgct

SEQ ID NO: 6037324 - DNA, 25 bp, Homo sapien
cagttgtttctttgaattctcataa

SEQ ID NO: 6037325 - DNA, 25 bp, Homo sapien
gtcaagacgtttttgcgcctcgctt

SEQ ID NO: 6037326 - DNA, 25 bp, Homo sapien
ggctgtttcaccccatccttctaaa

SEQ ID NO: 6037327 - DNA, 25 bp, Homo sapien
caggcgtttcaaaggattactgttc

SEQ ID NO: 6037328 - DNA, 25 bp, Homo sapien
attccattctttgaatttgttcttg

SEQ ID NO: 6037329 - DNA, 25 bp, Homo sapien
tctttgaattctcataattccatct

SEQ ID NO: 6037330 - DNA, 25 bp, Homo sapien
accccagccttggacacttcttgca

SEQ ID NO: 6037331 - DNA, 25 bp, Homo sapien
ctccaactcttctctaccaaactcc

SEQ ID NO: 6037332 - DNA, 25 bp, Homo sapien
tgtgccgtatcaccccagccttgga

SEQ ID NO: 6037333 - DNA, 25 bp, Homo sapien
gccttggacacttcttgcagcggct

SEQ ID NO: 6037334 - DNA, 25 bp, Homo sapien
aattctcataattccatcttaaatc

SEQ ID NO: 6037335 - DNA, 25 bp, Homo sapien
actttttcaacgcttcatcgtactt

SEQ ID NO: 6037336 - DNA, 25 bp, Homo sapien
cagcccttttccttgatcttcttca

SEQ ID NO: 6037337 - DNA, 25 bp, Homo sapien
agcgtcacccgtgttattcttcaac

SEQ ID NO: 6037338 - DNA, 25 bp, Homo sapien
gacacttcttgcagcggcttcttca

SEQ ID NO: 6037339 - DNA, 25 bp, Homo sapien
ttctttgaatttgttcttggcttca

SEQ ID NO: 6037340 - DNA, 25 bp, Homo sapien
cttcttcagctcgtcaagacgtttt

SEQ ID NO: 6037341 - DNA, 25 bp, Homo sapien
cacgttcttatccagttgtttcttt

SEQ ID NO: 6037342 - DNA, 25 bp, Homo sapien
agataacgagtccatggcatcggac

SEQ ID NO: 6037343 - DNA, 25 bp, Homo sapien
aactcctgtgccgtatcaccccagc

SEQ ID NO: 6037344 - DNA, 25 bp, Homo sapien
tcttttgggcctcatcttttaaagc

SEQ ID NO: 6037345 - DNA, 25 bp, Homo sapien
taaacctctggctacccgttcagca

SEQ ID NO: 6037346 - DNA, 25 bp, Homo sapien
cttcaacaggcgtttcaaaggatta

SEQ ID NO: 6037347 - DNA, 25 bp, Homo sapien
ttcttcagtattagcgtcacccgtg

SEQ ID NO: 6037348 - DNA, 25 bp, Homo sapien
caaaccagcccttttccttgatctt

SEQ ID NO: 6037349 - DNA, 25 bp, Homo sapien
atccagaccaccagtggctgccgta

SEQ ID NO: 6037350 - DNA, 25 bp, Homo sapien
cgagtccatggcatcggacacgttc

SEQ ID NO: 6037351 - DNA, 25 bp, Homo sapien
caagtcctccttcgccttagataac

SEQ ID NO: 6037352 - DNA, 25 bp, Homo sapien
gtggctgccgtactgtttcaagtcc

SEQ ID NO: 6037353 - DNA, 25 bp, Homo sapien
agcggcttcttcagtattagcgtca

SEQ ID NO: 6037354 - DNA, 25 bp, Homo sapien
agcatttctcttggcttcctccaac

SEQ ID NO: 6037355 - DNA, 25 bp, Homo sapien
ttgctcgctttgctcccctttgttg

SEQ ID NO: 6037356 - DNA, 25 bp, Homo sapien
ttgagcggctgtttcaccccatcct

SEQ ID NO: 6037357 - DNA, 25 bp, Homo sapien
tcaacgcttcatcgtacttcttttg

SEQ ID NO: 6037358 - DNA, 25 bp, Homo sapien
tcttgcagcggcttcttcagtatta

SEQ ID NO: 6037359 - DNA, 25 bp, Homo sapien
cttggaagtccatccagaccaccag

SEQ ID NO: 6037360 - DNA, 25 bp, Homo sapien
ccaccagtggctgccgtactgtttc

SEQ ID NO: 6037361 - DNA, 25 bp, Homo sapien
acgtttttgcgcctcgcttggctct

SEQ ID NO: 6037362 - DNA, 25 bp, Homo sapien
cttatccagttgtttctttgaattc

SEQ ID NO: 6037363 - DNA, 25 bp, Homo sapien
aagtccatccagaccaccagtggct

SEQ ID NO: 6037364 - DNA, 25 bp, Homo sapien
ggcttcctccaactcttctctacca

SEQ ID NO: 6037365 - DNA, 25 bp, Homo sapien
gttattcttcaacaggcgtttcaaa

SEQ ID NO: 6037366 - DNA, 25 bp, Homo sapien
ctgtttcaagtcctccttcgcctta

SEQ ID NO: 6037367 - DNA, 25 bp, Homo sapien
atccttctaaacctctggctacccg

SEQ ID NO: 6037368 - DNA, 25 bp, Homo sapien
ggcctcatcttttaaagcctgcttg

SEQ ID NO: 6037369 - DNA, 25 bp, Homo sapien
acccgtgttattcttcaacaggcgt

SEQ ID NO: 6037370 - DNA, 25 bp, Homo sapien
cgtatcaccccagccttggacactt

SEQ ID NO: 6037371 - DNA, 25 bp, Homo sapien
catggcatcggacacgttcttatcc

SEQ ID NO: 6037372 - DNA, 25 bp, Homo sapien
ctcgcttggctctgaagaagcattt

SEQ ID NO: 6037373 - DNA, 25 bp, Homo sapien
gaatttgttcttggcttcatcgtac

SEQ ID NO: 6037374 - DNA, 25 bp, Homo sapien
ttcctttcctgttggtctagcttgt

SEQ ID NO: 6037375 - DNA, 25 bp, Homo sapien
ttcagcaatctgttgctcgctttgc

SEQ ID NO: 6037376 - DNA, 25 bp, Homo sapien
cataattccatcttaaatcgtccat

SEQ ID NO: 6037377 - DNA, 25 bp, Homo sapien
caccccatccttctaaacctctggc

SEQ ID NO: 6037378 - DNA, 25 bp, Homo sapien
gtcattgtcgaccttggaagtccat

SEQ ID NO: 6037379 - DNA, 25 bp, Homo sapien
tctaccaaactcctgtgccgtatca

SEQ ID NO: 6037380 - DNA, 25 bp, Homo sapien
cttatcattccattctttgaatttg

SEQ ID NO: 6037381 - DNA, 25 bp, Homo sapien
tctcttggcttcctccaactcttct

SEQ ID NO: 6037382 - DNA, 25 bp, Homo sapien
atcggacacgttcttatccagttgt

SEQ ID NO: 6037383 - DNA, 25 bp, Homo sapien
aatctgttgctcgctttgctcccct

SEQ ID NO: 6037384 - DNA, 25 bp, Homo sapien
cgccttagataacgagtccatggca

SEQ ID NO: 6037385 - DNA, 25 bp, Homo sapien
ttgatcttcttcagctcgtcaagac

SEQ ID NO: 6037386 - DNA, 25 bp, Homo sapien
agtattagcgtcacccgtgttattc

SEQ ID NO: 6037387 - DNA, 25 bp, Homo sapien
cgtccatttcgtccttggaaagttg

SEQ ID NO: 6037388 - DNA, 25 bp, Homo sapien
aaggattactgttcctttcctgttg

SEQ ID NO: 6037389 - DNA, 25 bp, Homo sapien
taaagcctgcttgtcattgtcgacc

SEQ ID NO: 6037390 - DNA, 25 bp, Homo sapien
gctttgctcccctttgttgtaacca

SEQ ID NO: 6037391 - DNA, 25 bp, Homo sapien
tgaagaagcatttctcttggcttcc

SEQ ID NO: 6037392 - DNA, 25 bp, Homo sapien
atcacccttatcattccattctttg

SEQ ID NO: 6037393 - DNA, 25 bp, Homo sapien
tggctctgaagaagcatttctcttg

SEQ ID NO: 6037394 - DNA, 25 bp, Homo sapien
gttcttggcttcatcgtactttttc

SEQ ID NO: 6037395 - DNA, 25 bp, Homo sapien
tacccgttcagcaatctgttgctcg

SEQ ID NO: 6037396 - DNA, 25 bp, Homo sapien
cttcatcgtacttcttttgggcctc

SEQ ID NO: 6037397 - DNA, 25 bp, Homo sapien
atcgtactttttcaacgcttcatcg

SEQ ID NO: 6037398 - DNA, 25 bp, Homo sapien
gtcgaccttggaagtccatccagac

SEQ ID NO: 6037399 - DNA, 25 bp, Homo sapien
tccttggaaagttgagcggctgttt

SEQ ID NO: 6037400 - DNA, 25 bp, Homo sapien
ttactgttcctttcctgttggtcta

SEQ ID NO: 6037401 - DNA, 25 bp, Homo sapien
atcttttaaagcctgcttgtcattg

SEQ ID NO: 6037402 - DNA, 25 bp, Homo sapien
cgtacttcttttgggcctcatcttt

SEQ ID NO: 6037403 - DNA, 25 bp, Homo sapien
agcatcaaaacggaaacgcccacca

SEQ ID NO: 6037404 - DNA, 25 bp, Homo sapien
tgagggtcgtggatgtggattctga

SEQ ID NO: 6037405 - DNA, 25 bp, Homo sapien
aagccctggatagccaagtacgaga

SEQ ID NO: 6037406 - DNA, 25 bp, Homo sapien
ctgtcgcggtcgagaagcagggcca

SEQ ID NO: 6037407 - DNA, 25 bp, Homo sapien
gtagccgcagcagagtaagggagga

SEQ ID NO: 6037408 - DNA, 25 bp, Homo sapien
tcgtggatgtggattctgaagagga

SEQ ID NO: 6037409 - DNA, 25 bp, Homo sapien
ggaaagaggtcgtagcaagaagaaa

SEQ ID NO: 6037410 - DNA, 25 bp, Homo sapien
aggtcgtagcaagaagaaaagaggc

SEQ ID NO: 6037411 - DNA, 25 bp, Homo sapien
ttttgtaccagcataaacgaagtgc

SEQ ID NO: 6037412 - DNA, 25 bp, Homo sapien
ggaggaagagttcctcaagtggacc

SEQ ID NO: 6037413 - DNA, 25 bp, Homo sapien
acgaggaagagtccgatgaagagca

SEQ ID NO: 6037414 - DNA, 25 bp, Homo sapien
tttagagattgacgaggagttccac

SEQ ID NO: 6037415 - DNA, 25 bp, Homo sapien
ccaccacggtggagttcgactcgga

SEQ ID NO: 6037416 - DNA, 25 bp, Homo sapien
agggcaacgacgaagatgacgacga

SEQ ID NO: 6037417 - DNA, 25 bp, Homo sapien
aacgtgagcagtctgtcgcggtcga

SEQ ID NO: 6037418 - DNA, 25 bp, Homo sapien
atatggacgaggaagagtccgatga

SEQ ID NO: 6037419 - DNA, 25 bp, Homo sapien
acgacgacggcgacggcgacgatat

SEQ ID NO: 6037420 - DNA, 25 bp, Homo sapien
agccatgcaactactcaccaagggt

SEQ ID NO: 6037421 - DNA, 25 bp, Homo sapien
cggtggagttcgactcggagcagat

SEQ ID NO: 6037422 - DNA, 25 bp, Homo sapien
cacaatcgaatctacacagcatcaa

SEQ ID NO: 6037423 - DNA, 25 bp, Homo sapien
atggaaaggggccacagggaaagag

SEQ ID NO: 6037424 - DNA, 25 bp, Homo sapien
gtgttacccaacttttgtaccagca

SEQ ID NO: 6037425 - DNA, 25 bp, Homo sapien
ctagactccagcaagccctggatag

SEQ ID NO: 6037426 - DNA, 25 bp, Homo sapien
gtcagagccatgcaactactcacca

SEQ ID NO: 6037427 - DNA, 25 bp, Homo sapien
cgacgatatggacgaggaagagtcc

SEQ ID NO: 6037428 - DNA, 25 bp, Homo sapien
ggccacgaaaacgaagacgtgtctc

SEQ ID NO: 6037429 - DNA, 25 bp, Homo sapien
atgtggattctgaagaggaaggtga

SEQ ID NO: 6037430 - DNA, 25 bp, Homo sapien
ctggagcaactcgacggaggctacg

SEQ ID NO: 6037431 - DNA, 25 bp, Homo sapien
acggaacacaatcgaatctacacag

SEQ ID NO: 6037432 - DNA, 25 bp, Homo sapien
ctacgatctgggcatgaaagtgtta

SEQ ID NO: 6037433 - DNA, 25 bp, Homo sapien
tgaggcaggacccctcgatgcggtt

SEQ ID NO: 6037434 - DNA, 25 bp, Homo sapien
cgaggagttccactacgatctgggc

SEQ ID NO: 6037435 - DNA, 25 bp, Homo sapien
aagagttcctcaagtggaccgtgtt

SEQ ID NO: 6037436 - DNA, 25 bp, Homo sapien
gcaagtgagcgatatagagaacgat

SEQ ID NO: 6037437 - DNA, 25 bp, Homo sapien
gacggcgacggcgacgatatggacg

SEQ ID NO: 6037438 - DNA, 25 bp, Homo sapien
gaagagtccgatgaagagcaagtga

SEQ ID NO: 6037439 - DNA, 25 bp, Homo sapien
atccgtggccacgaaaacgaagacg

SEQ ID NO: 6037440 - DNA, 25 bp, Homo sapien
cccaacttttgtaccagcataaacg

SEQ ID NO: 6037441 - DNA, 25 bp, Homo sapien
aaggtgagggcaacgacgaagatga

SEQ ID NO: 6037442 - DNA, 25 bp, Homo sapien
attctgaagaggaaggtgagggcaa

SEQ ID NO: 6037443 - DNA, 25 bp, Homo sapien
gacggaggctacgtcagagccatgc

SEQ ID NO: 6037444 - DNA, 25 bp, Homo sapien
tgaagagcaagtgagcgatatagag

SEQ ID NO: 6037445 - DNA, 25 bp, Homo sapien
cgaatctacacagcatcaaaacgga

SEQ ID NO: 6037446 - DNA, 25 bp, Homo sapien
aagaaaagaggcgaacgagactcaa

SEQ ID NO: 6037447 - DNA, 25 bp, Homo sapien
gtccgatgaagagcaagtgagcgat

SEQ ID NO: 6037448 - DNA, 25 bp, Homo sapien
tgcggttgagggtcgtggatgtgga

SEQ ID NO: 6037449 - DNA, 25 bp, Homo sapien
ggctacgtcagagccatgcaactac

SEQ ID NO: 6037450 - DNA, 25 bp, Homo sapien
ataaacgaagtgctagactccagca

SEQ ID NO: 6037451 - DNA, 25 bp, Homo sapien
tggatagccaagtacgagatcagca

SEQ ID NO: 6037452 - DNA, 25 bp, Homo sapien
agtaagggaggaagagttcctcaag

SEQ ID NO: 6037453 - DNA, 25 bp, Homo sapien
gaacgatttagagattgacgaggag

SEQ ID NO: 6037454 - DNA, 25 bp, Homo sapien
agggtgccggcgcagaggccgggaa

SEQ ID NO: 6037455 - DNA, 25 bp, Homo sapien
agtggaccgtgttgaggcaggaccc

SEQ ID NO: 6037456 - DNA, 25 bp, Homo sapien
agcagtctgtcgcggtcgagaagca

SEQ ID NO: 6037457 - DNA, 25 bp, Homo sapien
agttcgactcggagcagatggaaag

SEQ ID NO: 6037458 - DNA, 25 bp, Homo sapien
tctgggcatgaaagtgttacccaac

SEQ ID NO: 6037459 - DNA, 25 bp, Homo sapien
agaagcagggccagtagccgcagca

SEQ ID NO: 6037460 - DNA, 25 bp, Homo sapien
gaagtgctagactccagcaagccct

SEQ ID NO: 6037461 - DNA, 25 bp, Homo sapien
gtgtctctggagcaactcgacggag

SEQ ID NO: 6037462 - DNA, 25 bp, Homo sapien
caactcgacggaggctacgtcagag

SEQ ID NO: 6037463 - DNA, 25 bp, Homo sapien
aggacccctcgatgcggttgagggt

SEQ ID NO: 6037464 - DNA, 25 bp, Homo sapien
ccacagggaaagaggtcgtagcaag

SEQ ID NO: 6037465 - DNA, 25 bp, Homo sapien
atcagcatccgtggccacgaaaacg

SEQ ID NO: 6037466 - DNA, 25 bp, Homo sapien
gcaactactcaccaagggtgccggc

SEQ ID NO: 6037467 - DNA, 25 bp, Homo sapien
agaggcgaacgagactcaaacgtga

SEQ ID NO: 6037468 - DNA, 25 bp, Homo sapien
agggccagtagccgcagcagagtaa

SEQ ID NO: 6037469 - DNA, 25 bp, Homo sapien
agcaagaagaaaagaggcgaacgag

SEQ ID NO: 6037470 - DNA, 25 bp, Homo sapien
tccagcaagccctggatagccaagt

SEQ ID NO: 6037471 - DNA, 25 bp, Homo sapien
cctcgatgcggttgagggtcgtgga

SEQ ID NO: 6037472 - DNA, 25 bp, Homo sapien
gaacgagactcaaacgtgagcagtc

SEQ ID NO: 6037473 - DNA, 25 bp, Homo sapien
gagcgatatagagaacgatttagag

SEQ ID NO: 6037474 - DNA, 25 bp, Homo sapien
catgaaagtgttacccaacttttgt

SEQ ID NO: 6037475 - DNA, 25 bp, Homo sapien
gattgacgaggagttccactacgat

SEQ ID NO: 6037476 - DNA, 25 bp, Homo sapien
actcaccaagggtgccggcgcagag

SEQ ID NO: 6037477 - DNA, 25 bp, Homo sapien
tacacagcatcaaaacggaaacgcc

SEQ ID NO: 6037478 - DNA, 25 bp, Homo sapien
aagaggaaggtgagggcaacgacga

SEQ ID NO: 6037479 - DNA, 25 bp, Homo sapien
gcagcagagtaagggaggaagagtt

SEQ ID NO: 6037480 - DNA, 25 bp, Homo sapien
tatagagaacgatttagagattgac

SEQ ID NO: 6037481 - DNA, 25 bp, Homo sapien
accagcataaacgaagtgctagact

SEQ ID NO: 6037482 - DNA, 25 bp, Homo sapien
acgcccaccacggtggagttcgact

SEQ ID NO: 6037483 - DNA, 25 bp, Homo sapien
gaaaacgaagacgtgtctctggagc

SEQ ID NO: 6037484 - DNA, 25 bp, Homo sapien
gccaagtacgagatcagcatccgtg

SEQ ID NO: 6037485 - DNA, 25 bp, Homo sapien
gactcaaacgtgagcagtctgtcgc

SEQ ID NO: 6037486 - DNA, 25 bp, Homo sapien
tacgagatcagcatccgtggccacg

SEQ ID NO: 6037487 - DNA, 25 bp, Homo sapien
tcctcaagtggaccgtgttgaggca

SEQ ID NO: 6037488 - DNA, 25 bp, Homo sapien
ccgtgttgaggcaggacccctcgat

SEQ ID NO: 6037489 - DNA, 25 bp, Homo sapien
aagatgacgacgacggcgacggcga

SEQ ID NO: 6037490 - DNA, 25 bp, Homo sapien
gttccactacgatctgggcatgaaa

SEQ ID NO: 6037491 - DNA, 25 bp, Homo sapien
cggtcgagaagcagggccagtagcc

SEQ ID NO: 6037492 - DNA, 25 bp, Homo sapien
gaagacgtgtctctggagcaactcg

SEQ ID NO: 6037493 - DNA, 25 bp, Homo sapien
cgacggcgacgatatggacgaggaa

SEQ ID NO: 6037494 - DNA, 25 bp, Homo sapien
acgacgaagatgacgacgacggcga

SEQ ID NO: 6037495 - DNA, 25 bp, Homo sapien
cagacgaagttctgcagagtggaca

SEQ ID NO: 6037496 - DNA, 25 bp, Homo sapien
cgcccgcgacgcagtcaaacaggtg

SEQ ID NO: 6037497 - DNA, 25 bp, Homo sapien
cagtggacaatgtagacggtgtctc

SEQ ID NO: 6037498 - DNA, 25 bp, Homo sapien
acgacgacgtcgaggtcgtcgagca

SEQ ID NO: 6037499 - DNA, 25 bp, Homo sapien
acttggctatccagggcttgctgga

SEQ ID NO: 6037500 - DNA, 25 bp, Homo sapien
cgccggcacccttggtgagtagttg

SEQ ID NO: 6037501 - DNA, 25 bp, Homo sapien
gtcaaggagaggacgacgacgtcga

SEQ ID NO: 6037502 - DNA, 25 bp, Homo sapien
accgagagggagcagcacagggcga

SEQ ID NO: 6037503 - DNA, 25 bp, Homo sapien
gtggacaggatgaccgagagggagc

SEQ ID NO: 6037504 - DNA, 25 bp, Homo sapien
gcacttcgtttatgctggtacaaaa

SEQ ID NO: 6037505 - DNA, 25 bp, Homo sapien
gcgaggatgggcacagagcagacga

SEQ ID NO: 6037506 - DNA, 25 bp, Homo sapien
cgtttatgctggtacaaaagttggg

SEQ ID NO: 6037507 - DNA, 25 bp, Homo sapien
gggtaacactttcatgcccagatcg

SEQ ID NO: 6037508 - DNA, 25 bp, Homo sapien
ggatgggtcaaggagaggacgacga

SEQ ID NO: 6037509 - DNA, 25 bp, Homo sapien
cgtaggtggactcgctgctcaggtc

SEQ ID NO: 6037510 - DNA, 25 bp, Homo sapien
cagcacagggcgactggcttgaggc

SEQ ID NO: 6037511 - DNA, 25 bp, Homo sapien
acaggtgcatgacgtgctttctgat

SEQ ID NO: 6037512 - DNA, 25 bp, Homo sapien
ttctgattctggcaacgttggcgaa

SEQ ID NO: 6037513 - DNA, 25 bp, Homo sapien
gcaacgttggcgaacatctgggagt

SEQ ID NO: 6037514 - DNA, 25 bp, Homo sapien
gggtacggatgggtcaaggagagga

SEQ ID NO: 6037515 - DNA, 25 bp, Homo sapien
catgagataggtcagggcgtaggtg

SEQ ID NO: 6037516 - DNA, 25 bp, Homo sapien
cgtagcctccgtcgagttgctccag

SEQ ID NO: 6037517 - DNA, 25 bp, Homo sapien
cgacgcagtcaaacaggtgcatgac

SEQ ID NO: 6037518 - DNA, 25 bp, Homo sapien
tgctgatctcgtacttggctatcca

SEQ ID NO: 6037519 - DNA, 25 bp, Homo sapien
gcatgacgtgctttctgattctggc

SEQ ID NO: 6037520 - DNA, 25 bp, Homo sapien
ctgcgcccatgagataggtcagggc

SEQ ID NO: 6037521 - DNA, 25 bp, Homo sapien
ccggcctctgcgccggcacccttgg

SEQ ID NO: 6037522 - DNA, 25 bp, Homo sapien
ttgaggccgtggatcatctcgttga

SEQ ID NO: 6037523 - DNA, 25 bp, Homo sapien
atgggcacagagcagacgaagttct

SEQ ID NO: 6037524 - DNA, 25 bp, Homo sapien
ttggcgaacatctgggagtcgtccg

SEQ ID NO: 6037525 - DNA, 25 bp, Homo sapien
acgtcgaggtcgtcgagcacgcccg

SEQ ID NO: 6037526 - DNA, 25 bp, Homo sapien
ggtcgtcgagcacgcccgcgacgca

SEQ ID NO: 6037527 - DNA, 25 bp, Homo sapien
cgttttcgtggccacggatgctgat

SEQ ID NO: 6037528 - DNA, 25 bp, Homo sapien
cactttcatgcccagatcgtagtgg

SEQ ID NO: 6037529 - DNA, 25 bp, Homo sapien
tgtctccctggttgacagctgcgcc

SEQ ID NO: 6037530 - DNA, 25 bp, Homo sapien
ttcagcttctttctaaccgcgagga

SEQ ID NO: 6037531 - DNA, 25 bp, Homo sapien
agggagcagcacagggcgactggct

SEQ ID NO: 6037532 - DNA, 25 bp, Homo sapien
tccgtgtagaggatgaaggaccttt

SEQ ID NO: 6037533 - DNA, 25 bp, Homo sapien
cgtcttcgttttcgtggccacggat

SEQ ID NO: 6037534 - DNA, 25 bp, Homo sapien
ggctcccagtggacaatgtagacgg

SEQ ID NO: 6037535 - DNA, 25 bp, Homo sapien
cgtgggcttcgagggctcccagtgg

SEQ ID NO: 6037536 - DNA, 25 bp, Homo sapien
tgggagtcgtccgtgggcttcgagg

SEQ ID NO: 6037537 - DNA, 25 bp, Homo sapien
tgctggtacaaaagttgggtaacac

SEQ ID NO: 6037538 - DNA, 25 bp, Homo sapien
cacggatgctgatctcgtacttggc

SEQ ID NO: 6037539 - DNA, 25 bp, Homo sapien
gagacacgtcttcgttttcgtggcc

SEQ ID NO: 6037540 - DNA, 25 bp, Homo sapien
tcatctcgttgaggaggtgttttgg

SEQ ID NO: 6037541 - DNA, 25 bp, Homo sapien
tcagggcgtaggtggactcgctgct

SEQ ID NO: 6037542 - DNA, 25 bp, Homo sapien
tcgtccgtgggcttcgagggctccc

SEQ ID NO: 6037543 - DNA, 25 bp, Homo sapien
ctctgacgtagcctccgtcgagttg

SEQ ID NO: 6037544 - DNA, 25 bp, Homo sapien
tggtgagtagttgcatggctctgac

SEQ ID NO: 6037545 - DNA, 25 bp, Homo sapien
gagcacgcccgcgacgcagtcaaac

SEQ ID NO: 6037546 - DNA, 25 bp, Homo sapien
tagaggatgaaggacctttggttcc

SEQ ID NO: 6037547 - DNA, 25 bp, Homo sapien
tgctggagtctagcacttcgtttat

SEQ ID NO: 6037548 - DNA, 25 bp, Homo sapien
gtagttgcatggctctgacgtagcc

SEQ ID NO: 6037549 - DNA, 25 bp, Homo sapien
cacccttggtgagtagttgcatggc

SEQ ID NO: 6037550 - DNA, 25 bp, Homo sapien
agggcgactggcttgaggccgtgga

SEQ ID NO: 6037551 - DNA, 25 bp, Homo sapien
tgaggaggtgttttgggtacggatg

SEQ ID NO: 6037552 - DNA, 25 bp, Homo sapien
ctaaccgcgaggatgggcacagagc

SEQ ID NO: 6037553 - DNA, 25 bp, Homo sapien
tagacggtgtctccctggttgacag

SEQ ID NO: 6037554 - DNA, 25 bp, Homo sapien
ccgtggatcatctcgttgaggaggt

SEQ ID NO: 6037555 - DNA, 25 bp, Homo sapien
aagttctgcagagtggacaggatga

SEQ ID NO: 6037556 - DNA, 25 bp, Homo sapien
cgtggccacggatgctgatctcgta

SEQ ID NO: 6037557 - DNA, 25 bp, Homo sapien
gcatggctctgacgtagcctccgtc

SEQ ID NO: 6037558 - DNA, 25 bp, Homo sapien
gctccagagacacgtcttcgttttc

SEQ ID NO: 6037559 - DNA, 25 bp, Homo sapien
tcgctgctcaggtccgtgtagagga

SEQ ID NO: 6037560 - DNA, 25 bp, Homo sapien
aacatctgggagtcgtccgtgggct

SEQ ID NO: 6037561 - DNA, 25 bp, Homo sapien
agtctagcacttcgtttatgctggt

SEQ ID NO: 6037562 - DNA, 25 bp, Homo sapien
ctctgcgccggcacccttggtgagt

SEQ ID NO: 6037563 - DNA, 25 bp, Homo sapien
tggttcccggcctctgcgccggcac

SEQ ID NO: 6037564 - DNA, 25 bp, Homo sapien
aggatgaccgagagggagcagcaca

SEQ ID NO: 6037565 - DNA, 25 bp, Homo sapien
tgcagagtggacaggatgaccgaga

SEQ ID NO: 6037566 - DNA, 25 bp, Homo sapien
cgagttgctccagagacacgtcttc

SEQ ID NO: 6037567 - DNA, 25 bp, Homo sapien
ctatccagggcttgctggagtctag

SEQ ID NO: 6037568 - DNA, 25 bp, Homo sapien
actggcttgaggccgtggatcatct

SEQ ID NO: 6037569 - DNA, 25 bp, Homo sapien
cgtgctttctgattctggcaacgtt

SEQ ID NO: 6037570 - DNA, 25 bp, Homo sapien
ataggtcagggcgtaggtggactcg

SEQ ID NO: 6037571 - DNA, 25 bp, Homo sapien
gtggactcgctgctcaggtccgtgt

SEQ ID NO: 6037572 - DNA, 25 bp, Homo sapien
acagagcagacgaagttctgcagag

SEQ ID NO: 6037573 - DNA, 25 bp, Homo sapien
ttcgagggctcccagtggacaatgt

SEQ ID NO: 6037574 - DNA, 25 bp, Homo sapien
catgcccagatcgtagtggaactcc

SEQ ID NO: 6037575 - DNA, 25 bp, Homo sapien
aagttgggtaacactttcatgccca

SEQ ID NO: 6037576 - DNA, 25 bp, Homo sapien
gacagctgcgcccatgagataggtc

SEQ ID NO: 6037577 - DNA, 25 bp, Homo sapien
ctccgtcgagttgctccagagacac

SEQ ID NO: 6037578 - DNA, 25 bp, Homo sapien
ttctttctaaccgcgaggatgggca

SEQ ID NO: 6037579 - DNA, 25 bp, Homo sapien
gagaggacgacgacgtcgaggtcgt

SEQ ID NO: 6037580 - DNA, 25 bp, Homo sapien
acaatgtagacggtgtctccctggt

SEQ ID NO: 6037581 - DNA, 25 bp, Homo sapien
attctggcaacgttggcgaacatct

SEQ ID NO: 6037582 - DNA, 25 bp, Homo sapien
agtcaaacaggtgcatgacgtgctt

SEQ ID NO: 6037583 - DNA, 25 bp, Homo sapien
acaaaagttgggtaacactttcatg

SEQ ID NO: 6037584 - DNA, 25 bp, Homo sapien
ctcaggtccgtgtagaggatgaagg

SEQ ID NO: 6037585 - DNA, 25 bp, Homo sapien
agggcttgctggagtctagcacttc

SEQ ID NO: 6037586 - DNA, 25 bp, Homo sapien
tctcgtacttggctatccagggctt

SEQ ID NO: 6037587 - DNA, 25 bp, Homo sapien
ctggttgacagctgcgcccatgaga

SEQ ID NO: 6037588 - DNA, 25 bp, Homo sapien
gcgaattggtctccaattctggaat

SEQ ID NO: 6037589 - DNA, 25 bp, Homo sapien
gcctacctaatgtatcgttatggat

SEQ ID NO: 6037590 - DNA, 25 bp, Homo sapien
caagcaggactctcgagatctgtaa

SEQ ID NO: 6037591 - DNA, 25 bp, Homo sapien
gccaaacgagaatttcatggaacaa

SEQ ID NO: 6037592 - DNA, 25 bp, Homo sapien
gctgtttttgctcattgtcaagcag

SEQ ID NO: 6037593 - DNA, 25 bp, Homo sapien
gcaatacttcgatgaaacgaaccga

SEQ ID NO: 6037594 - DNA, 25 bp, Homo sapien
ggaacaattacatctctttgagaaa

SEQ ID NO: 6037595 - DNA, 25 bp, Homo sapien
atagtagcctacctaatgtatcgtt

SEQ ID NO: 6037596 - DNA, 25 bp, Homo sapien
agctgaagcaatctatcaagttaga

SEQ ID NO: 6037597 - DNA, 25 bp, Homo sapien
tctaataaggaaaggttacacgcta

SEQ ID NO: 6037598 - DNA, 25 bp, Homo sapien
attcattgatcaatgcttgttcccc

SEQ ID NO: 6037599 - DNA, 25 bp, Homo sapien
gaaccgattcattgatcaatgcttg

SEQ ID NO: 6037600 - DNA, 25 bp, Homo sapien
accgagtgttgagccaaacgagaat

SEQ ID NO: 6037601 - DNA, 25 bp, Homo sapien
tggcggaatccgtccaattattgac

SEQ ID NO: 6037602 - DNA, 25 bp, Homo sapien
cgctgtcaagaggaagaaaccgagt

SEQ ID NO: 6037603 - DNA, 25 bp, Homo sapien
tgttgagccaaacgagaatttcatg

SEQ ID NO: 6037604 - DNA, 25 bp, Homo sapien
gactgatgtgctgcaatacttcgat

SEQ ID NO: 6037605 - DNA, 25 bp, Homo sapien
aggcatatatcttggcggaatccgt

SEQ ID NO: 6037606 - DNA, 25 bp, Homo sapien
tctttctgttatcaaattccaggtc

SEQ ID NO: 6037607 - DNA, 25 bp, Homo sapien
tgtgctgcaatacttcgatgaaacg

SEQ ID NO: 6037608 - DNA, 25 bp, Homo sapien
tctgtaaccttcatagtagcctacc

SEQ ID NO: 6037609 - DNA, 25 bp, Homo sapien
tatgcacgctgtcaagaggaagaaa

SEQ ID NO: 6037610 - DNA, 25 bp, Homo sapien
atgcttgttccccaatgaagttgag

SEQ ID NO: 6037611 - DNA, 25 bp, Homo sapien
tacatctctttgagaaaatgggtgg

SEQ ID NO: 6037612 - DNA, 25 bp, Homo sapien
tggtctccaattctggaatgtttaa

SEQ ID NO: 6037613 - DNA, 25 bp, Homo sapien
tacacgctaaaaaacatacccatcg

SEQ ID NO: 6037614 - DNA, 25 bp, Homo sapien
tgatgtgactgatgtgctgcaatac

SEQ ID NO: 6037615 - DNA, 25 bp, Homo sapien
ctatcaagttagatccatcgggcag

SEQ ID NO: 6037616 - DNA, 25 bp, Homo sapien
cttcgatgaaacgaaccgattcatt

SEQ ID NO: 6037617 - DNA, 25 bp, Homo sapien
ccaggtcattccagagtatctaata

SEQ ID NO: 6037618 - DNA, 25 bp, Homo sapien
catattctttctgttatcaaattcc

SEQ ID NO: 6037619 - DNA, 25 bp, Homo sapien
agcaatctatcaagttagatccatc

SEQ ID NO: 6037620 - DNA, 25 bp, Homo sapien
catcgatgatgatgatgtgactgat

SEQ ID NO: 6037621 - DNA, 25 bp, Homo sapien
aatggctatgcacgctgtcaagagg

SEQ ID NO: 6037622 - DNA, 25 bp, Homo sapien
tttgctcattgtcaagcaggactct

SEQ ID NO: 6037623 - DNA, 25 bp, Homo sapien
ctaaaaaacatacccatcgatgatg

SEQ ID NO: 6037624 - DNA, 25 bp, Homo sapien
ggtgcagaatttaacattactcata

SEQ ID NO: 6037625 - DNA, 25 bp, Homo sapien
atccatcgggcagcgaattggtctc

SEQ ID NO: 6037626 - DNA, 25 bp, Homo sapien
tcgagatctgtaaccttcatagtag

SEQ ID NO: 6037627 - DNA, 25 bp, Homo sapien
tgttccccaatgaagttgagtattc

SEQ ID NO: 6037628 - DNA, 25 bp, Homo sapien
atttcgacaacccagcctataagca

SEQ ID NO: 6037629 - DNA, 25 bp, Homo sapien
cgcccagattagtagatttcaagaa

SEQ ID NO: 6037630 - DNA, 25 bp, Homo sapien
tgatcaatgcttgttccccaatgaa

SEQ ID NO: 6037631 - DNA, 25 bp, Homo sapien
ctaatgtatcgttatggattgtcac

SEQ ID NO: 6037632 - DNA, 25 bp, Homo sapien
ataagcagtggaagctgaagcaatc

SEQ ID NO: 6037633 - DNA, 25 bp, Homo sapien
tctttgagaaaatgggtggagattt

SEQ ID NO: 6037634 - DNA, 25 bp, Homo sapien
tccaattattgaccacagaccattg

SEQ ID NO: 6037635 - DNA, 25 bp, Homo sapien
caaattccaggtcattccagagtat

SEQ ID NO: 6037636 - DNA, 25 bp, Homo sapien
ccattgggtgcagaatttaacatta

SEQ ID NO: 6037637 - DNA, 25 bp, Homo sapien
gattagtagatttcaagaagaaacc

SEQ ID NO: 6037638 - DNA, 25 bp, Homo sapien
agtggaagctgaagcaatctatcaa

SEQ ID NO: 6037639 - DNA, 25 bp, Homo sapien
cagagtatctaataaggaaaggtta

SEQ ID NO: 6037640 - DNA, 25 bp, Homo sapien
tatcgttatggattgtcactatcaa

SEQ ID NO: 6037641 - DNA, 25 bp, Homo sapien
actatcaatggctatgcacgctgtc

SEQ ID NO: 6037642 - DNA, 25 bp, Homo sapien
agtattcgcccagattagtagattt

SEQ ID NO: 6037643 - DNA, 25 bp, Homo sapien
tttaacattactcatattctttctg

SEQ ID NO: 6037644 - DNA, 25 bp, Homo sapien
gagattttgtcgatttcgacaaccc

SEQ ID NO: 6037645 - DNA, 25 bp, Homo sapien
ccacaacgtggtgctgtttttgctc

SEQ ID NO: 6037646 - DNA, 25 bp, Homo sapien
acaacccagcctataagcagtggaa

SEQ ID NO: 6037647 - DNA, 25 bp, Homo sapien
ttgtcgatttcgacaacccagccta

SEQ ID NO: 6037648 - DNA, 25 bp, Homo sapien
atatcttggcggaatccgtccaatt

SEQ ID NO: 6037649 - DNA, 25 bp, Homo sapien
agttaccaggatattaggaggcata

SEQ ID NO: 6037650 - DNA, 25 bp, Homo sapien
cagcctataagcagtggaagctgaa

SEQ ID NO: 6037651 - DNA, 25 bp, Homo sapien
aatccgtccaattattgaccacaga

SEQ ID NO: 6037652 - DNA, 25 bp, Homo sapien
cattgtcaagcaggactctcgagat

SEQ ID NO: 6037653 - DNA, 25 bp, Homo sapien
ttcaagaagaaaccacaacgtggtg

SEQ ID NO: 6037654 - DNA, 25 bp, Homo sapien
tattgaccacagaccattgggtgca

SEQ ID NO: 6037655 - DNA, 25 bp, Homo sapien
cattactcatattctttctgttatc

SEQ ID NO: 6037656 - DNA, 25 bp, Homo sapien
ccaatgaagttgagtattcgcccag

SEQ ID NO: 6037657 - DNA, 25 bp, Homo sapien
cgggcagcgaattggtctccaattc

SEQ ID NO: 6037658 - DNA, 25 bp, Homo sapien
tgaaacgaaccgattcattgatcaa

SEQ ID NO: 6037659 - DNA, 25 bp, Homo sapien
tatggattgtcactatcaatggcta

SEQ ID NO: 6037660 - DNA, 25 bp, Homo sapien
ttgtcactatcaatggctatgcacg

SEQ ID NO: 6037661 - DNA, 25 bp, Homo sapien
catacccatcgatgatgatgatgtg

SEQ ID NO: 6037662 - DNA, 25 bp, Homo sapien
tgatgatgatgtgactgatgtgctg

SEQ ID NO: 6037663 - DNA, 25 bp, Homo sapien
aagttgagtattcgcccagattagt

SEQ ID NO: 6037664 - DNA, 25 bp, Homo sapien
caagaggaagaaaccgagtgttgag

SEQ ID NO: 6037665 - DNA, 25 bp, Homo sapien
gaagaaaccgagtgttgagccaaac

SEQ ID NO: 6037666 - DNA, 25 bp, Homo sapien
gtagatttcaagaagaaaccacaac

SEQ ID NO: 6037667 - DNA, 25 bp, Homo sapien
tttcatggaacaattacatctcttt

SEQ ID NO: 6037668 - DNA, 25 bp, Homo sapien
aagaaaccacaacgtggtgctgttt

SEQ ID NO: 6037669 - DNA, 25 bp, Homo sapien
agttagatccatcgggcagcgaatt

SEQ ID NO: 6037670 - DNA, 25 bp, Homo sapien
cgagaatttcatggaacaattacat

SEQ ID NO: 6037671 - DNA, 25 bp, Homo sapien
caggatattaggaggcatatatctt

SEQ ID NO: 6037672 - DNA, 25 bp, Homo sapien
tgggtggagattttgtcgatttcga

SEQ ID NO: 6037673 - DNA, 25 bp, Homo sapien
ccacagaccattgggtgcagaattt

SEQ ID NO: 6037674 - DNA, 25 bp, Homo sapien
ccaattctggaatgtttaaagattc

SEQ ID NO: 6037675 - DNA, 25 bp, Homo sapien
agaaaatgggtggagattttgtcga

SEQ ID NO: 6037676 - DNA, 25 bp, Homo sapien
tgttatcaaattccaggtcattcca

SEQ ID NO: 6037677 - DNA, 25 bp, Homo sapien
cgtggtgctgtttttgctcattgtc

SEQ ID NO: 6037678 - DNA, 25 bp, Homo sapien
accttcatagtagcctacctaatgt

SEQ ID NO: 6037679 - DNA, 25 bp, Homo sapien
attaggaggcatatatcttggcgga

SEQ ID NO: 6037680 - DNA, 25 bp, Homo sapien
ggactctcgagatctgtaaccttca

SEQ ID NO: 6037681 - DNA, 25 bp, Homo sapien
cattccagagtatctaataaggaaa

SEQ ID NO: 6037682 - DNA, 25 bp, Homo sapien
gcaaagcagtggattgtaagggaaa

SEQ ID NO: 6037683 - DNA, 25 bp, Homo sapien
gatcctttccagttgtaaccgccaa

SEQ ID NO: 6037684 - DNA, 25 bp, Homo sapien
attggagaccaattcgctgcccgat

SEQ ID NO: 6037685 - DNA, 25 bp, Homo sapien
gggatgacccacttaccacaactgc

SEQ ID NO: 6037686 - DNA, 25 bp, Homo sapien
taacttgatagattgcttcagcttc

SEQ ID NO: 6037687 - DNA, 25 bp, Homo sapien
gattgtaagggaaattgatccactt

SEQ ID NO: 6037688 - DNA, 25 bp, Homo sapien
tttctcaaagagatgtaattgttcc

SEQ ID NO: 6037689 - DNA, 25 bp, Homo sapien
ctccgaatctttaaacattccagaa

SEQ ID NO: 6037690 - DNA, 25 bp, Homo sapien
tatccaagtcttgcgacgactccga

SEQ ID NO: 6037691 - DNA, 25 bp, Homo sapien
ttaatttatccaagtcttgcgacga

SEQ ID NO: 6037692 - DNA, 25 bp, Homo sapien
atctccacccattttctcaaagaga

SEQ ID NO: 6037693 - DNA, 25 bp, Homo sapien
aatttgcttgtgactcttgaatatc

SEQ ID NO: 6037694 - DNA, 25 bp, Homo sapien
ctgcggtgaccttgctcttctcagc

SEQ ID NO: 6037695 - DNA, 25 bp, Homo sapien
gaatatcaataatacgatgggagtt

SEQ ID NO: 6037696 - DNA, 25 bp, Homo sapien
tccttacttggtgggtcatgcgcga

SEQ ID NO: 6037697 - DNA, 25 bp, Homo sapien
gtcttgcgacgactccgaatcttta

SEQ ID NO: 6037698 - DNA, 25 bp, Homo sapien
cgacgactccgaatctttaaacatt

SEQ ID NO: 6037699 - DNA, 25 bp, Homo sapien
attgttccatgaaattctcgtttgg

SEQ ID NO: 6037700 - DNA, 25 bp, Homo sapien
gcctggacatgaaaacttcccttct

SEQ ID NO: 6037701 - DNA, 25 bp, Homo sapien
caactgcacctagatcctttccagt

SEQ ID NO: 6037702 - DNA, 25 bp, Homo sapien
ccaatttggttctgcacttcttaca

SEQ ID NO: 6037703 - DNA, 25 bp, Homo sapien
gatgattccttacttggtgggtcat

SEQ ID NO: 6037704 - DNA, 25 bp, Homo sapien
atagcggggatgacccacttaccac

SEQ ID NO: 6037705 - DNA, 25 bp, Homo sapien
aaacttcccttctaactcttgcttg

SEQ ID NO: 6037706 - DNA, 25 bp, Homo sapien
aattgatccactttactagtttgca

SEQ ID NO: 6037707 - DNA, 25 bp, Homo sapien
gcccgatggatctaacttgatagat

SEQ ID NO: 6037708 - DNA, 25 bp, Homo sapien
aagtgtccctctgatgattccttac

SEQ ID NO: 6037709 - DNA, 25 bp, Homo sapien
gaaatcgacaaaatctccacccatt

SEQ ID NO: 6037710 - DNA, 25 bp, Homo sapien
catccattttaaaggttcgatgaaa

SEQ ID NO: 6037711 - DNA, 25 bp, Homo sapien
acccattttctcaaagagatgtaat

SEQ ID NO: 6037712 - DNA, 25 bp, Homo sapien
cccttctaactcttgcttgccttgt

SEQ ID NO: 6037713 - DNA, 25 bp, Homo sapien
atctttaaacattccagaattggag

SEQ ID NO: 6037714 - DNA, 25 bp, Homo sapien
tagttcaggttgcatccattttaaa

SEQ ID NO: 6037715 - DNA, 25 bp, Homo sapien
ccactgcttataggctgggttgtcg

SEQ ID NO: 6037716 - DNA, 25 bp, Homo sapien
gcagtggattgtaagggaaattgat

SEQ ID NO: 6037717 - DNA, 25 bp, Homo sapien
gagagcaatttgcttgtgactcttg

SEQ ID NO: 6037718 - DNA, 25 bp, Homo sapien
tggatctaacttgatagattgcttc

SEQ ID NO: 6037719 - DNA, 25 bp, Homo sapien
gccaactttacttgaacagcctgga

SEQ ID NO: 6037720 - DNA, 25 bp, Homo sapien
tcttacatctcactgcggtgacctt

SEQ ID NO: 6037721 - DNA, 25 bp, Homo sapien
aagggaaattgatccactttactag

SEQ ID NO: 6037722 - DNA, 25 bp, Homo sapien
acatgaaaacttcccttctaactct

SEQ ID NO: 6037723 - DNA, 25 bp, Homo sapien
aaccatgttgggcaaagcagtggat

SEQ ID NO: 6037724 - DNA, 25 bp, Homo sapien
gaaagatgtagataacgccaatttg

SEQ ID NO: 6037725 - DNA, 25 bp, Homo sapien
gatgtaattgttccatgaaattctc

SEQ ID NO: 6037726 - DNA, 25 bp, Homo sapien
gccctcttgatgaagtgtccctctg

SEQ ID NO: 6037727 - DNA, 25 bp, Homo sapien
gtggatagcggggatgacccactta

SEQ ID NO: 6037728 - DNA, 25 bp, Homo sapien
ttactagtttgcaggtggatagcgg

SEQ ID NO: 6037729 - DNA, 25 bp, Homo sapien
aaacattccagaattggagaccaat

SEQ ID NO: 6037730 - DNA, 25 bp, Homo sapien
tgtagataacgccaatttggttctg

SEQ ID NO: 6037731 - DNA, 25 bp, Homo sapien
tctcagcttcagttaatttatccaa

SEQ ID NO: 6037732 - DNA, 25 bp, Homo sapien
tgcacttcttacatctcactgcggt

SEQ ID NO: 6037733 - DNA, 25 bp, Homo sapien
gccttgtagttcaggttgcatccat

SEQ ID NO: 6037734 - DNA, 25 bp, Homo sapien
gacaaaatctccacccattttctca

SEQ ID NO: 6037735 - DNA, 25 bp, Homo sapien
aggctgggttgtcgaaatcgacaaa

SEQ ID NO: 6037736 - DNA, 25 bp, Homo sapien
gtcatgcgcgatgaaagatgtagat

SEQ ID NO: 6037737 - DNA, 25 bp, Homo sapien
ttgcttcagcttccactgcttatag

SEQ ID NO: 6037738 - DNA, 25 bp, Homo sapien
gatagattgcttcagcttccactgc

SEQ ID NO: 6037739 - DNA, 25 bp, Homo sapien
gaccaattcgctgcccgatggatct

SEQ ID NO: 6037740 - DNA, 25 bp, Homo sapien
ggttgtcgaaatcgacaaaatctcc

SEQ ID NO: 6037741 - DNA, 25 bp, Homo sapien
tgttgggcaaagcagtggattgtaa

SEQ ID NO: 6037742 - DNA, 25 bp, Homo sapien
aggttgcatccattttaaaggttcg

SEQ ID NO: 6037743 - DNA, 25 bp, Homo sapien
tacgatgggagttggcggccctctt

SEQ ID NO: 6037744 - DNA, 25 bp, Homo sapien
cacctagatcctttccagttgtaac

SEQ ID NO: 6037745 - DNA, 25 bp, Homo sapien
actcttgaatatcaataatacgatg

SEQ ID NO: 6037746 - DNA, 25 bp, Homo sapien
ttcgctgcccgatggatctaacttg

SEQ ID NO: 6037747 - DNA, 25 bp, Homo sapien
tccactttactagtttgcaggtgga

SEQ ID NO: 6037748 - DNA, 25 bp, Homo sapien
aggttcgatgaaaaaatgagagcaa

SEQ ID NO: 6037749 - DNA, 25 bp, Homo sapien
ataacgccaatttggttctgcactt

SEQ ID NO: 6037750 - DNA, 25 bp, Homo sapien
cttgtgactcttgaatatcaataat

SEQ ID NO: 6037751 - DNA, 25 bp, Homo sapien
cagttgtaaccgccaactttacttg

SEQ ID NO: 6037752 - DNA, 25 bp, Homo sapien
cttcagttaatttatccaagtcttg

SEQ ID NO: 6037753 - DNA, 25 bp, Homo sapien
acccacttaccacaactgcacctag

SEQ ID NO: 6037754 - DNA, 25 bp, Homo sapien
ttgatgaagtgtccctctgatgatt

SEQ ID NO: 6037755 - DNA, 25 bp, Homo sapien
tttacttgaacagcctggacatgaa

SEQ ID NO: 6037756 - DNA, 25 bp, Homo sapien
tgaccttgctcttctcagcttcagt

SEQ ID NO: 6037757 - DNA, 25 bp, Homo sapien
taaccgccaactttacttgaacagc

SEQ ID NO: 6037758 - DNA, 25 bp, Homo sapien
tccagaattggagaccaattcgctg

SEQ ID NO: 6037759 - DNA, 25 bp, Homo sapien
taactcttgcttgccttgtagttca

SEQ ID NO: 6037760 - DNA, 25 bp, Homo sapien
cagcttccactgcttataggctggg

SEQ ID NO: 6037761 - DNA, 25 bp, Homo sapien
tgaacagcctggacatgaaaacttc

SEQ ID NO: 6037762 - DNA, 25 bp, Homo sapien
gatgaaaaaatgagagcaatttgct

SEQ ID NO: 6037763 - DNA, 25 bp, Homo sapien
cgcgatgaaagatgtagataacgcc

SEQ ID NO: 6037764 - DNA, 25 bp, Homo sapien
cttataggctgggttgtcgaaatcg

SEQ ID NO: 6037765 - DNA, 25 bp, Homo sapien
acttggtgggtcatgcgcgatgaaa

SEQ ID NO: 6037766 - DNA, 25 bp, Homo sapien
ttaaaggttcgatgaaaaaatgaga

SEQ ID NO: 6037767 - DNA, 25 bp, Homo sapien
caataatacgatgggagttggcggc

SEQ ID NO: 6037768 - DNA, 25 bp, Homo sapien
tggttctgcacttcttacatctcac

SEQ ID NO: 6037769 - DNA, 25 bp, Homo sapien
aaaatgagagcaatttgcttgtgac

SEQ ID NO: 6037770 - DNA, 25 bp, Homo sapien
atctcactgcggtgaccttgctctt

SEQ ID NO: 6037771 - DNA, 25 bp, Homo sapien
tgctcttctcagcttcagttaattt

SEQ ID NO: 6037772 - DNA, 25 bp, Homo sapien
caaagagatgtaattgttccatgaa

SEQ ID NO: 6037773 - DNA, 25 bp, Homo sapien
ttggcggccctcttgatgaagtgtc

SEQ ID NO: 6037774 - DNA, 25 bp, Homo sapien
ttaccacaactgcacctagatcctt

SEQ ID NO: 6037775 - DNA, 25 bp, Homo sapien
ttgcttgccttgtagttcaggttgc

SEQ ID NO: 6037776 - DNA, 25 bp, Homo sapien
ccctctgatgattccttacttggtg

SEQ ID NO: 6037777 - DNA, 25 bp, Homo sapien
ctttggattttacgctgggttcgca

SEQ ID NO: 6037778 - DNA, 25 bp, Homo sapien
atgaagacttgcctgcagtgtcgcc

SEQ ID NO: 6037779 - DNA, 25 bp, Homo sapien
caaagattataaagaagccttagcc

SEQ ID NO: 6037780 - DNA, 25 bp, Homo sapien
tgatttggaatttttggaaaatgac

SEQ ID NO: 6037781 - DNA, 25 bp, Homo sapien
taaagatgttaccaaagattataaa

SEQ ID NO: 6037782 - DNA, 25 bp, Homo sapien
attttacgctgggttcgcaggtgca

SEQ ID NO: 6037783 - DNA, 25 bp, Homo sapien
cattcaagcaaacgcattctgacga

SEQ ID NO: 6037784 - DNA, 25 bp, Homo sapien
aagagttgctgcctttggattttac

SEQ ID NO: 6037785 - DNA, 25 bp, Homo sapien
ccctctagtccacgaacacatccag

SEQ ID NO: 6037786 - DNA, 25 bp, Homo sapien
gtttgctcactgctacaaagaccaa

SEQ ID NO: 6037787 - DNA, 25 bp, Homo sapien
ctacaaagaccaagctgggtggcaa

SEQ ID NO: 6037788 - DNA, 25 bp, Homo sapien
ctaggaagatgtggttccggtgcca

SEQ ID NO: 6037789 - DNA, 25 bp, Homo sapien
cagtccacaatctactttcaatatt

SEQ ID NO: 6037790 - DNA, 25 bp, Homo sapien
gagccagaaagccaaccgtgttaat

SEQ ID NO: 6037791 - DNA, 25 bp, Homo sapien
gtcgccttaccccaatgaaaaggca

SEQ ID NO: 6037792 - DNA, 25 bp, Homo sapien
tgctgcctttggattttacgctggg

SEQ ID NO: 6037793 - DNA, 25 bp, Homo sapien
gcgacagaatcattataggtttgaa

SEQ ID NO: 6037794 - DNA, 25 bp, Homo sapien
agtccacgaacacatccagtttgct

SEQ ID NO: 6037795 - DNA, 25 bp, Homo sapien
taagagactgggcattcaagcaaac

SEQ ID NO: 6037796 - DNA, 25 bp, Homo sapien
gggacacggtactctatatgatttg

SEQ ID NO: 6037797 - DNA, 25 bp, Homo sapien
aagctgggtggcaaaatgtccttat

SEQ ID NO: 6037798 - DNA, 25 bp, Homo sapien
caccggagccagaaagccaaccgtg

SEQ ID NO: 6037799 - DNA, 25 bp, Homo sapien
ctagaggcacgtgctgccttaacac

SEQ ID NO: 6037800 - DNA, 25 bp, Homo sapien
atatcgtcaagcaggtgccattata

SEQ ID NO: 6037801 - DNA, 25 bp, Homo sapien
ggtggcaaaatgtccttatgagatt

SEQ ID NO: 6037802 - DNA, 25 bp, Homo sapien
gtgcctgcaggttcatggaaaaccg

SEQ ID NO: 6037803 - DNA, 25 bp, Homo sapien
gaatcattataggtttgaaggaaat

SEQ ID NO: 6037804 - DNA, 25 bp, Homo sapien
agaggacagtccacaatctactttc

SEQ ID NO: 6037805 - DNA, 25 bp, Homo sapien
attatagtgcctgcaggttcatgga

SEQ ID NO: 6037806 - DNA, 25 bp, Homo sapien
aaggaaatgcctgaaaccgatactt

SEQ ID NO: 6037807 - DNA, 25 bp, Homo sapien
cgaacacatccagtttgctcactgc

SEQ ID NO: 6037808 - DNA, 25 bp, Homo sapien
cgctgggttcgcaggtgcagccctt

SEQ ID NO: 6037809 - DNA, 25 bp, Homo sapien
ggtgccattatagtgcctgcaggtt

SEQ ID NO: 6037810 - DNA, 25 bp, Homo sapien
tgaccaaggtagaagagttgctgcc

SEQ ID NO: 6037811 - DNA, 25 bp, Homo sapien
tccttatgagatttattaagggaca

SEQ ID NO: 6037812 - DNA, 25 bp, Homo sapien
aaaaccgctccacgcgacagaatca

SEQ ID NO: 6037813 - DNA, 25 bp, Homo sapien
cattggttaaagatgttaccaaaga

SEQ ID NO: 6037814 - DNA, 25 bp, Homo sapien
tcatggaaaaccgctccacgcgaca

SEQ ID NO: 6037815 - DNA, 25 bp, Homo sapien
agctaagggcttcaaaatatatgta

SEQ ID NO: 6037816 - DNA, 25 bp, Homo sapien
tattaagggacacggtactctatat

SEQ ID NO: 6037817 - DNA, 25 bp, Homo sapien
gtttgaaggaaatgcctgaaaccga

SEQ ID NO: 6037818 - DNA, 25 bp, Homo sapien
tactttcaatattaacgaatatcgt

SEQ ID NO: 6037819 - DNA, 25 bp, Homo sapien
ttataaagaagccttagccaccgga

SEQ ID NO: 6037820 - DNA, 25 bp, Homo sapien
ttggtgtaagagactgggcattcaa

SEQ ID NO: 6037821 - DNA, 25 bp, Homo sapien
cagcccttggtgtaagagactgggc

SEQ ID NO: 6037822 - DNA, 25 bp, Homo sapien
atatgtagaggacagtccacaatct

SEQ ID NO: 6037823 - DNA, 25 bp, Homo sapien
ccaatgaaaaggcattggttaaaga

SEQ ID NO: 6037824 - DNA, 25 bp, Homo sapien
gttcgcaggtgcagcccttggtgta

SEQ ID NO: 6037825 - DNA, 25 bp, Homo sapien
ctccacgcgacagaatcattatagg

SEQ ID NO: 6037826 - DNA, 25 bp, Homo sapien
acaatctactttcaatattaacgaa

SEQ ID NO: 6037827 - DNA, 25 bp, Homo sapien
tgcagtgtcgccttaccccaatgaa

SEQ ID NO: 6037828 - DNA, 25 bp, Homo sapien
cgcattctgacgatgaagacttgcc

SEQ ID NO: 6037829 - DNA, 25 bp, Homo sapien
caaaatatatgtagaggacagtcca

SEQ ID NO: 6037830 - DNA, 25 bp, Homo sapien
tggaaaatgaccaaggtagaagagt

SEQ ID NO: 6037831 - DNA, 25 bp, Homo sapien
atgcctgaaaccgatactttccctc

SEQ ID NO: 6037832 - DNA, 25 bp, Homo sapien
caatattaacgaatatcgtcaagca

SEQ ID NO: 6037833 - DNA, 25 bp, Homo sapien
tgagatttattaagggacacggtac

SEQ ID NO: 6037834 - DNA, 25 bp, Homo sapien
caggtgcagcccttggtgtaagaga

SEQ ID NO: 6037835 - DNA, 25 bp, Homo sapien
actgatagctaagggcttcaaaata

SEQ ID NO: 6037836 - DNA, 25 bp, Homo sapien
ggtgcgctaggaagatgtggttccg

SEQ ID NO: 6037837 - DNA, 25 bp, Homo sapien
aggtagaagagttgctgcctttgga

SEQ ID NO: 6037838 - DNA, 25 bp, Homo sapien
cggtactctatatgatttggaattt

SEQ ID NO: 6037839 - DNA, 25 bp, Homo sapien
agaaagccaaccgtgttaatcattg

SEQ ID NO: 6037840 - DNA, 25 bp, Homo sapien
gaaaaggcattggttaaagatgtta

SEQ ID NO: 6037841 - DNA, 25 bp, Homo sapien
atcattggtgcgctaggaagatgtg

SEQ ID NO: 6037842 - DNA, 25 bp, Homo sapien
cttagccaccggagccagaaagcca

SEQ ID NO: 6037843 - DNA, 25 bp, Homo sapien
tgttaccaaagattataaagaagcc

SEQ ID NO: 6037844 - DNA, 25 bp, Homo sapien
taaacccctagaggcacgtgctgcc

SEQ ID NO: 6037845 - DNA, 25 bp, Homo sapien
agcaaacgcattctgacgatgaaga

SEQ ID NO: 6037846 - DNA, 25 bp, Homo sapien
tgaaaccgatactttccctctagtc

SEQ ID NO: 6037847 - DNA, 25 bp, Homo sapien
atactttccctctagtccacgaaca

SEQ ID NO: 6037848 - DNA, 25 bp, Homo sapien
agaccaagctgggtggcaaaatgtc

SEQ ID NO: 6037849 - DNA, 25 bp, Homo sapien
gacttgcctgcagtgtcgccttacc

SEQ ID NO: 6037850 - DNA, 25 bp, Homo sapien
gcacgtgctgccttaacacctacca

SEQ ID NO: 6037851 - DNA, 25 bp, Homo sapien
cttaccccaatgaaaaggcattggt

SEQ ID NO: 6037852 - DNA, 25 bp, Homo sapien
gctgccttaacacctaccacggtta

SEQ ID NO: 6037853 - DNA, 25 bp, Homo sapien
gtgttaatcattggtgcgctaggaa

SEQ ID NO: 6037854 - DNA, 25 bp, Homo sapien
catccagtttgctcactgctacaaa

SEQ ID NO: 6037855 - DNA, 25 bp, Homo sapien
aaaatgtccttatgagatttattaa

SEQ ID NO: 6037856 - DNA, 25 bp, Homo sapien
tctatatgatttggaatttttggaa

SEQ ID NO: 6037857 - DNA, 25 bp, Homo sapien
tcactgctacaaagaccaagctggg

SEQ ID NO: 6037858 - DNA, 25 bp, Homo sapien
gcaggttcatggaaaaccgctccac

SEQ ID NO: 6037859 - DNA, 25 bp, Homo sapien
tcaagcaggtgccattatagtgcct

SEQ ID NO: 6037860 - DNA, 25 bp, Homo sapien
ctgacgatgaagacttgcctgcagt

SEQ ID NO: 6037861 - DNA, 25 bp, Homo sapien
gggcttcaaaatatatgtagaggac

SEQ ID NO: 6037862 - DNA, 25 bp, Homo sapien
agaagccttagccaccggagccaga

SEQ ID NO: 6037863 - DNA, 25 bp, Homo sapien
ccaaccgtgttaatcattggtgcgc

SEQ ID NO: 6037864 - DNA, 25 bp, Homo sapien
ttataggtttgaaggaaatgcctga

SEQ ID NO: 6037865 - DNA, 25 bp, Homo sapien
actgggcattcaagcaaacgcattc

SEQ ID NO: 6037866 - DNA, 25 bp, Homo sapien
taacgaatatcgtcaagcaggtgcc

SEQ ID NO: 6037867 - DNA, 25 bp, Homo sapien
taaaaaactgatagctaagggcttc

SEQ ID NO: 6037868 - DNA, 25 bp, Homo sapien
cacggttaaaaaactgatagctaag

SEQ ID NO: 6037869 - DNA, 25 bp, Homo sapien
caccaatgattaacacggttggctt

SEQ ID NO: 6037870 - DNA, 25 bp, Homo sapien
tcttctgttaggattattcagtttc

SEQ ID NO: 6037871 - DNA, 25 bp, Homo sapien
gcagtttttctttgaggtaggagct

SEQ ID NO: 6037872 - DNA, 25 bp, Homo sapien
agcaattggcttcgatagatatata

SEQ ID NO: 6037873 - DNA, 25 bp, Homo sapien
gatggtaagagatcatgagagaaaa

SEQ ID NO: 6037874 - DNA, 25 bp, Homo sapien
gaagtttctttgatatcccatttta

SEQ ID NO: 6037875 - DNA, 25 bp, Homo sapien
tctttataatctttggtaacatctt

SEQ ID NO: 6037876 - DNA, 25 bp, Homo sapien
ggctccggtggctaaggcttcttta

SEQ ID NO: 6037877 - DNA, 25 bp, Homo sapien
gtctgctgatacgtccaccacggtc

SEQ ID NO: 6037878 - DNA, 25 bp, Homo sapien
tggaatttcgtcaaagggaccacca

SEQ ID NO: 6037879 - DNA, 25 bp, Homo sapien
aataccaactttgtgcaacagatcg

SEQ ID NO: 6037880 - DNA, 25 bp, Homo sapien
tttctttgaggtaggagctctaaag

SEQ ID NO: 6037881 - DNA, 25 bp, Homo sapien
atgacagataatttaggcccggcag

SEQ ID NO: 6037882 - DNA, 25 bp, Homo sapien
gttagtgaaaggagcaattggcttc

SEQ ID NO: 6037883 - DNA, 25 bp, Homo sapien
tgatcaatagagatgacagataatt

SEQ ID NO: 6037884 - DNA, 25 bp, Homo sapien
gataatttaggcccggcagtggtag

SEQ ID NO: 6037885 - DNA, 25 bp, Homo sapien
gatggggttgtgagggttggtagtg

SEQ ID NO: 6037886 - DNA, 25 bp, Homo sapien
tctaaagatggtaagagatcatgag

SEQ ID NO: 6037887 - DNA, 25 bp, Homo sapien
tgaggtaggagctctaaagatggta

SEQ ID NO: 6037888 - DNA, 25 bp, Homo sapien
gttaggattattcagtttctccatg

SEQ ID NO: 6037889 - DNA, 25 bp, Homo sapien
acaggagcagtttttctttgaggta

SEQ ID NO: 6037890 - DNA, 25 bp, Homo sapien
gaagcttctcttggcagcaaagaag

SEQ ID NO: 6037891 - DNA, 25 bp, Homo sapien
ccattttaatatgttagcatctgga

SEQ ID NO: 6037892 - DNA, 25 bp, Homo sapien
atgccttttcattggggtaaggcga

SEQ ID NO: 6037893 - DNA, 25 bp, Homo sapien
ggtagtgtctgctgatacgtccacc

SEQ ID NO: 6037894 - DNA, 25 bp, Homo sapien
aaagaaggcaagtgatcaatagaga

SEQ ID NO: 6037895 - DNA, 25 bp, Homo sapien
ttggctttctggctccggtggctaa

SEQ ID NO: 6037896 - DNA, 25 bp, Homo sapien
aagagatcatgagagaaaaattctg

SEQ ID NO: 6037897 - DNA, 25 bp, Homo sapien
cgatagatatatacaattgataaaa

SEQ ID NO: 6037898 - DNA, 25 bp, Homo sapien
catctttaaccaatgccttttcatt

SEQ ID NO: 6037899 - DNA, 25 bp, Homo sapien
caccggaaccacatcttcctagcgc

SEQ ID NO: 6037900 - DNA, 25 bp, Homo sapien
aattctgaagcttctcttggcagca

SEQ ID NO: 6037901 - DNA, 25 bp, Homo sapien
gttagcatctggaataccaactttg

SEQ ID NO: 6037902 - DNA, 25 bp, Homo sapien
attattcagtttctccatgttagtg

SEQ ID NO: 6037903 - DNA, 25 bp, Homo sapien
cagatcgatggcaccggaaccacat

SEQ ID NO: 6037904 - DNA, 25 bp, Homo sapien
gtccaccacggtccttagtcttctg

SEQ ID NO: 6037905 - DNA, 25 bp, Homo sapien
ggcaagtgatcaatagagatgacag

SEQ ID NO: 6037906 - DNA, 25 bp, Homo sapien
acacggttggctttctggctccggt

SEQ ID NO: 6037907 - DNA, 25 bp, Homo sapien
atctggaataccaactttgtgcaac

SEQ ID NO: 6037908 - DNA, 25 bp, Homo sapien
ttaggcccggcagtggtaggtacca

SEQ ID NO: 6037909 - DNA, 25 bp, Homo sapien
cagtggtaggtaccagaacggtagg

SEQ ID NO: 6037910 - DNA, 25 bp, Homo sapien
tctttgatatcccattttaatatgt

SEQ ID NO: 6037911 - DNA, 25 bp, Homo sapien
tctatcgaacaatttcttggctcta

SEQ ID NO: 6037912 - DNA, 25 bp, Homo sapien
gcccggcagtggtaggtaccagaac

SEQ ID NO: 6037913 - DNA, 25 bp, Homo sapien
gagaaaaattctgaagcttctcttg

SEQ ID NO: 6037914 - DNA, 25 bp, Homo sapien
ggtggctaaggcttctttataatct

SEQ ID NO: 6037915 - DNA, 25 bp, Homo sapien
aggagctctaaagatggtaagagat

SEQ ID NO: 6037916 - DNA, 25 bp, Homo sapien
gataaaaatatcagcttgtggaatt

SEQ ID NO: 6037917 - DNA, 25 bp, Homo sapien
cacgggaagtttctttgatatccca

SEQ ID NO: 6037918 - DNA, 25 bp, Homo sapien
ctagcgcaccaatgattaacacggt

SEQ ID NO: 6037919 - DNA, 25 bp, Homo sapien
gatggcaccggaaccacatcttcct

SEQ ID NO: 6037920 - DNA, 25 bp, Homo sapien
aatatcagcttgtggaatttcgtca

SEQ ID NO: 6037921 - DNA, 25 bp, Homo sapien
aaccacatcttcctagcgcaccaat

SEQ ID NO: 6037922 - DNA, 25 bp, Homo sapien
ctccatgttagtgaaaggagcaatt

SEQ ID NO: 6037923 - DNA, 25 bp, Homo sapien
ggcagcaaagaaggcaagtgatcaa

SEQ ID NO: 6037924 - DNA, 25 bp, Homo sapien
caattgataaaaatatcagcttgtg

SEQ ID NO: 6037925 - DNA, 25 bp, Homo sapien
tctcttggcagcaaagaaggcaagt

SEQ ID NO: 6037926 - DNA, 25 bp, Homo sapien
gcaatgtctatcgaacaatttcttg

SEQ ID NO: 6037927 - DNA, 25 bp, Homo sapien
cagtttctccatgttagtgaaagga

SEQ ID NO: 6037928 - DNA, 25 bp, Homo sapien
tgttaaacacagtagccacagtgta

SEQ ID NO: 6037929 - DNA, 25 bp, Homo sapien
tttcattggggtaaggcgacactgc

SEQ ID NO: 6037930 - DNA, 25 bp, Homo sapien
gctctaacccagacaggagcagttt

SEQ ID NO: 6037931 - DNA, 25 bp, Homo sapien
agcttgtggaatttcgtcaaaggga

SEQ ID NO: 6037932 - DNA, 25 bp, Homo sapien
gttgtgagggttggtagtgtctgct

SEQ ID NO: 6037933 - DNA, 25 bp, Homo sapien
ttcttggctctaacccagacaggag

SEQ ID NO: 6037934 - DNA, 25 bp, Homo sapien
tagccacagtgtatattgggatggg

SEQ ID NO: 6037935 - DNA, 25 bp, Homo sapien
taaggcttctttataatctttggta

SEQ ID NO: 6037936 - DNA, 25 bp, Homo sapien
gaaaggagcaattggcttcgataga

SEQ ID NO: 6037937 - DNA, 25 bp, Homo sapien
tttctggctccggtggctaaggctt

SEQ ID NO: 6037938 - DNA, 25 bp, Homo sapien
tggtaacatctttaaccaatgcctt

SEQ ID NO: 6037939 - DNA, 25 bp, Homo sapien
acacagtagccacagtgtatattgg

SEQ ID NO: 6037940 - DNA, 25 bp, Homo sapien
tgatacgtccaccacggtccttagt

SEQ ID NO: 6037941 - DNA, 25 bp, Homo sapien
taatatgttagcatctggaatacca

SEQ ID NO: 6037942 - DNA, 25 bp, Homo sapien
atagagatgacagataatttaggcc

SEQ ID NO: 6037943 - DNA, 25 bp, Homo sapien
tcatgagagaaaaattctgaagctt

SEQ ID NO: 6037944 - DNA, 25 bp, Homo sapien
tgattaacacggttggctttctggc

SEQ ID NO: 6037945 - DNA, 25 bp, Homo sapien
aactttgtgcaacagatcgatggca

SEQ ID NO: 6037946 - DNA, 25 bp, Homo sapien
tatatacaattgataaaaatatcag

SEQ ID NO: 6037947 - DNA, 25 bp, Homo sapien
tattgggatggggttgtgagggttg

SEQ ID NO: 6037948 - DNA, 25 bp, Homo sapien
taatctttggtaacatctttaacca

SEQ ID NO: 6037949 - DNA, 25 bp, Homo sapien
ccttagtcttctgttaggattattc

SEQ ID NO: 6037950 - DNA, 25 bp, Homo sapien
tggcttcgatagatatatacaattg

SEQ ID NO: 6037951 - DNA, 25 bp, Homo sapien
taaccaatgccttttcattggggta

SEQ ID NO: 6037952 - DNA, 25 bp, Homo sapien
gtgtatattgggatggggttgtgag

SEQ ID NO: 6037953 - DNA, 25 bp, Homo sapien
atcttcctagcgcaccaatgattaa

SEQ ID NO: 6037954 - DNA, 25 bp, Homo sapien
acccagacaggagcagtttttcttt

SEQ ID NO: 6037955 - DNA, 25 bp, Homo sapien
ccaccacgggaagtttctttgatat

SEQ ID NO: 6037956 - DNA, 25 bp, Homo sapien
gatatcccattttaatatgttagca

SEQ ID NO: 6037957 - DNA, 25 bp, Homo sapien
gtgcaacagatcgatggcaccggaa

SEQ ID NO: 6037958 - DNA, 25 bp, Homo sapien
cacggtccttagtcttctgttagga

SEQ ID NO: 6037959 - DNA, 25 bp, Homo sapien
taggtttgttaaacacagtagccac

SEQ ID NO: 6037960 - DNA, 25 bp, Homo sapien
agggttggtagtgtctgctgatacg

SEQ ID NO: 6037961 - DNA, 25 bp, Homo sapien
gaacaatttcttggctctaacccag

SEQ ID NO: 6037962 - DNA, 25 bp, Homo sapien
atgcactagaagttatcaaacaagt

SEQ ID NO: 6037963 - DNA, 25 bp, Homo sapien
tattggatcctatgggcggtcttgt

SEQ ID NO: 6037964 - DNA, 25 bp, Homo sapien
agacgctgttaagactgtccgtaaa

SEQ ID NO: 6037965 - DNA, 25 bp, Homo sapien
tagaagttatcaaacaagtaagtaa

SEQ ID NO: 6037966 - DNA, 25 bp, Homo sapien
cactgctgcaaaggcagttgccgat

SEQ ID NO: 6037967 - DNA, 25 bp, Homo sapien
attattctagctggtgagattttag

SEQ ID NO: 6037968 - DNA, 25 bp, Homo sapien
cagcagctaaatcaatgttggagtt

SEQ ID NO: 6037969 - DNA, 25 bp, Homo sapien
tggagttatcccgtactcaagacga

SEQ ID NO: 6037970 - DNA, 25 bp, Homo sapien
gcaaaggcagttgccgatgtcattc

SEQ ID NO: 6037971 - DNA, 25 bp, Homo sapien
tgattgaaaaaaatattcaccctgt

SEQ ID NO: 6037972 - DNA, 25 bp, Homo sapien
tcattcgaacttgcttaggtccaaa

SEQ ID NO: 6037973 - DNA, 25 bp, Homo sapien
ggtgagattttagctcagtgtgcac

SEQ ID NO: 6037974 - DNA, 25 bp, Homo sapien
tgtgcaccttatttgattgaaaaaa

SEQ ID NO: 6037975 - DNA, 25 bp, Homo sapien
aagctatgttaaagatgttattgga

SEQ ID NO: 6037976 - DNA, 25 bp, Homo sapien
tactaaatatgtcatacattggtca

SEQ ID NO: 6037977 - DNA, 25 bp, Homo sapien
ggtcttgtgttgactaacgatggcc

SEQ ID NO: 6037978 - DNA, 25 bp, Homo sapien
tgaattagctctagacgctgttaag

SEQ ID NO: 6037979 - DNA, 25 bp, Homo sapien
gttggtgacgggactacaacagtta

SEQ ID NO: 6037980 - DNA, 25 bp, Homo sapien
gattcaagcctctatcggtactaaa

SEQ ID NO: 6037981 - DNA, 25 bp, Homo sapien
taagggaaattgatgttgcacatcc

SEQ ID NO: 6037982 - DNA, 25 bp, Homo sapien
tgtggaaggtgaacctaattttgaa

SEQ ID NO: 6037983 - DNA, 25 bp, Homo sapien
catacattggtcagagaaaatgtgt

SEQ ID NO: 6037984 - DNA, 25 bp, Homo sapien
tgactgatgcactagaagttatcaa

SEQ ID NO: 6037985 - DNA, 25 bp, Homo sapien
attttagctcagtgtgcaccttatt

SEQ ID NO: 6037986 - DNA, 25 bp, Homo sapien
ttattattatccaagccttgaagaa

SEQ ID NO: 6037987 - DNA, 25 bp, Homo sapien
tgccgctatgaaaaaattgattcaa

SEQ ID NO: 6037988 - DNA, 25 bp, Homo sapien
cagttgccgatgtcattcgaacttg

SEQ ID NO: 6037989 - DNA, 25 bp, Homo sapien
acaaactgtggaaggtgaacctaat

SEQ ID NO: 6037990 - DNA, 25 bp, Homo sapien
tcgtcaggcccaaatctccaatatc

SEQ ID NO: 6037991 - DNA, 25 bp, Homo sapien
gaagaggttggtgacgggactacaa

SEQ ID NO: 6037992 - DNA, 25 bp, Homo sapien
tgtggaaaatgatgccgctatgaaa

SEQ ID NO: 6037993 - DNA, 25 bp, Homo sapien
gcttaggtccaaaagctatgttaaa

SEQ ID NO: 6037994 - DNA, 25 bp, Homo sapien
ctagctggtgagattttagctcagt

SEQ ID NO: 6037995 - DNA, 25 bp, Homo sapien
gtgaacctaattttgaaatcgatat

SEQ ID NO: 6037996 - DNA, 25 bp, Homo sapien
tgtcgatgtggaaaatgatgccgct

SEQ ID NO: 6037997 - DNA, 25 bp, Homo sapien
agagaaaatgtgtgaattagctcta

SEQ ID NO: 6037998 - DNA, 25 bp, Homo sapien
ctaattttgaaatcgatatcaaaag

SEQ ID NO: 6037999 - DNA, 25 bp, Homo sapien
agctctagacgctgttaagactgtc

SEQ ID NO: 6038000 - DNA, 25 bp, Homo sapien
gctcagtgtgcaccttatttgattg

SEQ ID NO: 6038001 - DNA, 25 bp, Homo sapien
atcctatgggcggtcttgtgttgac

SEQ ID NO: 6038002 - DNA, 25 bp, Homo sapien
ttgaaatcgatatcaaaagatatgt

SEQ ID NO: 6038003 - DNA, 25 bp, Homo sapien
aagccttgaagaaagcactgactga

SEQ ID NO: 6038004 - DNA, 25 bp, Homo sapien
tcaaaagatatgtccgtgtggagaa

SEQ ID NO: 6038005 - DNA, 25 bp, Homo sapien
aatctccaatatcactgctgcaaag

SEQ ID NO: 6038006 - DNA, 25 bp, Homo sapien
aaatgatgccgctatgaaaaaattg

SEQ ID NO: 6038007 - DNA, 25 bp, Homo sapien
atgttgcacatccagcagctaaatc

SEQ ID NO: 6038008 - DNA, 25 bp, Homo sapien
actaccggtcgtcaggcccaaatct

SEQ ID NO: 6038009 - DNA, 25 bp, Homo sapien
tgttaagactgtccgtaaagacctg

SEQ ID NO: 6038010 - DNA, 25 bp, Homo sapien
ggcccaaatctccaatatcactgct

SEQ ID NO: 6038011 - DNA, 25 bp, Homo sapien
aagcactgactgatgcactagaagt

SEQ ID NO: 6038012 - DNA, 25 bp, Homo sapien
ctcaagagagaactaccggtcgtca

SEQ ID NO: 6038013 - DNA, 25 bp, Homo sapien
tatgaaaaaattgattcaagcctct

SEQ ID NO: 6038014 - DNA, 25 bp, Homo sapien
gtgttgactaacgatggccacgcta

SEQ ID NO: 6038015 - DNA, 25 bp, Homo sapien
atgggcggtcttgtgttgactaacg

SEQ ID NO: 6038016 - DNA, 25 bp, Homo sapien
tgttaaagatgttattggatcctat

SEQ ID NO: 6038017 - DNA, 25 bp, Homo sapien
gatatgtccgtgtggagaagattcc

SEQ ID NO: 6038018 - DNA, 25 bp, Homo sapien
tatcggtactaaatatgtcatacat

SEQ ID NO: 6038019 - DNA, 25 bp, Homo sapien
acagttattattctagctggtgaga

SEQ ID NO: 6038020 - DNA, 25 bp, Homo sapien
actaacgatggccacgctattttaa

SEQ ID NO: 6038021 - DNA, 25 bp, Homo sapien
gtgacgggactacaacagttattat

SEQ ID NO: 6038022 - DNA, 25 bp, Homo sapien
cacatccagcagctaaatcaatgtt

SEQ ID NO: 6038023 - DNA, 25 bp, Homo sapien
ctaaatcaatgttggagttatcccg

SEQ ID NO: 6038024 - DNA, 25 bp, Homo sapien
taaacctgtcgatgtggaaaatgat

SEQ ID NO: 6038025 - DNA, 25 bp, Homo sapien
taaagacctgggacaaactgtggaa

SEQ ID NO: 6038026 - DNA, 25 bp, Homo sapien
aatgtgtgaattagctctagacgct

SEQ ID NO: 6038027 - DNA, 25 bp, Homo sapien
tgaagaaagcactgactgatgcact

SEQ ID NO: 6038028 - DNA, 25 bp, Homo sapien
gactgtccgtaaagacctgggacaa

SEQ ID NO: 6038029 - DNA, 25 bp, Homo sapien
agcctctatcggtactaaatatgtc

SEQ ID NO: 6038030 - DNA, 25 bp, Homo sapien
aaattgatgttgcacatccagcagc

SEQ ID NO: 6038031 - DNA, 25 bp, Homo sapien
ttatcccgtactcaagacgaagagg

SEQ ID NO: 6038032 - DNA, 25 bp, Homo sapien
gactacaacagttattattctagct

SEQ ID NO: 6038033 - DNA, 25 bp, Homo sapien
ccgatgtcattcgaacttgcttagg

SEQ ID NO: 6038034 - DNA, 25 bp, Homo sapien
gtccaaaagctatgttaaagatgtt

SEQ ID NO: 6038035 - DNA, 25 bp, Homo sapien
accctgttattattatccaagcctt

SEQ ID NO: 6038036 - DNA, 25 bp, Homo sapien
tcgatatcaaaagatatgtccgtgt

SEQ ID NO: 6038037 - DNA, 25 bp, Homo sapien
caatatcactgctgcaaaggcagtt

SEQ ID NO: 6038038 - DNA, 25 bp, Homo sapien
gaacttgcttaggtccaaaagctat

SEQ ID NO: 6038039 - DNA, 25 bp, Homo sapien
cctgggacaaactgtggaaggtgaa

SEQ ID NO: 6038040 - DNA, 25 bp, Homo sapien
caagacgaagaggttggtgacggga

SEQ ID NO: 6038041 - DNA, 25 bp, Homo sapien
agatgttattggatcctatgggcgg

SEQ ID NO: 6038042 - DNA, 25 bp, Homo sapien
agtaagtaaacctgtcgatgtggaa

SEQ ID NO: 6038043 - DNA, 25 bp, Homo sapien
atatgtcatacattggtcagagaaa

SEQ ID NO: 6038044 - DNA, 25 bp, Homo sapien
agagaactaccggtcgtcaggccca

SEQ ID NO: 6038045 - DNA, 25 bp, Homo sapien
atattcaccctgttattattatcca

SEQ ID NO: 6038046 - DNA, 25 bp, Homo sapien
cgtactcaagacgaagaggttggtg

SEQ ID NO: 6038047 - DNA, 25 bp, Homo sapien
aaaattgattcaagcctctatcggt

SEQ ID NO: 6038048 - DNA, 25 bp, Homo sapien
ttatccaagccttgaagaaagcact

SEQ ID NO: 6038049 - DNA, 25 bp, Homo sapien
caatgttggagttatcccgtactca

SEQ ID NO: 6038050 - DNA, 25 bp, Homo sapien
caaacaagtaagtaaacctgtcgat

SEQ ID NO: 6038051 - DNA, 25 bp, Homo sapien
ttggtcagagaaaatgtgtgaatta

SEQ ID NO: 6038052 - DNA, 25 bp, Homo sapien
gatggccacgctattttaagggaaa

SEQ ID NO: 6038053 - DNA, 25 bp, Homo sapien
tccctgtgcgtgtttggctcttagt

SEQ ID NO: 6038054 - DNA, 25 bp, Homo sapien
gttccttgcagttatccaaaaatga

SEQ ID NO: 6038055 - DNA, 25 bp, Homo sapien
gcaccagttacacgagcaattctat

SEQ ID NO: 6038056 - DNA, 25 bp, Homo sapien
gcatcagctacagcttggtatggcc

SEQ ID NO: 6038057 - DNA, 25 bp, Homo sapien
attatggtacaagcttttggttcct

SEQ ID NO: 6038058 - DNA, 25 bp, Homo sapien
tcttagttgggataggagtctaata

SEQ ID NO: 6038059 - DNA, 25 bp, Homo sapien
attttccccttgtcaccatcaatac

SEQ ID NO: 6038060 - DNA, 25 bp, Homo sapien
aaaatgagaaatattcgtccccaat

SEQ ID NO: 6038061 - DNA, 25 bp, Homo sapien
caatagcggttttgacactttgctg

SEQ ID NO: 6038062 - DNA, 25 bp, Homo sapien
gtaccgacatcactttccttcaagt

SEQ ID NO: 6038063 - DNA, 25 bp, Homo sapien
tctcggtggcaccaccacctgggga

SEQ ID NO: 6038064 - DNA, 25 bp, Homo sapien
atacactccatagcatcagctacag

SEQ ID NO: 6038065 - DNA, 25 bp, Homo sapien
gcttggtatggccattgctggatcc

SEQ ID NO: 6038066 - DNA, 25 bp, Homo sapien
ttgacagaaactgccatctcggtgg

SEQ ID NO: 6038067 - DNA, 25 bp, Homo sapien
tctatttcgtttaatatatctttgg

SEQ ID NO: 6038068 - DNA, 25 bp, Homo sapien
aaagtacgtggaatacactccatag

SEQ ID NO: 6038069 - DNA, 25 bp, Homo sapien
ttgggataggagtctaataggatca

SEQ ID NO: 6038070 - DNA, 25 bp, Homo sapien
tttgccttttctgctaatttgacag

SEQ ID NO: 6038071 - DNA, 25 bp, Homo sapien
ccattgctggatcccttctaattgc

SEQ ID NO: 6038072 - DNA, 25 bp, Homo sapien
tggatcccttctaattgctttgcct

SEQ ID NO: 6038073 - DNA, 25 bp, Homo sapien
tattcgtccccaatcatttctactt

SEQ ID NO: 6038074 - DNA, 25 bp, Homo sapien
gctaatttgacagaaactgccatct

SEQ ID NO: 6038075 - DNA, 25 bp, Homo sapien
cagtttgtaccgacatcactttcct

SEQ ID NO: 6038076 - DNA, 25 bp, Homo sapien
aatagtaaacatgcactttcaatag

SEQ ID NO: 6038077 - DNA, 25 bp, Homo sapien
gcatcttgtaggttacgatctattt

SEQ ID NO: 6038078 - DNA, 25 bp, Homo sapien
cttttggttccttgcagttatccaa

SEQ ID NO: 6038079 - DNA, 25 bp, Homo sapien
atatctttggaaccaccacgtaaca

SEQ ID NO: 6038080 - DNA, 25 bp, Homo sapien
ataccgtaactaaccatatctacaa

SEQ ID NO: 6038081 - DNA, 25 bp, Homo sapien
acacgattgacaatggttgcaccag

SEQ ID NO: 6038082 - DNA, 25 bp, Homo sapien
tgtatcaaagtacgtggaatacact

SEQ ID NO: 6038083 - DNA, 25 bp, Homo sapien
gccatagcatcttgtaggttacgat

SEQ ID NO: 6038084 - DNA, 25 bp, Homo sapien
aattgctttgccttttctgctaatt

SEQ ID NO: 6038085 - DNA, 25 bp, Homo sapien
ccaccacgtaacattatggtacaag

SEQ ID NO: 6038086 - DNA, 25 bp, Homo sapien
caccatcaatacctgttgtaaaatt

SEQ ID NO: 6038087 - DNA, 25 bp, Homo sapien
tacaagcttttggttccttgcagtt

SEQ ID NO: 6038088 - DNA, 25 bp, Homo sapien
gacaaggaaggactcaacatcacat

SEQ ID NO: 6038089 - DNA, 25 bp, Homo sapien
acatcactttccttcaagtcctcta

SEQ ID NO: 6038090 - DNA, 25 bp, Homo sapien
gaaggactcaacatcacattacgag

SEQ ID NO: 6038091 - DNA, 25 bp, Homo sapien
ccttgtcaccatcaatacctgttgt

SEQ ID NO: 6038092 - DNA, 25 bp, Homo sapien
tcatcaacccttaatagtaaacatg

SEQ ID NO: 6038093 - DNA, 25 bp, Homo sapien
tgcgtgtttggctcttagttgggat

SEQ ID NO: 6038094 - DNA, 25 bp, Homo sapien
ccttctaattgctttgccttttctg

SEQ ID NO: 6038095 - DNA, 25 bp, Homo sapien
caatacctgttgtaaaatttccctg

SEQ ID NO: 6038096 - DNA, 25 bp, Homo sapien
caccacctggggacaaggaaggact

SEQ ID NO: 6038097 - DNA, 25 bp, Homo sapien
ttttctgctaatttgacagaaactg

SEQ ID NO: 6038098 - DNA, 25 bp, Homo sapien
gaaactgccatctcggtggcaccac

SEQ ID NO: 6038099 - DNA, 25 bp, Homo sapien
atcacattacgagcaacagccatag

SEQ ID NO: 6038100 - DNA, 25 bp, Homo sapien
acccttaatagtaaacatgcacttt

SEQ ID NO: 6038101 - DNA, 25 bp, Homo sapien
ttcaagtcctctacacgattgacaa

SEQ ID NO: 6038102 - DNA, 25 bp, Homo sapien
ccaaataccgtaactaaccatatct

SEQ ID NO: 6038103 - DNA, 25 bp, Homo sapien
tatccaaaaatgagaaatattcgtc

SEQ ID NO: 6038104 - DNA, 25 bp, Homo sapien
tgtaggttacgatctatttcgttta

SEQ ID NO: 6038105 - DNA, 25 bp, Homo sapien
tgttgtaaaatttccctgtgcgtgt

SEQ ID NO: 6038106 - DNA, 25 bp, Homo sapien
ttgacaatggttgcaccagttacac

SEQ ID NO: 6038107 - DNA, 25 bp, Homo sapien
cggttttgacactttgctgcttgat

SEQ ID NO: 6038108 - DNA, 25 bp, Homo sapien
gcttgatgacttcaggttcccaaat

SEQ ID NO: 6038109 - DNA, 25 bp, Homo sapien
atcatttctactttgaataatccac

SEQ ID NO: 6038110 - DNA, 25 bp, Homo sapien
tgcagttatccaaaaatgagaaata

SEQ ID NO: 6038111 - DNA, 25 bp, Homo sapien
ttcgtttaatatatctttggaacca

SEQ ID NO: 6038112 - DNA, 25 bp, Homo sapien
tttggctcttagttgggataggagt

SEQ ID NO: 6038113 - DNA, 25 bp, Homo sapien
tgacttcaggttcccaaataccgta

SEQ ID NO: 6038114 - DNA, 25 bp, Homo sapien
tctaataggatcaccacctgcattt

SEQ ID NO: 6038115 - DNA, 25 bp, Homo sapien
ttaatatatctttggaaccaccacg

SEQ ID NO: 6038116 - DNA, 25 bp, Homo sapien
aaacatgcactttcaatagcggttt

SEQ ID NO: 6038117 - DNA, 25 bp, Homo sapien
ttggaaccaccacgtaacattatgg

SEQ ID NO: 6038118 - DNA, 25 bp, Homo sapien
tgacactttgctgcttgatgacttc

SEQ ID NO: 6038119 - DNA, 25 bp, Homo sapien
tggcaccaccacctggggacaagga

SEQ ID NO: 6038120 - DNA, 25 bp, Homo sapien
gcattttgtatcaaagtacgtggaa

SEQ ID NO: 6038121 - DNA, 25 bp, Homo sapien
ttacgagcaacagccatagcatctt

SEQ ID NO: 6038122 - DNA, 25 bp, Homo sapien
tctactttgaataatccacagtttg

SEQ ID NO: 6038123 - DNA, 25 bp, Homo sapien
cgtaacattatggtacaagcttttg

SEQ ID NO: 6038124 - DNA, 25 bp, Homo sapien
atctacaattttccccttgtcacca

SEQ ID NO: 6038125 - DNA, 25 bp, Homo sapien
gagaaatattcgtccccaatcattt

SEQ ID NO: 6038126 - DNA, 25 bp, Homo sapien
ggatcaccacctgcattttgtatca

SEQ ID NO: 6038127 - DNA, 25 bp, Homo sapien
gcactttcaatagcggttttgacac

SEQ ID NO: 6038128 - DNA, 25 bp, Homo sapien
cctggggacaaggaaggactcaaca

SEQ ID NO: 6038129 - DNA, 25 bp, Homo sapien
gctacagcttggtatggccattgct

SEQ ID NO: 6038130 - DNA, 25 bp, Homo sapien
tccccaatcatttctactttgaata

SEQ ID NO: 6038131 - DNA, 25 bp, Homo sapien
tccatagcatcagctacagcttggt

SEQ ID NO: 6038132 - DNA, 25 bp, Homo sapien
tacgatctatttcgtttaatatatc

SEQ ID NO: 6038133 - DNA, 25 bp, Homo sapien
ccacctgcattttgtatcaaagtac

SEQ ID NO: 6038134 - DNA, 25 bp, Homo sapien
atggttgcaccagttacacgagcaa

SEQ ID NO: 6038135 - DNA, 25 bp, Homo sapien
aatccacagtttgtaccgacatcac

SEQ ID NO: 6038136 - DNA, 25 bp, Homo sapien
aaaatttccctgtgcgtgtttggct

SEQ ID NO: 6038137 - DNA, 25 bp, Homo sapien
ctttccttcaagtcctctacacgat

SEQ ID NO: 6038138 - DNA, 25 bp, Homo sapien
taggagtctaataggatcaccacct

SEQ ID NO: 6038139 - DNA, 25 bp, Homo sapien
ttgaataatccacagtttgtaccga

SEQ ID NO: 6038140 - DNA, 25 bp, Homo sapien
gtatggccattgctggatcccttct

SEQ ID NO: 6038141 - DNA, 25 bp, Homo sapien
ctcaacatcacattacgagcaacag

SEQ ID NO: 6038142 - DNA, 25 bp, Homo sapien
taactaaccatatctacaattttcc

SEQ ID NO: 6038143 - DNA, 25 bp, Homo sapien
tcctctacacgattgacaatggttg

SEQ ID NO: 6038144 - DNA, 25 bp, Homo sapien
cgtggaatacactccatagcatcag

SEQ ID NO: 6038145 - DNA, 25 bp, Homo sapien
aaccatatctacaattttccccttg

SEQ ID NO: 6038146 - DNA, 25 bp, Homo sapien
gcaacagccatagcatcttgtaggt

SEQ ID NO: 6038147 - DNA, 25 bp, Homo sapien
tttgctgcttgatgacttcaggttc

SEQ ID NO: 6038148 - DNA, 25 bp, Homo sapien
gtcaataagcaacaatatgaatttt

SEQ ID NO: 6038149 - DNA, 25 bp, Homo sapien
agaagagatgagcatggagctatgc

SEQ ID NO: 6038150 - DNA, 25 bp, Homo sapien
tccacatctactgctggaagaatga

SEQ ID NO: 6038151 - DNA, 25 bp, Homo sapien
gttcaattgcgtgaatcgcaagcag

SEQ ID NO: 6038152 - DNA, 25 bp, Homo sapien
gacgctgattgcagagcttaagggt

SEQ ID NO: 6038153 - DNA, 25 bp, Homo sapien
aactgatgtaataaagtctcgaaat

SEQ ID NO: 6038154 - DNA, 25 bp, Homo sapien
ctttcggaatcagacgctgattgca

SEQ ID NO: 6038155 - DNA, 25 bp, Homo sapien
aaatcatgcacataatctggacaac

SEQ ID NO: 6038156 - DNA, 25 bp, Homo sapien
caaagcgaagaagaagggcatattg

SEQ ID NO: 6038157 - DNA, 25 bp, Homo sapien
aatggatgccaattgcaataataac

SEQ ID NO: 6038158 - DNA, 25 bp, Homo sapien
gtatctgccgagcaaaaatcggcag

SEQ ID NO: 6038159 - DNA, 25 bp, Homo sapien
gcatggagctatgctttgtaatgcg

SEQ ID NO: 6038160 - DNA, 25 bp, Homo sapien
gatacgaattcattacaccatatat

SEQ ID NO: 6038161 - DNA, 25 bp, Homo sapien
ttgcaataataacgtatccaatgat

SEQ ID NO: 6038162 - DNA, 25 bp, Homo sapien
catgggaaacccaggccaattagtt

SEQ ID NO: 6038163 - DNA, 25 bp, Homo sapien
ttaaggcgaatgacaagtctttttc

SEQ ID NO: 6038164 - DNA, 25 bp, Homo sapien
aagcttcatgggaaacccaggccaa

SEQ ID NO: 6038165 - DNA, 25 bp, Homo sapien
ttgcgtgaatcgcaagcaggagcgt

SEQ ID NO: 6038166 - DNA, 25 bp, Homo sapien
gaagcagtatctgccgagcaaaaat

SEQ ID NO: 6038167 - DNA, 25 bp, Homo sapien
acaaacaatggatgccaattgcaat

SEQ ID NO: 6038168 - DNA, 25 bp, Homo sapien
agtccggatacgaattcattacacc

SEQ ID NO: 6038169 - DNA, 25 bp, Homo sapien
taataacgtatccaatgatgctaat

SEQ ID NO: 6038170 - DNA, 25 bp, Homo sapien
taaaaatcaagttaagaataatgga

SEQ ID NO: 6038171 - DNA, 25 bp, Homo sapien
gataatgtatttgaaccaaaatcaa

SEQ ID NO: 6038172 - DNA, 25 bp, Homo sapien
gtctcgaaataggaaaagtaataca

SEQ ID NO: 6038173 - DNA, 25 bp, Homo sapien
ggttatgaagcagtatctgccgagc

SEQ ID NO: 6038174 - DNA, 25 bp, Homo sapien
attatggagaagagatgagcatgga

SEQ ID NO: 6038175 - DNA, 25 bp, Homo sapien
aattcattacaccatatattaccta

SEQ ID NO: 6038176 - DNA, 25 bp, Homo sapien
attagaaaacgagataatgtatttg

SEQ ID NO: 6038177 - DNA, 25 bp, Homo sapien
gaaaagtaatacaaatcatgcacat

SEQ ID NO: 6038178 - DNA, 25 bp, Homo sapien
aacctcaacagcttaaatcaaagcg

SEQ ID NO: 6038179 - DNA, 25 bp, Homo sapien
aaatcaagtgaaaacctcaacagct

SEQ ID NO: 6038180 - DNA, 25 bp, Homo sapien
tggccacctttaggttatgaagcag

SEQ ID NO: 6038181 - DNA, 25 bp, Homo sapien
gtttaacctctacaacaccattatg

SEQ ID NO: 6038182 - DNA, 25 bp, Homo sapien
taatacaaatcatgcacataatctg

SEQ ID NO: 6038183 - DNA, 25 bp, Homo sapien
gattgcagagcttaagggtgattgt

SEQ ID NO: 6038184 - DNA, 25 bp, Homo sapien
tataacattagaaaacgagataatg

SEQ ID NO: 6038185 - DNA, 25 bp, Homo sapien
ttaaatcaaagcgaagaagaagggc

SEQ ID NO: 6038186 - DNA, 25 bp, Homo sapien
gggagatggccacctttaggttatg

SEQ ID NO: 6038187 - DNA, 25 bp, Homo sapien
tgcacataatctggacaactttcgg

SEQ ID NO: 6038188 - DNA, 25 bp, Homo sapien
agctatgctttgtaatgcgtgtggt

SEQ ID NO: 6038189 - DNA, 25 bp, Homo sapien
agagcttaagggtgattgtaatata

SEQ ID NO: 6038190 - DNA, 25 bp, Homo sapien
cctctacaacaccattatggagaag

SEQ ID NO: 6038191 - DNA, 25 bp, Homo sapien
tgaatcgcaagcaggagcgtcaata

SEQ ID NO: 6038192 - DNA, 25 bp, Homo sapien
gccgagcaaaaatcggcagttcaat

SEQ ID NO: 6038193 - DNA, 25 bp, Homo sapien
tcaagttaagaataatggacaaaca

SEQ ID NO: 6038194 - DNA, 25 bp, Homo sapien
gaaataggaaaagtaatacaaatca

SEQ ID NO: 6038195 - DNA, 25 bp, Homo sapien
cgtgtggtctctttttaaagcttca

SEQ ID NO: 6038196 - DNA, 25 bp, Homo sapien
aacagcttaaatcaaagcgaagaag

SEQ ID NO: 6038197 - DNA, 25 bp, Homo sapien
cctttaggttatgaagcagtatctg

SEQ ID NO: 6038198 - DNA, 25 bp, Homo sapien
gtaatgcgtgtggtctctttttaaa

SEQ ID NO: 6038199 - DNA, 25 bp, Homo sapien
taagggtgattgtaatatagaatca

SEQ ID NO: 6038200 - DNA, 25 bp, Homo sapien
agatgagcatggagctatgctttgt

SEQ ID NO: 6038201 - DNA, 25 bp, Homo sapien
aacaccattatggagaagagatgag

SEQ ID NO: 6038202 - DNA, 25 bp, Homo sapien
catatattacctaaaaatcaagtta

SEQ ID NO: 6038203 - DNA, 25 bp, Homo sapien
catattgggagatggccacctttag

SEQ ID NO: 6038204 - DNA, 25 bp, Homo sapien
caatatgaattttaaggcgaatgac

SEQ ID NO: 6038205 - DNA, 25 bp, Homo sapien
cgtatccaatgatgctaatgttcct

SEQ ID NO: 6038206 - DNA, 25 bp, Homo sapien
tgccaattgcaataataacgtatcc

SEQ ID NO: 6038207 - DNA, 25 bp, Homo sapien
agaatgagtccggatacgaattcat

SEQ ID NO: 6038208 - DNA, 25 bp, Homo sapien
gaagaagaagggcatattgggagat

SEQ ID NO: 6038209 - DNA, 25 bp, Homo sapien
taatggacaaacaatggatgccaat

SEQ ID NO: 6038210 - DNA, 25 bp, Homo sapien
aaacgagataatgtatttgaaccaa

SEQ ID NO: 6038211 - DNA, 25 bp, Homo sapien
gtatttgaaccaaaatcaagtgaaa

SEQ ID NO: 6038212 - DNA, 25 bp, Homo sapien
tttgaaaactgatgtaataaagtct

SEQ ID NO: 6038213 - DNA, 25 bp, Homo sapien
gcgaatgacaagtctttttccacat

SEQ ID NO: 6038214 - DNA, 25 bp, Homo sapien
agtgaaaacctcaacagcttaaatc

SEQ ID NO: 6038215 - DNA, 25 bp, Homo sapien
tctttttccacatctactgctggaa

SEQ ID NO: 6038216 - DNA, 25 bp, Homo sapien
taatctggacaactttcggaatcag

SEQ ID NO: 6038217 - DNA, 25 bp, Homo sapien
caatgatgctaatgttcctgtttgt

SEQ ID NO: 6038218 - DNA, 25 bp, Homo sapien
gaagggcatattgggagatggccac

SEQ ID NO: 6038219 - DNA, 25 bp, Homo sapien
gcaagcaggagcgtcaataagcaac

SEQ ID NO: 6038220 - DNA, 25 bp, Homo sapien
ttacaccatatattacctaaaaatc

SEQ ID NO: 6038221 - DNA, 25 bp, Homo sapien
tgctaatgttcctgtttgtaagaac

SEQ ID NO: 6038222 - DNA, 25 bp, Homo sapien
tgtaataaagtctcgaaataggaaa

SEQ ID NO: 6038223 - DNA, 25 bp, Homo sapien
aagcaacaatatgaattttaaggcg

SEQ ID NO: 6038224 - DNA, 25 bp, Homo sapien
ttgtaagaactgtttaacctctaca

SEQ ID NO: 6038225 - DNA, 25 bp, Homo sapien
gaatcagacgctgattgcagagctt

SEQ ID NO: 6038226 - DNA, 25 bp, Homo sapien
gctttgtaatgcgtgtggtctcttt

SEQ ID NO: 6038227 - DNA, 25 bp, Homo sapien
gctggaagaatgagtccggatacga

SEQ ID NO: 6038228 - DNA, 25 bp, Homo sapien
aggagcgtcaataagcaacaatatg

SEQ ID NO: 6038229 - DNA, 25 bp, Homo sapien
gacaagtctttttccacatctactg

SEQ ID NO: 6038230 - DNA, 25 bp, Homo sapien
caaaaatcggcagttcaattgcgtg

SEQ ID NO: 6038231 - DNA, 25 bp, Homo sapien
gaactgtttaacctctacaacacca

SEQ ID NO: 6038232 - DNA, 25 bp, Homo sapien
tctactgctggaagaatgagtccgg

SEQ ID NO: 6038233 - DNA, 25 bp, Homo sapien
gaattttaaggcgaatgacaagtct

SEQ ID NO: 6038234 - DNA, 25 bp, Homo sapien
tcggcagttcaattgcgtgaatcgc

SEQ ID NO: 6038235 - DNA, 25 bp, Homo sapien
taagaataatggacaaacaatggat

SEQ ID NO: 6038236 - DNA, 25 bp, Homo sapien
gaaccaaaatcaagtgaaaacctca

SEQ ID NO: 6038237 - DNA, 25 bp, Homo sapien
tgttcctgtttgtaagaactgttta

SEQ ID NO: 6038238 - DNA, 25 bp, Homo sapien
ggacaactttcggaatcagacgctg

SEQ ID NO: 6038239 - DNA, 25 bp, Homo sapien
tatacagggagctttagaagattgt

SEQ ID NO: 6038240 - DNA, 25 bp, Homo sapien
tcctatataaatctgtaacaagttc

SEQ ID NO: 6038241 - DNA, 25 bp, Homo sapien
gagctcgacatttcccgtctaattc

SEQ ID NO: 6038242 - DNA, 25 bp, Homo sapien
ttgattcggtacctcggatggatta

SEQ ID NO: 6038243 - DNA, 25 bp, Homo sapien
agattgtagaaacggtatgaaatga

SEQ ID NO: 6038244 - DNA, 25 bp, Homo sapien
tcacctaaatctttagctgggtgat

SEQ ID NO: 6038245 - DNA, 25 bp, Homo sapien
tcccgtctaattcattgatatgtct

SEQ ID NO: 6038246 - DNA, 25 bp, Homo sapien
gtagaggcaataccattattgcaat

SEQ ID NO: 6038247 - DNA, 25 bp, Homo sapien
ctcggttttcacgttgctaatcgca

SEQ ID NO: 6038248 - DNA, 25 bp, Homo sapien
tatttgagatggattgtgaatttgc

SEQ ID NO: 6038249 - DNA, 25 bp, Homo sapien
tcgtccagaaacatcagaactagaa

SEQ ID NO: 6038250 - DNA, 25 bp, Homo sapien
ccgtgaagaagtgggtgccagagtt

SEQ ID NO: 6038251 - DNA, 25 bp, Homo sapien
aatttagtggataactgatcaccta

SEQ ID NO: 6038252 - DNA, 25 bp, Homo sapien
tggattagagtcagtcgtccgtgaa

SEQ ID NO: 6038253 - DNA, 25 bp, Homo sapien
aaattttcgtccagaaacatcagaa

SEQ ID NO: 6038254 - DNA, 25 bp, Homo sapien
ggtgattttcaaattttcgtccaga

SEQ ID NO: 6038255 - DNA, 25 bp, Homo sapien
ccattattgcaattggacactattt

SEQ ID NO: 6038256 - DNA, 25 bp, Homo sapien
ggctgggtcgttacgcttagcagat

SEQ ID NO: 6038257 - DNA, 25 bp, Homo sapien
ctaattcattgatatgtctcctata

SEQ ID NO: 6038258 - DNA, 25 bp, Homo sapien
cggtacctcggatggattagagtca

SEQ ID NO: 6038259 - DNA, 25 bp, Homo sapien
gggagctttagaagattgtagaaac

SEQ ID NO: 6038260 - DNA, 25 bp, Homo sapien
acgcttagcagatattatatctggg

SEQ ID NO: 6038261 - DNA, 25 bp, Homo sapien
tagaaacggtatgaaatgaggcggt

SEQ ID NO: 6038262 - DNA, 25 bp, Homo sapien
ttgaagtactgctcaagcttccaag

SEQ ID NO: 6038263 - DNA, 25 bp, Homo sapien
agatattatatctggggaagacatc

SEQ ID NO: 6038264 - DNA, 25 bp, Homo sapien
actagaaacactatttgagatggat

SEQ ID NO: 6038265 - DNA, 25 bp, Homo sapien
actatttcacttccgttatttgata

SEQ ID NO: 6038266 - DNA, 25 bp, Homo sapien
ctcaagcatgtcgttaatagaagcc

SEQ ID NO: 6038267 - DNA, 25 bp, Homo sapien
tttggatatacagggagctttagaa

SEQ ID NO: 6038268 - DNA, 25 bp, Homo sapien
atcagaactagaaacactatttgag

SEQ ID NO: 6038269 - DNA, 25 bp, Homo sapien
tcaagcttccaagcagcattgataa

SEQ ID NO: 6038270 - DNA, 25 bp, Homo sapien
catttattctagttttgagctttat

SEQ ID NO: 6038271 - DNA, 25 bp, Homo sapien
gtggataactgatcacctaaatctt

SEQ ID NO: 6038272 - DNA, 25 bp, Homo sapien
caagttctaactcatttattctagt

SEQ ID NO: 6038273 - DNA, 25 bp, Homo sapien
gcaataccattattgcaattggaca

SEQ ID NO: 6038274 - DNA, 25 bp, Homo sapien
atttcttcttctttgtgcaatttag

SEQ ID NO: 6038275 - DNA, 25 bp, Homo sapien
tactgctcaagcttccaagcagcat

SEQ ID NO: 6038276 - DNA, 25 bp, Homo sapien
aatttgctttggatatacagggagc

SEQ ID NO: 6038277 - DNA, 25 bp, Homo sapien
agatggattgtgaatttgctttgga

SEQ ID NO: 6038278 - DNA, 25 bp, Homo sapien
tatatctggggaagacatcgtcgat

SEQ ID NO: 6038279 - DNA, 25 bp, Homo sapien
catgtcgttaatagaagccatgtgg

SEQ ID NO: 6038280 - DNA, 25 bp, Homo sapien
tttataatttcttcttctttgtgca

SEQ ID NO: 6038281 - DNA, 25 bp, Homo sapien
acgatctctcgtctcaagcatgtcg

SEQ ID NO: 6038282 - DNA, 25 bp, Homo sapien
tatgtctcctatataaatctgtaac

SEQ ID NO: 6038283 - DNA, 25 bp, Homo sapien
tgtcctttgcaaacgttcctcaaga

SEQ ID NO: 6038284 - DNA, 25 bp, Homo sapien
ttccaagcagcattgataagtgagg

SEQ ID NO: 6038285 - DNA, 25 bp, Homo sapien
gttaatagaagccatgtggaaagat

SEQ ID NO: 6038286 - DNA, 25 bp, Homo sapien
tttcacgttgctaatcgcacgatct

SEQ ID NO: 6038287 - DNA, 25 bp, Homo sapien
cattgatatgtctcctatataaatc

SEQ ID NO: 6038288 - DNA, 25 bp, Homo sapien
ctttgcaaacgttcctcaagagctc

SEQ ID NO: 6038289 - DNA, 25 bp, Homo sapien
ttgtgcaatttagtggataactgat

SEQ ID NO: 6038290 - DNA, 25 bp, Homo sapien
aactgatcacctaaatctttagctg

SEQ ID NO: 6038291 - DNA, 25 bp, Homo sapien
tttcaaattttcgtccagaaacatc

SEQ ID NO: 6038292 - DNA, 25 bp, Homo sapien
ataaatctgtaacaagttctaactc

SEQ ID NO: 6038293 - DNA, 25 bp, Homo sapien
ggtatgaaatgaggcggtgtcgtct

SEQ ID NO: 6038294 - DNA, 25 bp, Homo sapien
agagttgcggcggtagaggcaatac

SEQ ID NO: 6038295 - DNA, 25 bp, Homo sapien
tggggaagacatcgtcgatctaatt

SEQ ID NO: 6038296 - DNA, 25 bp, Homo sapien
attgtgaatttgctttggatataca

SEQ ID NO: 6038297 - DNA, 25 bp, Homo sapien
gttgctaatcgcacgatctctcgtc

SEQ ID NO: 6038298 - DNA, 25 bp, Homo sapien
ctgtaacaagttctaactcatttat

SEQ ID NO: 6038299 - DNA, 25 bp, Homo sapien
agacatcgtcgatctaatttgattc

SEQ ID NO: 6038300 - DNA, 25 bp, Homo sapien
cacttccgttatttgatattgaagt

SEQ ID NO: 6038301 - DNA, 25 bp, Homo sapien
ctcggatggattagagtcagtcgtc

SEQ ID NO: 6038302 - DNA, 25 bp, Homo sapien
tgcggcggtagaggcaataccatta

SEQ ID NO: 6038303 - DNA, 25 bp, Homo sapien
tgtcgtctcggttttcacgttgcta

SEQ ID NO: 6038304 - DNA, 25 bp, Homo sapien
aaacgttcctcaagagctcgacatt

SEQ ID NO: 6038305 - DNA, 25 bp, Homo sapien
gaagtgggtgccagagttgcggcgg

SEQ ID NO: 6038306 - DNA, 25 bp, Homo sapien
tttagaagattgtagaaacggtatg

SEQ ID NO: 6038307 - DNA, 25 bp, Homo sapien
aatcgcacgatctctcgtctcaagc

SEQ ID NO: 6038308 - DNA, 25 bp, Homo sapien
ttgatattgaagtactgctcaagct

SEQ ID NO: 6038309 - DNA, 25 bp, Homo sapien
gtcgttacgcttagcagatattata

SEQ ID NO: 6038310 - DNA, 25 bp, Homo sapien
cgttatttgatattgaagtactgct

SEQ ID NO: 6038311 - DNA, 25 bp, Homo sapien
gacatttcccgtctaattcattgat

SEQ ID NO: 6038312 - DNA, 25 bp, Homo sapien
tctaatttgattcggtacctcggat

SEQ ID NO: 6038313 - DNA, 25 bp, Homo sapien
tttgagctttataatttcttcttct

SEQ ID NO: 6038314 - DNA, 25 bp, Homo sapien
aaatctttagctgggtgattttcaa

SEQ ID NO: 6038315 - DNA, 25 bp, Homo sapien
agagtcagtcgtccgtgaagaagtg

SEQ ID NO: 6038316 - DNA, 25 bp, Homo sapien
ctaactcatttattctagttttgag

SEQ ID NO: 6038317 - DNA, 25 bp, Homo sapien
agaaacatcagaactagaaacacta

SEQ ID NO: 6038318 - DNA, 25 bp, Homo sapien
ttggacactatttcacttccgttat

SEQ ID NO: 6038319 - DNA, 25 bp, Homo sapien
aggcggtgtcgtctcggttttcacg

SEQ ID NO: 6038320 - DNA, 25 bp, Homo sapien
tcttctttgtgcaatttagtggata

SEQ ID NO: 6038321 - DNA, 25 bp, Homo sapien
tagctgggtgattttcaaattttcg

SEQ ID NO: 6038322 - DNA, 25 bp, Homo sapien
ggtgccagagttgcggcggtagagg

SEQ ID NO: 6038323 - DNA, 25 bp, Homo sapien
aacactatttgagatggattgtgaa

SEQ ID NO: 6038324 - DNA, 25 bp, Homo sapien
cgtcgatctaatttgattcggtacc

SEQ ID NO: 6038325 - DNA, 25 bp, Homo sapien
tctcgtctcaagcatgtcgttaata

SEQ ID NO: 6038326 - DNA, 25 bp, Homo sapien
tctagttttgagctttataatttct

SEQ ID NO: 6038327 - DNA, 25 bp, Homo sapien
ttgcaattggacactatttcacttc

SEQ ID NO: 6038328 - DNA, 25 bp, Homo sapien
aaatgaggcggtgtcgtctcggttt

SEQ ID NO: 6038329 - DNA, 25 bp, Homo sapien
agaagccatgtggaaagataaaggg

SEQ ID NO: 6038330 - DNA, 25 bp, Homo sapien
agtcgtccgtgaagaagtgggtgcc

SEQ ID NO: 6038331 - DNA, 25 bp, Homo sapien
tcctcaagagctcgacatttcccgt

SEQ ID NO: 6038332 - DNA, 25 bp, Homo sapien
cgttagcccctaacatgacattaag

SEQ ID NO: 6038333 - DNA, 25 bp, Homo sapien
ttggtggcaagacatgaaacaaagg

SEQ ID NO: 6038334 - DNA, 25 bp, Homo sapien
caatttgaatgatttggtggcaaga

SEQ ID NO: 6038335 - DNA, 25 bp, Homo sapien
agagaaacgcccattgcattgattt

SEQ ID NO: 6038336 - DNA, 25 bp, Homo sapien
ataagaaggtcgtcctcagcggttt

SEQ ID NO: 6038337 - DNA, 25 bp, Homo sapien
cccctaacatgacattaagtactga

SEQ ID NO: 6038338 - DNA, 25 bp, Homo sapien
tagaaagtccgataaaaatgcccca

SEQ ID NO: 6038339 - DNA, 25 bp, Homo sapien
tatttacagtgttaatttgaaacca

SEQ ID NO: 6038340 - DNA, 25 bp, Homo sapien
tatttgttcttccatcccgtcatcc

SEQ ID NO: 6038341 - DNA, 25 bp, Homo sapien
aacaatacgcatatcatcgtttata

SEQ ID NO: 6038342 - DNA, 25 bp, Homo sapien
tagtgttcaccgcaattggtgcatc

SEQ ID NO: 6038343 - DNA, 25 bp, Homo sapien
atgccccatcggtcccacaagtaga

SEQ ID NO: 6038344 - DNA, 25 bp, Homo sapien
ctttcttgttcaccctcctctcacg

SEQ ID NO: 6038345 - DNA, 25 bp, Homo sapien
atcatcgtttatagagaaacgccca

SEQ ID NO: 6038346 - DNA, 25 bp, Homo sapien
acgtgtatctgactcgtatttcaag

SEQ ID NO: 6038347 - DNA, 25 bp, Homo sapien
cttgttggttctaaaggtgagaaag

SEQ ID NO: 6038348 - DNA, 25 bp, Homo sapien
attgcattgatttcgttagccccta

SEQ ID NO: 6038349 - DNA, 25 bp, Homo sapien
catcccgtcatccttgttgttctaa

SEQ ID NO: 6038350 - DNA, 25 bp, Homo sapien
gccaagaattgtctttccgataagg

SEQ ID NO: 6038351 - DNA, 25 bp, Homo sapien
ctggatggttctaccagctggctcg

SEQ ID NO: 6038352 - DNA, 25 bp, Homo sapien
ttgttcaccctcctctcacgtgtat

SEQ ID NO: 6038353 - DNA, 25 bp, Homo sapien
atgcatcattagacaaaccacttga

SEQ ID NO: 6038354 - DNA, 25 bp, Homo sapien
ttgatttcgttagcccctaacatga

SEQ ID NO: 6038355 - DNA, 25 bp, Homo sapien
cattaagtactgatgaaaatttagt

SEQ ID NO: 6038356 - DNA, 25 bp, Homo sapien
gatcaaccaacttgttggttctaaa

SEQ ID NO: 6038357 - DNA, 25 bp, Homo sapien
gaatgatttggtggcaagacatgaa

SEQ ID NO: 6038358 - DNA, 25 bp, Homo sapien
tctttccgataaggaatacaggatc

SEQ ID NO: 6038359 - DNA, 25 bp, Homo sapien
ggctgcttatttacttgacgccaag

SEQ ID NO: 6038360 - DNA, 25 bp, Homo sapien
ttcttccatcccgtcatccttgttg

SEQ ID NO: 6038361 - DNA, 25 bp, Homo sapien
acttgatattgatgctcctcctact

SEQ ID NO: 6038362 - DNA, 25 bp, Homo sapien
atcagacaagaacaggcattggcta

SEQ ID NO: 6038363 - DNA, 25 bp, Homo sapien
acgcccattgcattgatttcgttag

SEQ ID NO: 6038364 - DNA, 25 bp, Homo sapien
tacagtgttaatttgaaaccagaat

SEQ ID NO: 6038365 - DNA, 25 bp, Homo sapien
tcccacaagtagatgcatcattaga

SEQ ID NO: 6038366 - DNA, 25 bp, Homo sapien
ataaaaatgccccatcggtcccaca

SEQ ID NO: 6038367 - DNA, 25 bp, Homo sapien
ttgaaaccagaatatggtacagctg

SEQ ID NO: 6038368 - DNA, 25 bp, Homo sapien
ccattgggctgcttatttacttgac

SEQ ID NO: 6038369 - DNA, 25 bp, Homo sapien
aagtagatgcatcattagacaaacc

SEQ ID NO: 6038370 - DNA, 25 bp, Homo sapien
gatccagtggtgaacaatacgcata

SEQ ID NO: 6038371 - DNA, 25 bp, Homo sapien
gtgcatctttcttgttcaccctcct

SEQ ID NO: 6038372 - DNA, 25 bp, Homo sapien
ccagaatatggtacagctgcattga

SEQ ID NO: 6038373 - DNA, 25 bp, Homo sapien
aattgtctttccgataaggaataca

SEQ ID NO: 6038374 - DNA, 25 bp, Homo sapien
aataagtatttgttcttccatcccg

SEQ ID NO: 6038375 - DNA, 25 bp, Homo sapien
ggttctaccagctggctcgtattaa

SEQ ID NO: 6038376 - DNA, 25 bp, Homo sapien
tattgatgctcctcctactatttac

SEQ ID NO: 6038377 - DNA, 25 bp, Homo sapien
tcctactatttacagtgttaatttg

SEQ ID NO: 6038378 - DNA, 25 bp, Homo sapien
ccaacttgttggttctaaaggtgag

SEQ ID NO: 6038379 - DNA, 25 bp, Homo sapien
gtggtgaacaatacgcatatcatcg

SEQ ID NO: 6038380 - DNA, 25 bp, Homo sapien
gatttcatcagacaagaacaggcat

SEQ ID NO: 6038381 - DNA, 25 bp, Homo sapien
tcaccgcaattggtgcatctttctt

SEQ ID NO: 6038382 - DNA, 25 bp, Homo sapien
ttggctaataagtatttgttcttcc

SEQ ID NO: 6038383 - DNA, 25 bp, Homo sapien
gttaatttgaaaccagaatatggta

SEQ ID NO: 6038384 - DNA, 25 bp, Homo sapien
tgctcctcctactatttacagtgtt

SEQ ID NO: 6038385 - DNA, 25 bp, Homo sapien
tttcaagtcgaagatcaaccaactt

SEQ ID NO: 6038386 - DNA, 25 bp, Homo sapien
gtttatagagaaacgcccattgcat

SEQ ID NO: 6038387 - DNA, 25 bp, Homo sapien
acaaaggatccagtggtgaacaata

SEQ ID NO: 6038388 - DNA, 25 bp, Homo sapien
gcaagacatgaaacaaaggatccag

SEQ ID NO: 6038389 - DNA, 25 bp, Homo sapien
ggaatacaggatccgttgctggatg

SEQ ID NO: 6038390 - DNA, 25 bp, Homo sapien
aagttttcggcatcaatttgaatga

SEQ ID NO: 6038391 - DNA, 25 bp, Homo sapien
catgaaacaaaggatccagtggtga

SEQ ID NO: 6038392 - DNA, 25 bp, Homo sapien
aggtcgtcctcagcggtttagtgtt

SEQ ID NO: 6038393 - DNA, 25 bp, Homo sapien
cctctcacgtgtatctgactcgtat

SEQ ID NO: 6038394 - DNA, 25 bp, Homo sapien
caggcattggctaataagtatttgt

SEQ ID NO: 6038395 - DNA, 25 bp, Homo sapien
gcattgaatttgtccgcggatttca

SEQ ID NO: 6038396 - DNA, 25 bp, Homo sapien
tatggtacagctgcattgaatttgt

SEQ ID NO: 6038397 - DNA, 25 bp, Homo sapien
ttatttacttgacgccaagaattgt

SEQ ID NO: 6038398 - DNA, 25 bp, Homo sapien
ctaaaggtgagaaagttttcggcat

SEQ ID NO: 6038399 - DNA, 25 bp, Homo sapien
caattggtgcatctttcttgttcac

SEQ ID NO: 6038400 - DNA, 25 bp, Homo sapien
tccgcggatttcatcagacaagaac

SEQ ID NO: 6038401 - DNA, 25 bp, Homo sapien
gtcatccttgttgttctaaccattg

SEQ ID NO: 6038402 - DNA, 25 bp, Homo sapien
aatttgtccgcggatttcatcagac

SEQ ID NO: 6038403 - DNA, 25 bp, Homo sapien
cattagacaaaccacttgatattga

SEQ ID NO: 6038404 - DNA, 25 bp, Homo sapien
accagctggctcgtattaataagaa

SEQ ID NO: 6038405 - DNA, 25 bp, Homo sapien
caggatccgttgctggatggttcta

SEQ ID NO: 6038406 - DNA, 25 bp, Homo sapien
cgataaggaatacaggatccgttgc

SEQ ID NO: 6038407 - DNA, 25 bp, Homo sapien
gtgagaaagttttcggcatcaattt

SEQ ID NO: 6038408 - DNA, 25 bp, Homo sapien
ccgttgctggatggttctaccagct

SEQ ID NO: 6038409 - DNA, 25 bp, Homo sapien
tcctcagcggtttagtgttcaccgc

SEQ ID NO: 6038410 - DNA, 25 bp, Homo sapien
gtattaataagaaggtcgtcctcag

SEQ ID NO: 6038411 - DNA, 25 bp, Homo sapien
tggctcgtattaataagaaggtcgt

SEQ ID NO: 6038412 - DNA, 25 bp, Homo sapien
agtccgataaaaatgccccatcggt

SEQ ID NO: 6038413 - DNA, 25 bp, Homo sapien
cggcatcaatttgaatgatttggtg

SEQ ID NO: 6038414 - DNA, 25 bp, Homo sapien
catcggtcccacaagtagatgcatc

SEQ ID NO: 6038415 - DNA, 25 bp, Homo sapien
gttctaaccattgggctgcttattt

SEQ ID NO: 6038416 - DNA, 25 bp, Homo sapien
acatgacattaagtactgatgaaaa

SEQ ID NO: 6038417 - DNA, 25 bp, Homo sapien
ctcgtatttcaagtcgaagatcaac

SEQ ID NO: 6038418 - DNA, 25 bp, Homo sapien
cttgacgccaagaattgtctttccg

SEQ ID NO: 6038419 - DNA, 25 bp, Homo sapien
gtcgaagatcaaccaacttgttggt

SEQ ID NO: 6038420 - DNA, 25 bp, Homo sapien
caaaccacttgatattgatgctcct

SEQ ID NO: 6038421 - DNA, 25 bp, Homo sapien
gcggtttagtgttcaccgcaattgg

SEQ ID NO: 6038422 - DNA, 25 bp, Homo sapien
cttgttgttctaaccattgggctgc

SEQ ID NO: 6038423 - DNA, 25 bp, Homo sapien
acagctgcattgaatttgtccgcgg

SEQ ID NO: 6038424 - DNA, 25 bp, Homo sapien
atctgactcgtatttcaagtcgaag

SEQ ID NO: 6038425 - DNA, 25 bp, Homo sapien
acgcatatcatcgtttatagagaaa

SEQ ID NO: 6038426 - DNA, 25 bp, Homo sapien
caagaacaggcattggctaataagt

SEQ ID NO: 6038427 - DNA, 25 bp, Homo sapien
gataatgccactttttacatataca

SEQ ID NO: 6038428 - DNA, 25 bp, Homo sapien
catgtcttgccaccaaatcattcaa

SEQ ID NO: 6038429 - DNA, 25 bp, Homo sapien
caagttggttgatcttcgacttgaa

SEQ ID NO: 6038430 - DNA, 25 bp, Homo sapien
ctctaatgctttgaatataagtgaa

SEQ ID NO: 6038431 - DNA, 25 bp, Homo sapien
gccactttttacatatacacgacga

SEQ ID NO: 6038432 - DNA, 25 bp, Homo sapien
tgaggacgaccttcttattaatacg

SEQ ID NO: 6038433 - DNA, 25 bp, Homo sapien
aatcaaatcttcgataatgccactt

SEQ ID NO: 6038434 - DNA, 25 bp, Homo sapien
aattttcatcagtacttaatgtcat

SEQ ID NO: 6038435 - DNA, 25 bp, Homo sapien
gtgaacaagaaagatgcaccaattg

SEQ ID NO: 6038436 - DNA, 25 bp, Homo sapien
cgtgagaggagggtgaacaagaaag

SEQ ID NO: 6038437 - DNA, 25 bp, Homo sapien
ttggagtgtagcatagcccaatcaa

SEQ ID NO: 6038438 - DNA, 25 bp, Homo sapien
tcttattaatacgagccagctggta

SEQ ID NO: 6038439 - DNA, 25 bp, Homo sapien
tgttaggggctaacgaaatcaatgc

SEQ ID NO: 6038440 - DNA, 25 bp, Homo sapien
tacttaatgtcatgttaggggctaa

SEQ ID NO: 6038441 - DNA, 25 bp, Homo sapien
gtagtcgattttcagagactctaat

SEQ ID NO: 6038442 - DNA, 25 bp, Homo sapien
aatgtcatgttaggggctaacgaaa

SEQ ID NO: 6038443 - DNA, 25 bp, Homo sapien
ccactggatcctttgtttcatgtct

SEQ ID NO: 6038444 - DNA, 25 bp, Homo sapien
tctcacctttagaaccaacaagttg

SEQ ID NO: 6038445 - DNA, 25 bp, Homo sapien
tgtagcatagcccaatcaatcaaat

SEQ ID NO: 6038446 - DNA, 25 bp, Homo sapien
atacacgtgagaggagggtgaacaa

SEQ ID NO: 6038447 - DNA, 25 bp, Homo sapien
ttcttcaaaatttccttaagcgtgc

SEQ ID NO: 6038448 - DNA, 25 bp, Homo sapien
aggagggtgaacaagaaagatgcac

SEQ ID NO: 6038449 - DNA, 25 bp, Homo sapien
tgatatgcgtattgttcaccactgg

SEQ ID NO: 6038450 - DNA, 25 bp, Homo sapien
tccccgtatttgccgctgcttctaa

SEQ ID NO: 6038451 - DNA, 25 bp, Homo sapien
gatcctttgtttcatgtcttgccac

SEQ ID NO: 6038452 - DNA, 25 bp, Homo sapien
taatacgagccagctggtagaacca

SEQ ID NO: 6038453 - DNA, 25 bp, Homo sapien
acgacgacaacccacagtagtaaca

SEQ ID NO: 6038454 - DNA, 25 bp, Homo sapien
cgaccttcttattaatacgagccag

SEQ ID NO: 6038455 - DNA, 25 bp, Homo sapien
atatacacgacgacaacccacagta

SEQ ID NO: 6038456 - DNA, 25 bp, Homo sapien
tccttcttcacaccgaacaaaccgc

SEQ ID NO: 6038457 - DNA, 25 bp, Homo sapien
ttgtttcatgtcttgccaccaaatc

SEQ ID NO: 6038458 - DNA, 25 bp, Homo sapien
gatgcaccaattgcggtgaacacta

SEQ ID NO: 6038459 - DNA, 25 bp, Homo sapien
ctctataaacgatgatatgcgtatt

SEQ ID NO: 6038460 - DNA, 25 bp, Homo sapien
tgactaaattttcatcagtacttaa

SEQ ID NO: 6038461 - DNA, 25 bp, Homo sapien
ccacagtagtaacactcatgactaa

SEQ ID NO: 6038462 - DNA, 25 bp, Homo sapien
ctttagaaccaacaagttggttgat

SEQ ID NO: 6038463 - DNA, 25 bp, Homo sapien
cgcctagtagtcgattttcagagac

SEQ ID NO: 6038464 - DNA, 25 bp, Homo sapien
catcagtacttaatgtcatgttagg

SEQ ID NO: 6038465 - DNA, 25 bp, Homo sapien
acactaaaccgctgaggacgacctt

SEQ ID NO: 6038466 - DNA, 25 bp, Homo sapien
ttgccaccaaatcattcaaattgat

SEQ ID NO: 6038467 - DNA, 25 bp, Homo sapien
tcaaaatttccttaagcgtgctatc

SEQ ID NO: 6038468 - DNA, 25 bp, Homo sapien
cataattccttcttcacaccgaaca

SEQ ID NO: 6038469 - DNA, 25 bp, Homo sapien
gagccagctggtagaaccatccagc

SEQ ID NO: 6038470 - DNA, 25 bp, Homo sapien
cagagactctaatgctttgaatata

SEQ ID NO: 6038471 - DNA, 25 bp, Homo sapien
atcttcgataatgccactttttaca

SEQ ID NO: 6038472 - DNA, 25 bp, Homo sapien
cttctaatatttttggagtgtagca

SEQ ID NO: 6038473 - DNA, 25 bp, Homo sapien
gctggtagaaccatccagcaacgga

SEQ ID NO: 6038474 - DNA, 25 bp, Homo sapien
tatttgccgctgcttctaatatttt

SEQ ID NO: 6038475 - DNA, 25 bp, Homo sapien
gcgtttctctataaacgatgatatg

SEQ ID NO: 6038476 - DNA, 25 bp, Homo sapien
tagtaacactcatgactaaattttc

SEQ ID NO: 6038477 - DNA, 25 bp, Homo sapien
gggctaacgaaatcaatgcaatggg

SEQ ID NO: 6038478 - DNA, 25 bp, Homo sapien
tgctatcgaatgagtagacatcaat

SEQ ID NO: 6038479 - DNA, 25 bp, Homo sapien
ttttacatatacacgacgacaaccc

SEQ ID NO: 6038480 - DNA, 25 bp, Homo sapien
aaccgctgaggacgaccttcttatt

SEQ ID NO: 6038481 - DNA, 25 bp, Homo sapien
aattgatgccgaaaactttctcacc

SEQ ID NO: 6038482 - DNA, 25 bp, Homo sapien
tgctttgaatataagtgaacccttt

SEQ ID NO: 6038483 - DNA, 25 bp, Homo sapien
atagcccaatcaatcaaatcttcga

SEQ ID NO: 6038484 - DNA, 25 bp, Homo sapien
agtcagatacacgtgagaggagggt

SEQ ID NO: 6038485 - DNA, 25 bp, Homo sapien
tggtctccccgtatttgccgctgct

SEQ ID NO: 6038486 - DNA, 25 bp, Homo sapien
gtttcatggtctccccgtatttgcc

SEQ ID NO: 6038487 - DNA, 25 bp, Homo sapien
ccgctgcttctaatatttttggagt

SEQ ID NO: 6038488 - DNA, 25 bp, Homo sapien
cgaatgagtagacatcaatcaagag

SEQ ID NO: 6038489 - DNA, 25 bp, Homo sapien
gacaacccacagtagtaacactcat

SEQ ID NO: 6038490 - DNA, 25 bp, Homo sapien
atatttttggagtgtagcatagccc

SEQ ID NO: 6038491 - DNA, 25 bp, Homo sapien
cattcaaattgatgccgaaaacttt

SEQ ID NO: 6038492 - DNA, 25 bp, Homo sapien
ttgcaaaccccataattccttcttc

SEQ ID NO: 6038493 - DNA, 25 bp, Homo sapien
acgaaatcaatgcaatgggcgtttc

SEQ ID NO: 6038494 - DNA, 25 bp, Homo sapien
aagaaagatgcaccaattgcggtga

SEQ ID NO: 6038495 - DNA, 25 bp, Homo sapien
tttccttaagcgtgctatcgaatga

SEQ ID NO: 6038496 - DNA, 25 bp, Homo sapien
accccataattccttcttcacaccg

SEQ ID NO: 6038497 - DNA, 25 bp, Homo sapien
aaacgatgatatgcgtattgttcac

SEQ ID NO: 6038498 - DNA, 25 bp, Homo sapien
caattgcggtgaacactaaaccgct

SEQ ID NO: 6038499 - DNA, 25 bp, Homo sapien
tcacaccgaacaaaccgcctagtag

SEQ ID NO: 6038500 - DNA, 25 bp, Homo sapien
cgaacaaaccgcctagtagtcgatt

SEQ ID NO: 6038501 - DNA, 25 bp, Homo sapien
catcaatcaagagtttcatggtctc

SEQ ID NO: 6038502 - DNA, 25 bp, Homo sapien
cactcatgactaaattttcatcagt

SEQ ID NO: 6038503 - DNA, 25 bp, Homo sapien
aaccaacaagttggttgatcttcga

SEQ ID NO: 6038504 - DNA, 25 bp, Homo sapien
tcaatgcaatgggcgtttctctata

SEQ ID NO: 6038505 - DNA, 25 bp, Homo sapien
tgttcaccactggatcctttgtttc

SEQ ID NO: 6038506 - DNA, 25 bp, Homo sapien
ggttgatcttcgacttgaaatacga

SEQ ID NO: 6038507 - DNA, 25 bp, Homo sapien
tcaagagtttcatggtctccccgta

SEQ ID NO: 6038508 - DNA, 25 bp, Homo sapien
caaaccgcctagtagtcgattttca

SEQ ID NO: 6038509 - DNA, 25 bp, Homo sapien
caatgggcgtttctctataaacgat

SEQ ID NO: 6038510 - DNA, 25 bp, Homo sapien
gcgtattgttcaccactggatcctt

SEQ ID NO: 6038511 - DNA, 25 bp, Homo sapien
aatacgagtcagatacacgtgagag

SEQ ID NO: 6038512 - DNA, 25 bp, Homo sapien
ccaaatcattcaaattgatgccgaa

SEQ ID NO: 6038513 - DNA, 25 bp, Homo sapien
gattttcagagactctaatgctttg

SEQ ID NO: 6038514 - DNA, 25 bp, Homo sapien
agtagacatcaatcaagagtttcat

SEQ ID NO: 6038515 - DNA, 25 bp, Homo sapien
tcttcgacttgaaatacgagtcaga

SEQ ID NO: 6038516 - DNA, 25 bp, Homo sapien
taagcgtgctatcgaatgagtagac

SEQ ID NO: 6038517 - DNA, 25 bp, Homo sapien
tgccgaaaactttctcacctttaga

SEQ ID NO: 6038518 - DNA, 25 bp, Homo sapien
caatcaatcaaatcttcgataatgc

SEQ ID NO: 6038519 - DNA, 25 bp, Homo sapien
acttgaaatacgagtcagatacacg

SEQ ID NO: 6038520 - DNA, 25 bp, Homo sapien
cggtgaacactaaaccgctgaggac

SEQ ID NO: 6038521 - DNA, 25 bp, Homo sapien
cagctagaggaaagtcttttatttc

SEQ ID NO: 6038522 - DNA, 25 bp, Homo sapien
cagttttcgatgctactaatagtac

SEQ ID NO: 6038523 - DNA, 25 bp, Homo sapien
aaccgatgtttttagagagctggag

SEQ ID NO: 6038524 - DNA, 25 bp, Homo sapien
agccaagtgttttaatgtgggaaat

SEQ ID NO: 6038525 - DNA, 25 bp, Homo sapien
ccaaaaaattatcaggtacttatcg

SEQ ID NO: 6038526 - DNA, 25 bp, Homo sapien
aacctcatgtggcggaagctgattt

SEQ ID NO: 6038527 - DNA, 25 bp, Homo sapien
gatgctgagttttttaacttcgaaa

SEQ ID NO: 6038528 - DNA, 25 bp, Homo sapien
tcaaagtatgtgtgataatggttgg

SEQ ID NO: 6038529 - DNA, 25 bp, Homo sapien
agacgtgagtggaaatgtcccaatg

SEQ ID NO: 6038530 - DNA, 25 bp, Homo sapien
tggaaagaattagacaatatgaaag

SEQ ID NO: 6038531 - DNA, 25 bp, Homo sapien
tggttggcctaccagctagaggaaa

SEQ ID NO: 6038532 - DNA, 25 bp, Homo sapien
tatgtgtgataatggttggcctacc

SEQ ID NO: 6038533 - DNA, 25 bp, Homo sapien
gcctaccagctagaggaaagtcttt

SEQ ID NO: 6038534 - DNA, 25 bp, Homo sapien
gtagcacatctcctgattatgaaaa

SEQ ID NO: 6038535 - DNA, 25 bp, Homo sapien
tagtaattaataagatcagaacata

SEQ ID NO: 6038536 - DNA, 25 bp, Homo sapien
cggaagctgattttttggaaagaat

SEQ ID NO: 6038537 - DNA, 25 bp, Homo sapien
tgaaagattttatgaacctttggac

SEQ ID NO: 6038538 - DNA, 25 bp, Homo sapien
ttatccataaaagccaagtgtttta

SEQ ID NO: 6038539 - DNA, 25 bp, Homo sapien
ataacgctaaggatatcggtagcac

SEQ ID NO: 6038540 - DNA, 25 bp, Homo sapien
aagaagacggatctgtggcagtttt

SEQ ID NO: 6038541 - DNA, 25 bp, Homo sapien
gttggtcaatattattgaagaagta

SEQ ID NO: 6038542 - DNA, 25 bp, Homo sapien
atgtggcggaagctgattttttgga

SEQ ID NO: 6038543 - DNA, 25 bp, Homo sapien
atcatgaactgattataaataacgc

SEQ ID NO: 6038544 - DNA, 25 bp, Homo sapien
ttactaaagaagacggatctgtggc

SEQ ID NO: 6038545 - DNA, 25 bp, Homo sapien
tacttatcgtggttatccataaaag

SEQ ID NO: 6038546 - DNA, 25 bp, Homo sapien
aaaattatcaggtacttatcgtggt

SEQ ID NO: 6038547 - DNA, 25 bp, Homo sapien
gtaacgatcatgaactgattataaa

SEQ ID NO: 6038548 - DNA, 25 bp, Homo sapien
atatcggtagcacatctcctgatta

SEQ ID NO: 6038549 - DNA, 25 bp, Homo sapien
gatatcaaagtatgtgtgataatgg

SEQ ID NO: 6038550 - DNA, 25 bp, Homo sapien
gaaaatacagataattttaaactca

SEQ ID NO: 6038551 - DNA, 25 bp, Homo sapien
agtgttttaatgtgggaaattacag

SEQ ID NO: 6038552 - DNA, 25 bp, Homo sapien
ccaaaatgccataaaagatattgtt

SEQ ID NO: 6038553 - DNA, 25 bp, Homo sapien
tagagagctggagtaacgatcatga

SEQ ID NO: 6038554 - DNA, 25 bp, Homo sapien
aatgtcccaatggatgctgagtttt

SEQ ID NO: 6038555 - DNA, 25 bp, Homo sapien
cttaaagatatatgtgaaaagaata

SEQ ID NO: 6038556 - DNA, 25 bp, Homo sapien
gatatatgtgaaaagaataatattc

SEQ ID NO: 6038557 - DNA, 25 bp, Homo sapien
tgtgggaaattacagaagagacgtg

SEQ ID NO: 6038558 - DNA, 25 bp, Homo sapien
ggatatgacgttcattaagttggtc

SEQ ID NO: 6038559 - DNA, 25 bp, Homo sapien
aaattacagaagagacgtgagtgga

SEQ ID NO: 6038560 - DNA, 25 bp, Homo sapien
gctggagtaacgatcatgaactgat

SEQ ID NO: 6038561 - DNA, 25 bp, Homo sapien
ttaataagatcagaacatatttgga

SEQ ID NO: 6038562 - DNA, 25 bp, Homo sapien
ataattttaaactcagagaattggc

SEQ ID NO: 6038563 - DNA, 25 bp, Homo sapien
aactgattataaataacgctaagga

SEQ ID NO: 6038564 - DNA, 25 bp, Homo sapien
atgaaaactctgaacctcatgtggc

SEQ ID NO: 6038565 - DNA, 25 bp, Homo sapien
atcaggtacttatcgtggttatcca

SEQ ID NO: 6038566 - DNA, 25 bp, Homo sapien
tgattttttggaaagaattagacaa

SEQ ID NO: 6038567 - DNA, 25 bp, Homo sapien
aaatggcttaaagatatatgtgaaa

SEQ ID NO: 6038568 - DNA, 25 bp, Homo sapien
tgtttttagagagctggagtaacga

SEQ ID NO: 6038569 - DNA, 25 bp, Homo sapien
cataaaagccaagtgttttaatgtg

SEQ ID NO: 6038570 - DNA, 25 bp, Homo sapien
ccaaaaagataaggatatgacgttc

SEQ ID NO: 6038571 - DNA, 25 bp, Homo sapien
agataaggatatgacgttcattaag

SEQ ID NO: 6038572 - DNA, 25 bp, Homo sapien
acaatatgaaagattttatgaacct

SEQ ID NO: 6038573 - DNA, 25 bp, Homo sapien
ctactaatagtacacgtaaaagaag

SEQ ID NO: 6038574 - DNA, 25 bp, Homo sapien
atagtacacgtaaaagaaggaaatg

SEQ ID NO: 6038575 - DNA, 25 bp, Homo sapien
cagaagagacgtgagtggaaatgtc

SEQ ID NO: 6038576 - DNA, 25 bp, Homo sapien
tcgatgctactaatagtacacgtaa

SEQ ID NO: 6038577 - DNA, 25 bp, Homo sapien
catctcctgattatgaaaactctga

SEQ ID NO: 6038578 - DNA, 25 bp, Homo sapien
gagtggaaatgtcccaatggatgct

SEQ ID NO: 6038579 - DNA, 25 bp, Homo sapien
gaattggctgcccaaaatgccataa

SEQ ID NO: 6038580 - DNA, 25 bp, Homo sapien
agaataatattcaaccgatgttttt

SEQ ID NO: 6038581 - DNA, 25 bp, Homo sapien
ttaaactcagagaattggctgccca

SEQ ID NO: 6038582 - DNA, 25 bp, Homo sapien
gacgttcattaagttggtcaatatt

SEQ ID NO: 6038583 - DNA, 25 bp, Homo sapien
actctgaacctcatgtggcggaagc

SEQ ID NO: 6038584 - DNA, 25 bp, Homo sapien
caatattattgaagaagtagtaatt

SEQ ID NO: 6038585 - DNA, 25 bp, Homo sapien
agaaggaaatggcttaaagatatat

SEQ ID NO: 6038586 - DNA, 25 bp, Homo sapien
tattgaagaagtagtaattaataag

SEQ ID NO: 6038587 - DNA, 25 bp, Homo sapien
tcgtggttatccataaaagccaagt

SEQ ID NO: 6038588 - DNA, 25 bp, Homo sapien
tgccataaaagatattgttaatttt

SEQ ID NO: 6038589 - DNA, 25 bp, Homo sapien
gtgaaaagaataatattcaaccgat

SEQ ID NO: 6038590 - DNA, 25 bp, Homo sapien
atattcaaccgatgtttttagagag

SEQ ID NO: 6038591 - DNA, 25 bp, Homo sapien
ctgattatgaaaactctgaacctca

SEQ ID NO: 6038592 - DNA, 25 bp, Homo sapien
ccaatggatgctgagttttttaact

SEQ ID NO: 6038593 - DNA, 25 bp, Homo sapien
gacccccaaaaagataaggatatga

SEQ ID NO: 6038594 - DNA, 25 bp, Homo sapien
tgataatggttggcctaccagctag

SEQ ID NO: 6038595 - DNA, 25 bp, Homo sapien
atacagataattttaaactcagaga

SEQ ID NO: 6038596 - DNA, 25 bp, Homo sapien
tcagagaattggctgcccaaaatgc

SEQ ID NO: 6038597 - DNA, 25 bp, Homo sapien
acggatctgtggcagttttcgatgc

SEQ ID NO: 6038598 - DNA, 25 bp, Homo sapien
gaattagacaatatgaaagatttta

SEQ ID NO: 6038599 - DNA, 25 bp, Homo sapien
cattaagttggtcaatattattgaa

SEQ ID NO: 6038600 - DNA, 25 bp, Homo sapien
ttataaataacgctaaggatatcgg

SEQ ID NO: 6038601 - DNA, 25 bp, Homo sapien
aagaagtagtaattaataagatcag

SEQ ID NO: 6038602 - DNA, 25 bp, Homo sapien
ttttaatgtgggaaattacagaaga

SEQ ID NO: 6038603 - DNA, 25 bp, Homo sapien
ggctgcccaaaatgccataaaagat

SEQ ID NO: 6038604 - DNA, 25 bp, Homo sapien
ctaaggatatcggtagcacatctcc

SEQ ID NO: 6038605 - DNA, 25 bp, Homo sapien
ctgtggcagttttcgatgctactaa

SEQ ID NO: 6038606 - DNA, 25 bp, Homo sapien
tctaaacgaatcactacatctctgt

SEQ ID NO: 6038607 - DNA, 25 bp, Homo sapien
ggattcctcctgtggaacgttcata

SEQ ID NO: 6038608 - DNA, 25 bp, Homo sapien
tatgattctccaccacgatatctgt

SEQ ID NO: 6038609 - DNA, 25 bp, Homo sapien
tatttgtcattatcacgtgctttaa

SEQ ID NO: 6038610 - DNA, 25 bp, Homo sapien
attttttagcgtactgaaagcctct

SEQ ID NO: 6038611 - DNA, 25 bp, Homo sapien
gttataatgagaacattttcttggc

SEQ ID NO: 6038612 - DNA, 25 bp, Homo sapien
agggaagataatttgccgtttgttg

SEQ ID NO: 6038613 - DNA, 25 bp, Homo sapien
tgaagtttagttgagctttgagaaa

SEQ ID NO: 6038614 - DNA, 25 bp, Homo sapien
acgggctctaaacgaatcactacat

SEQ ID NO: 6038615 - DNA, 25 bp, Homo sapien
tctctgtatgattctccaccacgat

SEQ ID NO: 6038616 - DNA, 25 bp, Homo sapien
cgtcacaaacgccagcgtctaattc

SEQ ID NO: 6038617 - DNA, 25 bp, Homo sapien
actgaaagcctctttcagacagtga

SEQ ID NO: 6038618 - DNA, 25 bp, Homo sapien
gagctttgagaaagctcacctactt

SEQ ID NO: 6038619 - DNA, 25 bp, Homo sapien
gacatccaaggggattcctcctgtg

SEQ ID NO: 6038620 - DNA, 25 bp, Homo sapien
tggaagtccacacggtcaaatttat

SEQ ID NO: 6038621 - DNA, 25 bp, Homo sapien
tcttggcgctccaattccataatga

SEQ ID NO: 6038622 - DNA, 25 bp, Homo sapien
cagcgtctaattcatcaagtgcttt

SEQ ID NO: 6038623 - DNA, 25 bp, Homo sapien
tctccaccacgatatctgtactcgt

SEQ ID NO: 6038624 - DNA, 25 bp, Homo sapien
actacatctctgtatgattctccac

SEQ ID NO: 6038625 - DNA, 25 bp, Homo sapien
tgtgtagtgggattgacatccaagg

SEQ ID NO: 6038626 - DNA, 25 bp, Homo sapien
acggcttgatgagttataatgagaa

SEQ ID NO: 6038627 - DNA, 25 bp, Homo sapien
gttcataaaatatgcatatatacac

SEQ ID NO: 6038628 - DNA, 25 bp, Homo sapien
gtcattccgtcacaaacgccagcgt

SEQ ID NO: 6038629 - DNA, 25 bp, Homo sapien
gctttaaaatcttcaggatattctt

SEQ ID NO: 6038630 - DNA, 25 bp, Homo sapien
cctacttggcttgtacccttctctt

SEQ ID NO: 6038631 - DNA, 25 bp, Homo sapien
tcttatagggaagataatttgccgt

SEQ ID NO: 6038632 - DNA, 25 bp, Homo sapien
ataatgacgggctctaaacgaatca

SEQ ID NO: 6038633 - DNA, 25 bp, Homo sapien
tctttcactaactgctccaattttt

SEQ ID NO: 6038634 - DNA, 25 bp, Homo sapien
aattttggtgacctttgtgccatag

SEQ ID NO: 6038635 - DNA, 25 bp, Homo sapien
ttaaggtggaagtccacacggtcaa

SEQ ID NO: 6038636 - DNA, 25 bp, Homo sapien
tgcagggatgtttgctttaattttg

SEQ ID NO: 6038637 - DNA, 25 bp, Homo sapien
gataatttgccgtttgttgtgttct

SEQ ID NO: 6038638 - DNA, 25 bp, Homo sapien
atttcctcatacgtcattccgtcac

SEQ ID NO: 6038639 - DNA, 25 bp, Homo sapien
ccaaggggattcctcctgtggaacg

SEQ ID NO: 6038640 - DNA, 25 bp, Homo sapien
ctttgtgccataggccctaggctcc

SEQ ID NO: 6038641 - DNA, 25 bp, Homo sapien
ggtgacctttgtgccataggcccta

SEQ ID NO: 6038642 - DNA, 25 bp, Homo sapien
tatatgtactcactgcagggatgtt

SEQ ID NO: 6038643 - DNA, 25 bp, Homo sapien
ccataggccctaggctccagcttga

SEQ ID NO: 6038644 - DNA, 25 bp, Homo sapien
tgcatatatacaccgaagtacggct

SEQ ID NO: 6038645 - DNA, 25 bp, Homo sapien
ctaactgctccaattttttagcgta

SEQ ID NO: 6038646 - DNA, 25 bp, Homo sapien
gcgctctctttcactaactgctcca

SEQ ID NO: 6038647 - DNA, 25 bp, Homo sapien
tttcagacagtgatgaatccccgcc

SEQ ID NO: 6038648 - DNA, 25 bp, Homo sapien
tcattatcacgtgctttaaaatctt

SEQ ID NO: 6038649 - DNA, 25 bp, Homo sapien
gatgtttgctttaattttggtgacc

SEQ ID NO: 6038650 - DNA, 25 bp, Homo sapien
agcctctttcagacagtgatgaatc

SEQ ID NO: 6038651 - DNA, 25 bp, Homo sapien
gctccaattttttagcgtactgaaa

SEQ ID NO: 6038652 - DNA, 25 bp, Homo sapien
gctccagcttgatcaatgtgtgtag

SEQ ID NO: 6038653 - DNA, 25 bp, Homo sapien
ttttcaatttcctcatacgtcattc

SEQ ID NO: 6038654 - DNA, 25 bp, Homo sapien
cgaatcactacatctctgtatgatt

SEQ ID NO: 6038655 - DNA, 25 bp, Homo sapien
atacaccgaagtacggcttgatgag

SEQ ID NO: 6038656 - DNA, 25 bp, Homo sapien
tcacgtgctttaaaatcttcaggat

SEQ ID NO: 6038657 - DNA, 25 bp, Homo sapien
tttatttctcctgcgctctctttca

SEQ ID NO: 6038658 - DNA, 25 bp, Homo sapien
tggaacgttcataaaatatgcatat

SEQ ID NO: 6038659 - DNA, 25 bp, Homo sapien
cagttgatgaagtttagttgagctt

SEQ ID NO: 6038660 - DNA, 25 bp, Homo sapien
cgaagtacggcttgatgagttataa

SEQ ID NO: 6038661 - DNA, 25 bp, Homo sapien
caggatattctttttcaatttcctc

SEQ ID NO: 6038662 - DNA, 25 bp, Homo sapien
gcagtttcttatagggaagataatt

SEQ ID NO: 6038663 - DNA, 25 bp, Homo sapien
gcttgatcaatgtgtgtagtgggat

SEQ ID NO: 6038664 - DNA, 25 bp, Homo sapien
catcaagtgctttccattgcagttt

SEQ ID NO: 6038665 - DNA, 25 bp, Homo sapien
aatcttcaggatattctttttcaat

SEQ ID NO: 6038666 - DNA, 25 bp, Homo sapien
tacccttctctttatatgtactcac

SEQ ID NO: 6038667 - DNA, 25 bp, Homo sapien
atgagaacattttcttggcgctcca

SEQ ID NO: 6038668 - DNA, 25 bp, Homo sapien
ccacgatatctgtactcgtatttgt

SEQ ID NO: 6038669 - DNA, 25 bp, Homo sapien
gggattgacatccaaggggattcct

SEQ ID NO: 6038670 - DNA, 25 bp, Homo sapien
ctaattcatcaagtgctttccattg

SEQ ID NO: 6038671 - DNA, 25 bp, Homo sapien
tcatacgtcattccgtcacaaacgc

SEQ ID NO: 6038672 - DNA, 25 bp, Homo sapien
ggcttgtacccttctctttatatgt

SEQ ID NO: 6038673 - DNA, 25 bp, Homo sapien
cacacggtcaaatttatttctcctg

SEQ ID NO: 6038674 - DNA, 25 bp, Homo sapien
aattccataatgacgggctctaaac

SEQ ID NO: 6038675 - DNA, 25 bp, Homo sapien
aaaatatgcatatatacaccgaagt

SEQ ID NO: 6038676 - DNA, 25 bp, Homo sapien
ttagttgagctttgagaaagctcac

SEQ ID NO: 6038677 - DNA, 25 bp, Homo sapien
ccctaggctccagcttgatcaatgt

SEQ ID NO: 6038678 - DNA, 25 bp, Homo sapien
actcactgcagggatgtttgcttta

SEQ ID NO: 6038679 - DNA, 25 bp, Homo sapien
tctcctgcgctctctttcactaact

SEQ ID NO: 6038680 - DNA, 25 bp, Homo sapien
tccattgcagtttcttatagggaag

SEQ ID NO: 6038681 - DNA, 25 bp, Homo sapien
tactcgtatttgtcattatcacgtg

SEQ ID NO: 6038682 - DNA, 25 bp, Homo sapien
cgctccaattccataatgacgggct

SEQ ID NO: 6038683 - DNA, 25 bp, Homo sapien
tattctttttcaatttcctcatacg

SEQ ID NO: 6038684 - DNA, 25 bp, Homo sapien
gtgctttccattgcagtttcttata

SEQ ID NO: 6038685 - DNA, 25 bp, Homo sapien
agctcacctacttggcttgtaccct

SEQ ID NO: 6038686 - DNA, 25 bp, Homo sapien
tcaatgtgtgtagtgggattgacat

SEQ ID NO: 6038687 - DNA, 25 bp, Homo sapien
tctctttatatgtactcactgcagg

SEQ ID NO: 6038688 - DNA, 25 bp, Homo sapien
ctcctgtggaacgttcataaaatat

SEQ ID NO: 6038689 - DNA, 25 bp, Homo sapien
tgatgagttataatgagaacatttt

SEQ ID NO: 6038690 - DNA, 25 bp, Homo sapien
tgagaaagctcacctacttggcttg

SEQ ID NO: 6038691 - DNA, 25 bp, Homo sapien
tatctgtactcgtatttgtcattat

SEQ ID NO: 6038692 - DNA, 25 bp, Homo sapien
gtcaaatttatttctcctgcgctct

SEQ ID NO: 6038693 - DNA, 25 bp, Homo sapien
acattttcttggcgctccaattcca

SEQ ID NO: 6038694 - DNA, 25 bp, Homo sapien
aaacgccagcgtctaattcatcaag

SEQ ID NO: 6038695 - DNA, 25 bp, Homo sapien
tagcgtactgaaagcctctttcaga

SEQ ID NO: 6038696 - DNA, 25 bp, Homo sapien
aattccccaaggacatgttctactc

SEQ ID NO: 6038697 - DNA, 25 bp, Homo sapien
cgacaggttccaagacgcaacctcg

SEQ ID NO: 6038698 - DNA, 25 bp, Homo sapien
ggccacttcgcttttccagaaagaa

SEQ ID NO: 6038699 - DNA, 25 bp, Homo sapien
attgtccgacaggttccaagacgca

SEQ ID NO: 6038700 - DNA, 25 bp, Homo sapien
tttgccgtgcaacggtccaaggagc

SEQ ID NO: 6038701 - DNA, 25 bp, Homo sapien
atcttatttgccgtgcaacggtcca

SEQ ID NO: 6038702 - DNA, 25 bp, Homo sapien
agaaaatattggaactggttcctct

SEQ ID NO: 6038703 - DNA, 25 bp, Homo sapien
cctgccgcgcccgtagggtctaagg

SEQ ID NO: 6038704 - DNA, 25 bp, Homo sapien
tgcgtttcaatacggagtcatggag

SEQ ID NO: 6038705 - DNA, 25 bp, Homo sapien
gtaccaattccccaaggacatgttc

SEQ ID NO: 6038706 - DNA, 25 bp, Homo sapien
cgctacattcgtatttcatcaaggg

SEQ ID NO: 6038707 - DNA, 25 bp, Homo sapien
ggtccaaggagcacgactccttgca

SEQ ID NO: 6038708 - DNA, 25 bp, Homo sapien
tcaatacggagtcatggagtaccaa

SEQ ID NO: 6038709 - DNA, 25 bp, Homo sapien
tctactcggcaagacacaccgacga

SEQ ID NO: 6038710 - DNA, 25 bp, Homo sapien
tcgttatgaagaggccacttcgctt

SEQ ID NO: 6038711 - DNA, 25 bp, Homo sapien
ctagagaaaatattggaactggttc

SEQ ID NO: 6038712 - DNA, 25 bp, Homo sapien
attcgtatttcatcaagggtggtga

SEQ ID NO: 6038713 - DNA, 25 bp, Homo sapien
ttgagcaggtatgcctcattgtccg

SEQ ID NO: 6038714 - DNA, 25 bp, Homo sapien
cagaaattgagcaggtatgcctcat

SEQ ID NO: 6038715 - DNA, 25 bp, Homo sapien
gacccacagaaattgagcaggtatg

SEQ ID NO: 6038716 - DNA, 25 bp, Homo sapien
aagcaggttagtgcttatcagcacg

SEQ ID NO: 6038717 - DNA, 25 bp, Homo sapien
tcctctttcgcctaccagttttgtc

SEQ ID NO: 6038718 - DNA, 25 bp, Homo sapien
catggagtaccaattccccaaggac

SEQ ID NO: 6038719 - DNA, 25 bp, Homo sapien
agaaacggtagaaatttcatccata

SEQ ID NO: 6038720 - DNA, 25 bp, Homo sapien
gacaagttgatatttacgtcgatga

SEQ ID NO: 6038721 - DNA, 25 bp, Homo sapien
aatttcatccataagcaggttagtg

SEQ ID NO: 6038722 - DNA, 25 bp, Homo sapien
aggagcacgactccttgcagcactg

SEQ ID NO: 6038723 - DNA, 25 bp, Homo sapien
cctaccagttttgtcacaaagtatc

SEQ ID NO: 6038724 - DNA, 25 bp, Homo sapien
ggtagaaatttcatccataagcagg

SEQ ID NO: 6038725 - DNA, 25 bp, Homo sapien
gtcacaaagtatctgcctgccgcgc

SEQ ID NO: 6038726 - DNA, 25 bp, Homo sapien
ccttgcagcactgggagacgattcc

SEQ ID NO: 6038727 - DNA, 25 bp, Homo sapien
cttttggtggaacgctggtatcaca

SEQ ID NO: 6038728 - DNA, 25 bp, Homo sapien
gcctcattgtccgacaggttccaag

SEQ ID NO: 6038729 - DNA, 25 bp, Homo sapien
tggtgatccgcggaccaagatcacg

SEQ ID NO: 6038730 - DNA, 25 bp, Homo sapien
gccagaccctcatcgttatgaagag

SEQ ID NO: 6038731 - DNA, 25 bp, Homo sapien
aacctcgatgagcaagtatgtggat

SEQ ID NO: 6038732 - DNA, 25 bp, Homo sapien
gatcacgtaccatgtgcagaatctg

SEQ ID NO: 6038733 - DNA, 25 bp, Homo sapien
agttttgtcacaaagtatctgcctg

SEQ ID NO: 6038734 - DNA, 25 bp, Homo sapien
gcttatcagcacgacaagttgatat

SEQ ID NO: 6038735 - DNA, 25 bp, Homo sapien
caggcctgcaaggtaagcagccaga

SEQ ID NO: 6038736 - DNA, 25 bp, Homo sapien
cgcgcccgtagggtctaagggcact

SEQ ID NO: 6038737 - DNA, 25 bp, Homo sapien
gtaccatgtgcagaatctgagaaac

SEQ ID NO: 6038738 - DNA, 25 bp, Homo sapien
tcattgcatactgtgccattgaact

SEQ ID NO: 6038739 - DNA, 25 bp, Homo sapien
cgattccaggcctgcaaggtaagca

SEQ ID NO: 6038740 - DNA, 25 bp, Homo sapien
acatgttctactcggcaagacacac

SEQ ID NO: 6038741 - DNA, 25 bp, Homo sapien
atcgctgctggcgtcattgcatact

SEQ ID NO: 6038742 - DNA, 25 bp, Homo sapien
tcaagggtggtgatccgcggaccaa

SEQ ID NO: 6038743 - DNA, 25 bp, Homo sapien
tccgcggaccaagatcacgtaccat

SEQ ID NO: 6038744 - DNA, 25 bp, Homo sapien
tcgatgatcttatttgccgtgcaac

SEQ ID NO: 6038745 - DNA, 25 bp, Homo sapien
ggagacgattccaggcctgcaaggt

SEQ ID NO: 6038746 - DNA, 25 bp, Homo sapien
tgtgcagaatctgagaaacggtaga

SEQ ID NO: 6038747 - DNA, 25 bp, Homo sapien
ctttcgcctaccagttttgtcacaa

SEQ ID NO: 6038748 - DNA, 25 bp, Homo sapien
gttagtgcttatcagcacgacaagt

SEQ ID NO: 6038749 - DNA, 25 bp, Homo sapien
tgaagaggccacttcgcttttccag

SEQ ID NO: 6038750 - DNA, 25 bp, Homo sapien
gctggcgtcattgcatactgtgcca

SEQ ID NO: 6038751 - DNA, 25 bp, Homo sapien
agacgcaacctcgatgagcaagtat

SEQ ID NO: 6038752 - DNA, 25 bp, Homo sapien
actggttcctctttcgcctaccagt

SEQ ID NO: 6038753 - DNA, 25 bp, Homo sapien
acgactccttgcagcactgggagac

SEQ ID NO: 6038754 - DNA, 25 bp, Homo sapien
ccaaggacatgttctactcggcaag

SEQ ID NO: 6038755 - DNA, 25 bp, Homo sapien
caagtatgtggatgcgtttcaatac

SEQ ID NO: 6038756 - DNA, 25 bp, Homo sapien
cagcacgacaagttgatatttacgt

SEQ ID NO: 6038757 - DNA, 25 bp, Homo sapien
attggaactggttcctctttcgcct

SEQ ID NO: 6038758 - DNA, 25 bp, Homo sapien
gaacttcttccccacatcgctacat

SEQ ID NO: 6038759 - DNA, 25 bp, Homo sapien
gatgagcaagtatgtggatgcgttt

SEQ ID NO: 6038760 - DNA, 25 bp, Homo sapien
taagggcacttttggtggaacgctg

SEQ ID NO: 6038761 - DNA, 25 bp, Homo sapien
tgtggatgcgtttcaatacggagtc

SEQ ID NO: 6038762 - DNA, 25 bp, Homo sapien
aagtatctgcctgccgcgcccgtag

SEQ ID NO: 6038763 - DNA, 25 bp, Homo sapien
aggtatgcctcattgtccgacaggt

SEQ ID NO: 6038764 - DNA, 25 bp, Homo sapien
atccataagcaggttagtgcttatc

SEQ ID NO: 6038765 - DNA, 25 bp, Homo sapien
atcacaatcgctgctggcgtcattg

SEQ ID NO: 6038766 - DNA, 25 bp, Homo sapien
cggcaagacacaccgacgagctgga

SEQ ID NO: 6038767 - DNA, 25 bp, Homo sapien
gaatctgagaaacggtagaaatttc

SEQ ID NO: 6038768 - DNA, 25 bp, Homo sapien
tcttccccacatcgctacattcgta

SEQ ID NO: 6038769 - DNA, 25 bp, Homo sapien
gcaaggtaagcagccagaccctcat

SEQ ID NO: 6038770 - DNA, 25 bp, Homo sapien
gctggtatcacaatcgctgctggcg

SEQ ID NO: 6038771 - DNA, 25 bp, Homo sapien
taagcagccagaccctcatcgttat

SEQ ID NO: 6038772 - DNA, 25 bp, Homo sapien
gcactgggagacgattccaggcctg

SEQ ID NO: 6038773 - DNA, 25 bp, Homo sapien
gttctggacccacagaaattgagca

SEQ ID NO: 6038774 - DNA, 25 bp, Homo sapien
atttcatcaagggtggtgatccgcg

SEQ ID NO: 6038775 - DNA, 25 bp, Homo sapien
ttgatatttacgtcgatgatcttat

SEQ ID NO: 6038776 - DNA, 25 bp, Homo sapien
catactgtgccattgaacttcttcc

SEQ ID NO: 6038777 - DNA, 25 bp, Homo sapien
tttacgtcgatgatcttatttgccg

SEQ ID NO: 6038778 - DNA, 25 bp, Homo sapien
ttccagaaagaagttctggacccac

SEQ ID NO: 6038779 - DNA, 25 bp, Homo sapien
tgcaacggtccaaggagcacgactc

SEQ ID NO: 6038780 - DNA, 25 bp, Homo sapien
cggagtcatggagtaccaattcccc

SEQ ID NO: 6038781 - DNA, 25 bp, Homo sapien
gaccaagatcacgtaccatgtgcag

SEQ ID NO: 6038782 - DNA, 25 bp, Homo sapien
ccctcatcgttatgaagaggccact

SEQ ID NO: 6038783 - DNA, 25 bp, Homo sapien
gacacaccgacgagctggattattt

SEQ ID NO: 6038784 - DNA, 25 bp, Homo sapien
gttccaagacgcaacctcgatgagc

SEQ ID NO: 6038785 - DNA, 25 bp, Homo sapien
gtgccattgaacttcttccccacat

SEQ ID NO: 6038786 - DNA, 25 bp, Homo sapien
tggaacgctggtatcacaatcgctg

SEQ ID NO: 6038787 - DNA, 25 bp, Homo sapien
ccacatcgctacattcgtatttcat

SEQ ID NO: 6038788 - DNA, 25 bp, Homo sapien
aaagaagttctggacccacagaaat

SEQ ID NO: 6038789 - DNA, 25 bp, Homo sapien
tcgcttttccagaaagaagttctgg

SEQ ID NO: 6038790 - DNA, 25 bp, Homo sapien
gtaggaatcggacagatacgcaaag

SEQ ID NO: 6038791 - DNA, 25 bp, Homo sapien
tcgaggttgcgtcttggaacctgtc

SEQ ID NO: 6038792 - DNA, 25 bp, Homo sapien
tttctgtgggtccagaacttctttc

SEQ ID NO: 6038793 - DNA, 25 bp, Homo sapien
aagaagactcgtcgcccgcgtgctc

SEQ ID NO: 6038794 - DNA, 25 bp, Homo sapien
tagatccaattgttcacatgaggca

SEQ ID NO: 6038795 - DNA, 25 bp, Homo sapien
cgggatcgtgagtaggaggtaggaa

SEQ ID NO: 6038796 - DNA, 25 bp, Homo sapien
aggcaggttgtggaagtacgggatc

SEQ ID NO: 6038797 - DNA, 25 bp, Homo sapien
tagttgtagcgagcgtcgttctcag

SEQ ID NO: 6038798 - DNA, 25 bp, Homo sapien
tgacgaaataatccagctcgtcggt

SEQ ID NO: 6038799 - DNA, 25 bp, Homo sapien
gttgtggaagtacgggatcgtgagt

SEQ ID NO: 6038800 - DNA, 25 bp, Homo sapien
aattggtactccatgactccgtatt

SEQ ID NO: 6038801 - DNA, 25 bp, Homo sapien
ttggggaattggtactccatgactc

SEQ ID NO: 6038802 - DNA, 25 bp, Homo sapien
cgtgagtaggaggtaggaatcggac

SEQ ID NO: 6038803 - DNA, 25 bp, Homo sapien
catacttgctcatcgaggttgcgtc

SEQ ID NO: 6038804 - DNA, 25 bp, Homo sapien
tctttctggaaaagcgaagtggcct

SEQ ID NO: 6038805 - DNA, 25 bp, Homo sapien
tcctgtacggatgatgcttgtgtaa

SEQ ID NO: 6038806 - DNA, 25 bp, Homo sapien
aagtggcctcttcataacgatgagg

SEQ ID NO: 6038807 - DNA, 25 bp, Homo sapien
cgtattgaaacgcatccacatactt

SEQ ID NO: 6038808 - DNA, 25 bp, Homo sapien
taggaggtaggaatcggacagatac

SEQ ID NO: 6038809 - DNA, 25 bp, Homo sapien
gctcaatttctgtgggtccagaact

SEQ ID NO: 6038810 - DNA, 25 bp, Homo sapien
gctccacggtagtgatgggaggtct

SEQ ID NO: 6038811 - DNA, 25 bp, Homo sapien
ctgtggcagtacaaaggcaggttgt

SEQ ID NO: 6038812 - DNA, 25 bp, Homo sapien
aactggtgaaagtaaatcgtgtggt

SEQ ID NO: 6038813 - DNA, 25 bp, Homo sapien
ttgcgtcttggaacctgtcggacaa

SEQ ID NO: 6038814 - DNA, 25 bp, Homo sapien
catccacatacttgctcatcgaggt

SEQ ID NO: 6038815 - DNA, 25 bp, Homo sapien
gtacaaaggcaggttgtggaagtac

SEQ ID NO: 6038816 - DNA, 25 bp, Homo sapien
tgaaagtaaatcgtgtggtcgagcg

SEQ ID NO: 6038817 - DNA, 25 bp, Homo sapien
tgtgtcgaaatacttgccctgtacg

SEQ ID NO: 6038818 - DNA, 25 bp, Homo sapien
gagacactgaaactgtggcagtaca

SEQ ID NO: 6038819 - DNA, 25 bp, Homo sapien
agcgagcgtcgttctcaggagtaat

SEQ ID NO: 6038820 - DNA, 25 bp, Homo sapien
ttgccgagtagaacatgtccttggg

SEQ ID NO: 6038821 - DNA, 25 bp, Homo sapien
cgtcggtgtgtcttgccgagtagaa

SEQ ID NO: 6038822 - DNA, 25 bp, Homo sapien
tgctcatcgaggttgcgtcttggaa

SEQ ID NO: 6038823 - DNA, 25 bp, Homo sapien
tcgtcgcccgcgtgctccacggtag

SEQ ID NO: 6038824 - DNA, 25 bp, Homo sapien
gtgtggtcgagcgagacactgaaac

SEQ ID NO: 6038825 - DNA, 25 bp, Homo sapien
ttaagatagatccaattgttcacat

SEQ ID NO: 6038826 - DNA, 25 bp, Homo sapien
gaaatacttgccctgtacgaggtgc

SEQ ID NO: 6038827 - DNA, 25 bp, Homo sapien
cttggaacctgtcggacaatgaggc

SEQ ID NO: 6038828 - DNA, 25 bp, Homo sapien
acttgccctgtacgaggtgcttgtc

SEQ ID NO: 6038829 - DNA, 25 bp, Homo sapien
ttcacatgaggcaactggtgaaagt

SEQ ID NO: 6038830 - DNA, 25 bp, Homo sapien
tgaggcatacctgctcaatttctgt

SEQ ID NO: 6038831 - DNA, 25 bp, Homo sapien
atgtccttggggaattggtactcca

SEQ ID NO: 6038832 - DNA, 25 bp, Homo sapien
ccagtgggacctgggattcgaaatc

SEQ ID NO: 6038833 - DNA, 25 bp, Homo sapien
cctgagagacgcttgccatgatgcg

SEQ ID NO: 6038834 - DNA, 25 bp, Homo sapien
tctcaggagtaatgctcttcgggat

SEQ ID NO: 6038835 - DNA, 25 bp, Homo sapien
ctggaaaagcgaagtggcctcttca

SEQ ID NO: 6038836 - DNA, 25 bp, Homo sapien
ccagctcgtcggtgtgtcttgccga

SEQ ID NO: 6038837 - DNA, 25 bp, Homo sapien
tcgagcgagacactgaaactgtggc

SEQ ID NO: 6038838 - DNA, 25 bp, Homo sapien
atcggacagatacgcaaaggccacg

SEQ ID NO: 6038839 - DNA, 25 bp, Homo sapien
cgactgtgtgtcgaaatacttgccc

SEQ ID NO: 6038840 - DNA, 25 bp, Homo sapien
gaggtctcactttgacgaaataatc

SEQ ID NO: 6038841 - DNA, 25 bp, Homo sapien
gcgtcccgactgtgtgtcgaaatac

SEQ ID NO: 6038842 - DNA, 25 bp, Homo sapien
ctgaaactgtggcagtacaaaggca

SEQ ID NO: 6038843 - DNA, 25 bp, Homo sapien
aataatccagctcgtcggtgtgtct

SEQ ID NO: 6038844 - DNA, 25 bp, Homo sapien
atacctgctcaatttctgtgggtcc

SEQ ID NO: 6038845 - DNA, 25 bp, Homo sapien
cggtagtgatgggaggtctcacttt

SEQ ID NO: 6038846 - DNA, 25 bp, Homo sapien
tgtgtaaagaagactcgtcgcccgc

SEQ ID NO: 6038847 - DNA, 25 bp, Homo sapien
tcactttgacgaaataatccagctc

SEQ ID NO: 6038848 - DNA, 25 bp, Homo sapien
tgggtccagaacttctttctggaaa

SEQ ID NO: 6038849 - DNA, 25 bp, Homo sapien
ttgccatgatgcgtcccgactgtgt

SEQ ID NO: 6038850 - DNA, 25 bp, Homo sapien
gatgcttgtgtaaagaagactcgtc

SEQ ID NO: 6038851 - DNA, 25 bp, Homo sapien
agacgcttgccatgatgcgtcccga

SEQ ID NO: 6038852 - DNA, 25 bp, Homo sapien
gtagacaacgtagccctcctgagag

SEQ ID NO: 6038853 - DNA, 25 bp, Homo sapien
atgatgcgtcccgactgtgtgtcga

SEQ ID NO: 6038854 - DNA, 25 bp, Homo sapien
tactccatgactccgtattgaaacg

SEQ ID NO: 6038855 - DNA, 25 bp, Homo sapien
cagatacgcaaaggccacgtagttg

SEQ ID NO: 6038856 - DNA, 25 bp, Homo sapien
tgctcttcgggatcctgtacggatg

SEQ ID NO: 6038857 - DNA, 25 bp, Homo sapien
cctgtcggacaatgaggcatacctg

SEQ ID NO: 6038858 - DNA, 25 bp, Homo sapien
tgatgggaggtctcactttgacgaa

SEQ ID NO: 6038859 - DNA, 25 bp, Homo sapien
tgactccgtattgaaacgcatccac

SEQ ID NO: 6038860 - DNA, 25 bp, Homo sapien
aagcgaagtggcctcttcataacga

SEQ ID NO: 6038861 - DNA, 25 bp, Homo sapien
ggattcgaaatcttaagatagatcc

SEQ ID NO: 6038862 - DNA, 25 bp, Homo sapien
gaaatcttaagatagatccaattgt

SEQ ID NO: 6038863 - DNA, 25 bp, Homo sapien
acggatgatgcttgtgtaaagaaga

SEQ ID NO: 6038864 - DNA, 25 bp, Homo sapien
gcaaaggccacgtagttgtagcgag

SEQ ID NO: 6038865 - DNA, 25 bp, Homo sapien
cccgcgtgctccacggtagtgatgg

SEQ ID NO: 6038866 - DNA, 25 bp, Homo sapien
cgaggtgcttgtcccagtgggacct

SEQ ID NO: 6038867 - DNA, 25 bp, Homo sapien
gcttgtcccagtgggacctgggatt

SEQ ID NO: 6038868 - DNA, 25 bp, Homo sapien
gacctgggattcgaaatcttaagat

SEQ ID NO: 6038869 - DNA, 25 bp, Homo sapien
gaagtacgggatcgtgagtaggagg

SEQ ID NO: 6038870 - DNA, 25 bp, Homo sapien
ccctcctgagagacgcttgccatga

SEQ ID NO: 6038871 - DNA, 25 bp, Homo sapien
cctgtacgaggtgcttgtcccagtg

SEQ ID NO: 6038872 - DNA, 25 bp, Homo sapien
tgaggcaactggtgaaagtaaatcg

SEQ ID NO: 6038873 - DNA, 25 bp, Homo sapien
tcgggatcctgtacggatgatgctt

SEQ ID NO: 6038874 - DNA, 25 bp, Homo sapien
caattgttcacatgaggcaactggt

SEQ ID NO: 6038875 - DNA, 25 bp, Homo sapien
ggacaatgaggcatacctgctcaat

SEQ ID NO: 6038876 - DNA, 25 bp, Homo sapien
gccacgtagttgtagcgagcgtcgt

SEQ ID NO: 6038877 - DNA, 25 bp, Homo sapien
cgtcgttctcaggagtaatgctctt

SEQ ID NO: 6038878 - DNA, 25 bp, Homo sapien
gagtaatgctcttcgggatcctgta

SEQ ID NO: 6038879 - DNA, 25 bp, Homo sapien
agaacttctttctggaaaagcgaag

SEQ ID NO: 6038880 - DNA, 25 bp, Homo sapien
gaaacgcatccacatacttgctcat

SEQ ID NO: 6038881 - DNA, 25 bp, Homo sapien
taaatcgtgtggtcgagcgagacac

SEQ ID NO: 6038882 - DNA, 25 bp, Homo sapien
tgtgtcttgccgagtagaacatgtc

SEQ ID NO: 6038883 - DNA, 25 bp, Homo sapien
aatcctcaaatattgttcaatgaag

SEQ ID NO: 6038884 - DNA, 25 bp, Homo sapien
tgattctcagcctatttccaaggaa

SEQ ID NO: 6038885 - DNA, 25 bp, Homo sapien
aacctaacatttattatgacacaac

SEQ ID NO: 6038886 - DNA, 25 bp, Homo sapien
acaacaacctaacatttattatgac

SEQ ID NO: 6038887 - DNA, 25 bp, Homo sapien
acttggttcatacacaaccaattca

SEQ ID NO: 6038888 - DNA, 25 bp, Homo sapien
gagtttctgaatttggaaaatattg

SEQ ID NO: 6038889 - DNA, 25 bp, Homo sapien
tcaaaagagcaacagaaatggagat

SEQ ID NO: 6038890 - DNA, 25 bp, Homo sapien
ttgttcaatgaagagtttctgaatt

SEQ ID NO: 6038891 - DNA, 25 bp, Homo sapien
agaagatggtttcttcctctttcct

SEQ ID NO: 6038892 - DNA, 25 bp, Homo sapien
gagcaacagaaatggagatgatatc

SEQ ID NO: 6038893 - DNA, 25 bp, Homo sapien
atgatgaatccgcatctacgttcca

SEQ ID NO: 6038894 - DNA, 25 bp, Homo sapien
gaatccgcatctacgttccactcat

SEQ ID NO: 6038895 - DNA, 25 bp, Homo sapien
ttctaatgatgaatccgcatctacg

SEQ ID NO: 6038896 - DNA, 25 bp, Homo sapien
aaatatgaaactaatacaaatgcac

SEQ ID NO: 6038897 - DNA, 25 bp, Homo sapien
tattatgacacaaccaccgatcaag

SEQ ID NO: 6038898 - DNA, 25 bp, Homo sapien
gacttctacccatataccactaatt

SEQ ID NO: 6038899 - DNA, 25 bp, Homo sapien
ttcccctagaagttggcattttgaa

SEQ ID NO: 6038900 - DNA, 25 bp, Homo sapien
cctcatctcagctgcagaacttggt

SEQ ID NO: 6038901 - DNA, 25 bp, Homo sapien
tcagcctatttccaaggaaacgaaa

SEQ ID NO: 6038902 - DNA, 25 bp, Homo sapien
acagcaacaacaacctaacatttat

SEQ ID NO: 6038903 - DNA, 25 bp, Homo sapien
cacaataaaatatgaaactaataca

SEQ ID NO: 6038904 - DNA, 25 bp, Homo sapien
cagaaatggagatgatatcgatatt

SEQ ID NO: 6038905 - DNA, 25 bp, Homo sapien
tcattcaataaccatgataactttc

SEQ ID NO: 6038906 - DNA, 25 bp, Homo sapien
gcatctacgttccactcatcattca

SEQ ID NO: 6038907 - DNA, 25 bp, Homo sapien
atcatctcttttttctaatgatgaa

SEQ ID NO: 6038908 - DNA, 25 bp, Homo sapien
cttcctctttccttttgaacagcaa

SEQ ID NO: 6038909 - DNA, 25 bp, Homo sapien
ttggcattttgaaaagtctgacaaa

SEQ ID NO: 6038910 - DNA, 25 bp, Homo sapien
ccaagaaaattttgaattcaatgaa

SEQ ID NO: 6038911 - DNA, 25 bp, Homo sapien
gtcctgaaagaggaaaaaagagctc

SEQ ID NO: 6038912 - DNA, 25 bp, Homo sapien
caataaccatgataactttcaaaag

SEQ ID NO: 6038913 - DNA, 25 bp, Homo sapien
tttggaaaatattgattctcagcct

SEQ ID NO: 6038914 - DNA, 25 bp, Homo sapien
tagtgacacaataaaatatgaaact

SEQ ID NO: 6038915 - DNA, 25 bp, Homo sapien
tctgaatttggaaaatattgattct

SEQ ID NO: 6038916 - DNA, 25 bp, Homo sapien
caattcatttaattaatcctcaaat

SEQ ID NO: 6038917 - DNA, 25 bp, Homo sapien
gacacaaccaccgatcaagaagacc

SEQ ID NO: 6038918 - DNA, 25 bp, Homo sapien
gcaactggtcctgaaagaggaaaaa

SEQ ID NO: 6038919 - DNA, 25 bp, Homo sapien
aaactacgaaggactgcacaatggc

SEQ ID NO: 6038920 - DNA, 25 bp, Homo sapien
tgacaaaattgcctcatctcagctg

SEQ ID NO: 6038921 - DNA, 25 bp, Homo sapien
gaaactaatacaaatgcacaaaaag

SEQ ID NO: 6038922 - DNA, 25 bp, Homo sapien
aaatattgattctcagcctatttcc

SEQ ID NO: 6038923 - DNA, 25 bp, Homo sapien
cactcatcattcaataaccatgata

SEQ ID NO: 6038924 - DNA, 25 bp, Homo sapien
ccatgataactttcaaaagagcaac

SEQ ID NO: 6038925 - DNA, 25 bp, Homo sapien
gatatcaaaatattccaagaaaatt

SEQ ID NO: 6038926 - DNA, 25 bp, Homo sapien
cttgtttttcttttggatctacaat

SEQ ID NO: 6038927 - DNA, 25 bp, Homo sapien
aattcccatacacacaagacttcta

SEQ ID NO: 6038928 - DNA, 25 bp, Homo sapien
tgcagaacttggttcatacacaacc

SEQ ID NO: 6038929 - DNA, 25 bp, Homo sapien
tcttttggatctacaatttccccta

SEQ ID NO: 6038930 - DNA, 25 bp, Homo sapien
acaatggcaactggtcctgaaagag

SEQ ID NO: 6038931 - DNA, 25 bp, Homo sapien
gaaagaggaaaaaagagctctgaaa

SEQ ID NO: 6038932 - DNA, 25 bp, Homo sapien
ctcagctgcagaacttggttcatac

SEQ ID NO: 6038933 - DNA, 25 bp, Homo sapien
acacaagacttctacccatatacca

SEQ ID NO: 6038934 - DNA, 25 bp, Homo sapien
tggatctacaatttcccctagaagt

SEQ ID NO: 6038935 - DNA, 25 bp, Homo sapien
cgaaggactgcacaatggcaactgg

SEQ ID NO: 6038936 - DNA, 25 bp, Homo sapien
aagagctctgaaagtaccagatcct

SEQ ID NO: 6038937 - DNA, 25 bp, Homo sapien
tagaagttggcattttgaaaagtct

SEQ ID NO: 6038938 - DNA, 25 bp, Homo sapien
ttttgaaaagtctgacaaaattgcc

SEQ ID NO: 6038939 - DNA, 25 bp, Homo sapien
gtaccagatcctcttcattatcatc

SEQ ID NO: 6038940 - DNA, 25 bp, Homo sapien
ttttgaacagcaacaacaacctaac

SEQ ID NO: 6038941 - DNA, 25 bp, Homo sapien
tacaatttcccctagaagttggcat

SEQ ID NO: 6038942 - DNA, 25 bp, Homo sapien
cacaaccaattcatttaattaatcc

SEQ ID NO: 6038943 - DNA, 25 bp, Homo sapien
tgccttagaagatggtttcttcctc

SEQ ID NO: 6038944 - DNA, 25 bp, Homo sapien
aaattttgaattcaatgaattccca

SEQ ID NO: 6038945 - DNA, 25 bp, Homo sapien
acgttccactcatcattcaataacc

SEQ ID NO: 6038946 - DNA, 25 bp, Homo sapien
tctgaaagtaccagatcctcttcat

SEQ ID NO: 6038947 - DNA, 25 bp, Homo sapien
ttgaattcaatgaattcccatacac

SEQ ID NO: 6038948 - DNA, 25 bp, Homo sapien
tgatatcgatattagtgacacaata

SEQ ID NO: 6038949 - DNA, 25 bp, Homo sapien
ctttccttttgaacagcaacaacaa

SEQ ID NO: 6038950 - DNA, 25 bp, Homo sapien
aatgaagagtttctgaatttggaaa

SEQ ID NO: 6038951 - DNA, 25 bp, Homo sapien
acatttattatgacacaaccaccga

SEQ ID NO: 6038952 - DNA, 25 bp, Homo sapien
aaattgcctcatctcagctgcagaa

SEQ ID NO: 6038953 - DNA, 25 bp, Homo sapien
ggaaaaaagagctctgaaagtacca

SEQ ID NO: 6038954 - DNA, 25 bp, Homo sapien
aaccaccgatcaagaagaccgtcct

SEQ ID NO: 6038955 - DNA, 25 bp, Homo sapien
tacccatataccactaattatacct

SEQ ID NO: 6038956 - DNA, 25 bp, Homo sapien
aacgaaaactacgaaggactgcaca

SEQ ID NO: 6038957 - DNA, 25 bp, Homo sapien
caaaaagatatcaaaatattccaag

SEQ ID NO: 6038958 - DNA, 25 bp, Homo sapien
aaagtctgacaaaattgcctcatct

SEQ ID NO: 6038959 - DNA, 25 bp, Homo sapien
tcttttttctaatgatgaatccgca

SEQ ID NO: 6038960 - DNA, 25 bp, Homo sapien
gatcctcttcattatcatctctttt

SEQ ID NO: 6038961 - DNA, 25 bp, Homo sapien
ttcatacacaaccaattcatttaat

SEQ ID NO: 6038962 - DNA, 25 bp, Homo sapien
actgcacaatggcaactggtcctga

SEQ ID NO: 6038963 - DNA, 25 bp, Homo sapien
cgatcaagaagaccgtccttgtttt

SEQ ID NO: 6038964 - DNA, 25 bp, Homo sapien
aatgcacaaaaagatatcaaaatat

SEQ ID NO: 6038965 - DNA, 25 bp, Homo sapien
tcaatgaattcccatacacacaaga

SEQ ID NO: 6038966 - DNA, 25 bp, Homo sapien
aatacaaatgcacaaaaagatatca

SEQ ID NO: 6038967 - DNA, 25 bp, Homo sapien
catacacacaagacttctacccata

SEQ ID NO: 6038968 - DNA, 25 bp, Homo sapien
cgatattagtgacacaataaaatat

SEQ ID NO: 6038969 - DNA, 25 bp, Homo sapien
atattccaagaaaattttgaattca

SEQ ID NO: 6038970 - DNA, 25 bp, Homo sapien
cttcattatcatctcttttttctaa

SEQ ID NO: 6038971 - DNA, 25 bp, Homo sapien
tggagatgatatcgatattagtgac

SEQ ID NO: 6038972 - DNA, 25 bp, Homo sapien
taactttcaaaagagcaacagaaat

SEQ ID NO: 6038973 - DNA, 25 bp, Homo sapien
caaatattgttcaatgaagagtttc

SEQ ID NO: 6038974 - DNA, 25 bp, Homo sapien
ttaattaatcctcaaatattgttca

SEQ ID NO: 6038975 - DNA, 25 bp, Homo sapien
cggaggcgttgttattattgctggt

SEQ ID NO: 6038976 - DNA, 25 bp, Homo sapien
caacgtcgaaggcaatttctaatgg

SEQ ID NO: 6038977 - DNA, 25 bp, Homo sapien
gcatatcttgacagtttggagttca

SEQ ID NO: 6038978 - DNA, 25 bp, Homo sapien
tccatttctgttgctcttttgaaag

SEQ ID NO: 6038979 - DNA, 25 bp, Homo sapien
tgatattgggagtatgaatccgtgt

SEQ ID NO: 6038980 - DNA, 25 bp, Homo sapien
tgtgggttttgaataggtataatta

SEQ ID NO: 6038981 - DNA, 25 bp, Homo sapien
ctgaaggagtaagccgcagcatatc

SEQ ID NO: 6038982 - DNA, 25 bp, Homo sapien
cgttgttattattgctggtattatt

SEQ ID NO: 6038983 - DNA, 25 bp, Homo sapien
gagtaagccgcagcatatcttgaca

SEQ ID NO: 6038984 - DNA, 25 bp, Homo sapien
ggcggtggtgatttttcaacgtcga

SEQ ID NO: 6038985 - DNA, 25 bp, Homo sapien
cctgaggttcatctataaatggatc

SEQ ID NO: 6038986 - DNA, 25 bp, Homo sapien
tagtgatggcggtggtgatttttca

SEQ ID NO: 6038987 - DNA, 25 bp, Homo sapien
ttgctggtattattatagtaattac

SEQ ID NO: 6038988 - DNA, 25 bp, Homo sapien
tagtgacgattattaaaggaatgta

SEQ ID NO: 6038989 - DNA, 25 bp, Homo sapien
gaatgtatgttatcagtatgtggtg

SEQ ID NO: 6038990 - DNA, 25 bp, Homo sapien
aggtataattagtggtatatgggta

SEQ ID NO: 6038991 - DNA, 25 bp, Homo sapien
gtgcatttgtattagtttcatattt

SEQ ID NO: 6038992 - DNA, 25 bp, Homo sapien
catatacattatcggaggcgttgtt

SEQ ID NO: 6038993 - DNA, 25 bp, Homo sapien
tttttgtagtgatggcggtggtgat

SEQ ID NO: 6038994 - DNA, 25 bp, Homo sapien
tgtgtatgggaattcattgaattca

SEQ ID NO: 6038995 - DNA, 25 bp, Homo sapien
ggaaactgatcttgatattgggagt

SEQ ID NO: 6038996 - DNA, 25 bp, Homo sapien
actaatatcgatatcatctccattt

SEQ ID NO: 6038997 - DNA, 25 bp, Homo sapien
taattacaattagtgcttttatggt

SEQ ID NO: 6038998 - DNA, 25 bp, Homo sapien
atgttatcagtatgtggtggaaact

SEQ ID NO: 6038999 - DNA, 25 bp, Homo sapien
gaactgctgaaggagtaagccgcag

SEQ ID NO: 6039000 - DNA, 25 bp, Homo sapien
tgctatagtgacgattattaaagga

SEQ ID NO: 6039001 - DNA, 25 bp, Homo sapien
tcttgtgtgtatgggaattcattga

SEQ ID NO: 6039002 - DNA, 25 bp, Homo sapien
atcatctccatttctgttgctcttt

SEQ ID NO: 6039003 - DNA, 25 bp, Homo sapien
ttttattgtgtcactaatatcgata

SEQ ID NO: 6039004 - DNA, 25 bp, Homo sapien
ggaatattttgatatctttttgtgc

SEQ ID NO: 6039005 - DNA, 25 bp, Homo sapien
atttaatttttgtagtgatggcggt

SEQ ID NO: 6039006 - DNA, 25 bp, Homo sapien
gaatttattgattcatgaatatttg

SEQ ID NO: 6039007 - DNA, 25 bp, Homo sapien
aattagtggtatatgggtagaagtc

SEQ ID NO: 6039008 - DNA, 25 bp, Homo sapien
tagaagtcttgtgtgtatgggaatt

SEQ ID NO: 6039009 - DNA, 25 bp, Homo sapien
tgggagtatgaatccgtgttttttg

SEQ ID NO: 6039010 - DNA, 25 bp, Homo sapien
ttgaataggtataattagtggtata

SEQ ID NO: 6039011 - DNA, 25 bp, Homo sapien
ttaaaggaatgtatgttatcagtat

SEQ ID NO: 6039012 - DNA, 25 bp, Homo sapien
agtaggagggcacctgaggttcatc

SEQ ID NO: 6039013 - DNA, 25 bp, Homo sapien
atcgatatcatctccatttctgttg

SEQ ID NO: 6039014 - DNA, 25 bp, Homo sapien
cattatcggaggcgttgttattatt

SEQ ID NO: 6039015 - DNA, 25 bp, Homo sapien
aattagtgcttttatggttgctata

SEQ ID NO: 6039016 - DNA, 25 bp, Homo sapien
ttttcttggaatattttgatatctt

SEQ ID NO: 6039017 - DNA, 25 bp, Homo sapien
gatatctttttgtgcatttgtatta

SEQ ID NO: 6039018 - DNA, 25 bp, Homo sapien
cgattattaaaggaatgtatgttat

SEQ ID NO: 6039019 - DNA, 25 bp, Homo sapien
agggcacctgaggttcatctataaa

SEQ ID NO: 6039020 - DNA, 25 bp, Homo sapien
gtattattatagtaattacaattag

SEQ ID NO: 6039021 - DNA, 25 bp, Homo sapien
tcattagaactgctgaaggagtaag

SEQ ID NO: 6039022 - DNA, 25 bp, Homo sapien
tcgaaggcaatttctaatgggtaat

SEQ ID NO: 6039023 - DNA, 25 bp, Homo sapien
ctgaccttgtcataataatcttgat

SEQ ID NO: 6039024 - DNA, 25 bp, Homo sapien
attttgatatctttttgtgcatttg

SEQ ID NO: 6039025 - DNA, 25 bp, Homo sapien
tgtattagtttcatattttattgtg

SEQ ID NO: 6039026 - DNA, 25 bp, Homo sapien
tggtatatgggtagaagtcttgtgt

SEQ ID NO: 6039027 - DNA, 25 bp, Homo sapien
ctttttgtgcatttgtattagtttc

SEQ ID NO: 6039028 - DNA, 25 bp, Homo sapien
ttatagtaattacaattagtgcttt

SEQ ID NO: 6039029 - DNA, 25 bp, Homo sapien
atttcttgaaacctgaccttgtcat

SEQ ID NO: 6039030 - DNA, 25 bp, Homo sapien
tatggttgctatagtgacgattatt

SEQ ID NO: 6039031 - DNA, 25 bp, Homo sapien
cttgacagtttggagttcaactttt

SEQ ID NO: 6039032 - DNA, 25 bp, Homo sapien
ttttcaacgtcgaaggcaatttcta

SEQ ID NO: 6039033 - DNA, 25 bp, Homo sapien
tattattgctggtattattatagta

SEQ ID NO: 6039034 - DNA, 25 bp, Homo sapien
atatttgtgggttttgaataggtat

SEQ ID NO: 6039035 - DNA, 25 bp, Homo sapien
tgaaacctgaccttgtcataataat

SEQ ID NO: 6039036 - DNA, 25 bp, Homo sapien
ttcatattttattgtgtcactaata

SEQ ID NO: 6039037 - DNA, 25 bp, Homo sapien
tgggaattcattgaattcaaaattt

SEQ ID NO: 6039038 - DNA, 25 bp, Homo sapien
tcatgaatatttgtgggttttgaat

SEQ ID NO: 6039039 - DNA, 25 bp, Homo sapien
tgaattcaaaattttcttggaatat

SEQ ID NO: 6039040 - DNA, 25 bp, Homo sapien
gcaatttctaatgggtaatagtagg

SEQ ID NO: 6039041 - DNA, 25 bp, Homo sapien
ttgaatttaatttttgtagtgatgg

SEQ ID NO: 6039042 - DNA, 25 bp, Homo sapien
ggtaatagtaggagggcacctgagg

SEQ ID NO: 6039043 - DNA, 25 bp, Homo sapien
gccgcagcatatcttgacagtttgg

SEQ ID NO: 6039044 - DNA, 25 bp, Homo sapien
ctataaatggatctgcctcatatac

SEQ ID NO: 6039045 - DNA, 25 bp, Homo sapien
tgatcttgatattgggagtatgaat

SEQ ID NO: 6039046 - DNA, 25 bp, Homo sapien
cgtgttttttgaatttattgattca

SEQ ID NO: 6039047 - DNA, 25 bp, Homo sapien
caaaattttcttggaatattttgat

SEQ ID NO: 6039048 - DNA, 25 bp, Homo sapien
tgcttttatggttgctatagtgacg

SEQ ID NO: 6039049 - DNA, 25 bp, Homo sapien
atggatctgcctcatatacattatc

SEQ ID NO: 6039050 - DNA, 25 bp, Homo sapien
tcttgatcattagaactgctgaagg

SEQ ID NO: 6039051 - DNA, 25 bp, Homo sapien
ctgcctcatatacattatcggaggc

SEQ ID NO: 6039052 - DNA, 25 bp, Homo sapien
ggtgatttttcaacgtcgaaggcaa

SEQ ID NO: 6039053 - DNA, 25 bp, Homo sapien
tcagtatgtggtggaaactgatctt

SEQ ID NO: 6039054 - DNA, 25 bp, Homo sapien
tgtggtggaaactgatcttgatatt

SEQ ID NO: 6039055 - DNA, 25 bp, Homo sapien
ctaatgggtaatagtaggagggcac

SEQ ID NO: 6039056 - DNA, 25 bp, Homo sapien
tattgattcatgaatatttgtgggt

SEQ ID NO: 6039057 - DNA, 25 bp, Homo sapien
tgtgtcactaatatcgatatcatct

SEQ ID NO: 6039058 - DNA, 25 bp, Homo sapien
tctgttgctcttttgaaagttatca

SEQ ID NO: 6039059 - DNA, 25 bp, Homo sapien
tatgggtagaagtcttgtgtgtatg

SEQ ID NO: 6039060 - DNA, 25 bp, Homo sapien
ttcattgaattcaaaattttcttgg

SEQ ID NO: 6039061 - DNA, 25 bp, Homo sapien
taataatcttgatcattagaactgc

SEQ ID NO: 6039062 - DNA, 25 bp, Homo sapien
tatgaatccgtgttttttgaattta

SEQ ID NO: 6039063 - DNA, 25 bp, Homo sapien
ttgtcataataatcttgatcattag

SEQ ID NO: 6039064 - DNA, 25 bp, Homo sapien
gttcatctataaatggatctgcctc

SEQ ID NO: 6039065 - DNA, 25 bp, Homo sapien
ttagtttcatattttattgtgtcac

SEQ ID NO: 6039066 - DNA, 25 bp, Homo sapien
tggacagctgaaaaagggtggggta

SEQ ID NO: 6039067 - DNA, 25 bp, Homo sapien
cccagagattaaaccttatcaaaat

SEQ ID NO: 6039068 - DNA, 25 bp, Homo sapien
taactaccacacaacatgcatctaa

SEQ ID NO: 6039069 - DNA, 25 bp, Homo sapien
gcctgatagagccttgctatatgtc

SEQ ID NO: 6039070 - DNA, 25 bp, Homo sapien
aaccgaacagtgagttagtgtttgg

SEQ ID NO: 6039071 - DNA, 25 bp, Homo sapien
agccaaaaccgaacagtgagttagt

SEQ ID NO: 6039072 - DNA, 25 bp, Homo sapien
catctaagccaaaaccgaacagtga

SEQ ID NO: 6039073 - DNA, 25 bp, Homo sapien
tattcgaagggatgaaggcttacag

SEQ ID NO: 6039074 - DNA, 25 bp, Homo sapien
ttgagctattcgaagggatgaaggc

SEQ ID NO: 6039075 - DNA, 25 bp, Homo sapien
aactgatccagcaagataagtgctt

SEQ ID NO: 6039076 - DNA, 25 bp, Homo sapien
atctgtttgccaacgttcgacccag

SEQ ID NO: 6039077 - DNA, 25 bp, Homo sapien
acaagaaactaggtgcaaactacgc

SEQ ID NO: 6039078 - DNA, 25 bp, Homo sapien
gaagagttgattaccctaattggga

SEQ ID NO: 6039079 - DNA, 25 bp, Homo sapien
tggatttaaggcggtcagactggaa

SEQ ID NO: 6039080 - DNA, 25 bp, Homo sapien
ttaactgcggaatggacagctgaaa

SEQ ID NO: 6039081 - DNA, 25 bp, Homo sapien
gtggtgacaagaaactaggtgcaaa

SEQ ID NO: 6039082 - DNA, 25 bp, Homo sapien
gaaaaggttactctttatatatcag

SEQ ID NO: 6039083 - DNA, 25 bp, Homo sapien
ccttatcaaaatctgtctttagacc

SEQ ID NO: 6039084 - DNA, 25 bp, Homo sapien
tccattatgcttttgagctattcga

SEQ ID NO: 6039085 - DNA, 25 bp, Homo sapien
ggcctacattaatcggcactacggc

SEQ ID NO: 6039086 - DNA, 25 bp, Homo sapien
gagttagtgtttggcaagagcttca

SEQ ID NO: 6039087 - DNA, 25 bp, Homo sapien
catttgctgccctgtgggtccttat

SEQ ID NO: 6039088 - DNA, 25 bp, Homo sapien
gcggaatggacagctgaaaaagggt

SEQ ID NO: 6039089 - DNA, 25 bp, Homo sapien
gacccagaagagttgattaccctaa

SEQ ID NO: 6039090 - DNA, 25 bp, Homo sapien
aggctgtggtgacaagaaactaggt

SEQ ID NO: 6039091 - DNA, 25 bp, Homo sapien
gttactctttatatatcaggcctac

SEQ ID NO: 6039092 - DNA, 25 bp, Homo sapien
tggttttccattatgcttttgagct

SEQ ID NO: 6039093 - DNA, 25 bp, Homo sapien
tatgaagcgcatgaataagtctgct

SEQ ID NO: 6039094 - DNA, 25 bp, Homo sapien
caaaactggatttaaggcggtcaga

SEQ ID NO: 6039095 - DNA, 25 bp, Homo sapien
aacagtgagttagtgtttggcaaga

SEQ ID NO: 6039096 - DNA, 25 bp, Homo sapien
ccttccgcggtggttttccattatg

SEQ ID NO: 6039097 - DNA, 25 bp, Homo sapien
aagggatgaaggcttacagaacggt

SEQ ID NO: 6039098 - DNA, 25 bp, Homo sapien
tgattaccctaattgggaaactgat

SEQ ID NO: 6039099 - DNA, 25 bp, Homo sapien
cttgctatatgtcatttgctgccct

SEQ ID NO: 6039100 - DNA, 25 bp, Homo sapien
ctggaagccactgattatgccacaa

SEQ ID NO: 6039101 - DNA, 25 bp, Homo sapien
gtgtttggcaagagcttcacggacc

SEQ ID NO: 6039102 - DNA, 25 bp, Homo sapien
atgcttttgagctattcgaagggat

SEQ ID NO: 6039103 - DNA, 25 bp, Homo sapien
caaaatctgtctttagacccttccg

SEQ ID NO: 6039104 - DNA, 25 bp, Homo sapien
gggtttccacgcctgatagagcctt

SEQ ID NO: 6039105 - DNA, 25 bp, Homo sapien
cagagaatctgtttgccaacgttcg

SEQ ID NO: 6039106 - DNA, 25 bp, Homo sapien
ccctaattgggaaactgatccagca

SEQ ID NO: 6039107 - DNA, 25 bp, Homo sapien
ctgccctgtgggtccttattacaaa

SEQ ID NO: 6039108 - DNA, 25 bp, Homo sapien
ggcaagagcttcacggaccacatgt

SEQ ID NO: 6039109 - DNA, 25 bp, Homo sapien
tctgctcagagaatctgtttgccaa

SEQ ID NO: 6039110 - DNA, 25 bp, Homo sapien
aagataagtgcttagttcctgaagg

SEQ ID NO: 6039111 - DNA, 25 bp, Homo sapien
aacggtggacaacaaaattacaatg

SEQ ID NO: 6039112 - DNA, 25 bp, Homo sapien
ttaagataactaccacacaacatgc

SEQ ID NO: 6039113 - DNA, 25 bp, Homo sapien
atatcaggcctacattaatcggcac

SEQ ID NO: 6039114 - DNA, 25 bp, Homo sapien
ttgccaacgttcgacccagaagagt

SEQ ID NO: 6039115 - DNA, 25 bp, Homo sapien
tatgaatatgaagcgcatgaataag

SEQ ID NO: 6039116 - DNA, 25 bp, Homo sapien
ccacaagagcttggccaggaggctg

SEQ ID NO: 6039117 - DNA, 25 bp, Homo sapien
ccacacaacatgcatctaagccaaa

SEQ ID NO: 6039118 - DNA, 25 bp, Homo sapien
cgcatgaataagtctgctcagagaa

SEQ ID NO: 6039119 - DNA, 25 bp, Homo sapien
attatgccacaagagcttggccagg

SEQ ID NO: 6039120 - DNA, 25 bp, Homo sapien
agcttcacggaccacatgttaactg

SEQ ID NO: 6039121 - DNA, 25 bp, Homo sapien
tttaggggtttccacgcctgataga

SEQ ID NO: 6039122 - DNA, 25 bp, Homo sapien
ccgcggtggttttccattatgcttt

SEQ ID NO: 6039123 - DNA, 25 bp, Homo sapien
gtaccccagagattaaaccttatca

SEQ ID NO: 6039124 - DNA, 25 bp, Homo sapien
aacatgcatctaagccaaaaccgaa

SEQ ID NO: 6039125 - DNA, 25 bp, Homo sapien
ctgtctttagacccttccgcggtgg

SEQ ID NO: 6039126 - DNA, 25 bp, Homo sapien
caaaattacaatgtttcgtccagat

SEQ ID NO: 6039127 - DNA, 25 bp, Homo sapien
tgaaggcttacagaacggtggacaa

SEQ ID NO: 6039128 - DNA, 25 bp, Homo sapien
gattaaaccttatcaaaatctgtct

SEQ ID NO: 6039129 - DNA, 25 bp, Homo sapien
ttgggaaactgatccagcaagataa

SEQ ID NO: 6039130 - DNA, 25 bp, Homo sapien
aataagtctgctcagagaatctgtt

SEQ ID NO: 6039131 - DNA, 25 bp, Homo sapien
tacaatgtttcgtccagatatgaat

SEQ ID NO: 6039132 - DNA, 25 bp, Homo sapien
tagagccttgctatatgtcatttgc

SEQ ID NO: 6039133 - DNA, 25 bp, Homo sapien
ctttatatatcaggcctacattaat

SEQ ID NO: 6039134 - DNA, 25 bp, Homo sapien
taaggcggtcagactggaagccact

SEQ ID NO: 6039135 - DNA, 25 bp, Homo sapien
gccactgattatgccacaagagctt

SEQ ID NO: 6039136 - DNA, 25 bp, Homo sapien
tggacaacaaaattacaatgtttcg

SEQ ID NO: 6039137 - DNA, 25 bp, Homo sapien
tccagcaagataagtgcttagttcc

SEQ ID NO: 6039138 - DNA, 25 bp, Homo sapien
gtcagactggaagccactgattatg

SEQ ID NO: 6039139 - DNA, 25 bp, Homo sapien
ccaggaggctgtggtgacaagaaac

SEQ ID NO: 6039140 - DNA, 25 bp, Homo sapien
cttacagaacggtggacaacaaaat

SEQ ID NO: 6039141 - DNA, 25 bp, Homo sapien
tgtgggtccttattacaaaactgga

SEQ ID NO: 6039142 - DNA, 25 bp, Homo sapien
aactaggtgcaaactacgccccctg

SEQ ID NO: 6039143 - DNA, 25 bp, Homo sapien
acggaccacatgttaactgcggaat

SEQ ID NO: 6039144 - DNA, 25 bp, Homo sapien
tccagatatgaatatgaagcgcatg

SEQ ID NO: 6039145 - DNA, 25 bp, Homo sapien
atatgtcatttgctgccctgtgggt

SEQ ID NO: 6039146 - DNA, 25 bp, Homo sapien
gcttggccaggaggctgtggtgaca

SEQ ID NO: 6039147 - DNA, 25 bp, Homo sapien
cattaatcggcactacggccggttt

SEQ ID NO: 6039148 - DNA, 25 bp, Homo sapien
gtttcgtccagatatgaatatgaag

SEQ ID NO: 6039149 - DNA, 25 bp, Homo sapien
ttccacgcctgatagagccttgcta

SEQ ID NO: 6039150 - DNA, 25 bp, Homo sapien
agtgcttagttcctgaaggaaaagg

SEQ ID NO: 6039151 - DNA, 25 bp, Homo sapien
cacatgttaactgcggaatggacag

SEQ ID NO: 6039152 - DNA, 25 bp, Homo sapien
acgttcgacccagaagagttgatta

SEQ ID NO: 6039153 - DNA, 25 bp, Homo sapien
cagcctcctggccaagctcttgtgg

SEQ ID NO: 6039154 - DNA, 25 bp, Homo sapien
taaacacgaaaaaagcattcatggt

SEQ ID NO: 6039155 - DNA, 25 bp, Homo sapien
tcaccacagcctcctggccaagctc

SEQ ID NO: 6039156 - DNA, 25 bp, Homo sapien
ggcttccagtctgaccgccttaaat

SEQ ID NO: 6039157 - DNA, 25 bp, Homo sapien
aagtagttcaccgttcttggatctc

SEQ ID NO: 6039158 - DNA, 25 bp, Homo sapien
caagatttaaaatggaatccctagt

SEQ ID NO: 6039159 - DNA, 25 bp, Homo sapien
cttcagtaatgttgttatttggacc

SEQ ID NO: 6039160 - DNA, 25 bp, Homo sapien
ttcgcctttccagccgatttcctta

SEQ ID NO: 6039161 - DNA, 25 bp, Homo sapien
tcttgtggcataatcagtggcttcc

SEQ ID NO: 6039162 - DNA, 25 bp, Homo sapien
aatgggagaaacaatcgcagcagta

SEQ ID NO: 6039163 - DNA, 25 bp, Homo sapien
ttggaccaaatagccataaattttg

SEQ ID NO: 6039164 - DNA, 25 bp, Homo sapien
ccttccaaaatggtaccgtctagtg

SEQ ID NO: 6039165 - DNA, 25 bp, Homo sapien
cgaaaaaagcattcatggtgccgac

SEQ ID NO: 6039166 - DNA, 25 bp, Homo sapien
gtttgcacctagtttcttgtcacca

SEQ ID NO: 6039167 - DNA, 25 bp, Homo sapien
agcagtaccagaaccaaaggcttca

SEQ ID NO: 6039168 - DNA, 25 bp, Homo sapien
ttcgagtctttctttagcaagattt

SEQ ID NO: 6039169 - DNA, 25 bp, Homo sapien
tccattgtgcaacttctttggccaa

SEQ ID NO: 6039170 - DNA, 25 bp, Homo sapien
ttcttgtcaccacagcctcctggcc

SEQ ID NO: 6039171 - DNA, 25 bp, Homo sapien
gctcagtctcgccatattggattcc

SEQ ID NO: 6039172 - DNA, 25 bp, Homo sapien
atggaatccctagtaacaccttcca

SEQ ID NO: 6039173 - DNA, 25 bp, Homo sapien
gttggtaaccccttgaagcagcttg

SEQ ID NO: 6039174 - DNA, 25 bp, Homo sapien
tccagttttgtaataaggacccaca

SEQ ID NO: 6039175 - DNA, 25 bp, Homo sapien
ggcgtagtttgcacctagtttcttg

SEQ ID NO: 6039176 - DNA, 25 bp, Homo sapien
agtagcgttcactaatggtccattc

SEQ ID NO: 6039177 - DNA, 25 bp, Homo sapien
gtggagcagtaactagttccttctt

SEQ ID NO: 6039178 - DNA, 25 bp, Homo sapien
aatattaatttgttcgcctttccag

SEQ ID NO: 6039179 - DNA, 25 bp, Homo sapien
cagtctgaccgccttaaatccagtt

SEQ ID NO: 6039180 - DNA, 25 bp, Homo sapien
cagcttgcaattgtggcaggacgca

SEQ ID NO: 6039181 - DNA, 25 bp, Homo sapien
accagaaccaaaggcttcaagtagt

SEQ ID NO: 6039182 - DNA, 25 bp, Homo sapien
tctcagtaacttcgcctatagtgaa

SEQ ID NO: 6039183 - DNA, 25 bp, Homo sapien
gttcaccgttcttggatctctcagt

SEQ ID NO: 6039184 - DNA, 25 bp, Homo sapien
caaaatggtaccgtctagtggagca

SEQ ID NO: 6039185 - DNA, 25 bp, Homo sapien
ggattccattaatccattgtgcaac

SEQ ID NO: 6039186 - DNA, 25 bp, Homo sapien
tgccatgctcagtctcgccatattg

SEQ ID NO: 6039187 - DNA, 25 bp, Homo sapien
accaaaggcttcaagtagttcaccg

SEQ ID NO: 6039188 - DNA, 25 bp, Homo sapien
atcagtggcttccagtctgaccgcc

SEQ ID NO: 6039189 - DNA, 25 bp, Homo sapien
tgaccgccttaaatccagttttgta

SEQ ID NO: 6039190 - DNA, 25 bp, Homo sapien
ctttagcaagatttaaaatggaatc

SEQ ID NO: 6039191 - DNA, 25 bp, Homo sapien
taacttcgcctatagtgaagtagcg

SEQ ID NO: 6039192 - DNA, 25 bp, Homo sapien
cgggcaacaacggaatattaatttg

SEQ ID NO: 6039193 - DNA, 25 bp, Homo sapien
cagggggcgtagtttgcacctagtt

SEQ ID NO: 6039194 - DNA, 25 bp, Homo sapien
atccctagtaacaccttccaaaatg

SEQ ID NO: 6039195 - DNA, 25 bp, Homo sapien
gtggcaggacgcagggggcgtagtt

SEQ ID NO: 6039196 - DNA, 25 bp, Homo sapien
tgttatttggaccaaatagccataa

SEQ ID NO: 6039197 - DNA, 25 bp, Homo sapien
aggacgcagggggcgtagtttgcac

SEQ ID NO: 6039198 - DNA, 25 bp, Homo sapien
caacggaatattaatttgttcgcct

SEQ ID NO: 6039199 - DNA, 25 bp, Homo sapien
tcctggccaagctcttgtggcataa

SEQ ID NO: 6039200 - DNA, 25 bp, Homo sapien
agaaacaatcgcagcagtaccagaa

SEQ ID NO: 6039201 - DNA, 25 bp, Homo sapien
tttccagccgatttccttaatggga

SEQ ID NO: 6039202 - DNA, 25 bp, Homo sapien
aagcattcatggtgccgacttcagt

SEQ ID NO: 6039203 - DNA, 25 bp, Homo sapien
aatggtccattcacttggttcgagt

SEQ ID NO: 6039204 - DNA, 25 bp, Homo sapien
ctatctttaaacacgaaaaaagcat

SEQ ID NO: 6039205 - DNA, 25 bp, Homo sapien
gttcactaatggtccattcacttgg

SEQ ID NO: 6039206 - DNA, 25 bp, Homo sapien
tagtgaagtagcgttcactaatggt

SEQ ID NO: 6039207 - DNA, 25 bp, Homo sapien
gccgatttccttaatgggagaaaca

SEQ ID NO: 6039208 - DNA, 25 bp, Homo sapien
taatgttgttatttggaccaaatag

SEQ ID NO: 6039209 - DNA, 25 bp, Homo sapien
ccattcacttggttcgagtctttct

SEQ ID NO: 6039210 - DNA, 25 bp, Homo sapien
catattggattccattaatccattg

SEQ ID NO: 6039211 - DNA, 25 bp, Homo sapien
tggtaccgtctagtggagcagtaac

SEQ ID NO: 6039212 - DNA, 25 bp, Homo sapien
tcatggtgccgacttcagtaatgtt

SEQ ID NO: 6039213 - DNA, 25 bp, Homo sapien
tctttctttagcaagatttaaaatg

SEQ ID NO: 6039214 - DNA, 25 bp, Homo sapien
cagtaactagttccttcttgcccgt

SEQ ID NO: 6039215 - DNA, 25 bp, Homo sapien
aatcgcagcagtaccagaaccaaag

SEQ ID NO: 6039216 - DNA, 25 bp, Homo sapien
ttgaagcagcttgcaattgtggcag

SEQ ID NO: 6039217 - DNA, 25 bp, Homo sapien
ttccttaatgggagaaacaatcgca

SEQ ID NO: 6039218 - DNA, 25 bp, Homo sapien
tggatctctcagtaacttcgcctat

SEQ ID NO: 6039219 - DNA, 25 bp, Homo sapien
cttctttggccaatggaccggtttg

SEQ ID NO: 6039220 - DNA, 25 bp, Homo sapien
ccaagctcttgtggcataatcagtg

SEQ ID NO: 6039221 - DNA, 25 bp, Homo sapien
cattaatccattgtgcaacttcttt

SEQ ID NO: 6039222 - DNA, 25 bp, Homo sapien
ggcataatcagtggcttccagtctg

SEQ ID NO: 6039223 - DNA, 25 bp, Homo sapien
caaatagccataaattttgttggta

SEQ ID NO: 6039224 - DNA, 25 bp, Homo sapien
tggccaatggaccggtttgttcgcc

SEQ ID NO: 6039225 - DNA, 25 bp, Homo sapien
tgttcgccgggcaacaacggaatat

SEQ ID NO: 6039226 - DNA, 25 bp, Homo sapien
cgttcttggatctctcagtaacttc

SEQ ID NO: 6039227 - DNA, 25 bp, Homo sapien
tttgtaataaggacccacagggcag

SEQ ID NO: 6039228 - DNA, 25 bp, Homo sapien
acctagtttcttgtcaccacagcct

SEQ ID NO: 6039229 - DNA, 25 bp, Homo sapien
aaccccttgaagcagcttgcaattg

SEQ ID NO: 6039230 - DNA, 25 bp, Homo sapien
cgcctatagtgaagtagcgttcact

SEQ ID NO: 6039231 - DNA, 25 bp, Homo sapien
gtgcaacttctttggccaatggacc

SEQ ID NO: 6039232 - DNA, 25 bp, Homo sapien
aatttgttcgcctttccagccgatt

SEQ ID NO: 6039233 - DNA, 25 bp, Homo sapien
acttggttcgagtctttctttagca

SEQ ID NO: 6039234 - DNA, 25 bp, Homo sapien
tgccgacttcagtaatgttgttatt

SEQ ID NO: 6039235 - DNA, 25 bp, Homo sapien
cgtctagtggagcagtaactagttc

SEQ ID NO: 6039236 - DNA, 25 bp, Homo sapien
ggcttcaagtagttcaccgttcttg

SEQ ID NO: 6039237 - DNA, 25 bp, Homo sapien
tctcgccatattggattccattaat

SEQ ID NO: 6039238 - DNA, 25 bp, Homo sapien
gcaattgtggcaggacgcagggggc

SEQ ID NO: 6039239 - DNA, 25 bp, Homo sapien
tttgcacattcttgtgcagcagggc

SEQ ID NO: 6039240 - DNA, 25 bp, Homo sapien
gagtgccaatttctgtgggaatcac

SEQ ID NO: 6039241 - DNA, 25 bp, Homo sapien
actgagtctgtcactgctattgcca

SEQ ID NO: 6039242 - DNA, 25 bp, Homo sapien
taaaaaggcagtggaagagcggaag

SEQ ID NO: 6039243 - DNA, 25 bp, Homo sapien
ctttacgttcactggtgggattata

SEQ ID NO: 6039244 - DNA, 25 bp, Homo sapien
tctgtcactgctattgccatagctt

SEQ ID NO: 6039245 - DNA, 25 bp, Homo sapien
tgaacgtgatatcattccaatggct

SEQ ID NO: 6039246 - DNA, 25 bp, Homo sapien
cattccaatggctaggcattttggt

SEQ ID NO: 6039247 - DNA, 25 bp, Homo sapien
tccctttagtatctatcaaggtaaa

SEQ ID NO: 6039248 - DNA, 25 bp, Homo sapien
ggcagtggaagagcggaagaagaaa

SEQ ID NO: 6039249 - DNA, 25 bp, Homo sapien
tgaggaagttatggatagtttgcac

SEQ ID NO: 6039250 - DNA, 25 bp, Homo sapien
ggtacttcggaacagacggatatgg

SEQ ID NO: 6039251 - DNA, 25 bp, Homo sapien
agttgcggaagaacatggcactgag

SEQ ID NO: 6039252 - DNA, 25 bp, Homo sapien
aatggctaggcattttggtatggct

SEQ ID NO: 6039253 - DNA, 25 bp, Homo sapien
tcagagtaaaaaggcagtggaagag

SEQ ID NO: 6039254 - DNA, 25 bp, Homo sapien
aagtgtgagagattcccttcgtaag

SEQ ID NO: 6039255 - DNA, 25 bp, Homo sapien
cactaaatttaccacggattataag

SEQ ID NO: 6039256 - DNA, 25 bp, Homo sapien
gggatgttatgggaggcgggagatt

SEQ ID NO: 6039257 - DNA, 25 bp, Homo sapien
gcatgtaagtgtgagagattccctt

SEQ ID NO: 6039258 - DNA, 25 bp, Homo sapien
agttatggatagtttgcacattctt

SEQ ID NO: 6039259 - DNA, 25 bp, Homo sapien
tggattgatattctttacgttcact

SEQ ID NO: 6039260 - DNA, 25 bp, Homo sapien
aaattactacgccacatctcatggt

SEQ ID NO: 6039261 - DNA, 25 bp, Homo sapien
tgtgtctgatactcctgcctgggtt

SEQ ID NO: 6039262 - DNA, 25 bp, Homo sapien
tcatggtaaaactccctttagtatc

SEQ ID NO: 6039263 - DNA, 25 bp, Homo sapien
ggactttgaacgtgatatcattcca

SEQ ID NO: 6039264 - DNA, 25 bp, Homo sapien
gaagaacatggcactgagtctgtca

SEQ ID NO: 6039265 - DNA, 25 bp, Homo sapien
tgatatcattccaatggctaggcat

SEQ ID NO: 6039266 - DNA, 25 bp, Homo sapien
tgtaggcaaggggaagagtgccaat

SEQ ID NO: 6039267 - DNA, 25 bp, Homo sapien
gagagattcccttcgtaagttgcaa

SEQ ID NO: 6039268 - DNA, 25 bp, Homo sapien
ttgcaaactgattggattgatattc

SEQ ID NO: 6039269 - DNA, 25 bp, Homo sapien
catggcactgagtctgtcactgcta

SEQ ID NO: 6039270 - DNA, 25 bp, Homo sapien
tggaatgtattgaacagggactttg

SEQ ID NO: 6039271 - DNA, 25 bp, Homo sapien
aattgccactaaatttaccacggat

SEQ ID NO: 6039272 - DNA, 25 bp, Homo sapien
cagtttgcatgtaagtgtgagagat

SEQ ID NO: 6039273 - DNA, 25 bp, Homo sapien
ctccatgggatgttatgggaggcgg

SEQ ID NO: 6039274 - DNA, 25 bp, Homo sapien
ctcttgctccatgggatgttatggg

SEQ ID NO: 6039275 - DNA, 25 bp, Homo sapien
ggaagagtgccaatttctgtgggaa

SEQ ID NO: 6039276 - DNA, 25 bp, Homo sapien
ggatagtttgcacattcttgtgcag

SEQ ID NO: 6039277 - DNA, 25 bp, Homo sapien
actctatctaggtgtgtctgatact

SEQ ID NO: 6039278 - DNA, 25 bp, Homo sapien
aaaatcagcgaagcattgttaaaag

SEQ ID NO: 6039279 - DNA, 25 bp, Homo sapien
taggcattttggtatggctcttgct

SEQ ID NO: 6039280 - DNA, 25 bp, Homo sapien
tcctgcctgggttgtttctgcagca

SEQ ID NO: 6039281 - DNA, 25 bp, Homo sapien
ctggtgggattatatgagctccatt

SEQ ID NO: 6039282 - DNA, 25 bp, Homo sapien
agcgaagcattgttaaaagttgcgg

SEQ ID NO: 6039283 - DNA, 25 bp, Homo sapien
cagacggatatggaggttaaaatca

SEQ ID NO: 6039284 - DNA, 25 bp, Homo sapien
gaatcacaagcgcagtttgcatgta

SEQ ID NO: 6039285 - DNA, 25 bp, Homo sapien
ggtaaatggaatgtattgaacaggg

SEQ ID NO: 6039286 - DNA, 25 bp, Homo sapien
tatgagctccattgaggaagttatg

SEQ ID NO: 6039287 - DNA, 25 bp, Homo sapien
tatggctcttgctccatgggatgtt

SEQ ID NO: 6039288 - DNA, 25 bp, Homo sapien
gttcactggtgggattatatgagct

SEQ ID NO: 6039289 - DNA, 25 bp, Homo sapien
gaggttaaaatcagcgaagcattgt

SEQ ID NO: 6039290 - DNA, 25 bp, Homo sapien
gtattgaacagggactttgaacgtg

SEQ ID NO: 6039291 - DNA, 25 bp, Homo sapien
aggcgggagatttcagagtaaaaag

SEQ ID NO: 6039292 - DNA, 25 bp, Homo sapien
caatttctgtgggaatcacaagcgc

SEQ ID NO: 6039293 - DNA, 25 bp, Homo sapien
ttatgggaggcgggagatttcagag

SEQ ID NO: 6039294 - DNA, 25 bp, Homo sapien
caagcgcagtttgcatgtaagtgtg

SEQ ID NO: 6039295 - DNA, 25 bp, Homo sapien
tcccttcgtaagttgcaaactgatt

SEQ ID NO: 6039296 - DNA, 25 bp, Homo sapien
ttataaggggtatgatgtaggcaag

SEQ ID NO: 6039297 - DNA, 25 bp, Homo sapien
ctccattgaggaagttatggatagt

SEQ ID NO: 6039298 - DNA, 25 bp, Homo sapien
cacatctcatggtaaaactcccttt

SEQ ID NO: 6039299 - DNA, 25 bp, Homo sapien
tctaggtgtgtctgatactcctgcc

SEQ ID NO: 6039300 - DNA, 25 bp, Homo sapien
actgattggattgatattctttacg

SEQ ID NO: 6039301 - DNA, 25 bp, Homo sapien
taaaactccctttagtatctatcaa

SEQ ID NO: 6039302 - DNA, 25 bp, Homo sapien
tctgtgggaatcacaagcgcagttt

SEQ ID NO: 6039303 - DNA, 25 bp, Homo sapien
cattcttgtgcagcagggcaaagta

SEQ ID NO: 6039304 - DNA, 25 bp, Homo sapien
tcggaacagacggatatggaggtta

SEQ ID NO: 6039305 - DNA, 25 bp, Homo sapien
gagatttcagagtaaaaaggcagtg

SEQ ID NO: 6039306 - DNA, 25 bp, Homo sapien
tgtttctgcagcaaattactacgcc

SEQ ID NO: 6039307 - DNA, 25 bp, Homo sapien
agtatctatcaaggtaaatggaatg

SEQ ID NO: 6039308 - DNA, 25 bp, Homo sapien
gcagggcaaagtactctatctaggt

SEQ ID NO: 6039309 - DNA, 25 bp, Homo sapien
ttaaaagttgcggaagaacatggca

SEQ ID NO: 6039310 - DNA, 25 bp, Homo sapien
gcattgttaaaagttgcggaagaac

SEQ ID NO: 6039311 - DNA, 25 bp, Homo sapien
gcaaggggaagagtgccaatttctg

SEQ ID NO: 6039312 - DNA, 25 bp, Homo sapien
gaacagggactttgaacgtgatatc

SEQ ID NO: 6039313 - DNA, 25 bp, Homo sapien
aagaaaggagaaggcttgcgtacct

SEQ ID NO: 6039314 - DNA, 25 bp, Homo sapien
ggattatatgagctccattgaggaa

SEQ ID NO: 6039315 - DNA, 25 bp, Homo sapien
gaagagcggaagaagaaaggagaag

SEQ ID NO: 6039316 - DNA, 25 bp, Homo sapien
gatattctttacgttcactggtggg

SEQ ID NO: 6039317 - DNA, 25 bp, Homo sapien
cgtaagttgcaaactgattggattg

SEQ ID NO: 6039318 - DNA, 25 bp, Homo sapien
ctgggttgtttctgcagcaaattac

SEQ ID NO: 6039319 - DNA, 25 bp, Homo sapien
ctacgccacatctcatggtaaaact

SEQ ID NO: 6039320 - DNA, 25 bp, Homo sapien
ttaccacggattataaggggtatga

SEQ ID NO: 6039321 - DNA, 25 bp, Homo sapien
caaagtactctatctaggtgtgtct

SEQ ID NO: 6039322 - DNA, 25 bp, Homo sapien
cggaagaagaaaggagaaggcttgc

SEQ ID NO: 6039323 - DNA, 25 bp, Homo sapien
tgatactcctgcctgggttgtttct

SEQ ID NO: 6039324 - DNA, 25 bp, Homo sapien
tatcaaggtaaatggaatgtattga

SEQ ID NO: 6039325 - DNA, 25 bp, Homo sapien
tgcagcaaattactacgccacatct

SEQ ID NO: 6039326 - DNA, 25 bp, Homo sapien
gatatggaggttaaaatcagcgaag

SEQ ID NO: 6039327 - DNA, 25 bp, Homo sapien
ttttggtatggctcttgctccatgg

SEQ ID NO: 6039328 - DNA, 25 bp, Homo sapien
tgtgcagcagggcaaagtactctat

SEQ ID NO: 6039329 - DNA, 25 bp, Homo sapien
cacggattataaggggtatgatgta

SEQ ID NO: 6039330 - DNA, 25 bp, Homo sapien
tctccaataaaattagtgggaaatc

SEQ ID NO: 6039331 - DNA, 25 bp, Homo sapien
acagctgggtcatctccaataaaat

SEQ ID NO: 6039332 - DNA, 25 bp, Homo sapien
cacgttcaaagtccctgttcaatac

SEQ ID NO: 6039333 - DNA, 25 bp, Homo sapien
cgtagtaatttgctgcagaaacaac

SEQ ID NO: 6039334 - DNA, 25 bp, Homo sapien
aaggtacgcaagccttctcctttct

SEQ ID NO: 6039335 - DNA, 25 bp, Homo sapien
atcaaaaggaacaatactttctaag

SEQ ID NO: 6039336 - DNA, 25 bp, Homo sapien
ctgcagaaacaacccaggcaggagt

SEQ ID NO: 6039337 - DNA, 25 bp, Homo sapien
cagtgccatgttcttccgcaacttt

SEQ ID NO: 6039338 - DNA, 25 bp, Homo sapien
gtttcgctttagaccgaacataagc

SEQ ID NO: 6039339 - DNA, 25 bp, Homo sapien
caatacattccatttaccttgatag

SEQ ID NO: 6039340 - DNA, 25 bp, Homo sapien
aatttgctgcagaaacaacccaggc

SEQ ID NO: 6039341 - DNA, 25 bp, Homo sapien
aatgcctagccattggaatgatatc

SEQ ID NO: 6039342 - DNA, 25 bp, Homo sapien
tcctttcttcttccgctcttccact

SEQ ID NO: 6039343 - DNA, 25 bp, Homo sapien
atgtggcgtagtaatttgctgcaga

SEQ ID NO: 6039344 - DNA, 25 bp, Homo sapien
gtgggaaatccgacatcaaaaggaa

SEQ ID NO: 6039345 - DNA, 25 bp, Homo sapien
tagccattggaatgatatcacgttc

SEQ ID NO: 6039346 - DNA, 25 bp, Homo sapien
catgttcttccgcaacttttaacaa

SEQ ID NO: 6039347 - DNA, 25 bp, Homo sapien
caacttttaacaatgcttcgctgat

SEQ ID NO: 6039348 - DNA, 25 bp, Homo sapien
aatgaaggtttcttggtaacagctg

SEQ ID NO: 6039349 - DNA, 25 bp, Homo sapien
atgctcaaagcctcaatgttctgtt

SEQ ID NO: 6039350 - DNA, 25 bp, Homo sapien
cttgatagatactaaagggagtttt

SEQ ID NO: 6039351 - DNA, 25 bp, Homo sapien
cacacctagatagagtactttgccc

SEQ ID NO: 6039352 - DNA, 25 bp, Homo sapien
ttcggtgagaaatgaaggtttcttg

SEQ ID NO: 6039353 - DNA, 25 bp, Homo sapien
tttaccatgagatgtggcgtagtaa

SEQ ID NO: 6039354 - DNA, 25 bp, Homo sapien
atcagacacacctagatagagtact

SEQ ID NO: 6039355 - DNA, 25 bp, Homo sapien
aggagtatcagacacacctagatag

SEQ ID NO: 6039356 - DNA, 25 bp, Homo sapien
ttggaatgatatcacgttcaaagtc

SEQ ID NO: 6039357 - DNA, 25 bp, Homo sapien
gtgagaaatgaaggtttcttggtaa

SEQ ID NO: 6039358 - DNA, 25 bp, Homo sapien
gcctttttactctgaaatctcccgc

SEQ ID NO: 6039359 - DNA, 25 bp, Homo sapien
tgttcgatctttcttcctcccacta

SEQ ID NO: 6039360 - DNA, 25 bp, Homo sapien
aaagtccctgttcaatacattccat

SEQ ID NO: 6039361 - DNA, 25 bp, Homo sapien
caatactttctaagtactttatttg

SEQ ID NO: 6039362 - DNA, 25 bp, Homo sapien
aacatgtttcgctttagaccgaaca

SEQ ID NO: 6039363 - DNA, 25 bp, Homo sapien
attccatttaccttgatagatacta

SEQ ID NO: 6039364 - DNA, 25 bp, Homo sapien
ggtgttaatttaatgctcaaagcct

SEQ ID NO: 6039365 - DNA, 25 bp, Homo sapien
tatccgtctgttccgaagtaccaaa

SEQ ID NO: 6039366 - DNA, 25 bp, Homo sapien
cttcttccgctcttccactgccttt

SEQ ID NO: 6039367 - DNA, 25 bp, Homo sapien
cactaatgggaaaacatgtttcgct

SEQ ID NO: 6039368 - DNA, 25 bp, Homo sapien
tcctcccactaatgggaaaacatgt

SEQ ID NO: 6039369 - DNA, 25 bp, Homo sapien
cagactcagtgccatgttcttccgc

SEQ ID NO: 6039370 - DNA, 25 bp, Homo sapien
tcccgcctcccataacatcccatgg

SEQ ID NO: 6039371 - DNA, 25 bp, Homo sapien
cataagctatggcaatagcagtgac

SEQ ID NO: 6039372 - DNA, 25 bp, Homo sapien
ttaacaatgcttcgctgattttaac

SEQ ID NO: 6039373 - DNA, 25 bp, Homo sapien
tagatagagtactttgccctgctgc

SEQ ID NO: 6039374 - DNA, 25 bp, Homo sapien
ctaagtactttatttgttctggtgt

SEQ ID NO: 6039375 - DNA, 25 bp, Homo sapien
tacgcaagccttctcctttcttctt

SEQ ID NO: 6039376 - DNA, 25 bp, Homo sapien
gagccataccaaaatgcctagccat

SEQ ID NO: 6039377 - DNA, 25 bp, Homo sapien
gaaatctcccgcctcccataacatc

SEQ ID NO: 6039378 - DNA, 25 bp, Homo sapien
caatagcagtgacagactcagtgcc

SEQ ID NO: 6039379 - DNA, 25 bp, Homo sapien
aacaacccaggcaggagtatcagac

SEQ ID NO: 6039380 - DNA, 25 bp, Homo sapien
cagtgacagactcagtgccatgttc

SEQ ID NO: 6039381 - DNA, 25 bp, Homo sapien
cgctgattttaacctccatatccgt

SEQ ID NO: 6039382 - DNA, 25 bp, Homo sapien
tcaatgttctgtttgagatgttcga

SEQ ID NO: 6039383 - DNA, 25 bp, Homo sapien
ttctgtttgagatgttcgatctttc

SEQ ID NO: 6039384 - DNA, 25 bp, Homo sapien
ttttaacctccatatccgtctgttc

SEQ ID NO: 6039385 - DNA, 25 bp, Homo sapien
ctatggcaatagcagtgacagactc

SEQ ID NO: 6039386 - DNA, 25 bp, Homo sapien
aaattagtgggaaatccgacatcaa

SEQ ID NO: 6039387 - DNA, 25 bp, Homo sapien
atctttcttcctcccactaatggga

SEQ ID NO: 6039388 - DNA, 25 bp, Homo sapien
taccaaaatgcctagccattggaat

SEQ ID NO: 6039389 - DNA, 25 bp, Homo sapien
ctcccataacatcccatggagcaag

SEQ ID NO: 6039390 - DNA, 25 bp, Homo sapien
taacatcccatggagcaagagccat

SEQ ID NO: 6039391 - DNA, 25 bp, Homo sapien
ggagttttaccatgagatgtggcgt

SEQ ID NO: 6039392 - DNA, 25 bp, Homo sapien
atgagatgtggcgtagtaatttgct

SEQ ID NO: 6039393 - DNA, 25 bp, Homo sapien
ccaggcaggagtatcagacacacct

SEQ ID NO: 6039394 - DNA, 25 bp, Homo sapien
atgcttcgctgattttaacctccat

SEQ ID NO: 6039395 - DNA, 25 bp, Homo sapien
aaagcctcaatgttctgtttgagat

SEQ ID NO: 6039396 - DNA, 25 bp, Homo sapien
ctttctaagtactttatttgttctg

SEQ ID NO: 6039397 - DNA, 25 bp, Homo sapien
ccgctcttccactgcctttttactc

SEQ ID NO: 6039398 - DNA, 25 bp, Homo sapien
ttccactgcctttttactctgaaat

SEQ ID NO: 6039399 - DNA, 25 bp, Homo sapien
ttggtaacagctgggtcatctccaa

SEQ ID NO: 6039400 - DNA, 25 bp, Homo sapien
gagcaagagccataccaaaatgcct

SEQ ID NO: 6039401 - DNA, 25 bp, Homo sapien
tgttctggtgttaatttaatgctca

SEQ ID NO: 6039402 - DNA, 25 bp, Homo sapien
gccttctcctttcttcttccgctct

SEQ ID NO: 6039403 - DNA, 25 bp, Homo sapien
cctccatatccgtctgttccgaagt

SEQ ID NO: 6039404 - DNA, 25 bp, Homo sapien
tgggaaaacatgtttcgctttagac

SEQ ID NO: 6039405 - DNA, 25 bp, Homo sapien
agatactaaagggagttttaccatg

SEQ ID NO: 6039406 - DNA, 25 bp, Homo sapien
tgatatcacgttcaaagtccctgtt

SEQ ID NO: 6039407 - DNA, 25 bp, Homo sapien
ttgagatgttcgatctttcttcctc

SEQ ID NO: 6039408 - DNA, 25 bp, Homo sapien
cttccgcaacttttaacaatgcttc

SEQ ID NO: 6039409 - DNA, 25 bp, Homo sapien
aatttaatgctcaaagcctcaatgt

SEQ ID NO: 6039410 - DNA, 25 bp, Homo sapien
ctaaagggagttttaccatgagatg

SEQ ID NO: 6039411 - DNA, 25 bp, Homo sapien
ctttagaccgaacataagctatggc

SEQ ID NO: 6039412 - DNA, 25 bp, Homo sapien
cccatggagcaagagccataccaaa

SEQ ID NO: 6039413 - DNA, 25 bp, Homo sapien
accgaacataagctatggcaatagc

SEQ ID NO: 6039414 - DNA, 25 bp, Homo sapien
gagtactttgccctgctgcacaaga

SEQ ID NO: 6039415 - DNA, 25 bp, Homo sapien
ggtttcttggtaacagctgggtcat

SEQ ID NO: 6039416 - DNA, 25 bp, Homo sapien
tactctgaaatctcccgcctcccat

SEQ ID NO: 6039417 - DNA, 25 bp, Homo sapien
tttaccttgatagatactaaaggga

SEQ ID NO: 6039418 - DNA, 25 bp, Homo sapien
cctgttcaatacattccatttacct

SEQ ID NO: 6039419 - DNA, 25 bp, Homo sapien
tatttgttctggtgttaatttaatg

SEQ ID NO: 6039420 - DNA, 25 bp, Homo sapien
tccgacatcaaaaggaacaatactt

SEQ ID NO: 6039421 - DNA, 25 bp, Homo sapien
gggtcatctccaataaaattagtgg

SEQ ID NO: 6039422 - DNA, 25 bp, Homo sapien
tgcatttttgggtccaaagggctta

SEQ ID NO: 6039423 - DNA, 25 bp, Homo sapien
tgaccttcatgccgctggttcttgg

SEQ ID NO: 6039424 - DNA, 25 bp, Homo sapien
tttcttactttaaactagatgtcaa

SEQ ID NO: 6039425 - DNA, 25 bp, Homo sapien
gaaagacgttgatgcttgttttgtt

SEQ ID NO: 6039426 - DNA, 25 bp, Homo sapien
gatgctagattgagagactacacct

SEQ ID NO: 6039427 - DNA, 25 bp, Homo sapien
agattgagagactacacctttgttg

SEQ ID NO: 6039428 - DNA, 25 bp, Homo sapien
ctttgttcccattgaagcaagcccc

SEQ ID NO: 6039429 - DNA, 25 bp, Homo sapien
ttatcgaaaagtctcaaatccttag

SEQ ID NO: 6039430 - DNA, 25 bp, Homo sapien
tttcaaaggtttgattccatacaac

SEQ ID NO: 6039431 - DNA, 25 bp, Homo sapien
tagaacaatctagcgagtttgcttc

SEQ ID NO: 6039432 - DNA, 25 bp, Homo sapien
tccatttgctgaagtcaaattggct

SEQ ID NO: 6039433 - DNA, 25 bp, Homo sapien
attccgatgtcatgagcaacattgc

SEQ ID NO: 6039434 - DNA, 25 bp, Homo sapien
catttctctaggtgaccttcatgcc

SEQ ID NO: 6039435 - DNA, 25 bp, Homo sapien
ttctccaatcgtgaagactccattt

SEQ ID NO: 6039436 - DNA, 25 bp, Homo sapien
tgaaaaagaaagagctcgcttatta

SEQ ID NO: 6039437 - DNA, 25 bp, Homo sapien
gaagactccatttgctgaagtcaaa

SEQ ID NO: 6039438 - DNA, 25 bp, Homo sapien
tgccgatgaaaaagaaagagctcgc

SEQ ID NO: 6039439 - DNA, 25 bp, Homo sapien
agaaagagctcgcttattaggttcc

SEQ ID NO: 6039440 - DNA, 25 bp, Homo sapien
tttgttgctaccgaaaacatttctc

SEQ ID NO: 6039441 - DNA, 25 bp, Homo sapien
tgcttctttgttcccattgaagcaa

SEQ ID NO: 6039442 - DNA, 25 bp, Homo sapien
agagactacacctttgttgctaccg

SEQ ID NO: 6039443 - DNA, 25 bp, Homo sapien
caacaagaaagacgttgatgcttgt

SEQ ID NO: 6039444 - DNA, 25 bp, Homo sapien
agctttggctatccaattttatttg

SEQ ID NO: 6039445 - DNA, 25 bp, Homo sapien
ccgacgttatcgaaaagtctcaaat

SEQ ID NO: 6039446 - DNA, 25 bp, Homo sapien
atctagcgagtttgcttctttgttc

SEQ ID NO: 6039447 - DNA, 25 bp, Homo sapien
tgctaccgaaaacatttctctaggt

SEQ ID NO: 6039448 - DNA, 25 bp, Homo sapien
tgaatggagagctaagcatcctcat

SEQ ID NO: 6039449 - DNA, 25 bp, Homo sapien
ctttctttcaaaggtttgattccat

SEQ ID NO: 6039450 - DNA, 25 bp, Homo sapien
gatgggcatctctagctaattccga

SEQ ID NO: 6039451 - DNA, 25 bp, Homo sapien
gagatggttcaacactgttgctgct

SEQ ID NO: 6039452 - DNA, 25 bp, Homo sapien
ctcaaatccttagatgggcatctct

SEQ ID NO: 6039453 - DNA, 25 bp, Homo sapien
aaactacgcttctgaagctttgatt

SEQ ID NO: 6039454 - DNA, 25 bp, Homo sapien
cttgggcttttggtttggccactat

SEQ ID NO: 6039455 - DNA, 25 bp, Homo sapien
tgctgaagtcaaattggctgaaaag

SEQ ID NO: 6039456 - DNA, 25 bp, Homo sapien
aactagatgtcaagatcgttgatct

SEQ ID NO: 6039457 - DNA, 25 bp, Homo sapien
catctctagctaattccgatgtcat

SEQ ID NO: 6039458 - DNA, 25 bp, Homo sapien
tccttagatgggcatctctagctaa

SEQ ID NO: 6039459 - DNA, 25 bp, Homo sapien
tttgatgagatggttcaacactgtt

SEQ ID NO: 6039460 - DNA, 25 bp, Homo sapien
actttaaactagatgtcaagatcgt

SEQ ID NO: 6039461 - DNA, 25 bp, Homo sapien
gagagctaagcatcctcatttgatg

SEQ ID NO: 6039462 - DNA, 25 bp, Homo sapien
agcccctgcatttttgggtccaaag

SEQ ID NO: 6039463 - DNA, 25 bp, Homo sapien
tcatgccgctggttcttgggctttt

SEQ ID NO: 6039464 - DNA, 25 bp, Homo sapien
ggccactattttgggccctgaatgg

SEQ ID NO: 6039465 - DNA, 25 bp, Homo sapien
tccaagaaactacgcttctgaagct

SEQ ID NO: 6039466 - DNA, 25 bp, Homo sapien
gcttattaggttccgacgttatcga

SEQ ID NO: 6039467 - DNA, 25 bp, Homo sapien
cgaaaacatttctctaggtgacctt

SEQ ID NO: 6039468 - DNA, 25 bp, Homo sapien
atgtcatgagcaacattgctcgtcc

SEQ ID NO: 6039469 - DNA, 25 bp, Homo sapien
gttcaacactgttgctgcttctcca

SEQ ID NO: 6039470 - DNA, 25 bp, Homo sapien
aatcgtgaagactccatttgctgaa

SEQ ID NO: 6039471 - DNA, 25 bp, Homo sapien
gtttggccactattttgggccctga

SEQ ID NO: 6039472 - DNA, 25 bp, Homo sapien
tgaagctttgatttcttactttaaa

SEQ ID NO: 6039473 - DNA, 25 bp, Homo sapien
tcccattgaagcaagcccctgcatt

SEQ ID NO: 6039474 - DNA, 25 bp, Homo sapien
cgcttctgaagctttgatttcttac

SEQ ID NO: 6039475 - DNA, 25 bp, Homo sapien
ctcgtccattcctttctttcaaagg

SEQ ID NO: 6039476 - DNA, 25 bp, Homo sapien
tctaggtgaccttcatgccgctggt

SEQ ID NO: 6039477 - DNA, 25 bp, Homo sapien
atgtcaagatcgttgatctagaaca

SEQ ID NO: 6039478 - DNA, 25 bp, Homo sapien
tgattccatacaacaagaaagacgt

SEQ ID NO: 6039479 - DNA, 25 bp, Homo sapien
tagctaattccgatgtcatgagcaa

SEQ ID NO: 6039480 - DNA, 25 bp, Homo sapien
acattgctcgtccattcctttcttt

SEQ ID NO: 6039481 - DNA, 25 bp, Homo sapien
ggctatccaattttatttggctaat

SEQ ID NO: 6039482 - DNA, 25 bp, Homo sapien
aaagctaactgaagctttggctatc

SEQ ID NO: 6039483 - DNA, 25 bp, Homo sapien
cgagtttgcttctttgttcccattg

SEQ ID NO: 6039484 - DNA, 25 bp, Homo sapien
gggcttaaagctaactgaagctttg

SEQ ID NO: 6039485 - DNA, 25 bp, Homo sapien
agatcgttgatctagaacaatctag

SEQ ID NO: 6039486 - DNA, 25 bp, Homo sapien
aaaagtctcaaatccttagatgggc

SEQ ID NO: 6039487 - DNA, 25 bp, Homo sapien
atcgacaacctagctgctgtcttcg

SEQ ID NO: 6039488 - DNA, 25 bp, Homo sapien
taagcatcctcatttgatgagatgg

SEQ ID NO: 6039489 - DNA, 25 bp, Homo sapien
gaagcaagcccctgcatttttgggt

SEQ ID NO: 6039490 - DNA, 25 bp, Homo sapien
aactgaagctttggctatccaattt

SEQ ID NO: 6039491 - DNA, 25 bp, Homo sapien
cgctggttcttgggcttttggtttg

SEQ ID NO: 6039492 - DNA, 25 bp, Homo sapien
ttgatctagaacaatctagcgagtt

SEQ ID NO: 6039493 - DNA, 25 bp, Homo sapien
aacctagctgctgtcttcgatgcta

SEQ ID NO: 6039494 - DNA, 25 bp, Homo sapien
cgttgatgcttgttttgttaaaatc

SEQ ID NO: 6039495 - DNA, 25 bp, Homo sapien
ttatttggctaatcaagttgccgat

SEQ ID NO: 6039496 - DNA, 25 bp, Homo sapien
gagctcgcttattaggttccgacgt

SEQ ID NO: 6039497 - DNA, 25 bp, Homo sapien
tattttgggccctgaatggagagct

SEQ ID NO: 6039498 - DNA, 25 bp, Homo sapien
tccaaagggcttaaagctaactgaa

SEQ ID NO: 6039499 - DNA, 25 bp, Homo sapien
gggccctgaatggagagctaagcat

SEQ ID NO: 6039500 - DNA, 25 bp, Homo sapien
gttaaaatcgacaacctagctgctg

SEQ ID NO: 6039501 - DNA, 25 bp, Homo sapien
tacacctttgttgctaccgaaaaca

SEQ ID NO: 6039502 - DNA, 25 bp, Homo sapien
tcctcatttgatgagatggttcaac

SEQ ID NO: 6039503 - DNA, 25 bp, Homo sapien
tccatacaacaagaaagacgttgat

SEQ ID NO: 6039504 - DNA, 25 bp, Homo sapien
cattcctttctttcaaaggtttgat

SEQ ID NO: 6039505 - DNA, 25 bp, Homo sapien
tgcttgttttgttaaaatcgacaac

SEQ ID NO: 6039506 - DNA, 25 bp, Homo sapien
ttgatttcttactttaaactagatg

SEQ ID NO: 6039507 - DNA, 25 bp, Homo sapien
ggctaatcaagttgccgatgaaaaa

SEQ ID NO: 6039508 - DNA, 25 bp, Homo sapien
tcaagttgccgatgaaaaagaaaga

SEQ ID NO: 6039509 - DNA, 25 bp, Homo sapien
cactgttgctgcttctccaatcgtg

SEQ ID NO: 6039510 - DNA, 25 bp, Homo sapien
ccaattttatttggctaatcaagtt

SEQ ID NO: 6039511 - DNA, 25 bp, Homo sapien
tgagcaacattgctcgtccattcct

SEQ ID NO: 6039512 - DNA, 25 bp, Homo sapien
gtcttcgatgctagattgagagact

SEQ ID NO: 6039513 - DNA, 25 bp, Homo sapien
gctgctgtcttcgatgctagattga

SEQ ID NO: 6039514 - DNA, 25 bp, Homo sapien
tgctgcttctccaatcgtgaagact

SEQ ID NO: 6039515 - DNA, 25 bp, Homo sapien
ttgttgttttcaccatagacaacta

SEQ ID NO: 6039516 - DNA, 25 bp, Homo sapien
ttatcccaagcccacatgttgttga

SEQ ID NO: 6039517 - DNA, 25 bp, Homo sapien
tcccagaaccatggcaaagcaactg

SEQ ID NO: 6039518 - DNA, 25 bp, Homo sapien
ggagcgaaatcttggcctctgacca

SEQ ID NO: 6039519 - DNA, 25 bp, Homo sapien
ccagtcatccaagacaaatgtggac

SEQ ID NO: 6039520 - DNA, 25 bp, Homo sapien
tggcctctgaccataacggcaccaa

SEQ ID NO: 6039521 - DNA, 25 bp, Homo sapien
cttttcagccttttgcttctttggt

SEQ ID NO: 6039522 - DNA, 25 bp, Homo sapien
ttagtagaagcggacaatctgttga

SEQ ID NO: 6039523 - DNA, 25 bp, Homo sapien
tctcttccagtcatccaagacaaat

SEQ ID NO: 6039524 - DNA, 25 bp, Homo sapien
ttttcaccatagacaactaaacaac

SEQ ID NO: 6039525 - DNA, 25 bp, Homo sapien
aaatcttggcctctgaccataacgg

SEQ ID NO: 6039526 - DNA, 25 bp, Homo sapien
cagatggagtattcttcagggttgt

SEQ ID NO: 6039527 - DNA, 25 bp, Homo sapien
ccgaccaagttgttggacatgaaag

SEQ ID NO: 6039528 - DNA, 25 bp, Homo sapien
caataccattattgttgttttcacc

SEQ ID NO: 6039529 - DNA, 25 bp, Homo sapien
attctttgtcttcttccttggttgg

SEQ ID NO: 6039530 - DNA, 25 bp, Homo sapien
agcagcatcatctgctggcttagct

SEQ ID NO: 6039531 - DNA, 25 bp, Homo sapien
cggcctttggcttttcagccttttg

SEQ ID NO: 6039532 - DNA, 25 bp, Homo sapien
accttccagatggagtattcttcag

SEQ ID NO: 6039533 - DNA, 25 bp, Homo sapien
acatcaaaggctggagcgaaatctt

SEQ ID NO: 6039534 - DNA, 25 bp, Homo sapien
tagtgttcccagaaccatggcaaag

SEQ ID NO: 6039535 - DNA, 25 bp, Homo sapien
gtaggttagagccttttcagccaat

SEQ ID NO: 6039536 - DNA, 25 bp, Homo sapien
ttgcttctttggtggagtgtaggtt

SEQ ID NO: 6039537 - DNA, 25 bp, Homo sapien
caactggtctggtgtcgtcgttgga

SEQ ID NO: 6039538 - DNA, 25 bp, Homo sapien
ctttggtggagtgtaggttagagcc

SEQ ID NO: 6039539 - DNA, 25 bp, Homo sapien
gagtattcttcagggttgtagtgtt

SEQ ID NO: 6039540 - DNA, 25 bp, Homo sapien
agctggagcagcatcatctgctggc

SEQ ID NO: 6039541 - DNA, 25 bp, Homo sapien
caaggtaagttcgtcgttgtatttg

SEQ ID NO: 6039542 - DNA, 25 bp, Homo sapien
caacttggtgtattcgtaagattcc

SEQ ID NO: 6039543 - DNA, 25 bp, Homo sapien
gacaaatgtggactttcctaaagct

SEQ ID NO: 6039544 - DNA, 25 bp, Homo sapien
ccttcttcttttcagcctttgactt

SEQ ID NO: 6039545 - DNA, 25 bp, Homo sapien
ataacggcaccaacaataccattat

SEQ ID NO: 6039546 - DNA, 25 bp, Homo sapien
cttggttgggtccaacttggtgtat

SEQ ID NO: 6039547 - DNA, 25 bp, Homo sapien
aaccaccgaccaagttgttggacat

SEQ ID NO: 6039548 - DNA, 25 bp, Homo sapien
agccttttgcttctttggtggagtg

SEQ ID NO: 6039549 - DNA, 25 bp, Homo sapien
tgtggactttcctaaagcttccaat

SEQ ID NO: 6039550 - DNA, 25 bp, Homo sapien
gtcgtcgttggagtactttctcttc

SEQ ID NO: 6039551 - DNA, 25 bp, Homo sapien
ttccaatgggtgctttggcttttta

SEQ ID NO: 6039552 - DNA, 25 bp, Homo sapien
ccatagacaactaaacaaccgaaca

SEQ ID NO: 6039553 - DNA, 25 bp, Homo sapien
gtactttctcttccagtcatccaag

SEQ ID NO: 6039554 - DNA, 25 bp, Homo sapien
tgaccataacggcaccaacaatacc

SEQ ID NO: 6039555 - DNA, 25 bp, Homo sapien
tgctggcttagcttcgtccttcttc

SEQ ID NO: 6039556 - DNA, 25 bp, Homo sapien
tcgtaagattcccagtctggagcga

SEQ ID NO: 6039557 - DNA, 25 bp, Homo sapien
acaggcttatcccaagcccacatgt

SEQ ID NO: 6039558 - DNA, 25 bp, Homo sapien
cagtctggagcgacatcaaaggctg

SEQ ID NO: 6039559 - DNA, 25 bp, Homo sapien
gattcccagtctggagcgacatcaa

SEQ ID NO: 6039560 - DNA, 25 bp, Homo sapien
atgaaagtcaaggtaagttcgtcgt

SEQ ID NO: 6039561 - DNA, 25 bp, Homo sapien
atgtacttagtagaagcggacaatc

SEQ ID NO: 6039562 - DNA, 25 bp, Homo sapien
gacaaattctttgtcttcttccttg

SEQ ID NO: 6039563 - DNA, 25 bp, Homo sapien
accatggcaaagcaactggtctggt

SEQ ID NO: 6039564 - DNA, 25 bp, Homo sapien
gggttgtagtgttcccagaaccatg

SEQ ID NO: 6039565 - DNA, 25 bp, Homo sapien
gacaacaacaggcttatcccaagcc

SEQ ID NO: 6039566 - DNA, 25 bp, Homo sapien
ccattattgttgttttcaccataga

SEQ ID NO: 6039567 - DNA, 25 bp, Homo sapien
tcttttcagcctttgacttttcggc

SEQ ID NO: 6039568 - DNA, 25 bp, Homo sapien
ctttggctttttagctggagcagca

SEQ ID NO: 6039569 - DNA, 25 bp, Homo sapien
tcttcagggttgtagtgttcccaga

SEQ ID NO: 6039570 - DNA, 25 bp, Homo sapien
ccaagcccacatgttgttgacaaat

SEQ ID NO: 6039571 - DNA, 25 bp, Homo sapien
aaacaaccgaacatgtacttagtag

SEQ ID NO: 6039572 - DNA, 25 bp, Homo sapien
tgggtccaacttggtgtattcgtaa

SEQ ID NO: 6039573 - DNA, 25 bp, Homo sapien
ccgaacatgtacttagtagaagcgg

SEQ ID NO: 6039574 - DNA, 25 bp, Homo sapien
gcaaagcaactggtctggtgtcgtc

SEQ ID NO: 6039575 - DNA, 25 bp, Homo sapien
atccaagacaaatgtggactttcct

SEQ ID NO: 6039576 - DNA, 25 bp, Homo sapien
ctttcctaaagcttccaatgggtgc

SEQ ID NO: 6039577 - DNA, 25 bp, Homo sapien
ttggacatgaaagtcaaggtaagtt

SEQ ID NO: 6039578 - DNA, 25 bp, Homo sapien
cagcctttgacttttcggcctttgg

SEQ ID NO: 6039579 - DNA, 25 bp, Homo sapien
gtgtattcgtaagattcccagtctg

SEQ ID NO: 6039580 - DNA, 25 bp, Homo sapien
tgggtgctttggctttttagctgga

SEQ ID NO: 6039581 - DNA, 25 bp, Homo sapien
aaggctggagcgaaatcttggcctc

SEQ ID NO: 6039582 - DNA, 25 bp, Homo sapien
aagttgttggacatgaaagtcaagg

SEQ ID NO: 6039583 - DNA, 25 bp, Homo sapien
tggagtgtaggttagagccttttca

SEQ ID NO: 6039584 - DNA, 25 bp, Homo sapien
gacaatctgttgaaaaaaccaccga

SEQ ID NO: 6039585 - DNA, 25 bp, Homo sapien
ctttttagctggagcagcatcatct

SEQ ID NO: 6039586 - DNA, 25 bp, Homo sapien
acaactaaacaaccgaacatgtact

SEQ ID NO: 6039587 - DNA, 25 bp, Homo sapien
tgtcttcttccttggttgggtccaa

SEQ ID NO: 6039588 - DNA, 25 bp, Homo sapien
tgacttttcggcctttggcttttca

SEQ ID NO: 6039589 - DNA, 25 bp, Homo sapien
gaagcggacaatctgttgaaaaaac

SEQ ID NO: 6039590 - DNA, 25 bp, Homo sapien
gcttagcttcgtccttcttcttttc

SEQ ID NO: 6039591 - DNA, 25 bp, Homo sapien
ctttggcttttcagccttttgcttc

SEQ ID NO: 6039592 - DNA, 25 bp, Homo sapien
cttcgtccttcttcttttcagcctt

SEQ ID NO: 6039593 - DNA, 25 bp, Homo sapien
gttgttgacaaattctttgtcttct

SEQ ID NO: 6039594 - DNA, 25 bp, Homo sapien
taaccaaccttccagatggagtatt

SEQ ID NO: 6039595 - DNA, 25 bp, Homo sapien
ccacatgttgttgacaaattctttg

SEQ ID NO: 6039596 - DNA, 25 bp, Homo sapien
tagagccttttcagccaatttgact

SEQ ID NO: 6039597 - DNA, 25 bp, Homo sapien
tctggtgtcgtcgttggagtacttt

SEQ ID NO: 6039598 - DNA, 25 bp, Homo sapien
gagcgacatcaaaggctggagcgaa

SEQ ID NO: 6039599 - DNA, 25 bp, Homo sapien
gccattgacaacaacaggcttatcc

SEQ ID NO: 6039600 - DNA, 25 bp, Homo sapien
atcttcgccattgacaacaacaggc

SEQ ID NO: 6039601 - DNA, 25 bp, Homo sapien
gcaccaacaataccattattgttgt

SEQ ID NO: 6039602 - DNA, 25 bp, Homo sapien
atcatctgctggcttagcttcgtcc

SEQ ID NO: 6039603 - DNA, 25 bp, Homo sapien
taaagcttccaatgggtgctttggc

SEQ ID NO: 6039604 - DNA, 25 bp, Homo sapien
gttggagtactttctcttccagtca

SEQ ID NO: 6039605 - DNA, 25 bp, Homo sapien
tatttgtaaccaaccttccagatgg

SEQ ID NO: 6039606 - DNA, 25 bp, Homo sapien
tgaccttgatttttacgataacaaa

SEQ ID NO: 6039607 - DNA, 25 bp, Homo sapien
gattgttgaccttgatttttacgat

SEQ ID NO: 6039608 - DNA, 25 bp, Homo sapien
agacagaacctgatcgaaagcataa

SEQ ID NO: 6039609 - DNA, 25 bp, Homo sapien
caattatgtctcagacagaacctga

SEQ ID NO: 6039610 - DNA, 25 bp, Homo sapien
gacgaaagacacaagattgaggttg

SEQ ID NO: 6039611 - DNA, 25 bp, Homo sapien
ctgacacaagatctgcctgatgatg

SEQ ID NO: 6039612 - DNA, 25 bp, Homo sapien
tgactgatctggagaatttatactt

SEQ ID NO: 6039613 - DNA, 25 bp, Homo sapien
gttattgacttggtccatctaaaaa

SEQ ID NO: 6039614 - DNA, 25 bp, Homo sapien
tcaaatcgttagaagatttgaacct

SEQ ID NO: 6039615 - DNA, 25 bp, Homo sapien
ctgtcaaacttggaagaaatttggt

SEQ ID NO: 6039616 - DNA, 25 bp, Homo sapien
gatacaaatcctgacttcatcactg

SEQ ID NO: 6039617 - DNA, 25 bp, Homo sapien
tcctttaaagaatttgaagatattg

SEQ ID NO: 6039618 - DNA, 25 bp, Homo sapien
gatgatgtagaggttattgacttgg

SEQ ID NO: 6039619 - DNA, 25 bp, Homo sapien
ataaggttcattctattgaacccga

SEQ ID NO: 6039620 - DNA, 25 bp, Homo sapien
accccatgacaagattgttgacctt

SEQ ID NO: 6039621 - DNA, 25 bp, Homo sapien
caagacttattaacttacatccttt

SEQ ID NO: 6039622 - DNA, 25 bp, Homo sapien
ggttcaagaatttgaaacaattatg

SEQ ID NO: 6039623 - DNA, 25 bp, Homo sapien
agacacaagattgaggttgtagacg

SEQ ID NO: 6039624 - DNA, 25 bp, Homo sapien
attaacgtctctagacctgtcgttt

SEQ ID NO: 6039625 - DNA, 25 bp, Homo sapien
ccactttgaaatcactgaaaaactt

SEQ ID NO: 6039626 - DNA, 25 bp, Homo sapien
aaagaatttgaagatattgtccatc

SEQ ID NO: 6039627 - DNA, 25 bp, Homo sapien
ctgcctgatgatgtagaggttattg

SEQ ID NO: 6039628 - DNA, 25 bp, Homo sapien
caaaattaaacatatctcctctaat

SEQ ID NO: 6039629 - DNA, 25 bp, Homo sapien
taacaagatcaagcacatcaaaaat

SEQ ID NO: 6039630 - DNA, 25 bp, Homo sapien
gtcgtttaacaagatcaagcacatc

SEQ ID NO: 6039631 - DNA, 25 bp, Homo sapien
tgaaatcactgaaaaacttagaatt

SEQ ID NO: 6039632 - DNA, 25 bp, Homo sapien
gacttcatcactgcagattcggaac

SEQ ID NO: 6039633 - DNA, 25 bp, Homo sapien
gtagaggttattgacttggtccatc

SEQ ID NO: 6039634 - DNA, 25 bp, Homo sapien
aatcctgacttcatcactgcagatt

SEQ ID NO: 6039635 - DNA, 25 bp, Homo sapien
ttgaaaatctgtccactttgaaatc

SEQ ID NO: 6039636 - DNA, 25 bp, Homo sapien
aagattgaggttgtagacgatacaa

SEQ ID NO: 6039637 - DNA, 25 bp, Homo sapien
gaaaatttgactgatctggagaatt

SEQ ID NO: 6039638 - DNA, 25 bp, Homo sapien
tagaattaggtggtaataaggttca

SEQ ID NO: 6039639 - DNA, 25 bp, Homo sapien
gacttggtccatctaaaaatcaaat

SEQ ID NO: 6039640 - DNA, 25 bp, Homo sapien
gcatttccaaaattgaaaatctgtc

SEQ ID NO: 6039641 - DNA, 25 bp, Homo sapien
gatttgaacctttataggttcaaga

SEQ ID NO: 6039642 - DNA, 25 bp, Homo sapien
ccataccaagacttattaacttaca

SEQ ID NO: 6039643 - DNA, 25 bp, Homo sapien
caagatctgcctgatgatgtagagg

SEQ ID NO: 6039644 - DNA, 25 bp, Homo sapien
ctctaatgttaataagctcaccaaa

SEQ ID NO: 6039645 - DNA, 25 bp, Homo sapien
gaaaaagacgaaagacacaagattg

SEQ ID NO: 6039646 - DNA, 25 bp, Homo sapien
agtggaagttttaccccatgacaag

SEQ ID NO: 6039647 - DNA, 25 bp, Homo sapien
tatacttcgtgcagaacagcatttc

SEQ ID NO: 6039648 - DNA, 25 bp, Homo sapien
ttccttcgaaggtctgtcaaacttg

SEQ ID NO: 6039649 - DNA, 25 bp, Homo sapien
gcacatcaaaaatctagaaaatttg

SEQ ID NO: 6039650 - DNA, 25 bp, Homo sapien
gaggttgtagacgatacaaatcctg

SEQ ID NO: 6039651 - DNA, 25 bp, Homo sapien
taagctcaccaaattaacgtctcta

SEQ ID NO: 6039652 - DNA, 25 bp, Homo sapien
tcaaaaatctagaaaatttgactga

SEQ ID NO: 6039653 - DNA, 25 bp, Homo sapien
gtctctagacctgtcgtttaacaag

SEQ ID NO: 6039654 - DNA, 25 bp, Homo sapien
ccaaaattgaaaatctgtccacttt

SEQ ID NO: 6039655 - DNA, 25 bp, Homo sapien
caccaaattaacgtctctagacctg

SEQ ID NO: 6039656 - DNA, 25 bp, Homo sapien
ttcattctattgaacccgattcctt

SEQ ID NO: 6039657 - DNA, 25 bp, Homo sapien
cgaaggtctgtcaaacttggaagaa

SEQ ID NO: 6039658 - DNA, 25 bp, Homo sapien
ctattgaacccgattccttcgaagg

SEQ ID NO: 6039659 - DNA, 25 bp, Homo sapien
cactgaaaaacttagaattaggtgg

SEQ ID NO: 6039660 - DNA, 25 bp, Homo sapien
atcactgcagattcggaactgacac

SEQ ID NO: 6039661 - DNA, 25 bp, Homo sapien
gtagacgatacaaatcctgacttca

SEQ ID NO: 6039662 - DNA, 25 bp, Homo sapien
tcggaactgacacaagatctgcctg

SEQ ID NO: 6039663 - DNA, 25 bp, Homo sapien
gcagattcggaactgacacaagatc

SEQ ID NO: 6039664 - DNA, 25 bp, Homo sapien
aagaatttgaaacaattatgtctca

SEQ ID NO: 6039665 - DNA, 25 bp, Homo sapien
cttacatcctttaaagaatttgaag

SEQ ID NO: 6039666 - DNA, 25 bp, Homo sapien
ttgaaacaattatgtctcagacaga

SEQ ID NO: 6039667 - DNA, 25 bp, Homo sapien
atctggagaatttatacttcgtgca

SEQ ID NO: 6039668 - DNA, 25 bp, Homo sapien
atcgaaagcataagcgaagtggaag

SEQ ID NO: 6039669 - DNA, 25 bp, Homo sapien
tgttaataagctcaccaaattaacg

SEQ ID NO: 6039670 - DNA, 25 bp, Homo sapien
tttataggttcaagaatttgaaaca

SEQ ID NO: 6039671 - DNA, 25 bp, Homo sapien
agttttaccccatgacaagattgtt

SEQ ID NO: 6039672 - DNA, 25 bp, Homo sapien
cgttagaagatttgaacctttatag

SEQ ID NO: 6039673 - DNA, 25 bp, Homo sapien
ctaaaaatcaaatcgttagaagatt

SEQ ID NO: 6039674 - DNA, 25 bp, Homo sapien
aatctagaaaatttgactgatctgg

SEQ ID NO: 6039675 - DNA, 25 bp, Homo sapien
attaggtggtaataaggttcattct

SEQ ID NO: 6039676 - DNA, 25 bp, Homo sapien
cgataacaaaattaaacatatctcc

SEQ ID NO: 6039677 - DNA, 25 bp, Homo sapien
agaacagcatttccaaaattgaaaa

SEQ ID NO: 6039678 - DNA, 25 bp, Homo sapien
tatctcctctaatgttaataagctc

SEQ ID NO: 6039679 - DNA, 25 bp, Homo sapien
tgtctcagacagaacctgatcgaaa

SEQ ID NO: 6039680 - DNA, 25 bp, Homo sapien
tgacaagattgttgaccttgatttt

SEQ ID NO: 6039681 - DNA, 25 bp, Homo sapien
gatcaagcacatcaaaaatctagaa

SEQ ID NO: 6039682 - DNA, 25 bp, Homo sapien
tcgtgcagaacagcatttccaaaat

SEQ ID NO: 6039683 - DNA, 25 bp, Homo sapien
atctgtccactttgaaatcactgaa

SEQ ID NO: 6039684 - DNA, 25 bp, Homo sapien
gtccatctaaaaatcaaatcgttag

SEQ ID NO: 6039685 - DNA, 25 bp, Homo sapien
agcgaagtggaagttttaccccatg

SEQ ID NO: 6039686 - DNA, 25 bp, Homo sapien
taaacatatctcctctaatgttaat

SEQ ID NO: 6039687 - DNA, 25 bp, Homo sapien
agaatttatacttcgtgcagaacag

SEQ ID NO: 6039688 - DNA, 25 bp, Homo sapien
aattccataccaagacttattaact

SEQ ID NO: 6039689 - DNA, 25 bp, Homo sapien
aacctgatcgaaagcataagcgaag

SEQ ID NO: 6039690 - DNA, 25 bp, Homo sapien
acccgattccttcgaaggtctgtca

SEQ ID NO: 6039691 - DNA, 25 bp, Homo sapien
agacctgtcgtttaacaagatcaag

SEQ ID NO: 6039692 - DNA, 25 bp, Homo sapien
agcataagcgaagtggaagttttac

SEQ ID NO: 6039693 - DNA, 25 bp, Homo sapien
gtggtaataaggttcattctattga

SEQ ID NO: 6039694 - DNA, 25 bp, Homo sapien
ctctagaccttcaatcttggtgatg

SEQ ID NO: 6039695 - DNA, 25 bp, Homo sapien
agattggatggacaatatcttcaaa

SEQ ID NO: 6039696 - DNA, 25 bp, Homo sapien
caagctctcaaaggattgatctatc

SEQ ID NO: 6039697 - DNA, 25 bp, Homo sapien
taagtttttcagtgatttcaaagtg

SEQ ID NO: 6039698 - DNA, 25 bp, Homo sapien
gaatcgggttcaatagaatgaacct

SEQ ID NO: 6039699 - DNA, 25 bp, Homo sapien
tatgtcagttaaatttgacaggtgg

SEQ ID NO: 6039700 - DNA, 25 bp, Homo sapien
caaagtggacagattttcaattttg

SEQ ID NO: 6039701 - DNA, 25 bp, Homo sapien
gataaatggtctccaagcgtgatag

SEQ ID NO: 6039702 - DNA, 25 bp, Homo sapien
caggtggttcaagttttccagggag

SEQ ID NO: 6039703 - DNA, 25 bp, Homo sapien
aaaggatgtaagttaataagtcttg

SEQ ID NO: 6039704 - DNA, 25 bp, Homo sapien
aatttcttccaagtttgacagacct

SEQ ID NO: 6039705 - DNA, 25 bp, Homo sapien
ttccaagtttgacagaccttcgaag

SEQ ID NO: 6039706 - DNA, 25 bp, Homo sapien
gaagtataaattctccagatcagtc

SEQ ID NO: 6039707 - DNA, 25 bp, Homo sapien
tcttctatacgaagtcttattttcc

SEQ ID NO: 6039708 - DNA, 25 bp, Homo sapien
cctccagataaatggtctccaagcg

SEQ ID NO: 6039709 - DNA, 25 bp, Homo sapien
gaaattatgtgacagatagagctct

SEQ ID NO: 6039710 - DNA, 25 bp, Homo sapien
ggacagattttcaattttggaaatg

SEQ ID NO: 6039711 - DNA, 25 bp, Homo sapien
ctgcacgaagtataaattctccaga

SEQ ID NO: 6039712 - DNA, 25 bp, Homo sapien
cgaaggaatcgggttcaatagaatg

SEQ ID NO: 6039713 - DNA, 25 bp, Homo sapien
caactcttctagattttcaattttt

SEQ ID NO: 6039714 - DNA, 25 bp, Homo sapien
gagctcttcaagattggtcaactct

SEQ ID NO: 6039715 - DNA, 25 bp, Homo sapien
ggtgatgaaattatgtgacagatag

SEQ ID NO: 6039716 - DNA, 25 bp, Homo sapien
cagaccttcgaaggaatcgggttca

SEQ ID NO: 6039717 - DNA, 25 bp, Homo sapien
attttcaattttggaaatgctgttc

SEQ ID NO: 6039718 - DNA, 25 bp, Homo sapien
ttttaatttattagattggatggac

SEQ ID NO: 6039719 - DNA, 25 bp, Homo sapien
ggattgatctatcttgttaaaggag

SEQ ID NO: 6039720 - DNA, 25 bp, Homo sapien
tggaggtaagttcatagtcagtttt

SEQ ID NO: 6039721 - DNA, 25 bp, Homo sapien
aattttggaaatgctgttctgcacg

SEQ ID NO: 6039722 - DNA, 25 bp, Homo sapien
tttattagattggatggacaatatc

SEQ ID NO: 6039723 - DNA, 25 bp, Homo sapien
tggtctccaagcgtgatagggcgga

SEQ ID NO: 6039724 - DNA, 25 bp, Homo sapien
ggtttccctccagataaatggtctc

SEQ ID NO: 6039725 - DNA, 25 bp, Homo sapien
cagatagagctcttcaagattggtc

SEQ ID NO: 6039726 - DNA, 25 bp, Homo sapien
taaattctccagatcagtcaaattt

SEQ ID NO: 6039727 - DNA, 25 bp, Homo sapien
tagggatggaggtaagttcatagtc

SEQ ID NO: 6039728 - DNA, 25 bp, Homo sapien
tgatagggcggacaggttttcaccc

SEQ ID NO: 6039729 - DNA, 25 bp, Homo sapien
ttcaagattggtcaactcttctaga

SEQ ID NO: 6039730 - DNA, 25 bp, Homo sapien
ccacctaattctaagtttttcagtg

SEQ ID NO: 6039731 - DNA, 25 bp, Homo sapien
ggcccatatgtcagttaaatttgac

SEQ ID NO: 6039732 - DNA, 25 bp, Homo sapien
accaaatttcttccaagtttgacag

SEQ ID NO: 6039733 - DNA, 25 bp, Homo sapien
ctccagatcagtcaaattttctaga

SEQ ID NO: 6039734 - DNA, 25 bp, Homo sapien
gctgttctgcacgaagtataaattc

SEQ ID NO: 6039735 - DNA, 25 bp, Homo sapien
tgaaccttattaccacctaattcta

SEQ ID NO: 6039736 - DNA, 25 bp, Homo sapien
cagttttcttctatacgaagtctta

SEQ ID NO: 6039737 - DNA, 25 bp, Homo sapien
attttgttggaggtcacgtccaaag

SEQ ID NO: 6039738 - DNA, 25 bp, Homo sapien
ctcaaaggattgatctatcttgtta

SEQ ID NO: 6039739 - DNA, 25 bp, Homo sapien
ggttcaatagaatgaaccttattac

SEQ ID NO: 6039740 - DNA, 25 bp, Homo sapien
ggcggacaggttttcacccaagctc

SEQ ID NO: 6039741 - DNA, 25 bp, Homo sapien
caatatcttcaaattctttaaagga

SEQ ID NO: 6039742 - DNA, 25 bp, Homo sapien
accttcaatcttggtgatgaaatta

SEQ ID NO: 6039743 - DNA, 25 bp, Homo sapien
tccagttgaatagggtttccctcca

SEQ ID NO: 6039744 - DNA, 25 bp, Homo sapien
atagaatgaaccttattaccaccta

SEQ ID NO: 6039745 - DNA, 25 bp, Homo sapien
gtttttctctagaccttcaatcttg

SEQ ID NO: 6039746 - DNA, 25 bp, Homo sapien
gatgtaagttaataagtcttggtat

SEQ ID NO: 6039747 - DNA, 25 bp, Homo sapien
taagttcatagtcagttttcttcta

SEQ ID NO: 6039748 - DNA, 25 bp, Homo sapien
agttaaatttgacaggtggttcaag

SEQ ID NO: 6039749 - DNA, 25 bp, Homo sapien
tgaatagggtttccctccagataaa

SEQ ID NO: 6039750 - DNA, 25 bp, Homo sapien
aatcttggtgatgaaattatgtgac

SEQ ID NO: 6039751 - DNA, 25 bp, Homo sapien
atacgaagtcttattttccagttga

SEQ ID NO: 6039752 - DNA, 25 bp, Homo sapien
tttgacaggtggttcaagttttcca

SEQ ID NO: 6039753 - DNA, 25 bp, Homo sapien
taattctaagtttttcagtgatttc

SEQ ID NO: 6039754 - DNA, 25 bp, Homo sapien
agttaataagtcttggtatggaatt

SEQ ID NO: 6039755 - DNA, 25 bp, Homo sapien
agtcttattttccagttgaataggg

SEQ ID NO: 6039756 - DNA, 25 bp, Homo sapien
tttcagtgatttcaaagtggacaga

SEQ ID NO: 6039757 - DNA, 25 bp, Homo sapien
attggtcaactcttctagattttca

SEQ ID NO: 6039758 - DNA, 25 bp, Homo sapien
cttcaaattctttaaaggatgtaag

SEQ ID NO: 6039759 - DNA, 25 bp, Homo sapien
catagtcagttttcttctatacgaa

SEQ ID NO: 6039760 - DNA, 25 bp, Homo sapien
atctatcttgttaaaggaggcccat

SEQ ID NO: 6039761 - DNA, 25 bp, Homo sapien
gtttgacagaccttcgaaggaatcg

SEQ ID NO: 6039762 - DNA, 25 bp, Homo sapien
caggttttcacccaagctctcaaag

SEQ ID NO: 6039763 - DNA, 25 bp, Homo sapien
tgatttcaaagtggacagattttca

SEQ ID NO: 6039764 - DNA, 25 bp, Homo sapien
aaaggaggcccatatgtcagttaaa

SEQ ID NO: 6039765 - DNA, 25 bp, Homo sapien
tggaggtcacgtccaaagtagttag

SEQ ID NO: 6039766 - DNA, 25 bp, Homo sapien
gatggacaatatcttcaaattcttt

SEQ ID NO: 6039767 - DNA, 25 bp, Homo sapien
ccaagcgtgatagggcggacaggtt

SEQ ID NO: 6039768 - DNA, 25 bp, Homo sapien
atgtgacagatagagctcttcaaga

SEQ ID NO: 6039769 - DNA, 25 bp, Homo sapien
ggaaatgctgttctgcacgaagtat

SEQ ID NO: 6039770 - DNA, 25 bp, Homo sapien
ttcacccaagctctcaaaggattga

SEQ ID NO: 6039771 - DNA, 25 bp, Homo sapien
cttgttaaaggaggcccatatgtca

SEQ ID NO: 6039772 - DNA, 25 bp, Homo sapien
ctttagacaaaagatattagatccg

SEQ ID NO: 6039773 - DNA, 25 bp, Homo sapien
tcactagaagaccgtttcaataaaa

SEQ ID NO: 6039774 - DNA, 25 bp, Homo sapien
tgaaccactaaacaagaccaaggga

SEQ ID NO: 6039775 - DNA, 25 bp, Homo sapien
cggaggactggaacaggccatcttg

SEQ ID NO: 6039776 - DNA, 25 bp, Homo sapien
tacggtgggtcaaagtcatatagaa

SEQ ID NO: 6039777 - DNA, 25 bp, Homo sapien
ttttgttagtcttctattttgcttg

SEQ ID NO: 6039778 - DNA, 25 bp, Homo sapien
cattgttaatgcttgtgcgtaattg

SEQ ID NO: 6039779 - DNA, 25 bp, Homo sapien
caatacgctttaatccctgcggagg

SEQ ID NO: 6039780 - DNA, 25 bp, Homo sapien
actaccagtatgactggacatttct

SEQ ID NO: 6039781 - DNA, 25 bp, Homo sapien
atcaaagagaaaatgctacattgtt

SEQ ID NO: 6039782 - DNA, 25 bp, Homo sapien
tcgaagccaccacagccatggctag

SEQ ID NO: 6039783 - DNA, 25 bp, Homo sapien
aagtttcatcgagatatgattttac

SEQ ID NO: 6039784 - DNA, 25 bp, Homo sapien
gctatctagcaacacttataatgat

SEQ ID NO: 6039785 - DNA, 25 bp, Homo sapien
gaagatctcgagaagtttcatcgag

SEQ ID NO: 6039786 - DNA, 25 bp, Homo sapien
tttttagaagatctcgagaagtttc

SEQ ID NO: 6039787 - DNA, 25 bp, Homo sapien
ctcaaacatgttggcttgcacttgt

SEQ ID NO: 6039788 - DNA, 25 bp, Homo sapien
attttacaaggaggcgacatatgaa

SEQ ID NO: 6039789 - DNA, 25 bp, Homo sapien
taatgatgaaccactaaacaagacc

SEQ ID NO: 6039790 - DNA, 25 bp, Homo sapien
ataaaaactaccagtatgactggac

SEQ ID NO: 6039791 - DNA, 25 bp, Homo sapien
aacgaaactctatttgaagaggctt

SEQ ID NO: 6039792 - DNA, 25 bp, Homo sapien
gtggtagaacgcaatacgctttaat

SEQ ID NO: 6039793 - DNA, 25 bp, Homo sapien
catcgagatatgattttacaaggag

SEQ ID NO: 6039794 - DNA, 25 bp, Homo sapien
aatatgtgccgatttaattctggat

SEQ ID NO: 6039795 - DNA, 25 bp, Homo sapien
aagtcatatagaaatatgtgccgat

SEQ ID NO: 6039796 - DNA, 25 bp, Homo sapien
actttcgggggcactccgttccatg

SEQ ID NO: 6039797 - DNA, 25 bp, Homo sapien
atttgatcaagagttcatcgaagcc

SEQ ID NO: 6039798 - DNA, 25 bp, Homo sapien
gagaaaatgctacattgttaatgct

SEQ ID NO: 6039799 - DNA, 25 bp, Homo sapien
tgagcctagattcgtatttttttag

SEQ ID NO: 6039800 - DNA, 25 bp, Homo sapien
cacttgtaccatatcagagacagct

SEQ ID NO: 6039801 - DNA, 25 bp, Homo sapien
taatgcttgtgcgtaattgggaact

SEQ ID NO: 6039802 - DNA, 25 bp, Homo sapien
ggcgacatatgaatcagacgctgaa

SEQ ID NO: 6039803 - DNA, 25 bp, Homo sapien
tcaagagttcatcgaagccaccaca

SEQ ID NO: 6039804 - DNA, 25 bp, Homo sapien
aaatatcttgtacggtgggtcaaag

SEQ ID NO: 6039805 - DNA, 25 bp, Homo sapien
gatatgattttacaaggaggcgaca

SEQ ID NO: 6039806 - DNA, 25 bp, Homo sapien
cagccatggctagtggtagaacgca

SEQ ID NO: 6039807 - DNA, 25 bp, Homo sapien
ctggatttttctttagacaaaagat

SEQ ID NO: 6039808 - DNA, 25 bp, Homo sapien
caattaatggaggaaaaaaatatct

SEQ ID NO: 6039809 - DNA, 25 bp, Homo sapien
tttgcttgatagctcaaacatgttg

SEQ ID NO: 6039810 - DNA, 25 bp, Homo sapien
cttgtgcgtaattgggaactttcgg

SEQ ID NO: 6039811 - DNA, 25 bp, Homo sapien
cgttccatgagatcactagaagacc

SEQ ID NO: 6039812 - DNA, 25 bp, Homo sapien
taatgatgtcccatttgatcaagag

SEQ ID NO: 6039813 - DNA, 25 bp, Homo sapien
tagattcgtatttttttagaagatc

SEQ ID NO: 6039814 - DNA, 25 bp, Homo sapien
atcagagacagctgagcctagattc

SEQ ID NO: 6039815 - DNA, 25 bp, Homo sapien
atatgaatcagacgctgaagctatc

SEQ ID NO: 6039816 - DNA, 25 bp, Homo sapien
tttgaagaggctttacaattaatgg

SEQ ID NO: 6039817 - DNA, 25 bp, Homo sapien
actctatttgaagaggctttacaat

SEQ ID NO: 6039818 - DNA, 25 bp, Homo sapien
gaacgcaatacgctttaatccctgc

SEQ ID NO: 6039819 - DNA, 25 bp, Homo sapien
gttcatcgaagccaccacagccatg

SEQ ID NO: 6039820 - DNA, 25 bp, Homo sapien
ttctattttgcttgatagctcaaac

SEQ ID NO: 6039821 - DNA, 25 bp, Homo sapien
cgggggcactccgttccatgagatc

SEQ ID NO: 6039822 - DNA, 25 bp, Homo sapien
taaaaaatcaaagagaaaatgctac

SEQ ID NO: 6039823 - DNA, 25 bp, Homo sapien
tccctgcggaggactggaacaggcc

SEQ ID NO: 6039824 - DNA, 25 bp, Homo sapien
gacagctgagcctagattcgtattt

SEQ ID NO: 6039825 - DNA, 25 bp, Homo sapien
caaggaggcgacatatgaatcagac

SEQ ID NO: 6039826 - DNA, 25 bp, Homo sapien
atgagatcactagaagaccgtttca

SEQ ID NO: 6039827 - DNA, 25 bp, Homo sapien
cacttataatgatgaaccactaaac

SEQ ID NO: 6039828 - DNA, 25 bp, Homo sapien
tagcaacacttataatgatgaacca

SEQ ID NO: 6039829 - DNA, 25 bp, Homo sapien
actggaacaggccatcttggatcaa

SEQ ID NO: 6039830 - DNA, 25 bp, Homo sapien
ttttctttagacaaaagatattaga

SEQ ID NO: 6039831 - DNA, 25 bp, Homo sapien
gggtcaaagtcatatagaaatatgt

SEQ ID NO: 6039832 - DNA, 25 bp, Homo sapien
ctcgagaagtttcatcgagatatga

SEQ ID NO: 6039833 - DNA, 25 bp, Homo sapien
catttcttaatgatgtcccatttga

SEQ ID NO: 6039834 - DNA, 25 bp, Homo sapien
ttagtcttctattttgcttgatagc

SEQ ID NO: 6039835 - DNA, 25 bp, Homo sapien
ttaattctggatttttctttagaca

SEQ ID NO: 6039836 - DNA, 25 bp, Homo sapien
gaggctttacaattaatggaggaaa

SEQ ID NO: 6039837 - DNA, 25 bp, Homo sapien
taccatatcagagacagctgagcct

SEQ ID NO: 6039838 - DNA, 25 bp, Homo sapien
tcagacgctgaagctatctagcaac

SEQ ID NO: 6039839 - DNA, 25 bp, Homo sapien
tgccgatttaattctggatttttct

SEQ ID NO: 6039840 - DNA, 25 bp, Homo sapien
cgtatttttttagaagatctcgaga

SEQ ID NO: 6039841 - DNA, 25 bp, Homo sapien
agtatgactggacatttcttaatga

SEQ ID NO: 6039842 - DNA, 25 bp, Homo sapien
tatagaaatatgtgccgatttaatt

SEQ ID NO: 6039843 - DNA, 25 bp, Homo sapien
atgctacattgttaatgcttgtgcg

SEQ ID NO: 6039844 - DNA, 25 bp, Homo sapien
atcttgtacggtgggtcaaagtcat

SEQ ID NO: 6039845 - DNA, 25 bp, Homo sapien
ggcttgcacttgtaccatatcagag

SEQ ID NO: 6039846 - DNA, 25 bp, Homo sapien
gcactccgttccatgagatcactag

SEQ ID NO: 6039847 - DNA, 25 bp, Homo sapien
ccaccacagccatggctagtggtag

SEQ ID NO: 6039848 - DNA, 25 bp, Homo sapien
catgttggcttgcacttgtaccata

SEQ ID NO: 6039849 - DNA, 25 bp, Homo sapien
gctgaagctatctagcaacacttat

SEQ ID NO: 6039850 - DNA, 25 bp, Homo sapien
actggacatttcttaatgatgtccc

SEQ ID NO: 6039851 - DNA, 25 bp, Homo sapien
gctttaatccctgcggaggactgga

SEQ ID NO: 6039852 - DNA, 25 bp, Homo sapien
tggctagtggtagaacgcaatacgc

SEQ ID NO: 6039853 - DNA, 25 bp, Homo sapien
tgtcccatttgatcaagagttcatc

SEQ ID NO: 6039854 - DNA, 25 bp, Homo sapien
tggatcaacgaaactctatttgaag

SEQ ID NO: 6039855 - DNA, 25 bp, Homo sapien
tgatagctcaaacatgttggcttgc

SEQ ID NO: 6039856 - DNA, 25 bp, Homo sapien
atggaggaaaaaaatatcttgtacg

SEQ ID NO: 6039857 - DNA, 25 bp, Homo sapien
ccatcttggatcaacgaaactctat

SEQ ID NO: 6039858 - DNA, 25 bp, Homo sapien
gtttcaataaaaactaccagtatga

SEQ ID NO: 6039859 - DNA, 25 bp, Homo sapien
aacaggccatcttggatcaacgaaa

SEQ ID NO: 6039860 - DNA, 25 bp, Homo sapien
cgccctttgaatccaagtactcgaa

SEQ ID NO: 6039861 - DNA, 25 bp, Homo sapien
tattcttctacagcttcccataggc

SEQ ID NO: 6039862 - DNA, 25 bp, Homo sapien
gccatatttcttattgttctgcctc

SEQ ID NO: 6039863 - DNA, 25 bp, Homo sapien
taccgatgaagtcgaaatttgatac

SEQ ID NO: 6039864 - DNA, 25 bp, Homo sapien
agttcaaatcgccaatttcaaaatt

SEQ ID NO: 6039865 - DNA, 25 bp, Homo sapien
gcttcccataggctcggaattgtat

SEQ ID NO: 6039866 - DNA, 25 bp, Homo sapien
gcagcaatcgaatgaactggtgcat

SEQ ID NO: 6039867 - DNA, 25 bp, Homo sapien
atcgaatgaactggtgcatctcccc

SEQ ID NO: 6039868 - DNA, 25 bp, Homo sapien
ttgagatcaatattgtctgggtgat

SEQ ID NO: 6039869 - DNA, 25 bp, Homo sapien
tcaggcagctgatgacattgagatc

SEQ ID NO: 6039870 - DNA, 25 bp, Homo sapien
gactctgtttcttcgagatattctt

SEQ ID NO: 6039871 - DNA, 25 bp, Homo sapien
caaaagaagtgaggcagcaatcgaa

SEQ ID NO: 6039872 - DNA, 25 bp, Homo sapien
tagggaaaatcgcaaaaatactcta

SEQ ID NO: 6039873 - DNA, 25 bp, Homo sapien
tccaccatcttctcaggcagctgat

SEQ ID NO: 6039874 - DNA, 25 bp, Homo sapien
attgttctgcctcatcaccttgaat

SEQ ID NO: 6039875 - DNA, 25 bp, Homo sapien
aaaatctaatgtatttctcacttct

SEQ ID NO: 6039876 - DNA, 25 bp, Homo sapien
actcgaaaaatctaatgtatttctc

SEQ ID NO: 6039877 - DNA, 25 bp, Homo sapien
cgtccttccaccatcttctcaggca

SEQ ID NO: 6039878 - DNA, 25 bp, Homo sapien
tactatcgatgacaccaaaagattt

SEQ ID NO: 6039879 - DNA, 25 bp, Homo sapien
gatgatttcgtcttttttcaaaaga

SEQ ID NO: 6039880 - DNA, 25 bp, Homo sapien
agctgatgacattgagatcaatatt

SEQ ID NO: 6039881 - DNA, 25 bp, Homo sapien
ccaaaaatgacataaattatagccg

SEQ ID NO: 6039882 - DNA, 25 bp, Homo sapien
ttttttcaaaagaagtgaggcagca

SEQ ID NO: 6039883 - DNA, 25 bp, Homo sapien
tggatcgtagggaaaatcgcaaaaa

SEQ ID NO: 6039884 - DNA, 25 bp, Homo sapien
aaagcgttgctttccatgtcaatat

SEQ ID NO: 6039885 - DNA, 25 bp, Homo sapien
ccaagtactcgaaaaatctaatgta

SEQ ID NO: 6039886 - DNA, 25 bp, Homo sapien
tcaatatctgctgactctgtttctt

SEQ ID NO: 6039887 - DNA, 25 bp, Homo sapien
cacaaagccatatttcttattgttc

SEQ ID NO: 6039888 - DNA, 25 bp, Homo sapien
atgacataaattatagccgctgtta

SEQ ID NO: 6039889 - DNA, 25 bp, Homo sapien
ctcggaattgtatcttcgtattcat

SEQ ID NO: 6039890 - DNA, 25 bp, Homo sapien
ctgcctcatcaccttgaatggatcg

SEQ ID NO: 6039891 - DNA, 25 bp, Homo sapien
aaggcatatgcttatagcctaattc

SEQ ID NO: 6039892 - DNA, 25 bp, Homo sapien
aatcgccaatttcaaaatttgtcca

SEQ ID NO: 6039893 - DNA, 25 bp, Homo sapien
gacatctttgttgaagtctcaggta

SEQ ID NO: 6039894 - DNA, 25 bp, Homo sapien
aacccgaaagcgttgctttccatgt

SEQ ID NO: 6039895 - DNA, 25 bp, Homo sapien
agttatcacaaagccatatttctta

SEQ ID NO: 6039896 - DNA, 25 bp, Homo sapien
attgtatcttcgtattcatacatag

SEQ ID NO: 6039897 - DNA, 25 bp, Homo sapien
gggtgattgctatcacaaagacatc

SEQ ID NO: 6039898 - DNA, 25 bp, Homo sapien
cgctgttactatcgatgacaccaaa

SEQ ID NO: 6039899 - DNA, 25 bp, Homo sapien
agtgaggcagcaatcgaatgaactg

SEQ ID NO: 6039900 - DNA, 25 bp, Homo sapien
agtatgcagatggacacgtgccaaa

SEQ ID NO: 6039901 - DNA, 25 bp, Homo sapien
aaaatcgcaaaaatactctacatct

SEQ ID NO: 6039902 - DNA, 25 bp, Homo sapien
ttatagcctaattcatcaaaatgga

SEQ ID NO: 6039903 - DNA, 25 bp, Homo sapien
caccaaaagatttaccgatgaagtc

SEQ ID NO: 6039904 - DNA, 25 bp, Homo sapien
tgacattgagatcaatattgtctgg

SEQ ID NO: 6039905 - DNA, 25 bp, Homo sapien
atacatagttatcacaaagccatat

SEQ ID NO: 6039906 - DNA, 25 bp, Homo sapien
ttgaatccaagtactcgaaaaatct

SEQ ID NO: 6039907 - DNA, 25 bp, Homo sapien
ttgtctgggtgattgctatcacaaa

SEQ ID NO: 6039908 - DNA, 25 bp, Homo sapien
tgccaaaaggcatatgcttatagcc

SEQ ID NO: 6039909 - DNA, 25 bp, Homo sapien
tttgttgaagtctcaggtagtatgc

SEQ ID NO: 6039910 - DNA, 25 bp, Homo sapien
atcttctcaggcagctgatgacatt

SEQ ID NO: 6039911 - DNA, 25 bp, Homo sapien
tcgagatattcttctacagcttccc

SEQ ID NO: 6039912 - DNA, 25 bp, Homo sapien
cctaattcatcaaaatggatgattt

SEQ ID NO: 6039913 - DNA, 25 bp, Homo sapien
catctccccacctttcatagtaaaa

SEQ ID NO: 6039914 - DNA, 25 bp, Homo sapien
tgctatcacaaagacatctttgttg

SEQ ID NO: 6039915 - DNA, 25 bp, Homo sapien
taatgtatttctcacttctgaaaaa

SEQ ID NO: 6039916 - DNA, 25 bp, Homo sapien
ggtgcatctccccacctttcatagt

SEQ ID NO: 6039917 - DNA, 25 bp, Homo sapien
gcaaaaatactctacatctggctca

SEQ ID NO: 6039918 - DNA, 25 bp, Homo sapien
tgaactggtgcatctccccaccttt

SEQ ID NO: 6039919 - DNA, 25 bp, Homo sapien
tatgcttatagcctaattcatcaaa

SEQ ID NO: 6039920 - DNA, 25 bp, Homo sapien
cagatggacacgtgccaaaaggcat

SEQ ID NO: 6039921 - DNA, 25 bp, Homo sapien
cacttctgaaaaagttcaaatcgcc

SEQ ID NO: 6039922 - DNA, 25 bp, Homo sapien
ttgctttccatgtcaatatctgctg

SEQ ID NO: 6039923 - DNA, 25 bp, Homo sapien
tcaatattgtctgggtgattgctat

SEQ ID NO: 6039924 - DNA, 25 bp, Homo sapien
tctacagcttcccataggctcggaa

SEQ ID NO: 6039925 - DNA, 25 bp, Homo sapien
aagatttaccgatgaagtcgaaatt

SEQ ID NO: 6039926 - DNA, 25 bp, Homo sapien
tgaagtcgaaatttgatacgaaccc

SEQ ID NO: 6039927 - DNA, 25 bp, Homo sapien
aaatggatgatttcgtcttttttca

SEQ ID NO: 6039928 - DNA, 25 bp, Homo sapien
tatagccgctgttactatcgatgac

SEQ ID NO: 6039929 - DNA, 25 bp, Homo sapien
tctgctgactctgtttcttcgagat

SEQ ID NO: 6039930 - DNA, 25 bp, Homo sapien
cataggctcggaattgtatcttcgt

SEQ ID NO: 6039931 - DNA, 25 bp, Homo sapien
gtattcatacatagttatcacaaag

SEQ ID NO: 6039932 - DNA, 25 bp, Homo sapien
caaaatttgtccaaaaatgacataa

SEQ ID NO: 6039933 - DNA, 25 bp, Homo sapien
caatttcaaaatttgtccaaaaatg

SEQ ID NO: 6039934 - DNA, 25 bp, Homo sapien
tcatcaaaatggatgatttcgtctt

SEQ ID NO: 6039935 - DNA, 25 bp, Homo sapien
gtttcttcgagatattcttctacag

SEQ ID NO: 6039936 - DNA, 25 bp, Homo sapien
tcttcgtattcatacatagttatca

SEQ ID NO: 6039937 - DNA, 25 bp, Homo sapien
gaagtctcaggtagtatgcagatgg

SEQ ID NO: 6039938 - DNA, 25 bp, Homo sapien
cgatgacaccaaaagatttaccgat

SEQ ID NO: 6039939 - DNA, 25 bp, Homo sapien
gctgccgtccttccaccatcttctc

SEQ ID NO: 6039940 - DNA, 25 bp, Homo sapien
tgaaaaagttcaaatcgccaatttc

SEQ ID NO: 6039941 - DNA, 25 bp, Homo sapien
cttgaatggatcgtagggaaaatcg

SEQ ID NO: 6039942 - DNA, 25 bp, Homo sapien
tccatgtcaatatctgctgactctg

SEQ ID NO: 6039943 - DNA, 25 bp, Homo sapien
gacacgtgccaaaaggcatatgctt

SEQ ID NO: 6039944 - DNA, 25 bp, Homo sapien
catcaccttgaatggatcgtaggga

SEQ ID NO: 6039945 - DNA, 25 bp, Homo sapien
tcaggtagtatgcagatggacacgt

SEQ ID NO: 6039946 - DNA, 25 bp, Homo sapien
cacaaagacatctttgttgaagtct

SEQ ID NO: 6039947 - DNA, 25 bp, Homo sapien
atttctcacttctgaaaaagttcaa

SEQ ID NO: 6039948 - DNA, 25 bp, Homo sapien
taaattatagccgctgttactatcg

SEQ ID NO: 6039949 - DNA, 25 bp, Homo sapien
tgatacgaacccgaaagcgttgctt

SEQ ID NO: 6039950 - DNA, 25 bp, Homo sapien
tttcttattgttctgcctcatcacc

SEQ ID NO: 6039951 - DNA, 25 bp, Homo sapien
cgagtgcaagcagtaatagagcatt

SEQ ID NO: 6039952 - DNA, 25 bp, Homo sapien
catcactctggtggtactaacaaca

SEQ ID NO: 6039953 - DNA, 25 bp, Homo sapien
ggtactaacaacaataataacaata

SEQ ID NO: 6039954 - DNA, 25 bp, Homo sapien
gagaagtaggtcgagggctacgagt

SEQ ID NO: 6039955 - DNA, 25 bp, Homo sapien
catcacaaccttcacatcatcactc

SEQ ID NO: 6039956 - DNA, 25 bp, Homo sapien
aaggacgctcttcatcacaaccttc

SEQ ID NO: 6039957 - DNA, 25 bp, Homo sapien
ttctccgcaaagtgcgcggcctact

SEQ ID NO: 6039958 - DNA, 25 bp, Homo sapien
gagcattcaggcctagagggcagac

SEQ ID NO: 6039959 - DNA, 25 bp, Homo sapien
caacggcaacgatgggggaaatgat

SEQ ID NO: 6039960 - DNA, 25 bp, Homo sapien
aatctaataagcagtcatccgacga

SEQ ID NO: 6039961 - DNA, 25 bp, Homo sapien
taccatcccggagtcacatttatcg

SEQ ID NO: 6039962 - DNA, 25 bp, Homo sapien
taataataataataacagtaacaac

SEQ ID NO: 6039963 - DNA, 25 bp, Homo sapien
gcagaccacagtgtcggccaacgtg

SEQ ID NO: 6039964 - DNA, 25 bp, Homo sapien
tgcgcataccatcccggagtcacat

SEQ ID NO: 6039965 - DNA, 25 bp, Homo sapien
aataataataacagtaacaacaaca

SEQ ID NO: 6039966 - DNA, 25 bp, Homo sapien
accataaagataacggtccgccgag

SEQ ID NO: 6039967 - DNA, 25 bp, Homo sapien
ggcaggactactggtgcccaaacta

SEQ ID NO: 6039968 - DNA, 25 bp, Homo sapien
atgttccacaatattctgtagaaag

SEQ ID NO: 6039969 - DNA, 25 bp, Homo sapien
taggtcgagggctacgagtaatgct

SEQ ID NO: 6039970 - DNA, 25 bp, Homo sapien
gctcttcatcacaaccttcacatca

SEQ ID NO: 6039971 - DNA, 25 bp, Homo sapien
acgaatggcaggactactggtgccc

SEQ ID NO: 6039972 - DNA, 25 bp, Homo sapien
aagtgcgcggcctactcccacgtat

SEQ ID NO: 6039973 - DNA, 25 bp, Homo sapien
caacaacaacaacggcaacgatggg

SEQ ID NO: 6039974 - DNA, 25 bp, Homo sapien
tcctagcgcatacattaacacacaa

SEQ ID NO: 6039975 - DNA, 25 bp, Homo sapien
cacagtgtcggccaacgtgcttaac

SEQ ID NO: 6039976 - DNA, 25 bp, Homo sapien
cgacgaaggacgctcttcatcacaa

SEQ ID NO: 6039977 - DNA, 25 bp, Homo sapien
cgcatacattaacacacaagatata

SEQ ID NO: 6039978 - DNA, 25 bp, Homo sapien
ataagcagtcatccgacgaaggacg

SEQ ID NO: 6039979 - DNA, 25 bp, Homo sapien
gtcacatttatcgagaaggagaagt

SEQ ID NO: 6039980 - DNA, 25 bp, Homo sapien
caacgtgcttaacattgaagatttt

SEQ ID NO: 6039981 - DNA, 25 bp, Homo sapien
gtgggactgctttcccgattcaaga

SEQ ID NO: 6039982 - DNA, 25 bp, Homo sapien
gtcatccgacgaaggacgctcttca

SEQ ID NO: 6039983 - DNA, 25 bp, Homo sapien
aaatgcagacgatgcgcataccatc

SEQ ID NO: 6039984 - DNA, 25 bp, Homo sapien
ggcgccacgaatggcaggactactg

SEQ ID NO: 6039985 - DNA, 25 bp, Homo sapien
caatacaggcgccacgaatggcagg

SEQ ID NO: 6039986 - DNA, 25 bp, Homo sapien
cagtaacaacaacaacaacggcaac

SEQ ID NO: 6039987 - DNA, 25 bp, Homo sapien
caacgatgggggaaatgatgacgac

SEQ ID NO: 6039988 - DNA, 25 bp, Homo sapien
atgcaagattatagaccttctccgc

SEQ ID NO: 6039989 - DNA, 25 bp, Homo sapien
gacgactatgattatgaaatgcaag

SEQ ID NO: 6039990 - DNA, 25 bp, Homo sapien
cacacaagatataaaccataaagat

SEQ ID NO: 6039991 - DNA, 25 bp, Homo sapien
cattaacacacaagatataaaccat

SEQ ID NO: 6039992 - DNA, 25 bp, Homo sapien
gttctaggaaacaatctaataagca

SEQ ID NO: 6039993 - DNA, 25 bp, Homo sapien
attgaagatttttacaaaaatgcag

SEQ ID NO: 6039994 - DNA, 25 bp, Homo sapien
ttacaaaaatgcagacgatgcgcat

SEQ ID NO: 6039995 - DNA, 25 bp, Homo sapien
aggttattcctagcgcatacattaa

SEQ ID NO: 6039996 - DNA, 25 bp, Homo sapien
ggtgcccaaactaatatggaaagca

SEQ ID NO: 6039997 - DNA, 25 bp, Homo sapien
taaagataacggtccgccgagtgca

SEQ ID NO: 6039998 - DNA, 25 bp, Homo sapien
gatataaaccataaagataacggtc

SEQ ID NO: 6039999 - DNA, 25 bp, Homo sapien
tatgaaatgcaagattatagacctt

SEQ ID NO: 6040000 - DNA, 25 bp, Homo sapien
aataacagtaacaacaacaacaacg

SEQ ID NO: 6040001 - DNA, 25 bp, Homo sapien
tatgattatgaaatgcaagattata

SEQ ID NO: 6040002 - DNA, 25 bp, Homo sapien
tttctgtccagtgaatctgttcata

SEQ ID NO: 6040003 - DNA, 25 bp, Homo sapien
gcggcctactcccacgtatgttcca

SEQ ID NO: 6040004 - DNA, 25 bp, Homo sapien
taatgctgggcacagtgccaataca

SEQ ID NO: 6040005 - DNA, 25 bp, Homo sapien
gggggaaatgatgacgactatgatt

SEQ ID NO: 6040006 - DNA, 25 bp, Homo sapien
cccggagtcacatttatcgagaagg

SEQ ID NO: 6040007 - DNA, 25 bp, Homo sapien
tttatcgagaaggagaagtaggtcg

SEQ ID NO: 6040008 - DNA, 25 bp, Homo sapien
ctagagggcagaccacagtgtcggc

SEQ ID NO: 6040009 - DNA, 25 bp, Homo sapien
tctggtggtactaacaacaataata

SEQ ID NO: 6040010 - DNA, 25 bp, Homo sapien
agacgatgcgcataccatcccggag

SEQ ID NO: 6040011 - DNA, 25 bp, Homo sapien
taacggtccgccgagtgcaagcagt

SEQ ID NO: 6040012 - DNA, 25 bp, Homo sapien
actactggtgcccaaactaatatgg

SEQ ID NO: 6040013 - DNA, 25 bp, Homo sapien
tgtccagtgaatctgttcatacaca

SEQ ID NO: 6040014 - DNA, 25 bp, Homo sapien
ctactcccacgtatgttccacaata

SEQ ID NO: 6040015 - DNA, 25 bp, Homo sapien
ttcaagaggttattcctagcgcata

SEQ ID NO: 6040016 - DNA, 25 bp, Homo sapien
gcttaacattgaagatttttacaaa

SEQ ID NO: 6040017 - DNA, 25 bp, Homo sapien
ttcaggcctagagggcagaccacag

SEQ ID NO: 6040018 - DNA, 25 bp, Homo sapien
tcccgattcaagaggttattcctag

SEQ ID NO: 6040019 - DNA, 25 bp, Homo sapien
tgggcacagtgccaatacaggcgcc

SEQ ID NO: 6040020 - DNA, 25 bp, Homo sapien
gagaaggagaagtaggtcgagggct

SEQ ID NO: 6040021 - DNA, 25 bp, Homo sapien
ctgttcatacacatgatagttctag

SEQ ID NO: 6040022 - DNA, 25 bp, Homo sapien
gatttttacaaaaatgcagacgatg

SEQ ID NO: 6040023 - DNA, 25 bp, Homo sapien
agaccttctccgcaaagtgcgcggc

SEQ ID NO: 6040024 - DNA, 25 bp, Homo sapien
gtccgccgagtgcaagcagtaatag

SEQ ID NO: 6040025 - DNA, 25 bp, Homo sapien
gtgaatctgttcatacacatgatag

SEQ ID NO: 6040026 - DNA, 25 bp, Homo sapien
ggaaacaatctaataagcagtcatc

SEQ ID NO: 6040027 - DNA, 25 bp, Homo sapien
aaccttcacatcatcactctggtgg

SEQ ID NO: 6040028 - DNA, 25 bp, Homo sapien
atacacatgatagttctaggaaaca

SEQ ID NO: 6040029 - DNA, 25 bp, Homo sapien
atgatagttctaggaaacaatctaa

SEQ ID NO: 6040030 - DNA, 25 bp, Homo sapien
agggctacgagtaatgctgggcaca

SEQ ID NO: 6040031 - DNA, 25 bp, Homo sapien
cagtgccaatacaggcgccacgaat

SEQ ID NO: 6040032 - DNA, 25 bp, Homo sapien
ctgctttcccgattcaagaggttat

SEQ ID NO: 6040033 - DNA, 25 bp, Homo sapien
gtaatagagcattcaggcctagagg

SEQ ID NO: 6040034 - DNA, 25 bp, Homo sapien
tacgagtaatgctgggcacagtgcc

SEQ ID NO: 6040035 - DNA, 25 bp, Homo sapien
aatgatgacgactatgattatgaaa

SEQ ID NO: 6040036 - DNA, 25 bp, Homo sapien
gtcggccaacgtgcttaacattgaa

SEQ ID NO: 6040037 - DNA, 25 bp, Homo sapien
caagcagtaatagagcattcaggcc

SEQ ID NO: 6040038 - DNA, 25 bp, Homo sapien
cacaatattctgtagaaagtgggac

SEQ ID NO: 6040039 - DNA, 25 bp, Homo sapien
tagaaagtgggactgctttcccgat

SEQ ID NO: 6040040 - DNA, 25 bp, Homo sapien
gattatagaccttctccgcaaagtg

SEQ ID NO: 6040041 - DNA, 25 bp, Homo sapien
ccacgtatgttccacaatattctgt

SEQ ID NO: 6040042 - DNA, 25 bp, Homo sapien
attctgtagaaagtgggactgcttt

SEQ ID NO: 6040043 - DNA, 25 bp, Homo sapien
cacatcatcactctggtggtactaa

SEQ ID NO: 6040044 - DNA, 25 bp, Homo sapien
cctagcgaagcagtttcaatggaat

SEQ ID NO: 6040045 - DNA, 25 bp, Homo sapien
tcatttccttataaactggtaaaga

SEQ ID NO: 6040046 - DNA, 25 bp, Homo sapien
ttttctcctgcttcattttcgttgt

SEQ ID NO: 6040047 - DNA, 25 bp, Homo sapien
tgacttggtctttgtcttttgaaga

SEQ ID NO: 6040048 - DNA, 25 bp, Homo sapien
aaacgttcttttgccgcgctgaaca

SEQ ID NO: 6040049 - DNA, 25 bp, Homo sapien
gatttaaattgcactttcttttctc

SEQ ID NO: 6040050 - DNA, 25 bp, Homo sapien
aagcattttatgatcaaatccaact

SEQ ID NO: 6040051 - DNA, 25 bp, Homo sapien
ccgcgctgaacagatttaaattgca

SEQ ID NO: 6040052 - DNA, 25 bp, Homo sapien
attaacgcaccaataaatgggccta

SEQ ID NO: 6040053 - DNA, 25 bp, Homo sapien
tgtcggataacccaatagaatcagt

SEQ ID NO: 6040054 - DNA, 25 bp, Homo sapien
tcatgaccctgataaatacagacat

SEQ ID NO: 6040055 - DNA, 25 bp, Homo sapien
cctgcttcattttcgttgtctgaaa

SEQ ID NO: 6040056 - DNA, 25 bp, Homo sapien
tgtacctgtctgataagccatggaa

SEQ ID NO: 6040057 - DNA, 25 bp, Homo sapien
tagtgcaagacgtgggcccagatca

SEQ ID NO: 6040058 - DNA, 25 bp, Homo sapien
tcttcttccaaccaggccttctaaa

SEQ ID NO: 6040059 - DNA, 25 bp, Homo sapien
tcgttgtctgaaatagatgacttgg

SEQ ID NO: 6040060 - DNA, 25 bp, Homo sapien
gaccagttgactggagattcatgac

SEQ ID NO: 6040061 - DNA, 25 bp, Homo sapien
ttgaagagccattctttctccaaat

SEQ ID NO: 6040062 - DNA, 25 bp, Homo sapien
ggtaaagaccagttgactggagatt

SEQ ID NO: 6040063 - DNA, 25 bp, Homo sapien
attcctcatcatcatcgttattgta

SEQ ID NO: 6040064 - DNA, 25 bp, Homo sapien
actttcttttctcctgcttcatttt

SEQ ID NO: 6040065 - DNA, 25 bp, Homo sapien
ccccattaacgcaccaataaatggg

SEQ ID NO: 6040066 - DNA, 25 bp, Homo sapien
ctaccatgggaacccaaaagaaatg

SEQ ID NO: 6040067 - DNA, 25 bp, Homo sapien
tgggcccagatcacgagccaaattc

SEQ ID NO: 6040068 - DNA, 25 bp, Homo sapien
ttgactggagattcatgaccctgat

SEQ ID NO: 6040069 - DNA, 25 bp, Homo sapien
tcattttcgttgtctgaaatagatg

SEQ ID NO: 6040070 - DNA, 25 bp, Homo sapien
ctcaggtccgatgttcttcttgctc

SEQ ID NO: 6040071 - DNA, 25 bp, Homo sapien
gaagcagtttcaatggaatcttctt

SEQ ID NO: 6040072 - DNA, 25 bp, Homo sapien
atggaatcttcttcttcaagaattg

SEQ ID NO: 6040073 - DNA, 25 bp, Homo sapien
ccaatagaatcagtcgtcgtcgcac

SEQ ID NO: 6040074 - DNA, 25 bp, Homo sapien
aagacgtgggcccagatcacgagcc

SEQ ID NO: 6040075 - DNA, 25 bp, Homo sapien
ttattgtatgagaagtcactcaggt

SEQ ID NO: 6040076 - DNA, 25 bp, Homo sapien
atgatgcacccaaagcattttatga

SEQ ID NO: 6040077 - DNA, 25 bp, Homo sapien
tatttctcttcttccaaccaggcct

SEQ ID NO: 6040078 - DNA, 25 bp, Homo sapien
tcttcaagaattgttggtataccac

SEQ ID NO: 6040079 - DNA, 25 bp, Homo sapien
aacccaaaagaaatgatgatgatgc

SEQ ID NO: 6040080 - DNA, 25 bp, Homo sapien
tgtctgataagccatggaagcattg

SEQ ID NO: 6040081 - DNA, 25 bp, Homo sapien
cattgctgtacctgtctgataagcc

SEQ ID NO: 6040082 - DNA, 25 bp, Homo sapien
gaatcagtcgtcgtcgcacctagcg

SEQ ID NO: 6040083 - DNA, 25 bp, Homo sapien
catgggaacccaaaagaaatgatga

SEQ ID NO: 6040084 - DNA, 25 bp, Homo sapien
taaactggtaaagaccagttgactg

SEQ ID NO: 6040085 - DNA, 25 bp, Homo sapien
gtcgtcgtcgcacctagcgaagcag

SEQ ID NO: 6040086 - DNA, 25 bp, Homo sapien
caccaaacgttcttttgccgcgctg

SEQ ID NO: 6040087 - DNA, 25 bp, Homo sapien
aaagaaatgatgatgatgcacccaa

SEQ ID NO: 6040088 - DNA, 25 bp, Homo sapien
tcatcgttattgtatgagaagtcac

SEQ ID NO: 6040089 - DNA, 25 bp, Homo sapien
tcataatcatttccttataaactgg

SEQ ID NO: 6040090 - DNA, 25 bp, Homo sapien
gtctgaaatagatgacttggtcttt

SEQ ID NO: 6040091 - DNA, 25 bp, Homo sapien
gtttcaatggaatcttcttcttcaa

SEQ ID NO: 6040092 - DNA, 25 bp, Homo sapien
tgcatatagtgcaagacgtgggccc

SEQ ID NO: 6040093 - DNA, 25 bp, Homo sapien
catggaagcattgataatgaaaatc

SEQ ID NO: 6040094 - DNA, 25 bp, Homo sapien
atcaaatccaactgcatatagtgca

SEQ ID NO: 6040095 - DNA, 25 bp, Homo sapien
catcatcatcgttattgtatgagaa

SEQ ID NO: 6040096 - DNA, 25 bp, Homo sapien
tgtcttttgaagagccattctttct

SEQ ID NO: 6040097 - DNA, 25 bp, Homo sapien
tttatgatcaaatccaactgcatat

SEQ ID NO: 6040098 - DNA, 25 bp, Homo sapien
acgagccaaattcattgctgtacct

SEQ ID NO: 6040099 - DNA, 25 bp, Homo sapien
taaatacagacatcgtaaaccaacc

SEQ ID NO: 6040100 - DNA, 25 bp, Homo sapien
ggagattcatgaccctgataaatac

SEQ ID NO: 6040101 - DNA, 25 bp, Homo sapien
aatagatgacttggtctttgtcttt

SEQ ID NO: 6040102 - DNA, 25 bp, Homo sapien
ttgctctatttctcttcttccaacc

SEQ ID NO: 6040103 - DNA, 25 bp, Homo sapien
cttataaactggtaaagaccagttg

SEQ ID NO: 6040104 - DNA, 25 bp, Homo sapien
taaaccaggctctcataatcatttc

SEQ ID NO: 6040105 - DNA, 25 bp, Homo sapien
cgaatcttctgatgatgtgtcggat

SEQ ID NO: 6040106 - DNA, 25 bp, Homo sapien
tgaacagatttaaattgcactttct

SEQ ID NO: 6040107 - DNA, 25 bp, Homo sapien
aattgcactttcttttctcctgctt

SEQ ID NO: 6040108 - DNA, 25 bp, Homo sapien
atgatgtgtcggataacccaataga

SEQ ID NO: 6040109 - DNA, 25 bp, Homo sapien
tatgagaagtcactcaggtccgatg

SEQ ID NO: 6040110 - DNA, 25 bp, Homo sapien
aaccaggccttctaaaccaggctct

SEQ ID NO: 6040111 - DNA, 25 bp, Homo sapien
tcttcttcttcaagaattgttggta

SEQ ID NO: 6040112 - DNA, 25 bp, Homo sapien
cttttgccgcgctgaacagatttaa

SEQ ID NO: 6040113 - DNA, 25 bp, Homo sapien
agccattctttctccaaattcctca

SEQ ID NO: 6040114 - DNA, 25 bp, Homo sapien
tccaactgcatatagtgcaagacgt

SEQ ID NO: 6040115 - DNA, 25 bp, Homo sapien
atgatgatgatgcacccaaagcatt

SEQ ID NO: 6040116 - DNA, 25 bp, Homo sapien
aggctctcataatcatttccttata

SEQ ID NO: 6040117 - DNA, 25 bp, Homo sapien
tctttctccaaattcctcatcatca

SEQ ID NO: 6040118 - DNA, 25 bp, Homo sapien
ccctgataaatacagacatcgtaaa

SEQ ID NO: 6040119 - DNA, 25 bp, Homo sapien
caaattcattgctgtacctgtctga

SEQ ID NO: 6040120 - DNA, 25 bp, Homo sapien
cagatcacgagccaaattcattgct

SEQ ID NO: 6040121 - DNA, 25 bp, Homo sapien
gataacccaatagaatcagtcgtcg

SEQ ID NO: 6040122 - DNA, 25 bp, Homo sapien
gtcgcacctagcgaagcagtttcaa

SEQ ID NO: 6040123 - DNA, 25 bp, Homo sapien
ctccaaattcctcatcatcatcgtt

SEQ ID NO: 6040124 - DNA, 25 bp, Homo sapien
taaatgggcctaccatgggaaccca

SEQ ID NO: 6040125 - DNA, 25 bp, Homo sapien
ggtctttgtcttttgaagagccatt

SEQ ID NO: 6040126 - DNA, 25 bp, Homo sapien
ataagccatggaagcattgataatg

SEQ ID NO: 6040127 - DNA, 25 bp, Homo sapien
agaattgttggtataccaccaaacg

SEQ ID NO: 6040128 - DNA, 25 bp, Homo sapien
gcaccaataaatgggcctaccatgg

SEQ ID NO: 6040129 - DNA, 25 bp, Homo sapien
cttctgatgatgtgtcggataaccc

SEQ ID NO: 6040130 - DNA, 25 bp, Homo sapien
gccttctaaaccaggctctcataat

SEQ ID NO: 6040131 - DNA, 25 bp, Homo sapien
gttcttcttgctctatttctcttct

SEQ ID NO: 6040132 - DNA, 25 bp, Homo sapien
aagtcactcaggtccgatgttcttc

SEQ ID NO: 6040133 - DNA, 25 bp, Homo sapien
tccgatgttcttcttgctctatttc

SEQ ID NO: 6040134 - DNA, 25 bp, Homo sapien
cacccaaagcattttatgatcaaat

SEQ ID NO: 6040135 - DNA, 25 bp, Homo sapien
agcgcacagatggttgcattggcca

SEQ ID NO: 6040136 - DNA, 25 bp, Homo sapien
cgctaaagttctgcccgcttcgttg

SEQ ID NO: 6040137 - DNA, 25 bp, Homo sapien
ttgctagggttgaacagtgggttca

SEQ ID NO: 6040138 - DNA, 25 bp, Homo sapien
atatgtcgacgacgtcttttgcatc

SEQ ID NO: 6040139 - DNA, 25 bp, Homo sapien
gcccgcttcgttggcagctaatatt

SEQ ID NO: 6040140 - DNA, 25 bp, Homo sapien
gttgcattggccaagggtctaccgt

SEQ ID NO: 6040141 - DNA, 25 bp, Homo sapien
cggtgtgtatttagcgcacagatgg

SEQ ID NO: 6040142 - DNA, 25 bp, Homo sapien
tactactttacttattcacggctag

SEQ ID NO: 6040143 - DNA, 25 bp, Homo sapien
tttacttattcacggctagtctcag

SEQ ID NO: 6040144 - DNA, 25 bp, Homo sapien
aagaatgtagaaggttctacgggca

SEQ ID NO: 6040145 - DNA, 25 bp, Homo sapien
tgtttgtgtttgacaagtcgatttt

SEQ ID NO: 6040146 - DNA, 25 bp, Homo sapien
ttgcatcgctattgcctcgttccag

SEQ ID NO: 6040147 - DNA, 25 bp, Homo sapien
tatgggttattgttacgatctttgg

SEQ ID NO: 6040148 - DNA, 25 bp, Homo sapien
tgtttgacaagtcgattttcaacca

SEQ ID NO: 6040149 - DNA, 25 bp, Homo sapien
cggctagtctcagctacgtgtttgt

SEQ ID NO: 6040150 - DNA, 25 bp, Homo sapien
aaaaccacggtgtaaggaagctcat

SEQ ID NO: 6040151 - DNA, 25 bp, Homo sapien
ttgaccgttccatggtttgttatgg

SEQ ID NO: 6040152 - DNA, 25 bp, Homo sapien
gtatttagcgcacagatggttgcat

SEQ ID NO: 6040153 - DNA, 25 bp, Homo sapien
ggttctacgggcaggtgccattcct

SEQ ID NO: 6040154 - DNA, 25 bp, Homo sapien
aactccaagaatgccgtcaaagaat

SEQ ID NO: 6040155 - DNA, 25 bp, Homo sapien
tgattgcggtgtgtatttagcgcac

SEQ ID NO: 6040156 - DNA, 25 bp, Homo sapien
tcgttggcagctaatattcctgtca

SEQ ID NO: 6040157 - DNA, 25 bp, Homo sapien
tggatgtcgatgttgaccgttccat

SEQ ID NO: 6040158 - DNA, 25 bp, Homo sapien
taaggaagctcattatcgagtactt

SEQ ID NO: 6040159 - DNA, 25 bp, Homo sapien
gctacgtgtttgtgtttgacaagtc

SEQ ID NO: 6040160 - DNA, 25 bp, Homo sapien
tcactttcatctttttcactgattg

SEQ ID NO: 6040161 - DNA, 25 bp, Homo sapien
agcaattctacgattttgcaggaga

SEQ ID NO: 6040162 - DNA, 25 bp, Homo sapien
cgattttcaaccatcctcgttactt

SEQ ID NO: 6040163 - DNA, 25 bp, Homo sapien
tgagagaattcctctcactatgggt

SEQ ID NO: 6040164 - DNA, 25 bp, Homo sapien
tggtttgttatggaattgaacggcc

SEQ ID NO: 6040165 - DNA, 25 bp, Homo sapien
gcagtcagtgctatcccatggatgt

SEQ ID NO: 6040166 - DNA, 25 bp, Homo sapien
tattgttacgatctttggtttacta

SEQ ID NO: 6040167 - DNA, 25 bp, Homo sapien
agttctgcccgcttcgttggcagct

SEQ ID NO: 6040168 - DNA, 25 bp, Homo sapien
agtgctatcccatggatgtcgatgt

SEQ ID NO: 6040169 - DNA, 25 bp, Homo sapien
cattcctgtttgatatgtcgacgac

SEQ ID NO: 6040170 - DNA, 25 bp, Homo sapien
gttccatggtttgttatggaattga

SEQ ID NO: 6040171 - DNA, 25 bp, Homo sapien
cgacgacgtcttttgcatcgctatt

SEQ ID NO: 6040172 - DNA, 25 bp, Homo sapien
ttacttgaaaaaccaaatggcaatg

SEQ ID NO: 6040173 - DNA, 25 bp, Homo sapien
aagtggcagaaattgctagggttga

SEQ ID NO: 6040174 - DNA, 25 bp, Homo sapien
gggttgaacagtgggttcagcaatt

SEQ ID NO: 6040175 - DNA, 25 bp, Homo sapien
ttatcgagtacttcactttcatctt

SEQ ID NO: 6040176 - DNA, 25 bp, Homo sapien
cctgtcaagtggcagaaattgctag

SEQ ID NO: 6040177 - DNA, 25 bp, Homo sapien
agacgacttgtacgctaaagttctg

SEQ ID NO: 6040178 - DNA, 25 bp, Homo sapien
gaattgaacggccattctaaactat

SEQ ID NO: 6040179 - DNA, 25 bp, Homo sapien
attttgcaggagactttgaactcca

SEQ ID NO: 6040180 - DNA, 25 bp, Homo sapien
agaatgccgtcaaagaatgtagaag

SEQ ID NO: 6040181 - DNA, 25 bp, Homo sapien
ccaaatggcaatggaaatcaagttg

SEQ ID NO: 6040182 - DNA, 25 bp, Homo sapien
gcagctaatattcctgtcaagtggc

SEQ ID NO: 6040183 - DNA, 25 bp, Homo sapien
tacatgaagattgattatgaaaacc

SEQ ID NO: 6040184 - DNA, 25 bp, Homo sapien
acggtgtaaggaagctcattatcga

SEQ ID NO: 6040185 - DNA, 25 bp, Homo sapien
tcaaccatcctcgttacttgaaaaa

SEQ ID NO: 6040186 - DNA, 25 bp, Homo sapien
cgtcttttgcatcgctattgcctcg

SEQ ID NO: 6040187 - DNA, 25 bp, Homo sapien
caggagactttgaactccaagaatg

SEQ ID NO: 6040188 - DNA, 25 bp, Homo sapien
aagattgattatgaaaaccacggtg

SEQ ID NO: 6040189 - DNA, 25 bp, Homo sapien
gcatcttgagagaattcctctcact

SEQ ID NO: 6040190 - DNA, 25 bp, Homo sapien
atcccatggatgtcgatgttgaccg

SEQ ID NO: 6040191 - DNA, 25 bp, Homo sapien
actttgaactccaagaatgccgtca

SEQ ID NO: 6040192 - DNA, 25 bp, Homo sapien
aatattcctgtcaagtggcagaaat

SEQ ID NO: 6040193 - DNA, 25 bp, Homo sapien
acaagtcgattttcaaccatcctcg

SEQ ID NO: 6040194 - DNA, 25 bp, Homo sapien
gaaaaaccaaatggcaatggaaatc

SEQ ID NO: 6040195 - DNA, 25 bp, Homo sapien
aattcctctcactatgggttattgt

SEQ ID NO: 6040196 - DNA, 25 bp, Homo sapien
gttccagcatcttgagagaattcct

SEQ ID NO: 6040197 - DNA, 25 bp, Homo sapien
gattatgaaaaccacggtgtaagga

SEQ ID NO: 6040198 - DNA, 25 bp, Homo sapien
aacggccattctaaactatacatga

SEQ ID NO: 6040199 - DNA, 25 bp, Homo sapien
agctcattatcgagtacttcacttt

SEQ ID NO: 6040200 - DNA, 25 bp, Homo sapien
aggtgccattcctgtttgatatgtc

SEQ ID NO: 6040201 - DNA, 25 bp, Homo sapien
cattctaaactatacatgaagattg

SEQ ID NO: 6040202 - DNA, 25 bp, Homo sapien
gttatggaattgaacggccattcta

SEQ ID NO: 6040203 - DNA, 25 bp, Homo sapien
tctcactatgggttattgttacgat

SEQ ID NO: 6040204 - DNA, 25 bp, Homo sapien
ttttcactgattgcggtgtgtattt

SEQ ID NO: 6040205 - DNA, 25 bp, Homo sapien
aacagtgggttcagcaattctacga

SEQ ID NO: 6040206 - DNA, 25 bp, Homo sapien
tgcctcgttccagcatcttgagaga

SEQ ID NO: 6040207 - DNA, 25 bp, Homo sapien
tctacgattttgcaggagactttga

SEQ ID NO: 6040208 - DNA, 25 bp, Homo sapien
tattcacggctagtctcagctacgt

SEQ ID NO: 6040209 - DNA, 25 bp, Homo sapien
cgctattgcctcgttccagcatctt

SEQ ID NO: 6040210 - DNA, 25 bp, Homo sapien
ggaaatcaagttggcagtcagtgct

SEQ ID NO: 6040211 - DNA, 25 bp, Homo sapien
aaactatacatgaagattgattatg

SEQ ID NO: 6040212 - DNA, 25 bp, Homo sapien
cagatggttgcattggccaagggtc

SEQ ID NO: 6040213 - DNA, 25 bp, Homo sapien
agtacttcactttcatctttttcac

SEQ ID NO: 6040214 - DNA, 25 bp, Homo sapien
cttgtacgctaaagttctgcccgct

SEQ ID NO: 6040215 - DNA, 25 bp, Homo sapien
ggcaatggaaatcaagttggcagtc

SEQ ID NO: 6040216 - DNA, 25 bp, Homo sapien
cagaaattgctagggttgaacagtg

SEQ ID NO: 6040217 - DNA, 25 bp, Homo sapien
aagttggcagtcagtgctatcccat

SEQ ID NO: 6040218 - DNA, 25 bp, Homo sapien
gggttcagcaattctacgattttgc

SEQ ID NO: 6040219 - DNA, 25 bp, Homo sapien
tgtttgatatgtcgacgacgtcttt

SEQ ID NO: 6040220 - DNA, 25 bp, Homo sapien
tcgatgttgaccgttccatggtttg

SEQ ID NO: 6040221 - DNA, 25 bp, Homo sapien
tcatctttttcactgattgcggtgt

SEQ ID NO: 6040222 - DNA, 25 bp, Homo sapien
ccgtcaaagaatgtagaaggttcta

SEQ ID NO: 6040223 - DNA, 25 bp, Homo sapien
tgtcttagacgacttgtacgctaaa

SEQ ID NO: 6040224 - DNA, 25 bp, Homo sapien
acgggcaggtgccattcctgtttga

SEQ ID NO: 6040225 - DNA, 25 bp, Homo sapien
gtagaaggttctacgggcaggtgcc

SEQ ID NO: 6040226 - DNA, 25 bp, Homo sapien
gtctcagctacgtgtttgtgtttga

SEQ ID NO: 6040227 - DNA, 25 bp, Homo sapien
atagattctatcattatcatcacct

SEQ ID NO: 6040228 - DNA, 25 bp, Homo sapien
caccgcaatcagtgaaaaagatgaa

SEQ ID NO: 6040229 - DNA, 25 bp, Homo sapien
ctccttgatgaaatgttcaacttcc

SEQ ID NO: 6040230 - DNA, 25 bp, Homo sapien
ggtgaattgaccgtagttgtagttg

SEQ ID NO: 6040231 - DNA, 25 bp, Homo sapien
tttcataatcaatcttcatgtatag

SEQ ID NO: 6040232 - DNA, 25 bp, Homo sapien
tcataacagtccaaaagttaacaaa

SEQ ID NO: 6040233 - DNA, 25 bp, Homo sapien
gcaaccatctgtgcgctaaatacac

SEQ ID NO: 6040234 - DNA, 25 bp, Homo sapien
ttaggatcaaacaatgagtcatctg

SEQ ID NO: 6040235 - DNA, 25 bp, Homo sapien
tccttagcatctcttaacttaggat

SEQ ID NO: 6040236 - DNA, 25 bp, Homo sapien
atgtggtacgagatggattgcaaaa

SEQ ID NO: 6040237 - DNA, 25 bp, Homo sapien
gcgctaaatacacaccgcaatcagt

SEQ ID NO: 6040238 - DNA, 25 bp, Homo sapien
taacaaaagtgaacagaatcaaata

SEQ ID NO: 6040239 - DNA, 25 bp, Homo sapien
cgtagttgtagttgaaatatagatg

SEQ ID NO: 6040240 - DNA, 25 bp, Homo sapien
cagaccagccacttgtgatgaggct

SEQ ID NO: 6040241 - DNA, 25 bp, Homo sapien
tactcgataatgagcttccttacac

SEQ ID NO: 6040242 - DNA, 25 bp, Homo sapien
agaatggccgttcaattccataaca

SEQ ID NO: 6040243 - DNA, 25 bp, Homo sapien
ccgtgtggcaggcagtaccgttgac

SEQ ID NO: 6040244 - DNA, 25 bp, Homo sapien
agagcacggtagacccttggccaat

SEQ ID NO: 6040245 - DNA, 25 bp, Homo sapien
atctgtgcgctaaatacacaccgca

SEQ ID NO: 6040246 - DNA, 25 bp, Homo sapien
taacttgagcgtcccaggtctcctt

SEQ ID NO: 6040247 - DNA, 25 bp, Homo sapien
aagttaacaaaagtgaacagaatca

SEQ ID NO: 6040248 - DNA, 25 bp, Homo sapien
tgttcaacttccttaacttgagcgt

SEQ ID NO: 6040249 - DNA, 25 bp, Homo sapien
aacccgtctacaggatggaaagaat

SEQ ID NO: 6040250 - DNA, 25 bp, Homo sapien
cccctagtctgtcccacagagtggt

SEQ ID NO: 6040251 - DNA, 25 bp, Homo sapien
agcgtcccaggtctccttagcatct

SEQ ID NO: 6040252 - DNA, 25 bp, Homo sapien
ataatgagcttccttacaccgtggt

SEQ ID NO: 6040253 - DNA, 25 bp, Homo sapien
cggtagacccttggccaatgcaacc

SEQ ID NO: 6040254 - DNA, 25 bp, Homo sapien
gtcccacagagtggtgaattgaccg

SEQ ID NO: 6040255 - DNA, 25 bp, Homo sapien
aatcttcatgtatagtttagaatgg

SEQ ID NO: 6040256 - DNA, 25 bp, Homo sapien
tgtaatggcagaatcaatgggtaga

SEQ ID NO: 6040257 - DNA, 25 bp, Homo sapien
caggtctccttagcatctcttaact

SEQ ID NO: 6040258 - DNA, 25 bp, Homo sapien
gatgaaatgttcaacttccttaact

SEQ ID NO: 6040259 - DNA, 25 bp, Homo sapien
ggcagaatcaatgggtagatgtggt

SEQ ID NO: 6040260 - DNA, 25 bp, Homo sapien
ggtgtgcagaccagccacttgtgat

SEQ ID NO: 6040261 - DNA, 25 bp, Homo sapien
aaagaatgagatgcgaaaggtgtgc

SEQ ID NO: 6040262 - DNA, 25 bp, Homo sapien
tgaggcttgtgcagagcacggtaga

SEQ ID NO: 6040263 - DNA, 25 bp, Homo sapien
atcagtgaaaaagatgaaagtgaag

SEQ ID NO: 6040264 - DNA, 25 bp, Homo sapien
tctatcattatcatcaccttcgacc

SEQ ID NO: 6040265 - DNA, 25 bp, Homo sapien
agccacttgtgatgaggcttgtgca

SEQ ID NO: 6040266 - DNA, 25 bp, Homo sapien
atagatggtgaaccgtgtggcaggc

SEQ ID NO: 6040267 - DNA, 25 bp, Homo sapien
ttgataggtattgaccgtcatgaat

SEQ ID NO: 6040268 - DNA, 25 bp, Homo sapien
tagtttagaatggccgttcaattcc

SEQ ID NO: 6040269 - DNA, 25 bp, Homo sapien
attatcatcaccttcgacctccttg

SEQ ID NO: 6040270 - DNA, 25 bp, Homo sapien
tacgagatggattgcaaaaacccgt

SEQ ID NO: 6040271 - DNA, 25 bp, Homo sapien
gaccgtcatgaatcataacagtcca

SEQ ID NO: 6040272 - DNA, 25 bp, Homo sapien
tcatctggtctacggtaagaacccc

SEQ ID NO: 6040273 - DNA, 25 bp, Homo sapien
aagtgaacagaatcaaataagaaac

SEQ ID NO: 6040274 - DNA, 25 bp, Homo sapien
catgtatagtttagaatggccgttc

SEQ ID NO: 6040275 - DNA, 25 bp, Homo sapien
accttgtgtaatggcagaatcaatg

SEQ ID NO: 6040276 - DNA, 25 bp, Homo sapien
aagaaccccctagtctgtcccacag

SEQ ID NO: 6040277 - DNA, 25 bp, Homo sapien
tagtctgtcccacagagtggtgaat

SEQ ID NO: 6040278 - DNA, 25 bp, Homo sapien
gattgtttgataggtattgaccgtc

SEQ ID NO: 6040279 - DNA, 25 bp, Homo sapien
attgaccgtagttgtagttgaaata

SEQ ID NO: 6040280 - DNA, 25 bp, Homo sapien
tgcaaaaacccgtctacaggatgga

SEQ ID NO: 6040281 - DNA, 25 bp, Homo sapien
aatgagtcatctggtctacggtaag

SEQ ID NO: 6040282 - DNA, 25 bp, Homo sapien
acagaatcaaataagaaaccttgtg

SEQ ID NO: 6040283 - DNA, 25 bp, Homo sapien
ttgtgatgaggcttgtgcagagcac

SEQ ID NO: 6040284 - DNA, 25 bp, Homo sapien
cagagtggtgaattgaccgtagttg

SEQ ID NO: 6040285 - DNA, 25 bp, Homo sapien
cggcaggattgtttgataggtattg

SEQ ID NO: 6040286 - DNA, 25 bp, Homo sapien
gtctacaggatggaaagaatgagat

SEQ ID NO: 6040287 - DNA, 25 bp, Homo sapien
cgtggttttcataatcaatcttcat

SEQ ID NO: 6040288 - DNA, 25 bp, Homo sapien
tcaaacaatgagtcatctggtctac

SEQ ID NO: 6040289 - DNA, 25 bp, Homo sapien
tgagatgcgaaaggtgtgcagacca

SEQ ID NO: 6040290 - DNA, 25 bp, Homo sapien
tggcaggcagtaccgttgacggcag

SEQ ID NO: 6040291 - DNA, 25 bp, Homo sapien
gggtagatgtggtacgagatggatt

SEQ ID NO: 6040292 - DNA, 25 bp, Homo sapien
catgaatcataacagtccaaaagtt

SEQ ID NO: 6040293 - DNA, 25 bp, Homo sapien
gccaatgcaaccatctgtgcgctaa

SEQ ID NO: 6040294 - DNA, 25 bp, Homo sapien
ccgttgacggcaggattgtttgata

SEQ ID NO: 6040295 - DNA, 25 bp, Homo sapien
aggatggaaagaatgagatgcgaaa

SEQ ID NO: 6040296 - DNA, 25 bp, Homo sapien
gcatctcttaacttaggatcaaaca

SEQ ID NO: 6040297 - DNA, 25 bp, Homo sapien
cttaacttaggatcaaacaatgagt

SEQ ID NO: 6040298 - DNA, 25 bp, Homo sapien
tgaaatatagatggtgaaccgtgtg

SEQ ID NO: 6040299 - DNA, 25 bp, Homo sapien
gcagtaccgttgacggcaggattgt

SEQ ID NO: 6040300 - DNA, 25 bp, Homo sapien
atggattgcaaaaacccgtctacag

SEQ ID NO: 6040301 - DNA, 25 bp, Homo sapien
gcgaaaggtgtgcagaccagccact

SEQ ID NO: 6040302 - DNA, 25 bp, Homo sapien
gtgaagtactcgataatgagcttcc

SEQ ID NO: 6040303 - DNA, 25 bp, Homo sapien
acttccttaacttgagcgtcccagg

SEQ ID NO: 6040304 - DNA, 25 bp, Homo sapien
taagaaaccttgtgtaatggcagaa

SEQ ID NO: 6040305 - DNA, 25 bp, Homo sapien
ttcgacctccttgatgaaatgttca

SEQ ID NO: 6040306 - DNA, 25 bp, Homo sapien
ggtattgaccgtcatgaatcataac

SEQ ID NO: 6040307 - DNA, 25 bp, Homo sapien
cccttggccaatgcaaccatctgtg

SEQ ID NO: 6040308 - DNA, 25 bp, Homo sapien
ggtgaaccgtgtggcaggcagtacc

SEQ ID NO: 6040309 - DNA, 25 bp, Homo sapien
atcaccttcgacctccttgatgaaa

SEQ ID NO: 6040310 - DNA, 25 bp, Homo sapien
gaaaaagatgaaagtgaagtactcg

SEQ ID NO: 6040311 - DNA, 25 bp, Homo sapien
gatgaaagtgaagtactcgataatg

SEQ ID NO: 6040312 - DNA, 25 bp, Homo sapien
atcaaataagaaaccttgtgtaatg

SEQ ID NO: 6040313 - DNA, 25 bp, Homo sapien
tgtagttgaaatatagatggtgaac

SEQ ID NO: 6040314 - DNA, 25 bp, Homo sapien
atcaatgggtagatgtggtacgaga

SEQ ID NO: 6040315 - DNA, 25 bp, Homo sapien
aatacacaccgcaatcagtgaaaaa

SEQ ID NO: 6040316 - DNA, 25 bp, Homo sapien
taatcaatcttcatgtatagtttag

SEQ ID NO: 6040317 - DNA, 25 bp, Homo sapien
ttgtgcagagcacggtagacccttg

SEQ ID NO: 6040318 - DNA, 25 bp, Homo sapien
agcttccttacaccgtggttttcat

SEQ ID NO: 6040319 - DNA, 25 bp, Homo sapien
ttacaccgtggttttcataatcaat

SEQ ID NO: 6040320 - DNA, 25 bp, Homo sapien
gctcgttaatcatttaactccatca

SEQ ID NO: 6040321 - DNA, 25 bp, Homo sapien
gaattggaaacacgtaatgatcgta

SEQ ID NO: 6040322 - DNA, 25 bp, Homo sapien
tggcttattgatggattaccggctg

SEQ ID NO: 6040323 - DNA, 25 bp, Homo sapien
gcagaaaccaccgataaggatgtgg

SEQ ID NO: 6040324 - DNA, 25 bp, Homo sapien
tctggcgataaagaaaatttcttgt

SEQ ID NO: 6040325 - DNA, 25 bp, Homo sapien
gaaaatttcttgtactcatacgact

SEQ ID NO: 6040326 - DNA, 25 bp, Homo sapien
acaagaaaaagagtgtgaatccctg

SEQ ID NO: 6040327 - DNA, 25 bp, Homo sapien
tcgaatttataattcaccattccaa

SEQ ID NO: 6040328 - DNA, 25 bp, Homo sapien
aatggcttcttccaaaactggctta

SEQ ID NO: 6040329 - DNA, 25 bp, Homo sapien
gctactccaaaaggggcagaaacca

SEQ ID NO: 6040330 - DNA, 25 bp, Homo sapien
gcctaccacttacagggaaaatgac

SEQ ID NO: 6040331 - DNA, 25 bp, Homo sapien
caacatcccattgctcgttaatcat

SEQ ID NO: 6040332 - DNA, 25 bp, Homo sapien
ctactattacaatagattccatttt

SEQ ID NO: 6040333 - DNA, 25 bp, Homo sapien
gtaagaccgtaattccgggagatga

SEQ ID NO: 6040334 - DNA, 25 bp, Homo sapien
gactagtttttatggtgctggcttc

SEQ ID NO: 6040335 - DNA, 25 bp, Homo sapien
ttcttgtactcatacgactactatt

SEQ ID NO: 6040336 - DNA, 25 bp, Homo sapien
tatatttggtgatcgaatttataat

SEQ ID NO: 6040337 - DNA, 25 bp, Homo sapien
ttatgatggcagaactaagactagt

SEQ ID NO: 6040338 - DNA, 25 bp, Homo sapien
attgaatatgttacaagaaaaagag

SEQ ID NO: 6040339 - DNA, 25 bp, Homo sapien
ttcttccaaaactggcttattgatg

SEQ ID NO: 6040340 - DNA, 25 bp, Homo sapien
cttgggatccgttatatttggtgat

SEQ ID NO: 6040341 - DNA, 25 bp, Homo sapien
tatcaacacaaagatgaggacggta

SEQ ID NO: 6040342 - DNA, 25 bp, Homo sapien
gataaagaaaatttcttgtactcat

SEQ ID NO: 6040343 - DNA, 25 bp, Homo sapien
agtcaaagccttctatttaccaggt

SEQ ID NO: 6040344 - DNA, 25 bp, Homo sapien
cctgaaaaagtcgaaaagcaacctg

SEQ ID NO: 6040345 - DNA, 25 bp, Homo sapien
gaaacacgtaatgatcgtaacatgg

SEQ ID NO: 6040346 - DNA, 25 bp, Homo sapien
atgaattatcaacacaaagatgagg

SEQ ID NO: 6040347 - DNA, 25 bp, Homo sapien
tgtcagcctgaaaaagtcgaaaagc

SEQ ID NO: 6040348 - DNA, 25 bp, Homo sapien
cccattgctcgttaatcatttaact

SEQ ID NO: 6040349 - DNA, 25 bp, Homo sapien
atccgttatatttggtgatcgaatt

SEQ ID NO: 6040350 - DNA, 25 bp, Homo sapien
cacaaagatgaggacggtaataacg

SEQ ID NO: 6040351 - DNA, 25 bp, Homo sapien
ccgtaattccgggagatgatgctaa

SEQ ID NO: 6040352 - DNA, 25 bp, Homo sapien
aaccgacattgaggctactccaaaa

SEQ ID NO: 6040353 - DNA, 25 bp, Homo sapien
ccggctgcaagagaggtttatgatg

SEQ ID NO: 6040354 - DNA, 25 bp, Homo sapien
accaggtgtagcgcctaccacttac

SEQ ID NO: 6040355 - DNA, 25 bp, Homo sapien
taatcatttaactccatcaatgaat

SEQ ID NO: 6040356 - DNA, 25 bp, Homo sapien
attccaattgaatatgttacaagaa

SEQ ID NO: 6040357 - DNA, 25 bp, Homo sapien
tttttatggtgctggcttcaacctt

SEQ ID NO: 6040358 - DNA, 25 bp, Homo sapien
gataaggatgtggaattggaaacac

SEQ ID NO: 6040359 - DNA, 25 bp, Homo sapien
tggttttgtacaggtaactcaagga

SEQ ID NO: 6040360 - DNA, 25 bp, Homo sapien
agccttctatttaccaggtgtagcg

SEQ ID NO: 6040361 - DNA, 25 bp, Homo sapien
gatgtggaattggaaacacgtaatg

SEQ ID NO: 6040362 - DNA, 25 bp, Homo sapien
tactcatacgactactattacaata

SEQ ID NO: 6040363 - DNA, 25 bp, Homo sapien
gaggtttatgatggcagaactaaga

SEQ ID NO: 6040364 - DNA, 25 bp, Homo sapien
ctgaatccttgggatccgttatatt

SEQ ID NO: 6040365 - DNA, 25 bp, Homo sapien
ccatttttgtcagcctgaaaaagtc

SEQ ID NO: 6040366 - DNA, 25 bp, Homo sapien
tggtgatcgaatttataattcacca

SEQ ID NO: 6040367 - DNA, 25 bp, Homo sapien
cacttacagggaaaatgacaacatc

SEQ ID NO: 6040368 - DNA, 25 bp, Homo sapien
ttcaccattccaattgaatatgtta

SEQ ID NO: 6040369 - DNA, 25 bp, Homo sapien
tggtgctggcttcaaccttggtttt

SEQ ID NO: 6040370 - DNA, 25 bp, Homo sapien
ttacaatagattccatttttgtcag

SEQ ID NO: 6040371 - DNA, 25 bp, Homo sapien
aggggcagaaaccaccgataaggat

SEQ ID NO: 6040372 - DNA, 25 bp, Homo sapien
tacgactactattacaatagattcc

SEQ ID NO: 6040373 - DNA, 25 bp, Homo sapien
gatgaggacggtaataacgtttctg

SEQ ID NO: 6040374 - DNA, 25 bp, Homo sapien
tgtagcgcctaccacttacagggaa

SEQ ID NO: 6040375 - DNA, 25 bp, Homo sapien
attgaggctactccaaaaggggcag

SEQ ID NO: 6040376 - DNA, 25 bp, Homo sapien
gtatttttttgtgtcaacagtcaaa

SEQ ID NO: 6040377 - DNA, 25 bp, Homo sapien
ggtaactcaaggaaccgacattgag

SEQ ID NO: 6040378 - DNA, 25 bp, Homo sapien
gcaagagaggtttatgatggcagaa

SEQ ID NO: 6040379 - DNA, 25 bp, Homo sapien
atccctgtgtaagaccgtaattccg

SEQ ID NO: 6040380 - DNA, 25 bp, Homo sapien
gtcaacagtcaaagccttctattta

SEQ ID NO: 6040381 - DNA, 25 bp, Homo sapien
agcaacctgaatccttgggatccgt

SEQ ID NO: 6040382 - DNA, 25 bp, Homo sapien
cagggaaaatgacaacatcccattg

SEQ ID NO: 6040383 - DNA, 25 bp, Homo sapien
attgatggattaccggctgcaagag

SEQ ID NO: 6040384 - DNA, 25 bp, Homo sapien
tgtacaggtaactcaaggaaccgac

SEQ ID NO: 6040385 - DNA, 25 bp, Homo sapien
ttaactccatcaatgaattatcaac

SEQ ID NO: 6040386 - DNA, 25 bp, Homo sapien
ggagatgatgctaaattcatcaata

SEQ ID NO: 6040387 - DNA, 25 bp, Homo sapien
tggcagaactaagactagtttttat

SEQ ID NO: 6040388 - DNA, 25 bp, Homo sapien
gtgtgaatccctgtgtaagaccgta

SEQ ID NO: 6040389 - DNA, 25 bp, Homo sapien
caaaactggcttattgatggattac

SEQ ID NO: 6040390 - DNA, 25 bp, Homo sapien
ccatcaatgaattatcaacacaaag

SEQ ID NO: 6040391 - DNA, 25 bp, Homo sapien
aactaagactagtttttatggtgct

SEQ ID NO: 6040392 - DNA, 25 bp, Homo sapien
aaagtcgaaaagcaacctgaatcct

SEQ ID NO: 6040393 - DNA, 25 bp, Homo sapien
tcaaggaaccgacattgaggctact

SEQ ID NO: 6040394 - DNA, 25 bp, Homo sapien
gatgctaaattcatcaataaattga

SEQ ID NO: 6040395 - DNA, 25 bp, Homo sapien
ctatttaccaggtgtagcgcctacc

SEQ ID NO: 6040396 - DNA, 25 bp, Homo sapien
tcatcaataaattgataaaaaatgg

SEQ ID NO: 6040397 - DNA, 25 bp, Homo sapien
ttttgtgtcaacagtcaaagccttc

SEQ ID NO: 6040398 - DNA, 25 bp, Homo sapien
gttgttgtatttttttgtgtcaaca

SEQ ID NO: 6040399 - DNA, 25 bp, Homo sapien
ttataattcaccattccaattgaat

SEQ ID NO: 6040400 - DNA, 25 bp, Homo sapien
ggattaccggctgcaagagaggttt

SEQ ID NO: 6040401 - DNA, 25 bp, Homo sapien
accaccgataaggatgtggaattgg

SEQ ID NO: 6040402 - DNA, 25 bp, Homo sapien
tatgttacaagaaaaagagtgtgaa

SEQ ID NO: 6040403 - DNA, 25 bp, Homo sapien
aaatgacaacatcccattgctcgtt

SEQ ID NO: 6040404 - DNA, 25 bp, Homo sapien
tggcttcaaccttggttttgtacag

SEQ ID NO: 6040405 - DNA, 25 bp, Homo sapien
tcgaaaagcaacctgaatccttggg

SEQ ID NO: 6040406 - DNA, 25 bp, Homo sapien
attccgggagatgatgctaaattca

SEQ ID NO: 6040407 - DNA, 25 bp, Homo sapien
gacggtaataacgtttctggcgata

SEQ ID NO: 6040408 - DNA, 25 bp, Homo sapien
ttgataaaaaatggcttcttccaaa

SEQ ID NO: 6040409 - DNA, 25 bp, Homo sapien
tagattccatttttgtcagcctgaa

SEQ ID NO: 6040410 - DNA, 25 bp, Homo sapien
aataaattgataaaaaatggcttct

SEQ ID NO: 6040411 - DNA, 25 bp, Homo sapien
aaaagagtgtgaatccctgtgtaag

SEQ ID NO: 6040412 - DNA, 25 bp, Homo sapien
taataacgtttctggcgataaagaa

SEQ ID NO: 6040413 - DNA, 25 bp, Homo sapien
tccaattatgaatcctctccattgc

SEQ ID NO: 6040414 - DNA, 25 bp, Homo sapien
accagcaatcaaagtagctggtata

SEQ ID NO: 6040415 - DNA, 25 bp, Homo sapien
aaggctggaagggtatttgtcttgc

SEQ ID NO: 6040416 - DNA, 25 bp, Homo sapien
taaacttgtgtatatgaaatacaac

SEQ ID NO: 6040417 - DNA, 25 bp, Homo sapien
cacttccagttctccaggcataagg

SEQ ID NO: 6040418 - DNA, 25 bp, Homo sapien
tcttggttggatgttcatcccagtg

SEQ ID NO: 6040419 - DNA, 25 bp, Homo sapien
gaatgaataaacacatacaaagcac

SEQ ID NO: 6040420 - DNA, 25 bp, Homo sapien
gattgagaacaaaaaccatagaaaa

SEQ ID NO: 6040421 - DNA, 25 bp, Homo sapien
taatgggattgagaacaaaaaccat

SEQ ID NO: 6040422 - DNA, 25 bp, Homo sapien
ccagtgacatcttttcctggcaatc

SEQ ID NO: 6040423 - DNA, 25 bp, Homo sapien
cattgccacttccagttctccaggc

SEQ ID NO: 6040424 - DNA, 25 bp, Homo sapien
tgtgtatatgaaatacaactcaacg

SEQ ID NO: 6040425 - DNA, 25 bp, Homo sapien
tactgctgataaagccaattgaccc

SEQ ID NO: 6040426 - DNA, 25 bp, Homo sapien
aatgactgaggagtatcccacgtat

SEQ ID NO: 6040427 - DNA, 25 bp, Homo sapien
agtctttaaataccaaggctggaag

SEQ ID NO: 6040428 - DNA, 25 bp, Homo sapien
cataaggaatgataagtgatcaaaa

SEQ ID NO: 6040429 - DNA, 25 bp, Homo sapien
caattgaccccgttaccaaacagca

SEQ ID NO: 6040430 - DNA, 25 bp, Homo sapien
gtacttgctggtatgacaccagaag

SEQ ID NO: 6040431 - DNA, 25 bp, Homo sapien
cttattaaaccataaacttgtgtat

SEQ ID NO: 6040432 - DNA, 25 bp, Homo sapien
aatcaaagtagctggtatagtcttt

SEQ ID NO: 6040433 - DNA, 25 bp, Homo sapien
aataccaaggctggaagggtatttg

SEQ ID NO: 6040434 - DNA, 25 bp, Homo sapien
tgaccccgttaccaaacagcagagt

SEQ ID NO: 6040435 - DNA, 25 bp, Homo sapien
taacaaagagcatactgctgataaa

SEQ ID NO: 6040436 - DNA, 25 bp, Homo sapien
cgttaccaaacagcagagtaatgaa

SEQ ID NO: 6040437 - DNA, 25 bp, Homo sapien
aaaccataaacttgtgtatatgaaa

SEQ ID NO: 6040438 - DNA, 25 bp, Homo sapien
tgataaagccaattgaccccgttac

SEQ ID NO: 6040439 - DNA, 25 bp, Homo sapien
cgtgaatccacccaacttaaatttg

SEQ ID NO: 6040440 - DNA, 25 bp, Homo sapien
ttcatcccagtgacatcttttcctg

SEQ ID NO: 6040441 - DNA, 25 bp, Homo sapien
acaaccggcgcctccaattatgaat

SEQ ID NO: 6040442 - DNA, 25 bp, Homo sapien
ggcgatggagccaaatggaaagata

SEQ ID NO: 6040443 - DNA, 25 bp, Homo sapien
aaaatagaatgaataaacacataca

SEQ ID NO: 6040444 - DNA, 25 bp, Homo sapien
aatagtcgtgaatccacccaactta

SEQ ID NO: 6040445 - DNA, 25 bp, Homo sapien
gcagagtaatgaaatgactgaggag

SEQ ID NO: 6040446 - DNA, 25 bp, Homo sapien
caatgaaccagcaaatgataatggg

SEQ ID NO: 6040447 - DNA, 25 bp, Homo sapien
cctctccattgccacttccagttct

SEQ ID NO: 6040448 - DNA, 25 bp, Homo sapien
taagtgatcaaaatagtgacgagtg

SEQ ID NO: 6040449 - DNA, 25 bp, Homo sapien
aaagcacaaccggcgcctccaatta

SEQ ID NO: 6040450 - DNA, 25 bp, Homo sapien
tatgaatcctctccattgccacttc

SEQ ID NO: 6040451 - DNA, 25 bp, Homo sapien
ctcaacggcgatggagccaaatgga

SEQ ID NO: 6040452 - DNA, 25 bp, Homo sapien
agtagctggtatagtctttaaatac

SEQ ID NO: 6040453 - DNA, 25 bp, Homo sapien
acatcttttcctggcaatcaatgaa

SEQ ID NO: 6040454 - DNA, 25 bp, Homo sapien
gaacttgtcaaagttaataggagga

SEQ ID NO: 6040455 - DNA, 25 bp, Homo sapien
cgatttggtttgtcttggttggatg

SEQ ID NO: 6040456 - DNA, 25 bp, Homo sapien
aatacaactcaacggcgatggagcc

SEQ ID NO: 6040457 - DNA, 25 bp, Homo sapien
ggcaatcaatgaaccagcaaatgat

SEQ ID NO: 6040458 - DNA, 25 bp, Homo sapien
ggtttgtcttggttggatgttcatc

SEQ ID NO: 6040459 - DNA, 25 bp, Homo sapien
tccaggcataaggaatgataagtga

SEQ ID NO: 6040460 - DNA, 25 bp, Homo sapien
aaatgataatgggattgagaacaaa

SEQ ID NO: 6040461 - DNA, 25 bp, Homo sapien
ccagaagaatgaacaaacattaaga

SEQ ID NO: 6040462 - DNA, 25 bp, Homo sapien
tcaaagttaataggaggaaagagaa

SEQ ID NO: 6040463 - DNA, 25 bp, Homo sapien
agagcatactgctgataaagccaat

SEQ ID NO: 6040464 - DNA, 25 bp, Homo sapien
cacgtataagacaatagtcgtgaat

SEQ ID NO: 6040465 - DNA, 25 bp, Homo sapien
aaatggaaagataccagcaatcaaa

SEQ ID NO: 6040466 - DNA, 25 bp, Homo sapien
ataaacacatacaaagcacaaccgg

SEQ ID NO: 6040467 - DNA, 25 bp, Homo sapien
ataaaaaacagagtacttgctggta

SEQ ID NO: 6040468 - DNA, 25 bp, Homo sapien
catgtaaaaaatcttattaaaccat

SEQ ID NO: 6040469 - DNA, 25 bp, Homo sapien
tatttgtcttgcgatttggtttgtc

SEQ ID NO: 6040470 - DNA, 25 bp, Homo sapien
ggtgaataaaatagaatgaataaac

SEQ ID NO: 6040471 - DNA, 25 bp, Homo sapien
atagtgacgagtgaacttgtcaaag

SEQ ID NO: 6040472 - DNA, 25 bp, Homo sapien
taagacaatagtcgtgaatccaccc

SEQ ID NO: 6040473 - DNA, 25 bp, Homo sapien
aaccataaaaaacagagtacttgct

SEQ ID NO: 6040474 - DNA, 25 bp, Homo sapien
ggcgcctccaattatgaatcctctc

SEQ ID NO: 6040475 - DNA, 25 bp, Homo sapien
atgacaccagaagaatgaacaaaca

SEQ ID NO: 6040476 - DNA, 25 bp, Homo sapien
aaagataccagcaatcaaagtagct

SEQ ID NO: 6040477 - DNA, 25 bp, Homo sapien
aacagagtacttgctggtatgacac

SEQ ID NO: 6040478 - DNA, 25 bp, Homo sapien
acgagtgaacttgtcaaagttaata

SEQ ID NO: 6040479 - DNA, 25 bp, Homo sapien
taatgaaatgactgaggagtatccc

SEQ ID NO: 6040480 - DNA, 25 bp, Homo sapien
tatgaaatacaactcaacggcgatg

SEQ ID NO: 6040481 - DNA, 25 bp, Homo sapien
tgaggagtatcccacgtataagaca

SEQ ID NO: 6040482 - DNA, 25 bp, Homo sapien
atcaaaatagtgacgagtgaacttg

SEQ ID NO: 6040483 - DNA, 25 bp, Homo sapien
agagaaaaagaggaaaccaaacatg

SEQ ID NO: 6040484 - DNA, 25 bp, Homo sapien
aaatttggtgaataaaatagaatga

SEQ ID NO: 6040485 - DNA, 25 bp, Homo sapien
caaacagcagagtaatgaaatgact

SEQ ID NO: 6040486 - DNA, 25 bp, Homo sapien
gtcttgcgatttggtttgtcttggt

SEQ ID NO: 6040487 - DNA, 25 bp, Homo sapien
gctggtatgacaccagaagaatgaa

SEQ ID NO: 6040488 - DNA, 25 bp, Homo sapien
catagaaaaaccataaaaaacagag

SEQ ID NO: 6040489 - DNA, 25 bp, Homo sapien
tttcctggcaatcaatgaaccagca

SEQ ID NO: 6040490 - DNA, 25 bp, Homo sapien
ggagccaaatggaaagataccagca

SEQ ID NO: 6040491 - DNA, 25 bp, Homo sapien
aatgataagtgatcaaaatagtgac

SEQ ID NO: 6040492 - DNA, 25 bp, Homo sapien
gtatcccacgtataagacaatagtc

SEQ ID NO: 6040493 - DNA, 25 bp, Homo sapien
acatacaaagcacaaccggcgcctc

SEQ ID NO: 6040494 - DNA, 25 bp, Homo sapien
cagttctccaggcataaggaatgat

SEQ ID NO: 6040495 - DNA, 25 bp, Homo sapien
accagcaaatgataatgggattgag

SEQ ID NO: 6040496 - DNA, 25 bp, Homo sapien
ttggatgttcatcccagtgacatct

SEQ ID NO: 6040497 - DNA, 25 bp, Homo sapien
gaagggtatttgtcttgcgatttgg

SEQ ID NO: 6040498 - DNA, 25 bp, Homo sapien
tggtatagtctttaaataccaaggc

SEQ ID NO: 6040499 - DNA, 25 bp, Homo sapien
caatggtgatgttgcatggtttttg

SEQ ID NO: 6040500 - DNA, 25 bp, Homo sapien
ccaatgattccagaagcggtcattg

SEQ ID NO: 6040501 - DNA, 25 bp, Homo sapien
aattctaaagtggtcatcacttgtg

SEQ ID NO: 6040502 - DNA, 25 bp, Homo sapien
agctggggcgttaagaaaggtgaca

SEQ ID NO: 6040503 - DNA, 25 bp, Homo sapien
gaagctcacaacgtaaaggctctta

SEQ ID NO: 6040504 - DNA, 25 bp, Homo sapien
acaaaatcatcacatttggtgaatt

SEQ ID NO: 6040505 - DNA, 25 bp, Homo sapien
tgcatggtttttgaacggtaaattg

SEQ ID NO: 6040506 - DNA, 25 bp, Homo sapien
ggttcgttgaaagatcgtgtcgttg

SEQ ID NO: 6040507 - DNA, 25 bp, Homo sapien
ttacgttactgatatgcaacattat

SEQ ID NO: 6040508 - DNA, 25 bp, Homo sapien
tgaattactcagaaaagtttcccaa

SEQ ID NO: 6040509 - DNA, 25 bp, Homo sapien
caagggttacgttactgatatgcaa

SEQ ID NO: 6040510 - DNA, 25 bp, Homo sapien
gatcgtgtcgttgacgctaattcta

SEQ ID NO: 6040511 - DNA, 25 bp, Homo sapien
tcacaacgtaaaggctcttaaggct

SEQ ID NO: 6040512 - DNA, 25 bp, Homo sapien
atctatcaatgagccagaaaaattc

SEQ ID NO: 6040513 - DNA, 25 bp, Homo sapien
atcatacaattgtgttgacagacat

SEQ ID NO: 6040514 - DNA, 25 bp, Homo sapien
cagctttgatctatgaagctgatga

SEQ ID NO: 6040515 - DNA, 25 bp, Homo sapien
ttgaaagatcgtgtcgttgacgcta

SEQ ID NO: 6040516 - DNA, 25 bp, Homo sapien
gctatgttggctgtggctcgtattg

SEQ ID NO: 6040517 - DNA, 25 bp, Homo sapien
tatttgccaatgattccagaagcgg

SEQ ID NO: 6040518 - DNA, 25 bp, Homo sapien
gtcgttgacgctaattctaaagtgg

SEQ ID NO: 6040519 - DNA, 25 bp, Homo sapien
acttgtgatgaaggtaaaagaggtg

SEQ ID NO: 6040520 - DNA, 25 bp, Homo sapien
atcgctggtgtcttaaaaagctggg

SEQ ID NO: 6040521 - DNA, 25 bp, Homo sapien
aaggctcctcaacatttttacaaca

SEQ ID NO: 6040522 - DNA, 25 bp, Homo sapien
acattatcaagaaatgtatcaacaa

SEQ ID NO: 6040523 - DNA, 25 bp, Homo sapien
cacagtggctatctatttgccaatg

SEQ ID NO: 6040524 - DNA, 25 bp, Homo sapien
tgtctttgctgggttctccgctggt

SEQ ID NO: 6040525 - DNA, 25 bp, Homo sapien
aaagtggtcatcacttgtgatgaag

SEQ ID NO: 6040526 - DNA, 25 bp, Homo sapien
tgttgacagacatgcctttgctaat

SEQ ID NO: 6040527 - DNA, 25 bp, Homo sapien
catttggtgaattactcagaaaagt

SEQ ID NO: 6040528 - DNA, 25 bp, Homo sapien
ttgctgggttctccgctggttcgtt

SEQ ID NO: 6040529 - DNA, 25 bp, Homo sapien
gaatgcatcatacaattgtgttgac

SEQ ID NO: 6040530 - DNA, 25 bp, Homo sapien
ggttcattgaacaatggtgatgttg

SEQ ID NO: 6040531 - DNA, 25 bp, Homo sapien
ttgctaatcccgacaagccagcttt

SEQ ID NO: 6040532 - DNA, 25 bp, Homo sapien
gaacggtaaattgaatgcatcatac

SEQ ID NO: 6040533 - DNA, 25 bp, Homo sapien
gtaaaggctcttaaggctcctcaac

SEQ ID NO: 6040534 - DNA, 25 bp, Homo sapien
caattgtgttgacagacatgccttt

SEQ ID NO: 6040535 - DNA, 25 bp, Homo sapien
aggtgacacagtggctatctatttg

SEQ ID NO: 6040536 - DNA, 25 bp, Homo sapien
gaagcggtcattgctatgttggctg

SEQ ID NO: 6040537 - DNA, 25 bp, Homo sapien
tccgctggttcgttgaaagatcgtg

SEQ ID NO: 6040538 - DNA, 25 bp, Homo sapien
aatgtatcaacaatctatcaatgag

SEQ ID NO: 6040539 - DNA, 25 bp, Homo sapien
ttgcattgggatgctccatacacca

SEQ ID NO: 6040540 - DNA, 25 bp, Homo sapien
taaattgaatgcatcatacaattgt

SEQ ID NO: 6040541 - DNA, 25 bp, Homo sapien
tcgtattggtgctattcactctgtt

SEQ ID NO: 6040542 - DNA, 25 bp, Homo sapien
ctctgttgtctttgctgggttctcc

SEQ ID NO: 6040543 - DNA, 25 bp, Homo sapien
tggtgctattcactctgttgtcttt

SEQ ID NO: 6040544 - DNA, 25 bp, Homo sapien
acaagccagctttgatctatgaagc

SEQ ID NO: 6040545 - DNA, 25 bp, Homo sapien
gatgaaggtaaaagaggtggtaaga

SEQ ID NO: 6040546 - DNA, 25 bp, Homo sapien
gacgctaattctaaagtggtcatca

SEQ ID NO: 6040547 - DNA, 25 bp, Homo sapien
gaatacttgcattgggatgctccat

SEQ ID NO: 6040548 - DNA, 25 bp, Homo sapien
gtcatcacttgtgatgaaggtaaaa

SEQ ID NO: 6040549 - DNA, 25 bp, Homo sapien
aagatggctaaggaatacttgcatt

SEQ ID NO: 6040550 - DNA, 25 bp, Homo sapien
aaagttcaatctggttcattgaaca

SEQ ID NO: 6040551 - DNA, 25 bp, Homo sapien
tactgatatgcaacattatcaagaa

SEQ ID NO: 6040552 - DNA, 25 bp, Homo sapien
tatgcaacattatcaagaaatgtat

SEQ ID NO: 6040553 - DNA, 25 bp, Homo sapien
gtttttgaacggtaaattgaatgca

SEQ ID NO: 6040554 - DNA, 25 bp, Homo sapien
ctttgataagatggctaaggaatac

SEQ ID NO: 6040555 - DNA, 25 bp, Homo sapien
tacaccaaagttcaatctggttcat

SEQ ID NO: 6040556 - DNA, 25 bp, Homo sapien
atcccgacaagccagctttgatcta

SEQ ID NO: 6040557 - DNA, 25 bp, Homo sapien
gctcttaaggctcctcaacattttt

SEQ ID NO: 6040558 - DNA, 25 bp, Homo sapien
ctcagaaaagtttcccaaatcgctg

SEQ ID NO: 6040559 - DNA, 25 bp, Homo sapien
tgatctatgaagctgatgacgaatc

SEQ ID NO: 6040560 - DNA, 25 bp, Homo sapien
tgtggctcgtattggtgctattcac

SEQ ID NO: 6040561 - DNA, 25 bp, Homo sapien
cctcaacatttttacaacagccaac

SEQ ID NO: 6040562 - DNA, 25 bp, Homo sapien
tcccaaatcgctggtgtcttaaaaa

SEQ ID NO: 6040563 - DNA, 25 bp, Homo sapien
caatgagccagaaaaattctttgat

SEQ ID NO: 6040564 - DNA, 25 bp, Homo sapien
taagaaaggtgacacagtggctatc

SEQ ID NO: 6040565 - DNA, 25 bp, Homo sapien
tcatcacatttggtgaattactcag

SEQ ID NO: 6040566 - DNA, 25 bp, Homo sapien
catttttacaacagccaacccggca

SEQ ID NO: 6040567 - DNA, 25 bp, Homo sapien
aaagtttcccaaatcgctggtgtct

SEQ ID NO: 6040568 - DNA, 25 bp, Homo sapien
acgaatccgacaacaaaatcatcac

SEQ ID NO: 6040569 - DNA, 25 bp, Homo sapien
atgaagctgatgacgaatccgacaa

SEQ ID NO: 6040570 - DNA, 25 bp, Homo sapien
tgggatgctccatacaccaaagttc

SEQ ID NO: 6040571 - DNA, 25 bp, Homo sapien
gctaaggaatacttgcattgggatg

SEQ ID NO: 6040572 - DNA, 25 bp, Homo sapien
tcaacaatctatcaatgagccagaa

SEQ ID NO: 6040573 - DNA, 25 bp, Homo sapien
tgcctttgctaatcccgacaagcca

SEQ ID NO: 6040574 - DNA, 25 bp, Homo sapien
caatctggttcattgaacaatggtg

SEQ ID NO: 6040575 - DNA, 25 bp, Homo sapien
ttggctgtggctcgtattggtgcta

SEQ ID NO: 6040576 - DNA, 25 bp, Homo sapien
ggctatctatttgccaatgattcca

SEQ ID NO: 6040577 - DNA, 25 bp, Homo sapien
attgaacaatggtgatgttgcatgg

SEQ ID NO: 6040578 - DNA, 25 bp, Homo sapien
ctgatgacgaatccgacaacaaaat

SEQ ID NO: 6040579 - DNA, 25 bp, Homo sapien
cagacatgcctttgctaatcccgac

SEQ ID NO: 6040580 - DNA, 25 bp, Homo sapien
gggcgttaagaaaggtgacacagtg

SEQ ID NO: 6040581 - DNA, 25 bp, Homo sapien
gtcattgctatgttggctgtggctc

SEQ ID NO: 6040582 - DNA, 25 bp, Homo sapien
tgatgttgcatggtttttgaacggt

SEQ ID NO: 6040583 - DNA, 25 bp, Homo sapien
ggttctccgctggttcgttgaaaga

SEQ ID NO: 6040584 - DNA, 25 bp, Homo sapien
tattcactctgttgtctttgctggg

SEQ ID NO: 6040585 - DNA, 25 bp, Homo sapien
tcaagaaatgtatcaacaatctatc

SEQ ID NO: 6040586 - DNA, 25 bp, Homo sapien
gctccatacaccaaagttcaatctg

SEQ ID NO: 6040587 - DNA, 25 bp, Homo sapien
attccagaagcggtcattgctatgt

SEQ ID NO: 6040588 - DNA, 25 bp, Homo sapien
ccggcaagggttacgttactgatat

SEQ ID NO: 6040589 - DNA, 25 bp, Homo sapien
ccgacaacaaaatcatcacatttgg

SEQ ID NO: 6040590 - DNA, 25 bp, Homo sapien
aaaattctttgataagatggctaag

SEQ ID NO: 6040591 - DNA, 25 bp, Homo sapien
gccagaaaaattctttgataagatg

SEQ ID NO: 6040592 - DNA, 25 bp, Homo sapien
caagtaagtatccatgtaacggtcg

SEQ ID NO: 6040593 - DNA, 25 bp, Homo sapien
caggtacaacttctgggttggccaa

SEQ ID NO: 6040594 - DNA, 25 bp, Homo sapien
tgatctctaccagcaccatcacctg

SEQ ID NO: 6040595 - DNA, 25 bp, Homo sapien
tgcatcaccttcagtagcgttgttt

SEQ ID NO: 6040596 - DNA, 25 bp, Homo sapien
tgggttggccaaagtagttaggtca

SEQ ID NO: 6040597 - DNA, 25 bp, Homo sapien
accttcagtagcgttgttttgtaga

SEQ ID NO: 6040598 - DNA, 25 bp, Homo sapien
tctctaactagaataatggtttttg

SEQ ID NO: 6040599 - DNA, 25 bp, Homo sapien
agaactcttctcataatctttcctg

SEQ ID NO: 6040600 - DNA, 25 bp, Homo sapien
atctggtgtgatgtgttctgcatca

SEQ ID NO: 6040601 - DNA, 25 bp, Homo sapien
taaattatctggtgtgatgtgttct

SEQ ID NO: 6040602 - DNA, 25 bp, Homo sapien
gcaccatcacctgtgaaatagtgac

SEQ ID NO: 6040603 - DNA, 25 bp, Homo sapien
tgtgatgtgttctgcatcaccttca

SEQ ID NO: 6040604 - DNA, 25 bp, Homo sapien
ataaccatcttttagggaaacatat

SEQ ID NO: 6040605 - DNA, 25 bp, Homo sapien
tcatctggaataccgacaacagcag

SEQ ID NO: 6040606 - DNA, 25 bp, Homo sapien
tcgtcaactctacccctgatccagt

SEQ ID NO: 6040607 - DNA, 25 bp, Homo sapien
atccagtagtaaccatcatgatctc

SEQ ID NO: 6040608 - DNA, 25 bp, Homo sapien
tgcaacgacggtttgaccggtcaat

SEQ ID NO: 6040609 - DNA, 25 bp, Homo sapien
actctacccctgatccagtagtaac

SEQ ID NO: 6040610 - DNA, 25 bp, Homo sapien
ataatggtttttggtgaggcgaaag

SEQ ID NO: 6040611 - DNA, 25 bp, Homo sapien
gttcttggtagatctctaactagaa

SEQ ID NO: 6040612 - DNA, 25 bp, Homo sapien
aggtttcaagtaagtatccatgtaa

SEQ ID NO: 6040613 - DNA, 25 bp, Homo sapien
ataatctttcctgaccttgttcttg

SEQ ID NO: 6040614 - DNA, 25 bp, Homo sapien
gtgatttaacggcaaggacaccttc

SEQ ID NO: 6040615 - DNA, 25 bp, Homo sapien
atgaccggaaacatttacaacgtcg

SEQ ID NO: 6040616 - DNA, 25 bp, Homo sapien
gtgatttgagatagatgcttcaatt

SEQ ID NO: 6040617 - DNA, 25 bp, Homo sapien
caacttctgggttggccaaagtagt

SEQ ID NO: 6040618 - DNA, 25 bp, Homo sapien
tggtgaggcgaaaggaccaatctca

SEQ ID NO: 6040619 - DNA, 25 bp, Homo sapien
tagttaggtcacctagctgttcggc

SEQ ID NO: 6040620 - DNA, 25 bp, Homo sapien
acggtttgaccggtcaattcatctg

SEQ ID NO: 6040621 - DNA, 25 bp, Homo sapien
ctagctgttcggcttcgttagaagc

SEQ ID NO: 6040622 - DNA, 25 bp, Homo sapien
ttagaagcaacctttcttagaactc

SEQ ID NO: 6040623 - DNA, 25 bp, Homo sapien
aacatatgcaacgacggtttgaccg

SEQ ID NO: 6040624 - DNA, 25 bp, Homo sapien
aatctcacccctaacttgtaagatc

SEQ ID NO: 6040625 - DNA, 25 bp, Homo sapien
cagaaatgatggcaggtacaacttc

SEQ ID NO: 6040626 - DNA, 25 bp, Homo sapien
tttcttagaactcttctcataatct

SEQ ID NO: 6040627 - DNA, 25 bp, Homo sapien
gcttcgttagaagcaacctttctta

SEQ ID NO: 6040628 - DNA, 25 bp, Homo sapien
ttgatggccatggtgatttaacggc

SEQ ID NO: 6040629 - DNA, 25 bp, Homo sapien
atcttttagggaaacatatgcaacg

SEQ ID NO: 6040630 - DNA, 25 bp, Homo sapien
taatctatgaccggaaacatttaca

SEQ ID NO: 6040631 - DNA, 25 bp, Homo sapien
cccctgatccagtagtaaccatcat

SEQ ID NO: 6040632 - DNA, 25 bp, Homo sapien
taacggcaaggacaccttcgacatc

SEQ ID NO: 6040633 - DNA, 25 bp, Homo sapien
agtgaccaggataaggtttcaagta

SEQ ID NO: 6040634 - DNA, 25 bp, Homo sapien
gtgttctgcatcaccttcagtagcg

SEQ ID NO: 6040635 - DNA, 25 bp, Homo sapien
agcttccgagacgttttcgtgattt

SEQ ID NO: 6040636 - DNA, 25 bp, Homo sapien
acaacgtcgtcaactctacccctga

SEQ ID NO: 6040637 - DNA, 25 bp, Homo sapien
tagtaaccatcatgatctctaccag

SEQ ID NO: 6040638 - DNA, 25 bp, Homo sapien
cttctcataatctttcctgaccttg

SEQ ID NO: 6040639 - DNA, 25 bp, Homo sapien
ccatcatgatctctaccagcaccat

SEQ ID NO: 6040640 - DNA, 25 bp, Homo sapien
ggtcacctagctgttcggcttcgtt

SEQ ID NO: 6040641 - DNA, 25 bp, Homo sapien
cgagacgttttcgtgatttgagata

SEQ ID NO: 6040642 - DNA, 25 bp, Homo sapien
ggcgaaaggaccaatctcaccccta

SEQ ID NO: 6040643 - DNA, 25 bp, Homo sapien
ttgtagataaccatcttttagggaa

SEQ ID NO: 6040644 - DNA, 25 bp, Homo sapien
acagatctagccattgatggccatg

SEQ ID NO: 6040645 - DNA, 25 bp, Homo sapien
tttcctgaccttgttcttggtagat

SEQ ID NO: 6040646 - DNA, 25 bp, Homo sapien
acccctaacttgtaagatcaattct

SEQ ID NO: 6040647 - DNA, 25 bp, Homo sapien
taagatcaattctctacgtaaatta

SEQ ID NO: 6040648 - DNA, 25 bp, Homo sapien
agatgcttcaatttctgatgtggat

SEQ ID NO: 6040649 - DNA, 25 bp, Homo sapien
ggaataccgacaacagcagcttccg

SEQ ID NO: 6040650 - DNA, 25 bp, Homo sapien
tctacgtaaattatctggtgtgatg

SEQ ID NO: 6040651 - DNA, 25 bp, Homo sapien
ctaccagcaccatcacctgtgaaat

SEQ ID NO: 6040652 - DNA, 25 bp, Homo sapien
tgatggcaggtacaacttctgggtt

SEQ ID NO: 6040653 - DNA, 25 bp, Homo sapien
ttggccaaagtagttaggtcaccta

SEQ ID NO: 6040654 - DNA, 25 bp, Homo sapien
gcaacctttcttagaactcttctca

SEQ ID NO: 6040655 - DNA, 25 bp, Homo sapien
aggaccaatctcacccctaacttgt

SEQ ID NO: 6040656 - DNA, 25 bp, Homo sapien
ttctgatgtggataatctatgaccg

SEQ ID NO: 6040657 - DNA, 25 bp, Homo sapien
acagcagcttccgagacgttttcgt

SEQ ID NO: 6040658 - DNA, 25 bp, Homo sapien
agtatccatgtaacggtcgtggtgg

SEQ ID NO: 6040659 - DNA, 25 bp, Homo sapien
acatttacaacgtcgtcaactctac

SEQ ID NO: 6040660 - DNA, 25 bp, Homo sapien
gtcgtggtggttccaaacagatcta

SEQ ID NO: 6040661 - DNA, 25 bp, Homo sapien
caattctctacgtaaattatctggt

SEQ ID NO: 6040662 - DNA, 25 bp, Homo sapien
gttttcgtgatttgagatagatgct

SEQ ID NO: 6040663 - DNA, 25 bp, Homo sapien
gccatggtgatttaacggcaaggac

SEQ ID NO: 6040664 - DNA, 25 bp, Homo sapien
cagtagcgttgttttgtagataacc

SEQ ID NO: 6040665 - DNA, 25 bp, Homo sapien
tcacctgtgaaatagtgaccaggat

SEQ ID NO: 6040666 - DNA, 25 bp, Homo sapien
ttcaatttctgatgtggataatcta

SEQ ID NO: 6040667 - DNA, 25 bp, Homo sapien
tgtggataatctatgaccggaaaca

SEQ ID NO: 6040668 - DNA, 25 bp, Homo sapien
ccgacaacagcagcttccgagacgt

SEQ ID NO: 6040669 - DNA, 25 bp, Homo sapien
tccaaacagatctagccattgatgg

SEQ ID NO: 6040670 - DNA, 25 bp, Homo sapien
ccaaagtagttaggtcacctagctg

SEQ ID NO: 6040671 - DNA, 25 bp, Homo sapien
ggtagatctctaactagaataatgg

SEQ ID NO: 6040672 - DNA, 25 bp, Homo sapien
actagaataatggtttttggtgagg

SEQ ID NO: 6040673 - DNA, 25 bp, Homo sapien
catgtaacggtcgtggtggttccaa

SEQ ID NO: 6040674 - DNA, 25 bp, Homo sapien
cgttgttttgtagataaccatcttt

SEQ ID NO: 6040675 - DNA, 25 bp, Homo sapien
gtcaattcatctggaataccgacaa

SEQ ID NO: 6040676 - DNA, 25 bp, Homo sapien
ctagccattgatggccatggtgatt

SEQ ID NO: 6040677 - DNA, 25 bp, Homo sapien
caggataaggtttcaagtaagtatc

SEQ ID NO: 6040678 - DNA, 25 bp, Homo sapien
tgagatagatgcttcaatttctgat

SEQ ID NO: 6040679 - DNA, 25 bp, Homo sapien
ctacagcagaaatgatggcaggtac

SEQ ID NO: 6040680 - DNA, 25 bp, Homo sapien
tagggaaacatatgcaacgacggtt

SEQ ID NO: 6040681 - DNA, 25 bp, Homo sapien
tgaaatagtgaccaggataaggttt

SEQ ID NO: 6040682 - DNA, 25 bp, Homo sapien
tgttcggcttcgttagaagcaacct

SEQ ID NO: 6040683 - DNA, 25 bp, Homo sapien
aacttgtaagatcaattctctacgt

SEQ ID NO: 6040684 - DNA, 25 bp, Homo sapien
tgaccggtcaattcatctggaatac

SEQ ID NO: 6040685 - DNA, 25 bp, Homo sapien
gaccttgttcttggtagatctctaa

SEQ ID NO: 6040686 - DNA, 25 bp, Homo sapien
tagaagaagacactatgagcacaac

SEQ ID NO: 6040687 - DNA, 25 bp, Homo sapien
acctcatcagaatagaaaaaatagt

SEQ ID NO: 6040688 - DNA, 25 bp, Homo sapien
gaaaccggagcaacctcatcagaat

SEQ ID NO: 6040689 - DNA, 25 bp, Homo sapien
cacacctgattcaaaaaccgtatta

SEQ ID NO: 6040690 - DNA, 25 bp, Homo sapien
taattagaagaatactggctgtttt

SEQ ID NO: 6040691 - DNA, 25 bp, Homo sapien
ccgaatgcggcaacatctgatgtga

SEQ ID NO: 6040692 - DNA, 25 bp, Homo sapien
gaaaaccaagactgattaccgtcaa

SEQ ID NO: 6040693 - DNA, 25 bp, Homo sapien
aaatagttcagggagctctagtatg

SEQ ID NO: 6040694 - DNA, 25 bp, Homo sapien
tggaaactttacaactgttaatgcg

SEQ ID NO: 6040695 - DNA, 25 bp, Homo sapien
tgatttgattcacgatcatgagatt

SEQ ID NO: 6040696 - DNA, 25 bp, Homo sapien
gcacaactgtcacatccacatccgt

SEQ ID NO: 6040697 - DNA, 25 bp, Homo sapien
gtgcaaggttcatacgccatcgcct

SEQ ID NO: 6040698 - DNA, 25 bp, Homo sapien
ctttacaactgttaatgcgatttat

SEQ ID NO: 6040699 - DNA, 25 bp, Homo sapien
gattcacgatcatgagattttatta

SEQ ID NO: 6040700 - DNA, 25 bp, Homo sapien
attgaacaaatcagagatttaggta

SEQ ID NO: 6040701 - DNA, 25 bp, Homo sapien
aactgttaatgcgatttatctctgc

SEQ ID NO: 6040702 - DNA, 25 bp, Homo sapien
tattcagcaaattgctattgatttg

SEQ ID NO: 6040703 - DNA, 25 bp, Homo sapien
cgttggaaccatgttaatgacctta

SEQ ID NO: 6040704 - DNA, 25 bp, Homo sapien
gaatgttaccattgacactttcgtt

SEQ ID NO: 6040705 - DNA, 25 bp, Homo sapien
gaccttattgaacaaatcagagatt

SEQ ID NO: 6040706 - DNA, 25 bp, Homo sapien
tactggctgttttgagggatgaagt

SEQ ID NO: 6040707 - DNA, 25 bp, Homo sapien
tagaaaaaatagttcagggagctct

SEQ ID NO: 6040708 - DNA, 25 bp, Homo sapien
caaatcagagatttaggtaatagtc

SEQ ID NO: 6040709 - DNA, 25 bp, Homo sapien
caaggatcttatagatgagataaaa

SEQ ID NO: 6040710 - DNA, 25 bp, Homo sapien
cgatttatctctgcagctcgttgga

SEQ ID NO: 6040711 - DNA, 25 bp, Homo sapien
tgacactttcgttgctaagttaaaa

SEQ ID NO: 6040712 - DNA, 25 bp, Homo sapien
tgcggcaacatctgatgtgaatgtt

SEQ ID NO: 6040713 - DNA, 25 bp, Homo sapien
tgagattttattaactcccacacct

SEQ ID NO: 6040714 - DNA, 25 bp, Homo sapien
tctatgtttaatttattacagaaac

SEQ ID NO: 6040715 - DNA, 25 bp, Homo sapien
gttaatgaccttattgaacaaatca

SEQ ID NO: 6040716 - DNA, 25 bp, Homo sapien
tagatgagataaaaaacattgatga

SEQ ID NO: 6040717 - DNA, 25 bp, Homo sapien
catccacatccgttgctgaaccttt

SEQ ID NO: 6040718 - DNA, 25 bp, Homo sapien
gagataaaaaacattgatgaaggta

SEQ ID NO: 6040719 - DNA, 25 bp, Homo sapien
aaaagctcatcctactgctttcagt

SEQ ID NO: 6040720 - DNA, 25 bp, Homo sapien
tgctgaacctttgatttcctctatg

SEQ ID NO: 6040721 - DNA, 25 bp, Homo sapien
ttgcggtaacgtaattagaagaata

SEQ ID NO: 6040722 - DNA, 25 bp, Homo sapien
accgtattaaaatttctgattactg

SEQ ID NO: 6040723 - DNA, 25 bp, Homo sapien
ggttcatacgccatcgccttggaaa

SEQ ID NO: 6040724 - DNA, 25 bp, Homo sapien
cattgatgaaggtattcagcaaatt

SEQ ID NO: 6040725 - DNA, 25 bp, Homo sapien
cgatcatgagattttattaactccc

SEQ ID NO: 6040726 - DNA, 25 bp, Homo sapien
tcagaatagaaaaaatagttcaggg

SEQ ID NO: 6040727 - DNA, 25 bp, Homo sapien
gaagaatactggctgttttgaggga

SEQ ID NO: 6040728 - DNA, 25 bp, Homo sapien
tgaaggtattcagcaaattgctatt

SEQ ID NO: 6040729 - DNA, 25 bp, Homo sapien
taatagtctagaaaaagctcatcct

SEQ ID NO: 6040730 - DNA, 25 bp, Homo sapien
ttcagggagctctagtatgaaaacc

SEQ ID NO: 6040731 - DNA, 25 bp, Homo sapien
gagctctagtatgaaaaccaagact

SEQ ID NO: 6040732 - DNA, 25 bp, Homo sapien
aagacactatgagcacaactgtcac

SEQ ID NO: 6040733 - DNA, 25 bp, Homo sapien
tgatgtgaatgttaccattgacact

SEQ ID NO: 6040734 - DNA, 25 bp, Homo sapien
ttacagaaaccggagcaacctcatc

SEQ ID NO: 6040735 - DNA, 25 bp, Homo sapien
ttaaaatttctgattactgctcgcg

SEQ ID NO: 6040736 - DNA, 25 bp, Homo sapien
aaaagaagacaagtgcaaggttcat

SEQ ID NO: 6040737 - DNA, 25 bp, Homo sapien
atgaagtagaagaagacactatgag

SEQ ID NO: 6040738 - DNA, 25 bp, Homo sapien
aagttaaaaagaagacaagtgcaag

SEQ ID NO: 6040739 - DNA, 25 bp, Homo sapien
ccgtcaagtagccattcagggtatc

SEQ ID NO: 6040740 - DNA, 25 bp, Homo sapien
tttctgattactgctcgcgaacgta

SEQ ID NO: 6040741 - DNA, 25 bp, Homo sapien
tcatcctactgctttcagttgcggt

SEQ ID NO: 6040742 - DNA, 25 bp, Homo sapien
gcaaattgctattgatttgattcac

SEQ ID NO: 6040743 - DNA, 25 bp, Homo sapien
aacatctgatgtgaatgttaccatt

SEQ ID NO: 6040744 - DNA, 25 bp, Homo sapien
taactcccacacctgattcaaaaac

SEQ ID NO: 6040745 - DNA, 25 bp, Homo sapien
taccattgacactttcgttgctaag

SEQ ID NO: 6040746 - DNA, 25 bp, Homo sapien
tgattaccgtcaagtagccattcag

SEQ ID NO: 6040747 - DNA, 25 bp, Homo sapien
tgctcgcgaacgtagtaatagaaca

SEQ ID NO: 6040748 - DNA, 25 bp, Homo sapien
tactgctttcagttgcggtaacgta

SEQ ID NO: 6040749 - DNA, 25 bp, Homo sapien
tctagaaaaagctcatcctactgct

SEQ ID NO: 6040750 - DNA, 25 bp, Homo sapien
tttcagttgcggtaacgtaattaga

SEQ ID NO: 6040751 - DNA, 25 bp, Homo sapien
tacgccatcgccttggaaactttac

SEQ ID NO: 6040752 - DNA, 25 bp, Homo sapien
attactgctcgcgaacgtagtaata

SEQ ID NO: 6040753 - DNA, 25 bp, Homo sapien
ctgtcacatccacatccgttgctga

SEQ ID NO: 6040754 - DNA, 25 bp, Homo sapien
gggtatcaaggatcttatagatgag

SEQ ID NO: 6040755 - DNA, 25 bp, Homo sapien
tgctattgatttgattcacgatcat

SEQ ID NO: 6040756 - DNA, 25 bp, Homo sapien
ggagcaacctcatcagaatagaaaa

SEQ ID NO: 6040757 - DNA, 25 bp, Homo sapien
agacaagtgcaaggttcatacgcca

SEQ ID NO: 6040758 - DNA, 25 bp, Homo sapien
agagatttaggtaatagtctagaaa

SEQ ID NO: 6040759 - DNA, 25 bp, Homo sapien
acctttgatttcctctatgtttaat

SEQ ID NO: 6040760 - DNA, 25 bp, Homo sapien
ctatgagcacaactgtcacatccac

SEQ ID NO: 6040761 - DNA, 25 bp, Homo sapien
gtaacgtaattagaagaatactggc

SEQ ID NO: 6040762 - DNA, 25 bp, Homo sapien
tcttatagatgagataaaaaacatt

SEQ ID NO: 6040763 - DNA, 25 bp, Homo sapien
ttaatgcgatttatctctgcagctc

SEQ ID NO: 6040764 - DNA, 25 bp, Homo sapien
aaaaacattgatgaaggtattcagc

SEQ ID NO: 6040765 - DNA, 25 bp, Homo sapien
tttattaactcccacacctgattca

SEQ ID NO: 6040766 - DNA, 25 bp, Homo sapien
ctgttttgagggatgaagtagaaga

SEQ ID NO: 6040767 - DNA, 25 bp, Homo sapien
atctctgcagctcgttggaaccatg

SEQ ID NO: 6040768 - DNA, 25 bp, Homo sapien
catccgttgctgaacctttgatttc

SEQ ID NO: 6040769 - DNA, 25 bp, Homo sapien
caagactgattaccgtcaagtagcc

SEQ ID NO: 6040770 - DNA, 25 bp, Homo sapien
cattcagggtatcaaggatcttata

SEQ ID NO: 6040771 - DNA, 25 bp, Homo sapien
gcagctcgttggaaccatgttaatg

SEQ ID NO: 6040772 - DNA, 25 bp, Homo sapien
gatttcctctatgtttaatttatta

SEQ ID NO: 6040773 - DNA, 25 bp, Homo sapien
taatttattacagaaaccggagcaa

SEQ ID NO: 6040774 - DNA, 25 bp, Homo sapien
atcgccttggaaactttacaactgt

SEQ ID NO: 6040775 - DNA, 25 bp, Homo sapien
tgagggatgaagtagaagaagacac

SEQ ID NO: 6040776 - DNA, 25 bp, Homo sapien
ttaggtaatagtctagaaaaagctc

SEQ ID NO: 6040777 - DNA, 25 bp, Homo sapien
agtagccattcagggtatcaaggat

SEQ ID NO: 6040778 - DNA, 25 bp, Homo sapien
aaccatgttaatgaccttattgaac

SEQ ID NO: 6040779 - DNA, 25 bp, Homo sapien
tagtatgaaaaccaagactgattac

SEQ ID NO: 6040780 - DNA, 25 bp, Homo sapien
tcgttgctaagttaaaaagaagaca

SEQ ID NO: 6040781 - DNA, 25 bp, Homo sapien
tttctatgttgtgctgtgctaattt

SEQ ID NO: 6040782 - DNA, 25 bp, Homo sapien
cgaacggatatagaggagaaagctt

SEQ ID NO: 6040783 - DNA, 25 bp, Homo sapien
ccaccaaattcgacaaacttctcta

SEQ ID NO: 6040784 - DNA, 25 bp, Homo sapien
tacccacacgggacattaaagcaaa

SEQ ID NO: 6040785 - DNA, 25 bp, Homo sapien
tttcaggcggaacataatcggtaat

SEQ ID NO: 6040786 - DNA, 25 bp, Homo sapien
attaaagcaaaaacagctgagtctg

SEQ ID NO: 6040787 - DNA, 25 bp, Homo sapien
atctaatctttttcttggatccatt

SEQ ID NO: 6040788 - DNA, 25 bp, Homo sapien
caacagcaaatacaggggttctaaa

SEQ ID NO: 6040789 - DNA, 25 bp, Homo sapien
cccaccgacgtttgtaatgtagata

SEQ ID NO: 6040790 - DNA, 25 bp, Homo sapien
tctaaattctcgggcgcattcacaa

SEQ ID NO: 6040791 - DNA, 25 bp, Homo sapien
cttggattgaacccaccgacgtttg

SEQ ID NO: 6040792 - DNA, 25 bp, Homo sapien
tgttgtgctgtgctaattttttggc

SEQ ID NO: 6040793 - DNA, 25 bp, Homo sapien
ctaattttttggcaaactcatgtgc

SEQ ID NO: 6040794 - DNA, 25 bp, Homo sapien
ggactactagggtttctatgttgtg

SEQ ID NO: 6040795 - DNA, 25 bp, Homo sapien
gcattcttggtgttattagggaacc

SEQ ID NO: 6040796 - DNA, 25 bp, Homo sapien
caaattcgacaaacttctctacgtc

SEQ ID NO: 6040797 - DNA, 25 bp, Homo sapien
ggtgtgggagttaataaaatctcat

SEQ ID NO: 6040798 - DNA, 25 bp, Homo sapien
tgattaactgtatctaatctttttc

SEQ ID NO: 6040799 - DNA, 25 bp, Homo sapien
gtttttgaatcaggtgtgggagtta

SEQ ID NO: 6040800 - DNA, 25 bp, Homo sapien
tattactacgttcgcgagcagtaat

SEQ ID NO: 6040801 - DNA, 25 bp, Homo sapien
gagatagtccccccattgacaaaaa

SEQ ID NO: 6040802 - DNA, 25 bp, Homo sapien
ctacgtcgaacggatatagaggaga

SEQ ID NO: 6040803 - DNA, 25 bp, Homo sapien
tacgttcgcgagcagtaatcagaaa

SEQ ID NO: 6040804 - DNA, 25 bp, Homo sapien
tttttggcaaactcatgtgcattct

SEQ ID NO: 6040805 - DNA, 25 bp, Homo sapien
gaggagaaagcttatacaaacctgc

SEQ ID NO: 6040806 - DNA, 25 bp, Homo sapien
tctttttcttggatccattctaggt

SEQ ID NO: 6040807 - DNA, 25 bp, Homo sapien
ggagttaataaaatctcatgatcgt

SEQ ID NO: 6040808 - DNA, 25 bp, Homo sapien
ctagggtttctatgttgtgctgtgc

SEQ ID NO: 6040809 - DNA, 25 bp, Homo sapien
cgggacattaaagcaaaaacagctg

SEQ ID NO: 6040810 - DNA, 25 bp, Homo sapien
atgttctattactacgttcgcgagc

SEQ ID NO: 6040811 - DNA, 25 bp, Homo sapien
aacggatgatacacctgaatttgac

SEQ ID NO: 6040812 - DNA, 25 bp, Homo sapien
ggtaatttgattaactgtatctaat

SEQ ID NO: 6040813 - DNA, 25 bp, Homo sapien
gtaatgtagatatcaatattttcag

SEQ ID NO: 6040814 - DNA, 25 bp, Homo sapien
caaaaacggctttagtgccgataat

SEQ ID NO: 6040815 - DNA, 25 bp, Homo sapien
acagctgagtctgggactactaggg

SEQ ID NO: 6040816 - DNA, 25 bp, Homo sapien
cgtaaatgttctattactacgttcg

SEQ ID NO: 6040817 - DNA, 25 bp, Homo sapien
aacctgcaacagcaaatacaggggt

SEQ ID NO: 6040818 - DNA, 25 bp, Homo sapien
tcttggatccattctaggtaatata

SEQ ID NO: 6040819 - DNA, 25 bp, Homo sapien
cacgcaatacgatatataaaacttg

SEQ ID NO: 6040820 - DNA, 25 bp, Homo sapien
caaatacaggggttctaaattctcg

SEQ ID NO: 6040821 - DNA, 25 bp, Homo sapien
atccattctaggtaatatacgttgg

SEQ ID NO: 6040822 - DNA, 25 bp, Homo sapien
ggcgcattcacaaacggatgataca

SEQ ID NO: 6040823 - DNA, 25 bp, Homo sapien
gatatagaggagaaagcttatacaa

SEQ ID NO: 6040824 - DNA, 25 bp, Homo sapien
aataaaatctcatgatcgtgaatca

SEQ ID NO: 6040825 - DNA, 25 bp, Homo sapien
tgatacacctgaatttgacgagata

SEQ ID NO: 6040826 - DNA, 25 bp, Homo sapien
gacgtttgtaatgtagatatcaata

SEQ ID NO: 6040827 - DNA, 25 bp, Homo sapien
cataatcggtaatttgattaactgt

SEQ ID NO: 6040828 - DNA, 25 bp, Homo sapien
atctcatgatcgtgaatcaaatcaa

SEQ ID NO: 6040829 - DNA, 25 bp, Homo sapien
ttctcgggcgcattcacaaacggat

SEQ ID NO: 6040830 - DNA, 25 bp, Homo sapien
tcaatattttcaggcggaacataat

SEQ ID NO: 6040831 - DNA, 25 bp, Homo sapien
tcatgtgcattcttggtgttattag

SEQ ID NO: 6040832 - DNA, 25 bp, Homo sapien
tagatatcaatattttcaggcggaa

SEQ ID NO: 6040833 - DNA, 25 bp, Homo sapien
agtctgggactactagggtttctat

SEQ ID NO: 6040834 - DNA, 25 bp, Homo sapien
tgaatcaggtgtgggagttaataaa

SEQ ID NO: 6040835 - DNA, 25 bp, Homo sapien
atttgcttgtaattatcccacgcaa

SEQ ID NO: 6040836 - DNA, 25 bp, Homo sapien
cgcgagcagtaatcagaaattttaa

SEQ ID NO: 6040837 - DNA, 25 bp, Homo sapien
tatacaaacctgcaacagcaaatac

SEQ ID NO: 6040838 - DNA, 25 bp, Homo sapien
acttctctacgtcgaacggatatag

SEQ ID NO: 6040839 - DNA, 25 bp, Homo sapien
tctaggtaatatacgttgggaccca

SEQ ID NO: 6040840 - DNA, 25 bp, Homo sapien
gcggaacataatcggtaatttgatt

SEQ ID NO: 6040841 - DNA, 25 bp, Homo sapien
gctgtgctaattttttggcaaactc

SEQ ID NO: 6040842 - DNA, 25 bp, Homo sapien
acctgaatttgacgagatagtcccc

SEQ ID NO: 6040843 - DNA, 25 bp, Homo sapien
cagtaatcagaaattttaatacggt

SEQ ID NO: 6040844 - DNA, 25 bp, Homo sapien
aggggttctaaattctcgggcgcat

SEQ ID NO: 6040845 - DNA, 25 bp, Homo sapien
ttcacaaacggatgatacacctgaa

SEQ ID NO: 6040846 - DNA, 25 bp, Homo sapien
gcaaactcatgtgcattcttggtgt

SEQ ID NO: 6040847 - DNA, 25 bp, Homo sapien
ttgtaattatcccacgcaatacgat

SEQ ID NO: 6040848 - DNA, 25 bp, Homo sapien
tatataaaacttggattgaacccac

SEQ ID NO: 6040849 - DNA, 25 bp, Homo sapien
cattgacaaaaacggctttagtgcc

SEQ ID NO: 6040850 - DNA, 25 bp, Homo sapien
tgatcgtgaatcaaatcaatagcaa

SEQ ID NO: 6040851 - DNA, 25 bp, Homo sapien
aactgtatctaatctttttcttgga

SEQ ID NO: 6040852 - DNA, 25 bp, Homo sapien
tttgacgagatagtccccccattga

SEQ ID NO: 6040853 - DNA, 25 bp, Homo sapien
tgccgataataaccttacccacacg

SEQ ID NO: 6040854 - DNA, 25 bp, Homo sapien
ttatcccacgcaatacgatatataa

SEQ ID NO: 6040855 - DNA, 25 bp, Homo sapien
aaagcttatacaaacctgcaacagc

SEQ ID NO: 6040856 - DNA, 25 bp, Homo sapien
gcaaaaacagctgagtctgggacta

SEQ ID NO: 6040857 - DNA, 25 bp, Homo sapien
gctttagtgccgataataaccttac

SEQ ID NO: 6040858 - DNA, 25 bp, Homo sapien
attgaacccaccgacgtttgtaatg

SEQ ID NO: 6040859 - DNA, 25 bp, Homo sapien
atacgatatataaaacttggattga

SEQ ID NO: 6040860 - DNA, 25 bp, Homo sapien
aatacggtttttgaatcaggtgtgg

SEQ ID NO: 6040861 - DNA, 25 bp, Homo sapien
tgaatcaaatcaatagcaatttgct

SEQ ID NO: 6040862 - DNA, 25 bp, Homo sapien
cgacaaacttctctacgtcgaacgg

SEQ ID NO: 6040863 - DNA, 25 bp, Homo sapien
atgttgccgtggaatacggtaagaa

SEQ ID NO: 6040864 - DNA, 25 bp, Homo sapien
ccactgtaatttgactctattattc

SEQ ID NO: 6040865 - DNA, 25 bp, Homo sapien
tattaaaattgcttccacttgggaa

SEQ ID NO: 6040866 - DNA, 25 bp, Homo sapien
ttccacttgggaaggtattcaagct

SEQ ID NO: 6040867 - DNA, 25 bp, Homo sapien
gccaagttgatcgatgttgccgtgg

SEQ ID NO: 6040868 - DNA, 25 bp, Homo sapien
gtttcaacctcaagactccacaact

SEQ ID NO: 6040869 - DNA, 25 bp, Homo sapien
agactccacaactaacccatcattg

SEQ ID NO: 6040870 - DNA, 25 bp, Homo sapien
taatttgactctattattctccttc

SEQ ID NO: 6040871 - DNA, 25 bp, Homo sapien
agctaccattgaaaaggctagacat

SEQ ID NO: 6040872 - DNA, 25 bp, Homo sapien
tgccaaagaattggaagaaaaggac

SEQ ID NO: 6040873 - DNA, 25 bp, Homo sapien
agcactggtaaagattacaagggtg

SEQ ID NO: 6040874 - DNA, 25 bp, Homo sapien
tgccaagtttcaacctcaagactcc

SEQ ID NO: 6040875 - DNA, 25 bp, Homo sapien
tagacatatcattaaattgtttgaa

SEQ ID NO: 6040876 - DNA, 25 bp, Homo sapien
cattgaaaaggctagacatatcatt

SEQ ID NO: 6040877 - DNA, 25 bp, Homo sapien
aattgcttccacttgggaaggtatt

SEQ ID NO: 6040878 - DNA, 25 bp, Homo sapien
aaagattgttccaggcagagtctcc

SEQ ID NO: 6040879 - DNA, 25 bp, Homo sapien
tgccaagcaaccaacttacgccaag

SEQ ID NO: 6040880 - DNA, 25 bp, Homo sapien
tttgatttccccatttgttggtaga

SEQ ID NO: 6040881 - DNA, 25 bp, Homo sapien
aacaagaaggtgtctccaaggaaag

SEQ ID NO: 6040882 - DNA, 25 bp, Homo sapien
agaattctagactggtacaaatcca

SEQ ID NO: 6040883 - DNA, 25 bp, Homo sapien
agtcgaattcggtaaggagatctta

SEQ ID NO: 6040884 - DNA, 25 bp, Homo sapien
ccgtggaatacggtaagaagcatgg

SEQ ID NO: 6040885 - DNA, 25 bp, Homo sapien
tgctgtggacagattgttagtcgaa

SEQ ID NO: 6040886 - DNA, 25 bp, Homo sapien
tggtgatttcggctctattgccaag

SEQ ID NO: 6040887 - DNA, 25 bp, Homo sapien
tggaagaaaaggacggtatccactg

SEQ ID NO: 6040888 - DNA, 25 bp, Homo sapien
gcctccggcactgtcgttgttgccg

SEQ ID NO: 6040889 - DNA, 25 bp, Homo sapien
ttgaaagcctccggcactgtcgttg

SEQ ID NO: 6040890 - DNA, 25 bp, Homo sapien
tgttgccgacactggtgatttcggc

SEQ ID NO: 6040891 - DNA, 25 bp, Homo sapien
attgttagtcgaattcggtaaggag

SEQ ID NO: 6040892 - DNA, 25 bp, Homo sapien
tctccaaggaaagagtccttattaa

SEQ ID NO: 6040893 - DNA, 25 bp, Homo sapien
aaaggacggtatccactgtaatttg

SEQ ID NO: 6040894 - DNA, 25 bp, Homo sapien
attattctccttcgttcaagcagtt

SEQ ID NO: 6040895 - DNA, 25 bp, Homo sapien
ccatttgttggtagaattctagact

SEQ ID NO: 6040896 - DNA, 25 bp, Homo sapien
ttccccatttgttggtagaattcta

SEQ ID NO: 6040897 - DNA, 25 bp, Homo sapien
tatcattaaattgtttgaacaagaa

SEQ ID NO: 6040898 - DNA, 25 bp, Homo sapien
accaccgaagaacaagtcgaaaatg

SEQ ID NO: 6040899 - DNA, 25 bp, Homo sapien
tgctagattgtcttttgacactcaa

SEQ ID NO: 6040900 - DNA, 25 bp, Homo sapien
agttgatgctagattgtcttttgac

SEQ ID NO: 6040901 - DNA, 25 bp, Homo sapien
atcattgatcttggctgctgccaag

SEQ ID NO: 6040902 - DNA, 25 bp, Homo sapien
aatacggtaagaagcatggtaagac

SEQ ID NO: 6040903 - DNA, 25 bp, Homo sapien
tgtttgaacaagaaggtgtctccaa

SEQ ID NO: 6040904 - DNA, 25 bp, Homo sapien
aaatccagcactggtaaagattaca

SEQ ID NO: 6040905 - DNA, 25 bp, Homo sapien
gaacaattgaaagcctccggcactg

SEQ ID NO: 6040906 - DNA, 25 bp, Homo sapien
gatcttaaagattgttccaggcaga

SEQ ID NO: 6040907 - DNA, 25 bp, Homo sapien
tgcctgtgccgaggcccaagttact

SEQ ID NO: 6040908 - DNA, 25 bp, Homo sapien
caagttactttgatttccccatttg

SEQ ID NO: 6040909 - DNA, 25 bp, Homo sapien
tcaagctgccaaagaattggaagaa

SEQ ID NO: 6040910 - DNA, 25 bp, Homo sapien
ttgatcgatgttgccgtggaatacg

SEQ ID NO: 6040911 - DNA, 25 bp, Homo sapien
cgacactggtgatttcggctctatt

SEQ ID NO: 6040912 - DNA, 25 bp, Homo sapien
gtcgttgttgccgacactggtgatt

SEQ ID NO: 6040913 - DNA, 25 bp, Homo sapien
cggtatccactgtaatttgactcta

SEQ ID NO: 6040914 - DNA, 25 bp, Homo sapien
ctctattgccaagtttcaacctcaa

SEQ ID NO: 6040915 - DNA, 25 bp, Homo sapien
caccgaagttgatgctagattgtct

SEQ ID NO: 6040916 - DNA, 25 bp, Homo sapien
taaggagatcttaaagattgttcca

SEQ ID NO: 6040917 - DNA, 25 bp, Homo sapien
agtctccaccgaagttgatgctaga

SEQ ID NO: 6040918 - DNA, 25 bp, Homo sapien
attcggtaaggagatcttaaagatt

SEQ ID NO: 6040919 - DNA, 25 bp, Homo sapien
cgaaaatgctgtggacagattgtta

SEQ ID NO: 6040920 - DNA, 25 bp, Homo sapien
agcagttgcctgtgccgaggcccaa

SEQ ID NO: 6040921 - DNA, 25 bp, Homo sapien
tgttccaggcagagtctccaccgaa

SEQ ID NO: 6040922 - DNA, 25 bp, Homo sapien
agcatggtaagaccaccgaagaaca

SEQ ID NO: 6040923 - DNA, 25 bp, Homo sapien
tggtacaaatccagcactggtaaag

SEQ ID NO: 6040924 - DNA, 25 bp, Homo sapien
ggcactgtcgttgttgccgacactg

SEQ ID NO: 6040925 - DNA, 25 bp, Homo sapien
gactctattattctccttcgttcaa

SEQ ID NO: 6040926 - DNA, 25 bp, Homo sapien
acaagtcgaaaatgctgtggacaga

SEQ ID NO: 6040927 - DNA, 25 bp, Homo sapien
ctccttcgttcaagcagttgcctgt

SEQ ID NO: 6040928 - DNA, 25 bp, Homo sapien
aaggtgtctccaaggaaagagtcct

SEQ ID NO: 6040929 - DNA, 25 bp, Homo sapien
taaattgtttgaacaagaaggtgtc

SEQ ID NO: 6040930 - DNA, 25 bp, Homo sapien
ggctgctgccaagcaaccaacttac

SEQ ID NO: 6040931 - DNA, 25 bp, Homo sapien
ttgggaaggtattcaagctgccaaa

SEQ ID NO: 6040932 - DNA, 25 bp, Homo sapien
cgaagaacaagtcgaaaatgctgtg

SEQ ID NO: 6040933 - DNA, 25 bp, Homo sapien
tgccgaggcccaagttactttgatt

SEQ ID NO: 6040934 - DNA, 25 bp, Homo sapien
agtccttattaaaattgcttccact

SEQ ID NO: 6040935 - DNA, 25 bp, Homo sapien
gtaagaagcatggtaagaccaccga

SEQ ID NO: 6040936 - DNA, 25 bp, Homo sapien
gttggtagaattctagactggtaca

SEQ ID NO: 6040937 - DNA, 25 bp, Homo sapien
acttacgccaagttgatcgatgttg

SEQ ID NO: 6040938 - DNA, 25 bp, Homo sapien
tttcggctctattgccaagtttcaa

SEQ ID NO: 6040939 - DNA, 25 bp, Homo sapien
aggtattcaagctgccaaagaattg

SEQ ID NO: 6040940 - DNA, 25 bp, Homo sapien
ttttgacactcaagctaccattgaa

SEQ ID NO: 6040941 - DNA, 25 bp, Homo sapien
ggacagattgttagtcgaattcggt

SEQ ID NO: 6040942 - DNA, 25 bp, Homo sapien
gatcttggctgctgccaagcaacca

SEQ ID NO: 6040943 - DNA, 25 bp, Homo sapien
ctagactggtacaaatccagcactg

SEQ ID NO: 6040944 - DNA, 25 bp, Homo sapien
cgttcaagcagttgcctgtgccgag

SEQ ID NO: 6040945 - DNA, 25 bp, Homo sapien
gcaaccaacttacgccaagttgatc

SEQ ID NO: 6040946 - DNA, 25 bp, Homo sapien
aacaactctctagaacaattgaaag

SEQ ID NO: 6040947 - DNA, 25 bp, Homo sapien
cacaactaacccatcattgatcttg

SEQ ID NO: 6040948 - DNA, 25 bp, Homo sapien
gttgctaacaactctctagaacaat

SEQ ID NO: 6040949 - DNA, 25 bp, Homo sapien
tctctagaacaattgaaagcctccg

SEQ ID NO: 6040950 - DNA, 25 bp, Homo sapien
acctcaagactccacaactaaccca

SEQ ID NO: 6040951 - DNA, 25 bp, Homo sapien
aggcagagtctccaccgaagttgat

SEQ ID NO: 6040952 - DNA, 25 bp, Homo sapien
taacccatcattgatcttggctgct

SEQ ID NO: 6040953 - DNA, 25 bp, Homo sapien
aaaggctagacatatcattaaattg

SEQ ID NO: 6040954 - DNA, 25 bp, Homo sapien
attgtcttttgacactcaagctacc

SEQ ID NO: 6040955 - DNA, 25 bp, Homo sapien
gtaagaccaccgaagaacaagtcga

SEQ ID NO: 6040956 - DNA, 25 bp, Homo sapien
cactcaagctaccattgaaaaggct

SEQ ID NO: 6040957 - DNA, 25 bp, Homo sapien
cttgggaaaggttcagtactgttca

SEQ ID NO: 6040958 - DNA, 25 bp, Homo sapien
tccttcttagcggagacagggtcca

SEQ ID NO: 6040959 - DNA, 25 bp, Homo sapien
ttgtccaataaagctggagaaattg

SEQ ID NO: 6040960 - DNA, 25 bp, Homo sapien
attttcttgacggaaataacacctg

SEQ ID NO: 6040961 - DNA, 25 bp, Homo sapien
agtcgaatctgaatttagattcgtc

SEQ ID NO: 6040962 - DNA, 25 bp, Homo sapien
cacctgggtcggcttcacccttgta

SEQ ID NO: 6040963 - DNA, 25 bp, Homo sapien
ccttgtaatctttaccagtgctgga

SEQ ID NO: 6040964 - DNA, 25 bp, Homo sapien
ttgaacgaaggagaataatagagtc

SEQ ID NO: 6040965 - DNA, 25 bp, Homo sapien
caaatggggaaatcaaagtaacttg

SEQ ID NO: 6040966 - DNA, 25 bp, Homo sapien
taacaatatcggcagagaattttct

SEQ ID NO: 6040967 - DNA, 25 bp, Homo sapien
ctgataccttcggacaatttttcag

SEQ ID NO: 6040968 - DNA, 25 bp, Homo sapien
gctggagaaattgttagatagtcaa

SEQ ID NO: 6040969 - DNA, 25 bp, Homo sapien
ataaggactctttccttggagacac

SEQ ID NO: 6040970 - DNA, 25 bp, Homo sapien
cttgggcctcggcacaggcaactgc

SEQ ID NO: 6040971 - DNA, 25 bp, Homo sapien
gagacagggtccaaaactcttggga

SEQ ID NO: 6040972 - DNA, 25 bp, Homo sapien
caaattacagtggataccgtccttt

SEQ ID NO: 6040973 - DNA, 25 bp, Homo sapien
cctcggcacaggcaactgcttgaac

SEQ ID NO: 6040974 - DNA, 25 bp, Homo sapien
cattcaagtcgaatctgaatttaga

SEQ ID NO: 6040975 - DNA, 25 bp, Homo sapien
gtcggcttcacccttgtaatcttta

SEQ ID NO: 6040976 - DNA, 25 bp, Homo sapien
gaaataacacctgggtcggcttcac

SEQ ID NO: 6040977 - DNA, 25 bp, Homo sapien
agtaacttgggcctcggcacaggca

SEQ ID NO: 6040978 - DNA, 25 bp, Homo sapien
atctgaatttagattcgtcgctgat

SEQ ID NO: 6040979 - DNA, 25 bp, Homo sapien
cagtggataccgtccttttcttcca

SEQ ID NO: 6040980 - DNA, 25 bp, Homo sapien
aatagtcttgtaaccgtacttcttg

SEQ ID NO: 6040981 - DNA, 25 bp, Homo sapien
tcagtactgttcatcaacttgtcca

SEQ ID NO: 6040982 - DNA, 25 bp, Homo sapien
gaaagaagcacccataacaatagtc

SEQ ID NO: 6040983 - DNA, 25 bp, Homo sapien
tagagtcaaattacagtggataccg

SEQ ID NO: 6040984 - DNA, 25 bp, Homo sapien
cgtacttcttgtagtagttgtagat

SEQ ID NO: 6040985 - DNA, 25 bp, Homo sapien
tggaagcaattttaataaggactct

SEQ ID NO: 6040986 - DNA, 25 bp, Homo sapien
aattctttggcagcttgaatacctt

SEQ ID NO: 6040987 - DNA, 25 bp, Homo sapien
tagtagttgtagattttcttgacgg

SEQ ID NO: 6040988 - DNA, 25 bp, Homo sapien
ggacaatttttcagtggccatagcg

SEQ ID NO: 6040989 - DNA, 25 bp, Homo sapien
aatcaaagtaacttgggcctcggca

SEQ ID NO: 6040990 - DNA, 25 bp, Homo sapien
actctttccttggagacaccttctt

SEQ ID NO: 6040991 - DNA, 25 bp, Homo sapien
aactcttgggaaaggttcagtactg

SEQ ID NO: 6040992 - DNA, 25 bp, Homo sapien
attcgtcgctgatgtaagaaatctt

SEQ ID NO: 6040993 - DNA, 25 bp, Homo sapien
tttttcagtggccatagcgtcttca

SEQ ID NO: 6040994 - DNA, 25 bp, Homo sapien
ctaccaacaaatggggaaatcaaag

SEQ ID NO: 6040995 - DNA, 25 bp, Homo sapien
taccagtgctggatttgtaccagtc

SEQ ID NO: 6040996 - DNA, 25 bp, Homo sapien
cttgtaaccgtacttcttgtagtag

SEQ ID NO: 6040997 - DNA, 25 bp, Homo sapien
tccttttcttccaattctttggcag

SEQ ID NO: 6040998 - DNA, 25 bp, Homo sapien
agtggccatagcgtcttcattcaag

SEQ ID NO: 6040999 - DNA, 25 bp, Homo sapien
ccggcttccttcttagcggagacag

SEQ ID NO: 6041000 - DNA, 25 bp, Homo sapien
ttagcggagacagggtccaaaactc

SEQ ID NO: 6041001 - DNA, 25 bp, Homo sapien
ccagtctagaattctaccaacaaat

SEQ ID NO: 6041002 - DNA, 25 bp, Homo sapien
aactgcttgaacgaaggagaataat

SEQ ID NO: 6041003 - DNA, 25 bp, Homo sapien
gaaatcttgtcgccggcttccttct

SEQ ID NO: 6041004 - DNA, 25 bp, Homo sapien
aatctttaccagtgctggatttgta

SEQ ID NO: 6041005 - DNA, 25 bp, Homo sapien
atagagtaacaatatcggcagagaa

SEQ ID NO: 6041006 - DNA, 25 bp, Homo sapien
atcaacttgtccaataaagctggag

SEQ ID NO: 6041007 - DNA, 25 bp, Homo sapien
tagtcaacaccagccaagtttttga

SEQ ID NO: 6041008 - DNA, 25 bp, Homo sapien
ctgttcatcaacttgtccaataaag

SEQ ID NO: 6041009 - DNA, 25 bp, Homo sapien
tagaattctaccaacaaatggggaa

SEQ ID NO: 6041010 - DNA, 25 bp, Homo sapien
atttagattcgtcgctgatgtaaga

SEQ ID NO: 6041011 - DNA, 25 bp, Homo sapien
ttggcagcttgaataccttcccaag

SEQ ID NO: 6041012 - DNA, 25 bp, Homo sapien
tcagtgcttctgaaagaagcaccca

SEQ ID NO: 6041013 - DNA, 25 bp, Homo sapien
caccagccaagtttttgatttcgtc

SEQ ID NO: 6041014 - DNA, 25 bp, Homo sapien
ataccttcccaagtggaagcaattt

SEQ ID NO: 6041015 - DNA, 25 bp, Homo sapien
gaaattgttagatagtcaacaccag

SEQ ID NO: 6041016 - DNA, 25 bp, Homo sapien
aataaagctggagaaattgttagat

SEQ ID NO: 6041017 - DNA, 25 bp, Homo sapien
cttcacccttgtaatctttaccagt

SEQ ID NO: 6041018 - DNA, 25 bp, Homo sapien
tttgtaccagtctagaattctacca

SEQ ID NO: 6041019 - DNA, 25 bp, Homo sapien
tgtaagaaatcttgtcgccggcttc

SEQ ID NO: 6041020 - DNA, 25 bp, Homo sapien
gaataatagagtcaaattacagtgg

SEQ ID NO: 6041021 - DNA, 25 bp, Homo sapien
gagacaccttcttgttcaaacaatt

SEQ ID NO: 6041022 - DNA, 25 bp, Homo sapien
ccttcttgttcaaacaatttaatga

SEQ ID NO: 6041023 - DNA, 25 bp, Homo sapien
tccttggagacaccttcttgttcaa

SEQ ID NO: 6041024 - DNA, 25 bp, Homo sapien
agcacccataacaatagtcttgtaa

SEQ ID NO: 6041025 - DNA, 25 bp, Homo sapien
gttagatagtcaacaccagccaagt

SEQ ID NO: 6041026 - DNA, 25 bp, Homo sapien
tcttgtagtagttgtagattttctt

SEQ ID NO: 6041027 - DNA, 25 bp, Homo sapien
ccttcggacaatttttcagtggcca

SEQ ID NO: 6041028 - DNA, 25 bp, Homo sapien
gaaggagaataatagagtcaaatta

SEQ ID NO: 6041029 - DNA, 25 bp, Homo sapien
cgtcttcattcaagtcgaatctgaa

SEQ ID NO: 6041030 - DNA, 25 bp, Homo sapien
aattttctgataccttcggacaatt

SEQ ID NO: 6041031 - DNA, 25 bp, Homo sapien
gctggatttgtaccagtctagaatt

SEQ ID NO: 6041032 - DNA, 25 bp, Homo sapien
tgtcgccggcttccttcttagcgga

SEQ ID NO: 6041033 - DNA, 25 bp, Homo sapien
gcagagaattttctgataccttcgg

SEQ ID NO: 6041034 - DNA, 25 bp, Homo sapien
gcttgaataccttcccaagtggaag

SEQ ID NO: 6041035 - DNA, 25 bp, Homo sapien
cataacaatagtcttgtaaccgtac

SEQ ID NO: 6041036 - DNA, 25 bp, Homo sapien
ttgtagattttcttgacggaaataa

SEQ ID NO: 6041037 - DNA, 25 bp, Homo sapien
aaaggttcagtactgttcatcaact

SEQ ID NO: 6041038 - DNA, 25 bp, Homo sapien
atttcgtcagtgcttctgaaagaag

SEQ ID NO: 6041039 - DNA, 25 bp, Homo sapien
gccaagtttttgatttcgtcagtgc

SEQ ID NO: 6041040 - DNA, 25 bp, Homo sapien
cgctgatgtaagaaatcttgtcgcc

SEQ ID NO: 6041041 - DNA, 25 bp, Homo sapien
cccaagtggaagcaattttaataag

SEQ ID NO: 6041042 - DNA, 25 bp, Homo sapien
cttctgaaagaagcacccataacaa

SEQ ID NO: 6041043 - DNA, 25 bp, Homo sapien
atatcggcagagaattttctgatac

SEQ ID NO: 6041044 - DNA, 25 bp, Homo sapien
cacaggcaactgcttgaacgaagga

SEQ ID NO: 6041045 - DNA, 25 bp, Homo sapien
tcttccaattctttggcagcttgaa

SEQ ID NO: 6041046 - DNA, 25 bp, Homo sapien
ccatagcgtcttcattcaagtcgaa

SEQ ID NO: 6041047 - DNA, 25 bp, Homo sapien
tttttgatttcgtcagtgcttctga

SEQ ID NO: 6041048 - DNA, 25 bp, Homo sapien
tgacggaaataacacctgggtcggc

SEQ ID NO: 6041049 - DNA, 25 bp, Homo sapien
ggttagcaggcgcttccaacttcac

SEQ ID NO: 6041050 - DNA, 25 bp, Homo sapien
cacattagtactgaatgccttgcaa

SEQ ID NO: 6041051 - DNA, 25 bp, Homo sapien
gttcaaatttgtatctcacaccatc

SEQ ID NO: 6041052 - DNA, 25 bp, Homo sapien
ttagacacaaacttgggcgaattca

SEQ ID NO: 6041053 - DNA, 25 bp, Homo sapien
atcaggtactataaacgacgtactg

SEQ ID NO: 6041054 - DNA, 25 bp, Homo sapien
gtgatcctattgatggctcctcaaa

SEQ ID NO: 6041055 - DNA, 25 bp, Homo sapien
tattgacattgggtgatggagttga

SEQ ID NO: 6041056 - DNA, 25 bp, Homo sapien
cgcttgctatgccatgtacggatcc

SEQ ID NO: 6041057 - DNA, 25 bp, Homo sapien
cttgcaattcgcgttcaaatttgta

SEQ ID NO: 6041058 - DNA, 25 bp, Homo sapien
acaaacttgggcgaattcatcttga

SEQ ID NO: 6041059 - DNA, 25 bp, Homo sapien
gtttgataccgatatcatcactctt

SEQ ID NO: 6041060 - DNA, 25 bp, Homo sapien
aaacgacgtactgagatgtggtaaa

SEQ ID NO: 6041061 - DNA, 25 bp, Homo sapien
tgctgaattggttaacttggttggg

SEQ ID NO: 6041062 - DNA, 25 bp, Homo sapien
gctaccagactcatcaggtactata

SEQ ID NO: 6041063 - DNA, 25 bp, Homo sapien
atggctcctcaaatttggacgccgg

SEQ ID NO: 6041064 - DNA, 25 bp, Homo sapien
tctacgcatctagtattgacattgg

SEQ ID NO: 6041065 - DNA, 25 bp, Homo sapien
gccatgagggctagtgggatcatca

SEQ ID NO: 6041066 - DNA, 25 bp, Homo sapien
tttcccacaaacacgggctcatacg

SEQ ID NO: 6041067 - DNA, 25 bp, Homo sapien
atgtacggatcctctacgcatctag

SEQ ID NO: 6041068 - DNA, 25 bp, Homo sapien
attcataatcgagcaccagaagcaa

SEQ ID NO: 6041069 - DNA, 25 bp, Homo sapien
gcttccaacttcactggtgaccagc

SEQ ID NO: 6041070 - DNA, 25 bp, Homo sapien
aacttcactggtgaccagcaaaaga

SEQ ID NO: 6041071 - DNA, 25 bp, Homo sapien
gtgatggagttgatgggtttacctt

SEQ ID NO: 6041072 - DNA, 25 bp, Homo sapien
gaatgccttgcaattcgcgttcaaa

SEQ ID NO: 6041073 - DNA, 25 bp, Homo sapien
cgttggaactatcgcgtctatattc

SEQ ID NO: 6041074 - DNA, 25 bp, Homo sapien
ggaagacttgatcgtttttcccaca

SEQ ID NO: 6041075 - DNA, 25 bp, Homo sapien
tatcatcactcttcctagattcata

SEQ ID NO: 6041076 - DNA, 25 bp, Homo sapien
tggtaaagaaatggtagccgcttgc

SEQ ID NO: 6041077 - DNA, 25 bp, Homo sapien
gaacgctactggtgatttcacatta

SEQ ID NO: 6041078 - DNA, 25 bp, Homo sapien
cgtactgagatgtggtaaagaaatg

SEQ ID NO: 6041079 - DNA, 25 bp, Homo sapien
ttaccttagacacaaacttgggcga

SEQ ID NO: 6041080 - DNA, 25 bp, Homo sapien
ggtagccgcttgctatgccatgtac

SEQ ID NO: 6041081 - DNA, 25 bp, Homo sapien
ccttgtatctgaagaacaggaagac

SEQ ID NO: 6041082 - DNA, 25 bp, Homo sapien
cctcaaatttggacgccggtgtctc

SEQ ID NO: 6041083 - DNA, 25 bp, Homo sapien
cagactgctaccagactcatcaggt

SEQ ID NO: 6041084 - DNA, 25 bp, Homo sapien
caaggtccttgtatctgaagaacag

SEQ ID NO: 6041085 - DNA, 25 bp, Homo sapien
catctagtattgacattgggtgatg

SEQ ID NO: 6041086 - DNA, 25 bp, Homo sapien
gcaccagaagcaatttaagaacgct

SEQ ID NO: 6041087 - DNA, 25 bp, Homo sapien
cacaaacacgggctcatacgcagtg

SEQ ID NO: 6041088 - DNA, 25 bp, Homo sapien
atatttatcaatgccatgagggcta

SEQ ID NO: 6041089 - DNA, 25 bp, Homo sapien
ctattgatggctcctcaaatttgga

SEQ ID NO: 6041090 - DNA, 25 bp, Homo sapien
tgtctccgttggaactatcgcgtct

SEQ ID NO: 6041091 - DNA, 25 bp, Homo sapien
atctgaagaacaggaagacttgatc

SEQ ID NO: 6041092 - DNA, 25 bp, Homo sapien
acgccggtgtctccgttggaactat

SEQ ID NO: 6041093 - DNA, 25 bp, Homo sapien
ctaggtgatgaaatatttatcaatg

SEQ ID NO: 6041094 - DNA, 25 bp, Homo sapien
tatattcagactgctaccagactca

SEQ ID NO: 6041095 - DNA, 25 bp, Homo sapien
atctcacaccatcagacgtgctgaa

SEQ ID NO: 6041096 - DNA, 25 bp, Homo sapien
agactcatcaggtactataaacgac

SEQ ID NO: 6041097 - DNA, 25 bp, Homo sapien
cactcttcctagattcataatcgag

SEQ ID NO: 6041098 - DNA, 25 bp, Homo sapien
acacgggctcatacgcagtgtgttg

SEQ ID NO: 6041099 - DNA, 25 bp, Homo sapien
agtactgaatgccttgcaattcgcg

SEQ ID NO: 6041100 - DNA, 25 bp, Homo sapien
aagttggacgttctaggtgatgaaa

SEQ ID NO: 6041101 - DNA, 25 bp, Homo sapien
taacttggttgggttagcaggcgct

SEQ ID NO: 6041102 - DNA, 25 bp, Homo sapien
gatcatcaaggtccttgtatctgaa

SEQ ID NO: 6041103 - DNA, 25 bp, Homo sapien
gaagcaatttaagaacgctactggt

SEQ ID NO: 6041104 - DNA, 25 bp, Homo sapien
attcgcgttcaaatttgtatctcac

SEQ ID NO: 6041105 - DNA, 25 bp, Homo sapien
atttaagaacgctactggtgatttc

SEQ ID NO: 6041106 - DNA, 25 bp, Homo sapien
cgaagggtttgataccgatatcatc

SEQ ID NO: 6041107 - DNA, 25 bp, Homo sapien
gaattcatcttgactcatcctaact

SEQ ID NO: 6041108 - DNA, 25 bp, Homo sapien
agaacaggaagacttgatcgttttt

SEQ ID NO: 6041109 - DNA, 25 bp, Homo sapien
atttgtatctcacaccatcagacgt

SEQ ID NO: 6041110 - DNA, 25 bp, Homo sapien
gaccagcaaaagaagttggacgttc

SEQ ID NO: 6041111 - DNA, 25 bp, Homo sapien
aactatcgcgtctatattcagactg

SEQ ID NO: 6041112 - DNA, 25 bp, Homo sapien
ttgggcgaattcatcttgactcatc

SEQ ID NO: 6041113 - DNA, 25 bp, Homo sapien
ggagttgatgggtttaccttagaca

SEQ ID NO: 6041114 - DNA, 25 bp, Homo sapien
caaaagaagttggacgttctaggtg

SEQ ID NO: 6041115 - DNA, 25 bp, Homo sapien
ggatcctctacgcatctagtattga

SEQ ID NO: 6041116 - DNA, 25 bp, Homo sapien
caccatcagacgtgctgaattggtt

SEQ ID NO: 6041117 - DNA, 25 bp, Homo sapien
ctctaccgaagggtttgataccgat

SEQ ID NO: 6041118 - DNA, 25 bp, Homo sapien
cttgatcgtttttcccacaaacacg

SEQ ID NO: 6041119 - DNA, 25 bp, Homo sapien
acgcagtgtgttgtgatcctattga

SEQ ID NO: 6041120 - DNA, 25 bp, Homo sapien
tagtgggatcatcaaggtccttgta

SEQ ID NO: 6041121 - DNA, 25 bp, Homo sapien
tgatgggtttaccttagacacaaac

SEQ ID NO: 6041122 - DNA, 25 bp, Homo sapien
gacgttctaggtgatgaaatattta

SEQ ID NO: 6041123 - DNA, 25 bp, Homo sapien
cgcgtctatattcagactgctacca

SEQ ID NO: 6041124 - DNA, 25 bp, Homo sapien
cagacgtgctgaattggttaacttg

SEQ ID NO: 6041125 - DNA, 25 bp, Homo sapien
tcctagattcataatcgagcaccag

SEQ ID NO: 6041126 - DNA, 25 bp, Homo sapien
tactataaacgacgtactgagatgt

SEQ ID NO: 6041127 - DNA, 25 bp, Homo sapien
gatgaaatatttatcaatgccatga

SEQ ID NO: 6041128 - DNA, 25 bp, Homo sapien
gagatgtggtaaagaaatggtagcc

SEQ ID NO: 6041129 - DNA, 25 bp, Homo sapien
taccgatatcatcactcttcctaga

SEQ ID NO: 6041130 - DNA, 25 bp, Homo sapien
tggttgggttagcaggcgcttccaa

SEQ ID NO: 6041131 - DNA, 25 bp, Homo sapien
tgatttcacattagtactgaatgcc

SEQ ID NO: 6041132 - DNA, 25 bp, Homo sapien
tgtgttgtgatcctattgatggctc

SEQ ID NO: 6041133 - DNA, 25 bp, Homo sapien
actggtgaccagcaaaagaagttgg

SEQ ID NO: 6041134 - DNA, 25 bp, Homo sapien
tactggtgatttcacattagtactg

SEQ ID NO: 6041135 - DNA, 25 bp, Homo sapien
aatcgagcaccagaagcaatttaag

SEQ ID NO: 6041136 - DNA, 25 bp, Homo sapien
atcaatgccatgagggctagtggga

SEQ ID NO: 6041137 - DNA, 25 bp, Homo sapien
agaaatggtagccgcttgctatgcc

SEQ ID NO: 6041138 - DNA, 25 bp, Homo sapien
ctatgccatgtacggatcctctacg

SEQ ID NO: 6041139 - DNA, 25 bp, Homo sapien
gctcatacgcagtgtgttgtgatcc

SEQ ID NO: 6041140 - DNA, 25 bp, Homo sapien
gcaggcgcttccaacttcactggtg

SEQ ID NO: 6041141 - DNA, 25 bp, Homo sapien
atttggacgccggtgtctccgttgg

SEQ ID NO: 6041142 - DNA, 25 bp, Homo sapien
agggctagtgggatcatcaaggtcc

SEQ ID NO: 6041143 - DNA, 25 bp, Homo sapien
atatgacttggcaccaaatccaaga

SEQ ID NO: 6041144 - DNA, 25 bp, Homo sapien
tactagatgcgtagaggatccgtac

SEQ ID NO: 6041145 - DNA, 25 bp, Homo sapien
ttggggctcttcttgtcgcaagggt

SEQ ID NO: 6041146 - DNA, 25 bp, Homo sapien
atcaactccatcacccaatgtcaat

SEQ ID NO: 6041147 - DNA, 25 bp, Homo sapien
accacatctcagtacgtcgtttata

SEQ ID NO: 6041148 - DNA, 25 bp, Homo sapien
ccccctgcttgttccattaagaaag

SEQ ID NO: 6041149 - DNA, 25 bp, Homo sapien
ctcagttttccgttggggctcttct

SEQ ID NO: 6041150 - DNA, 25 bp, Homo sapien
tgggaaggcctcataaagcaacctc

SEQ ID NO: 6041151 - DNA, 25 bp, Homo sapien
agaggatccgtacatggcatagcaa

SEQ ID NO: 6041152 - DNA, 25 bp, Homo sapien
atgaattcgcccaagtttgtgtcta

SEQ ID NO: 6041153 - DNA, 25 bp, Homo sapien
aaccaaatagaagatttgtcatgga

SEQ ID NO: 6041154 - DNA, 25 bp, Homo sapien
cttggcaccaaatccaagattctct

SEQ ID NO: 6041155 - DNA, 25 bp, Homo sapien
agtacctgatgagtctggtagcagt

SEQ ID NO: 6041156 - DNA, 25 bp, Homo sapien
aacgtcctgtgaacatcagcaacca

SEQ ID NO: 6041157 - DNA, 25 bp, Homo sapien
tctgaatatagacgcgatagttcca

SEQ ID NO: 6041158 - DNA, 25 bp, Homo sapien
tctctctccgcgatcgttgaccgct

SEQ ID NO: 6041159 - DNA, 25 bp, Homo sapien
caataaatgttcttatagtctcgtt

SEQ ID NO: 6041160 - DNA, 25 bp, Homo sapien
gcttttccccctgcttgttccatta

SEQ ID NO: 6041161 - DNA, 25 bp, Homo sapien
ccgagaaaggcttgttgttgttgtc

SEQ ID NO: 6041162 - DNA, 25 bp, Homo sapien
ctgtgaacatcagcaaccatggatc

SEQ ID NO: 6041163 - DNA, 25 bp, Homo sapien
agaacccaaccaaatagaagatttg

SEQ ID NO: 6041164 - DNA, 25 bp, Homo sapien
atagcaagcggctaccatttcttta

SEQ ID NO: 6041165 - DNA, 25 bp, Homo sapien
tgatgagtctggtagcagtctgaat

SEQ ID NO: 6041166 - DNA, 25 bp, Homo sapien
tcatggatatgacttggcaccaaat

SEQ ID NO: 6041167 - DNA, 25 bp, Homo sapien
ataaagcaacctcagttttccgttg

SEQ ID NO: 6041168 - DNA, 25 bp, Homo sapien
ttccattaagaaagccattgggaag

SEQ ID NO: 6041169 - DNA, 25 bp, Homo sapien
agccattgggaaggcctcataaagc

SEQ ID NO: 6041170 - DNA, 25 bp, Homo sapien
tccgtacatggcatagcaagcggct

SEQ ID NO: 6041171 - DNA, 25 bp, Homo sapien
taccatttctttaccacatctcagt

SEQ ID NO: 6041172 - DNA, 25 bp, Homo sapien
ggcctcataaagcaacctcagtttt

SEQ ID NO: 6041173 - DNA, 25 bp, Homo sapien
atgttcttatagtctcgttccagta

SEQ ID NO: 6041174 - DNA, 25 bp, Homo sapien
cgttgaccgcttttccccctgcttg

SEQ ID NO: 6041175 - DNA, 25 bp, Homo sapien
gtttatagtacctgatgagtctggt

SEQ ID NO: 6041176 - DNA, 25 bp, Homo sapien
ttcacctgaagaacccaaccaaata

SEQ ID NO: 6041177 - DNA, 25 bp, Homo sapien
aaacccatcaactccatcacccaat

SEQ ID NO: 6041178 - DNA, 25 bp, Homo sapien
tgcttgttccattaagaaagccatt

SEQ ID NO: 6041179 - DNA, 25 bp, Homo sapien
taagaaagccattgggaaggcctca

SEQ ID NO: 6041180 - DNA, 25 bp, Homo sapien
cctgaagaacccaaccaaatagaag

SEQ ID NO: 6041181 - DNA, 25 bp, Homo sapien
agagggtgttaccttcattaattga

SEQ ID NO: 6041182 - DNA, 25 bp, Homo sapien
tacctagccgagaaaggcttgttgt

SEQ ID NO: 6041183 - DNA, 25 bp, Homo sapien
tagcagtctgaatatagacgcgata

SEQ ID NO: 6041184 - DNA, 25 bp, Homo sapien
taattgagtagatggccttttgagg

SEQ ID NO: 6041185 - DNA, 25 bp, Homo sapien
attcttaagttaggatgagtcaaga

SEQ ID NO: 6041186 - DNA, 25 bp, Homo sapien
accaaatccaagattctctctccgc

SEQ ID NO: 6041187 - DNA, 25 bp, Homo sapien
tggggttgtttgactttctcaataa

SEQ ID NO: 6041188 - DNA, 25 bp, Homo sapien
taaagaaacgtcctgtgaacatcag

SEQ ID NO: 6041189 - DNA, 25 bp, Homo sapien
catggcatagcaagcggctaccatt

SEQ ID NO: 6041190 - DNA, 25 bp, Homo sapien
tctcagtacgtcgtttatagtacct

SEQ ID NO: 6041191 - DNA, 25 bp, Homo sapien
tctgcttggggttgtttgactttct

SEQ ID NO: 6041192 - DNA, 25 bp, Homo sapien
tatagacgcgatagttccaacggag

SEQ ID NO: 6041193 - DNA, 25 bp, Homo sapien
tccagtagagggtgttaccttcatt

SEQ ID NO: 6041194 - DNA, 25 bp, Homo sapien
ccaacatacctagccgagaaaggct

SEQ ID NO: 6041195 - DNA, 25 bp, Homo sapien
acatcagcaaccatggatccaacat

SEQ ID NO: 6041196 - DNA, 25 bp, Homo sapien
gatttgtcatggatatgacttggca

SEQ ID NO: 6041197 - DNA, 25 bp, Homo sapien
ctcttcttgtcgcaagggtatgcga

SEQ ID NO: 6041198 - DNA, 25 bp, Homo sapien
gcaaccatggatccaacatacctag

SEQ ID NO: 6041199 - DNA, 25 bp, Homo sapien
tccatcacccaatgtcaatactaga

SEQ ID NO: 6041200 - DNA, 25 bp, Homo sapien
tttccgttggggctcttcttgtcgc

SEQ ID NO: 6041201 - DNA, 25 bp, Homo sapien
tgttaccttcattaattgagtagat

SEQ ID NO: 6041202 - DNA, 25 bp, Homo sapien
tacgtcgtttatagtacctgatgag

SEQ ID NO: 6041203 - DNA, 25 bp, Homo sapien
aagttaggatgagtcaagatgaatt

SEQ ID NO: 6041204 - DNA, 25 bp, Homo sapien
ctttctcaataaatgttcttatagt

SEQ ID NO: 6041205 - DNA, 25 bp, Homo sapien
caagggtatgcgaaaaggccaccgt

SEQ ID NO: 6041206 - DNA, 25 bp, Homo sapien
gtcaagatgaattcgcccaagtttg

SEQ ID NO: 6041207 - DNA, 25 bp, Homo sapien
taaggtaaacccatcaactccatca

SEQ ID NO: 6041208 - DNA, 25 bp, Homo sapien
agcggctaccatttctttaccacat

SEQ ID NO: 6041209 - DNA, 25 bp, Homo sapien
acccaatgtcaatactagatgcgta

SEQ ID NO: 6041210 - DNA, 25 bp, Homo sapien
atggatccaacatacctagccgaga

SEQ ID NO: 6041211 - DNA, 25 bp, Homo sapien
atagaagatttgtcatggatatgac

SEQ ID NO: 6041212 - DNA, 25 bp, Homo sapien
tccgcgatcgttgaccgcttttccc

SEQ ID NO: 6041213 - DNA, 25 bp, Homo sapien
aaaggcttgttgttgttgtctgctt

SEQ ID NO: 6041214 - DNA, 25 bp, Homo sapien
ttgttgttgttgtctgcttggggtt

SEQ ID NO: 6041215 - DNA, 25 bp, Homo sapien
tctcgttccagtagagggtgttacc

SEQ ID NO: 6041216 - DNA, 25 bp, Homo sapien
cttcattaattgagtagatggcctt

SEQ ID NO: 6041217 - DNA, 25 bp, Homo sapien
tgtcaatactagatgcgtagaggat

SEQ ID NO: 6041218 - DNA, 25 bp, Homo sapien
ggcggaattcttaagttaggatgag

SEQ ID NO: 6041219 - DNA, 25 bp, Homo sapien
ttatagtctcgttccagtagagggt

SEQ ID NO: 6041220 - DNA, 25 bp, Homo sapien
atgcgtagaggatccgtacatggca

SEQ ID NO: 6041221 - DNA, 25 bp, Homo sapien
tgtgtctaaggtaaacccatcaact

SEQ ID NO: 6041222 - DNA, 25 bp, Homo sapien
gtctggtagcagtctgaatatagac

SEQ ID NO: 6041223 - DNA, 25 bp, Homo sapien
ttgtcgcaagggtatgcgaaaaggc

SEQ ID NO: 6041224 - DNA, 25 bp, Homo sapien
agtagatggccttttgaggcggaat

SEQ ID NO: 6041225 - DNA, 25 bp, Homo sapien
ttgaggcggaattcttaagttagga

SEQ ID NO: 6041226 - DNA, 25 bp, Homo sapien
gccaccgtaaagaaacgtcctgtga

SEQ ID NO: 6041227 - DNA, 25 bp, Homo sapien
tcgcccaagtttgtgtctaaggtaa

SEQ ID NO: 6041228 - DNA, 25 bp, Homo sapien
tatgcgaaaaggccaccgtaaagaa

SEQ ID NO: 6041229 - DNA, 25 bp, Homo sapien
tggccttttgaggcggaattcttaa

SEQ ID NO: 6041230 - DNA, 25 bp, Homo sapien
ttctttaccacatctcagtacgtcg

SEQ ID NO: 6041231 - DNA, 25 bp, Homo sapien
ttgttgtctgcttggggttgtttga

SEQ ID NO: 6041232 - DNA, 25 bp, Homo sapien
gtcaatttcacctgaagaacccaac

SEQ ID NO: 6041233 - DNA, 25 bp, Homo sapien
ggatgagtcaagatgaattcgccca

SEQ ID NO: 6041234 - DNA, 25 bp, Homo sapien
tagattggacgtgtcactgaagcac

SEQ ID NO: 6041235 - DNA, 25 bp, Homo sapien
cactgaagccaagttgcgtgagctg

SEQ ID NO: 6041236 - DNA, 25 bp, Homo sapien
ctaccattcgtttcctacaagtgag

SEQ ID NO: 6041237 - DNA, 25 bp, Homo sapien
tttcgggaacttaatcacaacaata

SEQ ID NO: 6041238 - DNA, 25 bp, Homo sapien
atttgcgaaactttctccacaaggc

SEQ ID NO: 6041239 - DNA, 25 bp, Homo sapien
aggctggccaatcctttcgatggat

SEQ ID NO: 6041240 - DNA, 25 bp, Homo sapien
agaatgtgcaatagcctttgctcta

SEQ ID NO: 6041241 - DNA, 25 bp, Homo sapien
tgatttcctttatttgctcgagtaa

SEQ ID NO: 6041242 - DNA, 25 bp, Homo sapien
caagaaaagtattcagtagtgattt

SEQ ID NO: 6041243 - DNA, 25 bp, Homo sapien
tcagtagtgattttgaggcaagatg

SEQ ID NO: 6041244 - DNA, 25 bp, Homo sapien
gggctttggatatagagctaagtat

SEQ ID NO: 6041245 - DNA, 25 bp, Homo sapien
gaaaagttaaaccagtacagcacta

SEQ ID NO: 6041246 - DNA, 25 bp, Homo sapien
tgataaagctgaagctaatattact

SEQ ID NO: 6041247 - DNA, 25 bp, Homo sapien
cgataatgtttggattccaagcgat

SEQ ID NO: 6041248 - DNA, 25 bp, Homo sapien
cttattcgataatgtttggattcca

SEQ ID NO: 6041249 - DNA, 25 bp, Homo sapien
cacaaggcatccgtatcttggccca

SEQ ID NO: 6041250 - DNA, 25 bp, Homo sapien
agacattgatttcctttatttgctc

SEQ ID NO: 6041251 - DNA, 25 bp, Homo sapien
ggccagcaagaaaagtattcagtag

SEQ ID NO: 6041252 - DNA, 25 bp, Homo sapien
aagtattcagtagtgattttgaggc

SEQ ID NO: 6041253 - DNA, 25 bp, Homo sapien
caagatgaagagaatgagatcctgg

SEQ ID NO: 6041254 - DNA, 25 bp, Homo sapien
ggtgaatgataaagctgaagctaat

SEQ ID NO: 6041255 - DNA, 25 bp, Homo sapien
agatggggtcgcctaccattcgttt

SEQ ID NO: 6041256 - DNA, 25 bp, Homo sapien
gattccaagcgataaagcatttgcg

SEQ ID NO: 6041257 - DNA, 25 bp, Homo sapien
acaatgaagataggccagcaagaaa

SEQ ID NO: 6041258 - DNA, 25 bp, Homo sapien
acaatagatggggtcgcctaccatt

SEQ ID NO: 6041259 - DNA, 25 bp, Homo sapien
aacttctcgagccactgaagccaag

SEQ ID NO: 6041260 - DNA, 25 bp, Homo sapien
agcctttgctctaatttcgggaact

SEQ ID NO: 6041261 - DNA, 25 bp, Homo sapien
tcaagaattacgagaatgtgcaata

SEQ ID NO: 6041262 - DNA, 25 bp, Homo sapien
gtgctacaggctggccaatcctttc

SEQ ID NO: 6041263 - DNA, 25 bp, Homo sapien
aatgagatcctggaatttgttgctg

SEQ ID NO: 6041264 - DNA, 25 bp, Homo sapien
attacgagaatgtgcaatagccttt

SEQ ID NO: 6041265 - DNA, 25 bp, Homo sapien
tgggatgaaaagttaaaccagtaca

SEQ ID NO: 6041266 - DNA, 25 bp, Homo sapien
ttcgtttcctacaagtgaggagcta

SEQ ID NO: 6041267 - DNA, 25 bp, Homo sapien
agccaagttgcgtgagctgggcttt

SEQ ID NO: 6041268 - DNA, 25 bp, Homo sapien
taaagcatttgcgaaactttctcca

SEQ ID NO: 6041269 - DNA, 25 bp, Homo sapien
aagtgaggagctaacttctcgagcc

SEQ ID NO: 6041270 - DNA, 25 bp, Homo sapien
tcgagccactgaagccaagttgcgt

SEQ ID NO: 6041271 - DNA, 25 bp, Homo sapien
cgactgtggcaatcaggacgcctta

SEQ ID NO: 6041272 - DNA, 25 bp, Homo sapien
aatgaaatattttagattggacgtg

SEQ ID NO: 6041273 - DNA, 25 bp, Homo sapien
cgaaaccgcgagaaaactggtgaat

SEQ ID NO: 6041274 - DNA, 25 bp, Homo sapien
cgcgagaaaactggtgaatgataaa

SEQ ID NO: 6041275 - DNA, 25 bp, Homo sapien
tgtcggcgactgtggcaatcaggac

SEQ ID NO: 6041276 - DNA, 25 bp, Homo sapien
gtcactgaagcacttattcgataat

SEQ ID NO: 6041277 - DNA, 25 bp, Homo sapien
gccaatcctttcgatggatttggga

SEQ ID NO: 6041278 - DNA, 25 bp, Homo sapien
tgtttggattccaagcgataaagca

SEQ ID NO: 6041279 - DNA, 25 bp, Homo sapien
catgggagacattgatttcctttat

SEQ ID NO: 6041280 - DNA, 25 bp, Homo sapien
tcgagtaataataacatttcaagaa

SEQ ID NO: 6041281 - DNA, 25 bp, Homo sapien
cctttatttgctcgagtaataataa

SEQ ID NO: 6041282 - DNA, 25 bp, Homo sapien
gttgctgtcggcgactgtggcaatc

SEQ ID NO: 6041283 - DNA, 25 bp, Homo sapien
gttgcgtgagctgggctttggatat

SEQ ID NO: 6041284 - DNA, 25 bp, Homo sapien
tagagctaagtatattatcgaaacc

SEQ ID NO: 6041285 - DNA, 25 bp, Homo sapien
cgccttaaaaactcatctaatgaaa

SEQ ID NO: 6041286 - DNA, 25 bp, Homo sapien
gaagcacttattcgataatgtttgg

SEQ ID NO: 6041287 - DNA, 25 bp, Homo sapien
gagctatgtctagcaaatgtgctac

SEQ ID NO: 6041288 - DNA, 25 bp, Homo sapien
ggacgtgtcactgaagcacttattc

SEQ ID NO: 6041289 - DNA, 25 bp, Homo sapien
atattttagattggacgtgtcactg

SEQ ID NO: 6041290 - DNA, 25 bp, Homo sapien
tgtctagcaaatgtgctacaggctg

SEQ ID NO: 6041291 - DNA, 25 bp, Homo sapien
agcactacaatgaagataggccagc

SEQ ID NO: 6041292 - DNA, 25 bp, Homo sapien
gcaaatgtgctacaggctggccaat

SEQ ID NO: 6041293 - DNA, 25 bp, Homo sapien
tgcaatagcctttgctctaatttcg

SEQ ID NO: 6041294 - DNA, 25 bp, Homo sapien
gtgattttgaggcaagatgaagaga

SEQ ID NO: 6041295 - DNA, 25 bp, Homo sapien
tcaggacgccttaaaaactcatcta

SEQ ID NO: 6041296 - DNA, 25 bp, Homo sapien
aacatttcaagaattacgagaatgt

SEQ ID NO: 6041297 - DNA, 25 bp, Homo sapien
taagtatattatcgaaaccgcgaga

SEQ ID NO: 6041298 - DNA, 25 bp, Homo sapien
aggaaccatgggagacattgatttc

SEQ ID NO: 6041299 - DNA, 25 bp, Homo sapien
ttaaaccagtacagcactacaatga

SEQ ID NO: 6041300 - DNA, 25 bp, Homo sapien
atcacaacaatagatggggtcgcct

SEQ ID NO: 6041301 - DNA, 25 bp, Homo sapien
tttgctcgagtaataataacatttc

SEQ ID NO: 6041302 - DNA, 25 bp, Homo sapien
ctctaatttcgggaacttaatcaca

SEQ ID NO: 6041303 - DNA, 25 bp, Homo sapien
tattatcgaaaccgcgagaaaactg

SEQ ID NO: 6041304 - DNA, 25 bp, Homo sapien
aaaactggtgaatgataaagctgaa

SEQ ID NO: 6041305 - DNA, 25 bp, Homo sapien
ggagctaacttctcgagccactgaa

SEQ ID NO: 6041306 - DNA, 25 bp, Homo sapien
tggcccaggaaccatgggagacatt

SEQ ID NO: 6041307 - DNA, 25 bp, Homo sapien
gaacttaatcacaacaatagatggg

SEQ ID NO: 6041308 - DNA, 25 bp, Homo sapien
gtatcttggcccaggaaccatggga

SEQ ID NO: 6041309 - DNA, 25 bp, Homo sapien
tgagctgggctttggatatagagct

SEQ ID NO: 6041310 - DNA, 25 bp, Homo sapien
aaaagtgagctatgtctagcaaatg

SEQ ID NO: 6041311 - DNA, 25 bp, Homo sapien
cagtacagcactacaatgaagatag

SEQ ID NO: 6041312 - DNA, 25 bp, Homo sapien
tggatatagagctaagtatattatc

SEQ ID NO: 6041313 - DNA, 25 bp, Homo sapien
gatggatttgggatgaaaagttaaa

SEQ ID NO: 6041314 - DNA, 25 bp, Homo sapien
aagcgataaagcatttgcgaaactt

SEQ ID NO: 6041315 - DNA, 25 bp, Homo sapien
gcatccgtatcttggcccaggaacc

SEQ ID NO: 6041316 - DNA, 25 bp, Homo sapien
gaagagaatgagatcctggaatttg

SEQ ID NO: 6041317 - DNA, 25 bp, Homo sapien
tcctacaagtgaggagctaacttct

SEQ ID NO: 6041318 - DNA, 25 bp, Homo sapien
tggcaatcaggacgccttaaaaact

SEQ ID NO: 6041319 - DNA, 25 bp, Homo sapien
aataataacatttcaagaattacga

SEQ ID NO: 6041320 - DNA, 25 bp, Homo sapien
ttgaggcaagatgaagagaatgaga

SEQ ID NO: 6041321 - DNA, 25 bp, Homo sapien
atcctggaatttgttgctgtcggcg

SEQ ID NO: 6041322 - DNA, 25 bp, Homo sapien
cctttcgatggatttgggatgaaaa

SEQ ID NO: 6041323 - DNA, 25 bp, Homo sapien
ttctccacaaggcatccgtatcttg

SEQ ID NO: 6041324 - DNA, 25 bp, Homo sapien
gaaactttctccacaaggcatccgt

SEQ ID NO: 6041325 - DNA, 25 bp, Homo sapien
ggtcgcctaccattcgtttcctaca

SEQ ID NO: 6041326 - DNA, 25 bp, Homo sapien
aagataggccagcaagaaaagtatt

SEQ ID NO: 6041327 - DNA, 25 bp, Homo sapien
gaatttgttgctgtcggcgactgtg

SEQ ID NO: 6041328 - DNA, 25 bp, Homo sapien
cattgtaggacatgaggtgctctct

SEQ ID NO: 6041329 - DNA, 25 bp, Homo sapien
ggtttcgataatatacttagctcta

SEQ ID NO: 6041330 - DNA, 25 bp, Homo sapien
cttcatattgagcatctttacagat

SEQ ID NO: 6041331 - DNA, 25 bp, Homo sapien
attgagcatctttacagatactttg

SEQ ID NO: 6041332 - DNA, 25 bp, Homo sapien
gtttcctttatcatatcccattttc

SEQ ID NO: 6041333 - DNA, 25 bp, Homo sapien
gctctctaacgtcttcatattgagc

SEQ ID NO: 6041334 - DNA, 25 bp, Homo sapien
gctcgagaagttagctcctcacttg

SEQ ID NO: 6041335 - DNA, 25 bp, Homo sapien
aggacaccttgggcccaaccagcgt

SEQ ID NO: 6041336 - DNA, 25 bp, Homo sapien
attttgtcctcaattctttgagatg

SEQ ID NO: 6041337 - DNA, 25 bp, Homo sapien
tgaggtgctctctaacgtcttcata

SEQ ID NO: 6041338 - DNA, 25 bp, Homo sapien
atcagacaattcaactttcagtttc

SEQ ID NO: 6041339 - DNA, 25 bp, Homo sapien
aaggtatgtggtgtcagaagtaata

SEQ ID NO: 6041340 - DNA, 25 bp, Homo sapien
caactttggggcctacaccattgta

SEQ ID NO: 6041341 - DNA, 25 bp, Homo sapien
gtaaggcgttgtattttgtcctcaa

SEQ ID NO: 6041342 - DNA, 25 bp, Homo sapien
tggcttcagtggctcgagaagttag

SEQ ID NO: 6041343 - DNA, 25 bp, Homo sapien
cagatatttggtagtccctcttcgc

SEQ ID NO: 6041344 - DNA, 25 bp, Homo sapien
acaattcaactttcagtttcatttg

SEQ ID NO: 6041345 - DNA, 25 bp, Homo sapien
tttatagtaccagttgtagtgctac

SEQ ID NO: 6041346 - DNA, 25 bp, Homo sapien
gataggtaaggcgttgtattttgtc

SEQ ID NO: 6041347 - DNA, 25 bp, Homo sapien
attctttgagatggttcttgttcgc

SEQ ID NO: 6041348 - DNA, 25 bp, Homo sapien
catccatgtgaagtcccattagaca

SEQ ID NO: 6041349 - DNA, 25 bp, Homo sapien
tcttgagataggtaaggcgttgtat

SEQ ID NO: 6041350 - DNA, 25 bp, Homo sapien
tttatcattcaccagttttctcgcg

SEQ ID NO: 6041351 - DNA, 25 bp, Homo sapien
tggggcctacaccattgtaggacat

SEQ ID NO: 6041352 - DNA, 25 bp, Homo sapien
tatggtcgagctctaggttgatttt

SEQ ID NO: 6041353 - DNA, 25 bp, Homo sapien
ctcttctttatagtaccagttgtag

SEQ ID NO: 6041354 - DNA, 25 bp, Homo sapien
aatcagcaactttggggcctacacc

SEQ ID NO: 6041355 - DNA, 25 bp, Homo sapien
caactttcagtttcatttgtttcgt

SEQ ID NO: 6041356 - DNA, 25 bp, Homo sapien
ttcagctttatcattcaccagtttt

SEQ ID NO: 6041357 - DNA, 25 bp, Homo sapien
taaaaagcattaatctaatatggtc

SEQ ID NO: 6041358 - DNA, 25 bp, Homo sapien
tgtgaagtcccattagacaaacgca

SEQ ID NO: 6041359 - DNA, 25 bp, Homo sapien
tgattttttttcttgagataggtaa

SEQ ID NO: 6041360 - DNA, 25 bp, Homo sapien
agctctatatccaaagcccagctca

SEQ ID NO: 6041361 - DNA, 25 bp, Homo sapien
ccagcgtatgatccccattttttaa

SEQ ID NO: 6041362 - DNA, 25 bp, Homo sapien
catctttacagatactttgaaggta

SEQ ID NO: 6041363 - DNA, 25 bp, Homo sapien
tcctcaattctttgagatggttctt

SEQ ID NO: 6041364 - DNA, 25 bp, Homo sapien
tgtggtgtcagaagtaatattagct

SEQ ID NO: 6041365 - DNA, 25 bp, Homo sapien
tgttcgcagatatttggtagtccct

SEQ ID NO: 6041366 - DNA, 25 bp, Homo sapien
agtccctcttcgcaattctactaac

SEQ ID NO: 6041367 - DNA, 25 bp, Homo sapien
ccgatttctttagagaataggacac

SEQ ID NO: 6041368 - DNA, 25 bp, Homo sapien
atttgtttcgtaacaattgcttccg

SEQ ID NO: 6041369 - DNA, 25 bp, Homo sapien
ttagacaaacgcaatcagcaacttt

SEQ ID NO: 6041370 - DNA, 25 bp, Homo sapien
gtccctccgatttctttagagaata

SEQ ID NO: 6041371 - DNA, 25 bp, Homo sapien
tgagatggttcttgttcgcagatat

SEQ ID NO: 6041372 - DNA, 25 bp, Homo sapien
tactaacatggacatctacggggac

SEQ ID NO: 6041373 - DNA, 25 bp, Homo sapien
gtgctaccactagtccctccgattt

SEQ ID NO: 6041374 - DNA, 25 bp, Homo sapien
tatccaaagcccagctcacgcaact

SEQ ID NO: 6041375 - DNA, 25 bp, Homo sapien
gtcagaagtaatattagcttcagct

SEQ ID NO: 6041376 - DNA, 25 bp, Homo sapien
tttggtagtccctcttcgcaattct

SEQ ID NO: 6041377 - DNA, 25 bp, Homo sapien
cgttgtattttgtcctcaattcttt

SEQ ID NO: 6041378 - DNA, 25 bp, Homo sapien
cggggacgatgccatccatgtgaag

SEQ ID NO: 6041379 - DNA, 25 bp, Homo sapien
cgagctctaggttgattttttttct

SEQ ID NO: 6041380 - DNA, 25 bp, Homo sapien
attcaccagttttctcgcggtttcg

SEQ ID NO: 6041381 - DNA, 25 bp, Homo sapien
gcttccgtttcctttatcatatccc

SEQ ID NO: 6041382 - DNA, 25 bp, Homo sapien
tatgatccccattttttaaaaagca

SEQ ID NO: 6041383 - DNA, 25 bp, Homo sapien
acaattgcttccgtttcctttatca

SEQ ID NO: 6041384 - DNA, 25 bp, Homo sapien
gctcacgcaacttggcttcagtggc

SEQ ID NO: 6041385 - DNA, 25 bp, Homo sapien
ggttcttgttcgcagatatttggta

SEQ ID NO: 6041386 - DNA, 25 bp, Homo sapien
atctaatatggtcgagctctaggtt

SEQ ID NO: 6041387 - DNA, 25 bp, Homo sapien
ctaggttgattttttttcttgagat

SEQ ID NO: 6041388 - DNA, 25 bp, Homo sapien
tcttcgcaattctactaacatggac

SEQ ID NO: 6041389 - DNA, 25 bp, Homo sapien
atatcccattttctcttctttatag

SEQ ID NO: 6041390 - DNA, 25 bp, Homo sapien
tctcgcggtttcgataatatactta

SEQ ID NO: 6041391 - DNA, 25 bp, Homo sapien
ccactagtccctccgatttctttag

SEQ ID NO: 6041392 - DNA, 25 bp, Homo sapien
gcccaaccagcgtatgatccccatt

SEQ ID NO: 6041393 - DNA, 25 bp, Homo sapien
ctacaccattgtaggacatgaggtg

SEQ ID NO: 6041394 - DNA, 25 bp, Homo sapien
ccttgggcccaaccagcgtatgatc

SEQ ID NO: 6041395 - DNA, 25 bp, Homo sapien
cattttctcttctttatagtaccag

SEQ ID NO: 6041396 - DNA, 25 bp, Homo sapien
gtcccattagacaaacgcaatcagc

SEQ ID NO: 6041397 - DNA, 25 bp, Homo sapien
taacgtcttcatattgagcatcttt

SEQ ID NO: 6041398 - DNA, 25 bp, Homo sapien
atacttagctctatatccaaagccc

SEQ ID NO: 6041399 - DNA, 25 bp, Homo sapien
aagcccagctcacgcaacttggctt

SEQ ID NO: 6041400 - DNA, 25 bp, Homo sapien
gttgtagtgctaccactagtccctc

SEQ ID NO: 6041401 - DNA, 25 bp, Homo sapien
aggacatgaggtgctctctaacgtc

SEQ ID NO: 6041402 - DNA, 25 bp, Homo sapien
cgatgccatccatgtgaagtcccat

SEQ ID NO: 6041403 - DNA, 25 bp, Homo sapien
gataatatacttagctctatatcca

SEQ ID NO: 6041404 - DNA, 25 bp, Homo sapien
gagaataggacaccttgggcccaac

SEQ ID NO: 6041405 - DNA, 25 bp, Homo sapien
catggacatctacggggacgatgcc

SEQ ID NO: 6041406 - DNA, 25 bp, Homo sapien
acagatactttgaaggtatgtggtg

SEQ ID NO: 6041407 - DNA, 25 bp, Homo sapien
agtaatattagcttcagctttatca

SEQ ID NO: 6041408 - DNA, 25 bp, Homo sapien
caattctactaacatggacatctac

SEQ ID NO: 6041409 - DNA, 25 bp, Homo sapien
gcattaatctaatatggtcgagctc

SEQ ID NO: 6041410 - DNA, 25 bp, Homo sapien
agtttcatttgtttcgtaacaattg

SEQ ID NO: 6041411 - DNA, 25 bp, Homo sapien
actttgaaggtatgtggtgtcagaa

SEQ ID NO: 6041412 - DNA, 25 bp, Homo sapien
gtaccagttgtagtgctaccactag

SEQ ID NO: 6041413 - DNA, 25 bp, Homo sapien
attagcttcagctttatcattcacc

SEQ ID NO: 6041414 - DNA, 25 bp, Homo sapien
tcagtggctcgagaagttagctcct

SEQ ID NO: 6041415 - DNA, 25 bp, Homo sapien
cagttttctcgcggtttcgataata

SEQ ID NO: 6041416 - DNA, 25 bp, Homo sapien
aaacgcaatcagcaactttggggcc

SEQ ID NO: 6041417 - DNA, 25 bp, Homo sapien
tctttagagaataggacaccttggg

SEQ ID NO: 6041418 - DNA, 25 bp, Homo sapien
gcaacttggcttcagtggctcgaga

SEQ ID NO: 6041419 - DNA, 25 bp, Homo sapien
catctacggggacgatgccatccat

SEQ ID NO: 6041420 - DNA, 25 bp, Homo sapien
attcgaaggcaacaaagattaggaa

SEQ ID NO: 6041421 - DNA, 25 bp, Homo sapien
gcgctaaacaatcaacagattcgaa

SEQ ID NO: 6041422 - DNA, 25 bp, Homo sapien
ggtgacgagatggaagaggatgagg

SEQ ID NO: 6041423 - DNA, 25 bp, Homo sapien
aagctccgattggaagatttcaagt

SEQ ID NO: 6041424 - DNA, 25 bp, Homo sapien
aagagggtgacgagatggaagagga

SEQ ID NO: 6041425 - DNA, 25 bp, Homo sapien
tacagcccagaattctcagcgcaat

SEQ ID NO: 6041426 - DNA, 25 bp, Homo sapien
gaactgatagctactaataagttga

SEQ ID NO: 6041427 - DNA, 25 bp, Homo sapien
tgtactaacgcattccatacagccc

SEQ ID NO: 6041428 - DNA, 25 bp, Homo sapien
gatgtaagttccttgctttacgctt

SEQ ID NO: 6041429 - DNA, 25 bp, Homo sapien
gccgcagccactacaagctactgtg

SEQ ID NO: 6041430 - DNA, 25 bp, Homo sapien
gagaagaggatgaagagggtgacga

SEQ ID NO: 6041431 - DNA, 25 bp, Homo sapien
ttggatgaattggtatctggatatt

SEQ ID NO: 6041432 - DNA, 25 bp, Homo sapien
cgattggaagatttcaagtttgccc

SEQ ID NO: 6041433 - DNA, 25 bp, Homo sapien
ggtacagagaagaggatgaagaggg

SEQ ID NO: 6041434 - DNA, 25 bp, Homo sapien
ttccatacagcccagaattctcagc

SEQ ID NO: 6041435 - DNA, 25 bp, Homo sapien
gcgcaataagctccgattggaagat

SEQ ID NO: 6041436 - DNA, 25 bp, Homo sapien
atagctactaataagttgattacgg

SEQ ID NO: 6041437 - DNA, 25 bp, Homo sapien
ccactacaagctactgtgcagtgtt

SEQ ID NO: 6041438 - DNA, 25 bp, Homo sapien
gagatggaagaggatgaggatgagc

SEQ ID NO: 6041439 - DNA, 25 bp, Homo sapien
cagtgtttggatgaattggtatctg

SEQ ID NO: 6041440 - DNA, 25 bp, Homo sapien
aagttgattacggaagctaagaagc

SEQ ID NO: 6041441 - DNA, 25 bp, Homo sapien
ccgataaagcttgggagagcagaag

SEQ ID NO: 6041442 - DNA, 25 bp, Homo sapien
aggatgaagagggtgacgagatgga

SEQ ID NO: 6041443 - DNA, 25 bp, Homo sapien
aggcaacaaagattaggaagcaggg

SEQ ID NO: 6041444 - DNA, 25 bp, Homo sapien
gggagagcagaagaactgatagcta

SEQ ID NO: 6041445 - DNA, 25 bp, Homo sapien
ttacggcgatgtgccgcagccacta

SEQ ID NO: 6041446 - DNA, 25 bp, Homo sapien
ctccgtaaagacccgataaagcttg

SEQ ID NO: 6041447 - DNA, 25 bp, Homo sapien
actgtgcagtgtttggatgaattgg

SEQ ID NO: 6041448 - DNA, 25 bp, Homo sapien
gtaatagcgctaaacaatcaacaga

SEQ ID NO: 6041449 - DNA, 25 bp, Homo sapien
ttctcagcgcaataagctccgattg

SEQ ID NO: 6041450 - DNA, 25 bp, Homo sapien
agttccttgctttacgcttacggcg

SEQ ID NO: 6041451 - DNA, 25 bp, Homo sapien
ggatatttggtggatgtttgtacta

SEQ ID NO: 6041452 - DNA, 25 bp, Homo sapien
atgagacagacaatcaaaattcatt

SEQ ID NO: 6041453 - DNA, 25 bp, Homo sapien
gaagaggatgaggatgagcagcagg

SEQ ID NO: 6041454 - DNA, 25 bp, Homo sapien
gatgagcagcaggtgacggatgatg

SEQ ID NO: 6041455 - DNA, 25 bp, Homo sapien
aagcagcgggccgtaatagcgctaa

SEQ ID NO: 6041456 - DNA, 25 bp, Homo sapien
caacagattcgaaggcaacaaagat

SEQ ID NO: 6041457 - DNA, 25 bp, Homo sapien
cagacaatcaaaattcattaaagag

SEQ ID NO: 6041458 - DNA, 25 bp, Homo sapien
aacaaggatgtaagttccttgcttt

SEQ ID NO: 6041459 - DNA, 25 bp, Homo sapien
cagttcaatgagacagacaatcaaa

SEQ ID NO: 6041460 - DNA, 25 bp, Homo sapien
aagaagcagttcaatgagacagaca

SEQ ID NO: 6041461 - DNA, 25 bp, Homo sapien
gatgaggatgagcagcaggtgacgg

SEQ ID NO: 6041462 - DNA, 25 bp, Homo sapien
cagcaggtgacggatgatgatgagg

SEQ ID NO: 6041463 - DNA, 25 bp, Homo sapien
caagctactgtgcagtgtttggatg

SEQ ID NO: 6041464 - DNA, 25 bp, Homo sapien
gtgacggatgatgatgaggaagcag

SEQ ID NO: 6041465 - DNA, 25 bp, Homo sapien
gaagctaagaagcagttcaatgaga

SEQ ID NO: 6041466 - DNA, 25 bp, Homo sapien
taaagaggtacagagaagaggatga

SEQ ID NO: 6041467 - DNA, 25 bp, Homo sapien
gaagatttcaagtttgccctccgta

SEQ ID NO: 6041468 - DNA, 25 bp, Homo sapien
aagcttgggagagcagaagaactga

SEQ ID NO: 6041469 - DNA, 25 bp, Homo sapien
gatgaggaagcagcgggccgtaata

SEQ ID NO: 6041470 - DNA, 25 bp, Homo sapien
aacaatcaacagattcgaaggcaac

SEQ ID NO: 6041471 - DNA, 25 bp, Homo sapien
tacgcttacggcgatgtgccgcagc

SEQ ID NO: 6041472 - DNA, 25 bp, Homo sapien
gcagaagaactgatagctactaata

SEQ ID NO: 6041473 - DNA, 25 bp, Homo sapien
ttggtggatgtttgtactaacgcat

SEQ ID NO: 6041474 - DNA, 25 bp, Homo sapien
aacgcattccatacagcccagaatt

SEQ ID NO: 6041475 - DNA, 25 bp, Homo sapien
cgggccgtaatagcgctaaacaatc

SEQ ID NO: 6041476 - DNA, 25 bp, Homo sapien
gatgtttgtactaacgcattccata

SEQ ID NO: 6041477 - DNA, 25 bp, Homo sapien
gaattggtatctggatatttggtgg

SEQ ID NO: 6041478 - DNA, 25 bp, Homo sapien
gtatctggatatttggtggatgttt

SEQ ID NO: 6041479 - DNA, 25 bp, Homo sapien
ttgctttacgcttacggcgatgtgc

SEQ ID NO: 6041480 - DNA, 25 bp, Homo sapien
ccagaattctcagcgcaataagctc

SEQ ID NO: 6041481 - DNA, 25 bp, Homo sapien
atcaaaattcattaaagaggtacag

SEQ ID NO: 6041482 - DNA, 25 bp, Homo sapien
actaataagttgattacggaagcta

SEQ ID NO: 6041483 - DNA, 25 bp, Homo sapien
attcattaaagaggtacagagaaga

SEQ ID NO: 6041484 - DNA, 25 bp, Homo sapien
attacggaagctaagaagcagttca

SEQ ID NO: 6041485 - DNA, 25 bp, Homo sapien
aaagacccgataaagcttgggagag

SEQ ID NO: 6041486 - DNA, 25 bp, Homo sapien
caaagattaggaagcaggggcctaa

SEQ ID NO: 6041487 - DNA, 25 bp, Homo sapien
gatgatgatgaggaagcagcgggcc

SEQ ID NO: 6041488 - DNA, 25 bp, Homo sapien
cgatgtgccgcagccactacaagct

SEQ ID NO: 6041489 - DNA, 25 bp, Homo sapien
ccctgcttcctaatctttgttgcct

SEQ ID NO: 6041490 - DNA, 25 bp, Homo sapien
tctcattgaactgcttcttagcttc

SEQ ID NO: 6041491 - DNA, 25 bp, Homo sapien
catcctcttctctgtacctctttaa

SEQ ID NO: 6041492 - DNA, 25 bp, Homo sapien
cgtcaccctcttcatcctcttctct

SEQ ID NO: 6041493 - DNA, 25 bp, Homo sapien
cttctgctctcccaagctttatcgg

SEQ ID NO: 6041494 - DNA, 25 bp, Homo sapien
tacaaacatccaccaaatatccaga

SEQ ID NO: 6041495 - DNA, 25 bp, Homo sapien
ttcgtttttttcagcttcctagaca

SEQ ID NO: 6041496 - DNA, 25 bp, Homo sapien
tagctatcagttcttctgctctccc

SEQ ID NO: 6041497 - DNA, 25 bp, Homo sapien
tgcgctgagaattctgggctgtatg

SEQ ID NO: 6041498 - DNA, 25 bp, Homo sapien
ctttaatgaattttgattgtctgtc

SEQ ID NO: 6041499 - DNA, 25 bp, Homo sapien
catccaccaaatatccagataccaa

SEQ ID NO: 6041500 - DNA, 25 bp, Homo sapien
ccaaacactgcacagtagcttgtag

SEQ ID NO: 6041501 - DNA, 25 bp, Homo sapien
atcgccgtaagcgtaaagcaaggaa

SEQ ID NO: 6041502 - DNA, 25 bp, Homo sapien
cggcacatcgccgtaagcgtaaagc

SEQ ID NO: 6041503 - DNA, 25 bp, Homo sapien
ctctcccaagctttatcgggtcttt

SEQ ID NO: 6041504 - DNA, 25 bp, Homo sapien
ttctgggctgtatggaatgcgttag

SEQ ID NO: 6041505 - DNA, 25 bp, Homo sapien
tgaactgcttcttagcttccgtaat

SEQ ID NO: 6041506 - DNA, 25 bp, Homo sapien
atcggagcttattgcgctgagaatt

SEQ ID NO: 6041507 - DNA, 25 bp, Homo sapien
gtaagcgtaaagcaaggaacttaca

SEQ ID NO: 6041508 - DNA, 25 bp, Homo sapien
attcatccaaacactgcacagtagc

SEQ ID NO: 6041509 - DNA, 25 bp, Homo sapien
actgcacagtagcttgtagtggctg

SEQ ID NO: 6041510 - DNA, 25 bp, Homo sapien
tcaacttattagtagctatcagttc

SEQ ID NO: 6041511 - DNA, 25 bp, Homo sapien
gtacctctttaatgaattttgattg

SEQ ID NO: 6041512 - DNA, 25 bp, Homo sapien
gctgtatggaatgcgttagtacaaa

SEQ ID NO: 6041513 - DNA, 25 bp, Homo sapien
acagattcgtttttttcagcttcct

SEQ ID NO: 6041514 - DNA, 25 bp, Homo sapien
catccttgttaaacagattcgtttt

SEQ ID NO: 6041515 - DNA, 25 bp, Homo sapien
tggctgcggcacatcgccgtaagcg

SEQ ID NO: 6041516 - DNA, 25 bp, Homo sapien
gattgtttagcgctattacggcccg

SEQ ID NO: 6041517 - DNA, 25 bp, Homo sapien
cgttagtacaaacatccaccaaata

SEQ ID NO: 6041518 - DNA, 25 bp, Homo sapien
tccatctcgtcaccctcttcatcct

SEQ ID NO: 6041519 - DNA, 25 bp, Homo sapien
tcctcatcatcatccgtcacctgct

SEQ ID NO: 6041520 - DNA, 25 bp, Homo sapien
tttgattgtctgtctcattgaactg

SEQ ID NO: 6041521 - DNA, 25 bp, Homo sapien
tattagtagctatcagttcttctgc

SEQ ID NO: 6041522 - DNA, 25 bp, Homo sapien
cgtaaagcaaggaacttacatcctt

SEQ ID NO: 6041523 - DNA, 25 bp, Homo sapien
cctcttcatcctcttctctgtacct

SEQ ID NO: 6041524 - DNA, 25 bp, Homo sapien
tattacggcccgctgcttcctcatc

SEQ ID NO: 6041525 - DNA, 25 bp, Homo sapien
tgaattttgattgtctgtctcattg

SEQ ID NO: 6041526 - DNA, 25 bp, Homo sapien
gcttcttagcttccgtaatcaactt

SEQ ID NO: 6041527 - DNA, 25 bp, Homo sapien
ttctctgtacctctttaatgaattt

SEQ ID NO: 6041528 - DNA, 25 bp, Homo sapien
tccgtcacctgctgctcatcctcat

SEQ ID NO: 6041529 - DNA, 25 bp, Homo sapien
tcctcatcctcttccatctcgtcac

SEQ ID NO: 6041530 - DNA, 25 bp, Homo sapien
gttgccttcgaatctgttgattgtt

SEQ ID NO: 6041531 - DNA, 25 bp, Homo sapien
acctgctgctcatcctcatcctctt

SEQ ID NO: 6041532 - DNA, 25 bp, Homo sapien
tcagttcttctgctctcccaagctt

SEQ ID NO: 6041533 - DNA, 25 bp, Homo sapien
atccagataccaattcatccaaaca

SEQ ID NO: 6041534 - DNA, 25 bp, Homo sapien
cggcccgctgcttcctcatcatcat

SEQ ID NO: 6041535 - DNA, 25 bp, Homo sapien
tcatcatccgtcacctgctgctcat

SEQ ID NO: 6041536 - DNA, 25 bp, Homo sapien
ggaatgcgttagtacaaacatccac

SEQ ID NO: 6041537 - DNA, 25 bp, Homo sapien
gctgcttcctcatcatcatccgtca

SEQ ID NO: 6041538 - DNA, 25 bp, Homo sapien
tctgttgattgtttagcgctattac

SEQ ID NO: 6041539 - DNA, 25 bp, Homo sapien
ttcgaatctgttgattgtttagcgc

SEQ ID NO: 6041540 - DNA, 25 bp, Homo sapien
ccaaatatccagataccaattcatc

SEQ ID NO: 6041541 - DNA, 25 bp, Homo sapien
gcaaggaacttacatccttgttaaa

SEQ ID NO: 6041542 - DNA, 25 bp, Homo sapien
tcctcttccatctcgtcaccctctt

SEQ ID NO: 6041543 - DNA, 25 bp, Homo sapien
ccgtaatcaacttattagtagctat

SEQ ID NO: 6041544 - DNA, 25 bp, Homo sapien
cttgtagtggctgcggcacatcgcc

SEQ ID NO: 6041545 - DNA, 25 bp, Homo sapien
tgaaatcttccaatcggagcttatt

SEQ ID NO: 6041546 - DNA, 25 bp, Homo sapien
atctttgttgccttcgaatctgttg

SEQ ID NO: 6041547 - DNA, 25 bp, Homo sapien
aacttacatccttgttaaacagatt

SEQ ID NO: 6041548 - DNA, 25 bp, Homo sapien
gagaattctgggctgtatggaatgc

SEQ ID NO: 6041549 - DNA, 25 bp, Homo sapien
ttagcgctattacggcccgctgctt

SEQ ID NO: 6041550 - DNA, 25 bp, Homo sapien
cttccaatcggagcttattgcgctg

SEQ ID NO: 6041551 - DNA, 25 bp, Homo sapien
tgtctgtctcattgaactgcttctt

SEQ ID NO: 6041552 - DNA, 25 bp, Homo sapien
ataccaattcatccaaacactgcac

SEQ ID NO: 6041553 - DNA, 25 bp, Homo sapien
ggagggcaaacttgaaatcttccaa

SEQ ID NO: 6041554 - DNA, 25 bp, Homo sapien
gcttattgcgctgagaattctgggc

SEQ ID NO: 6041555 - DNA, 25 bp, Homo sapien
tagcttccgtaatcaacttattagt

SEQ ID NO: 6041556 - DNA, 25 bp, Homo sapien
ttcctaatctttgttgccttcgaat

SEQ ID NO: 6041557 - DNA, 25 bp, Homo sapien
cagtagcttgtagtggctgcggcac

SEQ ID NO: 6041558 - DNA, 25 bp, Homo sapien
caaacttgaaatcttccaatcggag

SEQ ID NO: 6041559 - DNA, 25 bp, Homo sapien
tgctcatcctcatcctcttccatct

SEQ ID NO: 6041560 - DNA, 25 bp, Homo sapien
caagctttatcgggtctttacggag

SEQ ID NO: 6041561 - DNA, 25 bp, Homo sapien
caacacacctgccatgagatcagta

SEQ ID NO: 6041562 - DNA, 25 bp, Homo sapien
aatgatgtccagacaaaacgttgat

SEQ ID NO: 6041563 - DNA, 25 bp, Homo sapien
tgaaccttcaaaattggctaagaaa

SEQ ID NO: 6041564 - DNA, 25 bp, Homo sapien
actacgcgctgagcctgacatggat

SEQ ID NO: 6041565 - DNA, 25 bp, Homo sapien
aggtgttgtcttggttacttctggg

SEQ ID NO: 6041566 - DNA, 25 bp, Homo sapien
atttggttatccaggtggtgctatc

SEQ ID NO: 6041567 - DNA, 25 bp, Homo sapien
gcctgacatggatacctctttcgtc

SEQ ID NO: 6041568 - DNA, 25 bp, Homo sapien
taacgaaatgatgtccagacaaaac

SEQ ID NO: 6041569 - DNA, 25 bp, Homo sapien
tccattagaacagcccgctgaacct

SEQ ID NO: 6041570 - DNA, 25 bp, Homo sapien
tagctctcgcgcagcgcttttatag

SEQ ID NO: 6041571 - DNA, 25 bp, Homo sapien
tcgcgcagcgcttttatagttcgtc

SEQ ID NO: 6041572 - DNA, 25 bp, Homo sapien
aatatttaacgaaatgatgtccaga

SEQ ID NO: 6041573 - DNA, 25 bp, Homo sapien
caatgtcgttactccaatggcagat

SEQ ID NO: 6041574 - DNA, 25 bp, Homo sapien
tgtcttggttacttctgggccaggt

SEQ ID NO: 6041575 - DNA, 25 bp, Homo sapien
ttcaaaattggctaagaaactacgc

SEQ ID NO: 6041576 - DNA, 25 bp, Homo sapien
cagcctctaaaaggccagagcctgc

SEQ ID NO: 6041577 - DNA, 25 bp, Homo sapien
tatagttcgtcttcccgttattaca

SEQ ID NO: 6041578 - DNA, 25 bp, Homo sapien
cgctgagcctgacatggatacctct

SEQ ID NO: 6041579 - DNA, 25 bp, Homo sapien
ccatgagatcagtagctctcgcgca

SEQ ID NO: 6041580 - DNA, 25 bp, Homo sapien
gctattaagcgttgctttcaacata

SEQ ID NO: 6041581 - DNA, 25 bp, Homo sapien
tcttcccgttattacagtgcgtctc

SEQ ID NO: 6041582 - DNA, 25 bp, Homo sapien
tgctatcctacctgtttacgatgcc

SEQ ID NO: 6041583 - DNA, 25 bp, Homo sapien
tccaatggcagatgcctttgcagac

SEQ ID NO: 6041584 - DNA, 25 bp, Homo sapien
ccaagtttcaatgttgatccattag

SEQ ID NO: 6041585 - DNA, 25 bp, Homo sapien
taagaaactacgcgctgagcctgac

SEQ ID NO: 6041586 - DNA, 25 bp, Homo sapien
tcaacatatagcataccgcaacaca

SEQ ID NO: 6041587 - DNA, 25 bp, Homo sapien
agaggctgacgtcgttggtatttct

SEQ ID NO: 6041588 - DNA, 25 bp, Homo sapien
tcaacttcgttcttccaaaacacga

SEQ ID NO: 6041589 - DNA, 25 bp, Homo sapien
cattcataacagtgataaattcaac

SEQ ID NO: 6041590 - DNA, 25 bp, Homo sapien
cgatgccattcataacagtgataaa

SEQ ID NO: 6041591 - DNA, 25 bp, Homo sapien
agaacagcccgctgaaccttcaaaa

SEQ ID NO: 6041592 - DNA, 25 bp, Homo sapien
gcccgctgaaccttcaaaattggct

SEQ ID NO: 6041593 - DNA, 25 bp, Homo sapien
tgcctttgcagacgggattccaatg

SEQ ID NO: 6041594 - DNA, 25 bp, Homo sapien
cgtctccattaccagcctctaaaag

SEQ ID NO: 6041595 - DNA, 25 bp, Homo sapien
gtgccggtcacatggcagaaggcta

SEQ ID NO: 6041596 - DNA, 25 bp, Homo sapien
cgttactccaatggcagatgccttt

SEQ ID NO: 6041597 - DNA, 25 bp, Homo sapien
ttgctttcaacatatagcataccgc

SEQ ID NO: 6041598 - DNA, 25 bp, Homo sapien
cacctgccatgagatcagtagctct

SEQ ID NO: 6041599 - DNA, 25 bp, Homo sapien
tggtcaaatatttaacgaaatgatg

SEQ ID NO: 6041600 - DNA, 25 bp, Homo sapien
taaaaggccagagcctgctccaagt

SEQ ID NO: 6041601 - DNA, 25 bp, Homo sapien
ttatccaggtggtgctatcctacct

SEQ ID NO: 6041602 - DNA, 25 bp, Homo sapien
cttccaaaacacgaacaaggtgccg

SEQ ID NO: 6041603 - DNA, 25 bp, Homo sapien
gagcttctggtaaaccaggtgttgt

SEQ ID NO: 6041604 - DNA, 25 bp, Homo sapien
ccagagcctgctccaagtttcaatg

SEQ ID NO: 6041605 - DNA, 25 bp, Homo sapien
gccaggtgccaccaatgtcgttact

SEQ ID NO: 6041606 - DNA, 25 bp, Homo sapien
cctacctgtttacgatgccattcat

SEQ ID NO: 6041607 - DNA, 25 bp, Homo sapien
ctttacagggcaagtcccaactagt

SEQ ID NO: 6041608 - DNA, 25 bp, Homo sapien
cctgctccaagtttcaatgttgatc

SEQ ID NO: 6041609 - DNA, 25 bp, Homo sapien
tactgtatttggttatccaggtggt

SEQ ID NO: 6041610 - DNA, 25 bp, Homo sapien
aacaaggtgccggtcacatggcaga

SEQ ID NO: 6041611 - DNA, 25 bp, Homo sapien
cgggattccaatggttgtctttaca

SEQ ID NO: 6041612 - DNA, 25 bp, Homo sapien
aacagtgataaattcaacttcgttc

SEQ ID NO: 6041613 - DNA, 25 bp, Homo sapien
tgttgatccattagaacagcccgct

SEQ ID NO: 6041614 - DNA, 25 bp, Homo sapien
tatagcataccgcaacacacctgcc

SEQ ID NO: 6041615 - DNA, 25 bp, Homo sapien
ggttgtctttacagggcaagtccca

SEQ ID NO: 6041616 - DNA, 25 bp, Homo sapien
taactggtggtcaaatatttaacga

SEQ ID NO: 6041617 - DNA, 25 bp, Homo sapien
tgccaccaatgtcgttactccaatg

SEQ ID NO: 6041618 - DNA, 25 bp, Homo sapien
gatcagtagctctcgcgcagcgctt

SEQ ID NO: 6041619 - DNA, 25 bp, Homo sapien
cattaccagcctctaaaaggccaga

SEQ ID NO: 6041620 - DNA, 25 bp, Homo sapien
ggttacttctgggccaggtgccacc

SEQ ID NO: 6041621 - DNA, 25 bp, Homo sapien
cgttgatactgtatttggttatcca

SEQ ID NO: 6041622 - DNA, 25 bp, Homo sapien
gtccagacaaaacgttgatactgta

SEQ ID NO: 6041623 - DNA, 25 bp, Homo sapien
tgtttacgatgccattcataacagt

SEQ ID NO: 6041624 - DNA, 25 bp, Homo sapien
agggcaagtcccaactagtgctatc

SEQ ID NO: 6041625 - DNA, 25 bp, Homo sapien
gaaggctacgccagagcttctggta

SEQ ID NO: 6041626 - DNA, 25 bp, Homo sapien
cgttattacagtgcgtctccattac

SEQ ID NO: 6041627 - DNA, 25 bp, Homo sapien
tgcagacgggattccaatggttgtc

SEQ ID NO: 6041628 - DNA, 25 bp, Homo sapien
ggtcacatggcagaaggctacgcca

SEQ ID NO: 6041629 - DNA, 25 bp, Homo sapien
aacacgaacaaggtgccggtcacat

SEQ ID NO: 6041630 - DNA, 25 bp, Homo sapien
taagcgttgctttcaacatatagca

SEQ ID NO: 6041631 - DNA, 25 bp, Homo sapien
aactagtgctatcggtactgatgct

SEQ ID NO: 6041632 - DNA, 25 bp, Homo sapien
agtcccaactagtgctatcggtact

SEQ ID NO: 6041633 - DNA, 25 bp, Homo sapien
atggcagaaggctacgccagagctt

SEQ ID NO: 6041634 - DNA, 25 bp, Homo sapien
tgatgctttccaagaggctgacgtc

SEQ ID NO: 6041635 - DNA, 25 bp, Homo sapien
ttctgggccaggtgccaccaatgtc

SEQ ID NO: 6041636 - DNA, 25 bp, Homo sapien
tgctatcggtactgatgctttccaa

SEQ ID NO: 6041637 - DNA, 25 bp, Homo sapien
catggatacctctttcgtcggttta

SEQ ID NO: 6041638 - DNA, 25 bp, Homo sapien
cggtactgatgctttccaagaggct

SEQ ID NO: 6041639 - DNA, 25 bp, Homo sapien
ctggtaaaccaggtgttgtcttggt

SEQ ID NO: 6041640 - DNA, 25 bp, Homo sapien
gttcgtcttcccgttattacagtgc

SEQ ID NO: 6041641 - DNA, 25 bp, Homo sapien
gataaattcaacttcgttcttccaa

SEQ ID NO: 6041642 - DNA, 25 bp, Homo sapien
aggtggtgctatcctacctgtttac

SEQ ID NO: 6041643 - DNA, 25 bp, Homo sapien
agcgcttttatagttcgtcttcccg

SEQ ID NO: 6041644 - DNA, 25 bp, Homo sapien
tacagtgcgtctccattaccagcct

SEQ ID NO: 6041645 - DNA, 25 bp, Homo sapien
tttccaagaggctgacgtcgttggt

SEQ ID NO: 6041646 - DNA, 25 bp, Homo sapien
ggcagatgcctttgcagacgggatt

SEQ ID NO: 6041647 - DNA, 25 bp, Homo sapien
attggctaagaaactacgcgctgag

SEQ ID NO: 6041648 - DNA, 25 bp, Homo sapien
tccaatggttgtctttacagggcaa

SEQ ID NO: 6041649 - DNA, 25 bp, Homo sapien
acaaaacgttgatactgtatttggt

SEQ ID NO: 6041650 - DNA, 25 bp, Homo sapien
acgccagagcttctggtaaaccagg

SEQ ID NO: 6041651 - DNA, 25 bp, Homo sapien
ataccgcaacacacctgccatgaga

SEQ ID NO: 6041652 - DNA, 25 bp, Homo sapien
tttcaatgttgatccattagaacag

SEQ ID NO: 6041653 - DNA, 25 bp, Homo sapien
catgtcttcctgtgtcgttggcaac

SEQ ID NO: 6041654 - DNA, 25 bp, Homo sapien
aagattctggctttgcaacttgagc

SEQ ID NO: 6041655 - DNA, 25 bp, Homo sapien
acatttgatgttgccccacacccgt

SEQ ID NO: 6041656 - DNA, 25 bp, Homo sapien
tgcttcttgactcttaaacctttta

SEQ ID NO: 6041657 - DNA, 25 bp, Homo sapien
acttctgggtcaaaatttatgaact

SEQ ID NO: 6041658 - DNA, 25 bp, Homo sapien
cgttagagtcatgttaaaggatgcg

SEQ ID NO: 6041659 - DNA, 25 bp, Homo sapien
gggtcaaaatttatgaactcgtcta

SEQ ID NO: 6041660 - DNA, 25 bp, Homo sapien
gtccagtgttgagcagcccacattt

SEQ ID NO: 6041661 - DNA, 25 bp, Homo sapien
caatgacatgtcttcctgtgtcgtt

SEQ ID NO: 6041662 - DNA, 25 bp, Homo sapien
gcagggagaccgtaacccatcgtac

SEQ ID NO: 6041663 - DNA, 25 bp, Homo sapien
tcgtagaacagggattgccattgag

SEQ ID NO: 6041664 - DNA, 25 bp, Homo sapien
cttgagcaccgatggcggcagggag

SEQ ID NO: 6041665 - DNA, 25 bp, Homo sapien
ataccttgctcttcattgttcaaaa

SEQ ID NO: 6041666 - DNA, 25 bp, Homo sapien
ttagcgtccaattcctcttgcttct

SEQ ID NO: 6041667 - DNA, 25 bp, Homo sapien
tagcctccgctagttttatgaaatc

SEQ ID NO: 6041668 - DNA, 25 bp, Homo sapien
gtaccagcttgaacggcagaactca

SEQ ID NO: 6041669 - DNA, 25 bp, Homo sapien
gtgtgggaataacgatgttcgtaga

SEQ ID NO: 6041670 - DNA, 25 bp, Homo sapien
ctccatgtccagtgttgagcagccc

SEQ ID NO: 6041671 - DNA, 25 bp, Homo sapien
ttcctgtgtcgttggcaaccttgga

SEQ ID NO: 6041672 - DNA, 25 bp, Homo sapien
gaactcaattccgttagagtcatgt

SEQ ID NO: 6041673 - DNA, 25 bp, Homo sapien
cgtcaccatcaatgtcaataaccaa

SEQ ID NO: 6041674 - DNA, 25 bp, Homo sapien
catcaatgtcaataaccaaagattc

SEQ ID NO: 6041675 - DNA, 25 bp, Homo sapien
ctggctttgcaacttgagcaccgat

SEQ ID NO: 6041676 - DNA, 25 bp, Homo sapien
aacagggattgccattgagtaacca

SEQ ID NO: 6041677 - DNA, 25 bp, Homo sapien
ggatttctccatgtccagtgttgag

SEQ ID NO: 6041678 - DNA, 25 bp, Homo sapien
agtctgttgtctttcaacttctggg

SEQ ID NO: 6041679 - DNA, 25 bp, Homo sapien
caagcaaaactgggcccttggtaga

SEQ ID NO: 6041680 - DNA, 25 bp, Homo sapien
tagaccgctaccacctgccaccatt

SEQ ID NO: 6041681 - DNA, 25 bp, Homo sapien
tgttgagcagcccacatttgatgtt

SEQ ID NO: 6041682 - DNA, 25 bp, Homo sapien
gaattctttcaacttagcgtccaat

SEQ ID NO: 6041683 - DNA, 25 bp, Homo sapien
ttcaaaatcaaaatcttcactggag

SEQ ID NO: 6041684 - DNA, 25 bp, Homo sapien
acctaaaccacctgatgtgatgaaa

SEQ ID NO: 6041685 - DNA, 25 bp, Homo sapien
tgaaatcagggttcaattgatgtgt

SEQ ID NO: 6041686 - DNA, 25 bp, Homo sapien
catcgtacctaaaccacctgatgtg

SEQ ID NO: 6041687 - DNA, 25 bp, Homo sapien
tcctcttgcttcttgactcttaaac

SEQ ID NO: 6041688 - DNA, 25 bp, Homo sapien
atggcggcagggagaccgtaaccca

SEQ ID NO: 6041689 - DNA, 25 bp, Homo sapien
tcattgttcaaaatcaaaatcttca

SEQ ID NO: 6041690 - DNA, 25 bp, Homo sapien
ttcaacttctgggtcaaaatttatg

SEQ ID NO: 6041691 - DNA, 25 bp, Homo sapien
cttttaaacccatagcctccgctag

SEQ ID NO: 6041692 - DNA, 25 bp, Homo sapien
gttaaaggatgcgtcaccatcaatg

SEQ ID NO: 6041693 - DNA, 25 bp, Homo sapien
tgtcgttggcaaccttggatagttt

SEQ ID NO: 6041694 - DNA, 25 bp, Homo sapien
cattgagtaaccataccttgctctt

SEQ ID NO: 6041695 - DNA, 25 bp, Homo sapien
tgctcttcattgttcaaaatcaaaa

SEQ ID NO: 6041696 - DNA, 25 bp, Homo sapien
gcagcccacatttgatgttgcccca

SEQ ID NO: 6041697 - DNA, 25 bp, Homo sapien
taattcagtctgttgtctttcaact

SEQ ID NO: 6041698 - DNA, 25 bp, Homo sapien
acggcagaactcaattccgttagag

SEQ ID NO: 6041699 - DNA, 25 bp, Homo sapien
tgatgtgtgtgggaataacgatgtt

SEQ ID NO: 6041700 - DNA, 25 bp, Homo sapien
agaaacgaattctttcaacttagcg

SEQ ID NO: 6041701 - DNA, 25 bp, Homo sapien
agtcatgttaaaggatgcgtcacca

SEQ ID NO: 6041702 - DNA, 25 bp, Homo sapien
gatgaaagtatgtggatttctccat

SEQ ID NO: 6041703 - DNA, 25 bp, Homo sapien
aaatttatgaactcgtctagaccgc

SEQ ID NO: 6041704 - DNA, 25 bp, Homo sapien
taaccaaagattctggctttgcaac

SEQ ID NO: 6041705 - DNA, 25 bp, Homo sapien
tggcaaaacaggaacttttttatca

SEQ ID NO: 6041706 - DNA, 25 bp, Homo sapien
tgatgttgccccacacccgttgtaa

SEQ ID NO: 6041707 - DNA, 25 bp, Homo sapien
gaataacgatgttcgtagaacaggg

SEQ ID NO: 6041708 - DNA, 25 bp, Homo sapien
gattgccattgagtaaccatacctt

SEQ ID NO: 6041709 - DNA, 25 bp, Homo sapien
aggatgcgtcaccatcaatgtcaat

SEQ ID NO: 6041710 - DNA, 25 bp, Homo sapien
gctaccacctgccaccattggcaaa

SEQ ID NO: 6041711 - DNA, 25 bp, Homo sapien
atgaactcgtctagaccgctaccac

SEQ ID NO: 6041712 - DNA, 25 bp, Homo sapien
tcaattgatgtgtgtgggaataacg

SEQ ID NO: 6041713 - DNA, 25 bp, Homo sapien
accacctgatgtgatgaaagtatgt

SEQ ID NO: 6041714 - DNA, 25 bp, Homo sapien
acctgccaccattggcaaaacagga

SEQ ID NO: 6041715 - DNA, 25 bp, Homo sapien
cacccgttgtaacaatgacatgtct

SEQ ID NO: 6041716 - DNA, 25 bp, Homo sapien
gtaaccataccttgctcttcattgt

SEQ ID NO: 6041717 - DNA, 25 bp, Homo sapien
gcttgaacggcagaactcaattccg

SEQ ID NO: 6041718 - DNA, 25 bp, Homo sapien
ccacttcaagcaaaactgggccctt

SEQ ID NO: 6041719 - DNA, 25 bp, Homo sapien
cgatgttcgtagaacagggattgcc

SEQ ID NO: 6041720 - DNA, 25 bp, Homo sapien
tgccccacacccgttgtaacaatga

SEQ ID NO: 6041721 - DNA, 25 bp, Homo sapien
caccattggcaaaacaggaactttt

SEQ ID NO: 6041722 - DNA, 25 bp, Homo sapien
ttgtaacaatgacatgtcttcctgt

SEQ ID NO: 6041723 - DNA, 25 bp, Homo sapien
atcaaaatcttcactggagtaccag

SEQ ID NO: 6041724 - DNA, 25 bp, Homo sapien
caccgatggcggcagggagaccgta

SEQ ID NO: 6041725 - DNA, 25 bp, Homo sapien
aacccatagcctccgctagttttat

SEQ ID NO: 6041726 - DNA, 25 bp, Homo sapien
actggagtaccagcttgaacggcag

SEQ ID NO: 6041727 - DNA, 25 bp, Homo sapien
agtatgtggatttctccatgtccag

SEQ ID NO: 6041728 - DNA, 25 bp, Homo sapien
caattccgttagagtcatgttaaag

SEQ ID NO: 6041729 - DNA, 25 bp, Homo sapien
ccgctagttttatgaaatcagggtt

SEQ ID NO: 6041730 - DNA, 25 bp, Homo sapien
ttgcaacttgagcaccgatggcggc

SEQ ID NO: 6041731 - DNA, 25 bp, Homo sapien
tgtcaataaccaaagattctggctt

SEQ ID NO: 6041732 - DNA, 25 bp, Homo sapien
ttgtctttcaacttctgggtcaaaa

SEQ ID NO: 6041733 - DNA, 25 bp, Homo sapien
gttttatgaaatcagggttcaattg

SEQ ID NO: 6041734 - DNA, 25 bp, Homo sapien
caacttccacttcaagcaaaactgg

SEQ ID NO: 6041735 - DNA, 25 bp, Homo sapien
tgatgtgatgaaagtatgtggattt

SEQ ID NO: 6041736 - DNA, 25 bp, Homo sapien
ttcaacttagcgtccaattcctctt

SEQ ID NO: 6041737 - DNA, 25 bp, Homo sapien
tcgtctagaccgctaccacctgcca

SEQ ID NO: 6041738 - DNA, 25 bp, Homo sapien
cagggttcaattgatgtgtgtggga

SEQ ID NO: 6041739 - DNA, 25 bp, Homo sapien
atcttcactggagtaccagcttgaa

SEQ ID NO: 6041740 - DNA, 25 bp, Homo sapien
tccaattcctcttgcttcttgactc

SEQ ID NO: 6041741 - DNA, 25 bp, Homo sapien
gtcccagttagatctttcaagggtc

SEQ ID NO: 6041742 - DNA, 25 bp, Homo sapien
gagttgttccaaacgaaaaagctga

SEQ ID NO: 6041743 - DNA, 25 bp, Homo sapien
ttccaaacgaaaaagctgatgatga

SEQ ID NO: 6041744 - DNA, 25 bp, Homo sapien
ttgggtcacaatgactgggtttccc

SEQ ID NO: 6041745 - DNA, 25 bp, Homo sapien
ctgcttcttgggacaagaccttgag

SEQ ID NO: 6041746 - DNA, 25 bp, Homo sapien
tgtccgttgacattgacaagaaggc

SEQ ID NO: 6041747 - DNA, 25 bp, Homo sapien
acctattgttgtccgcttcccgtga

SEQ ID NO: 6041748 - DNA, 25 bp, Homo sapien
ttggccactttgttgggtcacaatg

SEQ ID NO: 6041749 - DNA, 25 bp, Homo sapien
cttacgctttgtctgcttcttggga

SEQ ID NO: 6041750 - DNA, 25 bp, Homo sapien
ctttgtctgcttcttgggacaagac

SEQ ID NO: 6041751 - DNA, 25 bp, Homo sapien
tcgtcggtcacaagtccgatgttat

SEQ ID NO: 6041752 - DNA, 25 bp, Homo sapien
cgtgacaagaccatcaaggtctgga

SEQ ID NO: 6041753 - DNA, 25 bp, Homo sapien
caagtcagagttgttccaaacgaaa

SEQ ID NO: 6041754 - DNA, 25 bp, Homo sapien
tctttcaagggtcacagtcacattg

SEQ ID NO: 6041755 - DNA, 25 bp, Homo sapien
gacttcatcggtcacaactccaaca

SEQ ID NO: 6041756 - DNA, 25 bp, Homo sapien
tctcctggaagttgactggtgacga

SEQ ID NO: 6041757 - DNA, 25 bp, Homo sapien
acttctgctggtcaaccaaacctat

SEQ ID NO: 6041758 - DNA, 25 bp, Homo sapien
atcaaggtctggaccatcaaaggtc

SEQ ID NO: 6041759 - DNA, 25 bp, Homo sapien
ttgacattgacaagaaggcttccat

SEQ ID NO: 6041760 - DNA, 25 bp, Homo sapien
actgtactttgactgctgacggtgc

SEQ ID NO: 6041761 - DNA, 25 bp, Homo sapien
ttgacaagaaggcttccatgattat

SEQ ID NO: 6041762 - DNA, 25 bp, Homo sapien
ctttgatctcctggaagttgactgg

SEQ ID NO: 6041763 - DNA, 25 bp, Homo sapien
ggtttcccaagtcagagttgttcca

SEQ ID NO: 6041764 - DNA, 25 bp, Homo sapien
ttggctacttctgctggtcaaccaa

SEQ ID NO: 6041765 - DNA, 25 bp, Homo sapien
gttagatctttcaagggtcacagtc

SEQ ID NO: 6041766 - DNA, 25 bp, Homo sapien
aaagattcgtcggtcacaagtccga

SEQ ID NO: 6041767 - DNA, 25 bp, Homo sapien
acaagaccttgagattatgggatgt

SEQ ID NO: 6041768 - DNA, 25 bp, Homo sapien
ggaagttgactggtgacgaccaaaa

SEQ ID NO: 6041769 - DNA, 25 bp, Homo sapien
gtctggaccatcaaaggtcaatgtt

SEQ ID NO: 6041770 - DNA, 25 bp, Homo sapien
aaaggtcaatgtttggccactttgt

SEQ ID NO: 6041771 - DNA, 25 bp, Homo sapien
actctgtcaccatcatttctgccgg

SEQ ID NO: 6041772 - DNA, 25 bp, Homo sapien
agtccgatgttatgtccgttgacat

SEQ ID NO: 6041773 - DNA, 25 bp, Homo sapien
tgacgaccaaaagtttggtgtccca

SEQ ID NO: 6041774 - DNA, 25 bp, Homo sapien
cactttgactgcttccccagacgga

SEQ ID NO: 6041775 - DNA, 25 bp, Homo sapien
tctctggttcccgtgacaagaccat

SEQ ID NO: 6041776 - DNA, 25 bp, Homo sapien
gctggtcaaccaaacctattgttgt

SEQ ID NO: 6041777 - DNA, 25 bp, Homo sapien
tgactggtgacgaccaaaagtttgg

SEQ ID NO: 6041778 - DNA, 25 bp, Homo sapien
atcaacactttgactgcttccccag

SEQ ID NO: 6041779 - DNA, 25 bp, Homo sapien
ttggaaggtcacaacggttgggtca

SEQ ID NO: 6041780 - DNA, 25 bp, Homo sapien
ccttgagattatgggatgttgccac

SEQ ID NO: 6041781 - DNA, 25 bp, Homo sapien
atgatgactctgtcaccatcatttc

SEQ ID NO: 6041782 - DNA, 25 bp, Homo sapien
acgaaaaagctgatgatgactctgt

SEQ ID NO: 6041783 - DNA, 25 bp, Homo sapien
caaaagtttggtgtcccagttagat

SEQ ID NO: 6041784 - DNA, 25 bp, Homo sapien
gggatgttgccaccggtgaaaccta

SEQ ID NO: 6041785 - DNA, 25 bp, Homo sapien
tttggtgtcccagttagatctttca

SEQ ID NO: 6041786 - DNA, 25 bp, Homo sapien
acatctttggctacttctgctggtc

SEQ ID NO: 6041787 - DNA, 25 bp, Homo sapien
caatgtttggccactttgttgggtc

SEQ ID NO: 6041788 - DNA, 25 bp, Homo sapien
tgggtcacatctttggctacttctg

SEQ ID NO: 6041789 - DNA, 25 bp, Homo sapien
atgttatgtccgttgacattgacaa

SEQ ID NO: 6041790 - DNA, 25 bp, Homo sapien
cttgggacaagaccttgagattatg

SEQ ID NO: 6041791 - DNA, 25 bp, Homo sapien
caattccaaattgaagctgacttca

SEQ ID NO: 6041792 - DNA, 25 bp, Homo sapien
tcatttctgccggtaacgacaaaat

SEQ ID NO: 6041793 - DNA, 25 bp, Homo sapien
aagaccatcaaggtctggaccatca

SEQ ID NO: 6041794 - DNA, 25 bp, Homo sapien
ctgctgacggtgcttacgctttgtc

SEQ ID NO: 6041795 - DNA, 25 bp, Homo sapien
gaagctgacttcatcggtcacaact

SEQ ID NO: 6041796 - DNA, 25 bp, Homo sapien
agaaggcttccatgattatctctgg

SEQ ID NO: 6041797 - DNA, 25 bp, Homo sapien
tcaccatcatttctgccggtaacga

SEQ ID NO: 6041798 - DNA, 25 bp, Homo sapien
tgccaccggtgaaacctaccaaaga

SEQ ID NO: 6041799 - DNA, 25 bp, Homo sapien
tctgccggtaacgacaaaatggtta

SEQ ID NO: 6041800 - DNA, 25 bp, Homo sapien
ctttgactgctgacggtgcttacgc

SEQ ID NO: 6041801 - DNA, 25 bp, Homo sapien
tgattatctctggttcccgtgacaa

SEQ ID NO: 6041802 - DNA, 25 bp, Homo sapien
gattatgggatgttgccaccggtga

SEQ ID NO: 6041803 - DNA, 25 bp, Homo sapien
accatcaaaggtcaatgtttggcca

SEQ ID NO: 6041804 - DNA, 25 bp, Homo sapien
tgttgtccgcttcccgtgataagac

SEQ ID NO: 6041805 - DNA, 25 bp, Homo sapien
tccaagactgtactttgactgctga

SEQ ID NO: 6041806 - DNA, 25 bp, Homo sapien
aacggttgggtcacatctttggcta

SEQ ID NO: 6041807 - DNA, 25 bp, Homo sapien
cacaactccaacatcaacactttga

SEQ ID NO: 6041808 - DNA, 25 bp, Homo sapien
gtcacaagtccgatgttatgtccgt

SEQ ID NO: 6041809 - DNA, 25 bp, Homo sapien
actttgttgggtcacaatgactggg

SEQ ID NO: 6041810 - DNA, 25 bp, Homo sapien
acggtgcttacgctttgtctgcttc

SEQ ID NO: 6041811 - DNA, 25 bp, Homo sapien
cacattgtccaagactgtactttga

SEQ ID NO: 6041812 - DNA, 25 bp, Homo sapien
cctaccaaagattcgtcggtcacaa

SEQ ID NO: 6041813 - DNA, 25 bp, Homo sapien
caaattgaagctgacttcatcggtc

SEQ ID NO: 6041814 - DNA, 25 bp, Homo sapien
tccaacatcaacactttgactgctt

SEQ ID NO: 6041815 - DNA, 25 bp, Homo sapien
ttaaaccaattccaaattgaagctg

SEQ ID NO: 6041816 - DNA, 25 bp, Homo sapien
aagctgatgatgactctgtcaccat

SEQ ID NO: 6041817 - DNA, 25 bp, Homo sapien
ccgcttcccgtgataagactttgat

SEQ ID NO: 6041818 - DNA, 25 bp, Homo sapien
caaccaaacctattgttgtccgctt

SEQ ID NO: 6041819 - DNA, 25 bp, Homo sapien
cccgtgataagactttgatctcctg

SEQ ID NO: 6041820 - DNA, 25 bp, Homo sapien
atcggtcacaactccaacatcaaca

SEQ ID NO: 6041821 - DNA, 25 bp, Homo sapien
cacagtcacattgtccaagactgta

SEQ ID NO: 6041822 - DNA, 25 bp, Homo sapien
aagggtcacagtcacattgtccaag

SEQ ID NO: 6041823 - DNA, 25 bp, Homo sapien
gactgcttccccagacggaactttg

SEQ ID NO: 6041824 - DNA, 25 bp, Homo sapien
cttccatgattatctctggttcccg

SEQ ID NO: 6041825 - DNA, 25 bp, Homo sapien
cacaatgactgggtttcccaagtca

SEQ ID NO: 6041826 - DNA, 25 bp, Homo sapien
ggtcacaacggttgggtcacatctt

SEQ ID NO: 6041827 - DNA, 25 bp, Homo sapien
gactgggtttcccaagtcagagttg

SEQ ID NO: 6041828 - DNA, 25 bp, Homo sapien
ggttcccgtgacaagaccatcaagg

SEQ ID NO: 6041829 - DNA, 25 bp, Homo sapien
ataagactttgatctcctggaagtt

SEQ ID NO: 6041830 - DNA, 25 bp, Homo sapien
tctgacttgggaaacccagtcattg

SEQ ID NO: 6041831 - DNA, 25 bp, Homo sapien
tcatcagctttttcgtttggaacaa

SEQ ID NO: 6041832 - DNA, 25 bp, Homo sapien
ctggggaagcagtcaaagtgttgat

SEQ ID NO: 6041833 - DNA, 25 bp, Homo sapien
atcgaccaagtattgtgggtccaaa

SEQ ID NO: 6041834 - DNA, 25 bp, Homo sapien
taatttcaccgtccttaccagcgga

SEQ ID NO: 6041835 - DNA, 25 bp, Homo sapien
accaagccaaagaaacagcatgtgg

SEQ ID NO: 6041836 - DNA, 25 bp, Homo sapien
tcaaagttccgtctggggaagcagt

SEQ ID NO: 6041837 - DNA, 25 bp, Homo sapien
gatggtcttgtcacgggaaccagag

SEQ ID NO: 6041838 - DNA, 25 bp, Homo sapien
agcttcaatttggaattggtttaag

SEQ ID NO: 6041839 - DNA, 25 bp, Homo sapien
tcagcagaccaagccaaagaaacag

SEQ ID NO: 6041840 - DNA, 25 bp, Homo sapien
tcaaagtgttgatgttggagttgtg

SEQ ID NO: 6041841 - DNA, 25 bp, Homo sapien
gttgtgaccgatgaagtcagcttca

SEQ ID NO: 6041842 - DNA, 25 bp, Homo sapien
ttgggaaacccagtcattgtgaccc

SEQ ID NO: 6041843 - DNA, 25 bp, Homo sapien
aaacagcatgtggttcagcggcctt

SEQ ID NO: 6041844 - DNA, 25 bp, Homo sapien
agccaagttccacaacataatttca

SEQ ID NO: 6041845 - DNA, 25 bp, Homo sapien
gtacatagccttcttagcagccaag

SEQ ID NO: 6041846 - DNA, 25 bp, Homo sapien
tgtcgttaccggcagaaatgatggt

SEQ ID NO: 6041847 - DNA, 25 bp, Homo sapien
cttagcagccaagttccacaacata

SEQ ID NO: 6041848 - DNA, 25 bp, Homo sapien
aaagtttgaccgtcagcagaccaag

SEQ ID NO: 6041849 - DNA, 25 bp, Homo sapien
atgatggtgacagagtcatcatcag

SEQ ID NO: 6041850 - DNA, 25 bp, Homo sapien
ggtccagaccttgatggtcttgtca

SEQ ID NO: 6041851 - DNA, 25 bp, Homo sapien
ccaaagaaacagcatgtggttcagc

SEQ ID NO: 6041852 - DNA, 25 bp, Homo sapien
agtggcagcagccaaccagtatctg

SEQ ID NO: 6041853 - DNA, 25 bp, Homo sapien
atcttgggcagacaaagtgtacata

SEQ ID NO: 6041854 - DNA, 25 bp, Homo sapien
caaacattgacctttgatggtccag

SEQ ID NO: 6041855 - DNA, 25 bp, Homo sapien
aagcaatcaaagttccgtctgggga

SEQ ID NO: 6041856 - DNA, 25 bp, Homo sapien
aaattctggtctcaagtcatcgacc

SEQ ID NO: 6041857 - DNA, 25 bp, Homo sapien
aaagaccttaataccggtagcagtg

SEQ ID NO: 6041858 - DNA, 25 bp, Homo sapien
agccttcttgtcaatgtcaacggac

SEQ ID NO: 6041859 - DNA, 25 bp, Homo sapien
ggcagacaaagtgtacatagccttc

SEQ ID NO: 6041860 - DNA, 25 bp, Homo sapien
gaccttgatggtcttgtcacgggaa

SEQ ID NO: 6041861 - DNA, 25 bp, Homo sapien
caagtattgtgggtccaaagaaaag

SEQ ID NO: 6041862 - DNA, 25 bp, Homo sapien
acgggaaccagagataatcatggaa

SEQ ID NO: 6041863 - DNA, 25 bp, Homo sapien
tttgatggtccagaccttgatggtc

SEQ ID NO: 6041864 - DNA, 25 bp, Homo sapien
gctgtaaccagcaaattctggtctc

SEQ ID NO: 6041865 - DNA, 25 bp, Homo sapien
accagagataatcatggaagccttc

SEQ ID NO: 6041866 - DNA, 25 bp, Homo sapien
aagcagtcaaagtgttgatgttgga

SEQ ID NO: 6041867 - DNA, 25 bp, Homo sapien
gtcattgtgacccaacaaagtggcc

SEQ ID NO: 6041868 - DNA, 25 bp, Homo sapien
caagtcatcgaccaagtattgtggg

SEQ ID NO: 6041869 - DNA, 25 bp, Homo sapien
aagagaaaacttcatcttgggcaga

SEQ ID NO: 6041870 - DNA, 25 bp, Homo sapien
ttgacctttgatggtccagaccttg

SEQ ID NO: 6041871 - DNA, 25 bp, Homo sapien
accttaataccggtagcagtggcag

SEQ ID NO: 6041872 - DNA, 25 bp, Homo sapien
gataatcatggaagccttcttgtca

SEQ ID NO: 6041873 - DNA, 25 bp, Homo sapien
aacccagtcattgtgacccaacaaa

SEQ ID NO: 6041874 - DNA, 25 bp, Homo sapien
ggccttgctgtaaccagcaaattct

SEQ ID NO: 6041875 - DNA, 25 bp, Homo sapien
gtttggaacaactctgacttgggaa

SEQ ID NO: 6041876 - DNA, 25 bp, Homo sapien
caccgtccttaccagcggaagcaat

SEQ ID NO: 6041877 - DNA, 25 bp, Homo sapien
tgacgttgtcggtgtaaccggcaaa

SEQ ID NO: 6041878 - DNA, 25 bp, Homo sapien
ggtagcagtggcagcagccaaccag

SEQ ID NO: 6041879 - DNA, 25 bp, Homo sapien
cttgtcacgggaaccagagataatc

SEQ ID NO: 6041880 - DNA, 25 bp, Homo sapien
agtggccaaacattgacctttgatg

SEQ ID NO: 6041881 - DNA, 25 bp, Homo sapien
caacaaagtggccaaacattgacct

SEQ ID NO: 6041882 - DNA, 25 bp, Homo sapien
aagccaaagagaaaacttcatcttg

SEQ ID NO: 6041883 - DNA, 25 bp, Homo sapien
ccaaccagtatctgtttggagagaa

SEQ ID NO: 6041884 - DNA, 25 bp, Homo sapien
cagcggaagcaatcaaagttccgtc

SEQ ID NO: 6041885 - DNA, 25 bp, Homo sapien
tgtttggagagaaagccaaagagaa

SEQ ID NO: 6041886 - DNA, 25 bp, Homo sapien
tgttgatgttggagttgtgaccgat

SEQ ID NO: 6041887 - DNA, 25 bp, Homo sapien
aataccggtagcagtggcagcagcc

SEQ ID NO: 6041888 - DNA, 25 bp, Homo sapien
gcagaaatgatggtgacagagtcat

SEQ ID NO: 6041889 - DNA, 25 bp, Homo sapien
tgaccgtcagcagaccaagccaaag

SEQ ID NO: 6041890 - DNA, 25 bp, Homo sapien
cagcagccaaccagtatctgtttgg

SEQ ID NO: 6041891 - DNA, 25 bp, Homo sapien
catgtggttcagcggccttgctgta

SEQ ID NO: 6041892 - DNA, 25 bp, Homo sapien
gagagaaagccaaagagaaaacttc

SEQ ID NO: 6041893 - DNA, 25 bp, Homo sapien
gttccacaacataatttcaccgtcc

SEQ ID NO: 6041894 - DNA, 25 bp, Homo sapien
caacataatttcaccgtccttacca

SEQ ID NO: 6041895 - DNA, 25 bp, Homo sapien
aacaactctgacttgggaaacccag

SEQ ID NO: 6041896 - DNA, 25 bp, Homo sapien
gcaaacaaagtttgaccgtcagcag

SEQ ID NO: 6041897 - DNA, 25 bp, Homo sapien
gaagtcagcttcaatttggaattgg

SEQ ID NO: 6041898 - DNA, 25 bp, Homo sapien
gctttttcgtttggaacaactctga

SEQ ID NO: 6041899 - DNA, 25 bp, Homo sapien
gtgacagagtcatcatcagcttttt

SEQ ID NO: 6041900 - DNA, 25 bp, Homo sapien
agtatctgtttggagagaaagccaa

SEQ ID NO: 6041901 - DNA, 25 bp, Homo sapien
aaacttcatcttgggcagacaaagt

SEQ ID NO: 6041902 - DNA, 25 bp, Homo sapien
agccttcttagcagccaagttccac

SEQ ID NO: 6041903 - DNA, 25 bp, Homo sapien
gagtcatcatcagctttttcgtttg

SEQ ID NO: 6041904 - DNA, 25 bp, Homo sapien
ttccgtctggggaagcagtcaaagt

SEQ ID NO: 6041905 - DNA, 25 bp, Homo sapien
accgatgaagtcagcttcaatttgg

SEQ ID NO: 6041906 - DNA, 25 bp, Homo sapien
ttaccggcagaaatgatggtgacag

SEQ ID NO: 6041907 - DNA, 25 bp, Homo sapien
tggtctcaagtcatcgaccaagtat

SEQ ID NO: 6041908 - DNA, 25 bp, Homo sapien
ttcagcggccttgctgtaaccagca

SEQ ID NO: 6041909 - DNA, 25 bp, Homo sapien
ccttaccagcggaagcaatcaaagt

SEQ ID NO: 6041910 - DNA, 25 bp, Homo sapien
gttggagttgtgaccgatgaagtca

SEQ ID NO: 6041911 - DNA, 25 bp, Homo sapien
accagcaaattctggtctcaagtca

SEQ ID NO: 6041912 - DNA, 25 bp, Homo sapien
gtgacccaacaaagtggccaaacat

SEQ ID NO: 6041913 - DNA, 25 bp, Homo sapien
ccattttgtcgttaccggcagaaat

SEQ ID NO: 6041914 - DNA, 25 bp, Homo sapien
caaagtgtacatagccttcttagca

SEQ ID NO: 6041915 - DNA, 25 bp, Homo sapien
catggaagccttcttgtcaatgtca

SEQ ID NO: 6041916 - DNA, 25 bp, Homo sapien
taaatccatgtatttcaaagtagat

SEQ ID NO: 6041917 - DNA, 25 bp, Homo sapien
atatctggacaataaatccatgtat

SEQ ID NO: 6041918 - DNA, 25 bp, Homo sapien
tctacttggtatgggagcgccgttt

SEQ ID NO: 6041919 - DNA, 25 bp, Homo sapien
attcttttcgaaagatttagtgtca

SEQ ID NO: 6041920 - DNA, 25 bp, Homo sapien
cacggatgatcagacgcggtttgta

SEQ ID NO: 6041921 - DNA, 25 bp, Homo sapien
gctaaaaggaaagaagaatggtgga

SEQ ID NO: 6041922 - DNA, 25 bp, Homo sapien
gtatcaactcttttgccaatgtctt

SEQ ID NO: 6041923 - DNA, 25 bp, Homo sapien
taagctatatctggacaataaatcc

SEQ ID NO: 6041924 - DNA, 25 bp, Homo sapien
gccgtttatttcgatcctgaaacaa

SEQ ID NO: 6041925 - DNA, 25 bp, Homo sapien
aaaaggatccaagtatcaactcttt

SEQ ID NO: 6041926 - DNA, 25 bp, Homo sapien
tggaaaaggcaagaataagccctca

SEQ ID NO: 6041927 - DNA, 25 bp, Homo sapien
aaactggatcaacaaagccgatggg

SEQ ID NO: 6041928 - DNA, 25 bp, Homo sapien
cctgaatatacaataagaagagtaa

SEQ ID NO: 6041929 - DNA, 25 bp, Homo sapien
gcgactacccagaagctaaaaggaa

SEQ ID NO: 6041930 - DNA, 25 bp, Homo sapien
ctgcttcaaatacacggatgatcag

SEQ ID NO: 6041931 - DNA, 25 bp, Homo sapien
aagagtaaaaggatccaagtatcaa

SEQ ID NO: 6041932 - DNA, 25 bp, Homo sapien
aaggaacataagacagattcagttt

SEQ ID NO: 6041933 - DNA, 25 bp, Homo sapien
tatacaataagaagagtaaaaggat

SEQ ID NO: 6041934 - DNA, 25 bp, Homo sapien
aataagaagagtaaaaggatccaag

SEQ ID NO: 6041935 - DNA, 25 bp, Homo sapien
gatcaacaaagccgatgggattctt

SEQ ID NO: 6041936 - DNA, 25 bp, Homo sapien
gacgcggtttgtaggacatgttgca

SEQ ID NO: 6041937 - DNA, 25 bp, Homo sapien
agacactcttttcgtttgtgaatac

SEQ ID NO: 6041938 - DNA, 25 bp, Homo sapien
tgatcagacgcggtttgtaggacat

SEQ ID NO: 6041939 - DNA, 25 bp, Homo sapien
gagaccaagggtcagctttcctctg

SEQ ID NO: 6041940 - DNA, 25 bp, Homo sapien
aggacatgttgcaagttgtccattt

SEQ ID NO: 6041941 - DNA, 25 bp, Homo sapien
ttcgaaagatttagtgtcatatcag

SEQ ID NO: 6041942 - DNA, 25 bp, Homo sapien
aacaaaaaggctagggtgctccgag

SEQ ID NO: 6041943 - DNA, 25 bp, Homo sapien
tgctccgagaccaagggtcagcttt

SEQ ID NO: 6041944 - DNA, 25 bp, Homo sapien
tccatttcaatatcgtgttccaggc

SEQ ID NO: 6041945 - DNA, 25 bp, Homo sapien
ccagaagctaaaaggaaagaagaat

SEQ ID NO: 6041946 - DNA, 25 bp, Homo sapien
caagagtcctgaatatacaataaga

SEQ ID NO: 6041947 - DNA, 25 bp, Homo sapien
aatactgaacgaaaggaacataaga

SEQ ID NO: 6041948 - DNA, 25 bp, Homo sapien
aagttgtccatttcaatatcgtgtt

SEQ ID NO: 6041949 - DNA, 25 bp, Homo sapien
aataaaaaattctctacttggtatg

SEQ ID NO: 6041950 - DNA, 25 bp, Homo sapien
gggagcgccgtttatttcgatcctg

SEQ ID NO: 6041951 - DNA, 25 bp, Homo sapien
ctggctagacactcttttcgtttgt

SEQ ID NO: 6041952 - DNA, 25 bp, Homo sapien
atatcagcaaaataatctagcgtgc

SEQ ID NO: 6041953 - DNA, 25 bp, Homo sapien
atgtctttgtcttttcactaagcta

SEQ ID NO: 6041954 - DNA, 25 bp, Homo sapien
atatggaatactgaacgaaaggaac

SEQ ID NO: 6041955 - DNA, 25 bp, Homo sapien
gtttgtaggacatgttgcaagttgt

SEQ ID NO: 6041956 - DNA, 25 bp, Homo sapien
tggtatgggagcgccgtttatttcg

SEQ ID NO: 6041957 - DNA, 25 bp, Homo sapien
aaagagatgctatatggaatactga

SEQ ID NO: 6041958 - DNA, 25 bp, Homo sapien
ttccaggcaaaataaaatacaagag

SEQ ID NO: 6041959 - DNA, 25 bp, Homo sapien
cagctttcctctgtttctaacagcc

SEQ ID NO: 6041960 - DNA, 25 bp, Homo sapien
actcaaaaagagatgctatatggaa

SEQ ID NO: 6041961 - DNA, 25 bp, Homo sapien
ccaatactggctagacactcttttc

SEQ ID NO: 6041962 - DNA, 25 bp, Homo sapien
aaattctctacttggtatgggagcg

SEQ ID NO: 6041963 - DNA, 25 bp, Homo sapien
tgaatactgcttcaaatacacggat

SEQ ID NO: 6041964 - DNA, 25 bp, Homo sapien
tcctctgtttctaacagccaatact

SEQ ID NO: 6041965 - DNA, 25 bp, Homo sapien
aaagaagaatggtggaaaaggcaag

SEQ ID NO: 6041966 - DNA, 25 bp, Homo sapien
tcaatatcgtgttccaggcaaaata

SEQ ID NO: 6041967 - DNA, 25 bp, Homo sapien
gtagatcattatgaattttacatag

SEQ ID NO: 6041968 - DNA, 25 bp, Homo sapien
aggcaagaataagccctcagcaaaa

SEQ ID NO: 6041969 - DNA, 25 bp, Homo sapien
gatgggattcttttcgaaagattta

SEQ ID NO: 6041970 - DNA, 25 bp, Homo sapien
acagattcagtttggactgaataaa

SEQ ID NO: 6041971 - DNA, 25 bp, Homo sapien
tcctgaaacaaaaaggctagggtgc

SEQ ID NO: 6041972 - DNA, 25 bp, Homo sapien
gtttctaacagccaatactggctag

SEQ ID NO: 6041973 - DNA, 25 bp, Homo sapien
tttcactaagctatatctggacaat

SEQ ID NO: 6041974 - DNA, 25 bp, Homo sapien
ttcaaagtagatcattatgaatttt

SEQ ID NO: 6041975 - DNA, 25 bp, Homo sapien
cgtttgtgaatactgcttcaaatac

SEQ ID NO: 6041976 - DNA, 25 bp, Homo sapien
atccaagtatcaactcttttgccaa

SEQ ID NO: 6041977 - DNA, 25 bp, Homo sapien
tcagtttggactgaataaaaaattc

SEQ ID NO: 6041978 - DNA, 25 bp, Homo sapien
cataagacagattcagtttggactg

SEQ ID NO: 6041979 - DNA, 25 bp, Homo sapien
agtgtcatatcagcaaaataatcta

SEQ ID NO: 6041980 - DNA, 25 bp, Homo sapien
caaagccgatgggattcttttcgaa

SEQ ID NO: 6041981 - DNA, 25 bp, Homo sapien
tttatgaaactggatcaacaaagcc

SEQ ID NO: 6041982 - DNA, 25 bp, Homo sapien
aaaaggctagggtgctccgagacca

SEQ ID NO: 6041983 - DNA, 25 bp, Homo sapien
taaaatacaagagtcctgaatatac

SEQ ID NO: 6041984 - DNA, 25 bp, Homo sapien
caaatacacggatgatcagacgcgg

SEQ ID NO: 6041985 - DNA, 25 bp, Homo sapien
ttgccaatgtctttgtcttttcact

SEQ ID NO: 6041986 - DNA, 25 bp, Homo sapien
gaatggtggaaaaggcaagaataag

SEQ ID NO: 6041987 - DNA, 25 bp, Homo sapien
tcttttcgtttgtgaatactgcttc

SEQ ID NO: 6041988 - DNA, 25 bp, Homo sapien
taacagccaatactggctagacact

SEQ ID NO: 6041989 - DNA, 25 bp, Homo sapien
gatgctatatggaatactgaacgaa

SEQ ID NO: 6041990 - DNA, 25 bp, Homo sapien
aagggtcagctttcctctgtttcta

SEQ ID NO: 6041991 - DNA, 25 bp, Homo sapien
ttgtcttttcactaagctatatctg

SEQ ID NO: 6041992 - DNA, 25 bp, Homo sapien
tggactgaataaaaaattctctact

SEQ ID NO: 6041993 - DNA, 25 bp, Homo sapien
tgttgcaagttgtccatttcaatat

SEQ ID NO: 6041994 - DNA, 25 bp, Homo sapien
aattttacatagtttatgaaactgg

SEQ ID NO: 6041995 - DNA, 25 bp, Homo sapien
tttcgatcctgaaacaaaaaggcta

SEQ ID NO: 6041996 - DNA, 25 bp, Homo sapien
gaacgaaaggaacataagacagatt

SEQ ID NO: 6041997 - DNA, 25 bp, Homo sapien
gcaaaataatctagcgtgcatcttg

SEQ ID NO: 6041998 - DNA, 25 bp, Homo sapien
actcttttgccaatgtctttgtctt

SEQ ID NO: 6041999 - DNA, 25 bp, Homo sapien
cattatgaattttacatagtttatg

SEQ ID NO: 6042000 - DNA, 25 bp, Homo sapien
agatttagtgtcatatcagcaaaat

SEQ ID NO: 6042001 - DNA, 25 bp, Homo sapien
tcgtgttccaggcaaaataaaatac

SEQ ID NO: 6042002 - DNA, 25 bp, Homo sapien
ggacaataaatccatgtatttcaaa

SEQ ID NO: 6042003 - DNA, 25 bp, Homo sapien
acatagtttatgaaactggatcaac

SEQ ID NO: 6042004 - DNA, 25 bp, Homo sapien
ctagggtgctccgagaccaagggtc

SEQ ID NO: 6042005 - DNA, 25 bp, Homo sapien
gcaaaataaaatacaagagtcctga

SEQ ID NO: 6042006 - DNA, 25 bp, Homo sapien
aaaaaactcaaaaagagatgctata

SEQ ID NO: 6042007 - DNA, 25 bp, Homo sapien
catgtatttcaaagtagatcattat

SEQ ID NO: 6042008 - DNA, 25 bp, Homo sapien
gaataagccctcagcaaaaattaaa

SEQ ID NO: 6042009 - DNA, 25 bp, Homo sapien
ggatccttttactcttcttattgta

SEQ ID NO: 6042010 - DNA, 25 bp, Homo sapien
taatgatctactttgaaatacatgg

SEQ ID NO: 6042011 - DNA, 25 bp, Homo sapien
acagagtatctgtgaccaatatttc

SEQ ID NO: 6042012 - DNA, 25 bp, Homo sapien
ccatcggctttgttgatccagtttc

SEQ ID NO: 6042013 - DNA, 25 bp, Homo sapien
agagttgatacttggatccttttac

SEQ ID NO: 6042014 - DNA, 25 bp, Homo sapien
cacgatggaaagatcctccagggtc

SEQ ID NO: 6042015 - DNA, 25 bp, Homo sapien
acttctggccctgatattacacctt

SEQ ID NO: 6042016 - DNA, 25 bp, Homo sapien
gactcttgtattttattttgcctgg

SEQ ID NO: 6042017 - DNA, 25 bp, Homo sapien
cgaaaagaatcccatcggctttgtt

SEQ ID NO: 6042018 - DNA, 25 bp, Homo sapien
atgggcgaggtcaccttcaataagg

SEQ ID NO: 6042019 - DNA, 25 bp, Homo sapien
gacattggcaaaagagttgatactt

SEQ ID NO: 6042020 - DNA, 25 bp, Homo sapien
tatgtaaaattcataatgatctact

SEQ ID NO: 6042021 - DNA, 25 bp, Homo sapien
cgattagtccaaaaggtgataacgg

SEQ ID NO: 6042022 - DNA, 25 bp, Homo sapien
ttcaggactcttgtattttattttg

SEQ ID NO: 6042023 - DNA, 25 bp, Homo sapien
ctccccaatacagttcaagtgcttc

SEQ ID NO: 6042024 - DNA, 25 bp, Homo sapien
tctcattccagtcacgatggaaaga

SEQ ID NO: 6042025 - DNA, 25 bp, Homo sapien
gtgccaacagagtatctgtgaccaa

SEQ ID NO: 6042026 - DNA, 25 bp, Homo sapien
tatctgtgaccaatatttcaagtac

SEQ ID NO: 6042027 - DNA, 25 bp, Homo sapien
aacatcattgactctcattccagtc

SEQ ID NO: 6042028 - DNA, 25 bp, Homo sapien
caaaataacatcattgactctcatt

SEQ ID NO: 6042029 - DNA, 25 bp, Homo sapien
gtgcttcaaggtcaaaataacatca

SEQ ID NO: 6042030 - DNA, 25 bp, Homo sapien
gatattacaccttctaattgggata

SEQ ID NO: 6042031 - DNA, 25 bp, Homo sapien
ggccctgatattacaccttctaatt

SEQ ID NO: 6042032 - DNA, 25 bp, Homo sapien
tctactttgaaatacatggatttat

SEQ ID NO: 6042033 - DNA, 25 bp, Homo sapien
tacccgattagtccaaaaggtgata

SEQ ID NO: 6042034 - DNA, 25 bp, Homo sapien
ttgaaatacatggatttattgtcca

SEQ ID NO: 6042035 - DNA, 25 bp, Homo sapien
aatacagttcaagtgcttcaaggtc

SEQ ID NO: 6042036 - DNA, 25 bp, Homo sapien
accttcaataaggtgccaacagagt

SEQ ID NO: 6042037 - DNA, 25 bp, Homo sapien
cactttatcataatgggcgaggtca

SEQ ID NO: 6042038 - DNA, 25 bp, Homo sapien
gttattctccccaatacagttcaag

SEQ ID NO: 6042039 - DNA, 25 bp, Homo sapien
tgggatagtttgtatgaaaactcga

SEQ ID NO: 6042040 - DNA, 25 bp, Homo sapien
ggaaagatcctccagggtcacttta

SEQ ID NO: 6042041 - DNA, 25 bp, Homo sapien
cagggtcactttatcataatgggcg

SEQ ID NO: 6042042 - DNA, 25 bp, Homo sapien
tgtccagatatagcttagtgaaaag

SEQ ID NO: 6042043 - DNA, 25 bp, Homo sapien
cataaactatgtaaaattcataatg

SEQ ID NO: 6042044 - DNA, 25 bp, Homo sapien
aatttggttattctccccaatacag

SEQ ID NO: 6042045 - DNA, 25 bp, Homo sapien
taatccacgtcgttgatatggggga

SEQ ID NO: 6042046 - DNA, 25 bp, Homo sapien
caaggtcaaaataacatcattgact

SEQ ID NO: 6042047 - DNA, 25 bp, Homo sapien
atcctccagggtcactttatcataa

SEQ ID NO: 6042048 - DNA, 25 bp, Homo sapien
gatttattgtccagatatagcttag

SEQ ID NO: 6042049 - DNA, 25 bp, Homo sapien
atgggggaaatatcaagatgcacgc

SEQ ID NO: 6042050 - DNA, 25 bp, Homo sapien
ggcaaaagagttgatacttggatcc

SEQ ID NO: 6042051 - DNA, 25 bp, Homo sapien
tccatgtagtttcaaccagctattc

SEQ ID NO: 6042052 - DNA, 25 bp, Homo sapien
acgtcgttgatatgggggaaatatc

SEQ ID NO: 6042053 - DNA, 25 bp, Homo sapien
gaaatatcaagatgcacgctagatt

SEQ ID NO: 6042054 - DNA, 25 bp, Homo sapien
tcttattgtatattcaggactcttg

SEQ ID NO: 6042055 - DNA, 25 bp, Homo sapien
acaccttctaattgggatagtttgt

SEQ ID NO: 6042056 - DNA, 25 bp, Homo sapien
caaccagctattcaatgactgcaag

SEQ ID NO: 6042057 - DNA, 25 bp, Homo sapien
gctattcaatgactgcaagtaaatt

SEQ ID NO: 6042058 - DNA, 25 bp, Homo sapien
tattttgctgatatgacactaaatc

SEQ ID NO: 6042059 - DNA, 25 bp, Homo sapien
tgcacgctagattattttgctgata

SEQ ID NO: 6042060 - DNA, 25 bp, Homo sapien
aataaggtgccaacagagtatctgt

SEQ ID NO: 6042061 - DNA, 25 bp, Homo sapien
accaattccgttttgttccatgtag

SEQ ID NO: 6042062 - DNA, 25 bp, Homo sapien
gacaaagacattggcaaaagagttg

SEQ ID NO: 6042063 - DNA, 25 bp, Homo sapien
gctttgttgatccagtttcataaac

SEQ ID NO: 6042064 - DNA, 25 bp, Homo sapien
tagtttcaaccagctattcaatgac

SEQ ID NO: 6042065 - DNA, 25 bp, Homo sapien
tactcttcttattgtatattcagga

SEQ ID NO: 6042066 - DNA, 25 bp, Homo sapien
tgaaaagacaaagacattggcaaaa

SEQ ID NO: 6042067 - DNA, 25 bp, Homo sapien
atcataatgggcgaggtcaccttca

SEQ ID NO: 6042068 - DNA, 25 bp, Homo sapien
agtttgtatgaaaactcgataagta

SEQ ID NO: 6042069 - DNA, 25 bp, Homo sapien
caatgactgcaagtaaatttggtta

SEQ ID NO: 6042070 - DNA, 25 bp, Homo sapien
ccaaaaggtgataacggtacttctg

SEQ ID NO: 6042071 - DNA, 25 bp, Homo sapien
cgataagtaaaaggcctaatccacg

SEQ ID NO: 6042072 - DNA, 25 bp, Homo sapien
cagtttcataaactatgtaaaattc

SEQ ID NO: 6042073 - DNA, 25 bp, Homo sapien
gcttagtgaaaagacaaagacattg

SEQ ID NO: 6042074 - DNA, 25 bp, Homo sapien
tcaagatgcacgctagattattttg

SEQ ID NO: 6042075 - DNA, 25 bp, Homo sapien
ggtgataacggtacttctggccctg

SEQ ID NO: 6042076 - DNA, 25 bp, Homo sapien
tgcaagtaaatttggttattctccc

SEQ ID NO: 6042077 - DNA, 25 bp, Homo sapien
aattcataatgatctactttgaaat

SEQ ID NO: 6042078 - DNA, 25 bp, Homo sapien
gctgatatgacactaaatctttcga

SEQ ID NO: 6042079 - DNA, 25 bp, Homo sapien
ttccgttttgttccatgtagtttca

SEQ ID NO: 6042080 - DNA, 25 bp, Homo sapien
gaggtcaccttcaataaggtgccaa

SEQ ID NO: 6042081 - DNA, 25 bp, Homo sapien
attgactctcattccagtcacgatg

SEQ ID NO: 6042082 - DNA, 25 bp, Homo sapien
tccagtcacgatggaaagatcctcc

SEQ ID NO: 6042083 - DNA, 25 bp, Homo sapien
gttcaagtgcttcaaggtcaaaata

SEQ ID NO: 6042084 - DNA, 25 bp, Homo sapien
aacggtacttctggccctgatatta

SEQ ID NO: 6042085 - DNA, 25 bp, Homo sapien
tgtatattcaggactcttgtatttt

SEQ ID NO: 6042086 - DNA, 25 bp, Homo sapien
gaatcccatcggctttgttgatcca

SEQ ID NO: 6042087 - DNA, 25 bp, Homo sapien
ctaaatctttcgaaaagaatcccat

SEQ ID NO: 6042088 - DNA, 25 bp, Homo sapien
tgaccaatatttcaagtacccgatt

SEQ ID NO: 6042089 - DNA, 25 bp, Homo sapien
ttttgttccatgtagtttcaaccag

SEQ ID NO: 6042090 - DNA, 25 bp, Homo sapien
tctaattgggatagtttgtatgaaa

SEQ ID NO: 6042091 - DNA, 25 bp, Homo sapien
gatatagcttagtgaaaagacaaag

SEQ ID NO: 6042092 - DNA, 25 bp, Homo sapien
ctagattattttgctgatatgacac

SEQ ID NO: 6042093 - DNA, 25 bp, Homo sapien
atctttcgaaaagaatcccatcggc

SEQ ID NO: 6042094 - DNA, 25 bp, Homo sapien
atatttcaagtacccgattagtcca

SEQ ID NO: 6042095 - DNA, 25 bp, Homo sapien
tacatggatttattgtccagatata

SEQ ID NO: 6042096 - DNA, 25 bp, Homo sapien
ttgatccagtttcataaactatgta

SEQ ID NO: 6042097 - DNA, 25 bp, Homo sapien
aaggcctaatccacgtcgttgatat

SEQ ID NO: 6042098 - DNA, 25 bp, Homo sapien
atgacactaaatctttcgaaaagaa

SEQ ID NO: 6042099 - DNA, 25 bp, Homo sapien
gatacttggatccttttactcttct

SEQ ID NO: 6042100 - DNA, 25 bp, Homo sapien
tatgaaaactcgataagtaaaaggc

SEQ ID NO: 6042101 - DNA, 25 bp, Homo sapien
tgatatgggggaaatatcaagatgc

SEQ ID NO: 6042102 - DNA, 25 bp, Homo sapien
catgtttcaattgttcaagtcattg

SEQ ID NO: 6042103 - DNA, 25 bp, Homo sapien
gatccggtgcagatatctttcccta

SEQ ID NO: 6042104 - DNA, 25 bp, Homo sapien
catgccacaatctttgtaccagagg

SEQ ID NO: 6042105 - DNA, 25 bp, Homo sapien
taatgaaaaagttgctattaagaaa

SEQ ID NO: 6042106 - DNA, 25 bp, Homo sapien
gcaagataaacgattcaagaacaga

SEQ ID NO: 6042107 - DNA, 25 bp, Homo sapien
atagacccgaatgatccggtgcaga

SEQ ID NO: 6042108 - DNA, 25 bp, Homo sapien
acaatctttgtaccagaggttacgt

SEQ ID NO: 6042109 - DNA, 25 bp, Homo sapien
gtgcagatatctttccctaccaccg

SEQ ID NO: 6042110 - DNA, 25 bp, Homo sapien
cgcccatcctccacctacgatagac

SEQ ID NO: 6042111 - DNA, 25 bp, Homo sapien
ttcaagtcattgaattacctccatc

SEQ ID NO: 6042112 - DNA, 25 bp, Homo sapien
cgtccatcaacgtacgccgatgtca

SEQ ID NO: 6042113 - DNA, 25 bp, Homo sapien
gtctgtcatagagacattaagcctc

SEQ ID NO: 6042114 - DNA, 25 bp, Homo sapien
ctcagtaataacatagtgtcaaaac

SEQ ID NO: 6042115 - DNA, 25 bp, Homo sapien
ggttcgtttggtgtggtatttgcca

SEQ ID NO: 6042116 - DNA, 25 bp, Homo sapien
tcctccacctacgatagacccgaat

SEQ ID NO: 6042117 - DNA, 25 bp, Homo sapien
cataaatataatagatctgaagtac

SEQ ID NO: 6042118 - DNA, 25 bp, Homo sapien
gaattacctccatcatttcgcgaac

SEQ ID NO: 6042119 - DNA, 25 bp, Homo sapien
tataatagatctgaagtactttttc

SEQ ID NO: 6042120 - DNA, 25 bp, Homo sapien
ttactacgcccatcctccacctacg

SEQ ID NO: 6042121 - DNA, 25 bp, Homo sapien
accgaagtagttgggcatggttcgt

SEQ ID NO: 6042122 - DNA, 25 bp, Homo sapien
agaaactaatgaaaaagttgctatt

SEQ ID NO: 6042123 - DNA, 25 bp, Homo sapien
tgctattaagaaagtcctgcaagat

SEQ ID NO: 6042124 - DNA, 25 bp, Homo sapien
agaatacatgccacaatctttgtac

SEQ ID NO: 6042125 - DNA, 25 bp, Homo sapien
agcctcaaaatttattagtagatcc

SEQ ID NO: 6042126 - DNA, 25 bp, Homo sapien
attcaagaacagagagctggaaata

SEQ ID NO: 6042127 - DNA, 25 bp, Homo sapien
gacattaagcctcaaaatttattag

SEQ ID NO: 6042128 - DNA, 25 bp, Homo sapien
tcacggtactatagagcaccagagc

SEQ ID NO: 6042129 - DNA, 25 bp, Homo sapien
tatttaaatttgatactagaataca

SEQ ID NO: 6042130 - DNA, 25 bp, Homo sapien
tttggtgtggtatttgccactgtta

SEQ ID NO: 6042131 - DNA, 25 bp, Homo sapien
gaacagagagctggaaataatgaaa

SEQ ID NO: 6042132 - DNA, 25 bp, Homo sapien
ctgagacctggtccttaaaactgtg

SEQ ID NO: 6042133 - DNA, 25 bp, Homo sapien
ttctatgaaagggactcccaagatg

SEQ ID NO: 6042134 - DNA, 25 bp, Homo sapien
aatgaaaatgctgagtcacataaat

SEQ ID NO: 6042135 - DNA, 25 bp, Homo sapien
ctgaacctaacgtttcctatatttg

SEQ ID NO: 6042136 - DNA, 25 bp, Homo sapien
tcaacgtacgccgatgtcaagattg

SEQ ID NO: 6042137 - DNA, 25 bp, Homo sapien
gaaagggactcccaagatgagattt

SEQ ID NO: 6042138 - DNA, 25 bp, Homo sapien
ggcagtgcaaagcaattgaaaccta

SEQ ID NO: 6042139 - DNA, 25 bp, Homo sapien
gaaataaagtactacatgtttcaat

SEQ ID NO: 6042140 - DNA, 25 bp, Homo sapien
cctaccaccgaagtagttgggcatg

SEQ ID NO: 6042141 - DNA, 25 bp, Homo sapien
agtcctgcaagataaacgattcaag

SEQ ID NO: 6042142 - DNA, 25 bp, Homo sapien
gtggtatttgccactgttattcaag

SEQ ID NO: 6042143 - DNA, 25 bp, Homo sapien
tcaaaacaggtttactacgcccatc

SEQ ID NO: 6042144 - DNA, 25 bp, Homo sapien
catagagacattaagcctcaaaatt

SEQ ID NO: 6042145 - DNA, 25 bp, Homo sapien
ccaagatgagatttatttaaatttg

SEQ ID NO: 6042146 - DNA, 25 bp, Homo sapien
gttacgtcatttcgtccatcaacgt

SEQ ID NO: 6042147 - DNA, 25 bp, Homo sapien
atatctttccctaccaccgaagtag

SEQ ID NO: 6042148 - DNA, 25 bp, Homo sapien
taaacgattcaagaacagagagctg

SEQ ID NO: 6042149 - DNA, 25 bp, Homo sapien
tttgtaccagaggttacgtcatttc

SEQ ID NO: 6042150 - DNA, 25 bp, Homo sapien
aaatttgatactagaatacatgcca

SEQ ID NO: 6042151 - DNA, 25 bp, Homo sapien
tattagtagatcctgagacctggtc

SEQ ID NO: 6042152 - DNA, 25 bp, Homo sapien
actgttattcaagaaactaatgaaa

SEQ ID NO: 6042153 - DNA, 25 bp, Homo sapien
agattggaaataaagtactacatgt

SEQ ID NO: 6042154 - DNA, 25 bp, Homo sapien
aaaagttgctattaagaaagtcctg

SEQ ID NO: 6042155 - DNA, 25 bp, Homo sapien
ccttaaaactgtgcgatttcggcag

SEQ ID NO: 6042156 - DNA, 25 bp, Homo sapien
ccagaggttacgtcatttcgtccat

SEQ ID NO: 6042157 - DNA, 25 bp, Homo sapien
taagaaagtcctgcaagataaacga

SEQ ID NO: 6042158 - DNA, 25 bp, Homo sapien
ggactcccaagatgagatttattta

SEQ ID NO: 6042159 - DNA, 25 bp, Homo sapien
tcattgaattacctccatcatttcg

SEQ ID NO: 6042160 - DNA, 25 bp, Homo sapien
tagatcctgagacctggtccttaaa

SEQ ID NO: 6042161 - DNA, 25 bp, Homo sapien
caattgaaacctactgaacctaacg

SEQ ID NO: 6042162 - DNA, 25 bp, Homo sapien
gcgaacgtctgtcatagagacatta

SEQ ID NO: 6042163 - DNA, 25 bp, Homo sapien
atgtcaagattggaaataaagtact

SEQ ID NO: 6042164 - DNA, 25 bp, Homo sapien
tacgccgatgtcaagattggaaata

SEQ ID NO: 6042165 - DNA, 25 bp, Homo sapien
tcctatatttgttcacggtactata

SEQ ID NO: 6042166 - DNA, 25 bp, Homo sapien
cctggtccttaaaactgtgcgattt

SEQ ID NO: 6042167 - DNA, 25 bp, Homo sapien
ggaaataatgaaaatgctgagtcac

SEQ ID NO: 6042168 - DNA, 25 bp, Homo sapien
tttgccactgttattcaagaaacta

SEQ ID NO: 6042169 - DNA, 25 bp, Homo sapien
gagatttatttaaatttgatactag

SEQ ID NO: 6042170 - DNA, 25 bp, Homo sapien
tgaagtactttttctatgaaaggga

SEQ ID NO: 6042171 - DNA, 25 bp, Homo sapien
caattgttcaagtcattgaattacc

SEQ ID NO: 6042172 - DNA, 25 bp, Homo sapien
aatgctgagtcacataaatataata

SEQ ID NO: 6042173 - DNA, 25 bp, Homo sapien
gagtcacataaatataatagatctg

SEQ ID NO: 6042174 - DNA, 25 bp, Homo sapien
cctccatcatttcgcgaacgtctgt

SEQ ID NO: 6042175 - DNA, 25 bp, Homo sapien
agagctggaaataatgaaaatgctg

SEQ ID NO: 6042176 - DNA, 25 bp, Homo sapien
tagatctgaagtactttttctatga

SEQ ID NO: 6042177 - DNA, 25 bp, Homo sapien
gtagttgggcatggttcgtttggtg

SEQ ID NO: 6042178 - DNA, 25 bp, Homo sapien
ctaacgtttcctatatttgttcacg

SEQ ID NO: 6042179 - DNA, 25 bp, Homo sapien
attcaagaaactaatgaaaaagttg

SEQ ID NO: 6042180 - DNA, 25 bp, Homo sapien
actgtgcgatttcggcagtgcaaag

SEQ ID NO: 6042181 - DNA, 25 bp, Homo sapien
gcaaagcaattgaaacctactgaac

SEQ ID NO: 6042182 - DNA, 25 bp, Homo sapien
acctacgatagacccgaatgatccg

SEQ ID NO: 6042183 - DNA, 25 bp, Homo sapien
gatttcggcagtgcaaagcaattga

SEQ ID NO: 6042184 - DNA, 25 bp, Homo sapien
atagtgtcaaaacaggtttactacg

SEQ ID NO: 6042185 - DNA, 25 bp, Homo sapien
ccgaatgatccggtgcagatatctt

SEQ ID NO: 6042186 - DNA, 25 bp, Homo sapien
gggcatggttcgtttggtgtggtat

SEQ ID NO: 6042187 - DNA, 25 bp, Homo sapien
aataacatagtgtcaaaacaggttt

SEQ ID NO: 6042188 - DNA, 25 bp, Homo sapien
aaaatttattagtagatcctgagac

SEQ ID NO: 6042189 - DNA, 25 bp, Homo sapien
gatactagaatacatgccacaatct

SEQ ID NO: 6042190 - DNA, 25 bp, Homo sapien
tcatttcgtccatcaacgtacgccg

SEQ ID NO: 6042191 - DNA, 25 bp, Homo sapien
atttgttcacggtactatagagcac

SEQ ID NO: 6042192 - DNA, 25 bp, Homo sapien
catttcgcgaacgtctgtcatagag

SEQ ID NO: 6042193 - DNA, 25 bp, Homo sapien
gtggatcatatttcaaaacgtcagc

SEQ ID NO: 6042194 - DNA, 25 bp, Homo sapien
atgatagttcatcgggagatagatg

SEQ ID NO: 6042195 - DNA, 25 bp, Homo sapien
cgtgaacaaatataggaaacgttag

SEQ ID NO: 6042196 - DNA, 25 bp, Homo sapien
gagcaaatttcttgctttgatggag

SEQ ID NO: 6042197 - DNA, 25 bp, Homo sapien
caagttttagttcatcaaaatatgg

SEQ ID NO: 6042198 - DNA, 25 bp, Homo sapien
catatgtcgatttggttggtataat

SEQ ID NO: 6042199 - DNA, 25 bp, Homo sapien
tcagtaggtttcaattgctttgcac

SEQ ID NO: 6042200 - DNA, 25 bp, Homo sapien
gcccaatagcagttccgccattacg

SEQ ID NO: 6042201 - DNA, 25 bp, Homo sapien
cttgaaaacacgtgacaatggtatt

SEQ ID NO: 6042202 - DNA, 25 bp, Homo sapien
tttaccgtcatcaagttttagttca

SEQ ID NO: 6042203 - DNA, 25 bp, Homo sapien
tttctagtggatcatatttcaaaac

SEQ ID NO: 6042204 - DNA, 25 bp, Homo sapien
gaggaccatatgtcgatttggttgg

SEQ ID NO: 6042205 - DNA, 25 bp, Homo sapien
actttctccagggaacattggttgg

SEQ ID NO: 6042206 - DNA, 25 bp, Homo sapien
ggaacattggttggcccaatagcag

SEQ ID NO: 6042207 - DNA, 25 bp, Homo sapien
taaatctttctagtggatcatattt

SEQ ID NO: 6042208 - DNA, 25 bp, Homo sapien
gttccgccattacgcagccagagga

SEQ ID NO: 6042209 - DNA, 25 bp, Homo sapien
acagttttaaggaccaggtctcagg

SEQ ID NO: 6042210 - DNA, 25 bp, Homo sapien
ctaataaattttgaggcttaatgtc

SEQ ID NO: 6042211 - DNA, 25 bp, Homo sapien
tctcaggatctactaataaattttg

SEQ ID NO: 6042212 - DNA, 25 bp, Homo sapien
ttagttcatcaaaatatggactaca

SEQ ID NO: 6042213 - DNA, 25 bp, Homo sapien
tgggattcatagagcaaatttcttg

SEQ ID NO: 6042214 - DNA, 25 bp, Homo sapien
ctgccgaaatcgcacagttttaagg

SEQ ID NO: 6042215 - DNA, 25 bp, Homo sapien
gtataatttgttgcgccgaagatta

SEQ ID NO: 6042216 - DNA, 25 bp, Homo sapien
gcccaattcgacattttcatcgaac

SEQ ID NO: 6042217 - DNA, 25 bp, Homo sapien
atcgaactctagcaattttaaatca

SEQ ID NO: 6042218 - DNA, 25 bp, Homo sapien
gctctggtgctctatagtaccgtga

SEQ ID NO: 6042219 - DNA, 25 bp, Homo sapien
atttcttgctttgatggagtaccta

SEQ ID NO: 6042220 - DNA, 25 bp, Homo sapien
aattttgaggcttaatgtctctatg

SEQ ID NO: 6042221 - DNA, 25 bp, Homo sapien
atataggaaacgttaggttcagtag

SEQ ID NO: 6042222 - DNA, 25 bp, Homo sapien
attgtagagcattaaatctttctag

SEQ ID NO: 6042223 - DNA, 25 bp, Homo sapien
gagcattaaatctttctagtggatc

SEQ ID NO: 6042224 - DNA, 25 bp, Homo sapien
caattttaaatcagttgttatttga

SEQ ID NO: 6042225 - DNA, 25 bp, Homo sapien
cagtttgatcatcttctttcttgaa

SEQ ID NO: 6042226 - DNA, 25 bp, Homo sapien
tgatttattttaccgtcatcaagtt

SEQ ID NO: 6042227 - DNA, 25 bp, Homo sapien
cattacgcagccagaggaccatatg

SEQ ID NO: 6042228 - DNA, 25 bp, Homo sapien
tcgatttggttggtataatttgttg

SEQ ID NO: 6042229 - DNA, 25 bp, Homo sapien
taagattttaatgatttccactagt

SEQ ID NO: 6042230 - DNA, 25 bp, Homo sapien
aaatcgcacagttttaaggaccagg

SEQ ID NO: 6042231 - DNA, 25 bp, Homo sapien
tgacaatggtattggtttaatttgc

SEQ ID NO: 6042232 - DNA, 25 bp, Homo sapien
gctccatataattgggattcataga

SEQ ID NO: 6042233 - DNA, 25 bp, Homo sapien
ctagaaattccacagtttgatcatc

SEQ ID NO: 6042234 - DNA, 25 bp, Homo sapien
aataccactttctccagggaacatt

SEQ ID NO: 6042235 - DNA, 25 bp, Homo sapien
tgctctatagtaccgtgaacaaata

SEQ ID NO: 6042236 - DNA, 25 bp, Homo sapien
gcgggaacttatgctccatataatt

SEQ ID NO: 6042237 - DNA, 25 bp, Homo sapien
tgctttgatggagtacctaagattt

SEQ ID NO: 6042238 - DNA, 25 bp, Homo sapien
tgttatttgatttattttaccgtca

SEQ ID NO: 6042239 - DNA, 25 bp, Homo sapien
aattgctttgcactgccgaaatcgc

SEQ ID NO: 6042240 - DNA, 25 bp, Homo sapien
gactacacaggcattgtagagcatt

SEQ ID NO: 6042241 - DNA, 25 bp, Homo sapien
gttcatcgggagatagatggcccaa

SEQ ID NO: 6042242 - DNA, 25 bp, Homo sapien
cgggagatagatggcccaattcgac

SEQ ID NO: 6042243 - DNA, 25 bp, Homo sapien
cactagttgatcaataccactttct

SEQ ID NO: 6042244 - DNA, 25 bp, Homo sapien
catatttcaaaacgtcagctagaaa

SEQ ID NO: 6042245 - DNA, 25 bp, Homo sapien
agattagctctggtgctctatagta

SEQ ID NO: 6042246 - DNA, 25 bp, Homo sapien
aacacgtgacaatggtattggttta

SEQ ID NO: 6042247 - DNA, 25 bp, Homo sapien
tataattgggattcatagagcaaat

SEQ ID NO: 6042248 - DNA, 25 bp, Homo sapien
taatttgcgggaacttatgctccat

SEQ ID NO: 6042249 - DNA, 25 bp, Homo sapien
aatatggactacacaggcattgtag

SEQ ID NO: 6042250 - DNA, 25 bp, Homo sapien
gtacctaagattttaatgatttcca

SEQ ID NO: 6042251 - DNA, 25 bp, Homo sapien
tagcagttccgccattacgcagcca

SEQ ID NO: 6042252 - DNA, 25 bp, Homo sapien
tacagatgatagttcatcgggagat

SEQ ID NO: 6042253 - DNA, 25 bp, Homo sapien
attccacagtttgatcatcttcttt

SEQ ID NO: 6042254 - DNA, 25 bp, Homo sapien
gcagccagaggaccatatgtcgatt

SEQ ID NO: 6042255 - DNA, 25 bp, Homo sapien
ggtttcaattgctttgcactgccga

SEQ ID NO: 6042256 - DNA, 25 bp, Homo sapien
cgccgaagattagctctggtgctct

SEQ ID NO: 6042257 - DNA, 25 bp, Homo sapien
ttctttcttgaaaacacgtgacaat

SEQ ID NO: 6042258 - DNA, 25 bp, Homo sapien
ttgatcaataccactttctccaggg

SEQ ID NO: 6042259 - DNA, 25 bp, Homo sapien
gatctactaataaattttgaggctt

SEQ ID NO: 6042260 - DNA, 25 bp, Homo sapien
cgtcagctagaaattccacagtttg

SEQ ID NO: 6042261 - DNA, 25 bp, Homo sapien
gatttccactagttgatcaatacca

SEQ ID NO: 6042262 - DNA, 25 bp, Homo sapien
tagatggcccaattcgacattttca

SEQ ID NO: 6042263 - DNA, 25 bp, Homo sapien
ttaaggaccaggtctcaggatctac

SEQ ID NO: 6042264 - DNA, 25 bp, Homo sapien
tagtaccgtgaacaaatataggaaa

SEQ ID NO: 6042265 - DNA, 25 bp, Homo sapien
tggttggtataatttgttgcgccga

SEQ ID NO: 6042266 - DNA, 25 bp, Homo sapien
ccgtcatcaagttttagttcatcaa

SEQ ID NO: 6042267 - DNA, 25 bp, Homo sapien
attttcatcgaactctagcaatttt

SEQ ID NO: 6042268 - DNA, 25 bp, Homo sapien
gatcatcttctttcttgaaaacacg

SEQ ID NO: 6042269 - DNA, 25 bp, Homo sapien
tcatagagcaaatttcttgctttga

SEQ ID NO: 6042270 - DNA, 25 bp, Homo sapien
ttaggttcagtaggtttcaattgct

SEQ ID NO: 6042271 - DNA, 25 bp, Homo sapien
gatggagtacctaagattttaatga

SEQ ID NO: 6042272 - DNA, 25 bp, Homo sapien
ttcgacattttcatcgaactctagc

SEQ ID NO: 6042273 - DNA, 25 bp, Homo sapien
acttatgctccatataattgggatt

SEQ ID NO: 6042274 - DNA, 25 bp, Homo sapien
catcaaaatatggactacacaggca

SEQ ID NO: 6042275 - DNA, 25 bp, Homo sapien
tcaaaacgtcagctagaaattccac

SEQ ID NO: 6042276 - DNA, 25 bp, Homo sapien
accaggtctcaggatctactaataa

SEQ ID NO: 6042277 - DNA, 25 bp, Homo sapien
tttgcactgccgaaatcgcacagtt

SEQ ID NO: 6042278 - DNA, 25 bp, Homo sapien
ttgttgcgccgaagattagctctgg

SEQ ID NO: 6042279 - DNA, 25 bp, Homo sapien
acaggcattgtagagcattaaatct

SEQ ID NO: 6042280 - DNA, 25 bp, Homo sapien
ctctagcaattttaaatcagttgtt

SEQ ID NO: 6042281 - DNA, 25 bp, Homo sapien
tggttggcccaatagcagttccgcc

SEQ ID NO: 6042282 - DNA, 25 bp, Homo sapien
tggtttaatttgcgggaacttatgc

SEQ ID NO: 6042283 - DNA, 25 bp, Homo sapien
ctccagggaacattggttggcccaa

SEQ ID NO: 6042284 - DNA, 25 bp, Homo sapien
tttaatgatttccactagttgatca

SEQ ID NO: 6042285 - DNA, 25 bp, Homo sapien
ctgcttttcaaacctcacacacttt

SEQ ID NO: 6042286 - DNA, 25 bp, Homo sapien
ggcttccgatttttctgtgaacgta

SEQ ID NO: 6042287 - DNA, 25 bp, Homo sapien
ctaagtacgcattctccgcattgtt

SEQ ID NO: 6042288 - DNA, 25 bp, Homo sapien
atttctaaggtcaacctacagatat

SEQ ID NO: 6042289 - DNA, 25 bp, Homo sapien
acctgaataaggaagtctcccgtga

SEQ ID NO: 6042290 - DNA, 25 bp, Homo sapien
cactatcccggccctttctcctttg

SEQ ID NO: 6042291 - DNA, 25 bp, Homo sapien
aagggcgaattcacaggtgttgctg

SEQ ID NO: 6042292 - DNA, 25 bp, Homo sapien
tttggagctggtcaatcccggtacc

SEQ ID NO: 6042293 - DNA, 25 bp, Homo sapien
cggtagattaaactatggttgggat

SEQ ID NO: 6042294 - DNA, 25 bp, Homo sapien
ttttcaccgggctaagagctgattt

SEQ ID NO: 6042295 - DNA, 25 bp, Homo sapien
ctcctcaaacccaatatctagcttt

SEQ ID NO: 6042296 - DNA, 25 bp, Homo sapien
cgatttttctgtgaacgtaaagaca

SEQ ID NO: 6042297 - DNA, 25 bp, Homo sapien
ttctccgcattgtttgccaacgata

SEQ ID NO: 6042298 - DNA, 25 bp, Homo sapien
caaggtaatatcgacaacgatttat

SEQ ID NO: 6042299 - DNA, 25 bp, Homo sapien
aacccttcgttctctgagaagggcg

SEQ ID NO: 6042300 - DNA, 25 bp, Homo sapien
tttgccaacgataacctatttgctc

SEQ ID NO: 6042301 - DNA, 25 bp, Homo sapien
ttgtctcagtattttttcaccgggc

SEQ ID NO: 6042302 - DNA, 25 bp, Homo sapien
tacaaagtgttactcctcaattagc

SEQ ID NO: 6042303 - DNA, 25 bp, Homo sapien
tgttgtggatacgtacaaacaattg

SEQ ID NO: 6042304 - DNA, 25 bp, Homo sapien
ttctgtgaacgtaaagacattgaac

SEQ ID NO: 6042305 - DNA, 25 bp, Homo sapien
tttccatgaatcctgcttttcaaac

SEQ ID NO: 6042306 - DNA, 25 bp, Homo sapien
ctcaaattcccactatcccggccct

SEQ ID NO: 6042307 - DNA, 25 bp, Homo sapien
gtctcccgtgacgtgtttttgtctc

SEQ ID NO: 6042308 - DNA, 25 bp, Homo sapien
ggatacgtacaaacaattgcattct

SEQ ID NO: 6042309 - DNA, 25 bp, Homo sapien
tgtgtcagttagaacaagactatca

SEQ ID NO: 6042310 - DNA, 25 bp, Homo sapien
tgaacgtaaagacattgaacccttc

SEQ ID NO: 6042311 - DNA, 25 bp, Homo sapien
tgaatcctgcttttcaaacctcaca

SEQ ID NO: 6042312 - DNA, 25 bp, Homo sapien
tcacagacaatctttggagctggtc

SEQ ID NO: 6042313 - DNA, 25 bp, Homo sapien
aacctacagatatcagatggccaac

SEQ ID NO: 6042314 - DNA, 25 bp, Homo sapien
aaacccaatatctagctttgttgtg

SEQ ID NO: 6042315 - DNA, 25 bp, Homo sapien
acaatctttggagctggtcaatccc

SEQ ID NO: 6042316 - DNA, 25 bp, Homo sapien
cagatggccaaccaacaatgtgtca

SEQ ID NO: 6042317 - DNA, 25 bp, Homo sapien
tagctttgttgtggatacgtacaaa

SEQ ID NO: 6042318 - DNA, 25 bp, Homo sapien
aaacatttctaaggtcaacctacag

SEQ ID NO: 6042319 - DNA, 25 bp, Homo sapien
tggaaaacctgaataaggaagtctc

SEQ ID NO: 6042320 - DNA, 25 bp, Homo sapien
ataaggaagtctcccgtgacgtgtt

SEQ ID NO: 6042321 - DNA, 25 bp, Homo sapien
cctttctcctttgactgcgaagcaa

SEQ ID NO: 6042322 - DNA, 25 bp, Homo sapien
gtacaaacaattgcattctcacaga

SEQ ID NO: 6042323 - DNA, 25 bp, Homo sapien
aatatctagctttgttgtggatacg

SEQ ID NO: 6042324 - DNA, 25 bp, Homo sapien
aacgataacctatttgctcaaggta

SEQ ID NO: 6042325 - DNA, 25 bp, Homo sapien
cattgcctaagtacgcattctccgc

SEQ ID NO: 6042326 - DNA, 25 bp, Homo sapien
tctctataggttcccaagcattgcc

SEQ ID NO: 6042327 - DNA, 25 bp, Homo sapien
ttgctgttgcatcttttctacaaag

SEQ ID NO: 6042328 - DNA, 25 bp, Homo sapien
caggtgttgctgttgcatcttttct

SEQ ID NO: 6042329 - DNA, 25 bp, Homo sapien
caacaatgtgtcagttagaacaaga

SEQ ID NO: 6042330 - DNA, 25 bp, Homo sapien
cccggccctttctcctttgactgcg

SEQ ID NO: 6042331 - DNA, 25 bp, Homo sapien
ttgcatcttttctacaaagtgttac

SEQ ID NO: 6042332 - DNA, 25 bp, Homo sapien
taggttcccaagcattgcctaagta

SEQ ID NO: 6042333 - DNA, 25 bp, Homo sapien
gacaacgatttatctgtttccggta

SEQ ID NO: 6042334 - DNA, 25 bp, Homo sapien
ctatggttgggataagaaaaacatt

SEQ ID NO: 6042335 - DNA, 25 bp, Homo sapien
tccaaggggaatttcttctcctcaa

SEQ ID NO: 6042336 - DNA, 25 bp, Homo sapien
acattgaacccttcgttctctgaga

SEQ ID NO: 6042337 - DNA, 25 bp, Homo sapien
gaagcaatccaaggggaatttcttc

SEQ ID NO: 6042338 - DNA, 25 bp, Homo sapien
gcattctcacagacaatctttggag

SEQ ID NO: 6042339 - DNA, 25 bp, Homo sapien
ccgggctaagagctgatttgaataa

SEQ ID NO: 6042340 - DNA, 25 bp, Homo sapien
cagatatcagatggccaaccaacaa

SEQ ID NO: 6042341 - DNA, 25 bp, Homo sapien
gcattgtttgccaacgataacctat

SEQ ID NO: 6042342 - DNA, 25 bp, Homo sapien
gatttatctgtttccggtagattaa

SEQ ID NO: 6042343 - DNA, 25 bp, Homo sapien
aacaagactatcaggcttccgattt

SEQ ID NO: 6042344 - DNA, 25 bp, Homo sapien
gctggtcaatcccggtaccgtggaa

SEQ ID NO: 6042345 - DNA, 25 bp, Homo sapien
ctgtttccggtagattaaactatgg

SEQ ID NO: 6042346 - DNA, 25 bp, Homo sapien
tctgagaagggcgaattcacaggtg

SEQ ID NO: 6042347 - DNA, 25 bp, Homo sapien
gataagaaaaacatttctaaggtca

SEQ ID NO: 6042348 - DNA, 25 bp, Homo sapien
agttagaacaagactatcaggcttc

SEQ ID NO: 6042349 - DNA, 25 bp, Homo sapien
ttcaaacctcacacactttctctat

SEQ ID NO: 6042350 - DNA, 25 bp, Homo sapien
tttcttctcctcaaacccaatatct

SEQ ID NO: 6042351 - DNA, 25 bp, Homo sapien
tgaataaggcattttccatgaatcc

SEQ ID NO: 6042352 - DNA, 25 bp, Homo sapien
taagagctgatttgaataaggcatt

SEQ ID NO: 6042353 - DNA, 25 bp, Homo sapien
gattaaactatggttgggataagaa

SEQ ID NO: 6042354 - DNA, 25 bp, Homo sapien
acgcattctccgcattgtttgccaa

SEQ ID NO: 6042355 - DNA, 25 bp, Homo sapien
gactgcgaagcaatccaaggggaat

SEQ ID NO: 6042356 - DNA, 25 bp, Homo sapien
cccaagcattgcctaagtacgcatt

SEQ ID NO: 6042357 - DNA, 25 bp, Homo sapien
actatcaggcttccgatttttctgt

SEQ ID NO: 6042358 - DNA, 25 bp, Homo sapien
tcctttgactgcgaagcaatccaag

SEQ ID NO: 6042359 - DNA, 25 bp, Homo sapien
cagtattttttcaccgggctaagag

SEQ ID NO: 6042360 - DNA, 25 bp, Homo sapien
aattcacaggtgttgctgttgcatc

SEQ ID NO: 6042361 - DNA, 25 bp, Homo sapien
aacctatttgctcaaggtaatatcg

SEQ ID NO: 6042362 - DNA, 25 bp, Homo sapien
cctcacacactttctctataggttc

SEQ ID NO: 6042363 - DNA, 25 bp, Homo sapien
cgtgacgtgtttttgtctcagtatt

SEQ ID NO: 6042364 - DNA, 25 bp, Homo sapien
aatatcgacaacgatttatctgttt

SEQ ID NO: 6042365 - DNA, 25 bp, Homo sapien
tttgctcaaggtaatatcgacaacg

SEQ ID NO: 6042366 - DNA, 25 bp, Homo sapien
gccaaccaacaatgtgtcagttaga

SEQ ID NO: 6042367 - DNA, 25 bp, Homo sapien
ctgatttgaataaggcattttccat

SEQ ID NO: 6042368 - DNA, 25 bp, Homo sapien
aaggtcaacctacagatatcagatg

SEQ ID NO: 6042369 - DNA, 25 bp, Homo sapien
acactttctctataggttcccaagc

SEQ ID NO: 6042370 - DNA, 25 bp, Homo sapien
cttttctacaaagtgttactcctca

SEQ ID NO: 6042371 - DNA, 25 bp, Homo sapien
taaagacattgaacccttcgttctc

SEQ ID NO: 6042372 - DNA, 25 bp, Homo sapien
acaattgcattctcacagacaatct

SEQ ID NO: 6042373 - DNA, 25 bp, Homo sapien
gtgtttttgtctcagtattttttca

SEQ ID NO: 6042374 - DNA, 25 bp, Homo sapien
aggcattttccatgaatcctgcttt

SEQ ID NO: 6042375 - DNA, 25 bp, Homo sapien
tcgttctctgagaagggcgaattca

SEQ ID NO: 6042376 - DNA, 25 bp, Homo sapien
ttggcccgaaaaaatccaatcttgc

SEQ ID NO: 6042377 - DNA, 25 bp, Homo sapien
gtatgaaacaccagcatcacctgga

SEQ ID NO: 6042378 - DNA, 25 bp, Homo sapien
catagcgatgcaattaaagcaccgt

SEQ ID NO: 6042379 - DNA, 25 bp, Homo sapien
ccacgatatacagattgtctgtatt

SEQ ID NO: 6042380 - DNA, 25 bp, Homo sapien
ttggtatcgttcttgaaatgatcga

SEQ ID NO: 6042381 - DNA, 25 bp, Homo sapien
ttaccagcagtttcaaattgtagac

SEQ ID NO: 6042382 - DNA, 25 bp, Homo sapien
tggcagaacttttctttctagaaaa

SEQ ID NO: 6042383 - DNA, 25 bp, Homo sapien
cttcttggagacataacgagtcaag

SEQ ID NO: 6042384 - DNA, 25 bp, Homo sapien
ggagacataacgagtcaagtatgaa

SEQ ID NO: 6042385 - DNA, 25 bp, Homo sapien
gcccttctcagagaacgaagggttc

SEQ ID NO: 6042386 - DNA, 25 bp, Homo sapien
ctaaagctaattgaggagtaacact

SEQ ID NO: 6042387 - DNA, 25 bp, Homo sapien
atcttgcttcttggagacataacga

SEQ ID NO: 6042388 - DNA, 25 bp, Homo sapien
cctgcctcgacattttgtgctactt

SEQ ID NO: 6042389 - DNA, 25 bp, Homo sapien
gtagtttcgatacctgcctcgacat

SEQ ID NO: 6042390 - DNA, 25 bp, Homo sapien
agtaattcttgattaccagcagttt

SEQ ID NO: 6042391 - DNA, 25 bp, Homo sapien
gaggagtaacactttgtagaaaaga

SEQ ID NO: 6042392 - DNA, 25 bp, Homo sapien
tcaaattgtagaccgcaaccaatct

SEQ ID NO: 6042393 - DNA, 25 bp, Homo sapien
accttaccattggaatctaatgtac

SEQ ID NO: 6042394 - DNA, 25 bp, Homo sapien
cagcaacacctgtgaattcgccctt

SEQ ID NO: 6042395 - DNA, 25 bp, Homo sapien
ctaattgaggagtaacactttgtag

SEQ ID NO: 6042396 - DNA, 25 bp, Homo sapien
ttgaataccaattggagtgcccatc

SEQ ID NO: 6042397 - DNA, 25 bp, Homo sapien
tcgatacctgcctcgacattttgtg

SEQ ID NO: 6042398 - DNA, 25 bp, Homo sapien
aatgtaccacgatatacagattgtc

SEQ ID NO: 6042399 - DNA, 25 bp, Homo sapien
tgatcgatttcaccgcaaaataaaa

SEQ ID NO: 6042400 - DNA, 25 bp, Homo sapien
ataacgagtcaagtatgaaacacca

SEQ ID NO: 6042401 - DNA, 25 bp, Homo sapien
gaatctaatgtaccacgatatacag

SEQ ID NO: 6042402 - DNA, 25 bp, Homo sapien
ccattggaatctaatgtaccacgat

SEQ ID NO: 6042403 - DNA, 25 bp, Homo sapien
cccatcaatggatcagtaataggaa

SEQ ID NO: 6042404 - DNA, 25 bp, Homo sapien
atgcaacagcaacacctgtgaattc

SEQ ID NO: 6042405 - DNA, 25 bp, Homo sapien
tcagtaataggaaccataccagctt

SEQ ID NO: 6042406 - DNA, 25 bp, Homo sapien
tcgacattttgtgctacttttctcc

SEQ ID NO: 6042407 - DNA, 25 bp, Homo sapien
agaaaacatgcaaccttaccattgg

SEQ ID NO: 6042408 - DNA, 25 bp, Homo sapien
agtggtagaaccctcgacagtaggt

SEQ ID NO: 6042409 - DNA, 25 bp, Homo sapien
ttgaaatgatcgatttcaccgcaaa

SEQ ID NO: 6042410 - DNA, 25 bp, Homo sapien
cacctggagcgctaccgtcagttct

SEQ ID NO: 6042411 - DNA, 25 bp, Homo sapien
tctgtattcatacttagcaccaata

SEQ ID NO: 6042412 - DNA, 25 bp, Homo sapien
tgcaattggcccgaaaaaatccaat

SEQ ID NO: 6042413 - DNA, 25 bp, Homo sapien
accataccagcttgtaatgtagttt

SEQ ID NO: 6042414 - DNA, 25 bp, Homo sapien
tgtagaccgcaaccaatcttggtat

SEQ ID NO: 6042415 - DNA, 25 bp, Homo sapien
cgtctaaaccttgttgtaacattag

SEQ ID NO: 6042416 - DNA, 25 bp, Homo sapien
tatacagattgtctgtattcatact

SEQ ID NO: 6042417 - DNA, 25 bp, Homo sapien
gatgcaattaaagcaccgttggctt

SEQ ID NO: 6042418 - DNA, 25 bp, Homo sapien
ctcgacagtaggttgaataccaatt

SEQ ID NO: 6042419 - DNA, 25 bp, Homo sapien
gcaccgttggcttgcaattggcccg

SEQ ID NO: 6042420 - DNA, 25 bp, Homo sapien
aacaccagcatcacctggagcgcta

SEQ ID NO: 6042421 - DNA, 25 bp, Homo sapien
ataggaaccataccagcttgtaatg

SEQ ID NO: 6042422 - DNA, 25 bp, Homo sapien
tttctccatagcgatgcaattaaag

SEQ ID NO: 6042423 - DNA, 25 bp, Homo sapien
aatggatcagtaataggaaccatac

SEQ ID NO: 6042424 - DNA, 25 bp, Homo sapien
attaaagcaccgttggcttgcaatt

SEQ ID NO: 6042425 - DNA, 25 bp, Homo sapien
acttttctttctagaaaacatgcaa

SEQ ID NO: 6042426 - DNA, 25 bp, Homo sapien
accaatagtggtagaaccctcgaca

SEQ ID NO: 6042427 - DNA, 25 bp, Homo sapien
tttgtagaaaagatgcaacagcaac

SEQ ID NO: 6042428 - DNA, 25 bp, Homo sapien
agcatcacctggagcgctaccgtca

SEQ ID NO: 6042429 - DNA, 25 bp, Homo sapien
cagagttggcagaacttttctttct

SEQ ID NO: 6042430 - DNA, 25 bp, Homo sapien
ccgcaaccaatcttggtatcgttct

SEQ ID NO: 6042431 - DNA, 25 bp, Homo sapien
gcagtttcaaattgtagaccgcaac

SEQ ID NO: 6042432 - DNA, 25 bp, Homo sapien
taacactttgtagaaaagatgcaac

SEQ ID NO: 6042433 - DNA, 25 bp, Homo sapien
gaattcgcccttctcagagaacgaa

SEQ ID NO: 6042434 - DNA, 25 bp, Homo sapien
tgttgtaacattagtaattcttgat

SEQ ID NO: 6042435 - DNA, 25 bp, Homo sapien
agtaggttgaataccaattggagtg

SEQ ID NO: 6042436 - DNA, 25 bp, Homo sapien
catctgcgtctaaaccttgttgtaa

SEQ ID NO: 6042437 - DNA, 25 bp, Homo sapien
aaataaaacggacagagttggcaga

SEQ ID NO: 6042438 - DNA, 25 bp, Homo sapien
accaattggagtgcccatcaatgga

SEQ ID NO: 6042439 - DNA, 25 bp, Homo sapien
aacattagtaattcttgattaccag

SEQ ID NO: 6042440 - DNA, 25 bp, Homo sapien
ccaatcttggtatcgttcttgaaat

SEQ ID NO: 6042441 - DNA, 25 bp, Homo sapien
gctacttttctccatagcgatgcaa

SEQ ID NO: 6042442 - DNA, 25 bp, Homo sapien
aacggacagagttggcagaactttt

SEQ ID NO: 6042443 - DNA, 25 bp, Homo sapien
accttgttgtaacattagtaattct

SEQ ID NO: 6042444 - DNA, 25 bp, Homo sapien
agtcaagtatgaaacaccagcatca

SEQ ID NO: 6042445 - DNA, 25 bp, Homo sapien
ccgcaaaataaaacggacagagttg

SEQ ID NO: 6042446 - DNA, 25 bp, Homo sapien
agaaccctcgacagtaggttgaata

SEQ ID NO: 6042447 - DNA, 25 bp, Homo sapien
cttagcaccaatagtggtagaaccc

SEQ ID NO: 6042448 - DNA, 25 bp, Homo sapien
ttcatacttagcaccaatagtggta

SEQ ID NO: 6042449 - DNA, 25 bp, Homo sapien
catgcaaccttaccattggaatcta

SEQ ID NO: 6042450 - DNA, 25 bp, Homo sapien
ctcagagaacgaagggttcaatgtc

SEQ ID NO: 6042451 - DNA, 25 bp, Homo sapien
cacctgtgaattcgcccttctcaga

SEQ ID NO: 6042452 - DNA, 25 bp, Homo sapien
cagttctggagtataaagtttctaa

SEQ ID NO: 6042453 - DNA, 25 bp, Homo sapien
ggagtgcccatcaatggatcagtaa

SEQ ID NO: 6042454 - DNA, 25 bp, Homo sapien
taccgtcagttctggagtataaagt

SEQ ID NO: 6042455 - DNA, 25 bp, Homo sapien
tcgttcttgaaatgatcgatttcac

SEQ ID NO: 6042456 - DNA, 25 bp, Homo sapien
ttggcttgcaattggcccgaaaaaa

SEQ ID NO: 6042457 - DNA, 25 bp, Homo sapien
agattgtctgtattcatacttagca

SEQ ID NO: 6042458 - DNA, 25 bp, Homo sapien
aatccaatcttgcttcttggagaca

SEQ ID NO: 6042459 - DNA, 25 bp, Homo sapien
tcttgattaccagcagtttcaaatt

SEQ ID NO: 6042460 - DNA, 25 bp, Homo sapien
gagcgctaccgtcagttctggagta

SEQ ID NO: 6042461 - DNA, 25 bp, Homo sapien
tgtaatgtagtttcgatacctgcct

SEQ ID NO: 6042462 - DNA, 25 bp, Homo sapien
ccagcttgtaatgtagtttcgatac

SEQ ID NO: 6042463 - DNA, 25 bp, Homo sapien
gaaaagatgcaacagcaacacctgt

SEQ ID NO: 6042464 - DNA, 25 bp, Homo sapien
cgaaaaaatccaatcttgcttcttg

SEQ ID NO: 6042465 - DNA, 25 bp, Homo sapien
ttcaccgcaaaataaaacggacaga

SEQ ID NO: 6042466 - DNA, 25 bp, Homo sapien
ctaaacctaaagctaattgaggagt

SEQ ID NO: 6042467 - DNA, 25 bp, Homo sapien
ttttgtgctacttttctccatagcg

SEQ ID NO: 6042468 - DNA, 25 bp, Homo sapien
ctttctagaaaacatgcaaccttac

SEQ ID NO: 6042469 - DNA, 25 bp, Homo sapien
gttcagtagtaagggaggcatttac

SEQ ID NO: 6042470 - DNA, 25 bp, Homo sapien
agtaagggaggcatttacagatact

SEQ ID NO: 6042471 - DNA, 25 bp, Homo sapien
aaggtcttataatgcagtggctgtc

SEQ ID NO: 6042472 - DNA, 25 bp, Homo sapien
ttctagctaggccaggcatgcattc

SEQ ID NO: 6042473 - DNA, 25 bp, Homo sapien
tgttattatggatgccaagcacaac

SEQ ID NO: 6042474 - DNA, 25 bp, Homo sapien
atggaatccaacagtatacaataaa

SEQ ID NO: 6042475 - DNA, 25 bp, Homo sapien
aaagagatccatatgactggtcaac

SEQ ID NO: 6042476 - DNA, 25 bp, Homo sapien
atgataaatttctaaccgttgctaa

SEQ ID NO: 6042477 - DNA, 25 bp, Homo sapien
gagcgaatatttgttcctgaagttc

SEQ ID NO: 6042478 - DNA, 25 bp, Homo sapien
gctcaagtctctacaagtttctgaa

SEQ ID NO: 6042479 - DNA, 25 bp, Homo sapien
tttcaaatatttatggaatccaaca

SEQ ID NO: 6042480 - DNA, 25 bp, Homo sapien
atgcaaaattcgaagggtctccatt

SEQ ID NO: 6042481 - DNA, 25 bp, Homo sapien
aagggtctccattgcaaattctaaa

SEQ ID NO: 6042482 - DNA, 25 bp, Homo sapien
tcgaatctaattgacgaagagcgaa

SEQ ID NO: 6042483 - DNA, 25 bp, Homo sapien
ctagatccaaatgttcagtagtaag

SEQ ID NO: 6042484 - DNA, 25 bp, Homo sapien
gaagttcaatcctcagatcatatta

SEQ ID NO: 6042485 - DNA, 25 bp, Homo sapien
tattctttattagaaaaacgctcaa

SEQ ID NO: 6042486 - DNA, 25 bp, Homo sapien
catattaatgataaatttctaaccg

SEQ ID NO: 6042487 - DNA, 25 bp, Homo sapien
gacgaagagcgaatatttgttcctg

SEQ ID NO: 6042488 - DNA, 25 bp, Homo sapien
tcagatcatattaatgataaatttc

SEQ ID NO: 6042489 - DNA, 25 bp, Homo sapien
ttctaaaaagagatccatatgactg

SEQ ID NO: 6042490 - DNA, 25 bp, Homo sapien
aattcgaagggtctccattgcaaat

SEQ ID NO: 6042491 - DNA, 25 bp, Homo sapien
ggtgttggtatacaatcagctattt

SEQ ID NO: 6042492 - DNA, 25 bp, Homo sapien
caatcagctattttttataataaat

SEQ ID NO: 6042493 - DNA, 25 bp, Homo sapien
gatccatatgactggtcaacctact

SEQ ID NO: 6042494 - DNA, 25 bp, Homo sapien
tatggatgccaagcacaacagctag

SEQ ID NO: 6042495 - DNA, 25 bp, Homo sapien
acctactcgaatctaattgacgaag

SEQ ID NO: 6042496 - DNA, 25 bp, Homo sapien
caataaaatctttgataagctggat

SEQ ID NO: 6042497 - DNA, 25 bp, Homo sapien
ctccattgcaaattctaaaaagaga

SEQ ID NO: 6042498 - DNA, 25 bp, Homo sapien
tgataagctggatttaactaaaacg

SEQ ID NO: 6042499 - DNA, 25 bp, Homo sapien
ttataataaatattgccccaggcaa

SEQ ID NO: 6042500 - DNA, 25 bp, Homo sapien
atctccaaacttaagttcttttatg

SEQ ID NO: 6042501 - DNA, 25 bp, Homo sapien
taaactcattgccatatcagacgca

SEQ ID NO: 6042502 - DNA, 25 bp, Homo sapien
tatggtttcaaatatttatggaatc

SEQ ID NO: 6042503 - DNA, 25 bp, Homo sapien
ctaattgacgaagagcgaatatttg

SEQ ID NO: 6042504 - DNA, 25 bp, Homo sapien
gtctctacaagtttctgaatgcaaa

SEQ ID NO: 6042505 - DNA, 25 bp, Homo sapien
ttctgaatgcaaaattcgaagggtc

SEQ ID NO: 6042506 - DNA, 25 bp, Homo sapien
tcttttatggtttcaaatatttatg

SEQ ID NO: 6042507 - DNA, 25 bp, Homo sapien
aatttctaaccgttgctaatgtgac

SEQ ID NO: 6042508 - DNA, 25 bp, Homo sapien
ctgtattggaaacaagaactggttg

SEQ ID NO: 6042509 - DNA, 25 bp, Homo sapien
ttgctaatgtgacgggggagggttc

SEQ ID NO: 6042510 - DNA, 25 bp, Homo sapien
atgtgacgggggagggttctgaagg

SEQ ID NO: 6042511 - DNA, 25 bp, Homo sapien
caggcaatattctttattagaaaaa

SEQ ID NO: 6042512 - DNA, 25 bp, Homo sapien
gcagtggctgtcctgtattggaaac

SEQ ID NO: 6042513 - DNA, 25 bp, Homo sapien
gtacttgacctctaccctggtgttg

SEQ ID NO: 6042514 - DNA, 25 bp, Homo sapien
ggaggcatttacagatactaaactc

SEQ ID NO: 6042515 - DNA, 25 bp, Homo sapien
tggaaacaagaactggttgtatagg

SEQ ID NO: 6042516 - DNA, 25 bp, Homo sapien
gttcctgaagttcaatcctcagatc

SEQ ID NO: 6042517 - DNA, 25 bp, Homo sapien
gctattttttataataaatattgcc

SEQ ID NO: 6042518 - DNA, 25 bp, Homo sapien
ctaggccaggcatgcattctagatc

SEQ ID NO: 6042519 - DNA, 25 bp, Homo sapien
taaccgttgctaatgtgacggggga

SEQ ID NO: 6042520 - DNA, 25 bp, Homo sapien
atatttgttcctgaagttcaatcct

SEQ ID NO: 6042521 - DNA, 25 bp, Homo sapien
caatcctcagatcatattaatgata

SEQ ID NO: 6042522 - DNA, 25 bp, Homo sapien
gttctgaaggtcttataatgcagtg

SEQ ID NO: 6042523 - DNA, 25 bp, Homo sapien
gtaaagtaaagatgttattatggat

SEQ ID NO: 6042524 - DNA, 25 bp, Homo sapien
taactaaaacgtataaacatccaga

SEQ ID NO: 6042525 - DNA, 25 bp, Homo sapien
gacctctaccctggtgttggtatac

SEQ ID NO: 6042526 - DNA, 25 bp, Homo sapien
ggtatacaatcagctattttttata

SEQ ID NO: 6042527 - DNA, 25 bp, Homo sapien
gcacaacagctagaaaacttctagc

SEQ ID NO: 6042528 - DNA, 25 bp, Homo sapien
ttgccccaggcaatattctttatta

SEQ ID NO: 6042529 - DNA, 25 bp, Homo sapien
taaagatgttattatggatgccaag

SEQ ID NO: 6042530 - DNA, 25 bp, Homo sapien
acaagtttctgaatgcaaaattcga

SEQ ID NO: 6042531 - DNA, 25 bp, Homo sapien
agtatacaataaaatctttgataag

SEQ ID NO: 6042532 - DNA, 25 bp, Homo sapien
atatttatggaatccaacagtatac

SEQ ID NO: 6042533 - DNA, 25 bp, Homo sapien
taccctggtgttggtatacaatcag

SEQ ID NO: 6042534 - DNA, 25 bp, Homo sapien
atttacagatactaaactcattgcc

SEQ ID NO: 6042535 - DNA, 25 bp, Homo sapien
gaaaacttctagctaggccaggcat

SEQ ID NO: 6042536 - DNA, 25 bp, Homo sapien
ggagggttctgaaggtcttataatg

SEQ ID NO: 6042537 - DNA, 25 bp, Homo sapien
aaaacgtataaacatccagaagaat

SEQ ID NO: 6042538 - DNA, 25 bp, Homo sapien
agatactaaactcattgccatatca

SEQ ID NO: 6042539 - DNA, 25 bp, Homo sapien
ttgaaagtacttgacctctaccctg

SEQ ID NO: 6042540 - DNA, 25 bp, Homo sapien
gctgtcctgtattggaaacaagaac

SEQ ID NO: 6042541 - DNA, 25 bp, Homo sapien
tgccaagcacaacagctagaaaact

SEQ ID NO: 6042542 - DNA, 25 bp, Homo sapien
catccagaagaattgaaagtacttg

SEQ ID NO: 6042543 - DNA, 25 bp, Homo sapien
ttataatgcagtggctgtcctgtat

SEQ ID NO: 6042544 - DNA, 25 bp, Homo sapien
caggcatgcattctagatccaaatg

SEQ ID NO: 6042545 - DNA, 25 bp, Homo sapien
tgcattctagatccaaatgttcagt

SEQ ID NO: 6042546 - DNA, 25 bp, Homo sapien
tccaacagtatacaataaaatcttt

SEQ ID NO: 6042547 - DNA, 25 bp, Homo sapien
ccaaatgttcagtagtaagggaggc

SEQ ID NO: 6042548 - DNA, 25 bp, Homo sapien
tgcaaattctaaaaagagatccata

SEQ ID NO: 6042549 - DNA, 25 bp, Homo sapien
ttattagaaaaacgctcaagtctct

SEQ ID NO: 6042550 - DNA, 25 bp, Homo sapien
tggtcaacctactcgaatctaattg

SEQ ID NO: 6042551 - DNA, 25 bp, Homo sapien
aatctttgataagctggatttaact

SEQ ID NO: 6042552 - DNA, 25 bp, Homo sapien
cagctagaaaacttctagctaggcc

SEQ ID NO: 6042553 - DNA, 25 bp, Homo sapien
aaaaacgctcaagtctctacaagtt

SEQ ID NO: 6042554 - DNA, 25 bp, Homo sapien
gaagaattgaaagtacttgacctct

SEQ ID NO: 6042555 - DNA, 25 bp, Homo sapien
tatgactggtcaacctactcgaatc

SEQ ID NO: 6042556 - DNA, 25 bp, Homo sapien
caagaactggttgtataggtttggt

SEQ ID NO: 6042557 - DNA, 25 bp, Homo sapien
tataaacatccagaagaattgaaag

SEQ ID NO: 6042558 - DNA, 25 bp, Homo sapien
gcgagtccatgacagtattcaaggg

SEQ ID NO: 6042559 - DNA, 25 bp, Homo sapien
caaatcccttcaattcatttgcgtc

SEQ ID NO: 6042560 - DNA, 25 bp, Homo sapien
catttgtcaaatcaatcggacactt

SEQ ID NO: 6042561 - DNA, 25 bp, Homo sapien
agaagttttctagctgttgtgcttg

SEQ ID NO: 6042562 - DNA, 25 bp, Homo sapien
gaataatttcgttagatatataaac

SEQ ID NO: 6042563 - DNA, 25 bp, Homo sapien
ttgggtccatttctactaacgcaat

SEQ ID NO: 6042564 - DNA, 25 bp, Homo sapien
catatttccgcagcactaaataaaa

SEQ ID NO: 6042565 - DNA, 25 bp, Homo sapien
tatctacgtcaaaatcgaagtcaat

SEQ ID NO: 6042566 - DNA, 25 bp, Homo sapien
ctccatgaataatttcgttagatat

SEQ ID NO: 6042567 - DNA, 25 bp, Homo sapien
accaaacctatacaaccagttcttg

SEQ ID NO: 6042568 - DNA, 25 bp, Homo sapien
tttctagctgttgtgcttggcatcc

SEQ ID NO: 6042569 - DNA, 25 bp, Homo sapien
ccatgacagtattcaagggtgttct

SEQ ID NO: 6042570 - DNA, 25 bp, Homo sapien
ttcttttcaaaatcattaagtgcct

SEQ ID NO: 6042571 - DNA, 25 bp, Homo sapien
ctactgaacatttggatctagaatg

SEQ ID NO: 6042572 - DNA, 25 bp, Homo sapien
ccctttgtaggccatatttccgcag

SEQ ID NO: 6042573 - DNA, 25 bp, Homo sapien
taaaatatctggtttgaaaggccac

SEQ ID NO: 6042574 - DNA, 25 bp, Homo sapien
actcgtcatttgtcaaatcaatcgg

SEQ ID NO: 6042575 - DNA, 25 bp, Homo sapien
agtgcctcgtgacataatcccaatt

SEQ ID NO: 6042576 - DNA, 25 bp, Homo sapien
tggcaatgagtttagtatctgtaaa

SEQ ID NO: 6042577 - DNA, 25 bp, Homo sapien
ggacagccactgcattataagacct

SEQ ID NO: 6042578 - DNA, 25 bp, Homo sapien
tcaaaatcattaagtgcctcgtgac

SEQ ID NO: 6042579 - DNA, 25 bp, Homo sapien
ccatgtcccagcgagtccatgacag

SEQ ID NO: 6042580 - DNA, 25 bp, Homo sapien
tgagtttagtatctgtaaatgcctc

SEQ ID NO: 6042581 - DNA, 25 bp, Homo sapien
tgactatcaaatcccttcaattcat

SEQ ID NO: 6042582 - DNA, 25 bp, Homo sapien
gacacttttttagcagatctttgtc

SEQ ID NO: 6042583 - DNA, 25 bp, Homo sapien
cattataagaccttcagaaccctcc

SEQ ID NO: 6042584 - DNA, 25 bp, Homo sapien
atttcgttagatatataaactcgtc

SEQ ID NO: 6042585 - DNA, 25 bp, Homo sapien
cccttactactgaacatttggatct

SEQ ID NO: 6042586 - DNA, 25 bp, Homo sapien
tggctttccctttgtaggccatatt

SEQ ID NO: 6042587 - DNA, 25 bp, Homo sapien
ccttcaattcatttgcgtctgatat

SEQ ID NO: 6042588 - DNA, 25 bp, Homo sapien
ggcatccataataacatctttactt

SEQ ID NO: 6042589 - DNA, 25 bp, Homo sapien
tcaaatcaatcggacacttttttag

SEQ ID NO: 6042590 - DNA, 25 bp, Homo sapien
acaaccagttcttgtttccaataca

SEQ ID NO: 6042591 - DNA, 25 bp, Homo sapien
gcagatctttgtcagtgattctact

SEQ ID NO: 6042592 - DNA, 25 bp, Homo sapien
gaaccctcccccgtcacattagcaa

SEQ ID NO: 6042593 - DNA, 25 bp, Homo sapien
caagggtgttcttttcaaaatcatt

SEQ ID NO: 6042594 - DNA, 25 bp, Homo sapien
tgtaggccatatttccgcagcacta

SEQ ID NO: 6042595 - DNA, 25 bp, Homo sapien
tccgcagcactaaataaaatgggat

SEQ ID NO: 6042596 - DNA, 25 bp, Homo sapien
tgcatgcctggcctagctagaagtt

SEQ ID NO: 6042597 - DNA, 25 bp, Homo sapien
attcatttgcgtctgatatggcaat

SEQ ID NO: 6042598 - DNA, 25 bp, Homo sapien
aatcgaagtcaattgggtccatttc

SEQ ID NO: 6042599 - DNA, 25 bp, Homo sapien
gcactaaataaaatgggatcccatt

SEQ ID NO: 6042600 - DNA, 25 bp, Homo sapien
acaaaatccattaaaatatctggtt

SEQ ID NO: 6042601 - DNA, 25 bp, Homo sapien
aggccactccatgaataatttcgtt

SEQ ID NO: 6042602 - DNA, 25 bp, Homo sapien
tcttctatgcattgactatcaaatc

SEQ ID NO: 6042603 - DNA, 25 bp, Homo sapien
ctttgtcagtgattctactattaaa

SEQ ID NO: 6042604 - DNA, 25 bp, Homo sapien
atgcattgactatcaaatcccttca

SEQ ID NO: 6042605 - DNA, 25 bp, Homo sapien
caatcggacacttttttagcagatc

SEQ ID NO: 6042606 - DNA, 25 bp, Homo sapien
agtcaattgggtccatttctactaa

SEQ ID NO: 6042607 - DNA, 25 bp, Homo sapien
cagtgattctactattaaaatattg

SEQ ID NO: 6042608 - DNA, 25 bp, Homo sapien
cataataacatctttactttaccaa

SEQ ID NO: 6042609 - DNA, 25 bp, Homo sapien
ctgtaaatgcctcccttactactga

SEQ ID NO: 6042610 - DNA, 25 bp, Homo sapien
tcgtgacataatcccaattatctac

SEQ ID NO: 6042611 - DNA, 25 bp, Homo sapien
atgggatcccattcttctatgcatt

SEQ ID NO: 6042612 - DNA, 25 bp, Homo sapien
ctgatatggcaatgagtttagtatc

SEQ ID NO: 6042613 - DNA, 25 bp, Homo sapien
ccactgcattataagaccttcagaa

SEQ ID NO: 6042614 - DNA, 25 bp, Homo sapien
cctatacaaccagttcttgtttcca

SEQ ID NO: 6042615 - DNA, 25 bp, Homo sapien
ttctactattaaaatattgttggcc

SEQ ID NO: 6042616 - DNA, 25 bp, Homo sapien
atataaactcgtcatttgtcaaatc

SEQ ID NO: 6042617 - DNA, 25 bp, Homo sapien
cgcaattggctttccctttgtaggc

SEQ ID NO: 6042618 - DNA, 25 bp, Homo sapien
cccaattatctacgtcaaaatcgaa

SEQ ID NO: 6042619 - DNA, 25 bp, Homo sapien
ccatttctactaacgcaattggctt

SEQ ID NO: 6042620 - DNA, 25 bp, Homo sapien
ttgcgtctgatatggcaatgagttt

SEQ ID NO: 6042621 - DNA, 25 bp, Homo sapien
tcattaagtgcctcgtgacataatc

SEQ ID NO: 6042622 - DNA, 25 bp, Homo sapien
gttggccaccatgtcccagcgagtc

SEQ ID NO: 6042623 - DNA, 25 bp, Homo sapien
tttgaaaggccactccatgaataat

SEQ ID NO: 6042624 - DNA, 25 bp, Homo sapien
aacatttggatctagaatgcatgcc

SEQ ID NO: 6042625 - DNA, 25 bp, Homo sapien
tagaatgcatgcctggcctagctag

SEQ ID NO: 6042626 - DNA, 25 bp, Homo sapien
ctactaacgcaattggctttccctt

SEQ ID NO: 6042627 - DNA, 25 bp, Homo sapien
tagtatctgtaaatgcctcccttac

SEQ ID NO: 6042628 - DNA, 25 bp, Homo sapien
tattaaaatattgttggccaccatg

SEQ ID NO: 6042629 - DNA, 25 bp, Homo sapien
ttagatatataaactcgtcatttgt

SEQ ID NO: 6042630 - DNA, 25 bp, Homo sapien
cagtattcaagggtgttcttttcaa

SEQ ID NO: 6042631 - DNA, 25 bp, Homo sapien
cgtcaaaatcgaagtcaattgggtc

SEQ ID NO: 6042632 - DNA, 25 bp, Homo sapien
cataatcccaattatctacgtcaaa

SEQ ID NO: 6042633 - DNA, 25 bp, Homo sapien
cctggcctagctagaagttttctag

SEQ ID NO: 6042634 - DNA, 25 bp, Homo sapien
tcccattcttctatgcattgactat

SEQ ID NO: 6042635 - DNA, 25 bp, Homo sapien
tgtttccaatacaggacagccactg

SEQ ID NO: 6042636 - DNA, 25 bp, Homo sapien
gtcccagcgagtccatgacagtatt

SEQ ID NO: 6042637 - DNA, 25 bp, Homo sapien
atgcctcccttactactgaacattt

SEQ ID NO: 6042638 - DNA, 25 bp, Homo sapien
agttcttgtttccaatacaggacag

SEQ ID NO: 6042639 - DNA, 25 bp, Homo sapien
gctgttgtgcttggcatccataata

SEQ ID NO: 6042640 - DNA, 25 bp, Homo sapien
ctagctagaagttttctagctgttg

SEQ ID NO: 6042641 - DNA, 25 bp, Homo sapien
atctggtttgaaaggccactccatg

SEQ ID NO: 6042642 - DNA, 25 bp, Homo sapien
cccccgtcacattagcaacggttag

SEQ ID NO: 6042643 - DNA, 25 bp, Homo sapien
gtgcttggcatccataataacatct

SEQ ID NO: 6042644 - DNA, 25 bp, Homo sapien
tttttagcagatctttgtcagtgat

SEQ ID NO: 6042645 - DNA, 25 bp, Homo sapien
tccattaaaatatctggtttgaaag

SEQ ID NO: 6042646 - DNA, 25 bp, Homo sapien
aataaaatgggatcccattcttcta

SEQ ID NO: 6042647 - DNA, 25 bp, Homo sapien
tggatctagaatgcatgcctggcct

SEQ ID NO: 6042648 - DNA, 25 bp, Homo sapien
aatattgttggccaccatgtcccag

SEQ ID NO: 6042649 - DNA, 25 bp, Homo sapien
caatacaggacagccactgcattat

SEQ ID NO: 6042650 - DNA, 25 bp, Homo sapien
gaatatcttagttaaactggacagc

SEQ ID NO: 6042651 - DNA, 25 bp, Homo sapien
ttgcatttatactctgcgtacctct

SEQ ID NO: 6042652 - DNA, 25 bp, Homo sapien
ttaccactacaaccgctgataaaga

SEQ ID NO: 6042653 - DNA, 25 bp, Homo sapien
atacaattattgaccctagtgtaga

SEQ ID NO: 6042654 - DNA, 25 bp, Homo sapien
ctggatgctcaatggcaaaaatttc

SEQ ID NO: 6042655 - DNA, 25 bp, Homo sapien
gcctaatcccaatacaattattgac

SEQ ID NO: 6042656 - DNA, 25 bp, Homo sapien
ccaaagagaacgaattcgatgtaag

SEQ ID NO: 6042657 - DNA, 25 bp, Homo sapien
ctctctaagtctgccttggaccatg

SEQ ID NO: 6042658 - DNA, 25 bp, Homo sapien
actctagatgtggatgaattgaaca

SEQ ID NO: 6042659 - DNA, 25 bp, Homo sapien
taccggaaggtattgcaaatgtaag

SEQ ID NO: 6042660 - DNA, 25 bp, Homo sapien
ttttatgaagtaaaccagtttgtga

SEQ ID NO: 6042661 - DNA, 25 bp, Homo sapien
atcccggaatatcttagttaaactg

SEQ ID NO: 6042662 - DNA, 25 bp, Homo sapien
aaactcagatcgatgctcctatcga

SEQ ID NO: 6042663 - DNA, 25 bp, Homo sapien
ttgcaaatgtaagcgtacagccggg

SEQ ID NO: 6042664 - DNA, 25 bp, Homo sapien
tgaagtaaaccagtttgtgaagacc

SEQ ID NO: 6042665 - DNA, 25 bp, Homo sapien
acaaattgtatgaagatataccgga

SEQ ID NO: 6042666 - DNA, 25 bp, Homo sapien
atgtaaggcaagataagcattctaa

SEQ ID NO: 6042667 - DNA, 25 bp, Homo sapien
gatgaattgaacattccaaacgaaa

SEQ ID NO: 6042668 - DNA, 25 bp, Homo sapien
accctagtgtagacaaattgtatga

SEQ ID NO: 6042669 - DNA, 25 bp, Homo sapien
agaacgaattcgatgtaaggcaaga

SEQ ID NO: 6042670 - DNA, 25 bp, Homo sapien
gccttggaccatgatgtaactctag

SEQ ID NO: 6042671 - DNA, 25 bp, Homo sapien
gactttgaaatctgcaaatgaatta

SEQ ID NO: 6042672 - DNA, 25 bp, Homo sapien
tagaacactcgcacagagtcgacct

SEQ ID NO: 6042673 - DNA, 25 bp, Homo sapien
taaagagactttgaaatctgcaaat

SEQ ID NO: 6042674 - DNA, 25 bp, Homo sapien
tggcaaaaatttctctctaagtctg

SEQ ID NO: 6042675 - DNA, 25 bp, Homo sapien
gatgtggatgaattgaacattccaa

SEQ ID NO: 6042676 - DNA, 25 bp, Homo sapien
cagtttgtgaagacccaaattaagg

SEQ ID NO: 6042677 - DNA, 25 bp, Homo sapien
aaatttctctctaagtctgccttgg

SEQ ID NO: 6042678 - DNA, 25 bp, Homo sapien
ctgagcttaccactacaaccgctga

SEQ ID NO: 6042679 - DNA, 25 bp, Homo sapien
gtgtagacaaattgtatgaagatat

SEQ ID NO: 6042680 - DNA, 25 bp, Homo sapien
gactattgtataaggcaaatgaaaa

SEQ ID NO: 6042681 - DNA, 25 bp, Homo sapien
gaggatctgagcttaccactacaac

SEQ ID NO: 6042682 - DNA, 25 bp, Homo sapien
gtcgacctttcgttgcatttatact

SEQ ID NO: 6042683 - DNA, 25 bp, Homo sapien
aatgcacgcctctgatatgatgagg

SEQ ID NO: 6042684 - DNA, 25 bp, Homo sapien
taaactggacagcttattcgaaggg

SEQ ID NO: 6042685 - DNA, 25 bp, Homo sapien
tattagattctctagaacactcgca

SEQ ID NO: 6042686 - DNA, 25 bp, Homo sapien
attctctagaacactcgcacagagt

SEQ ID NO: 6042687 - DNA, 25 bp, Homo sapien
agatctcaaatagggctttaatgca

SEQ ID NO: 6042688 - DNA, 25 bp, Homo sapien
gaaatctgcaaatgaattattagat

SEQ ID NO: 6042689 - DNA, 25 bp, Homo sapien
agatcgatgctcctatcgaagatat

SEQ ID NO: 6042690 - DNA, 25 bp, Homo sapien
cttattcgaagggttgcatgataaa

SEQ ID NO: 6042691 - DNA, 25 bp, Homo sapien
aaatagccaaagagaacgaattcga

SEQ ID NO: 6042692 - DNA, 25 bp, Homo sapien
tccaaacgaaatatcccggaatatc

SEQ ID NO: 6042693 - DNA, 25 bp, Homo sapien
tgaaaagactattgtataaggcaaa

SEQ ID NO: 6042694 - DNA, 25 bp, Homo sapien
aggataactggacgagctggcctaa

SEQ ID NO: 6042695 - DNA, 25 bp, Homo sapien
tgcaaatgaattattagattctcta

SEQ ID NO: 6042696 - DNA, 25 bp, Homo sapien
ggacagcttattcgaagggttgcat

SEQ ID NO: 6042697 - DNA, 25 bp, Homo sapien
cacagagtcgacctttcgttgcatt

SEQ ID NO: 6042698 - DNA, 25 bp, Homo sapien
ctatcgaagatattatacgaggatc

SEQ ID NO: 6042699 - DNA, 25 bp, Homo sapien
tgaagacccaaattaaggataactg

SEQ ID NO: 6042700 - DNA, 25 bp, Homo sapien
aagatattatacgaggatctgagct

SEQ ID NO: 6042701 - DNA, 25 bp, Homo sapien
tcccaatacaattattgaccctagt

SEQ ID NO: 6042702 - DNA, 25 bp, Homo sapien
gctcaatggcaaaaatttctctcta

SEQ ID NO: 6042703 - DNA, 25 bp, Homo sapien
ggcaagataagcattctaataatat

SEQ ID NO: 6042704 - DNA, 25 bp, Homo sapien
cgaaatatcccggaatatcttagtt

SEQ ID NO: 6042705 - DNA, 25 bp, Homo sapien
tgaattattagattctctagaacac

SEQ ID NO: 6042706 - DNA, 25 bp, Homo sapien
tacagccgggggagatctcaaatag

SEQ ID NO: 6042707 - DNA, 25 bp, Homo sapien
cgctgataaagagactttgaaatct

SEQ ID NO: 6042708 - DNA, 25 bp, Homo sapien
tgaacattccaaacgaaatatcccg

SEQ ID NO: 6042709 - DNA, 25 bp, Homo sapien
ttatacgaggatctgagcttaccac

SEQ ID NO: 6042710 - DNA, 25 bp, Homo sapien
tctgcgtacctcttgaaaagactat

SEQ ID NO: 6042711 - DNA, 25 bp, Homo sapien
acctcttgaaaagactattgtataa

SEQ ID NO: 6042712 - DNA, 25 bp, Homo sapien
gagctggcctaatcccaatacaatt

SEQ ID NO: 6042713 - DNA, 25 bp, Homo sapien
ctttcgttgcatttatactctgcgt

SEQ ID NO: 6042714 - DNA, 25 bp, Homo sapien
ttatactctgcgtacctcttgaaaa

SEQ ID NO: 6042715 - DNA, 25 bp, Homo sapien
gatgtaactctagatgtggatgaat

SEQ ID NO: 6042716 - DNA, 25 bp, Homo sapien
gcctctgatatgatgagggttgagc

SEQ ID NO: 6042717 - DNA, 25 bp, Homo sapien
ggctttaatgcacgcctctgatatg

SEQ ID NO: 6042718 - DNA, 25 bp, Homo sapien
aaattaaggataactggacgagctg

SEQ ID NO: 6042719 - DNA, 25 bp, Homo sapien
gttgagctggatgctcaatggcaaa

SEQ ID NO: 6042720 - DNA, 25 bp, Homo sapien
tacaaccgctgataaagagactttg

SEQ ID NO: 6042721 - DNA, 25 bp, Homo sapien
cgaagggttgcatgataaaatagcc

SEQ ID NO: 6042722 - DNA, 25 bp, Homo sapien
actggacgagctggcctaatcccaa

SEQ ID NO: 6042723 - DNA, 25 bp, Homo sapien
tgataaaatagccaaagagaacgaa

SEQ ID NO: 6042724 - DNA, 25 bp, Homo sapien
ttattgaccctagtgtagacaaatt

SEQ ID NO: 6042725 - DNA, 25 bp, Homo sapien
cactcgcacagagtcgacctttcgt

SEQ ID NO: 6042726 - DNA, 25 bp, Homo sapien
gaccatgatgtaactctagatgtgg

SEQ ID NO: 6042727 - DNA, 25 bp, Homo sapien
aagtctgccttggaccatgatgtaa

SEQ ID NO: 6042728 - DNA, 25 bp, Homo sapien
aattcgatgtaaggcaagataagca

SEQ ID NO: 6042729 - DNA, 25 bp, Homo sapien
aaggtattgcaaatgtaagcgtaca

SEQ ID NO: 6042730 - DNA, 25 bp, Homo sapien
gttgcatgataaaatagccaaagag

SEQ ID NO: 6042731 - DNA, 25 bp, Homo sapien
atgctcctatcgaagatattatacg

SEQ ID NO: 6042732 - DNA, 25 bp, Homo sapien
aaatagggctttaatgcacgcctct

SEQ ID NO: 6042733 - DNA, 25 bp, Homo sapien
gatatgatgagggttgagctggatg

SEQ ID NO: 6042734 - DNA, 25 bp, Homo sapien
atgagggttgagctggatgctcaat

SEQ ID NO: 6042735 - DNA, 25 bp, Homo sapien
cgggggagatctcaaatagggcttt

SEQ ID NO: 6042736 - DNA, 25 bp, Homo sapien
aagatataccggaaggtattgcaaa

SEQ ID NO: 6042737 - DNA, 25 bp, Homo sapien
tgtatgaagatataccggaaggtat

SEQ ID NO: 6042738 - DNA, 25 bp, Homo sapien
cttagttaaactggacagcttattc

SEQ ID NO: 6042739 - DNA, 25 bp, Homo sapien
tccaactcgtaatcagagatctcat

SEQ ID NO: 6042740 - DNA, 25 bp, Homo sapien
ctttgatgtcaaccgtttatccttc

SEQ ID NO: 6042741 - DNA, 25 bp, Homo sapien
tttatcatgcaacccttcgaataag

SEQ ID NO: 6042742 - DNA, 25 bp, Homo sapien
cgggatatttcgtttggaatgttca

SEQ ID NO: 6042743 - DNA, 25 bp, Homo sapien
tagatatccgtcatatcctcgttca

SEQ ID NO: 6042744 - DNA, 25 bp, Homo sapien
acttttccacaggtatgaaatcttc

SEQ ID NO: 6042745 - DNA, 25 bp, Homo sapien
catccacatctagagttacatcatg

SEQ ID NO: 6042746 - DNA, 25 bp, Homo sapien
ttttggctggtgatacttttttaga

SEQ ID NO: 6042747 - DNA, 25 bp, Homo sapien
tatattattagaatgcttatcttgc

SEQ ID NO: 6042748 - DNA, 25 bp, Homo sapien
caacctcttgaaaccaagtcatgat

SEQ ID NO: 6042749 - DNA, 25 bp, Homo sapien
gatatcgttatatagctctaatgat

SEQ ID NO: 6042750 - DNA, 25 bp, Homo sapien
ttctgggatatcgttatatagctct

SEQ ID NO: 6042751 - DNA, 25 bp, Homo sapien
gtctatctgattcgcccttatatta

SEQ ID NO: 6042752 - DNA, 25 bp, Homo sapien
ttccgtctcttcacgatttaagcgt

SEQ ID NO: 6042753 - DNA, 25 bp, Homo sapien
atatcctcgttcatttcacaacctc

SEQ ID NO: 6042754 - DNA, 25 bp, Homo sapien
tcaataacttttccacaggtatgaa

SEQ ID NO: 6042755 - DNA, 25 bp, Homo sapien
cttggatttgtcctttgatgtcaac

SEQ ID NO: 6042756 - DNA, 25 bp, Homo sapien
atcgaattcgttctctttggctatt

SEQ ID NO: 6042757 - DNA, 25 bp, Homo sapien
ggctattttatcatgcaacccttcg

SEQ ID NO: 6042758 - DNA, 25 bp, Homo sapien
ctggtgatacttttttagaatttgt

SEQ ID NO: 6042759 - DNA, 25 bp, Homo sapien
tacttttctgggatatcgttatata

SEQ ID NO: 6042760 - DNA, 25 bp, Homo sapien
ctcgtcgtctatctgattcgccctt

SEQ ID NO: 6042761 - DNA, 25 bp, Homo sapien
tatccttcaataacttttccacagg

SEQ ID NO: 6042762 - DNA, 25 bp, Homo sapien
tcgattggcctgcatgggctcgtcg

SEQ ID NO: 6042763 - DNA, 25 bp, Homo sapien
agtctgaattttctctttttatact

SEQ ID NO: 6042764 - DNA, 25 bp, Homo sapien
gctgtccagtttaactaagatattc

SEQ ID NO: 6042765 - DNA, 25 bp, Homo sapien
atctcattctcatcctctaagtagc

SEQ ID NO: 6042766 - DNA, 25 bp, Homo sapien
atttcacaacctcttgaaaccaagt

SEQ ID NO: 6042767 - DNA, 25 bp, Homo sapien
ctggtcttttttggctggtgatact

SEQ ID NO: 6042768 - DNA, 25 bp, Homo sapien
ctcttcacgatttaagcgttgtagc

SEQ ID NO: 6042769 - DNA, 25 bp, Homo sapien
cttgaaaccaagtcatgatatgtgt

SEQ ID NO: 6042770 - DNA, 25 bp, Homo sapien
ttctcatcctctaagtagcccttta

SEQ ID NO: 6042771 - DNA, 25 bp, Homo sapien
ccacaggtatgaaatcttctcttgt

SEQ ID NO: 6042772 - DNA, 25 bp, Homo sapien
tatgtgtatttaattcgtcgattgg

SEQ ID NO: 6042773 - DNA, 25 bp, Homo sapien
gtttagagcatcttccgtctcttca

SEQ ID NO: 6042774 - DNA, 25 bp, Homo sapien
tcagagatctcattctcatcctcta

SEQ ID NO: 6042775 - DNA, 25 bp, Homo sapien
gaataagctgtccagtttaactaag

SEQ ID NO: 6042776 - DNA, 25 bp, Homo sapien
ctgattcgcccttatattattagaa

SEQ ID NO: 6042777 - DNA, 25 bp, Homo sapien
agctctaatgatttcatgtagatat

SEQ ID NO: 6042778 - DNA, 25 bp, Homo sapien
atatttcgtttggaatgttcaattc

SEQ ID NO: 6042779 - DNA, 25 bp, Homo sapien
catgggctcgtcgtctatctgattc

SEQ ID NO: 6042780 - DNA, 25 bp, Homo sapien
ttacttaatagctcctttaagtatg

SEQ ID NO: 6042781 - DNA, 25 bp, Homo sapien
ccttacatcgaattcgttctctttg

SEQ ID NO: 6042782 - DNA, 25 bp, Homo sapien
tattagaatgcttatcttgccttac

SEQ ID NO: 6042783 - DNA, 25 bp, Homo sapien
agcatcttccgtctcttcacgattt

SEQ ID NO: 6042784 - DNA, 25 bp, Homo sapien
cagtttaactaagatattccgggat

SEQ ID NO: 6042785 - DNA, 25 bp, Homo sapien
aactaagatattccgggatatttcg

SEQ ID NO: 6042786 - DNA, 25 bp, Homo sapien
tcgtaatcagagatctcattctcat

SEQ ID NO: 6042787 - DNA, 25 bp, Homo sapien
gtatgaaatcttctcttgttttact

SEQ ID NO: 6042788 - DNA, 25 bp, Homo sapien
aattcgtcgattggcctgcatgggc

SEQ ID NO: 6042789 - DNA, 25 bp, Homo sapien
taatagctcctttaagtatgaactg

SEQ ID NO: 6042790 - DNA, 25 bp, Homo sapien
aatcttctcttgttttacttaatag

SEQ ID NO: 6042791 - DNA, 25 bp, Homo sapien
tatgaactggtcttttttggctggt

SEQ ID NO: 6042792 - DNA, 25 bp, Homo sapien
ctcttgttttacttaatagctcctt

SEQ ID NO: 6042793 - DNA, 25 bp, Homo sapien
atcttgccttacatcgaattcgttc

SEQ ID NO: 6042794 - DNA, 25 bp, Homo sapien
cccttcgaataagctgtccagttta

SEQ ID NO: 6042795 - DNA, 25 bp, Homo sapien
tttgtcctttgatgtcaaccgttta

SEQ ID NO: 6042796 - DNA, 25 bp, Homo sapien
ttcatgtagatatccgtcatatcct

SEQ ID NO: 6042797 - DNA, 25 bp, Homo sapien
acgatttaagcgttgtagcttggat

SEQ ID NO: 6042798 - DNA, 25 bp, Homo sapien
atgcaacccttcgaataagctgtcc

SEQ ID NO: 6042799 - DNA, 25 bp, Homo sapien
taagcgttgtagcttggatttgtcc

SEQ ID NO: 6042800 - DNA, 25 bp, Homo sapien
tgtcaaccgtttatccttcaataac

SEQ ID NO: 6042801 - DNA, 25 bp, Homo sapien
atttgtttgggcagtctgaattttc

SEQ ID NO: 6042802 - DNA, 25 bp, Homo sapien
cgcccttatattattagaatgctta

SEQ ID NO: 6042803 - DNA, 25 bp, Homo sapien
tcttttgtttagagcatcttccgtc

SEQ ID NO: 6042804 - DNA, 25 bp, Homo sapien
tcaattcatccacatctagagttac

SEQ ID NO: 6042805 - DNA, 25 bp, Homo sapien
ttatatagctctaatgatttcatgt

SEQ ID NO: 6042806 - DNA, 25 bp, Homo sapien
gaatgttcaattcatccacatctag

SEQ ID NO: 6042807 - DNA, 25 bp, Homo sapien
cgtttggaatgttcaattcatccac

SEQ ID NO: 6042808 - DNA, 25 bp, Homo sapien
ttcgttctctttggctattttatca

SEQ ID NO: 6042809 - DNA, 25 bp, Homo sapien
tcgttcatttcacaacctcttgaaa

SEQ ID NO: 6042810 - DNA, 25 bp, Homo sapien
ttgtagcttggatttgtcctttgat

SEQ ID NO: 6042811 - DNA, 25 bp, Homo sapien
tttagaatttgtttgggcagtctga

SEQ ID NO: 6042812 - DNA, 25 bp, Homo sapien
catctagagttacatcatggtccaa

SEQ ID NO: 6042813 - DNA, 25 bp, Homo sapien
ttgggcagtctgaattttctctttt

SEQ ID NO: 6042814 - DNA, 25 bp, Homo sapien
accaagtcatgatatgtgtatttaa

SEQ ID NO: 6042815 - DNA, 25 bp, Homo sapien
ctttttatacttttctgggatatcg

SEQ ID NO: 6042816 - DNA, 25 bp, Homo sapien
aatgatttcatgtagatatccgtca

SEQ ID NO: 6042817 - DNA, 25 bp, Homo sapien
ggcctgcatgggctcgtcgtctatc

SEQ ID NO: 6042818 - DNA, 25 bp, Homo sapien
aaatgttcttttgtttagagcatct

SEQ ID NO: 6042819 - DNA, 25 bp, Homo sapien
ctcctttaagtatgaactggtcttt

SEQ ID NO: 6042820 - DNA, 25 bp, Homo sapien
aatgcttatcttgccttacatcgaa

SEQ ID NO: 6042821 - DNA, 25 bp, Homo sapien
gatattccgggatatttcgtttgga

SEQ ID NO: 6042822 - DNA, 25 bp, Homo sapien
tccgtcatatcctcgttcatttcac

SEQ ID NO: 6042823 - DNA, 25 bp, Homo sapien
cagtcgtccaactcgtaatcagaga

SEQ ID NO: 6042824 - DNA, 25 bp, Homo sapien
taagtatgaactggtcttttttggc

SEQ ID NO: 6042825 - DNA, 25 bp, Homo sapien
tcatgatatgtgtatttaattcgtc

SEQ ID NO: 6042826 - DNA, 25 bp, Homo sapien
ctctttggctattttatcatgcaac

SEQ ID NO: 6042827 - DNA, 25 bp, Homo sapien
tcctctaagtagccctttacctgaa

SEQ ID NO: 6042828 - DNA, 25 bp, Homo sapien
gtatttaattcgtcgattggcctgc

SEQ ID NO: 6042829 - DNA, 25 bp, Homo sapien
ggtgcagcagctggcactggcgcca

SEQ ID NO: 6042830 - DNA, 25 bp, Homo sapien
gtccaacccgcaattgcaggccatg

SEQ ID NO: 6042831 - DNA, 25 bp, Homo sapien
ggccgacttgaccagtgccagatac

SEQ ID NO: 6042832 - DNA, 25 bp, Homo sapien
ccggacggtggtgcattaaacaacg

SEQ ID NO: 6042833 - DNA, 25 bp, Homo sapien
gttgaggatgatggaaaaccccatc

SEQ ID NO: 6042834 - DNA, 25 bp, Homo sapien
gaataaccaagacgagctgttgagg

SEQ ID NO: 6042835 - DNA, 25 bp, Homo sapien
caagacggtcacagcgtccatctgg

SEQ ID NO: 6042836 - DNA, 25 bp, Homo sapien
catgtttggcccggacggtggtgca

SEQ ID NO: 6042837 - DNA, 25 bp, Homo sapien
cgagatgttgagtaaccctcagatg

SEQ ID NO: 6042838 - DNA, 25 bp, Homo sapien
tcaaagtgcaggcttcaatccgctg

SEQ ID NO: 6042839 - DNA, 25 bp, Homo sapien
atgctacaaagtcccatgtttagac

SEQ ID NO: 6042840 - DNA, 25 bp, Homo sapien
aatgaacgagatgttgagtaaccct

SEQ ID NO: 6042841 - DNA, 25 bp, Homo sapien
aaggacgaccaaaccgtggagtcat

SEQ ID NO: 6042842 - DNA, 25 bp, Homo sapien
cttccaatcgcaaatgaacgagatg

SEQ ID NO: 6042843 - DNA, 25 bp, Homo sapien
gtcaggtcaaagtgcaggcttcaat

SEQ ID NO: 6042844 - DNA, 25 bp, Homo sapien
gaatatgccatctgcagacatgttt

SEQ ID NO: 6042845 - DNA, 25 bp, Homo sapien
cgagctgttgaggatgatggaaaac

SEQ ID NO: 6042846 - DNA, 25 bp, Homo sapien
attgcaggccatgggtccacaagcc

SEQ ID NO: 6042847 - DNA, 25 bp, Homo sapien
cgctggcgcaaataacgccaccgcc

SEQ ID NO: 6042848 - DNA, 25 bp, Homo sapien
cagatgctcaccaatcctgatatga

SEQ ID NO: 6042849 - DNA, 25 bp, Homo sapien
gacaagtgggaagtaaatgtggcac

SEQ ID NO: 6042850 - DNA, 25 bp, Homo sapien
aagcacagtgttgcaattcaaggag

SEQ ID NO: 6042851 - DNA, 25 bp, Homo sapien
ggtccacaagccaggcaaatgctac

SEQ ID NO: 6042852 - DNA, 25 bp, Homo sapien
atatttgaatatgccatctgcagac

SEQ ID NO: 6042853 - DNA, 25 bp, Homo sapien
gaaaaccccatcttccaatcgcaaa

SEQ ID NO: 6042854 - DNA, 25 bp, Homo sapien
caagccaggcaaatgctacaaagtc

SEQ ID NO: 6042855 - DNA, 25 bp, Homo sapien
gcagctggcactggcgccaccccga

SEQ ID NO: 6042856 - DNA, 25 bp, Homo sapien
gcactggcgccaccccgaacatgtc

SEQ ID NO: 6042857 - DNA, 25 bp, Homo sapien
gtatcccggtggcaaatcagagatt

SEQ ID NO: 6042858 - DNA, 25 bp, Homo sapien
agagattgatctactcgggtaagat

SEQ ID NO: 6042859 - DNA, 25 bp, Homo sapien
agtgttgcaattcaaggaggcgata

SEQ ID NO: 6042860 - DNA, 25 bp, Homo sapien
cagatacgctggatatttgaatatg

SEQ ID NO: 6042861 - DNA, 25 bp, Homo sapien
cagtgccagatacgctggatatttg

SEQ ID NO: 6042862 - DNA, 25 bp, Homo sapien
gcttcaatccgctggccgacttgac

SEQ ID NO: 6042863 - DNA, 25 bp, Homo sapien
caaatcagagattgatctactcggg

SEQ ID NO: 6042864 - DNA, 25 bp, Homo sapien
ggtggtgcattaaacaacgactcga

SEQ ID NO: 6042865 - DNA, 25 bp, Homo sapien
cgaacggtatcccggtggcaaatca

SEQ ID NO: 6042866 - DNA, 25 bp, Homo sapien
tgatctactcgggtaagattttaaa

SEQ ID NO: 6042867 - DNA, 25 bp, Homo sapien
cccaaaccacaaaccgccagtgccg

SEQ ID NO: 6042868 - DNA, 25 bp, Homo sapien
gtgcaggcttcaatccgctggccga

SEQ ID NO: 6042869 - DNA, 25 bp, Homo sapien
cataccacattcaagacggtcacag

SEQ ID NO: 6042870 - DNA, 25 bp, Homo sapien
catctggtcaagtcacaacccaaac

SEQ ID NO: 6042871 - DNA, 25 bp, Homo sapien
gccatgggtccacaagccaggcaaa

SEQ ID NO: 6042872 - DNA, 25 bp, Homo sapien
cgactcgaataaccaagacgagctg

SEQ ID NO: 6042873 - DNA, 25 bp, Homo sapien
tggagtcataccacattcaagacgg

SEQ ID NO: 6042874 - DNA, 25 bp, Homo sapien
taaccctcagatgttggactttatg

SEQ ID NO: 6042875 - DNA, 25 bp, Homo sapien
tgggaagtaaatgtggcacctgaaa

SEQ ID NO: 6042876 - DNA, 25 bp, Homo sapien
gccaccggtgcagcagctggcactg

SEQ ID NO: 6042877 - DNA, 25 bp, Homo sapien
caaagtcccatgtttagacagatgc

SEQ ID NO: 6042878 - DNA, 25 bp, Homo sapien
cgcaaataacgccaccgccaccggt

SEQ ID NO: 6042879 - DNA, 25 bp, Homo sapien
gcattaaacaacgactcgaataacc

SEQ ID NO: 6042880 - DNA, 25 bp, Homo sapien
ccaccgccaccggtgcagcagctgg

SEQ ID NO: 6042881 - DNA, 25 bp, Homo sapien
gcaattcaaggaggcgataaacaaa

SEQ ID NO: 6042882 - DNA, 25 bp, Homo sapien
catgtcgtcaggtcaaagtgcaggc

SEQ ID NO: 6042883 - DNA, 25 bp, Homo sapien
gtcaagtcacaacccaaaccacaaa

SEQ ID NO: 6042884 - DNA, 25 bp, Homo sapien
gatccagtccaacccgcaattgcag

SEQ ID NO: 6042885 - DNA, 25 bp, Homo sapien
tgtggcacctgaaagcacagtgttg

SEQ ID NO: 6042886 - DNA, 25 bp, Homo sapien
cccatcttccaatcgcaaatgaacg

SEQ ID NO: 6042887 - DNA, 25 bp, Homo sapien
cccgcaattgcaggccatgggtcca

SEQ ID NO: 6042888 - DNA, 25 bp, Homo sapien
cccatgtttagacagatgctcacca

SEQ ID NO: 6042889 - DNA, 25 bp, Homo sapien
ccaagacgagctgttgaggatgatg

SEQ ID NO: 6042890 - DNA, 25 bp, Homo sapien
gttgagtaaccctcagatgttggac

SEQ ID NO: 6042891 - DNA, 25 bp, Homo sapien
acattcaagacggtcacagcgtcca

SEQ ID NO: 6042892 - DNA, 25 bp, Homo sapien
atccgctggccgacttgaccagtgc

SEQ ID NO: 6042893 - DNA, 25 bp, Homo sapien
aacaacgactcgaataaccaagacg

SEQ ID NO: 6042894 - DNA, 25 bp, Homo sapien
cggtggcaaatcagagattgatcta

SEQ ID NO: 6042895 - DNA, 25 bp, Homo sapien
taacgccaccgccaccggtgcagca

SEQ ID NO: 6042896 - DNA, 25 bp, Homo sapien
aggcaaatgctacaaagtcccatgt

SEQ ID NO: 6042897 - DNA, 25 bp, Homo sapien
ggtcacagcgtccatctggtcaagt

SEQ ID NO: 6042898 - DNA, 25 bp, Homo sapien
agcgtccatctggtcaagtcacaac

SEQ ID NO: 6042899 - DNA, 25 bp, Homo sapien
gcgataaacaaagcgaacggtatcc

SEQ ID NO: 6042900 - DNA, 25 bp, Homo sapien
ctttatgatccagtccaacccgcaa

SEQ ID NO: 6042901 - DNA, 25 bp, Homo sapien
gttggactttatgatccagtccaac

SEQ ID NO: 6042902 - DNA, 25 bp, Homo sapien
gatgatggaaaaccccatcttccaa

SEQ ID NO: 6042903 - DNA, 25 bp, Homo sapien
aaggaggcgataaacaaagcgaacg

SEQ ID NO: 6042904 - DNA, 25 bp, Homo sapien
agtaaatgtggcacctgaaagcaca

SEQ ID NO: 6042905 - DNA, 25 bp, Homo sapien
accacaaaccgccagtgccgctggc

SEQ ID NO: 6042906 - DNA, 25 bp, Homo sapien
acgaccaaaccgtggagtcatacca

SEQ ID NO: 6042907 - DNA, 25 bp, Homo sapien
aaaccgtggagtcataccacattca

SEQ ID NO: 6042908 - DNA, 25 bp, Homo sapien
acctgaaagcacagtgttgcaattc

SEQ ID NO: 6042909 - DNA, 25 bp, Homo sapien
cagtgccgctggcgcaaataacgcc

SEQ ID NO: 6042910 - DNA, 25 bp, Homo sapien
cgccaccccgaacatgtcgtcaggt

SEQ ID NO: 6042911 - DNA, 25 bp, Homo sapien
cttgaccagtgccagatacgctgga

SEQ ID NO: 6042912 - DNA, 25 bp, Homo sapien
caaagcgaacggtatcccggtggca

SEQ ID NO: 6042913 - DNA, 25 bp, Homo sapien
tgcagacatgtttggcccggacggt

SEQ ID NO: 6042914 - DNA, 25 bp, Homo sapien
aaccgccagtgccgctggcgcaaat

SEQ ID NO: 6042915 - DNA, 25 bp, Homo sapien
atcgcaaatgaacgagatgttgagt

SEQ ID NO: 6042916 - DNA, 25 bp, Homo sapien
tttagacagatgctcaccaatcctg

SEQ ID NO: 6042917 - DNA, 25 bp, Homo sapien
cccgaacatgtcgtcaggtcaaagt

SEQ ID NO: 6042918 - DNA, 25 bp, Homo sapien
ttggcccggacggtggtgcattaaa

SEQ ID NO: 6042919 - DNA, 25 bp, Homo sapien
tcagatgttggactttatgatccag

SEQ ID NO: 6042920 - DNA, 25 bp, Homo sapien
cgctggatatttgaatatgccatct

SEQ ID NO: 6042921 - DNA, 25 bp, Homo sapien
gccatctgcagacatgtttggcccg

SEQ ID NO: 6042922 - DNA, 25 bp, Homo sapien
ccggtggatgcagcgtttcccgcgt

SEQ ID NO: 6042923 - DNA, 25 bp, Homo sapien
gaaggcagaggcagccccacctgca

SEQ ID NO: 6042924 - DNA, 25 bp, Homo sapien
ggcatcccggtggatgcagcgtttc

SEQ ID NO: 6042925 - DNA, 25 bp, Homo sapien
gatgcagcgtttcccgcgttagcaa

SEQ ID NO: 6042926 - DNA, 25 bp, Homo sapien
ggctgcgacgtttctatcgaaatcg

SEQ ID NO: 6042927 - DNA, 25 bp, Homo sapien
gcccatgtcgtttagttgtcttaat

SEQ ID NO: 6042928 - DNA, 25 bp, Homo sapien
cgttgttccctgtgttggatgagga

SEQ ID NO: 6042929 - DNA, 25 bp, Homo sapien
gtcgtttagttgtcttaattgatgt

SEQ ID NO: 6042930 - DNA, 25 bp, Homo sapien
tgcgggttggactggatcataaagt

SEQ ID NO: 6042931 - DNA, 25 bp, Homo sapien
ggaacatagacgctagcaatgcagg

SEQ ID NO: 6042932 - DNA, 25 bp, Homo sapien
cctgagggctgcgacgtttctatcg

SEQ ID NO: 6042933 - DNA, 25 bp, Homo sapien
cataccggcattagggtccatcatt

SEQ ID NO: 6042934 - DNA, 25 bp, Homo sapien
tctgtctaatcatatcaggattggt

SEQ ID NO: 6042935 - DNA, 25 bp, Homo sapien
tgcaattgcgggttggactggatca

SEQ ID NO: 6042936 - DNA, 25 bp, Homo sapien
ttggactggatcataaagtccaaca

SEQ ID NO: 6042937 - DNA, 25 bp, Homo sapien
agccccacctgcagagcccataccg

SEQ ID NO: 6042938 - DNA, 25 bp, Homo sapien
atggcctgcaattgcgggttggact

SEQ ID NO: 6042939 - DNA, 25 bp, Homo sapien
gaaatcgaagaagcccatgtcgttt

SEQ ID NO: 6042940 - DNA, 25 bp, Homo sapien
gaaggcgggcatcccggtggatgca

SEQ ID NO: 6042941 - DNA, 25 bp, Homo sapien
agggtccatcattcttgcgaattgc

SEQ ID NO: 6042942 - DNA, 25 bp, Homo sapien
aagagacgcaaatgggtttgcagct

SEQ ID NO: 6042943 - DNA, 25 bp, Homo sapien
tgggactttgtagcatttgcctggc

SEQ ID NO: 6042944 - DNA, 25 bp, Homo sapien
ttgatgttcatagcgttcttccggt

SEQ ID NO: 6042945 - DNA, 25 bp, Homo sapien
tctgtctaaacatgggactttgtag

SEQ ID NO: 6042946 - DNA, 25 bp, Homo sapien
ggtacctgcattagtccctgcgttg

SEQ ID NO: 6042947 - DNA, 25 bp, Homo sapien
gtttaatgcagggttcagaagagac

SEQ ID NO: 6042948 - DNA, 25 bp, Homo sapien
tgcgttggtacctgcattagtccct

SEQ ID NO: 6042949 - DNA, 25 bp, Homo sapien
agcggggaaggcagaggcagcccca

SEQ ID NO: 6042950 - DNA, 25 bp, Homo sapien
tagttgtcttaattgatgttcatag

SEQ ID NO: 6042951 - DNA, 25 bp, Homo sapien
cgtgttggagccttcctctggagca

SEQ ID NO: 6042952 - DNA, 25 bp, Homo sapien
accaggagcggggaaggcagaggca

SEQ ID NO: 6042953 - DNA, 25 bp, Homo sapien
ttccctgtgttggatgaggaagtag

SEQ ID NO: 6042954 - DNA, 25 bp, Homo sapien
gggttggaacatagacgctagcaat

SEQ ID NO: 6042955 - DNA, 25 bp, Homo sapien
gtccaacatctgagggttactcaac

SEQ ID NO: 6042956 - DNA, 25 bp, Homo sapien
ttcatagcgttcttccggtggtctg

SEQ ID NO: 6042957 - DNA, 25 bp, Homo sapien
agagcccataccggcattagggtcc

SEQ ID NO: 6042958 - DNA, 25 bp, Homo sapien
gattggtgagcatctgtctaaacat

SEQ ID NO: 6042959 - DNA, 25 bp, Homo sapien
gagccaccgcttctcctgagggctg

SEQ ID NO: 6042960 - DNA, 25 bp, Homo sapien
atgcaggatcgaaggcgggcatccc

SEQ ID NO: 6042961 - DNA, 25 bp, Homo sapien
tccctgcgttgttccctgtgttgga

SEQ ID NO: 6042962 - DNA, 25 bp, Homo sapien
acctgcagagcccataccggcatta

SEQ ID NO: 6042963 - DNA, 25 bp, Homo sapien
ctggatcataaagtccaacatctga

SEQ ID NO: 6042964 - DNA, 25 bp, Homo sapien
tgtgttagcgcctgcgttggtacct

SEQ ID NO: 6042965 - DNA, 25 bp, Homo sapien
taatcatatcaggattggtgagcat

SEQ ID NO: 6042966 - DNA, 25 bp, Homo sapien
tttgtagcatttgcctggcttgtgg

SEQ ID NO: 6042967 - DNA, 25 bp, Homo sapien
gcgccttggacggagccaccgcttc

SEQ ID NO: 6042968 - DNA, 25 bp, Homo sapien
agcgcctgcgttggtacctgcatta

SEQ ID NO: 6042969 - DNA, 25 bp, Homo sapien
ggtgtcttctgcttgagatgcttgt

SEQ ID NO: 6042970 - DNA, 25 bp, Homo sapien
atcgccaccaggagcggggaaggca

SEQ ID NO: 6042971 - DNA, 25 bp, Homo sapien
tgcagctgtgttagcgcctgcgttg

SEQ ID NO: 6042972 - DNA, 25 bp, Homo sapien
ctggagcatcgccaccaggagcggg

SEQ ID NO: 6042973 - DNA, 25 bp, Homo sapien
cgcgttagcaaaggggtttaatgca

SEQ ID NO: 6042974 - DNA, 25 bp, Homo sapien
ggacccatggcctgcaattgcgggt

SEQ ID NO: 6042975 - DNA, 25 bp, Homo sapien
cttgtacagggggttggaacataga

SEQ ID NO: 6042976 - DNA, 25 bp, Homo sapien
tctatcgaaatcgaagaagcccatg

SEQ ID NO: 6042977 - DNA, 25 bp, Homo sapien
gtgttggatgaggaagtagtgttcg

SEQ ID NO: 6042978 - DNA, 25 bp, Homo sapien
taaacatgggactttgtagcatttg

SEQ ID NO: 6042979 - DNA, 25 bp, Homo sapien
ctagcaatgcaggatcgaaggcggg

SEQ ID NO: 6042980 - DNA, 25 bp, Homo sapien
cgcaaatgggtttgcagctgtgtta

SEQ ID NO: 6042981 - DNA, 25 bp, Homo sapien
ttccggtggtctggtgtcttctgct

SEQ ID NO: 6042982 - DNA, 25 bp, Homo sapien
tatcaggattggtgagcatctgtct

SEQ ID NO: 6042983 - DNA, 25 bp, Homo sapien
tcttaattgatgttcatagcgttct

SEQ ID NO: 6042984 - DNA, 25 bp, Homo sapien
tagacgctagcaatgcaggatcgaa

SEQ ID NO: 6042985 - DNA, 25 bp, Homo sapien
tggtctggtgtcttctgcttgagat

SEQ ID NO: 6042986 - DNA, 25 bp, Homo sapien
ttcttgcgaattgcatgctctgtct

SEQ ID NO: 6042987 - DNA, 25 bp, Homo sapien
tgcagggttcagaagagacgcaaat

SEQ ID NO: 6042988 - DNA, 25 bp, Homo sapien
gaagtagtgttcgtgttggagcctt

SEQ ID NO: 6042989 - DNA, 25 bp, Homo sapien
ttcctctggagcatcgccaccagga

SEQ ID NO: 6042990 - DNA, 25 bp, Homo sapien
gcgttcttccggtggtctggtgtct

SEQ ID NO: 6042991 - DNA, 25 bp, Homo sapien
ggagccttcctctggagcatcgcca

SEQ ID NO: 6042992 - DNA, 25 bp, Homo sapien
agtgttcgtgttggagccttcctct

SEQ ID NO: 6042993 - DNA, 25 bp, Homo sapien
ggcattagggtccatcattcttgcg

SEQ ID NO: 6042994 - DNA, 25 bp, Homo sapien
catcattcttgcgaattgcatgctc

SEQ ID NO: 6042995 - DNA, 25 bp, Homo sapien
caaaggggtttaatgcagggttcag

SEQ ID NO: 6042996 - DNA, 25 bp, Homo sapien
agaggcagccccacctgcagagccc

SEQ ID NO: 6042997 - DNA, 25 bp, Homo sapien
cgcttctcctgagggctgcgacgtt

SEQ ID NO: 6042998 - DNA, 25 bp, Homo sapien
cgaattgcatgctctgtctaatcat

SEQ ID NO: 6042999 - DNA, 25 bp, Homo sapien
gaagaagcccatgtcgtttagttgt

SEQ ID NO: 6043000 - DNA, 25 bp, Homo sapien
catctgagggttactcaacatctcg

SEQ ID NO: 6043001 - DNA, 25 bp, Homo sapien
gttcagaagagacgcaaatgggttt

SEQ ID NO: 6043002 - DNA, 25 bp, Homo sapien
tgagcatctgtctaaacatgggact

SEQ ID NO: 6043003 - DNA, 25 bp, Homo sapien
gatgaggaagtagtgttcgtgttgg

SEQ ID NO: 6043004 - DNA, 25 bp, Homo sapien
cataaagtccaacatctgagggtta

SEQ ID NO: 6043005 - DNA, 25 bp, Homo sapien
tgcctggcttgtggacccatggcct

SEQ ID NO: 6043006 - DNA, 25 bp, Homo sapien
gcattagtccctgcgttgttccctg

SEQ ID NO: 6043007 - DNA, 25 bp, Homo sapien
gcttgtggacccatggcctgcaatt

SEQ ID NO: 6043008 - DNA, 25 bp, Homo sapien
gcatttgcctggcttgtggacccat

SEQ ID NO: 6043009 - DNA, 25 bp, Homo sapien
tggacggagccaccgcttctcctga

SEQ ID NO: 6043010 - DNA, 25 bp, Homo sapien
ttctgcttgagatgcttgtacaggg

SEQ ID NO: 6043011 - DNA, 25 bp, Homo sapien
gcatgctctgtctaatcatatcagg

SEQ ID NO: 6043012 - DNA, 25 bp, Homo sapien
tgggtttgcagctgtgttagcgcct

SEQ ID NO: 6043013 - DNA, 25 bp, Homo sapien
tacagggggttggaacatagacgct

SEQ ID NO: 6043014 - DNA, 25 bp, Homo sapien
gacgtttctatcgaaatcgaagaag

SEQ ID NO: 6043015 - DNA, 25 bp, Homo sapien
aagaagcttctcgaaacatatgaag

SEQ ID NO: 6043016 - DNA, 25 bp, Homo sapien
ggaaatcggttcatagtaaagtcaa

SEQ ID NO: 6043017 - DNA, 25 bp, Homo sapien
atatccctaatggaacgttttgttg

SEQ ID NO: 6043018 - DNA, 25 bp, Homo sapien
cagttgcttttcaagatacatagac

SEQ ID NO: 6043019 - DNA, 25 bp, Homo sapien
cttttcaagatacatagacaaaacc

SEQ ID NO: 6043020 - DNA, 25 bp, Homo sapien
tcaaggaattgtgcgaaattcaatc

SEQ ID NO: 6043021 - DNA, 25 bp, Homo sapien
gcagatgcgagaaagttgagtaacg

SEQ ID NO: 6043022 - DNA, 25 bp, Homo sapien
cgagatcagttgcttttcaagatac

SEQ ID NO: 6043023 - DNA, 25 bp, Homo sapien
cagaagaagataggaaatcggttca

SEQ ID NO: 6043024 - DNA, 25 bp, Homo sapien
caaaaccaatcagactgtgcagatg

SEQ ID NO: 6043025 - DNA, 25 bp, Homo sapien
gagtaatatcaaaagattgcaaaag

SEQ ID NO: 6043026 - DNA, 25 bp, Homo sapien
ttcaagaaaagatgggctcatcgtt

SEQ ID NO: 6043027 - DNA, 25 bp, Homo sapien
agcatcttcaagaaaagatgggctc

SEQ ID NO: 6043028 - DNA, 25 bp, Homo sapien
ccctaatggaacgttttgttggcat

SEQ ID NO: 6043029 - DNA, 25 bp, Homo sapien
aagatacatagacaaaaccaatcag

SEQ ID NO: 6043030 - DNA, 25 bp, Homo sapien
cgtcatattgccaaacataattctt

SEQ ID NO: 6043031 - DNA, 25 bp, Homo sapien
ttggcataccagaagctttggaggc

SEQ ID NO: 6043032 - DNA, 25 bp, Homo sapien
aaatgaagtgaaggaagatggacaa

SEQ ID NO: 6043033 - DNA, 25 bp, Homo sapien
gcgagaaagttgagtaacgatgaag

SEQ ID NO: 6043034 - DNA, 25 bp, Homo sapien
gtggattatgatagcttgattggca

SEQ ID NO: 6043035 - DNA, 25 bp, Homo sapien
attggcattgacaatgaggaatctc

SEQ ID NO: 6043036 - DNA, 25 bp, Homo sapien
attgacaatgaggaatctcaagaaa

SEQ ID NO: 6043037 - DNA, 25 bp, Homo sapien
atcaatgtggattatgatagcttga

SEQ ID NO: 6043038 - DNA, 25 bp, Homo sapien
acaaatttgaggaagaagcttctcg

SEQ ID NO: 6043039 - DNA, 25 bp, Homo sapien
aagttgagtaacgatgaagaagatg

SEQ ID NO: 6043040 - DNA, 25 bp, Homo sapien
catagacaaaaccaatcagactgtg

SEQ ID NO: 6043041 - DNA, 25 bp, Homo sapien
gaaacatatgaaggccaagataccg

SEQ ID NO: 6043042 - DNA, 25 bp, Homo sapien
gaaagtcggcaacagaaattagaaa

SEQ ID NO: 6043043 - DNA, 25 bp, Homo sapien
gaataagagaagaattggaggagtt

SEQ ID NO: 6043044 - DNA, 25 bp, Homo sapien
ttgaaaatagaaaatttaacatctg

SEQ ID NO: 6043045 - DNA, 25 bp, Homo sapien
tatgaaggccaagataccgtcatat

SEQ ID NO: 6043046 - DNA, 25 bp, Homo sapien
cagaaaatatccctaatggaacgtt

SEQ ID NO: 6043047 - DNA, 25 bp, Homo sapien
ttttgaaaatgaagtgaaggaagat

SEQ ID NO: 6043048 - DNA, 25 bp, Homo sapien
aatagaaaatttaacatctgaaatg

SEQ ID NO: 6043049 - DNA, 25 bp, Homo sapien
agataccgtcatattgccaaacata

SEQ ID NO: 6043050 - DNA, 25 bp, Homo sapien
atcaaaagattgcaaaagttagatc

SEQ ID NO: 6043051 - DNA, 25 bp, Homo sapien
tggaggcagaagaagataggaaatc

SEQ ID NO: 6043052 - DNA, 25 bp, Homo sapien
tcaatcaaaattggcgacggaatca

SEQ ID NO: 6043053 - DNA, 25 bp, Homo sapien
tggaacgttttgttggcataccaga

SEQ ID NO: 6043054 - DNA, 25 bp, Homo sapien
ttgagagtttgagaagggctattcg

SEQ ID NO: 6043055 - DNA, 25 bp, Homo sapien
agtgaaggaagatggacaacaagaa

SEQ ID NO: 6043056 - DNA, 25 bp, Homo sapien
caagaaatttttgaaaatgaagtga

SEQ ID NO: 6043057 - DNA, 25 bp, Homo sapien
attgtgcgaaattcaatcaaaattg

SEQ ID NO: 6043058 - DNA, 25 bp, Homo sapien
ggaagaagcatcttcaagaaaagat

SEQ ID NO: 6043059 - DNA, 25 bp, Homo sapien
gaatcatctagtagattgacaaatt

SEQ ID NO: 6043060 - DNA, 25 bp, Homo sapien
gagatgttgagagtttgagaagggc

SEQ ID NO: 6043061 - DNA, 25 bp, Homo sapien
aaaatttaacatctgaaatgcaaac

SEQ ID NO: 6043062 - DNA, 25 bp, Homo sapien
aaacataattcttgatacgagtaat

SEQ ID NO: 6043063 - DNA, 25 bp, Homo sapien
attgccaaacataattcttgatacg

SEQ ID NO: 6043064 - DNA, 25 bp, Homo sapien
aatgaggaatctcaagaaatttttg

SEQ ID NO: 6043065 - DNA, 25 bp, Homo sapien
cttctcgaaacatatgaaggccaag

SEQ ID NO: 6043066 - DNA, 25 bp, Homo sapien
aaccagggagagatgttgagagttt

SEQ ID NO: 6043067 - DNA, 25 bp, Homo sapien
caaaagttagatcagaaaatatccc

SEQ ID NO: 6043068 - DNA, 25 bp, Homo sapien
ggaagatggacaacaagaagagcag

SEQ ID NO: 6043069 - DNA, 25 bp, Homo sapien
caatcagactgtgcagatgcgagaa

SEQ ID NO: 6043070 - DNA, 25 bp, Homo sapien
cggcaacagaaattagaaagaataa

SEQ ID NO: 6043071 - DNA, 25 bp, Homo sapien
ctgaaatgcaaactgaaatcaagga

SEQ ID NO: 6043072 - DNA, 25 bp, Homo sapien
tggacaacaagaagagcaggaagaa

SEQ ID NO: 6043073 - DNA, 25 bp, Homo sapien
agaagggctattcgagatcagttgc

SEQ ID NO: 6043074 - DNA, 25 bp, Homo sapien
taacatctgaaatgcaaactgaaat

SEQ ID NO: 6043075 - DNA, 25 bp, Homo sapien
aaattggcgacggaatcatctagta

SEQ ID NO: 6043076 - DNA, 25 bp, Homo sapien
gaatctcaagaaatttttgaaaatg

SEQ ID NO: 6043077 - DNA, 25 bp, Homo sapien
agtaacgatgaagaagatgaaagtc

SEQ ID NO: 6043078 - DNA, 25 bp, Homo sapien
gatgaagaagatgaaagtcggcaac

SEQ ID NO: 6043079 - DNA, 25 bp, Homo sapien
aattcttgatacgagtaatatcaaa

SEQ ID NO: 6043080 - DNA, 25 bp, Homo sapien
gttttgttggcataccagaagcttt

SEQ ID NO: 6043081 - DNA, 25 bp, Homo sapien
agattgacaaatttgaggaagaagc

SEQ ID NO: 6043082 - DNA, 25 bp, Homo sapien
tatgatagcttgattggcattgaca

SEQ ID NO: 6043083 - DNA, 25 bp, Homo sapien
acaagaagagcaggaagaagcatct

SEQ ID NO: 6043084 - DNA, 25 bp, Homo sapien
cagaaattagaaagaataagagaag

SEQ ID NO: 6043085 - DNA, 25 bp, Homo sapien
cgaaattcaatcaaaattggcgacg

SEQ ID NO: 6043086 - DNA, 25 bp, Homo sapien
gcgacggaatcatctagtagattga

SEQ ID NO: 6043087 - DNA, 25 bp, Homo sapien
gaagatgaaagtcggcaacagaaat

SEQ ID NO: 6043088 - DNA, 25 bp, Homo sapien
atcgttgaaccagggagagatgttg

SEQ ID NO: 6043089 - DNA, 25 bp, Homo sapien
ctgaaatcaaggaattgtgcgaaat

SEQ ID NO: 6043090 - DNA, 25 bp, Homo sapien
gctattcgagatcagttgcttttca

SEQ ID NO: 6043091 - DNA, 25 bp, Homo sapien
tgatacgagtaatatcaaaagattg

SEQ ID NO: 6043092 - DNA, 25 bp, Homo sapien
agattgcaaaagttagatcagaaaa

SEQ ID NO: 6043093 - DNA, 25 bp, Homo sapien
ttagatcagaaaatatccctaatgg

SEQ ID NO: 6043094 - DNA, 25 bp, Homo sapien
agagaagaattggaggagttgaaaa

SEQ ID NO: 6043095 - DNA, 25 bp, Homo sapien
tgggctcatcgttgaaccagggaga

SEQ ID NO: 6043096 - DNA, 25 bp, Homo sapien
taccagaagctttggaggcagaaga

SEQ ID NO: 6043097 - DNA, 25 bp, Homo sapien
gaattggaggagttgaaaatagaaa

SEQ ID NO: 6043098 - DNA, 25 bp, Homo sapien
ttgaggaagaagcttctcgaaacat

SEQ ID NO: 6043099 - DNA, 25 bp, Homo sapien
aaaagatgggctcatcgttgaacca

SEQ ID NO: 6043100 - DNA, 25 bp, Homo sapien
agagcaggaagaagcatcttcaaga

SEQ ID NO: 6043101 - DNA, 25 bp, Homo sapien
tgcaaactgaaatcaaggaattgtg

SEQ ID NO: 6043102 - DNA, 25 bp, Homo sapien
aagctttggaggcagaagaagatag

SEQ ID NO: 6043103 - DNA, 25 bp, Homo sapien
gtttgagaagggctattcgagatca

SEQ ID NO: 6043104 - DNA, 25 bp, Homo sapien
agcttgattggcattgacaatgagg

SEQ ID NO: 6043105 - DNA, 25 bp, Homo sapien
ggccaagataccgtcatattgccaa

SEQ ID NO: 6043106 - DNA, 25 bp, Homo sapien
aagataggaaatcggttcatagtaa

SEQ ID NO: 6043107 - DNA, 25 bp, Homo sapien
tctagtagattgacaaatttgagga

SEQ ID NO: 6043108 - DNA, 25 bp, Homo sapien
gactgtgcagatgcgagaaagttga

SEQ ID NO: 6043109 - DNA, 25 bp, Homo sapien
tagaaagaataagagaagaattgga

SEQ ID NO: 6043110 - DNA, 25 bp, Homo sapien
tggtagtgaatcttgatattgcttg

SEQ ID NO: 6043111 - DNA, 25 bp, Homo sapien
actatgaaccgatttcctatcttct

SEQ ID NO: 6043112 - DNA, 25 bp, Homo sapien
caacaaaacgttccattagggatat

SEQ ID NO: 6043113 - DNA, 25 bp, Homo sapien
attttctgatctaacttttgcaatc

SEQ ID NO: 6043114 - DNA, 25 bp, Homo sapien
cttcttctgcctccaaagcttctgg

SEQ ID NO: 6043115 - DNA, 25 bp, Homo sapien
accgatttcctatcttcttctgcct

SEQ ID NO: 6043116 - DNA, 25 bp, Homo sapien
ttttttatccagctcatttaaagcc

SEQ ID NO: 6043117 - DNA, 25 bp, Homo sapien
cctcgttcagttctacgagtctatc

SEQ ID NO: 6043118 - DNA, 25 bp, Homo sapien
ccttatcatcgccttgtaaaagttg

SEQ ID NO: 6043119 - DNA, 25 bp, Homo sapien
ggaatacatactatttatctccttt

SEQ ID NO: 6043120 - DNA, 25 bp, Homo sapien
ttgttcatcgaattttttatccagc

SEQ ID NO: 6043121 - DNA, 25 bp, Homo sapien
ctacgagtctatcccggaacttttg

SEQ ID NO: 6043122 - DNA, 25 bp, Homo sapien
cttgcctaacaatgagttttcaaat

SEQ ID NO: 6043123 - DNA, 25 bp, Homo sapien
tgagttttcaaattcctcgttcagt

SEQ ID NO: 6043124 - DNA, 25 bp, Homo sapien
tttacgcctgatctgctccatattt

SEQ ID NO: 6043125 - DNA, 25 bp, Homo sapien
gatattactcgtatcaagaattatg

SEQ ID NO: 6043126 - DNA, 25 bp, Homo sapien
tcttttgatattactcgtatcaaga

SEQ ID NO: 6043127 - DNA, 25 bp, Homo sapien
ctcatttaaagcctttagccaaact

SEQ ID NO: 6043128 - DNA, 25 bp, Homo sapien
cttgttcttggatgctggttatttg

SEQ ID NO: 6043129 - DNA, 25 bp, Homo sapien
catattttcgcgaattttaacctct

SEQ ID NO: 6043130 - DNA, 25 bp, Homo sapien
gtatgccaacaaaacgttccattag

SEQ ID NO: 6043131 - DNA, 25 bp, Homo sapien
gatcaccctgttgttcattttattg

SEQ ID NO: 6043132 - DNA, 25 bp, Homo sapien
caagcttgctcacggtgtcatcttt

SEQ ID NO: 6043133 - DNA, 25 bp, Homo sapien
ttgcttgaacatggaatacatacta

SEQ ID NO: 6043134 - DNA, 25 bp, Homo sapien
cttgtaaaagttgaatacttctata

SEQ ID NO: 6043135 - DNA, 25 bp, Homo sapien
acctcttgttcatcgaattttttat

SEQ ID NO: 6043136 - DNA, 25 bp, Homo sapien
tatagttcattgactttactatgaa

SEQ ID NO: 6043137 - DNA, 25 bp, Homo sapien
gagtctatcccggaacttttgcagc

SEQ ID NO: 6043138 - DNA, 25 bp, Homo sapien
catcctctccgccaacagtggtagt

SEQ ID NO: 6043139 - DNA, 25 bp, Homo sapien
ggtgtcatctttcaacctcaagtcc

SEQ ID NO: 6043140 - DNA, 25 bp, Homo sapien
ctgcctccaaagcttctggtatgcc

SEQ ID NO: 6043141 - DNA, 25 bp, Homo sapien
gctcacggtgtcatctttcaacctc

SEQ ID NO: 6043142 - DNA, 25 bp, Homo sapien
ctccgccaacagtggtagtgaatct

SEQ ID NO: 6043143 - DNA, 25 bp, Homo sapien
tattttcttgcctaacaatgagttt

SEQ ID NO: 6043144 - DNA, 25 bp, Homo sapien
caaattcctcgttcagttctacgag

SEQ ID NO: 6043145 - DNA, 25 bp, Homo sapien
tttgttttcgggcataacaagcttg

SEQ ID NO: 6043146 - DNA, 25 bp, Homo sapien
tgcagctttccttccgccttatcat

SEQ ID NO: 6043147 - DNA, 25 bp, Homo sapien
tcaattttacgcctgatctgctcca

SEQ ID NO: 6043148 - DNA, 25 bp, Homo sapien
atccagctcatttaaagcctttagc

SEQ ID NO: 6043149 - DNA, 25 bp, Homo sapien
cttctatatagttcattgactttac

SEQ ID NO: 6043150 - DNA, 25 bp, Homo sapien
gaacatggaatacatactatttatc

SEQ ID NO: 6043151 - DNA, 25 bp, Homo sapien
taacaatgagttttcaaattcctcg

SEQ ID NO: 6043152 - DNA, 25 bp, Homo sapien
agggatattttctgatctaactttt

SEQ ID NO: 6043153 - DNA, 25 bp, Homo sapien
ttcgagggtatcaattttacgcctg

SEQ ID NO: 6043154 - DNA, 25 bp, Homo sapien
ctgctccatattttcgcgaatttta

SEQ ID NO: 6043155 - DNA, 25 bp, Homo sapien
tgaatacttctatatagttcattga

SEQ ID NO: 6043156 - DNA, 25 bp, Homo sapien
tttcgggcataacaagcttgctcac

SEQ ID NO: 6043157 - DNA, 25 bp, Homo sapien
cctgatctgctccatattttcgcga

SEQ ID NO: 6043158 - DNA, 25 bp, Homo sapien
catcgccttgtaaaagttgaatact

SEQ ID NO: 6043159 - DNA, 25 bp, Homo sapien
ctgttgtattttcttgcctaacaat

SEQ ID NO: 6043160 - DNA, 25 bp, Homo sapien
cttttccttgttcttggatgctggt

SEQ ID NO: 6043161 - DNA, 25 bp, Homo sapien
ccaaagcttctggtatgccaacaaa

SEQ ID NO: 6043162 - DNA, 25 bp, Homo sapien
attttaacctcttgttcatcgaatt

SEQ ID NO: 6043163 - DNA, 25 bp, Homo sapien
tcgcgaattttaacctcttgttcat

SEQ ID NO: 6043164 - DNA, 25 bp, Homo sapien
atcccggaacttttgcagctttcct

SEQ ID NO: 6043165 - DNA, 25 bp, Homo sapien
cttctggtatgccaacaaaacgttc

SEQ ID NO: 6043166 - DNA, 25 bp, Homo sapien
cctgttgttcattttattgagactt

SEQ ID NO: 6043167 - DNA, 25 bp, Homo sapien
ttcctatcttcttctgcctccaaag

SEQ ID NO: 6043168 - DNA, 25 bp, Homo sapien
caacctcaagtcctgttgtattttc

SEQ ID NO: 6043169 - DNA, 25 bp, Homo sapien
tgctggttatttgtgaatccagccc

SEQ ID NO: 6043170 - DNA, 25 bp, Homo sapien
ttcattgactttactatgaaccgat

SEQ ID NO: 6043171 - DNA, 25 bp, Homo sapien
cttccgccttatcatcgccttgtaa

SEQ ID NO: 6043172 - DNA, 25 bp, Homo sapien
aacttttgcaatcttttgatattac

SEQ ID NO: 6043173 - DNA, 25 bp, Homo sapien
ttttcatcctctccgccaacagtgg

SEQ ID NO: 6043174 - DNA, 25 bp, Homo sapien
ttatttgtgaatccagccctttcgt

SEQ ID NO: 6043175 - DNA, 25 bp, Homo sapien
tccagccctttcgtggtttcgtaca

SEQ ID NO: 6043176 - DNA, 25 bp, Homo sapien
gttcattttattgagacttttcatc

SEQ ID NO: 6043177 - DNA, 25 bp, Homo sapien
cttggatgctggttatttgtgaatc

SEQ ID NO: 6043178 - DNA, 25 bp, Homo sapien
ctttccttccgccttatcatcgcct

SEQ ID NO: 6043179 - DNA, 25 bp, Homo sapien
atcgaattttttatccagctcattt

SEQ ID NO: 6043180 - DNA, 25 bp, Homo sapien
aacttttgcagctttccttccgcct

SEQ ID NO: 6043181 - DNA, 25 bp, Homo sapien
tttcgtacacctcgatcaccctgtt

SEQ ID NO: 6043182 - DNA, 25 bp, Homo sapien
atctttcaacctcaagtcctgttgt

SEQ ID NO: 6043183 - DNA, 25 bp, Homo sapien
acacctcgatcaccctgttgttcat

SEQ ID NO: 6043184 - DNA, 25 bp, Homo sapien
tcgtggtttcgtacacctcgatcac

SEQ ID NO: 6043185 - DNA, 25 bp, Homo sapien
tccattagggatattttctgatcta

SEQ ID NO: 6043186 - DNA, 25 bp, Homo sapien
aacgttccattagggatattttctg

SEQ ID NO: 6043187 - DNA, 25 bp, Homo sapien
tcagttctacgagtctatcccggaa

SEQ ID NO: 6043188 - DNA, 25 bp, Homo sapien
gtgaatccagccctttcgtggtttc

SEQ ID NO: 6043189 - DNA, 25 bp, Homo sapien
caagtcctgttgtattttcttgcct

SEQ ID NO: 6043190 - DNA, 25 bp, Homo sapien
gactttactatgaaccgatttccta

SEQ ID NO: 6043191 - DNA, 25 bp, Homo sapien
ttttattgagacttttcatcctctc

SEQ ID NO: 6043192 - DNA, 25 bp, Homo sapien
ttgcaatcttttgatattactcgta

SEQ ID NO: 6043193 - DNA, 25 bp, Homo sapien
tgaatcttgatattgcttgaacatg

SEQ ID NO: 6043194 - DNA, 25 bp, Homo sapien
tgatctaacttttgcaatcttttga

SEQ ID NO: 6043195 - DNA, 25 bp, Homo sapien
aaagttgaatacttctatatagttc

SEQ ID NO: 6043196 - DNA, 25 bp, Homo sapien
gcataacaagcttgctcacggtgtc

SEQ ID NO: 6043197 - DNA, 25 bp, Homo sapien
agggtatcaattttacgcctgatct

SEQ ID NO: 6043198 - DNA, 25 bp, Homo sapien
catactatttatctcctttactttg

SEQ ID NO: 6043199 - DNA, 25 bp, Homo sapien
tgagacttttcatcctctccgccaa

SEQ ID NO: 6043200 - DNA, 25 bp, Homo sapien
caacagtggtagtgaatcttgatat

SEQ ID NO: 6043201 - DNA, 25 bp, Homo sapien
ttgatattgcttgaacatggaatac

SEQ ID NO: 6043202 - DNA, 25 bp, Homo sapien
ccaaacttttccttgttcttggatg

SEQ ID NO: 6043203 - DNA, 25 bp, Homo sapien
agttaacaaataaaagggcagcata

SEQ ID NO: 6043204 - DNA, 25 bp, Homo sapien
ggcttccctgaagaatggatacccc

SEQ ID NO: 6043205 - DNA, 25 bp, Homo sapien
agtttttcattccaaaaacatgtgt

SEQ ID NO: 6043206 - DNA, 25 bp, Homo sapien
gtgttgttcgttactatcttgatcc

SEQ ID NO: 6043207 - DNA, 25 bp, Homo sapien
tgtgttccttcaagtgcgtaatgcc

SEQ ID NO: 6043208 - DNA, 25 bp, Homo sapien
atttctagaaaagactatctcgcaa

SEQ ID NO: 6043209 - DNA, 25 bp, Homo sapien
agaggtcagggaatctaaaagaaag

SEQ ID NO: 6043210 - DNA, 25 bp, Homo sapien
ggatgaacttaagttagatataaaa

SEQ ID NO: 6043211 - DNA, 25 bp, Homo sapien
acaagacaagttgagtaaggttctt

SEQ ID NO: 6043212 - DNA, 25 bp, Homo sapien
tttgaaactgccatctcctcatttt

SEQ ID NO: 6043213 - DNA, 25 bp, Homo sapien
gattctgcaggaagaaggttaggac

SEQ ID NO: 6043214 - DNA, 25 bp, Homo sapien
gtctggtgtgttccttcaagtgcgt

SEQ ID NO: 6043215 - DNA, 25 bp, Homo sapien
gcgtgatttgaaactgccatctcct

SEQ ID NO: 6043216 - DNA, 25 bp, Homo sapien
agacatcgaattggcaacgtcatac

SEQ ID NO: 6043217 - DNA, 25 bp, Homo sapien
cagcatataaggaagaaaattctat

SEQ ID NO: 6043218 - DNA, 25 bp, Homo sapien
atgaggcaaagaggaacaaagtttt

SEQ ID NO: 6043219 - DNA, 25 bp, Homo sapien
aaagggcagcatataaggaagaaaa

SEQ ID NO: 6043220 - DNA, 25 bp, Homo sapien
aattctatttctagaaaagactatc

SEQ ID NO: 6043221 - DNA, 25 bp, Homo sapien
ggccaggatgtttccacaggtgaaa

SEQ ID NO: 6043222 - DNA, 25 bp, Homo sapien
caagttgagtaaggttcttcgggat

SEQ ID NO: 6043223 - DNA, 25 bp, Homo sapien
cgttggtatagggaaagatcattcc

SEQ ID NO: 6043224 - DNA, 25 bp, Homo sapien
ctcgcaaaacctaatattttgaagc

SEQ ID NO: 6043225 - DNA, 25 bp, Homo sapien
gttagatataaaagacatcgaattg

SEQ ID NO: 6043226 - DNA, 25 bp, Homo sapien
gtaagggcttccctgaagaatggat

SEQ ID NO: 6043227 - DNA, 25 bp, Homo sapien
ggtgaaattattatgaggcaaagag

SEQ ID NO: 6043228 - DNA, 25 bp, Homo sapien
tgcgggctcgagaacaagtatgaag

SEQ ID NO: 6043229 - DNA, 25 bp, Homo sapien
tgcaggaagaaggttaggaccaaaa

SEQ ID NO: 6043230 - DNA, 25 bp, Homo sapien
gcagttagaggtcagggaatctaaa

SEQ ID NO: 6043231 - DNA, 25 bp, Homo sapien
ggcaacgtcatacttaattcgtgta

SEQ ID NO: 6043232 - DNA, 25 bp, Homo sapien
tcttcgggatgaacttaagttagat

SEQ ID NO: 6043233 - DNA, 25 bp, Homo sapien
tcgagaacaagtatgaaggattctg

SEQ ID NO: 6043234 - DNA, 25 bp, Homo sapien
caaagaggaacaaagttttatcctg

SEQ ID NO: 6043235 - DNA, 25 bp, Homo sapien
tatagggaaagatcattccatattc

SEQ ID NO: 6043236 - DNA, 25 bp, Homo sapien
taaaagaaaattcattggtgttgcc

SEQ ID NO: 6043237 - DNA, 25 bp, Homo sapien
ccaaaaacatgtgtctggtgtgttc

SEQ ID NO: 6043238 - DNA, 25 bp, Homo sapien
cttaattcgtgtaagggcttccctg

SEQ ID NO: 6043239 - DNA, 25 bp, Homo sapien
taaggaagaaaattctatttctaga

SEQ ID NO: 6043240 - DNA, 25 bp, Homo sapien
gactatctcgcaaaacctaatattt

SEQ ID NO: 6043241 - DNA, 25 bp, Homo sapien
ttgatccttttcatcctaaaagaaa

SEQ ID NO: 6043242 - DNA, 25 bp, Homo sapien
atctcctcattttgagcctaccgta

SEQ ID NO: 6043243 - DNA, 25 bp, Homo sapien
catattcgccttagaacctggtgtt

SEQ ID NO: 6043244 - DNA, 25 bp, Homo sapien
tccacaggtgaaattattatgaggc

SEQ ID NO: 6043245 - DNA, 25 bp, Homo sapien
taatgccaccaaaagggctgcgggc

SEQ ID NO: 6043246 - DNA, 25 bp, Homo sapien
actatcttgatccttttcatcctaa

SEQ ID NO: 6043247 - DNA, 25 bp, Homo sapien
acatgtgtctggtgtgttccttcaa

SEQ ID NO: 6043248 - DNA, 25 bp, Homo sapien
cttgaggcgtgatttgaaactgcca

SEQ ID NO: 6043249 - DNA, 25 bp, Homo sapien
cattggtgttgccttgaggcgtgat

SEQ ID NO: 6043250 - DNA, 25 bp, Homo sapien
atgaaggattctgcaggaagaaggt

SEQ ID NO: 6043251 - DNA, 25 bp, Homo sapien
tgagtaaggttcttcgggatgaact

SEQ ID NO: 6043252 - DNA, 25 bp, Homo sapien
tgttgccttgaggcgtgatttgaaa

SEQ ID NO: 6043253 - DNA, 25 bp, Homo sapien
tttgaagcagttagaggtcagggaa

SEQ ID NO: 6043254 - DNA, 25 bp, Homo sapien
aagggctgcgggctcgagaacaagt

SEQ ID NO: 6043255 - DNA, 25 bp, Homo sapien
caaataaaagggcagcatataagga

SEQ ID NO: 6043256 - DNA, 25 bp, Homo sapien
tatgaaggccaggatgtttccacag

SEQ ID NO: 6043257 - DNA, 25 bp, Homo sapien
atcctggagaaaacgttggtatagg

SEQ ID NO: 6043258 - DNA, 25 bp, Homo sapien
agaaaagactatctcgcaaaaccta

SEQ ID NO: 6043259 - DNA, 25 bp, Homo sapien
gaggaacaaagttttatcctggaga

SEQ ID NO: 6043260 - DNA, 25 bp, Homo sapien
aacctggtgttgttcgttactatct

SEQ ID NO: 6043261 - DNA, 25 bp, Homo sapien
gaccaaaaaaatatgaaggccagga

SEQ ID NO: 6043262 - DNA, 25 bp, Homo sapien
ttcgttactatcttgatccttttca

SEQ ID NO: 6043263 - DNA, 25 bp, Homo sapien
tcatcctaaaagaaaattcattggt

SEQ ID NO: 6043264 - DNA, 25 bp, Homo sapien
attcgtgtaagggcttccctgaaga

SEQ ID NO: 6043265 - DNA, 25 bp, Homo sapien
gaaagatcattccatattcgcctta

SEQ ID NO: 6043266 - DNA, 25 bp, Homo sapien
gtcatacttaattcgtgtaagggct

SEQ ID NO: 6043267 - DNA, 25 bp, Homo sapien
acaagtatgaaggattctgcaggaa

SEQ ID NO: 6043268 - DNA, 25 bp, Homo sapien
agtgcgtaatgccaccaaaagggct

SEQ ID NO: 6043269 - DNA, 25 bp, Homo sapien
attattatgaggcaaagaggaacaa

SEQ ID NO: 6043270 - DNA, 25 bp, Homo sapien
aaaaaatatgaaggccaggatgttt

SEQ ID NO: 6043271 - DNA, 25 bp, Homo sapien
acttaagttagatataaaagacatc

SEQ ID NO: 6043272 - DNA, 25 bp, Homo sapien
tataaaagacatcgaattggcaacg

SEQ ID NO: 6043273 - DNA, 25 bp, Homo sapien
ttcattccaaaaacatgtgtctggt

SEQ ID NO: 6043274 - DNA, 25 bp, Homo sapien
tcattccatattcgccttagaacct

SEQ ID NO: 6043275 - DNA, 25 bp, Homo sapien
gatgtttccacaggtgaaattatta

SEQ ID NO: 6043276 - DNA, 25 bp, Homo sapien
tcattttgagcctaccgtaaggagg

SEQ ID NO: 6043277 - DNA, 25 bp, Homo sapien
actgccatctcctcattttgagcct

SEQ ID NO: 6043278 - DNA, 25 bp, Homo sapien
taatattttgaagcagttagaggtc

SEQ ID NO: 6043279 - DNA, 25 bp, Homo sapien
ggagttacaagacaagttgagtaag

SEQ ID NO: 6043280 - DNA, 25 bp, Homo sapien
aagaaaggagttacaagacaagttg

SEQ ID NO: 6043281 - DNA, 25 bp, Homo sapien
cttttcatcctaaaagaaaattcat

SEQ ID NO: 6043282 - DNA, 25 bp, Homo sapien
aaacctaatattttgaagcagttag

SEQ ID NO: 6043283 - DNA, 25 bp, Homo sapien
aaaattcattggtgttgccttgagg

SEQ ID NO: 6043284 - DNA, 25 bp, Homo sapien
tgagcctaccgtaaggaggtttggc

SEQ ID NO: 6043285 - DNA, 25 bp, Homo sapien
cgaattggcaacgtcatacttaatt

SEQ ID NO: 6043286 - DNA, 25 bp, Homo sapien
tctaaaagaaaggagttacaagaca

SEQ ID NO: 6043287 - DNA, 25 bp, Homo sapien
caccaaaagggctgcgggctcgaga

SEQ ID NO: 6043288 - DNA, 25 bp, Homo sapien
cgccttagaacctggtgttgttcgt

SEQ ID NO: 6043289 - DNA, 25 bp, Homo sapien
ccttcaagtgcgtaatgccaccaaa

SEQ ID NO: 6043290 - DNA, 25 bp, Homo sapien
actttaagtatttcctacgcaaatg

SEQ ID NO: 6043291 - DNA, 25 bp, Homo sapien
gatcactacactcatcaatcttgga

SEQ ID NO: 6043292 - DNA, 25 bp, Homo sapien
tcaaaaaattacaagcgtccttgaa

SEQ ID NO: 6043293 - DNA, 25 bp, Homo sapien
tgggatttttctaggtcctctaata

SEQ ID NO: 6043294 - DNA, 25 bp, Homo sapien
aatgacttcaactttatttttggtg

SEQ ID NO: 6043295 - DNA, 25 bp, Homo sapien
atcttctatggggtatccattcttc

SEQ ID NO: 6043296 - DNA, 25 bp, Homo sapien
atctactattgaaccttgcatcttc

SEQ ID NO: 6043297 - DNA, 25 bp, Homo sapien
tcaacttgtcttgtaactcctttct

SEQ ID NO: 6043298 - DNA, 25 bp, Homo sapien
atagttttgccttcaaagcttgttt

SEQ ID NO: 6043299 - DNA, 25 bp, Homo sapien
aagtatttcctacgcaaatgtactt

SEQ ID NO: 6043300 - DNA, 25 bp, Homo sapien
tctagacacaattgacttcttcccg

SEQ ID NO: 6043301 - DNA, 25 bp, Homo sapien
agctttctctccttgccttcaaacg

SEQ ID NO: 6043302 - DNA, 25 bp, Homo sapien
tctcattcgtccagctttctctcct

SEQ ID NO: 6043303 - DNA, 25 bp, Homo sapien
gaagaaccttactcaacttgtcttg

SEQ ID NO: 6043304 - DNA, 25 bp, Homo sapien
tcaactttatttttggtgtaatcaa

SEQ ID NO: 6043305 - DNA, 25 bp, Homo sapien
tgaaagatgtagatgagttcaaaag

SEQ ID NO: 6043306 - DNA, 25 bp, Homo sapien
cctctaatagttttgccttcaaagc

SEQ ID NO: 6043307 - DNA, 25 bp, Homo sapien
atagactctccgacaatttctcatt

SEQ ID NO: 6043308 - DNA, 25 bp, Homo sapien
aattcgatgtcttttatatctaact

SEQ ID NO: 6043309 - DNA, 25 bp, Homo sapien
ttttggtgtaatcaaaacgtctaga

SEQ ID NO: 6043310 - DNA, 25 bp, Homo sapien
ttgccttcaaagcttgtttttcttg

SEQ ID NO: 6043311 - DNA, 25 bp, Homo sapien
catcaatcttggatagactctccga

SEQ ID NO: 6043312 - DNA, 25 bp, Homo sapien
agttcatcccgaagaaccttactca

SEQ ID NO: 6043313 - DNA, 25 bp, Homo sapien
gtagctctagcttgttattgaaaga

SEQ ID NO: 6043314 - DNA, 25 bp, Homo sapien
acacgaattaagtatgacgttgcca

SEQ ID NO: 6043315 - DNA, 25 bp, Homo sapien
acaatttctcattcgtccagctttc

SEQ ID NO: 6043316 - DNA, 25 bp, Homo sapien
ctagcttgttattgaaagatgtaga

SEQ ID NO: 6043317 - DNA, 25 bp, Homo sapien
cacaattgacttcttcccgcttttg

SEQ ID NO: 6043318 - DNA, 25 bp, Homo sapien
tttaaataatatctactattgaacc

SEQ ID NO: 6043319 - DNA, 25 bp, Homo sapien
agcgtccttgaaaagcgccttaata

SEQ ID NO: 6043320 - DNA, 25 bp, Homo sapien
tatggggtatccattcttcagggaa

SEQ ID NO: 6043321 - DNA, 25 bp, Homo sapien
tcaaagcttgtttttcttgttccga

SEQ ID NO: 6043322 - DNA, 25 bp, Homo sapien
gcccttacacgaattaagtatgacg

SEQ ID NO: 6043323 - DNA, 25 bp, Homo sapien
cttaatataattcttgtcttttttg

SEQ ID NO: 6043324 - DNA, 25 bp, Homo sapien
agataaagtcaaaaaattacaagcg

SEQ ID NO: 6043325 - DNA, 25 bp, Homo sapien
attcttcagggaagcccttacacga

SEQ ID NO: 6043326 - DNA, 25 bp, Homo sapien
tctagcaatgacttcaactttattt

SEQ ID NO: 6043327 - DNA, 25 bp, Homo sapien
ccttactcaacttgtcttgtaactc

SEQ ID NO: 6043328 - DNA, 25 bp, Homo sapien
tcttcttttaaataatatctactat

SEQ ID NO: 6043329 - DNA, 25 bp, Homo sapien
cttgccttcaaacgctcttcttctt

SEQ ID NO: 6043330 - DNA, 25 bp, Homo sapien
actggtgtagctctagcttgttatt

SEQ ID NO: 6043331 - DNA, 25 bp, Homo sapien
tatgacgttgccaattcgatgtctt

SEQ ID NO: 6043332 - DNA, 25 bp, Homo sapien
tggtttcaaccgtactatctgtttc

SEQ ID NO: 6043333 - DNA, 25 bp, Homo sapien
gttgccaattcgatgtcttttatat

SEQ ID NO: 6043334 - DNA, 25 bp, Homo sapien
cgctcttcttcttttaaataatatc

SEQ ID NO: 6043335 - DNA, 25 bp, Homo sapien
caaaacgtctagacacaattgactt

SEQ ID NO: 6043336 - DNA, 25 bp, Homo sapien
tgtcttttatatctaacttaagttc

SEQ ID NO: 6043337 - DNA, 25 bp, Homo sapien
atgagttcaaaagatcactacactc

SEQ ID NO: 6043338 - DNA, 25 bp, Homo sapien
tcgtccagctttctctccttgcctt

SEQ ID NO: 6043339 - DNA, 25 bp, Homo sapien
tcaaccgtactatctgtttcgggga

SEQ ID NO: 6043340 - DNA, 25 bp, Homo sapien
aataatatctactattgaaccttgc

SEQ ID NO: 6043341 - DNA, 25 bp, Homo sapien
tcaaacgctcttcttcttttaaata

SEQ ID NO: 6043342 - DNA, 25 bp, Homo sapien
cgcaaatgtacttcttcagataaag

SEQ ID NO: 6043343 - DNA, 25 bp, Homo sapien
ccttgcatcttctatggggtatcca

SEQ ID NO: 6043344 - DNA, 25 bp, Homo sapien
attaagtatgacgttgccaattcga

SEQ ID NO: 6043345 - DNA, 25 bp, Homo sapien
tctccgacaatttctcattcgtcca

SEQ ID NO: 6043346 - DNA, 25 bp, Homo sapien
cttgaaaagcgccttaatataattc

SEQ ID NO: 6043347 - DNA, 25 bp, Homo sapien
tcaaaagatcactacactcatcaat

SEQ ID NO: 6043348 - DNA, 25 bp, Homo sapien
cagggaagcccttacacgaattaag

SEQ ID NO: 6043349 - DNA, 25 bp, Homo sapien
tgtaatcaaaacgtctagacacaat

SEQ ID NO: 6043350 - DNA, 25 bp, Homo sapien
tctaacttaagttcatcccgaagaa

SEQ ID NO: 6043351 - DNA, 25 bp, Homo sapien
tttcttgttccgaaatatactggtg

SEQ ID NO: 6043352 - DNA, 25 bp, Homo sapien
aaatatactggtgtagctctagctt

SEQ ID NO: 6043353 - DNA, 25 bp, Homo sapien
catcccgaagaaccttactcaactt

SEQ ID NO: 6043354 - DNA, 25 bp, Homo sapien
gttccgaaatatactggtgtagctc

SEQ ID NO: 6043355 - DNA, 25 bp, Homo sapien
ttatatctaacttaagttcatcccg

SEQ ID NO: 6043356 - DNA, 25 bp, Homo sapien
gtatccattcttcagggaagccctt

SEQ ID NO: 6043357 - DNA, 25 bp, Homo sapien
ctaggtcctctaatagttttgcctt

SEQ ID NO: 6043358 - DNA, 25 bp, Homo sapien
tgttattgaaagatgtagatgagtt

SEQ ID NO: 6043359 - DNA, 25 bp, Homo sapien
ctatctgtttcggggaagaccgact

SEQ ID NO: 6043360 - DNA, 25 bp, Homo sapien
tcttggatagactctccgacaattt

SEQ ID NO: 6043361 - DNA, 25 bp, Homo sapien
tacactcatcaatcttggatagact

SEQ ID NO: 6043362 - DNA, 25 bp, Homo sapien
tattgaaccttgcatcttctatggg

SEQ ID NO: 6043363 - DNA, 25 bp, Homo sapien
attacaagcgtccttgaaaagcgcc

SEQ ID NO: 6043364 - DNA, 25 bp, Homo sapien
aagcgccttaatataattcttgtct

SEQ ID NO: 6043365 - DNA, 25 bp, Homo sapien
ttcctacgcaaatgtacttcttcag

SEQ ID NO: 6043366 - DNA, 25 bp, Homo sapien
tgtacttcttcagataaagtcaaaa

SEQ ID NO: 6043367 - DNA, 25 bp, Homo sapien
tgtcttgtaactcctttcttttaga

SEQ ID NO: 6043368 - DNA, 25 bp, Homo sapien
tctctccttgccttcaaacgctctt

SEQ ID NO: 6043369 - DNA, 25 bp, Homo sapien
tgacttcttcccgcttttggtttca

SEQ ID NO: 6043370 - DNA, 25 bp, Homo sapien
tcttcagataaagtcaaaaaattac

SEQ ID NO: 6043371 - DNA, 25 bp, Homo sapien
atgtagatgagttcaaaagatcact

SEQ ID NO: 6043372 - DNA, 25 bp, Homo sapien
cttttggtttcaaccgtactatctg

SEQ ID NO: 6043373 - DNA, 25 bp, Homo sapien
agacaaagaagttcatacaaattga

SEQ ID NO: 6043374 - DNA, 25 bp, Homo sapien
gaacaagttgaaggaaaagcacaat

SEQ ID NO: 6043375 - DNA, 25 bp, Homo sapien
ggaaaagcacaatgatgtcatcgag

SEQ ID NO: 6043376 - DNA, 25 bp, Homo sapien
caaggtaccagatgttctccacttg

SEQ ID NO: 6043377 - DNA, 25 bp, Homo sapien
actccagatgtggaagctaagaagt

SEQ ID NO: 6043378 - DNA, 25 bp, Homo sapien
gatgtggaagctaagaagttcttgg

SEQ ID NO: 6043379 - DNA, 25 bp, Homo sapien
ccacttgaacaagttgaaggaaaag

SEQ ID NO: 6043380 - DNA, 25 bp, Homo sapien
cgaagaagacaaagaagttcataca

SEQ ID NO: 6043381 - DNA, 25 bp, Homo sapien
ctctattgtacacgaattcgacatc

SEQ ID NO: 6043382 - DNA, 25 bp, Homo sapien
aagaacactccagatgtggaagcta

SEQ ID NO: 6043383 - DNA, 25 bp, Homo sapien
tgttctccacttgaacaagttgaag

SEQ ID NO: 6043384 - DNA, 25 bp, Homo sapien
agaacgtcgaagaagacaaagaagt

SEQ ID NO: 6043385 - DNA, 25 bp, Homo sapien
agttcatcacgcaggtggctctatt

SEQ ID NO: 6043386 - DNA, 25 bp, Homo sapien
tgtacacgaattcgacatcattaaa

SEQ ID NO: 6043387 - DNA, 25 bp, Homo sapien
agggtacaccatcaaggtaccagat

SEQ ID NO: 6043388 - DNA, 25 bp, Homo sapien
cattaaagggtacaccatcaaggta

SEQ ID NO: 6043389 - DNA, 25 bp, Homo sapien
aagaagttcttggattcagttcatc

SEQ ID NO: 6043390 - DNA, 25 bp, Homo sapien
cgaattcgacatcattaaagggtac

SEQ ID NO: 6043391 - DNA, 25 bp, Homo sapien
accagatgttctccacttgaacaag

SEQ ID NO: 6043392 - DNA, 25 bp, Homo sapien
gcacaatgatgtcatcgagaacgtc

SEQ ID NO: 6043393 - DNA, 25 bp, Homo sapien
tcatcgagaacgtcgaagaagacaa

SEQ ID NO: 6043394 - DNA, 25 bp, Homo sapien
caccatcaaggtaccagatgttctc

SEQ ID NO: 6043395 - DNA, 25 bp, Homo sapien
tcacgcaggtggctctattgtacac

SEQ ID NO: 6043396 - DNA, 25 bp, Homo sapien
aggtggctctattgtacacgaattc

SEQ ID NO: 6043397 - DNA, 25 bp, Homo sapien
atgatgtcatcgagaacgtcgaaga

SEQ ID NO: 6043398 - DNA, 25 bp, Homo sapien
gttgaaggaaaagcacaatgatgtc

SEQ ID NO: 6043399 - DNA, 25 bp, Homo sapien
gaagctaagaagttcttggattcag

SEQ ID NO: 6043400 - DNA, 25 bp, Homo sapien
ggattcagttcatcacgcaggtggc

SEQ ID NO: 6043401 - DNA, 25 bp, Homo sapien
ttcttggattcagttcatcacgcag

SEQ ID NO: 6043402 - DNA, 25 bp, Homo sapien
cgacatcattaaagggtacaccatc

SEQ ID NO: 6043403 - DNA, 25 bp, Homo sapien
atctggagtgttctttttcaaagtg

SEQ ID NO: 6043404 - DNA, 25 bp, Homo sapien
ggtgtaccctttaatgatgtcgaat

SEQ ID NO: 6043405 - DNA, 25 bp, Homo sapien
gtcgaattcgtgtacaatagagcca

SEQ ID NO: 6043406 - DNA, 25 bp, Homo sapien
ttcgtgtacaatagagccacctgcg

SEQ ID NO: 6043407 - DNA, 25 bp, Homo sapien
agtgttctttttcaaagtgacgatg

SEQ ID NO: 6043408 - DNA, 25 bp, Homo sapien
aactgaatccaagaacttcttagct

SEQ ID NO: 6043409 - DNA, 25 bp, Homo sapien
ttccacatctggagtgttctttttc

SEQ ID NO: 6043410 - DNA, 25 bp, Homo sapien
cttagcttccacatctggagtgttc

SEQ ID NO: 6043411 - DNA, 25 bp, Homo sapien
aacatctggtaccttgatggtgtac

SEQ ID NO: 6043412 - DNA, 25 bp, Homo sapien
caaagtgacgatgaaattctttgtc

SEQ ID NO: 6043413 - DNA, 25 bp, Homo sapien
cttgatggtgtaccctttaatgatg

SEQ ID NO: 6043414 - DNA, 25 bp, Homo sapien
tggtaccttgatggtgtacccttta

SEQ ID NO: 6043415 - DNA, 25 bp, Homo sapien
gttctcgatgacatcattgtgcttt

SEQ ID NO: 6043416 - DNA, 25 bp, Homo sapien
aatgatgtcgaattcgtgtacaata

SEQ ID NO: 6043417 - DNA, 25 bp, Homo sapien
tacaatagagccacctgcgtgatga

SEQ ID NO: 6043418 - DNA, 25 bp, Homo sapien
gtggagaacatctggtaccttgatg

SEQ ID NO: 6043419 - DNA, 25 bp, Homo sapien
gtgcttttccttcaacttgttcaag

SEQ ID NO: 6043420 - DNA, 25 bp, Homo sapien
gatgacatcattgtgcttttccttc

SEQ ID NO: 6043421 - DNA, 25 bp, Homo sapien
agagccacctgcgtgatgaactgaa

SEQ ID NO: 6043422 - DNA, 25 bp, Homo sapien
ttccttcaacttgttcaagtggaga

SEQ ID NO: 6043423 - DNA, 25 bp, Homo sapien
ctttttcaaagtgacgatgaaattc

SEQ ID NO: 6043424 - DNA, 25 bp, Homo sapien
acctgcgtgatgaactgaatccaag

SEQ ID NO: 6043425 - DNA, 25 bp, Homo sapien
gaacttcttagcttccacatctgga

SEQ ID NO: 6043426 - DNA, 25 bp, Homo sapien
atcattgtgcttttccttcaacttg

SEQ ID NO: 6043427 - DNA, 25 bp, Homo sapien
caacttgttcaagtggagaacatct

SEQ ID NO: 6043428 - DNA, 25 bp, Homo sapien
ccctttaatgatgtcgaattcgtgt

SEQ ID NO: 6043429 - DNA, 25 bp, Homo sapien
gttcaagtggagaacatctggtacc

SEQ ID NO: 6043430 - DNA, 25 bp, Homo sapien
gtgatgaactgaatccaagaacttc

SEQ ID NO: 6043431 - DNA, 25 bp, Homo sapien
atccaagaacttcttagcttccaca

SEQ ID NO: 6043432 - DNA, 25 bp, Homo sapien
tctatgaagctgttgagtctctaaa

SEQ ID NO: 6043433 - DNA, 25 bp, Homo sapien
aagctgttgagtctctaaagagaaa

SEQ ID NO: 6043434 - DNA, 25 bp, Homo sapien
tagatttgattgtcattagagaaaa

SEQ ID NO: 6043435 - DNA, 25 bp, Homo sapien
gaaaatatcccgatcgactgggaaa

SEQ ID NO: 6043436 - DNA, 25 bp, Homo sapien
ctttgacttcgccaagaaatacaac

SEQ ID NO: 6043437 - DNA, 25 bp, Homo sapien
tgggaaactataaacattaagcaaa

SEQ ID NO: 6043438 - DNA, 25 bp, Homo sapien
gatacctggtgacggtgttgggaaa

SEQ ID NO: 6043439 - DNA, 25 bp, Homo sapien
gtctgtcacagctgtgcataaggca

SEQ ID NO: 6043440 - DNA, 25 bp, Homo sapien
gagaaaacacggagggtgagttctc

SEQ ID NO: 6043441 - DNA, 25 bp, Homo sapien
gggaaagaaatcactgattcagtga

SEQ ID NO: 6043442 - DNA, 25 bp, Homo sapien
cagaaagtctgtcacagctgtgcat

SEQ ID NO: 6043443 - DNA, 25 bp, Homo sapien
acattaagcaaacagatcataagga

SEQ ID NO: 6043444 - DNA, 25 bp, Homo sapien
actgattcagtgagaaccatttttg

SEQ ID NO: 6043445 - DNA, 25 bp, Homo sapien
atttttgaggctgaaaatatcccga

SEQ ID NO: 6043446 - DNA, 25 bp, Homo sapien
ctataaacattaagcaaacagatca

SEQ ID NO: 6043447 - DNA, 25 bp, Homo sapien
gtgtcaagactagaattccagacat

SEQ ID NO: 6043448 - DNA, 25 bp, Homo sapien
ataaggaaggcgtctatgaagctgt

SEQ ID NO: 6043449 - DNA, 25 bp, Homo sapien
gctatggcacactcctgctgaccaa

SEQ ID NO: 6043450 - DNA, 25 bp, Homo sapien
acggttcactaaacgttgctttgcg

SEQ ID NO: 6043451 - DNA, 25 bp, Homo sapien
ggtcttaaggggctatggcacactc

SEQ ID NO: 6043452 - DNA, 25 bp, Homo sapien
cacagctgtgcataaggcaaatatc

SEQ ID NO: 6043453 - DNA, 25 bp, Homo sapien
acatgaatccgtccctggtgtagtg

SEQ ID NO: 6043454 - DNA, 25 bp, Homo sapien
actagatatctacgccaatgtggcc

SEQ ID NO: 6043455 - DNA, 25 bp, Homo sapien
cgttgctttgcgtaaacaactagat

SEQ ID NO: 6043456 - DNA, 25 bp, Homo sapien
taaacaactagatatctacgccaat

SEQ ID NO: 6043457 - DNA, 25 bp, Homo sapien
tttgaaagttatgactagacctaag

SEQ ID NO: 6043458 - DNA, 25 bp, Homo sapien
aaggcaaatatcatgaagttaggtg

SEQ ID NO: 6043459 - DNA, 25 bp, Homo sapien
atttgcctttgacttcgccaagaaa

SEQ ID NO: 6043460 - DNA, 25 bp, Homo sapien
ggtgttgggaaagaaatcactgatt

SEQ ID NO: 6043461 - DNA, 25 bp, Homo sapien
cagatcataaggaaggcgtctatga

SEQ ID NO: 6043462 - DNA, 25 bp, Homo sapien
gaattccagacatagatttgattgt

SEQ ID NO: 6043463 - DNA, 25 bp, Homo sapien
atacaacagaaagtctgtcacagct

SEQ ID NO: 6043464 - DNA, 25 bp, Homo sapien
ttgagtctctaaagagaaataagat

SEQ ID NO: 6043465 - DNA, 25 bp, Homo sapien
ttaaggggctatggcacactcctgc

SEQ ID NO: 6043466 - DNA, 25 bp, Homo sapien
tgattgtcattagagaaaacacgga

SEQ ID NO: 6043467 - DNA, 25 bp, Homo sapien
ctcaggcctggaacatgaatccgtc

SEQ ID NO: 6043468 - DNA, 25 bp, Homo sapien
gacggtctgttcagaaatataataa

SEQ ID NO: 6043469 - DNA, 25 bp, Homo sapien
agttatgactagacctaagacagaa

SEQ ID NO: 6043470 - DNA, 25 bp, Homo sapien
aaggatcgccagatttgcctttgac

SEQ ID NO: 6043471 - DNA, 25 bp, Homo sapien
ggtgacggtgttgggaaagaaatca

SEQ ID NO: 6043472 - DNA, 25 bp, Homo sapien
tcagtgagaaccatttttgaggctg

SEQ ID NO: 6043473 - DNA, 25 bp, Homo sapien
cttcgccaagaaatacaacagaaag

SEQ ID NO: 6043474 - DNA, 25 bp, Homo sapien
gtgcataaggcaaatatcatgaagt

SEQ ID NO: 6043475 - DNA, 25 bp, Homo sapien
cactttgatacctggtgacggtgtt

SEQ ID NO: 6043476 - DNA, 25 bp, Homo sapien
agagaaataagattggtcttaaggg

SEQ ID NO: 6043477 - DNA, 25 bp, Homo sapien
aaggcgtctatgaagctgttgagtc

SEQ ID NO: 6043478 - DNA, 25 bp, Homo sapien
acacggagggtgagttctcaggcct

SEQ ID NO: 6043479 - DNA, 25 bp, Homo sapien
ctctaaagagaaataagattggtct

SEQ ID NO: 6043480 - DNA, 25 bp, Homo sapien
ccctacccaagaagtatggcggtcg

SEQ ID NO: 6043481 - DNA, 25 bp, Homo sapien
ttaggtgacggtctgttcagaaata

SEQ ID NO: 6043482 - DNA, 25 bp, Homo sapien
atcgactgggaaactataaacatta

SEQ ID NO: 6043483 - DNA, 25 bp, Homo sapien
tgtggcccttttcaaatccttgaag

SEQ ID NO: 6043484 - DNA, 25 bp, Homo sapien
atccgtccctggtgtagtggaatct

SEQ ID NO: 6043485 - DNA, 25 bp, Homo sapien
caggtcacggttcactaaacgttgc

SEQ ID NO: 6043486 - DNA, 25 bp, Homo sapien
gccgctcaggcggaacgcaccctac

SEQ ID NO: 6043487 - DNA, 25 bp, Homo sapien
gcacactcctgctgaccaaacaggt

SEQ ID NO: 6043488 - DNA, 25 bp, Homo sapien
cagacatagatttgattgtcattag

SEQ ID NO: 6043489 - DNA, 25 bp, Homo sapien
agactagaattccagacatagattt

SEQ ID NO: 6043490 - DNA, 25 bp, Homo sapien
aatccttgaagggtgtcaagactag

SEQ ID NO: 6043491 - DNA, 25 bp, Homo sapien
tgaagggtgtcaagactagaattcc

SEQ ID NO: 6043492 - DNA, 25 bp, Homo sapien
atcccgatcgactgggaaactataa

SEQ ID NO: 6043493 - DNA, 25 bp, Homo sapien
tagccactgccgctcaggcggaacg

SEQ ID NO: 6043494 - DNA, 25 bp, Homo sapien
gaagtatggcggtcgtttcaccgtc

SEQ ID NO: 6043495 - DNA, 25 bp, Homo sapien
cccaagaagtatggcggtcgtttca

SEQ ID NO: 6043496 - DNA, 25 bp, Homo sapien
caccgtcactttgatacctggtgac

SEQ ID NO: 6043497 - DNA, 25 bp, Homo sapien
cactaaacgttgctttgcgtaaaca

SEQ ID NO: 6043498 - DNA, 25 bp, Homo sapien
agaaccatttttgaggctgaaaata

SEQ ID NO: 6043499 - DNA, 25 bp, Homo sapien
tcattagagaaaacacggagggtga

SEQ ID NO: 6043500 - DNA, 25 bp, Homo sapien
gacagaaaggatcgccagatttgcc

SEQ ID NO: 6043501 - DNA, 25 bp, Homo sapien
cctgctgaccaaacaggtcacggtt

SEQ ID NO: 6043502 - DNA, 25 bp, Homo sapien
gaccaaacaggtcacggttcactaa

SEQ ID NO: 6043503 - DNA, 25 bp, Homo sapien
caagaaatacaacagaaagtctgtc

SEQ ID NO: 6043504 - DNA, 25 bp, Homo sapien
ccctggtgtagtggaatctttgaaa

SEQ ID NO: 6043505 - DNA, 25 bp, Homo sapien
tttgcgtaaacaactagatatctac

SEQ ID NO: 6043506 - DNA, 25 bp, Homo sapien
tcgtttcaccgtcactttgatacct

SEQ ID NO: 6043507 - DNA, 25 bp, Homo sapien
atctacgccaatgtggcccttttca

SEQ ID NO: 6043508 - DNA, 25 bp, Homo sapien
agcaaacagatcataaggaaggcgt

SEQ ID NO: 6043509 - DNA, 25 bp, Homo sapien
caggcggaacgcaccctacccaaga

SEQ ID NO: 6043510 - DNA, 25 bp, Homo sapien
aatatcatgaagttaggtgacggtc

SEQ ID NO: 6043511 - DNA, 25 bp, Homo sapien
tgtagtggaatctttgaaagttatg

SEQ ID NO: 6043512 - DNA, 25 bp, Homo sapien
gaaatcactgattcagtgagaacca

SEQ ID NO: 6043513 - DNA, 25 bp, Homo sapien
cctggaacatgaatccgtccctggt

SEQ ID NO: 6043514 - DNA, 25 bp, Homo sapien
gccaatgtggcccttttcaaatcct

SEQ ID NO: 6043515 - DNA, 25 bp, Homo sapien
acgcaccctacccaagaagtatggc

SEQ ID NO: 6043516 - DNA, 25 bp, Homo sapien
aagattggtcttaaggggctatggc

SEQ ID NO: 6043517 - DNA, 25 bp, Homo sapien
acctaagacagaaaggatcgccaga

SEQ ID NO: 6043518 - DNA, 25 bp, Homo sapien
gactagacctaagacagaaaggatc

SEQ ID NO: 6043519 - DNA, 25 bp, Homo sapien
gaatctttgaaagttatgactagac

SEQ ID NO: 6043520 - DNA, 25 bp, Homo sapien
cgccagatttgcctttgacttcgcc

SEQ ID NO: 6043521 - DNA, 25 bp, Homo sapien
atgaagttaggtgacggtctgttca

SEQ ID NO: 6043522 - DNA, 25 bp, Homo sapien
ttttcaaatccttgaagggtgtcaa

SEQ ID NO: 6043523 - DNA, 25 bp, Homo sapien
tggcggtcgtttcaccgtcactttg

SEQ ID NO: 6043524 - DNA, 25 bp, Homo sapien
gaggctgaaaatatcccgatcgact

SEQ ID NO: 6043525 - DNA, 25 bp, Homo sapien
tttggccaccgcctgcatggaggca

SEQ ID NO: 6043526 - DNA, 25 bp, Homo sapien
gtcacctaacttcatgatatttgcc

SEQ ID NO: 6043527 - DNA, 25 bp, Homo sapien
aactaggacatcaaattgatgaggt

SEQ ID NO: 6043528 - DNA, 25 bp, Homo sapien
aatatctctagtggtatgcttacct

SEQ ID NO: 6043529 - DNA, 25 bp, Homo sapien
gttggcacctgccaccaatcctgga

SEQ ID NO: 6043530 - DNA, 25 bp, Homo sapien
cagcatagtccctgccaaagttggc

SEQ ID NO: 6043531 - DNA, 25 bp, Homo sapien
ccaccgcctgcatggaggcattgtc

SEQ ID NO: 6043532 - DNA, 25 bp, Homo sapien
ctttctgtcttaggtctagtcataa

SEQ ID NO: 6043533 - DNA, 25 bp, Homo sapien
catggcagttgggttagccacattt

SEQ ID NO: 6043534 - DNA, 25 bp, Homo sapien
cttatgcacagctgtgacagacttt

SEQ ID NO: 6043535 - DNA, 25 bp, Homo sapien
tatatttctgaacagaccgtcacct

SEQ ID NO: 6043536 - DNA, 25 bp, Homo sapien
ctttgagattctagtagcatattca

SEQ ID NO: 6043537 - DNA, 25 bp, Homo sapien
aaattgatgaggtttggccaccgcc

SEQ ID NO: 6043538 - DNA, 25 bp, Homo sapien
accaccgatcaaagcagcgccaatg

SEQ ID NO: 6043539 - DNA, 25 bp, Homo sapien
gttagccacattttggcctttaata

SEQ ID NO: 6043540 - DNA, 25 bp, Homo sapien
tcgacaatgatggacgatacgtcaa

SEQ ID NO: 6043541 - DNA, 25 bp, Homo sapien
ggaggaaaggatcatggcagttggg

SEQ ID NO: 6043542 - DNA, 25 bp, Homo sapien
gacgatacgtcaatatcaggatatt

SEQ ID NO: 6043543 - DNA, 25 bp, Homo sapien
tatcaggatattctttttggccaat

SEQ ID NO: 6043544 - DNA, 25 bp, Homo sapien
atattcattcaaacccaaatggttc

SEQ ID NO: 6043545 - DNA, 25 bp, Homo sapien
ttggcctttaatatctaaaccaaca

SEQ ID NO: 6043546 - DNA, 25 bp, Homo sapien
catgtctggaacctggttcgaagac

SEQ ID NO: 6043547 - DNA, 25 bp, Homo sapien
gatattctttttggccaatttcagt

SEQ ID NO: 6043548 - DNA, 25 bp, Homo sapien
cattgaaggggtaactaggacatca

SEQ ID NO: 6043549 - DNA, 25 bp, Homo sapien
tatctaaaccaacatgtctggaacc

SEQ ID NO: 6043550 - DNA, 25 bp, Homo sapien
taacttcatgatatttgccttatgc

SEQ ID NO: 6043551 - DNA, 25 bp, Homo sapien
tcagtagtagaagaggaaccaccaa

SEQ ID NO: 6043552 - DNA, 25 bp, Homo sapien
cttggcgaagtcaaaggcaaatctg

SEQ ID NO: 6043553 - DNA, 25 bp, Homo sapien
agcagcgccaatgttgcctaagatg

SEQ ID NO: 6043554 - DNA, 25 bp, Homo sapien
gattctagtagcatattcattcaaa

SEQ ID NO: 6043555 - DNA, 25 bp, Homo sapien
aggggtaactaggacatcaaattga

SEQ ID NO: 6043556 - DNA, 25 bp, Homo sapien
cacattttggcctttaatatctaaa

SEQ ID NO: 6043557 - DNA, 25 bp, Homo sapien
tctgaacagaccgtcacctaacttc

SEQ ID NO: 6043558 - DNA, 25 bp, Homo sapien
gccaatgttgcctaagatggtaccg

SEQ ID NO: 6043559 - DNA, 25 bp, Homo sapien
catgatatttgccttatgcacagct

SEQ ID NO: 6043560 - DNA, 25 bp, Homo sapien
gatcgtttcatgaactgcctttgag

SEQ ID NO: 6043561 - DNA, 25 bp, Homo sapien
attcaaacccaaatggttcaacatt

SEQ ID NO: 6043562 - DNA, 25 bp, Homo sapien
ctggttcgaagacagcatagtccct

SEQ ID NO: 6043563 - DNA, 25 bp, Homo sapien
atgaggtttggccaccgcctgcatg

SEQ ID NO: 6043564 - DNA, 25 bp, Homo sapien
aactgcctttgagattctagtagca

SEQ ID NO: 6043565 - DNA, 25 bp, Homo sapien
agtccctgccaaagttggcacctgc

SEQ ID NO: 6043566 - DNA, 25 bp, Homo sapien
gtagaagaggaaccaccaatatctc

SEQ ID NO: 6043567 - DNA, 25 bp, Homo sapien
agttgggttagccacattttggcct

SEQ ID NO: 6043568 - DNA, 25 bp, Homo sapien
ggtctagtcataactttcaaagatt

SEQ ID NO: 6043569 - DNA, 25 bp, Homo sapien
agttattatatttctgaacagaccg

SEQ ID NO: 6043570 - DNA, 25 bp, Homo sapien
tttttggccaatttcagttattata

SEQ ID NO: 6043571 - DNA, 25 bp, Homo sapien
agtagcatattcattcaaacccaaa

SEQ ID NO: 6043572 - DNA, 25 bp, Homo sapien
gcattgtcgacaatgatggacgata

SEQ ID NO: 6043573 - DNA, 25 bp, Homo sapien
cagaccgtcacctaacttcatgata

SEQ ID NO: 6043574 - DNA, 25 bp, Homo sapien
cacagctgtgacagactttctgttg

SEQ ID NO: 6043575 - DNA, 25 bp, Homo sapien
aaaggcaaatctggcgatcctttct

SEQ ID NO: 6043576 - DNA, 25 bp, Homo sapien
accaccaatatctctagtggtatgc

SEQ ID NO: 6043577 - DNA, 25 bp, Homo sapien
tggaacctggttcgaagacagcata

SEQ ID NO: 6043578 - DNA, 25 bp, Homo sapien
cttaccttctgcgatcgtttcatga

SEQ ID NO: 6043579 - DNA, 25 bp, Homo sapien
aatctggcgatcctttctgtcttag

SEQ ID NO: 6043580 - DNA, 25 bp, Homo sapien
gtatttcttggcgaagtcaaaggca

SEQ ID NO: 6043581 - DNA, 25 bp, Homo sapien
gtcttaggtctagtcataactttca

SEQ ID NO: 6043582 - DNA, 25 bp, Homo sapien
tgtgacagactttctgttgtatttc

SEQ ID NO: 6043583 - DNA, 25 bp, Homo sapien
cgaagacagcatagtccctgccaaa

SEQ ID NO: 6043584 - DNA, 25 bp, Homo sapien
aaagattccactacaccagggacgg

SEQ ID NO: 6043585 - DNA, 25 bp, Homo sapien
gacatcaaattgatgaggtttggcc

SEQ ID NO: 6043586 - DNA, 25 bp, Homo sapien
actttcaaagattccactacaccag

SEQ ID NO: 6043587 - DNA, 25 bp, Homo sapien
cctgcatggaggcattgtcgacaat

SEQ ID NO: 6043588 - DNA, 25 bp, Homo sapien
tctagtggtatgcttaccttctgcg

SEQ ID NO: 6043589 - DNA, 25 bp, Homo sapien
gccaaagttggcacctgccaccaat

SEQ ID NO: 6043590 - DNA, 25 bp, Homo sapien
cgtcaatatcaggatattctttttg

SEQ ID NO: 6043591 - DNA, 25 bp, Homo sapien
gatcaaagcagcgccaatgttgcct

SEQ ID NO: 6043592 - DNA, 25 bp, Homo sapien
gaagtcaaaggcaaatctggcgatc

SEQ ID NO: 6043593 - DNA, 25 bp, Homo sapien
tccactacaccagggacggattcat

SEQ ID NO: 6043594 - DNA, 25 bp, Homo sapien
gttgcctaagatggtaccgtacatt

SEQ ID NO: 6043595 - DNA, 25 bp, Homo sapien
acccaaatggttcaacattaacgtg

SEQ ID NO: 6043596 - DNA, 25 bp, Homo sapien
tcctggaccaccgatcaaagcagcg

SEQ ID NO: 6043597 - DNA, 25 bp, Homo sapien
gcgatcctttctgtcttaggtctag

SEQ ID NO: 6043598 - DNA, 25 bp, Homo sapien
ctgccaccaatcctggaccaccgat

SEQ ID NO: 6043599 - DNA, 25 bp, Homo sapien
gtgaagtcagtagtagaagaggaac

SEQ ID NO: 6043600 - DNA, 25 bp, Homo sapien
atggaggcattgtcgacaatgatgg

SEQ ID NO: 6043601 - DNA, 25 bp, Homo sapien
accaatcctggaccaccgatcaaag

SEQ ID NO: 6043602 - DNA, 25 bp, Homo sapien
gccaatttcagttattatatttctg

SEQ ID NO: 6043603 - DNA, 25 bp, Homo sapien
ttctgcgatcgtttcatgaactgcc

SEQ ID NO: 6043604 - DNA, 25 bp, Homo sapien
gaggaaccaccaatatctctagtgg

SEQ ID NO: 6043605 - DNA, 25 bp, Homo sapien
atggttcaacattaacgtggaggaa

SEQ ID NO: 6043606 - DNA, 25 bp, Homo sapien
taagatggtaccgtacattgaaggg

SEQ ID NO: 6043607 - DNA, 25 bp, Homo sapien
atgatggacgatacgtcaatatcag

SEQ ID NO: 6043608 - DNA, 25 bp, Homo sapien
taacgtggaggaaaggatcatggca

SEQ ID NO: 6043609 - DNA, 25 bp, Homo sapien
agactttctgttgtatttcttggcg

SEQ ID NO: 6043610 - DNA, 25 bp, Homo sapien
ggtatgcttaccttctgcgatcgtt

SEQ ID NO: 6043611 - DNA, 25 bp, Homo sapien
tctgttgtatttcttggcgaagtca

SEQ ID NO: 6043612 - DNA, 25 bp, Homo sapien
ttcatgaactgcctttgagattcta

SEQ ID NO: 6043613 - DNA, 25 bp, Homo sapien
caacattaacgtggaggaaaggatc

SEQ ID NO: 6043614 - DNA, 25 bp, Homo sapien
aaggatcatggcagttgggttagcc

SEQ ID NO: 6043615 - DNA, 25 bp, Homo sapien
gtcataactttcaaagattccacta

SEQ ID NO: 6043616 - DNA, 25 bp, Homo sapien
aaccaacatgtctggaacctggttc

SEQ ID NO: 6043617 - DNA, 25 bp, Homo sapien
tttaatatctaaaccaacatgtctg

SEQ ID NO: 6043618 - DNA, 25 bp, Homo sapien
attcgtgaagtcagtagtagaagag

SEQ ID NO: 6043619 - DNA, 25 bp, Homo sapien
atttgccttatgcacagctgtgaca

SEQ ID NO: 6043620 - DNA, 25 bp, Homo sapien
tatatcctttatttggatattcgcc

SEQ ID NO: 6043621 - DNA, 25 bp, Homo sapien
gctgctgggatatatcaaattgcag

SEQ ID NO: 6043622 - DNA, 25 bp, Homo sapien
accaagcactgatgattactatgat

SEQ ID NO: 6043623 - DNA, 25 bp, Homo sapien
tatttgccaagttagctaaagatga

SEQ ID NO: 6043624 - DNA, 25 bp, Homo sapien
tgcttctgatcttgagttaaaaaaa

SEQ ID NO: 6043625 - DNA, 25 bp, Homo sapien
tattcgccaacggattatgaatatt

SEQ ID NO: 6043626 - DNA, 25 bp, Homo sapien
tattttttaactctgctctttatac

SEQ ID NO: 6043627 - DNA, 25 bp, Homo sapien
actaaaatagacaactcagctgctg

SEQ ID NO: 6043628 - DNA, 25 bp, Homo sapien
cccaggaaagagcatggtatgactc

SEQ ID NO: 6043629 - DNA, 25 bp, Homo sapien
gataatgttgaagaagccacacaaa

SEQ ID NO: 6043630 - DNA, 25 bp, Homo sapien
ctttatttggatattcgccaacgga

SEQ ID NO: 6043631 - DNA, 25 bp, Homo sapien
tgatgaattactcttattttttaac

SEQ ID NO: 6043632 - DNA, 25 bp, Homo sapien
ggctatttgaaagcctgcgataact

SEQ ID NO: 6043633 - DNA, 25 bp, Homo sapien
cactgatgattactatgattatgag

SEQ ID NO: 6043634 - DNA, 25 bp, Homo sapien
ccgcttatgaagtactgtctgaccc

SEQ ID NO: 6043635 - DNA, 25 bp, Homo sapien
ccaagttagctaaagatgagatttt

SEQ ID NO: 6043636 - DNA, 25 bp, Homo sapien
agatgatgtattcgaacaggatatt

SEQ ID NO: 6043637 - DNA, 25 bp, Homo sapien
tactcttattttttaactctgctct

SEQ ID NO: 6043638 - DNA, 25 bp, Homo sapien
agtcacaggtgtcacaactgatgaa

SEQ ID NO: 6043639 - DNA, 25 bp, Homo sapien
tagctaaagatgagattttaagtgg

SEQ ID NO: 6043640 - DNA, 25 bp, Homo sapien
aagatgagattttaagtggtaagcg

SEQ ID NO: 6043641 - DNA, 25 bp, Homo sapien
caataccttgaaaagttttagctgg

SEQ ID NO: 6043642 - DNA, 25 bp, Homo sapien
ctatgattatgaggtagacgctaca

SEQ ID NO: 6043643 - DNA, 25 bp, Homo sapien
gctgtgattcgagccgcttatgaag

SEQ ID NO: 6043644 - DNA, 25 bp, Homo sapien
aaatttgctgtgattcgagccgctt

SEQ ID NO: 6043645 - DNA, 25 bp, Homo sapien
gaatatttgaaacatttctataaga

SEQ ID NO: 6043646 - DNA, 25 bp, Homo sapien
gtcgaaacgcatgcttctgatcttg

SEQ ID NO: 6043647 - DNA, 25 bp, Homo sapien
tataagacttggtcagcgttcaata

SEQ ID NO: 6043648 - DNA, 25 bp, Homo sapien
gttgaagaagccacacaaaaatttg

SEQ ID NO: 6043649 - DNA, 25 bp, Homo sapien
ggatattaatagtattggctatttg

SEQ ID NO: 6043650 - DNA, 25 bp, Homo sapien
ttcgagccgcttatgaagtactgtc

SEQ ID NO: 6043651 - DNA, 25 bp, Homo sapien
ttccgagtatcaagatgatgtattc

SEQ ID NO: 6043652 - DNA, 25 bp, Homo sapien
attgcaggaaaaatatttgccaagt

SEQ ID NO: 6043653 - DNA, 25 bp, Homo sapien
cacaactgatgaattactcttattt

SEQ ID NO: 6043654 - DNA, 25 bp, Homo sapien
ggaacaaattttaaatgatactcca

SEQ ID NO: 6043655 - DNA, 25 bp, Homo sapien
aacgcatgcttctgatcttgagtta

SEQ ID NO: 6043656 - DNA, 25 bp, Homo sapien
atagacaactcagctgctgggatat

SEQ ID NO: 6043657 - DNA, 25 bp, Homo sapien
gtatcaagatgatgtattcgaacag

SEQ ID NO: 6043658 - DNA, 25 bp, Homo sapien
catttctataagacttggtcagcgt

SEQ ID NO: 6043659 - DNA, 25 bp, Homo sapien
tgatcttgagttaaaaaaagcttac

SEQ ID NO: 6043660 - DNA, 25 bp, Homo sapien
caagacggataaacttttatatcct

SEQ ID NO: 6043661 - DNA, 25 bp, Homo sapien
ccaacggattatgaatatttgaaac

SEQ ID NO: 6043662 - DNA, 25 bp, Homo sapien
gcctgcgataactttattaacaaga

SEQ ID NO: 6043663 - DNA, 25 bp, Homo sapien
aaagagcatggtatgactcacataa

SEQ ID NO: 6043664 - DNA, 25 bp, Homo sapien
gactggggaaattttccgagtatca

SEQ ID NO: 6043665 - DNA, 25 bp, Homo sapien
gaagccacacaaaaatttgctgtga

SEQ ID NO: 6043666 - DNA, 25 bp, Homo sapien
aaatgatactccaccaagcactgat

SEQ ID NO: 6043667 - DNA, 25 bp, Homo sapien
atgactcacataaggaacaaatttt

SEQ ID NO: 6043668 - DNA, 25 bp, Homo sapien
gataaaaacccagataatgttgaag

SEQ ID NO: 6043669 - DNA, 25 bp, Homo sapien
aactcagctgctgggatatatcaaa

SEQ ID NO: 6043670 - DNA, 25 bp, Homo sapien
tactgtctgacccccaggaaagagc

SEQ ID NO: 6043671 - DNA, 25 bp, Homo sapien
ctttatactaaaatagacaactcag

SEQ ID NO: 6043672 - DNA, 25 bp, Homo sapien
tgtattcgaacaggatattaatagt

SEQ ID NO: 6043673 - DNA, 25 bp, Homo sapien
ttgaaagcctgcgataactttatta

SEQ ID NO: 6043674 - DNA, 25 bp, Homo sapien
ggccctacaatatcacccagataaa

SEQ ID NO: 6043675 - DNA, 25 bp, Homo sapien
aacccagataatgttgaagaagcca

SEQ ID NO: 6043676 - DNA, 25 bp, Homo sapien
cgctacagtcacaggtgtcacaact

SEQ ID NO: 6043677 - DNA, 25 bp, Homo sapien
agtattggctatttgaaagcctgcg

SEQ ID NO: 6043678 - DNA, 25 bp, Homo sapien
gaaattttccgagtatcaagatgat

SEQ ID NO: 6043679 - DNA, 25 bp, Homo sapien
cagcgttcaataccttgaaaagttt

SEQ ID NO: 6043680 - DNA, 25 bp, Homo sapien
taatagtattggctatttgaaagcc

SEQ ID NO: 6043681 - DNA, 25 bp, Homo sapien
catggtatgactcacataaggaaca

SEQ ID NO: 6043682 - DNA, 25 bp, Homo sapien
tatcaaattgcaggaaaaatatttg

SEQ ID NO: 6043683 - DNA, 25 bp, Homo sapien
cacccagataaaaacccagataatg

SEQ ID NO: 6043684 - DNA, 25 bp, Homo sapien
tactccaccaagcactgatgattac

SEQ ID NO: 6043685 - DNA, 25 bp, Homo sapien
caatatcacccagataaaaacccag

SEQ ID NO: 6043686 - DNA, 25 bp, Homo sapien
acttggtcagcgttcaataccttga

SEQ ID NO: 6043687 - DNA, 25 bp, Homo sapien
ttgaaacatttctataagacttggt

SEQ ID NO: 6043688 - DNA, 25 bp, Homo sapien
taaaaaggccctacaatatcaccca

SEQ ID NO: 6043689 - DNA, 25 bp, Homo sapien
cacataaggaacaaattttaaatga

SEQ ID NO: 6043690 - DNA, 25 bp, Homo sapien
gataactttattaacaagacggata

SEQ ID NO: 6043691 - DNA, 25 bp, Homo sapien
agattttaagtggtaagcgactggg

SEQ ID NO: 6043692 - DNA, 25 bp, Homo sapien
atgaagtactgtctgacccccagga

SEQ ID NO: 6043693 - DNA, 25 bp, Homo sapien
tctgctctttatactaaaatagaca

SEQ ID NO: 6043694 - DNA, 25 bp, Homo sapien
ctgacccccaggaaagagcatggta

SEQ ID NO: 6043695 - DNA, 25 bp, Homo sapien
cgaacaggatattaatagtattggc

SEQ ID NO: 6043696 - DNA, 25 bp, Homo sapien
ggaaaaatatttgccaagttagcta

SEQ ID NO: 6043697 - DNA, 25 bp, Homo sapien
tttaactctgctctttatactaaaa

SEQ ID NO: 6043698 - DNA, 25 bp, Homo sapien
ttggatattcgccaacggattatga

SEQ ID NO: 6043699 - DNA, 25 bp, Homo sapien
gggatatatcaaattgcaggaaaaa

SEQ ID NO: 6043700 - DNA, 25 bp, Homo sapien
ttatgaggtagacgctacagtcaca

SEQ ID NO: 6043701 - DNA, 25 bp, Homo sapien
tgattactatgattatgaggtagac

SEQ ID NO: 6043702 - DNA, 25 bp, Homo sapien
gattatgaatatttgaaacatttct

SEQ ID NO: 6043703 - DNA, 25 bp, Homo sapien
aattttaaatgatactccaccaagc

SEQ ID NO: 6043704 - DNA, 25 bp, Homo sapien
acacaaaaatttgctgtgattcgag

SEQ ID NO: 6043705 - DNA, 25 bp, Homo sapien
aggtgtcacaactgatgaattactc

SEQ ID NO: 6043706 - DNA, 25 bp, Homo sapien
ggtagacgctacagtcacaggtgtc

SEQ ID NO: 6043707 - DNA, 25 bp, Homo sapien
atccaactcattactccgtttgtct

SEQ ID NO: 6043708 - DNA, 25 bp, Homo sapien
ctcattactccgtttgtctttagta

SEQ ID NO: 6043709 - DNA, 25 bp, Homo sapien
ttcttcgtattcacatgtacatttt

SEQ ID NO: 6043710 - DNA, 25 bp, Homo sapien
gtctcctagtgatgccaaaagatca

SEQ ID NO: 6043711 - DNA, 25 bp, Homo sapien
gttcagcttgcaatgcttgcagatc

SEQ ID NO: 6043712 - DNA, 25 bp, Homo sapien
ctcgatcgcggaggttggagacata

SEQ ID NO: 6043713 - DNA, 25 bp, Homo sapien
ttgtaagcccttgtctcctagtgat

SEQ ID NO: 6043714 - DNA, 25 bp, Homo sapien
ctttcgtcttcagaagacgattctg

SEQ ID NO: 6043715 - DNA, 25 bp, Homo sapien
acattttcatccgaactgacgtctt

SEQ ID NO: 6043716 - DNA, 25 bp, Homo sapien
ttttcactgccgcatgccctgctat

SEQ ID NO: 6043717 - DNA, 25 bp, Homo sapien
atcgtcatccgtttgtaagcccttg

SEQ ID NO: 6043718 - DNA, 25 bp, Homo sapien
tttgtctttagtatcatcgaacgat

SEQ ID NO: 6043719 - DNA, 25 bp, Homo sapien
atcatcgaacgattcagattcctct

SEQ ID NO: 6043720 - DNA, 25 bp, Homo sapien
cagcgagttcagcttgcaatgcttg

SEQ ID NO: 6043721 - DNA, 25 bp, Homo sapien
acactttcatctgctgaatcaaatt

SEQ ID NO: 6043722 - DNA, 25 bp, Homo sapien
agacatagaggacggtagagtcgac

SEQ ID NO: 6043723 - DNA, 25 bp, Homo sapien
cttatttcgactatcaaatgattct

SEQ ID NO: 6043724 - DNA, 25 bp, Homo sapien
caatatcttctttttctttaacact

SEQ ID NO: 6043725 - DNA, 25 bp, Homo sapien
atcaaatgattctccgcatgtagtg

SEQ ID NO: 6043726 - DNA, 25 bp, Homo sapien
tgctttttgtggatttagaattctt

SEQ ID NO: 6043727 - DNA, 25 bp, Homo sapien
aagatcatccaactcattactccgt

SEQ ID NO: 6043728 - DNA, 25 bp, Homo sapien
ttcctctgtttctgtgtcaaccttt

SEQ ID NO: 6043729 - DNA, 25 bp, Homo sapien
actccgtttgtctttagtatcatcg

SEQ ID NO: 6043730 - DNA, 25 bp, Homo sapien
tgtagtgcacacctcgatcgcggag

SEQ ID NO: 6043731 - DNA, 25 bp, Homo sapien
tgctatcttcacgtggttgaatagc

SEQ ID NO: 6043732 - DNA, 25 bp, Homo sapien
ggttggagacatagaggacggtaga

SEQ ID NO: 6043733 - DNA, 25 bp, Homo sapien
ttctttcaatttcagcgagttcagc

SEQ ID NO: 6043734 - DNA, 25 bp, Homo sapien
tccatttctatgttgagattgtcat

SEQ ID NO: 6043735 - DNA, 25 bp, Homo sapien
tctttttctttaacactttcatctg

SEQ ID NO: 6043736 - DNA, 25 bp, Homo sapien
tccgcatgtagtgcacacctcgatc

SEQ ID NO: 6043737 - DNA, 25 bp, Homo sapien
tgattctccgcatgtagtgcacacc

SEQ ID NO: 6043738 - DNA, 25 bp, Homo sapien
cttcacgtggttgaatagcttattt

SEQ ID NO: 6043739 - DNA, 25 bp, Homo sapien
gcacacctcgatcgcggaggttgga

SEQ ID NO: 6043740 - DNA, 25 bp, Homo sapien
tagaggacggtagagtcgacaagga

SEQ ID NO: 6043741 - DNA, 25 bp, Homo sapien
gaagacgattctgccagttttcttt

SEQ ID NO: 6043742 - DNA, 25 bp, Homo sapien
atgcttgcagatcaatatcttcttt

SEQ ID NO: 6043743 - DNA, 25 bp, Homo sapien
ttgtcatcttcactttcgtcttcag

SEQ ID NO: 6043744 - DNA, 25 bp, Homo sapien
actacgtttttcactgccgcatgcc

SEQ ID NO: 6043745 - DNA, 25 bp, Homo sapien
gtattcacatgtacattttcatccg

SEQ ID NO: 6043746 - DNA, 25 bp, Homo sapien
acggtagagtcgacaaggacggagt

SEQ ID NO: 6043747 - DNA, 25 bp, Homo sapien
ttcagattcctctgtttctgtgtca

SEQ ID NO: 6043748 - DNA, 25 bp, Homo sapien
cttgcaatgcttgcagatcaatatc

SEQ ID NO: 6043749 - DNA, 25 bp, Homo sapien
tttcgctttagtagaccaatcttca

SEQ ID NO: 6043750 - DNA, 25 bp, Homo sapien
tttagtagaccaatcttcatcgtca

SEQ ID NO: 6043751 - DNA, 25 bp, Homo sapien
tctttttcgctttagtagaccaatc

SEQ ID NO: 6043752 - DNA, 25 bp, Homo sapien
gcccttgtctcctagtgatgccaaa

SEQ ID NO: 6043753 - DNA, 25 bp, Homo sapien
ccagttttctttcaatttcagcgag

SEQ ID NO: 6043754 - DNA, 25 bp, Homo sapien
tctacctctatatccatttctatgt

SEQ ID NO: 6043755 - DNA, 25 bp, Homo sapien
tcgactatcaaatgattctccgcat

SEQ ID NO: 6043756 - DNA, 25 bp, Homo sapien
tctatgttgagattgtcatcttcac

SEQ ID NO: 6043757 - DNA, 25 bp, Homo sapien
tgccaaaagatcatccaactcatta

SEQ ID NO: 6043758 - DNA, 25 bp, Homo sapien
gagtcgacaaggacggagtgctttt

SEQ ID NO: 6043759 - DNA, 25 bp, Homo sapien
acatgtacattttcatccgaactga

SEQ ID NO: 6043760 - DNA, 25 bp, Homo sapien
tgtttctgtgtcaacctttgctttt

SEQ ID NO: 6043761 - DNA, 25 bp, Homo sapien
gctgaatcaaatttctcgagatcgg

SEQ ID NO: 6043762 - DNA, 25 bp, Homo sapien
tagtgatgccaaaagatcatccaac

SEQ ID NO: 6043763 - DNA, 25 bp, Homo sapien
gcagatcaatatcttctttttcttt

SEQ ID NO: 6043764 - DNA, 25 bp, Homo sapien
tctatatccatttctatgttgagat

SEQ ID NO: 6043765 - DNA, 25 bp, Homo sapien
atccgtttgtaagcccttgtctcct

SEQ ID NO: 6043766 - DNA, 25 bp, Homo sapien
gaactgacgtcttctacctctatat

SEQ ID NO: 6043767 - DNA, 25 bp, Homo sapien
ttctcgagatcggagagattatcca

SEQ ID NO: 6043768 - DNA, 25 bp, Homo sapien
tttttattcttcgtattcacatgta

SEQ ID NO: 6043769 - DNA, 25 bp, Homo sapien
tttcactacgtttttcactgccgca

SEQ ID NO: 6043770 - DNA, 25 bp, Homo sapien
tcatctgctgaatcaaatttctcga

SEQ ID NO: 6043771 - DNA, 25 bp, Homo sapien
agaccaatcttcatcgtcatccgtt

SEQ ID NO: 6043772 - DNA, 25 bp, Homo sapien
ttgagattgtcatcttcactttcgt

SEQ ID NO: 6043773 - DNA, 25 bp, Homo sapien
tctttaacactttcatctgctgaat

SEQ ID NO: 6043774 - DNA, 25 bp, Homo sapien
tcttcactttcgtcttcagaagacg

SEQ ID NO: 6043775 - DNA, 25 bp, Homo sapien
tttctttttattcttcgtattcaca

SEQ ID NO: 6043776 - DNA, 25 bp, Homo sapien
attctgccagttttctttcaatttc

SEQ ID NO: 6043777 - DNA, 25 bp, Homo sapien
tttagtatcatcgaacgattcagat

SEQ ID NO: 6043778 - DNA, 25 bp, Homo sapien
gaacgattcagattcctctgtttct

SEQ ID NO: 6043779 - DNA, 25 bp, Homo sapien
tcaaatttctcgagatcggagagat

SEQ ID NO: 6043780 - DNA, 25 bp, Homo sapien
acaaggacggagtgctttttgtgga

SEQ ID NO: 6043781 - DNA, 25 bp, Homo sapien
acgtcttctacctctatatccattt

SEQ ID NO: 6043782 - DNA, 25 bp, Homo sapien
caatttcagcgagttcagcttgcaa

SEQ ID NO: 6043783 - DNA, 25 bp, Homo sapien
atgccctgctatcttcacgtggttg

SEQ ID NO: 6043784 - DNA, 25 bp, Homo sapien
cgcggaggttggagacatagaggac

SEQ ID NO: 6043785 - DNA, 25 bp, Homo sapien
gtggttgaatagcttatttcgacta

SEQ ID NO: 6043786 - DNA, 25 bp, Homo sapien
atcttcatcgtcatccgtttgtaag

SEQ ID NO: 6043787 - DNA, 25 bp, Homo sapien
tcatccgaactgacgtcttctacct

SEQ ID NO: 6043788 - DNA, 25 bp, Homo sapien
tgccgcatgccctgctatcttcacg

SEQ ID NO: 6043789 - DNA, 25 bp, Homo sapien
tcttcagaagacgattctgccagtt

SEQ ID NO: 6043790 - DNA, 25 bp, Homo sapien
acggagtgctttttgtggatttaga

SEQ ID NO: 6043791 - DNA, 25 bp, Homo sapien
gaatagcttatttcgactatcaaat

SEQ ID NO: 6043792 - DNA, 25 bp, Homo sapien
tctatatccatttctatgttgagat

SEQ ID NO: 6043793 - DNA, 25 bp, Homo sapien
acggagtgctttttgtggatttaga

SEQ ID NO: 6043794 - DNA, 25 bp, Homo sapien
gaatagcttatttcgactatcaaat

SEQ ID NO: 6043795 - DNA, 25 bp, Homo sapien
atccaactcattactccgtttgtct

SEQ ID NO: 6043796 - DNA, 25 bp, Homo sapien
aacactttcatctgctgaatcaaat

SEQ ID NO: 6043797 - DNA, 25 bp, Homo sapien
ctcattactccgtttgtctttagta

SEQ ID NO: 6043798 - DNA, 25 bp, Homo sapien
ttcttcgtattcacatgtacatttt

SEQ ID NO: 6043799 - DNA, 25 bp, Homo sapien
gtctcctagtgatgccaaaagatca

SEQ ID NO: 6043800 - DNA, 25 bp, Homo sapien
gttcagcttgcaatgcttgcagatc

SEQ ID NO: 6043801 - DNA, 25 bp, Homo sapien
ttgtaagcccttgtctcctagtgat

SEQ ID NO: 6043802 - DNA, 25 bp, Homo sapien
ctcgatcgcggaggttggagacata

SEQ ID NO: 6043803 - DNA, 25 bp, Homo sapien
cttatttcgactatcaaatgattct

SEQ ID NO: 6043804 - DNA, 25 bp, Homo sapien
tttgtctttagtatcatcgaacgat

SEQ ID NO: 6043805 - DNA, 25 bp, Homo sapien
ttttcactgccgcatgccctgctat

SEQ ID NO: 6043806 - DNA, 25 bp, Homo sapien
atcatcgaacgattcagattcctct

SEQ ID NO: 6043807 - DNA, 25 bp, Homo sapien
cagcgagttcagcttgcaatgcttg

SEQ ID NO: 6043808 - DNA, 25 bp, Homo sapien
agacatagaggacggtagagtcgac

SEQ ID NO: 6043809 - DNA, 25 bp, Homo sapien
acattttcatccgaactgacgtctt

SEQ ID NO: 6043810 - DNA, 25 bp, Homo sapien
caatatcttctttttctttaacact

SEQ ID NO: 6043811 - DNA, 25 bp, Homo sapien
ctttcgtcttcagaagacgattctg

SEQ ID NO: 6043812 - DNA, 25 bp, Homo sapien
atcgtcatccgtttgtaagcccttg

SEQ ID NO: 6043813 - DNA, 25 bp, Homo sapien
atcaaatgattctccgcatgtagtg

SEQ ID NO: 6043814 - DNA, 25 bp, Homo sapien
tgctttttgtggatttagaattctt

SEQ ID NO: 6043815 - DNA, 25 bp, Homo sapien
aagatcatccaactcattactccgt

SEQ ID NO: 6043816 - DNA, 25 bp, Homo sapien
ttcctctgtttctgtgtcaaccttt

SEQ ID NO: 6043817 - DNA, 25 bp, Homo sapien
tgctatcttcacgtggttgaatagc

SEQ ID NO: 6043818 - DNA, 25 bp, Homo sapien
actccgtttgtctttagtatcatcg

SEQ ID NO: 6043819 - DNA, 25 bp, Homo sapien
ttctttcaatttcagcgagttcagc

SEQ ID NO: 6043820 - DNA, 25 bp, Homo sapien
tgtagtgcacacctcgatcgcggag

SEQ ID NO: 6043821 - DNA, 25 bp, Homo sapien
ggttggagacatagaggacggtaga

SEQ ID NO: 6043822 - DNA, 25 bp, Homo sapien
tccatttctatgttgagattgtcat

SEQ ID NO: 6043823 - DNA, 25 bp, Homo sapien
tctttttctttaacactttcatctg

SEQ ID NO: 6043824 - DNA, 25 bp, Homo sapien
tccgcatgtagtgcacacctcgatc

SEQ ID NO: 6043825 - DNA, 25 bp, Homo sapien
tgattctccgcatgtagtgcacacc

SEQ ID NO: 6043826 - DNA, 25 bp, Homo sapien
gcacacctcgatcgcggaggttgga

SEQ ID NO: 6043827 - DNA, 25 bp, Homo sapien
tgctgaatcaaatttctcgagatcg

SEQ ID NO: 6043828 - DNA, 25 bp, Homo sapien
cttcacgtggttgaatagcttattt

SEQ ID NO: 6043829 - DNA, 25 bp, Homo sapien
cttttcactacgtttttcactgccg

SEQ ID NO: 6043830 - DNA, 25 bp, Homo sapien
tagaggacggtagagtcgacaagga

SEQ ID NO: 6043831 - DNA, 25 bp, Homo sapien
gaagacgattctgccagttttcttt

SEQ ID NO: 6043832 - DNA, 25 bp, Homo sapien
atgcttgcagatcaatatcttcttt

SEQ ID NO: 6043833 - DNA, 25 bp, Homo sapien
actacgtttttcactgccgcatgcc

SEQ ID NO: 6043834 - DNA, 25 bp, Homo sapien
gtattcacatgtacattttcatccg

SEQ ID NO: 6043835 - DNA, 25 bp, Homo sapien
acggtagagtcgacaaggacggagt

SEQ ID NO: 6043836 - DNA, 25 bp, Homo sapien
ttcagattcctctgtttctgtgtca

SEQ ID NO: 6043837 - DNA, 25 bp, Homo sapien
cttgcaatgcttgcagatcaatatc

SEQ ID NO: 6043838 - DNA, 25 bp, Homo sapien
tttcgctttagtagaccaatcttca

SEQ ID NO: 6043839 - DNA, 25 bp, Homo sapien
tctttttcgctttagtagaccaatc

SEQ ID NO: 6043840 - DNA, 25 bp, Homo sapien
ccagttttctttcaatttcagcgag

SEQ ID NO: 6043841 - DNA, 25 bp, Homo sapien
tctacctctatatccatttctatgt

SEQ ID NO: 6043842 - DNA, 25 bp, Homo sapien
tctatgttgagattgtcatcttcac

SEQ ID NO: 6043843 - DNA, 25 bp, Homo sapien
tcgactatcaaatgattctccgcat

SEQ ID NO: 6043844 - DNA, 25 bp, Homo sapien
gcccttgtctcctagtgatgccaaa

SEQ ID NO: 6043845 - DNA, 25 bp, Homo sapien
tttagtagaccaatcttcatcgtca

SEQ ID NO: 6043846 - DNA, 25 bp, Homo sapien
tgccaaaagatcatccaactcatta

SEQ ID NO: 6043847 - DNA, 25 bp, Homo sapien
acatgtacattttcatccgaactga

SEQ ID NO: 6043848 - DNA, 25 bp, Homo sapien
gagtcgacaaggacggagtgctttt

SEQ ID NO: 6043849 - DNA, 25 bp, Homo sapien
tgtttctgtgtcaacctttgctttt

SEQ ID NO: 6043850 - DNA, 25 bp, Homo sapien
ttcatctgctgaatcaaatttctcg

SEQ ID NO: 6043851 - DNA, 25 bp, Homo sapien
tagtgatgccaaaagatcatccaac

SEQ ID NO: 6043852 - DNA, 25 bp, Homo sapien
ttctttaacactttcatctgctgaa

SEQ ID NO: 6043853 - DNA, 25 bp, Homo sapien
gcagatcaatatcttctttttcttt

SEQ ID NO: 6043854 - DNA, 25 bp, Homo sapien
atccgtttgtaagcccttgtctcct

SEQ ID NO: 6043855 - DNA, 25 bp, Homo sapien
gaactgacgtcttctacctctatat

SEQ ID NO: 6043856 - DNA, 25 bp, Homo sapien
ttgtcatcttcactttcgtcttcag

SEQ ID NO: 6043857 - DNA, 25 bp, Homo sapien
tttttattcttcgtattcacatgta

SEQ ID NO: 6043858 - DNA, 25 bp, Homo sapien
ttgagattgtcatcttcactttcgt

SEQ ID NO: 6043859 - DNA, 25 bp, Homo sapien
agaccaatcttcatcgtcatccgtt

SEQ ID NO: 6043860 - DNA, 25 bp, Homo sapien
tcttcactttcgtcttcagaagacg

SEQ ID NO: 6043861 - DNA, 25 bp, Homo sapien
tttctttttattcttcgtattcaca

SEQ ID NO: 6043862 - DNA, 25 bp, Homo sapien
attctgccagttttctttcaatttc

SEQ ID NO: 6043863 - DNA, 25 bp, Homo sapien
tttagtatcatcgaacgattcagat

SEQ ID NO: 6043864 - DNA, 25 bp, Homo sapien
gaacgattcagattcctctgtttct

SEQ ID NO: 6043865 - DNA, 25 bp, Homo sapien
acaaggacggagtgctttttgtgga

SEQ ID NO: 6043866 - DNA, 25 bp, Homo sapien
acgtcttctacctctatatccattt

SEQ ID NO: 6043867 - DNA, 25 bp, Homo sapien
caatttcagcgagttcagcttgcaa

SEQ ID NO: 6043868 - DNA, 25 bp, Homo sapien
cgcggaggttggagacatagaggac

SEQ ID NO: 6043869 - DNA, 25 bp, Homo sapien
atgccctgctatcttcacgtggttg

SEQ ID NO: 6043870 - DNA, 25 bp, Homo sapien
atcttcatcgtcatccgtttgtaag

SEQ ID NO: 6043871 - DNA, 25 bp, Homo sapien
gtggttgaatagcttatttcgacta

SEQ ID NO: 6043872 - DNA, 25 bp, Homo sapien
tcatccgaactgacgtcttctacct

SEQ ID NO: 6043873 - DNA, 25 bp, Homo sapien
tgccgcatgccctgctatcttcacg

SEQ ID NO: 6043874 - DNA, 25 bp, Homo sapien
tcttcagaagacgattctgccagtt

SEQ ID NO: 6043875 - DNA, 25 bp, Homo sapien
agaaatggatatagaggtagaagac

SEQ ID NO: 6043876 - DNA, 25 bp, Homo sapien
taaagacaaacggagtaatgagttg

SEQ ID NO: 6043877 - DNA, 25 bp, Homo sapien
tcttttggcatcactaggagacaag

SEQ ID NO: 6043878 - DNA, 25 bp, Homo sapien
tgaaaatgtacatgtgaatacgaag

SEQ ID NO: 6043879 - DNA, 25 bp, Homo sapien
ttctgaagacgaaagtgaagatgac

SEQ ID NO: 6043880 - DNA, 25 bp, Homo sapien
gttcgatgatactaaagacaaacgg

SEQ ID NO: 6043881 - DNA, 25 bp, Homo sapien
taagaaaaatatggaagagatacgg

SEQ ID NO: 6043882 - DNA, 25 bp, Homo sapien
atctctccgatctcgagaaatttga

SEQ ID NO: 6043883 - DNA, 25 bp, Homo sapien
gattggtctactaaagcgaaaaaga

SEQ ID NO: 6043884 - DNA, 25 bp, Homo sapien
cagatgaaagtgttaaagaaaaaga

SEQ ID NO: 6043885 - DNA, 25 bp, Homo sapien
aatttgattcagcagatgaaagtgt

SEQ ID NO: 6043886 - DNA, 25 bp, Homo sapien
caattgaaaaaccacataaacacta

SEQ ID NO: 6043887 - DNA, 25 bp, Homo sapien
actgcataagaaaaatatggaagag

SEQ ID NO: 6043888 - DNA, 25 bp, Homo sapien
aagtgaagatgacaatctcaacata

SEQ ID NO: 6043889 - DNA, 25 bp, Homo sapien
cacagaaacagaggaatctgaatcg

SEQ ID NO: 6043890 - DNA, 25 bp, Homo sapien
taaagaaaaagaagatattgatctg

SEQ ID NO: 6043891 - DNA, 25 bp, Homo sapien
cgtcagttcggatgaaaatgtacat

SEQ ID NO: 6043892 - DNA, 25 bp, Homo sapien
agtgttaaagaaaaagaagatattg

SEQ ID NO: 6043893 - DNA, 25 bp, Homo sapien
ccgatctcgagaaatttgattcagc

SEQ ID NO: 6043894 - DNA, 25 bp, Homo sapien
attcagcagatgaaagtgttaaaga

SEQ ID NO: 6043895 - DNA, 25 bp, Homo sapien
aacagaggaatctgaatcgttcgat

SEQ ID NO: 6043896 - DNA, 25 bp, Homo sapien
aaactggcagaatcgtcttctgaag

SEQ ID NO: 6043897 - DNA, 25 bp, Homo sapien
tgagttggatgatcttttggcatca

SEQ ID NO: 6043898 - DNA, 25 bp, Homo sapien
actaggagacaagggcttacaaacg

SEQ ID NO: 6043899 - DNA, 25 bp, Homo sapien
gaattctaaatccacaaaaagcact

SEQ ID NO: 6043900 - DNA, 25 bp, Homo sapien
agacgaaagtgaagatgacaatctc

SEQ ID NO: 6043901 - DNA, 25 bp, Homo sapien
ggatatagaggtagaagacgtcagt

SEQ ID NO: 6043902 - DNA, 25 bp, Homo sapien
ggaagagatacggaaagaaatggaa

SEQ ID NO: 6043903 - DNA, 25 bp, Homo sapien
gcaagcattgcaagctgaactcgct

SEQ ID NO: 6043904 - DNA, 25 bp, Homo sapien
cttgtcgactctaccgtcctctatg

SEQ ID NO: 6043905 - DNA, 25 bp, Homo sapien
tgtgaatacgaagaataaaaagaaa

SEQ ID NO: 6043906 - DNA, 25 bp, Homo sapien
tcgtcttctgaagacgaaagtgaag

SEQ ID NO: 6043907 - DNA, 25 bp, Homo sapien
ggcttacaaacggatgacgatgaag

SEQ ID NO: 6043908 - DNA, 25 bp, Homo sapien
cacaaaaagcactccgtccttgtcg

SEQ ID NO: 6043909 - DNA, 25 bp, Homo sapien
ggaatctgaatcgttcgatgatact

SEQ ID NO: 6043910 - DNA, 25 bp, Homo sapien
attgcaagctgaactcgctgaaatt

SEQ ID NO: 6043911 - DNA, 25 bp, Homo sapien
caaacggagtaatgagttggatgat

SEQ ID NO: 6043912 - DNA, 25 bp, Homo sapien
tggataatctctccgatctcgagaa

SEQ ID NO: 6043913 - DNA, 25 bp, Homo sapien
ggatgatcttttggcatcactagga

SEQ ID NO: 6043914 - DNA, 25 bp, Homo sapien
gatgaagattggtctactaaagcga

SEQ ID NO: 6043915 - DNA, 25 bp, Homo sapien
agaaatggaagaggaaaacataacg

SEQ ID NO: 6043916 - DNA, 25 bp, Homo sapien
ggcatcactaggagacaagggctta

SEQ ID NO: 6043917 - DNA, 25 bp, Homo sapien
tcgagaaatttgattcagcagatga

SEQ ID NO: 6043918 - DNA, 25 bp, Homo sapien
ttgggttggataatctctccgatct

SEQ ID NO: 6043919 - DNA, 25 bp, Homo sapien
aagcactccgtccttgtcgactcta

SEQ ID NO: 6043920 - DNA, 25 bp, Homo sapien
cataaacactaaactgcataagaaa

SEQ ID NO: 6043921 - DNA, 25 bp, Homo sapien
tgaaagaaaactggcagaatcgtct

SEQ ID NO: 6043922 - DNA, 25 bp, Homo sapien
ttcggatgaaaatgtacatgtgaat

SEQ ID NO: 6043923 - DNA, 25 bp, Homo sapien
aaaagaagatattgatctgcaagca

SEQ ID NO: 6043924 - DNA, 25 bp, Homo sapien
tgtacatgtgaatacgaagaataaa

SEQ ID NO: 6043925 - DNA, 25 bp, Homo sapien
gacaagggcttacaaacggatgacg

SEQ ID NO: 6043926 - DNA, 25 bp, Homo sapien
actcgctgaaattgaaagaaaactg

SEQ ID NO: 6043927 - DNA, 25 bp, Homo sapien
caaacggatgacgatgaagattggt

SEQ ID NO: 6043928 - DNA, 25 bp, Homo sapien
taacgcttgggttggataatctctc

SEQ ID NO: 6043929 - DNA, 25 bp, Homo sapien
agaggtagaagacgtcagttcggat

SEQ ID NO: 6043930 - DNA, 25 bp, Homo sapien
agatgacaatctcaacatagaaatg

SEQ ID NO: 6043931 - DNA, 25 bp, Homo sapien
tccgtccttgtcgactctaccgtcc

SEQ ID NO: 6043932 - DNA, 25 bp, Homo sapien
gactctaccgtcctctatgtctcca

SEQ ID NO: 6043933 - DNA, 25 bp, Homo sapien
taaatccacaaaaagcactccgtcc

SEQ ID NO: 6043934 - DNA, 25 bp, Homo sapien
tgaatcgttcgatgatactaaagac

SEQ ID NO: 6043935 - DNA, 25 bp, Homo sapien
gcagaatcgtcttctgaagacgaaa

SEQ ID NO: 6043936 - DNA, 25 bp, Homo sapien
gaaaagcaattgaaaaaccacataa

SEQ ID NO: 6043937 - DNA, 25 bp, Homo sapien
ggttgacacagaaacagaggaatct

SEQ ID NO: 6043938 - DNA, 25 bp, Homo sapien
aaaccacataaacactaaactgcat

SEQ ID NO: 6043939 - DNA, 25 bp, Homo sapien
gaaaacataacgcttgggttggata

SEQ ID NO: 6043940 - DNA, 25 bp, Homo sapien
tggaagaggaaaacataacgcttgg

SEQ ID NO: 6043941 - DNA, 25 bp, Homo sapien
agaagacgtcagttcggatgaaaat

SEQ ID NO: 6043942 - DNA, 25 bp, Homo sapien
gagtaatgagttggatgatcttttg

SEQ ID NO: 6043943 - DNA, 25 bp, Homo sapien
tgatctgcaagcattgcaagctgaa

SEQ ID NO: 6043944 - DNA, 25 bp, Homo sapien
caatctcaacatagaaatggatata

SEQ ID NO: 6043945 - DNA, 25 bp, Homo sapien
agctgaactcgctgaaattgaaaga

SEQ ID NO: 6043946 - DNA, 25 bp, Homo sapien
caacatagaaatggatatagaggta

SEQ ID NO: 6043947 - DNA, 25 bp, Homo sapien
gatacggaaagaaatggaagaggaa

SEQ ID NO: 6043948 - DNA, 25 bp, Homo sapien
tgaaattgaaagaaaactggcagaa

SEQ ID NO: 6043949 - DNA, 25 bp, Homo sapien
agcaaaggttgacacagaaacagag

SEQ ID NO: 6043950 - DNA, 25 bp, Homo sapien
gatgacgatgaagattggtctacta

SEQ ID NO: 6043951 - DNA, 25 bp, Homo sapien
agatattgatctgcaagcattgcaa

SEQ ID NO: 6043952 - DNA, 25 bp, Homo sapien
accgtcctctatgtctccaacctcc

SEQ ID NO: 6043953 - DNA, 25 bp, Homo sapien
tgatactaaagacaaacggagtaat

SEQ ID NO: 6043954 - DNA, 25 bp, Homo sapien
cactaaactgcataagaaaaatatg

SEQ ID NO: 6043955 - DNA, 25 bp, Homo sapien
aaatatggaagagatacggaaagaa

SEQ ID NO: 6043956 - DNA, 25 bp, Homo sapien
gtcgtcatgacctgctcgggatgtt

SEQ ID NO: 6043957 - DNA, 25 bp, Homo sapien
ccaaaatagatatatcccttgaaaa

SEQ ID NO: 6043958 - DNA, 25 bp, Homo sapien
tagtagatgtatatactacacttcc

SEQ ID NO: 6043959 - DNA, 25 bp, Homo sapien
tatcccttgaaaagcaattagtaga

SEQ ID NO: 6043960 - DNA, 25 bp, Homo sapien
gttctggtgcagtcaataaagtttt

SEQ ID NO: 6043961 - DNA, 25 bp, Homo sapien
aaaggaagttagatctggcaaacaa

SEQ ID NO: 6043962 - DNA, 25 bp, Homo sapien
cgggatgttctggtgcagtcaataa

SEQ ID NO: 6043963 - DNA, 25 bp, Homo sapien
tcatgacctgctcgggatgttctgg

SEQ ID NO: 6043964 - DNA, 25 bp, Homo sapien
tgacgaaattagaaccagacgtttc

SEQ ID NO: 6043965 - DNA, 25 bp, Homo sapien
cctgctcgggatgttctggtgcagt

SEQ ID NO: 6043966 - DNA, 25 bp, Homo sapien
gtgcagtcaataaagttttgacgaa

SEQ ID NO: 6043967 - DNA, 25 bp, Homo sapien
tcaataaagttttgacgaaattaga

SEQ ID NO: 6043968 - DNA, 25 bp, Homo sapien
agcaattagtagatgtatatactac

SEQ ID NO: 6043969 - DNA, 25 bp, Homo sapien
accggaaaggaagttagatctggca

SEQ ID NO: 6043970 - DNA, 25 bp, Homo sapien
ttgaaaagcaattagtagatgtata

SEQ ID NO: 6043971 - DNA, 25 bp, Homo sapien
atgtatatactacacttccttacga

SEQ ID NO: 6043972 - DNA, 25 bp, Homo sapien
atactacacttccttacgattttat

SEQ ID NO: 6043973 - DNA, 25 bp, Homo sapien
tagatatatcccttgaaaagcaatt

SEQ ID NO: 6043974 - DNA, 25 bp, Homo sapien
acgtttccaaaatagatatatccct

SEQ ID NO: 6043975 - DNA, 25 bp, Homo sapien
agttagatctggcaaacaattgtga

SEQ ID NO: 6043976 - DNA, 25 bp, Homo sapien
aaccagacgtttccaaaatagatat

SEQ ID NO: 6043977 - DNA, 25 bp, Homo sapien
aactttattgactgcaccagaacat

SEQ ID NO: 6043978 - DNA, 25 bp, Homo sapien
ataaaatcgtaaggaagtgtagtat

SEQ ID NO: 6043979 - DNA, 25 bp, Homo sapien
tgcaccagaacatcccgagcaggtc

SEQ ID NO: 6043980 - DNA, 25 bp, Homo sapien
gatatatctattttggaaacgtctg

SEQ ID NO: 6043981 - DNA, 25 bp, Homo sapien
tgcttttcaagggatatatctattt

SEQ ID NO: 6043982 - DNA, 25 bp, Homo sapien
attgactgcaccagaacatcccgag

SEQ ID NO: 6043983 - DNA, 25 bp, Homo sapien
actaattgcttttcaagggatatat

SEQ ID NO: 6043984 - DNA, 25 bp, Homo sapien
gacattgaattgataatgttttatc

SEQ ID NO: 6043985 - DNA, 25 bp, Homo sapien
gcaggtcatgacgacattgaattga

SEQ ID NO: 6043986 - DNA, 25 bp, Homo sapien
gaattgataatgttttatctctgcc

SEQ ID NO: 6043987 - DNA, 25 bp, Homo sapien
gtgtagtatatacatctactaattg

SEQ ID NO: 6043988 - DNA, 25 bp, Homo sapien
aatttcgtcaaaactttattgactg

SEQ ID NO: 6043989 - DNA, 25 bp, Homo sapien
tcccgagcaggtcatgacgacattg

SEQ ID NO: 6043990 - DNA, 25 bp, Homo sapien
gaaacgtctggttctaatttcgtca

SEQ ID NO: 6043991 - DNA, 25 bp, Homo sapien
tcaagggatatatctattttggaaa

SEQ ID NO: 6043992 - DNA, 25 bp, Homo sapien
acatctactaattgcttttcaaggg

SEQ ID NO: 6043993 - DNA, 25 bp, Homo sapien
aatcgtaaggaagtgtagtatatac

SEQ ID NO: 6043994 - DNA, 25 bp, Homo sapien
tctattttggaaacgtctggttcta

SEQ ID NO: 6043995 - DNA, 25 bp, Homo sapien
gtatatacatctactaattgctttt

SEQ ID NO: 6043996 - DNA, 25 bp, Homo sapien
cgtcaaaactttattgactgcacca

SEQ ID NO: 6043997 - DNA, 25 bp, Homo sapien
catgacgacattgaattgataatgt

SEQ ID NO: 6043998 - DNA, 25 bp, Homo sapien
aaggaagtgtagtatatacatctac

SEQ ID NO: 6043999 - DNA, 25 bp, Homo sapien
agaacatcccgagcaggtcatgacg

SEQ ID NO: 6044000 - DNA, 25 bp, Homo sapien
atgcgcataaacttacacctgcgtt

SEQ ID NO: 6044001 - DNA, 25 bp, Homo sapien
gctttggcacgtgagatatatggta

SEQ ID NO: 6044002 - DNA, 25 bp, Homo sapien
caaatcttctctaaagggttcaagt

SEQ ID NO: 6044003 - DNA, 25 bp, Homo sapien
taaatttgtagatgaaggtaaattg

SEQ ID NO: 6044004 - DNA, 25 bp, Homo sapien
catgggttgaaaaatacagacccga

SEQ ID NO: 6044005 - DNA, 25 bp, Homo sapien
ttctacaattgttgctttggcacgt

SEQ ID NO: 6044006 - DNA, 25 bp, Homo sapien
agccaacgtcttggtgcatgagaag

SEQ ID NO: 6044007 - DNA, 25 bp, Homo sapien
gttgtctcctaatgcggagaaggcc

SEQ ID NO: 6044008 - DNA, 25 bp, Homo sapien
tcggatagccaacgtcttggtgcat

SEQ ID NO: 6044009 - DNA, 25 bp, Homo sapien
aatcaaattaaagactttgcctcta

SEQ ID NO: 6044010 - DNA, 25 bp, Homo sapien
attaaagactttgcctctacaagac

SEQ ID NO: 6044011 - DNA, 25 bp, Homo sapien
gcacgagattcagatttcagccctt

SEQ ID NO: 6044012 - DNA, 25 bp, Homo sapien
tggggatatgagacgtgtgttaaac

SEQ ID NO: 6044013 - DNA, 25 bp, Homo sapien
aatgcatccgatgacagaggtattg

SEQ ID NO: 6044014 - DNA, 25 bp, Homo sapien
ctgtgtattggccaattatgcgcat

SEQ ID NO: 6044015 - DNA, 25 bp, Homo sapien
acaagacaaatcttctctaaagggt

SEQ ID NO: 6044016 - DNA, 25 bp, Homo sapien
ggtgcatgagaagctgaagttgtct

SEQ ID NO: 6044017 - DNA, 25 bp, Homo sapien
ttacacctgcgttattgagtaggtg

SEQ ID NO: 6044018 - DNA, 25 bp, Homo sapien
gaactttctaatggggatatgagac

SEQ ID NO: 6044019 - DNA, 25 bp, Homo sapien
ccaattatgcgcataaacttacacc

SEQ ID NO: 6044020 - DNA, 25 bp, Homo sapien
gccgcacaaaatgcgttgagaagag

SEQ ID NO: 6044021 - DNA, 25 bp, Homo sapien
gagaagagttatagaacggtacacc

SEQ ID NO: 6044022 - DNA, 25 bp, Homo sapien
cttaatagaactttctaatggggat

SEQ ID NO: 6044023 - DNA, 25 bp, Homo sapien
caccacagttcgtaaatttgtagat

SEQ ID NO: 6044024 - DNA, 25 bp, Homo sapien
aattgttgctttggcacgtgagata

SEQ ID NO: 6044025 - DNA, 25 bp, Homo sapien
tcctaatgcggagaaggccttaata

SEQ ID NO: 6044026 - DNA, 25 bp, Homo sapien
tgagaagctgaagttgtctcctaat

SEQ ID NO: 6044027 - DNA, 25 bp, Homo sapien
tactcgaacatggttttggagctga

SEQ ID NO: 6044028 - DNA, 25 bp, Homo sapien
agttatagaacggtacaccaagaat

SEQ ID NO: 6044029 - DNA, 25 bp, Homo sapien
aaattgccacatcttctattctatg

SEQ ID NO: 6044030 - DNA, 25 bp, Homo sapien
gatttcagcccttgccccaagaggc

SEQ ID NO: 6044031 - DNA, 25 bp, Homo sapien
cttctattctatgggcctccaggta

SEQ ID NO: 6044032 - DNA, 25 bp, Homo sapien
accttccatgggttgaaaaatacag

SEQ ID NO: 6044033 - DNA, 25 bp, Homo sapien
gagctgaatgcatccgatgacagag

SEQ ID NO: 6044034 - DNA, 25 bp, Homo sapien
gcctctacaagacaaatcttctcta

SEQ ID NO: 6044035 - DNA, 25 bp, Homo sapien
accaatgccgcacaaaatgcgttga

SEQ ID NO: 6044036 - DNA, 25 bp, Homo sapien
aaggccttaatagaactttctaatg

SEQ ID NO: 6044037 - DNA, 25 bp, Homo sapien
gctgaagttgtctcctaatgcggag

SEQ ID NO: 6044038 - DNA, 25 bp, Homo sapien
tctatgggcctccaggtaccggtaa

SEQ ID NO: 6044039 - DNA, 25 bp, Homo sapien
tgcggagaaggccttaatagaactt

SEQ ID NO: 6044040 - DNA, 25 bp, Homo sapien
ggccattgagcgtcggatagccaac

SEQ ID NO: 6044041 - DNA, 25 bp, Homo sapien
gatgaagcagatgccatgaccaatg

SEQ ID NO: 6044042 - DNA, 25 bp, Homo sapien
cgtcttggtgcatgagaagctgaag

SEQ ID NO: 6044043 - DNA, 25 bp, Homo sapien
atactggatgaagcagatgccatga

SEQ ID NO: 6044044 - DNA, 25 bp, Homo sapien
gattcagatttcagcccttgcccca

SEQ ID NO: 6044045 - DNA, 25 bp, Homo sapien
tgagcgtcggatagccaacgtcttg

SEQ ID NO: 6044046 - DNA, 25 bp, Homo sapien
cggacaaaatgaggtgatcaccaca

SEQ ID NO: 6044047 - DNA, 25 bp, Homo sapien
tattgagtaggtgcacgagattcag

SEQ ID NO: 6044048 - DNA, 25 bp, Homo sapien
cttgccccaagaggccattgagcgt

SEQ ID NO: 6044049 - DNA, 25 bp, Homo sapien
acaccaagaatacgcggttctgtgt

SEQ ID NO: 6044050 - DNA, 25 bp, Homo sapien
ataaacttacacctgcgttattgag

SEQ ID NO: 6044051 - DNA, 25 bp, Homo sapien
ttctaatggggatatgagacgtgtg

SEQ ID NO: 6044052 - DNA, 25 bp, Homo sapien
tgtagatgaaggtaaattgccacat

SEQ ID NO: 6044053 - DNA, 25 bp, Homo sapien
tcaagttaattatactggatgaagc

SEQ ID NO: 6044054 - DNA, 25 bp, Homo sapien
gcagatgccatgaccaatgccgcac

SEQ ID NO: 6044055 - DNA, 25 bp, Homo sapien
gcggttctgtgtattggccaattat

SEQ ID NO: 6044056 - DNA, 25 bp, Homo sapien
aaatgaggtgatcaccacagttcgt

SEQ ID NO: 6044057 - DNA, 25 bp, Homo sapien
agggttcaagttaattatactggat

SEQ ID NO: 6044058 - DNA, 25 bp, Homo sapien
gtaggtgcacgagattcagatttca

SEQ ID NO: 6044059 - DNA, 25 bp, Homo sapien
gaatacgcggttctgtgtattggcc

SEQ ID NO: 6044060 - DNA, 25 bp, Homo sapien
gatgtggtgaggaatcaaattaaag

SEQ ID NO: 6044061 - DNA, 25 bp, Homo sapien
tattggccaattatgcgcataaact

SEQ ID NO: 6044062 - DNA, 25 bp, Homo sapien
gcacgtgagatatatggtaagaatt

SEQ ID NO: 6044063 - DNA, 25 bp, Homo sapien
ggacgaagtgtacggacaaaatgag

SEQ ID NO: 6044064 - DNA, 25 bp, Homo sapien
tatggtaagaattactcgaacatgg

SEQ ID NO: 6044065 - DNA, 25 bp, Homo sapien
caaaatgcgttgagaagagttatag

SEQ ID NO: 6044066 - DNA, 25 bp, Homo sapien
agaacggtacaccaagaatacgcgg

SEQ ID NO: 6044067 - DNA, 25 bp, Homo sapien
gtgaggaatcaaattaaagactttg

SEQ ID NO: 6044068 - DNA, 25 bp, Homo sapien
tgaaggtaaattgccacatcttcta

SEQ ID NO: 6044069 - DNA, 25 bp, Homo sapien
ccacatcttctattctatgggcctc

SEQ ID NO: 6044070 - DNA, 25 bp, Homo sapien
gttttggagctgaatgcatccgatg

SEQ ID NO: 6044071 - DNA, 25 bp, Homo sapien
aagaattactcgaacatggttttgg

SEQ ID NO: 6044072 - DNA, 25 bp, Homo sapien
ggtgatcaccacagttcgtaaattt

SEQ ID NO: 6044073 - DNA, 25 bp, Homo sapien
taaaacttctacaattgttgctttg

SEQ ID NO: 6044074 - DNA, 25 bp, Homo sapien
agcccttgccccaagaggccattga

SEQ ID NO: 6044075 - DNA, 25 bp, Homo sapien
agtgtacggacaaaatgaggtgatc

SEQ ID NO: 6044076 - DNA, 25 bp, Homo sapien
gccatgaccaatgccgcacaaaatg

SEQ ID NO: 6044077 - DNA, 25 bp, Homo sapien
tccgatgacagaggtattgatgtgg

SEQ ID NO: 6044078 - DNA, 25 bp, Homo sapien
cagacccgaaacgttggacgaagtg

SEQ ID NO: 6044079 - DNA, 25 bp, Homo sapien
ttaattatactggatgaagcagatg

SEQ ID NO: 6044080 - DNA, 25 bp, Homo sapien
aacatggttttggagctgaatgcat

SEQ ID NO: 6044081 - DNA, 25 bp, Homo sapien
ggtattgatgtggtgaggaatcaaa

SEQ ID NO: 6044082 - DNA, 25 bp, Homo sapien
gagatatatggtaagaattactcga

SEQ ID NO: 6044083 - DNA, 25 bp, Homo sapien
agttcgtaaatttgtagatgaaggt

SEQ ID NO: 6044084 - DNA, 25 bp, Homo sapien
tgcgttgagaagagttatagaacgg

SEQ ID NO: 6044085 - DNA, 25 bp, Homo sapien
gactttgcctctacaagacaaatct

SEQ ID NO: 6044086 - DNA, 25 bp, Homo sapien
ctgcgttattgagtaggtgcacgag

SEQ ID NO: 6044087 - DNA, 25 bp, Homo sapien
gacagaggtattgatgtggtgagga

SEQ ID NO: 6044088 - DNA, 25 bp, Homo sapien
ccaagaggccattgagcgtcggata

SEQ ID NO: 6044089 - DNA, 25 bp, Homo sapien
atctcgtgcacctactcaataacgc

SEQ ID NO: 6044090 - DNA, 25 bp, Homo sapien
ggtaagcaaatgcactcttgtttcc

SEQ ID NO: 6044091 - DNA, 25 bp, Homo sapien
tatgcgcataattggccaatacaca

SEQ ID NO: 6044092 - DNA, 25 bp, Homo sapien
tattaaggccttctccgcattagga

SEQ ID NO: 6044093 - DNA, 25 bp, Homo sapien
cagtatcttcactatgccctcgatt

SEQ ID NO: 6044094 - DNA, 25 bp, Homo sapien
agacaacttcagcttctcatgcacc

SEQ ID NO: 6044095 - DNA, 25 bp, Homo sapien
tctaaagtagctttgcaagactgca

SEQ ID NO: 6044096 - DNA, 25 bp, Homo sapien
tatccgacgctcaatggcctcttgg

SEQ ID NO: 6044097 - DNA, 25 bp, Homo sapien
catcctcgtcgggattgtctaaagt

SEQ ID NO: 6044098 - DNA, 25 bp, Homo sapien
cttctcatgcaccaagacgttggct

SEQ ID NO: 6044099 - DNA, 25 bp, Homo sapien
gacttcaatactgcctttaagtcac

SEQ ID NO: 6044100 - DNA, 25 bp, Homo sapien
catagataacgtcgtcactgatctc

SEQ ID NO: 6044101 - DNA, 25 bp, Homo sapien
tggcactgcgtaccttattaagtgt

SEQ ID NO: 6044102 - DNA, 25 bp, Homo sapien
gcctttaagtcacttggtctgggtg

SEQ ID NO: 6044103 - DNA, 25 bp, Homo sapien
gaccgcgctgccctgaatctggtcg

SEQ ID NO: 6044104 - DNA, 25 bp, Homo sapien
cataattggccaatacacagaaccg

SEQ ID NO: 6044105 - DNA, 25 bp, Homo sapien
cgtcactgatctcatcctcgtcggg

SEQ ID NO: 6044106 - DNA, 25 bp, Homo sapien
tgcgtaccttattaagtgtgtagtg

SEQ ID NO: 6044107 - DNA, 25 bp, Homo sapien
gcctcttggggcaagggctgaaatc

SEQ ID NO: 6044108 - DNA, 25 bp, Homo sapien
tatccccattagaaagttctattaa

SEQ ID NO: 6044109 - DNA, 25 bp, Homo sapien
tgcaagactgcaaaacgtttaacac

SEQ ID NO: 6044110 - DNA, 25 bp, Homo sapien
taagtttatgcgcataattggccaa

SEQ ID NO: 6044111 - DNA, 25 bp, Homo sapien
tgaagttcgtagtcttccagtatct

SEQ ID NO: 6044112 - DNA, 25 bp, Homo sapien
ggattgtctaaagtagctttgcaag

SEQ ID NO: 6044113 - DNA, 25 bp, Homo sapien
aagttctattaaggccttctccgca

SEQ ID NO: 6044114 - DNA, 25 bp, Homo sapien
ctccgcattaggagacaacttcagc

SEQ ID NO: 6044115 - DNA, 25 bp, Homo sapien
ctggtcgttgccacccttggatatc

SEQ ID NO: 6044116 - DNA, 25 bp, Homo sapien
tgtagtgggcggtaccccaatcgtc

SEQ ID NO: 6044117 - DNA, 25 bp, Homo sapien
agaaccgcgtattcttggtgtaccg

SEQ ID NO: 6044118 - DNA, 25 bp, Homo sapien
tggccttgatggcgccaatgaccgc

SEQ ID NO: 6044119 - DNA, 25 bp, Homo sapien
tcctccagtatcgacttcaatactg

SEQ ID NO: 6044120 - DNA, 25 bp, Homo sapien
gctgaaatctgaatctcgtgcacct

SEQ ID NO: 6044121 - DNA, 25 bp, Homo sapien
atcggccagtttggtaagcaaatgc

SEQ ID NO: 6044122 - DNA, 25 bp, Homo sapien
cgagtactctatatcggccagtttg

SEQ ID NO: 6044123 - DNA, 25 bp, Homo sapien
agtatcgacttcaatactgccttta

SEQ ID NO: 6044124 - DNA, 25 bp, Homo sapien
ctctatatcggccagtttggtaagc

SEQ ID NO: 6044125 - DNA, 25 bp, Homo sapien
tgggtgccccacagcattcatagat

SEQ ID NO: 6044126 - DNA, 25 bp, Homo sapien
tcattttgaagttcgtagtcttcca

SEQ ID NO: 6044127 - DNA, 25 bp, Homo sapien
atctgaatctcgtgcacctactcaa

SEQ ID NO: 6044128 - DNA, 25 bp, Homo sapien
caggtgtaagtttatgcgcataatt

SEQ ID NO: 6044129 - DNA, 25 bp, Homo sapien
ccttattaagtgtgtagtgggcggt

SEQ ID NO: 6044130 - DNA, 25 bp, Homo sapien
cttggtctgggtgccccacagcatt

SEQ ID NO: 6044131 - DNA, 25 bp, Homo sapien
cattagaaagttctattaaggcctt

SEQ ID NO: 6044132 - DNA, 25 bp, Homo sapien
ttaggtcgatcaacgcgagaccctt

SEQ ID NO: 6044133 - DNA, 25 bp, Homo sapien
taagtgtgtagtgggcggtacccca

SEQ ID NO: 6044134 - DNA, 25 bp, Homo sapien
acgctcaatggcctcttggggcaag

SEQ ID NO: 6044135 - DNA, 25 bp, Homo sapien
cgatcaacgcgagacccttggcact

SEQ ID NO: 6044136 - DNA, 25 bp, Homo sapien
tgatggcgccaatgaccgcgctgcc

SEQ ID NO: 6044137 - DNA, 25 bp, Homo sapien
tgtttcctcattttgaagttcgtag

SEQ ID NO: 6044138 - DNA, 25 bp, Homo sapien
acccttggatatcgagtactctata

SEQ ID NO: 6044139 - DNA, 25 bp, Homo sapien
tcttggtgtaccgttctataactct

SEQ ID NO: 6044140 - DNA, 25 bp, Homo sapien
gacccttggcactgcgtaccttatt

SEQ ID NO: 6044141 - DNA, 25 bp, Homo sapien
aatactgcctttaagtcacttggtc

SEQ ID NO: 6044142 - DNA, 25 bp, Homo sapien
ctgaatctggtcgttgccacccttg

SEQ ID NO: 6044143 - DNA, 25 bp, Homo sapien
ggatatcgagtactctatatcggcc

SEQ ID NO: 6044144 - DNA, 25 bp, Homo sapien
tcgtcgggattgtctaaagtagctt

SEQ ID NO: 6044145 - DNA, 25 bp, Homo sapien
gcgtattcttggtgtaccgttctat

SEQ ID NO: 6044146 - DNA, 25 bp, Homo sapien
cactcttgtttcctcattttgaagt

SEQ ID NO: 6044147 - DNA, 25 bp, Homo sapien
caatcgtcctccagtatcgacttca

SEQ ID NO: 6044148 - DNA, 25 bp, Homo sapien
agcattcatagataacgtcgtcact

SEQ ID NO: 6044149 - DNA, 25 bp, Homo sapien
gcaagggctgaaatctgaatctcgt

SEQ ID NO: 6044150 - DNA, 25 bp, Homo sapien
tgatctcatcctcgtcgggattgtc

SEQ ID NO: 6044151 - DNA, 25 bp, Homo sapien
cttcactatgccctcgattaggtcg

SEQ ID NO: 6044152 - DNA, 25 bp, Homo sapien
cagtttggtaagcaaatgcactctt

SEQ ID NO: 6044153 - DNA, 25 bp, Homo sapien
ctatgccctcgattaggtcgatcaa

SEQ ID NO: 6044154 - DNA, 25 bp, Homo sapien
cttcagcttctcatgcaccaagacg

SEQ ID NO: 6044155 - DNA, 25 bp, Homo sapien
gctgccctgaatctggtcgttgcca

SEQ ID NO: 6044156 - DNA, 25 bp, Homo sapien
ccccacagcattcatagataacgtc

SEQ ID NO: 6044157 - DNA, 25 bp, Homo sapien
ttcgtagtcttccagtatcttcact

SEQ ID NO: 6044158 - DNA, 25 bp, Homo sapien
caaaacgtttaacacacgtctcata

SEQ ID NO: 6044159 - DNA, 25 bp, Homo sapien
gtctcatatccccattagaaagttc

SEQ ID NO: 6044160 - DNA, 25 bp, Homo sapien
acacacgtctcatatccccattaga

SEQ ID NO: 6044161 - DNA, 25 bp, Homo sapien
tagctttgcaagactgcaaaacgtt

SEQ ID NO: 6044162 - DNA, 25 bp, Homo sapien
gaagctggccttgatggcgccaatg

SEQ ID NO: 6044163 - DNA, 25 bp, Homo sapien
gtttaacacacgtctcatatcccca

SEQ ID NO: 6044164 - DNA, 25 bp, Homo sapien
atgcaccaagacgttggctatccga

SEQ ID NO: 6044165 - DNA, 25 bp, Homo sapien
gttgccacccttggatatcgagtac

SEQ ID NO: 6044166 - DNA, 25 bp, Homo sapien
cctcgattaggtcgatcaacgcgag

SEQ ID NO: 6044167 - DNA, 25 bp, Homo sapien
gttggctatccgacgctcaatggcc

SEQ ID NO: 6044168 - DNA, 25 bp, Homo sapien
ataacgcaggtgtaagtttatgcgc

SEQ ID NO: 6044169 - DNA, 25 bp, Homo sapien
tgcacctactcaataacgcaggtgt

SEQ ID NO: 6044170 - DNA, 25 bp, Homo sapien
tactcaataacgcaggtgtaagttt

SEQ ID NO: 6044171 - DNA, 25 bp, Homo sapien
attaggagacaacttcagcttctca

SEQ ID NO: 6044172 - DNA, 25 bp, Homo sapien
atacacagaaccgcgtattcttggt

SEQ ID NO: 6044173 - DNA, 25 bp, Homo sapien
caaatgcactcttgtttcctcattt

SEQ ID NO: 6044174 - DNA, 25 bp, Homo sapien
caatgaccgcgctgccctgaatctg

SEQ ID NO: 6044175 - DNA, 25 bp, Homo sapien
acgcgagacccttggcactgcgtac

SEQ ID NO: 6044176 - DNA, 25 bp, Homo sapien
ttggggcaagggctgaaatctgaat

SEQ ID NO: 6044177 - DNA, 25 bp, Homo sapien
tggccaatacacagaaccgcgtatt

SEQ ID NO: 6044178 - DNA, 25 bp, Homo sapien
caagacgttggctatccgacgctca

SEQ ID NO: 6044179 - DNA, 25 bp, Homo sapien
ggccttctccgcattaggagacaac

SEQ ID NO: 6044180 - DNA, 25 bp, Homo sapien
gtcttccagtatcttcactatgccc

SEQ ID NO: 6044181 - DNA, 25 bp, Homo sapien
taacgtcgtcactgatctcatcctc

SEQ ID NO: 6044182 - DNA, 25 bp, Homo sapien
tcaatggcctcttggggcaagggct

SEQ ID NO: 6044183 - DNA, 25 bp, Homo sapien
aagtcacttggtctgggtgccccac

SEQ ID NO: 6044184 - DNA, 25 bp, Homo sapien
gtaccccaatcgtcctccagtatcg

SEQ ID NO: 6044185 - DNA, 25 bp, Homo sapien
tgcgattttgggtctgccaaaaaat

SEQ ID NO: 6044186 - DNA, 25 bp, Homo sapien
gataataaagtttatcaacaccttg

SEQ ID NO: 6044187 - DNA, 25 bp, Homo sapien
gcatatttaacccaggataagaaaa

SEQ ID NO: 6044188 - DNA, 25 bp, Homo sapien
aaaatctgcgattttgggtctgcca

SEQ ID NO: 6044189 - DNA, 25 bp, Homo sapien
agttacatctgttcaagattttata

SEQ ID NO: 6044190 - DNA, 25 bp, Homo sapien
caggaaaatcggtagaggtgccttt

SEQ ID NO: 6044191 - DNA, 25 bp, Homo sapien
gattgccgaccatccaaatatcgtt

SEQ ID NO: 6044192 - DNA, 25 bp, Homo sapien
tcaattagttacatctgttcaagat

SEQ ID NO: 6044193 - DNA, 25 bp, Homo sapien
cgaccatccaaatatcgttaaattg

SEQ ID NO: 6044194 - DNA, 25 bp, Homo sapien
gtgacaaacaagctagaaatgccat

SEQ ID NO: 6044195 - DNA, 25 bp, Homo sapien
gtacaagcatatttaacccaggata

SEQ ID NO: 6044196 - DNA, 25 bp, Homo sapien
attgcccgcgggatgctttatttac

SEQ ID NO: 6044197 - DNA, 25 bp, Homo sapien
gaataaatcgaacaacacgaggcgg

SEQ ID NO: 6044198 - DNA, 25 bp, Homo sapien
gaggcggatgctggtgaaagagtac

SEQ ID NO: 6044199 - DNA, 25 bp, Homo sapien
aatcggtagaggtgcctttgggact

SEQ ID NO: 6044200 - DNA, 25 bp, Homo sapien
cagattctgaggattgccgaccatc

SEQ ID NO: 6044201 - DNA, 25 bp, Homo sapien
aaaccatccaatgttcttgtagacc

SEQ ID NO: 6044202 - DNA, 25 bp, Homo sapien
tgctcataccgagtacaagtccagg

SEQ ID NO: 6044203 - DNA, 25 bp, Homo sapien
taaaaaagtccctgctcataccgag

SEQ ID NO: 6044204 - DNA, 25 bp, Homo sapien
ttggaacataaccagccttcaatta

SEQ ID NO: 6044205 - DNA, 25 bp, Homo sapien
tatcgttaaattgcagtatttcttt

SEQ ID NO: 6044206 - DNA, 25 bp, Homo sapien
tctttactcatttgtccccgcaaga

SEQ ID NO: 6044207 - DNA, 25 bp, Homo sapien
ccgcaagataataaagtttatcaac

SEQ ID NO: 6044208 - DNA, 25 bp, Homo sapien
cgatgtaacctcgaataaatcgaac

SEQ ID NO: 6044209 - DNA, 25 bp, Homo sapien
ggtagaggtgcctttgggactgttg

SEQ ID NO: 6044210 - DNA, 25 bp, Homo sapien
aacaagctagaaatgccattaaaac

SEQ ID NO: 6044211 - DNA, 25 bp, Homo sapien
ctacaaatcgagattaatcgttatg

SEQ ID NO: 6044212 - DNA, 25 bp, Homo sapien
atgccattaaaacatatcaggctat

SEQ ID NO: 6044213 - DNA, 25 bp, Homo sapien
gatatcaaaccatccaatgttcttg

SEQ ID NO: 6044214 - DNA, 25 bp, Homo sapien
catcgtgatatcaaaccatccaatg

SEQ ID NO: 6044215 - DNA, 25 bp, Homo sapien
tttgggactgttgtacaagcatatt

SEQ ID NO: 6044216 - DNA, 25 bp, Homo sapien
tacacttatcagattgcccgcggga

SEQ ID NO: 6044217 - DNA, 25 bp, Homo sapien
tatcagattgcccgcgggatgcttt

SEQ ID NO: 6044218 - DNA, 25 bp, Homo sapien
caccttgccatggaatgcttaccag

SEQ ID NO: 6044219 - DNA, 25 bp, Homo sapien
caacacgaggcggatgctggtgaaa

SEQ ID NO: 6044220 - DNA, 25 bp, Homo sapien
aaagtttatcaacaccttgccatgg

SEQ ID NO: 6044221 - DNA, 25 bp, Homo sapien
gaattacagattctgaggattgccg

SEQ ID NO: 6044222 - DNA, 25 bp, Homo sapien
tgcagacgatgtaacctcgaataaa

SEQ ID NO: 6044223 - DNA, 25 bp, Homo sapien
atctgttcaagattttatagagcgc

SEQ ID NO: 6044224 - DNA, 25 bp, Homo sapien
tgcaattaaaaaagtccctgctcat

SEQ ID NO: 6044225 - DNA, 25 bp, Homo sapien
gtttgtcatcgtgatatcaaaccat

SEQ ID NO: 6044226 - DNA, 25 bp, Homo sapien
cacggtcttggcgtttgtcatcgtg

SEQ ID NO: 6044227 - DNA, 25 bp, Homo sapien
ctgaggattgccgaccatccaaata

SEQ ID NO: 6044228 - DNA, 25 bp, Homo sapien
tgtccccgcaagataataaagttta

SEQ ID NO: 6044229 - DNA, 25 bp, Homo sapien
gccatggaatgcttaccagaaactc

SEQ ID NO: 6044230 - DNA, 25 bp, Homo sapien
taccgagtacaagtccagggaatta

SEQ ID NO: 6044231 - DNA, 25 bp, Homo sapien
agagtacaggaaaatcggtagaggt

SEQ ID NO: 6044232 - DNA, 25 bp, Homo sapien
aaggggatctgaattcattgcagac

SEQ ID NO: 6044233 - DNA, 25 bp, Homo sapien
cgcgggatgctttatttacacggtc

SEQ ID NO: 6044234 - DNA, 25 bp, Homo sapien
atctgaattcattgcagacgatgta

SEQ ID NO: 6044235 - DNA, 25 bp, Homo sapien
gatgctggtgaaagagtacaggaaa

SEQ ID NO: 6044236 - DNA, 25 bp, Homo sapien
attcattgcagacgatgtaacctcg

SEQ ID NO: 6044237 - DNA, 25 bp, Homo sapien
cttggcgtttgtcatcgtgatatca

SEQ ID NO: 6044238 - DNA, 25 bp, Homo sapien
cataaccagccttcaattagttaca

SEQ ID NO: 6044239 - DNA, 25 bp, Homo sapien
cgttatgtgacaaacaagctagaaa

SEQ ID NO: 6044240 - DNA, 25 bp, Homo sapien
taaattgcagtatttctttactcat

SEQ ID NO: 6044241 - DNA, 25 bp, Homo sapien
attaatcgttatgtgacaaacaagc

SEQ ID NO: 6044242 - DNA, 25 bp, Homo sapien
actgttgtacaagcatatttaaccc

SEQ ID NO: 6044243 - DNA, 25 bp, Homo sapien
atcgagattaatcgttatgtgacaa

SEQ ID NO: 6044244 - DNA, 25 bp, Homo sapien
tacaagtccagggaattacagattc

SEQ ID NO: 6044245 - DNA, 25 bp, Homo sapien
tccaaatatcgttaaattgcagtat

SEQ ID NO: 6044246 - DNA, 25 bp, Homo sapien
cagccttcaattagttacatctgtt

SEQ ID NO: 6044247 - DNA, 25 bp, Homo sapien
ctagaaatgccattaaaacatatca

SEQ ID NO: 6044248 - DNA, 25 bp, Homo sapien
gaaactctacaaatcgagattaatc

SEQ ID NO: 6044249 - DNA, 25 bp, Homo sapien
ggtgcctttgggactgttgtacaag

SEQ ID NO: 6044250 - DNA, 25 bp, Homo sapien
agtccctgctcataccgagtacaag

SEQ ID NO: 6044251 - DNA, 25 bp, Homo sapien
cagtatttctttactcatttgtccc

SEQ ID NO: 6044252 - DNA, 25 bp, Homo sapien
tcaagattttatagagcgcctgaat

SEQ ID NO: 6044253 - DNA, 25 bp, Homo sapien
catatcaggctatacacttatcaga

SEQ ID NO: 6044254 - DNA, 25 bp, Homo sapien
aacctcgaataaatcgaacaacacg

SEQ ID NO: 6044255 - DNA, 25 bp, Homo sapien
caaaaaattggaacataaccagcct

SEQ ID NO: 6044256 - DNA, 25 bp, Homo sapien
aggctatacacttatcagattgccc

SEQ ID NO: 6044257 - DNA, 25 bp, Homo sapien
ttgggtctgccaaaaaattggaaca

SEQ ID NO: 6044258 - DNA, 25 bp, Homo sapien
gtcttgaaaatctgcgattttgggt

SEQ ID NO: 6044259 - DNA, 25 bp, Homo sapien
atcgaacaacacgaggcggatgctg

SEQ ID NO: 6044260 - DNA, 25 bp, Homo sapien
gaatgcttaccagaaactctacaaa

SEQ ID NO: 6044261 - DNA, 25 bp, Homo sapien
atgctttatttacacggtcttggcg

SEQ ID NO: 6044262 - DNA, 25 bp, Homo sapien
tccaatgttcttgtagacccggaaa

SEQ ID NO: 6044263 - DNA, 25 bp, Homo sapien
tggtgaaagagtacaggaaaatcgg

SEQ ID NO: 6044264 - DNA, 25 bp, Homo sapien
tatcaacaccttgccatggaatgct

SEQ ID NO: 6044265 - DNA, 25 bp, Homo sapien
tatttacacggtcttggcgtttgtc

SEQ ID NO: 6044266 - DNA, 25 bp, Homo sapien
ttaccagaaactctacaaatcgaga

SEQ ID NO: 6044267 - DNA, 25 bp, Homo sapien
accggtgtcttgaaaatctgcgatt

SEQ ID NO: 6044268 - DNA, 25 bp, Homo sapien
ctgcaaaggggatctgaattcattg

SEQ ID NO: 6044269 - DNA, 25 bp, Homo sapien
gtctgccaaaaaattggaacataac

SEQ ID NO: 6044270 - DNA, 25 bp, Homo sapien
ctcatttgtccccgcaagataataa

SEQ ID NO: 6044271 - DNA, 25 bp, Homo sapien
cggaaaccggtgtcttgaaaatctg

SEQ ID NO: 6044272 - DNA, 25 bp, Homo sapien
tccagggaattacagattctgagga

SEQ ID NO: 6044273 - DNA, 25 bp, Homo sapien
ttaaaacatatcaggctatacactt

SEQ ID NO: 6044274 - DNA, 25 bp, Homo sapien
agtgaaacctcttggtaagaaagtg

SEQ ID NO: 6044275 - DNA, 25 bp, Homo sapien
ttgggtacaaccaatgatcaattca

SEQ ID NO: 6044276 - DNA, 25 bp, Homo sapien
gaaagtgtcatcattccttaattca

SEQ ID NO: 6044277 - DNA, 25 bp, Homo sapien
agaaaatgaatcttttatcgggagg

SEQ ID NO: 6044278 - DNA, 25 bp, Homo sapien
actaattgaaggctggttatgttcc

SEQ ID NO: 6044279 - DNA, 25 bp, Homo sapien
ggctttgccgataagcatctcgccc

SEQ ID NO: 6044280 - DNA, 25 bp, Homo sapien
cgataccatctggaccggaatggcc

SEQ ID NO: 6044281 - DNA, 25 bp, Homo sapien
ctcgcccatgacacaaccaagcccc

SEQ ID NO: 6044282 - DNA, 25 bp, Homo sapien
ctgtagaaggggttcttgaccttga

SEQ ID NO: 6044283 - DNA, 25 bp, Homo sapien
ggttcgtagaccaatattttcatca

SEQ ID NO: 6044284 - DNA, 25 bp, Homo sapien
tgaacagatgtaactaattgaaggc

SEQ ID NO: 6044285 - DNA, 25 bp, Homo sapien
cagtggtttggaaaatagagggcca

SEQ ID NO: 6044286 - DNA, 25 bp, Homo sapien
atcattaaaatcaaacaaatttggt

SEQ ID NO: 6044287 - DNA, 25 bp, Homo sapien
aagcccccatatatcgatctgggtg

SEQ ID NO: 6044288 - DNA, 25 bp, Homo sapien
tcgaaaagaaaatgaatcttttatc

SEQ ID NO: 6044289 - DNA, 25 bp, Homo sapien
aaagatcgataccatctggaccgga

SEQ ID NO: 6044290 - DNA, 25 bp, Homo sapien
cagaatttgtaactcaaaatcatta

SEQ ID NO: 6044291 - DNA, 25 bp, Homo sapien
atattttcatcaaaagatcgatacc

SEQ ID NO: 6044292 - DNA, 25 bp, Homo sapien
tgaatcttttatcgggaggacctaa

SEQ ID NO: 6044293 - DNA, 25 bp, Homo sapien
aaatcttgaacagatgtaactaatt

SEQ ID NO: 6044294 - DNA, 25 bp, Homo sapien
tatcgggaggacctaacaatttagc

SEQ ID NO: 6044295 - DNA, 25 bp, Homo sapien
tgggcaaggattcttcttggagaca

SEQ ID NO: 6044296 - DNA, 25 bp, Homo sapien
tccgggtctacaagaacattggatg

SEQ ID NO: 6044297 - DNA, 25 bp, Homo sapien
tgttccaattttttggcagacccaa

SEQ ID NO: 6044298 - DNA, 25 bp, Homo sapien
tggttcagtgaaacctcttggtaag

SEQ ID NO: 6044299 - DNA, 25 bp, Homo sapien
tcaaacctctgttgcgaagagcccg

SEQ ID NO: 6044300 - DNA, 25 bp, Homo sapien
acctcttggtaagaaagtgtcatca

SEQ ID NO: 6044301 - DNA, 25 bp, Homo sapien
tcaaacaaatttggtagcttgattg

SEQ ID NO: 6044302 - DNA, 25 bp, Homo sapien
cttgattggttcagtgaaacctctt

SEQ ID NO: 6044303 - DNA, 25 bp, Homo sapien
tttggaaaatagagggccatcgtag

SEQ ID NO: 6044304 - DNA, 25 bp, Homo sapien
cttcttggagacagtctttgttgtg

SEQ ID NO: 6044305 - DNA, 25 bp, Homo sapien
ctaacaatttagcaatttcccttag

SEQ ID NO: 6044306 - DNA, 25 bp, Homo sapien
caaatttggtagcttgattggttca

SEQ ID NO: 6044307 - DNA, 25 bp, Homo sapien
ttccttaattcattaaagaactgat

SEQ ID NO: 6044308 - DNA, 25 bp, Homo sapien
accttgaaatatggctttgccgata

SEQ ID NO: 6044309 - DNA, 25 bp, Homo sapien
aaccaagcccccatatatcgatctg

SEQ ID NO: 6044310 - DNA, 25 bp, Homo sapien
gacccaaaatcgcagattttcaaga

SEQ ID NO: 6044311 - DNA, 25 bp, Homo sapien
tgttgtggttcgtagaccaatattt

SEQ ID NO: 6044312 - DNA, 25 bp, Homo sapien
tcatcaaaagatcgataccatctgg

SEQ ID NO: 6044313 - DNA, 25 bp, Homo sapien
aaaatcaaacaaatttggtagcttg

SEQ ID NO: 6044314 - DNA, 25 bp, Homo sapien
aaatcgcagattttcaagacaccgg

SEQ ID NO: 6044315 - DNA, 25 bp, Homo sapien
caattcaggcgctctataaaatctt

SEQ ID NO: 6044316 - DNA, 25 bp, Homo sapien
tggttatgttccaattttttggcag

SEQ ID NO: 6044317 - DNA, 25 bp, Homo sapien
aactgatgggcaaggattcttcttg

SEQ ID NO: 6044318 - DNA, 25 bp, Homo sapien
ttaaagaactgatgggcaaggattc

SEQ ID NO: 6044319 - DNA, 25 bp, Homo sapien
tggtaagaaagtgtcatcattcctt

SEQ ID NO: 6044320 - DNA, 25 bp, Homo sapien
aattcattaaagaactgatgggcaa

SEQ ID NO: 6044321 - DNA, 25 bp, Homo sapien
tggtagcttgattggttcagtgaaa

SEQ ID NO: 6044322 - DNA, 25 bp, Homo sapien
cagattttcaagacaccggtttccg

SEQ ID NO: 6044323 - DNA, 25 bp, Homo sapien
ttgtaactcaaaatcattaaaatca

SEQ ID NO: 6044324 - DNA, 25 bp, Homo sapien
ggtatattgggtacaaccaatgatc

SEQ ID NO: 6044325 - DNA, 25 bp, Homo sapien
aggattcttcttggagacagtcttt

SEQ ID NO: 6044326 - DNA, 25 bp, Homo sapien
ccggattcgaaaagaaaatgaatct

SEQ ID NO: 6044327 - DNA, 25 bp, Homo sapien
agtctttgttgtggttcgtagacca

SEQ ID NO: 6044328 - DNA, 25 bp, Homo sapien
ggagacagtctttgttgtggttcgt

SEQ ID NO: 6044329 - DNA, 25 bp, Homo sapien
tgcgaagagcccgagaacagtggtt

SEQ ID NO: 6044330 - DNA, 25 bp, Homo sapien
catctggaccggaatggccaaaata

SEQ ID NO: 6044331 - DNA, 25 bp, Homo sapien
aaggggttcttgaccttgaaatatg

SEQ ID NO: 6044332 - DNA, 25 bp, Homo sapien
ctctgttgcgaagagcccgagaaca

SEQ ID NO: 6044333 - DNA, 25 bp, Homo sapien
attttttggcagacccaaaatcgca

SEQ ID NO: 6044334 - DNA, 25 bp, Homo sapien
ttggcagacccaaaatcgcagattt

SEQ ID NO: 6044335 - DNA, 25 bp, Homo sapien
ccaaaatacttctcaaacctctgtt

SEQ ID NO: 6044336 - DNA, 25 bp, Homo sapien
gtcatcattccttaattcattaaag

SEQ ID NO: 6044337 - DNA, 25 bp, Homo sapien
gatgtaactaattgaaggctggtta

SEQ ID NO: 6044338 - DNA, 25 bp, Homo sapien
aaatagagggccatcgtaggccgga

SEQ ID NO: 6044339 - DNA, 25 bp, Homo sapien
tgaaggctggttatgttccaatttt

SEQ ID NO: 6044340 - DNA, 25 bp, Homo sapien
atgacacaaccaagcccccatatat

SEQ ID NO: 6044341 - DNA, 25 bp, Homo sapien
ctgggtggtatattgggtacaacca

SEQ ID NO: 6044342 - DNA, 25 bp, Homo sapien
taggccggattcgaaaagaaaatga

SEQ ID NO: 6044343 - DNA, 25 bp, Homo sapien
gcaatttcccttagctgtagaaggg

SEQ ID NO: 6044344 - DNA, 25 bp, Homo sapien
aatttagcaatttcccttagctgta

SEQ ID NO: 6044345 - DNA, 25 bp, Homo sapien
catcgtaggccggattcgaaaagaa

SEQ ID NO: 6044346 - DNA, 25 bp, Homo sapien
gaccggaatggccaaaatacttctc

SEQ ID NO: 6044347 - DNA, 25 bp, Homo sapien
ccatatatcgatctgggtggtatat

SEQ ID NO: 6044348 - DNA, 25 bp, Homo sapien
acaaccaatgatcaattcaggcgct

SEQ ID NO: 6044349 - DNA, 25 bp, Homo sapien
agcaaattcacccagaatttgtaac

SEQ ID NO: 6044350 - DNA, 25 bp, Homo sapien
agggccatcgtaggccggattcgaa

SEQ ID NO: 6044351 - DNA, 25 bp, Homo sapien
agagcccgagaacagtggtttggaa

SEQ ID NO: 6044352 - DNA, 25 bp, Homo sapien
agaccaatattttcatcaaaagatc

SEQ ID NO: 6044353 - DNA, 25 bp, Homo sapien
cgagaacagtggtttggaaaataga

SEQ ID NO: 6044354 - DNA, 25 bp, Homo sapien
gccgataagcatctcgcccatgaca

SEQ ID NO: 6044355 - DNA, 25 bp, Homo sapien
aaatatggctttgccgataagcatc

SEQ ID NO: 6044356 - DNA, 25 bp, Homo sapien
aagcatctcgcccatgacacaacca

SEQ ID NO: 6044357 - DNA, 25 bp, Homo sapien
gaggacctaacaatttagcaatttc

SEQ ID NO: 6044358 - DNA, 25 bp, Homo sapien
atcgatctgggtggtatattgggta

SEQ ID NO: 6044359 - DNA, 25 bp, Homo sapien
gaatggccaaaatacttctcaaacc

SEQ ID NO: 6044360 - DNA, 25 bp, Homo sapien
tctataaaatcttgaacagatgtaa

SEQ ID NO: 6044361 - DNA, 25 bp, Homo sapien
ccttagctgtagaaggggttcttga

SEQ ID NO: 6044362 - DNA, 25 bp, Homo sapien
ttcacccagaatttgtaactcaaaa

SEQ ID NO: 6044363 - DNA, 25 bp, Homo sapien
ctcaaaatcattaaaatcaaacaaa

SEQ ID NO: 6044364 - DNA, 25 bp, Homo sapien
ttcttgaccttgaaatatggctttg

SEQ ID NO: 6044365 - DNA, 25 bp, Homo sapien
aatgatcaattcaggcgctctataa

SEQ ID NO: 6044366 - DNA, 25 bp, Homo sapien
tacttctcaaacctctgttgcgaag

SEQ ID NO: 6044367 - DNA, 25 bp, Homo sapien
aggcgctctataaaatcttgaacag

SEQ ID NO: 6044368 - DNA, 25 bp, Homo sapien
ggattctctccgcaaattgcaaact

SEQ ID NO: 6044369 - DNA, 25 bp, Homo sapien
atgaagtaggtggtggtaaaagtgc

SEQ ID NO: 6044370 - DNA, 25 bp, Homo sapien
tattttagttcagcagggcaaggtc

SEQ ID NO: 6044371 - DNA, 25 bp, Homo sapien
gttatggatagtttgcatattttag

SEQ ID NO: 6044372 - DNA, 25 bp, Homo sapien
acatctcatggtaaaactcctttta

SEQ ID NO: 6044373 - DNA, 25 bp, Homo sapien
aattactacgctacatctcatggta

SEQ ID NO: 6044374 - DNA, 25 bp, Homo sapien
atcaagaaaactgcgtgaccagatt

SEQ ID NO: 6044375 - DNA, 25 bp, Homo sapien
ctggtgggattatatgagttcaatc

SEQ ID NO: 6044376 - DNA, 25 bp, Homo sapien
gattggattgatatactttacattc

SEQ ID NO: 6044377 - DNA, 25 bp, Homo sapien
gtttctgcggcaaattactacgcta

SEQ ID NO: 6044378 - DNA, 25 bp, Homo sapien
gaacttcttgatgctttttatgaag

SEQ ID NO: 6044379 - DNA, 25 bp, Homo sapien
gccggcataagggtttcaccgctaa

SEQ ID NO: 6044380 - DNA, 25 bp, Homo sapien
tctttctaaaactgccggcataagg

SEQ ID NO: 6044381 - DNA, 25 bp, Homo sapien
gtgagtgtgagggattctctccgca

SEQ ID NO: 6044382 - DNA, 25 bp, Homo sapien
tatgaagctggaggtaattgtattg

SEQ ID NO: 6044383 - DNA, 25 bp, Homo sapien
gctttttatgaagctggaggtaatt

SEQ ID NO: 6044384 - DNA, 25 bp, Homo sapien
accgctaattctgggaggagcttca

SEQ ID NO: 6044385 - DNA, 25 bp, Homo sapien
tgaatggatggcatcaagaaaactg

SEQ ID NO: 6044386 - DNA, 25 bp, Homo sapien
cgacgcatggtcaggctttatgggc

SEQ ID NO: 6044387 - DNA, 25 bp, Homo sapien
gctctatgaataaggaacaggcctt

SEQ ID NO: 6044388 - DNA, 25 bp, Homo sapien
cacaagcgtagtttacatgtgagtg

SEQ ID NO: 6044389 - DNA, 25 bp, Homo sapien
cttgatgctttttatgaagctggag

SEQ ID NO: 6044390 - DNA, 25 bp, Homo sapien
gctggaggtaattgtattgatactg

SEQ ID NO: 6044391 - DNA, 25 bp, Homo sapien
catggtaaaactccttttagcgtct

SEQ ID NO: 6044392 - DNA, 25 bp, Homo sapien
tgtaattgccaccaagtttaccgga

SEQ ID NO: 6044393 - DNA, 25 bp, Homo sapien
tgcaaacagttaccaaaatgaagag

SEQ ID NO: 6044394 - DNA, 25 bp, Homo sapien
agttcagcagggcaaggtcctatat

SEQ ID NO: 6044395 - DNA, 25 bp, Homo sapien
tgggttgtttctgcggcaaattact

SEQ ID NO: 6044396 - DNA, 25 bp, Homo sapien
cacctaccgaattgggacgtctcag

SEQ ID NO: 6044397 - DNA, 25 bp, Homo sapien
tttgcatattttagttcagcagggc

SEQ ID NO: 6044398 - DNA, 25 bp, Homo sapien
ggtttcaccgctaattctgggagga

SEQ ID NO: 6044399 - DNA, 25 bp, Homo sapien
atggtcaggctttatgggctctatg

SEQ ID NO: 6044400 - DNA, 25 bp, Homo sapien
tactttacattcactggtgggatta

SEQ ID NO: 6044401 - DNA, 25 bp, Homo sapien
gtaatcacaagcgtagtttacatgt

SEQ ID NO: 6044402 - DNA, 25 bp, Homo sapien
ctcagggttctttctaaaactgccg

SEQ ID NO: 6044403 - DNA, 25 bp, Homo sapien
taggtggtggtaaaagtgccaacta

SEQ ID NO: 6044404 - DNA, 25 bp, Homo sapien
gcgtgaccagattgtaattgccacc

SEQ ID NO: 6044405 - DNA, 25 bp, Homo sapien
gcttcaatcggcgacgcatggtcag

SEQ ID NO: 6044406 - DNA, 25 bp, Homo sapien
tgtgagggattctctccgcaaattg

SEQ ID NO: 6044407 - DNA, 25 bp, Homo sapien
tgccaccaagtttaccggagattat

SEQ ID NO: 6044408 - DNA, 25 bp, Homo sapien
ttataagaagtatgaagtaggtggt

SEQ ID NO: 6044409 - DNA, 25 bp, Homo sapien
gatggcatcaagaaaactgcgtgac

SEQ ID NO: 6044410 - DNA, 25 bp, Homo sapien
ccttttagcgtctatcaaggtaaat

SEQ ID NO: 6044411 - DNA, 25 bp, Homo sapien
aatcggcgacgcatggtcaggcttt

SEQ ID NO: 6044412 - DNA, 25 bp, Homo sapien
tcagagatttggataggtgaatgga

SEQ ID NO: 6044413 - DNA, 25 bp, Homo sapien
agtatctgatacacctgcttgggtt

SEQ ID NO: 6044414 - DNA, 25 bp, Homo sapien
cctatatttaggagtatctgataca

SEQ ID NO: 6044415 - DNA, 25 bp, Homo sapien
gcagggcaaggtcctatatttagga

SEQ ID NO: 6044416 - DNA, 25 bp, Homo sapien
actgtggtaatcacaagcgtagttt

SEQ ID NO: 6044417 - DNA, 25 bp, Homo sapien
ggcctttgaacttcttgatgctttt

SEQ ID NO: 6044418 - DNA, 25 bp, Homo sapien
tgatactgcaaacagttaccaaaat

SEQ ID NO: 6044419 - DNA, 25 bp, Homo sapien
ggaggagcttcaatcggcgacgcat

SEQ ID NO: 6044420 - DNA, 25 bp, Homo sapien
aaaactccttttagcgtctatcaag

SEQ ID NO: 6044421 - DNA, 25 bp, Homo sapien
tttaccggagattataagaagtatg

SEQ ID NO: 6044422 - DNA, 25 bp, Homo sapien
cataagggtttcaccgctaattctg

SEQ ID NO: 6044423 - DNA, 25 bp, Homo sapien
atttggataggtgaatggatggcat

SEQ ID NO: 6044424 - DNA, 25 bp, Homo sapien
ccaaaatgaagagtcagagatttgg

SEQ ID NO: 6044425 - DNA, 25 bp, Homo sapien
cgtagtttacatgtgagtgtgaggg

SEQ ID NO: 6044426 - DNA, 25 bp, Homo sapien
acattcactggtgggattatatgag

SEQ ID NO: 6044427 - DNA, 25 bp, Homo sapien
cggagattataagaagtatgaagta

SEQ ID NO: 6044428 - DNA, 25 bp, Homo sapien
gaagaagttatggatagtttgcata

SEQ ID NO: 6044429 - DNA, 25 bp, Homo sapien
ggattatatgagttcaatcgaagaa

SEQ ID NO: 6044430 - DNA, 25 bp, Homo sapien
ttcaatcgaagaagttatggatagt

SEQ ID NO: 6044431 - DNA, 25 bp, Homo sapien
ttacatgtgagtgtgagggattctc

SEQ ID NO: 6044432 - DNA, 25 bp, Homo sapien
taaaagtgccaactactgtggtaat

SEQ ID NO: 6044433 - DNA, 25 bp, Homo sapien
tgccaactactgtggtaatcacaag

SEQ ID NO: 6044434 - DNA, 25 bp, Homo sapien
ccagattgtaattgccaccaagttt

SEQ ID NO: 6044435 - DNA, 25 bp, Homo sapien
caagtttaccggagattataagaag

SEQ ID NO: 6044436 - DNA, 25 bp, Homo sapien
tctccgcaaattgcaaactgattgg

SEQ ID NO: 6044437 - DNA, 25 bp, Homo sapien
ttatgggctctatgaataaggaaca

SEQ ID NO: 6044438 - DNA, 25 bp, Homo sapien
tgaagagtcagagatttggataggt

SEQ ID NO: 6044439 - DNA, 25 bp, Homo sapien
ggtaattgtattgatactgcaaaca

SEQ ID NO: 6044440 - DNA, 25 bp, Homo sapien
tacgctacatctcatggtaaaactc

SEQ ID NO: 6044441 - DNA, 25 bp, Homo sapien
caaggtcctatatttaggagtatct

SEQ ID NO: 6044442 - DNA, 25 bp, Homo sapien
tgtattgatactgcaaacagttacc

SEQ ID NO: 6044443 - DNA, 25 bp, Homo sapien
aaattgcaaactgattggattgata

SEQ ID NO: 6044444 - DNA, 25 bp, Homo sapien
aggctttatgggctctatgaataag

SEQ ID NO: 6044445 - DNA, 25 bp, Homo sapien
ggaacaggcctttgaacttcttgat

SEQ ID NO: 6044446 - DNA, 25 bp, Homo sapien
tggtggtaaaagtgccaactactgt

SEQ ID NO: 6044447 - DNA, 25 bp, Homo sapien
tttaggagtatctgatacacctgct

SEQ ID NO: 6044448 - DNA, 25 bp, Homo sapien
aaaactgcgtgaccagattgtaatt

SEQ ID NO: 6044449 - DNA, 25 bp, Homo sapien
cagttaccaaaatgaagagtcagag

SEQ ID NO: 6044450 - DNA, 25 bp, Homo sapien
gcggcaaattactacgctacatctc

SEQ ID NO: 6044451 - DNA, 25 bp, Homo sapien
tatgagttcaatcgaagaagttatg

SEQ ID NO: 6044452 - DNA, 25 bp, Homo sapien
gataggtgaatggatggcatcaaga

SEQ ID NO: 6044453 - DNA, 25 bp, Homo sapien
tgggacgtctcagggttctttctaa

SEQ ID NO: 6044454 - DNA, 25 bp, Homo sapien
ccgaattgggacgtctcagggttct

SEQ ID NO: 6044455 - DNA, 25 bp, Homo sapien
ttgatatactttacattcactggtg

SEQ ID NO: 6044456 - DNA, 25 bp, Homo sapien
taaaactgccggcataagggtttca

SEQ ID NO: 6044457 - DNA, 25 bp, Homo sapien
tgatacacctgcttgggttgtttct

SEQ ID NO: 6044458 - DNA, 25 bp, Homo sapien
attctgggaggagcttcaatcggcg

SEQ ID NO: 6044459 - DNA, 25 bp, Homo sapien
acctgcttgggttgtttctgcggca

SEQ ID NO: 6044460 - DNA, 25 bp, Homo sapien
gaagtatgaagtaggtggtggtaaa

SEQ ID NO: 6044461 - DNA, 25 bp, Homo sapien
caaactgattggattgatatacttt

SEQ ID NO: 6044462 - DNA, 25 bp, Homo sapien
ggatagtttgcatattttagttcag

SEQ ID NO: 6044463 - DNA, 25 bp, Homo sapien
tgaataaggaacaggcctttgaact

SEQ ID NO: 6044464 - DNA, 25 bp, Homo sapien
caacccaagcaggtgtatcagatac

SEQ ID NO: 6044465 - DNA, 25 bp, Homo sapien
tcatctcctattaaacttttgggaa

SEQ ID NO: 6044466 - DNA, 25 bp, Homo sapien
ctcccatgacatcccatggggctag

SEQ ID NO: 6044467 - DNA, 25 bp, Homo sapien
agatgtagcgtagtaatttgccgca

SEQ ID NO: 6044468 - DNA, 25 bp, Homo sapien
tccattcttcttccgttcttccatt

SEQ ID NO: 6044469 - DNA, 25 bp, Homo sapien
ctcaaagcctcaatgttctgcttga

SEQ ID NO: 6044470 - DNA, 25 bp, Homo sapien
gaccctctccattcttcttccgttc

SEQ ID NO: 6044471 - DNA, 25 bp, Homo sapien
tccaattctgtttgttcggggccac

SEQ ID NO: 6044472 - DNA, 25 bp, Homo sapien
gggaaagccaacatcaaaaggaaca

SEQ ID NO: 6044473 - DNA, 25 bp, Homo sapien
gaacataggcaatagcgatagcagt

SEQ ID NO: 6044474 - DNA, 25 bp, Homo sapien
ttactctgaaatcttccacctccca

SEQ ID NO: 6044475 - DNA, 25 bp, Homo sapien
caatacattccatttaccttgatag

SEQ ID NO: 6044476 - DNA, 25 bp, Homo sapien
cctccaatcaatgggaaaacatttt

SEQ ID NO: 6044477 - DNA, 25 bp, Homo sapien
tagcgatagcagtaacagactctgt

SEQ ID NO: 6044478 - DNA, 25 bp, Homo sapien
aaaaggagttttaccatgagatgta

SEQ ID NO: 6044479 - DNA, 25 bp, Homo sapien
tccattgcttttttactctgaaatc

SEQ ID NO: 6044480 - DNA, 25 bp, Homo sapien
aatgcctagccattggaataatatc

SEQ ID NO: 6044481 - DNA, 25 bp, Homo sapien
tgattttaacctccaattctgtttg

SEQ ID NO: 6044482 - DNA, 25 bp, Homo sapien
tagagcgaacataggcaatagcgat

SEQ ID NO: 6044483 - DNA, 25 bp, Homo sapien
agatgttcaattttccttcctccaa

SEQ ID NO: 6044484 - DNA, 25 bp, Homo sapien
cttgatagacgctaaaaggagtttt

SEQ ID NO: 6044485 - DNA, 25 bp, Homo sapien
ttttagtcaatgcttcgctgatttt

SEQ ID NO: 6044486 - DNA, 25 bp, Homo sapien
ttggaataatatcacgctcaaagtc

SEQ ID NO: 6044487 - DNA, 25 bp, Homo sapien
cccatggggctagagccataccaaa

SEQ ID NO: 6044488 - DNA, 25 bp, Homo sapien
aaagtccctgttcaatacattccat

SEQ ID NO: 6044489 - DNA, 25 bp, Homo sapien
tgttccggtgttaatttaatactca

SEQ ID NO: 6044490 - DNA, 25 bp, Homo sapien
cattccatttaccttgatagacgct

SEQ ID NO: 6044491 - DNA, 25 bp, Homo sapien
ttaatactcaaagcctcaatgttct

SEQ ID NO: 6044492 - DNA, 25 bp, Homo sapien
cttcgctgattttaacctccaattc

SEQ ID NO: 6044493 - DNA, 25 bp, Homo sapien
caatactttccaggtattctatttg

SEQ ID NO: 6044494 - DNA, 25 bp, Homo sapien
tcaatgcttcgctgattttaacctc

SEQ ID NO: 6044495 - DNA, 25 bp, Homo sapien
atgacatcccatggggctagagcca

SEQ ID NO: 6044496 - DNA, 25 bp, Homo sapien
gtgaaagcttcttggttaccgctgg

SEQ ID NO: 6044497 - DNA, 25 bp, Homo sapien
gggctagagccataccaaaatgcct

SEQ ID NO: 6044498 - DNA, 25 bp, Homo sapien
cttttgggaaagccaacatcaaaag

SEQ ID NO: 6044499 - DNA, 25 bp, Homo sapien
taacagactctgttccatgttcctc

SEQ ID NO: 6044500 - DNA, 25 bp, Homo sapien
tagccattggaataatatcacgctc

SEQ ID NO: 6044501 - DNA, 25 bp, Homo sapien
ttccttcctccaatcaatgggaaaa

SEQ ID NO: 6044502 - DNA, 25 bp, Homo sapien
catttttcgctttagagcgaacata

SEQ ID NO: 6044503 - DNA, 25 bp, Homo sapien
tcgctttagagcgaacataggcaat

SEQ ID NO: 6044504 - DNA, 25 bp, Homo sapien
tacgcagaccctctccattcttctt

SEQ ID NO: 6044505 - DNA, 25 bp, Homo sapien
actctgttccatgttcctcagcaat

SEQ ID NO: 6044506 - DNA, 25 bp, Homo sapien
gggccacccacaaaagtacgcagac

SEQ ID NO: 6044507 - DNA, 25 bp, Homo sapien
cagatactcctaaatataggacctt

SEQ ID NO: 6044508 - DNA, 25 bp, Homo sapien
gagccataccaaaatgcctagccat

SEQ ID NO: 6044509 - DNA, 25 bp, Homo sapien
tgccgcagaaacaacccaagcaggt

SEQ ID NO: 6044510 - DNA, 25 bp, Homo sapien
cagaaacaacccaagcaggtgtatc

SEQ ID NO: 6044511 - DNA, 25 bp, Homo sapien
ctttccaggtattctatttgttccg

SEQ ID NO: 6044512 - DNA, 25 bp, Homo sapien
gtaatttgccgcagaaacaacccaa

SEQ ID NO: 6044513 - DNA, 25 bp, Homo sapien
agttttaccatgagatgtagcgtag

SEQ ID NO: 6044514 - DNA, 25 bp, Homo sapien
cgttcttccattgcttttttactct

SEQ ID NO: 6044515 - DNA, 25 bp, Homo sapien
caggtattctatttgttccggtgtt

SEQ ID NO: 6044516 - DNA, 25 bp, Homo sapien
aggaacaatactttccaggtattct

SEQ ID NO: 6044517 - DNA, 25 bp, Homo sapien
taaacttttgggaaagccaacatca

SEQ ID NO: 6044518 - DNA, 25 bp, Homo sapien
gcctcaatgttctgcttgagatgtt

SEQ ID NO: 6044519 - DNA, 25 bp, Homo sapien
cacgctcaaagtccctgttcaatac

SEQ ID NO: 6044520 - DNA, 25 bp, Homo sapien
gttaatttaatactcaaagcctcaa

SEQ ID NO: 6044521 - DNA, 25 bp, Homo sapien
tgcttgagatgttcaattttccttc

SEQ ID NO: 6044522 - DNA, 25 bp, Homo sapien
tgaggggtgaaagcttcttggttac

SEQ ID NO: 6044523 - DNA, 25 bp, Homo sapien
aagcaggtgtatcagatactcctaa

SEQ ID NO: 6044524 - DNA, 25 bp, Homo sapien
taccaaaatgcctagccattggaat

SEQ ID NO: 6044525 - DNA, 25 bp, Homo sapien
cttcttccgttcttccattgctttt

SEQ ID NO: 6044526 - DNA, 25 bp, Homo sapien
tagcagtaacagactctgttccatg

SEQ ID NO: 6044527 - DNA, 25 bp, Homo sapien
gttaccgctgggtcatctcctatta

SEQ ID NO: 6044528 - DNA, 25 bp, Homo sapien
gcttcttggttaccgctgggtcatc

SEQ ID NO: 6044529 - DNA, 25 bp, Homo sapien
atcaaaaggaacaatactttccagg

SEQ ID NO: 6044530 - DNA, 25 bp, Homo sapien
cacccacaaaagtacgcagaccctc

SEQ ID NO: 6044531 - DNA, 25 bp, Homo sapien
cagcaattttagtcaatgcttcgct

SEQ ID NO: 6044532 - DNA, 25 bp, Homo sapien
atcaatgggaaaacatttttcgctt

SEQ ID NO: 6044533 - DNA, 25 bp, Homo sapien
aggcaatagcgatagcagtaacaga

SEQ ID NO: 6044534 - DNA, 25 bp, Homo sapien
gttcctcagcaattttagtcaatgc

SEQ ID NO: 6044535 - DNA, 25 bp, Homo sapien
agcgtagtaatttgccgcagaaaca

SEQ ID NO: 6044536 - DNA, 25 bp, Homo sapien
taatatcacgctcaaagtccctgtt

SEQ ID NO: 6044537 - DNA, 25 bp, Homo sapien
atgttctgcttgagatgttcaattt

SEQ ID NO: 6044538 - DNA, 25 bp, Homo sapien
ttccatgttcctcagcaattttagt

SEQ ID NO: 6044539 - DNA, 25 bp, Homo sapien
ctcctaaatataggaccttgccctg

SEQ ID NO: 6044540 - DNA, 25 bp, Homo sapien
ttccacctcccatgacatcccatgg

SEQ ID NO: 6044541 - DNA, 25 bp, Homo sapien
ggaccttgccctgctgaactaaaat

SEQ ID NO: 6044542 - DNA, 25 bp, Homo sapien
aatataggaccttgccctgctgaac

SEQ ID NO: 6044543 - DNA, 25 bp, Homo sapien
atttaccttgatagacgctaaaagg

SEQ ID NO: 6044544 - DNA, 25 bp, Homo sapien
gaaaacatttttcgctttagagcga

SEQ ID NO: 6044545 - DNA, 25 bp, Homo sapien
cgatgtgaggggtgaaagcttcttg

SEQ ID NO: 6044546 - DNA, 25 bp, Homo sapien
tctgtttgttcggggccacccacaa

SEQ ID NO: 6044547 - DNA, 25 bp, Homo sapien
cctgttcaatacattccatttacct

SEQ ID NO: 6044548 - DNA, 25 bp, Homo sapien
caaaagtacgcagaccctctccatt

SEQ ID NO: 6044549 - DNA, 25 bp, Homo sapien
gccaacatcaaaaggaacaatactt

SEQ ID NO: 6044550 - DNA, 25 bp, Homo sapien
accatgagatgtagcgtagtaattt

SEQ ID NO: 6044551 - DNA, 25 bp, Homo sapien
tcaattttccttcctccaatcaatg

SEQ ID NO: 6044552 - DNA, 25 bp, Homo sapien
gctgggtcatctcctattaaacttt

SEQ ID NO: 6044553 - DNA, 25 bp, Homo sapien
tgaaatcttccacctcccatgacat

SEQ ID NO: 6044554 - DNA, 25 bp, Homo sapien
gtgtatcagatactcctaaatatag

SEQ ID NO: 6044555 - DNA, 25 bp, Homo sapien
gcttttttactctgaaatcttccac

SEQ ID NO: 6044556 - DNA, 25 bp, Homo sapien
gttttcagaacatatccaaaactag

SEQ ID NO: 6044557 - DNA, 25 bp, Homo sapien
ctccggcatgggctctgccctcttg

SEQ ID NO: 6044558 - DNA, 25 bp, Homo sapien
gaatcctctaaattgattttccaga

SEQ ID NO: 6044559 - DNA, 25 bp, Homo sapien
cgtcaaacgtctgtgtgccacgggc

SEQ ID NO: 6044560 - DNA, 25 bp, Homo sapien
ccggagacgctcgttttcagaacat

SEQ ID NO: 6044561 - DNA, 25 bp, Homo sapien
gtgtgccacgggcatcacaaatctt

SEQ ID NO: 6044562 - DNA, 25 bp, Homo sapien
aaacagagagcagcccatcacagat

SEQ ID NO: 6044563 - DNA, 25 bp, Homo sapien
gcccacgagactgatggcgctggcc

SEQ ID NO: 6044564 - DNA, 25 bp, Homo sapien
aaactagaatcctctaaattgattt

SEQ ID NO: 6044565 - DNA, 25 bp, Homo sapien
caggctgctttgaaagtgatcaacg

SEQ ID NO: 6044566 - DNA, 25 bp, Homo sapien
ggtgcagatctcgtctggtccccag

SEQ ID NO: 6044567 - DNA, 25 bp, Homo sapien
gaacgtgggtaaccctcacagcaaa

SEQ ID NO: 6044568 - DNA, 25 bp, Homo sapien
acagctcgtcaaacgtctgtgtgcc

SEQ ID NO: 6044569 - DNA, 25 bp, Homo sapien
gtcgactacgtcgtgccgtccaagg

SEQ ID NO: 6044570 - DNA, 25 bp, Homo sapien
aaaataagactcttggacaccaagc

SEQ ID NO: 6044571 - DNA, 25 bp, Homo sapien
gccacccaggctgctttgaaagtga

SEQ ID NO: 6044572 - DNA, 25 bp, Homo sapien
aaggaaaacactgcactccaaactg

SEQ ID NO: 6044573 - DNA, 25 bp, Homo sapien
aatgagaaacagagagcagcccatc

SEQ ID NO: 6044574 - DNA, 25 bp, Homo sapien
cttgcgcaccccagacacactgtgt

SEQ ID NO: 6044575 - DNA, 25 bp, Homo sapien
agccggcgaactgcccacgagactg

SEQ ID NO: 6044576 - DNA, 25 bp, Homo sapien
tgccccaaacacttctctatacact

SEQ ID NO: 6044577 - DNA, 25 bp, Homo sapien
tctcatcttgaaagaactggttaag

SEQ ID NO: 6044578 - DNA, 25 bp, Homo sapien
ttgattttccagatcgggtctgcat

SEQ ID NO: 6044579 - DNA, 25 bp, Homo sapien
atcaatgcaggctgccccaaacact

SEQ ID NO: 6044580 - DNA, 25 bp, Homo sapien
tatacactccggcatgggctctgcc

SEQ ID NO: 6044581 - DNA, 25 bp, Homo sapien
acgctcgttttcagaacatatccaa

SEQ ID NO: 6044582 - DNA, 25 bp, Homo sapien
cgaactgcccacgagactgatggcg

SEQ ID NO: 6044583 - DNA, 25 bp, Homo sapien
atggcgctggcccacggtgcagatc

SEQ ID NO: 6044584 - DNA, 25 bp, Homo sapien
gttcaaacgaggccggagacgctcg

SEQ ID NO: 6044585 - DNA, 25 bp, Homo sapien
gtctggtccccagaaatcatcgaca

SEQ ID NO: 6044586 - DNA, 25 bp, Homo sapien
gactgaaatgagaaacagagagcag

SEQ ID NO: 6044587 - DNA, 25 bp, Homo sapien
acagattacattgcggagatctacg

SEQ ID NO: 6044588 - DNA, 25 bp, Homo sapien
tatccaaaactagaatcctctaaat

SEQ ID NO: 6044589 - DNA, 25 bp, Homo sapien
atcgacaaaaagctaattcagtgcg

SEQ ID NO: 6044590 - DNA, 25 bp, Homo sapien
aaagtgatcaacgacgtcagcggga

SEQ ID NO: 6044591 - DNA, 25 bp, Homo sapien
cccggctctggccacccaggctgct

SEQ ID NO: 6044592 - DNA, 25 bp, Homo sapien
ggcatgggctctgccctcttgcgca

SEQ ID NO: 6044593 - DNA, 25 bp, Homo sapien
gcaggctgccccaaacacttctcta

SEQ ID NO: 6044594 - DNA, 25 bp, Homo sapien
cacgggcatcacaaatcttacagtt

SEQ ID NO: 6044595 - DNA, 25 bp, Homo sapien
aaacacttctctatacactccggca

SEQ ID NO: 6044596 - DNA, 25 bp, Homo sapien
atagatatcaatgcaggctgcccca

SEQ ID NO: 6044597 - DNA, 25 bp, Homo sapien
gtaagagccggcgaactgcccacga

SEQ ID NO: 6044598 - DNA, 25 bp, Homo sapien
agcgggatagatatcaatgcaggct

SEQ ID NO: 6044599 - DNA, 25 bp, Homo sapien
gacgtcagcgggatagatatcaatg

SEQ ID NO: 6044600 - DNA, 25 bp, Homo sapien
aacactgcactccaaactgtcgact

SEQ ID NO: 6044601 - DNA, 25 bp, Homo sapien
actgtgtctcatcttgaaagaactg

SEQ ID NO: 6044602 - DNA, 25 bp, Homo sapien
cttctctatacactccggcatgggc

SEQ ID NO: 6044603 - DNA, 25 bp, Homo sapien
atcaacgacgtcagcgggatagata

SEQ ID NO: 6044604 - DNA, 25 bp, Homo sapien
catcacaaatcttacagttcactgc

SEQ ID NO: 6044605 - DNA, 25 bp, Homo sapien
gctttgaaagtgatcaacgacgtca

SEQ ID NO: 6044606 - DNA, 25 bp, Homo sapien
tctaaattgattttccagatcgggt

SEQ ID NO: 6044607 - DNA, 25 bp, Homo sapien
cccatcacagattacattgcggaga

SEQ ID NO: 6044608 - DNA, 25 bp, Homo sapien
accaagcaagacactctacagctcg

SEQ ID NO: 6044609 - DNA, 25 bp, Homo sapien
ctaattcagtgcgtcaggaaggaaa

SEQ ID NO: 6044610 - DNA, 25 bp, Homo sapien
gcaagacactctacagctcgtcaaa

SEQ ID NO: 6044611 - DNA, 25 bp, Homo sapien
aaaaagctaattcagtgcgtcagga

SEQ ID NO: 6044612 - DNA, 25 bp, Homo sapien
cgctggcccacggtgcagatctcgt

SEQ ID NO: 6044613 - DNA, 25 bp, Homo sapien
caggaagactgaaatgagaaacaga

SEQ ID NO: 6044614 - DNA, 25 bp, Homo sapien
tccaaggttcaaacgaggccggaga

SEQ ID NO: 6044615 - DNA, 25 bp, Homo sapien
agcaaacccatcagtgtgaaaataa

SEQ ID NO: 6044616 - DNA, 25 bp, Homo sapien
acgtctgtgtgccacgggcatcaca

SEQ ID NO: 6044617 - DNA, 25 bp, Homo sapien
ggtaaccctcacagcaaacccatca

SEQ ID NO: 6044618 - DNA, 25 bp, Homo sapien
cctcacagcaaacccatcagtgtga

SEQ ID NO: 6044619 - DNA, 25 bp, Homo sapien
ccaatggtaagagccggcgaactgc

SEQ ID NO: 6044620 - DNA, 25 bp, Homo sapien
cttgaaagaactggttaagaacgtg

SEQ ID NO: 6044621 - DNA, 25 bp, Homo sapien
aaatcttacagttcactgcaggaag

SEQ ID NO: 6044622 - DNA, 25 bp, Homo sapien
caccccagacacactgtgtctcatc

SEQ ID NO: 6044623 - DNA, 25 bp, Homo sapien
acgaggccggagacgctcgttttca

SEQ ID NO: 6044624 - DNA, 25 bp, Homo sapien
tacgtcgtgccgtccaaggttcaaa

SEQ ID NO: 6044625 - DNA, 25 bp, Homo sapien
agactgatggcgctggcccacggtg

SEQ ID NO: 6044626 - DNA, 25 bp, Homo sapien
gtgccgtccaaggttcaaacgaggc

SEQ ID NO: 6044627 - DNA, 25 bp, Homo sapien
tccccagaaatcatcgacaaaaagc

SEQ ID NO: 6044628 - DNA, 25 bp, Homo sapien
atcgggtctgcatccccggctctgg

SEQ ID NO: 6044629 - DNA, 25 bp, Homo sapien
tacagttcactgcaggaagactgaa

SEQ ID NO: 6044630 - DNA, 25 bp, Homo sapien
tgccctcttgcgcaccccagacaca

SEQ ID NO: 6044631 - DNA, 25 bp, Homo sapien
gagcagcccatcacagattacattg

SEQ ID NO: 6044632 - DNA, 25 bp, Homo sapien
caaactgtcgactacgtcgtgccgt

SEQ ID NO: 6044633 - DNA, 25 bp, Homo sapien
gcccacggtgcagatctcgtctggt

SEQ ID NO: 6044634 - DNA, 25 bp, Homo sapien
ttggacaccaagcaagacactctac

SEQ ID NO: 6044635 - DNA, 25 bp, Homo sapien
agtgtgaaaataagactcttggaca

SEQ ID NO: 6044636 - DNA, 25 bp, Homo sapien
gctctggccacccaggctgctttga

SEQ ID NO: 6044637 - DNA, 25 bp, Homo sapien
agaacatatccaaaactagaatcct

SEQ ID NO: 6044638 - DNA, 25 bp, Homo sapien
gatctcgtctggtccccagaaatca

SEQ ID NO: 6044639 - DNA, 25 bp, Homo sapien
tcactgcaggaagactgaaatgaga

SEQ ID NO: 6044640 - DNA, 25 bp, Homo sapien
cagtgcgtcaggaaggaaaacactg

SEQ ID NO: 6044641 - DNA, 25 bp, Homo sapien
cccatcagtgtgaaaataagactct

SEQ ID NO: 6044642 - DNA, 25 bp, Homo sapien
agactcttggacaccaagcaagaca

SEQ ID NO: 6044643 - DNA, 25 bp, Homo sapien
ttccagatcgggtctgcatccccgg

SEQ ID NO: 6044644 - DNA, 25 bp, Homo sapien
gcactccaaactgtcgactacgtcg

SEQ ID NO: 6044645 - DNA, 25 bp, Homo sapien
cactctacagctcgtcaaacgtctg

SEQ ID NO: 6044646 - DNA, 25 bp, Homo sapien
gaaatcatcgacaaaaagctaattc

SEQ ID NO: 6044647 - DNA, 25 bp, Homo sapien
agacacactgtgtctcatcttgaaa

SEQ ID NO: 6044648 - DNA, 25 bp, Homo sapien
gtcaggaaggaaaacactgcactcc

SEQ ID NO: 6044649 - DNA, 25 bp, Homo sapien
tgcagtgaactgtaagatttgtgat

SEQ ID NO: 6044650 - DNA, 25 bp, Homo sapien
caaagctttttcttgagctctgcag

SEQ ID NO: 6044651 - DNA, 25 bp, Homo sapien
atggcgttggcgtttttcaaagctt

SEQ ID NO: 6044652 - DNA, 25 bp, Homo sapien
ttgtaaatcatgaaaatgagagcgg

SEQ ID NO: 6044653 - DNA, 25 bp, Homo sapien
gccgttcacaatcaacgacacgtta

SEQ ID NO: 6044654 - DNA, 25 bp, Homo sapien
ttcctcttttgcttggcgatggcgt

SEQ ID NO: 6044655 - DNA, 25 bp, Homo sapien
tccatcatcgttcaattgctttagt

SEQ ID NO: 6044656 - DNA, 25 bp, Homo sapien
tttttcttgagctctgcagttttcc

SEQ ID NO: 6044657 - DNA, 25 bp, Homo sapien
ttgtgatgcccgtggcacacagacg

SEQ ID NO: 6044658 - DNA, 25 bp, Homo sapien
ttggcgatggcgttggcgtttttca

SEQ ID NO: 6044659 - DNA, 25 bp, Homo sapien
ctctgaaggatctgtttgagcgctt

SEQ ID NO: 6044660 - DNA, 25 bp, Homo sapien
atcgttcaattgctttagtacgaaa

SEQ ID NO: 6044661 - DNA, 25 bp, Homo sapien
cgggcaaagtactgaaaaaagactg

SEQ ID NO: 6044662 - DNA, 25 bp, Homo sapien
ctccgcaatgtaatctgtgatgggc

SEQ ID NO: 6044663 - DNA, 25 bp, Homo sapien
caacgacacgttatttgcctggcat

SEQ ID NO: 6044664 - DNA, 25 bp, Homo sapien
gtagatctccgcaatgtaatctgtg

SEQ ID NO: 6044665 - DNA, 25 bp, Homo sapien
ttgagctctgcagttttccaagtac

SEQ ID NO: 6044666 - DNA, 25 bp, Homo sapien
taaactcgcgacaagcaacgaccca

SEQ ID NO: 6044667 - DNA, 25 bp, Homo sapien
tgcaatcataccaccaatgttagtg

SEQ ID NO: 6044668 - DNA, 25 bp, Homo sapien
gtcgcggatagcgccgttcacaatc

SEQ ID NO: 6044669 - DNA, 25 bp, Homo sapien
cgcgacaagcaacgacccaagatgg

SEQ ID NO: 6044670 - DNA, 25 bp, Homo sapien
agcgcttccatcatcgttcaattgc

SEQ ID NO: 6044671 - DNA, 25 bp, Homo sapien
gttttccaagtactctgaaggatct

SEQ ID NO: 6044672 - DNA, 25 bp, Homo sapien
tagtgtcactgcctatgtgatcggt

SEQ ID NO: 6044673 - DNA, 25 bp, Homo sapien
ggtcccgttcagcacactctgcaat

SEQ ID NO: 6044674 - DNA, 25 bp, Homo sapien
tgtttgagcgcttccatcatcgttc

SEQ ID NO: 6044675 - DNA, 25 bp, Homo sapien
tcttcctgcagtgaactgtaagatt

SEQ ID NO: 6044676 - DNA, 25 bp, Homo sapien
ttctcatttcagtcttcctgcagtg

SEQ ID NO: 6044677 - DNA, 25 bp, Homo sapien
ttgcccactgaataaactcgcgaca

SEQ ID NO: 6044678 - DNA, 25 bp, Homo sapien
gttagtgtttttccaatgattcgct

SEQ ID NO: 6044679 - DNA, 25 bp, Homo sapien
tttttcaaagctttttcttgagctc

SEQ ID NO: 6044680 - DNA, 25 bp, Homo sapien
tcactgcctatgtgatcggtctgtt

SEQ ID NO: 6044681 - DNA, 25 bp, Homo sapien
actgaataaactcgcgacaagcaac

SEQ ID NO: 6044682 - DNA, 25 bp, Homo sapien
tcttccgggctcttgcaacgggcaa

SEQ ID NO: 6044683 - DNA, 25 bp, Homo sapien
cttctgaaggcttagaagtgtgatc

SEQ ID NO: 6044684 - DNA, 25 bp, Homo sapien
tagaagtgtgatcaaaaactgtagg

SEQ ID NO: 6044685 - DNA, 25 bp, Homo sapien
ctctgtttctcatttcagtcttcct

SEQ ID NO: 6044686 - DNA, 25 bp, Homo sapien
caaagtactgaaaaaagactgattt

SEQ ID NO: 6044687 - DNA, 25 bp, Homo sapien
cctatgtgatcggtctgtttcctct

SEQ ID NO: 6044688 - DNA, 25 bp, Homo sapien
ttcagcacactctgcaatcatacca

SEQ ID NO: 6044689 - DNA, 25 bp, Homo sapien
tgtcaaacttcgttgcccactgaat

SEQ ID NO: 6044690 - DNA, 25 bp, Homo sapien
tttcagtcttcctgcagtgaactgt

SEQ ID NO: 6044691 - DNA, 25 bp, Homo sapien
agagcggtcgcggatagcgccgttc

SEQ ID NO: 6044692 - DNA, 25 bp, Homo sapien
ttgcaacgggcaaagtactgaaaaa

SEQ ID NO: 6044693 - DNA, 25 bp, Homo sapien
gctttttagtgtcactgcctatgtg

SEQ ID NO: 6044694 - DNA, 25 bp, Homo sapien
tgatgggctgctctctgtttctcat

SEQ ID NO: 6044695 - DNA, 25 bp, Homo sapien
ctgtagggtcccgttcagcacactc

SEQ ID NO: 6044696 - DNA, 25 bp, Homo sapien
gatagcgccgttcacaatcaacgac

SEQ ID NO: 6044697 - DNA, 25 bp, Homo sapien
tccggggacaattctgcttaacatg

SEQ ID NO: 6044698 - DNA, 25 bp, Homo sapien
agactgattttccggggacaattct

SEQ ID NO: 6044699 - DNA, 25 bp, Homo sapien
ctaacttcttccgggctcttgcaac

SEQ ID NO: 6044700 - DNA, 25 bp, Homo sapien
acttcgttgcccactgaataaactc

SEQ ID NO: 6044701 - DNA, 25 bp, Homo sapien
ttaacatgtattttgtattgccgat

SEQ ID NO: 6044702 - DNA, 25 bp, Homo sapien
cacaatcaacgacacgttatttgcc

SEQ ID NO: 6044703 - DNA, 25 bp, Homo sapien
acactctgcaatcataccaccaatg

SEQ ID NO: 6044704 - DNA, 25 bp, Homo sapien
gggctcttgcaacgggcaaagtact

SEQ ID NO: 6044705 - DNA, 25 bp, Homo sapien
ttttgcttggcgatggcgttggcgt

SEQ ID NO: 6044706 - DNA, 25 bp, Homo sapien
tctgcttaacatgtattttgtattg

SEQ ID NO: 6044707 - DNA, 25 bp, Homo sapien
attcgcttgtaaatcatgaaaatga

SEQ ID NO: 6044708 - DNA, 25 bp, Homo sapien
tgtattttgtattgccgatgtggtt

SEQ ID NO: 6044709 - DNA, 25 bp, Homo sapien
tctgcagttttccaagtactctgaa

SEQ ID NO: 6044710 - DNA, 25 bp, Homo sapien
atctgtgatgggctgctctctgttt

SEQ ID NO: 6044711 - DNA, 25 bp, Homo sapien
gaccgtcttctgaaggcttagaagt

SEQ ID NO: 6044712 - DNA, 25 bp, Homo sapien
aagcaacgacccaagatggaccgtc

SEQ ID NO: 6044713 - DNA, 25 bp, Homo sapien
tgccgatgtggttgtcaaacttcgt

SEQ ID NO: 6044714 - DNA, 25 bp, Homo sapien
ccaatgattcgcttgtaaatcatga

SEQ ID NO: 6044715 - DNA, 25 bp, Homo sapien
atcatgaaaatgagagcggtcgcgg

SEQ ID NO: 6044716 - DNA, 25 bp, Homo sapien
caattgctttagtacgaaactaact

SEQ ID NO: 6044717 - DNA, 25 bp, Homo sapien
cacgttatttgcctggcatatctcg

SEQ ID NO: 6044718 - DNA, 25 bp, Homo sapien
ctggcatatctcgtagatctccgca

SEQ ID NO: 6044719 - DNA, 25 bp, Homo sapien
tgtgatcaaaaactgtagggtcccg

SEQ ID NO: 6044720 - DNA, 25 bp, Homo sapien
tgatcggtctgtttcctcttttgct

SEQ ID NO: 6044721 - DNA, 25 bp, Homo sapien
aagatggaccgtcttctgaaggctt

SEQ ID NO: 6044722 - DNA, 25 bp, Homo sapien
tgtggttgtcaaacttcgttgccca

SEQ ID NO: 6044723 - DNA, 25 bp, Homo sapien
gtctgtttcctcttttgcttggcga

SEQ ID NO: 6044724 - DNA, 25 bp, Homo sapien
tgattttccggggacaattctgctt

SEQ ID NO: 6044725 - DNA, 25 bp, Homo sapien
tatctcgtagatctccgcaatgtaa

SEQ ID NO: 6044726 - DNA, 25 bp, Homo sapien
gctgctctctgtttctcatttcagt

SEQ ID NO: 6044727 - DNA, 25 bp, Homo sapien
ttgtattgccgatgtggttgtcaaa

SEQ ID NO: 6044728 - DNA, 25 bp, Homo sapien
gacaattctgcttaacatgtatttt

SEQ ID NO: 6044729 - DNA, 25 bp, Homo sapien
accaatgttagtgtttttccaatga

SEQ ID NO: 6044730 - DNA, 25 bp, Homo sapien
cataccaccaatgttagtgtttttc

SEQ ID NO: 6044731 - DNA, 25 bp, Homo sapien
caagtactctgaaggatctgtttga

SEQ ID NO: 6044732 - DNA, 25 bp, Homo sapien
cgacccaagatggaccgtcttctga

SEQ ID NO: 6044733 - DNA, 25 bp, Homo sapien
aggatctgtttgagcgcttccatca

SEQ ID NO: 6044734 - DNA, 25 bp, Homo sapien
aaggcttagaagtgtgatcaaaaac

SEQ ID NO: 6044735 - DNA, 25 bp, Homo sapien
gtttttccaatgattcgcttgtaaa

SEQ ID NO: 6044736 - DNA, 25 bp, Homo sapien
atttgcctggcatatctcgtagatc

SEQ ID NO: 6044737 - DNA, 25 bp, Homo sapien
aaaatgagagcggtcgcggatagcg

SEQ ID NO: 6044738 - DNA, 25 bp, Homo sapien
gaactgtaagatttgtgatgcccgt

SEQ ID NO: 6044739 - DNA, 25 bp, Homo sapien
taagatttgtgatgcccgtggcaca

SEQ ID NO: 6044740 - DNA, 25 bp, Homo sapien
aatgtaatctgtgatgggctgctct

SEQ ID NO: 6044741 - DNA, 25 bp, Homo sapien
atgaagcgatagaggcacttcgcaa

SEQ ID NO: 6044742 - DNA, 25 bp, Homo sapien
tgacgaggagaacatcttcatcaaa

SEQ ID NO: 6044743 - DNA, 25 bp, Homo sapien
ttgacgttactgaagtttctggccg

SEQ ID NO: 6044744 - DNA, 25 bp, Homo sapien
gaattgtttccgatttcgactatac

SEQ ID NO: 6044745 - DNA, 25 bp, Homo sapien
gcaaccggcacctgtcgaagcagaa

SEQ ID NO: 6044746 - DNA, 25 bp, Homo sapien
ggagaacatcttcatcaaaccttcc

SEQ ID NO: 6044747 - DNA, 25 bp, Homo sapien
gtatcgtgacgaggagaacatcttc

SEQ ID NO: 6044748 - DNA, 25 bp, Homo sapien
attactggcggtgaggttgctgcca

SEQ ID NO: 6044749 - DNA, 25 bp, Homo sapien
tgagttttcccttcgaattggccat

SEQ ID NO: 6044750 - DNA, 25 bp, Homo sapien
cccggctatgactacactcttcaga

SEQ ID NO: 6044751 - DNA, 25 bp, Homo sapien
agaagataagtccattctgttgttg

SEQ ID NO: 6044752 - DNA, 25 bp, Homo sapien
cattctgttgttgagtgttaagacc

SEQ ID NO: 6044753 - DNA, 25 bp, Homo sapien
cgatagaggcacttcgcaagggttc

SEQ ID NO: 6044754 - DNA, 25 bp, Homo sapien
gtctgttttgaagaccattatattg

SEQ ID NO: 6044755 - DNA, 25 bp, Homo sapien
ttgaactaagccagcagcaaccggc

SEQ ID NO: 6044756 - DNA, 25 bp, Homo sapien
ccacatttcaaacacagcagaagat

SEQ ID NO: 6044757 - DNA, 25 bp, Homo sapien
caaagcttgggtaagtgtctctgag

SEQ ID NO: 6044758 - DNA, 25 bp, Homo sapien
tctttgggtggggtgactatcccaa

SEQ ID NO: 6044759 - DNA, 25 bp, Homo sapien
gtggagcccggctatgactacactc

SEQ ID NO: 6044760 - DNA, 25 bp, Homo sapien
gctgccaatggagacaacactttgt

SEQ ID NO: 6044761 - DNA, 25 bp, Homo sapien
aatcttcgagactatttttcaagac

SEQ ID NO: 6044762 - DNA, 25 bp, Homo sapien
agcagaaattactggcggtgaggtt

SEQ ID NO: 6044763 - DNA, 25 bp, Homo sapien
tctggccgaccactactcctctttg

SEQ ID NO: 6044764 - DNA, 25 bp, Homo sapien
caaaagacactgaatgaagcgatag

SEQ ID NO: 6044765 - DNA, 25 bp, Homo sapien
ggcggtgaggttgctgccaatggag

SEQ ID NO: 6044766 - DNA, 25 bp, Homo sapien
aagtttctggccgaccactactcct

SEQ ID NO: 6044767 - DNA, 25 bp, Homo sapien
tttgaagaccattatattgagtttt

SEQ ID NO: 6044768 - DNA, 25 bp, Homo sapien
acaactgtctgttttgaagaccatt

SEQ ID NO: 6044769 - DNA, 25 bp, Homo sapien
actttgttcacaatcaagtatcgtg

SEQ ID NO: 6044770 - DNA, 25 bp, Homo sapien
taagtccattctgttgttgagtgtt

SEQ ID NO: 6044771 - DNA, 25 bp, Homo sapien
accttccaatgacagagttaccata

SEQ ID NO: 6044772 - DNA, 25 bp, Homo sapien
tgtcgaagcagaaattactggcggt

SEQ ID NO: 6044773 - DNA, 25 bp, Homo sapien
gaccattatattgagttttcccttc

SEQ ID NO: 6044774 - DNA, 25 bp, Homo sapien
actcctctttgggtggggtgactat

SEQ ID NO: 6044775 - DNA, 25 bp, Homo sapien
gttgttgagtgttaagaccaaagct

SEQ ID NO: 6044776 - DNA, 25 bp, Homo sapien
tgaccatggacagaattgtttccga

SEQ ID NO: 6044777 - DNA, 25 bp, Homo sapien
ggcacctgtcgaagcagaaattact

SEQ ID NO: 6044778 - DNA, 25 bp, Homo sapien
ttcgcaagggttcgccgttgaccat

SEQ ID NO: 6044779 - DNA, 25 bp, Homo sapien
ttcaaacacagcagaagataagtcc

SEQ ID NO: 6044780 - DNA, 25 bp, Homo sapien
ttccgatttcgactataccacctac

SEQ ID NO: 6044781 - DNA, 25 bp, Homo sapien
taccataatcttcgagactattttt

SEQ ID NO: 6044782 - DNA, 25 bp, Homo sapien
gagtgttaagaccaaagcttgggta

SEQ ID NO: 6044783 - DNA, 25 bp, Homo sapien
tggccatttcgaagtttattgaact

SEQ ID NO: 6044784 - DNA, 25 bp, Homo sapien
tcgaattggccatttcgaagtttat

SEQ ID NO: 6044785 - DNA, 25 bp, Homo sapien
taagaccaaagcttgggtaagtgtc

SEQ ID NO: 6044786 - DNA, 25 bp, Homo sapien
cgaccactactcctctttgggtggg

SEQ ID NO: 6044787 - DNA, 25 bp, Homo sapien
gggtggggtgactatcccaagtgaa

SEQ ID NO: 6044788 - DNA, 25 bp, Homo sapien
cacagcagaagataagtccattctg

SEQ ID NO: 6044789 - DNA, 25 bp, Homo sapien
ctctgagtgccaattggacggttct

SEQ ID NO: 6044790 - DNA, 25 bp, Homo sapien
gtgccaattggacggttctttgacg

SEQ ID NO: 6044791 - DNA, 25 bp, Homo sapien
cgagactatttttcaagacgaaaca

SEQ ID NO: 6044792 - DNA, 25 bp, Homo sapien
aatcaagtatcgtgacgaggagaac

SEQ ID NO: 6044793 - DNA, 25 bp, Homo sapien
agggttcgccgttgaccatggacag

SEQ ID NO: 6044794 - DNA, 25 bp, Homo sapien
attacgttggccgaattggttcaag

SEQ ID NO: 6044795 - DNA, 25 bp, Homo sapien
ttctttgacgttactgaagtttctg

SEQ ID NO: 6044796 - DNA, 25 bp, Homo sapien
tatgactacactcttcagattacgt

SEQ ID NO: 6044797 - DNA, 25 bp, Homo sapien
gattttacaactgtctgttttgaag

SEQ ID NO: 6044798 - DNA, 25 bp, Homo sapien
agtttattgaactaagccagcagca

SEQ ID NO: 6044799 - DNA, 25 bp, Homo sapien
ggttcaagaatcgattttacaactg

SEQ ID NO: 6044800 - DNA, 25 bp, Homo sapien
tttcgaagtttattgaactaagcca

SEQ ID NO: 6044801 - DNA, 25 bp, Homo sapien
tatttttcaagacgaaacagataaa

SEQ ID NO: 6044802 - DNA, 25 bp, Homo sapien
ggtgactatcccaagtgaagtggag

SEQ ID NO: 6044803 - DNA, 25 bp, Homo sapien
agaatcgattttacaactgtctgtt

SEQ ID NO: 6044804 - DNA, 25 bp, Homo sapien
gacaacactttgttcacaatcaagt

SEQ ID NO: 6044805 - DNA, 25 bp, Homo sapien
tataccacctaccacatttcaaaca

SEQ ID NO: 6044806 - DNA, 25 bp, Homo sapien
cgccgttgaccatggacagaattgt

SEQ ID NO: 6044807 - DNA, 25 bp, Homo sapien
agcagcaaccggcacctgtcgaagc

SEQ ID NO: 6044808 - DNA, 25 bp, Homo sapien
cagagttaccataatcttcgagact

SEQ ID NO: 6044809 - DNA, 25 bp, Homo sapien
acctaccacatttcaaacacagcag

SEQ ID NO: 6044810 - DNA, 25 bp, Homo sapien
ttcccttcgaattggccatttcgaa

SEQ ID NO: 6044811 - DNA, 25 bp, Homo sapien
ttgggtaagtgtctctgagtgccaa

SEQ ID NO: 6044812 - DNA, 25 bp, Homo sapien
aatggagacaacactttgttcacaa

SEQ ID NO: 6044813 - DNA, 25 bp, Homo sapien
tatcccaagtgaagtggagcccggc

SEQ ID NO: 6044814 - DNA, 25 bp, Homo sapien
tatattgagttttcccttcgaattg

SEQ ID NO: 6044815 - DNA, 25 bp, Homo sapien
catcttcatcaaaccttccaatgac

SEQ ID NO: 6044816 - DNA, 25 bp, Homo sapien
aagtgtctctgagtgccaattggac

SEQ ID NO: 6044817 - DNA, 25 bp, Homo sapien
ttactgaagtttctggccgaccact

SEQ ID NO: 6044818 - DNA, 25 bp, Homo sapien
cttcagattacgttggccgaattgg

SEQ ID NO: 6044819 - DNA, 25 bp, Homo sapien
gttggccgaattggttcaagaatcg

SEQ ID NO: 6044820 - DNA, 25 bp, Homo sapien
taagccagcagcaaccggcacctgt

SEQ ID NO: 6044821 - DNA, 25 bp, Homo sapien
tggacggttctttgacgttactgaa

SEQ ID NO: 6044822 - DNA, 25 bp, Homo sapien
ttcacaatcaagtatcgtgacgagg

SEQ ID NO: 6044823 - DNA, 25 bp, Homo sapien
ttcgactataccacctaccacattt

SEQ ID NO: 6044824 - DNA, 25 bp, Homo sapien
tggacagaattgtttccgatttcga

SEQ ID NO: 6044825 - DNA, 25 bp, Homo sapien
catcaaaccttccaatgacagagtt

SEQ ID NO: 6044826 - DNA, 25 bp, Homo sapien
gacgaaacagataaaatttttggca

SEQ ID NO: 6044827 - DNA, 25 bp, Homo sapien
gaggttgctgccaatggagacaaca

SEQ ID NO: 6044828 - DNA, 25 bp, Homo sapien
aggcacttcgcaagggttcgccgtt

SEQ ID NO: 6044829 - DNA, 25 bp, Homo sapien
cgaattggttcaagaatcgatttta

SEQ ID NO: 6044830 - DNA, 25 bp, Homo sapien
caatgacagagttaccataatcttc

SEQ ID NO: 6044831 - DNA, 25 bp, Homo sapien
acactgaatgaagcgatagaggcac

SEQ ID NO: 6044832 - DNA, 25 bp, Homo sapien
aagtgaagtggagcccggctatgac

SEQ ID NO: 6044833 - DNA, 25 bp, Homo sapien
tacactcttcagattacgttggccg

SEQ ID NO: 6044834 - DNA, 25 bp, Homo sapien
cagataaaatttttggcaaggtctt

SEQ ID NO: 6044835 - DNA, 25 bp, Homo sapien
ccagtaatttctgcttcgacaggtg

SEQ ID NO: 6044836 - DNA, 25 bp, Homo sapien
ttctgcactcaattcatcattttca

SEQ ID NO: 6044837 - DNA, 25 bp, Homo sapien
ggctctatttaagactttgatgaac

SEQ ID NO: 6044838 - DNA, 25 bp, Homo sapien
ctaaacaatgttaactggcaaattg

SEQ ID NO: 6044839 - DNA, 25 bp, Homo sapien
gaagatgttctcctcgtcacgatac

SEQ ID NO: 6044840 - DNA, 25 bp, Homo sapien
agagcactttatgtgataatggaag

SEQ ID NO: 6044841 - DNA, 25 bp, Homo sapien
caaaaattttatctgtttcgtcttg

SEQ ID NO: 6044842 - DNA, 25 bp, Homo sapien
cttgattgtgaacaaagtgttgtct

SEQ ID NO: 6044843 - DNA, 25 bp, Homo sapien
aactggcaaattgaatggaattgca

SEQ ID NO: 6044844 - DNA, 25 bp, Homo sapien
tgtttcgtcttgaaaaatagtctcg

SEQ ID NO: 6044845 - DNA, 25 bp, Homo sapien
caaattgaatggaattgcaactctt

SEQ ID NO: 6044846 - DNA, 25 bp, Homo sapien
cggattggatttgacggtttctctt

SEQ ID NO: 6044847 - DNA, 25 bp, Homo sapien
ggctttagagcactttatgtgataa

SEQ ID NO: 6044848 - DNA, 25 bp, Homo sapien
ctttaggtggttgatatagtctctt

SEQ ID NO: 6044849 - DNA, 25 bp, Homo sapien
tctgccttctgcactcaattcatca

SEQ ID NO: 6044850 - DNA, 25 bp, Homo sapien
tacgtgcatccacgaattcttgtaa

SEQ ID NO: 6044851 - DNA, 25 bp, Homo sapien
acgtgataaatcttctactttgctc

SEQ ID NO: 6044852 - DNA, 25 bp, Homo sapien
gatatagtctcttcaactccaatgg

SEQ ID NO: 6044853 - DNA, 25 bp, Homo sapien
aattgcaactcttttgtctggaaat

SEQ ID NO: 6044854 - DNA, 25 bp, Homo sapien
gatgaacgagtccactctgaatctc

SEQ ID NO: 6044855 - DNA, 25 bp, Homo sapien
ctcgtcacgatacttgattgtgaac

SEQ ID NO: 6044856 - DNA, 25 bp, Homo sapien
tagttcaataaacttcgaaatggcc

SEQ ID NO: 6044857 - DNA, 25 bp, Homo sapien
ttgctgctggcttagttcaataaac

SEQ ID NO: 6044858 - DNA, 25 bp, Homo sapien
tgtgaacaaagtgttgtctccattg

SEQ ID NO: 6044859 - DNA, 25 bp, Homo sapien
catccacgaattcttgtaaaaagac

SEQ ID NO: 6044860 - DNA, 25 bp, Homo sapien
tttgtctggaaatgacgtgggaaaa

SEQ ID NO: 6044861 - DNA, 25 bp, Homo sapien
ggagtgcatgtaggctttagagcac

SEQ ID NO: 6044862 - DNA, 25 bp, Homo sapien
acaggtgccggttgctgctggctta

SEQ ID NO: 6044863 - DNA, 25 bp, Homo sapien
aatgttaactggcaaattgaatgga

SEQ ID NO: 6044864 - DNA, 25 bp, Homo sapien
ggaaggtttgatgaagatgttctcc

SEQ ID NO: 6044865 - DNA, 25 bp, Homo sapien
gttgtctccattggcagcaacctca

SEQ ID NO: 6044866 - DNA, 25 bp, Homo sapien
cactctgaatctcattctggagtgc

SEQ ID NO: 6044867 - DNA, 25 bp, Homo sapien
atcatcttcgtccaccttggctcta

SEQ ID NO: 6044868 - DNA, 25 bp, Homo sapien
gtcattggaaggtttgatgaagatg

SEQ ID NO: 6044869 - DNA, 25 bp, Homo sapien
atttaagactttgatgaacgagtcc

SEQ ID NO: 6044870 - DNA, 25 bp, Homo sapien
caaagtgttgtctccattggcagca

SEQ ID NO: 6044871 - DNA, 25 bp, Homo sapien
gtggttgatatagtctcttcaactc

SEQ ID NO: 6044872 - DNA, 25 bp, Homo sapien
ttatctgtttcgtcttgaaaaatag

SEQ ID NO: 6044873 - DNA, 25 bp, Homo sapien
aactcttttgtctggaaatgacgtg

SEQ ID NO: 6044874 - DNA, 25 bp, Homo sapien
ttctactttgctctgcaactttagg

SEQ ID NO: 6044875 - DNA, 25 bp, Homo sapien
gtggttcatgtgagtataaaacttg

SEQ ID NO: 6044876 - DNA, 25 bp, Homo sapien
tatggtaactctgtcattggaaggt

SEQ ID NO: 6044877 - DNA, 25 bp, Homo sapien
cgagtccactctgaatctcattctg

SEQ ID NO: 6044878 - DNA, 25 bp, Homo sapien
gtcttgaaaaatagtctcgaagatt

SEQ ID NO: 6044879 - DNA, 25 bp, Homo sapien
aaaaatagtctcgaagattatggta

SEQ ID NO: 6044880 - DNA, 25 bp, Homo sapien
gaatggaattgcaactcttttgtct

SEQ ID NO: 6044881 - DNA, 25 bp, Homo sapien
tttgatgaagatgttctcctcgtca

SEQ ID NO: 6044882 - DNA, 25 bp, Homo sapien
gactttgatgaacgagtccactctg

SEQ ID NO: 6044883 - DNA, 25 bp, Homo sapien
tccattggcagcaacctcaccgcca

SEQ ID NO: 6044884 - DNA, 25 bp, Homo sapien
attttcatcatcttcgtccaccttg

SEQ ID NO: 6044885 - DNA, 25 bp, Homo sapien
gaagattatggtaactctgtcattg

SEQ ID NO: 6044886 - DNA, 25 bp, Homo sapien
ccaatggtggttcatgtgagtataa

SEQ ID NO: 6044887 - DNA, 25 bp, Homo sapien
tttatgtgataatggaagtagtttc

SEQ ID NO: 6044888 - DNA, 25 bp, Homo sapien
ctgttgtctgccttctgcactcaat

SEQ ID NO: 6044889 - DNA, 25 bp, Homo sapien
cttgccaaaaattttatctgtttcg

SEQ ID NO: 6044890 - DNA, 25 bp, Homo sapien
gcttcgacaggtgccggttgctgct

SEQ ID NO: 6044891 - DNA, 25 bp, Homo sapien
aactctgtcattggaaggtttgatg

SEQ ID NO: 6044892 - DNA, 25 bp, Homo sapien
tgacgtgggaaaagaacaaacgtga

SEQ ID NO: 6044893 - DNA, 25 bp, Homo sapien
tcttgcctgttgtctgccttctgca

SEQ ID NO: 6044894 - DNA, 25 bp, Homo sapien
aaaacttgtggagcggattggattt

SEQ ID NO: 6044895 - DNA, 25 bp, Homo sapien
tagtttctaaacaatgttaactggc

SEQ ID NO: 6044896 - DNA, 25 bp, Homo sapien
tcaccgccagtaatttctgcttcga

SEQ ID NO: 6044897 - DNA, 25 bp, Homo sapien
agtctcgaagattatggtaactctg

SEQ ID NO: 6044898 - DNA, 25 bp, Homo sapien
ggatttgacggtttctcttacgtgc

SEQ ID NO: 6044899 - DNA, 25 bp, Homo sapien
gacggtttctcttacgtgcatccac

SEQ ID NO: 6044900 - DNA, 25 bp, Homo sapien
gtggagcggattggatttgacggtt

SEQ ID NO: 6044901 - DNA, 25 bp, Homo sapien
gtctcttcaactccaatggtggttc

SEQ ID NO: 6044902 - DNA, 25 bp, Homo sapien
atttctgcttcgacaggtgccggtt

SEQ ID NO: 6044903 - DNA, 25 bp, Homo sapien
actcaattcatcattttcatcatct

SEQ ID NO: 6044904 - DNA, 25 bp, Homo sapien
tggaagtagtttctaaacaatgtta

SEQ ID NO: 6044905 - DNA, 25 bp, Homo sapien
gagtataaaacttgtggagcggatt

SEQ ID NO: 6044906 - DNA, 25 bp, Homo sapien
ctggcttagttcaataaacttcgaa

SEQ ID NO: 6044907 - DNA, 25 bp, Homo sapien
cattctggagtgcatgtaggcttta

SEQ ID NO: 6044908 - DNA, 25 bp, Homo sapien
catgtgagtataaaacttgtggagc

SEQ ID NO: 6044909 - DNA, 25 bp, Homo sapien
tggaaatgacgtgggaaaagaacaa

SEQ ID NO: 6044910 - DNA, 25 bp, Homo sapien
gcaacctcaccgccagtaatttctg

SEQ ID NO: 6044911 - DNA, 25 bp, Homo sapien
gttctcctcgtcacgatacttgatt

SEQ ID NO: 6044912 - DNA, 25 bp, Homo sapien
gaatctcattctggagtgcatgtag

SEQ ID NO: 6044913 - DNA, 25 bp, Homo sapien
tcaactccaatggtggttcatgtga

SEQ ID NO: 6044914 - DNA, 25 bp, Homo sapien
gaacaaacgtgataaatcttctact

SEQ ID NO: 6044915 - DNA, 25 bp, Homo sapien
ttggcagcaacctcaccgccagtaa

SEQ ID NO: 6044916 - DNA, 25 bp, Homo sapien
ttctcttacgtgcatccacgaattc

SEQ ID NO: 6044917 - DNA, 25 bp, Homo sapien
gaattcttgtaaaaagaccttgcca

SEQ ID NO: 6044918 - DNA, 25 bp, Homo sapien
ttcgtccaccttggctctatttaag

SEQ ID NO: 6044919 - DNA, 25 bp, Homo sapien
tgataatggaagtagtttctaaaca

SEQ ID NO: 6044920 - DNA, 25 bp, Homo sapien
ctgcaactttaggtggttgatatag

SEQ ID NO: 6044921 - DNA, 25 bp, Homo sapien
ttcatcattttcatcatcttcgtcc

SEQ ID NO: 6044922 - DNA, 25 bp, Homo sapien
aagaccttgccaaaaattttatctg

SEQ ID NO: 6044923 - DNA, 25 bp, Homo sapien
taaatcttctactttgctctgcaac

SEQ ID NO: 6044924 - DNA, 25 bp, Homo sapien
tttgctctgcaactttaggtggttg

SEQ ID NO: 6044925 - DNA, 25 bp, Homo sapien
catgtaggctttagagcactttatg

SEQ ID NO: 6044926 - DNA, 25 bp, Homo sapien
acgatacttgattgtgaacaaagtg

SEQ ID NO: 6044927 - DNA, 25 bp, Homo sapien
caccttggctctatttaagactttg

SEQ ID NO: 6044928 - DNA, 25 bp, Homo sapien
tgccggttgctgctggcttagttca

SEQ ID NO: 6044929 - DNA, 25 bp, Homo sapien
gaatggatcgaatcaaggacttgtg

SEQ ID NO: 6044930 - DNA, 25 bp, Homo sapien
gcactatgctttctgctcaaacgag

SEQ ID NO: 6044931 - DNA, 25 bp, Homo sapien
gatgaacctgtattagcaaatctaa

SEQ ID NO: 6044932 - DNA, 25 bp, Homo sapien
tctaataaatgtgggatacctagtg

SEQ ID NO: 6044933 - DNA, 25 bp, Homo sapien
aggcttcaatttcttattggcacta

SEQ ID NO: 6044934 - DNA, 25 bp, Homo sapien
atataatcgggtgagattaatgagg

SEQ ID NO: 6044935 - DNA, 25 bp, Homo sapien
gtatttcaaaaagaatgagagaact

SEQ ID NO: 6044936 - DNA, 25 bp, Homo sapien
cactgaagccaatagagtattttga

SEQ ID NO: 6044937 - DNA, 25 bp, Homo sapien
ttattggcactatgctttctgctca

SEQ ID NO: 6044938 - DNA, 25 bp, Homo sapien
ctgctcaaacgagggacgaaaggat

SEQ ID NO: 6044939 - DNA, 25 bp, Homo sapien
caatttcttattggcactatgcttt

SEQ ID NO: 6044940 - DNA, 25 bp, Homo sapien
caaaattacggcggagtaaatattg

SEQ ID NO: 6044941 - DNA, 25 bp, Homo sapien
gaaaaagtcgatccaaagaatttca

SEQ ID NO: 6044942 - DNA, 25 bp, Homo sapien
tttcttacccatatataatcgggtg

SEQ ID NO: 6044943 - DNA, 25 bp, Homo sapien
gagattaatgaggtccaaggttaaa

SEQ ID NO: 6044944 - DNA, 25 bp, Homo sapien
agccaatagagtattttgaatggat

SEQ ID NO: 6044945 - DNA, 25 bp, Homo sapien
agaagaaatgattaacgattctggg

SEQ ID NO: 6044946 - DNA, 25 bp, Homo sapien
aatttcaggcttcaatttcttattg

SEQ ID NO: 6044947 - DNA, 25 bp, Homo sapien
tcaaggacttgtgatgatccgagaa

SEQ ID NO: 6044948 - DNA, 25 bp, Homo sapien
agttcctgagagtttcttacccata

SEQ ID NO: 6044949 - DNA, 25 bp, Homo sapien
tgctttctgctcaaacgagggacga

SEQ ID NO: 6044950 - DNA, 25 bp, Homo sapien
actggatcaaggcactgaagccaat

SEQ ID NO: 6044951 - DNA, 25 bp, Homo sapien
aaatagcagagggtattacgctaga

SEQ ID NO: 6044952 - DNA, 25 bp, Homo sapien
acccatatataatcgggtgagatta

SEQ ID NO: 6044953 - DNA, 25 bp, Homo sapien
ggtagaagttcgatctaagtatttc

SEQ ID NO: 6044954 - DNA, 25 bp, Homo sapien
tcgggtgagattaatgaggtccaag

SEQ ID NO: 6044955 - DNA, 25 bp, Homo sapien
ttctggggcgaaagttcctgagagt

SEQ ID NO: 6044956 - DNA, 25 bp, Homo sapien
gaaaataaaatcaataaagatttgc

SEQ ID NO: 6044957 - DNA, 25 bp, Homo sapien
taaaatcaataaagatttgcaaaat

SEQ ID NO: 6044958 - DNA, 25 bp, Homo sapien
tagatgctatgggatgtagcatgat

SEQ ID NO: 6044959 - DNA, 25 bp, Homo sapien
tggcgcaagcggctttgaatatcac

SEQ ID NO: 6044960 - DNA, 25 bp, Homo sapien
ggtattacgctagatggactgctta

SEQ ID NO: 6044961 - DNA, 25 bp, Homo sapien
acggcggagtaaatattgactggat

SEQ ID NO: 6044962 - DNA, 25 bp, Homo sapien
gcatattcctgttgatattgaagag

SEQ ID NO: 6044963 - DNA, 25 bp, Homo sapien
acgctagatggactgcttaaaattg

SEQ ID NO: 6044964 - DNA, 25 bp, Homo sapien
ggcgaaagttcctgagagtttctta

SEQ ID NO: 6044965 - DNA, 25 bp, Homo sapien
gacttgtgatgatccgagaacttgg

SEQ ID NO: 6044966 - DNA, 25 bp, Homo sapien
tatgggatgtagcatgattcctgtt

SEQ ID NO: 6044967 - DNA, 25 bp, Homo sapien
atgattaacgattctggggcgaaag

SEQ ID NO: 6044968 - DNA, 25 bp, Homo sapien
accgaatactgcttaaacacattaa

SEQ ID NO: 6044969 - DNA, 25 bp, Homo sapien
tgatgatccgagaacttggggacgg

SEQ ID NO: 6044970 - DNA, 25 bp, Homo sapien
gctttgaatatcaccgaatactgct

SEQ ID NO: 6044971 - DNA, 25 bp, Homo sapien
agttcgatctaagtatttcaaaaag

SEQ ID NO: 6044972 - DNA, 25 bp, Homo sapien
gccaataactaaagaagaaatgatt

SEQ ID NO: 6044973 - DNA, 25 bp, Homo sapien
aaatgtgggatacctagtgaaaaag

SEQ ID NO: 6044974 - DNA, 25 bp, Homo sapien
atctaagtatttcaaaaagaatgag

SEQ ID NO: 6044975 - DNA, 25 bp, Homo sapien
tgagagtttcttacccatatataat

SEQ ID NO: 6044976 - DNA, 25 bp, Homo sapien
atcgaatcaaggacttgtgatgatc

SEQ ID NO: 6044977 - DNA, 25 bp, Homo sapien
gatggactgcttaaaattgatgaac

SEQ ID NO: 6044978 - DNA, 25 bp, Homo sapien
aacgattctggggcgaaagttcctg

SEQ ID NO: 6044979 - DNA, 25 bp, Homo sapien
cattaaaaatagcagagggtattac

SEQ ID NO: 6044980 - DNA, 25 bp, Homo sapien
gcagagggtattacgctagatggac

SEQ ID NO: 6044981 - DNA, 25 bp, Homo sapien
aatatcaccgaatactgcttaaaca

SEQ ID NO: 6044982 - DNA, 25 bp, Homo sapien
gtcgatccaaagaatttcaggcttc

SEQ ID NO: 6044983 - DNA, 25 bp, Homo sapien
actgcttaaacacattaaaaatagc

SEQ ID NO: 6044984 - DNA, 25 bp, Homo sapien
gggacgaaaggatggcgcaagcggc

SEQ ID NO: 6044985 - DNA, 25 bp, Homo sapien
cctagtgaaaaagtcgatccaaaga

SEQ ID NO: 6044986 - DNA, 25 bp, Homo sapien
catgattcctgttttagtttctaat

SEQ ID NO: 6044987 - DNA, 25 bp, Homo sapien
tgatattgaagaggtagaagttcga

SEQ ID NO: 6044988 - DNA, 25 bp, Homo sapien
taaaaccccggtagatgctatggga

SEQ ID NO: 6044989 - DNA, 25 bp, Homo sapien
tcaaggcactgaagccaatagagta

SEQ ID NO: 6044990 - DNA, 25 bp, Homo sapien
ccaaagaatttcaggcttcaatttc

SEQ ID NO: 6044991 - DNA, 25 bp, Homo sapien
caaaaagaatgagagaactgttgag

SEQ ID NO: 6044992 - DNA, 25 bp, Homo sapien
aaacgagggacgaaaggatggcgca

SEQ ID NO: 6044993 - DNA, 25 bp, Homo sapien
aaaggatggcgcaagcggctttgaa

SEQ ID NO: 6044994 - DNA, 25 bp, Homo sapien
gatttgcaaaattacggcggagtaa

SEQ ID NO: 6044995 - DNA, 25 bp, Homo sapien
taaacacattaaaaatagcagaggg

SEQ ID NO: 6044996 - DNA, 25 bp, Homo sapien
aataaagatttgcaaaattacggcg

SEQ ID NO: 6044997 - DNA, 25 bp, Homo sapien
tattttgaatggatcgaatcaagga

SEQ ID NO: 6044998 - DNA, 25 bp, Homo sapien
ctgcttaaaattgatgaacctgtat

SEQ ID NO: 6044999 - DNA, 25 bp, Homo sapien
gagaactgttgagttagtaaaagaa

SEQ ID NO: 6045000 - DNA, 25 bp, Homo sapien
gaatgagagaactgttgagttagta

SEQ ID NO: 6045001 - DNA, 25 bp, Homo sapien
atgtagcatgattcctgttttagtt

SEQ ID NO: 6045002 - DNA, 25 bp, Homo sapien
cctgttttagtttctaataaatgtg

SEQ ID NO: 6045003 - DNA, 25 bp, Homo sapien
tccgagaacttggggacggccaata

SEQ ID NO: 6045004 - DNA, 25 bp, Homo sapien
atctaattcgatgcgttagcttcta

SEQ ID NO: 6045005 - DNA, 25 bp, Homo sapien
tagcaaatctaattcgatgcgttag

SEQ ID NO: 6045006 - DNA, 25 bp, Homo sapien
ctgtattagcaaatctaattcgatg

SEQ ID NO: 6045007 - DNA, 25 bp, Homo sapien
aaaattgatgaacctgtattagcaa

SEQ ID NO: 6045008 - DNA, 25 bp, Homo sapien
tcctgttgatattgaagaggtagaa

SEQ ID NO: 6045009 - DNA, 25 bp, Homo sapien
atattgactggatcaaggcactgaa

SEQ ID NO: 6045010 - DNA, 25 bp, Homo sapien
tgaagaggtagaagttcgatctaag

SEQ ID NO: 6045011 - DNA, 25 bp, Homo sapien
aactaaagaagaaatgattaacgat

SEQ ID NO: 6045012 - DNA, 25 bp, Homo sapien
caagcggctttgaatatcaccgaat

SEQ ID NO: 6045013 - DNA, 25 bp, Homo sapien
tagagtattttgaatggatcgaatc

SEQ ID NO: 6045014 - DNA, 25 bp, Homo sapien
ttagtttctaataaatgtgggatac

SEQ ID NO: 6045015 - DNA, 25 bp, Homo sapien
gggatacctagtgaaaaagtcgatc

SEQ ID NO: 6045016 - DNA, 25 bp, Homo sapien
ccccggtagatgctatgggatgtag

SEQ ID NO: 6045017 - DNA, 25 bp, Homo sapien
gagtaaatattgactggatcaaggc

SEQ ID NO: 6045018 - DNA, 25 bp, Homo sapien
tgaaatttggaagattcgattagct

SEQ ID NO: 6045019 - DNA, 25 bp, Homo sapien
aatcgaaattgtctaccaataattg

SEQ ID NO: 6045020 - DNA, 25 bp, Homo sapien
atcgacgcatatgccggcaatcagc

SEQ ID NO: 6045021 - DNA, 25 bp, Homo sapien
gttcatcaattttaagcagtccatc

SEQ ID NO: 6045022 - DNA, 25 bp, Homo sapien
ataattgtgcggttcttttgatgaa

SEQ ID NO: 6045023 - DNA, 25 bp, Homo sapien
gaattccctctatatcatacggtat

SEQ ID NO: 6045024 - DNA, 25 bp, Homo sapien
ttctagtatgctcggcagtcttaca

SEQ ID NO: 6045025 - DNA, 25 bp, Homo sapien
cttttctggtatagaagctaacgca

SEQ ID NO: 6045026 - DNA, 25 bp, Homo sapien
gcagacatcgtttgctagacataaa

SEQ ID NO: 6045027 - DNA, 25 bp, Homo sapien
tgtaaccgtgtccaaccaatgcgaa

SEQ ID NO: 6045028 - DNA, 25 bp, Homo sapien
gtgtttatttcgtaccacagtgagt

SEQ ID NO: 6045029 - DNA, 25 bp, Homo sapien
agccaaacctgtaactcctttctag

SEQ ID NO: 6045030 - DNA, 25 bp, Homo sapien
tatcatacggtatatctgaatcgaa

SEQ ID NO: 6045031 - DNA, 25 bp, Homo sapien
ccaacctttttgcagtgttaaatat

SEQ ID NO: 6045032 - DNA, 25 bp, Homo sapien
atatactttctcgatgtcttctttg

SEQ ID NO: 6045033 - DNA, 25 bp, Homo sapien
tgaggtagccaaacctgtaactcct

SEQ ID NO: 6045034 - DNA, 25 bp, Homo sapien
tgttaaatatcccattttaggtcca

SEQ ID NO: 6045035 - DNA, 25 bp, Homo sapien
atttcgtaccacagtgagtgaggta

SEQ ID NO: 6045036 - DNA, 25 bp, Homo sapien
acggtatatctgaatcgaaattgtc

SEQ ID NO: 6045037 - DNA, 25 bp, Homo sapien
gatgtcttctttgtcctccaattga

SEQ ID NO: 6045038 - DNA, 25 bp, Homo sapien
cgagagaattccctctatatcatac

SEQ ID NO: 6045039 - DNA, 25 bp, Homo sapien
acataaatcacacctcttacccctg

SEQ ID NO: 6045040 - DNA, 25 bp, Homo sapien
agaagctaacgcatcgaattagatt

SEQ ID NO: 6045041 - DNA, 25 bp, Homo sapien
tctttgtcctccaattgatgaaatt

SEQ ID NO: 6045042 - DNA, 25 bp, Homo sapien
taacgcatcgaattagatttgctaa

SEQ ID NO: 6045043 - DNA, 25 bp, Homo sapien
gcaatcagcccccaacctttttgca

SEQ ID NO: 6045044 - DNA, 25 bp, Homo sapien
ccatttgtaaccgtgtccaaccaat

SEQ ID NO: 6045045 - DNA, 25 bp, Homo sapien
cacattttacacagcctatggacat

SEQ ID NO: 6045046 - DNA, 25 bp, Homo sapien
caaccaatgcgaatatactttctcg

SEQ ID NO: 6045047 - DNA, 25 bp, Homo sapien
taagcagtccatctagcgtaatacc

SEQ ID NO: 6045048 - DNA, 25 bp, Homo sapien
cagcccccaacctttttgcagtgtt

SEQ ID NO: 6045049 - DNA, 25 bp, Homo sapien
ttttaatgtgtttaagcagtattcg

SEQ ID NO: 6045050 - DNA, 25 bp, Homo sapien
atcgtttgctagacataaatcacac

SEQ ID NO: 6045051 - DNA, 25 bp, Homo sapien
cctctatatcatacggtatatctga

SEQ ID NO: 6045052 - DNA, 25 bp, Homo sapien
tgaacatcgacgcatatgccggcaa

SEQ ID NO: 6045053 - DNA, 25 bp, Homo sapien
tgctatttttaatgtgtttaagcag

SEQ ID NO: 6045054 - DNA, 25 bp, Homo sapien
atacaggttcatcaattttaagcag

SEQ ID NO: 6045055 - DNA, 25 bp, Homo sapien
tgatgaaattggcttttctggtata

SEQ ID NO: 6045056 - DNA, 25 bp, Homo sapien
tcttacacttaatagggtctaccca

SEQ ID NO: 6045057 - DNA, 25 bp, Homo sapien
agcattgcagacatcgtttgctaga

SEQ ID NO: 6045058 - DNA, 25 bp, Homo sapien
tgctagacataaatcacacctctta

SEQ ID NO: 6045059 - DNA, 25 bp, Homo sapien
cttctcattgcgagcattgcagaca

SEQ ID NO: 6045060 - DNA, 25 bp, Homo sapien
ctaccaataattgtgcggttctttt

SEQ ID NO: 6045061 - DNA, 25 bp, Homo sapien
cgtgtccaaccaatgcgaatatact

SEQ ID NO: 6045062 - DNA, 25 bp, Homo sapien
atctagcgtaataccctctgctatt

SEQ ID NO: 6045063 - DNA, 25 bp, Homo sapien
cctttttgcagtgttaaatatccca

SEQ ID NO: 6045064 - DNA, 25 bp, Homo sapien
actccaggtaacgagagaattccct

SEQ ID NO: 6045065 - DNA, 25 bp, Homo sapien
tggtatagaagctaacgcatcgaat

SEQ ID NO: 6045066 - DNA, 25 bp, Homo sapien
gcagatcaattgaccaaatccaacc

SEQ ID NO: 6045067 - DNA, 25 bp, Homo sapien
gattagcttctcattgcgagcattg

SEQ ID NO: 6045068 - DNA, 25 bp, Homo sapien
caattccacattttacacagcctat

SEQ ID NO: 6045069 - DNA, 25 bp, Homo sapien
agtgagtgaggtagccaaacctgta

SEQ ID NO: 6045070 - DNA, 25 bp, Homo sapien
caattttaagcagtccatctagcgt

SEQ ID NO: 6045071 - DNA, 25 bp, Homo sapien
tttctcgatgtcttctttgtcctcc

SEQ ID NO: 6045072 - DNA, 25 bp, Homo sapien
attgcgagcattgcagacatcgttt

SEQ ID NO: 6045073 - DNA, 25 bp, Homo sapien
tgtgtttaagcagtattcggtgata

SEQ ID NO: 6045074 - DNA, 25 bp, Homo sapien
ttgcagtgttaaatatcccatttta

SEQ ID NO: 6045075 - DNA, 25 bp, Homo sapien
ggtccaactccaggtaacgagagaa

SEQ ID NO: 6045076 - DNA, 25 bp, Homo sapien
tggacatgaacatcgacgcatatgc

SEQ ID NO: 6045077 - DNA, 25 bp, Homo sapien
tatctgaatcgaaattgtctaccaa

SEQ ID NO: 6045078 - DNA, 25 bp, Homo sapien
atcccattttaggtccaactccagg

SEQ ID NO: 6045079 - DNA, 25 bp, Homo sapien
taccacagtgagtgaggtagccaaa

SEQ ID NO: 6045080 - DNA, 25 bp, Homo sapien
ttacacagcctatggacatgaacat

SEQ ID NO: 6045081 - DNA, 25 bp, Homo sapien
aattgatgaaatttggaagattcga

SEQ ID NO: 6045082 - DNA, 25 bp, Homo sapien
atcgaattagatttgctaatacagg

SEQ ID NO: 6045083 - DNA, 25 bp, Homo sapien
atcacacctcttacccctggccatg

SEQ ID NO: 6045084 - DNA, 25 bp, Homo sapien
tcctccaattgatgaaatttggaag

SEQ ID NO: 6045085 - DNA, 25 bp, Homo sapien
cctcttacccctggccatgcagatc

SEQ ID NO: 6045086 - DNA, 25 bp, Homo sapien
cgtaataccctctgctatttttaat

SEQ ID NO: 6045087 - DNA, 25 bp, Homo sapien
actcctttctagtatgctcggcagt

SEQ ID NO: 6045088 - DNA, 25 bp, Homo sapien
cggcagtcttacacttaatagggtc

SEQ ID NO: 6045089 - DNA, 25 bp, Homo sapien
agattcgattagcttctcattgcga

SEQ ID NO: 6045090 - DNA, 25 bp, Homo sapien
ggccatgcagatcaattgaccaaat

SEQ ID NO: 6045091 - DNA, 25 bp, Homo sapien
gtgcggttcttttgatgaaattggc

SEQ ID NO: 6045092 - DNA, 25 bp, Homo sapien
agcctatggacatgaacatcgacgc

SEQ ID NO: 6045093 - DNA, 25 bp, Homo sapien
acccctggccatgcagatcaattga

SEQ ID NO: 6045094 - DNA, 25 bp, Homo sapien
agtccatctagcgtaataccctctg

SEQ ID NO: 6045095 - DNA, 25 bp, Homo sapien
atagggtctacccaattccacattt

SEQ ID NO: 6045096 - DNA, 25 bp, Homo sapien
cctgtaactcctttctagtatgctc

SEQ ID NO: 6045097 - DNA, 25 bp, Homo sapien
aattgtctaccaataattgtgcggt

SEQ ID NO: 6045098 - DNA, 25 bp, Homo sapien
atgcgaatatactttctcgatgtct

SEQ ID NO: 6045099 - DNA, 25 bp, Homo sapien
tttggaagattcgattagcttctca

SEQ ID NO: 6045100 - DNA, 25 bp, Homo sapien
ttagatttgctaatacaggttcatc

SEQ ID NO: 6045101 - DNA, 25 bp, Homo sapien
ttcttttgatgaaattggcttttct

SEQ ID NO: 6045102 - DNA, 25 bp, Homo sapien
aattggcttttctggtatagaagct

SEQ ID NO: 6045103 - DNA, 25 bp, Homo sapien
ttgctaatacaggttcatcaatttt

SEQ ID NO: 6045104 - DNA, 25 bp, Homo sapien
aggtaacgagagaattccctctata

SEQ ID NO: 6045105 - DNA, 25 bp, Homo sapien
caattgaccaaatccaaccaaaacg

SEQ ID NO: 6045106 - DNA, 25 bp, Homo sapien
accctctgctatttttaatgtgttt

SEQ ID NO: 6045107 - DNA, 25 bp, Homo sapien
tctacccaattccacattttacaca

SEQ ID NO: 6045108 - DNA, 25 bp, Homo sapien
tatgctcggcagtcttacacttaat

SEQ ID NO: 6045109 - DNA, 25 bp, Homo sapien
aaatcatcgatttcggcaattacga

SEQ ID NO: 6045110 - DNA, 25 bp, Homo sapien
gattttggtgtttggatcctattga

SEQ ID NO: 6045111 - DNA, 25 bp, Homo sapien
aaatgctatcaagagcaattttcct

SEQ ID NO: 6045112 - DNA, 25 bp, Homo sapien
aggtgattatgctgcacaaacgatc

SEQ ID NO: 6045113 - DNA, 25 bp, Homo sapien
tccgctaaaatctttggaggacgtc

SEQ ID NO: 6045114 - DNA, 25 bp, Homo sapien
ggtgtttggatcctattgacggaac

SEQ ID NO: 6045115 - DNA, 25 bp, Homo sapien
tttaagaggtgaacagtttgcagta

SEQ ID NO: 6045116 - DNA, 25 bp, Homo sapien
aagagaattcaatctgaagtgattt

SEQ ID NO: 6045117 - DNA, 25 bp, Homo sapien
taacaagaattataaaaaggatgat

SEQ ID NO: 6045118 - DNA, 25 bp, Homo sapien
taattctccagtaaccacaggtgat

SEQ ID NO: 6045119 - DNA, 25 bp, Homo sapien
tccagtaaccacaggtgattatgct

SEQ ID NO: 6045120 - DNA, 25 bp, Homo sapien
ataaaagccaatgacgaagtttata

SEQ ID NO: 6045121 - DNA, 25 bp, Homo sapien
ggccatgagtcatttggttatatct

SEQ ID NO: 6045122 - DNA, 25 bp, Homo sapien
catcataaatgctatcaagagcaat

SEQ ID NO: 6045123 - DNA, 25 bp, Homo sapien
aacgaaataaaagccaatgacgaag

SEQ ID NO: 6045124 - DNA, 25 bp, Homo sapien
tggttgtattggatgccccaactta

SEQ ID NO: 6045125 - DNA, 25 bp, Homo sapien
tcagcttggttgtattggatgcccc

SEQ ID NO: 6045126 - DNA, 25 bp, Homo sapien
caaggactccactactattaccaag

SEQ ID NO: 6045127 - DNA, 25 bp, Homo sapien
tctttattgactaagagaattcaat

SEQ ID NO: 6045128 - DNA, 25 bp, Homo sapien
aagttcttatggggcccaagatttg

SEQ ID NO: 6045129 - DNA, 25 bp, Homo sapien
tgttgttcagcttggttgtattgga

SEQ ID NO: 6045130 - DNA, 25 bp, Homo sapien
gacggtgttgttcagcttggttgta

SEQ ID NO: 6045131 - DNA, 25 bp, Homo sapien
attgtggacggtgttgttcagcttg

SEQ ID NO: 6045132 - DNA, 25 bp, Homo sapien
tcagtttccgctaaaatctttggag

SEQ ID NO: 6045133 - DNA, 25 bp, Homo sapien
tttcgtgctgttagaggtttaggtg

SEQ ID NO: 6045134 - DNA, 25 bp, Homo sapien
taccaagaatgataattctccagta

SEQ ID NO: 6045135 - DNA, 25 bp, Homo sapien
atcctcatcaggattgagcgacgca

SEQ ID NO: 6045136 - DNA, 25 bp, Homo sapien
tattggatgccccaacttagtttta

SEQ ID NO: 6045137 - DNA, 25 bp, Homo sapien
gacgaagtttataacaagaattata

SEQ ID NO: 6045138 - DNA, 25 bp, Homo sapien
tttggttatatctttcgtgctgtta

SEQ ID NO: 6045139 - DNA, 25 bp, Homo sapien
gtgatttctcacaaggactccacta

SEQ ID NO: 6045140 - DNA, 25 bp, Homo sapien
caagctgtacgaaaggcgtctttat

SEQ ID NO: 6045141 - DNA, 25 bp, Homo sapien
gatgattttctgtttacaaacgatc

SEQ ID NO: 6045142 - DNA, 25 bp, Homo sapien
acagtttgcagtatgtctggcctta

SEQ ID NO: 6045143 - DNA, 25 bp, Homo sapien
catcaggattgagcgacgcattcgt

SEQ ID NO: 6045144 - DNA, 25 bp, Homo sapien
ttgactaagagaattcaatctgaag

SEQ ID NO: 6045145 - DNA, 25 bp, Homo sapien
aggaagattttggtgtttggatcct

SEQ ID NO: 6045146 - DNA, 25 bp, Homo sapien
tgcagtatgtctggccttaattgtg

SEQ ID NO: 6045147 - DNA, 25 bp, Homo sapien
gccttaattgtggacggtgttgttc

SEQ ID NO: 6045148 - DNA, 25 bp, Homo sapien
gaattataaaaaggatgattttctg

SEQ ID NO: 6045149 - DNA, 25 bp, Homo sapien
tatcaagagcaattttcctgatgat

SEQ ID NO: 6045150 - DNA, 25 bp, Homo sapien
gctgttagaggtttaggtgccttct

SEQ ID NO: 6045151 - DNA, 25 bp, Homo sapien
taaaaaggatgattttctgtttaca

SEQ ID NO: 6045152 - DNA, 25 bp, Homo sapien
tttggaggacgtcaggcaaatcatc

SEQ ID NO: 6045153 - DNA, 25 bp, Homo sapien
ttgaaaggccatgagtcatttggtt

SEQ ID NO: 6045154 - DNA, 25 bp, Homo sapien
gccaatgacgaagtttataacaaga

SEQ ID NO: 6045155 - DNA, 25 bp, Homo sapien
aacgatcatcataaatgctatcaag

SEQ ID NO: 6045156 - DNA, 25 bp, Homo sapien
ttatgctgcacaaacgatcatcata

SEQ ID NO: 6045157 - DNA, 25 bp, Homo sapien
aaggcgtctttattgactaagagaa

SEQ ID NO: 6045158 - DNA, 25 bp, Homo sapien
tctgaagtgatttctcacaaggact

SEQ ID NO: 6045159 - DNA, 25 bp, Homo sapien
tcaggcaaatcatcgatttcggcaa

SEQ ID NO: 6045160 - DNA, 25 bp, Homo sapien
tgcacaaacgatcatcataaatgct

SEQ ID NO: 6045161 - DNA, 25 bp, Homo sapien
tggatcctattgacggaaccaaggg

SEQ ID NO: 6045162 - DNA, 25 bp, Homo sapien
ttctcacaaggactccactactatt

SEQ ID NO: 6045163 - DNA, 25 bp, Homo sapien
gagcaattttcctgatgataaggta

SEQ ID NO: 6045164 - DNA, 25 bp, Homo sapien
tgatgataaggtagttggtgaagaa

SEQ ID NO: 6045165 - DNA, 25 bp, Homo sapien
agttggtgaagaatcctcatcagga

SEQ ID NO: 6045166 - DNA, 25 bp, Homo sapien
gaatgataattctccagtaaccaca

SEQ ID NO: 6045167 - DNA, 25 bp, Homo sapien
aggacgtcaggcaaatcatcgattt

SEQ ID NO: 6045168 - DNA, 25 bp, Homo sapien
tgtctggccttaattgtggacggtg

SEQ ID NO: 6045169 - DNA, 25 bp, Homo sapien
aaacgatcagtttccgctaaaatct

SEQ ID NO: 6045170 - DNA, 25 bp, Homo sapien
cattcgtctcaggaattttaaacga

SEQ ID NO: 6045171 - DNA, 25 bp, Homo sapien
caagatttgaaaggccatgagtcat

SEQ ID NO: 6045172 - DNA, 25 bp, Homo sapien
tttctgtttacaaacgatcagtttc

SEQ ID NO: 6045173 - DNA, 25 bp, Homo sapien
tcggcaattacgaaggtggtagaaa

SEQ ID NO: 6045174 - DNA, 25 bp, Homo sapien
tgaagaatcctcatcaggattgagc

SEQ ID NO: 6045175 - DNA, 25 bp, Homo sapien
gattgagcgacgcattcgtctcagg

SEQ ID NO: 6045176 - DNA, 25 bp, Homo sapien
tactattaccaagaatgataattct

SEQ ID NO: 6045177 - DNA, 25 bp, Homo sapien
attcaatctgaagtgatttctcaca

SEQ ID NO: 6045178 - DNA, 25 bp, Homo sapien
cttatggggcccaagatttgaaagg

SEQ ID NO: 6045179 - DNA, 25 bp, Homo sapien
tcgatttcggcaattacgaaggtgg

SEQ ID NO: 6045180 - DNA, 25 bp, Homo sapien
ctccactactattaccaagaatgat

SEQ ID NO: 6045181 - DNA, 25 bp, Homo sapien
gagtcatttggttatatctttcgtg

SEQ ID NO: 6045182 - DNA, 25 bp, Homo sapien
gggcccaagatttgaaaggccatga

SEQ ID NO: 6045183 - DNA, 25 bp, Homo sapien
gtttacaaacgatcagtttccgcta

SEQ ID NO: 6045184 - DNA, 25 bp, Homo sapien
gtacgaaaggcgtctttattgacta

SEQ ID NO: 6045185 - DNA, 25 bp, Homo sapien
aggtgaacagtttgcagtatgtctg

SEQ ID NO: 6045186 - DNA, 25 bp, Homo sapien
aaccacaggtgattatgctgcacaa

SEQ ID NO: 6045187 - DNA, 25 bp, Homo sapien
aaaatctttggaggacgtcaggcaa

SEQ ID NO: 6045188 - DNA, 25 bp, Homo sapien
taaggtagttggtgaagaatcctca

SEQ ID NO: 6045189 - DNA, 25 bp, Homo sapien
ttttcctgatgataaggtagttggt

SEQ ID NO: 6045190 - DNA, 25 bp, Homo sapien
gcgacgcattcgtctcaggaatttt

SEQ ID NO: 6045191 - DNA, 25 bp, Homo sapien
agaggtttaggtgccttctattctc

SEQ ID NO: 6045192 - DNA, 25 bp, Homo sapien
tatatctttcgtgctgttagaggtt

SEQ ID NO: 6045193 - DNA, 25 bp, Homo sapien
gtttgttcatcatgagaggagtgtc

SEQ ID NO: 6045194 - DNA, 25 bp, Homo sapien
ggattttggtccatgactctgcatc

SEQ ID NO: 6045195 - DNA, 25 bp, Homo sapien
taacgtggattttggtccatgactc

SEQ ID NO: 6045196 - DNA, 25 bp, Homo sapien
atggatacctccagcttcatggaca

SEQ ID NO: 6045197 - DNA, 25 bp, Homo sapien
gttggggcatccaatacaaccaagc

SEQ ID NO: 6045198 - DNA, 25 bp, Homo sapien
cagcacgaaagatataaccaaatga

SEQ ID NO: 6045199 - DNA, 25 bp, Homo sapien
actaagttggggcatccaatacaac

SEQ ID NO: 6045200 - DNA, 25 bp, Homo sapien
tctaccgttaccgaagtctagagga

SEQ ID NO: 6045201 - DNA, 25 bp, Homo sapien
gagtgtcccttttcaactccctcta

SEQ ID NO: 6045202 - DNA, 25 bp, Homo sapien
caagtgcaaagatttggatatattt

SEQ ID NO: 6045203 - DNA, 25 bp, Homo sapien
agtgtctaacgtggattttggtcca

SEQ ID NO: 6045204 - DNA, 25 bp, Homo sapien
ttggtccatgactctgcatctgaag

SEQ ID NO: 6045205 - DNA, 25 bp, Homo sapien
aattaaggccagacatactgcaaac

SEQ ID NO: 6045206 - DNA, 25 bp, Homo sapien
acatactgcaaactgttcacctctt

SEQ ID NO: 6045207 - DNA, 25 bp, Homo sapien
gtaagaaagtttgataggcagacgt

SEQ ID NO: 6045208 - DNA, 25 bp, Homo sapien
agctagcgttctaccgttaccgaag

SEQ ID NO: 6045209 - DNA, 25 bp, Homo sapien
cacttgacgctataactcccttcgt

SEQ ID NO: 6045210 - DNA, 25 bp, Homo sapien
gtgggccacttgacgctataactcc

SEQ ID NO: 6045211 - DNA, 25 bp, Homo sapien
tgctaagcccaatgctaacaaacag

SEQ ID NO: 6045212 - DNA, 25 bp, Homo sapien
tggtcccagatcttttcttggtaag

SEQ ID NO: 6045213 - DNA, 25 bp, Homo sapien
agcttcatggacaataacgttgcct

SEQ ID NO: 6045214 - DNA, 25 bp, Homo sapien
caaacagtacttggcttgagaatcc

SEQ ID NO: 6045215 - DNA, 25 bp, Homo sapien
ctcatggcctttcaaatcttgggcc

SEQ ID NO: 6045216 - DNA, 25 bp, Homo sapien
tataaccaaatgactcatggccttt

SEQ ID NO: 6045217 - DNA, 25 bp, Homo sapien
gtccacaattaaggccagacatact

SEQ ID NO: 6045218 - DNA, 25 bp, Homo sapien
tttttgatagcagtttgttcatcat

SEQ ID NO: 6045219 - DNA, 25 bp, Homo sapien
ccgttaccgaagtctagaggaacat

SEQ ID NO: 6045220 - DNA, 25 bp, Homo sapien
cagatcttttcttggtaagaaagtt

SEQ ID NO: 6045221 - DNA, 25 bp, Homo sapien
caaatgactcatggcctttcaaatc

SEQ ID NO: 6045222 - DNA, 25 bp, Homo sapien
cagacgtaaatatacgtctgctaag

SEQ ID NO: 6045223 - DNA, 25 bp, Homo sapien
tgctaacaaacagtacttggcttga

SEQ ID NO: 6045224 - DNA, 25 bp, Homo sapien
ggatatatttagtttgtttttgata

SEQ ID NO: 6045225 - DNA, 25 bp, Homo sapien
tcaactccctctaaagtaatcatgt

SEQ ID NO: 6045226 - DNA, 25 bp, Homo sapien
gcatccaatacaaccaagctgaaca

SEQ ID NO: 6045227 - DNA, 25 bp, Homo sapien
acctccagcttcatggacaataacg

SEQ ID NO: 6045228 - DNA, 25 bp, Homo sapien
gcagcatggtcccagatcttttctt

SEQ ID NO: 6045229 - DNA, 25 bp, Homo sapien
atagcagtttgttcatcatgagagg

SEQ ID NO: 6045230 - DNA, 25 bp, Homo sapien
actcgcgtgggccacttgacgctat

SEQ ID NO: 6045231 - DNA, 25 bp, Homo sapien
aggcacctaaacctctaacagcacg

SEQ ID NO: 6045232 - DNA, 25 bp, Homo sapien
accgaagtctagaggaacatcttcc

SEQ ID NO: 6045233 - DNA, 25 bp, Homo sapien
aggaacatcttccatggcatctgta

SEQ ID NO: 6045234 - DNA, 25 bp, Homo sapien
gcccaatgctaacaaacagtacttg

SEQ ID NO: 6045235 - DNA, 25 bp, Homo sapien
gacgctataactcccttcgtagcta

SEQ ID NO: 6045236 - DNA, 25 bp, Homo sapien
atcttccatggcatctgtatggata

SEQ ID NO: 6045237 - DNA, 25 bp, Homo sapien
gcttgagaatccaagtgcaaagatt

SEQ ID NO: 6045238 - DNA, 25 bp, Homo sapien
tatttagtttgtttttgatagcagt

SEQ ID NO: 6045239 - DNA, 25 bp, Homo sapien
tacttggcttgagaatccaagtgca

SEQ ID NO: 6045240 - DNA, 25 bp, Homo sapien
atctgtatggatacctccagcttca

SEQ ID NO: 6045241 - DNA, 25 bp, Homo sapien
atggacaataacgttgcctgcagca

SEQ ID NO: 6045242 - DNA, 25 bp, Homo sapien
ctaaacctctaacagcacgaaagat

SEQ ID NO: 6045243 - DNA, 25 bp, Homo sapien
aataacgttgcctgcagcatggtcc

SEQ ID NO: 6045244 - DNA, 25 bp, Homo sapien
ttcttggtaagaaagtttgataggc

SEQ ID NO: 6045245 - DNA, 25 bp, Homo sapien
atcatgtctttagtgtcttttaagt

SEQ ID NO: 6045246 - DNA, 25 bp, Homo sapien
accaagctgaacaacaccgtccaca

SEQ ID NO: 6045247 - DNA, 25 bp, Homo sapien
ctgaacaacaccgtccacaattaag

SEQ ID NO: 6045248 - DNA, 25 bp, Homo sapien
taactcccttcgtagctagcgttct

SEQ ID NO: 6045249 - DNA, 25 bp, Homo sapien
ccctctaaagtaatcatgtctttag

SEQ ID NO: 6045250 - DNA, 25 bp, Homo sapien
tgagaggagtgtcccttttcaactc

SEQ ID NO: 6045251 - DNA, 25 bp, Homo sapien
ctctaacagcacgaaagatataacc

SEQ ID NO: 6045252 - DNA, 25 bp, Homo sapien
catgactctgcatctgaagatggag

SEQ ID NO: 6045253 - DNA, 25 bp, Homo sapien
gtttgtttttgatagcagtttgttc

SEQ ID NO: 6045254 - DNA, 25 bp, Homo sapien
gatggagaatagaaggcacctaaac

SEQ ID NO: 6045255 - DNA, 25 bp, Homo sapien
catgtaactcgcgtgggccacttga

SEQ ID NO: 6045256 - DNA, 25 bp, Homo sapien
aagtttgataggcagacgtaaatat

SEQ ID NO: 6045257 - DNA, 25 bp, Homo sapien
gataggcagacgtaaatatacgtct

SEQ ID NO: 6045258 - DNA, 25 bp, Homo sapien
aacaccgtccacaattaaggccaga

SEQ ID NO: 6045259 - DNA, 25 bp, Homo sapien
catggcatctgtatggatacctcca

SEQ ID NO: 6045260 - DNA, 25 bp, Homo sapien
caaagatttggatatatttagtttg

SEQ ID NO: 6045261 - DNA, 25 bp, Homo sapien
taaatatacgtctgctaagcccaat

SEQ ID NO: 6045262 - DNA, 25 bp, Homo sapien
tgtcttttaagtgtctaacgtggat

SEQ ID NO: 6045263 - DNA, 25 bp, Homo sapien
aatacaaccaagctgaacaacaccg

SEQ ID NO: 6045264 - DNA, 25 bp, Homo sapien
ttgcctgcagcatggtcccagatct

SEQ ID NO: 6045265 - DNA, 25 bp, Homo sapien
taaaactaagttggggcatccaata

SEQ ID NO: 6045266 - DNA, 25 bp, Homo sapien
gaatagaaggcacctaaacctctaa

SEQ ID NO: 6045267 - DNA, 25 bp, Homo sapien
ccttcgtagctagcgttctaccgtt

SEQ ID NO: 6045268 - DNA, 25 bp, Homo sapien
caaatcttgggccccataagaactt

SEQ ID NO: 6045269 - DNA, 25 bp, Homo sapien
tgtagacaccaccaagtcatgtaac

SEQ ID NO: 6045270 - DNA, 25 bp, Homo sapien
gaatccaagtgcaaagatttggata

SEQ ID NO: 6045271 - DNA, 25 bp, Homo sapien
tctgcatctgaagatggagaataga

SEQ ID NO: 6045272 - DNA, 25 bp, Homo sapien
gtctagaggaacatcttccatggca

SEQ ID NO: 6045273 - DNA, 25 bp, Homo sapien
tacgtctgctaagcccaatgctaac

SEQ ID NO: 6045274 - DNA, 25 bp, Homo sapien
gcctttcaaatcttgggccccataa

SEQ ID NO: 6045275 - DNA, 25 bp, Homo sapien
ggccagacatactgcaaactgttca

SEQ ID NO: 6045276 - DNA, 25 bp, Homo sapien
tctttagtgtcttttaagtgtctaa

SEQ ID NO: 6045277 - DNA, 25 bp, Homo sapien
caagtcatgtaactcgcgtgggcca

SEQ ID NO: 6045278 - DNA, 25 bp, Homo sapien
tgcaaactgttcacctcttaaaaac

SEQ ID NO: 6045279 - DNA, 25 bp, Homo sapien
aaagtaatcatgtctttagtgtctt

SEQ ID NO: 6045280 - DNA, 25 bp, Homo sapien
tcatcatgagaggagtgtccctttt

SEQ ID NO: 6045281 - DNA, 25 bp, Homo sapien
gaaagatataaccaaatgactcatg

SEQ ID NO: 6045282 - DNA, 25 bp, Homo sapien
caccaccaagtcatgtaactcgcgt

SEQ ID NO: 6045283 - DNA, 25 bp, Homo sapien
tctgaagatggagaatagaaggcac

SEQ ID NO: 6045284 - DNA, 25 bp, Homo sapien
caagtcgcccccatcttgtgtgctg

SEQ ID NO: 6045285 - DNA, 25 bp, Homo sapien
taccgctgacgctgttcaagccgct

SEQ ID NO: 6045286 - DNA, 25 bp, Homo sapien
cgaaggtgccggtgtcgttgtcggc

SEQ ID NO: 6045287 - DNA, 25 bp, Homo sapien
ttcttgtatggcctgtgaatactgt

SEQ ID NO: 6045288 - DNA, 25 bp, Homo sapien
acagagtcttgggtattgacggtgg

SEQ ID NO: 6045289 - DNA, 25 bp, Homo sapien
gacggttctttccaacaatacgcta

SEQ ID NO: 6045290 - DNA, 25 bp, Homo sapien
tgaagtctgctaacttgatggccgg

SEQ ID NO: 6045291 - DNA, 25 bp, Homo sapien
atcttgtgtgctggtatcaccgtct

SEQ ID NO: 6045292 - DNA, 25 bp, Homo sapien
tggccggtcactgggttgctatctc

SEQ ID NO: 6045293 - DNA, 25 bp, Homo sapien
ggtgactggccattgccagttaagc

SEQ ID NO: 6045294 - DNA, 25 bp, Homo sapien
atacaaagatattccagttccaaag

SEQ ID NO: 6045295 - DNA, 25 bp, Homo sapien
agatattccagttccaaagccaaag

SEQ ID NO: 6045296 - DNA, 25 bp, Homo sapien
accattagtcggtggtcacgaaggt

SEQ ID NO: 6045297 - DNA, 25 bp, Homo sapien
tttggctgttcaatacgccaaggct

SEQ ID NO: 6045298 - DNA, 25 bp, Homo sapien
taaatactctggtgtctgtcacact

SEQ ID NO: 6045299 - DNA, 25 bp, Homo sapien
acttgatggccggtcactgggttgc

SEQ ID NO: 6045300 - DNA, 25 bp, Homo sapien
ctgtgaatactgtgaattgggtaac

SEQ ID NO: 6045301 - DNA, 25 bp, Homo sapien
ctggaagatcggtgactacgccggt

SEQ ID NO: 6045302 - DNA, 25 bp, Homo sapien
atggttgaacggttcttgtatggcc

SEQ ID NO: 6045303 - DNA, 25 bp, Homo sapien
gcacgcttggcacggtgactggcca

SEQ ID NO: 6045304 - DNA, 25 bp, Homo sapien
ttgccagttaagctaccattagtcg

SEQ ID NO: 6045305 - DNA, 25 bp, Homo sapien
agtcggtggtcacgaaggtgccggt

SEQ ID NO: 6045306 - DNA, 25 bp, Homo sapien
gaatcccacggtaagttggaataca

SEQ ID NO: 6045307 - DNA, 25 bp, Homo sapien
tgtcgttgtcggcatgggtgaaaac

SEQ ID NO: 6045308 - DNA, 25 bp, Homo sapien
caaggtaccgacttggcccaagtcg

SEQ ID NO: 6045309 - DNA, 25 bp, Homo sapien
atcttctacgaatcccacggtaagt

SEQ ID NO: 6045310 - DNA, 25 bp, Homo sapien
ggccaacgaattgttgatcaacgtt

SEQ ID NO: 6045311 - DNA, 25 bp, Homo sapien
ctacaaggctttgaagtctgctaac

SEQ ID NO: 6045312 - DNA, 25 bp, Homo sapien
tgtctggttacacccacgacggttc

SEQ ID NO: 6045313 - DNA, 25 bp, Homo sapien
catgggtgaaaacgttaagggctgg

SEQ ID NO: 6045314 - DNA, 25 bp, Homo sapien
tatggcctgtgaatactgtgaattg

SEQ ID NO: 6045315 - DNA, 25 bp, Homo sapien
tgtctgtcacactgacttgcacgct

SEQ ID NO: 6045316 - DNA, 25 bp, Homo sapien
tatctccggtgctgctggtggtcta

SEQ ID NO: 6045317 - DNA, 25 bp, Homo sapien
tcttgggtattgacggtggtgaagg

SEQ ID NO: 6045318 - DNA, 25 bp, Homo sapien
gttggaatacaaagatattccagtt

SEQ ID NO: 6045319 - DNA, 25 bp, Homo sapien
gtaacgaatccaactgtcctcacgc

SEQ ID NO: 6045320 - DNA, 25 bp, Homo sapien
gttaagctaccattagtcggtggtc

SEQ ID NO: 6045321 - DNA, 25 bp, Homo sapien
cggtaagttggaatacaaagatatt

SEQ ID NO: 6045322 - DNA, 25 bp, Homo sapien
tgttcaatacgccaaggctatgggt

SEQ ID NO: 6045323 - DNA, 25 bp, Homo sapien
tggtcacgaaggtgccggtgtcgtt

SEQ ID NO: 6045324 - DNA, 25 bp, Homo sapien
tgaaaacgttaagggctggaagatc

SEQ ID NO: 6045325 - DNA, 25 bp, Homo sapien
aatccaactgtcctcacgctgactt

SEQ ID NO: 6045326 - DNA, 25 bp, Homo sapien
tgacgctgttcaagccgctcacatt

SEQ ID NO: 6045327 - DNA, 25 bp, Homo sapien
tattgacggtggtgaaggtaaggaa

SEQ ID NO: 6045328 - DNA, 25 bp, Homo sapien
tgacttgcacgcttggcacggtgac

SEQ ID NO: 6045329 - DNA, 25 bp, Homo sapien
ctgacttgtctggttacacccacga

SEQ ID NO: 6045330 - DNA, 25 bp, Homo sapien
aagccgctcacattcctcaaggtac

SEQ ID NO: 6045331 - DNA, 25 bp, Homo sapien
tgtgctggtatcaccgtctacaagg

SEQ ID NO: 6045332 - DNA, 25 bp, Homo sapien
ctgctaacttgatggccggtcactg

SEQ ID NO: 6045333 - DNA, 25 bp, Homo sapien
tggtatcaccgtctacaaggctttg

SEQ ID NO: 6045334 - DNA, 25 bp, Homo sapien
tgttcaagccgctcacattcctcaa

SEQ ID NO: 6045335 - DNA, 25 bp, Homo sapien
taagggctggaagatcggtgactac

SEQ ID NO: 6045336 - DNA, 25 bp, Homo sapien
tgtcggcatgggtgaaaacgttaag

SEQ ID NO: 6045337 - DNA, 25 bp, Homo sapien
ggttgctatctccggtgctgctggt

SEQ ID NO: 6045338 - DNA, 25 bp, Homo sapien
gttgatcaacgttaaatactctggt

SEQ ID NO: 6045339 - DNA, 25 bp, Homo sapien
gatcggtgactacgccggtatcaaa

SEQ ID NO: 6045340 - DNA, 25 bp, Homo sapien
cggtgctgctggtggtctaggttct

SEQ ID NO: 6045341 - DNA, 25 bp, Homo sapien
caccgtctacaaggctttgaagtct

SEQ ID NO: 6045342 - DNA, 25 bp, Homo sapien
tctttccaacaatacgctaccgctg

SEQ ID NO: 6045343 - DNA, 25 bp, Homo sapien
tgctggtggtctaggttctttggct

SEQ ID NO: 6045344 - DNA, 25 bp, Homo sapien
ggctttgaagtctgctaacttgatg

SEQ ID NO: 6045345 - DNA, 25 bp, Homo sapien
atacgctaccgctgacgctgttcaa

SEQ ID NO: 6045346 - DNA, 25 bp, Homo sapien
tggtctaggttctttggctgttcaa

SEQ ID NO: 6045347 - DNA, 25 bp, Homo sapien
tgccggtgtcgttgtcggcatgggt

SEQ ID NO: 6045348 - DNA, 25 bp, Homo sapien
atactgtgaattgggtaacgaatcc

SEQ ID NO: 6045349 - DNA, 25 bp, Homo sapien
cgccggtatcaaatggttgaacggt

SEQ ID NO: 6045350 - DNA, 25 bp, Homo sapien
ctcacattcctcaaggtaccgactt

SEQ ID NO: 6045351 - DNA, 25 bp, Homo sapien
caacgttaaatactctggtgtctgt

SEQ ID NO: 6045352 - DNA, 25 bp, Homo sapien
tccaaagccaaaggccaacgaattg

SEQ ID NO: 6045353 - DNA, 25 bp, Homo sapien
gcccccatcttgtgtgctggtatca

SEQ ID NO: 6045354 - DNA, 25 bp, Homo sapien
tcacactgacttgcacgcttggcac

SEQ ID NO: 6045355 - DNA, 25 bp, Homo sapien
tccagttccaaagccaaaggccaac

SEQ ID NO: 6045356 - DNA, 25 bp, Homo sapien
ctctggtgtctgtcacactgacttg

SEQ ID NO: 6045357 - DNA, 25 bp, Homo sapien
gaattgggtaacgaatccaactgtc

SEQ ID NO: 6045358 - DNA, 25 bp, Homo sapien
aacgttaagggctggaagatcggtg

SEQ ID NO: 6045359 - DNA, 25 bp, Homo sapien
aggttctttggctgttcaatacgcc

SEQ ID NO: 6045360 - DNA, 25 bp, Homo sapien
tctacgaatcccacggtaagttgga

SEQ ID NO: 6045361 - DNA, 25 bp, Homo sapien
tggccattgccagttaagctaccat

SEQ ID NO: 6045362 - DNA, 25 bp, Homo sapien
gccaaaggccaacgaattgttgatc

SEQ ID NO: 6045363 - DNA, 25 bp, Homo sapien
ttcctcaaggtaccgacttggccca

SEQ ID NO: 6045364 - DNA, 25 bp, Homo sapien
tcactgggttgctatctccggtgct

SEQ ID NO: 6045365 - DNA, 25 bp, Homo sapien
ctcacgctgacttgtctggttacac

SEQ ID NO: 6045366 - DNA, 25 bp, Homo sapien
cgaattgttgatcaacgttaaatac

SEQ ID NO: 6045367 - DNA, 25 bp, Homo sapien
tggcacggtgactggccattgccag

SEQ ID NO: 6045368 - DNA, 25 bp, Homo sapien
tgggttacagagtcttgggtattga

SEQ ID NO: 6045369 - DNA, 25 bp, Homo sapien
gaacggttcttgtatggcctgtgaa

SEQ ID NO: 6045370 - DNA, 25 bp, Homo sapien
tacgccaaggctatgggttacagag

SEQ ID NO: 6045371 - DNA, 25 bp, Homo sapien
aaggctatgggttacagagtcttgg

SEQ ID NO: 6045372 - DNA, 25 bp, Homo sapien
actgtcctcacgctgacttgtctgg

SEQ ID NO: 6045373 - DNA, 25 bp, Homo sapien
caacaatacgctaccgctgacgctg

SEQ ID NO: 6045374 - DNA, 25 bp, Homo sapien
tatcaaatggttgaacggttcttgt

SEQ ID NO: 6045375 - DNA, 25 bp, Homo sapien
tgactacgccggtatcaaatggttg

SEQ ID NO: 6045376 - DNA, 25 bp, Homo sapien
tctggtgtcagctctgttaccgacg

SEQ ID NO: 6045377 - DNA, 25 bp, Homo sapien
tgataccagcacacaagatgggggc

SEQ ID NO: 6045378 - DNA, 25 bp, Homo sapien
ctagaccaccagcagcaccggagat

SEQ ID NO: 6045379 - DNA, 25 bp, Homo sapien
accggccatcaagttagcagacttc

SEQ ID NO: 6045380 - DNA, 25 bp, Homo sapien
caaacctctggcgaagaagtccaaa

SEQ ID NO: 6045381 - DNA, 25 bp, Homo sapien
cagcaccggagatagcaacccagtg

SEQ ID NO: 6045382 - DNA, 25 bp, Homo sapien
tctgttaccgacgtaagaaccaaca

SEQ ID NO: 6045383 - DNA, 25 bp, Homo sapien
cacaagatgggggcgacttgggcca

SEQ ID NO: 6045384 - DNA, 25 bp, Homo sapien
agtgaagtcaatgaagacttcacca

SEQ ID NO: 6045385 - DNA, 25 bp, Homo sapien
tcttccttaccttcaccaccgtcaa

SEQ ID NO: 6045386 - DNA, 25 bp, Homo sapien
ccgttagctctaacgtatctggtag

SEQ ID NO: 6045387 - DNA, 25 bp, Homo sapien
gacaaccttgattggagacttgacc

SEQ ID NO: 6045388 - DNA, 25 bp, Homo sapien
agcaccgacaatgtccttttcctta

SEQ ID NO: 6045389 - DNA, 25 bp, Homo sapien
agacggtgataccagcacacaagat

SEQ ID NO: 6045390 - DNA, 25 bp, Homo sapien
gaagacttcaccaccgatggatctg

SEQ ID NO: 6045391 - DNA, 25 bp, Homo sapien
ccaagactctgtaacccatagcctt

SEQ ID NO: 6045392 - DNA, 25 bp, Homo sapien
taacccatagccttggcgtattgaa

SEQ ID NO: 6045393 - DNA, 25 bp, Homo sapien
acttggcaccagctggcataccgac

SEQ ID NO: 6045394 - DNA, 25 bp, Homo sapien
cttgattggagacttgaccaaacct

SEQ ID NO: 6045395 - DNA, 25 bp, Homo sapien
catcagaacaacacttggcaccagc

SEQ ID NO: 6045396 - DNA, 25 bp, Homo sapien
cggagatagcaacccagtgaccggc

SEQ ID NO: 6045397 - DNA, 25 bp, Homo sapien
tcaaagccttgtagacggtgatacc

SEQ ID NO: 6045398 - DNA, 25 bp, Homo sapien
acgtatctggtagaagcttcaatag

SEQ ID NO: 6045399 - DNA, 25 bp, Homo sapien
gtgagcaccaccgtcagtggccttt

SEQ ID NO: 6045400 - DNA, 25 bp, Homo sapien
gtggtaccgttagctctaacgtatc

SEQ ID NO: 6045401 - DNA, 25 bp, Homo sapien
accagctggcataccgaccaaaacg

SEQ ID NO: 6045402 - DNA, 25 bp, Homo sapien
accgtcaatacccaagactctgtaa

SEQ ID NO: 6045403 - DNA, 25 bp, Homo sapien
tgaagacatcagaacaacacttggc

SEQ ID NO: 6045404 - DNA, 25 bp, Homo sapien
ttcgtaaatttctggcaaggtagac

SEQ ID NO: 6045405 - DNA, 25 bp, Homo sapien
accaccgtcagtggcctttagaaca

SEQ ID NO: 6045406 - DNA, 25 bp, Homo sapien
gttagcagacttcaaagccttgtag

SEQ ID NO: 6045407 - DNA, 25 bp, Homo sapien
tagaacagcaccgacaatgtccttt

SEQ ID NO: 6045408 - DNA, 25 bp, Homo sapien
gatgggggcgacttgggccaagtcg

SEQ ID NO: 6045409 - DNA, 25 bp, Homo sapien
actctgtaacccatagccttggcgt

SEQ ID NO: 6045410 - DNA, 25 bp, Homo sapien
gacaatgtccttttccttagtgaag

SEQ ID NO: 6045411 - DNA, 25 bp, Homo sapien
cttgaccaaacctctggcgaagaag

SEQ ID NO: 6045412 - DNA, 25 bp, Homo sapien
aagaaccaacaatagagatggactt

SEQ ID NO: 6045413 - DNA, 25 bp, Homo sapien
ttggcgtattgaacagccaaagaac

SEQ ID NO: 6045414 - DNA, 25 bp, Homo sapien
tggacttgacgacttggttgaagac

SEQ ID NO: 6045415 - DNA, 25 bp, Homo sapien
caacaatagagatggacttgacgac

SEQ ID NO: 6045416 - DNA, 25 bp, Homo sapien
ttcaccaccgatggatctgaataat

SEQ ID NO: 6045417 - DNA, 25 bp, Homo sapien
cgacgtaagaaccaacaatagagat

SEQ ID NO: 6045418 - DNA, 25 bp, Homo sapien
acagccaaagaacctagaccaccag

SEQ ID NO: 6045419 - DNA, 25 bp, Homo sapien
gtccttttccttagtgaagtcaatg

SEQ ID NO: 6045420 - DNA, 25 bp, Homo sapien
cagcacacaagatgggggcgacttg

SEQ ID NO: 6045421 - DNA, 25 bp, Homo sapien
aatttctggcaaggtagacaagccg

SEQ ID NO: 6045422 - DNA, 25 bp, Homo sapien
gaagaagtccaaagcttctctggtg

SEQ ID NO: 6045423 - DNA, 25 bp, Homo sapien
agcttctctggtgtcagctctgtta

SEQ ID NO: 6045424 - DNA, 25 bp, Homo sapien
tggcaaggtagacaagccgacaacc

SEQ ID NO: 6045425 - DNA, 25 bp, Homo sapien
aacaacacttggcaccagctggcat

SEQ ID NO: 6045426 - DNA, 25 bp, Homo sapien
ttcaccaccgtcaatacccaagact

SEQ ID NO: 6045427 - DNA, 25 bp, Homo sapien
ggatctgaataattcttccttacct

SEQ ID NO: 6045428 - DNA, 25 bp, Homo sapien
gtccaaagcttctctggtgtcagct

SEQ ID NO: 6045429 - DNA, 25 bp, Homo sapien
gtcagtggcctttagaacagcaccg

SEQ ID NO: 6045430 - DNA, 25 bp, Homo sapien
caagccgacaaccttgattggagac

SEQ ID NO: 6045431 - DNA, 25 bp, Homo sapien
ggcctttagaacagcaccgacaatg

SEQ ID NO: 6045432 - DNA, 25 bp, Homo sapien
catcttttcgtaaatttctggcaag

SEQ ID NO: 6045433 - DNA, 25 bp, Homo sapien
cgacttgggccaagtcggtaccttg

SEQ ID NO: 6045434 - DNA, 25 bp, Homo sapien
gtcagctctgttaccgacgtaagaa

SEQ ID NO: 6045435 - DNA, 25 bp, Homo sapien
gttgatgacaccgtgagcaccaccg

SEQ ID NO: 6045436 - DNA, 25 bp, Homo sapien
ccttgtagacggtgataccagcaca

SEQ ID NO: 6045437 - DNA, 25 bp, Homo sapien
gaataattcttccttaccttcacca

SEQ ID NO: 6045438 - DNA, 25 bp, Homo sapien
catcaagttagcagacttcaaagcc

SEQ ID NO: 6045439 - DNA, 25 bp, Homo sapien
tagagatggacttgacgacttggtt

SEQ ID NO: 6045440 - DNA, 25 bp, Homo sapien
ccaccagcagcaccggagatagcaa

SEQ ID NO: 6045441 - DNA, 25 bp, Homo sapien
gacaccgtgagcaccaccgtcagtg

SEQ ID NO: 6045442 - DNA, 25 bp, Homo sapien
agacttcaaagccttgtagacggtg

SEQ ID NO: 6045443 - DNA, 25 bp, Homo sapien
tgacgacttggttgaagacatcaga

SEQ ID NO: 6045444 - DNA, 25 bp, Homo sapien
tctggcgaagaagtccaaagcttct

SEQ ID NO: 6045445 - DNA, 25 bp, Homo sapien
tcaatagcggcttcggaaacggaaa

SEQ ID NO: 6045446 - DNA, 25 bp, Homo sapien
aaagaacctagaccaccagcagcac

SEQ ID NO: 6045447 - DNA, 25 bp, Homo sapien
ggtagacaagccgacaaccttgatt

SEQ ID NO: 6045448 - DNA, 25 bp, Homo sapien
gaagcttcaatagcggcttcggaaa

SEQ ID NO: 6045449 - DNA, 25 bp, Homo sapien
gctctaacgtatctggtagaagctt

SEQ ID NO: 6045450 - DNA, 25 bp, Homo sapien
accgatggatctgaataattcttcc

SEQ ID NO: 6045451 - DNA, 25 bp, Homo sapien
tggagacttgaccaaacctctggcg

SEQ ID NO: 6045452 - DNA, 25 bp, Homo sapien
ttaccttcaccaccgtcaataccca

SEQ ID NO: 6045453 - DNA, 25 bp, Homo sapien
tcggaaacggaaacgttgatgacac

SEQ ID NO: 6045454 - DNA, 25 bp, Homo sapien
tggcataccgaccaaaacggtggta

SEQ ID NO: 6045455 - DNA, 25 bp, Homo sapien
atagccttggcgtattgaacagcca

SEQ ID NO: 6045456 - DNA, 25 bp, Homo sapien
agcaacccagtgaccggccatcaag

SEQ ID NO: 6045457 - DNA, 25 bp, Homo sapien
cttggttgaagacatcagaacaaca

SEQ ID NO: 6045458 - DNA, 25 bp, Homo sapien
ttccttagtgaagtcaatgaagact

SEQ ID NO: 6045459 - DNA, 25 bp, Homo sapien
tattgaacagccaaagaacctagac

SEQ ID NO: 6045460 - DNA, 25 bp, Homo sapien
cggaaacgttgatgacaccgtgagc

SEQ ID NO: 6045461 - DNA, 25 bp, Homo sapien
caatacccaagactctgtaacccat

SEQ ID NO: 6045462 - DNA, 25 bp, Homo sapien
ccagtgaccggccatcaagttagca

SEQ ID NO: 6045463 - DNA, 25 bp, Homo sapien
tgggccaagtcggtaccttgaggaa

SEQ ID NO: 6045464 - DNA, 25 bp, Homo sapien
gtcaatgaagacttcaccaccgatg

SEQ ID NO: 6045465 - DNA, 25 bp, Homo sapien
ctggtagaagcttcaatagcggctt

SEQ ID NO: 6045466 - DNA, 25 bp, Homo sapien
atcacaaaagttcactgctgtctac

SEQ ID NO: 6045467 - DNA, 25 bp, Homo sapien
tcaagattctgtttttttcgataat

SEQ ID NO: 6045468 - DNA, 25 bp, Homo sapien
gatatttgacttccgaatataattc

SEQ ID NO: 6045469 - DNA, 25 bp, Homo sapien
aatacatcttcggaagacttattta

SEQ ID NO: 6045470 - DNA, 25 bp, Homo sapien
gctaccagctactgggaagtctacc

SEQ ID NO: 6045471 - DNA, 25 bp, Homo sapien
cactttagattgtcaagattctgtt

SEQ ID NO: 6045472 - DNA, 25 bp, Homo sapien
gccaggatcactttgcaaaagttgt

SEQ ID NO: 6045473 - DNA, 25 bp, Homo sapien
tcttcggaagacttatttaatccga

SEQ ID NO: 6045474 - DNA, 25 bp, Homo sapien
gtttcacgaaatcaacaacgatgaa

SEQ ID NO: 6045475 - DNA, 25 bp, Homo sapien
cgaaatcaacaacgatgaatgtgac

SEQ ID NO: 6045476 - DNA, 25 bp, Homo sapien
acgtatgccaggatcactttgcaaa

SEQ ID NO: 6045477 - DNA, 25 bp, Homo sapien
agattgtcaagattctgtttttttc

SEQ ID NO: 6045478 - DNA, 25 bp, Homo sapien
atggaaaagttaacaagtttatgat

SEQ ID NO: 6045479 - DNA, 25 bp, Homo sapien
cccattacactgaattacaaaagag

SEQ ID NO: 6045480 - DNA, 25 bp, Homo sapien
ttttttcgataatcacaaaagttca

SEQ ID NO: 6045481 - DNA, 25 bp, Homo sapien
tttcacttaacaccggtaacagcta

SEQ ID NO: 6045482 - DNA, 25 bp, Homo sapien
ttcaagcgcatctctcgacagagcc

SEQ ID NO: 6045483 - DNA, 25 bp, Homo sapien
ttaattcaatgtttgaagaacaatc

SEQ ID NO: 6045484 - DNA, 25 bp, Homo sapien
gattgggctaccagctactgggaag

SEQ ID NO: 6045485 - DNA, 25 bp, Homo sapien
atgctggtaagataagaaggcaaat

SEQ ID NO: 6045486 - DNA, 25 bp, Homo sapien
atcactttgcaaaagttgtttcacg

SEQ ID NO: 6045487 - DNA, 25 bp, Homo sapien
cagagccactttagattgtcaagat

SEQ ID NO: 6045488 - DNA, 25 bp, Homo sapien
tctcgacagagccactttagattgt

SEQ ID NO: 6045489 - DNA, 25 bp, Homo sapien
tcctcgaattctcttttttcactta

SEQ ID NO: 6045490 - DNA, 25 bp, Homo sapien
attacaaaagagacaatgcagaccc

SEQ ID NO: 6045491 - DNA, 25 bp, Homo sapien
aaagttcactgctgtctacagaggt

SEQ ID NO: 6045492 - DNA, 25 bp, Homo sapien
ctaattcattacgctgtaaagtttt

SEQ ID NO: 6045493 - DNA, 25 bp, Homo sapien
cgctaactaattcattacgctgtaa

SEQ ID NO: 6045494 - DNA, 25 bp, Homo sapien
ttaacaccggtaacagctattcaag

SEQ ID NO: 6045495 - DNA, 25 bp, Homo sapien
cacttacccattacactgaattaca

SEQ ID NO: 6045496 - DNA, 25 bp, Homo sapien
tgtctacagaggtcccaaggtttat

SEQ ID NO: 6045497 - DNA, 25 bp, Homo sapien
agctactgggaagtctaccatttct

SEQ ID NO: 6045498 - DNA, 25 bp, Homo sapien
caatgtttgaagaacaatccgctaa

SEQ ID NO: 6045499 - DNA, 25 bp, Homo sapien
acaatgcagaccctacgtatacaaa

SEQ ID NO: 6045500 - DNA, 25 bp, Homo sapien
tgtaaagtttttaatgctggtaaga

SEQ ID NO: 6045501 - DNA, 25 bp, Homo sapien
ccatcgaaagaagaagatttatatt

SEQ ID NO: 6045502 - DNA, 25 bp, Homo sapien
cgaatataattcctcgaattctctt

SEQ ID NO: 6045503 - DNA, 25 bp, Homo sapien
tgggaagtctaccatttcttctcat

SEQ ID NO: 6045504 - DNA, 25 bp, Homo sapien
gtaagataagaaggcaaatcagttg

SEQ ID NO: 6045505 - DNA, 25 bp, Homo sapien
attcgaccatcgaaagaagaagatt

SEQ ID NO: 6045506 - DNA, 25 bp, Homo sapien
tcgataatcacaaaagttcactgct

SEQ ID NO: 6045507 - DNA, 25 bp, Homo sapien
gatggatatttgacttccgaatata

SEQ ID NO: 6045508 - DNA, 25 bp, Homo sapien
ttgcttttgtcgaatacatcttcgg

SEQ ID NO: 6045509 - DNA, 25 bp, Homo sapien
cactgctgtctacagaggtcccaag

SEQ ID NO: 6045510 - DNA, 25 bp, Homo sapien
gttaacaagtttatgattgttttga

SEQ ID NO: 6045511 - DNA, 25 bp, Homo sapien
aaggaaacgtatgccaggatcactt

SEQ ID NO: 6045512 - DNA, 25 bp, Homo sapien
ttctgtttttttcgataatcacaaa

SEQ ID NO: 6045513 - DNA, 25 bp, Homo sapien
ttgtcgaatacatcttcggaagact

SEQ ID NO: 6045514 - DNA, 25 bp, Homo sapien
acaatccgctaactaattcattacg

SEQ ID NO: 6045515 - DNA, 25 bp, Homo sapien
ccgttacacttacccattacactga

SEQ ID NO: 6045516 - DNA, 25 bp, Homo sapien
cagttgtgctaccatttcaaagcct

SEQ ID NO: 6045517 - DNA, 25 bp, Homo sapien
aagttgtttcacgaaatcaacaacg

SEQ ID NO: 6045518 - DNA, 25 bp, Homo sapien
ttgcaaaagttgtttcacgaaatca

SEQ ID NO: 6045519 - DNA, 25 bp, Homo sapien
atgtgacgtgggaatcttcgacgcc

SEQ ID NO: 6045520 - DNA, 25 bp, Homo sapien
aatcttcgacgccacaaattcgacc

SEQ ID NO: 6045521 - DNA, 25 bp, Homo sapien
cgtgggaatcttcgacgccacaaat

SEQ ID NO: 6045522 - DNA, 25 bp, Homo sapien
taattcctcgaattctcttttttca

SEQ ID NO: 6045523 - DNA, 25 bp, Homo sapien
cagaccctacgtatacaaatggaaa

SEQ ID NO: 6045524 - DNA, 25 bp, Homo sapien
cactgaattacaaaagagacaatgc

SEQ ID NO: 6045525 - DNA, 25 bp, Homo sapien
atgattgttttgattgggctaccag

SEQ ID NO: 6045526 - DNA, 25 bp, Homo sapien
tctcatttaattcaatgtttgaaga

SEQ ID NO: 6045527 - DNA, 25 bp, Homo sapien
acagctattcaagcgcatctctcga

SEQ ID NO: 6045528 - DNA, 25 bp, Homo sapien
ttgaagaacaatccgctaactaatt

SEQ ID NO: 6045529 - DNA, 25 bp, Homo sapien
gcaaatcagttgtgctaccatttca

SEQ ID NO: 6045530 - DNA, 25 bp, Homo sapien
gtctaccatttcttctcatttaatt

SEQ ID NO: 6045531 - DNA, 25 bp, Homo sapien
ccacaaattcgaccatcgaaagaag

SEQ ID NO: 6045532 - DNA, 25 bp, Homo sapien
tttttaatgctggtaagataagaag

SEQ ID NO: 6045533 - DNA, 25 bp, Homo sapien
ttacgctgtaaagtttttaatgctg

SEQ ID NO: 6045534 - DNA, 25 bp, Homo sapien
gctaccatttcaaagcctttgcttt

SEQ ID NO: 6045535 - DNA, 25 bp, Homo sapien
gataaaaaggaaacgtatgccagga

SEQ ID NO: 6045536 - DNA, 25 bp, Homo sapien
catttcttctcatttaattcaatgt

SEQ ID NO: 6045537 - DNA, 25 bp, Homo sapien
caacaacgatgaatgtgacgtggga

SEQ ID NO: 6045538 - DNA, 25 bp, Homo sapien
ccggtaacagctattcaagcgcatc

SEQ ID NO: 6045539 - DNA, 25 bp, Homo sapien
aaagagacaatgcagaccctacgta

SEQ ID NO: 6045540 - DNA, 25 bp, Homo sapien
cgcatctctcgacagagccacttta

SEQ ID NO: 6045541 - DNA, 25 bp, Homo sapien
aagtttatgattgttttgattgggc

SEQ ID NO: 6045542 - DNA, 25 bp, Homo sapien
atttcaaagcctttgcttttgtcga

SEQ ID NO: 6045543 - DNA, 25 bp, Homo sapien
cgatgaatgtgacgtgggaatcttc

SEQ ID NO: 6045544 - DNA, 25 bp, Homo sapien
gttttgattgggctaccagctactg

SEQ ID NO: 6045545 - DNA, 25 bp, Homo sapien
aagcctttgcttttgtcgaatacat

SEQ ID NO: 6045546 - DNA, 25 bp, Homo sapien
aagaaggcaaatcagttgtgctacc

SEQ ID NO: 6045547 - DNA, 25 bp, Homo sapien
tcgacgccacaaattcgaccatcga

SEQ ID NO: 6045548 - DNA, 25 bp, Homo sapien
gacttccgaatataattcctcgaat

SEQ ID NO: 6045549 - DNA, 25 bp, Homo sapien
cccgcattaataacattgaagaaaa

SEQ ID NO: 6045550 - DNA, 25 bp, Homo sapien
cctcaaatataaatcttcttctttc

SEQ ID NO: 6045551 - DNA, 25 bp, Homo sapien
cattaacaacagagtctagtgtagt

SEQ ID NO: 6045552 - DNA, 25 bp, Homo sapien
caaaaaatttatcattaacaacaga

SEQ ID NO: 6045553 - DNA, 25 bp, Homo sapien
atctgtattgaacgaacaaacctcc

SEQ ID NO: 6045554 - DNA, 25 bp, Homo sapien
aagctcatctgtattgaacgaacaa

SEQ ID NO: 6045555 - DNA, 25 bp, Homo sapien
aactgcgaatagtaatgttttaatc

SEQ ID NO: 6045556 - DNA, 25 bp, Homo sapien
gttaaaacatgacacctgtaagatt

SEQ ID NO: 6045557 - DNA, 25 bp, Homo sapien
atataaatcttcttctttcgatggt

SEQ ID NO: 6045558 - DNA, 25 bp, Homo sapien
aacattgaagaaaaataagctcgta

SEQ ID NO: 6045559 - DNA, 25 bp, Homo sapien
taatgttttaatctctttgcaaaat

SEQ ID NO: 6045560 - DNA, 25 bp, Homo sapien
gtcgaagattcccacgtcacattca

SEQ ID NO: 6045561 - DNA, 25 bp, Homo sapien
tttaacagcttcgatgtattcaaaa

SEQ ID NO: 6045562 - DNA, 25 bp, Homo sapien
aaacctcctcaaatataaatcttct

SEQ ID NO: 6045563 - DNA, 25 bp, Homo sapien
acagagtctagtgtagttaaagttt

SEQ ID NO: 6045564 - DNA, 25 bp, Homo sapien
tccctaatttgcttgccgcaggttg

SEQ ID NO: 6045565 - DNA, 25 bp, Homo sapien
gatgtattcaaaaccaaacatctga

SEQ ID NO: 6045566 - DNA, 25 bp, Homo sapien
tcttcatgttggctgatatatcgat

SEQ ID NO: 6045567 - DNA, 25 bp, Homo sapien
tatgggcaccaaattgaaactagaa

SEQ ID NO: 6045568 - DNA, 25 bp, Homo sapien
ctctttgcaaaatctttgatggcaa

SEQ ID NO: 6045569 - DNA, 25 bp, Homo sapien
tttaaagaatgtggctcaacgacgc

SEQ ID NO: 6045570 - DNA, 25 bp, Homo sapien
actagaaagctcatctgtattgaac

SEQ ID NO: 6045571 - DNA, 25 bp, Homo sapien
tctagtgtagttaaagtttcctctg

SEQ ID NO: 6045572 - DNA, 25 bp, Homo sapien
accataatggtgtccctaatttgct

SEQ ID NO: 6045573 - DNA, 25 bp, Homo sapien
atttgcttgccgcaggttgaagggt

SEQ ID NO: 6045574 - DNA, 25 bp, Homo sapien
ttgtctaagtagtcttcattaaacg

SEQ ID NO: 6045575 - DNA, 25 bp, Homo sapien
ctttgatttaaagaatgtggctcaa

SEQ ID NO: 6045576 - DNA, 25 bp, Homo sapien
ttctttcgatggtcgaatttgtggc

SEQ ID NO: 6045577 - DNA, 25 bp, Homo sapien
attgaacgaacaaacctcctcaaat

SEQ ID NO: 6045578 - DNA, 25 bp, Homo sapien
aaacaatttaacagcttcgatgtat

SEQ ID NO: 6045579 - DNA, 25 bp, Homo sapien
ttcaaaaccaaacatctgagaatag

SEQ ID NO: 6045580 - DNA, 25 bp, Homo sapien
agttcataaggtttgtctaagtagt

SEQ ID NO: 6045581 - DNA, 25 bp, Homo sapien
tttaatctctttgcaaaatctttga

SEQ ID NO: 6045582 - DNA, 25 bp, Homo sapien
ctgatatatcgatggatttgattga

SEQ ID NO: 6045583 - DNA, 25 bp, Homo sapien
tcgatttcttcatgttggctgatat

SEQ ID NO: 6045584 - DNA, 25 bp, Homo sapien
cgaacaaacctcctcaaatataaat

SEQ ID NO: 6045585 - DNA, 25 bp, Homo sapien
atggtgtccctaatttgcttgccgc

SEQ ID NO: 6045586 - DNA, 25 bp, Homo sapien
atcttcttctttcgatggtcgaatt

SEQ ID NO: 6045587 - DNA, 25 bp, Homo sapien
cgaatttgtggcgtcgaagattccc

SEQ ID NO: 6045588 - DNA, 25 bp, Homo sapien
ggtgtaaactgcgaatagtaatgtt

SEQ ID NO: 6045589 - DNA, 25 bp, Homo sapien
tgtagttaaagtttcctctgagcta

SEQ ID NO: 6045590 - DNA, 25 bp, Homo sapien
tgcaaatcatcaaaaaatttatcat

SEQ ID NO: 6045591 - DNA, 25 bp, Homo sapien
gatgaaattttcaataaccataatg

SEQ ID NO: 6045592 - DNA, 25 bp, Homo sapien
aactcatcaagggagaaaggtgtaa

SEQ ID NO: 6045593 - DNA, 25 bp, Homo sapien
accaaacatctgagaatagtgattg

SEQ ID NO: 6045594 - DNA, 25 bp, Homo sapien
aaattttcaataaccataatggtgt

SEQ ID NO: 6045595 - DNA, 25 bp, Homo sapien
tggatttgattgaactcatcaaggg

SEQ ID NO: 6045596 - DNA, 25 bp, Homo sapien
aaataagctcgtatcgatttcttca

SEQ ID NO: 6045597 - DNA, 25 bp, Homo sapien
taaggtttgtctaagtagtcttcat

SEQ ID NO: 6045598 - DNA, 25 bp, Homo sapien
acatgacacctgtaagattatgggc

SEQ ID NO: 6045599 - DNA, 25 bp, Homo sapien
gatttattgtggatattgtatttga

SEQ ID NO: 6045600 - DNA, 25 bp, Homo sapien
gaatgtggctcaacgacgcccgcat

SEQ ID NO: 6045601 - DNA, 25 bp, Homo sapien
tgaagggtaatgactttgatttaaa

SEQ ID NO: 6045602 - DNA, 25 bp, Homo sapien
gtgattgatgaaattttcaataacc

SEQ ID NO: 6045603 - DNA, 25 bp, Homo sapien
gatattgtatttgataaagcttctg

SEQ ID NO: 6045604 - DNA, 25 bp, Homo sapien
aagtagtcttcattaaacgatttat

SEQ ID NO: 6045605 - DNA, 25 bp, Homo sapien
tatcgatggatttgattgaactcat

SEQ ID NO: 6045606 - DNA, 25 bp, Homo sapien
tcttcattaaacgatttattgtgga

SEQ ID NO: 6045607 - DNA, 25 bp, Homo sapien
gaatagtaatgttttaatctctttg

SEQ ID NO: 6045608 - DNA, 25 bp, Homo sapien
tgtggcgtcgaagattcccacgtca

SEQ ID NO: 6045609 - DNA, 25 bp, Homo sapien
tctttgatggcaagttcataaggtt

SEQ ID NO: 6045610 - DNA, 25 bp, Homo sapien
tcaataaccataatggtgtccctaa

SEQ ID NO: 6045611 - DNA, 25 bp, Homo sapien
caccaaattgaaactagaaagctca

SEQ ID NO: 6045612 - DNA, 25 bp, Homo sapien
taatgactttgatttaaagaatgtg

SEQ ID NO: 6045613 - DNA, 25 bp, Homo sapien
ctcgtatcgatttcttcatgttggc

SEQ ID NO: 6045614 - DNA, 25 bp, Homo sapien
gagaaaggtgtaaactgcgaatagt

SEQ ID NO: 6045615 - DNA, 25 bp, Homo sapien
ttcctctgagctatttccaaaactt

SEQ ID NO: 6045616 - DNA, 25 bp, Homo sapien
taaagtttcctctgagctatttcca

SEQ ID NO: 6045617 - DNA, 25 bp, Homo sapien
atggcaagttcataaggtttgtcta

SEQ ID NO: 6045618 - DNA, 25 bp, Homo sapien
agaatagtgattgatgaaattttca

SEQ ID NO: 6045619 - DNA, 25 bp, Homo sapien
tgttggctgatatatcgatggattt

SEQ ID NO: 6045620 - DNA, 25 bp, Homo sapien
taagattatgggcaccaaattgaaa

SEQ ID NO: 6045621 - DNA, 25 bp, Homo sapien
atttatcattaacaacagagtctag

SEQ ID NO: 6045622 - DNA, 25 bp, Homo sapien
gaagaaaaataagctcgtatcgatt

SEQ ID NO: 6045623 - DNA, 25 bp, Homo sapien
ggctcaacgacgcccgcattaataa

SEQ ID NO: 6045624 - DNA, 25 bp, Homo sapien
gcaaaatctttgatggcaagttcat

SEQ ID NO: 6045625 - DNA, 25 bp, Homo sapien
gcaggttgaagggtaatgactttga

SEQ ID NO: 6045626 - DNA, 25 bp, Homo sapien
tcaaaaaacaatttaacagcttcga

SEQ ID NO: 6045627 - DNA, 25 bp, Homo sapien
tgagctatttccaaaactttcaaaa

SEQ ID NO: 6045628 - DNA, 25 bp, Homo sapien
gataaagcttctgttaaaacatgac

SEQ ID NO: 6045629 - DNA, 25 bp, Homo sapien
attgaaactagaaagctcatctgta

SEQ ID NO: 6045630 - DNA, 25 bp, Homo sapien
acgacgcccgcattaataacattga

SEQ ID NO: 6045631 - DNA, 25 bp, Homo sapien
catctgagaatagtgattgatgaaa

SEQ ID NO: 6045632 - DNA, 25 bp, Homo sapien
agcttcgatgtattcaaaaccaaac

SEQ ID NO: 6045633 - DNA, 25 bp, Homo sapien
cttgccgcaggttgaagggtaatga

SEQ ID NO: 6045634 - DNA, 25 bp, Homo sapien
tcaagggagaaaggtgtaaactgcg

SEQ ID NO: 6045635 - DNA, 25 bp, Homo sapien
ttgtggatattgtatttgataaagc

SEQ ID NO: 6045636 - DNA, 25 bp, Homo sapien
cacctgtaagattatgggcaccaaa

SEQ ID NO: 6045637 - DNA, 25 bp, Homo sapien
ttaaacgatttattgtggatattgt

SEQ ID NO: 6045638 - DNA, 25 bp, Homo sapien
gtatttgataaagcttctgttaaaa

SEQ ID NO: 6045639 - DNA, 25 bp, Homo sapien
gcttctgttaaaacatgacacctgt

SEQ ID NO: 6045640 - DNA, 25 bp, Homo sapien
tgattgaactcatcaagggagaaag

SEQ ID NO: 6045641 - DNA, 25 bp, Homo sapien
cgatggtcgaatttgtggcgtcgaa

SEQ ID NO: 6045642 - DNA, 25 bp, Homo sapien
ttaataacattgaagaaaaataagc

SEQ ID NO: 6045643 - DNA, 25 bp, Homo sapien
ggtgtcgaggaaaataacataataa

SEQ ID NO: 6045644 - DNA, 25 bp, Homo sapien
atgaacttacaagaaaaagtcgaca

SEQ ID NO: 6045645 - DNA, 25 bp, Homo sapien
ttcatgcccgttggaaccgtgtcat

SEQ ID NO: 6045646 - DNA, 25 bp, Homo sapien
ttacaagaaaaagtcgacatgcccg

SEQ ID NO: 6045647 - DNA, 25 bp, Homo sapien
tgacagacaagcgaagttgggaaag

SEQ ID NO: 6045648 - DNA, 25 bp, Homo sapien
taataattgaaactgttcctggatc

SEQ ID NO: 6045649 - DNA, 25 bp, Homo sapien
cgtgtcattattgacgctcttgtga

SEQ ID NO: 6045650 - DNA, 25 bp, Homo sapien
ccgctagatgttgtaattcctattg

SEQ ID NO: 6045651 - DNA, 25 bp, Homo sapien
agggtcggtatcattcatgcccgtt

SEQ ID NO: 6045652 - DNA, 25 bp, Homo sapien
acaagccctggccagagctggcatc

SEQ ID NO: 6045653 - DNA, 25 bp, Homo sapien
acaagcgaagttgggaaagccgcta

SEQ ID NO: 6045654 - DNA, 25 bp, Homo sapien
tcccttggtgtcgaggaaaataaca

SEQ ID NO: 6045655 - DNA, 25 bp, Homo sapien
gacgctcttgtgaaaggtgctattg

SEQ ID NO: 6045656 - DNA, 25 bp, Homo sapien
atgcactttgaatacatttcagatt

SEQ ID NO: 6045657 - DNA, 25 bp, Homo sapien
gtttgttgacagacaagcgaagttg

SEQ ID NO: 6045658 - DNA, 25 bp, Homo sapien
atgcccgtcatttttggcctcttaa

SEQ ID NO: 6045659 - DNA, 25 bp, Homo sapien
gatgttgtaattcctattggtgtac

SEQ ID NO: 6045660 - DNA, 25 bp, Homo sapien
gtcatttttggcctcttaacttgca

SEQ ID NO: 6045661 - DNA, 25 bp, Homo sapien
aagtttatgacggttccaaaatcag

SEQ ID NO: 6045662 - DNA, 25 bp, Homo sapien
gcacaaccatggtgaagattggggt

SEQ ID NO: 6045663 - DNA, 25 bp, Homo sapien
cccgttggaaccgtgtcattattga

SEQ ID NO: 6045664 - DNA, 25 bp, Homo sapien
ggtatcattcatgcccgttggaacc

SEQ ID NO: 6045665 - DNA, 25 bp, Homo sapien
attattgacgctcttgtgaaaggtg

SEQ ID NO: 6045666 - DNA, 25 bp, Homo sapien
cctattggtgtacttatcaaaggta

SEQ ID NO: 6045667 - DNA, 25 bp, Homo sapien
ataacataataattgaaactgttcc

SEQ ID NO: 6045668 - DNA, 25 bp, Homo sapien
tacatttcagattccaccactcacg

SEQ ID NO: 6045669 - DNA, 25 bp, Homo sapien
aaaaaggtttgttgacagacaagcg

SEQ ID NO: 6045670 - DNA, 25 bp, Homo sapien
ggacaaaaaggtttgttgacagaca

SEQ ID NO: 6045671 - DNA, 25 bp, Homo sapien
ggtgtacttatcaaaggtagtacaa

SEQ ID NO: 6045672 - DNA, 25 bp, Homo sapien
tggaaccgtgtcattattgacgctc

SEQ ID NO: 6045673 - DNA, 25 bp, Homo sapien
gaagaacaagccctggccagagctg

SEQ ID NO: 6045674 - DNA, 25 bp, Homo sapien
tggcatcgatgaagcgcactccatg

SEQ ID NO: 6045675 - DNA, 25 bp, Homo sapien
gttccaaaatcagggtcggtatcat

SEQ ID NO: 6045676 - DNA, 25 bp, Homo sapien
tggaaatggctgttaagttcggtaa

SEQ ID NO: 6045677 - DNA, 25 bp, Homo sapien
atgactgaagaacaagccctggcca

SEQ ID NO: 6045678 - DNA, 25 bp, Homo sapien
gcattgatgaacttacaagaaaaag

SEQ ID NO: 6045679 - DNA, 25 bp, Homo sapien
gaaagaatggcttcccttggtgtcg

SEQ ID NO: 6045680 - DNA, 25 bp, Homo sapien
attgaaactgttcctggatcctatg

SEQ ID NO: 6045681 - DNA, 25 bp, Homo sapien
ggaaagccgctagatgttgtaattc

SEQ ID NO: 6045682 - DNA, 25 bp, Homo sapien
gtcgacatgcccgtcatttttggcc

SEQ ID NO: 6045683 - DNA, 25 bp, Homo sapien
tttggcctcttaacttgcatgactg

SEQ ID NO: 6045684 - DNA, 25 bp, Homo sapien
cagagctggcatcgatgaagcgcac

SEQ ID NO: 6045685 - DNA, 25 bp, Homo sapien
ctccatgcacaaccatggtgaagat

SEQ ID NO: 6045686 - DNA, 25 bp, Homo sapien
gctattgaaagaatggcttcccttg

SEQ ID NO: 6045687 - DNA, 25 bp, Homo sapien
tgctgcagcagtggaaatggctgtt

SEQ ID NO: 6045688 - DNA, 25 bp, Homo sapien
cagcagtggaaatggctgttaagtt

SEQ ID NO: 6045689 - DNA, 25 bp, Homo sapien
aaatcagggtcggtatcattcatgc

SEQ ID NO: 6045690 - DNA, 25 bp, Homo sapien
aaaggtgctattgaaagaatggctt

SEQ ID NO: 6045691 - DNA, 25 bp, Homo sapien
ttggggtgctgcagcagtggaaatg

SEQ ID NO: 6045692 - DNA, 25 bp, Homo sapien
atgacggttccaaaatcagggtcgg

SEQ ID NO: 6045693 - DNA, 25 bp, Homo sapien
cgatgaagcgcactccatgcacaac

SEQ ID NO: 6045694 - DNA, 25 bp, Homo sapien
actcacgcattgatgaacttacaag

SEQ ID NO: 6045695 - DNA, 25 bp, Homo sapien
ctcttaacttgcatgactgaagaac

SEQ ID NO: 6045696 - DNA, 25 bp, Homo sapien
agcgcactccatgcacaaccatggt

SEQ ID NO: 6045697 - DNA, 25 bp, Homo sapien
cctggccagagctggcatcgatgaa

SEQ ID NO: 6045698 - DNA, 25 bp, Homo sapien
gaaaaagtcgacatgcccgtcattt

SEQ ID NO: 6045699 - DNA, 25 bp, Homo sapien
atggcttcccttggtgtcgaggaaa

SEQ ID NO: 6045700 - DNA, 25 bp, Homo sapien
aaaggtagtacaatgcactttgaat

SEQ ID NO: 6045701 - DNA, 25 bp, Homo sapien
gtaattcctattggtgtacttatca

SEQ ID NO: 6045702 - DNA, 25 bp, Homo sapien
gaagttgggaaagccgctagatgtt

SEQ ID NO: 6045703 - DNA, 25 bp, Homo sapien
ccatggtgaagattggggtgctgca

SEQ ID NO: 6045704 - DNA, 25 bp, Homo sapien
tggctgttaagttcggtaaaaatgc

SEQ ID NO: 6045705 - DNA, 25 bp, Homo sapien
ccaccactcacgcattgatgaactt

SEQ ID NO: 6045706 - DNA, 25 bp, Homo sapien
gaggaaaataacataataattgaaa

SEQ ID NO: 6045707 - DNA, 25 bp, Homo sapien
tgaagattggggtgctgcagcagtg

SEQ ID NO: 6045708 - DNA, 25 bp, Homo sapien
tttgaatacatttcagattccacca

SEQ ID NO: 6045709 - DNA, 25 bp, Homo sapien
cttgtgaaaggtgctattgaaagaa

SEQ ID NO: 6045710 - DNA, 25 bp, Homo sapien
tcctatgaattaccttgggggacaa

SEQ ID NO: 6045711 - DNA, 25 bp, Homo sapien
cagattccaccactcacgcattgat

SEQ ID NO: 6045712 - DNA, 25 bp, Homo sapien
cttatcaaaggtagtacaatgcact

SEQ ID NO: 6045713 - DNA, 25 bp, Homo sapien
acttgcatgactgaagaacaagccc

SEQ ID NO: 6045714 - DNA, 25 bp, Homo sapien
actgttcctggatcctatgaattac

SEQ ID NO: 6045715 - DNA, 25 bp, Homo sapien
cctggatcctatgaattaccttggg

SEQ ID NO: 6045716 - DNA, 25 bp, Homo sapien
agtacaatgcactttgaatacattt

SEQ ID NO: 6045717 - DNA, 25 bp, Homo sapien
ccccaaggtaattcataggatccag

SEQ ID NO: 6045718 - DNA, 25 bp, Homo sapien
cccaacttcgcttgtctgtcaacaa

SEQ ID NO: 6045719 - DNA, 25 bp, Homo sapien
ttcaattattatgttattttcctcg

SEQ ID NO: 6045720 - DNA, 25 bp, Homo sapien
cgtcataaacttgatctggtttgcc

SEQ ID NO: 6045721 - DNA, 25 bp, Homo sapien
gttaagaggccaaaaatgacgggca

SEQ ID NO: 6045722 - DNA, 25 bp, Homo sapien
tgaaatgtattcaaagtgcattgta

SEQ ID NO: 6045723 - DNA, 25 bp, Homo sapien
attattatgttattttcctcgacac

SEQ ID NO: 6045724 - DNA, 25 bp, Homo sapien
ttacaacatctagcggctttcccaa

SEQ ID NO: 6045725 - DNA, 25 bp, Homo sapien
gcatgaatgataccgaccctgattt

SEQ ID NO: 6045726 - DNA, 25 bp, Homo sapien
ggaatctgaaatgtattcaaagtgc

SEQ ID NO: 6045727 - DNA, 25 bp, Homo sapien
tctagcggctttcccaacttcgctt

SEQ ID NO: 6045728 - DNA, 25 bp, Homo sapien
taagtacaccaataggaattacaac

SEQ ID NO: 6045729 - DNA, 25 bp, Homo sapien
cgactttttcttgtaagttcatcaa

SEQ ID NO: 6045730 - DNA, 25 bp, Homo sapien
ctgcagcaccccaatcttcaccatg

SEQ ID NO: 6045731 - DNA, 25 bp, Homo sapien
tcaataatgacacggttccaacggg

SEQ ID NO: 6045732 - DNA, 25 bp, Homo sapien
tcaatagcacctttcacaagagcgt

SEQ ID NO: 6045733 - DNA, 25 bp, Homo sapien
tttcttgtaagttcatcaatgcgtg

SEQ ID NO: 6045734 - DNA, 25 bp, Homo sapien
atgttattttcctcgacaccaaggg

SEQ ID NO: 6045735 - DNA, 25 bp, Homo sapien
caccaataggaattacaacatctag

SEQ ID NO: 6045736 - DNA, 25 bp, Homo sapien
aatcttcaccatggttgtgcatgga

SEQ ID NO: 6045737 - DNA, 25 bp, Homo sapien
ggttccaacgggcatgaatgatacc

SEQ ID NO: 6045738 - DNA, 25 bp, Homo sapien
tgacgggcatgtcgactttttcttg

SEQ ID NO: 6045739 - DNA, 25 bp, Homo sapien
gcacctttcacaagagcgtcaataa

SEQ ID NO: 6045740 - DNA, 25 bp, Homo sapien
tactacctttgataagtacaccaat

SEQ ID NO: 6045741 - DNA, 25 bp, Homo sapien
gaccctgattttggaaccgtcataa

SEQ ID NO: 6045742 - DNA, 25 bp, Homo sapien
caacgggcatgaatgataccgaccc

SEQ ID NO: 6045743 - DNA, 25 bp, Homo sapien
gtattcaaagtgcattgtactacct

SEQ ID NO: 6045744 - DNA, 25 bp, Homo sapien
ctggccagggcttgttcttcagtca

SEQ ID NO: 6045745 - DNA, 25 bp, Homo sapien
gaacagtttcaattattatgttatt

SEQ ID NO: 6045746 - DNA, 25 bp, Homo sapien
gtaagttcatcaatgcgtgagtggt

SEQ ID NO: 6045747 - DNA, 25 bp, Homo sapien
tgataccgaccctgattttggaacc

SEQ ID NO: 6045748 - DNA, 25 bp, Homo sapien
tgacacggttccaacgggcatgaat

SEQ ID NO: 6045749 - DNA, 25 bp, Homo sapien
ttcgcttgtctgtcaacaaaccttt

SEQ ID NO: 6045750 - DNA, 25 bp, Homo sapien
gaagccattctttcaatagcacctt

SEQ ID NO: 6045751 - DNA, 25 bp, Homo sapien
aaaaatgacgggcatgtcgactttt

SEQ ID NO: 6045752 - DNA, 25 bp, Homo sapien
gcatggagtgcgcttcatcgatgcc

SEQ ID NO: 6045753 - DNA, 25 bp, Homo sapien
gaggccaaaaatgacgggcatgtcg

SEQ ID NO: 6045754 - DNA, 25 bp, Homo sapien
tcatcaatgcgtgagtggtggaatc

SEQ ID NO: 6045755 - DNA, 25 bp, Homo sapien
tcagtcatgcaagttaagaggccaa

SEQ ID NO: 6045756 - DNA, 25 bp, Homo sapien
ccaagggaagccattctttcaatag

SEQ ID NO: 6045757 - DNA, 25 bp, Homo sapien
catttccactgctgcagcaccccaa

SEQ ID NO: 6045758 - DNA, 25 bp, Homo sapien
agggcttgttcttcagtcatgcaag

SEQ ID NO: 6045759 - DNA, 25 bp, Homo sapien
caccatggttgtgcatggagtgcgc

SEQ ID NO: 6045760 - DNA, 25 bp, Homo sapien
tgttcttcagtcatgcaagttaaga

SEQ ID NO: 6045761 - DNA, 25 bp, Homo sapien
ttcacaagagcgtcaataatgacac

SEQ ID NO: 6045762 - DNA, 25 bp, Homo sapien
tgtctgtcaacaaacctttttgtcc

SEQ ID NO: 6045763 - DNA, 25 bp, Homo sapien
atgcgtgagtggtggaatctgaaat

SEQ ID NO: 6045764 - DNA, 25 bp, Homo sapien
tcgatgccagctctggccagggctt

SEQ ID NO: 6045765 - DNA, 25 bp, Homo sapien
gcatgtcgactttttcttgtaagtt

SEQ ID NO: 6045766 - DNA, 25 bp, Homo sapien
tggaaccgtcataaacttgatctgg

SEQ ID NO: 6045767 - DNA, 25 bp, Homo sapien
ccagctctggccagggcttgttctt

SEQ ID NO: 6045768 - DNA, 25 bp, Homo sapien
cttcatcgatgccagctctggccag

SEQ ID NO: 6045769 - DNA, 25 bp, Homo sapien
caccccaatcttcaccatggttgtg

SEQ ID NO: 6045770 - DNA, 25 bp, Homo sapien
ggtttgcctaatcctttaactgcca

SEQ ID NO: 6045771 - DNA, 25 bp, Homo sapien
aaagtgcattgtactacctttgata

SEQ ID NO: 6045772 - DNA, 25 bp, Homo sapien
gatctggtttgcctaatcctttaac

SEQ ID NO: 6045773 - DNA, 25 bp, Homo sapien
agtgcgcttcatcgatgccagctct

SEQ ID NO: 6045774 - DNA, 25 bp, Homo sapien
ggttgtgcatggagtgcgcttcatc

SEQ ID NO: 6045775 - DNA, 25 bp, Homo sapien
ggctttcccaacttcgcttgtctgt

SEQ ID NO: 6045776 - DNA, 25 bp, Homo sapien
ctttgataagtacaccaataggaat

SEQ ID NO: 6045777 - DNA, 25 bp, Homo sapien
attctttcaatagcacctttcacaa

SEQ ID NO: 6045778 - DNA, 25 bp, Homo sapien
atgcaagttaagaggccaaaaatga

SEQ ID NO: 6045779 - DNA, 25 bp, Homo sapien
ttttcctcgacaccaagggaagcca

SEQ ID NO: 6045780 - DNA, 25 bp, Homo sapien
gatccaggaacagtttcaattatta

SEQ ID NO: 6045781 - DNA, 25 bp, Homo sapien
tcgacaccaagggaagccattcttt

SEQ ID NO: 6045782 - DNA, 25 bp, Homo sapien
aaacttgatctggtttgcctaatcc

SEQ ID NO: 6045783 - DNA, 25 bp, Homo sapien
ttgtcccccaaggtaattcatagga

SEQ ID NO: 6045784 - DNA, 25 bp, Homo sapien
agtggtggaatctgaaatgtattca

SEQ ID NO: 6045785 - DNA, 25 bp, Homo sapien
tcataggatccaggaacagtttcaa

SEQ ID NO: 6045786 - DNA, 25 bp, Homo sapien
taggaattacaacatctagcggctt

SEQ ID NO: 6045787 - DNA, 25 bp, Homo sapien
ggtaattcataggatccaggaacag

SEQ ID NO: 6045788 - DNA, 25 bp, Homo sapien
gcattgtactacctttgataagtac

SEQ ID NO: 6045789 - DNA, 25 bp, Homo sapien
agagcgtcaataatgacacggttcc

SEQ ID NO: 6045790 - DNA, 25 bp, Homo sapien
ccactgctgcagcaccccaatcttc

SEQ ID NO: 6045791 - DNA, 25 bp, Homo sapien
gattttggaaccgtcataaacttga

SEQ ID NO: 6045792 - DNA, 25 bp, Homo sapien
tgttaaattccttgactcaaaaata

SEQ ID NO: 6045793 - DNA, 25 bp, Homo sapien
agagtaaaaaagcaatggaggaacg

SEQ ID NO: 6045794 - DNA, 25 bp, Homo sapien
aatcaagattagtgaagcattagcc

SEQ ID NO: 6045795 - DNA, 25 bp, Homo sapien
tgagtctgttactgctattgctatt

SEQ ID NO: 6045796 - DNA, 25 bp, Homo sapien
aattccttgactcaaaaatatggta

SEQ ID NO: 6045797 - DNA, 25 bp, Homo sapien
ctctcagtatcgatctaacgccgga

SEQ ID NO: 6045798 - DNA, 25 bp, Homo sapien
aaagcaatggaggaacggaggaaga

SEQ ID NO: 6045799 - DNA, 25 bp, Homo sapien
aaattgaggatctcaaagagaacat

SEQ ID NO: 6045800 - DNA, 25 bp, Homo sapien
atataaaatacttggaaaatgtagt

SEQ ID NO: 6045801 - DNA, 25 bp, Homo sapien
gattagtgaagcattagccaaggtt

SEQ ID NO: 6045802 - DNA, 25 bp, Homo sapien
ttgaaggaggaaaaattgaggatct

SEQ ID NO: 6045803 - DNA, 25 bp, Homo sapien
aggatctcaaagagaacattaaggc

SEQ ID NO: 6045804 - DNA, 25 bp, Homo sapien
gaacggaggaagaatggagagtgta

SEQ ID NO: 6045805 - DNA, 25 bp, Homo sapien
attagccaaggttgctgaggaacat

SEQ ID NO: 6045806 - DNA, 25 bp, Homo sapien
gtatcgatctaacgccggacaatat

SEQ ID NO: 6045807 - DNA, 25 bp, Homo sapien
tgttcgctctaaggcgaaaaatgtt

SEQ ID NO: 6045808 - DNA, 25 bp, Homo sapien
gggatgtcatgggaggtggaagatt

SEQ ID NO: 6045809 - DNA, 25 bp, Homo sapien
atggaggaacggaggaagaatggag

SEQ ID NO: 6045810 - DNA, 25 bp, Homo sapien
tcaaagagaacattaaggctctcag

SEQ ID NO: 6045811 - DNA, 25 bp, Homo sapien
ggaaaatgtagttccttttgacatc

SEQ ID NO: 6045812 - DNA, 25 bp, Homo sapien
tggaagatttcagagtaaaaaagca

SEQ ID NO: 6045813 - DNA, 25 bp, Homo sapien
caaggttgctgaggaacatggcact

SEQ ID NO: 6045814 - DNA, 25 bp, Homo sapien
tctttcgttggcgcctccgaacaaa

SEQ ID NO: 6045815 - DNA, 25 bp, Homo sapien
aggaagaatggagagtgtattcgtt

SEQ ID NO: 6045816 - DNA, 25 bp, Homo sapien
ttgactcaaaaatatggtacgaata

SEQ ID NO: 6045817 - DNA, 25 bp, Homo sapien
ggaggtggaagatttcagagtaaaa

SEQ ID NO: 6045818 - DNA, 25 bp, Homo sapien
ggaacatggcactgagtctgttact

SEQ ID NO: 6045819 - DNA, 25 bp, Homo sapien
tgtagttccttttgacatcggattt

SEQ ID NO: 6045820 - DNA, 25 bp, Homo sapien
cgcctccgaacaaacagatgcagaa

SEQ ID NO: 6045821 - DNA, 25 bp, Homo sapien
agaacattaaggctctcagtatcga

SEQ ID NO: 6045822 - DNA, 25 bp, Homo sapien
tgcagaaatcaagattagtgaagca

SEQ ID NO: 6045823 - DNA, 25 bp, Homo sapien
tgttactgctattgctattgcctat

SEQ ID NO: 6045824 - DNA, 25 bp, Homo sapien
tgctgaggaacatggcactgagtct

SEQ ID NO: 6045825 - DNA, 25 bp, Homo sapien
aatggagagtgtattcgttctttcg

SEQ ID NO: 6045826 - DNA, 25 bp, Homo sapien
tccttttgacatcggatttcctaac

SEQ ID NO: 6045827 - DNA, 25 bp, Homo sapien
gccggacaatataaaatacttggaa

SEQ ID NO: 6045828 - DNA, 25 bp, Homo sapien
cggatttcctaacacttttatcgtg

SEQ ID NO: 6045829 - DNA, 25 bp, Homo sapien
caaaaatatggtacgaataatgttt

SEQ ID NO: 6045830 - DNA, 25 bp, Homo sapien
tgacatcggatttcctaacactttt

SEQ ID NO: 6045831 - DNA, 25 bp, Homo sapien
ccatgggatgtcatgggaggtggaa

SEQ ID NO: 6045832 - DNA, 25 bp, Homo sapien
gaggaaaaattgaggatctcaaaga

SEQ ID NO: 6045833 - DNA, 25 bp, Homo sapien
tgcctatgttcgctctaaggcgaaa

SEQ ID NO: 6045834 - DNA, 25 bp, Homo sapien
tgctattgcctatgttcgctctaag

SEQ ID NO: 6045835 - DNA, 25 bp, Homo sapien
atttcagagtaaaaaagcaatggag

SEQ ID NO: 6045836 - DNA, 25 bp, Homo sapien
gagtgtattcgttctttcgttggcg

SEQ ID NO: 6045837 - DNA, 25 bp, Homo sapien
tgaagcattagccaaggttgctgag

SEQ ID NO: 6045838 - DNA, 25 bp, Homo sapien
gttggcgcctccgaacaaacagatg

SEQ ID NO: 6045839 - DNA, 25 bp, Homo sapien
cgaacaaacagatgcagaaatcaag

SEQ ID NO: 6045840 - DNA, 25 bp, Homo sapien
tctaacgccggacaatataaaatac

SEQ ID NO: 6045841 - DNA, 25 bp, Homo sapien
aacagatgcagaaatcaagattagt

SEQ ID NO: 6045842 - DNA, 25 bp, Homo sapien
ttatcgtgttaaattccttgactca

SEQ ID NO: 6045843 - DNA, 25 bp, Homo sapien
attcgttctttcgttggcgcctccg

SEQ ID NO: 6045844 - DNA, 25 bp, Homo sapien
tggcactgagtctgttactgctatt

SEQ ID NO: 6045845 - DNA, 25 bp, Homo sapien
tgctattgctattgcctatgttcgc

SEQ ID NO: 6045846 - DNA, 25 bp, Homo sapien
gtcatgggaggtggaagatttcaga

SEQ ID NO: 6045847 - DNA, 25 bp, Homo sapien
cacttttatcgtgttaaattccttg

SEQ ID NO: 6045848 - DNA, 25 bp, Homo sapien
ttaaggctctcagtatcgatctaac

SEQ ID NO: 6045849 - DNA, 25 bp, Homo sapien
aaagtgttaggaaatccgatgtcaa

SEQ ID NO: 6045850 - DNA, 25 bp, Homo sapien
tgttctctttgagatcctcaatttt

SEQ ID NO: 6045851 - DNA, 25 bp, Homo sapien
aatccgatgtcaaaaggaactacat

SEQ ID NO: 6045852 - DNA, 25 bp, Homo sapien
ttactctgaaatcttccacctccca

SEQ ID NO: 6045853 - DNA, 25 bp, Homo sapien
tccattcttcctccgttcctccatt

SEQ ID NO: 6045854 - DNA, 25 bp, Homo sapien
atattgtccggcgttagatcgatac

SEQ ID NO: 6045855 - DNA, 25 bp, Homo sapien
tgtttgttcggaggcgccaacgaaa

SEQ ID NO: 6045856 - DNA, 25 bp, Homo sapien
ccttaatgttctctttgagatcctc

SEQ ID NO: 6045857 - DNA, 25 bp, Homo sapien
tcgatactgagagccttaatgttct

SEQ ID NO: 6045858 - DNA, 25 bp, Homo sapien
agcaaccttggctaatgcttcacta

SEQ ID NO: 6045859 - DNA, 25 bp, Homo sapien
cttggctaatgcttcactaatcttg

SEQ ID NO: 6045860 - DNA, 25 bp, Homo sapien
aggcgccaacgaaagaacgaataca

SEQ ID NO: 6045861 - DNA, 25 bp, Homo sapien
taatgcttcactaatcttgatttct

SEQ ID NO: 6045862 - DNA, 25 bp, Homo sapien
aagaacgaatacactctccattctt

SEQ ID NO: 6045863 - DNA, 25 bp, Homo sapien
tattttatattgtccggcgttagat

SEQ ID NO: 6045864 - DNA, 25 bp, Homo sapien
cccatggggcgagggccataccgaa

SEQ ID NO: 6045865 - DNA, 25 bp, Homo sapien
ctcccatgacatcccatggggcgag

SEQ ID NO: 6045866 - DNA, 25 bp, Homo sapien
ttaggaaatccgatgtcaaaaggaa

SEQ ID NO: 6045867 - DNA, 25 bp, Homo sapien
tgagagccttaatgttctctttgag

SEQ ID NO: 6045868 - DNA, 25 bp, Homo sapien
ttcactaatcttgatttctgcatct

SEQ ID NO: 6045869 - DNA, 25 bp, Homo sapien
tgcatctgtttgttcggaggcgcca

SEQ ID NO: 6045870 - DNA, 25 bp, Homo sapien
gatttctgcatctgtttgttcggag

SEQ ID NO: 6045871 - DNA, 25 bp, Homo sapien
cgttcctccattgcttttttactct

SEQ ID NO: 6045872 - DNA, 25 bp, Homo sapien
cagtgccatgttcctcagcaacctt

SEQ ID NO: 6045873 - DNA, 25 bp, Homo sapien
ttttcgccttagagcgaacataggc

SEQ ID NO: 6045874 - DNA, 25 bp, Homo sapien
aacatttttcgccttagagcgaaca

SEQ ID NO: 6045875 - DNA, 25 bp, Homo sapien
gatcctcaatttttcctccttcaac

SEQ ID NO: 6045876 - DNA, 25 bp, Homo sapien
catgttcctcagcaaccttggctaa

SEQ ID NO: 6045877 - DNA, 25 bp, Homo sapien
cagtaacagactcagtgccatgttc

SEQ ID NO: 6045878 - DNA, 25 bp, Homo sapien
caaggaatttaacacgataaaagtg

SEQ ID NO: 6045879 - DNA, 25 bp, Homo sapien
cttcctccgttcctccattgctttt

SEQ ID NO: 6045880 - DNA, 25 bp, Homo sapien
gttagatcgatactgagagccttaa

SEQ ID NO: 6045881 - DNA, 25 bp, Homo sapien
tccaagtattttatattgtccggcg

SEQ ID NO: 6045882 - DNA, 25 bp, Homo sapien
cagactcagtgccatgttcctcagc

SEQ ID NO: 6045883 - DNA, 25 bp, Homo sapien
ttcggaggcgccaacgaaagaacga

SEQ ID NO: 6045884 - DNA, 25 bp, Homo sapien
agcgaacataggcaatagcaatagc

SEQ ID NO: 6045885 - DNA, 25 bp, Homo sapien
ctccattgcttttttactctgaaat

SEQ ID NO: 6045886 - DNA, 25 bp, Homo sapien
atgacatcccatggggcgagggcca

SEQ ID NO: 6045887 - DNA, 25 bp, Homo sapien
aatcttgatttctgcatctgtttgt

SEQ ID NO: 6045888 - DNA, 25 bp, Homo sapien
cattttccaagtattttatattgtc

SEQ ID NO: 6045889 - DNA, 25 bp, Homo sapien
caatagcagtaacagactcagtgcc

SEQ ID NO: 6045890 - DNA, 25 bp, Homo sapien
gagggccataccgaaatgcctagcc

SEQ ID NO: 6045891 - DNA, 25 bp, Homo sapien
cataggcaatagcaatagcagtaac

SEQ ID NO: 6045892 - DNA, 25 bp, Homo sapien
caatagcaatagcagtaacagactc

SEQ ID NO: 6045893 - DNA, 25 bp, Homo sapien
tgtcaaaaggaactacattttccaa

SEQ ID NO: 6045894 - DNA, 25 bp, Homo sapien
actacattttccaagtattttatat

SEQ ID NO: 6045895 - DNA, 25 bp, Homo sapien
ttccacctcccatgacatcccatgg

SEQ ID NO: 6045896 - DNA, 25 bp, Homo sapien
cacgataaaagtgttaggaaatccg

SEQ ID NO: 6045897 - DNA, 25 bp, Homo sapien
caacgaaagaacgaatacactctcc

SEQ ID NO: 6045898 - DNA, 25 bp, Homo sapien
tcctcagcaaccttggctaatgctt

SEQ ID NO: 6045899 - DNA, 25 bp, Homo sapien
ctttgagatcctcaatttttcctcc

SEQ ID NO: 6045900 - DNA, 25 bp, Homo sapien
tccggcgttagatcgatactgagag

SEQ ID NO: 6045901 - DNA, 25 bp, Homo sapien
ccttagagcgaacataggcaatagc

SEQ ID NO: 6045902 - DNA, 25 bp, Homo sapien
gaatacactctccattcttcctccg

SEQ ID NO: 6045903 - DNA, 25 bp, Homo sapien
cactctccattcttcctccgttcct

SEQ ID NO: 6045904 - DNA, 25 bp, Homo sapien
tgaaatcttccacctcccatgacat

SEQ ID NO: 6045905 - DNA, 25 bp, Homo sapien
gcttttttactctgaaatcttccac

SEQ ID NO: 6045906 - DNA, 25 bp, Homo sapien
gggcgagggccataccgaaatgcct

SEQ ID NO: 6045907 - DNA, 25 bp, Homo sapien
tccactgatactggctcagaaagaa

SEQ ID NO: 6045908 - DNA, 25 bp, Homo sapien
tctgtttactgccacagcgcccgaa

SEQ ID NO: 6045909 - DNA, 25 bp, Homo sapien
atttggaggacccttctaagaccat

SEQ ID NO: 6045910 - DNA, 25 bp, Homo sapien
aacatcttggcaccacctcacgaaa

SEQ ID NO: 6045911 - DNA, 25 bp, Homo sapien
caagtaaacgacttctctttacact

SEQ ID NO: 6045912 - DNA, 25 bp, Homo sapien
atctcccaagaaaattatacctctg

SEQ ID NO: 6045913 - DNA, 25 bp, Homo sapien
cacagcgcccgaaattggctgttct

SEQ ID NO: 6045914 - DNA, 25 bp, Homo sapien
caagaaaattatacctctgaaggac

SEQ ID NO: 6045915 - DNA, 25 bp, Homo sapien
tccggatgcaaaatcgtccaattcc

SEQ ID NO: 6045916 - DNA, 25 bp, Homo sapien
tcaagttttgaaaacatcttggcac

SEQ ID NO: 6045917 - DNA, 25 bp, Homo sapien
ccgatacatctattttcttcacaaa

SEQ ID NO: 6045918 - DNA, 25 bp, Homo sapien
tcttcaaaaagcagtccaaactcat

SEQ ID NO: 6045919 - DNA, 25 bp, Homo sapien
ctgttctctgtgtctcgagctagaa

SEQ ID NO: 6045920 - DNA, 25 bp, Homo sapien
ggctcagaaagaatgaagcaaatca

SEQ ID NO: 6045921 - DNA, 25 bp, Homo sapien
tttcttcacaaaggtcaatttggag

SEQ ID NO: 6045922 - DNA, 25 bp, Homo sapien
acctctgaaggactcaagttttgaa

SEQ ID NO: 6045923 - DNA, 25 bp, Homo sapien
ctagattgttcatcttcaaaccaaa

SEQ ID NO: 6045924 - DNA, 25 bp, Homo sapien
tggactggactccaattattacctc

SEQ ID NO: 6045925 - DNA, 25 bp, Homo sapien
catctattttcttcacaaaggtcaa

SEQ ID NO: 6045926 - DNA, 25 bp, Homo sapien
atacaagccattaagcagttctcgc

SEQ ID NO: 6045927 - DNA, 25 bp, Homo sapien
gatactggctcagaaagaatgaagc

SEQ ID NO: 6045928 - DNA, 25 bp, Homo sapien
aagcagttctcgcaagtaaacgact

SEQ ID NO: 6045929 - DNA, 25 bp, Homo sapien
gtttgatgatcatccggatgcaaaa

SEQ ID NO: 6045930 - DNA, 25 bp, Homo sapien
cacagcgtgatcagtatttccactg

SEQ ID NO: 6045931 - DNA, 25 bp, Homo sapien
agtggcctcctggtttgatgatcat

SEQ ID NO: 6045932 - DNA, 25 bp, Homo sapien
taataaatctcccaagaaaattata

SEQ ID NO: 6045933 - DNA, 25 bp, Homo sapien
tccaactaaacaatgttcctagatt

SEQ ID NO: 6045934 - DNA, 25 bp, Homo sapien
ctctttacacttacctatggactgg

SEQ ID NO: 6045935 - DNA, 25 bp, Homo sapien
cctggcaatgtccagcaacagacta

SEQ ID NO: 6045936 - DNA, 25 bp, Homo sapien
ttggcaccacctcacgaaaatgcct

SEQ ID NO: 6045937 - DNA, 25 bp, Homo sapien
tacctatggactggactccaattat

SEQ ID NO: 6045938 - DNA, 25 bp, Homo sapien
ggactccaattattacctcgacaat

SEQ ID NO: 6045939 - DNA, 25 bp, Homo sapien
gtcaatttggaggacccttctaaga

SEQ ID NO: 6045940 - DNA, 25 bp, Homo sapien
tgttcatcttcaaaccaaactctcc

SEQ ID NO: 6045941 - DNA, 25 bp, Homo sapien
gtgatcagtatttccactgatactg

SEQ ID NO: 6045942 - DNA, 25 bp, Homo sapien
aattatacctctgaaggactcaagt

SEQ ID NO: 6045943 - DNA, 25 bp, Homo sapien
atacgacaccatagtggcctcctgg

SEQ ID NO: 6045944 - DNA, 25 bp, Homo sapien
tacacttacctatggactggactcc

SEQ ID NO: 6045945 - DNA, 25 bp, Homo sapien
ttctcgcaagtaaacgacttctctt

SEQ ID NO: 6045946 - DNA, 25 bp, Homo sapien
tgcaaaatcgtccaattccgataca

SEQ ID NO: 6045947 - DNA, 25 bp, Homo sapien
tcacgaaaatgcctatatagttgct

SEQ ID NO: 6045948 - DNA, 25 bp, Homo sapien
caccatagtggcctcctggtttgat

SEQ ID NO: 6045949 - DNA, 25 bp, Homo sapien
gcccgaaattggctgttctctgtgt

SEQ ID NO: 6045950 - DNA, 25 bp, Homo sapien
tctccctctattctggaccacagcg

SEQ ID NO: 6045951 - DNA, 25 bp, Homo sapien
gaaggactcaagttttgaaaacatc

SEQ ID NO: 6045952 - DNA, 25 bp, Homo sapien
atccgaatacgacaccatagtggcc

SEQ ID NO: 6045953 - DNA, 25 bp, Homo sapien
cttctaagaccattcctaaagcgtt

SEQ ID NO: 6045954 - DNA, 25 bp, Homo sapien
tcttactcttcaaaaagcagtccaa

SEQ ID NO: 6045955 - DNA, 25 bp, Homo sapien
ccaattccgatacatctattttctt

SEQ ID NO: 6045956 - DNA, 25 bp, Homo sapien
ccaaactctccctctattctggacc

SEQ ID NO: 6045957 - DNA, 25 bp, Homo sapien
cgacaataattaccttcatcaccgt

SEQ ID NO: 6045958 - DNA, 25 bp, Homo sapien
ctggaccacagcgtgatcagtattt

SEQ ID NO: 6045959 - DNA, 25 bp, Homo sapien
ctcctggtttgatgatcatccggat

SEQ ID NO: 6045960 - DNA, 25 bp, Homo sapien
aattggctgttctctgtgtctcgag

SEQ ID NO: 6045961 - DNA, 25 bp, Homo sapien
tcaccgtcttactcttcaaaaagca

SEQ ID NO: 6045962 - DNA, 25 bp, Homo sapien
atgaagcaaatcatacaagccatta

SEQ ID NO: 6045963 - DNA, 25 bp, Homo sapien
caaatcatacaagccattaagcagt

SEQ ID NO: 6045964 - DNA, 25 bp, Homo sapien
atcctgccctggcaatgtccagcaa

SEQ ID NO: 6045965 - DNA, 25 bp, Homo sapien
gaaagaatgaagcaaatcatacaag

SEQ ID NO: 6045966 - DNA, 25 bp, Homo sapien
atgttcctagattgttcatcttcaa

SEQ ID NO: 6045967 - DNA, 25 bp, Homo sapien
ggcgtgtcaacccatcctgccctgg

SEQ ID NO: 6045968 - DNA, 25 bp, Homo sapien
cgacttctctttacacttacctatg

SEQ ID NO: 6045969 - DNA, 25 bp, Homo sapien
ttcaaaccaaactctccctctattc

SEQ ID NO: 6045970 - DNA, 25 bp, Homo sapien
gccattaagcagttctcgcaagtaa

SEQ ID NO: 6045971 - DNA, 25 bp, Homo sapien
gctggctaataaatctcccaagaaa

SEQ ID NO: 6045972 - DNA, 25 bp, Homo sapien
ctatatagttgctctgtttactgcc

SEQ ID NO: 6045973 - DNA, 25 bp, Homo sapien
taaacaatgttcctagattgttcat

SEQ ID NO: 6045974 - DNA, 25 bp, Homo sapien
actaaagctggctaataaatctccc

SEQ ID NO: 6045975 - DNA, 25 bp, Homo sapien
tactgccacagcgcccgaaattggc

SEQ ID NO: 6045976 - DNA, 25 bp, Homo sapien
cttcatcaccgtcttactcttcaaa

SEQ ID NO: 6045977 - DNA, 25 bp, Homo sapien
aattaccttcatcaccgtcttactc

SEQ ID NO: 6045978 - DNA, 25 bp, Homo sapien
agaccattcctaaagcgttccagtt

SEQ ID NO: 6045979 - DNA, 25 bp, Homo sapien
accacctcacgaaaatgcctatata

SEQ ID NO: 6045980 - DNA, 25 bp, Homo sapien
ttacctcgacaataattaccttcat

SEQ ID NO: 6045981 - DNA, 25 bp, Homo sapien
aatgtccagcaacagactactaaag

SEQ ID NO: 6045982 - DNA, 25 bp, Homo sapien
aaatgcctatatagttgctctgttt

SEQ ID NO: 6045983 - DNA, 25 bp, Homo sapien
agtatttccactgatactggctcag

SEQ ID NO: 6045984 - DNA, 25 bp, Homo sapien
cagcaacagactactaaagctggct

SEQ ID NO: 6045985 - DNA, 25 bp, Homo sapien
caattattacctcgacaataattac

SEQ ID NO: 6045986 - DNA, 25 bp, Homo sapien
aatcgtccaattccgatacatctat

SEQ ID NO: 6045987 - DNA, 25 bp, Homo sapien
tcaacccatcctgccctggcaatgt

SEQ ID NO: 6045988 - DNA, 25 bp, Homo sapien
gctagaatccgaatacgacaccata

SEQ ID NO: 6045989 - DNA, 25 bp, Homo sapien
ttctgcggcgtgtcaacccatcctg

SEQ ID NO: 6045990 - DNA, 25 bp, Homo sapien
cacaaaggtcaatttggaggaccct

SEQ ID NO: 6045991 - DNA, 25 bp, Homo sapien
tctattctggaccacagcgtgatca

SEQ ID NO: 6045992 - DNA, 25 bp, Homo sapien
tctcgagctagaatccgaatacgac

SEQ ID NO: 6045993 - DNA, 25 bp, Homo sapien
cagactactaaagctggctaataaa

SEQ ID NO: 6045994 - DNA, 25 bp, Homo sapien
gaggacccttctaagaccattccta

SEQ ID NO: 6045995 - DNA, 25 bp, Homo sapien
tctgtgtctcgagctagaatccgaa

SEQ ID NO: 6045996 - DNA, 25 bp, Homo sapien
tgatcatccggatgcaaaatcgtcc

SEQ ID NO: 6045997 - DNA, 25 bp, Homo sapien
tttgaaaacatcttggcaccacctc

SEQ ID NO: 6045998 - DNA, 25 bp, Homo sapien
agttgctctgtttactgccacagcg

SEQ ID NO: 6045999 - DNA, 25 bp, Homo sapien
gaaatacataacctcgcccttagga

SEQ ID NO: 6046000 - DNA, 25 bp, Homo sapien
tataggcactgatcatgcaaatgat

SEQ ID NO: 6046001 - DNA, 25 bp, Homo sapien
atgttccgtaaataagaaccatgac

SEQ ID NO: 6046002 - DNA, 25 bp, Homo sapien
cacgctgtggtccagaatagaggga

SEQ ID NO: 6046003 - DNA, 25 bp, Homo sapien
gaagtcgtttacttgcgagaactgc

SEQ ID NO: 6046004 - DNA, 25 bp, Homo sapien
acaaaaggaggccaaaatagcatca

SEQ ID NO: 6046005 - DNA, 25 bp, Homo sapien
actgatcacgctgtggtccagaata

SEQ ID NO: 6046006 - DNA, 25 bp, Homo sapien
tttggactgctttttgaagagtaag

SEQ ID NO: 6046007 - DNA, 25 bp, Homo sapien
tggagtccagtccataggtaagtgt

SEQ ID NO: 6046008 - DNA, 25 bp, Homo sapien
taagaaccatgacttgagtttcaat

SEQ ID NO: 6046009 - DNA, 25 bp, Homo sapien
tttcttggtctctggatacaaatga

SEQ ID NO: 6046010 - DNA, 25 bp, Homo sapien
tttgaagagtaagacggtgatgaag

SEQ ID NO: 6046011 - DNA, 25 bp, Homo sapien
aagatatgatggagaacatgagttt

SEQ ID NO: 6046012 - DNA, 25 bp, Homo sapien
tcatgcaaatgatgaaaaaagttga

SEQ ID NO: 6046013 - DNA, 25 bp, Homo sapien
caaatgagaccgcaagaattgtata

SEQ ID NO: 6046014 - DNA, 25 bp, Homo sapien
ggagaacatgagtttggactgcttt

SEQ ID NO: 6046015 - DNA, 25 bp, Homo sapien
ccagtccataggtaagtgtaaagag

SEQ ID NO: 6046016 - DNA, 25 bp, Homo sapien
ttgcgagaactgcttaatggcttgt

SEQ ID NO: 6046017 - DNA, 25 bp, Homo sapien
gtacgctttcttggtctctggatac

SEQ ID NO: 6046018 - DNA, 25 bp, Homo sapien
agttgacaaggttgcccagatgatc

SEQ ID NO: 6046019 - DNA, 25 bp, Homo sapien
ggcttgtatgatttgcttcattctt

SEQ ID NO: 6046020 - DNA, 25 bp, Homo sapien
tcctgatttggttgaacatataggc

SEQ ID NO: 6046021 - DNA, 25 bp, Homo sapien
ggaggccaaaatagcatcaatgaag

SEQ ID NO: 6046022 - DNA, 25 bp, Homo sapien
gtaagcaggactctttatcgtgaac

SEQ ID NO: 6046023 - DNA, 25 bp, Homo sapien
gggtattcctgatttggttgaacat

SEQ ID NO: 6046024 - DNA, 25 bp, Homo sapien
tgcccagatgatcctggaagatatg

SEQ ID NO: 6046025 - DNA, 25 bp, Homo sapien
tggatacaaatgagaccgcaagaat

SEQ ID NO: 6046026 - DNA, 25 bp, Homo sapien
tggcgaattggtgttggaattcatt

SEQ ID NO: 6046027 - DNA, 25 bp, Homo sapien
ggaaatactgatcacgctgtggtcc

SEQ ID NO: 6046028 - DNA, 25 bp, Homo sapien
ataggtaagtgtaaagagaagtcgt

SEQ ID NO: 6046029 - DNA, 25 bp, Homo sapien
agcagcaaagaagacataaatgaat

SEQ ID NO: 6046030 - DNA, 25 bp, Homo sapien
attgtatacccttgaccaatacgac

SEQ ID NO: 6046031 - DNA, 25 bp, Homo sapien
tacgacaaccaacgcggccaatgtt

SEQ ID NO: 6046032 - DNA, 25 bp, Homo sapien
ccatgacttgagtttcaatggcgaa

SEQ ID NO: 6046033 - DNA, 25 bp, Homo sapien
gagaccgcaagaattgtataccctt

SEQ ID NO: 6046034 - DNA, 25 bp, Homo sapien
caaaatagcatcaatgaagtacgct

SEQ ID NO: 6046035 - DNA, 25 bp, Homo sapien
cttaatggcttgtatgatttgcttc

SEQ ID NO: 6046036 - DNA, 25 bp, Homo sapien
ttggtgttggaattcattgggcaag

SEQ ID NO: 6046037 - DNA, 25 bp, Homo sapien
gcaagaattgtatacccttgaccaa

SEQ ID NO: 6046038 - DNA, 25 bp, Homo sapien
ccaacgcggccaatgttccgtaaat

SEQ ID NO: 6046039 - DNA, 25 bp, Homo sapien
ccaattgggtattcctgatttggtt

SEQ ID NO: 6046040 - DNA, 25 bp, Homo sapien
cgtgaacacggttgtcaaagcagca

SEQ ID NO: 6046041 - DNA, 25 bp, Homo sapien
gaactgcttaatggcttgtatgatt

SEQ ID NO: 6046042 - DNA, 25 bp, Homo sapien
aaagaagacataaatgaataaggca

SEQ ID NO: 6046043 - DNA, 25 bp, Homo sapien
tttggttgaacatataggcactgat

SEQ ID NO: 6046044 - DNA, 25 bp, Homo sapien
taattattgtcgaggtaataattgg

SEQ ID NO: 6046045 - DNA, 25 bp, Homo sapien
tgtcaaagcagcaaagaagacataa

SEQ ID NO: 6046046 - DNA, 25 bp, Homo sapien
agcatcaatgaagtacgctttcttg

SEQ ID NO: 6046047 - DNA, 25 bp, Homo sapien
gatgatcctggaagatatgatggag

SEQ ID NO: 6046048 - DNA, 25 bp, Homo sapien
cacggttgtcaaagcagcaaagaag

SEQ ID NO: 6046049 - DNA, 25 bp, Homo sapien
tgaaggtaattattgtcgaggtaat

SEQ ID NO: 6046050 - DNA, 25 bp, Homo sapien
ctttatcgtgaacacggttgtcaaa

SEQ ID NO: 6046051 - DNA, 25 bp, Homo sapien
ctgctttttgaagagtaagacggtg

SEQ ID NO: 6046052 - DNA, 25 bp, Homo sapien
tgaaaaaagttgacaaggttgccca

SEQ ID NO: 6046053 - DNA, 25 bp, Homo sapien
ttctgagccagtatcagtggaaata

SEQ ID NO: 6046054 - DNA, 25 bp, Homo sapien
cgcctgccaattgggtattcctgat

SEQ ID NO: 6046055 - DNA, 25 bp, Homo sapien
aatgaataaggcacaaaaggaggcc

SEQ ID NO: 6046056 - DNA, 25 bp, Homo sapien
tacccttgaccaatacgacaaccaa

SEQ ID NO: 6046057 - DNA, 25 bp, Homo sapien
caaggttgcccagatgatcctggaa

SEQ ID NO: 6046058 - DNA, 25 bp, Homo sapien
gccagtatcagtggaaatactgatc

SEQ ID NO: 6046059 - DNA, 25 bp, Homo sapien
gtaagacggtgatgaaggtaattat

SEQ ID NO: 6046060 - DNA, 25 bp, Homo sapien
ttcattgggcaagaaatacataacc

SEQ ID NO: 6046061 - DNA, 25 bp, Homo sapien
aataattggagtccagtccataggt

SEQ ID NO: 6046062 - DNA, 25 bp, Homo sapien
atcagtggaaatactgatcacgctg

SEQ ID NO: 6046063 - DNA, 25 bp, Homo sapien
cgtaaataagaaccatgacttgagt

SEQ ID NO: 6046064 - DNA, 25 bp, Homo sapien
gcggccaatgttccgtaaataagaa

SEQ ID NO: 6046065 - DNA, 25 bp, Homo sapien
ccttaggaccaacgcctgccaattg

SEQ ID NO: 6046066 - DNA, 25 bp, Homo sapien
aatgaagtacgctttcttggtctct

SEQ ID NO: 6046067 - DNA, 25 bp, Homo sapien
tgaccaatacgacaaccaacgcggc

SEQ ID NO: 6046068 - DNA, 25 bp, Homo sapien
tatgatggagaacatgagtttggac

SEQ ID NO: 6046069 - DNA, 25 bp, Homo sapien
agtgtaaagagaagtcgtttacttg

SEQ ID NO: 6046070 - DNA, 25 bp, Homo sapien
aaatgatgaaaaaagttgacaaggt

SEQ ID NO: 6046071 - DNA, 25 bp, Homo sapien
gggcaagaaatacataacctcgccc

SEQ ID NO: 6046072 - DNA, 25 bp, Homo sapien
cgaggtaataattggagtccagtcc

SEQ ID NO: 6046073 - DNA, 25 bp, Homo sapien
taaggcacaaaaggaggccaaaata

SEQ ID NO: 6046074 - DNA, 25 bp, Homo sapien
tattgtcgaggtaataattggagtc

SEQ ID NO: 6046075 - DNA, 25 bp, Homo sapien
ggaccaacgcctgccaattgggtat

SEQ ID NO: 6046076 - DNA, 25 bp, Homo sapien
aaagggtaagcaggactctttatcg

SEQ ID NO: 6046077 - DNA, 25 bp, Homo sapien
ggtctctggatacaaatgagaccgc

SEQ ID NO: 6046078 - DNA, 25 bp, Homo sapien
tgaacatataggcactgatcatgca

SEQ ID NO: 6046079 - DNA, 25 bp, Homo sapien
tcgcccttaggaccaacgcctgcca

SEQ ID NO: 6046080 - DNA, 25 bp, Homo sapien
cggtgatgaaggtaattattgtcga

SEQ ID NO: 6046081 - DNA, 25 bp, Homo sapien
tttcaatggcgaattggtgttggaa

SEQ ID NO: 6046082 - DNA, 25 bp, Homo sapien
tatgatttgcttcattctttctgag

SEQ ID NO: 6046083 - DNA, 25 bp, Homo sapien
gacataaatgaataaggcacaaaag

SEQ ID NO: 6046084 - DNA, 25 bp, Homo sapien
aggactctttatcgtgaacacggtt

SEQ ID NO: 6046085 - DNA, 25 bp, Homo sapien
ttggaattcattgggcaagaaatac

SEQ ID NO: 6046086 - DNA, 25 bp, Homo sapien
cattctttctgagccagtatcagtg

SEQ ID NO: 6046087 - DNA, 25 bp, Homo sapien
cttgagtttcaatggcgaattggtg

SEQ ID NO: 6046088 - DNA, 25 bp, Homo sapien
cactgatcatgcaaatgatgaaaaa

SEQ ID NO: 6046089 - DNA, 25 bp, Homo sapien
taaagagaagtcgtttacttgcgag

SEQ ID NO: 6046090 - DNA, 25 bp, Homo sapien
ttgcttcattctttctgagccagta

SEQ ID NO: 6046091 - DNA, 25 bp, Homo sapien
gtttacttgcgagaactgcttaatg

SEQ ID NO: 6046092 - DNA, 25 bp, Homo sapien
catgagtttggactgctttttgaag

SEQ ID NO: 6046093 - DNA, 25 bp, Homo sapien
tacagacacatgtgtcgttttgaat

SEQ ID NO: 6046094 - DNA, 25 bp, Homo sapien
tcaggcttcttttacagacatcctt

SEQ ID NO: 6046095 - DNA, 25 bp, Homo sapien
ggatgactacgattggtattggcgt

SEQ ID NO: 6046096 - DNA, 25 bp, Homo sapien
acctgatatcaagttgcactgtgat

SEQ ID NO: 6046097 - DNA, 25 bp, Homo sapien
aagagaatcatctacggtgattcta

SEQ ID NO: 6046098 - DNA, 25 bp, Homo sapien
catcccaaaggaacattggtccttc

SEQ ID NO: 6046099 - DNA, 25 bp, Homo sapien
ggaagatagatttaactccaagttc

SEQ ID NO: 6046100 - DNA, 25 bp, Homo sapien
tgagtctattaaatccgtggaagat

SEQ ID NO: 6046101 - DNA, 25 bp, Homo sapien
cggctcgggctataaatactcgaaa

SEQ ID NO: 6046102 - DNA, 25 bp, Homo sapien
actgtgtatgtgttctttcatggag

SEQ ID NO: 6046103 - DNA, 25 bp, Homo sapien
ggaaggagatgggtgagaagagaat

SEQ ID NO: 6046104 - DNA, 25 bp, Homo sapien
tgtggaacctgatatcaagttgcac

SEQ ID NO: 6046105 - DNA, 25 bp, Homo sapien
tatgcgagaggctctgccccaagcc

SEQ ID NO: 6046106 - DNA, 25 bp, Homo sapien
ggaaaaggccacttttgtcactcta

SEQ ID NO: 6046107 - DNA, 25 bp, Homo sapien
cagctttagttagtggtacaacaaa

SEQ ID NO: 6046108 - DNA, 25 bp, Homo sapien
atcatctacggtgattctatctctt

SEQ ID NO: 6046109 - DNA, 25 bp, Homo sapien
ttggcgtgtggaacctgatatcaag

SEQ ID NO: 6046110 - DNA, 25 bp, Homo sapien
cactctagtgcgtaatagagatcta

SEQ ID NO: 6046111 - DNA, 25 bp, Homo sapien
tgattgggtgtttttgaatgatgaa

SEQ ID NO: 6046112 - DNA, 25 bp, Homo sapien
gtcgccgtgtttactgtgtatgtgt

SEQ ID NO: 6046113 - DNA, 25 bp, Homo sapien
tgaattcaaaaacgttacgtcagct

SEQ ID NO: 6046114 - DNA, 25 bp, Homo sapien
taaatactcgaaagtggaactacca

SEQ ID NO: 6046115 - DNA, 25 bp, Homo sapien
tatcaagttgcactgtgatatcgac

SEQ ID NO: 6046116 - DNA, 25 bp, Homo sapien
atccgtggaagatagatttaactcc

SEQ ID NO: 6046117 - DNA, 25 bp, Homo sapien
ttacgtcagctttagttagtggtac

SEQ ID NO: 6046118 - DNA, 25 bp, Homo sapien
tttgatggatgactacgattggtat

SEQ ID NO: 6046119 - DNA, 25 bp, Homo sapien
tttgaatgatgaagagttcactgat

SEQ ID NO: 6046120 - DNA, 25 bp, Homo sapien
tattaaatccgtggaagatagattt

SEQ ID NO: 6046121 - DNA, 25 bp, Homo sapien
gtacaacaaaatacggtgtcatccc

SEQ ID NO: 6046122 - DNA, 25 bp, Homo sapien
tgatgaagagttcactgatgaattc

SEQ ID NO: 6046123 - DNA, 25 bp, Homo sapien
gttggctgagtctattaaatccgtg

SEQ ID NO: 6046124 - DNA, 25 bp, Homo sapien
tatcttccggctcgggctataaata

SEQ ID NO: 6046125 - DNA, 25 bp, Homo sapien
aggaacattggtccttccctgagtg

SEQ ID NO: 6046126 - DNA, 25 bp, Homo sapien
gttgcactgtgatatcgactacgat

SEQ ID NO: 6046127 - DNA, 25 bp, Homo sapien
gtgtttactgtgtatgtgttctttc

SEQ ID NO: 6046128 - DNA, 25 bp, Homo sapien
acatcctttgatggatgactacgat

SEQ ID NO: 6046129 - DNA, 25 bp, Homo sapien
ggccacttttgtcactctagtgcgt

SEQ ID NO: 6046130 - DNA, 25 bp, Homo sapien
cggtgtcatcccaaaggaacattgg

SEQ ID NO: 6046131 - DNA, 25 bp, Homo sapien
catggagctcagtatgcgagaggct

SEQ ID NO: 6046132 - DNA, 25 bp, Homo sapien
caagcccaaagtacagtaccgtgct

SEQ ID NO: 6046133 - DNA, 25 bp, Homo sapien
ttggtattggcgtgtggaacctgat

SEQ ID NO: 6046134 - DNA, 25 bp, Homo sapien
aaaaggccgctcaagtcaggaagga

SEQ ID NO: 6046135 - DNA, 25 bp, Homo sapien
caaagtacagtaccgtgctatcttc

SEQ ID NO: 6046136 - DNA, 25 bp, Homo sapien
cacatgtgtcgttttgaatcaggct

SEQ ID NO: 6046137 - DNA, 25 bp, Homo sapien
tcaactatgattgggtgtttttgaa

SEQ ID NO: 6046138 - DNA, 25 bp, Homo sapien
gaggctctgccccaagcccaaagta

SEQ ID NO: 6046139 - DNA, 25 bp, Homo sapien
cttctggtcgccgtgtttactgtgt

SEQ ID NO: 6046140 - DNA, 25 bp, Homo sapien
taactccaagttcaactatgattgg

SEQ ID NO: 6046141 - DNA, 25 bp, Homo sapien
aagtcaggaaggagatgggtgagaa

SEQ ID NO: 6046142 - DNA, 25 bp, Homo sapien
tagatttaactccaagttcaactat

SEQ ID NO: 6046143 - DNA, 25 bp, Homo sapien
ggtgagaagagaatcatctacggtg

SEQ ID NO: 6046144 - DNA, 25 bp, Homo sapien
atgaagaaaaggccgctcaagtcag

SEQ ID NO: 6046145 - DNA, 25 bp, Homo sapien
agagttcactgatgaattcaaaaac

SEQ ID NO: 6046146 - DNA, 25 bp, Homo sapien
tgtcgttttgaatcaggcttctttt

SEQ ID NO: 6046147 - DNA, 25 bp, Homo sapien
gggctataaatactcgaaagtggaa

SEQ ID NO: 6046148 - DNA, 25 bp, Homo sapien
ttacagacatcctttgatggatgac

SEQ ID NO: 6046149 - DNA, 25 bp, Homo sapien
tagtggtacaacaaaatacggtgtc

SEQ ID NO: 6046150 - DNA, 25 bp, Homo sapien
aaattaggacttcttctggtcgccg

SEQ ID NO: 6046151 - DNA, 25 bp, Homo sapien
ttctttcatggagctcagtatgcga

SEQ ID NO: 6046152 - DNA, 25 bp, Homo sapien
aacgttacgtcagctttagttagtg

SEQ ID NO: 6046153 - DNA, 25 bp, Homo sapien
ccgctcaagtcaggaaggagatggg

SEQ ID NO: 6046154 - DNA, 25 bp, Homo sapien
gctcagtatgcgagaggctctgccc

SEQ ID NO: 6046155 - DNA, 25 bp, Homo sapien
ccttccctgagtggattgatgaaga

SEQ ID NO: 6046156 - DNA, 25 bp, Homo sapien
ttcttttacagacatcctttgatgg

SEQ ID NO: 6046157 - DNA, 25 bp, Homo sapien
tcgaaagtggaactaccaaagtata

SEQ ID NO: 6046158 - DNA, 25 bp, Homo sapien
caaaatacggtgtcatcccaaagga

SEQ ID NO: 6046159 - DNA, 25 bp, Homo sapien
agatctatattcgttggctgagtct

SEQ ID NO: 6046160 - DNA, 25 bp, Homo sapien
taatagagatctatattcgttggct

SEQ ID NO: 6046161 - DNA, 25 bp, Homo sapien
gattctatctcttacagacacatgt

SEQ ID NO: 6046162 - DNA, 25 bp, Homo sapien
ggacttcttctggtcgccgtgttta

SEQ ID NO: 6046163 - DNA, 25 bp, Homo sapien
ggtgtttttgaatgatgaagagttc

SEQ ID NO: 6046164 - DNA, 25 bp, Homo sapien
ctacgattggtattggcgtgtggaa

SEQ ID NO: 6046165 - DNA, 25 bp, Homo sapien
tttgaatcaggcttcttttacagac

SEQ ID NO: 6046166 - DNA, 25 bp, Homo sapien
ctgccccaagcccaaagtacagtac

SEQ ID NO: 6046167 - DNA, 25 bp, Homo sapien
tacggtgattctatctcttacagac

SEQ ID NO: 6046168 - DNA, 25 bp, Homo sapien
tatgtgttctttcatggagctcagt

SEQ ID NO: 6046169 - DNA, 25 bp, Homo sapien
ttttgtcactctagtgcgtaataga

SEQ ID NO: 6046170 - DNA, 25 bp, Homo sapien
cactgatgaattcaaaaacgttacg

SEQ ID NO: 6046171 - DNA, 25 bp, Homo sapien
atattcgttggctgagtctattaaa

SEQ ID NO: 6046172 - DNA, 25 bp, Homo sapien
ctgagtggattgatgaagaaaaggc

SEQ ID NO: 6046173 - DNA, 25 bp, Homo sapien
ggattgatgaagaaaaggccgctca

SEQ ID NO: 6046174 - DNA, 25 bp, Homo sapien
caagttcaactatgattgggtgttt

SEQ ID NO: 6046175 - DNA, 25 bp, Homo sapien
gagatgggtgagaagagaatcatct

SEQ ID NO: 6046176 - DNA, 25 bp, Homo sapien
agtgcgtaatagagatctatattcg

SEQ ID NO: 6046177 - DNA, 25 bp, Homo sapien
attggtccttccctgagtggattga

SEQ ID NO: 6046178 - DNA, 25 bp, Homo sapien
atctcttacagacacatgtgtcgtt

SEQ ID NO: 6046179 - DNA, 25 bp, Homo sapien
acagtaccgtgctatcttccggctc

SEQ ID NO: 6046180 - DNA, 25 bp, Homo sapien
ccgtgctatcttccggctcgggcta

SEQ ID NO: 6046181 - DNA, 25 bp, Homo sapien
tggatcacagtcacatttgttagcc

SEQ ID NO: 6046182 - DNA, 25 bp, Homo sapien
tattgtctttcatgaatttgaagac

SEQ ID NO: 6046183 - DNA, 25 bp, Homo sapien
ggaacatggtaataaccaatatcac

SEQ ID NO: 6046184 - DNA, 25 bp, Homo sapien
cttccatgaatttacgagtagtctc

SEQ ID NO: 6046185 - DNA, 25 bp, Homo sapien
tgaagacatcgtagtcgatatcaca

SEQ ID NO: 6046186 - DNA, 25 bp, Homo sapien
gatgggcttccatgaatttacgagt

SEQ ID NO: 6046187 - DNA, 25 bp, Homo sapien
acatttgttagccagtctgatactt

SEQ ID NO: 6046188 - DNA, 25 bp, Homo sapien
tagaatttagtagtacatgaataac

SEQ ID NO: 6046189 - DNA, 25 bp, Homo sapien
gtacatgaataactgtgccatgtga

SEQ ID NO: 6046190 - DNA, 25 bp, Homo sapien
gcatcaccccatctttcataaaaga

SEQ ID NO: 6046191 - DNA, 25 bp, Homo sapien
ttagtagtacatgaataactgtgcc

SEQ ID NO: 6046192 - DNA, 25 bp, Homo sapien
ccaataccaatcgtagtcatccatc

SEQ ID NO: 6046193 - DNA, 25 bp, Homo sapien
cagtgcaacttgatatcaggttcca

SEQ ID NO: 6046194 - DNA, 25 bp, Homo sapien
agcggtccaagaacagcgcagcacc

SEQ ID NO: 6046195 - DNA, 25 bp, Homo sapien
ccaatagaatgaactggagcatcac

SEQ ID NO: 6046196 - DNA, 25 bp, Homo sapien
tttgcttggatcacagtcacatttg

SEQ ID NO: 6046197 - DNA, 25 bp, Homo sapien
tggcaacttgtttatattgtagaat

SEQ ID NO: 6046198 - DNA, 25 bp, Homo sapien
gcagcaccaatagaatgaactggag

SEQ ID NO: 6046199 - DNA, 25 bp, Homo sapien
gaatgaactggagcatcaccccatc

SEQ ID NO: 6046200 - DNA, 25 bp, Homo sapien
acagtcacatttgttagccagtctg

SEQ ID NO: 6046201 - DNA, 25 bp, Homo sapien
tgatcgtcgctaacaaagtctaaca

SEQ ID NO: 6046202 - DNA, 25 bp, Homo sapien
caggagtgaaatggaacatggtaat

SEQ ID NO: 6046203 - DNA, 25 bp, Homo sapien
ccaatcgtagtcatccatcaaagga

SEQ ID NO: 6046204 - DNA, 25 bp, Homo sapien
atctccacaaatccaaagcagcaat

SEQ ID NO: 6046205 - DNA, 25 bp, Homo sapien
agtcgatatcacagtgcaacttgat

SEQ ID NO: 6046206 - DNA, 25 bp, Homo sapien
caaagtctaacatattattttcatg

SEQ ID NO: 6046207 - DNA, 25 bp, Homo sapien
ggataagctcaggatgggcttccat

SEQ ID NO: 6046208 - DNA, 25 bp, Homo sapien
tcgctaacaaagtctaacatattat

SEQ ID NO: 6046209 - DNA, 25 bp, Homo sapien
ccatgtgaaatctttgcttggatca

SEQ ID NO: 6046210 - DNA, 25 bp, Homo sapien
agtatgctggagatctccacaaatc

SEQ ID NO: 6046211 - DNA, 25 bp, Homo sapien
cagcaatttcaaaattagaccaaaa

SEQ ID NO: 6046212 - DNA, 25 bp, Homo sapien
aaattgtatgaaagtccctgatcgt

SEQ ID NO: 6046213 - DNA, 25 bp, Homo sapien
aatccaccttcacgatctaaataat

SEQ ID NO: 6046214 - DNA, 25 bp, Homo sapien
tgaatttacgagtagtctcccataa

SEQ ID NO: 6046215 - DNA, 25 bp, Homo sapien
taaagtggggatagtagcttcatac

SEQ ID NO: 6046216 - DNA, 25 bp, Homo sapien
tatcacagtgcaacttgatatcagg

SEQ ID NO: 6046217 - DNA, 25 bp, Homo sapien
ggttccacacgccaataccaatcgt

SEQ ID NO: 6046218 - DNA, 25 bp, Homo sapien
taaccaatatcaccgaagtgatgga

SEQ ID NO: 6046219 - DNA, 25 bp, Homo sapien
gatggatttcagagcggtccaagaa

SEQ ID NO: 6046220 - DNA, 25 bp, Homo sapien
ttagaccaaaaatggcacaaattgt

SEQ ID NO: 6046221 - DNA, 25 bp, Homo sapien
tttcagagcggtccaagaacagcgc

SEQ ID NO: 6046222 - DNA, 25 bp, Homo sapien
tggcacaaattgtatgaaagtccct

SEQ ID NO: 6046223 - DNA, 25 bp, Homo sapien
atatcaggttccacacgccaatacc

SEQ ID NO: 6046224 - DNA, 25 bp, Homo sapien
acaaatccaaagcagcaatttcaaa

SEQ ID NO: 6046225 - DNA, 25 bp, Homo sapien
aatggcaaaggcatactttttctta

SEQ ID NO: 6046226 - DNA, 25 bp, Homo sapien
tatgaaagtccctgatcgtcgctaa

SEQ ID NO: 6046227 - DNA, 25 bp, Homo sapien
agtagcttcatactccttaatggaa

SEQ ID NO: 6046228 - DNA, 25 bp, Homo sapien
gttagccagtctgatacttgtgtct

SEQ ID NO: 6046229 - DNA, 25 bp, Homo sapien
aataatcaaaatatgcggagtatgc

SEQ ID NO: 6046230 - DNA, 25 bp, Homo sapien
ctccttaatggaaatggcaaaggca

SEQ ID NO: 6046231 - DNA, 25 bp, Homo sapien
tttcatggataagctcaggatgggc

SEQ ID NO: 6046232 - DNA, 25 bp, Homo sapien
aacttgatatcaggttccacacgcc

SEQ ID NO: 6046233 - DNA, 25 bp, Homo sapien
actggagcatcaccccatctttcat

SEQ ID NO: 6046234 - DNA, 25 bp, Homo sapien
atgcggagtatgctggagatctcca

SEQ ID NO: 6046235 - DNA, 25 bp, Homo sapien
tgaaatggaacatggtaataaccaa

SEQ ID NO: 6046236 - DNA, 25 bp, Homo sapien
tattgtagaatttagtagtacatga

SEQ ID NO: 6046237 - DNA, 25 bp, Homo sapien
ctttcataaaagaatccaccttcac

SEQ ID NO: 6046238 - DNA, 25 bp, Homo sapien
ctttcatgaatttgaagacatcgta

SEQ ID NO: 6046239 - DNA, 25 bp, Homo sapien
tacgagtagtctcccataaagtggg

SEQ ID NO: 6046240 - DNA, 25 bp, Homo sapien
cagtctgatacttgtgtctattgga

SEQ ID NO: 6046241 - DNA, 25 bp, Homo sapien
ttcttattgtctttcatgaatttga

SEQ ID NO: 6046242 - DNA, 25 bp, Homo sapien
ccttcacgatctaaataatcaaaat

SEQ ID NO: 6046243 - DNA, 25 bp, Homo sapien
gatacttgtgtctattggacaggag

SEQ ID NO: 6046244 - DNA, 25 bp, Homo sapien
caaaatatgcggagtatgctggaga

SEQ ID NO: 6046245 - DNA, 25 bp, Homo sapien
taaaagaatccaccttcacgatcta

SEQ ID NO: 6046246 - DNA, 25 bp, Homo sapien
gggatagtagcttcatactccttaa

SEQ ID NO: 6046247 - DNA, 25 bp, Homo sapien
ccaaagcagcaatttcaaaattaga

SEQ ID NO: 6046248 - DNA, 25 bp, Homo sapien
attggacaggagtgaaatggaacat

SEQ ID NO: 6046249 - DNA, 25 bp, Homo sapien
gatctaaataatcaaaatatgcgga

SEQ ID NO: 6046250 - DNA, 25 bp, Homo sapien
ttcatactccttaatggaaatggca

SEQ ID NO: 6046251 - DNA, 25 bp, Homo sapien
tggtaataaccaatatcaccgaagt

SEQ ID NO: 6046252 - DNA, 25 bp, Homo sapien
tattattttcatggataagctcagg

SEQ ID NO: 6046253 - DNA, 25 bp, Homo sapien
ctaacatattattttcatggataag

SEQ ID NO: 6046254 - DNA, 25 bp, Homo sapien
cacacgccaataccaatcgtagtca

SEQ ID NO: 6046255 - DNA, 25 bp, Homo sapien
tcaaaattagaccaaaaatggcaca

SEQ ID NO: 6046256 - DNA, 25 bp, Homo sapien
agtccctgatcgtcgctaacaaagt

SEQ ID NO: 6046257 - DNA, 25 bp, Homo sapien
ccccatctttcataaaagaatccac

SEQ ID NO: 6046258 - DNA, 25 bp, Homo sapien
caaaaatggcacaaattgtatgaaa

SEQ ID NO: 6046259 - DNA, 25 bp, Homo sapien
gaaatctttgcttggatcacagtca

SEQ ID NO: 6046260 - DNA, 25 bp, Homo sapien
aaaggcatactttttcttattgtct

SEQ ID NO: 6046261 - DNA, 25 bp, Homo sapien
aacagcgcagcaccaatagaatgaa

SEQ ID NO: 6046262 - DNA, 25 bp, Homo sapien
catcgtagtcgatatcacagtgcaa

SEQ ID NO: 6046263 - DNA, 25 bp, Homo sapien
gaataactgtgccatgtgaaatctt

SEQ ID NO: 6046264 - DNA, 25 bp, Homo sapien
gtgtctattggacaggagtgaaatg

SEQ ID NO: 6046265 - DNA, 25 bp, Homo sapien
tactttttcttattgtctttcatga

SEQ ID NO: 6046266 - DNA, 25 bp, Homo sapien
gctcaggatgggcttccatgaattt

SEQ ID NO: 6046267 - DNA, 25 bp, Homo sapien
ctggagatctccacaaatccaaagc

SEQ ID NO: 6046268 - DNA, 25 bp, Homo sapien
aatggaaatggcaaaggcatacttt

SEQ ID NO: 6046269 - DNA, 25 bp, Homo sapien
ccaagaacagcgcagcaccaataga

SEQ ID NO: 6046270 - DNA, 25 bp, Homo sapien
cgaagtgatggatttcagagcggtc

SEQ ID NO: 6046271 - DNA, 25 bp, Homo sapien
tatcaccgaagtgatggatttcaga

SEQ ID NO: 6046272 - DNA, 25 bp, Homo sapien
tgaatttgaagacatcgtagtcgat

SEQ ID NO: 6046273 - DNA, 25 bp, Homo sapien
actgtgccatgtgaaatctttgctt

SEQ ID NO: 6046274 - DNA, 25 bp, Homo sapien
tgccgataatgacctaattcccatt

SEQ ID NO: 6046275 - DNA, 25 bp, Homo sapien
ccatcaacgaattgtggagacagat

SEQ ID NO: 6046276 - DNA, 25 bp, Homo sapien
taagtatcagaagacaattgctaaa

SEQ ID NO: 6046277 - DNA, 25 bp, Homo sapien
acccacaggaattgttttgatgaac

SEQ ID NO: 6046278 - DNA, 25 bp, Homo sapien
caaagccgctaaccgcagaaactta

SEQ ID NO: 6046279 - DNA, 25 bp, Homo sapien
tacaaatgaaggtctaatcaaggcc

SEQ ID NO: 6046280 - DNA, 25 bp, Homo sapien
gctaaccgcagaaacttataaacaa

SEQ ID NO: 6046281 - DNA, 25 bp, Homo sapien
cctaattcccattagtgctaagtat

SEQ ID NO: 6046282 - DNA, 25 bp, Homo sapien
gccactgaggtctgtaaaatcttag

SEQ ID NO: 6046283 - DNA, 25 bp, Homo sapien
tagtgctaagtatcagaagacaatt

SEQ ID NO: 6046284 - DNA, 25 bp, Homo sapien
ttggtcggttattgatcgttggcct

SEQ ID NO: 6046285 - DNA, 25 bp, Homo sapien
ggcgtttcgttacgcaaagccgcta

SEQ ID NO: 6046286 - DNA, 25 bp, Homo sapien
agaaacggcgcctcataagccttac

SEQ ID NO: 6046287 - DNA, 25 bp, Homo sapien
cattggactccgagagatctatatc

SEQ ID NO: 6046288 - DNA, 25 bp, Homo sapien
cctgtccagaaacggcgcctcataa

SEQ ID NO: 6046289 - DNA, 25 bp, Homo sapien
attcaacatgcagaatgcacaaaag

SEQ ID NO: 6046290 - DNA, 25 bp, Homo sapien
gacagattaaggcattggactccga

SEQ ID NO: 6046291 - DNA, 25 bp, Homo sapien
taatgacctaattcccattagtgct

SEQ ID NO: 6046292 - DNA, 25 bp, Homo sapien
tgtaaaatcttagataaaacctgtc

SEQ ID NO: 6046293 - DNA, 25 bp, Homo sapien
aactgaccattacaagatcattttc

SEQ ID NO: 6046294 - DNA, 25 bp, Homo sapien
tgctaagtttcgtacccccaagata

SEQ ID NO: 6046295 - DNA, 25 bp, Homo sapien
ctatatcttggtcggttattgatcg

SEQ ID NO: 6046296 - DNA, 25 bp, Homo sapien
gctaaatatattgctaagtttcgta

SEQ ID NO: 6046297 - DNA, 25 bp, Homo sapien
aatatcctcatttctcttattccac

SEQ ID NO: 6046298 - DNA, 25 bp, Homo sapien
gaggtctgtaaaatcttagataaaa

SEQ ID NO: 6046299 - DNA, 25 bp, Homo sapien
gatgaacatgggtggcccctctaaa

SEQ ID NO: 6046300 - DNA, 25 bp, Homo sapien
acgaattgtggagacagattaaggc

SEQ ID NO: 6046301 - DNA, 25 bp, Homo sapien
attatttgccgataatgacctaatt

SEQ ID NO: 6046302 - DNA, 25 bp, Homo sapien
atggcgtgaagaaggcagtggcctt

SEQ ID NO: 6046303 - DNA, 25 bp, Homo sapien
cgcagaaacttataaacaaatgcta

SEQ ID NO: 6046304 - DNA, 25 bp, Homo sapien
tacgtggcgtttcgttacgcaaagc

SEQ ID NO: 6046305 - DNA, 25 bp, Homo sapien
ctaccgggtcatccatcaacgaatt

SEQ ID NO: 6046306 - DNA, 25 bp, Homo sapien
tcagaagacaattgctaaatatatt

SEQ ID NO: 6046307 - DNA, 25 bp, Homo sapien
tgaaggtctaatcaaggccttctcc

SEQ ID NO: 6046308 - DNA, 25 bp, Homo sapien
atgattttttgtatcaattatttgc

SEQ ID NO: 6046309 - DNA, 25 bp, Homo sapien
tctaaagttgaggaaacatatgatt

SEQ ID NO: 6046310 - DNA, 25 bp, Homo sapien
aaatggtctgagtatcaagccactg

SEQ ID NO: 6046311 - DNA, 25 bp, Homo sapien
aacttataaacaaatgctaaaagat

SEQ ID NO: 6046312 - DNA, 25 bp, Homo sapien
atcttagataaaacctgtccagaaa

SEQ ID NO: 6046313 - DNA, 25 bp, Homo sapien
aggaattgttttgatgaacatgggt

SEQ ID NO: 6046314 - DNA, 25 bp, Homo sapien
ggtcatccatcaacgaattgtggag

SEQ ID NO: 6046315 - DNA, 25 bp, Homo sapien
tcgtacccccaagatagagaagcaa

SEQ ID NO: 6046316 - DNA, 25 bp, Homo sapien
aggcagtggccttttctcaatatcc

SEQ ID NO: 6046317 - DNA, 25 bp, Homo sapien
ataaacaaatgctaaaagatggcgt

SEQ ID NO: 6046318 - DNA, 25 bp, Homo sapien
gataaaacctgtccagaaacggcgc

SEQ ID NO: 6046319 - DNA, 25 bp, Homo sapien
attttcggttacattcaacatgcag

SEQ ID NO: 6046320 - DNA, 25 bp, Homo sapien
tggcccctctaaagttgaggaaaca

SEQ ID NO: 6046321 - DNA, 25 bp, Homo sapien
gttgaggaaacatatgattttttgt

SEQ ID NO: 6046322 - DNA, 25 bp, Homo sapien
tgaagaaggcagtggccttttctca

SEQ ID NO: 6046323 - DNA, 25 bp, Homo sapien
taaaagatggcgtgaagaaggcagt

SEQ ID NO: 6046324 - DNA, 25 bp, Homo sapien
ggttacattcaacatgcagaatgca

SEQ ID NO: 6046325 - DNA, 25 bp, Homo sapien
gaatgcacaaaagagatcacccaca

SEQ ID NO: 6046326 - DNA, 25 bp, Homo sapien
tgttttgatgaacatgggtggcccc

SEQ ID NO: 6046327 - DNA, 25 bp, Homo sapien
gatcacaactgaccattacaagatc

SEQ ID NO: 6046328 - DNA, 25 bp, Homo sapien
ccattacaagatcattttcggttac

SEQ ID NO: 6046329 - DNA, 25 bp, Homo sapien
ccccaagatagagaagcaatatagg

SEQ ID NO: 6046330 - DNA, 25 bp, Homo sapien
tatcaagccactgaggtctgtaaaa

SEQ ID NO: 6046331 - DNA, 25 bp, Homo sapien
ggttattgatcgttggcctacaaat

SEQ ID NO: 6046332 - DNA, 25 bp, Homo sapien
ctcatttctcttattccactaccgg

SEQ ID NO: 6046333 - DNA, 25 bp, Homo sapien
tctgagtatcaagccactgaggtct

SEQ ID NO: 6046334 - DNA, 25 bp, Homo sapien
caagatcattttcggttacattcaa

SEQ ID NO: 6046335 - DNA, 25 bp, Homo sapien
taagaagatcacaactgaccattac

SEQ ID NO: 6046336 - DNA, 25 bp, Homo sapien
acaaaagagatcacccacaggaatt

SEQ ID NO: 6046337 - DNA, 25 bp, Homo sapien
tctcttattccactaccgggtcatc

SEQ ID NO: 6046338 - DNA, 25 bp, Homo sapien
attccactaccgggtcatccatcaa

SEQ ID NO: 6046339 - DNA, 25 bp, Homo sapien
tatattgctaagtttcgtaccccca

SEQ ID NO: 6046340 - DNA, 25 bp, Homo sapien
tgtggagacagattaaggcattgga

SEQ ID NO: 6046341 - DNA, 25 bp, Homo sapien
tccccaatccggaaatggtctgagt

SEQ ID NO: 6046342 - DNA, 25 bp, Homo sapien
tcataagccttacgtggcgtttcgt

SEQ ID NO: 6046343 - DNA, 25 bp, Homo sapien
gccttacgtggcgtttcgttacgca

SEQ ID NO: 6046344 - DNA, 25 bp, Homo sapien
aaatgctaaaagatggcgtgaagaa

SEQ ID NO: 6046345 - DNA, 25 bp, Homo sapien
actccgagagatctatatcttggtc

SEQ ID NO: 6046346 - DNA, 25 bp, Homo sapien
catgggtggcccctctaaagttgag

SEQ ID NO: 6046347 - DNA, 25 bp, Homo sapien
ccttcctaagaagatcacaactgac

SEQ ID NO: 6046348 - DNA, 25 bp, Homo sapien
gtatcaattatttgccgataatgac

SEQ ID NO: 6046349 - DNA, 25 bp, Homo sapien
agatagagaagcaatatagggaaat

SEQ ID NO: 6046350 - DNA, 25 bp, Homo sapien
ttttttgtatcaattatttgccgat

SEQ ID NO: 6046351 - DNA, 25 bp, Homo sapien
gttacgcaaagccgctaaccgcaga

SEQ ID NO: 6046352 - DNA, 25 bp, Homo sapien
gacaattgctaaatatattgctaag

SEQ ID NO: 6046353 - DNA, 25 bp, Homo sapien
ggcgcctcataagccttacgtggcg

SEQ ID NO: 6046354 - DNA, 25 bp, Homo sapien
tgatcgttggcctacaaatgaaggt

SEQ ID NO: 6046355 - DNA, 25 bp, Homo sapien
ttaaggcattggactccgagagatc

SEQ ID NO: 6046356 - DNA, 25 bp, Homo sapien
agagatctatatcttggtcggttat

SEQ ID NO: 6046357 - DNA, 25 bp, Homo sapien
gaaacatatgattttttgtatcaat

SEQ ID NO: 6046358 - DNA, 25 bp, Homo sapien
tggccttttctcaatatcctcattt

SEQ ID NO: 6046359 - DNA, 25 bp, Homo sapien
atccggaaatggtctgagtatcaag

SEQ ID NO: 6046360 - DNA, 25 bp, Homo sapien
agaagcaatatagggaaattggtgg

SEQ ID NO: 6046361 - DNA, 25 bp, Homo sapien
gagatcacccacaggaattgttttg

SEQ ID NO: 6046362 - DNA, 25 bp, Homo sapien
tttctcaatatcctcatttctctta

SEQ ID NO: 6046363 - DNA, 25 bp, Homo sapien
ttggcctacaaatgaaggtctaatc

SEQ ID NO: 6046364 - DNA, 25 bp, Homo sapien
catgcagaatgcacaaaagagatca

SEQ ID NO: 6046365 - DNA, 25 bp, Homo sapien
tcccattagtgctaagtatcagaag

SEQ ID NO: 6046366 - DNA, 25 bp, Homo sapien
tttcagctgtctgcgctcccaacca

SEQ ID NO: 6046367 - DNA, 25 bp, Homo sapien
gtaggccaacgatcaataaccgacc

SEQ ID NO: 6046368 - DNA, 25 bp, Homo sapien
gaatgtgcggaaaacaataaaacaa

SEQ ID NO: 6046369 - DNA, 25 bp, Homo sapien
ggtagagaatgtgcggaaaacaata

SEQ ID NO: 6046370 - DNA, 25 bp, Homo sapien
tttgcatgatgttgtaaaccgtcgc

SEQ ID NO: 6046371 - DNA, 25 bp, Homo sapien
tgtaaaccgtcgcagctacctcagc

SEQ ID NO: 6046372 - DNA, 25 bp, Homo sapien
caccggtgttaacaacatccatggg

SEQ ID NO: 6046373 - DNA, 25 bp, Homo sapien
caagtgcaaaatcaagaggtagttg

SEQ ID NO: 6046374 - DNA, 25 bp, Homo sapien
ccatggttttggtccaacttgggat

SEQ ID NO: 6046375 - DNA, 25 bp, Homo sapien
ctgggtaggcatcaccggtgttaac

SEQ ID NO: 6046376 - DNA, 25 bp, Homo sapien
acttgccaagtgcaaaatcaagagg

SEQ ID NO: 6046377 - DNA, 25 bp, Homo sapien
ttatattccgattccccaatgacgc

SEQ ID NO: 6046378 - DNA, 25 bp, Homo sapien
catgcaatgtttcaatatgatcaga

SEQ ID NO: 6046379 - DNA, 25 bp, Homo sapien
aaggccttgattagaccttcatttg

SEQ ID NO: 6046380 - DNA, 25 bp, Homo sapien
tccaacttgggattgccaaaccaac

SEQ ID NO: 6046381 - DNA, 25 bp, Homo sapien
tcatttgtaggccaacgatcaataa

SEQ ID NO: 6046382 - DNA, 25 bp, Homo sapien
ttggtgatattttcggagaaggcct

SEQ ID NO: 6046383 - DNA, 25 bp, Homo sapien
gatcagaggtaaaggcgataggaat

SEQ ID NO: 6046384 - DNA, 25 bp, Homo sapien
atattttcggagaaggccttgatta

SEQ ID NO: 6046385 - DNA, 25 bp, Homo sapien
taaatttatccttatattccgattc

SEQ ID NO: 6046386 - DNA, 25 bp, Homo sapien
aaactttaatttttgcatgatgttg

SEQ ID NO: 6046387 - DNA, 25 bp, Homo sapien
caatatgatcagaggtaaaggcgat

SEQ ID NO: 6046388 - DNA, 25 bp, Homo sapien
ttatccttatattccgattccccaa

SEQ ID NO: 6046389 - DNA, 25 bp, Homo sapien
caagaggtagttgattagaatagag

SEQ ID NO: 6046390 - DNA, 25 bp, Homo sapien
tgacgcctaagtcaatttcatgcaa

SEQ ID NO: 6046391 - DNA, 25 bp, Homo sapien
atctgccatgccttcaataaaggtc

SEQ ID NO: 6046392 - DNA, 25 bp, Homo sapien
cagctacctcagctgggtaggcatc

SEQ ID NO: 6046393 - DNA, 25 bp, Homo sapien
tccgattccccaatgacgcctaagt

SEQ ID NO: 6046394 - DNA, 25 bp, Homo sapien
taaacattaggccatcaactttggg

SEQ ID NO: 6046395 - DNA, 25 bp, Homo sapien
gcttttgacgagatctgccatgcct

SEQ ID NO: 6046396 - DNA, 25 bp, Homo sapien
aaaggtctggttgccatttaaagat

SEQ ID NO: 6046397 - DNA, 25 bp, Homo sapien
tactctgtaagtggcttttgacgag

SEQ ID NO: 6046398 - DNA, 25 bp, Homo sapien
tgtctgcgctcccaaccatggtttt

SEQ ID NO: 6046399 - DNA, 25 bp, Homo sapien
tgttaacaacatccatgggtagaga

SEQ ID NO: 6046400 - DNA, 25 bp, Homo sapien
caagatatagatctctcggagtcca

SEQ ID NO: 6046401 - DNA, 25 bp, Homo sapien
caggatcattggacttgccaagtgc

SEQ ID NO: 6046402 - DNA, 25 bp, Homo sapien
ttcgcatctcttaaatttatcctta

SEQ ID NO: 6046403 - DNA, 25 bp, Homo sapien
taggccatcaactttggggcctaaa

SEQ ID NO: 6046404 - DNA, 25 bp, Homo sapien
caacatccatgggtagagaatgtgc

SEQ ID NO: 6046405 - DNA, 25 bp, Homo sapien
accgaccaagatatagatctctcgg

SEQ ID NO: 6046406 - DNA, 25 bp, Homo sapien
cattggacttgccaagtgcaaaatc

SEQ ID NO: 6046407 - DNA, 25 bp, Homo sapien
gaatagagttggttactctgtaagt

SEQ ID NO: 6046408 - DNA, 25 bp, Homo sapien
tgggattgccaaaccaacctataag

SEQ ID NO: 6046409 - DNA, 25 bp, Homo sapien
gtagttgattagaatagagttggtt

SEQ ID NO: 6046410 - DNA, 25 bp, Homo sapien
tctcttaaatttatccttatattcc

SEQ ID NO: 6046411 - DNA, 25 bp, Homo sapien
cctttacaggatcattggacttgcc

SEQ ID NO: 6046412 - DNA, 25 bp, Homo sapien
aaacaaccttgtctctgacaggttg

SEQ ID NO: 6046413 - DNA, 25 bp, Homo sapien
caggttgcggaaactcttgtagttt

SEQ ID NO: 6046414 - DNA, 25 bp, Homo sapien
aggtaaaggcgataggaataaacat

SEQ ID NO: 6046415 - DNA, 25 bp, Homo sapien
taatttttgcatgatgttgtaaacc

SEQ ID NO: 6046416 - DNA, 25 bp, Homo sapien
tccgcaatttcagctgtctgcgctc

SEQ ID NO: 6046417 - DNA, 25 bp, Homo sapien
aggcatcaccggtgttaacaacatc

SEQ ID NO: 6046418 - DNA, 25 bp, Homo sapien
caacgatcaataaccgaccaagata

SEQ ID NO: 6046419 - DNA, 25 bp, Homo sapien
tgatgttgtaaaccgtcgcagctac

SEQ ID NO: 6046420 - DNA, 25 bp, Homo sapien
gcgctcccaaccatggttttggtcc

SEQ ID NO: 6046421 - DNA, 25 bp, Homo sapien
aggcgataggaataaacattaggcc

SEQ ID NO: 6046422 - DNA, 25 bp, Homo sapien
tcggagaaggccttgattagacctt

SEQ ID NO: 6046423 - DNA, 25 bp, Homo sapien
gacgagatctgccatgccttcaata

SEQ ID NO: 6046424 - DNA, 25 bp, Homo sapien
acaataaaacaaccttgtctctgac

SEQ ID NO: 6046425 - DNA, 25 bp, Homo sapien
ccgtcgcagctacctcagctgggta

SEQ ID NO: 6046426 - DNA, 25 bp, Homo sapien
gattagaatagagttggttactctg

SEQ ID NO: 6046427 - DNA, 25 bp, Homo sapien
caaaatcaagaggtagttgattaga

SEQ ID NO: 6046428 - DNA, 25 bp, Homo sapien
taagtggcttttgacgagatctgcc

SEQ ID NO: 6046429 - DNA, 25 bp, Homo sapien
tccatgggtagagaatgtgcggaaa

SEQ ID NO: 6046430 - DNA, 25 bp, Homo sapien
ggcctaaaaattccgcaatttcagc

SEQ ID NO: 6046431 - DNA, 25 bp, Homo sapien
cctcagctgggtaggcatcaccggt

SEQ ID NO: 6046432 - DNA, 25 bp, Homo sapien
aaaggtcctttacaggatcattgga

SEQ ID NO: 6046433 - DNA, 25 bp, Homo sapien
ctggttgccatttaaagattcgcat

SEQ ID NO: 6046434 - DNA, 25 bp, Homo sapien
caatttcatgcaatgtttcaatatg

SEQ ID NO: 6046435 - DNA, 25 bp, Homo sapien
aaaaattccgcaatttcagctgtct

SEQ ID NO: 6046436 - DNA, 25 bp, Homo sapien
atgtttcaatatgatcagaggtaaa

SEQ ID NO: 6046437 - DNA, 25 bp, Homo sapien
ttgattagaccttcatttgtaggcc

SEQ ID NO: 6046438 - DNA, 25 bp, Homo sapien
agaccttcatttgtaggccaacgat

SEQ ID NO: 6046439 - DNA, 25 bp, Homo sapien
taaagattcgcatctcttaaattta

SEQ ID NO: 6046440 - DNA, 25 bp, Homo sapien
ccccaatgacgcctaagtcaatttc

SEQ ID NO: 6046441 - DNA, 25 bp, Homo sapien
ccttgtctctgacaggttgcggaaa

SEQ ID NO: 6046442 - DNA, 25 bp, Homo sapien
ctctgacaggttgcggaaactcttg

SEQ ID NO: 6046443 - DNA, 25 bp, Homo sapien
ttttggtccaacttgggattgccaa

SEQ ID NO: 6046444 - DNA, 25 bp, Homo sapien
ccaaccatggttttggtccaacttg

SEQ ID NO: 6046445 - DNA, 25 bp, Homo sapien
ctaagtcaatttcatgcaatgtttc

SEQ ID NO: 6046446 - DNA, 25 bp, Homo sapien
agttggttactctgtaagtggcttt

SEQ ID NO: 6046447 - DNA, 25 bp, Homo sapien
ttcaataaaggtctggttgccattt

SEQ ID NO: 6046448 - DNA, 25 bp, Homo sapien
tcaataaccgaccaagatatagatc

SEQ ID NO: 6046449 - DNA, 25 bp, Homo sapien
gccatttaaagattcgcatctctta

SEQ ID NO: 6046450 - DNA, 25 bp, Homo sapien
catgccttcaataaaggtctggttg

SEQ ID NO: 6046451 - DNA, 25 bp, Homo sapien
ctcttgtagttttttggtgatattt

SEQ ID NO: 6046452 - DNA, 25 bp, Homo sapien
taggaataaacattaggccatcaac

SEQ ID NO: 6046453 - DNA, 25 bp, Homo sapien
tagattgctttgcagaagaacgaaa

SEQ ID NO: 6046454 - DNA, 25 bp, Homo sapien
aatttatctgatgtttttgaaaaag

SEQ ID NO: 6046455 - DNA, 25 bp, Homo sapien
atagatgagactgacccgagttggc

SEQ ID NO: 6046456 - DNA, 25 bp, Homo sapien
gaagctaaatgggtagattgctttg

SEQ ID NO: 6046457 - DNA, 25 bp, Homo sapien
agaatgcatcgtcgtgttcaaatct

SEQ ID NO: 6046458 - DNA, 25 bp, Homo sapien
agttttcaccattattcacgtatcc

SEQ ID NO: 6046459 - DNA, 25 bp, Homo sapien
tcattactttttatcgaagccgcta

SEQ ID NO: 6046460 - DNA, 25 bp, Homo sapien
agttggcaaatctattggttgttga

SEQ ID NO: 6046461 - DNA, 25 bp, Homo sapien
cttggagcaaaatctttcgatgagg

SEQ ID NO: 6046462 - DNA, 25 bp, Homo sapien
gctttgcagaagaacgaaaaacaca

SEQ ID NO: 6046463 - DNA, 25 bp, Homo sapien
gaagccttaagagtttctatagttg

SEQ ID NO: 6046464 - DNA, 25 bp, Homo sapien
actacttacaagtattggcactacc

SEQ ID NO: 6046465 - DNA, 25 bp, Homo sapien
cggctataaggatctcatcatccac

SEQ ID NO: 6046466 - DNA, 25 bp, Homo sapien
aagtattcagcaaaattaggagacg

SEQ ID NO: 6046467 - DNA, 25 bp, Homo sapien
aaggatgatgtaattgttagggatg

SEQ ID NO: 6046468 - DNA, 25 bp, Homo sapien
gaattgattggtttcgtcactactt

SEQ ID NO: 6046469 - DNA, 25 bp, Homo sapien
aaatcgagtttggttgacgattttg

SEQ ID NO: 6046470 - DNA, 25 bp, Homo sapien
cgtatccaatttacggtgactccga

SEQ ID NO: 6046471 - DNA, 25 bp, Homo sapien
attgttagggatgaagctaaatggg

SEQ ID NO: 6046472 - DNA, 25 bp, Homo sapien
gttgacgattttgccaggagaatgc

SEQ ID NO: 6046473 - DNA, 25 bp, Homo sapien
gccaacgaagccttaagagtttcta

SEQ ID NO: 6046474 - DNA, 25 bp, Homo sapien
cctagcatttgattcagtaacattc

SEQ ID NO: 6046475 - DNA, 25 bp, Homo sapien
catccacctagcatttgattcagta

SEQ ID NO: 6046476 - DNA, 25 bp, Homo sapien
aatggggaagaatttgttgtatata

SEQ ID NO: 6046477 - DNA, 25 bp, Homo sapien
ttaagagtttctatagttggagaaa

SEQ ID NO: 6046478 - DNA, 25 bp, Homo sapien
cgaaaagatctacggctataaggat

SEQ ID NO: 6046479 - DNA, 25 bp, Homo sapien
atcgaagccgctaactatatagatg

SEQ ID NO: 6046480 - DNA, 25 bp, Homo sapien
ctttttatcgaagccgctaactata

SEQ ID NO: 6046481 - DNA, 25 bp, Homo sapien
aaatgggtagattgctttgcagaag

SEQ ID NO: 6046482 - DNA, 25 bp, Homo sapien
attggtttcgtcactacttacaagt

SEQ ID NO: 6046483 - DNA, 25 bp, Homo sapien
tatagttggagaaaacgctgttcag

SEQ ID NO: 6046484 - DNA, 25 bp, Homo sapien
tttgttgtatataaatcgagtttgg

SEQ ID NO: 6046485 - DNA, 25 bp, Homo sapien
aaaattactctcatttctaccaaag

SEQ ID NO: 6046486 - DNA, 25 bp, Homo sapien
agggatgaagctaaatgggtagatt

SEQ ID NO: 6046487 - DNA, 25 bp, Homo sapien
tggacttcaagcgccaacgaagcct

SEQ ID NO: 6046488 - DNA, 25 bp, Homo sapien
tacaagtattggcactaccttggag

SEQ ID NO: 6046489 - DNA, 25 bp, Homo sapien
caatttacggtgactccgaaaagat

SEQ ID NO: 6046490 - DNA, 25 bp, Homo sapien
aaattaggagacgacaatattgtag

SEQ ID NO: 6046491 - DNA, 25 bp, Homo sapien
tcttttcattactttttatcgaagc

SEQ ID NO: 6046492 - DNA, 25 bp, Homo sapien
ttgaacaagaaaacaaaagaattga

SEQ ID NO: 6046493 - DNA, 25 bp, Homo sapien
tcaagcgccaacgaagccttaagag

SEQ ID NO: 6046494 - DNA, 25 bp, Homo sapien
tcagcaaaattaggagacgacaata

SEQ ID NO: 6046495 - DNA, 25 bp, Homo sapien
aactatatagatgagactgacccga

SEQ ID NO: 6046496 - DNA, 25 bp, Homo sapien
tattcacgtatccaatttacggtga

SEQ ID NO: 6046497 - DNA, 25 bp, Homo sapien
tcgttgaatggggaagaatttgttg

SEQ ID NO: 6046498 - DNA, 25 bp, Homo sapien
aacgtcaagtattcagcaaaattag

SEQ ID NO: 6046499 - DNA, 25 bp, Homo sapien
cagaagaacgaaaaacacataattt

SEQ ID NO: 6046500 - DNA, 25 bp, Homo sapien
cgaaaaacacataatttatctgatg

SEQ ID NO: 6046501 - DNA, 25 bp, Homo sapien
caaatctattggttgttgaacaaga

SEQ ID NO: 6046502 - DNA, 25 bp, Homo sapien
tcagtaacattcaagccgtatgtta

SEQ ID NO: 6046503 - DNA, 25 bp, Homo sapien
aaaacgctgttcagttttcaccatt

SEQ ID NO: 6046504 - DNA, 25 bp, Homo sapien
gaagaatttgttgtatataaatcga

SEQ ID NO: 6046505 - DNA, 25 bp, Homo sapien
ttactctcatttctaccaaaggatg

SEQ ID NO: 6046506 - DNA, 25 bp, Homo sapien
gagactgacccgagttggcaaatct

SEQ ID NO: 6046507 - DNA, 25 bp, Homo sapien
tgtttttgaaaaagtatcagagtat

SEQ ID NO: 6046508 - DNA, 25 bp, Homo sapien
acattcaagccgtatgttaacgtca

SEQ ID NO: 6046509 - DNA, 25 bp, Homo sapien
ggagacgacaatattgtagacgtgg

SEQ ID NO: 6046510 - DNA, 25 bp, Homo sapien
gagtattcgttgaatggggaagaat

SEQ ID NO: 6046511 - DNA, 25 bp, Homo sapien
cactaccttggagcaaaatctttcg

SEQ ID NO: 6046512 - DNA, 25 bp, Homo sapien
gtttctatagttggagaaaacgctg

SEQ ID NO: 6046513 - DNA, 25 bp, Homo sapien
gccgctaactatatagatgagactg

SEQ ID NO: 6046514 - DNA, 25 bp, Homo sapien
tgaaaaagtatcagagtattcgttg

SEQ ID NO: 6046515 - DNA, 25 bp, Homo sapien
catcgtcgtgttcaaatcttttcat

SEQ ID NO: 6046516 - DNA, 25 bp, Homo sapien
atctgatgtttttgaaaaagtatca

SEQ ID NO: 6046517 - DNA, 25 bp, Homo sapien
acaaaagaattgattggtttcgtca

SEQ ID NO: 6046518 - DNA, 25 bp, Homo sapien
gatgtaattgttagggatgaagcta

SEQ ID NO: 6046519 - DNA, 25 bp, Homo sapien
caccattattcacgtatccaattta

SEQ ID NO: 6046520 - DNA, 25 bp, Homo sapien
gacaatattgtagacgtggaaaaaa

SEQ ID NO: 6046521 - DNA, 25 bp, Homo sapien
tggagaaaacgctgttcagttttca

SEQ ID NO: 6046522 - DNA, 25 bp, Homo sapien
gatctacggctataaggatctcatc

SEQ ID NO: 6046523 - DNA, 25 bp, Homo sapien
tctcatcatccacctagcatttgat

SEQ ID NO: 6046524 - DNA, 25 bp, Homo sapien
tacggtgactccgaaaagatctacg

SEQ ID NO: 6046525 - DNA, 25 bp, Homo sapien
gtatataaatcgagtttggttgacg

SEQ ID NO: 6046526 - DNA, 25 bp, Homo sapien
taaggatctcatcatccacctagca

SEQ ID NO: 6046527 - DNA, 25 bp, Homo sapien
gacccgagttggcaaatctattggt

SEQ ID NO: 6046528 - DNA, 25 bp, Homo sapien
caagaaaacaaaagaattgattggt

SEQ ID NO: 6046529 - DNA, 25 bp, Homo sapien
ctaccaaaggatgatgtaattgtta

SEQ ID NO: 6046530 - DNA, 25 bp, Homo sapien
ttcgtcactacttacaagtattggc

SEQ ID NO: 6046531 - DNA, 25 bp, Homo sapien
tcatttctaccaaaggatgatgtaa

SEQ ID NO: 6046532 - DNA, 25 bp, Homo sapien
tatgttaacgtcaagtattcagcaa

SEQ ID NO: 6046533 - DNA, 25 bp, Homo sapien
tattggcactaccttggagcaaaat

SEQ ID NO: 6046534 - DNA, 25 bp, Homo sapien
caaatcttttcattactttttatcg

SEQ ID NO: 6046535 - DNA, 25 bp, Homo sapien
tgactccgaaaagatctacggctat

SEQ ID NO: 6046536 - DNA, 25 bp, Homo sapien
ccaggagaatgcatcgtcgtgttca

SEQ ID NO: 6046537 - DNA, 25 bp, Homo sapien
attttgccaggagaatgcatcgtcg

SEQ ID NO: 6046538 - DNA, 25 bp, Homo sapien
agtatcagagtattcgttgaatggg

SEQ ID NO: 6046539 - DNA, 25 bp, Homo sapien
agtttggttgacgattttgccagga

SEQ ID NO: 6046540 - DNA, 25 bp, Homo sapien
aagccgtatgttaacgtcaagtatt

SEQ ID NO: 6046541 - DNA, 25 bp, Homo sapien
cgtgttcaaatcttttcattacttt

SEQ ID NO: 6046542 - DNA, 25 bp, Homo sapien
gcaaaatctttcgatgaggatatag

SEQ ID NO: 6046543 - DNA, 25 bp, Homo sapien
acacataatttatctgatgtttttg

SEQ ID NO: 6046544 - DNA, 25 bp, Homo sapien
tattggttgttgaacaagaaaacaa

SEQ ID NO: 6046545 - DNA, 25 bp, Homo sapien
tcctgtcgcgaagatcgtcaaatgc

SEQ ID NO: 6046546 - DNA, 25 bp, Homo sapien
acttgtaagtagtgacgaaaccaat

SEQ ID NO: 6046547 - DNA, 25 bp, Homo sapien
gggcatcataatttttaatgtacaa

SEQ ID NO: 6046548 - DNA, 25 bp, Homo sapien
gatcgtcaaatgcttcgtttggatc

SEQ ID NO: 6046549 - DNA, 25 bp, Homo sapien
gttttcgcagtctttgaatatcatt

SEQ ID NO: 6046550 - DNA, 25 bp, Homo sapien
ggtagtgccaatacttgtaagtagt

SEQ ID NO: 6046551 - DNA, 25 bp, Homo sapien
taaagattttcggcttgactccaaa

SEQ ID NO: 6046552 - DNA, 25 bp, Homo sapien
catctttgactaaaataaatgaatt

SEQ ID NO: 6046553 - DNA, 25 bp, Homo sapien
cataatttttaatgtacaacctatt

SEQ ID NO: 6046554 - DNA, 25 bp, Homo sapien
gctccaaggtagtgccaatacttgt

SEQ ID NO: 6046555 - DNA, 25 bp, Homo sapien
aactcatcagaaaggtcggagtgct

SEQ ID NO: 6046556 - DNA, 25 bp, Homo sapien
aagacaggatccgtggcctttattt

SEQ ID NO: 6046557 - DNA, 25 bp, Homo sapien
cttgactccaaaaactcatcagaaa

SEQ ID NO: 6046558 - DNA, 25 bp, Homo sapien
cagtaatttcagtaatacttttgtc

SEQ ID NO: 6046559 - DNA, 25 bp, Homo sapien
accaatcaattcttttgttttcttg

SEQ ID NO: 6046560 - DNA, 25 bp, Homo sapien
tttcggcttgactccaaaaactcat

SEQ ID NO: 6046561 - DNA, 25 bp, Homo sapien
ttggatcctctacagtaatttcagt

SEQ ID NO: 6046562 - DNA, 25 bp, Homo sapien
aaagatcagaaattgagatattttg

SEQ ID NO: 6046563 - DNA, 25 bp, Homo sapien
gatctagggcatcataatttttaat

SEQ ID NO: 6046564 - DNA, 25 bp, Homo sapien
cgcgaagatcgtcaaatgcttcgtt

SEQ ID NO: 6046565 - DNA, 25 bp, Homo sapien
agcttctcttgccttttctggatca

SEQ ID NO: 6046566 - DNA, 25 bp, Homo sapien
gtggcctttattttgataaggtgga

SEQ ID NO: 6046567 - DNA, 25 bp, Homo sapien
acctttaattcaaatgatggagaat

SEQ ID NO: 6046568 - DNA, 25 bp, Homo sapien
taaccaagttttcgcagtctttgaa

SEQ ID NO: 6046569 - DNA, 25 bp, Homo sapien
ctggatcagtttgatctagggcatc

SEQ ID NO: 6046570 - DNA, 25 bp, Homo sapien
ggagaattgtttaaaagaagaagca

SEQ ID NO: 6046571 - DNA, 25 bp, Homo sapien
tccaaaaactcatcagaaaggtcgg

SEQ ID NO: 6046572 - DNA, 25 bp, Homo sapien
gattttgctccaaggtagtgccaat

SEQ ID NO: 6046573 - DNA, 25 bp, Homo sapien
tctatatcctcatcgaaagattttg

SEQ ID NO: 6046574 - DNA, 25 bp, Homo sapien
ccttttctggatcagtttgatctag

SEQ ID NO: 6046575 - DNA, 25 bp, Homo sapien
gaattttttatctatatcctcatcg

SEQ ID NO: 6046576 - DNA, 25 bp, Homo sapien
aacaaccaatagatttgccaactcg

SEQ ID NO: 6046577 - DNA, 25 bp, Homo sapien
ctcttgccttttctggatcagtttg

SEQ ID NO: 6046578 - DNA, 25 bp, Homo sapien
aggtggaaagatcagaaattgagat

SEQ ID NO: 6046579 - DNA, 25 bp, Homo sapien
tcgaaagattttgctccaaggtagt

SEQ ID NO: 6046580 - DNA, 25 bp, Homo sapien
tttattttgataaggtggaaagatc

SEQ ID NO: 6046581 - DNA, 25 bp, Homo sapien
cagaaattgagatattttggctctg

SEQ ID NO: 6046582 - DNA, 25 bp, Homo sapien
tacgcctataatcatctttgactaa

SEQ ID NO: 6046583 - DNA, 25 bp, Homo sapien
aagtagtgacgaaaccaatcaattc

SEQ ID NO: 6046584 - DNA, 25 bp, Homo sapien
ggatccgtggcctttattttgataa

SEQ ID NO: 6046585 - DNA, 25 bp, Homo sapien
ctgtctttcttccagttttaaagat

SEQ ID NO: 6046586 - DNA, 25 bp, Homo sapien
tatagcctcataaagacaggatccg

SEQ ID NO: 6046587 - DNA, 25 bp, Homo sapien
catttccacaagacgattaaactgt

SEQ ID NO: 6046588 - DNA, 25 bp, Homo sapien
tttttatctatatcctcatcgaaag

SEQ ID NO: 6046589 - DNA, 25 bp, Homo sapien
aggtcggagtgcttctgaaagacag

SEQ ID NO: 6046590 - DNA, 25 bp, Homo sapien
tcctcatcgaaagattttgctccaa

SEQ ID NO: 6046591 - DNA, 25 bp, Homo sapien
ttctagccaagattggattatagcc

SEQ ID NO: 6046592 - DNA, 25 bp, Homo sapien
cttcgtttggatcctctacagtaat

SEQ ID NO: 6046593 - DNA, 25 bp, Homo sapien
cctctacagtaatttcagtaatact

SEQ ID NO: 6046594 - DNA, 25 bp, Homo sapien
ccaactcgggtcagtctcatctata

SEQ ID NO: 6046595 - DNA, 25 bp, Homo sapien
ctcataaagacaggatccgtggcct

SEQ ID NO: 6046596 - DNA, 25 bp, Homo sapien
cagtttgatctagggcatcataatt

SEQ ID NO: 6046597 - DNA, 25 bp, Homo sapien
cacaagacgattaaactgtctttct

SEQ ID NO: 6046598 - DNA, 25 bp, Homo sapien
taaaagaagaagcatttccacaaga

SEQ ID NO: 6046599 - DNA, 25 bp, Homo sapien
tgactaaaataaatgaattttgtaa

SEQ ID NO: 6046600 - DNA, 25 bp, Homo sapien
gatttgccaactcgggtcagtctca

SEQ ID NO: 6046601 - DNA, 25 bp, Homo sapien
tataatcatctttgactaaaataaa

SEQ ID NO: 6046602 - DNA, 25 bp, Homo sapien
ccaagattggattatagcctcataa

SEQ ID NO: 6046603 - DNA, 25 bp, Homo sapien
ttttgtcttctagccaagattggat

SEQ ID NO: 6046604 - DNA, 25 bp, Homo sapien
gcagtctttgaatatcattcctgtc

SEQ ID NO: 6046605 - DNA, 25 bp, Homo sapien
taatacttttgtcttctagccaaga

SEQ ID NO: 6046606 - DNA, 25 bp, Homo sapien
tgacgaaaccaatcaattcttttgt

SEQ ID NO: 6046607 - DNA, 25 bp, Homo sapien
ctattctttacctttaattcaaatg

SEQ ID NO: 6046608 - DNA, 25 bp, Homo sapien
ttgtttaaaagaagaagcatttcca

SEQ ID NO: 6046609 - DNA, 25 bp, Homo sapien
ttgtaaagcttctcttgccttttct

SEQ ID NO: 6046610 - DNA, 25 bp, Homo sapien
gttttcttgttcaacaaccaataga

SEQ ID NO: 6046611 - DNA, 25 bp, Homo sapien
gagtgcttctgaaagacagcatcat

SEQ ID NO: 6046612 - DNA, 25 bp, Homo sapien
gccaatacttgtaagtagtgacgaa

SEQ ID NO: 6046613 - DNA, 25 bp, Homo sapien
ttgataaggtggaaagatcagaaat

SEQ ID NO: 6046614 - DNA, 25 bp, Homo sapien
gcatcataaccaagttttcgcagtc

SEQ ID NO: 6046615 - DNA, 25 bp, Homo sapien
cgattaaactgtctttcttccagtt

SEQ ID NO: 6046616 - DNA, 25 bp, Homo sapien
tcaattcttttgttttcttgttcaa

SEQ ID NO: 6046617 - DNA, 25 bp, Homo sapien
tattttggctctgaattttttatct

SEQ ID NO: 6046618 - DNA, 25 bp, Homo sapien
caatagatttgccaactcgggtcag

SEQ ID NO: 6046619 - DNA, 25 bp, Homo sapien
aatgatggagaattgtttaaaagaa

SEQ ID NO: 6046620 - DNA, 25 bp, Homo sapien
tgaattttgtaaagcttctcttgcc

SEQ ID NO: 6046621 - DNA, 25 bp, Homo sapien
ttctgaaagacagcatcataaccaa

SEQ ID NO: 6046622 - DNA, 25 bp, Homo sapien
aattcaaatgatggagaattgttta

SEQ ID NO: 6046623 - DNA, 25 bp, Homo sapien
tatcattcctgtcgcgaagatcgtc

SEQ ID NO: 6046624 - DNA, 25 bp, Homo sapien
tctttacctttaattcaaatgatgg

SEQ ID NO: 6046625 - DNA, 25 bp, Homo sapien
caaatgcttcgtttggatcctctac

SEQ ID NO: 6046626 - DNA, 25 bp, Homo sapien
tttcagtaatacttttgtcttctag

SEQ ID NO: 6046627 - DNA, 25 bp, Homo sapien
tttgaatatcattcctgtcgcgaag

SEQ ID NO: 6046628 - DNA, 25 bp, Homo sapien
tcagaaaggtcggagtgcttctgaa

SEQ ID NO: 6046629 - DNA, 25 bp, Homo sapien
ttggattatagcctcataaagacag

SEQ ID NO: 6046630 - DNA, 25 bp, Homo sapien
ttgagatattttggctctgaatttt

SEQ ID NO: 6046631 - DNA, 25 bp, Homo sapien
aagaagcatttccacaagacgatta

SEQ ID NO: 6046632 - DNA, 25 bp, Homo sapien
aagacagcatcataaccaagttttc

SEQ ID NO: 6046633 - DNA, 25 bp, Homo sapien
aataaatgaattttgtaaagcttct

SEQ ID NO: 6046634 - DNA, 25 bp, Homo sapien
ttgttcaacaaccaatagatttgcc

SEQ ID NO: 6046635 - DNA, 25 bp, Homo sapien
acacctgagtcatctgagaaaataa

SEQ ID NO: 6046636 - DNA, 25 bp, Homo sapien
gactccatgctaaaaggtaaaccga

SEQ ID NO: 6046637 - DNA, 25 bp, Homo sapien
tgaagactttgtttgtgaggtctat

SEQ ID NO: 6046638 - DNA, 25 bp, Homo sapien
aagcatgcggtagttgttaaggaca

SEQ ID NO: 6046639 - DNA, 25 bp, Homo sapien
cttctagtaatgtctcaaaacaaaa

SEQ ID NO: 6046640 - DNA, 25 bp, Homo sapien
agatgagcagctggcagatttcttt

SEQ ID NO: 6046641 - DNA, 25 bp, Homo sapien
cattgctaaaagaagagatcgttca

SEQ ID NO: 6046642 - DNA, 25 bp, Homo sapien
gtaatgtctcaaaacaaaatgacga

SEQ ID NO: 6046643 - DNA, 25 bp, Homo sapien
tcgggttcgttagttttgctgtaga

SEQ ID NO: 6046644 - DNA, 25 bp, Homo sapien
agccctagctaaggccagaaagacc

SEQ ID NO: 6046645 - DNA, 25 bp, Homo sapien
agttgtcgtgatccagttaaattga

SEQ ID NO: 6046646 - DNA, 25 bp, Homo sapien
gttcgttagttttgctgtagaggat

SEQ ID NO: 6046647 - DNA, 25 bp, Homo sapien
cagaaagaccaaatttaacggacat

SEQ ID NO: 6046648 - DNA, 25 bp, Homo sapien
acggcctagatatgaagactttgtt

SEQ ID NO: 6046649 - DNA, 25 bp, Homo sapien
cagctggcagatttcttttccaatt

SEQ ID NO: 6046650 - DNA, 25 bp, Homo sapien
cgtgatccagttaaattgaaaaaga

SEQ ID NO: 6046651 - DNA, 25 bp, Homo sapien
tgctgtagaggatgacacaaaagaa

SEQ ID NO: 6046652 - DNA, 25 bp, Homo sapien
acatcagaagtggttgaaaagagca

SEQ ID NO: 6046653 - DNA, 25 bp, Homo sapien
aattgtgtggatttgcgtttgttac

SEQ ID NO: 6046654 - DNA, 25 bp, Homo sapien
aatgaagatgaggacgatgctgatg

SEQ ID NO: 6046655 - DNA, 25 bp, Homo sapien
gtggatttgcgtttgttactatgaa

SEQ ID NO: 6046656 - DNA, 25 bp, Homo sapien
cttgagggtagacattgctaaaaga

SEQ ID NO: 6046657 - DNA, 25 bp, Homo sapien
taaattgaaaaagatctttggtaga

SEQ ID NO: 6046658 - DNA, 25 bp, Homo sapien
gttgaaaagagcacacctgagtcat

SEQ ID NO: 6046659 - DNA, 25 bp, Homo sapien
gatctttggtagatatggtaccgtc

SEQ ID NO: 6046660 - DNA, 25 bp, Homo sapien
gcagatttcttttccaattttgctc

SEQ ID NO: 6046661 - DNA, 25 bp, Homo sapien
aggtctataccccaggatgtcacag

SEQ ID NO: 6046662 - DNA, 25 bp, Homo sapien
gatgaggacgatgctgatggtgaag

SEQ ID NO: 6046663 - DNA, 25 bp, Homo sapien
cgttcaaagaaaacatcagaagtgg

SEQ ID NO: 6046664 - DNA, 25 bp, Homo sapien
tttgctccgatcaagcatgcggtag

SEQ ID NO: 6046665 - DNA, 25 bp, Homo sapien
gaaaaagatctttggtagatatggt

SEQ ID NO: 6046666 - DNA, 25 bp, Homo sapien
ggtgaagactccatgctaaaaggta

SEQ ID NO: 6046667 - DNA, 25 bp, Homo sapien
acgggccagaacaatgaagatgagg

SEQ ID NO: 6046668 - DNA, 25 bp, Homo sapien
aagaaaacatcagaagtggttgaaa

SEQ ID NO: 6046669 - DNA, 25 bp, Homo sapien
ccatggagttgtcgtgatccagtta

SEQ ID NO: 6046670 - DNA, 25 bp, Homo sapien
aaatttaacggacatatcttgaggg

SEQ ID NO: 6046671 - DNA, 25 bp, Homo sapien
gatatggtaccgtcgtggaggctac

SEQ ID NO: 6046672 - DNA, 25 bp, Homo sapien
tccaattttgctccgatcaagcatg

SEQ ID NO: 6046673 - DNA, 25 bp, Homo sapien
tagatatgaagactttgtttgtgag

SEQ ID NO: 6046674 - DNA, 25 bp, Homo sapien
aatatgccatggagttgtcgtgatc

SEQ ID NO: 6046675 - DNA, 25 bp, Homo sapien
taaaagaagagatcgttcaaagaaa

SEQ ID NO: 6046676 - DNA, 25 bp, Homo sapien
ctatgaagaaaatcagtaattgtag

SEQ ID NO: 6046677 - DNA, 25 bp, Homo sapien
tctcaaaacaaaatgacgacggcct

SEQ ID NO: 6046678 - DNA, 25 bp, Homo sapien
ccgatcaagcatgcggtagttgtta

SEQ ID NO: 6046679 - DNA, 25 bp, Homo sapien
aaaataacgggccagaacaatgaag

SEQ ID NO: 6046680 - DNA, 25 bp, Homo sapien
aacaaaatgacgacggcctagatat

SEQ ID NO: 6046681 - DNA, 25 bp, Homo sapien
cgaaattaattatcagaaatatgcc

SEQ ID NO: 6046682 - DNA, 25 bp, Homo sapien
tataccccaggatgtcacagatgag

SEQ ID NO: 6046683 - DNA, 25 bp, Homo sapien
tcgtggaggctaccattccaaggaa

SEQ ID NO: 6046684 - DNA, 25 bp, Homo sapien
agagatcgttcaaagaaaacatcag

SEQ ID NO: 6046685 - DNA, 25 bp, Homo sapien
tgtcacagatgagcagctggcagat

SEQ ID NO: 6046686 - DNA, 25 bp, Homo sapien
ccaggatgtcacagatgagcagctg

SEQ ID NO: 6046687 - DNA, 25 bp, Homo sapien
gaagtggttgaaaagagcacacctg

SEQ ID NO: 6046688 - DNA, 25 bp, Homo sapien
taattatcagaaatatgccatggag

SEQ ID NO: 6046689 - DNA, 25 bp, Homo sapien
ctttgtttgtgaggtctatacccca

SEQ ID NO: 6046690 - DNA, 25 bp, Homo sapien
atggtaaattgtgtggatttgcgtt

SEQ ID NO: 6046691 - DNA, 25 bp, Homo sapien
gcggtagttgttaaggacacgaata

SEQ ID NO: 6046692 - DNA, 25 bp, Homo sapien
gtaccgtcgtggaggctaccattcc

SEQ ID NO: 6046693 - DNA, 25 bp, Homo sapien
tcagtaattgtagaattgctttgga

SEQ ID NO: 6046694 - DNA, 25 bp, Homo sapien
aagaccaaatttaacggacatatct

SEQ ID NO: 6046695 - DNA, 25 bp, Homo sapien
caaggaagcgtgatggtaaattgtg

SEQ ID NO: 6046696 - DNA, 25 bp, Homo sapien
tagttttgctgtagaggatgacaca

SEQ ID NO: 6046697 - DNA, 25 bp, Homo sapien
tttgtgaggtctataccccaggatg

SEQ ID NO: 6046698 - DNA, 25 bp, Homo sapien
agcgtgatggtaaattgtgtggatt

SEQ ID NO: 6046699 - DNA, 25 bp, Homo sapien
ccattccaaggaagcgtgatggtaa

SEQ ID NO: 6046700 - DNA, 25 bp, Homo sapien
tgacacaaaagaagccctagctaag

SEQ ID NO: 6046701 - DNA, 25 bp, Homo sapien
gacgatgctgatggtgaagactcca

SEQ ID NO: 6046702 - DNA, 25 bp, Homo sapien
aaaagaagccctagctaaggccaga

SEQ ID NO: 6046703 - DNA, 25 bp, Homo sapien
agaaaatcagtaattgtagaattgc

SEQ ID NO: 6046704 - DNA, 25 bp, Homo sapien
gaattgctttggaaaacaccaaaga

SEQ ID NO: 6046705 - DNA, 25 bp, Homo sapien
gctgatggtgaagactccatgctaa

SEQ ID NO: 6046706 - DNA, 25 bp, Homo sapien
ttggtagatatggtaccgtcgtgga

SEQ ID NO: 6046707 - DNA, 25 bp, Homo sapien
aacggacatatcttgagggtagaca

SEQ ID NO: 6046708 - DNA, 25 bp, Homo sapien
tcagaaatatgccatggagttgtcg

SEQ ID NO: 6046709 - DNA, 25 bp, Homo sapien
ttgcgtttgttactatgaagaaaat

SEQ ID NO: 6046710 - DNA, 25 bp, Homo sapien
ggtagacattgctaaaagaagagat

SEQ ID NO: 6046711 - DNA, 25 bp, Homo sapien
ccagttaaattgaaaaagatctttg

SEQ ID NO: 6046712 - DNA, 25 bp, Homo sapien
gctaaggccagaaagaccaaattta

SEQ ID NO: 6046713 - DNA, 25 bp, Homo sapien
aggctaccattccaaggaagcgtga

SEQ ID NO: 6046714 - DNA, 25 bp, Homo sapien
catatcttgagggtagacattgcta

SEQ ID NO: 6046715 - DNA, 25 bp, Homo sapien
atgacgacggcctagatatgaagac

SEQ ID NO: 6046716 - DNA, 25 bp, Homo sapien
gagtcatctgagaaaataacgggcc

SEQ ID NO: 6046717 - DNA, 25 bp, Homo sapien
tctgagaaaataacgggccagaaca

SEQ ID NO: 6046718 - DNA, 25 bp, Homo sapien
cagaacaatgaagatgaggacgatg

SEQ ID NO: 6046719 - DNA, 25 bp, Homo sapien
ttcttttccaattttgctccgatca

SEQ ID NO: 6046720 - DNA, 25 bp, Homo sapien
ttgttactatgaagaaaatcagtaa

SEQ ID NO: 6046721 - DNA, 25 bp, Homo sapien
agaggatgacacaaaagaagcccta

SEQ ID NO: 6046722 - DNA, 25 bp, Homo sapien
aagagcacacctgagtcatctgaga

SEQ ID NO: 6046723 - DNA, 25 bp, Homo sapien
attgtagaattgctttggaaaacac

SEQ ID NO: 6046724 - DNA, 25 bp, Homo sapien
tggtcttgttctcttggttcttgct

SEQ ID NO: 6046725 - DNA, 25 bp, Homo sapien
tggacccatgaacttgtatttttcc

SEQ ID NO: 6046726 - DNA, 25 bp, Homo sapien
gcgtttttatgatctctgaattcta

SEQ ID NO: 6046727 - DNA, 25 bp, Homo sapien
tgatcctttaacttccattataact

SEQ ID NO: 6046728 - DNA, 25 bp, Homo sapien
cgcagttgatcctttaacttccatt

SEQ ID NO: 6046729 - DNA, 25 bp, Homo sapien
ttcatcatcattcaaaccctctaaa

SEQ ID NO: 6046730 - DNA, 25 bp, Homo sapien
tttttaacttctgtagcaaattcca

SEQ ID NO: 6046731 - DNA, 25 bp, Homo sapien
tctctgaattctacaaaaccgtaac

SEQ ID NO: 6046732 - DNA, 25 bp, Homo sapien
aagcccatcaaagcgtttttatgat

SEQ ID NO: 6046733 - DNA, 25 bp, Homo sapien
attgtctacttgtttcttttcatca

SEQ ID NO: 6046734 - DNA, 25 bp, Homo sapien
tgcttgcttgacaacaccacttttt

SEQ ID NO: 6046735 - DNA, 25 bp, Homo sapien
aacacaaagacgtcttcctttgcct

SEQ ID NO: 6046736 - DNA, 25 bp, Homo sapien
ttatgatctctgaattctacaaaac

SEQ ID NO: 6046737 - DNA, 25 bp, Homo sapien
tttactcaatggatgtctttcctta

SEQ ID NO: 6046738 - DNA, 25 bp, Homo sapien
tacttgtttcttttcatcatcattc

SEQ ID NO: 6046739 - DNA, 25 bp, Homo sapien
aattccacgacagctttacgagcta

SEQ ID NO: 6046740 - DNA, 25 bp, Homo sapien
tttgcctaagtcattgtctacttgt

SEQ ID NO: 6046741 - DNA, 25 bp, Homo sapien
tctttatatcatcgcccatcttttt

SEQ ID NO: 6046742 - DNA, 25 bp, Homo sapien
atcattcaaaccctctaaaatttca

SEQ ID NO: 6046743 - DNA, 25 bp, Homo sapien
gttctcaatcgcaaattcaacacaa

SEQ ID NO: 6046744 - DNA, 25 bp, Homo sapien
atcttcattatctggtcttgttctc

SEQ ID NO: 6046745 - DNA, 25 bp, Homo sapien
gacatctccagtatcttcattatct

SEQ ID NO: 6046746 - DNA, 25 bp, Homo sapien
tcttcccgcagttgatcctttaact

SEQ ID NO: 6046747 - DNA, 25 bp, Homo sapien
aaattcaacacaaagacgtcttcct

SEQ ID NO: 6046748 - DNA, 25 bp, Homo sapien
gaggtaacggcatgacaattcaacc

SEQ ID NO: 6046749 - DNA, 25 bp, Homo sapien
tacgacgttagagttctcaatcgca

SEQ ID NO: 6046750 - DNA, 25 bp, Homo sapien
cttgtatttttcctttgtagatctg

SEQ ID NO: 6046751 - DNA, 25 bp, Homo sapien
cattataacttttgcttgcttgaca

SEQ ID NO: 6046752 - DNA, 25 bp, Homo sapien
tttgtctttctttttttgagcttca

SEQ ID NO: 6046753 - DNA, 25 bp, Homo sapien
tcttgcttgcttcaattgttccctt

SEQ ID NO: 6046754 - DNA, 25 bp, Homo sapien
ctcggattctccgacatctccagta

SEQ ID NO: 6046755 - DNA, 25 bp, Homo sapien
tttttggcttcttattctcggattc

SEQ ID NO: 6046756 - DNA, 25 bp, Homo sapien
tgttctcttggttcttgcttgcttc

SEQ ID NO: 6046757 - DNA, 25 bp, Homo sapien
tcatcggaggtaacggcatgacaat

SEQ ID NO: 6046758 - DNA, 25 bp, Homo sapien
ttctccgacatctccagtatcttca

SEQ ID NO: 6046759 - DNA, 25 bp, Homo sapien
caccttaagcccatcaaagcgtttt

SEQ ID NO: 6046760 - DNA, 25 bp, Homo sapien
catgaacttgtatttttcctttgta

SEQ ID NO: 6046761 - DNA, 25 bp, Homo sapien
ctttctttttttgagcttcaatctc

SEQ ID NO: 6046762 - DNA, 25 bp, Homo sapien
tggcttcttattctcggattctccg

SEQ ID NO: 6046763 - DNA, 25 bp, Homo sapien
tttttcctttgtagatctgataatc

SEQ ID NO: 6046764 - DNA, 25 bp, Homo sapien
gataatctcttctttactcaatgga

SEQ ID NO: 6046765 - DNA, 25 bp, Homo sapien
acggcatgacaattcaaccacctta

SEQ ID NO: 6046766 - DNA, 25 bp, Homo sapien
tgcttcttctttttttggcttctta

SEQ ID NO: 6046767 - DNA, 25 bp, Homo sapien
tctctttacgacgttagagttctca

SEQ ID NO: 6046768 - DNA, 25 bp, Homo sapien
tgagcttcaatctcatctggaccca

SEQ ID NO: 6046769 - DNA, 25 bp, Homo sapien
ttgcttcaattgttcccttcttctc

SEQ ID NO: 6046770 - DNA, 25 bp, Homo sapien
caatggatgtctttccttattttta

SEQ ID NO: 6046771 - DNA, 25 bp, Homo sapien
tcttcctttgcctaagtcattgtct

SEQ ID NO: 6046772 - DNA, 25 bp, Homo sapien
attatctggtcttgttctcttggtt

SEQ ID NO: 6046773 - DNA, 25 bp, Homo sapien
acccgattattctctttatatcatc

SEQ ID NO: 6046774 - DNA, 25 bp, Homo sapien
ttcaatctcatctggacccatgaac

SEQ ID NO: 6046775 - DNA, 25 bp, Homo sapien
tctacttcttcccgcagttgatcct

SEQ ID NO: 6046776 - DNA, 25 bp, Homo sapien
cttgacaacaccactttttttgtct

SEQ ID NO: 6046777 - DNA, 25 bp, Homo sapien
taagtcattgtctacttgtttcttt

SEQ ID NO: 6046778 - DNA, 25 bp, Homo sapien
tggtgggcgtcgttgcttcttcttt

SEQ ID NO: 6046779 - DNA, 25 bp, Homo sapien
aaaatttcatcggaggtaacggcat

SEQ ID NO: 6046780 - DNA, 25 bp, Homo sapien
atcaaagcgtttttatgatctctga

SEQ ID NO: 6046781 - DNA, 25 bp, Homo sapien
taacctctacttcttcccgcagttg

SEQ ID NO: 6046782 - DNA, 25 bp, Homo sapien
aagacgtcttcctttgcctaagtca

SEQ ID NO: 6046783 - DNA, 25 bp, Homo sapien
acgacagctttacgagctaacgcct

SEQ ID NO: 6046784 - DNA, 25 bp, Homo sapien
cgcccatctttttgtcatcgggatt

SEQ ID NO: 6046785 - DNA, 25 bp, Homo sapien
aatcgcaaattcaacacaaagacgt

SEQ ID NO: 6046786 - DNA, 25 bp, Homo sapien
cgggattggtgggcgtcgttgcttc

SEQ ID NO: 6046787 - DNA, 25 bp, Homo sapien
gtagcaaattccacgacagctttac

SEQ ID NO: 6046788 - DNA, 25 bp, Homo sapien
ttattctctttatatcatcgcccat

SEQ ID NO: 6046789 - DNA, 25 bp, Homo sapien
ttcaaccaccttaagcccatcaaag

SEQ ID NO: 6046790 - DNA, 25 bp, Homo sapien
ttttttgagcttcaatctcatctgg

SEQ ID NO: 6046791 - DNA, 25 bp, Homo sapien
cttggttcttgcttgcttcaattgt

SEQ ID NO: 6046792 - DNA, 25 bp, Homo sapien
ccttcttctctttacgacgttagag

SEQ ID NO: 6046793 - DNA, 25 bp, Homo sapien
ctttgtagatctgataatctcttct

SEQ ID NO: 6046794 - DNA, 25 bp, Homo sapien
tccagtatcttcattatctggtctt

SEQ ID NO: 6046795 - DNA, 25 bp, Homo sapien
tttcttttcatcatcattcaaaccc

SEQ ID NO: 6046796 - DNA, 25 bp, Homo sapien
tatcatcgcccatctttttgtcatc

SEQ ID NO: 6046797 - DNA, 25 bp, Homo sapien
acttctgtagcaaattccacgacag

SEQ ID NO: 6046798 - DNA, 25 bp, Homo sapien
aacttttgcttgcttgacaacacca

SEQ ID NO: 6046799 - DNA, 25 bp, Homo sapien
gctttacgagctaacgcctttaatg

SEQ ID NO: 6046800 - DNA, 25 bp, Homo sapien
ctcatctggacccatgaacttgtat

SEQ ID NO: 6046801 - DNA, 25 bp, Homo sapien
agatctgataatctcttctttactc

SEQ ID NO: 6046802 - DNA, 25 bp, Homo sapien
tgacaattcaaccaccttaagccca

SEQ ID NO: 6046803 - DNA, 25 bp, Homo sapien
gttagagttctcaatcgcaaattca

SEQ ID NO: 6046804 - DNA, 25 bp, Homo sapien
caattgttcccttcttctctttacg

SEQ ID NO: 6046805 - DNA, 25 bp, Homo sapien
tctttttgtcatcgggattggtggg

SEQ ID NO: 6046806 - DNA, 25 bp, Homo sapien
ctcttctttactcaatggatgtctt

SEQ ID NO: 6046807 - DNA, 25 bp, Homo sapien
tgtcatcgggattggtgggcgtcgt

SEQ ID NO: 6046808 - DNA, 25 bp, Homo sapien
aacttccattataacttttgcttgc

SEQ ID NO: 6046809 - DNA, 25 bp, Homo sapien
caaaccctctaaaatttcatcggag

SEQ ID NO: 6046810 - DNA, 25 bp, Homo sapien
ctctaaaatttcatcggaggtaacg

SEQ ID NO: 6046811 - DNA, 25 bp, Homo sapien
cttattctcggattctccgacatct

SEQ ID NO: 6046812 - DNA, 25 bp, Homo sapien
tgcaacttgtatcgcagctaaccac

SEQ ID NO: 6046813 - DNA, 25 bp, Homo sapien
ggtattatttatcagattagagatg

SEQ ID NO: 6046814 - DNA, 25 bp, Homo sapien
tccagccaaaatgaaagcttgattt

SEQ ID NO: 6046815 - DNA, 25 bp, Homo sapien
tatatactggagagactttctgcct

SEQ ID NO: 6046816 - DNA, 25 bp, Homo sapien
cagctggccatagtttcgcaaattg

SEQ ID NO: 6046817 - DNA, 25 bp, Homo sapien
atcttcggtgtaccctccactataa

SEQ ID NO: 6046818 - DNA, 25 bp, Homo sapien
tagttcaaattaacagagttatgaa

SEQ ID NO: 6046819 - DNA, 25 bp, Homo sapien
gccatagtttcgcaaattgttgagc

SEQ ID NO: 6046820 - DNA, 25 bp, Homo sapien
gatcaatctacataggggacaaggc

SEQ ID NO: 6046821 - DNA, 25 bp, Homo sapien
tgctcccttgagaaggggacagacc

SEQ ID NO: 6046822 - DNA, 25 bp, Homo sapien
acaaggcttggatatatactggaga

SEQ ID NO: 6046823 - DNA, 25 bp, Homo sapien
gaagataatgctcccttgagaaggg

SEQ ID NO: 6046824 - DNA, 25 bp, Homo sapien
tactcaggagatgtatttgaatatg

SEQ ID NO: 6046825 - DNA, 25 bp, Homo sapien
caaaatgaaagcttgatttcaaaac

SEQ ID NO: 6046826 - DNA, 25 bp, Homo sapien
atcacatccttttgaaacctggcaa

SEQ ID NO: 6046827 - DNA, 25 bp, Homo sapien
gatatagaagataatgctcccttga

SEQ ID NO: 6046828 - DNA, 25 bp, Homo sapien
ctcttgcataattccagccttttaa

SEQ ID NO: 6046829 - DNA, 25 bp, Homo sapien
tatgaatttgcccaaagaccagctg

SEQ ID NO: 6046830 - DNA, 25 bp, Homo sapien
gcaaattatatgtatttcagagcca

SEQ ID NO: 6046831 - DNA, 25 bp, Homo sapien
aattaacagagttatgaatttgccc

SEQ ID NO: 6046832 - DNA, 25 bp, Homo sapien
ttggttcctttcataaatcttctgg

SEQ ID NO: 6046833 - DNA, 25 bp, Homo sapien
gaattgatcaatctacataggggac

SEQ ID NO: 6046834 - DNA, 25 bp, Homo sapien
gagccatgcaacttgtatcgcagct

SEQ ID NO: 6046835 - DNA, 25 bp, Homo sapien
caacgaagaattgatcaatctacat

SEQ ID NO: 6046836 - DNA, 25 bp, Homo sapien
gatcctgtttggtccagccaaaatg

SEQ ID NO: 6046837 - DNA, 25 bp, Homo sapien
aaccacaaaagagcctttgtatcat

SEQ ID NO: 6046838 - DNA, 25 bp, Homo sapien
catacctactcaggagatgtatttg

SEQ ID NO: 6046839 - DNA, 25 bp, Homo sapien
cttgagaaggggacagaccacttct

SEQ ID NO: 6046840 - DNA, 25 bp, Homo sapien
tcacttaatcttcggtgtaccctcc

SEQ ID NO: 6046841 - DNA, 25 bp, Homo sapien
ctataaacaccgcaaattatatgta

SEQ ID NO: 6046842 - DNA, 25 bp, Homo sapien
cttctgggtattatttatcagatta

SEQ ID NO: 6046843 - DNA, 25 bp, Homo sapien
ttgagactcatggaagcgctgtctc

SEQ ID NO: 6046844 - DNA, 25 bp, Homo sapien
gtttggtccagccaaaatgaaagct

SEQ ID NO: 6046845 - DNA, 25 bp, Homo sapien
agactttctgcctgaaatcatacct

SEQ ID NO: 6046846 - DNA, 25 bp, Homo sapien
aacaccgcaaattatatgtatttca

SEQ ID NO: 6046847 - DNA, 25 bp, Homo sapien
cacttctcacttaatcttcggtgta

SEQ ID NO: 6046848 - DNA, 25 bp, Homo sapien
ctgtctccttcctcacaccacggcc

SEQ ID NO: 6046849 - DNA, 25 bp, Homo sapien
aaaagagcctttgtatcataatttg

SEQ ID NO: 6046850 - DNA, 25 bp, Homo sapien
cacggccattcgttggttcctttca

SEQ ID NO: 6046851 - DNA, 25 bp, Homo sapien
tctacataggggacaaggcttggat

SEQ ID NO: 6046852 - DNA, 25 bp, Homo sapien
ctcatggaagcgctgtctccttcct

SEQ ID NO: 6046853 - DNA, 25 bp, Homo sapien
gtttcgcaaattgttgagctcttgc

SEQ ID NO: 6046854 - DNA, 25 bp, Homo sapien
atttcagagccatgcaacttgtatc

SEQ ID NO: 6046855 - DNA, 25 bp, Homo sapien
ctggagagactttctgcctgaaatc

SEQ ID NO: 6046856 - DNA, 25 bp, Homo sapien
gaaagcttgatttcaaaaccttata

SEQ ID NO: 6046857 - DNA, 25 bp, Homo sapien
caaattgttgagctcttgcataatt

SEQ ID NO: 6046858 - DNA, 25 bp, Homo sapien
gcagctaaccacaaaagagcctttg

SEQ ID NO: 6046859 - DNA, 25 bp, Homo sapien
tggttatgaataaaacaggcggcct

SEQ ID NO: 6046860 - DNA, 25 bp, Homo sapien
caaagaccagctggccatagtttcg

SEQ ID NO: 6046861 - DNA, 25 bp, Homo sapien
gcctttgtatcataatttgattacg

SEQ ID NO: 6046862 - DNA, 25 bp, Homo sapien
tgatttcaaaaccttataatcacat

SEQ ID NO: 6046863 - DNA, 25 bp, Homo sapien
ccttcctcacaccacggccattcgt

SEQ ID NO: 6046864 - DNA, 25 bp, Homo sapien
taggggacaaggcttggatatatac

SEQ ID NO: 6046865 - DNA, 25 bp, Homo sapien
ttaacgttgagactcatggaagcgc

SEQ ID NO: 6046866 - DNA, 25 bp, Homo sapien
gttgagctcttgcataattccagcc

SEQ ID NO: 6046867 - DNA, 25 bp, Homo sapien
cttggatatatactggagagacttt

SEQ ID NO: 6046868 - DNA, 25 bp, Homo sapien
cttttaatcgacgatatagaagata

SEQ ID NO: 6046869 - DNA, 25 bp, Homo sapien
gaagcgctgtctccttcctcacacc

SEQ ID NO: 6046870 - DNA, 25 bp, Homo sapien
taatttgattacgattttcaacgaa

SEQ ID NO: 6046871 - DNA, 25 bp, Homo sapien
tctgcctgaaatcatacctactcag

SEQ ID NO: 6046872 - DNA, 25 bp, Homo sapien
tatatgtatttcagagccatgcaac

SEQ ID NO: 6046873 - DNA, 25 bp, Homo sapien
tgaatatggttatgaataaaacagg

SEQ ID NO: 6046874 - DNA, 25 bp, Homo sapien
gtatttgaatatggttatgaataaa

SEQ ID NO: 6046875 - DNA, 25 bp, Homo sapien
tcacaccacggccattcgttggttc

SEQ ID NO: 6046876 - DNA, 25 bp, Homo sapien
cattcgttggttcctttcataaatc

SEQ ID NO: 6046877 - DNA, 25 bp, Homo sapien
tttgcccaaagaccagctggccata

SEQ ID NO: 6046878 - DNA, 25 bp, Homo sapien
taaatcttctgggtattatttatca

SEQ ID NO: 6046879 - DNA, 25 bp, Homo sapien
cctccactataaacaccgcaaatta

SEQ ID NO: 6046880 - DNA, 25 bp, Homo sapien
ggagatgtatttgaatatggttatg

SEQ ID NO: 6046881 - DNA, 25 bp, Homo sapien
gtatcataatttgattacgattttc

SEQ ID NO: 6046882 - DNA, 25 bp, Homo sapien
ttgaaacctggcaagaactttagac

SEQ ID NO: 6046883 - DNA, 25 bp, Homo sapien
cctggcaagaactttagactaaatt

SEQ ID NO: 6046884 - DNA, 25 bp, Homo sapien
acaggcggccttttcagattaacgt

SEQ ID NO: 6046885 - DNA, 25 bp, Homo sapien
tgtatcgcagctaaccacaaaagag

SEQ ID NO: 6046886 - DNA, 25 bp, Homo sapien
cataattccagccttttaatcgacg

SEQ ID NO: 6046887 - DNA, 25 bp, Homo sapien
cagagttatgaatttgcccaaagac

SEQ ID NO: 6046888 - DNA, 25 bp, Homo sapien
ggccttttcagattaacgttgagac

SEQ ID NO: 6046889 - DNA, 25 bp, Homo sapien
aaggggacagaccacttctcactta

SEQ ID NO: 6046890 - DNA, 25 bp, Homo sapien
gattttcaacgaagaattgatcaat

SEQ ID NO: 6046891 - DNA, 25 bp, Homo sapien
aatttaatagttcaaattaacagag

SEQ ID NO: 6046892 - DNA, 25 bp, Homo sapien
cctttcataaatcttctgggtatta

SEQ ID NO: 6046893 - DNA, 25 bp, Homo sapien
tgaaatcatacctactcaggagatg

SEQ ID NO: 6046894 - DNA, 25 bp, Homo sapien
tccagccttttaatcgacgatatag

SEQ ID NO: 6046895 - DNA, 25 bp, Homo sapien
cttataatcacatccttttgaaacc

SEQ ID NO: 6046896 - DNA, 25 bp, Homo sapien
atcgacgatatagaagataatgctc

SEQ ID NO: 6046897 - DNA, 25 bp, Homo sapien
gattacgattttcaacgaagaattg

SEQ ID NO: 6046898 - DNA, 25 bp, Homo sapien
acagaccacttctcacttaatcttc

SEQ ID NO: 6046899 - DNA, 25 bp, Homo sapien
caaaaccttataatcacatcctttt

SEQ ID NO: 6046900 - DNA, 25 bp, Homo sapien
ttcagattaacgttgagactcatgg

SEQ ID NO: 6046901 - DNA, 25 bp, Homo sapien
aataaaacaggcggccttttcagat

SEQ ID NO: 6046902 - DNA, 25 bp, Homo sapien
gtgtaccctccactataaacaccgc

SEQ ID NO: 6046903 - DNA, 25 bp, Homo sapien
tgtagattgatcaattcttcgttga

SEQ ID NO: 6046904 - DNA, 25 bp, Homo sapien
gggcgtggacgatgggaaaagataa

SEQ ID NO: 6046905 - DNA, 25 bp, Homo sapien
tttggtgtaggccaatgaattggtg

SEQ ID NO: 6046906 - DNA, 25 bp, Homo sapien
tatcacttgtcctcaacaggagaat

SEQ ID NO: 6046907 - DNA, 25 bp, Homo sapien
tatgaaaggaaccaacgaatggccg

SEQ ID NO: 6046908 - DNA, 25 bp, Homo sapien
tgttttattcataaccatattcaaa

SEQ ID NO: 6046909 - DNA, 25 bp, Homo sapien
ttgatcaattcttcgttgaaaatcg

SEQ ID NO: 6046910 - DNA, 25 bp, Homo sapien
cccctatgtagattgatcaattctt

SEQ ID NO: 6046911 - DNA, 25 bp, Homo sapien
tcgctggacatttggaaatctttca

SEQ ID NO: 6046912 - DNA, 25 bp, Homo sapien
tcaacaggagaattcttagaatttc

SEQ ID NO: 6046913 - DNA, 25 bp, Homo sapien
gaagccaaatcaggtaaatacttat

SEQ ID NO: 6046914 - DNA, 25 bp, Homo sapien
agaatttcattgtgttgctcagttt

SEQ ID NO: 6046915 - DNA, 25 bp, Homo sapien
aaattggtggcggtgtcggaatgcg

SEQ ID NO: 6046916 - DNA, 25 bp, Homo sapien
tcattatcattttttatcatattca

SEQ ID NO: 6046917 - DNA, 25 bp, Homo sapien
gcagaaagtctctccagtatatatc

SEQ ID NO: 6046918 - DNA, 25 bp, Homo sapien
catattcactaattgattaataaaa

SEQ ID NO: 6046919 - DNA, 25 bp, Homo sapien
caacgaatggccgtggtgtgaggaa

SEQ ID NO: 6046920 - DNA, 25 bp, Homo sapien
gctttagttttatatctttatcact

SEQ ID NO: 6046921 - DNA, 25 bp, Homo sapien
tgaggaaggagacagcgcttccatg

SEQ ID NO: 6046922 - DNA, 25 bp, Homo sapien
gttttatatctttatcacttgtcct

SEQ ID NO: 6046923 - DNA, 25 bp, Homo sapien
gaatcagctttagttttatatcttt

SEQ ID NO: 6046924 - DNA, 25 bp, Homo sapien
tgtaggccaatgaattggtgtcgaa

SEQ ID NO: 6046925 - DNA, 25 bp, Homo sapien
ttagtgaagttaagggcgtggacga

SEQ ID NO: 6046926 - DNA, 25 bp, Homo sapien
ttcttagaatttcattgtgttgctc

SEQ ID NO: 6046927 - DNA, 25 bp, Homo sapien
gccgcctgttttattcataaccata

SEQ ID NO: 6046928 - DNA, 25 bp, Homo sapien
aattggtgtcgaattccagtatttg

SEQ ID NO: 6046929 - DNA, 25 bp, Homo sapien
aaatttttggtgtaggccaatgaat

SEQ ID NO: 6046930 - DNA, 25 bp, Homo sapien
aattcgtcatgtaaattggtggcgg

SEQ ID NO: 6046931 - DNA, 25 bp, Homo sapien
gtgtcggaatgcgaagccaaatcag

SEQ ID NO: 6046932 - DNA, 25 bp, Homo sapien
tgtcgaattccagtatttgaatcag

SEQ ID NO: 6046933 - DNA, 25 bp, Homo sapien
atggccgtggtgtgaggaaggagac

SEQ ID NO: 6046934 - DNA, 25 bp, Homo sapien
gtggcggtgtcggaatgcgaagcca

SEQ ID NO: 6046935 - DNA, 25 bp, Homo sapien
ttccatgagtctcaacgttaatctg

SEQ ID NO: 6046936 - DNA, 25 bp, Homo sapien
gaatgcgaagccaaatcaggtaaat

SEQ ID NO: 6046937 - DNA, 25 bp, Homo sapien
taatctgaaaaggccgcctgtttta

SEQ ID NO: 6046938 - DNA, 25 bp, Homo sapien
aggaaccaacgaatggccgtggtgt

SEQ ID NO: 6046939 - DNA, 25 bp, Homo sapien
ttttttatcatattcactaattgat

SEQ ID NO: 6046940 - DNA, 25 bp, Homo sapien
aaattcaagtaatcatctctaatct

SEQ ID NO: 6046941 - DNA, 25 bp, Homo sapien
tttcaggcagaaagtctctccagta

SEQ ID NO: 6046942 - DNA, 25 bp, Homo sapien
attcataaccatattcaaatacatc

SEQ ID NO: 6046943 - DNA, 25 bp, Homo sapien
tggaaatctttcaaattcaagtaat

SEQ ID NO: 6046944 - DNA, 25 bp, Homo sapien
tatctttatcacttgtcctcaacag

SEQ ID NO: 6046945 - DNA, 25 bp, Homo sapien
atacatctcctgagtaggtatgatt

SEQ ID NO: 6046946 - DNA, 25 bp, Homo sapien
ttgtcctcaacaggagaattcttag

SEQ ID NO: 6046947 - DNA, 25 bp, Homo sapien
aagtaatcatctctaatctgataaa

SEQ ID NO: 6046948 - DNA, 25 bp, Homo sapien
tccaagccttgtcccctatgtagat

SEQ ID NO: 6046949 - DNA, 25 bp, Homo sapien
agtctctccagtatatatccaagcc

SEQ ID NO: 6046950 - DNA, 25 bp, Homo sapien
ctaatctgataaataatacccagaa

SEQ ID NO: 6046951 - DNA, 25 bp, Homo sapien
atatatccaagccttgtcccctatg

SEQ ID NO: 6046952 - DNA, 25 bp, Homo sapien
gcctttttcgctggacatttggaaa

SEQ ID NO: 6046953 - DNA, 25 bp, Homo sapien
gtcctcagcaaagcctttttcgctg

SEQ ID NO: 6046954 - DNA, 25 bp, Homo sapien
tcatctctaatctgataaataatac

SEQ ID NO: 6046955 - DNA, 25 bp, Homo sapien
aaatcaggtaaatacttattttcat

SEQ ID NO: 6046956 - DNA, 25 bp, Homo sapien
tcattgtgttgctcagtttgacctt

SEQ ID NO: 6046957 - DNA, 25 bp, Homo sapien
gaagatttatgaaaggaaccaacga

SEQ ID NO: 6046958 - DNA, 25 bp, Homo sapien
ccaatgaattggtgtcgaattccag

SEQ ID NO: 6046959 - DNA, 25 bp, Homo sapien
cactaattgattaataaaatttttg

SEQ ID NO: 6046960 - DNA, 25 bp, Homo sapien
ggagaattcttagaatttcattgtg

SEQ ID NO: 6046961 - DNA, 25 bp, Homo sapien
attccagtatttgaatcagctttag

SEQ ID NO: 6046962 - DNA, 25 bp, Homo sapien
tcatgtaaattggtggcggtgtcgg

SEQ ID NO: 6046963 - DNA, 25 bp, Homo sapien
agcaaagcctttttcgctggacatt

SEQ ID NO: 6046964 - DNA, 25 bp, Homo sapien
caattcttcgttgaaaatcgtaatc

SEQ ID NO: 6046965 - DNA, 25 bp, Homo sapien
tatgatttcaggcagaaagtctctc

SEQ ID NO: 6046966 - DNA, 25 bp, Homo sapien
tccagtatatatccaagccttgtcc

SEQ ID NO: 6046967 - DNA, 25 bp, Homo sapien
aggagacagcgcttccatgagtctc

SEQ ID NO: 6046968 - DNA, 25 bp, Homo sapien
gaagttaagggcgtggacgatggga

SEQ ID NO: 6046969 - DNA, 25 bp, Homo sapien
gtatttgaatcagctttagttttat

SEQ ID NO: 6046970 - DNA, 25 bp, Homo sapien
tcagtttgacctttcgttttagtga

SEQ ID NO: 6046971 - DNA, 25 bp, Homo sapien
ccttgtcccctatgtagattgatca

SEQ ID NO: 6046972 - DNA, 25 bp, Homo sapien
tggacgatgggaaaagataacttcc

SEQ ID NO: 6046973 - DNA, 25 bp, Homo sapien
gaaaaggccgcctgttttattcata

SEQ ID NO: 6046974 - DNA, 25 bp, Homo sapien
gtggtgtgaggaaggagacagcgct

SEQ ID NO: 6046975 - DNA, 25 bp, Homo sapien
ctcctgagtaggtatgatttcaggc

SEQ ID NO: 6046976 - DNA, 25 bp, Homo sapien
cagcgcttccatgagtctcaacgtt

SEQ ID NO: 6046977 - DNA, 25 bp, Homo sapien
cccctctgtaatgtcctcagcaaag

SEQ ID NO: 6046978 - DNA, 25 bp, Homo sapien
attcaaatacatctcctgagtaggt

SEQ ID NO: 6046979 - DNA, 25 bp, Homo sapien
aaataatacccagaagatttatgaa

SEQ ID NO: 6046980 - DNA, 25 bp, Homo sapien
tacccagaagatttatgaaaggaac

SEQ ID NO: 6046981 - DNA, 25 bp, Homo sapien
taacttcccctctgtaatgtcctca

SEQ ID NO: 6046982 - DNA, 25 bp, Homo sapien
gacatttggaaatctttcaaattca

SEQ ID NO: 6046983 - DNA, 25 bp, Homo sapien
tctttcaaattcaagtaatcatctc

SEQ ID NO: 6046984 - DNA, 25 bp, Homo sapien
gagtctcaacgttaatctgaaaagg

SEQ ID NO: 6046985 - DNA, 25 bp, Homo sapien
tgttgctcagtttgacctttcgttt

SEQ ID NO: 6046986 - DNA, 25 bp, Homo sapien
tatcattttttatcatattcactaa

SEQ ID NO: 6046987 - DNA, 25 bp, Homo sapien
atgggaaaagataacttcccctctg

SEQ ID NO: 6046988 - DNA, 25 bp, Homo sapien
caacgttaatctgaaaaggccgcct

SEQ ID NO: 6046989 - DNA, 25 bp, Homo sapien
tgtaatgtcctcagcaaagcctttt

SEQ ID NO: 6046990 - DNA, 25 bp, Homo sapien
gtaaatacttattttcattatcatt

SEQ ID NO: 6046991 - DNA, 25 bp, Homo sapien
aaccatattcaaatacatctcctga

SEQ ID NO: 6046992 - DNA, 25 bp, Homo sapien
aaaagataacttcccctctgtaatg

SEQ ID NO: 6046993 - DNA, 25 bp, Homo sapien
taacaattcgtcatgtaaattggtg

SEQ ID NO: 6046994 - DNA, 25 bp, Homo sapien
agtaggtatgatttcaggcagaaag

SEQ ID NO: 6046995 - DNA, 25 bp, Homo sapien
aacttgcttcacgaagtgaaagatc

SEQ ID NO: 6046996 - DNA, 25 bp, Homo sapien
tcgaaatcaaatgttaaaggaatga

SEQ ID NO: 6046997 - DNA, 25 bp, Homo sapien
gttctttgtcaagtagacatagccg

SEQ ID NO: 6046998 - DNA, 25 bp, Homo sapien
ttgagaggaattcaaatatgcattc

SEQ ID NO: 6046999 - DNA, 25 bp, Homo sapien
ttcaaagatggatggtagtgagcaa

SEQ ID NO: 6047000 - DNA, 25 bp, Homo sapien
gttgttatccccgaccgcactcatt

SEQ ID NO: 6047001 - DNA, 25 bp, Homo sapien
aatgatgatgatgagaacaatgatg

SEQ ID NO: 6047002 - DNA, 25 bp, Homo sapien
ggagactttcacaaaagtgcatccg

SEQ ID NO: 6047003 - DNA, 25 bp, Homo sapien
acagaaatagggctgtcacgtttat

SEQ ID NO: 6047004 - DNA, 25 bp, Homo sapien
ttacaacatttgaaaagattgaaac

SEQ ID NO: 6047005 - DNA, 25 bp, Homo sapien
gaccgcactcatttcaaagatggat

SEQ ID NO: 6047006 - DNA, 25 bp, Homo sapien
catgaactatccgttctttgtcaag

SEQ ID NO: 6047007 - DNA, 25 bp, Homo sapien
aaccagtcagaaaatgatgatgatg

SEQ ID NO: 6047008 - DNA, 25 bp, Homo sapien
aagccttcgaaatcaaatgttaaag

SEQ ID NO: 6047009 - DNA, 25 bp, Homo sapien
aatgatgaggacgacgatgatcatg

SEQ ID NO: 6047010 - DNA, 25 bp, Homo sapien
agcctctgataaaaatataccgagt

SEQ ID NO: 6047011 - DNA, 25 bp, Homo sapien
gcatccgttaacataaatcaagacc

SEQ ID NO: 6047012 - DNA, 25 bp, Homo sapien
gaatgatttaatctatcactaccaa

SEQ ID NO: 6047013 - DNA, 25 bp, Homo sapien
gattgaaaccggatcctttgcaaat

SEQ ID NO: 6047014 - DNA, 25 bp, Homo sapien
aaagatccttccgattatggagact

SEQ ID NO: 6047015 - DNA, 25 bp, Homo sapien
aggaattcaaatatgcattcgaata

SEQ ID NO: 6047016 - DNA, 25 bp, Homo sapien
tgataaaaatataccgagtgcacac

SEQ ID NO: 6047017 - DNA, 25 bp, Homo sapien
caaaatgacaaaaacttgcttcacg

SEQ ID NO: 6047018 - DNA, 25 bp, Homo sapien
atcctgagaacgcgctgccgccttt

SEQ ID NO: 6047019 - DNA, 25 bp, Homo sapien
ctgatgacagaaatagggctgtcac

SEQ ID NO: 6047020 - DNA, 25 bp, Homo sapien
atcatggcaattttgagaggaattc

SEQ ID NO: 6047021 - DNA, 25 bp, Homo sapien
actcatttcaaagatggatggtagt

SEQ ID NO: 6047022 - DNA, 25 bp, Homo sapien
atccccgaccgcactcatttcaaag

SEQ ID NO: 6047023 - DNA, 25 bp, Homo sapien
gttaacataaatcaagacctactca

SEQ ID NO: 6047024 - DNA, 25 bp, Homo sapien
taaaaaagcctctgataaaaatata

SEQ ID NO: 6047025 - DNA, 25 bp, Homo sapien
ggatacgaatgatttaatctatcac

SEQ ID NO: 6047026 - DNA, 25 bp, Homo sapien
ccgcctttacaacatttgaaaagat

SEQ ID NO: 6047027 - DNA, 25 bp, Homo sapien
tatgcattcgaataaaaaagcctct

SEQ ID NO: 6047028 - DNA, 25 bp, Homo sapien
catgaagttgttatccccgaccgca

SEQ ID NO: 6047029 - DNA, 25 bp, Homo sapien
accgagtgcacacatgaagttgtta

SEQ ID NO: 6047030 - DNA, 25 bp, Homo sapien
tcaaatatgcattcgaataaaaaag

SEQ ID NO: 6047031 - DNA, 25 bp, Homo sapien
aaggcccatgaactatccgttcttt

SEQ ID NO: 6047032 - DNA, 25 bp, Homo sapien
tcaaatgttaaaggaatgaaccagt

SEQ ID NO: 6047033 - DNA, 25 bp, Homo sapien
ctatgagttttcctctgtggatacg

SEQ ID NO: 6047034 - DNA, 25 bp, Homo sapien
tttcacaaaagtgcatccgttaaca

SEQ ID NO: 6047035 - DNA, 25 bp, Homo sapien
aaccggatcctttgcaaataagtag

SEQ ID NO: 6047036 - DNA, 25 bp, Homo sapien
ggaatgaaccagtcagaaaatgatg

SEQ ID NO: 6047037 - DNA, 25 bp, Homo sapien
atagggctgtcacgtttataaaacg

SEQ ID NO: 6047038 - DNA, 25 bp, Homo sapien
tgtcaagtagacatagccgtcatta

SEQ ID NO: 6047039 - DNA, 25 bp, Homo sapien
tttaatctatcactaccaaaatgac

SEQ ID NO: 6047040 - DNA, 25 bp, Homo sapien
ataagtagaactccgcaacagcaac

SEQ ID NO: 6047041 - DNA, 25 bp, Homo sapien
gttaaaggaatgaaccagtcagaaa

SEQ ID NO: 6047042 - DNA, 25 bp, Homo sapien
ttgcaaataagtagaactccgcaac

SEQ ID NO: 6047043 - DNA, 25 bp, Homo sapien
ctactcaggtcgtctatgtcaaata

SEQ ID NO: 6047044 - DNA, 25 bp, Homo sapien
atggtagtgagcaaaataaacgtca

SEQ ID NO: 6047045 - DNA, 25 bp, Homo sapien
tgagaacgcgctgccgcctttacaa

SEQ ID NO: 6047046 - DNA, 25 bp, Homo sapien
aacgtcatcctgagaacgcgctgcc

SEQ ID NO: 6047047 - DNA, 25 bp, Homo sapien
gcaattttgagaggaattcaaatat

SEQ ID NO: 6047048 - DNA, 25 bp, Homo sapien
ccttccgattatggagactttcaca

SEQ ID NO: 6047049 - DNA, 25 bp, Homo sapien
atttctgatgacagaaatagggctg

SEQ ID NO: 6047050 - DNA, 25 bp, Homo sapien
gatggatggtagtgagcaaaataaa

SEQ ID NO: 6047051 - DNA, 25 bp, Homo sapien
ctatcactaccaaaatgacaaaaac

SEQ ID NO: 6047052 - DNA, 25 bp, Homo sapien
ttcgaataaaaaagcctctgataaa

SEQ ID NO: 6047053 - DNA, 25 bp, Homo sapien
cactaccaaaatgacaaaaacttgc

SEQ ID NO: 6047054 - DNA, 25 bp, Homo sapien
gatcctttgcaaataagtagaactc

SEQ ID NO: 6047055 - DNA, 25 bp, Homo sapien
gaagtgaaagatccttccgattatg

SEQ ID NO: 6047056 - DNA, 25 bp, Homo sapien
aaatataccgagtgcacacatgaag

SEQ ID NO: 6047057 - DNA, 25 bp, Homo sapien
ctatccgttctttgtcaagtagaca

SEQ ID NO: 6047058 - DNA, 25 bp, Homo sapien
tcaaataagccttcgaaatcaaatg

SEQ ID NO: 6047059 - DNA, 25 bp, Homo sapien
aaaagtgcatccgttaacataaatc

SEQ ID NO: 6047060 - DNA, 25 bp, Homo sapien
aaaataaacgtcatcctgagaacgc

SEQ ID NO: 6047061 - DNA, 25 bp, Homo sapien
gcgctgccgcctttacaacatttga

SEQ ID NO: 6047062 - DNA, 25 bp, Homo sapien
tgcacacatgaagttgttatccccg

SEQ ID NO: 6047063 - DNA, 25 bp, Homo sapien
gtagacatagccgtcattatactgg

SEQ ID NO: 6047064 - DNA, 25 bp, Homo sapien
tctatgtcaaataagccttcgaaat

SEQ ID NO: 6047065 - DNA, 25 bp, Homo sapien
gaggacgacgatgatcatggcaatt

SEQ ID NO: 6047066 - DNA, 25 bp, Homo sapien
tcagaaaatgatgatgatgagaaca

SEQ ID NO: 6047067 - DNA, 25 bp, Homo sapien
gggtccaataacacgttctatgagt

SEQ ID NO: 6047068 - DNA, 25 bp, Homo sapien
catagccgtcattatactggggtcc

SEQ ID NO: 6047069 - DNA, 25 bp, Homo sapien
cttcacgaagtgaaagatccttccg

SEQ ID NO: 6047070 - DNA, 25 bp, Homo sapien
atactggggtccaataacacgttct

SEQ ID NO: 6047071 - DNA, 25 bp, Homo sapien
caagacctactcaggtcgtctatgt

SEQ ID NO: 6047072 - DNA, 25 bp, Homo sapien
tggcctttttaagaaggcccatgaa

SEQ ID NO: 6047073 - DNA, 25 bp, Homo sapien
gatgatgagaacaatgatgaggacg

SEQ ID NO: 6047074 - DNA, 25 bp, Homo sapien
gattatggagactttcacaaaagtg

SEQ ID NO: 6047075 - DNA, 25 bp, Homo sapien
cacgttctatgagttttcctctgtg

SEQ ID NO: 6047076 - DNA, 25 bp, Homo sapien
ataaatcaagacctactcaggtcgt

SEQ ID NO: 6047077 - DNA, 25 bp, Homo sapien
gacgatgatcatggcaattttgaga

SEQ ID NO: 6047078 - DNA, 25 bp, Homo sapien
caataacacgttctatgagttttcc

SEQ ID NO: 6047079 - DNA, 25 bp, Homo sapien
gacaaaaacttgcttcacgaagtga

SEQ ID NO: 6047080 - DNA, 25 bp, Homo sapien
aggtcgtctatgtcaaataagcctt

SEQ ID NO: 6047081 - DNA, 25 bp, Homo sapien
tttaagaaggcccatgaactatccg

SEQ ID NO: 6047082 - DNA, 25 bp, Homo sapien
gttttcctctgtggatacgaatgat

SEQ ID NO: 6047083 - DNA, 25 bp, Homo sapien
gagaacaatgatgaggacgacgatg

SEQ ID NO: 6047084 - DNA, 25 bp, Homo sapien
ctctgtggatacgaatgatttaatc

SEQ ID NO: 6047085 - DNA, 25 bp, Homo sapien
catttgaaaagattgaaaccggatc

SEQ ID NO: 6047086 - DNA, 25 bp, Homo sapien
cgtcattatactggggtccaataac

SEQ ID NO: 6047087 - DNA, 25 bp, Homo sapien
gtgagcaaaataaacgtcatcctga

SEQ ID NO: 6047088 - DNA, 25 bp, Homo sapien
catcatatgtacttgagttggactg

SEQ ID NO: 6047089 - DNA, 25 bp, Homo sapien
ccggtatttccattatatgcggtgg

SEQ ID NO: 6047090 - DNA, 25 bp, Homo sapien
acttcgatggcagtgaaccagttgg

SEQ ID NO: 6047091 - DNA, 25 bp, Homo sapien
gttaatgttgtagttaatggtactg

SEQ ID NO: 6047092 - DNA, 25 bp, Homo sapien
atgtacttgagttggactgattgtt

SEQ ID NO: 6047093 - DNA, 25 bp, Homo sapien
ttagtgctgctgatattgctggagt

SEQ ID NO: 6047094 - DNA, 25 bp, Homo sapien
ggctctgttttttgaaagacatttg

SEQ ID NO: 6047095 - DNA, 25 bp, Homo sapien
gtttgagcagtatttatgtatggag

SEQ ID NO: 6047096 - DNA, 25 bp, Homo sapien
ttgttgttgttagtgttgttagtgc

SEQ ID NO: 6047097 - DNA, 25 bp, Homo sapien
gttattgtcgttgccgttgttgctg

SEQ ID NO: 6047098 - DNA, 25 bp, Homo sapien
aattactcatcaaatcatgtacgaa

SEQ ID NO: 6047099 - DNA, 25 bp, Homo sapien
gtaactgttattgctattgttactg

SEQ ID NO: 6047100 - DNA, 25 bp, Homo sapien
ctgctgatattgctggagttgccgt

SEQ ID NO: 6047101 - DNA, 25 bp, Homo sapien
actatagtaactgttattgctattg

SEQ ID NO: 6047102 - DNA, 25 bp, Homo sapien
cagttggagggccattgctggtttc

SEQ ID NO: 6047103 - DNA, 25 bp, Homo sapien
cggtggcagcagcatcatatgtact

SEQ ID NO: 6047104 - DNA, 25 bp, Homo sapien
tgtttcccggcttggcactgttggg

SEQ ID NO: 6047105 - DNA, 25 bp, Homo sapien
gtgttgttagtgctgctgatattgc

SEQ ID NO: 6047106 - DNA, 25 bp, Homo sapien
gattgttcgagtcaccatcggtagt

SEQ ID NO: 6047107 - DNA, 25 bp, Homo sapien
gttattgctattgttactgttattg

SEQ ID NO: 6047108 - DNA, 25 bp, Homo sapien
ggtgcatcttcattattactatagt

SEQ ID NO: 6047109 - DNA, 25 bp, Homo sapien
cattgctggtttcagggccggaaaa

SEQ ID NO: 6047110 - DNA, 25 bp, Homo sapien
cgttgttgctgttgttgttgctgct

SEQ ID NO: 6047111 - DNA, 25 bp, Homo sapien
ttgaccagtctggaaacatcgatat

SEQ ID NO: 6047112 - DNA, 25 bp, Homo sapien
gcagtatttatgtatggagtcagcc

SEQ ID NO: 6047113 - DNA, 25 bp, Homo sapien
ctgtttggctctgttttttgaaaga

SEQ ID NO: 6047114 - DNA, 25 bp, Homo sapien
tgccgttgtttacggccgtctgtac

SEQ ID NO: 6047115 - DNA, 25 bp, Homo sapien
tagttaatggtactgtttggctctg

SEQ ID NO: 6047116 - DNA, 25 bp, Homo sapien
cagcagcatcatatgtacttgagtt

SEQ ID NO: 6047117 - DNA, 25 bp, Homo sapien
tggactgattgttcgagtcaccatc

SEQ ID NO: 6047118 - DNA, 25 bp, Homo sapien
tcttcattattactatagtaactgt

SEQ ID NO: 6047119 - DNA, 25 bp, Homo sapien
tttccattatatgcggtggcagcag

SEQ ID NO: 6047120 - DNA, 25 bp, Homo sapien
cggtagtatgttctgaaatagcagc

SEQ ID NO: 6047121 - DNA, 25 bp, Homo sapien
tcgagtcaccatcggtagtatgttc

SEQ ID NO: 6047122 - DNA, 25 bp, Homo sapien
ctccatttacgggtgcatcttcatt

SEQ ID NO: 6047123 - DNA, 25 bp, Homo sapien
cgtccggttaatgttgtagttaatg

SEQ ID NO: 6047124 - DNA, 25 bp, Homo sapien
gtcgttgccgttgttgctgttgttg

SEQ ID NO: 6047125 - DNA, 25 bp, Homo sapien
tcatcaaatcatgtacgaacttcga

SEQ ID NO: 6047126 - DNA, 25 bp, Homo sapien
tttatgtatggagtcagcccggtat

SEQ ID NO: 6047127 - DNA, 25 bp, Homo sapien
ctggagttgccgttgtttacggccg

SEQ ID NO: 6047128 - DNA, 25 bp, Homo sapien
gctgttgttgttgctgctgttgttg

SEQ ID NO: 6047129 - DNA, 25 bp, Homo sapien
tatatgcggtggcagcagcatcata

SEQ ID NO: 6047130 - DNA, 25 bp, Homo sapien
agggaaagtaccaggattgtttgtg

SEQ ID NO: 6047131 - DNA, 25 bp, Homo sapien
gagggccattgctggtttcagggcc

SEQ ID NO: 6047132 - DNA, 25 bp, Homo sapien
atatcagtcgaaaaattaaagaatt

SEQ ID NO: 6047133 - DNA, 25 bp, Homo sapien
caccatcggtagtatgttctgaaat

SEQ ID NO: 6047134 - DNA, 25 bp, Homo sapien
aatcatgtacgaacttcgatggcag

SEQ ID NO: 6047135 - DNA, 25 bp, Homo sapien
gtcagcccggtatttccattatatg

SEQ ID NO: 6047136 - DNA, 25 bp, Homo sapien
ttgtttgtgtttcccggcttggcac

SEQ ID NO: 6047137 - DNA, 25 bp, Homo sapien
ctgaaatagcagctccatttacggg

SEQ ID NO: 6047138 - DNA, 25 bp, Homo sapien
gttactgttattgtcgttgccgttg

SEQ ID NO: 6047139 - DNA, 25 bp, Homo sapien
tcgatatagaagaaacatttggaga

SEQ ID NO: 6047140 - DNA, 25 bp, Homo sapien
gctattgttactgttattgtcgttg

SEQ ID NO: 6047141 - DNA, 25 bp, Homo sapien
atggtactgtttggctctgtttttt

SEQ ID NO: 6047142 - DNA, 25 bp, Homo sapien
aaacatttggagaattactcatcaa

SEQ ID NO: 6047143 - DNA, 25 bp, Homo sapien
ttgagttggactgattgttcgagtc

SEQ ID NO: 6047144 - DNA, 25 bp, Homo sapien
gtgcctagtggtgtttgagcagtat

SEQ ID NO: 6047145 - DNA, 25 bp, Homo sapien
ttgttgctgctgttgttgttgttat

SEQ ID NO: 6047146 - DNA, 25 bp, Homo sapien
tgttgtagttaatggtactgtttgg

SEQ ID NO: 6047147 - DNA, 25 bp, Homo sapien
ttgttagtgttgttagtgctgctga

SEQ ID NO: 6047148 - DNA, 25 bp, Homo sapien
gaaacatcgatatagaagaaacatt

SEQ ID NO: 6047149 - DNA, 25 bp, Homo sapien
ttaaagaatttagtgcctagtggtg

SEQ ID NO: 6047150 - DNA, 25 bp, Homo sapien
ttattactatagtaactgttattgc

SEQ ID NO: 6047151 - DNA, 25 bp, Homo sapien
ccggcttggcactgttgggtcccat

SEQ ID NO: 6047152 - DNA, 25 bp, Homo sapien
aatttagtgcctagtggtgtttgag

SEQ ID NO: 6047153 - DNA, 25 bp, Homo sapien
agtctggaaacatcgatatagaaga

SEQ ID NO: 6047154 - DNA, 25 bp, Homo sapien
tatggagtcagcccggtatttccat

SEQ ID NO: 6047155 - DNA, 25 bp, Homo sapien
atattgctggagttgccgttgttta

SEQ ID NO: 6047156 - DNA, 25 bp, Homo sapien
tttacgggtgcatcttcattattac

SEQ ID NO: 6047157 - DNA, 25 bp, Homo sapien
tagcagctccatttacgggtgcatc

SEQ ID NO: 6047158 - DNA, 25 bp, Homo sapien
tatgttctgaaatagcagctccatt

SEQ ID NO: 6047159 - DNA, 25 bp, Homo sapien
atggcagtgaaccagttggagggcc

SEQ ID NO: 6047160 - DNA, 25 bp, Homo sapien
gtgaaccagttggagggccattgct

SEQ ID NO: 6047161 - DNA, 25 bp, Homo sapien
ttggagaattactcatcaaatcatg

SEQ ID NO: 6047162 - DNA, 25 bp, Homo sapien
tgttgggtcccattgaccagtctgg

SEQ ID NO: 6047163 - DNA, 25 bp, Homo sapien
ccaggattgtttgtgtttcccggct

SEQ ID NO: 6047164 - DNA, 25 bp, Homo sapien
ctgctgttgttgttgttattgttgt

SEQ ID NO: 6047165 - DNA, 25 bp, Homo sapien
gtcccattgaccagtctggaaacat

SEQ ID NO: 6047166 - DNA, 25 bp, Homo sapien
gtacgaacttcgatggcagtgaacc

SEQ ID NO: 6047167 - DNA, 25 bp, Homo sapien
agtggtgtttgagcagtatttatgt

SEQ ID NO: 6047168 - DNA, 25 bp, Homo sapien
tagaagaaacatttggagaattact

SEQ ID NO: 6047169 - DNA, 25 bp, Homo sapien
tggcactgttgggtcccattgacca

SEQ ID NO: 6047170 - DNA, 25 bp, Homo sapien
ctcaaatgggttccaggcaacttga

SEQ ID NO: 6047171 - DNA, 25 bp, Homo sapien
tacatgcttaagcatggtctgcaaa

SEQ ID NO: 6047172 - DNA, 25 bp, Homo sapien
tgggggttcctctgttatgatagac

SEQ ID NO: 6047173 - DNA, 25 bp, Homo sapien
gttgaaaatggagaaggactccaca

SEQ ID NO: 6047174 - DNA, 25 bp, Homo sapien
atggacgaggcccaatttgtgggaa

SEQ ID NO: 6047175 - DNA, 25 bp, Homo sapien
ctggtcttttatggatagacgccca

SEQ ID NO: 6047176 - DNA, 25 bp, Homo sapien
atagacggtgtcaaggctaaaagag

SEQ ID NO: 6047177 - DNA, 25 bp, Homo sapien
ggtgtcaaggctaaaagagcagatt

SEQ ID NO: 6047178 - DNA, 25 bp, Homo sapien
gtgtacaactccgtgtcgaaagtgg

SEQ ID NO: 6047179 - DNA, 25 bp, Homo sapien
agcccaaaaaagatcgcgtatattg

SEQ ID NO: 6047180 - DNA, 25 bp, Homo sapien
gagtcgctcaaatgggttccaggca

SEQ ID NO: 6047181 - DNA, 25 bp, Homo sapien
cgtgtcgaaagtggtccaggcgaac

SEQ ID NO: 6047182 - DNA, 25 bp, Homo sapien
aagcatagaggatttgggctggtct

SEQ ID NO: 6047183 - DNA, 25 bp, Homo sapien
cggcggtcagggtaagcttggtgtc

SEQ ID NO: 6047184 - DNA, 25 bp, Homo sapien
taagcatggtctgcaaacaagcata

SEQ ID NO: 6047185 - DNA, 25 bp, Homo sapien
atcgcgtatattgggttgagagatg

SEQ ID NO: 6047186 - DNA, 25 bp, Homo sapien
tggacaaataccccgatgctggtct

SEQ ID NO: 6047187 - DNA, 25 bp, Homo sapien
ttgcacggctgtcccgtgtcattcc

SEQ ID NO: 6047188 - DNA, 25 bp, Homo sapien
acgcccacgctgatataaacaccat

SEQ ID NO: 6047189 - DNA, 25 bp, Homo sapien
gactccacaactgggggttcctctg

SEQ ID NO: 6047190 - DNA, 25 bp, Homo sapien
cccctctggaaacttgcacggctgt

SEQ ID NO: 6047191 - DNA, 25 bp, Homo sapien
tacggaattagagccctcaatggac

SEQ ID NO: 6047192 - DNA, 25 bp, Homo sapien
agagatgttgatgccggagaaaaga

SEQ ID NO: 6047193 - DNA, 25 bp, Homo sapien
tgatcattcaatagccattggtact

SEQ ID NO: 6047194 - DNA, 25 bp, Homo sapien
caactccgtgtcgaaagtggtccag

SEQ ID NO: 6047195 - DNA, 25 bp, Homo sapien
ccgtgtcattcctaatgggtttgaa

SEQ ID NO: 6047196 - DNA, 25 bp, Homo sapien
aaaagagcagatttggttggtgaag

SEQ ID NO: 6047197 - DNA, 25 bp, Homo sapien
aaagcaccccctctggaaacttgca

SEQ ID NO: 6047198 - DNA, 25 bp, Homo sapien
aataccccgatgctggtcttttatg

SEQ ID NO: 6047199 - DNA, 25 bp, Homo sapien
cacaactgggggttcctctgttatg

SEQ ID NO: 6047200 - DNA, 25 bp, Homo sapien
ttttatggatagacgcccacgctga

SEQ ID NO: 6047201 - DNA, 25 bp, Homo sapien
cctaaatacatgcttaagcatggtc

SEQ ID NO: 6047202 - DNA, 25 bp, Homo sapien
cattcctaatgggtttgaacaagga

SEQ ID NO: 6047203 - DNA, 25 bp, Homo sapien
tcagggtaagcttggtgtcgagaag

SEQ ID NO: 6047204 - DNA, 25 bp, Homo sapien
tggtctgcaaacaagcatagaggat

SEQ ID NO: 6047205 - DNA, 25 bp, Homo sapien
taagcttggtgtcgagaagggccct

SEQ ID NO: 6047206 - DNA, 25 bp, Homo sapien
aaatcgcgaattgtccatcgttctg

SEQ ID NO: 6047207 - DNA, 25 bp, Homo sapien
aaggctaaaagagcagatttggttg

SEQ ID NO: 6047208 - DNA, 25 bp, Homo sapien
attcagcggcggtcagggtaagctt

SEQ ID NO: 6047209 - DNA, 25 bp, Homo sapien
ccccttgaccttgggtggtgatcat

SEQ ID NO: 6047210 - DNA, 25 bp, Homo sapien
gaccttgggtggtgatcattcaata

SEQ ID NO: 6047211 - DNA, 25 bp, Homo sapien
gtccatcgttctggctccattcagc

SEQ ID NO: 6047212 - DNA, 25 bp, Homo sapien
tgtcccgagtcgctcaaatgggttc

SEQ ID NO: 6047213 - DNA, 25 bp, Homo sapien
tggaaacttgcacggctgtcccgtg

SEQ ID NO: 6047214 - DNA, 25 bp, Homo sapien
gttttggacaaataccccgatgctg

SEQ ID NO: 6047215 - DNA, 25 bp, Homo sapien
ccaggcaacttgagcccaaaaaaga

SEQ ID NO: 6047216 - DNA, 25 bp, Homo sapien
tgtatccgcggttttggacaaatac

SEQ ID NO: 6047217 - DNA, 25 bp, Homo sapien
ccctcaatggacgaggcccaatttg

SEQ ID NO: 6047218 - DNA, 25 bp, Homo sapien
gctgtcccgtgtcattcctaatggg

SEQ ID NO: 6047219 - DNA, 25 bp, Homo sapien
tggtactgtatccgcggttttggac

SEQ ID NO: 6047220 - DNA, 25 bp, Homo sapien
ggatagacgcccacgctgatataaa

SEQ ID NO: 6047221 - DNA, 25 bp, Homo sapien
tttgggctggtctacggaattagag

SEQ ID NO: 6047222 - DNA, 25 bp, Homo sapien
aatggagaaggactccacaactggg

SEQ ID NO: 6047223 - DNA, 25 bp, Homo sapien
ccatagaaagcaccccctctggaaa

SEQ ID NO: 6047224 - DNA, 25 bp, Homo sapien
ttggtgtcgagaagggccctaaata

SEQ ID NO: 6047225 - DNA, 25 bp, Homo sapien
acaaggatgtcccacattgtcccga

SEQ ID NO: 6047226 - DNA, 25 bp, Homo sapien
cgaattgtccatcgttctggctcca

SEQ ID NO: 6047227 - DNA, 25 bp, Homo sapien
agaggatttgggctggtctacggaa

SEQ ID NO: 6047228 - DNA, 25 bp, Homo sapien
gccaccaagttggtgtacaactccg

SEQ ID NO: 6047229 - DNA, 25 bp, Homo sapien
gaaagtggtccaggcgaacagattc

SEQ ID NO: 6047230 - DNA, 25 bp, Homo sapien
gtttgaacaaggatgtcccacattg

SEQ ID NO: 6047231 - DNA, 25 bp, Homo sapien
gggttgagagatgttgatgccggag

SEQ ID NO: 6047232 - DNA, 25 bp, Homo sapien
ccgatgctggtcttttatggataga

SEQ ID NO: 6047233 - DNA, 25 bp, Homo sapien
tatattgggttgagagatgttgatg

SEQ ID NO: 6047234 - DNA, 25 bp, Homo sapien
gaaagttgaaaatggagaaggactc

SEQ ID NO: 6047235 - DNA, 25 bp, Homo sapien
gcaaacaagcatagaggatttgggc

SEQ ID NO: 6047236 - DNA, 25 bp, Homo sapien
aaaaagatcgcgtatattgggttga

SEQ ID NO: 6047237 - DNA, 25 bp, Homo sapien
ctggtctacggaattagagccctca

SEQ ID NO: 6047238 - DNA, 25 bp, Homo sapien
tgggttccaggcaacttgagcccaa

SEQ ID NO: 6047239 - DNA, 25 bp, Homo sapien
ttgtgggaaagttgaaaatggagaa

SEQ ID NO: 6047240 - DNA, 25 bp, Homo sapien
aagggccctaaatacatgcttaagc

SEQ ID NO: 6047241 - DNA, 25 bp, Homo sapien
ggtgaagccaccaagttggtgtaca

SEQ ID NO: 6047242 - DNA, 25 bp, Homo sapien
gggtggtgatcattcaatagccatt

SEQ ID NO: 6047243 - DNA, 25 bp, Homo sapien
gctccattcagcggcggtcagggta

SEQ ID NO: 6047244 - DNA, 25 bp, Homo sapien
ttcaatagccattggtactgtatcc

SEQ ID NO: 6047245 - DNA, 25 bp, Homo sapien
taatgggtttgaacaaggatgtccc

SEQ ID NO: 6047246 - DNA, 25 bp, Homo sapien
cgaggcccaatttgtgggaaagttg

SEQ ID NO: 6047247 - DNA, 25 bp, Homo sapien
ccaatttgtgggaaagttgaaaatg

SEQ ID NO: 6047248 - DNA, 25 bp, Homo sapien
ttagagccctcaatggacgaggccc

SEQ ID NO: 6047249 - DNA, 25 bp, Homo sapien
atataaacaccatagaaagcacccc

SEQ ID NO: 6047250 - DNA, 25 bp, Homo sapien
gcagatttggttggtgaagccacca

SEQ ID NO: 6047251 - DNA, 25 bp, Homo sapien
agccattggtactgtatccgcggtt

SEQ ID NO: 6047252 - DNA, 25 bp, Homo sapien
ttggttggtgaagccaccaagttgg

SEQ ID NO: 6047253 - DNA, 25 bp, Homo sapien
acgctgatataaacaccatagaaag

SEQ ID NO: 6047254 - DNA, 25 bp, Homo sapien
aagttggtgtacaactccgtgtcga

SEQ ID NO: 6047255 - DNA, 25 bp, Homo sapien
gatgtcccacattgtcccgagtcgc

SEQ ID NO: 6047256 - DNA, 25 bp, Homo sapien
ggcgaacagattccccttgaccttg

SEQ ID NO: 6047257 - DNA, 25 bp, Homo sapien
ccacattgtcccgagtcgctcaaat

SEQ ID NO: 6047258 - DNA, 25 bp, Homo sapien
aacttgagcccaaaaaagatcgcgt

SEQ ID NO: 6047259 - DNA, 25 bp, Homo sapien
gttctggctccattcagcggcggtc

SEQ ID NO: 6047260 - DNA, 25 bp, Homo sapien
ggtccaggcgaacagattccccttg

SEQ ID NO: 6047261 - DNA, 25 bp, Homo sapien
tgttatgatagacggtgtcaaggct

SEQ ID NO: 6047262 - DNA, 25 bp, Homo sapien
cagattccccttgaccttgggtggt

SEQ ID NO: 6047263 - DNA, 25 bp, Homo sapien
ttcctctgttatgatagacggtgtc

SEQ ID NO: 6047264 - DNA, 25 bp, Homo sapien
tcgagaagggccctaaatacatgct

SEQ ID NO: 6047265 - DNA, 25 bp, Homo sapien
cggcgatacccagatctttcaagat

SEQ ID NO: 6047266 - DNA, 25 bp, Homo sapien
tgcagagatggtgtttgaaacatgg

SEQ ID NO: 6047267 - DNA, 25 bp, Homo sapien
acgtcataggagcacataatgggac

SEQ ID NO: 6047268 - DNA, 25 bp, Homo sapien
tctacaccatcgacgtcataggagc

SEQ ID NO: 6047269 - DNA, 25 bp, Homo sapien
ccaaaaccgcggatacagtaccaat

SEQ ID NO: 6047270 - DNA, 25 bp, Homo sapien
tccataaaagaccagcatcggggta

SEQ ID NO: 6047271 - DNA, 25 bp, Homo sapien
cttgttcaaacccattaggaatgac

SEQ ID NO: 6047272 - DNA, 25 bp, Homo sapien
caccaagaaaagaccttctctcaag

SEQ ID NO: 6047273 - DNA, 25 bp, Homo sapien
atcagcgtgggcgtctatccataaa

SEQ ID NO: 6047274 - DNA, 25 bp, Homo sapien
caatctttccaccaagaaaagacct

SEQ ID NO: 6047275 - DNA, 25 bp, Homo sapien
gcaacctgcagagatggtgtttgaa

SEQ ID NO: 6047276 - DNA, 25 bp, Homo sapien
gacagccgtgcaagtttccagaggg

SEQ ID NO: 6047277 - DNA, 25 bp, Homo sapien
tacgcgatcttttttgggctcaagt

SEQ ID NO: 6047278 - DNA, 25 bp, Homo sapien
aacatctctcaacccaatatacgcg

SEQ ID NO: 6047279 - DNA, 25 bp, Homo sapien
cgactcgggacaatgtgggacatcc

SEQ ID NO: 6047280 - DNA, 25 bp, Homo sapien
ggagtacctgtagcaggaatgtata

SEQ ID NO: 6047281 - DNA, 25 bp, Homo sapien
tgtttctgggtgcacggctttcatt

SEQ ID NO: 6047282 - DNA, 25 bp, Homo sapien
cgtctatccataaaagaccagcatc

SEQ ID NO: 6047283 - DNA, 25 bp, Homo sapien
ggttacattcaacaacgtctagcgc

SEQ ID NO: 6047284 - DNA, 25 bp, Homo sapien
ttcggccaatctttccaccaagaaa

SEQ ID NO: 6047285 - DNA, 25 bp, Homo sapien
cgtgggcgtctatccataaaagacc

SEQ ID NO: 6047286 - DNA, 25 bp, Homo sapien
gtttgaaacatggatatcatgaata

SEQ ID NO: 6047287 - DNA, 25 bp, Homo sapien
tgcctggaacccatttgagcgactc

SEQ ID NO: 6047288 - DNA, 25 bp, Homo sapien
gatggtgtttgaaacatggatatca

SEQ ID NO: 6047289 - DNA, 25 bp, Homo sapien
cctgtagcaggaatgtataatgggt

SEQ ID NO: 6047290 - DNA, 25 bp, Homo sapien
cattaggaatgacacgggacagccg

SEQ ID NO: 6047291 - DNA, 25 bp, Homo sapien
gaaaagaccttctctcaaggtcaac

SEQ ID NO: 6047292 - DNA, 25 bp, Homo sapien
aatgggtctacaccatcgacgtcat

SEQ ID NO: 6047293 - DNA, 25 bp, Homo sapien
gatcagggttacattcaacaacgtc

SEQ ID NO: 6047294 - DNA, 25 bp, Homo sapien
gatctttcaagattttcttttctcc

SEQ ID NO: 6047295 - DNA, 25 bp, Homo sapien
ccatcgacgtcataggagcacataa

SEQ ID NO: 6047296 - DNA, 25 bp, Homo sapien
tacatggaaaaggcggcgataccca

SEQ ID NO: 6047297 - DNA, 25 bp, Homo sapien
gaacccatttgagcgactcgggaca

SEQ ID NO: 6047298 - DNA, 25 bp, Homo sapien
gggacaatgtgggacatccttgttc

SEQ ID NO: 6047299 - DNA, 25 bp, Homo sapien
gcaagtttccagagggggtgctttc

SEQ ID NO: 6047300 - DNA, 25 bp, Homo sapien
acgtggtacatggaaaaggcggcga

SEQ ID NO: 6047301 - DNA, 25 bp, Homo sapien
taggagcacataatgggaccttcac

SEQ ID NO: 6047302 - DNA, 25 bp, Homo sapien
ccgtatttgtcaacgtggtacatgg

SEQ ID NO: 6047303 - DNA, 25 bp, Homo sapien
aaagaccagcatcggggtatttgtc

SEQ ID NO: 6047304 - DNA, 25 bp, Homo sapien
tttcattgccatttcaatgacagcg

SEQ ID NO: 6047305 - DNA, 25 bp, Homo sapien
atgggaccttcaccgtttgtttctg

SEQ ID NO: 6047306 - DNA, 25 bp, Homo sapien
tttctccggcatcaacatctctcaa

SEQ ID NO: 6047307 - DNA, 25 bp, Homo sapien
ggtcaacccacctctcactggagta

SEQ ID NO: 6047308 - DNA, 25 bp, Homo sapien
aacatggatatcatgaatagccaga

SEQ ID NO: 6047309 - DNA, 25 bp, Homo sapien
ccgcggatacagtaccaatggctat

SEQ ID NO: 6047310 - DNA, 25 bp, Homo sapien
ccttcaccgtttgtttctgggtgca

SEQ ID NO: 6047311 - DNA, 25 bp, Homo sapien
tcaagttgcctggaacccatttgag

SEQ ID NO: 6047312 - DNA, 25 bp, Homo sapien
ttgggctcaagttgcctggaaccca

SEQ ID NO: 6047313 - DNA, 25 bp, Homo sapien
tgccatttcaatgacagcgttgatg

SEQ ID NO: 6047314 - DNA, 25 bp, Homo sapien
cacataatgggaccttcaccgtttg

SEQ ID NO: 6047315 - DNA, 25 bp, Homo sapien
cacggctttcattgccatttcaatg

SEQ ID NO: 6047316 - DNA, 25 bp, Homo sapien
caacgtctagcgcaattaaattacc

SEQ ID NO: 6047317 - DNA, 25 bp, Homo sapien
ggcatcaacatctctcaacccaata

SEQ ID NO: 6047318 - DNA, 25 bp, Homo sapien
gaatgacacgggacagccgtgcaag

SEQ ID NO: 6047319 - DNA, 25 bp, Homo sapien
gacagcgttgatgccgtatttgtca

SEQ ID NO: 6047320 - DNA, 25 bp, Homo sapien
ttgatgccgtatttgtcaacgtggt

SEQ ID NO: 6047321 - DNA, 25 bp, Homo sapien
ccacctctcactggagtacctgtag

SEQ ID NO: 6047322 - DNA, 25 bp, Homo sapien
gctttctatggtgtttatatcagcg

SEQ ID NO: 6047323 - DNA, 25 bp, Homo sapien
tcttttttgggctcaagttgcctgg

SEQ ID NO: 6047324 - DNA, 25 bp, Homo sapien
ctcaacccaatatacgcgatctttt

SEQ ID NO: 6047325 - DNA, 25 bp, Homo sapien
tctcaaggtcaacccacctctcact

SEQ ID NO: 6047326 - DNA, 25 bp, Homo sapien
cagcatcggggtatttgtccaaaac

SEQ ID NO: 6047327 - DNA, 25 bp, Homo sapien
attttcttttctccggcatcaacat

SEQ ID NO: 6047328 - DNA, 25 bp, Homo sapien
gggggtgctttctatggtgtttata

SEQ ID NO: 6047329 - DNA, 25 bp, Homo sapien
cacgggacagccgtgcaagtttcca

SEQ ID NO: 6047330 - DNA, 25 bp, Homo sapien
ttcaatgacagcgttgatgccgtat

SEQ ID NO: 6047331 - DNA, 25 bp, Homo sapien
tacccagatctttcaagattttctt

SEQ ID NO: 6047332 - DNA, 25 bp, Homo sapien
ttcaagattttcttttctccggcat

SEQ ID NO: 6047333 - DNA, 25 bp, Homo sapien
tctagcgcaattaaattaccggatt

SEQ ID NO: 6047334 - DNA, 25 bp, Homo sapien
ttccagagggggtgctttctatggt

SEQ ID NO: 6047335 - DNA, 25 bp, Homo sapien
gcaggaatgtataatgggtctacac

SEQ ID NO: 6047336 - DNA, 25 bp, Homo sapien
atgaatagccagatcagggttacat

SEQ ID NO: 6047337 - DNA, 25 bp, Homo sapien
ctcactggagtacctgtagcaggaa

SEQ ID NO: 6047338 - DNA, 25 bp, Homo sapien
atttgtccaaaaccgcggatacagt

SEQ ID NO: 6047339 - DNA, 25 bp, Homo sapien
tatggtgtttatatcagcgtgggcg

SEQ ID NO: 6047340 - DNA, 25 bp, Homo sapien
tgggtgcacggctttcattgccatt

SEQ ID NO: 6047341 - DNA, 25 bp, Homo sapien
taccggattcggccaatctttccac

SEQ ID NO: 6047342 - DNA, 25 bp, Homo sapien
ccttctctcaaggtcaacccacctc

SEQ ID NO: 6047343 - DNA, 25 bp, Homo sapien
attcaacaacgtctagcgcaattaa

SEQ ID NO: 6047344 - DNA, 25 bp, Homo sapien
aatggcgcaacctgcagagatggtg

SEQ ID NO: 6047345 - DNA, 25 bp, Homo sapien
gtttatatcagcgtgggcgtctatc

SEQ ID NO: 6047346 - DNA, 25 bp, Homo sapien
aaaaggcggcgatacccagatcttt

SEQ ID NO: 6047347 - DNA, 25 bp, Homo sapien
caaacccattaggaatgacacggga

SEQ ID NO: 6047348 - DNA, 25 bp, Homo sapien
atgtgggacatccttgttcaaaccc

SEQ ID NO: 6047349 - DNA, 25 bp, Homo sapien
accgtttgtttctgggtgcacggct

SEQ ID NO: 6047350 - DNA, 25 bp, Homo sapien
gatatcatgaatagccagatcaggg

SEQ ID NO: 6047351 - DNA, 25 bp, Homo sapien
ccaatatacgcgatcttttttgggc

SEQ ID NO: 6047352 - DNA, 25 bp, Homo sapien
agccagatcagggttacattcaaca

SEQ ID NO: 6047353 - DNA, 25 bp, Homo sapien
atttgagcgactcgggacaatgtgg

SEQ ID NO: 6047354 - DNA, 25 bp, Homo sapien
gcaattaaattaccggattcggcca

SEQ ID NO: 6047355 - DNA, 25 bp, Homo sapien
ttgtcaacgtggtacatggaaaagg

SEQ ID NO: 6047356 - DNA, 25 bp, Homo sapien
gacatccttgttcaaacccattagg

SEQ ID NO: 6047357 - DNA, 25 bp, Homo sapien
atgtataatgggtctacaccatcga

SEQ ID NO: 6047358 - DNA, 25 bp, Homo sapien
ggatatggaaagctccaaaattcca

SEQ ID NO: 6047359 - DNA, 25 bp, Homo sapien
accttcacctgtaagagaaaaattg

SEQ ID NO: 6047360 - DNA, 25 bp, Homo sapien
accaaatacgtccaggatcaataaa

SEQ ID NO: 6047361 - DNA, 25 bp, Homo sapien
actcgatgactttgaactggggaag

SEQ ID NO: 6047362 - DNA, 25 bp, Homo sapien
tgcgttcggcacaggagtacaggat

SEQ ID NO: 6047363 - DNA, 25 bp, Homo sapien
caggatcaataaaccatggagaata

SEQ ID NO: 6047364 - DNA, 25 bp, Homo sapien
gaaataataaagtataatttacaga

SEQ ID NO: 6047365 - DNA, 25 bp, Homo sapien
gtttttggatatggaaagctccaaa

SEQ ID NO: 6047366 - DNA, 25 bp, Homo sapien
aagagtgtacctgctaatggaatac

SEQ ID NO: 6047367 - DNA, 25 bp, Homo sapien
tccgaatctaactaaatcatacggc

SEQ ID NO: 6047368 - DNA, 25 bp, Homo sapien
cggcacaggagtacaggatatattt

SEQ ID NO: 6047369 - DNA, 25 bp, Homo sapien
ctccaaaattccatcacctataagg

SEQ ID NO: 6047370 - DNA, 25 bp, Homo sapien
ttcgccatcgaaaaagaccacaaca

SEQ ID NO: 6047371 - DNA, 25 bp, Homo sapien
ggaggtagaaatacaaacatcgcta

SEQ ID NO: 6047372 - DNA, 25 bp, Homo sapien
gaaaaattgaacagattacctgtaa

SEQ ID NO: 6047373 - DNA, 25 bp, Homo sapien
aacaataagaagtttttggatatgg

SEQ ID NO: 6047374 - DNA, 25 bp, Homo sapien
ttagtcaatggggaaatgtataaac

SEQ ID NO: 6047375 - DNA, 25 bp, Homo sapien
ttcgccgcagcaaagaaacccgaat

SEQ ID NO: 6047376 - DNA, 25 bp, Homo sapien
ctgaaagtaatggagaaggaagaaa

SEQ ID NO: 6047377 - DNA, 25 bp, Homo sapien
taaatcatacggctattttcatgat

SEQ ID NO: 6047378 - DNA, 25 bp, Homo sapien
atcccattcgccgcagcaaagaaac

SEQ ID NO: 6047379 - DNA, 25 bp, Homo sapien
atcacctataaggaaagcgacttct

SEQ ID NO: 6047380 - DNA, 25 bp, Homo sapien
ggaaagctccaaaattccatcacct

SEQ ID NO: 6047381 - DNA, 25 bp, Homo sapien
atcgctaaatcatccgaatctaact

SEQ ID NO: 6047382 - DNA, 25 bp, Homo sapien
gaccacaacaagaccaaatacgtcc

SEQ ID NO: 6047383 - DNA, 25 bp, Homo sapien
atgatacacgaaaataagaagctac

SEQ ID NO: 6047384 - DNA, 25 bp, Homo sapien
cgctaattcgccatcgaaaaagacc

SEQ ID NO: 6047385 - DNA, 25 bp, Homo sapien
cagaaacaattcagaagggaggtag

SEQ ID NO: 6047386 - DNA, 25 bp, Homo sapien
aatttacagaaacaattcagaaggg

SEQ ID NO: 6047387 - DNA, 25 bp, Homo sapien
tatatttgcgcactgaaagtaatgg

SEQ ID NO: 6047388 - DNA, 25 bp, Homo sapien
tccaaaatgatacacgaaaataaga

SEQ ID NO: 6047389 - DNA, 25 bp, Homo sapien
gaatacttagtcaatggggaaatgt

SEQ ID NO: 6047390 - DNA, 25 bp, Homo sapien
ctattgaggttacacggacccttca

SEQ ID NO: 6047391 - DNA, 25 bp, Homo sapien
aattccatcacctataaggaaagcg

SEQ ID NO: 6047392 - DNA, 25 bp, Homo sapien
ctaaacgctaattcgccatcgaaaa

SEQ ID NO: 6047393 - DNA, 25 bp, Homo sapien
aaatcatccgaatctaactaaatca

SEQ ID NO: 6047394 - DNA, 25 bp, Homo sapien
aatggggaaatgtataaactattga

SEQ ID NO: 6047395 - DNA, 25 bp, Homo sapien
acttcttccaaaatgatacacgaaa

SEQ ID NO: 6047396 - DNA, 25 bp, Homo sapien
aggagtacaggatatatttgcgcac

SEQ ID NO: 6047397 - DNA, 25 bp, Homo sapien
tacgtccaggatcaataaaccatgg

SEQ ID NO: 6047398 - DNA, 25 bp, Homo sapien
cacctgtaagagaaaaattgaacag

SEQ ID NO: 6047399 - DNA, 25 bp, Homo sapien
gtaatggagaaggaagaaataataa

SEQ ID NO: 6047400 - DNA, 25 bp, Homo sapien
gaaatgtataaactattgaggttac

SEQ ID NO: 6047401 - DNA, 25 bp, Homo sapien
cacgaaaataagaagctacctaaat

SEQ ID NO: 6047402 - DNA, 25 bp, Homo sapien
cagaagggaggtagaaatacaaaca

SEQ ID NO: 6047403 - DNA, 25 bp, Homo sapien
ctattttcatgatgaaaaaagagtg

SEQ ID NO: 6047404 - DNA, 25 bp, Homo sapien
cgaattcaaaaataccttcacctgt

SEQ ID NO: 6047405 - DNA, 25 bp, Homo sapien
aaatttaaatccctatcactcgatg

SEQ ID NO: 6047406 - DNA, 25 bp, Homo sapien
gctacctaaatttaaatccctatca

SEQ ID NO: 6047407 - DNA, 25 bp, Homo sapien
agattacctgtaaacaataagaagt

SEQ ID NO: 6047408 - DNA, 25 bp, Homo sapien
caattcagaagggaggtagaaatac

SEQ ID NO: 6047409 - DNA, 25 bp, Homo sapien
taagaagtttttggatatggaaagc

SEQ ID NO: 6047410 - DNA, 25 bp, Homo sapien
agaaatacaaacatcgctaaatcat

SEQ ID NO: 6047411 - DNA, 25 bp, Homo sapien
gtacctgctaatggaatacttagtc

SEQ ID NO: 6047412 - DNA, 25 bp, Homo sapien
acaggatatatttgcgcactgaaag

SEQ ID NO: 6047413 - DNA, 25 bp, Homo sapien
taataaagtataatttacagaaaca

SEQ ID NO: 6047414 - DNA, 25 bp, Homo sapien
tttagcatcagattatatttatcaa

SEQ ID NO: 6047415 - DNA, 25 bp, Homo sapien
tctaactaaatcatacggctatttt

SEQ ID NO: 6047416 - DNA, 25 bp, Homo sapien
ttgaacagattacctgtaaacaata

SEQ ID NO: 6047417 - DNA, 25 bp, Homo sapien
tgaggttacacggacccttcaacga

SEQ ID NO: 6047418 - DNA, 25 bp, Homo sapien
cctatcactcgatgactttgaactg

SEQ ID NO: 6047419 - DNA, 25 bp, Homo sapien
gagaatatcccattcgccgcagcaa

SEQ ID NO: 6047420 - DNA, 25 bp, Homo sapien
tcgaaaaagaccacaacaagaccaa

SEQ ID NO: 6047421 - DNA, 25 bp, Homo sapien
taagagaaaaattgaacagattacc

SEQ ID NO: 6047422 - DNA, 25 bp, Homo sapien
tgactttgaactggggaagaaatta

SEQ ID NO: 6047423 - DNA, 25 bp, Homo sapien
gcagcaaagaaacccgaattcaaaa

SEQ ID NO: 6047424 - DNA, 25 bp, Homo sapien
gagaaggaagaaataataaagtata

SEQ ID NO: 6047425 - DNA, 25 bp, Homo sapien
tataaactattgaggttacacggac

SEQ ID NO: 6047426 - DNA, 25 bp, Homo sapien
taaatccctatcactcgatgacttt

SEQ ID NO: 6047427 - DNA, 25 bp, Homo sapien
tgaaaaaagagtgtacctgctaatg

SEQ ID NO: 6047428 - DNA, 25 bp, Homo sapien
tcatgatgaaaaaagagtgtacctg

SEQ ID NO: 6047429 - DNA, 25 bp, Homo sapien
aaagcgacttcttccaaaatgatac

SEQ ID NO: 6047430 - DNA, 25 bp, Homo sapien
accatggagaatatcccattcgccg

SEQ ID NO: 6047431 - DNA, 25 bp, Homo sapien
cgatattttagcatcagattatatt

SEQ ID NO: 6047432 - DNA, 25 bp, Homo sapien
tgcgcactgaaagtaatggagaagg

SEQ ID NO: 6047433 - DNA, 25 bp, Homo sapien
aacaagaccaaatacgtccaggatc

SEQ ID NO: 6047434 - DNA, 25 bp, Homo sapien
caataaaccatggagaatatcccat

SEQ ID NO: 6047435 - DNA, 25 bp, Homo sapien
gtttattgcgttcggcacaggagta

SEQ ID NO: 6047436 - DNA, 25 bp, Homo sapien
acaaacatcgctaaatcatccgaat

SEQ ID NO: 6047437 - DNA, 25 bp, Homo sapien
caaaaataccttcacctgtaagaga

SEQ ID NO: 6047438 - DNA, 25 bp, Homo sapien
catacggctattttcatgatgaaaa

SEQ ID NO: 6047439 - DNA, 25 bp, Homo sapien
gctaatggaatacttagtcaatggg

SEQ ID NO: 6047440 - DNA, 25 bp, Homo sapien
tataaggaaagcgacttcttccaaa

SEQ ID NO: 6047441 - DNA, 25 bp, Homo sapien
cggacccttcaacgatattttagca

SEQ ID NO: 6047442 - DNA, 25 bp, Homo sapien
ggtaaagtttattgcgttcggcaca

SEQ ID NO: 6047443 - DNA, 25 bp, Homo sapien
cttcaacgatattttagcatcagat

SEQ ID NO: 6047444 - DNA, 25 bp, Homo sapien
agtataatttacagaaacaattcag

SEQ ID NO: 6047445 - DNA, 25 bp, Homo sapien
ttaacttaatgacattattgaaccc

SEQ ID NO: 6047446 - DNA, 25 bp, Homo sapien
attagcaggtacactcttttttcat

SEQ ID NO: 6047447 - DNA, 25 bp, Homo sapien
agagcccatgcatctatagtgtgat

SEQ ID NO: 6047448 - DNA, 25 bp, Homo sapien
tagtagtttaagtattaaatcttgc

SEQ ID NO: 6047449 - DNA, 25 bp, Homo sapien
tgtagtatctttcatttcttcttcg

SEQ ID NO: 6047450 - DNA, 25 bp, Homo sapien
tgaaccctattagtatattttcagg

SEQ ID NO: 6047451 - DNA, 25 bp, Homo sapien
atagtttatacatttccccattgac

SEQ ID NO: 6047452 - DNA, 25 bp, Homo sapien
cctcaatagtttatacatttcccca

SEQ ID NO: 6047453 - DNA, 25 bp, Homo sapien
tctttttatgcatataatctagggc

SEQ ID NO: 6047454 - DNA, 25 bp, Homo sapien
gataaatataatctgatgctaaaat

SEQ ID NO: 6047455 - DNA, 25 bp, Homo sapien
cagttttccttctattttctggcgg

SEQ ID NO: 6047456 - DNA, 25 bp, Homo sapien
atttccccattgactaagtattcca

SEQ ID NO: 6047457 - DNA, 25 bp, Homo sapien
cccttgactccaccatttctggaga

SEQ ID NO: 6047458 - DNA, 25 bp, Homo sapien
taatatctctatgaataatattctt

SEQ ID NO: 6047459 - DNA, 25 bp, Homo sapien
ggcggatttattatactccatccga

SEQ ID NO: 6047460 - DNA, 25 bp, Homo sapien
gtccgtgtaacctcaatagtttata

SEQ ID NO: 6047461 - DNA, 25 bp, Homo sapien
tttattatactccatccgaagtccg

SEQ ID NO: 6047462 - DNA, 25 bp, Homo sapien
tcttcgaacggaggggcaccggtca

SEQ ID NO: 6047463 - DNA, 25 bp, Homo sapien
catgcatctatagtgtgatcatatt

SEQ ID NO: 6047464 - DNA, 25 bp, Homo sapien
ttcaaacgccaggacgccaagagcc

SEQ ID NO: 6047465 - DNA, 25 bp, Homo sapien
ttttcatcatgaaaatagccgtatg

SEQ ID NO: 6047466 - DNA, 25 bp, Homo sapien
tcatattcccttgactccaccattt

SEQ ID NO: 6047467 - DNA, 25 bp, Homo sapien
gtattaaatcttgcgcatcctgaga

SEQ ID NO: 6047468 - DNA, 25 bp, Homo sapien
tactgggcattttgatatccagtgc

SEQ ID NO: 6047469 - DNA, 25 bp, Homo sapien
catttcttcttcgaacggaggggca

SEQ ID NO: 6047470 - DNA, 25 bp, Homo sapien
ccatttctggagaaaggtagtcaat

SEQ ID NO: 6047471 - DNA, 25 bp, Homo sapien
gtgtaacctcaatagtttatacatt

SEQ ID NO: 6047472 - DNA, 25 bp, Homo sapien
gtctccaaggcgcattctatctttg

SEQ ID NO: 6047473 - DNA, 25 bp, Homo sapien
ctatgaataatattctttttatgca

SEQ ID NO: 6047474 - DNA, 25 bp, Homo sapien
tatgcatataatctagggcattggc

SEQ ID NO: 6047475 - DNA, 25 bp, Homo sapien
cagtagttcaaacgccaggacgcca

SEQ ID NO: 6047476 - DNA, 25 bp, Homo sapien
agtcaattgtcccacagacagtttt

SEQ ID NO: 6047477 - DNA, 25 bp, Homo sapien
ttgtcccacagacagttttccttct

SEQ ID NO: 6047478 - DNA, 25 bp, Homo sapien
ctagggcattggcaatttgataaat

SEQ ID NO: 6047479 - DNA, 25 bp, Homo sapien
tattccattagcaggtacactcttt

SEQ ID NO: 6047480 - DNA, 25 bp, Homo sapien
caatttgataaatataatctgatgc

SEQ ID NO: 6047481 - DNA, 25 bp, Homo sapien
ctgagaaatgttactgggcattttg

SEQ ID NO: 6047482 - DNA, 25 bp, Homo sapien
tattttcaggtttaatatctctatg

SEQ ID NO: 6047483 - DNA, 25 bp, Homo sapien
ccaaggatgcatttttacgtctcca

SEQ ID NO: 6047484 - DNA, 25 bp, Homo sapien
tatacatttccccattgactaagta

SEQ ID NO: 6047485 - DNA, 25 bp, Homo sapien
ccagtgctgctatccttttatatgt

SEQ ID NO: 6047486 - DNA, 25 bp, Homo sapien
ttagtatattttcaggtttaatatc

SEQ ID NO: 6047487 - DNA, 25 bp, Homo sapien
caggtttaatatctctatgaataat

SEQ ID NO: 6047488 - DNA, 25 bp, Homo sapien
taatgacattattgaaccctattag

SEQ ID NO: 6047489 - DNA, 25 bp, Homo sapien
tgaagggtccgtgtaacctcaatag

SEQ ID NO: 6047490 - DNA, 25 bp, Homo sapien
cattggcaatttgataaatataatc

SEQ ID NO: 6047491 - DNA, 25 bp, Homo sapien
agtccgttaacttaatgacattatt

SEQ ID NO: 6047492 - DNA, 25 bp, Homo sapien
cattctatctttggggtcgtatttt

SEQ ID NO: 6047493 - DNA, 25 bp, Homo sapien
cattattgaaccctattagtatatt

SEQ ID NO: 6047494 - DNA, 25 bp, Homo sapien
ctgctatccttttatatgtagtatc

SEQ ID NO: 6047495 - DNA, 25 bp, Homo sapien
ctaaaatatcgttgaagggtccgtg

SEQ ID NO: 6047496 - DNA, 25 bp, Homo sapien
aaatagccgtatgatttagttagat

SEQ ID NO: 6047497 - DNA, 25 bp, Homo sapien
accggtcagtagttcaaacgccagg

SEQ ID NO: 6047498 - DNA, 25 bp, Homo sapien
cgaacggaggggcaccggtcagtag

SEQ ID NO: 6047499 - DNA, 25 bp, Homo sapien
taatattctttttatgcatataatc

SEQ ID NO: 6047500 - DNA, 25 bp, Homo sapien
gtttcttagtatccaaggatgcatt

SEQ ID NO: 6047501 - DNA, 25 bp, Homo sapien
ttttctggcggatttattatactcc

SEQ ID NO: 6047502 - DNA, 25 bp, Homo sapien
gtgtgatcatattcccttgactcca

SEQ ID NO: 6047503 - DNA, 25 bp, Homo sapien
actcttttttcatcatgaaaatagc

SEQ ID NO: 6047504 - DNA, 25 bp, Homo sapien
cgcatcctgagaaatgttactgggc

SEQ ID NO: 6047505 - DNA, 25 bp, Homo sapien
tagtatccaaggatgcatttttacg

SEQ ID NO: 6047506 - DNA, 25 bp, Homo sapien
actccaccatttctggagaaaggta

SEQ ID NO: 6047507 - DNA, 25 bp, Homo sapien
cacagacagttttccttctattttc

SEQ ID NO: 6047508 - DNA, 25 bp, Homo sapien
acgccaagagcccatgcatctatag

SEQ ID NO: 6047509 - DNA, 25 bp, Homo sapien
tcatgaaaatagccgtatgatttag

SEQ ID NO: 6047510 - DNA, 25 bp, Homo sapien
gcattttgatatccagtgctgctat

SEQ ID NO: 6047511 - DNA, 25 bp, Homo sapien
aaggcgcattctatctttggggtcg

SEQ ID NO: 6047512 - DNA, 25 bp, Homo sapien
ccttctattttctggcggatttatt

SEQ ID NO: 6047513 - DNA, 25 bp, Homo sapien
gatttagttagattcggatgattta

SEQ ID NO: 6047514 - DNA, 25 bp, Homo sapien
aaaggtagtcaattgtcccacagac

SEQ ID NO: 6047515 - DNA, 25 bp, Homo sapien
atctttcatttcttcttcgaacgga

SEQ ID NO: 6047516 - DNA, 25 bp, Homo sapien
atgcatttttacgtctccaaggcgc

SEQ ID NO: 6047517 - DNA, 25 bp, Homo sapien
ctggagaaaggtagtcaattgtccc

SEQ ID NO: 6047518 - DNA, 25 bp, Homo sapien
ttttacgtctccaaggcgcattcta

SEQ ID NO: 6047519 - DNA, 25 bp, Homo sapien
ggaggggcaccggtcagtagttcaa

SEQ ID NO: 6047520 - DNA, 25 bp, Homo sapien
ccgtatgatttagttagattcggat

SEQ ID NO: 6047521 - DNA, 25 bp, Homo sapien
actaagtattccattagcaggtaca

SEQ ID NO: 6047522 - DNA, 25 bp, Homo sapien
ctgatgctaaaatatcgttgaaggg

SEQ ID NO: 6047523 - DNA, 25 bp, Homo sapien
atcttgcgcatcctgagaaatgtta

SEQ ID NO: 6047524 - DNA, 25 bp, Homo sapien
tataatctagggcattggcaatttg

SEQ ID NO: 6047525 - DNA, 25 bp, Homo sapien
tataatctgatgctaaaatatcgtt

SEQ ID NO: 6047526 - DNA, 25 bp, Homo sapien
tatatgtagtatctttcatttcttc

SEQ ID NO: 6047527 - DNA, 25 bp, Homo sapien
atactccatccgaagtccgttaact

SEQ ID NO: 6047528 - DNA, 25 bp, Homo sapien
gtttaagtattaaatcttgcgcatc

SEQ ID NO: 6047529 - DNA, 25 bp, Homo sapien
tgatatccagtgctgctatcctttt

SEQ ID NO: 6047530 - DNA, 25 bp, Homo sapien
tccttttatatgtagtatctttcat

SEQ ID NO: 6047531 - DNA, 25 bp, Homo sapien
gccaggacgccaagagcccatgcat

SEQ ID NO: 6047532 - DNA, 25 bp, Homo sapien
tcgttgaagggtccgtgtaacctca

SEQ ID NO: 6047533 - DNA, 25 bp, Homo sapien
aggtacactcttttttcatcatgaa

SEQ ID NO: 6047534 - DNA, 25 bp, Homo sapien
aatgttactgggcattttgatatcc

SEQ ID NO: 6047535 - DNA, 25 bp, Homo sapien
tccgaagtccgttaacttaatgaca

SEQ ID NO: 6047536 - DNA, 25 bp, Homo sapien
tctatagtgtgatcatattcccttg

SEQ ID NO: 6047537 - DNA, 25 bp, Homo sapien
ccattgactaagtattccattagca

SEQ ID NO: 6047538 - DNA, 25 bp, Homo sapien
gggcaccggtcagtagttcaaacgc

SEQ ID NO: 6047539 - DNA, 25 bp, Homo sapien
actccaaacaagttcaaccacagac

SEQ ID NO: 6047540 - DNA, 25 bp, Homo sapien
actgtggtgttggtgccggtaaggt

SEQ ID NO: 6047541 - DNA, 25 bp, Homo sapien
ctcataaggatgaagaaatctggtt

SEQ ID NO: 6047542 - DNA, 25 bp, Homo sapien
acactctatttgacatgtatgacga

SEQ ID NO: 6047543 - DNA, 25 bp, Homo sapien
tgacaacattgttgtcttggccgca

SEQ ID NO: 6047544 - DNA, 25 bp, Homo sapien
aagaatacactctatttgacatgta

SEQ ID NO: 6047545 - DNA, 25 bp, Homo sapien
agacatgatcgaagctcactacaga

SEQ ID NO: 6047546 - DNA, 25 bp, Homo sapien
tgcttactacccagatcccttcagg

SEQ ID NO: 6047547 - DNA, 25 bp, Homo sapien
ggtttatgccagagacatgatcgaa

SEQ ID NO: 6047548 - DNA, 25 bp, Homo sapien
cccgttgcttactacccagatccct

SEQ ID NO: 6047549 - DNA, 25 bp, Homo sapien
gttcaaccacagacacgaagctgcc

SEQ ID NO: 6047550 - DNA, 25 bp, Homo sapien
tttacaaaaatatctagaactggac

SEQ ID NO: 6047551 - DNA, 25 bp, Homo sapien
ccaaccaagcgccaggccacgactc

SEQ ID NO: 6047552 - DNA, 25 bp, Homo sapien
gccaaagggtgggtacccagctcca

SEQ ID NO: 6047553 - DNA, 25 bp, Homo sapien
ccaaagaggtagaataattgccgaa

SEQ ID NO: 6047554 - DNA, 25 bp, Homo sapien
tggaacttcgacggttcttctacca

SEQ ID NO: 6047555 - DNA, 25 bp, Homo sapien
agctcactacagagcttgtttgtat

SEQ ID NO: 6047556 - DNA, 25 bp, Homo sapien
gagaggtgacaacattgttgtcttg

SEQ ID NO: 6047557 - DNA, 25 bp, Homo sapien
atgccatctcaatgggaattccaag

SEQ ID NO: 6047558 - DNA, 25 bp, Homo sapien
ctacccagatcccttcaggagaggt

SEQ ID NO: 6047559 - DNA, 25 bp, Homo sapien
aggtagaataattgccgaatacgtt

SEQ ID NO: 6047560 - DNA, 25 bp, Homo sapien
gacggttcttctaccaaccaagcgc

SEQ ID NO: 6047561 - DNA, 25 bp, Homo sapien
tctagaactggaccaaagaggtaga

SEQ ID NO: 6047562 - DNA, 25 bp, Homo sapien
gagaatcacatccattgaccaattg

SEQ ID NO: 6047563 - DNA, 25 bp, Homo sapien
gatcgaagctcactacagagcttgt

SEQ ID NO: 6047564 - DNA, 25 bp, Homo sapien
gccgaatacgtttggatcgatggta

SEQ ID NO: 6047565 - DNA, 25 bp, Homo sapien
taacgctgaagtcatgccatctcaa

SEQ ID NO: 6047566 - DNA, 25 bp, Homo sapien
attccaagtcggtccatgtaccggt

SEQ ID NO: 6047567 - DNA, 25 bp, Homo sapien
atgacgatgtttacggatggccaaa

SEQ ID NO: 6047568 - DNA, 25 bp, Homo sapien
tctgacatctatttgaaacccgttg

SEQ ID NO: 6047569 - DNA, 25 bp, Homo sapien
agctgccaagctatttgctgctcat

SEQ ID NO: 6047570 - DNA, 25 bp, Homo sapien
aggtagaactttgaagaagagaatc

SEQ ID NO: 6047571 - DNA, 25 bp, Homo sapien
atgttacaacaatgacggtactcca

SEQ ID NO: 6047572 - DNA, 25 bp, Homo sapien
gatggtactggtaacttacgttcca

SEQ ID NO: 6047573 - DNA, 25 bp, Homo sapien
agcttgtttgtatgccggattagaa

SEQ ID NO: 6047574 - DNA, 25 bp, Homo sapien
atctatttgaaacccgttgcttact

SEQ ID NO: 6047575 - DNA, 25 bp, Homo sapien
aatttctggtattaacgctgaagtc

SEQ ID NO: 6047576 - DNA, 25 bp, Homo sapien
gaagtcatgccatctcaatgggaat

SEQ ID NO: 6047577 - DNA, 25 bp, Homo sapien
gatggccaaagggtgggtacccagc

SEQ ID NO: 6047578 - DNA, 25 bp, Homo sapien
tgacggtactccaaacaagttcaac

SEQ ID NO: 6047579 - DNA, 25 bp, Homo sapien
tggtattaacgctgaagtcatgcca

SEQ ID NO: 6047580 - DNA, 25 bp, Homo sapien
aacaagttcaaccacagacacgaag

SEQ ID NO: 6047581 - DNA, 25 bp, Homo sapien
ccagaatggaacttcgacggttctt

SEQ ID NO: 6047582 - DNA, 25 bp, Homo sapien
ggccgcatgttacaacaatgacggt

SEQ ID NO: 6047583 - DNA, 25 bp, Homo sapien
ccacagacacgaagctgccaagcta

SEQ ID NO: 6047584 - DNA, 25 bp, Homo sapien
aactttgaagaagagaatcacatcc

SEQ ID NO: 6047585 - DNA, 25 bp, Homo sapien
ccaggccacgactctgacatctatt

SEQ ID NO: 6047586 - DNA, 25 bp, Homo sapien
ggtgggtacccagctccacaaggtc

SEQ ID NO: 6047587 - DNA, 25 bp, Homo sapien
ctccacaaggtccttactactgtgg

SEQ ID NO: 6047588 - DNA, 25 bp, Homo sapien
cattgttgtcttggccgcatgttac

SEQ ID NO: 6047589 - DNA, 25 bp, Homo sapien
acacgaagctgccaagctatttgct

SEQ ID NO: 6047590 - DNA, 25 bp, Homo sapien
tgccagagacatgatcgaagctcac

SEQ ID NO: 6047591 - DNA, 25 bp, Homo sapien
acatgtatgacgatgtttacggatg

SEQ ID NO: 6047592 - DNA, 25 bp, Homo sapien
tgaaacccgttgcttactacccaga

SEQ ID NO: 6047593 - DNA, 25 bp, Homo sapien
aagaaatctggtttggtctagaaca

SEQ ID NO: 6047594 - DNA, 25 bp, Homo sapien
tacgtttggatcgatggtactggta

SEQ ID NO: 6047595 - DNA, 25 bp, Homo sapien
cattgaccaattgccagaatggaac

SEQ ID NO: 6047596 - DNA, 25 bp, Homo sapien
cacgactctgacatctatttgaaac

SEQ ID NO: 6047597 - DNA, 25 bp, Homo sapien
tagaacaagaatacactctatttga

SEQ ID NO: 6047598 - DNA, 25 bp, Homo sapien
tctcaatgggaattccaagtcggtc

SEQ ID NO: 6047599 - DNA, 25 bp, Homo sapien
aaaatatctagaactggaccaaaga

SEQ ID NO: 6047600 - DNA, 25 bp, Homo sapien
tatttgacatgtatgacgatgttta

SEQ ID NO: 6047601 - DNA, 25 bp, Homo sapien
agatcccttcaggagaggtgacaac

SEQ ID NO: 6047602 - DNA, 25 bp, Homo sapien
tggatcgatggtactggtaacttac

SEQ ID NO: 6047603 - DNA, 25 bp, Homo sapien
cttcaggagaggtgacaacattgtt

SEQ ID NO: 6047604 - DNA, 25 bp, Homo sapien
tgggaattccaagtcggtccatgta

SEQ ID NO: 6047605 - DNA, 25 bp, Homo sapien
cacatccattgaccaattgccagaa

SEQ ID NO: 6047606 - DNA, 25 bp, Homo sapien
caacaatgacggtactccaaacaag

SEQ ID NO: 6047607 - DNA, 25 bp, Homo sapien
actggaccaaagaggtagaataatt

SEQ ID NO: 6047608 - DNA, 25 bp, Homo sapien
caattgccagaatggaacttcgacg

SEQ ID NO: 6047609 - DNA, 25 bp, Homo sapien
tccaaaggtagaactttgaagaaga

SEQ ID NO: 6047610 - DNA, 25 bp, Homo sapien
attagaaatttctggtattaacgct

SEQ ID NO: 6047611 - DNA, 25 bp, Homo sapien
tgtcttggccgcatgttacaacaat

SEQ ID NO: 6047612 - DNA, 25 bp, Homo sapien
atgtttacggatggccaaagggtgg

SEQ ID NO: 6047613 - DNA, 25 bp, Homo sapien
acccagctccacaaggtccttacta

SEQ ID NO: 6047614 - DNA, 25 bp, Homo sapien
ttggtctagaacaagaatacactct

SEQ ID NO: 6047615 - DNA, 25 bp, Homo sapien
cttctaccaaccaagcgccaggcca

SEQ ID NO: 6047616 - DNA, 25 bp, Homo sapien
gaagaagagaatcacatccattgac

SEQ ID NO: 6047617 - DNA, 25 bp, Homo sapien
aaggtccttactactgtggtgttgg

SEQ ID NO: 6047618 - DNA, 25 bp, Homo sapien
ctacagagcttgtttgtatgccgga

SEQ ID NO: 6047619 - DNA, 25 bp, Homo sapien
aggatgaagaaatctggtttggtct

SEQ ID NO: 6047620 - DNA, 25 bp, Homo sapien
gtgttggtgccggtaaggtttatgc

SEQ ID NO: 6047621 - DNA, 25 bp, Homo sapien
tttgtatgccggattagaaatttct

SEQ ID NO: 6047622 - DNA, 25 bp, Homo sapien
ataattgccgaatacgtttggatcg

SEQ ID NO: 6047623 - DNA, 25 bp, Homo sapien
caagctatttgctgctcataaggat

SEQ ID NO: 6047624 - DNA, 25 bp, Homo sapien
aagcgccaggccacgactctgacat

SEQ ID NO: 6047625 - DNA, 25 bp, Homo sapien
tggtgccggtaaggtttatgccaga

SEQ ID NO: 6047626 - DNA, 25 bp, Homo sapien
cttactactgtggtgttggtgccgg

SEQ ID NO: 6047627 - DNA, 25 bp, Homo sapien
cggtaaggtttatgccagagacatg

SEQ ID NO: 6047628 - DNA, 25 bp, Homo sapien
tgccggattagaaatttctggtatt

SEQ ID NO: 6047629 - DNA, 25 bp, Homo sapien
tctggtttggtctagaacaagaata

SEQ ID NO: 6047630 - DNA, 25 bp, Homo sapien
agtcggtccatgtaccggtattgac

SEQ ID NO: 6047631 - DNA, 25 bp, Homo sapien
tcacacatgatacctgtaaccaagt

SEQ ID NO: 6047632 - DNA, 25 bp, Homo sapien
ttcatgtctaccagttaatctcatg

SEQ ID NO: 6047633 - DNA, 25 bp, Homo sapien
gacttcagcgttaataccagaaatt

SEQ ID NO: 6047634 - DNA, 25 bp, Homo sapien
caacttaatgtgttcagcgtgtctc

SEQ ID NO: 6047635 - DNA, 25 bp, Homo sapien
gaaaaggcagtcatggaagcggttt

SEQ ID NO: 6047636 - DNA, 25 bp, Homo sapien
tctggcataaaccttaccggcacca

SEQ ID NO: 6047637 - DNA, 25 bp, Homo sapien
accgtacaacttaatgtgttcagcg

SEQ ID NO: 6047638 - DNA, 25 bp, Homo sapien
tccataattggtcacccatgtcaat

SEQ ID NO: 6047639 - DNA, 25 bp, Homo sapien
acctggttgtctcatttccttggtg

SEQ ID NO: 6047640 - DNA, 25 bp, Homo sapien
ttgtctcatttccttggtggaaacg

SEQ ID NO: 6047641 - DNA, 25 bp, Homo sapien
gcggtttcatgtctaccagttaatc

SEQ ID NO: 6047642 - DNA, 25 bp, Homo sapien
agttaatctcatgtcgttatcgcta

SEQ ID NO: 6047643 - DNA, 25 bp, Homo sapien
gtatttcgtaccacctggttgtctc

SEQ ID NO: 6047644 - DNA, 25 bp, Homo sapien
atgatacctgtaaccaagtatgggt

SEQ ID NO: 6047645 - DNA, 25 bp, Homo sapien
gtgagcttcgatcatgtctctggca

SEQ ID NO: 6047646 - DNA, 25 bp, Homo sapien
gtcgttatcgctaccgtacaactta

SEQ ID NO: 6047647 - DNA, 25 bp, Homo sapien
tgtcaataccggtacatggaccgac

SEQ ID NO: 6047648 - DNA, 25 bp, Homo sapien
aatgtgttcagcgtgtctcttggat

SEQ ID NO: 6047649 - DNA, 25 bp, Homo sapien
cgacaccagaagaaaaggcagtcat

SEQ ID NO: 6047650 - DNA, 25 bp, Homo sapien
ttcgatcatgtctctggcataaacc

SEQ ID NO: 6047651 - DNA, 25 bp, Homo sapien
cctgtaaccaagtatgggtcgatgt

SEQ ID NO: 6047652 - DNA, 25 bp, Homo sapien
ggcgacggatcttgggattctaatt

SEQ ID NO: 6047653 - DNA, 25 bp, Homo sapien
ctgccactctgtgcaaaaagtatct

SEQ ID NO: 6047654 - DNA, 25 bp, Homo sapien
acaagctctgtagtgagcttcgatc

SEQ ID NO: 6047655 - DNA, 25 bp, Homo sapien
ttcagcgtgtctcttggataacttc

SEQ ID NO: 6047656 - DNA, 25 bp, Homo sapien
catgtctctggcataaaccttaccg

SEQ ID NO: 6047657 - DNA, 25 bp, Homo sapien
ggcttgttcgatgtatttcgtacca

SEQ ID NO: 6047658 - DNA, 25 bp, Homo sapien
cacccatgtcaataccggtacatgg

SEQ ID NO: 6047659 - DNA, 25 bp, Homo sapien
agaaatttctaatccggcatacaaa

SEQ ID NO: 6047660 - DNA, 25 bp, Homo sapien
ttggaagctggtctacggtcttcaa

SEQ ID NO: 6047661 - DNA, 25 bp, Homo sapien
ccagtcacccttcaatggctttgga

SEQ ID NO: 6047662 - DNA, 25 bp, Homo sapien
accgacttggaattcccattgagat

SEQ ID NO: 6047663 - DNA, 25 bp, Homo sapien
gcaaaaagtatctggccatccataa

SEQ ID NO: 6047664 - DNA, 25 bp, Homo sapien
attggtcacccatgtcaataccggt

SEQ ID NO: 6047665 - DNA, 25 bp, Homo sapien
atggaatgagatcttgataccaaac

SEQ ID NO: 6047666 - DNA, 25 bp, Homo sapien
accaagtatgggtcgatgttggaag

SEQ ID NO: 6047667 - DNA, 25 bp, Homo sapien
tgagctacctctgttggcgacacca

SEQ ID NO: 6047668 - DNA, 25 bp, Homo sapien
ggaaacgttagcgtgacaaccggca

SEQ ID NO: 6047669 - DNA, 25 bp, Homo sapien
aataccagaaatttctaatccggca

SEQ ID NO: 6047670 - DNA, 25 bp, Homo sapien
tcttgataccaaactcttctgccac

SEQ ID NO: 6047671 - DNA, 25 bp, Homo sapien
gcagtcatggaagcggtttcatgtc

SEQ ID NO: 6047672 - DNA, 25 bp, Homo sapien
ctcgatggcttgttcgatgtatttc

SEQ ID NO: 6047673 - DNA, 25 bp, Homo sapien
ttggaattcccattgagatggcatg

SEQ ID NO: 6047674 - DNA, 25 bp, Homo sapien
acagtttcacacatgatacctgtaa

SEQ ID NO: 6047675 - DNA, 25 bp, Homo sapien
cttggtggaaacgttagcgtgacaa

SEQ ID NO: 6047676 - DNA, 25 bp, Homo sapien
catttccttggtggaaacgttagcg

SEQ ID NO: 6047677 - DNA, 25 bp, Homo sapien
tcgatgttggaagctggtctacggt

SEQ ID NO: 6047678 - DNA, 25 bp, Homo sapien
tctaattgagctacctctgttggcg

SEQ ID NO: 6047679 - DNA, 25 bp, Homo sapien
tatgggtcgatgttggaagctggtc

SEQ ID NO: 6047680 - DNA, 25 bp, Homo sapien
actcttctgccactctgtgcaaaaa

SEQ ID NO: 6047681 - DNA, 25 bp, Homo sapien
acctctgttggcgacaccagaagaa

SEQ ID NO: 6047682 - DNA, 25 bp, Homo sapien
tgggattctaattgagctacctctg

SEQ ID NO: 6047683 - DNA, 25 bp, Homo sapien
tccggcatacaaacaagctctgtag

SEQ ID NO: 6047684 - DNA, 25 bp, Homo sapien
atggaagcggtttcatgtctaccag

SEQ ID NO: 6047685 - DNA, 25 bp, Homo sapien
ttgtcaatagcaccgcaaacagttt

SEQ ID NO: 6047686 - DNA, 25 bp, Homo sapien
taaccttccttggcgacggatcttg

SEQ ID NO: 6047687 - DNA, 25 bp, Homo sapien
ctctgtgcaaaaagtatctggccat

SEQ ID NO: 6047688 - DNA, 25 bp, Homo sapien
ctttggatggaatgagatcttgata

SEQ ID NO: 6047689 - DNA, 25 bp, Homo sapien
gtgacaaccggcaccgttccagtca

SEQ ID NO: 6047690 - DNA, 25 bp, Homo sapien
tctgtagtgagcttcgatcatgtct

SEQ ID NO: 6047691 - DNA, 25 bp, Homo sapien
catgtcagcattgtcaatagcaccg

SEQ ID NO: 6047692 - DNA, 25 bp, Homo sapien
taccggtacatggaccgacttggaa

SEQ ID NO: 6047693 - DNA, 25 bp, Homo sapien
agtatctggccatccataattggtc

SEQ ID NO: 6047694 - DNA, 25 bp, Homo sapien
atagcaccgcaaacagtttcacaca

SEQ ID NO: 6047695 - DNA, 25 bp, Homo sapien
tctcatgtcgttatcgctaccgtac

SEQ ID NO: 6047696 - DNA, 25 bp, Homo sapien
acccttcaatggctttggatggaat

SEQ ID NO: 6047697 - DNA, 25 bp, Homo sapien
gtgtctcttggataacttctcgatg

SEQ ID NO: 6047698 - DNA, 25 bp, Homo sapien
tggccatccataattggtcacccat

SEQ ID NO: 6047699 - DNA, 25 bp, Homo sapien
tgagatcttgataccaaactcttct

SEQ ID NO: 6047700 - DNA, 25 bp, Homo sapien
cgtaccacctggttgtctcatttcc

SEQ ID NO: 6047701 - DNA, 25 bp, Homo sapien
cagaagaaaaggcagtcatggaagc

SEQ ID NO: 6047702 - DNA, 25 bp, Homo sapien
tccttggcgacggatcttgggattc

SEQ ID NO: 6047703 - DNA, 25 bp, Homo sapien
agcgttaataccagaaatttctaat

SEQ ID NO: 6047704 - DNA, 25 bp, Homo sapien
tctaccagttaatctcatgtcgtta

SEQ ID NO: 6047705 - DNA, 25 bp, Homo sapien
ttgagatggcatgacttcagcgtta

SEQ ID NO: 6047706 - DNA, 25 bp, Homo sapien
tggcatgacttcagcgttaatacca

SEQ ID NO: 6047707 - DNA, 25 bp, Homo sapien
cttggataacttctcgatggcttgt

SEQ ID NO: 6047708 - DNA, 25 bp, Homo sapien
tcagcattgtcaatagcaccgcaaa

SEQ ID NO: 6047709 - DNA, 25 bp, Homo sapien
ggatcttgggattctaattgagcta

SEQ ID NO: 6047710 - DNA, 25 bp, Homo sapien
taacttctcgatggcttgttcgatg

SEQ ID NO: 6047711 - DNA, 25 bp, Homo sapien
caatggctttggatggaatgagatc

SEQ ID NO: 6047712 - DNA, 25 bp, Homo sapien
taccaaactcttctgccactctgtg

SEQ ID NO: 6047713 - DNA, 25 bp, Homo sapien
accgttccagtcacccttcaatggc

SEQ ID NO: 6047714 - DNA, 25 bp, Homo sapien
acatggaccgacttggaattcccat

SEQ ID NO: 6047715 - DNA, 25 bp, Homo sapien
tgttggcgacaccagaagaaaaggc

SEQ ID NO: 6047716 - DNA, 25 bp, Homo sapien
ttcgatgtatttcgtaccacctggt

SEQ ID NO: 6047717 - DNA, 25 bp, Homo sapien
gttagcgtgacaaccggcaccgttc

SEQ ID NO: 6047718 - DNA, 25 bp, Homo sapien
ttcccattgagatggcatgacttca

SEQ ID NO: 6047719 - DNA, 25 bp, Homo sapien
gctggtctacggtcttcaaagtaac

SEQ ID NO: 6047720 - DNA, 25 bp, Homo sapien
atacaaacaagctctgtagtgagct

SEQ ID NO: 6047721 - DNA, 25 bp, Homo sapien
ccgcaaacagtttcacacatgatac

SEQ ID NO: 6047722 - DNA, 25 bp, Homo sapien
ttctaatccggcatacaaacaagct

SEQ ID NO: 6047723 - DNA, 25 bp, Homo sapien
atcgctaccgtacaacttaatgtgt

SEQ ID NO: 6047724 - DNA, 25 bp, Homo sapien
tgttgaggatgtaaaaaaagtaatc

SEQ ID NO: 6047725 - DNA, 25 bp, Homo sapien
ttgcttttcttaaagaattatctcg

SEQ ID NO: 6047726 - DNA, 25 bp, Homo sapien
aaaggcacgccatctcgccatcctt

SEQ ID NO: 6047727 - DNA, 25 bp, Homo sapien
acgccatctcgccatccttgattag

SEQ ID NO: 6047728 - DNA, 25 bp, Homo sapien
atatgggtaaggtggtttaactctg

SEQ ID NO: 6047729 - DNA, 25 bp, Homo sapien
tatctgattcttcagtgaatcctga

SEQ ID NO: 6047730 - DNA, 25 bp, Homo sapien
atcctgatgtcattgaatatcttaa

SEQ ID NO: 6047731 - DNA, 25 bp, Homo sapien
tcactgaaggagataaacatgaact

SEQ ID NO: 6047732 - DNA, 25 bp, Homo sapien
gaaccaacgccatatcgattaagaa

SEQ ID NO: 6047733 - DNA, 25 bp, Homo sapien
ggctggaaaaaaccaagattgacag

SEQ ID NO: 6047734 - DNA, 25 bp, Homo sapien
atgaactagttggatacaaccagtg

SEQ ID NO: 6047735 - DNA, 25 bp, Homo sapien
atgggcgaagaatattttggtacgg

SEQ ID NO: 6047736 - DNA, 25 bp, Homo sapien
cggtgttgactaatgcctacgagtt

SEQ ID NO: 6047737 - DNA, 25 bp, Homo sapien
gcgtcacaaatcaagcatgtacgat

SEQ ID NO: 6047738 - DNA, 25 bp, Homo sapien
aaggaagaaaatcttcagattgatg

SEQ ID NO: 6047739 - DNA, 25 bp, Homo sapien
cttcagattgatgaggaatgggcga

SEQ ID NO: 6047740 - DNA, 25 bp, Homo sapien
aagcatgtacgatgatgaggatgag

SEQ ID NO: 6047741 - DNA, 25 bp, Homo sapien
cagtgaatcctgatgtcattgaata

SEQ ID NO: 6047742 - DNA, 25 bp, Homo sapien
taaggtggtttaactctgtgaaggc

SEQ ID NO: 6047743 - DNA, 25 bp, Homo sapien
cgaagatatgcccagcaaatgtact

SEQ ID NO: 6047744 - DNA, 25 bp, Homo sapien
aggcgacggtgttgactaatgccta

SEQ ID NO: 6047745 - DNA, 25 bp, Homo sapien
tgcctacgagtttaccggttatgag

SEQ ID NO: 6047746 - DNA, 25 bp, Homo sapien
tcagcattcctttcctgagaaggca

SEQ ID NO: 6047747 - DNA, 25 bp, Homo sapien
tgaggaatgggcgaagaatattttg

SEQ ID NO: 6047748 - DNA, 25 bp, Homo sapien
atgtcattgaatatcttaaaagtgt

SEQ ID NO: 6047749 - DNA, 25 bp, Homo sapien
caaatcaagcatgtacgatgatgag

SEQ ID NO: 6047750 - DNA, 25 bp, Homo sapien
gatacaaccagtggttccaatacct

SEQ ID NO: 6047751 - DNA, 25 bp, Homo sapien
gtggtttaactctgtgaaggcgacg

SEQ ID NO: 6047752 - DNA, 25 bp, Homo sapien
atcttaaaagtgttaggcaagaagc

SEQ ID NO: 6047753 - DNA, 25 bp, Homo sapien
gtgcatttgcactatctgattcttc

SEQ ID NO: 6047754 - DNA, 25 bp, Homo sapien
tgattaggcttcaaaggaatgtaga

SEQ ID NO: 6047755 - DNA, 25 bp, Homo sapien
ttaagaatcatatgaatctgcaaaa

SEQ ID NO: 6047756 - DNA, 25 bp, Homo sapien
tgcaaaagaggacgcgtcacaaatc

SEQ ID NO: 6047757 - DNA, 25 bp, Homo sapien
ttggtcaatctcgtgcatttgcact

SEQ ID NO: 6047758 - DNA, 25 bp, Homo sapien
catccttgattaggcttcaaaggaa

SEQ ID NO: 6047759 - DNA, 25 bp, Homo sapien
attcttcagtgaatcctgatgtcat

SEQ ID NO: 6047760 - DNA, 25 bp, Homo sapien
aagaagcactaagaaccaacgccat

SEQ ID NO: 6047761 - DNA, 25 bp, Homo sapien
gaagagaaggaagaaaatcttcaga

SEQ ID NO: 6047762 - DNA, 25 bp, Homo sapien
gaggacgcgtcacaaatcaagcatg

SEQ ID NO: 6047763 - DNA, 25 bp, Homo sapien
ccaagattgacagtgttgaggatgt

SEQ ID NO: 6047764 - DNA, 25 bp, Homo sapien
gaaaatcttcagattgatgaggaat

SEQ ID NO: 6047765 - DNA, 25 bp, Homo sapien
ttgcactatctgattcttcagtgaa

SEQ ID NO: 6047766 - DNA, 25 bp, Homo sapien
gatcttttattgcttttcttaaaga

SEQ ID NO: 6047767 - DNA, 25 bp, Homo sapien
ttgaatatcttaaaagtgttaggca

SEQ ID NO: 6047768 - DNA, 25 bp, Homo sapien
tcctgagaaggcagaagagaaggaa

SEQ ID NO: 6047769 - DNA, 25 bp, Homo sapien
ctgtgaaggcgacggtgttgactaa

SEQ ID NO: 6047770 - DNA, 25 bp, Homo sapien
aaagtgttaggcaagaagcactaag

SEQ ID NO: 6047771 - DNA, 25 bp, Homo sapien
atgtagaaatatgggtaaggtggtt

SEQ ID NO: 6047772 - DNA, 25 bp, Homo sapien
atcatatgaatctgcaaaagaggac

SEQ ID NO: 6047773 - DNA, 25 bp, Homo sapien
ccatctttggtcaatctcgtgcatt

SEQ ID NO: 6047774 - DNA, 25 bp, Homo sapien
tagttggatacaaccagtggttcca

SEQ ID NO: 6047775 - DNA, 25 bp, Homo sapien
aaattataagtgtcctaaatcagca

SEQ ID NO: 6047776 - DNA, 25 bp, Homo sapien
cctaaatcagcattcctttcctgag

SEQ ID NO: 6047777 - DNA, 25 bp, Homo sapien
ataaacatgaactagttggatacaa

SEQ ID NO: 6047778 - DNA, 25 bp, Homo sapien
ttatctcgaagatatgcccagcaaa

SEQ ID NO: 6047779 - DNA, 25 bp, Homo sapien
gaagaatattttggtacggctggaa

SEQ ID NO: 6047780 - DNA, 25 bp, Homo sapien
tgactaatgcctacgagtttaccgg

SEQ ID NO: 6047781 - DNA, 25 bp, Homo sapien
aggatgtaaaaaaagtaatcactga

SEQ ID NO: 6047782 - DNA, 25 bp, Homo sapien
tgatgaggatgagggggcccttaaa

SEQ ID NO: 6047783 - DNA, 25 bp, Homo sapien
tttcttaaagaattatctcgaagat

SEQ ID NO: 6047784 - DNA, 25 bp, Homo sapien
ttaggcaagaagcactaagaaccaa

SEQ ID NO: 6047785 - DNA, 25 bp, Homo sapien
aatctcgtgcatttgcactatctga

SEQ ID NO: 6047786 - DNA, 25 bp, Homo sapien
tatcgattaagaatcatatgaatct

SEQ ID NO: 6047787 - DNA, 25 bp, Homo sapien
acgccatatcgattaagaatcatat

SEQ ID NO: 6047788 - DNA, 25 bp, Homo sapien
aaaaaaccaagattgacagtgttga

SEQ ID NO: 6047789 - DNA, 25 bp, Homo sapien
taaaaaaagtaatcactgaaggaga

SEQ ID NO: 6047790 - DNA, 25 bp, Homo sapien
tatgaggacgaaacactggatcttt

SEQ ID NO: 6047791 - DNA, 25 bp, Homo sapien
tctcgccatccttgattaggcttca

SEQ ID NO: 6047792 - DNA, 25 bp, Homo sapien
ggcttcaaaggaatgtagaaatatg

SEQ ID NO: 6047793 - DNA, 25 bp, Homo sapien
tgaatctgcaaaagaggacgcgtca

SEQ ID NO: 6047794 - DNA, 25 bp, Homo sapien
accggttatgaggacgaaacactgg

SEQ ID NO: 6047795 - DNA, 25 bp, Homo sapien
aaggcagaagagaaggaagaaaatc

SEQ ID NO: 6047796 - DNA, 25 bp, Homo sapien
ttgacagtgttgaggatgtaaaaaa

SEQ ID NO: 6047797 - DNA, 25 bp, Homo sapien
gacgaaacactggatcttttattgc

SEQ ID NO: 6047798 - DNA, 25 bp, Homo sapien
cactaagaaccaacgccatatcgat

SEQ ID NO: 6047799 - DNA, 25 bp, Homo sapien
agcaaatgtactacagttgaaaaaa

SEQ ID NO: 6047800 - DNA, 25 bp, Homo sapien
tatgcccagcaaatgtactacagtt

SEQ ID NO: 6047801 - DNA, 25 bp, Homo sapien
taagtgtcctaaatcagcattcctt

SEQ ID NO: 6047802 - DNA, 25 bp, Homo sapien
cccttaaaaggcacgccatctcgcc

SEQ ID NO: 6047803 - DNA, 25 bp, Homo sapien
aaggagataaacatgaactagttgg

SEQ ID NO: 6047804 - DNA, 25 bp, Homo sapien
taactctgtgaaggcgacggtgttg

SEQ ID NO: 6047805 - DNA, 25 bp, Homo sapien
aaaggaatgtagaaatatgggtaag

SEQ ID NO: 6047806 - DNA, 25 bp, Homo sapien
ttcctttcctgagaaggcagaagag

SEQ ID NO: 6047807 - DNA, 25 bp, Homo sapien
cagttgaaaaaattataagtgtcct

SEQ ID NO: 6047808 - DNA, 25 bp, Homo sapien
acactggatcttttattgcttttct

SEQ ID NO: 6047809 - DNA, 25 bp, Homo sapien
tacgatgatgaggatgagggggccc

SEQ ID NO: 6047810 - DNA, 25 bp, Homo sapien
aaagaattatctcgaagatatgccc

SEQ ID NO: 6047811 - DNA, 25 bp, Homo sapien
tgtactacagttgaaaaaattataa

SEQ ID NO: 6047812 - DNA, 25 bp, Homo sapien
aagtaatcactgaaggagataaaca

SEQ ID NO: 6047813 - DNA, 25 bp, Homo sapien
attgatgaggaatgggcgaagaata

SEQ ID NO: 6047814 - DNA, 25 bp, Homo sapien
agttcaaggcatttctttccaagat

SEQ ID NO: 6047815 - DNA, 25 bp, Homo sapien
tggttgtatccaactagttcatgtt

SEQ ID NO: 6047816 - DNA, 25 bp, Homo sapien
caggaaaggaatgctgatttaggac

SEQ ID NO: 6047817 - DNA, 25 bp, Homo sapien
acatatacttgatcagaacccaaag

SEQ ID NO: 6047818 - DNA, 25 bp, Homo sapien
aagatgcttgtatattctgccgtga

SEQ ID NO: 6047819 - DNA, 25 bp, Homo sapien
actagttcatgtttatctccttcag

SEQ ID NO: 6047820 - DNA, 25 bp, Homo sapien
aggacacttataattttttcaactg

SEQ ID NO: 6047821 - DNA, 25 bp, Homo sapien
cttcgggagtgttattttattctca

SEQ ID NO: 6047822 - DNA, 25 bp, Homo sapien
tatccaactagttcatgtttatctc

SEQ ID NO: 6047823 - DNA, 25 bp, Homo sapien
tattggaaccactggttgtatccaa

SEQ ID NO: 6047824 - DNA, 25 bp, Homo sapien
aatctgaagattttcttccttctct

SEQ ID NO: 6047825 - DNA, 25 bp, Homo sapien
actgctataacagacactgtcagct

SEQ ID NO: 6047826 - DNA, 25 bp, Homo sapien
aagattttcttccttctcttctgcc

SEQ ID NO: 6047827 - DNA, 25 bp, Homo sapien
tcagttatcgtcatattctccaccg

SEQ ID NO: 6047828 - DNA, 25 bp, Homo sapien
tcaacattcaattccgccatctcct

SEQ ID NO: 6047829 - DNA, 25 bp, Homo sapien
tgaatcagttcaaggcatttctttc

SEQ ID NO: 6047830 - DNA, 25 bp, Homo sapien
gggtgtatgtaccagtatgtagaat

SEQ ID NO: 6047831 - DNA, 25 bp, Homo sapien
cttctcttctgccttctcaggaaag

SEQ ID NO: 6047832 - DNA, 25 bp, Homo sapien
atattcttcgcccattcctcatcaa

SEQ ID NO: 6047833 - DNA, 25 bp, Homo sapien
gtcagctcagttatcgtcatattct

SEQ ID NO: 6047834 - DNA, 25 bp, Homo sapien
tttcatgaaaagtagtatgctgcgg

SEQ ID NO: 6047835 - DNA, 25 bp, Homo sapien
ttttttcaactgtagtacatttgct

SEQ ID NO: 6047836 - DNA, 25 bp, Homo sapien
attcaattccgccatctccttcggg

SEQ ID NO: 6047837 - DNA, 25 bp, Homo sapien
cttttatccatgtattcgacatata

SEQ ID NO: 6047838 - DNA, 25 bp, Homo sapien
tagaggtaatcttttcatgaaaagt

SEQ ID NO: 6047839 - DNA, 25 bp, Homo sapien
tcagaacccaaagttgcttagaggt

SEQ ID NO: 6047840 - DNA, 25 bp, Homo sapien
atcttgcagccgacgataatgcctt

SEQ ID NO: 6047841 - DNA, 25 bp, Homo sapien
tcttttgaatcagttcaaggcattt

SEQ ID NO: 6047842 - DNA, 25 bp, Homo sapien
accaaaatattcttcgcccattcct

SEQ ID NO: 6047843 - DNA, 25 bp, Homo sapien
gaaaagtagtatgctgcggttcatt

SEQ ID NO: 6047844 - DNA, 25 bp, Homo sapien
ttattttattctcatgtgcttcaac

SEQ ID NO: 6047845 - DNA, 25 bp, Homo sapien
ccgtgactctttcgggtgtatgtac

SEQ ID NO: 6047846 - DNA, 25 bp, Homo sapien
ttccgccatctccttcgggagtgtt

SEQ ID NO: 6047847 - DNA, 25 bp, Homo sapien
ctggcttcttttgaatcagttcaag

SEQ ID NO: 6047848 - DNA, 25 bp, Homo sapien
gccgtaccaaaatattcttcgccca

SEQ ID NO: 6047849 - DNA, 25 bp, Homo sapien
gtagaatagccaatcttgcagccga

SEQ ID NO: 6047850 - DNA, 25 bp, Homo sapien
caactgtagtacatttgctgggcat

SEQ ID NO: 6047851 - DNA, 25 bp, Homo sapien
cttgtatattctgccgtgactcttt

SEQ ID NO: 6047852 - DNA, 25 bp, Homo sapien
tcctcaacactgtcaatcttggttt

SEQ ID NO: 6047853 - DNA, 25 bp, Homo sapien
cttctgccttctcaggaaaggaatg

SEQ ID NO: 6047854 - DNA, 25 bp, Homo sapien
ataacagacactgtcagctcagtta

SEQ ID NO: 6047855 - DNA, 25 bp, Homo sapien
ttctttccaagatctctcaagatgc

SEQ ID NO: 6047856 - DNA, 25 bp, Homo sapien
aaccactggttgtatccaactagtt

SEQ ID NO: 6047857 - DNA, 25 bp, Homo sapien
tagccaatcttgcagccgacgataa

SEQ ID NO: 6047858 - DNA, 25 bp, Homo sapien
ttcttccttctcttctgccttctca

SEQ ID NO: 6047859 - DNA, 25 bp, Homo sapien
ttataattttttcaactgtagtaca

SEQ ID NO: 6047860 - DNA, 25 bp, Homo sapien
cagccgacgataatgccttcctttc

SEQ ID NO: 6047861 - DNA, 25 bp, Homo sapien
actttttttacatcctcaacactgt

SEQ ID NO: 6047862 - DNA, 25 bp, Homo sapien
aggcatttctttccaagatctctca

SEQ ID NO: 6047863 - DNA, 25 bp, Homo sapien
tattctcatgtgcttcaactggctt

SEQ ID NO: 6047864 - DNA, 25 bp, Homo sapien
tcatgtttatctccttcagtgatta

SEQ ID NO: 6047865 - DNA, 25 bp, Homo sapien
ccttcagtgattactttttttacat

SEQ ID NO: 6047866 - DNA, 25 bp, Homo sapien
ccttctcaggaaaggaatgctgatt

SEQ ID NO: 6047867 - DNA, 25 bp, Homo sapien
gtgattactttttttacatcctcaa

SEQ ID NO: 6047868 - DNA, 25 bp, Homo sapien
cccaaagttgcttagaggtaatctt

SEQ ID NO: 6047869 - DNA, 25 bp, Homo sapien
tcctttcttgtgtatttcttttatc

SEQ ID NO: 6047870 - DNA, 25 bp, Homo sapien
taatcttttcatgaaaagtagtatg

SEQ ID NO: 6047871 - DNA, 25 bp, Homo sapien
tctttcgggtgtatgtaccagtatg

SEQ ID NO: 6047872 - DNA, 25 bp, Homo sapien
tctctcaagatgcttgtatattctg

SEQ ID NO: 6047873 - DNA, 25 bp, Homo sapien
atcgtcatattctccaccgcggctg

SEQ ID NO: 6047874 - DNA, 25 bp, Homo sapien
cttcaactggcttcttttgaatcag

SEQ ID NO: 6047875 - DNA, 25 bp, Homo sapien
tccaccgcggctggtatctcaacat

SEQ ID NO: 6047876 - DNA, 25 bp, Homo sapien
ttatctccttcagtgattacttttt

SEQ ID NO: 6047877 - DNA, 25 bp, Homo sapien
attctgccgtgactctttcgggtgt

SEQ ID NO: 6047878 - DNA, 25 bp, Homo sapien
acactgtcaatcttggttttttcca

SEQ ID NO: 6047879 - DNA, 25 bp, Homo sapien
gctgcggttcattgtttataaggta

SEQ ID NO: 6047880 - DNA, 25 bp, Homo sapien
gctgatttaggacacttataatttt

SEQ ID NO: 6047881 - DNA, 25 bp, Homo sapien
tagtatgctgcggttcattgtttat

SEQ ID NO: 6047882 - DNA, 25 bp, Homo sapien
tgtttataaggtattggaaccactg

SEQ ID NO: 6047883 - DNA, 25 bp, Homo sapien
atattctccaccgcggctggtatct

SEQ ID NO: 6047884 - DNA, 25 bp, Homo sapien
ccattcctcatcaatctgaagattt

SEQ ID NO: 6047885 - DNA, 25 bp, Homo sapien
acgataatgccttcctttcttgtgt

SEQ ID NO: 6047886 - DNA, 25 bp, Homo sapien
ttccagccgtaccaaaatattcttc

SEQ ID NO: 6047887 - DNA, 25 bp, Homo sapien
gtatttcttttatccatgtattcga

SEQ ID NO: 6047888 - DNA, 25 bp, Homo sapien
tcttgtgtatttcttttatccatgt

SEQ ID NO: 6047889 - DNA, 25 bp, Homo sapien
catgtgcttcaactggcttcttttg

SEQ ID NO: 6047890 - DNA, 25 bp, Homo sapien
ttcgcccattcctcatcaatctgaa

SEQ ID NO: 6047891 - DNA, 25 bp, Homo sapien
ccaagatctctcaagatgcttgtat

SEQ ID NO: 6047892 - DNA, 25 bp, Homo sapien
gttcattgtttataaggtattggaa

SEQ ID NO: 6047893 - DNA, 25 bp, Homo sapien
gttgcttagaggtaatcttttcatg

SEQ ID NO: 6047894 - DNA, 25 bp, Homo sapien
gacactgtcagctcagttatcgtca

SEQ ID NO: 6047895 - DNA, 25 bp, Homo sapien
ggtatctcaacattcaattccgcca

SEQ ID NO: 6047896 - DNA, 25 bp, Homo sapien
ggagtgttattttattctcatgtgc

SEQ ID NO: 6047897 - DNA, 25 bp, Homo sapien
atgtaccagtatgtagaatagccaa

SEQ ID NO: 6047898 - DNA, 25 bp, Homo sapien
cagtatgtagaatagccaatcttgc

SEQ ID NO: 6047899 - DNA, 25 bp, Homo sapien
tattcgacatatacttgatcagaac

SEQ ID NO: 6047900 - DNA, 25 bp, Homo sapien
tcaatcttggttttttccagccgta

SEQ ID NO: 6047901 - DNA, 25 bp, Homo sapien
ctcatcaatctgaagattttcttcc

SEQ ID NO: 6047902 - DNA, 25 bp, Homo sapien
ataaggtattggaaccactggttgt

SEQ ID NO: 6047903 - DNA, 25 bp, Homo sapien
tccatgtattcgacatatacttgat

SEQ ID NO: 6047904 - DNA, 25 bp, Homo sapien
gcggctggtatctcaacattcaatt

SEQ ID NO: 6047905 - DNA, 25 bp, Homo sapien
catctccttcgggagtgttatttta

SEQ ID NO: 6047906 - DNA, 25 bp, Homo sapien
atgccttcctttcttgtgtatttct

SEQ ID NO: 6047907 - DNA, 25 bp, Homo sapien
aggaatgctgatttaggacacttat

SEQ ID NO: 6047908 - DNA, 25 bp, Homo sapien
acttgatcagaacccaaagttgctt

SEQ ID NO: 6047909 - DNA, 25 bp, Homo sapien
tttacatcctcaacactgtcaatct

SEQ ID NO: 6047910 - DNA, 25 bp, Homo sapien
ccgcaattacaacagccctttaaca

SEQ ID NO: 6047911 - DNA, 25 bp, Homo sapien
acctttgacgcatgataagacggca

SEQ ID NO: 6047912 - DNA, 25 bp, Homo sapien
cagatctttaagtggactacctttg

SEQ ID NO: 6047913 - DNA, 25 bp, Homo sapien
tcaactaaattctattccatattac

SEQ ID NO: 6047914 - DNA, 25 bp, Homo sapien
aaagaacagcagcagcagaaacagt

SEQ ID NO: 6047915 - DNA, 25 bp, Homo sapien
gagcaacagcagcagcaacaacaga

SEQ ID NO: 6047916 - DNA, 25 bp, Homo sapien
ccgctcaaggtgtggaaatacccca

SEQ ID NO: 6047917 - DNA, 25 bp, Homo sapien
ctatatggtctccagatctttaagt

SEQ ID NO: 6047918 - DNA, 25 bp, Homo sapien
ctcgaacagctatcagttccaattg

SEQ ID NO: 6047919 - DNA, 25 bp, Homo sapien
ggcttacaaccggaagataaggcac

SEQ ID NO: 6047920 - DNA, 25 bp, Homo sapien
tctagcggagaaggagaaactagaa

SEQ ID NO: 6047921 - DNA, 25 bp, Homo sapien
caaggtgtggaaataccccataatt

SEQ ID NO: 6047922 - DNA, 25 bp, Homo sapien
tgaaaagagcacattctctttcacc

SEQ ID NO: 6047923 - DNA, 25 bp, Homo sapien
cctttaacaacaatatagttcttat

SEQ ID NO: 6047924 - DNA, 25 bp, Homo sapien
aatggaccgctcaaggtgtggaaat

SEQ ID NO: 6047925 - DNA, 25 bp, Homo sapien
acaacaatatagttcttatgaaaag

SEQ ID NO: 6047926 - DNA, 25 bp, Homo sapien
catttctaaaattattggtacgaag

SEQ ID NO: 6047927 - DNA, 25 bp, Homo sapien
gacggcaagagacctaccacagctg

SEQ ID NO: 6047928 - DNA, 25 bp, Homo sapien
ggtctccagatctttaagtggacta

SEQ ID NO: 6047929 - DNA, 25 bp, Homo sapien
acaggatcttaatagacgaatggac

SEQ ID NO: 6047930 - DNA, 25 bp, Homo sapien
gaacaatgatcttaagaggttgcct

SEQ ID NO: 6047931 - DNA, 25 bp, Homo sapien
ttcttatgaaaagagcacattctct

SEQ ID NO: 6047932 - DNA, 25 bp, Homo sapien
aaattctattccatattactcagct

SEQ ID NO: 6047933 - DNA, 25 bp, Homo sapien
atcttcctcggtgtcaagctcgaac

SEQ ID NO: 6047934 - DNA, 25 bp, Homo sapien
cagcagaaacagtcacaaccgcaat

SEQ ID NO: 6047935 - DNA, 25 bp, Homo sapien
ctcggtgtcaagctcgaacagctat

SEQ ID NO: 6047936 - DNA, 25 bp, Homo sapien
gtcaagctcgaacagctatcagttc

SEQ ID NO: 6047937 - DNA, 25 bp, Homo sapien
caacagaaagaacagcagcagcaga

SEQ ID NO: 6047938 - DNA, 25 bp, Homo sapien
gacgcatgataagacggcaagagac

SEQ ID NO: 6047939 - DNA, 25 bp, Homo sapien
ccaagaacgcatttattctgttcag

SEQ ID NO: 6047940 - DNA, 25 bp, Homo sapien
tgatcttaagaggttgcctattcct

SEQ ID NO: 6047941 - DNA, 25 bp, Homo sapien
gaaaatctagcggagaaggagaaac

SEQ ID NO: 6047942 - DNA, 25 bp, Homo sapien
aagaagaagcaactacttttgaagg

SEQ ID NO: 6047943 - DNA, 25 bp, Homo sapien
tattccttctgttaatacttctaac

SEQ ID NO: 6047944 - DNA, 25 bp, Homo sapien
caagccggtaagaaagtctaagaag

SEQ ID NO: 6047945 - DNA, 25 bp, Homo sapien
ttgaaggaaatcgagcaacagcagc

SEQ ID NO: 6047946 - DNA, 25 bp, Homo sapien
aagtctaagaagaagcaactacttt

SEQ ID NO: 6047947 - DNA, 25 bp, Homo sapien
cactgggaaaatctagcggagaagg

SEQ ID NO: 6047948 - DNA, 25 bp, Homo sapien
ctacttttgaaggaaatcgagcaac

SEQ ID NO: 6047949 - DNA, 25 bp, Homo sapien
tgaatacaaatacaagccggtaaga

SEQ ID NO: 6047950 - DNA, 25 bp, Homo sapien
tggtacgaagtggaagggcttacaa

SEQ ID NO: 6047951 - DNA, 25 bp, Homo sapien
tggaaataccccataattcaaacat

SEQ ID NO: 6047952 - DNA, 25 bp, Homo sapien
cagcagcagcaacaacagaaagaac

SEQ ID NO: 6047953 - DNA, 25 bp, Homo sapien
acagctgtcatctcaactaaattct

SEQ ID NO: 6047954 - DNA, 25 bp, Homo sapien
cagcaacaacagaaagaacagcagc

SEQ ID NO: 6047955 - DNA, 25 bp, Homo sapien
ttctaactatatggtctccagatct

SEQ ID NO: 6047956 - DNA, 25 bp, Homo sapien
tctaaaattattggtacgaagtgga

SEQ ID NO: 6047957 - DNA, 25 bp, Homo sapien
taatacttctaactatatggtctcc

SEQ ID NO: 6047958 - DNA, 25 bp, Homo sapien
gtatcctgaatacaaatacaagccg

SEQ ID NO: 6047959 - DNA, 25 bp, Homo sapien
tagacgaatggaccgctcaaggtgt

SEQ ID NO: 6047960 - DNA, 25 bp, Homo sapien
gttgcctattccttctgttaatact

SEQ ID NO: 6047961 - DNA, 25 bp, Homo sapien
ttcaccatcttcctcggtgtcaagc

SEQ ID NO: 6047962 - DNA, 25 bp, Homo sapien
aaggcacactgggaaaatctagcgg

SEQ ID NO: 6047963 - DNA, 25 bp, Homo sapien
attacaacagccctttaacaacaat

SEQ ID NO: 6047964 - DNA, 25 bp, Homo sapien
taagaggttgcctattccttctgtt

SEQ ID NO: 6047965 - DNA, 25 bp, Homo sapien
tcagttccaattgaacaatgatctt

SEQ ID NO: 6047966 - DNA, 25 bp, Homo sapien
acatgaaaggaagtatcctgaatac

SEQ ID NO: 6047967 - DNA, 25 bp, Homo sapien
gtaagaaagtctaagaagaagcaac

SEQ ID NO: 6047968 - DNA, 25 bp, Homo sapien
caaccggaagataaggcacactggg

SEQ ID NO: 6047969 - DNA, 25 bp, Homo sapien
aacagccctttaacaacaatatagt

SEQ ID NO: 6047970 - DNA, 25 bp, Homo sapien
ctaccacagctgtcatctcaactaa

SEQ ID NO: 6047971 - DNA, 25 bp, Homo sapien
caaatacaagccggtaagaaagtct

SEQ ID NO: 6047972 - DNA, 25 bp, Homo sapien
cagcagcagcagaaacagtcacaac

SEQ ID NO: 6047973 - DNA, 25 bp, Homo sapien
ttctctttcaccatcttcctcggtg

SEQ ID NO: 6047974 - DNA, 25 bp, Homo sapien
atatagttcttatgaaaagagcaca

SEQ ID NO: 6047975 - DNA, 25 bp, Homo sapien
acgcatttattctgttcagacagca

SEQ ID NO: 6047976 - DNA, 25 bp, Homo sapien
caagacccaagaacgcatttattct

SEQ ID NO: 6047977 - DNA, 25 bp, Homo sapien
tgttcagacagcactaccacaggat

SEQ ID NO: 6047978 - DNA, 25 bp, Homo sapien
aagagacctaccacagctgtcatct

SEQ ID NO: 6047979 - DNA, 25 bp, Homo sapien
gaaatcgagcaacagcagcagcaac

SEQ ID NO: 6047980 - DNA, 25 bp, Homo sapien
cagctatcagttccaattgaacaat

SEQ ID NO: 6047981 - DNA, 25 bp, Homo sapien
ggagaaactagaacatgaaaggaag

SEQ ID NO: 6047982 - DNA, 25 bp, Homo sapien
gacagcactaccacaggatcttaat

SEQ ID NO: 6047983 - DNA, 25 bp, Homo sapien
attattggtacgaagtggaagggct

SEQ ID NO: 6047984 - DNA, 25 bp, Homo sapien
actagaacatgaaaggaagtatcct

SEQ ID NO: 6047985 - DNA, 25 bp, Homo sapien
aagcaactacttttgaaggaaatcg

SEQ ID NO: 6047986 - DNA, 25 bp, Homo sapien
tcacaaccgcaattacaacagccct

SEQ ID NO: 6047987 - DNA, 25 bp, Homo sapien
tggactacctttgacgcatgataag

SEQ ID NO: 6047988 - DNA, 25 bp, Homo sapien
gagcacattctctttcaccatcttc

SEQ ID NO: 6047989 - DNA, 25 bp, Homo sapien
gaagataaggcacactgggaaaatc

SEQ ID NO: 6047990 - DNA, 25 bp, Homo sapien
taccccataattcaaacatttctaa

SEQ ID NO: 6047991 - DNA, 25 bp, Homo sapien
gtcatctcaactaaattctattcca

SEQ ID NO: 6047992 - DNA, 25 bp, Homo sapien
atattactcagctccacacgaccct

SEQ ID NO: 6047993 - DNA, 25 bp, Homo sapien
tctgttaatacttctaactatatgg

SEQ ID NO: 6047994 - DNA, 25 bp, Homo sapien
tattccatattactcagctccacac

SEQ ID NO: 6047995 - DNA, 25 bp, Homo sapien
ttattctgttcagacagcactacca

SEQ ID NO: 6047996 - DNA, 25 bp, Homo sapien
tgataagacggcaagagacctacca

SEQ ID NO: 6047997 - DNA, 25 bp, Homo sapien
tttaagtggactacctttgacgcat

SEQ ID NO: 6047998 - DNA, 25 bp, Homo sapien
tcttaatagacgaatggaccgctca

SEQ ID NO: 6047999 - DNA, 25 bp, Homo sapien
ccaattgaacaatgatcttaagagg

SEQ ID NO: 6048000 - DNA, 25 bp, Homo sapien
actaccacaggatcttaatagacga

SEQ ID NO: 6048001 - DNA, 25 bp, Homo sapien
ggagaaggagaaactagaacatgaa

SEQ ID NO: 6048002 - DNA, 25 bp, Homo sapien
tggaagggcttacaaccggaagata

SEQ ID NO: 6048003 - DNA, 25 bp, Homo sapien
aaggaagtatcctgaatacaaatac

SEQ ID NO: 6048004 - DNA, 25 bp, Homo sapien
aaacagtcacaaccgcaattacaac

SEQ ID NO: 6048005 - DNA, 25 bp, Homo sapien
ctgctggtactgatccagttgaaaa

SEQ ID NO: 6048006 - DNA, 25 bp, Homo sapien
tatcatgcgtcaaaggtagtccact

SEQ ID NO: 6048007 - DNA, 25 bp, Homo sapien
taggggtagttgtggacaatagatt

SEQ ID NO: 6048008 - DNA, 25 bp, Homo sapien
tggagctgagtaatatggaatagaa

SEQ ID NO: 6048009 - DNA, 25 bp, Homo sapien
ttggtatatgaggaatgtgatgatg

SEQ ID NO: 6048010 - DNA, 25 bp, Homo sapien
tcgtgtggagctgagtaatatggaa

SEQ ID NO: 6048011 - DNA, 25 bp, Homo sapien
gaatgttttggtttggtatatgagg

SEQ ID NO: 6048012 - DNA, 25 bp, Homo sapien
ttggtcccatctgctttagctgctg

SEQ ID NO: 6048013 - DNA, 25 bp, Homo sapien
gacaatataagttggtcccatctgc

SEQ ID NO: 6048014 - DNA, 25 bp, Homo sapien
tgagtttataatttgatgtagagga

SEQ ID NO: 6048015 - DNA, 25 bp, Homo sapien
tgagcttgagcgacgttgaggtaat

SEQ ID NO: 6048016 - DNA, 25 bp, Homo sapien
tggtttgacaatataagttggtccc

SEQ ID NO: 6048017 - DNA, 25 bp, Homo sapien
gaagggtcgtgtggagctgagtaat

SEQ ID NO: 6048018 - DNA, 25 bp, Homo sapien
ccgtcttatcatgcgtcaaaggtag

SEQ ID NO: 6048019 - DNA, 25 bp, Homo sapien
aggtaatgatgtctcgttgaagggt

SEQ ID NO: 6048020 - DNA, 25 bp, Homo sapien
gaatttcccaggagaagatgtcgca

SEQ ID NO: 6048021 - DNA, 25 bp, Homo sapien
gatgcgtaggggtagttgtggacaa

SEQ ID NO: 6048022 - DNA, 25 bp, Homo sapien
ctcttgccgtcttatcatgcgtcaa

SEQ ID NO: 6048023 - DNA, 25 bp, Homo sapien
cttggttgagcttgagcgacgttga

SEQ ID NO: 6048024 - DNA, 25 bp, Homo sapien
agacagtggtttgacaatataagtt

SEQ ID NO: 6048025 - DNA, 25 bp, Homo sapien
atctgttgttctccagtacagagga

SEQ ID NO: 6048026 - DNA, 25 bp, Homo sapien
atccagttgaaaatcttgcagagaa

SEQ ID NO: 6048027 - DNA, 25 bp, Homo sapien
atatgaggaatgtgatgatgcgtag

SEQ ID NO: 6048028 - DNA, 25 bp, Homo sapien
gtccacttaaagatctggagaccat

SEQ ID NO: 6048029 - DNA, 25 bp, Homo sapien
gactgctgttgttgataatggatga

SEQ ID NO: 6048030 - DNA, 25 bp, Homo sapien
agaagatgtcgcagttgttgtggat

SEQ ID NO: 6048031 - DNA, 25 bp, Homo sapien
ctcgttgaagggtcgtgtggagctg

SEQ ID NO: 6048032 - DNA, 25 bp, Homo sapien
cggagaagaggagaatttcccagga

SEQ ID NO: 6048033 - DNA, 25 bp, Homo sapien
atagagggggaggtaaatattgatt

SEQ ID NO: 6048034 - DNA, 25 bp, Homo sapien
ggtgacctcagtgttgcttgagttt

SEQ ID NO: 6048035 - DNA, 25 bp, Homo sapien
atgtcgcagttgttgtggatgtggt

SEQ ID NO: 6048036 - DNA, 25 bp, Homo sapien
ataagttggtcccatctgctttagc

SEQ ID NO: 6048037 - DNA, 25 bp, Homo sapien
ccatctgctttagctgctggtactg

SEQ ID NO: 6048038 - DNA, 25 bp, Homo sapien
ggtaggtctcttgccgtcttatcat

SEQ ID NO: 6048039 - DNA, 25 bp, Homo sapien
ctcagtgttgcttgagtttataatt

SEQ ID NO: 6048040 - DNA, 25 bp, Homo sapien
gaattgttgatactgtttaatctgt

SEQ ID NO: 6048041 - DNA, 25 bp, Homo sapien
ttagcccttggttgagcttgagcga

SEQ ID NO: 6048042 - DNA, 25 bp, Homo sapien
atagattgttcctggtgtgagacag

SEQ ID NO: 6048043 - DNA, 25 bp, Homo sapien
aatatggaatagaatttagttgaga

SEQ ID NO: 6048044 - DNA, 25 bp, Homo sapien
agaccatatagttagaagtattaac

SEQ ID NO: 6048045 - DNA, 25 bp, Homo sapien
atgtggtagttgtagttaccggtgt

SEQ ID NO: 6048046 - DNA, 25 bp, Homo sapien
aattgaggggtcgagttagcccttg

SEQ ID NO: 6048047 - DNA, 25 bp, Homo sapien
cagttgttgtggatgtggtagttgt

SEQ ID NO: 6048048 - DNA, 25 bp, Homo sapien
gtcgagttagcccttggttgagctt

SEQ ID NO: 6048049 - DNA, 25 bp, Homo sapien
tagttgtggacaatagattgttcct

SEQ ID NO: 6048050 - DNA, 25 bp, Homo sapien
ttgatgtagaggaatgttttggttt

SEQ ID NO: 6048051 - DNA, 25 bp, Homo sapien
tgttgttgataatggatgaaataaa

SEQ ID NO: 6048052 - DNA, 25 bp, Homo sapien
ttgaaaatcttgcagagaaggtaat

SEQ ID NO: 6048053 - DNA, 25 bp, Homo sapien
ggtgtgagacagtggtttgacaata

SEQ ID NO: 6048054 - DNA, 25 bp, Homo sapien
atcttgcagagaaggtaatagaggg

SEQ ID NO: 6048055 - DNA, 25 bp, Homo sapien
tgttcctggtgtgagacagtggttt

SEQ ID NO: 6048056 - DNA, 25 bp, Homo sapien
tgataatggatgaaataaagggcaa

SEQ ID NO: 6048057 - DNA, 25 bp, Homo sapien
ttgtagttaccggtgtttgactgct

SEQ ID NO: 6048058 - DNA, 25 bp, Homo sapien
ggaggtaaatattgatttgaattgt

SEQ ID NO: 6048059 - DNA, 25 bp, Homo sapien
tttggtttggtatatgaggaatgtg

SEQ ID NO: 6048060 - DNA, 25 bp, Homo sapien
tatagttagaagtattaacagaagg

SEQ ID NO: 6048061 - DNA, 25 bp, Homo sapien
ttgtggatgtggtagttgtagttac

SEQ ID NO: 6048062 - DNA, 25 bp, Homo sapien
gtgtttgactgctgttgttgataat

SEQ ID NO: 6048063 - DNA, 25 bp, Homo sapien
tggatgaaataaagggcaattgagg

SEQ ID NO: 6048064 - DNA, 25 bp, Homo sapien
gttgcttgagtttataatttgatgt

SEQ ID NO: 6048065 - DNA, 25 bp, Homo sapien
atgatgtctcgttgaagggtcgtgt

SEQ ID NO: 6048066 - DNA, 25 bp, Homo sapien
atctggagaccatatagttagaagt

SEQ ID NO: 6048067 - DNA, 25 bp, Homo sapien
tgatttgaattgttgatactgttta

SEQ ID NO: 6048068 - DNA, 25 bp, Homo sapien
ttaaagatctggagaccatatagtt

SEQ ID NO: 6048069 - DNA, 25 bp, Homo sapien
ctgagtaatatggaatagaatttag

SEQ ID NO: 6048070 - DNA, 25 bp, Homo sapien
agaggagaatttcccaggagaagat

SEQ ID NO: 6048071 - DNA, 25 bp, Homo sapien
tgtttaatctgttgttctccagtac

SEQ ID NO: 6048072 - DNA, 25 bp, Homo sapien
acgttgaggtaatgatgtctcgttg

SEQ ID NO: 6048073 - DNA, 25 bp, Homo sapien
tgagcgacgttgaggtaatgatgtc

SEQ ID NO: 6048074 - DNA, 25 bp, Homo sapien
tataatttgatgtagaggaatgttt

SEQ ID NO: 6048075 - DNA, 25 bp, Homo sapien
tagaagtattaacagaaggaatagg

SEQ ID NO: 6048076 - DNA, 25 bp, Homo sapien
aaatattgatttgaattgttgatac

SEQ ID NO: 6048077 - DNA, 25 bp, Homo sapien
agttgagatgacagctgtggtaggt

SEQ ID NO: 6048078 - DNA, 25 bp, Homo sapien
aaggtagtccacttaaagatctgga

SEQ ID NO: 6048079 - DNA, 25 bp, Homo sapien
gtactgatccagttgaaaatcttgc

SEQ ID NO: 6048080 - DNA, 25 bp, Homo sapien
tgatactgtttaatctgttgttctc

SEQ ID NO: 6048081 - DNA, 25 bp, Homo sapien
cagaggagttcggagaagaggagaa

SEQ ID NO: 6048082 - DNA, 25 bp, Homo sapien
tggacaatagattgttcctggtgtg

SEQ ID NO: 6048083 - DNA, 25 bp, Homo sapien
tagaggaatgttttggtttggtata

SEQ ID NO: 6048084 - DNA, 25 bp, Homo sapien
ccagtacagaggagttcggagaaga

SEQ ID NO: 6048085 - DNA, 25 bp, Homo sapien
gatgacagctgtggtaggtctcttg

SEQ ID NO: 6048086 - DNA, 25 bp, Homo sapien
gctttagctgctggtactgatccag

SEQ ID NO: 6048087 - DNA, 25 bp, Homo sapien
gcgtcaaaggtagtccacttaaaga

SEQ ID NO: 6048088 - DNA, 25 bp, Homo sapien
cccaggagaagatgtcgcagttgtt

SEQ ID NO: 6048089 - DNA, 25 bp, Homo sapien
agctgtggtaggtctcttgccgtct

SEQ ID NO: 6048090 - DNA, 25 bp, Homo sapien
tgttctccagtacagaggagttcgg

SEQ ID NO: 6048091 - DNA, 25 bp, Homo sapien
ttaccggtgtttgactgctgttgtt

SEQ ID NO: 6048092 - DNA, 25 bp, Homo sapien
tattaacagaaggaataggcaacct

SEQ ID NO: 6048093 - DNA, 25 bp, Homo sapien
gaatttagttgagatgacagctgtg

SEQ ID NO: 6048094 - DNA, 25 bp, Homo sapien
gaatagaatttagttgagatgacag

SEQ ID NO: 6048095 - DNA, 25 bp, Homo sapien
gagttcggagaagaggagaatttcc

SEQ ID NO: 6048096 - DNA, 25 bp, Homo sapien
cccaggtgctccattgggtatggca

SEQ ID NO: 6048097 - DNA, 25 bp, Homo sapien
taccggtccattaggtcaaggtatc

SEQ ID NO: 6048098 - DNA, 25 bp, Homo sapien
caaggccaactcaggtcacccaggt

SEQ ID NO: 6048099 - DNA, 25 bp, Homo sapien
ctgaatttgagttgccaggtgttga

SEQ ID NO: 6048100 - DNA, 25 bp, Homo sapien
gctttgttgtattctatgctacatt

SEQ ID NO: 6048101 - DNA, 25 bp, Homo sapien
tggtatggccatggctcaagctaac

SEQ ID NO: 6048102 - DNA, 25 bp, Homo sapien
tgacggttgtttgcaagaaggtatt

SEQ ID NO: 6048103 - DNA, 25 bp, Homo sapien
ggacaccgtatccaaggccaactca

SEQ ID NO: 6048104 - DNA, 25 bp, Homo sapien
ctgacaactacacctatgttttctt

SEQ ID NO: 6048105 - DNA, 25 bp, Homo sapien
caacaagatcactatcgatggtgct

SEQ ID NO: 6048106 - DNA, 25 bp, Homo sapien
gcggtcgctttgttgtattctatgc

SEQ ID NO: 6048107 - DNA, 25 bp, Homo sapien
tggtgctaccagtatctcattcgat

SEQ ID NO: 6048108 - DNA, 25 bp, Homo sapien
attgggtatggcaccagctgcacac

SEQ ID NO: 6048109 - DNA, 25 bp, Homo sapien
gtcatcctgaatttgagttgccagg

SEQ ID NO: 6048110 - DNA, 25 bp, Homo sapien
ttttcttgggtgacggttgtttgca

SEQ ID NO: 6048111 - DNA, 25 bp, Homo sapien
aggtcacccaggtgctccattgggt

SEQ ID NO: 6048112 - DNA, 25 bp, Homo sapien
ggctttaccttgtctgacaactaca

SEQ ID NO: 6048113 - DNA, 25 bp, Homo sapien
aggtatctccaacgctgttggtatg

SEQ ID NO: 6048114 - DNA, 25 bp, Homo sapien
tgctccattgggtatggcaccagct

SEQ ID NO: 6048115 - DNA, 25 bp, Homo sapien
cgctgttggtatggccatggctcaa

SEQ ID NO: 6048116 - DNA, 25 bp, Homo sapien
ctatgctacatttgactggttacga

SEQ ID NO: 6048117 - DNA, 25 bp, Homo sapien
ttgtttgcaagaaggtatttcttca

SEQ ID NO: 6048118 - DNA, 25 bp, Homo sapien
tgtattctatgctacatttgactgg

SEQ ID NO: 6048119 - DNA, 25 bp, Homo sapien
ctattgaagacttgaaacagttcag

SEQ ID NO: 6048120 - DNA, 25 bp, Homo sapien
cgtatccaaggccaactcaggtcac

SEQ ID NO: 6048121 - DNA, 25 bp, Homo sapien
taccagtatctcattcgatgaagat

SEQ ID NO: 6048122 - DNA, 25 bp, Homo sapien
ttcttcagaagcttcctccttggct

SEQ ID NO: 6048123 - DNA, 25 bp, Homo sapien
caccaggtcatcctgaatttgagtt

SEQ ID NO: 6048124 - DNA, 25 bp, Homo sapien
agttcagacagttgggttccagaac

SEQ ID NO: 6048125 - DNA, 25 bp, Homo sapien
ctggctgccacttacaacaagccgg

SEQ ID NO: 6048126 - DNA, 25 bp, Homo sapien
atggagtcaaatgcgcatgaaccca

SEQ ID NO: 6048127 - DNA, 25 bp, Homo sapien
agaagcttcctccttggctggtcat

SEQ ID NO: 6048128 - DNA, 25 bp, Homo sapien
gctcaagctaacctggctgccactt

SEQ ID NO: 6048129 - DNA, 25 bp, Homo sapien
accagctgcacacgttctatggagt

SEQ ID NO: 6048130 - DNA, 25 bp, Homo sapien
cgatgacaacaagatcactatcgat

SEQ ID NO: 6048131 - DNA, 25 bp, Homo sapien
gccatggctcaagctaacctggctg

SEQ ID NO: 6048132 - DNA, 25 bp, Homo sapien
tgaacccaaccaacccagactggat

SEQ ID NO: 6048133 - DNA, 25 bp, Homo sapien
tccattaggtcaaggtatctccaac

SEQ ID NO: 6048134 - DNA, 25 bp, Homo sapien
tatcgatggtgctaccagtatctca

SEQ ID NO: 6048135 - DNA, 25 bp, Homo sapien
tagatttgtcttgtctaacggtcac

SEQ ID NO: 6048136 - DNA, 25 bp, Homo sapien
tgggttccagaacaccaggtcatcc

SEQ ID NO: 6048137 - DNA, 25 bp, Homo sapien
gatcactatcgatggtgctaccagt

SEQ ID NO: 6048138 - DNA, 25 bp, Homo sapien
tacatttgactggttacgatctgtc

SEQ ID NO: 6048139 - DNA, 25 bp, Homo sapien
ccttgtctgacaactacacctatgt

SEQ ID NO: 6048140 - DNA, 25 bp, Homo sapien
cgttctatggagtcaaatgcgcatg

SEQ ID NO: 6048141 - DNA, 25 bp, Homo sapien
cttgggtgacggttgtttgcaagaa

SEQ ID NO: 6048142 - DNA, 25 bp, Homo sapien
caactcaggtcacccaggtgctcca

SEQ ID NO: 6048143 - DNA, 25 bp, Homo sapien
tcaaatgcgcatgaacccaaccaac

SEQ ID NO: 6048144 - DNA, 25 bp, Homo sapien
gctgtggacaccgtatccaaggcca

SEQ ID NO: 6048145 - DNA, 25 bp, Homo sapien
gcaagaaggtatttcttcagaagct

SEQ ID NO: 6048146 - DNA, 25 bp, Homo sapien
tggtcatttgaaattgggtaacttg

SEQ ID NO: 6048147 - DNA, 25 bp, Homo sapien
tttgaaattgggtaacttgattgcc

SEQ ID NO: 6048148 - DNA, 25 bp, Homo sapien
tgaaacagttcagacagttgggttc

SEQ ID NO: 6048149 - DNA, 25 bp, Homo sapien
tgcacacgttctatggagtcaaatg

SEQ ID NO: 6048150 - DNA, 25 bp, Homo sapien
tgttgctaagagatacgaagcctac

SEQ ID NO: 6048151 - DNA, 25 bp, Homo sapien
gattgccatctacgatgacaacaag

SEQ ID NO: 6048152 - DNA, 25 bp, Homo sapien
actacacctatgttttcttgggtga

SEQ ID NO: 6048153 - DNA, 25 bp, Homo sapien
gatcaacagagatagatttgtcttg

SEQ ID NO: 6048154 - DNA, 25 bp, Homo sapien
aggtcaaggtatctccaacgctgtt

SEQ ID NO: 6048155 - DNA, 25 bp, Homo sapien
gttacgatctgtctattgaagactt

SEQ ID NO: 6048156 - DNA, 25 bp, Homo sapien
attcgatgaagatgttgctaagaga

SEQ ID NO: 6048157 - DNA, 25 bp, Homo sapien
cctatgttttcttgggtgacggttg

SEQ ID NO: 6048158 - DNA, 25 bp, Homo sapien
tgccaggtgttgaagttactaccgg

SEQ ID NO: 6048159 - DNA, 25 bp, Homo sapien
agactggatcaacagagatagattt

SEQ ID NO: 6048160 - DNA, 25 bp, Homo sapien
ttgagttgccaggtgttgaagttac

SEQ ID NO: 6048161 - DNA, 25 bp, Homo sapien
tgtcttgtctaacggtcacgcggtc

SEQ ID NO: 6048162 - DNA, 25 bp, Homo sapien
gtctaacggtcacgcggtcgctttg

SEQ ID NO: 6048163 - DNA, 25 bp, Homo sapien
cttggctggtcatttgaaattgggt

SEQ ID NO: 6048164 - DNA, 25 bp, Homo sapien
tgttgaagttactaccggtccatta

SEQ ID NO: 6048165 - DNA, 25 bp, Homo sapien
ccaccataagaattttggctgtgga

SEQ ID NO: 6048166 - DNA, 25 bp, Homo sapien
ccagaacaccaggtcatcctgaatt

SEQ ID NO: 6048167 - DNA, 25 bp, Homo sapien
caacaagccgggctttaccttgtct

SEQ ID NO: 6048168 - DNA, 25 bp, Homo sapien
ccgtctccaccataagaattttggc

SEQ ID NO: 6048169 - DNA, 25 bp, Homo sapien
attgggtaacttgattgccatctac

SEQ ID NO: 6048170 - DNA, 25 bp, Homo sapien
caacccagactggatcaacagagat

SEQ ID NO: 6048171 - DNA, 25 bp, Homo sapien
taacttgattgccatctacgatgac

SEQ ID NO: 6048172 - DNA, 25 bp, Homo sapien
taagaattttggctgtggacaccgt

SEQ ID NO: 6048173 - DNA, 25 bp, Homo sapien
tgactggttacgatctgtctattga

SEQ ID NO: 6048174 - DNA, 25 bp, Homo sapien
aagacttgaaacagttcagacagtt

SEQ ID NO: 6048175 - DNA, 25 bp, Homo sapien
caaccaacccagactggatcaacag

SEQ ID NO: 6048176 - DNA, 25 bp, Homo sapien
tgaagatgttgctaagagatacgaa

SEQ ID NO: 6048177 - DNA, 25 bp, Homo sapien
cagagatagatttgtcttgtctaac

SEQ ID NO: 6048178 - DNA, 25 bp, Homo sapien
aggtatttcttcagaagcttcctcc

SEQ ID NO: 6048179 - DNA, 25 bp, Homo sapien
attttggctgtggacaccgtatcca

SEQ ID NO: 6048180 - DNA, 25 bp, Homo sapien
catctacgatgacaacaagatcact

SEQ ID NO: 6048181 - DNA, 25 bp, Homo sapien
gacagttgggttccagaacaccagg

SEQ ID NO: 6048182 - DNA, 25 bp, Homo sapien
gctaacctggctgccacttacaaca

SEQ ID NO: 6048183 - DNA, 25 bp, Homo sapien
tatggcaccagctgcacacgttcta

SEQ ID NO: 6048184 - DNA, 25 bp, Homo sapien
gccacttacaacaagccgggcttta

SEQ ID NO: 6048185 - DNA, 25 bp, Homo sapien
tatctcattcgatgaagatgttgct

SEQ ID NO: 6048186 - DNA, 25 bp, Homo sapien
aagccgggctttaccttgtctgaca

SEQ ID NO: 6048187 - DNA, 25 bp, Homo sapien
atctgtctattgaagacttgaaaca

SEQ ID NO: 6048188 - DNA, 25 bp, Homo sapien
ttcctccttggctggtcatttgaaa

SEQ ID NO: 6048189 - DNA, 25 bp, Homo sapien
cggtcacgcggtcgctttgttgtat

SEQ ID NO: 6048190 - DNA, 25 bp, Homo sapien
ctccaacgctgttggtatggccatg

SEQ ID NO: 6048191 - DNA, 25 bp, Homo sapien
ctaaagtttcaataggttgatgtgt

SEQ ID NO: 6048192 - DNA, 25 bp, Homo sapien
accgaagaacttgaagacttctggt

SEQ ID NO: 6048193 - DNA, 25 bp, Homo sapien
ttctggtgccttaccggaggcacca

SEQ ID NO: 6048194 - DNA, 25 bp, Homo sapien
gcaacaccttctggggtgaaaccga

SEQ ID NO: 6048195 - DNA, 25 bp, Homo sapien
tctggtaagactgatagtctgtatt

SEQ ID NO: 6048196 - DNA, 25 bp, Homo sapien
agtcttagcagcttcaacactcaaa

SEQ ID NO: 6048197 - DNA, 25 bp, Homo sapien
taggttgatgtgttggaccatcttc

SEQ ID NO: 6048198 - DNA, 25 bp, Homo sapien
agtatgcttggattctaaagagttc

SEQ ID NO: 6048199 - DNA, 25 bp, Homo sapien
tttcaataggttgatgtgttggacc

SEQ ID NO: 6048200 - DNA, 25 bp, Homo sapien
gaagacttctggtgccttaccggag

SEQ ID NO: 6048201 - DNA, 25 bp, Homo sapien
agaaacaacacgagccttgatgttc

SEQ ID NO: 6048202 - DNA, 25 bp, Homo sapien
acttggagtatgcttggattctaaa

SEQ ID NO: 6048203 - DNA, 25 bp, Homo sapien
caaaacttcaacagacatgattgga

SEQ ID NO: 6048204 - DNA, 25 bp, Homo sapien
gatgttctttgcggccaaagtctta

SEQ ID NO: 6048205 - DNA, 25 bp, Homo sapien
gacatgattggaacgttgtctggta

SEQ ID NO: 6048206 - DNA, 25 bp, Homo sapien
agctctttcagcaacaccttctggg

SEQ ID NO: 6048207 - DNA, 25 bp, Homo sapien
tcaacagacatgattggaacgttgt

SEQ ID NO: 6048208 - DNA, 25 bp, Homo sapien
agcgctttcaatagagctaccttcc

SEQ ID NO: 6048209 - DNA, 25 bp, Homo sapien
agcagcttcaacactcaaagacact

SEQ ID NO: 6048210 - DNA, 25 bp, Homo sapien
ttctaaagagttcttgtaggcggca

SEQ ID NO: 6048211 - DNA, 25 bp, Homo sapien
attggaacgttgtctggtaagactg

SEQ ID NO: 6048212 - DNA, 25 bp, Homo sapien
accgaaggattgatgagcgtatttg

SEQ ID NO: 6048213 - DNA, 25 bp, Homo sapien
tgccttaccggaggcaccaaatctg

SEQ ID NO: 6048214 - DNA, 25 bp, Homo sapien
aagactgatagtctgtattctaggg

SEQ ID NO: 6048215 - DNA, 25 bp, Homo sapien
gtcacccttatagaatgcaatggtc

SEQ ID NO: 6048216 - DNA, 25 bp, Homo sapien
gtcaaaagtgaagaaatctggtaga

SEQ ID NO: 6048217 - DNA, 25 bp, Homo sapien
atgagcgtatttgccccaacatgtg

SEQ ID NO: 6048218 - DNA, 25 bp, Homo sapien
cttggattctaaagagttcttgtag

SEQ ID NO: 6048219 - DNA, 25 bp, Homo sapien
acgttgtctggtaagactgatagtc

SEQ ID NO: 6048220 - DNA, 25 bp, Homo sapien
tggtagagaaacaacacgagccttg

SEQ ID NO: 6048221 - DNA, 25 bp, Homo sapien
atctgaagtgtgctaaagtttcaat

SEQ ID NO: 6048222 - DNA, 25 bp, Homo sapien
gaaatctggtagagaaacaacacga

SEQ ID NO: 6048223 - DNA, 25 bp, Homo sapien
taatatctgggttagcaacatcttg

SEQ ID NO: 6048224 - DNA, 25 bp, Homo sapien
ggtagccaaaacttcaacagacatg

SEQ ID NO: 6048225 - DNA, 25 bp, Homo sapien
ccatcagctggtctccaaacttgaa

SEQ ID NO: 6048226 - DNA, 25 bp, Homo sapien
tgtttggtagggatctgaagtgtgc

SEQ ID NO: 6048227 - DNA, 25 bp, Homo sapien
gaacttgaagacttctggtgcctta

SEQ ID NO: 6048228 - DNA, 25 bp, Homo sapien
aatgatacttggagtatgcttggat

SEQ ID NO: 6048229 - DNA, 25 bp, Homo sapien
aatggtcttttgagctctttcagca

SEQ ID NO: 6048230 - DNA, 25 bp, Homo sapien
gcggcagaaacttcgttaccatcag

SEQ ID NO: 6048231 - DNA, 25 bp, Homo sapien
ctttgcggccaaagtcttagcagct

SEQ ID NO: 6048232 - DNA, 25 bp, Homo sapien
accggaggcaccaaatctgtcaata

SEQ ID NO: 6048233 - DNA, 25 bp, Homo sapien
ggcaccaaatctgtcaataccgaag

SEQ ID NO: 6048234 - DNA, 25 bp, Homo sapien
gaaacttcgttaccatcagctggtc

SEQ ID NO: 6048235 - DNA, 25 bp, Homo sapien
agtgtgctaaagtttcaataggttg

SEQ ID NO: 6048236 - DNA, 25 bp, Homo sapien
gtcaataccgaaggattgatgagcg

SEQ ID NO: 6048237 - DNA, 25 bp, Homo sapien
tgaaaccgaagaacttgaagacttc

SEQ ID NO: 6048238 - DNA, 25 bp, Homo sapien
ttgtaggcggcagaaacttcgttac

SEQ ID NO: 6048239 - DNA, 25 bp, Homo sapien
ggattgatgagcgtatttgccccaa

SEQ ID NO: 6048240 - DNA, 25 bp, Homo sapien
ttgtttgtcaaaagtgaagaaatct

SEQ ID NO: 6048241 - DNA, 25 bp, Homo sapien
agtgaagaaatctggtagagaaaca

SEQ ID NO: 6048242 - DNA, 25 bp, Homo sapien
agagttcttgtaggcggcagaaact

SEQ ID NO: 6048243 - DNA, 25 bp, Homo sapien
cttttgagctctttcagcaacacct

SEQ ID NO: 6048244 - DNA, 25 bp, Homo sapien
aacacgagccttgatgttctttgcg

SEQ ID NO: 6048245 - DNA, 25 bp, Homo sapien
agagctaccttccaattgtggcaag

SEQ ID NO: 6048246 - DNA, 25 bp, Homo sapien
accttccaattgtggcaagttttgt

SEQ ID NO: 6048247 - DNA, 25 bp, Homo sapien
accacccttagaagcgctttcaata

SEQ ID NO: 6048248 - DNA, 25 bp, Homo sapien
actcaaagacacttcggaaccagta

SEQ ID NO: 6048249 - DNA, 25 bp, Homo sapien
cttgaatgtttggtagggatctgaa

SEQ ID NO: 6048250 - DNA, 25 bp, Homo sapien
gttttgtctggacaaagcaatgata

SEQ ID NO: 6048251 - DNA, 25 bp, Homo sapien
accagtagccactaaaataatatct

SEQ ID NO: 6048252 - DNA, 25 bp, Homo sapien
tctggacaaagcaatgatacttgga

SEQ ID NO: 6048253 - DNA, 25 bp, Homo sapien
cttagaagcgctttcaatagagcta

SEQ ID NO: 6048254 - DNA, 25 bp, Homo sapien
gctggtctccaaacttgaatgtttg

SEQ ID NO: 6048255 - DNA, 25 bp, Homo sapien
ttcaacactcaaagacacttcggaa

SEQ ID NO: 6048256 - DNA, 25 bp, Homo sapien
ttcggaaccagtagccactaaaata

SEQ ID NO: 6048257 - DNA, 25 bp, Homo sapien
tggcaagttttgtctggacaaagca

SEQ ID NO: 6048258 - DNA, 25 bp, Homo sapien
ttcaatagagctaccttccaattgt

SEQ ID NO: 6048259 - DNA, 25 bp, Homo sapien
taaaataatatctgggttagcaaca

SEQ ID NO: 6048260 - DNA, 25 bp, Homo sapien
tagcaacatcttgtagtacgtaacc

SEQ ID NO: 6048261 - DNA, 25 bp, Homo sapien
acatgtggtagccaaaacttcaaca

SEQ ID NO: 6048262 - DNA, 25 bp, Homo sapien
agccttgatgttctttgcggccaaa

SEQ ID NO: 6048263 - DNA, 25 bp, Homo sapien
gatgtgttggaccatcttcaccgac

SEQ ID NO: 6048264 - DNA, 25 bp, Homo sapien
tcgttaccatcagctggtctccaaa

SEQ ID NO: 6048265 - DNA, 25 bp, Homo sapien
gtatttgccccaacatgtggtagcc

SEQ ID NO: 6048266 - DNA, 25 bp, Homo sapien
caaagcaatgatacttggagtatgc

SEQ ID NO: 6048267 - DNA, 25 bp, Homo sapien
tctaggggttgtttgtcaaaagtga

SEQ ID NO: 6048268 - DNA, 25 bp, Homo sapien
cttatagaatgcaatggtcttttga

SEQ ID NO: 6048269 - DNA, 25 bp, Homo sapien
tccaaacttgaatgtttggtaggga

SEQ ID NO: 6048270 - DNA, 25 bp, Homo sapien
gtagggatctgaagtgtgctaaagt

SEQ ID NO: 6048271 - DNA, 25 bp, Homo sapien
ttggaccatcttcaccgacaccgat

SEQ ID NO: 6048272 - DNA, 25 bp, Homo sapien
ggccaaagtcttagcagcttcaaca

SEQ ID NO: 6048273 - DNA, 25 bp, Homo sapien
gaatgcaatggtcttttgagctctt

SEQ ID NO: 6048274 - DNA, 25 bp, Homo sapien
aaatctgtcaataccgaaggattga

SEQ ID NO: 6048275 - DNA, 25 bp, Homo sapien
catcttgtagtacgtaaccaccctt

SEQ ID NO: 6048276 - DNA, 25 bp, Homo sapien
caattgtggcaagttttgtctggac

SEQ ID NO: 6048277 - DNA, 25 bp, Homo sapien
agccactaaaataatatctgggtta

SEQ ID NO: 6048278 - DNA, 25 bp, Homo sapien
tctggggtgaaaccgaagaacttga

SEQ ID NO: 6048279 - DNA, 25 bp, Homo sapien
tgtattctaggggttgtttgtcaaa

SEQ ID NO: 6048280 - DNA, 25 bp, Homo sapien
ctgggttagcaacatcttgtagtac

SEQ ID NO: 6048281 - DNA, 25 bp, Homo sapien
gccccaacatgtggtagccaaaact

SEQ ID NO: 6048282 - DNA, 25 bp, Homo sapien
agacacttcggaaccagtagccact

SEQ ID NO: 6048283 - DNA, 25 bp, Homo sapien
attgactctgaaaagggtaccgtga

SEQ ID NO: 6048284 - DNA, 25 bp, Homo sapien
caagaatagatcaagtaatcgccct

SEQ ID NO: 6048285 - DNA, 25 bp, Homo sapien
agaagttcgctgttttggtacagaa

SEQ ID NO: 6048286 - DNA, 25 bp, Homo sapien
ctggggtcctgaagaaatttatccg

SEQ ID NO: 6048287 - DNA, 25 bp, Homo sapien
gacaacagatatgtggggctgttag

SEQ ID NO: 6048288 - DNA, 25 bp, Homo sapien
tgtttacaccccaacttcgacagaa

SEQ ID NO: 6048289 - DNA, 25 bp, Homo sapien
ccaagttccaaagcccgaatccaat

SEQ ID NO: 6048290 - DNA, 25 bp, Homo sapien
ttcaaagtcgatattccgaatgaag

SEQ ID NO: 6048291 - DNA, 25 bp, Homo sapien
acggtatacaattctgtaaagttca

SEQ ID NO: 6048292 - DNA, 25 bp, Homo sapien
gacagaaaccgctactgctagtatg

SEQ ID NO: 6048293 - DNA, 25 bp, Homo sapien
ctgttagaagatattgactctgaaa

SEQ ID NO: 6048294 - DNA, 25 bp, Homo sapien
aaccgctactgctagtatgaatgat

SEQ ID NO: 6048295 - DNA, 25 bp, Homo sapien
tcaacaagctcaatctccaccccag

SEQ ID NO: 6048296 - DNA, 25 bp, Homo sapien
gtcaaggatttaagcattttagatg

SEQ ID NO: 6048297 - DNA, 25 bp, Homo sapien
tcctcaaatgatgccacccgcttca

SEQ ID NO: 6048298 - DNA, 25 bp, Homo sapien
gttccaaagcccgaatccaatgtgc

SEQ ID NO: 6048299 - DNA, 25 bp, Homo sapien
aatcctacggtatacaattctgtaa

SEQ ID NO: 6048300 - DNA, 25 bp, Homo sapien
atctccaccccaggctcaagctcaa

SEQ ID NO: 6048301 - DNA, 25 bp, Homo sapien
tgaagaaatttatccgaatcctacg

SEQ ID NO: 6048302 - DNA, 25 bp, Homo sapien
tccaaccgcaatttcaaagtcgata

SEQ ID NO: 6048303 - DNA, 25 bp, Homo sapien
tagtatgaatgataagagcactcct

SEQ ID NO: 6048304 - DNA, 25 bp, Homo sapien
aaatgagccaaaatatcaaagaaac

SEQ ID NO: 6048305 - DNA, 25 bp, Homo sapien
gctcaagcacacgtgcaaacaaacc

SEQ ID NO: 6048306 - DNA, 25 bp, Homo sapien
gatttaagcattttagatgctaaca

SEQ ID NO: 6048307 - DNA, 25 bp, Homo sapien
aatgatgccacccgcttcacaattc

SEQ ID NO: 6048308 - DNA, 25 bp, Homo sapien
caatgtgccagcagctgtcgctgga

SEQ ID NO: 6048309 - DNA, 25 bp, Homo sapien
agctcaatctccaccccaggctcaa

SEQ ID NO: 6048310 - DNA, 25 bp, Homo sapien
tctgaaaagggtaccgtgactttga

SEQ ID NO: 6048311 - DNA, 25 bp, Homo sapien
gccacccgcttcacaattccctcct

SEQ ID NO: 6048312 - DNA, 25 bp, Homo sapien
atcaatgacatacagccggttgttc

SEQ ID NO: 6048313 - DNA, 25 bp, Homo sapien
acaattccctcctcaacaagctcaa

SEQ ID NO: 6048314 - DNA, 25 bp, Homo sapien
ggtcctgaagaaatttatccgaatc

SEQ ID NO: 6048315 - DNA, 25 bp, Homo sapien
cacacgtgcaaacaaacccccaagt

SEQ ID NO: 6048316 - DNA, 25 bp, Homo sapien
gtcgatattccgaatgaagattttg

SEQ ID NO: 6048317 - DNA, 25 bp, Homo sapien
acagccggttgttcctcaaatgatg

SEQ ID NO: 6048318 - DNA, 25 bp, Homo sapien
tacagaaggtcgcaagaactggggt

SEQ ID NO: 6048319 - DNA, 25 bp, Homo sapien
taaaaatggtgaaaatgagccaaaa

SEQ ID NO: 6048320 - DNA, 25 bp, Homo sapien
cgcaatttcaaagtcgatattccga

SEQ ID NO: 6048321 - DNA, 25 bp, Homo sapien
tcgccctcctcaatccaaccgcaat

SEQ ID NO: 6048322 - DNA, 25 bp, Homo sapien
atatggtgtttacaccccaacttcg

SEQ ID NO: 6048323 - DNA, 25 bp, Homo sapien
tactgctagtatgaatgataagagc

SEQ ID NO: 6048324 - DNA, 25 bp, Homo sapien
agctgtcgctggatatggtgtttac

SEQ ID NO: 6048325 - DNA, 25 bp, Homo sapien
tcgctgttttggtacagaaggtcgc

SEQ ID NO: 6048326 - DNA, 25 bp, Homo sapien
agcattttagatgctaacatcaatg

SEQ ID NO: 6048327 - DNA, 25 bp, Homo sapien
caccccaacttcgacagaaaccgct

SEQ ID NO: 6048328 - DNA, 25 bp, Homo sapien
attccgaatgaagattttgactttc

SEQ ID NO: 6048329 - DNA, 25 bp, Homo sapien
taagagcactcctcaagacaccaat

SEQ ID NO: 6048330 - DNA, 25 bp, Homo sapien
gccaaaatatcaaagaaacaagaat

SEQ ID NO: 6048331 - DNA, 25 bp, Homo sapien
ccgtgactttgaaagaagttcgctg

SEQ ID NO: 6048332 - DNA, 25 bp, Homo sapien
gaagatattgactctgaaaagggta

SEQ ID NO: 6048333 - DNA, 25 bp, Homo sapien
aatgaagattttgactttcaatcaa

SEQ ID NO: 6048334 - DNA, 25 bp, Homo sapien
cgctggatatggtgtttacacccca

SEQ ID NO: 6048335 - DNA, 25 bp, Homo sapien
gccagcagctgtcgctggatatggt

SEQ ID NO: 6048336 - DNA, 25 bp, Homo sapien
ttagatgctaacatcaatgacatac

SEQ ID NO: 6048337 - DNA, 25 bp, Homo sapien
gacatacagccggttgttcctcaaa

SEQ ID NO: 6048338 - DNA, 25 bp, Homo sapien
aacttcgacagaaaccgctactgct

SEQ ID NO: 6048339 - DNA, 25 bp, Homo sapien
tagatcaagtaatcgccctcctcaa

SEQ ID NO: 6048340 - DNA, 25 bp, Homo sapien
tcaagacaccaatgtaaactcgcaa

SEQ ID NO: 6048341 - DNA, 25 bp, Homo sapien
agatatgtggggctgttagaagata

SEQ ID NO: 6048342 - DNA, 25 bp, Homo sapien
tatccgaatcctacggtatacaatt

SEQ ID NO: 6048343 - DNA, 25 bp, Homo sapien
caagaactggggtcctgaagaaatt

SEQ ID NO: 6048344 - DNA, 25 bp, Homo sapien
ccccaggctcaagctcaagcacacg

SEQ ID NO: 6048345 - DNA, 25 bp, Homo sapien
aagttcaacggcagtgaagtcaagg

SEQ ID NO: 6048346 - DNA, 25 bp, Homo sapien
ggttgttcctcaaatgatgccaccc

SEQ ID NO: 6048347 - DNA, 25 bp, Homo sapien
caccaatgtaaactcgcaaagtagg

SEQ ID NO: 6048348 - DNA, 25 bp, Homo sapien
aagaggtaaaaatggtgaaaatgag

SEQ ID NO: 6048349 - DNA, 25 bp, Homo sapien
gctcaagctcaagcacacgtgcaaa

SEQ ID NO: 6048350 - DNA, 25 bp, Homo sapien
tggtgaaaatgagccaaaatatcaa

SEQ ID NO: 6048351 - DNA, 25 bp, Homo sapien
ctttgaaagaagttcgctgttttgg

SEQ ID NO: 6048352 - DNA, 25 bp, Homo sapien
cactcctcaagacaccaatgtaaac

SEQ ID NO: 6048353 - DNA, 25 bp, Homo sapien
gaatgataagagcactcctcaagac

SEQ ID NO: 6048354 - DNA, 25 bp, Homo sapien
aacggcagtgaagtcaaggatttaa

SEQ ID NO: 6048355 - DNA, 25 bp, Homo sapien
ttaatctctgtgactgacaacagat

SEQ ID NO: 6048356 - DNA, 25 bp, Homo sapien
tcctcaatccaaccgcaatttcaaa

SEQ ID NO: 6048357 - DNA, 25 bp, Homo sapien
ttttggtacagaaggtcgcaagaac

SEQ ID NO: 6048358 - DNA, 25 bp, Homo sapien
tgtaaactcgcaaagtagggaaaga

SEQ ID NO: 6048359 - DNA, 25 bp, Homo sapien
aagtaatcgccctcctcaatccaac

SEQ ID NO: 6048360 - DNA, 25 bp, Homo sapien
atatcaaagaaacaagaatagatca

SEQ ID NO: 6048361 - DNA, 25 bp, Homo sapien
gtgactgacaacagatatgtggggc

SEQ ID NO: 6048362 - DNA, 25 bp, Homo sapien
tctgtaaagttcaacggcagtgaag

SEQ ID NO: 6048363 - DNA, 25 bp, Homo sapien
agtgaagtcaaggatttaagcattt

SEQ ID NO: 6048364 - DNA, 25 bp, Homo sapien
ccctcctcaacaagctcaatctcca

SEQ ID NO: 6048365 - DNA, 25 bp, Homo sapien
aaagcccgaatccaatgtgccagca

SEQ ID NO: 6048366 - DNA, 25 bp, Homo sapien
gtggggctgttagaagatattgact

SEQ ID NO: 6048367 - DNA, 25 bp, Homo sapien
cgaatccaatgtgccagcagctgtc

SEQ ID NO: 6048368 - DNA, 25 bp, Homo sapien
aagaaacaagaatagatcaagtaat

SEQ ID NO: 6048369 - DNA, 25 bp, Homo sapien
aggtcgcaagaactggggtcctgaa

SEQ ID NO: 6048370 - DNA, 25 bp, Homo sapien
tacaattctgtaaagttcaacggca

SEQ ID NO: 6048371 - DNA, 25 bp, Homo sapien
cgcttcacaattccctcctcaacaa

SEQ ID NO: 6048372 - DNA, 25 bp, Homo sapien
tctctgtgactgacaacagatatgt

SEQ ID NO: 6048373 - DNA, 25 bp, Homo sapien
gctaacatcaatgacatacagccgg

SEQ ID NO: 6048374 - DNA, 25 bp, Homo sapien
aaaatcttcattcggaatatcgact

SEQ ID NO: 6048375 - DNA, 25 bp, Homo sapien
cgaggcctctagagtgaaatcttgg

SEQ ID NO: 6048376 - DNA, 25 bp, Homo sapien
cctataatttccacgcccacgaccg

SEQ ID NO: 6048377 - DNA, 25 bp, Homo sapien
attggtgtcttgaggagtgctctta

SEQ ID NO: 6048378 - DNA, 25 bp, Homo sapien
tgattgaaagtcaaaatcttcattc

SEQ ID NO: 6048379 - DNA, 25 bp, Homo sapien
tgtgaacagctgattctaattcttt

SEQ ID NO: 6048380 - DNA, 25 bp, Homo sapien
ggttggattgaggagggcgattact

SEQ ID NO: 6048381 - DNA, 25 bp, Homo sapien
ctcattttcaccatttttacctctt

SEQ ID NO: 6048382 - DNA, 25 bp, Homo sapien
tcacctttcgtgaattttgcattat

SEQ ID NO: 6048383 - DNA, 25 bp, Homo sapien
ttgatattttggctcattttcacca

SEQ ID NO: 6048384 - DNA, 25 bp, Homo sapien
acgttggccgcctcttcctctgttt

SEQ ID NO: 6048385 - DNA, 25 bp, Homo sapien
cagaagcttgtccaaaggtgtcaac

SEQ ID NO: 6048386 - DNA, 25 bp, Homo sapien
tagtttccacgttggccgcctcttc

SEQ ID NO: 6048387 - DNA, 25 bp, Homo sapien
gtcttgaggagtgctcttatcattc

SEQ ID NO: 6048388 - DNA, 25 bp, Homo sapien
attttgcattatttgattgaaagtc

SEQ ID NO: 6048389 - DNA, 25 bp, Homo sapien
cacgaccgaggcctctagagtgaaa

SEQ ID NO: 6048390 - DNA, 25 bp, Homo sapien
gccgcctcttcctctgtttcctctg

SEQ ID NO: 6048391 - DNA, 25 bp, Homo sapien
actggttggctggtctgctgtacga

SEQ ID NO: 6048392 - DNA, 25 bp, Homo sapien
caaaggtgtcaacgttcaacatttt

SEQ ID NO: 6048393 - DNA, 25 bp, Homo sapien
agtgaaatcttggtctggcagaagc

SEQ ID NO: 6048394 - DNA, 25 bp, Homo sapien
caacgttcaacattttttcttcttg

SEQ ID NO: 6048395 - DNA, 25 bp, Homo sapien
catcagattcatcctgcttgtgaac

SEQ ID NO: 6048396 - DNA, 25 bp, Homo sapien
cctgcttgtgaacagctgattctaa

SEQ ID NO: 6048397 - DNA, 25 bp, Homo sapien
cactatcattttggtagttatttct

SEQ ID NO: 6048398 - DNA, 25 bp, Homo sapien
tatcattcatactagcagtagcggt

SEQ ID NO: 6048399 - DNA, 25 bp, Homo sapien
agtcgttttggttctgataggcgcc

SEQ ID NO: 6048400 - DNA, 25 bp, Homo sapien
ctctagagtgaaatcttggtctggc

SEQ ID NO: 6048401 - DNA, 25 bp, Homo sapien
tagtttcagtagaagtggagatggt

SEQ ID NO: 6048402 - DNA, 25 bp, Homo sapien
cattttggtagttatttctgttttg

SEQ ID NO: 6048403 - DNA, 25 bp, Homo sapien
tcgtgaattttgcattatttgattg

SEQ ID NO: 6048404 - DNA, 25 bp, Homo sapien
tcatattggtattagtttcagtaga

SEQ ID NO: 6048405 - DNA, 25 bp, Homo sapien
ttttttcttcttgccatctcatatt

SEQ ID NO: 6048406 - DNA, 25 bp, Homo sapien
attgaggagggcgattacttgatct

SEQ ID NO: 6048407 - DNA, 25 bp, Homo sapien
acgcccacgaccgaggcctctagag

SEQ ID NO: 6048408 - DNA, 25 bp, Homo sapien
tcatactagcagtagcggtttctgt

SEQ ID NO: 6048409 - DNA, 25 bp, Homo sapien
cttcttgccatctcatattggtatt

SEQ ID NO: 6048410 - DNA, 25 bp, Homo sapien
tagcagtagcggtttctgtcgaagt

SEQ ID NO: 6048411 - DNA, 25 bp, Homo sapien
aggcgccactatcattttggtagtt

SEQ ID NO: 6048412 - DNA, 25 bp, Homo sapien
ggagggcgattacttgatctattct

SEQ ID NO: 6048413 - DNA, 25 bp, Homo sapien
aagtggagatggtgtcgaaaaaaga

SEQ ID NO: 6048414 - DNA, 25 bp, Homo sapien
ctgtttcctctgtttcccctataat

SEQ ID NO: 6048415 - DNA, 25 bp, Homo sapien
tggtattagtttcagtagaagtgga

SEQ ID NO: 6048416 - DNA, 25 bp, Homo sapien
ttttccacatcagtggaatcacctt

SEQ ID NO: 6048417 - DNA, 25 bp, Homo sapien
tctttccctactttgcgagtttaca

SEQ ID NO: 6048418 - DNA, 25 bp, Homo sapien
tctgataggcgccactatcattttg

SEQ ID NO: 6048419 - DNA, 25 bp, Homo sapien
ttttggctcattttcaccattttta

SEQ ID NO: 6048420 - DNA, 25 bp, Homo sapien
aaagtcaaaatcttcattcggaata

SEQ ID NO: 6048421 - DNA, 25 bp, Homo sapien
gtctgctgtacgagtcgttttggtt

SEQ ID NO: 6048422 - DNA, 25 bp, Homo sapien
gtttacattggtgtcttgaggagtg

SEQ ID NO: 6048423 - DNA, 25 bp, Homo sapien
atcgactttgaaattgcggttggat

SEQ ID NO: 6048424 - DNA, 25 bp, Homo sapien
agatggtgtcgaaaaaagacgattt

SEQ ID NO: 6048425 - DNA, 25 bp, Homo sapien
gtggaatcacctttcgtgaattttg

SEQ ID NO: 6048426 - DNA, 25 bp, Homo sapien
tttgaaattgcggttggattgagga

SEQ ID NO: 6048427 - DNA, 25 bp, Homo sapien
ttgcgagtttacattggtgtcttga

SEQ ID NO: 6048428 - DNA, 25 bp, Homo sapien
atttccacgcccacgaccgaggcct

SEQ ID NO: 6048429 - DNA, 25 bp, Homo sapien
actgctcatcagattcatcctgctt

SEQ ID NO: 6048430 - DNA, 25 bp, Homo sapien
ttttctttttccacatcagtggaat

SEQ ID NO: 6048431 - DNA, 25 bp, Homo sapien
tgtacgagtcgttttggttctgata

SEQ ID NO: 6048432 - DNA, 25 bp, Homo sapien
ttttattataaaactgctcatcaga

SEQ ID NO: 6048433 - DNA, 25 bp, Homo sapien
aattgcggttggattgaggagggcg

SEQ ID NO: 6048434 - DNA, 25 bp, Homo sapien
gtttctttgatattttggctcattt

SEQ ID NO: 6048435 - DNA, 25 bp, Homo sapien
cggaatatcgactttgaaattgcgg

SEQ ID NO: 6048436 - DNA, 25 bp, Homo sapien
gtctggcagaagcttgtccaaaggt

SEQ ID NO: 6048437 - DNA, 25 bp, Homo sapien
tataaaactgctcatcagattcatc

SEQ ID NO: 6048438 - DNA, 25 bp, Homo sapien
gctcttatcattcatactagcagta

SEQ ID NO: 6048439 - DNA, 25 bp, Homo sapien
attcatcctgcttgtgaacagctga

SEQ ID NO: 6048440 - DNA, 25 bp, Homo sapien
tcttcctctgtttcctctgtttccc

SEQ ID NO: 6048441 - DNA, 25 bp, Homo sapien
acatcagtggaatcacctttcgtga

SEQ ID NO: 6048442 - DNA, 25 bp, Homo sapien
atcttggtctggcagaagcttgtcc

SEQ ID NO: 6048443 - DNA, 25 bp, Homo sapien
attctttttctttttccacatcagt

SEQ ID NO: 6048444 - DNA, 25 bp, Homo sapien
cattatttgattgaaagtcaaaatc

SEQ ID NO: 6048445 - DNA, 25 bp, Homo sapien
attcttgtttctttgatattttggc

SEQ ID NO: 6048446 - DNA, 25 bp, Homo sapien
aggagtgctcttatcattcatacta

SEQ ID NO: 6048447 - DNA, 25 bp, Homo sapien
gattacttgatctattcttgtttct

SEQ ID NO: 6048448 - DNA, 25 bp, Homo sapien
cctactttgcgagtttacattggtg

SEQ ID NO: 6048449 - DNA, 25 bp, Homo sapien
cttgtccaaaggtgtcaacgttcaa

SEQ ID NO: 6048450 - DNA, 25 bp, Homo sapien
tctgtttcccctataatttccacgc

SEQ ID NO: 6048451 - DNA, 25 bp, Homo sapien
tttggttctgataggcgccactatc

SEQ ID NO: 6048452 - DNA, 25 bp, Homo sapien
gccatctcatattggtattagtttc

SEQ ID NO: 6048453 - DNA, 25 bp, Homo sapien
tggctggtctgctgtacgagtcgtt

SEQ ID NO: 6048454 - DNA, 25 bp, Homo sapien
tgatctattcttgtttctttgatat

SEQ ID NO: 6048455 - DNA, 25 bp, Homo sapien
ttcattcggaatatcgactttgaaa

SEQ ID NO: 6048456 - DNA, 25 bp, Homo sapien
caacattttttcttcttgccatctc

SEQ ID NO: 6048457 - DNA, 25 bp, Homo sapien
cagtagaagtggagatggtgtcgaa

SEQ ID NO: 6048458 - DNA, 25 bp, Homo sapien
taggaaacccattgttatacgatgg

SEQ ID NO: 6048459 - DNA, 25 bp, Homo sapien
gtatgccattacattcagaaagggt

SEQ ID NO: 6048460 - DNA, 25 bp, Homo sapien
gtcaatgccctagcagacgtgctat

SEQ ID NO: 6048461 - DNA, 25 bp, Homo sapien
ttaaacagattcaactttcaaaaca

SEQ ID NO: 6048462 - DNA, 25 bp, Homo sapien
gatagggaatacatcactttgaaag

SEQ ID NO: 6048463 - DNA, 25 bp, Homo sapien
ccaattgtatgccattacattcaga

SEQ ID NO: 6048464 - DNA, 25 bp, Homo sapien
gatttgaaaagatttgttgacgagt

SEQ ID NO: 6048465 - DNA, 25 bp, Homo sapien
tgtggaaagagtcagtttgcaagat

SEQ ID NO: 6048466 - DNA, 25 bp, Homo sapien
cattggctgttaaggtccatggagg

SEQ ID NO: 6048467 - DNA, 25 bp, Homo sapien
tatctacattggctgttaaggtcca

SEQ ID NO: 6048468 - DNA, 25 bp, Homo sapien
acgatggtgtggaaagagtcagttt

SEQ ID NO: 6048469 - DNA, 25 bp, Homo sapien
agattcaactttcaaaacacgaaca

SEQ ID NO: 6048470 - DNA, 25 bp, Homo sapien
gctgaacaatgtccggtaaagagcg

SEQ ID NO: 6048471 - DNA, 25 bp, Homo sapien
gcggacaaagtctataccaaggaga

SEQ ID NO: 6048472 - DNA, 25 bp, Homo sapien
ttgcctgctgctagatacgattatg

SEQ ID NO: 6048473 - DNA, 25 bp, Homo sapien
ggagggtctcgttatgcaaccaagg

SEQ ID NO: 6048474 - DNA, 25 bp, Homo sapien
gacgagtcactgttaagcactttgc

SEQ ID NO: 6048475 - DNA, 25 bp, Homo sapien
tgaaagctacctttttgaaggacga

SEQ ID NO: 6048476 - DNA, 25 bp, Homo sapien
agagcgccgaagaccaattgtatgc

SEQ ID NO: 6048477 - DNA, 25 bp, Homo sapien
gaaaatgttgttgaggccgatttga

SEQ ID NO: 6048478 - DNA, 25 bp, Homo sapien
gagctcaccgaatctgttttgcctg

SEQ ID NO: 6048479 - DNA, 25 bp, Homo sapien
ttgaaattagtcagagaatccgaat

SEQ ID NO: 6048480 - DNA, 25 bp, Homo sapien
ggttgaccgtttccgctagagacgc

SEQ ID NO: 6048481 - DNA, 25 bp, Homo sapien
gctgctagatacgattatgcggtcg

SEQ ID NO: 6048482 - DNA, 25 bp, Homo sapien
caagatatcaaggactttgcggaca

SEQ ID NO: 6048483 - DNA, 25 bp, Homo sapien
gtccatggagggtctcgttatgcaa

SEQ ID NO: 6048484 - DNA, 25 bp, Homo sapien
aagtctaccttggatagggaataca

SEQ ID NO: 6048485 - DNA, 25 bp, Homo sapien
ttagtcagagaatccgaattattag

SEQ ID NO: 6048486 - DNA, 25 bp, Homo sapien
caggggtcagttagaaggttgaccg

SEQ ID NO: 6048487 - DNA, 25 bp, Homo sapien
caaaacacgaacactagatcagctt

SEQ ID NO: 6048488 - DNA, 25 bp, Homo sapien
tataccaaggagaaccttgaagtta

SEQ ID NO: 6048489 - DNA, 25 bp, Homo sapien
catcttttaaacagattcaactttc

SEQ ID NO: 6048490 - DNA, 25 bp, Homo sapien
gcagacgtgctatacaagactgcct

SEQ ID NO: 6048491 - DNA, 25 bp, Homo sapien
gcggtcgctgaacaatgtccggtaa

SEQ ID NO: 6048492 - DNA, 25 bp, Homo sapien
aactttcaaaacacgaacactagat

SEQ ID NO: 6048493 - DNA, 25 bp, Homo sapien
attatgcggtcgctgaacaatgtcc

SEQ ID NO: 6048494 - DNA, 25 bp, Homo sapien
gaggccgatttgaaaagatttgttg

SEQ ID NO: 6048495 - DNA, 25 bp, Homo sapien
cttccctactacgtcaatgccctag

SEQ ID NO: 6048496 - DNA, 25 bp, Homo sapien
gacgaccttccctactacgtcaatg

SEQ ID NO: 6048497 - DNA, 25 bp, Homo sapien
gtgctatacaagactgccttcaaac

SEQ ID NO: 6048498 - DNA, 25 bp, Homo sapien
gactttgcggacaaagtctatacca

SEQ ID NO: 6048499 - DNA, 25 bp, Homo sapien
cagagaatccgaattattaggggga

SEQ ID NO: 6048500 - DNA, 25 bp, Homo sapien
tgttaaggtccatggagggtctcgt

SEQ ID NO: 6048501 - DNA, 25 bp, Homo sapien
acccattgttatacgatggtgtgga

SEQ ID NO: 6048502 - DNA, 25 bp, Homo sapien
tgttatacgatggtgtggaaagagt

SEQ ID NO: 6048503 - DNA, 25 bp, Homo sapien
tcagctttgaaattagtcagagaat

SEQ ID NO: 6048504 - DNA, 25 bp, Homo sapien
aaagtctataccaaggagaaccttg

SEQ ID NO: 6048505 - DNA, 25 bp, Homo sapien
tttgttgacgagtcactgttaagca

SEQ ID NO: 6048506 - DNA, 25 bp, Homo sapien
atcaaggactttgcggacaaagtct

SEQ ID NO: 6048507 - DNA, 25 bp, Homo sapien
cacctactaaaatatctacattggc

SEQ ID NO: 6048508 - DNA, 25 bp, Homo sapien
acgaacactagatcagctttgaaat

SEQ ID NO: 6048509 - DNA, 25 bp, Homo sapien
tactacgtcaatgccctagcagacg

SEQ ID NO: 6048510 - DNA, 25 bp, Homo sapien
aaaagatttgttgacgagtcactgt

SEQ ID NO: 6048511 - DNA, 25 bp, Homo sapien
agaaggttgaccgtttccgctagag

SEQ ID NO: 6048512 - DNA, 25 bp, Homo sapien
tcactttgaaagctacctttttgaa

SEQ ID NO: 6048513 - DNA, 25 bp, Homo sapien
actagatcagctttgaaattagtca

SEQ ID NO: 6048514 - DNA, 25 bp, Homo sapien
tatgcaaccaaggatggtgtggccc

SEQ ID NO: 6048515 - DNA, 25 bp, Homo sapien
gagacgcacctactaaaatatctac

SEQ ID NO: 6048516 - DNA, 25 bp, Homo sapien
gtggcccatcttttaaacagattca

SEQ ID NO: 6048517 - DNA, 25 bp, Homo sapien
cagtttgcaagatatcaaggacttt

SEQ ID NO: 6048518 - DNA, 25 bp, Homo sapien
cggtaaagagcgccgaagaccaatt

SEQ ID NO: 6048519 - DNA, 25 bp, Homo sapien
accgaatctgttttgcctgctgcta

SEQ ID NO: 6048520 - DNA, 25 bp, Homo sapien
ctaaaatatctacattggctgttaa

SEQ ID NO: 6048521 - DNA, 25 bp, Homo sapien
cctcacgagctcaccgaatctgttt

SEQ ID NO: 6048522 - DNA, 25 bp, Homo sapien
aaggagaaccttgaagttagcggtg

SEQ ID NO: 6048523 - DNA, 25 bp, Homo sapien
ccgaagaccaattgtatgccattac

SEQ ID NO: 6048524 - DNA, 25 bp, Homo sapien
aaccttgaagttagcggtgaaaatg

SEQ ID NO: 6048525 - DNA, 25 bp, Homo sapien
ttcaaacctcacgagctcaccgaat

SEQ ID NO: 6048526 - DNA, 25 bp, Homo sapien
tctcgttatgcaaccaaggatggtg

SEQ ID NO: 6048527 - DNA, 25 bp, Homo sapien
actgccttcaaacctcacgagctca

SEQ ID NO: 6048528 - DNA, 25 bp, Homo sapien
gatggtgtggcccatcttttaaaca

SEQ ID NO: 6048529 - DNA, 25 bp, Homo sapien
aagagtcagtttgcaagatatcaag

SEQ ID NO: 6048530 - DNA, 25 bp, Homo sapien
tacaagactgccttcaaacctcacg

SEQ ID NO: 6048531 - DNA, 25 bp, Homo sapien
accttggatagggaatacatcactt

SEQ ID NO: 6048532 - DNA, 25 bp, Homo sapien
ccgctagagacgcacctactaaaat

SEQ ID NO: 6048533 - DNA, 25 bp, Homo sapien
tagcggtgaaaatgttgttgaggcc

SEQ ID NO: 6048534 - DNA, 25 bp, Homo sapien
aatgtccggtaaagagcgccgaaga

SEQ ID NO: 6048535 - DNA, 25 bp, Homo sapien
gccctagcagacgtgctatacaaga

SEQ ID NO: 6048536 - DNA, 25 bp, Homo sapien
cgtttccgctagagacgcacctact

SEQ ID NO: 6048537 - DNA, 25 bp, Homo sapien
tgaagttagcggtgaaaatgttgtt

SEQ ID NO: 6048538 - DNA, 25 bp, Homo sapien
gttgttgaggccgatttgaaaagat

SEQ ID NO: 6048539 - DNA, 25 bp, Homo sapien
tctgttttgcctgctgctagatacg

SEQ ID NO: 6048540 - DNA, 25 bp, Homo sapien
agatacgattatgcggtcgctgaac

SEQ ID NO: 6048541 - DNA, 25 bp, Homo sapien
cattacattcagaaagggtttagga

SEQ ID NO: 6048542 - DNA, 25 bp, Homo sapien
gaatacatcactttgaaagctacct

SEQ ID NO: 6048543 - DNA, 25 bp, Homo sapien
accaaggatggtgtggcccatcttt

SEQ ID NO: 6048544 - DNA, 25 bp, Homo sapien
tttggttcggatttactcaccaatg

SEQ ID NO: 6048545 - DNA, 25 bp, Homo sapien
ccgtcagtgaatttatcaagtttag

SEQ ID NO: 6048546 - DNA, 25 bp, Homo sapien
gtaaataggccgccgtcagtgaatt

SEQ ID NO: 6048547 - DNA, 25 bp, Homo sapien
caacaaatcttttcaaatcggcctc

SEQ ID NO: 6048548 - DNA, 25 bp, Homo sapien
aagtccttgcccttcttcaaatccg

SEQ ID NO: 6048549 - DNA, 25 bp, Homo sapien
aatccgcaacaattttcttgatgtt

SEQ ID NO: 6048550 - DNA, 25 bp, Homo sapien
ggcctcaacaacattttcaccgcta

SEQ ID NO: 6048551 - DNA, 25 bp, Homo sapien
gacttacctgcaggcaaagtgctta

SEQ ID NO: 6048552 - DNA, 25 bp, Homo sapien
attcattttggacggcattctttaa

SEQ ID NO: 6048553 - DNA, 25 bp, Homo sapien
ctgcaggcaaagtgcttaacagtga

SEQ ID NO: 6048554 - DNA, 25 bp, Homo sapien
tgcaaactgactctttccacaccat

SEQ ID NO: 6048555 - DNA, 25 bp, Homo sapien
cttcacggcgtcaaaatttagttca

SEQ ID NO: 6048556 - DNA, 25 bp, Homo sapien
cttacaaacagagtaaataggccgc

SEQ ID NO: 6048557 - DNA, 25 bp, Homo sapien
ccgggataccaatggcggcaacgga

SEQ ID NO: 6048558 - DNA, 25 bp, Homo sapien
tacatagttgaattttcccaactta

SEQ ID NO: 6048559 - DNA, 25 bp, Homo sapien
accaatgacttacctgcaggcaaag

SEQ ID NO: 6048560 - DNA, 25 bp, Homo sapien
gcaaagtccttgatatcttgcaaac

SEQ ID NO: 6048561 - DNA, 25 bp, Homo sapien
tctccttggtatagactttgtccgc

SEQ ID NO: 6048562 - DNA, 25 bp, Homo sapien
atcttttcaaatcggcctcaacaac

SEQ ID NO: 6048563 - DNA, 25 bp, Homo sapien
tggtatagactttgtccgcaaagtc

SEQ ID NO: 6048564 - DNA, 25 bp, Homo sapien
atatcttgcaaactgactctttcca

SEQ ID NO: 6048565 - DNA, 25 bp, Homo sapien
aaagctcggatagggcagaggtcaa

SEQ ID NO: 6048566 - DNA, 25 bp, Homo sapien
caacaattttcttgatgttggaaga

SEQ ID NO: 6048567 - DNA, 25 bp, Homo sapien
tggaagataccacggcgctgtcctg

SEQ ID NO: 6048568 - DNA, 25 bp, Homo sapien
tgagctagggaggctttgtttaccg

SEQ ID NO: 6048569 - DNA, 25 bp, Homo sapien
cattttcaccgctaacttcaaggtt

SEQ ID NO: 6048570 - DNA, 25 bp, Homo sapien
cggcattctttaactttgtgtaatt

SEQ ID NO: 6048571 - DNA, 25 bp, Homo sapien
ctttaactttgtgtaatttattgca

SEQ ID NO: 6048572 - DNA, 25 bp, Homo sapien
cggcgctgtcctggtctcttacaaa

SEQ ID NO: 6048573 - DNA, 25 bp, Homo sapien
ttgcaggggataagtccttgccctt

SEQ ID NO: 6048574 - DNA, 25 bp, Homo sapien
ctttgtgtaatttattgcaggggat

SEQ ID NO: 6048575 - DNA, 25 bp, Homo sapien
aaatagttggccaatacttcatatt

SEQ ID NO: 6048576 - DNA, 25 bp, Homo sapien
ccgagctgattaaaccggaaagctc

SEQ ID NO: 6048577 - DNA, 25 bp, Homo sapien
tgtcctggtctcttacaaacagagt

SEQ ID NO: 6048578 - DNA, 25 bp, Homo sapien
aacagagtaaataggccgccgtcag

SEQ ID NO: 6048579 - DNA, 25 bp, Homo sapien
taatttattgcaggggataagtcct

SEQ ID NO: 6048580 - DNA, 25 bp, Homo sapien
aatacttcatattgagctagggagg

SEQ ID NO: 6048581 - DNA, 25 bp, Homo sapien
caccgctaacttcaaggttctcctt

SEQ ID NO: 6048582 - DNA, 25 bp, Homo sapien
tcaaaatttagttcaattgggctgg

SEQ ID NO: 6048583 - DNA, 25 bp, Homo sapien
caacttaaagtccttcacggcgtca

SEQ ID NO: 6048584 - DNA, 25 bp, Homo sapien
tccttgatatcttgcaaactgactc

SEQ ID NO: 6048585 - DNA, 25 bp, Homo sapien
caattgggctggaaacagattcatt

SEQ ID NO: 6048586 - DNA, 25 bp, Homo sapien
ggtctcttacaaacagagtaaatag

SEQ ID NO: 6048587 - DNA, 25 bp, Homo sapien
aaccggaaagctcggatagggcaga

SEQ ID NO: 6048588 - DNA, 25 bp, Homo sapien
tgtttaccgggataccaatggcggc

SEQ ID NO: 6048589 - DNA, 25 bp, Homo sapien
tgactctttccacaccatcgtataa

SEQ ID NO: 6048590 - DNA, 25 bp, Homo sapien
ttggacggcattctttaactttgtg

SEQ ID NO: 6048591 - DNA, 25 bp, Homo sapien
aaacagattcattttggacggcatt

SEQ ID NO: 6048592 - DNA, 25 bp, Homo sapien
ggctggaaacagattcattttggac

SEQ ID NO: 6048593 - DNA, 25 bp, Homo sapien
gggataagtccttgcccttcttcaa

SEQ ID NO: 6048594 - DNA, 25 bp, Homo sapien
gtgaatttatcaagtttagccgagc

SEQ ID NO: 6048595 - DNA, 25 bp, Homo sapien
caacaacattttcaccgctaacttc

SEQ ID NO: 6048596 - DNA, 25 bp, Homo sapien
tcggatagggcagaggtcaaatagt

SEQ ID NO: 6048597 - DNA, 25 bp, Homo sapien
gcaaagtgcttaacagtgactcgtc

SEQ ID NO: 6048598 - DNA, 25 bp, Homo sapien
ttactcaccaatgacttacctgcag

SEQ ID NO: 6048599 - DNA, 25 bp, Homo sapien
agggcagaggtcaaatagttggcca

SEQ ID NO: 6048600 - DNA, 25 bp, Homo sapien
tcttcaaatccgcaacaattttctt

SEQ ID NO: 6048601 - DNA, 25 bp, Homo sapien
actcgtcaacaaatcttttcaaatc

SEQ ID NO: 6048602 - DNA, 25 bp, Homo sapien
caaggttctccttggtatagacttt

SEQ ID NO: 6048603 - DNA, 25 bp, Homo sapien
agtccttcacggcgtcaaaatttag

SEQ ID NO: 6048604 - DNA, 25 bp, Homo sapien
tttagttcaattgggctggaaacag

SEQ ID NO: 6048605 - DNA, 25 bp, Homo sapien
gacggctacatagttgaattttccc

SEQ ID NO: 6048606 - DNA, 25 bp, Homo sapien
tcggatttactcaccaatgacttac

SEQ ID NO: 6048607 - DNA, 25 bp, Homo sapien
taccaatggcggcaacggagtcacc

SEQ ID NO: 6048608 - DNA, 25 bp, Homo sapien
acagtgactcgtcaacaaatctttt

SEQ ID NO: 6048609 - DNA, 25 bp, Homo sapien
gcaacggagtcaccgataaacctta

SEQ ID NO: 6048610 - DNA, 25 bp, Homo sapien
ttggccaatacttcatattgagcta

SEQ ID NO: 6048611 - DNA, 25 bp, Homo sapien
agactttgtccgcaaagtccttgat

SEQ ID NO: 6048612 - DNA, 25 bp, Homo sapien
caaatcggcctcaacaacattttca

SEQ ID NO: 6048613 - DNA, 25 bp, Homo sapien
tcatattgagctagggaggctttgt

SEQ ID NO: 6048614 - DNA, 25 bp, Homo sapien
aggccgccgtcagtgaatttatcaa

SEQ ID NO: 6048615 - DNA, 25 bp, Homo sapien
ataccacggcgctgtcctggtctct

SEQ ID NO: 6048616 - DNA, 25 bp, Homo sapien
tgcccttcttcaaatccgcaacaat

SEQ ID NO: 6048617 - DNA, 25 bp, Homo sapien
ttgtccgcaaagtccttgatatctt

SEQ ID NO: 6048618 - DNA, 25 bp, Homo sapien
tgatgttggaagataccacggcgct

SEQ ID NO: 6048619 - DNA, 25 bp, Homo sapien
gtttagccgagctgattaaaccgga

SEQ ID NO: 6048620 - DNA, 25 bp, Homo sapien
ttttcttgatgttggaagataccac

SEQ ID NO: 6048621 - DNA, 25 bp, Homo sapien
atcaccgacggctacatagttgaat

SEQ ID NO: 6048622 - DNA, 25 bp, Homo sapien
atggcggcaacggagtcaccgataa

SEQ ID NO: 6048623 - DNA, 25 bp, Homo sapien
ttatcaagtttagccgagctgatta

SEQ ID NO: 6048624 - DNA, 25 bp, Homo sapien
acggcgtcaaaatttagttcaattg

SEQ ID NO: 6048625 - DNA, 25 bp, Homo sapien
taacttcaaggttctccttggtata

SEQ ID NO: 6048626 - DNA, 25 bp, Homo sapien
tgcttaacagtgactcgtcaacaaa

SEQ ID NO: 6048627 - DNA, 25 bp, Homo sapien
gaggtcaaatagttggccaatactt

SEQ ID NO: 6048628 - DNA, 25 bp, Homo sapien
tgattaaaccggaaagctcggatag

SEQ ID NO: 6048629 - DNA, 25 bp, Homo sapien
agagactactcgttaggtgcgcggc

SEQ ID NO: 6048630 - DNA, 25 bp, Homo sapien
taagcttaagttcgcgcgtccgttc

SEQ ID NO: 6048631 - DNA, 25 bp, Homo sapien
cgcggcacgactgggccgctataac

SEQ ID NO: 6048632 - DNA, 25 bp, Homo sapien
gatagtcagccgacgcgatatagaa

SEQ ID NO: 6048633 - DNA, 25 bp, Homo sapien
gaacgtcgcgagagagactactcgt

SEQ ID NO: 6048634 - DNA, 25 bp, Homo sapien
gctaccaggccacgcacctcgatac

SEQ ID NO: 6048635 - DNA, 25 bp, Homo sapien
tatagagaacagcacgtacgatcga

SEQ ID NO: 6048636 - DNA, 25 bp, Homo sapien
tactcgttaggtgcgcggcacgact

SEQ ID NO: 6048637 - DNA, 25 bp, Homo sapien
tagagcgttagcgtggcatccgcgt

SEQ ID NO: 6048638 - DNA, 25 bp, Homo sapien
gctgtgcgtcatgtatgtaagcgta

SEQ ID NO: 6048639 - DNA, 25 bp, Homo sapien
cgcgagagagactactcgttaggtg

SEQ ID NO: 6048640 - DNA, 25 bp, Homo sapien
ggctcgtacacgcggatttactcta

SEQ ID NO: 6048641 - DNA, 25 bp, Homo sapien
atctgtgcatctactcgcgacggga

SEQ ID NO: 6048642 - DNA, 25 bp, Homo sapien
cgtcatgtatgtaagcgtattagac

SEQ ID NO: 6048643 - DNA, 25 bp, Homo sapien
gtcgaacataaacgactttgtacgc

SEQ ID NO: 6048644 - DNA, 25 bp, Homo sapien
acagtacgtcgatcgagcatctgtg

SEQ ID NO: 6048645 - DNA, 25 bp, Homo sapien
tcaattacagtacgtcgatcgagca

SEQ ID NO: 6048646 - DNA, 25 bp, Homo sapien
gcatctactcgcgacgggatagaat

SEQ ID NO: 6048647 - DNA, 25 bp, Homo sapien
ggatagaatctcaatgcgtagagcg

SEQ ID NO: 6048648 - DNA, 25 bp, Homo sapien
acgttatttctatgattagacgatc

SEQ ID NO: 6048649 - DNA, 25 bp, Homo sapien
tatagaactgcaatgggcgttattg

SEQ ID NO: 6048650 - DNA, 25 bp, Homo sapien
gcggccgatagtcagccgacgcgat

SEQ ID NO: 6048651 - DNA, 25 bp, Homo sapien
tgtacgctgtgcgtcatgtatgtaa

SEQ ID NO: 6048652 - DNA, 25 bp, Homo sapien
ttaagttcgcgcgtccgttcgcaaa

SEQ ID NO: 6048653 - DNA, 25 bp, Homo sapien
acacgtagatttaagcttaagttcg

SEQ ID NO: 6048654 - DNA, 25 bp, Homo sapien
gcggctacgtacgtaatgtcaatta

SEQ ID NO: 6048655 - DNA, 25 bp, Homo sapien
cgactttgtacgctgtgcgtcatgt

SEQ ID NO: 6048656 - DNA, 25 bp, Homo sapien
cataaacgactttgtacgctgtgcg

SEQ ID NO: 6048657 - DNA, 25 bp, Homo sapien
gcgaccacaccagcgtattaacgtc

SEQ ID NO: 6048658 - DNA, 25 bp, Homo sapien
gcgacgggatagaatctcaatgcgt

SEQ ID NO: 6048659 - DNA, 25 bp, Homo sapien
aatgcgtagagcgttagcgtggcat

SEQ ID NO: 6048660 - DNA, 25 bp, Homo sapien
gaacagcacgtacgatcgattctga

SEQ ID NO: 6048661 - DNA, 25 bp, Homo sapien
atgggcgttattgcgtcgtatagag

SEQ ID NO: 6048662 - DNA, 25 bp, Homo sapien
tactagacgatgtatcgcttacgat

SEQ ID NO: 6048663 - DNA, 25 bp, Homo sapien
aagcgtattagacgcgcgtggcgtc

SEQ ID NO: 6048664 - DNA, 25 bp, Homo sapien
acacgtacgttatttctatgattag

SEQ ID NO: 6048665 - DNA, 25 bp, Homo sapien
tatcgcttacgatcgctaaggtgcg

SEQ ID NO: 6048666 - DNA, 25 bp, Homo sapien
acgactgggccgctataacacgtag

SEQ ID NO: 6048667 - DNA, 25 bp, Homo sapien
tccgcgacttctcgtaaagcggccg

SEQ ID NO: 6048668 - DNA, 25 bp, Homo sapien
cgatcgattctgaactcggcggcta

SEQ ID NO: 6048669 - DNA, 25 bp, Homo sapien
taggtgcgcggcacgactgggccgc

SEQ ID NO: 6048670 - DNA, 25 bp, Homo sapien
tactcgcgacgggatagaatctcaa

SEQ ID NO: 6048671 - DNA, 25 bp, Homo sapien
cagccgacgcgatatagaactgcaa

SEQ ID NO: 6048672 - DNA, 25 bp, Homo sapien
cgcaaaaacctaatcgcggaagctc

SEQ ID NO: 6048673 - DNA, 25 bp, Homo sapien
gcacctactggacaggcgtactaga

SEQ ID NO: 6048674 - DNA, 25 bp, Homo sapien
gctataacacgtagatttaagctta

SEQ ID NO: 6048675 - DNA, 25 bp, Homo sapien
acttctcgtaaagcggccgatagtc

SEQ ID NO: 6048676 - DNA, 25 bp, Homo sapien
aatctcaatgcgtagagcgttagcg

SEQ ID NO: 6048677 - DNA, 25 bp, Homo sapien
acgatgtatcgcttacgatcgctaa

SEQ ID NO: 6048678 - DNA, 25 bp, Homo sapien
gttagcgtggcatccgcgttatgtg

SEQ ID NO: 6048679 - DNA, 25 bp, Homo sapien
aggtgcggctcgtacacgcggattt

SEQ ID NO: 6048680 - DNA, 25 bp, Homo sapien
aacgtcgcgatgctaccaggccacg

SEQ ID NO: 6048681 - DNA, 25 bp, Homo sapien
tacacgcggatttactctaggacgg

SEQ ID NO: 6048682 - DNA, 25 bp, Homo sapien
tgattagacgatcgcggtctggact

SEQ ID NO: 6048683 - DNA, 25 bp, Homo sapien
gtggcatccgcgttatgtgcaccta

SEQ ID NO: 6048684 - DNA, 25 bp, Homo sapien
cacgtacgatcgattctgaactcgg

SEQ ID NO: 6048685 - DNA, 25 bp, Homo sapien
tcgcgcgtccgttcgcaaaaaccta

SEQ ID NO: 6048686 - DNA, 25 bp, Homo sapien
aggccacgcacctcgatacgtcgaa

SEQ ID NO: 6048687 - DNA, 25 bp, Homo sapien
gcacctcgatacgtcgaacataaac

SEQ ID NO: 6048688 - DNA, 25 bp, Homo sapien
ggtagagtagatccgcgaccacacc

SEQ ID NO: 6048689 - DNA, 25 bp, Homo sapien
tgggccgctataacacgtagattta

SEQ ID NO: 6048690 - DNA, 25 bp, Homo sapien
cgtaaagcggccgatagtcagccga

SEQ ID NO: 6048691 - DNA, 25 bp, Homo sapien
attctgaactcggcggctacgtacg

SEQ ID NO: 6048692 - DNA, 25 bp, Homo sapien
gttattgcgtcgtatagagaacagc

SEQ ID NO: 6048693 - DNA, 25 bp, Homo sapien
tcgagcatctgtgcatctactcgcg

SEQ ID NO: 6048694 - DNA, 25 bp, Homo sapien
acaccagcgtattaacgtcgcgatg

SEQ ID NO: 6048695 - DNA, 25 bp, Homo sapien
cggatttactctaggacggtagagt

SEQ ID NO: 6048696 - DNA, 25 bp, Homo sapien
tttctatgattagacgatcgcggtc

SEQ ID NO: 6048697 - DNA, 25 bp, Homo sapien
gcgtcgtatagagaacagcacgtac

SEQ ID NO: 6048698 - DNA, 25 bp, Homo sapien
ggaagctccgcgacttctcgtaaag

SEQ ID NO: 6048699 - DNA, 25 bp, Homo sapien
tactctaggacggtagagtagatcc

SEQ ID NO: 6048700 - DNA, 25 bp, Homo sapien
aatcgcggaagctccgcgacttctc

SEQ ID NO: 6048701 - DNA, 25 bp, Homo sapien
taggacggtagagtagatccgcgac

SEQ ID NO: 6048702 - DNA, 25 bp, Homo sapien
cgatacgtcgaacataaacgacttt

SEQ ID NO: 6048703 - DNA, 25 bp, Homo sapien
aacctaatcgcggaagctccgcgac

SEQ ID NO: 6048704 - DNA, 25 bp, Homo sapien
cgcgtggcgtcgacacgtacgttat

SEQ ID NO: 6048705 - DNA, 25 bp, Homo sapien
tagatttaagcttaagttcgcgcgt

SEQ ID NO: 6048706 - DNA, 25 bp, Homo sapien
gcgtcgacacgtacgttatttctat

SEQ ID NO: 6048707 - DNA, 25 bp, Homo sapien
acgtacgtaatgtcaattacagtac

SEQ ID NO: 6048708 - DNA, 25 bp, Homo sapien
ttagacgcgcgtggcgtcgacacgt

SEQ ID NO: 6048709 - DNA, 25 bp, Homo sapien
gtatgtaagcgtattagacgcgcgt

SEQ ID NO: 6048710 - DNA, 25 bp, Homo sapien
acgcgatatagaactgcaatgggcg

SEQ ID NO: 6048711 - DNA, 25 bp, Homo sapien
actggacaggcgtactagacgatgt

SEQ ID NO: 6048712 - DNA, 25 bp, Homo sapien
tccgcgttatgtgcacctactggac

SEQ ID NO: 6048713 - DNA, 25 bp, Homo sapien
agatccgcgaccacaccagcgtatt

SEQ ID NO: 6048714 - DNA, 25 bp, Homo sapien
gcgtattaacgtcgcgatgctacca

SEQ ID NO: 6048715 - DNA, 25 bp, Homo sapien
aactcggcggctacgtacgtaatgt

SEQ ID NO: 6048716 - DNA, 25 bp, Homo sapien
caggcgtactagacgatgtatcgct

SEQ ID NO: 6048717 - DNA, 25 bp, Homo sapien
tcgctaaggtgcggctcgtacacgc

SEQ ID NO: 6048718 - DNA, 25 bp, Homo sapien
actgcaatgggcgttattgcgtcgt

SEQ ID NO: 6048719 - DNA, 25 bp, Homo sapien
cgtcgatcgagcatctgtgcatcta

SEQ ID NO: 6048720 - DNA, 25 bp, Homo sapien
ctaccgaacgtcgcgagagagacta

SEQ ID NO: 6048721 - DNA, 25 bp, Homo sapien
ttatgtgcacctactggacaggcgt

SEQ ID NO: 6048722 - DNA, 25 bp, Homo sapien
gtaatgtcaattacagtacgtcgat

SEQ ID NO: 6048723 - DNA, 25 bp, Homo sapien
ttacgatcgctaaggtgcggctcgt

SEQ ID NO: 6048724 - DNA, 25 bp, Homo sapien
gtcctagcgcgatacgacatcagag

SEQ ID NO: 6048725 - DNA, 25 bp, Homo sapien
tgcgctcttcggcgcgaactaaatg

SEQ ID NO: 6048726 - DNA, 25 bp, Homo sapien
ccacagtaagtaccgcgtagccttt

SEQ ID NO: 6048727 - DNA, 25 bp, Homo sapien
aacgaccgctactactgccgcgaat

SEQ ID NO: 6048728 - DNA, 25 bp, Homo sapien
cgctgaatatgtcgcacgtatcgta

SEQ ID NO: 6048729 - DNA, 25 bp, Homo sapien
acgcgaacgattagtgcaatcgaag

SEQ ID NO: 6048730 - DNA, 25 bp, Homo sapien
taggtatgcgctcttcggcgcgaac

SEQ ID NO: 6048731 - DNA, 25 bp, Homo sapien
acgattagtgcaatcgaaggttaat

SEQ ID NO: 6048732 - DNA, 25 bp, Homo sapien
tttctcgaggtgtaacgaccgctac

SEQ ID NO: 6048733 - DNA, 25 bp, Homo sapien
ggtaggtcgcgcatattgcaatcaa

SEQ ID NO: 6048734 - DNA, 25 bp, Homo sapien
cgcacgtatcgtagggcacctacgg

SEQ ID NO: 6048735 - DNA, 25 bp, Homo sapien
atatgtcgcacgtatcgtagggcac

SEQ ID NO: 6048736 - DNA, 25 bp, Homo sapien
tcgtgcgcgtcttacacagccgcgt

SEQ ID NO: 6048737 - DNA, 25 bp, Homo sapien
ggatatcgcgcgtgtcgtccatgga

SEQ ID NO: 6048738 - DNA, 25 bp, Homo sapien
tcgtacgttaactcacaaatcggtc

SEQ ID NO: 6048739 - DNA, 25 bp, Homo sapien
gcgagaccgctcgtaagttccctat

SEQ ID NO: 6048740 - DNA, 25 bp, Homo sapien
ggttaatcgtgcgcgtcttacacag

SEQ ID NO: 6048741 - DNA, 25 bp, Homo sapien
ctcaacaaatgttctacaacgagcg

SEQ ID NO: 6048742 - DNA, 25 bp, Homo sapien
agtatcttgtacgtcctagcgcgat

SEQ ID NO: 6048743 - DNA, 25 bp, Homo sapien
ggtcgaggaactacacgcgatgatc

SEQ ID NO: 6048744 - DNA, 25 bp, Homo sapien
cctaccggtcgaggaactacacgcg

SEQ ID NO: 6048745 - DNA, 25 bp, Homo sapien
taggctgtacctaagcagtatatca

SEQ ID NO: 6048746 - DNA, 25 bp, Homo sapien
atcagaggtaggtcgcgcatattgc

SEQ ID NO: 6048747 - DNA, 25 bp, Homo sapien
acgcccgaggaccatcacacgcgaa

SEQ ID NO: 6048748 - DNA, 25 bp, Homo sapien
aagcagtatatcacgcccgaggacc

SEQ ID NO: 6048749 - DNA, 25 bp, Homo sapien
ctcacaaatcggtcgcgtagtatct

SEQ ID NO: 6048750 - DNA, 25 bp, Homo sapien
tactgccgcgaataggctgtaccta

SEQ ID NO: 6048751 - DNA, 25 bp, Homo sapien
acacgtattacggcgcgaccgctga

SEQ ID NO: 6048752 - DNA, 25 bp, Homo sapien
tccaatgcaccgtcacgccgctact

SEQ ID NO: 6048753 - DNA, 25 bp, Homo sapien
cgttaactcacaaatcggtcgcgta

SEQ ID NO: 6048754 - DNA, 25 bp, Homo sapien
tctacaacgagcgtccaatgcaccg

SEQ ID NO: 6048755 - DNA, 25 bp, Homo sapien
ctagatcgcgaatgcttctttctcg

SEQ ID NO: 6048756 - DNA, 25 bp, Homo sapien
cgctactaggtatgcgctcttcggc

SEQ ID NO: 6048757 - DNA, 25 bp, Homo sapien
ctaaatgcatagacacgtattacgg

SEQ ID NO: 6048758 - DNA, 25 bp, Homo sapien
cgatgatcggccggcgtccacagta

SEQ ID NO: 6048759 - DNA, 25 bp, Homo sapien
ccgctcgtaagttccctattcgacg

SEQ ID NO: 6048760 - DNA, 25 bp, Homo sapien
atcgcaaaagaaagaactcgaaacg

SEQ ID NO: 6048761 - DNA, 25 bp, Homo sapien
tacacagccgcgtcgtacgttaact

SEQ ID NO: 6048762 - DNA, 25 bp, Homo sapien
aaatgttctacaacgagcgtccaat

SEQ ID NO: 6048763 - DNA, 25 bp, Homo sapien
attacggcgcgaccgctgaatatgt

SEQ ID NO: 6048764 - DNA, 25 bp, Homo sapien
gtacctaagcagtatatcacgcccg

SEQ ID NO: 6048765 - DNA, 25 bp, Homo sapien
acgcgtatcgcaaaagaaagaactc

SEQ ID NO: 6048766 - DNA, 25 bp, Homo sapien
cgcgaataggctgtacctaagcagt

SEQ ID NO: 6048767 - DNA, 25 bp, Homo sapien
agtgcaatcgaaggttaatcgtgcg

SEQ ID NO: 6048768 - DNA, 25 bp, Homo sapien
gttgaaatatgacctacgtttagcg

SEQ ID NO: 6048769 - DNA, 25 bp, Homo sapien
ttgtacgtcctagcgcgatacgaca

SEQ ID NO: 6048770 - DNA, 25 bp, Homo sapien
aatcggtcgcgtagtatcttgtacg

SEQ ID NO: 6048771 - DNA, 25 bp, Homo sapien
tgtcgtccatggacgcgtatcgcaa

SEQ ID NO: 6048772 - DNA, 25 bp, Homo sapien
cgctactactgccgcgaataggctg

SEQ ID NO: 6048773 - DNA, 25 bp, Homo sapien
cgcgcgtgtcgtccatggacgcgta

SEQ ID NO: 6048774 - DNA, 25 bp, Homo sapien
ggcgtccacagtaagtaccgcgtag

SEQ ID NO: 6048775 - DNA, 25 bp, Homo sapien
gcaccgtcacgccgctactaggtat

SEQ ID NO: 6048776 - DNA, 25 bp, Homo sapien
atatgacctacgtttagcgcgagac

SEQ ID NO: 6048777 - DNA, 25 bp, Homo sapien
cgcgaactaaatgcatagacacgta

SEQ ID NO: 6048778 - DNA, 25 bp, Homo sapien
ggaactacacgcgatgatcggccgg

SEQ ID NO: 6048779 - DNA, 25 bp, Homo sapien
tgcttctttctcgaggtgtaacgac

SEQ ID NO: 6048780 - DNA, 25 bp, Homo sapien
gccgcgtcgtacgttaactcacaaa

SEQ ID NO: 6048781 - DNA, 25 bp, Homo sapien
cctacgtttagcgcgagaccgctcg

SEQ ID NO: 6048782 - DNA, 25 bp, Homo sapien
cctgggctagatcgcgaatgcttct

SEQ ID NO: 6048783 - DNA, 25 bp, Homo sapien
cgcgaatgcttctttctcgaggtgt

SEQ ID NO: 6048784 - DNA, 25 bp, Homo sapien
tacgacatcagaggtaggtcgcgca

SEQ ID NO: 6048785 - DNA, 25 bp, Homo sapien
tcacgccgctactaggtatgcgctc

SEQ ID NO: 6048786 - DNA, 25 bp, Homo sapien
tattgcaatcaaccaggcacgcgac

SEQ ID NO: 6048787 - DNA, 25 bp, Homo sapien
gcgtagccttttcctgggctagatc

SEQ ID NO: 6048788 - DNA, 25 bp, Homo sapien
tttagcgcgagaccgctcgtaagtt

SEQ ID NO: 6048789 - DNA, 25 bp, Homo sapien
ctaggtctcaacaaatgttctacaa

SEQ ID NO: 6048790 - DNA, 25 bp, Homo sapien
tacacgcgatgatcggccggcgtcc

SEQ ID NO: 6048791 - DNA, 25 bp, Homo sapien
cttcggcgcgaactaaatgcataga

SEQ ID NO: 6048792 - DNA, 25 bp, Homo sapien
gcgtcttacacagccgcgtcgtacg

SEQ ID NO: 6048793 - DNA, 25 bp, Homo sapien
tcggccggcgtccacagtaagtacc

SEQ ID NO: 6048794 - DNA, 25 bp, Homo sapien
gcgcgatacgacatcagaggtaggt

SEQ ID NO: 6048795 - DNA, 25 bp, Homo sapien
tatatcacgcccgaggaccatcaca

SEQ ID NO: 6048796 - DNA, 25 bp, Homo sapien
tcgcgtagtatcttgtacgtcctag

SEQ ID NO: 6048797 - DNA, 25 bp, Homo sapien
acgcgactaggtctcaacaaatgtt

SEQ ID NO: 6048798 - DNA, 25 bp, Homo sapien
tatcgtagggcacctacgggatatc

SEQ ID NO: 6048799 - DNA, 25 bp, Homo sapien
gtaagttccctattcgacgcgcaga

SEQ ID NO: 6048800 - DNA, 25 bp, Homo sapien
gcatagacacgtattacggcgcgac

SEQ ID NO: 6048801 - DNA, 25 bp, Homo sapien
gatccctaccggtcgaggaactaca

SEQ ID NO: 6048802 - DNA, 25 bp, Homo sapien
agggcacctacgggatatcgcgcgt

SEQ ID NO: 6048803 - DNA, 25 bp, Homo sapien
cgcgaccgctgaatatgtcgcacgt

SEQ ID NO: 6048804 - DNA, 25 bp, Homo sapien
catcacacgcgaacgattagtgcaa

SEQ ID NO: 6048805 - DNA, 25 bp, Homo sapien
atcgaaggttaatcgtgcgcgtctt

SEQ ID NO: 6048806 - DNA, 25 bp, Homo sapien
gaggtgtaacgaccgctactactgc

SEQ ID NO: 6048807 - DNA, 25 bp, Homo sapien
cgcgcatattgcaatcaaccaggca

SEQ ID NO: 6048808 - DNA, 25 bp, Homo sapien
taccgcgtagccttttcctgggcta

SEQ ID NO: 6048809 - DNA, 25 bp, Homo sapien
aatcaaccaggcacgcgactaggtc

SEQ ID NO: 6048810 - DNA, 25 bp, Homo sapien
ccaggcacgcgactaggtctcaaca

SEQ ID NO: 6048811 - DNA, 25 bp, Homo sapien
ccttttcctgggctagatcgcgaat

SEQ ID NO: 6048812 - DNA, 25 bp, Homo sapien
ccatggacgcgtatcgcaaaagaaa

SEQ ID NO: 6048813 - DNA, 25 bp, Homo sapien
cgaaacgttgaaatatgacctacgt

SEQ ID NO: 6048814 - DNA, 25 bp, Homo sapien
aacgagcgtccaatgcaccgtcacg

SEQ ID NO: 6048815 - DNA, 25 bp, Homo sapien
agaactcgaaacgttgaaatatgac

SEQ ID NO: 6048816 - DNA, 25 bp, Homo sapien
gaggaccatcacacgcgaacgatta

SEQ ID NO: 6048817 - DNA, 25 bp, Homo sapien
cctacgggatatcgcgcgtgtcgtc

SEQ ID NO: 6048818 - DNA, 25 bp, Homo sapien
tactgagccggcgtcgtatccgacg

SEQ ID NO: 6048819 - DNA, 25 bp, Homo sapien
tgtcggacagaaaggcgagacacgc

SEQ ID NO: 6048820 - DNA, 25 bp, Homo sapien
gcaaactattatcagatactagccg

SEQ ID NO: 6048821 - DNA, 25 bp, Homo sapien
tgttgttctcgaggacggtacgact

SEQ ID NO: 6048822 - DNA, 25 bp, Homo sapien
aacacctgtatcgacatacgccgag

SEQ ID NO: 6048823 - DNA, 25 bp, Homo sapien
tgcgacacgactagtttatctctcc

SEQ ID NO: 6048824 - DNA, 25 bp, Homo sapien
cgcggttcagactggtattgcgcta

SEQ ID NO: 6048825 - DNA, 25 bp, Homo sapien
gcgcgccaatttattgatacgtcga

SEQ ID NO: 6048826 - DNA, 25 bp, Homo sapien
taccggtttatggtctcggtcgatc

SEQ ID NO: 6048827 - DNA, 25 bp, Homo sapien
tgcggacgtataccggtttatggtc

SEQ ID NO: 6048828 - DNA, 25 bp, Homo sapien
tgatggcgacctgccgtatgacttg

SEQ ID NO: 6048829 - DNA, 25 bp, Homo sapien
gacatacgccgaggctactccagtc

SEQ ID NO: 6048830 - DNA, 25 bp, Homo sapien
ttcgaccgctgtaacacctgtatcg

SEQ ID NO: 6048831 - DNA, 25 bp, Homo sapien
tacgcaagatccgtccctaaaggat

SEQ ID NO: 6048832 - DNA, 25 bp, Homo sapien
tctctccaagtatcgacgctaggaa

SEQ ID NO: 6048833 - DNA, 25 bp, Homo sapien
agccggcgtcgtatccgacggtaga

SEQ ID NO: 6048834 - DNA, 25 bp, Homo sapien
tgcgctaagtaagtatctgatggcg

SEQ ID NO: 6048835 - DNA, 25 bp, Homo sapien
agtttatctctccaagtatcgacgc

SEQ ID NO: 6048836 - DNA, 25 bp, Homo sapien
cggcagtactgagccggcgtcgtat

SEQ ID NO: 6048837 - DNA, 25 bp, Homo sapien
acgactagtttatctctccaagtat

SEQ ID NO: 6048838 - DNA, 25 bp, Homo sapien
ctacgatagttacgcggttcagact

SEQ ID NO: 6048839 - DNA, 25 bp, Homo sapien
gcgtcacgatgtgtttctgggtagt

SEQ ID NO: 6048840 - DNA, 25 bp, Homo sapien
tacgactcacaatgctttgtgcgga

SEQ ID NO: 6048841 - DNA, 25 bp, Homo sapien
cgtcgagctcttctacgatagttac

SEQ ID NO: 6048842 - DNA, 25 bp, Homo sapien
attgatacgtcgagcccgctctgtc

SEQ ID NO: 6048843 - DNA, 25 bp, Homo sapien
tctactatcgcgaggtaacagcgct

SEQ ID NO: 6048844 - DNA, 25 bp, Homo sapien
tgtatcgacatacgccgaggctact

SEQ ID NO: 6048845 - DNA, 25 bp, Homo sapien
ggtcgatctacgggccatgcctagg

SEQ ID NO: 6048846 - DNA, 25 bp, Homo sapien
aaaggatctactatcgcgaggtaac

SEQ ID NO: 6048847 - DNA, 25 bp, Homo sapien
tgacttgctattagctcggtacgca

SEQ ID NO: 6048848 - DNA, 25 bp, Homo sapien
tagctcggtacgcaactctctggcc

SEQ ID NO: 6048849 - DNA, 25 bp, Homo sapien
gggtagtacgcaagatccgtcccta

SEQ ID NO: 6048850 - DNA, 25 bp, Homo sapien
gcctaggttagttcgaccgctgtaa

SEQ ID NO: 6048851 - DNA, 25 bp, Homo sapien
gctaggaaccgacaaactcgaagta

SEQ ID NO: 6048852 - DNA, 25 bp, Homo sapien
aagtaagtatctgatggcgacctgc

SEQ ID NO: 6048853 - DNA, 25 bp, Homo sapien
tccgacggtagaagtacgatcgcgc

SEQ ID NO: 6048854 - DNA, 25 bp, Homo sapien
ggcgagacacgcgttaacgtcgagc

SEQ ID NO: 6048855 - DNA, 25 bp, Homo sapien
gacacgcgttaacgtcgagctcttc

SEQ ID NO: 6048856 - DNA, 25 bp, Homo sapien
cgctgtaacacctgtatcgacatac

SEQ ID NO: 6048857 - DNA, 25 bp, Homo sapien
ttacttccacggttacgcacgattg

SEQ ID NO: 6048858 - DNA, 25 bp, Homo sapien
atcgcgaggtaacagcgctgcgaca

SEQ ID NO: 6048859 - DNA, 25 bp, Homo sapien
gatcgcgcaaactattatcagatac

SEQ ID NO: 6048860 - DNA, 25 bp, Homo sapien
gcgcgtcgactaccggcagtactga

SEQ ID NO: 6048861 - DNA, 25 bp, Homo sapien
cagaaaggcgagacacgcgttaacg

SEQ ID NO: 6048862 - DNA, 25 bp, Homo sapien
ggccatgcctaggttagttcgaccg

SEQ ID NO: 6048863 - DNA, 25 bp, Homo sapien
accaagatcggtccgcgtcgttact

SEQ ID NO: 6048864 - DNA, 25 bp, Homo sapien
gactaccggcagtactgagccggcg

SEQ ID NO: 6048865 - DNA, 25 bp, Homo sapien
caaactcgaagtaacgcgcacatca

SEQ ID NO: 6048866 - DNA, 25 bp, Homo sapien
accgacaaactcgaagtaacgcgca

SEQ ID NO: 6048867 - DNA, 25 bp, Homo sapien
ccgagcgcgtcacgatgtgtttctg

SEQ ID NO: 6048868 - DNA, 25 bp, Homo sapien
acgtcgagcccgctctgtccgagcg

SEQ ID NO: 6048869 - DNA, 25 bp, Homo sapien
cacgattgttgttctcgaggacggt

SEQ ID NO: 6048870 - DNA, 25 bp, Homo sapien
atcgacgctaggaaccgacaaactc

SEQ ID NO: 6048871 - DNA, 25 bp, Homo sapien
gtccctaaaggatctactatcgcga

SEQ ID NO: 6048872 - DNA, 25 bp, Homo sapien
tctacgggccatgcctaggttagtt

SEQ ID NO: 6048873 - DNA, 25 bp, Homo sapien
atcggtccgcgtcgttacttccacg

SEQ ID NO: 6048874 - DNA, 25 bp, Homo sapien
ctctgtccgagcgcgtcacgatgtg

SEQ ID NO: 6048875 - DNA, 25 bp, Homo sapien
caatttattgatacgtcgagcccgc

SEQ ID NO: 6048876 - DNA, 25 bp, Homo sapien
cagcgctgcgacacgactagtttat

SEQ ID NO: 6048877 - DNA, 25 bp, Homo sapien
gtatctgatggcgacctgccgtatg

SEQ ID NO: 6048878 - DNA, 25 bp, Homo sapien
gccgaggctactccagtcgtgtcgg

SEQ ID NO: 6048879 - DNA, 25 bp, Homo sapien
tctcgaggacggtacgactcacaat

SEQ ID NO: 6048880 - DNA, 25 bp, Homo sapien
cgatgtgtttctgggtagtacgcaa

SEQ ID NO: 6048881 - DNA, 25 bp, Homo sapien
caagtatcgacgctaggaaccgaca

SEQ ID NO: 6048882 - DNA, 25 bp, Homo sapien
cgaagtaacgcgcacatcaccaaga

SEQ ID NO: 6048883 - DNA, 25 bp, Homo sapien
tttatggtctcggtcgatctacggg

SEQ ID NO: 6048884 - DNA, 25 bp, Homo sapien
gttacgcacgattgttgttctcgag

SEQ ID NO: 6048885 - DNA, 25 bp, Homo sapien
ttagttcgaccgctgtaacacctgt

SEQ ID NO: 6048886 - DNA, 25 bp, Homo sapien
ggtctcggtcgatctacgggccatg

SEQ ID NO: 6048887 - DNA, 25 bp, Homo sapien
ctagccgcgcgccaatttattgata

SEQ ID NO: 6048888 - DNA, 25 bp, Homo sapien
aggtaacagcgctgcgacacgacta

SEQ ID NO: 6048889 - DNA, 25 bp, Homo sapien
ggacggtacgactcacaatgctttg

SEQ ID NO: 6048890 - DNA, 25 bp, Homo sapien
gcgtcgttacttccacggttacgca

SEQ ID NO: 6048891 - DNA, 25 bp, Homo sapien
agcccgctctgtccgagcgcgtcac

SEQ ID NO: 6048892 - DNA, 25 bp, Homo sapien
agatccgtccctaaaggatctacta

SEQ ID NO: 6048893 - DNA, 25 bp, Homo sapien
tcagactggtattgcgctaagtaag

SEQ ID NO: 6048894 - DNA, 25 bp, Homo sapien
ggtagaagtacgatcgcgcaaacta

SEQ ID NO: 6048895 - DNA, 25 bp, Homo sapien
cagatactagccgcgcgccaattta

SEQ ID NO: 6048896 - DNA, 25 bp, Homo sapien
gctactccagtcgtgtcggacagaa

SEQ ID NO: 6048897 - DNA, 25 bp, Homo sapien
gccgtatgacttgctattagctcgg

SEQ ID NO: 6048898 - DNA, 25 bp, Homo sapien
agtacgatcgcgcaaactattatca

SEQ ID NO: 6048899 - DNA, 25 bp, Homo sapien
tattatcagatactagccgcgcgcc

SEQ ID NO: 6048900 - DNA, 25 bp, Homo sapien
aacgcgcacatcaccaagatcggtc

SEQ ID NO: 6048901 - DNA, 25 bp, Homo sapien
tggtattgcgctaagtaagtatctg

SEQ ID NO: 6048902 - DNA, 25 bp, Homo sapien
tgctttgtgcggacgtataccggtt

SEQ ID NO: 6048903 - DNA, 25 bp, Homo sapien
acatcaccaagatcggtccgcgtcg

SEQ ID NO: 6048904 - DNA, 25 bp, Homo sapien
gctattagctcggtacgcaactctc

SEQ ID NO: 6048905 - DNA, 25 bp, Homo sapien
cgacctgccgtatgacttgctatta

SEQ ID NO: 6048906 - DNA, 25 bp, Homo sapien
ccagtcgtgtcggacagaaaggcga

SEQ ID NO: 6048907 - DNA, 25 bp, Homo sapien
cgttaacgtcgagctcttctacgat

SEQ ID NO: 6048908 - DNA, 25 bp, Homo sapien
gctcttctacgatagttacgcggtt

SEQ ID NO: 6048909 - DNA, 25 bp, Homo sapien
gtttctgggtagtacgcaagatccg

SEQ ID NO: 6048910 - DNA, 25 bp, Homo sapien
tcacaatgctttgtgcggacgtata

SEQ ID NO: 6048911 - DNA, 25 bp, Homo sapien
tagttacgcggttcagactggtatt

SEQ ID NO: 6048912 - DNA, 25 bp, Homo sapien
tccacggttacgcacgattgttgtt

SEQ ID NO: 6048913 - DNA, 25 bp, Homo sapien
cgtcgtatccgacggtagaagtacg

SEQ ID NO: 6048914 - DNA, 25 bp, Homo sapien
aggtggcacaggatagcgcgtatta

SEQ ID NO: 6048915 - DNA, 25 bp, Homo sapien
agaggatgctaacgcgtcggacaat

SEQ ID NO: 6048916 - DNA, 25 bp, Homo sapien
gacaatagtcggacaaccctatacg

SEQ ID NO: 6048917 - DNA, 25 bp, Homo sapien
gttccctgtcgggacgtacgcatag

SEQ ID NO: 6048918 - DNA, 25 bp, Homo sapien
taccgcgatcgtaagttataaccga

SEQ ID NO: 6048919 - DNA, 25 bp, Homo sapien
gccgcgacgtattagtaagtaggac

SEQ ID NO: 6048920 - DNA, 25 bp, Homo sapien
gctaacgcgtcggacaatagtcgga

SEQ ID NO: 6048921 - DNA, 25 bp, Homo sapien
acgcacgtatctcaaaaatacgcac

SEQ ID NO: 6048922 - DNA, 25 bp, Homo sapien
ttacgatagtaataatgtacgcgtc

SEQ ID NO: 6048923 - DNA, 25 bp, Homo sapien
gagcgttagtgacattatctaacgg

SEQ ID NO: 6048924 - DNA, 25 bp, Homo sapien
acctacgagcgttagtgacattatc

SEQ ID NO: 6048925 - DNA, 25 bp, Homo sapien
tctaccgcgtcgggtccgagaggat

SEQ ID NO: 6048926 - DNA, 25 bp, Homo sapien
agtcggacaaccctatacggcgcaa

SEQ ID NO: 6048927 - DNA, 25 bp, Homo sapien
acgctgtcgacatgaagactgctac

SEQ ID NO: 6048928 - DNA, 25 bp, Homo sapien
agcttagcgcgtacgcacgtatctc

SEQ ID NO: 6048929 - DNA, 25 bp, Homo sapien
taagttataaccgacgcgatagtgg

SEQ ID NO: 6048930 - DNA, 25 bp, Homo sapien
atgaaggccgcgacgtattagtaag

SEQ ID NO: 6048931 - DNA, 25 bp, Homo sapien
agccagtatggcacgccttaccgcg

SEQ ID NO: 6048932 - DNA, 25 bp, Homo sapien
cgctgcccgcgcttacgatagtaat

SEQ ID NO: 6048933 - DNA, 25 bp, Homo sapien
tctgtccgacgtacgctgtcgacat

SEQ ID NO: 6048934 - DNA, 25 bp, Homo sapien
tagtaataatgtacgcgtccgatac

SEQ ID NO: 6048935 - DNA, 25 bp, Homo sapien
ccgacgcgatagtgggttccctgtc

SEQ ID NO: 6048936 - DNA, 25 bp, Homo sapien
gatagcgcgtattattaacgctgcc

SEQ ID NO: 6048937 - DNA, 25 bp, Homo sapien
gcgtagtctgtataccgcgtagcct

SEQ ID NO: 6048938 - DNA, 25 bp, Homo sapien
gacaaccctatacggcgcaacagtc

SEQ ID NO: 6048939 - DNA, 25 bp, Homo sapien
tcgacctctgtccgacgtacgctgt

SEQ ID NO: 6048940 - DNA, 25 bp, Homo sapien
cgatagtgggttccctgtcgggacg

SEQ ID NO: 6048941 - DNA, 25 bp, Homo sapien
gtacgactacctagattctctaccg

SEQ ID NO: 6048942 - DNA, 25 bp, Homo sapien
cctatacggcgcaacagtcagctta

SEQ ID NO: 6048943 - DNA, 25 bp, Homo sapien
gccctgagcttagcgcgtacgcacg

SEQ ID NO: 6048944 - DNA, 25 bp, Homo sapien
gcgcgtacgcacgtatctcaaaaat

SEQ ID NO: 6048945 - DNA, 25 bp, Homo sapien
agccgttatacacgaagaacctacg

SEQ ID NO: 6048946 - DNA, 25 bp, Homo sapien
gcacaggatagcgcgtattattaac

SEQ ID NO: 6048947 - DNA, 25 bp, Homo sapien
ccgcgcttacgatagtaataatgta

SEQ ID NO: 6048948 - DNA, 25 bp, Homo sapien
tcggaatgatgataatactcgacct

SEQ ID NO: 6048949 - DNA, 25 bp, Homo sapien
acgcgtccgatactgagcctcgcga

SEQ ID NO: 6048950 - DNA, 25 bp, Homo sapien
tgctacgggatatccgaaaaaggag

SEQ ID NO: 6048951 - DNA, 25 bp, Homo sapien
ctgttctcgagcgtacgactaccta

SEQ ID NO: 6048952 - DNA, 25 bp, Homo sapien
aacagtcagcttaccgcgaccgttt

SEQ ID NO: 6048953 - DNA, 25 bp, Homo sapien
gcgtcgggtccgagaggatgctaac

SEQ ID NO: 6048954 - DNA, 25 bp, Homo sapien
tacgcacgatcgagccagtatggca

SEQ ID NO: 6048955 - DNA, 25 bp, Homo sapien
cgatcgtaagttataaccgacgcga

SEQ ID NO: 6048956 - DNA, 25 bp, Homo sapien
tcgagcgtacgactacctagattct

SEQ ID NO: 6048957 - DNA, 25 bp, Homo sapien
cggcgcaacagtcagcttaccgcga

SEQ ID NO: 6048958 - DNA, 25 bp, Homo sapien
tatacacgaagaacctacgagcgtt

SEQ ID NO: 6048959 - DNA, 25 bp, Homo sapien
cagcttaccgcgaccgtttagttcg

SEQ ID NO: 6048960 - DNA, 25 bp, Homo sapien
gcatagaatgaaggccgcgacgtat

SEQ ID NO: 6048961 - DNA, 25 bp, Homo sapien
gcgtataggtgtcttcccgatgcct

SEQ ID NO: 6048962 - DNA, 25 bp, Homo sapien
tgtcgggacgtacgcatagaatgaa

SEQ ID NO: 6048963 - DNA, 25 bp, Homo sapien
tcgacatgaagactgctacgggata

SEQ ID NO: 6048964 - DNA, 25 bp, Homo sapien
tataaccgacgcgatagtgggttcc

SEQ ID NO: 6048965 - DNA, 25 bp, Homo sapien
tagtaagtaggacgcgcgactaaat

SEQ ID NO: 6048966 - DNA, 25 bp, Homo sapien
tcttcccgatgcctagcgagccgtt

SEQ ID NO: 6048967 - DNA, 25 bp, Homo sapien
gcgtattattaacgctgcccgcgct

SEQ ID NO: 6048968 - DNA, 25 bp, Homo sapien
acgtattagtaagtaggacgcgcga

SEQ ID NO: 6048969 - DNA, 25 bp, Homo sapien
tgatgataatactcgacctctgtcc

SEQ ID NO: 6048970 - DNA, 25 bp, Homo sapien
cgtgcactgttctcgagcgtacgac

SEQ ID NO: 6048971 - DNA, 25 bp, Homo sapien
cgatgcctagcgagccgttatacac

SEQ ID NO: 6048972 - DNA, 25 bp, Homo sapien
tttagttcggaatgatgataatact

SEQ ID NO: 6048973 - DNA, 25 bp, Homo sapien
cattatctaacggttcgcgtaacag

SEQ ID NO: 6048974 - DNA, 25 bp, Homo sapien
cgaagaacctacgagcgttagtgac

SEQ ID NO: 6048975 - DNA, 25 bp, Homo sapien
agattctctaccgcgtcgggtccga

SEQ ID NO: 6048976 - DNA, 25 bp, Homo sapien
ctaacggttcgcgtaacagccctga

SEQ ID NO: 6048977 - DNA, 25 bp, Homo sapien
tcgcgacgcgtataggtgtcttccc

SEQ ID NO: 6048978 - DNA, 25 bp, Homo sapien
ctagcgagccgttatacacgaagaa

SEQ ID NO: 6048979 - DNA, 25 bp, Homo sapien
taggacgcgcgactaaatccgtgca

SEQ ID NO: 6048980 - DNA, 25 bp, Homo sapien
gtatctcaaaaatacgcacgatcga

SEQ ID NO: 6048981 - DNA, 25 bp, Homo sapien
cgaccgtttagttcggaatgatgat

SEQ ID NO: 6048982 - DNA, 25 bp, Homo sapien
ataccgcgtagccttacggccgagg

SEQ ID NO: 6048983 - DNA, 25 bp, Homo sapien
gcgcgactaaatccgtgcactgttc

SEQ ID NO: 6048984 - DNA, 25 bp, Homo sapien
caaaaatacgcacgatcgagccagt

SEQ ID NO: 6048985 - DNA, 25 bp, Homo sapien
taaatccgtgcactgttctcgagcg

SEQ ID NO: 6048986 - DNA, 25 bp, Homo sapien
cgatactgagcctcgcgacgcgtat

SEQ ID NO: 6048987 - DNA, 25 bp, Homo sapien
tatggcacgccttaccgcgatcgta

SEQ ID NO: 6048988 - DNA, 25 bp, Homo sapien
ctacctagattctctaccgcgtcgg

SEQ ID NO: 6048989 - DNA, 25 bp, Homo sapien
gcgtcggacaatagtcggacaaccc

SEQ ID NO: 6048990 - DNA, 25 bp, Homo sapien
cgtagccttacggccgaggtggcac

SEQ ID NO: 6048991 - DNA, 25 bp, Homo sapien
acgtacgcatagaatgaaggccgcg

SEQ ID NO: 6048992 - DNA, 25 bp, Homo sapien
taatgtacgcgtccgatactgagcc

SEQ ID NO: 6048993 - DNA, 25 bp, Homo sapien
cgatcgagccagtatggcacgcctt

SEQ ID NO: 6048994 - DNA, 25 bp, Homo sapien
tattaacgctgcccgcgcttacgat

SEQ ID NO: 6048995 - DNA, 25 bp, Homo sapien
tagtgacattatctaacggttcgcg

SEQ ID NO: 6048996 - DNA, 25 bp, Homo sapien
aggtgtcttcccgatgcctagcgag

SEQ ID NO: 6048997 - DNA, 25 bp, Homo sapien
cggccgaggtggcacaggatagcgc

SEQ ID NO: 6048998 - DNA, 25 bp, Homo sapien
ggtccgagaggatgctaacgcgtcg

SEQ ID NO: 6048999 - DNA, 25 bp, Homo sapien
gtaacagccctgagcttagcgcgta

SEQ ID NO: 6049000 - DNA, 25 bp, Homo sapien
ctcgacgcgtagtctgtataccgcg

SEQ ID NO: 6049001 - DNA, 25 bp, Homo sapien
tgagcctcgcgacgcgtataggtgt

SEQ ID NO: 6049002 - DNA, 25 bp, Homo sapien
cgacgtacgctgtcgacatgaagac

SEQ ID NO: 6049003 - DNA, 25 bp, Homo sapien
ccttacggccgaggtggcacaggat

SEQ ID NO: 6049004 - DNA, 25 bp, Homo sapien
taatactcgacctctgtccgacgta

SEQ ID NO: 6049005 - DNA, 25 bp, Homo sapien
gttcgcgtaacagccctgagcttag

SEQ ID NO: 6049006 - DNA, 25 bp, Homo sapien
tgaagactgctacgggatatccgaa

SEQ ID NO: 6049007 - DNA, 25 bp, Homo sapien
acgccttaccgcgatcgtaagttat

SEQ ID NO: 6049008 - DNA, 25 bp, Homo sapien
tctgtataccgcgtagccttacggc

SEQ ID NO: 6049009 - DNA, 25 bp, Homo sapien
acggattacccctgcgctcgcgcta

SEQ ID NO: 6049010 - DNA, 25 bp, Homo sapien
cttcacgacgcgctaaatcgacgca

SEQ ID NO: 6049011 - DNA, 25 bp, Homo sapien
cacacttttgcaggcgcgctatacg

SEQ ID NO: 6049012 - DNA, 25 bp, Homo sapien
tgtacgcggattgtgtcttctatag

SEQ ID NO: 6049013 - DNA, 25 bp, Homo sapien
taacgcgggtatatcaagagcgcgg

SEQ ID NO: 6049014 - DNA, 25 bp, Homo sapien
tccgcctacgattaagtatagaacc

SEQ ID NO: 6049015 - DNA, 25 bp, Homo sapien
gagagcgattgtccgcgtggttcca

SEQ ID NO: 6049016 - DNA, 25 bp, Homo sapien
ggcgtacgtatcaaaaatgagatac

SEQ ID NO: 6049017 - DNA, 25 bp, Homo sapien
atggcccctggtcgcgtaccgagac

SEQ ID NO: 6049018 - DNA, 25 bp, Homo sapien
gaccgctaagaggacgacgacttag

SEQ ID NO: 6049019 - DNA, 25 bp, Homo sapien
cctgtatcgcgagcccgcgagagcg

SEQ ID NO: 6049020 - DNA, 25 bp, Homo sapien
accggtcgaccaatcggctgtacgc

SEQ ID NO: 6049021 - DNA, 25 bp, Homo sapien
cttgagatatacgaccgctaagagg

SEQ ID NO: 6049022 - DNA, 25 bp, Homo sapien
cgacgcgctaaatcgacgcactgta

SEQ ID NO: 6049023 - DNA, 25 bp, Homo sapien
cgacccgcctgcggcttgaacatta

SEQ ID NO: 6049024 - DNA, 25 bp, Homo sapien
taggactgactgctattggtcgcgc

SEQ ID NO: 6049025 - DNA, 25 bp, Homo sapien
agtatagaacccttcgaacgacgcg

SEQ ID NO: 6049026 - DNA, 25 bp, Homo sapien
cgacgatccgcctacgattaagtat

SEQ ID NO: 6049027 - DNA, 25 bp, Homo sapien
aggcgcgctatacggattacccctg

SEQ ID NO: 6049028 - DNA, 25 bp, Homo sapien
gcccgcgagagcgattgtccgcgtg

SEQ ID NO: 6049029 - DNA, 25 bp, Homo sapien
aacattaccggtcgaccaatcggct

SEQ ID NO: 6049030 - DNA, 25 bp, Homo sapien
tagcattaacgcgggtatatcaaga

SEQ ID NO: 6049031 - DNA, 25 bp, Homo sapien
cggattgtgtcttctatagcatgac

SEQ ID NO: 6049032 - DNA, 25 bp, Homo sapien
atcgacgcactgtacgttagtcggc

SEQ ID NO: 6049033 - DNA, 25 bp, Homo sapien
gaagagacaatttaggttagacgac

SEQ ID NO: 6049034 - DNA, 25 bp, Homo sapien
taaacgggaaatcttgagatatacg

SEQ ID NO: 6049035 - DNA, 25 bp, Homo sapien
gcatgacgcgtaatcgtatggcccc

SEQ ID NO: 6049036 - DNA, 25 bp, Homo sapien
gacgacgacttagttcgcgaagaga

SEQ ID NO: 6049037 - DNA, 25 bp, Homo sapien
tatcgtaccggcgagcacgatgcct

SEQ ID NO: 6049038 - DNA, 25 bp, Homo sapien
gcgcatagtgtgtcgtcacgcgtat

SEQ ID NO: 6049039 - DNA, 25 bp, Homo sapien
tacgttagtcggcacggtcgggtgc

SEQ ID NO: 6049040 - DNA, 25 bp, Homo sapien
aacctgtatcgtaccggcgagcacg

SEQ ID NO: 6049041 - DNA, 25 bp, Homo sapien
aataagtcgcgccagtgcttggctg

SEQ ID NO: 6049042 - DNA, 25 bp, Homo sapien
atttaggttagacgacccgcctgcg

SEQ ID NO: 6049043 - DNA, 25 bp, Homo sapien
agtgtgtcgtcacgcgtatgttgca

SEQ ID NO: 6049044 - DNA, 25 bp, Homo sapien
ggtcgcgcactctagcattaacgcg

SEQ ID NO: 6049045 - DNA, 25 bp, Homo sapien
ttggctgtagcatcgcgtcacactt

SEQ ID NO: 6049046 - DNA, 25 bp, Homo sapien
tatagcaactgtcgtgctaataagt

SEQ ID NO: 6049047 - DNA, 25 bp, Homo sapien
cgcgctaaacgggaaatcttgagat

SEQ ID NO: 6049048 - DNA, 25 bp, Homo sapien
aactgtcgtgctaataagtcgcgcc

SEQ ID NO: 6049049 - DNA, 25 bp, Homo sapien
accggcgagcacgatgccttcacga

SEQ ID NO: 6049050 - DNA, 25 bp, Homo sapien
tcgcgagcccgcgagagcgattgtc

SEQ ID NO: 6049051 - DNA, 25 bp, Homo sapien
tcgcgtcacacttttgcaggcgcgc

SEQ ID NO: 6049052 - DNA, 25 bp, Homo sapien
gtagcatcgcgtcacacttttgcag

SEQ ID NO: 6049053 - DNA, 25 bp, Homo sapien
tacgattaagtatagaacccttcga

SEQ ID NO: 6049054 - DNA, 25 bp, Homo sapien
ggcttgaacattaccggtcgaccaa

SEQ ID NO: 6049055 - DNA, 25 bp, Homo sapien
gctatacggattacccctgcgctcg

SEQ ID NO: 6049056 - DNA, 25 bp, Homo sapien
taagaggacgacgacttagttcgcg

SEQ ID NO: 6049057 - DNA, 25 bp, Homo sapien
gagcacgatgccttcacgacgcgct

SEQ ID NO: 6049058 - DNA, 25 bp, Homo sapien
tgttgcaacctgtatcgtaccggcg

SEQ ID NO: 6049059 - DNA, 25 bp, Homo sapien
cgaccaatcggctgtacgcggattg

SEQ ID NO: 6049060 - DNA, 25 bp, Homo sapien
ctattggtcgcgcactctagcatta

SEQ ID NO: 6049061 - DNA, 25 bp, Homo sapien
ttcgaacgacgcgcgcatagtgtgt

SEQ ID NO: 6049062 - DNA, 25 bp, Homo sapien
cgtatcaaaaatgagatacggattg

SEQ ID NO: 6049063 - DNA, 25 bp, Homo sapien
gagatacggattgttaactaggact

SEQ ID NO: 6049064 - DNA, 25 bp, Homo sapien
tcgcgccagtgcttggctgtagcat

SEQ ID NO: 6049065 - DNA, 25 bp, Homo sapien
gattgtccgcgtggttccatggtac

SEQ ID NO: 6049066 - DNA, 25 bp, Homo sapien
tggtacgcgaactatagcaactgtc

SEQ ID NO: 6049067 - DNA, 25 bp, Homo sapien
cgatgccttcacgacgcgctaaatc

SEQ ID NO: 6049068 - DNA, 25 bp, Homo sapien
tctatagcatgacgcgtaatcgtat

SEQ ID NO: 6049069 - DNA, 25 bp, Homo sapien
gggtgcggcgtacgtatcaaaaatg

SEQ ID NO: 6049070 - DNA, 25 bp, Homo sapien
gttaactaggactgactgctattgg

SEQ ID NO: 6049071 - DNA, 25 bp, Homo sapien
ccgcgtggttccatggtacgcgaac

SEQ ID NO: 6049072 - DNA, 25 bp, Homo sapien
cgcgtatgttgcaacctgtatcgta

SEQ ID NO: 6049073 - DNA, 25 bp, Homo sapien
cgcgtaatcgtatggcccctggtcg

SEQ ID NO: 6049074 - DNA, 25 bp, Homo sapien
gtgtcttctatagcatgacgcgtaa

SEQ ID NO: 6049075 - DNA, 25 bp, Homo sapien
tacccctgcgctcgcgctaaacggg

SEQ ID NO: 6049076 - DNA, 25 bp, Homo sapien
cgacgcgcgcatagtgtgtcgtcac

SEQ ID NO: 6049077 - DNA, 25 bp, Homo sapien
gttcgcgaagagacaatttaggtta

SEQ ID NO: 6049078 - DNA, 25 bp, Homo sapien
tagtcggcacggtcgggtgcggcgt

SEQ ID NO: 6049079 - DNA, 25 bp, Homo sapien
cggattgttaactaggactgactgc

SEQ ID NO: 6049080 - DNA, 25 bp, Homo sapien
ggaaatcttgagatatacgaccgct

SEQ ID NO: 6049081 - DNA, 25 bp, Homo sapien
gacttagttcgcgaagagacaattt

SEQ ID NO: 6049082 - DNA, 25 bp, Homo sapien
tttagacgacgatccgcctacgatt

SEQ ID NO: 6049083 - DNA, 25 bp, Homo sapien
cgtgctaataagtcgcgccagtgct

SEQ ID NO: 6049084 - DNA, 25 bp, Homo sapien
gttagacgacccgcctgcggcttga

SEQ ID NO: 6049085 - DNA, 25 bp, Homo sapien
gcgaactatagcaactgtcgtgcta

SEQ ID NO: 6049086 - DNA, 25 bp, Homo sapien
gcactgtacgttagtcggcacggtc

SEQ ID NO: 6049087 - DNA, 25 bp, Homo sapien
gctaaatcgacgcactgtacgttag

SEQ ID NO: 6049088 - DNA, 25 bp, Homo sapien
aaaaatgagatacggattgttaact

SEQ ID NO: 6049089 - DNA, 25 bp, Homo sapien
ggttccatggtacgcgaactatagc

SEQ ID NO: 6049090 - DNA, 25 bp, Homo sapien
atcgtatggcccctggtcgcgtacc

SEQ ID NO: 6049091 - DNA, 25 bp, Homo sapien
gcctgcggcttgaacattaccggtc

SEQ ID NO: 6049092 - DNA, 25 bp, Homo sapien
gaacccttcgaacgacgcgcgcata

SEQ ID NO: 6049093 - DNA, 25 bp, Homo sapien
tcgtcacgcgtatgttgcaacctgt

SEQ ID NO: 6049094 - DNA, 25 bp, Homo sapien
atcggctgtacgcggattgtgtctt

SEQ ID NO: 6049095 - DNA, 25 bp, Homo sapien
cgagactttagacgacgatccgcct

SEQ ID NO: 6049096 - DNA, 25 bp, Homo sapien
atatacgaccgctaagaggacgacg

SEQ ID NO: 6049097 - DNA, 25 bp, Homo sapien
tttgcaggcgcgctatacggattac

SEQ ID NO: 6049098 - DNA, 25 bp, Homo sapien
gcacggtcgggtgcggcgtacgtat

SEQ ID NO: 6049099 - DNA, 25 bp, Homo sapien
tgactgctattggtcgcgcactcta

SEQ ID NO: 6049100 - DNA, 25 bp, Homo sapien
cctggtcgcgtaccgagactttaga

SEQ ID NO: 6049101 - DNA, 25 bp, Homo sapien
tgcgctcgcgctaaacgggaaatct

SEQ ID NO: 6049102 - DNA, 25 bp, Homo sapien
gcgtaccgagactttagacgacgat

SEQ ID NO: 6049103 - DNA, 25 bp, Homo sapien
gcactctagcattaacgcgggtata

SEQ ID NO: 6049104 - DNA, 25 bp, Homo sapien
cagtgcttggctgtagcatcgcgtc

SEQ ID NO: 6049105 - DNA, 25 bp, Homo sapien
gattaccgacaacgaatcgacaaca

SEQ ID NO: 6049106 - DNA, 25 bp, Homo sapien
ctctcacccggggttcgatcgcttt

SEQ ID NO: 6049107 - DNA, 25 bp, Homo sapien
gtacccggtcgacagagctttcggc

SEQ ID NO: 6049108 - DNA, 25 bp, Homo sapien
agtccgaatgccgaccggtcatctc

SEQ ID NO: 6049109 - DNA, 25 bp, Homo sapien
aagtactggttaagataggtcgctc

SEQ ID NO: 6049110 - DNA, 25 bp, Homo sapien
gcctaattgacttacggggcgcgcc

SEQ ID NO: 6049111 - DNA, 25 bp, Homo sapien
gctgcggacgcgaaacacattatag

SEQ ID NO: 6049112 - DNA, 25 bp, Homo sapien
cgtaccgtcacgatgaagtatgcaa

SEQ ID NO: 6049113 - DNA, 25 bp, Homo sapien
cgacaacgaatcgacaacatcgata

SEQ ID NO: 6049114 - DNA, 25 bp, Homo sapien
acgggctagacgccaattgggcatg

SEQ ID NO: 6049115 - DNA, 25 bp, Homo sapien
agcttgctggttacgggctagacgc

SEQ ID NO: 6049116 - DNA, 25 bp, Homo sapien
gtggagagtacgtcgcctaattgac

SEQ ID NO: 6049117 - DNA, 25 bp, Homo sapien
gacgcgaaacacattataggcgcga

SEQ ID NO: 6049118 - DNA, 25 bp, Homo sapien
tcgctcggaatcagtccgaatgccg

SEQ ID NO: 6049119 - DNA, 25 bp, Homo sapien
ttcgggtctctgtggagagtacgtc

SEQ ID NO: 6049120 - DNA, 25 bp, Homo sapien
gtgaacacgcctgcgtaccgtcacg

SEQ ID NO: 6049121 - DNA, 25 bp, Homo sapien
gagaaggtatatcgtaacaagtgta

SEQ ID NO: 6049122 - DNA, 25 bp, Homo sapien
ctcgcactggatactacgtcccgga

SEQ ID NO: 6049123 - DNA, 25 bp, Homo sapien
gcgtcataagcaccacacgcaatcg

SEQ ID NO: 6049124 - DNA, 25 bp, Homo sapien
tagacgccaattgggcatggtatta

SEQ ID NO: 6049125 - DNA, 25 bp, Homo sapien
cgcctgcgtaccgtcacgatgaagt

SEQ ID NO: 6049126 - DNA, 25 bp, Homo sapien
gttcgatcgcttttaaagctgtgcg

SEQ ID NO: 6049127 - DNA, 25 bp, Homo sapien
atcgatataggtagcttgctggtta

SEQ ID NO: 6049128 - DNA, 25 bp, Homo sapien
aatatacgcttgactctcacccggg

SEQ ID NO: 6049129 - DNA, 25 bp, Homo sapien
agtacgtcgcctaattgacttacgg

SEQ ID NO: 6049130 - DNA, 25 bp, Homo sapien
gcctggagaaggtatatcgtaacaa

SEQ ID NO: 6049131 - DNA, 25 bp, Homo sapien
ccgacgtagtgtagctctaatgcaa

SEQ ID NO: 6049132 - DNA, 25 bp, Homo sapien
ctggatactacgtcccggaatgatg

SEQ ID NO: 6049133 - DNA, 25 bp, Homo sapien
atctctcatcgacgcgacgtatttg

SEQ ID NO: 6049134 - DNA, 25 bp, Homo sapien
tttcggcgcgtactgtctctcgcac

SEQ ID NO: 6049135 - DNA, 25 bp, Homo sapien
attataggcgcgaatatacgcttga

SEQ ID NO: 6049136 - DNA, 25 bp, Homo sapien
atgatggccgcggcgtcataagcac

SEQ ID NO: 6049137 - DNA, 25 bp, Homo sapien
ctgtgcgatataccggaatgcctgg

SEQ ID NO: 6049138 - DNA, 25 bp, Homo sapien
ggaatcagtccgaatgccgaccggt

SEQ ID NO: 6049139 - DNA, 25 bp, Homo sapien
ttatacccgacgtagtgtagctcta

SEQ ID NO: 6049140 - DNA, 25 bp, Homo sapien
aatgcaagttcgtcgctacgggttc

SEQ ID NO: 6049141 - DNA, 25 bp, Homo sapien
gcgcgccaatctaagtactggttaa

SEQ ID NO: 6049142 - DNA, 25 bp, Homo sapien
cgcgacgtatttgtgaacacgcctg

SEQ ID NO: 6049143 - DNA, 25 bp, Homo sapien
tagtgtagctctaatgcaagttcgt

SEQ ID NO: 6049144 - DNA, 25 bp, Homo sapien
agataggtcgctcggaatcagtccg

SEQ ID NO: 6049145 - DNA, 25 bp, Homo sapien
tcgtgcgctgcggacgcgaaacaca

SEQ ID NO: 6049146 - DNA, 25 bp, Homo sapien
gacaacatcgatataggtagcttgc

SEQ ID NO: 6049147 - DNA, 25 bp, Homo sapien
tcccggaatgatggccgcggcgtca

SEQ ID NO: 6049148 - DNA, 25 bp, Homo sapien
gttcgagtacgcctgcatcgtgcgc

SEQ ID NO: 6049149 - DNA, 25 bp, Homo sapien
catcgacgcgacgtatttgtgaaca

SEQ ID NO: 6049150 - DNA, 25 bp, Homo sapien
tatgcaatatcgtacccggtcgaca

SEQ ID NO: 6049151 - DNA, 25 bp, Homo sapien
taatggcgactatacgagattgtgg

SEQ ID NO: 6049152 - DNA, 25 bp, Homo sapien
ggcatggtattacgcgaaaaatggg

SEQ ID NO: 6049153 - DNA, 25 bp, Homo sapien
atatcgtacccggtcgacagagctt

SEQ ID NO: 6049154 - DNA, 25 bp, Homo sapien
cgaatcgacaacatcgatataggta

SEQ ID NO: 6049155 - DNA, 25 bp, Homo sapien
acacgcaatcgcgattaccgacaac

SEQ ID NO: 6049156 - DNA, 25 bp, Homo sapien
caatctaagtactggttaagatagg

SEQ ID NO: 6049157 - DNA, 25 bp, Homo sapien
gccgaccggtcatctctcatcgacg

SEQ ID NO: 6049158 - DNA, 25 bp, Homo sapien
ggtcgacagagctttcggcgcgtac

SEQ ID NO: 6049159 - DNA, 25 bp, Homo sapien
tacggggcgcgccaatctaagtact

SEQ ID NO: 6049160 - DNA, 25 bp, Homo sapien
gtcacgatgaagtatgcaatatcgt

SEQ ID NO: 6049161 - DNA, 25 bp, Homo sapien
cgttaagttcgggtctctgtggaga

SEQ ID NO: 6049162 - DNA, 25 bp, Homo sapien
gtacgcctgcatcgtgcgctgcgga

SEQ ID NO: 6049163 - DNA, 25 bp, Homo sapien
cgtaacaagtgtaatggcgactata

SEQ ID NO: 6049164 - DNA, 25 bp, Homo sapien
tcgctacgggttctcctaggcgtta

SEQ ID NO: 6049165 - DNA, 25 bp, Homo sapien
gccgcggcgtcataagcaccacacg

SEQ ID NO: 6049166 - DNA, 25 bp, Homo sapien
gtctctgtggagagtacgtcgccta

SEQ ID NO: 6049167 - DNA, 25 bp, Homo sapien
ttaaagctgtgcgatataccggaat

SEQ ID NO: 6049168 - DNA, 25 bp, Homo sapien
cgactatacgagattgtggttatac

SEQ ID NO: 6049169 - DNA, 25 bp, Homo sapien
ctggttacgggctagacgccaattg

SEQ ID NO: 6049170 - DNA, 25 bp, Homo sapien
ggcgcgaatatacgcttgactctca

SEQ ID NO: 6049171 - DNA, 25 bp, Homo sapien
agctctaatgcaagttcgtcgctac

SEQ ID NO: 6049172 - DNA, 25 bp, Homo sapien
aaacacattataggcgcgaatatac

SEQ ID NO: 6049173 - DNA, 25 bp, Homo sapien
ctgtctctcgcactggatactacgt

SEQ ID NO: 6049174 - DNA, 25 bp, Homo sapien
agttcgtcgctacgggttctcctag

SEQ ID NO: 6049175 - DNA, 25 bp, Homo sapien
cggtcatctctcatcgacgcgacgt

SEQ ID NO: 6049176 - DNA, 25 bp, Homo sapien
gtatatcgtaacaagtgtaatggcg

SEQ ID NO: 6049177 - DNA, 25 bp, Homo sapien
tcgcttttaaagctgtgcgatatac

SEQ ID NO: 6049178 - DNA, 25 bp, Homo sapien
attgtggttatacccgacgtagtgt

SEQ ID NO: 6049179 - DNA, 25 bp, Homo sapien
actacgtcccggaatgatggccgcg

SEQ ID NO: 6049180 - DNA, 25 bp, Homo sapien
gtatttgtgaacacgcctgcgtacc

SEQ ID NO: 6049181 - DNA, 25 bp, Homo sapien
atgaagtatgcaatatcgtacccgg

SEQ ID NO: 6049182 - DNA, 25 bp, Homo sapien
cctaggcgttaagttcgggtctctg

SEQ ID NO: 6049183 - DNA, 25 bp, Homo sapien
caattgggcatggtattacgcgaaa

SEQ ID NO: 6049184 - DNA, 25 bp, Homo sapien
cgcgtactgtctctcgcactggata

SEQ ID NO: 6049185 - DNA, 25 bp, Homo sapien
ctgcatcgtgcgctgcggacgcgaa

SEQ ID NO: 6049186 - DNA, 25 bp, Homo sapien
gaatgccgaccggtcatctctcatc

SEQ ID NO: 6049187 - DNA, 25 bp, Homo sapien
atataccggaatgcctggagaaggt

SEQ ID NO: 6049188 - DNA, 25 bp, Homo sapien
aagcaccacacgcaatcgcgattac

SEQ ID NO: 6049189 - DNA, 25 bp, Homo sapien
tacgagattgtggttatacccgacg

SEQ ID NO: 6049190 - DNA, 25 bp, Homo sapien
aagtgtaatggcgactatacgagat

SEQ ID NO: 6049191 - DNA, 25 bp, Homo sapien
cggaatgcctggagaaggtatatcg

SEQ ID NO: 6049192 - DNA, 25 bp, Homo sapien
ataggtagcttgctggttacgggct

SEQ ID NO: 6049193 - DNA, 25 bp, Homo sapien
caatcgcgattaccgacaacgaatc

SEQ ID NO: 6049194 - DNA, 25 bp, Homo sapien
ttgacttacggggcgcgccaatcta

SEQ ID NO: 6049195 - DNA, 25 bp, Homo sapien
cagagctttcggcgcgtactgtctc

SEQ ID NO: 6049196 - DNA, 25 bp, Homo sapien
tggttaagataggtcgctcggaatc

SEQ ID NO: 6049197 - DNA, 25 bp, Homo sapien
cggggttcgatcgcttttaaagctg

SEQ ID NO: 6049198 - DNA, 25 bp, Homo sapien
tgaactgacagaaatcgggtgcgta

SEQ ID NO: 6049199 - DNA, 25 bp, Homo sapien
gcgctaccgaatagttcaagtcgat

SEQ ID NO: 6049200 - DNA, 25 bp, Homo sapien
tcctggtagcgctacgcgttgctca

SEQ ID NO: 6049201 - DNA, 25 bp, Homo sapien
gaatacccaattgcacggtgtatta

SEQ ID NO: 6049202 - DNA, 25 bp, Homo sapien
tactagacgggtgtcagtgaacgca

SEQ ID NO: 6049203 - DNA, 25 bp, Homo sapien
gcacaagattgaatgtcgtacgcgt

SEQ ID NO: 6049204 - DNA, 25 bp, Homo sapien
ttaagcgcgttggaccgtgctgcag

SEQ ID NO: 6049205 - DNA, 25 bp, Homo sapien
gattgaatgtcgtacgcgtgaactg

SEQ ID NO: 6049206 - DNA, 25 bp, Homo sapien
atgttgtacgtcgacgcgcagcgtt

SEQ ID NO: 6049207 - DNA, 25 bp, Homo sapien
gtacggtacgcccatgcgacgtaac

SEQ ID NO: 6049208 - DNA, 25 bp, Homo sapien
ctgcagtatcgtcgggccgtttttc

SEQ ID NO: 6049209 - DNA, 25 bp, Homo sapien
gaccgtgctgcagtcgacatacgat

SEQ ID NO: 6049210 - DNA, 25 bp, Homo sapien
agtcgatatgtcgtacgcgagcgac

SEQ ID NO: 6049211 - DNA, 25 bp, Homo sapien
gcacggtgtattaagcgcgttggac

SEQ ID NO: 6049212 - DNA, 25 bp, Homo sapien
cctctctctacagtacggtacgccc

SEQ ID NO: 6049213 - DNA, 25 bp, Homo sapien
gctgcagtcgacatacgatagaatt

SEQ ID NO: 6049214 - DNA, 25 bp, Homo sapien
tatgtcgtacgcgagcgacaagtac

SEQ ID NO: 6049215 - DNA, 25 bp, Homo sapien
aacgaggtacgcattgtagcaagac

SEQ ID NO: 6049216 - DNA, 25 bp, Homo sapien
ccgaatagttcaagtcgatatgtcg

SEQ ID NO: 6049217 - DNA, 25 bp, Homo sapien
tgtattaagcgcgttggaccgtgct

SEQ ID NO: 6049218 - DNA, 25 bp, Homo sapien
ctgcgaaccgttgggtagtaaactg

SEQ ID NO: 6049219 - DNA, 25 bp, Homo sapien
gaaccgcggttaatacgaccatcta

SEQ ID NO: 6049220 - DNA, 25 bp, Homo sapien
catcgactgcgaaccgttgggtagt

SEQ ID NO: 6049221 - DNA, 25 bp, Homo sapien
catgtcgctcgcatagccctaagta

SEQ ID NO: 6049222 - DNA, 25 bp, Homo sapien
tgataaatgttgtacgtcgacgcgc

SEQ ID NO: 6049223 - DNA, 25 bp, Homo sapien
cctcgcgaagcccatcgactgcgaa

SEQ ID NO: 6049224 - DNA, 25 bp, Homo sapien
ataacaatcatcgaagagctacgcg

SEQ ID NO: 6049225 - DNA, 25 bp, Homo sapien
cgacgcacgggtcgcccgaacgagg

SEQ ID NO: 6049226 - DNA, 25 bp, Homo sapien
tacgcgtgaactgacagaaatcggg

SEQ ID NO: 6049227 - DNA, 25 bp, Homo sapien
catagccctaagtagcgcgaatacc

SEQ ID NO: 6049228 - DNA, 25 bp, Homo sapien
ccatctaagtattacggtacgacgc

SEQ ID NO: 6049229 - DNA, 25 bp, Homo sapien
atgtcgtacgcgtgaactgacagaa

SEQ ID NO: 6049230 - DNA, 25 bp, Homo sapien
tagaattcctggtagcgctacgcgt

SEQ ID NO: 6049231 - DNA, 25 bp, Homo sapien
gcgttactaggttaccacctgcagt

SEQ ID NO: 6049232 - DNA, 25 bp, Homo sapien
cgcccgaacgaggtacgcattgtag

SEQ ID NO: 6049233 - DNA, 25 bp, Homo sapien
gagcgacaagtacgtgagataacaa

SEQ ID NO: 6049234 - DNA, 25 bp, Homo sapien
cgcgtatactaacctctctctacag

SEQ ID NO: 6049235 - DNA, 25 bp, Homo sapien
tacgtcgacgcgcagcgttacacgc

SEQ ID NO: 6049236 - DNA, 25 bp, Homo sapien
cagcgttacacgcatgtcgctcgca

SEQ ID NO: 6049237 - DNA, 25 bp, Homo sapien
tagcgctacgcgttgctcagttggc

SEQ ID NO: 6049238 - DNA, 25 bp, Homo sapien
gcaagacgcgttactaggttaccac

SEQ ID NO: 6049239 - DNA, 25 bp, Homo sapien
gaagcccatcgactgcgaaccgttg

SEQ ID NO: 6049240 - DNA, 25 bp, Homo sapien
agttcaagtcgatatgtcgtacgcg

SEQ ID NO: 6049241 - DNA, 25 bp, Homo sapien
caagtacgtgagataacaatcatcg

SEQ ID NO: 6049242 - DNA, 25 bp, Homo sapien
taccacctgcagtatcgtcgggccg

SEQ ID NO: 6049243 - DNA, 25 bp, Homo sapien
cgtgagataacaatcatcgaagagc

SEQ ID NO: 6049244 - DNA, 25 bp, Homo sapien
gcgttggaccgtgctgcagtcgaca

SEQ ID NO: 6049245 - DNA, 25 bp, Homo sapien
gacagaaatcgggtgcgtaaactat

SEQ ID NO: 6049246 - DNA, 25 bp, Homo sapien
gtgcgtaaactatgataaatgttgt

SEQ ID NO: 6049247 - DNA, 25 bp, Homo sapien
cacctgtcaacgtcgtatcggctaa

SEQ ID NO: 6049248 - DNA, 25 bp, Homo sapien
aagtattacggtacgacgcacaaga

SEQ ID NO: 6049249 - DNA, 25 bp, Homo sapien
gctcgcatagccctaagtagcgcga

SEQ ID NO: 6049250 - DNA, 25 bp, Homo sapien
tacgcgttgctcagttggcgcgtat

SEQ ID NO: 6049251 - DNA, 25 bp, Homo sapien
agttggcgcgtatactaacctctct

SEQ ID NO: 6049252 - DNA, 25 bp, Homo sapien
aacgcacctcgcgaagcccatcgac

SEQ ID NO: 6049253 - DNA, 25 bp, Homo sapien
tctacagtacggtacgcccatgcga

SEQ ID NO: 6049254 - DNA, 25 bp, Homo sapien
ccaattgcacggtgtattaagcgcg

SEQ ID NO: 6049255 - DNA, 25 bp, Homo sapien
gtcagtgaacgcacctcgcgaagcc

SEQ ID NO: 6049256 - DNA, 25 bp, Homo sapien
tacgcccatgcgacgtaactccgat

SEQ ID NO: 6049257 - DNA, 25 bp, Homo sapien
aatcgggtgcgtaaactatgataaa

SEQ ID NO: 6049258 - DNA, 25 bp, Homo sapien
gtacgcgagcgacaagtacgtgaga

SEQ ID NO: 6049259 - DNA, 25 bp, Homo sapien
gtagcgcgaatacccaattgcacgg

SEQ ID NO: 6049260 - DNA, 25 bp, Homo sapien
catgcgacgtaactccgatactaga

SEQ ID NO: 6049261 - DNA, 25 bp, Homo sapien
gtcgtagtaccgacgcacgggtcgc

SEQ ID NO: 6049262 - DNA, 25 bp, Homo sapien
tactaacctctctctacagtacggt

SEQ ID NO: 6049263 - DNA, 25 bp, Homo sapien
gacgcgcagcgttacacgcatgtcg

SEQ ID NO: 6049264 - DNA, 25 bp, Homo sapien
tcggctcacctgtcaacgtcgtatc

SEQ ID NO: 6049265 - DNA, 25 bp, Homo sapien
ttacacgcatgtcgctcgcatagcc

SEQ ID NO: 6049266 - DNA, 25 bp, Homo sapien
ggggccgcgctaccgaatagttcaa

SEQ ID NO: 6049267 - DNA, 25 bp, Homo sapien
cctaagtagcgcgaatacccaattg

SEQ ID NO: 6049268 - DNA, 25 bp, Homo sapien
cgggtcgcccgaacgaggtacgcat

SEQ ID NO: 6049269 - DNA, 25 bp, Homo sapien
attgtagcaagacgcgttactaggt

SEQ ID NO: 6049270 - DNA, 25 bp, Homo sapien
ttgctcagttggcgcgtatactaac

SEQ ID NO: 6049271 - DNA, 25 bp, Homo sapien
cgaagttcggctcacctgtcaacgt

SEQ ID NO: 6049272 - DNA, 25 bp, Homo sapien
gtacgcattgtagcaagacgcgtta

SEQ ID NO: 6049273 - DNA, 25 bp, Homo sapien
acgggtgtcagtgaacgcacctcgc

SEQ ID NO: 6049274 - DNA, 25 bp, Homo sapien
atacgaccatctaagtattacggta

SEQ ID NO: 6049275 - DNA, 25 bp, Homo sapien
ctccgatactagacgggtgtcagtg

SEQ ID NO: 6049276 - DNA, 25 bp, Homo sapien
ctaggttaccacctgcagtatcgtc

SEQ ID NO: 6049277 - DNA, 25 bp, Homo sapien
tacgacgcacaagattgaatgtcgt

SEQ ID NO: 6049278 - DNA, 25 bp, Homo sapien
acgtaactccgatactagacgggtg

SEQ ID NO: 6049279 - DNA, 25 bp, Homo sapien
atcatcgaagagctacgcgaagttc

SEQ ID NO: 6049280 - DNA, 25 bp, Homo sapien
tacggtacgacgcacaagattgaat

SEQ ID NO: 6049281 - DNA, 25 bp, Homo sapien
taaactggggccgcgctaccgaata

SEQ ID NO: 6049282 - DNA, 25 bp, Homo sapien
atacgatagaattcctggtagcgct

SEQ ID NO: 6049283 - DNA, 25 bp, Homo sapien
tcaacgtcgtatcggctaataccgc

SEQ ID NO: 6049284 - DNA, 25 bp, Homo sapien
gtcgacatacgatagaattcctggt

SEQ ID NO: 6049285 - DNA, 25 bp, Homo sapien
gctacgcgaagttcggctcacctgt

SEQ ID NO: 6049286 - DNA, 25 bp, Homo sapien
cggttaatacgaccatctaagtatt

SEQ ID NO: 6049287 - DNA, 25 bp, Homo sapien
aaactatgataaatgttgtacgtcg

SEQ ID NO: 6049288 - DNA, 25 bp, Homo sapien
tagtaccgacgcacgggtcgcccga

SEQ ID NO: 6049289 - DNA, 25 bp, Homo sapien
gaagagctacgcgaagttcggctca

SEQ ID NO: 6049290 - DNA, 25 bp, Homo sapien
agggttggactattgcgcgaaagaa

SEQ ID NO: 6049291 - DNA, 25 bp, Homo sapien
ggcacgctgacaatacgtcgagcgg

SEQ ID NO: 6049292 - DNA, 25 bp, Homo sapien
atcatgtcgcgtcgctttgctatga

SEQ ID NO: 6049293 - DNA, 25 bp, Homo sapien
agcggtatacgacctacttaagctt

SEQ ID NO: 6049294 - DNA, 25 bp, Homo sapien
gctcgccttcaccattaagcgcgtt

SEQ ID NO: 6049295 - DNA, 25 bp, Homo sapien
cgcgaagctccggtgactcgggata

SEQ ID NO: 6049296 - DNA, 25 bp, Homo sapien
tcacccagatagtaagacctatatc

SEQ ID NO: 6049297 - DNA, 25 bp, Homo sapien
cgtcgtccggtactataaccagtcg

SEQ ID NO: 6049298 - DNA, 25 bp, Homo sapien
agatagtaagacctatatcgcgagc

SEQ ID NO: 6049299 - DNA, 25 bp, Homo sapien
ggtactataaccagtcgggagcgct

SEQ ID NO: 6049300 - DNA, 25 bp, Homo sapien
agctccggtgactcgggataagacg

SEQ ID NO: 6049301 - DNA, 25 bp, Homo sapien
cggttaggcacgctgacaatacgtc

SEQ ID NO: 6049302 - DNA, 25 bp, Homo sapien
gtgctggatcgacccgtcacccaga

SEQ ID NO: 6049303 - DNA, 25 bp, Homo sapien
cgcaaagggttggactattgcgcga

SEQ ID NO: 6049304 - DNA, 25 bp, Homo sapien
tcgggataagacgatcagctgccac

SEQ ID NO: 6049305 - DNA, 25 bp, Homo sapien
ccaaagcgcgttacacctacgggat

SEQ ID NO: 6049306 - DNA, 25 bp, Homo sapien
taagcttgtcgcgaactaggtactt

SEQ ID NO: 6049307 - DNA, 25 bp, Homo sapien
gacccgtcacccagatagtaagacc

SEQ ID NO: 6049308 - DNA, 25 bp, Homo sapien
aactgaagcggtatacgacctactt

SEQ ID NO: 6049309 - DNA, 25 bp, Homo sapien
taagacgatcagctgccacgtacgg

SEQ ID NO: 6049310 - DNA, 25 bp, Homo sapien
tccgaccgatcgtcgagcgtgctgg

SEQ ID NO: 6049311 - DNA, 25 bp, Homo sapien
tagccggcgcaaagggttggactat

SEQ ID NO: 6049312 - DNA, 25 bp, Homo sapien
cgctttgctatgacccgatcgcgaa

SEQ ID NO: 6049313 - DNA, 25 bp, Homo sapien
agatgtcgcgtaacgctgaactacg

SEQ ID NO: 6049314 - DNA, 25 bp, Homo sapien
gacttaaactgaagcggtatacgac

SEQ ID NO: 6049315 - DNA, 25 bp, Homo sapien
aactacgaatcagcacgtcgcaata

SEQ ID NO: 6049316 - DNA, 25 bp, Homo sapien
tcgggctacccacgcgtataacgac

SEQ ID NO: 6049317 - DNA, 25 bp, Homo sapien
cttcaccattaagcgcgttagtcgt

SEQ ID NO: 6049318 - DNA, 25 bp, Homo sapien
acgctgaactacgaatcagcacgtc

SEQ ID NO: 6049319 - DNA, 25 bp, Homo sapien
acgatcgcgactcccaaagcgcgtt

SEQ ID NO: 6049320 - DNA, 25 bp, Homo sapien
aaattgtacgatcgcgactcccaaa

SEQ ID NO: 6049321 - DNA, 25 bp, Homo sapien
aatcatcgtagtattcgcgtagccg

SEQ ID NO: 6049322 - DNA, 25 bp, Homo sapien
cacctacgggattgggggatctagt

SEQ ID NO: 6049323 - DNA, 25 bp, Homo sapien
ctcataacggcccacagagatgtcg

SEQ ID NO: 6049324 - DNA, 25 bp, Homo sapien
tatccttcagtctagtatacgaccg

SEQ ID NO: 6049325 - DNA, 25 bp, Homo sapien
acaataatatggcggttaggcacgc

SEQ ID NO: 6049326 - DNA, 25 bp, Homo sapien
gcgtcctatcgagcccagcttcagt

SEQ ID NO: 6049327 - DNA, 25 bp, Homo sapien
cgagcggacttaaactgaagcggta

SEQ ID NO: 6049328 - DNA, 25 bp, Homo sapien
cgcgtataacgacgtcaatttggac

SEQ ID NO: 6049329 - DNA, 25 bp, Homo sapien
ggttcggcccaatgtatagcgtcgt

SEQ ID NO: 6049330 - DNA, 25 bp, Homo sapien
ctgacaatacgtcgagcggacttaa

SEQ ID NO: 6049331 - DNA, 25 bp, Homo sapien
cgatcgtcgagcgtgctggatcgac

SEQ ID NO: 6049332 - DNA, 25 bp, Homo sapien
cgtagtattcgcgtagccggcgcaa

SEQ ID NO: 6049333 - DNA, 25 bp, Homo sapien
cgcaataatcatcgtagtattcgcg

SEQ ID NO: 6049334 - DNA, 25 bp, Homo sapien
tcagtctagtatacgaccgtcgggc

SEQ ID NO: 6049335 - DNA, 25 bp, Homo sapien
gattgggggatctagtaccgctcgc

SEQ ID NO: 6049336 - DNA, 25 bp, Homo sapien
taagacctatatcgcgagcacctta

SEQ ID NO: 6049337 - DNA, 25 bp, Homo sapien
aacggcccacagagatgtcgcgtaa

SEQ ID NO: 6049338 - DNA, 25 bp, Homo sapien
gcgactcccaaagcgcgttacacct

SEQ ID NO: 6049339 - DNA, 25 bp, Homo sapien
ttcagtatcatgtcgcgtcgctttg

SEQ ID NO: 6049340 - DNA, 25 bp, Homo sapien
cagtcgggagcgctcataacggccc

SEQ ID NO: 6049341 - DNA, 25 bp, Homo sapien
gctatgacccgatcgcgaagctccg

SEQ ID NO: 6049342 - DNA, 25 bp, Homo sapien
acgtacggttcggcccaatgtatag

SEQ ID NO: 6049343 - DNA, 25 bp, Homo sapien
gggatctagtaccgctcgccttcac

SEQ ID NO: 6049344 - DNA, 25 bp, Homo sapien
tacccacgcgtataacgacgtcaat

SEQ ID NO: 6049345 - DNA, 25 bp, Homo sapien
gatcagctgccacgtacggttcggc

SEQ ID NO: 6049346 - DNA, 25 bp, Homo sapien
ctatatcgcgagcaccttacaataa

SEQ ID NO: 6049347 - DNA, 25 bp, Homo sapien
ctgccacgtacggttcggcccaatg

SEQ ID NO: 6049348 - DNA, 25 bp, Homo sapien
tggatcgacccgtcacccagatagt

SEQ ID NO: 6049349 - DNA, 25 bp, Homo sapien
atacgacctacttaagcttgtcgcg

SEQ ID NO: 6049350 - DNA, 25 bp, Homo sapien
cgcgtaacgctgaactacgaatcag

SEQ ID NO: 6049351 - DNA, 25 bp, Homo sapien
gcacgtcgcaataatcatcgtagta

SEQ ID NO: 6049352 - DNA, 25 bp, Homo sapien
gcgcgttagtcgtatccttcagtct

SEQ ID NO: 6049353 - DNA, 25 bp, Homo sapien
cccagcttcagtatcatgtcgcgtc

SEQ ID NO: 6049354 - DNA, 25 bp, Homo sapien
atcgagcccagcttcagtatcatgt

SEQ ID NO: 6049355 - DNA, 25 bp, Homo sapien
acccgatcgcgaagctccggtgact

SEQ ID NO: 6049356 - DNA, 25 bp, Homo sapien
tgtcgcgaactaggtacttagtaaa

SEQ ID NO: 6049357 - DNA, 25 bp, Homo sapien
atatggcggttaggcacgctgacaa

SEQ ID NO: 6049358 - DNA, 25 bp, Homo sapien
ggagcgctcataacggcccacagag

SEQ ID NO: 6049359 - DNA, 25 bp, Homo sapien
cgcgagcaccttacaataatatggc

SEQ ID NO: 6049360 - DNA, 25 bp, Homo sapien
gtatagcgtcgtccggtactataac

SEQ ID NO: 6049361 - DNA, 25 bp, Homo sapien
agtaccgctcgccttcaccattaag

SEQ ID NO: 6049362 - DNA, 25 bp, Homo sapien
tagtatacgaccgtcgggctaccca

SEQ ID NO: 6049363 - DNA, 25 bp, Homo sapien
taacgacgtcaatttggaccgcgtc

SEQ ID NO: 6049364 - DNA, 25 bp, Homo sapien
tcgagcgtgctggatcgacccgtca

SEQ ID NO: 6049365 - DNA, 25 bp, Homo sapien
ttggaccgcgtcctatcgagcccag

SEQ ID NO: 6049366 - DNA, 25 bp, Homo sapien
ggactattgcgcgaaagaaacaggt

SEQ ID NO: 6049367 - DNA, 25 bp, Homo sapien
gaccgtcgggctacccacgcgtata

SEQ ID NO: 6049368 - DNA, 25 bp, Homo sapien
atacgtcgagcggacttaaactgaa

SEQ ID NO: 6049369 - DNA, 25 bp, Homo sapien
gtacttagtaaaattgtacgatcgc

SEQ ID NO: 6049370 - DNA, 25 bp, Homo sapien
tagtcgtatccttcagtctagtata

SEQ ID NO: 6049371 - DNA, 25 bp, Homo sapien
ataaccagtcgggagcgctcataac

SEQ ID NO: 6049372 - DNA, 25 bp, Homo sapien
caccttacaataatatggcggttag

SEQ ID NO: 6049373 - DNA, 25 bp, Homo sapien
gcccaatgtatagcgtcgtccggta

SEQ ID NO: 6049374 - DNA, 25 bp, Homo sapien
gaatcagcacgtcgcaataatcatc

SEQ ID NO: 6049375 - DNA, 25 bp, Homo sapien
tcgcgtcgctttgctatgacccgat

SEQ ID NO: 6049376 - DNA, 25 bp, Homo sapien
ccacagagatgtcgcgtaacgctga

SEQ ID NO: 6049377 - DNA, 25 bp, Homo sapien
agcgcgttacacctacgggattggg

SEQ ID NO: 6049378 - DNA, 25 bp, Homo sapien
ttagtaaaattgtacgatcgcgact

SEQ ID NO: 6049379 - DNA, 25 bp, Homo sapien
cattaagcgcgttagtcgtatcctt

SEQ ID NO: 6049380 - DNA, 25 bp, Homo sapien
cctacttaagcttgtcgcgaactag

SEQ ID NO: 6049381 - DNA, 25 bp, Homo sapien
attcgcgtagccggcgcaaagggtt

SEQ ID NO: 6049382 - DNA, 25 bp, Homo sapien
ggtgactcgggataagacgatcagc

SEQ ID NO: 6049383 - DNA, 25 bp, Homo sapien
cgtcaatttggaccgcgtcctatcg

SEQ ID NO: 6049384 - DNA, 25 bp, Homo sapien
cgaaatgcgtactaggccgtcgaga

SEQ ID NO: 6049385 - DNA, 25 bp, Homo sapien
tttagttcgacggacaacatcggac

SEQ ID NO: 6049386 - DNA, 25 bp, Homo sapien
tacagaagtaagtcgcgcgtatgat

SEQ ID NO: 6049387 - DNA, 25 bp, Homo sapien
cacaggccgcctagtcgagttcgaa

SEQ ID NO: 6049388 - DNA, 25 bp, Homo sapien
gtcgatatactaccggcgcaacggc

SEQ ID NO: 6049389 - DNA, 25 bp, Homo sapien
atatagcaaaatctacgcgagtaac

SEQ ID NO: 6049390 - DNA, 25 bp, Homo sapien
attacgagagaattgcgccgcggtt

SEQ ID NO: 6049391 - DNA, 25 bp, Homo sapien
cgcgaacagcttattcgaccgcgag

SEQ ID NO: 6049392 - DNA, 25 bp, Homo sapien
gtcgcatctcccgataggacgctcg

SEQ ID NO: 6049393 - DNA, 25 bp, Homo sapien
agagaattgcgccgcggttaacgca

SEQ ID NO: 6049394 - DNA, 25 bp, Homo sapien
tagtcatttacgaagtacggacggc

SEQ ID NO: 6049395 - DNA, 25 bp, Homo sapien
tttaaatcgaattatgcggtccagc

SEQ ID NO: 6049396 - DNA, 25 bp, Homo sapien
aacgtagactatgaaccatttagtt

SEQ ID NO: 6049397 - DNA, 25 bp, Homo sapien
ggtccagcgggacagacgcttagta

SEQ ID NO: 6049398 - DNA, 25 bp, Homo sapien
tgctagaacgtactcgcgaccaggc

SEQ ID NO: 6049399 - DNA, 25 bp, Homo sapien
ccgcgaaacgtagactatgaaccat

SEQ ID NO: 6049400 - DNA, 25 bp, Homo sapien
gccgcctagtcgagttcgaagtggc

SEQ ID NO: 6049401 - DNA, 25 bp, Homo sapien
taacgcatatagcaaaatctacgcg

SEQ ID NO: 6049402 - DNA, 25 bp, Homo sapien
gagtgcatacgtcgcaagttggatc

SEQ ID NO: 6049403 - DNA, 25 bp, Homo sapien
tagtcgagttcgaagtggccgcgaa

SEQ ID NO: 6049404 - DNA, 25 bp, Homo sapien
ttatgcggtccagcgggacagacgc

SEQ ID NO: 6049405 - DNA, 25 bp, Homo sapien
cagcttattcgaccgcgagtagtaa

SEQ ID NO: 6049406 - DNA, 25 bp, Homo sapien
gcagattacgtacgcgaacagctta

SEQ ID NO: 6049407 - DNA, 25 bp, Homo sapien
cagacgcttagtacggattagtcat

SEQ ID NO: 6049408 - DNA, 25 bp, Homo sapien
gtcgcggaataaacctatcgccgaa

SEQ ID NO: 6049409 - DNA, 25 bp, Homo sapien
atctcccgataggacgctcgctgta

SEQ ID NO: 6049410 - DNA, 25 bp, Homo sapien
aagtacggacggcacactgctagaa

SEQ ID NO: 6049411 - DNA, 25 bp, Homo sapien
gctgttgcagattacgtacgcgaac

SEQ ID NO: 6049412 - DNA, 25 bp, Homo sapien
acctatcgccgaagaggcgtcgata

SEQ ID NO: 6049413 - DNA, 25 bp, Homo sapien
gtcgatcggctacacacctacagaa

SEQ ID NO: 6049414 - DNA, 25 bp, Homo sapien
tacgtcgcaagttggatcagaccgc

SEQ ID NO: 6049415 - DNA, 25 bp, Homo sapien
acgcaggtcgcatctcccgatagga

SEQ ID NO: 6049416 - DNA, 25 bp, Homo sapien
tcctacacgccgattacgagagaat

SEQ ID NO: 6049417 - DNA, 25 bp, Homo sapien
cggacggcacactgctagaacgtac

SEQ ID NO: 6049418 - DNA, 25 bp, Homo sapien
agttcgaagtggccgcgaaacgtag

SEQ ID NO: 6049419 - DNA, 25 bp, Homo sapien
cataatccgtctacaaagttaatag

SEQ ID NO: 6049420 - DNA, 25 bp, Homo sapien
cgataggacgctcgctgtagagtgc

SEQ ID NO: 6049421 - DNA, 25 bp, Homo sapien
tcgaattatgcggtccagcgggaca

SEQ ID NO: 6049422 - DNA, 25 bp, Homo sapien
tctgatgtcgatcggctacacacct

SEQ ID NO: 6049423 - DNA, 25 bp, Homo sapien
tactaccggcgcaacggcgaaatgc

SEQ ID NO: 6049424 - DNA, 25 bp, Homo sapien
agaggcgtcgatatactaccggcgc

SEQ ID NO: 6049425 - DNA, 25 bp, Homo sapien
cggcgcaacggcgaaatgcgtacta

SEQ ID NO: 6049426 - DNA, 25 bp, Homo sapien
aacgtactcgcgaccaggcatccta

SEQ ID NO: 6049427 - DNA, 25 bp, Homo sapien
ttgcgccgcggttaacgcatatagc

SEQ ID NO: 6049428 - DNA, 25 bp, Homo sapien
gactatgaaccatttagttcgacgg

SEQ ID NO: 6049429 - DNA, 25 bp, Homo sapien
acgctcgctgtagagtgcatacgtc

SEQ ID NO: 6049430 - DNA, 25 bp, Homo sapien
caacggcgaaatgcgtactaggccg

SEQ ID NO: 6049431 - DNA, 25 bp, Homo sapien
gtcctaggcgcggattcgtacggct

SEQ ID NO: 6049432 - DNA, 25 bp, Homo sapien
gaataaacctatcgccgaagaggcg

SEQ ID NO: 6049433 - DNA, 25 bp, Homo sapien
tctacgcgagtaacgcaggtcgcat

SEQ ID NO: 6049434 - DNA, 25 bp, Homo sapien
cggctacacacctacagaagtaagt

SEQ ID NO: 6049435 - DNA, 25 bp, Homo sapien
acaaagttaatagcgcaatgcgtcc

SEQ ID NO: 6049436 - DNA, 25 bp, Homo sapien
gacaacatcggacccggcgcataat

SEQ ID NO: 6049437 - DNA, 25 bp, Homo sapien
ctaggccgtcgagaaccacaggccg

SEQ ID NO: 6049438 - DNA, 25 bp, Homo sapien
gcgggacagacgcttagtacggatt

SEQ ID NO: 6049439 - DNA, 25 bp, Homo sapien
tcgacggacaacatcggacccggcg

SEQ ID NO: 6049440 - DNA, 25 bp, Homo sapien
aatggcgtcctaggcgcggattcgt

SEQ ID NO: 6049441 - DNA, 25 bp, Homo sapien
gctgtagagtgcatacgtcgcaagt

SEQ ID NO: 6049442 - DNA, 25 bp, Homo sapien
gcacactgctagaacgtactcgcga

SEQ ID NO: 6049443 - DNA, 25 bp, Homo sapien
ccgtctacaaagttaatagcgcaat

SEQ ID NO: 6049444 - DNA, 25 bp, Homo sapien
cgtcgagaaccacaggccgcctagt

SEQ ID NO: 6049445 - DNA, 25 bp, Homo sapien
ttcgaccgcgagtagtaaagttcat

SEQ ID NO: 6049446 - DNA, 25 bp, Homo sapien
gcgtactaggccgtcgagaaccaca

SEQ ID NO: 6049447 - DNA, 25 bp, Homo sapien
tccgatgtcgcggaataaacctatc

SEQ ID NO: 6049448 - DNA, 25 bp, Homo sapien
agtaagtcgcgcgtatgatttaaat

SEQ ID NO: 6049449 - DNA, 25 bp, Homo sapien
cacacctacagaagtaagtcgcgcg

SEQ ID NO: 6049450 - DNA, 25 bp, Homo sapien
tagtaaagttcatctgatgtcgatc

SEQ ID NO: 6049451 - DNA, 25 bp, Homo sapien
gtatgatttaaatcgaattatgcgg

SEQ ID NO: 6049452 - DNA, 25 bp, Homo sapien
caaaatctacgcgagtaacgcaggt

SEQ ID NO: 6049453 - DNA, 25 bp, Homo sapien
cgcgagtagtaaagttcatctgatg

SEQ ID NO: 6049454 - DNA, 25 bp, Homo sapien
cgcgaccaggcatcctacacgccga

SEQ ID NO: 6049455 - DNA, 25 bp, Homo sapien
cgtacggctgttgcagattacgtac

SEQ ID NO: 6049456 - DNA, 25 bp, Homo sapien
gcaagttggatcagaccgctcgtgt

SEQ ID NO: 6049457 - DNA, 25 bp, Homo sapien
tacgtacgcgaacagcttattcgac

SEQ ID NO: 6049458 - DNA, 25 bp, Homo sapien
agaccgctcgtgtccgatgtcgcgg

SEQ ID NO: 6049459 - DNA, 25 bp, Homo sapien
cgccgaagaggcgtcgatatactac

SEQ ID NO: 6049460 - DNA, 25 bp, Homo sapien
acgccgattacgagagaattgcgcc

SEQ ID NO: 6049461 - DNA, 25 bp, Homo sapien
agttcatctgatgtcgatcggctac

SEQ ID NO: 6049462 - DNA, 25 bp, Homo sapien
accggtccgattaatggcgtcctag

SEQ ID NO: 6049463 - DNA, 25 bp, Homo sapien
aagtggccgcgaaacgtagactatg

SEQ ID NO: 6049464 - DNA, 25 bp, Homo sapien
ttaatagcgcaatgcgtcccagccg

SEQ ID NO: 6049465 - DNA, 25 bp, Homo sapien
tcgcgcgtatgatttaaatcgaatt

SEQ ID NO: 6049466 - DNA, 25 bp, Homo sapien
ccggcgcataatccgtctacaaagt

SEQ ID NO: 6049467 - DNA, 25 bp, Homo sapien
cttagtacggattagtcatttacga

SEQ ID NO: 6049468 - DNA, 25 bp, Homo sapien
cgcggttaacgcatatagcaaaatc

SEQ ID NO: 6049469 - DNA, 25 bp, Homo sapien
tcggacccggcgcataatccgtcta

SEQ ID NO: 6049470 - DNA, 25 bp, Homo sapien
ccgattaatggcgtcctaggcgcgg

SEQ ID NO: 6049471 - DNA, 25 bp, Homo sapien
gagaaccacaggccgcctagtcgag

SEQ ID NO: 6049472 - DNA, 25 bp, Homo sapien
ggattcgtacggctgttgcagatta

SEQ ID NO: 6049473 - DNA, 25 bp, Homo sapien
cgagtaacgcaggtcgcatctcccg

SEQ ID NO: 6049474 - DNA, 25 bp, Homo sapien
caggcatcctacacgccgattacga

SEQ ID NO: 6049475 - DNA, 25 bp, Homo sapien
ctcgtgtccgatgtcgcggaataaa

SEQ ID NO: 6049476 - DNA, 25 bp, Homo sapien
aggcgcggattcgtacggctgttgc

SEQ ID NO: 6049477 - DNA, 25 bp, Homo sapien
gaaccatttagttcgacggacaaca

SEQ ID NO: 6049478 - DNA, 25 bp, Homo sapien
atttacgaagtacggacggcacact

SEQ ID NO: 6049479 - DNA, 25 bp, Homo sapien
acggattagtcatttacgaagtacg

SEQ ID NO: 6049480 - DNA, 25 bp, Homo sapien
tggatcagaccgctcgtgtccgatg

SEQ ID NO: 6049481 - DNA, 25 bp, Homo sapien
tcgataatccgtagtcgcgccgatg

SEQ ID NO: 6049482 - DNA, 25 bp, Homo sapien
tcggtctaaacgtctctcttacgat

SEQ ID NO: 6049483 - DNA, 25 bp, Homo sapien
cgtatcgcgaccgatggaaccaggt

SEQ ID NO: 6049484 - DNA, 25 bp, Homo sapien
tactaacaaccagttggcaggacta

SEQ ID NO: 6049485 - DNA, 25 bp, Homo sapien
accttgcgcgtagtcgtccacaggc

SEQ ID NO: 6049486 - DNA, 25 bp, Homo sapien
ggtcgcctatagctcacactactag

SEQ ID NO: 6049487 - DNA, 25 bp, Homo sapien
gcgtaaggcgaatcgtcacaggata

SEQ ID NO: 6049488 - DNA, 25 bp, Homo sapien
attaacgcgcggtgtgggtcgccac

SEQ ID NO: 6049489 - DNA, 25 bp, Homo sapien
cgcgtagtcgtccacaggcacgtat

SEQ ID NO: 6049490 - DNA, 25 bp, Homo sapien
gcgtcggagtatataacttacggtc

SEQ ID NO: 6049491 - DNA, 25 bp, Homo sapien
catcgagtcctgtcggtagcgcgcc

SEQ ID NO: 6049492 - DNA, 25 bp, Homo sapien
caaccagttggcaggactagcgcac

SEQ ID NO: 6049493 - DNA, 25 bp, Homo sapien
ataccggtcgcctatagctcacact

SEQ ID NO: 6049494 - DNA, 25 bp, Homo sapien
acgcgcaagtccttcccagcgtaag

SEQ ID NO: 6049495 - DNA, 25 bp, Homo sapien
tctatgtagcgacggagactgtaaa

SEQ ID NO: 6049496 - DNA, 25 bp, Homo sapien
cgacgtctatgtatgcttacgcgat

SEQ ID NO: 6049497 - DNA, 25 bp, Homo sapien
cgcgcctttctgtggttaaagcgac

SEQ ID NO: 6049498 - DNA, 25 bp, Homo sapien
gttggcaggactagcgcacgctcaa

SEQ ID NO: 6049499 - DNA, 25 bp, Homo sapien
gcaccctggcgctgaccttagatcg

SEQ ID NO: 6049500 - DNA, 25 bp, Homo sapien
aaggtaactttatctatgtagcgac

SEQ ID NO: 6049501 - DNA, 25 bp, Homo sapien
agatggttacgcgtaagcatcgagt

SEQ ID NO: 6049502 - DNA, 25 bp, Homo sapien
acggtcgcaccctggcgctgacctt

SEQ ID NO: 6049503 - DNA, 25 bp, Homo sapien
taaacgtctctcttacgattagtta

SEQ ID NO: 6049504 - DNA, 25 bp, Homo sapien
tgaccttagatcgtacccgtagcgt

SEQ ID NO: 6049505 - DNA, 25 bp, Homo sapien
caggataacgccgatactaaggtaa

SEQ ID NO: 6049506 - DNA, 25 bp, Homo sapien
ttcccagcgtaaggcgaatcgtcac

SEQ ID NO: 6049507 - DNA, 25 bp, Homo sapien
ctctcttacgattagttaacgcgca

SEQ ID NO: 6049508 - DNA, 25 bp, Homo sapien
tacccgtagcgttgataaatagtta

SEQ ID NO: 6049509 - DNA, 25 bp, Homo sapien
ctcacactactagcgtcggagtata

SEQ ID NO: 6049510 - DNA, 25 bp, Homo sapien
aactcctattaacgcgcggtgtggg

SEQ ID NO: 6049511 - DNA, 25 bp, Homo sapien
acaggcacgtatcgcgaccgatgga

SEQ ID NO: 6049512 - DNA, 25 bp, Homo sapien
tttctgtggttaaagcgaccgtagc

SEQ ID NO: 6049513 - DNA, 25 bp, Homo sapien
ataacttacggtcgcaccctggcgc

SEQ ID NO: 6049514 - DNA, 25 bp, Homo sapien
taggggtcgccataccggtcgccta

SEQ ID NO: 6049515 - DNA, 25 bp, Homo sapien
tagcagtaggggtcgccataccggt

SEQ ID NO: 6049516 - DNA, 25 bp, Homo sapien
gcgctataagtatttgtggacccgc

SEQ ID NO: 6049517 - DNA, 25 bp, Homo sapien
tgtgggtcgccacgcgctataagta

SEQ ID NO: 6049518 - DNA, 25 bp, Homo sapien
gacccgcgcgtaatgctcaaccaag

SEQ ID NO: 6049519 - DNA, 25 bp, Homo sapien
ctatagctcacactactagcgtcgg

SEQ ID NO: 6049520 - DNA, 25 bp, Homo sapien
tacgattagttaacgcgcaagtcct

SEQ ID NO: 6049521 - DNA, 25 bp, Homo sapien
gcgcacgctcaacaacattcatact

SEQ ID NO: 6049522 - DNA, 25 bp, Homo sapien
cgatggaaccaggtcggtctaaacg

SEQ ID NO: 6049523 - DNA, 25 bp, Homo sapien
gtagtccgacgtctatgtatgctta

SEQ ID NO: 6049524 - DNA, 25 bp, Homo sapien
gcgcggtgtgggtcgccacgcgcta

SEQ ID NO: 6049525 - DNA, 25 bp, Homo sapien
gctcaacaacattcatactatcgcg

SEQ ID NO: 6049526 - DNA, 25 bp, Homo sapien
tagcgacggagactgtaaactccta

SEQ ID NO: 6049527 - DNA, 25 bp, Homo sapien
gccgatgatgctagatggttacgcg

SEQ ID NO: 6049528 - DNA, 25 bp, Homo sapien
gatcgatgtctctcgataatccgta

SEQ ID NO: 6049529 - DNA, 25 bp, Homo sapien
tgtctctcgataatccgtagtcgcg

SEQ ID NO: 6049530 - DNA, 25 bp, Homo sapien
cgcgaccgatggaaccaggtcggtc

SEQ ID NO: 6049531 - DNA, 25 bp, Homo sapien
agtaggcgttacgatcgatgtctct

SEQ ID NO: 6049532 - DNA, 25 bp, Homo sapien
actttatctatgtagcgacggagac

SEQ ID NO: 6049533 - DNA, 25 bp, Homo sapien
taagtatttgtggacccgcgcgtaa

SEQ ID NO: 6049534 - DNA, 25 bp, Homo sapien
aggactagcgcacgctcaacaacat

SEQ ID NO: 6049535 - DNA, 25 bp, Homo sapien
accaggtcggtctaaacgtctctct

SEQ ID NO: 6049536 - DNA, 25 bp, Homo sapien
actgtaaactcctattaacgcgcgg

SEQ ID NO: 6049537 - DNA, 25 bp, Homo sapien
cggagactgtaaactcctattaacg

SEQ ID NO: 6049538 - DNA, 25 bp, Homo sapien
tgataaatagttaacggaattccgc

SEQ ID NO: 6049539 - DNA, 25 bp, Homo sapien
gtcctgtcggtagcgcgcctttctg

SEQ ID NO: 6049540 - DNA, 25 bp, Homo sapien
cgcgtaatgctcaaccaagtaggcg

SEQ ID NO: 6049541 - DNA, 25 bp, Homo sapien
gagtatataacttacggtcgcaccc

SEQ ID NO: 6049542 - DNA, 25 bp, Homo sapien
aagtccttcccagcgtaaggcgaat

SEQ ID NO: 6049543 - DNA, 25 bp, Homo sapien
tagcgttgataaatagttaacggaa

SEQ ID NO: 6049544 - DNA, 25 bp, Homo sapien
cgccacgcgctataagtatttgtgg

SEQ ID NO: 6049545 - DNA, 25 bp, Homo sapien
gatgctagatggttacgcgtaagca

SEQ ID NO: 6049546 - DNA, 25 bp, Homo sapien
aaccaagtaggcgttacgatcgatg

SEQ ID NO: 6049547 - DNA, 25 bp, Homo sapien
cgccgatactaaggtaactttatct

SEQ ID NO: 6049548 - DNA, 25 bp, Homo sapien
tagttaacgcgcaagtccttcccag

SEQ ID NO: 6049549 - DNA, 25 bp, Homo sapien
gtcgccataccggtcgcctatagct

SEQ ID NO: 6049550 - DNA, 25 bp, Homo sapien
atccgtagtcgcgccgatgatgcta

SEQ ID NO: 6049551 - DNA, 25 bp, Homo sapien
attccgccgttagcgtagtccgacg

SEQ ID NO: 6049552 - DNA, 25 bp, Homo sapien
gtcgtccacaggcacgtatcgcgac

SEQ ID NO: 6049553 - DNA, 25 bp, Homo sapien
ctactagcgtcggagtatataactt

SEQ ID NO: 6049554 - DNA, 25 bp, Homo sapien
cgtaagcatcgagtcctgtcggtag

SEQ ID NO: 6049555 - DNA, 25 bp, Homo sapien
gttacgcgtaagcatcgagtcctgt

SEQ ID NO: 6049556 - DNA, 25 bp, Homo sapien
gatactaaggtaactttatctatgt

SEQ ID NO: 6049557 - DNA, 25 bp, Homo sapien
agtcgcgccgatgatgctagatggt

SEQ ID NO: 6049558 - DNA, 25 bp, Homo sapien
cgttagcgtagtccgacgtctatgt

SEQ ID NO: 6049559 - DNA, 25 bp, Homo sapien
tggttaaagcgaccgtagcagtagg

SEQ ID NO: 6049560 - DNA, 25 bp, Homo sapien
tggcgctgaccttagatcgtacccg

SEQ ID NO: 6049561 - DNA, 25 bp, Homo sapien
cgttacgatcgatgtctctcgataa

SEQ ID NO: 6049562 - DNA, 25 bp, Homo sapien
caacattcatactatcgcggccgaa

SEQ ID NO: 6049563 - DNA, 25 bp, Homo sapien
tcgtcacaggataacgccgatacta

SEQ ID NO: 6049564 - DNA, 25 bp, Homo sapien
atgcttacgcgatactaacaaccag

SEQ ID NO: 6049565 - DNA, 25 bp, Homo sapien
ggcgaatcgtcacaggataacgccg

SEQ ID NO: 6049566 - DNA, 25 bp, Homo sapien
tttgtggacccgcgcgtaatgctca

SEQ ID NO: 6049567 - DNA, 25 bp, Homo sapien
acgcgatactaacaaccagttggca

SEQ ID NO: 6049568 - DNA, 25 bp, Homo sapien
ctatgtatgcttacgcgatactaac

SEQ ID NO: 6049569 - DNA, 25 bp, Homo sapien
cgaccgtagcagtaggggtcgccat

SEQ ID NO: 6049570 - DNA, 25 bp, Homo sapien
atgctcaaccaagtaggcgttacga

SEQ ID NO: 6049571 - DNA, 25 bp, Homo sapien
cggtagcgcgcctttctgtggttaa

SEQ ID NO: 6049572 - DNA, 25 bp, Homo sapien
agatcgtacccgtagcgttgataaa

SEQ ID NO: 6049573 - DNA, 25 bp, Homo sapien
tcaagacgctagttgacggtcgtac

SEQ ID NO: 6049574 - DNA, 25 bp, Homo sapien
gttgttaaccacgaattagtagcga

SEQ ID NO: 6049575 - DNA, 25 bp, Homo sapien
cgttaaggacgaaggccattggagc

SEQ ID NO: 6049576 - DNA, 25 bp, Homo sapien
cgtactcgaaccgagcacggagtgt

SEQ ID NO: 6049577 - DNA, 25 bp, Homo sapien
gctaccatacgtcggaaattacgct

SEQ ID NO: 6049578 - DNA, 25 bp, Homo sapien
gtaacacgttctcggttcttgcttg

SEQ ID NO: 6049579 - DNA, 25 bp, Homo sapien
atcgatcatcgggaagcactcgcgt

SEQ ID NO: 6049580 - DNA, 25 bp, Homo sapien
ctgtcgcgttaaggacgaaggccat

SEQ ID NO: 6049581 - DNA, 25 bp, Homo sapien
gtagcgactgcttcaagacgctagt

SEQ ID NO: 6049582 - DNA, 25 bp, Homo sapien
ggtactaggaaagcgcgactagtat

SEQ ID NO: 6049583 - DNA, 25 bp, Homo sapien
ctcgaaccgagcacggagtgtgcga

SEQ ID NO: 6049584 - DNA, 25 bp, Homo sapien
tagttgtgcagctatcgtacggagc

SEQ ID NO: 6049585 - DNA, 25 bp, Homo sapien
attggagcgtatatcgatcatcggg

SEQ ID NO: 6049586 - DNA, 25 bp, Homo sapien
cgctggatacacgtacaatcggttg

SEQ ID NO: 6049587 - DNA, 25 bp, Homo sapien
tgcagctatcgtacggagctatccg

SEQ ID NO: 6049588 - DNA, 25 bp, Homo sapien
catctcgctaccatacgtcggaaat

SEQ ID NO: 6049589 - DNA, 25 bp, Homo sapien
acggagtgtgcgactagtcgccgcc

SEQ ID NO: 6049590 - DNA, 25 bp, Homo sapien
gtgtaggatcgggttacgacttgca

SEQ ID NO: 6049591 - DNA, 25 bp, Homo sapien
cgtatgctagtcgaatactgtgaga

SEQ ID NO: 6049592 - DNA, 25 bp, Homo sapien
gaatactgtgagataacgacgacat

SEQ ID NO: 6049593 - DNA, 25 bp, Homo sapien
gtcgtacatgctccggcgagtctaa

SEQ ID NO: 6049594 - DNA, 25 bp, Homo sapien
tcatcgggaagcactcgcgtaacac

SEQ ID NO: 6049595 - DNA, 25 bp, Homo sapien
cggcgagtctaactcagtctgaaga

SEQ ID NO: 6049596 - DNA, 25 bp, Homo sapien
atacacgtacaatcggttgcatcgt

SEQ ID NO: 6049597 - DNA, 25 bp, Homo sapien
gtctaactcagtctgaagatagtag

SEQ ID NO: 6049598 - DNA, 25 bp, Homo sapien
gacttgcaattctgtcgcgttaagg

SEQ ID NO: 6049599 - DNA, 25 bp, Homo sapien
attcctgaagcgattacgacccaag

SEQ ID NO: 6049600 - DNA, 25 bp, Homo sapien
atgaaataacttagtatttcgcggg

SEQ ID NO: 6049601 - DNA, 25 bp, Homo sapien
taacgacgacatatacatgactttg

SEQ ID NO: 6049602 - DNA, 25 bp, Homo sapien
ttgcttgaacgaccgtgtgtcaaag

SEQ ID NO: 6049603 - DNA, 25 bp, Homo sapien
ctcagtctgaagatagtagaacgca

SEQ ID NO: 6049604 - DNA, 25 bp, Homo sapien
taaccgtacgcgactagcatctcgc

SEQ ID NO: 6049605 - DNA, 25 bp, Homo sapien
actgcttcaagacgctagttgacgg

SEQ ID NO: 6049606 - DNA, 25 bp, Homo sapien
ccgagcacggagtgtgcgactagtc

SEQ ID NO: 6049607 - DNA, 25 bp, Homo sapien
aaggccattggagcgtatatcgatc

SEQ ID NO: 6049608 - DNA, 25 bp, Homo sapien
atacatgactttgacgcggtaatca

SEQ ID NO: 6049609 - DNA, 25 bp, Homo sapien
atacggcatacgttgagcgactaat

SEQ ID NO: 6049610 - DNA, 25 bp, Homo sapien
cgttctcggttcttgcttgaacgac

SEQ ID NO: 6049611 - DNA, 25 bp, Homo sapien
ccgcccatacggcatacgttgagcg

SEQ ID NO: 6049612 - DNA, 25 bp, Homo sapien
tggtacgaatgattaacgggaagta

SEQ ID NO: 6049613 - DNA, 25 bp, Homo sapien
gggtgtgacggggtcgcgtatgcta

SEQ ID NO: 6049614 - DNA, 25 bp, Homo sapien
caattctgtcgcgttaaggacgaag

SEQ ID NO: 6049615 - DNA, 25 bp, Homo sapien
tatcgtacggagctatccgtgtagg

SEQ ID NO: 6049616 - DNA, 25 bp, Homo sapien
gttgagcgactaattcctgaagcga

SEQ ID NO: 6049617 - DNA, 25 bp, Homo sapien
gggtcgcgtatgctagtcgaatact

SEQ ID NO: 6049618 - DNA, 25 bp, Homo sapien
gcatcgtgttttgatacgcgacggg

SEQ ID NO: 6049619 - DNA, 25 bp, Homo sapien
gaacgaccgtgtgtcaaaggaatat

SEQ ID NO: 6049620 - DNA, 25 bp, Homo sapien
ggaaagcgcgactagtattagttgt

SEQ ID NO: 6049621 - DNA, 25 bp, Homo sapien
tagtattagttgtgcagctatcgta

SEQ ID NO: 6049622 - DNA, 25 bp, Homo sapien
tagtcgccgcccatacggcatacgt

SEQ ID NO: 6049623 - DNA, 25 bp, Homo sapien
cggttcttgcttgaacgaccgtgtg

SEQ ID NO: 6049624 - DNA, 25 bp, Homo sapien
gtcaaaggaatatggtacgaatgat

SEQ ID NO: 6049625 - DNA, 25 bp, Homo sapien
ggaagcactcgcgtaacacgttctc

SEQ ID NO: 6049626 - DNA, 25 bp, Homo sapien
ggttacgacttgcaattctgtcgcg

SEQ ID NO: 6049627 - DNA, 25 bp, Homo sapien
gactttgacgcggtaatcaggaacg

SEQ ID NO: 6049628 - DNA, 25 bp, Homo sapien
acggagctatccgtgtaggatcggg

SEQ ID NO: 6049629 - DNA, 25 bp, Homo sapien
gcgtatatcgatcatcgggaagcac

SEQ ID NO: 6049630 - DNA, 25 bp, Homo sapien
ctagtcgaatactgtgagataacga

SEQ ID NO: 6049631 - DNA, 25 bp, Homo sapien
ccgtgtgtcaaaggaatatggtacg

SEQ ID NO: 6049632 - DNA, 25 bp, Homo sapien
gatacgcgacgggtactaggaaagc

SEQ ID NO: 6049633 - DNA, 25 bp, Homo sapien
aaccacgaattagtagcgactgctt

SEQ ID NO: 6049634 - DNA, 25 bp, Homo sapien
gaagcgattacgacccaagttgtta

SEQ ID NO: 6049635 - DNA, 25 bp, Homo sapien
cgacatatacatgactttgacgcgg

SEQ ID NO: 6049636 - DNA, 25 bp, Homo sapien
atagtagaacgcaatgaaataactt

SEQ ID NO: 6049637 - DNA, 25 bp, Homo sapien
aacttagtatttcgcgggtgtgacg

SEQ ID NO: 6049638 - DNA, 25 bp, Homo sapien
tgacggggtcgcgtatgctagtcga

SEQ ID NO: 6049639 - DNA, 25 bp, Homo sapien
caggaacgctggatacacgtacaat

SEQ ID NO: 6049640 - DNA, 25 bp, Homo sapien
gaacgcaatgaaataacttagtatt

SEQ ID NO: 6049641 - DNA, 25 bp, Homo sapien
ggtaatcaggaacgctggatacacg

SEQ ID NO: 6049642 - DNA, 25 bp, Homo sapien
gggaagtaaccgtacgcgactagca

SEQ ID NO: 6049643 - DNA, 25 bp, Homo sapien
ctgaagatagtagaacgcaatgaaa

SEQ ID NO: 6049644 - DNA, 25 bp, Homo sapien
catacgttgagcgactaattcctga

SEQ ID NO: 6049645 - DNA, 25 bp, Homo sapien
aggacgaaggccattggagcgtata

SEQ ID NO: 6049646 - DNA, 25 bp, Homo sapien
ctatccgtgtaggatcgggttacga

SEQ ID NO: 6049647 - DNA, 25 bp, Homo sapien
gaattagtagcgactgcttcaagac

SEQ ID NO: 6049648 - DNA, 25 bp, Homo sapien
ggatcgggttacgacttgcaattct

SEQ ID NO: 6049649 - DNA, 25 bp, Homo sapien
tacgcgactagcatctcgctaccat

SEQ ID NO: 6049650 - DNA, 25 bp, Homo sapien
cgactaattcctgaagcgattacga

SEQ ID NO: 6049651 - DNA, 25 bp, Homo sapien
actcgcgtaacacgttctcggttct

SEQ ID NO: 6049652 - DNA, 25 bp, Homo sapien
actagcatctcgctaccatacgtcg

SEQ ID NO: 6049653 - DNA, 25 bp, Homo sapien
gtgagataacgacgacatatacatg

SEQ ID NO: 6049654 - DNA, 25 bp, Homo sapien
gtacaatcggttgcatcgtgttttg

SEQ ID NO: 6049655 - DNA, 25 bp, Homo sapien
tgtgcgactagtcgccgcccatacg

SEQ ID NO: 6049656 - DNA, 25 bp, Homo sapien
ttgacggtcgtacatgctccggcga

SEQ ID NO: 6049657 - DNA, 25 bp, Homo sapien
tgacgcggtaatcaggaacgctgga

SEQ ID NO: 6049658 - DNA, 25 bp, Homo sapien
atgctccggcgagtctaactcagtc

SEQ ID NO: 6049659 - DNA, 25 bp, Homo sapien
cgacgggtactaggaaagcgcgact

SEQ ID NO: 6049660 - DNA, 25 bp, Homo sapien
tcggttgcatcgtgttttgatacgc

SEQ ID NO: 6049661 - DNA, 25 bp, Homo sapien
tgttttgatacgcgacgggtactag

SEQ ID NO: 6049662 - DNA, 25 bp, Homo sapien
cgcgactagtattagttgtgcagct

SEQ ID NO: 6049663 - DNA, 25 bp, Homo sapien
ggaatatggtacgaatgattaacgg

SEQ ID NO: 6049664 - DNA, 25 bp, Homo sapien
cgctagttgacggtcgtacatgctc

SEQ ID NO: 6049665 - DNA, 25 bp, Homo sapien
gaagtaagacatccgtccgatggta

SEQ ID NO: 6049666 - DNA, 25 bp, Homo sapien
ggttaaactagtcgatcgcggtgta

SEQ ID NO: 6049667 - DNA, 25 bp, Homo sapien
taggtaatatactccggtacgcgat

SEQ ID NO: 6049668 - DNA, 25 bp, Homo sapien
agcagctcatccgtcgtacgcgcgt

SEQ ID NO: 6049669 - DNA, 25 bp, Homo sapien
cagggatataaatcgatgatgcacc

SEQ ID NO: 6049670 - DNA, 25 bp, Homo sapien
gtcccagtctttctcgcggtataca

SEQ ID NO: 6049671 - DNA, 25 bp, Homo sapien
tctccttagcgaagtcggaacattg

SEQ ID NO: 6049672 - DNA, 25 bp, Homo sapien
tctcgcggtatacacagttgggttg

SEQ ID NO: 6049673 - DNA, 25 bp, Homo sapien
atggtagtcccagtctttctcgcgg

SEQ ID NO: 6049674 - DNA, 25 bp, Homo sapien
ctatgtcggcgctaacgctacagac

SEQ ID NO: 6049675 - DNA, 25 bp, Homo sapien
cgtccgatggtagtcccagtctttc

SEQ ID NO: 6049676 - DNA, 25 bp, Homo sapien
tgcgcgtagaacgttgcaccgtcaa

SEQ ID NO: 6049677 - DNA, 25 bp, Homo sapien
tatgtatctccttagcgaagtcgga

SEQ ID NO: 6049678 - DNA, 25 bp, Homo sapien
tataagtgcacgacaaagtaatcgg

SEQ ID NO: 6049679 - DNA, 25 bp, Homo sapien
tacgacggtaattatgtatctcctt

SEQ ID NO: 6049680 - DNA, 25 bp, Homo sapien
taacgctacagaccgtttcacgcgg

SEQ ID NO: 6049681 - DNA, 25 bp, Homo sapien
cgtttcacgcggccgaattatcgct

SEQ ID NO: 6049682 - DNA, 25 bp, Homo sapien
aaacaaacctagttgcgagcgagac

SEQ ID NO: 6049683 - DNA, 25 bp, Homo sapien
cggtgtagcagctcatccgtcgtac

SEQ ID NO: 6049684 - DNA, 25 bp, Homo sapien
ttagtacacattatgcttggcgcga

SEQ ID NO: 6049685 - DNA, 25 bp, Homo sapien
tagaacgttgcaccgtcaacgcgaa

SEQ ID NO: 6049686 - DNA, 25 bp, Homo sapien
acctagttgcgagcgagacccgaag

SEQ ID NO: 6049687 - DNA, 25 bp, Homo sapien
ttgcgagcgagacccgaaggaggcc

SEQ ID NO: 6049688 - DNA, 25 bp, Homo sapien
tatcgctcacttcagggatataaat

SEQ ID NO: 6049689 - DNA, 25 bp, Homo sapien
agatcgtacgctactagtcctgcgg

SEQ ID NO: 6049690 - DNA, 25 bp, Homo sapien
tcacttcagggatataaatcgatga

SEQ ID NO: 6049691 - DNA, 25 bp, Homo sapien
cacactcgccgttatgtagaagtaa

SEQ ID NO: 6049692 - DNA, 25 bp, Homo sapien
atgcacctagcgcttcgtacgatga

SEQ ID NO: 6049693 - DNA, 25 bp, Homo sapien
gcgcgtaaaggtgtcgagataccgc

SEQ ID NO: 6049694 - DNA, 25 bp, Homo sapien
agtcggaacattgcacagagatcgt

SEQ ID NO: 6049695 - DNA, 25 bp, Homo sapien
aagcgagtagaacgccttgtaaaca

SEQ ID NO: 6049696 - DNA, 25 bp, Homo sapien
ccgccacgcggattagtacacatta

SEQ ID NO: 6049697 - DNA, 25 bp, Homo sapien
cgagacccgaaggaggccgtatacg

SEQ ID NO: 6049698 - DNA, 25 bp, Homo sapien
actagtcctgcggccgcgtacgata

SEQ ID NO: 6049699 - DNA, 25 bp, Homo sapien
cggcgctaacgctacagaccgtttc

SEQ ID NO: 6049700 - DNA, 25 bp, Homo sapien
gcgcgataggtaatatactccggta

SEQ ID NO: 6049701 - DNA, 25 bp, Homo sapien
cgcaaactatgtcggcgctaacgct

SEQ ID NO: 6049702 - DNA, 25 bp, Homo sapien
cacattatgcttggcgcgataggta

SEQ ID NO: 6049703 - DNA, 25 bp, Homo sapien
tccggtacgcgatataagtgcacga

SEQ ID NO: 6049704 - DNA, 25 bp, Homo sapien
atatactccggtacgcgatataagt

SEQ ID NO: 6049705 - DNA, 25 bp, Homo sapien
aaaggtgtcgagataccgcgcaaac

SEQ ID NO: 6049706 - DNA, 25 bp, Homo sapien
gcgaagtcgcccgccacgcggatta

SEQ ID NO: 6049707 - DNA, 25 bp, Homo sapien
gaggttcacactcgccgttatgtag

SEQ ID NO: 6049708 - DNA, 25 bp, Homo sapien
tacgctactagtcctgcggccgcgt

SEQ ID NO: 6049709 - DNA, 25 bp, Homo sapien
cgatcgcggtgtagcagctcatccg

SEQ ID NO: 6049710 - DNA, 25 bp, Homo sapien
ccgttatgcgcgtagaacgttgcac

SEQ ID NO: 6049711 - DNA, 25 bp, Homo sapien
acgcaccaacgtggcagtacgacgg

SEQ ID NO: 6049712 - DNA, 25 bp, Homo sapien
cgccgttatgtagaagtaagacatc

SEQ ID NO: 6049713 - DNA, 25 bp, Homo sapien
gtatacgacatattgtgccagatac

SEQ ID NO: 6049714 - DNA, 25 bp, Homo sapien
gtctttctcgcggtatacacagttg

SEQ ID NO: 6049715 - DNA, 25 bp, Homo sapien
gcacagagatcgtacgctactagtc

SEQ ID NO: 6049716 - DNA, 25 bp, Homo sapien
cctgcggccgcgtacgatagcttgc

SEQ ID NO: 6049717 - DNA, 25 bp, Homo sapien
ggcagtacgacggtaattatgtatc

SEQ ID NO: 6049718 - DNA, 25 bp, Homo sapien
actagtcgatcgcggtgtagcagct

SEQ ID NO: 6049719 - DNA, 25 bp, Homo sapien
aacattgcacagagatcgtacgcta

SEQ ID NO: 6049720 - DNA, 25 bp, Homo sapien
tgcttggcgcgataggtaatatact

SEQ ID NO: 6049721 - DNA, 25 bp, Homo sapien
ccttgtaaacaaacctagttgcgag

SEQ ID NO: 6049722 - DNA, 25 bp, Homo sapien
gcttcgtacgatgaggttcacactc

SEQ ID NO: 6049723 - DNA, 25 bp, Homo sapien
cagatacgtcgtccggagacccggt

SEQ ID NO: 6049724 - DNA, 25 bp, Homo sapien
gtaatcggtagtacgcaccaacgtg

SEQ ID NO: 6049725 - DNA, 25 bp, Homo sapien
tagcgaagtcggaacattgcacaga

SEQ ID NO: 6049726 - DNA, 25 bp, Homo sapien
tataaatcgatgatgcacctagcgc

SEQ ID NO: 6049727 - DNA, 25 bp, Homo sapien
caacgtggcagtacgacggtaatta

SEQ ID NO: 6049728 - DNA, 25 bp, Homo sapien
tcgtacgcgcgtaaaggtgtcgaga

SEQ ID NO: 6049729 - DNA, 25 bp, Homo sapien
ccgaattatcgctcacttcagggat

SEQ ID NO: 6049730 - DNA, 25 bp, Homo sapien
tcatccgtcgtacgcgcgtaaaggt

SEQ ID NO: 6049731 - DNA, 25 bp, Homo sapien
cgcggattagtacacattatgcttg

SEQ ID NO: 6049732 - DNA, 25 bp, Homo sapien
gtcgagataccgcgcaaactatgtc

SEQ ID NO: 6049733 - DNA, 25 bp, Homo sapien
cttaccaagcgagtagaacgccttg

SEQ ID NO: 6049734 - DNA, 25 bp, Homo sapien
acaaagtaatcggtagtacgcacca

SEQ ID NO: 6049735 - DNA, 25 bp, Homo sapien
tacgatgaggttcacactcgccgtt

SEQ ID NO: 6049736 - DNA, 25 bp, Homo sapien
tacgatagcttgcttaccaagcgag

SEQ ID NO: 6049737 - DNA, 25 bp, Homo sapien
ttgtgccagatacgtcgtccggaga

SEQ ID NO: 6049738 - DNA, 25 bp, Homo sapien
ataccgcgcaaactatgtcggcgct

SEQ ID NO: 6049739 - DNA, 25 bp, Homo sapien
gacatccgtccgatggtagtcccag

SEQ ID NO: 6049740 - DNA, 25 bp, Homo sapien
ggtaattatgtatctccttagcgaa

SEQ ID NO: 6049741 - DNA, 25 bp, Homo sapien
cctagcgcttcgtacgatgaggttc

SEQ ID NO: 6049742 - DNA, 25 bp, Homo sapien
gacatattgtgccagatacgtcgtc

SEQ ID NO: 6049743 - DNA, 25 bp, Homo sapien
gaggccgtatacgacatattgtgcc

SEQ ID NO: 6049744 - DNA, 25 bp, Homo sapien
acagaccgtttcacgcggccgaatt

SEQ ID NO: 6049745 - DNA, 25 bp, Homo sapien
gttgcaccgtcaacgcgaagtcgcc

SEQ ID NO: 6049746 - DNA, 25 bp, Homo sapien
tgcacgacaaagtaatcggtagtac

SEQ ID NO: 6049747 - DNA, 25 bp, Homo sapien
acgcggccgaattatcgctcacttc

SEQ ID NO: 6049748 - DNA, 25 bp, Homo sapien
ccgaaggaggccgtatacgacatat

SEQ ID NO: 6049749 - DNA, 25 bp, Homo sapien
acgcgatataagtgcacgacaaagt

SEQ ID NO: 6049750 - DNA, 25 bp, Homo sapien
agcttgcttaccaagcgagtagaac

SEQ ID NO: 6049751 - DNA, 25 bp, Homo sapien
tcgatgatgcacctagcgcttcgta

SEQ ID NO: 6049752 - DNA, 25 bp, Homo sapien
gccgcgtacgatagcttgcttacca

SEQ ID NO: 6049753 - DNA, 25 bp, Homo sapien
tatgtagaagtaagacatccgtccg

SEQ ID NO: 6049754 - DNA, 25 bp, Homo sapien
agtcgcccgccacgcggattagtac

SEQ ID NO: 6049755 - DNA, 25 bp, Homo sapien
ggtagtacgcaccaacgtggcagta

SEQ ID NO: 6049756 - DNA, 25 bp, Homo sapien
agacgcgtctaagccgtgagcgtac

SEQ ID NO: 6049757 - DNA, 25 bp, Homo sapien
attaagcacggcgatcggtatttcg

SEQ ID NO: 6049758 - DNA, 25 bp, Homo sapien
gctcggataacggtgtccttgtagt

SEQ ID NO: 6049759 - DNA, 25 bp, Homo sapien
cgtcgcgtgcaccagacgcacgcac

SEQ ID NO: 6049760 - DNA, 25 bp, Homo sapien
gtcacgtatgttctctgagtttgta

SEQ ID NO: 6049761 - DNA, 25 bp, Homo sapien
tcgacacgatttattaagcacggcg

SEQ ID NO: 6049762 - DNA, 25 bp, Homo sapien
cgccgcagacgcgtctaagccgtga

SEQ ID NO: 6049763 - DNA, 25 bp, Homo sapien
gatcttacgcacgattaagcgggcg

SEQ ID NO: 6049764 - DNA, 25 bp, Homo sapien
gacgcttcgcggtagcaacgccgca

SEQ ID NO: 6049765 - DNA, 25 bp, Homo sapien
aagtcgcgagcaacggattttgcgc

SEQ ID NO: 6049766 - DNA, 25 bp, Homo sapien
cttggtgggtccgactaacgcgctc

SEQ ID NO: 6049767 - DNA, 25 bp, Homo sapien
gttctctaaggctagcgatcgacac

SEQ ID NO: 6049768 - DNA, 25 bp, Homo sapien
ataacggtgtccttgtagtggtatc

SEQ ID NO: 6049769 - DNA, 25 bp, Homo sapien
atatgccgtcgcgtgcaccagacgc

SEQ ID NO: 6049770 - DNA, 25 bp, Homo sapien
tacctcgctcggataacggtgtcct

SEQ ID NO: 6049771 - DNA, 25 bp, Homo sapien
aatataatgcgcgaaaagaggggct

SEQ ID NO: 6049772 - DNA, 25 bp, Homo sapien
ggtatcgcgtatgttctctaaggct

SEQ ID NO: 6049773 - DNA, 25 bp, Homo sapien
tagcgatcgacacgatttattaagc

SEQ ID NO: 6049774 - DNA, 25 bp, Homo sapien
acgcacgattaagcgggcgtctgcc

SEQ ID NO: 6049775 - DNA, 25 bp, Homo sapien
gtgtccttgtagtggtatcgcgtat

SEQ ID NO: 6049776 - DNA, 25 bp, Homo sapien
acgcgctcctctgggtggaacgtat

SEQ ID NO: 6049777 - DNA, 25 bp, Homo sapien
tatgttctctgagtttgtacagttc

SEQ ID NO: 6049778 - DNA, 25 bp, Homo sapien
gtttgtacagttcgcgacaccttgg

SEQ ID NO: 6049779 - DNA, 25 bp, Homo sapien
attaagcgggcgtctgccggcgctc

SEQ ID NO: 6049780 - DNA, 25 bp, Homo sapien
tatttcgtgcaacgtaggtacgcga

SEQ ID NO: 6049781 - DNA, 25 bp, Homo sapien
gtagtcaatataatgcgcgaaaaga

SEQ ID NO: 6049782 - DNA, 25 bp, Homo sapien
gcgcgatagcatacctcgctcggat

SEQ ID NO: 6049783 - DNA, 25 bp, Homo sapien
tcgcggtagcaacgccgcagacgcg

SEQ ID NO: 6049784 - DNA, 25 bp, Homo sapien
cacggcgatcggtatttcgtgcaac

SEQ ID NO: 6049785 - DNA, 25 bp, Homo sapien
gatacgtcgtgtctgggcataactc

SEQ ID NO: 6049786 - DNA, 25 bp, Homo sapien
tcctctgggtggaacgtatcggcaa

SEQ ID NO: 6049787 - DNA, 25 bp, Homo sapien
attacgtcgattgatcttacgcacg

SEQ ID NO: 6049788 - DNA, 25 bp, Homo sapien
gtattagcgcgatagcatacctcgc

SEQ ID NO: 6049789 - DNA, 25 bp, Homo sapien
ggtttctcggttagcgtcgtgcaag

SEQ ID NO: 6049790 - DNA, 25 bp, Homo sapien
cagttcgcgacaccttggtgggtcc

SEQ ID NO: 6049791 - DNA, 25 bp, Homo sapien
ctctgagtttgtacagttcgcgaca

SEQ ID NO: 6049792 - DNA, 25 bp, Homo sapien
gggtggaacgtatcggcaaacattg

SEQ ID NO: 6049793 - DNA, 25 bp, Homo sapien
agcgtactgcgcaacatagccgata

SEQ ID NO: 6049794 - DNA, 25 bp, Homo sapien
tttactgcgcgcgtcacgtatgttc

SEQ ID NO: 6049795 - DNA, 25 bp, Homo sapien
gtgcaacgtaggtacgcgagctatt

SEQ ID NO: 6049796 - DNA, 25 bp, Homo sapien
ataagcagtgagatatgccgtcgcg

SEQ ID NO: 6049797 - DNA, 25 bp, Homo sapien
agtgagatatgccgtcgcgtgcacc

SEQ ID NO: 6049798 - DNA, 25 bp, Homo sapien
tcgtgtctgggcataactcgcgacg

SEQ ID NO: 6049799 - DNA, 25 bp, Homo sapien
gcgtatgttctctaaggctagcgat

SEQ ID NO: 6049800 - DNA, 25 bp, Homo sapien
gtgcaagtagtcaatataatgcgcg

SEQ ID NO: 6049801 - DNA, 25 bp, Homo sapien
aacattgcaccgcggcgcattacgt

SEQ ID NO: 6049802 - DNA, 25 bp, Homo sapien
gcacgcacgatatactctaatgtat

SEQ ID NO: 6049803 - DNA, 25 bp, Homo sapien
ccagacgcacgcacgatatactcta

SEQ ID NO: 6049804 - DNA, 25 bp, Homo sapien
ttaataagtcgcgagcaacggattt

SEQ ID NO: 6049805 - DNA, 25 bp, Homo sapien
aaagaggggcttaataagtcgcgag

SEQ ID NO: 6049806 - DNA, 25 bp, Homo sapien
taaggctagcgatcgacacgattta

SEQ ID NO: 6049807 - DNA, 25 bp, Homo sapien
gtctaagccgtgagcgtactgcgca

SEQ ID NO: 6049808 - DNA, 25 bp, Homo sapien
cagatgaaagacgtattagcgcgat

SEQ ID NO: 6049809 - DNA, 25 bp, Homo sapien
cgtaggtacgcgagctatttcttac

SEQ ID NO: 6049810 - DNA, 25 bp, Homo sapien
tacgcgagctatttcttaccgccgc

SEQ ID NO: 6049811 - DNA, 25 bp, Homo sapien
cgactaacgcgctcctctgggtgga

SEQ ID NO: 6049812 - DNA, 25 bp, Homo sapien
aacggattttgcgcggtcgtataca

SEQ ID NO: 6049813 - DNA, 25 bp, Homo sapien
tagcatacctcgctcggataacggt

SEQ ID NO: 6049814 - DNA, 25 bp, Homo sapien
tagcaacgccgcagacgcgtctaag

SEQ ID NO: 6049815 - DNA, 25 bp, Homo sapien
tcgattgatcttacgcacgattaag

SEQ ID NO: 6049816 - DNA, 25 bp, Homo sapien
aggggcttaataagtcgcgagcaac

SEQ ID NO: 6049817 - DNA, 25 bp, Homo sapien
gcgacgtatctgtttactgcgcgcg

SEQ ID NO: 6049818 - DNA, 25 bp, Homo sapien
ccgatacagatgaaagacgtattag

SEQ ID NO: 6049819 - DNA, 25 bp, Homo sapien
tatctgtttactgcgcgcgtcacgt

SEQ ID NO: 6049820 - DNA, 25 bp, Homo sapien
ctcgatcgttgtaacggtttctcgg

SEQ ID NO: 6049821 - DNA, 25 bp, Homo sapien
ttttgcgcggtcgtatacataagca

SEQ ID NO: 6049822 - DNA, 25 bp, Homo sapien
cgccgcgatacgtcgtgtctgggca

SEQ ID NO: 6049823 - DNA, 25 bp, Homo sapien
gcaccgcggcgcattacgtcgattg

SEQ ID NO: 6049824 - DNA, 25 bp, Homo sapien
gcgacaccttggtgggtccgactaa

SEQ ID NO: 6049825 - DNA, 25 bp, Homo sapien
tgcgcgaaaagaggggcttaataag

SEQ ID NO: 6049826 - DNA, 25 bp, Homo sapien
gcggtcgtatacataagcagtgaga

SEQ ID NO: 6049827 - DNA, 25 bp, Homo sapien
ttgtagtggtatcgcgtatgttctc

SEQ ID NO: 6049828 - DNA, 25 bp, Homo sapien
tcggttagcgtcgtgcaagtagtca

SEQ ID NO: 6049829 - DNA, 25 bp, Homo sapien
acatagccgatacagatgaaagacg

SEQ ID NO: 6049830 - DNA, 25 bp, Homo sapien
cgatttattaagcacggcgatcggt

SEQ ID NO: 6049831 - DNA, 25 bp, Homo sapien
ctgggcataactcgcgacgtatctg

SEQ ID NO: 6049832 - DNA, 25 bp, Homo sapien
tcttaccgccgcgatacgtcgtgtc

SEQ ID NO: 6049833 - DNA, 25 bp, Homo sapien
cgagcaacggattttgcgcggtcgt

SEQ ID NO: 6049834 - DNA, 25 bp, Homo sapien
tcggcaaacattgcaccgcggcgca

SEQ ID NO: 6049835 - DNA, 25 bp, Homo sapien
ccggcgctcgatcgttgtaacggtt

SEQ ID NO: 6049836 - DNA, 25 bp, Homo sapien
aacgtatcggcaaacattgcaccgc

SEQ ID NO: 6049837 - DNA, 25 bp, Homo sapien
gtatacataagcagtgagatatgcc

SEQ ID NO: 6049838 - DNA, 25 bp, Homo sapien
agcgtcgtgcaagtagtcaatataa

SEQ ID NO: 6049839 - DNA, 25 bp, Homo sapien
cggcgcattacgtcgattgatctta

SEQ ID NO: 6049840 - DNA, 25 bp, Homo sapien
gatcggtatttcgtgcaacgtaggt

SEQ ID NO: 6049841 - DNA, 25 bp, Homo sapien
ctgcgcaacatagccgatacagatg

SEQ ID NO: 6049842 - DNA, 25 bp, Homo sapien
aaagacgtattagcgcgatagcata

SEQ ID NO: 6049843 - DNA, 25 bp, Homo sapien
tgggtccgactaacgcgctcctctg

SEQ ID NO: 6049844 - DNA, 25 bp, Homo sapien
gccgtgagcgtactgcgcaacatag

SEQ ID NO: 6049845 - DNA, 25 bp, Homo sapien
gcgcgcgtcacgtatgttctctgag

SEQ ID NO: 6049846 - DNA, 25 bp, Homo sapien
agctatttcttaccgccgcgatacg

SEQ ID NO: 6049847 - DNA, 25 bp, Homo sapien
gtgcaccagacgcacgcacgatata

SEQ ID NO: 6049848 - DNA, 25 bp, Homo sapien
cgtctgccggcgctcgatcgttgta

SEQ ID NO: 6049849 - DNA, 25 bp, Homo sapien
taactcgcgacgtatctgtttactg

SEQ ID NO: 6049850 - DNA, 25 bp, Homo sapien
gcgataatactttgggatctagccg

SEQ ID NO: 6049851 - DNA, 25 bp, Homo sapien
cctcctagagttcaattacgcccga

SEQ ID NO: 6049852 - DNA, 25 bp, Homo sapien
tcatcaagatccgcgttaggtcacc

SEQ ID NO: 6049853 - DNA, 25 bp, Homo sapien
gcatccgaccgtatagagacgtctt

SEQ ID NO: 6049854 - DNA, 25 bp, Homo sapien
taccgtacgaagtcgcgaccgctac

SEQ ID NO: 6049855 - DNA, 25 bp, Homo sapien
tgcccgtatcgggtctcgcaggcgt

SEQ ID NO: 6049856 - DNA, 25 bp, Homo sapien
agcgatcgagtataacaaaaaaggt

SEQ ID NO: 6049857 - DNA, 25 bp, Homo sapien
tcgcgacctcctagagttcaattac

SEQ ID NO: 6049858 - DNA, 25 bp, Homo sapien
tgaggttatcgcgaccgagacgcag

SEQ ID NO: 6049859 - DNA, 25 bp, Homo sapien
cgaccgagacgcaggcgacgtattt

SEQ ID NO: 6049860 - DNA, 25 bp, Homo sapien
gaaagaacgcgctagtagcttgcat

SEQ ID NO: 6049861 - DNA, 25 bp, Homo sapien
agagttcaattacgcccgaataggt

SEQ ID NO: 6049862 - DNA, 25 bp, Homo sapien
aatccttcatcaagatccgcgttag

SEQ ID NO: 6049863 - DNA, 25 bp, Homo sapien
agtgagcgcgtaacgtagtacatta

SEQ ID NO: 6049864 - DNA, 25 bp, Homo sapien
gcggtagtacgagccttatgttgga

SEQ ID NO: 6049865 - DNA, 25 bp, Homo sapien
taaaagcggtagtacgagccttatg

SEQ ID NO: 6049866 - DNA, 25 bp, Homo sapien
gtgtacgcatacgttcgaccgatcg

SEQ ID NO: 6049867 - DNA, 25 bp, Homo sapien
tccaatccatcggcgtatagtactt

SEQ ID NO: 6049868 - DNA, 25 bp, Homo sapien
ccgacgtcgccataccctcgcgacg

SEQ ID NO: 6049869 - DNA, 25 bp, Homo sapien
gtgtaagcgataatactttgggatc

SEQ ID NO: 6049870 - DNA, 25 bp, Homo sapien
tgttggactcgcgacgacgtaaaag

SEQ ID NO: 6049871 - DNA, 25 bp, Homo sapien
aggcgacgtatttaagattatcaaa

SEQ ID NO: 6049872 - DNA, 25 bp, Homo sapien
acgtcttagtgagcgcgtaacgtag

SEQ ID NO: 6049873 - DNA, 25 bp, Homo sapien
acgaagtcgcgaccgctacacgata

SEQ ID NO: 6049874 - DNA, 25 bp, Homo sapien
tctcgcaggcgtgggccgcgagcta

SEQ ID NO: 6049875 - DNA, 25 bp, Homo sapien
ctgaatcatgcgcaaactaccggtg

SEQ ID NO: 6049876 - DNA, 25 bp, Homo sapien
gcaccctacaggatgcaaggaatat

SEQ ID NO: 6049877 - DNA, 25 bp, Homo sapien
accctcgcgacggtgtagctccaat

SEQ ID NO: 6049878 - DNA, 25 bp, Homo sapien
taacgtccgacgcaccctacaggat

SEQ ID NO: 6049879 - DNA, 25 bp, Homo sapien
gggccgcgagctaatccttcatcaa

SEQ ID NO: 6049880 - DNA, 25 bp, Homo sapien
ccatcggcgtatagtacttaggcgg

SEQ ID NO: 6049881 - DNA, 25 bp, Homo sapien
cgacgacgtaaaagattgatatact

SEQ ID NO: 6049882 - DNA, 25 bp, Homo sapien
ccgctacacgatagcgatcgagtat

SEQ ID NO: 6049883 - DNA, 25 bp, Homo sapien
agacgcaggcgacgtatttaagatt

SEQ ID NO: 6049884 - DNA, 25 bp, Homo sapien
gttcgaccgatcgaaagaacgcgct

SEQ ID NO: 6049885 - DNA, 25 bp, Homo sapien
tacaggatgcaaggaatattacgtc

SEQ ID NO: 6049886 - DNA, 25 bp, Homo sapien
gttagttgaggttatcgcgaccgag

SEQ ID NO: 6049887 - DNA, 25 bp, Homo sapien
ttgcattctggagtgtaagcgataa

SEQ ID NO: 6049888 - DNA, 25 bp, Homo sapien
cgagctaatccttcatcaagatccg

SEQ ID NO: 6049889 - DNA, 25 bp, Homo sapien
cgcgtaacgtagtacattaaaagcg

SEQ ID NO: 6049890 - DNA, 25 bp, Homo sapien
cgtatttaagattatcaaataccat

SEQ ID NO: 6049891 - DNA, 25 bp, Homo sapien
ccgatcgaaagaacgcgctagtagc

SEQ ID NO: 6049892 - DNA, 25 bp, Homo sapien
atactttgggatctagccgtataac

SEQ ID NO: 6049893 - DNA, 25 bp, Homo sapien
tccgacgcaccctacaggatgcaag

SEQ ID NO: 6049894 - DNA, 25 bp, Homo sapien
cgcgctagtagcttgcattctggag

SEQ ID NO: 6049895 - DNA, 25 bp, Homo sapien
gtacgagccttatgttggactcgcg

SEQ ID NO: 6049896 - DNA, 25 bp, Homo sapien
gaccgtatagagacgtcttagtgag

SEQ ID NO: 6049897 - DNA, 25 bp, Homo sapien
tcgccataccctcgcgacggtgtag

SEQ ID NO: 6049898 - DNA, 25 bp, Homo sapien
atagagacgtcttagtgagcgcgta

SEQ ID NO: 6049899 - DNA, 25 bp, Homo sapien
gccttatgttggactcgcgacgacg

SEQ ID NO: 6049900 - DNA, 25 bp, Homo sapien
gcccgaataggtaacgtccgacgca

SEQ ID NO: 6049901 - DNA, 25 bp, Homo sapien
tcgcgaccgctacacgatagcgatc

SEQ ID NO: 6049902 - DNA, 25 bp, Homo sapien
ggcgtgggccgcgagctaatccttc

SEQ ID NO: 6049903 - DNA, 25 bp, Homo sapien
tacgaaccgacgtcgccataccctc

SEQ ID NO: 6049904 - DNA, 25 bp, Homo sapien
cgtaaaagattgatatactacgaac

SEQ ID NO: 6049905 - DNA, 25 bp, Homo sapien
acgagactatcccaacgggtctatg

SEQ ID NO: 6049906 - DNA, 25 bp, Homo sapien
agtagcttgcattctggagtgtaag

SEQ ID NO: 6049907 - DNA, 25 bp, Homo sapien
gcgttaggtcacctgaatcatgcgc

SEQ ID NO: 6049908 - DNA, 25 bp, Homo sapien
tgtagctccaatccatcggcgtata

SEQ ID NO: 6049909 - DNA, 25 bp, Homo sapien
catgcgcaaactaccggtgagtgtg

SEQ ID NO: 6049910 - DNA, 25 bp, Homo sapien
taagattatcaaataccatacggtt

SEQ ID NO: 6049911 - DNA, 25 bp, Homo sapien
tgggatctagccgtataacgagact

SEQ ID NO: 6049912 - DNA, 25 bp, Homo sapien
cgtataacgagactatcccaacggg

SEQ ID NO: 6049913 - DNA, 25 bp, Homo sapien
cgacggtgtagctccaatccatcgg

SEQ ID NO: 6049914 - DNA, 25 bp, Homo sapien
accggtgagtgtgcatccgaccgta

SEQ ID NO: 6049915 - DNA, 25 bp, Homo sapien
ataccatacggttcgcgacctccta

SEQ ID NO: 6049916 - DNA, 25 bp, Homo sapien
ttaggcggtgtacgcatacgttcga

SEQ ID NO: 6049917 - DNA, 25 bp, Homo sapien
ggtctatgcgcgtaccgtacgaagt

SEQ ID NO: 6049918 - DNA, 25 bp, Homo sapien
tgcgcgtaccgtacgaagtcgcgac

SEQ ID NO: 6049919 - DNA, 25 bp, Homo sapien
tctagccgtataacgagactatccc

SEQ ID NO: 6049920 - DNA, 25 bp, Homo sapien
agattgatatactacgaaccgacgt

SEQ ID NO: 6049921 - DNA, 25 bp, Homo sapien
ctatcccaacgggtctatgcgcgta

SEQ ID NO: 6049922 - DNA, 25 bp, Homo sapien
agatccgcgttaggtcacctgaatc

SEQ ID NO: 6049923 - DNA, 25 bp, Homo sapien
tacggttcgcgacctcctagagttc

SEQ ID NO: 6049924 - DNA, 25 bp, Homo sapien
gagtgtgcatccgaccgtatagaga

SEQ ID NO: 6049925 - DNA, 25 bp, Homo sapien
caaactaccggtgagtgtgcatccg

SEQ ID NO: 6049926 - DNA, 25 bp, Homo sapien
ggaatattacgtcgcgtagtcctcc

SEQ ID NO: 6049927 - DNA, 25 bp, Homo sapien
ccaacgggtctatgcgcgtaccgta

SEQ ID NO: 6049928 - DNA, 25 bp, Homo sapien
tatcaaataccatacggttcgcgac

SEQ ID NO: 6049929 - DNA, 25 bp, Homo sapien
atgcaaggaatattacgtcgcgtag

SEQ ID NO: 6049930 - DNA, 25 bp, Homo sapien
ggtcacctgaatcatgcgcaaacta

SEQ ID NO: 6049931 - DNA, 25 bp, Homo sapien
cacgatagcgatcgagtataacaaa

SEQ ID NO: 6049932 - DNA, 25 bp, Homo sapien
ttatcgcgaccgagacgcaggcgac

SEQ ID NO: 6049933 - DNA, 25 bp, Homo sapien
gcatacgttcgaccgatcgaaagaa

SEQ ID NO: 6049934 - DNA, 25 bp, Homo sapien
taggtaacgtccgacgcaccctaca

SEQ ID NO: 6049935 - DNA, 25 bp, Homo sapien
agtacttaggcggtgtacgcatacg

SEQ ID NO: 6049936 - DNA, 25 bp, Homo sapien
agtacattaaaagcggtagtacgag

SEQ ID NO: 6049937 - DNA, 25 bp, Homo sapien
atcgggtctcgcaggcgtgggccgc

SEQ ID NO: 6049938 - DNA, 25 bp, Homo sapien
gactcgcgacgacgtaaaagattga

SEQ ID NO: 6049939 - DNA, 25 bp, Homo sapien
gcgtatagtacttaggcggtgtacg

SEQ ID NO: 6049940 - DNA, 25 bp, Homo sapien
atatactacgaaccgacgtcgccat

SEQ ID NO: 6049941 - DNA, 25 bp, Homo sapien
tctggagtgtaagcgataatacttt

SEQ ID NO: 6049942 - DNA, 25 bp, Homo sapien
ataagaggacataacgccgatagtg

SEQ ID NO: 6049943 - DNA, 25 bp, Homo sapien
gggtcgccttctgggaagaatcgta

SEQ ID NO: 6049944 - DNA, 25 bp, Homo sapien
gtatcctacattgcggcgtcggctc

SEQ ID NO: 6049945 - DNA, 25 bp, Homo sapien
gccgctaaacgataaactgtcttgc

SEQ ID NO: 6049946 - DNA, 25 bp, Homo sapien
cttctgggaagaatcgtagatatct

SEQ ID NO: 6049947 - DNA, 25 bp, Homo sapien
tcggccaatcgacaacgctatcgtt

SEQ ID NO: 6049948 - DNA, 25 bp, Homo sapien
tatcgggattcttcttgcgcgaata

SEQ ID NO: 6049949 - DNA, 25 bp, Homo sapien
ccttggccacgggtctatcgcacag

SEQ ID NO: 6049950 - DNA, 25 bp, Homo sapien
ggtctatcgcacagatcttatgcgg

SEQ ID NO: 6049951 - DNA, 25 bp, Homo sapien
gcactccttggccacgggtctatcg

SEQ ID NO: 6049952 - DNA, 25 bp, Homo sapien
agttcacacatagtgtcctacgata

SEQ ID NO: 6049953 - DNA, 25 bp, Homo sapien
atatggaaatccgataggtcgtcga

SEQ ID NO: 6049954 - DNA, 25 bp, Homo sapien
tacgatacgcgatgcgccttcatac

SEQ ID NO: 6049955 - DNA, 25 bp, Homo sapien
gcgaataggtatctttggcaggcgt

SEQ ID NO: 6049956 - DNA, 25 bp, Homo sapien
ggacataacgccgatagtgcgaagg

SEQ ID NO: 6049957 - DNA, 25 bp, Homo sapien
tagtaccaagatgcggtacgagtta

SEQ ID NO: 6049958 - DNA, 25 bp, Homo sapien
gtcttgcttcggtacgtgtcgctgt

SEQ ID NO: 6049959 - DNA, 25 bp, Homo sapien
ccgcctcgtactaggaacaagagta

SEQ ID NO: 6049960 - DNA, 25 bp, Homo sapien
tgcattgccgctaaacgataaactg

SEQ ID NO: 6049961 - DNA, 25 bp, Homo sapien
cgataggtcgtcgacaactgatgcg

SEQ ID NO: 6049962 - DNA, 25 bp, Homo sapien
cggtatcggggatacgcgcactcct

SEQ ID NO: 6049963 - DNA, 25 bp, Homo sapien
tccgcgtagtacgactagtagttac

SEQ ID NO: 6049964 - DNA, 25 bp, Homo sapien
aggtatctttggcaggcgtcgacgt

SEQ ID NO: 6049965 - DNA, 25 bp, Homo sapien
cgaaggtcaaccaggtgcgacctat

SEQ ID NO: 6049966 - DNA, 25 bp, Homo sapien
gtatagtccattaccgctaataaga

SEQ ID NO: 6049967 - DNA, 25 bp, Homo sapien
ggctccgtgagttaacgaccgcgta

SEQ ID NO: 6049968 - DNA, 25 bp, Homo sapien
tcgctgtcggaatccgcgtagtacg

SEQ ID NO: 6049969 - DNA, 25 bp, Homo sapien
atccggtgtatcgtatagtccatta

SEQ ID NO: 6049970 - DNA, 25 bp, Homo sapien
atagtgcgaaggtcaaccaggtgcg

SEQ ID NO: 6049971 - DNA, 25 bp, Homo sapien
gtgagttaacgaccgcgtatatttg

SEQ ID NO: 6049972 - DNA, 25 bp, Homo sapien
tgcgccttcatacaagcgagatcgt

SEQ ID NO: 6049973 - DNA, 25 bp, Homo sapien
cgtactaggaacaagagtatccggt

SEQ ID NO: 6049974 - DNA, 25 bp, Homo sapien
ggaagaatcgtagatatctagcgtt

SEQ ID NO: 6049975 - DNA, 25 bp, Homo sapien
acgtgcgtaccgacagtgaaccggt

SEQ ID NO: 6049976 - DNA, 25 bp, Homo sapien
accgctaataagataagaggacata

SEQ ID NO: 6049977 - DNA, 25 bp, Homo sapien
gacaactgatgcgttcgaccgatcg

SEQ ID NO: 6049978 - DNA, 25 bp, Homo sapien
gacctatcggccaatcgacaacgct

SEQ ID NO: 6049979 - DNA, 25 bp, Homo sapien
tacgtgtcgctgtcggaatccgcgt

SEQ ID NO: 6049980 - DNA, 25 bp, Homo sapien
tcgcacagatcttatgcgggcgata

SEQ ID NO: 6049981 - DNA, 25 bp, Homo sapien
aaacgataaactgtcttgcttcggt

SEQ ID NO: 6049982 - DNA, 25 bp, Homo sapien
caagatgcggtacgagttagctcta

SEQ ID NO: 6049983 - DNA, 25 bp, Homo sapien
gcggtacgagttagctctatatgga

SEQ ID NO: 6049984 - DNA, 25 bp, Homo sapien
agatcttatgcgggcgatagttcac

SEQ ID NO: 6049985 - DNA, 25 bp, Homo sapien
ggcgatagttcacacatagtgtcct

SEQ ID NO: 6049986 - DNA, 25 bp, Homo sapien
ggcgtcggctccgtgagttaacgac

SEQ ID NO: 6049987 - DNA, 25 bp, Homo sapien
tcggaatccgcgtagtacgactagt

SEQ ID NO: 6049988 - DNA, 25 bp, Homo sapien
caagcgagatcgtagtaccaagatg

SEQ ID NO: 6049989 - DNA, 25 bp, Homo sapien
tccattaccgctaataagataagag

SEQ ID NO: 6049990 - DNA, 25 bp, Homo sapien
ctttggcaggcgtcgacgtgatacg

SEQ ID NO: 6049991 - DNA, 25 bp, Homo sapien
caggcgtcgacgtgatacgagtaat

SEQ ID NO: 6049992 - DNA, 25 bp, Homo sapien
aggtgcgacctatcggccaatcgac

SEQ ID NO: 6049993 - DNA, 25 bp, Homo sapien
gacggttatcgggattcttcttgcg

SEQ ID NO: 6049994 - DNA, 25 bp, Homo sapien
aacgccgatagtgcgaaggtcaacc

SEQ ID NO: 6049995 - DNA, 25 bp, Homo sapien
cacatagtgtcctacgatacgcgat

SEQ ID NO: 6049996 - DNA, 25 bp, Homo sapien
gccacgggtctatcgcacagatctt

SEQ ID NO: 6049997 - DNA, 25 bp, Homo sapien
tgatgcgttcgaccgatcggaaacg

SEQ ID NO: 6049998 - DNA, 25 bp, Homo sapien
tcgacgtgatacgagtaatgcattg

SEQ ID NO: 6049999 - DNA, 25 bp, Homo sapien
taaactgtcttgcttcggtacgtgt

SEQ ID NO: 6050000 - DNA, 25 bp, Homo sapien
tgtatcgtatagtccattaccgcta

SEQ ID NO: 6050001 - DNA, 25 bp, Homo sapien
ccgatcggaaacgtatcctacattg

SEQ ID NO: 6050002 - DNA, 25 bp, Homo sapien
tcaaccaggtgcgacctatcggcca

SEQ ID NO: 6050003 - DNA, 25 bp, Homo sapien
gattcttcttgcgcgaataggtatc

SEQ ID NO: 6050004 - DNA, 25 bp, Homo sapien
aagagtatccggtgtatcgtatagt

SEQ ID NO: 6050005 - DNA, 25 bp, Homo sapien
tgatacgagtaatgcattgccgcta

SEQ ID NO: 6050006 - DNA, 25 bp, Homo sapien
atacgcgcactccttggccacgggt

SEQ ID NO: 6050007 - DNA, 25 bp, Homo sapien
acgcgatgcgccttcatacaagcga

SEQ ID NO: 6050008 - DNA, 25 bp, Homo sapien
agatcgtagtaccaagatgcggtac

SEQ ID NO: 6050009 - DNA, 25 bp, Homo sapien
tcttgcgcgaataggtatctttggc

SEQ ID NO: 6050010 - DNA, 25 bp, Homo sapien
cggggatacgcgcactccttggcca

SEQ ID NO: 6050011 - DNA, 25 bp, Homo sapien
cgtatatttggtcccgcctcgtact

SEQ ID NO: 6050012 - DNA, 25 bp, Homo sapien
gatatctagcgttgttcgacggtta

SEQ ID NO: 6050013 - DNA, 25 bp, Homo sapien
agctctatatggaaatccgataggt

SEQ ID NO: 6050014 - DNA, 25 bp, Homo sapien
cgaccgcgtatatttggtcccgcct

SEQ ID NO: 6050015 - DNA, 25 bp, Homo sapien
atcgtagatatctagcgttgttcga

SEQ ID NO: 6050016 - DNA, 25 bp, Homo sapien
ttggtcccgcctcgtactaggaaca

SEQ ID NO: 6050017 - DNA, 25 bp, Homo sapien
tgttcgacggttatcgggattcttc

SEQ ID NO: 6050018 - DNA, 25 bp, Homo sapien
aatcgacaacgctatcgttacgggt

SEQ ID NO: 6050019 - DNA, 25 bp, Homo sapien
ttcgaccgatcggaaacgtatccta

SEQ ID NO: 6050020 - DNA, 25 bp, Homo sapien
acattgcggcgtcggctccgtgagt

SEQ ID NO: 6050021 - DNA, 25 bp, Homo sapien
ggaaacgtatcctacattgcggcgt

SEQ ID NO: 6050022 - DNA, 25 bp, Homo sapien
cagtgaaccggtatcggggatacgc

SEQ ID NO: 6050023 - DNA, 25 bp, Homo sapien
tagcgttgttcgacggttatcggga

SEQ ID NO: 6050024 - DNA, 25 bp, Homo sapien
gtcgtcgacaactgatgcgttcgac

SEQ ID NO: 6050025 - DNA, 25 bp, Homo sapien
gagtaatgcattgccgctaaacgat

SEQ ID NO: 6050026 - DNA, 25 bp, Homo sapien
gtgtcctacgatacgcgatgcgcct

SEQ ID NO: 6050027 - DNA, 25 bp, Homo sapien
aggaacaagagtatccggtgtatcg

SEQ ID NO: 6050028 - DNA, 25 bp, Homo sapien
cttcggtacgtgtcgctgtcggaat

SEQ ID NO: 6050029 - DNA, 25 bp, Homo sapien
ttcatacaagcgagatcgtagtacc

SEQ ID NO: 6050030 - DNA, 25 bp, Homo sapien
caacgctatcgttacgggtcgcctt

SEQ ID NO: 6050031 - DNA, 25 bp, Homo sapien
tatcgttacgggtcgccttctggga

SEQ ID NO: 6050032 - DNA, 25 bp, Homo sapien
aataagataagaggacataacgccg

SEQ ID NO: 6050033 - DNA, 25 bp, Homo sapien
tatgcgggcgatagttcacacatag

SEQ ID NO: 6050034 - DNA, 25 bp, Homo sapien
cgagttagctctatatggaaatccg

SEQ ID NO: 6050035 - DNA, 25 bp, Homo sapien
cgtaccgacagtgaaccggtatcgg

SEQ ID NO: 6050036 - DNA, 25 bp, Homo sapien
gaaatccgataggtcgtcgacaact

SEQ ID NO: 6050037 - DNA, 25 bp, Homo sapien
taacgactagcacgcaggaggttcg

SEQ ID NO: 6050038 - DNA, 25 bp, Homo sapien
tggggagctcgcgtacctatccggc

SEQ ID NO: 6050039 - DNA, 25 bp, Homo sapien
tcgaaactcgcgatgtatcagacac

SEQ ID NO: 6050040 - DNA, 25 bp, Homo sapien
cagacacattagaccgtaaagaata

SEQ ID NO: 6050041 - DNA, 25 bp, Homo sapien
gtaattcggctaagaagcctaataa

SEQ ID NO: 6050042 - DNA, 25 bp, Homo sapien
gtgagcaagataactagtatacgag

SEQ ID NO: 6050043 - DNA, 25 bp, Homo sapien
gaatgcgaacgaaatatgcttctta

SEQ ID NO: 6050044 - DNA, 25 bp, Homo sapien
gcttcttacagaaccggtccgctac

SEQ ID NO: 6050045 - DNA, 25 bp, Homo sapien
gtatataggagggttagccatgtac

SEQ ID NO: 6050046 - DNA, 25 bp, Homo sapien
aagcgcaagattcattcctgacgcg

SEQ ID NO: 6050047 - DNA, 25 bp, Homo sapien
gtcgcgataccggttagcatgggga

SEQ ID NO: 6050048 - DNA, 25 bp, Homo sapien
tcaccgagaattacgataccggata

SEQ ID NO: 6050049 - DNA, 25 bp, Homo sapien
ggtgtatcgcgcgatttcacagttg

SEQ ID NO: 6050050 - DNA, 25 bp, Homo sapien
gatatcatgcgcgagtttagacaga

SEQ ID NO: 6050051 - DNA, 25 bp, Homo sapien
cctatgttagtgatcgtaccgtaga

SEQ ID NO: 6050052 - DNA, 25 bp, Homo sapien
aatatgcttcttacagaaccggtcc

SEQ ID NO: 6050053 - DNA, 25 bp, Homo sapien
gggtcgtcacatatcctattaccgc

SEQ ID NO: 6050054 - DNA, 25 bp, Homo sapien
cgtagaaactgggaatagtcctatc

SEQ ID NO: 6050055 - DNA, 25 bp, Homo sapien
ctcgcgatgtatcagacacattaga

SEQ ID NO: 6050056 - DNA, 25 bp, Homo sapien
accgtaaagaatagtgtgatgttct

SEQ ID NO: 6050057 - DNA, 25 bp, Homo sapien
cggacgatataggtgagcaagataa

SEQ ID NO: 6050058 - DNA, 25 bp, Homo sapien
gataagaaccactccactgcgtcgg

SEQ ID NO: 6050059 - DNA, 25 bp, Homo sapien
gcgcgaacactatcaccgagaatta

SEQ ID NO: 6050060 - DNA, 25 bp, Homo sapien
atacgagccagatcgaaactcgcga

SEQ ID NO: 6050061 - DNA, 25 bp, Homo sapien
gtcaggcgcgagattacgtagcctc

SEQ ID NO: 6050062 - DNA, 25 bp, Homo sapien
ttagcatggggagctcgcgtaccta

SEQ ID NO: 6050063 - DNA, 25 bp, Homo sapien
tcacatatcctattaccgcggacga

SEQ ID NO: 6050064 - DNA, 25 bp, Homo sapien
cggctaagaagcctaataaagcgca

SEQ ID NO: 6050065 - DNA, 25 bp, Homo sapien
aaccactccactgcgtcggtaattc

SEQ ID NO: 6050066 - DNA, 25 bp, Homo sapien
attacgtagcctcttctaggtgtat

SEQ ID NO: 6050067 - DNA, 25 bp, Homo sapien
ataccggttagcatggggagctcgc

SEQ ID NO: 6050068 - DNA, 25 bp, Homo sapien
cttctaggtgtatcgcgcgatttca

SEQ ID NO: 6050069 - DNA, 25 bp, Homo sapien
ttcgtagtcgaccataaatcagaac

SEQ ID NO: 6050070 - DNA, 25 bp, Homo sapien
ctaataaagcgcaagattcattcct

SEQ ID NO: 6050071 - DNA, 25 bp, Homo sapien
cataaatcagaacgagccgataaga

SEQ ID NO: 6050072 - DNA, 25 bp, Homo sapien
aggttcgaatgcgaacgaaatatgc

SEQ ID NO: 6050073 - DNA, 25 bp, Homo sapien
agtgtgatgttctaacgactagcac

SEQ ID NO: 6050074 - DNA, 25 bp, Homo sapien
agcgcgttcgtagtcgaccataaat

SEQ ID NO: 6050075 - DNA, 25 bp, Homo sapien
gtcgaccataaatcagaacgagccg

SEQ ID NO: 6050076 - DNA, 25 bp, Homo sapien
aagaatagtgtgatgttctaacgac

SEQ ID NO: 6050077 - DNA, 25 bp, Homo sapien
atgttctaacgactagcacgcagga

SEQ ID NO: 6050078 - DNA, 25 bp, Homo sapien
gaacgaaatatgcttcttacagaac

SEQ ID NO: 6050079 - DNA, 25 bp, Homo sapien
cgcgagattacgtagcctcttctag

SEQ ID NO: 6050080 - DNA, 25 bp, Homo sapien
cgataccggatacgccagaagcgcg

SEQ ID NO: 6050081 - DNA, 25 bp, Homo sapien
ggtaaactagcaccgcggtcaataa

SEQ ID NO: 6050082 - DNA, 25 bp, Homo sapien
gttagccatgtacgggtcgtcacat

SEQ ID NO: 6050083 - DNA, 25 bp, Homo sapien
tcaataatatgagtcaggcgcgaga

SEQ ID NO: 6050084 - DNA, 25 bp, Homo sapien
catgcgcgagtttagacagagtctt

SEQ ID NO: 6050085 - DNA, 25 bp, Homo sapien
actagtatacgagccagatcgaaac

SEQ ID NO: 6050086 - DNA, 25 bp, Homo sapien
cgtacctatccggcgttctcacgaa

SEQ ID NO: 6050087 - DNA, 25 bp, Homo sapien
tccactgcgtcggtaattcggctaa

SEQ ID NO: 6050088 - DNA, 25 bp, Homo sapien
gaatagtcctatccggtcgcggtaa

SEQ ID NO: 6050089 - DNA, 25 bp, Homo sapien
atcgtaccgtagaaactgggaatag

SEQ ID NO: 6050090 - DNA, 25 bp, Homo sapien
cctatccggtcgcggtaaactagca

SEQ ID NO: 6050091 - DNA, 25 bp, Homo sapien
atacccgcgctggatatcatgcgcg

SEQ ID NO: 6050092 - DNA, 25 bp, Homo sapien
atgtacgggtcgtcacatatcctat

SEQ ID NO: 6050093 - DNA, 25 bp, Homo sapien
agctcgcgtacctatccggcgttct

SEQ ID NO: 6050094 - DNA, 25 bp, Homo sapien
cgagtttagacagagtcttgctgcg

SEQ ID NO: 6050095 - DNA, 25 bp, Homo sapien
atatgagtcaggcgcgagattacgt

SEQ ID NO: 6050096 - DNA, 25 bp, Homo sapien
ccgctacctatgttagtgatcgtac

SEQ ID NO: 6050097 - DNA, 25 bp, Homo sapien
ttagtgatcgtaccgtagaaactgg

SEQ ID NO: 6050098 - DNA, 25 bp, Homo sapien
ctagcaccgcggtcaataatatgag

SEQ ID NO: 6050099 - DNA, 25 bp, Homo sapien
cattagaccgtaaagaatagtgtga

SEQ ID NO: 6050100 - DNA, 25 bp, Homo sapien
atcctattaccgcggacgatatagg

SEQ ID NO: 6050101 - DNA, 25 bp, Homo sapien
gcgttctcacgaatacccgcgctgg

SEQ ID NO: 6050102 - DNA, 25 bp, Homo sapien
tagcctcttctaggtgtatcgcgcg

SEQ ID NO: 6050103 - DNA, 25 bp, Homo sapien
tatccggcgttctcacgaatacccg

SEQ ID NO: 6050104 - DNA, 25 bp, Homo sapien
gcgtcggtaattcggctaagaagcc

SEQ ID NO: 6050105 - DNA, 25 bp, Homo sapien
tcacgaatacccgcgctggatatca

SEQ ID NO: 6050106 - DNA, 25 bp, Homo sapien
agaattacgataccggatacgccag

SEQ ID NO: 6050107 - DNA, 25 bp, Homo sapien
aagataactagtatacgagccagat

SEQ ID NO: 6050108 - DNA, 25 bp, Homo sapien
aggagggttagccatgtacgggtcg

SEQ ID NO: 6050109 - DNA, 25 bp, Homo sapien
cgagccgataagaaccactccactg

SEQ ID NO: 6050110 - DNA, 25 bp, Homo sapien
atataggtgagcaagataactagta

SEQ ID NO: 6050111 - DNA, 25 bp, Homo sapien
gagtcttgctgcgcgcgaacactat

SEQ ID NO: 6050112 - DNA, 25 bp, Homo sapien
accggtccgctacctatgttagtga

SEQ ID NO: 6050113 - DNA, 25 bp, Homo sapien
aagattcattcctgacgcgtatata

SEQ ID NO: 6050114 - DNA, 25 bp, Homo sapien
tacagaaccggtccgctacctatgt

SEQ ID NO: 6050115 - DNA, 25 bp, Homo sapien
aactgggaatagtcctatccggtcg

SEQ ID NO: 6050116 - DNA, 25 bp, Homo sapien
cgcaggaggttcgaatgcgaacgaa

SEQ ID NO: 6050117 - DNA, 25 bp, Homo sapien
ctagcacgcaggaggttcgaatgcg

SEQ ID NO: 6050118 - DNA, 25 bp, Homo sapien
cattcctgacgcgtatataggaggg

SEQ ID NO: 6050119 - DNA, 25 bp, Homo sapien
tagacagagtcttgctgcgcgcgaa

SEQ ID NO: 6050120 - DNA, 25 bp, Homo sapien
ccgcggtcaataatatgagtcaggc

SEQ ID NO: 6050121 - DNA, 25 bp, Homo sapien
atgtatcagacacattagaccgtaa

SEQ ID NO: 6050122 - DNA, 25 bp, Homo sapien
cggtcgcggtaaactagcaccgcgg

SEQ ID NO: 6050123 - DNA, 25 bp, Homo sapien
gccagatcgaaactcgcgatgtatc

SEQ ID NO: 6050124 - DNA, 25 bp, Homo sapien
gccagaagcgcgttcgtagtcgacc

SEQ ID NO: 6050125 - DNA, 25 bp, Homo sapien
tgctgcgcgcgaacactatcaccga

SEQ ID NO: 6050126 - DNA, 25 bp, Homo sapien
ttaccgcggacgatataggtgagca

SEQ ID NO: 6050127 - DNA, 25 bp, Homo sapien
gcgctggatatcatgcgcgagttta

SEQ ID NO: 6050128 - DNA, 25 bp, Homo sapien
ggatacgccagaagcgcgttcgtag

SEQ ID NO: 6050129 - DNA, 25 bp, Homo sapien
tcagaacgagccgataagaaccact

SEQ ID NO: 6050130 - DNA, 25 bp, Homo sapien
acactatcaccgagaattacgatac

SEQ ID NO: 6050131 - DNA, 25 bp, Homo sapien
tgacgcgtatataggagggttagcc

SEQ ID NO: 6050132 - DNA, 25 bp, Homo sapien
agaagcctaataaagcgcaagattc

SEQ ID NO: 6050133 - DNA, 25 bp, Homo sapien
gtcacgatacgcaggagatgagaat

SEQ ID NO: 6050134 - DNA, 25 bp, Homo sapien
atcgatacgtccgatagtcgcgcaa

SEQ ID NO: 6050135 - DNA, 25 bp, Homo sapien
cgcgtctagcaatatactttgtccg

SEQ ID NO: 6050136 - DNA, 25 bp, Homo sapien
ctcgcgaaacgtacagggataccga

SEQ ID NO: 6050137 - DNA, 25 bp, Homo sapien
gacaattgagagcagtatcgggata

SEQ ID NO: 6050138 - DNA, 25 bp, Homo sapien
tacttagtcacgatacgcaggagat

SEQ ID NO: 6050139 - DNA, 25 bp, Homo sapien
cgggatacgagatttagccatgttc

SEQ ID NO: 6050140 - DNA, 25 bp, Homo sapien
agtggccgcgtctagcaatatactt

SEQ ID NO: 6050141 - DNA, 25 bp, Homo sapien
ctagtaagtcagaggctcgttagta

SEQ ID NO: 6050142 - DNA, 25 bp, Homo sapien
gtccattcgtataggctcgtaagtc

SEQ ID NO: 6050143 - DNA, 25 bp, Homo sapien
gcgtcacctttcatgtcgtacgcta

SEQ ID NO: 6050144 - DNA, 25 bp, Homo sapien
gatcatctcgcggtacgtcgatagc

SEQ ID NO: 6050145 - DNA, 25 bp, Homo sapien
ataccgagatacgacgactagacct

SEQ ID NO: 6050146 - DNA, 25 bp, Homo sapien
aggagatgagaatacgcggacctat

SEQ ID NO: 6050147 - DNA, 25 bp, Homo sapien
tatactttgtccgggttcgctacgc

SEQ ID NO: 6050148 - DNA, 25 bp, Homo sapien
tttggtctcgcgaaacgtacaggga

SEQ ID NO: 6050149 - DNA, 25 bp, Homo sapien
caagtgaatcgatagtgaaattgac

SEQ ID NO: 6050150 - DNA, 25 bp, Homo sapien
cctttcatgtcgtacgctaaccggg

SEQ ID NO: 6050151 - DNA, 25 bp, Homo sapien
tagtgaaattgaccatgagcggtga

SEQ ID NO: 6050152 - DNA, 25 bp, Homo sapien
gacgactagacctggcatgagtctc

SEQ ID NO: 6050153 - DNA, 25 bp, Homo sapien
gatagtcgcgcaatgagtcggctag

SEQ ID NO: 6050154 - DNA, 25 bp, Homo sapien
tagtcgatcgatacgtccgatagtc

SEQ ID NO: 6050155 - DNA, 25 bp, Homo sapien
tttagtcacataacgcgactggact

SEQ ID NO: 6050156 - DNA, 25 bp, Homo sapien
tgagtcggctagtagacgagaaatt

SEQ ID NO: 6050157 - DNA, 25 bp, Homo sapien
gtatttacgccgctatgtcaagtga

SEQ ID NO: 6050158 - DNA, 25 bp, Homo sapien
taagccggacgttagtcgatcgata

SEQ ID NO: 6050159 - DNA, 25 bp, Homo sapien
aaattgttgctgaggcgcacgatcg

SEQ ID NO: 6050160 - DNA, 25 bp, Homo sapien
gcggtgatcgcgaatctaccggccg

SEQ ID NO: 6050161 - DNA, 25 bp, Homo sapien
ggctagtagacgagaaattaacatt

SEQ ID NO: 6050162 - DNA, 25 bp, Homo sapien
cgcgtactagtaagtcagaggctcg

SEQ ID NO: 6050163 - DNA, 25 bp, Homo sapien
aattgaccatgagcggtgatcgcga

SEQ ID NO: 6050164 - DNA, 25 bp, Homo sapien
ctgtcatacttagtcacgatacgca

SEQ ID NO: 6050165 - DNA, 25 bp, Homo sapien
ctatgtcaagtgaatcgatagtgaa

SEQ ID NO: 6050166 - DNA, 25 bp, Homo sapien
aatcgatagtgaaattgaccatgag

SEQ ID NO: 6050167 - DNA, 25 bp, Homo sapien
gggcagtggccgcgtctagcaatat

SEQ ID NO: 6050168 - DNA, 25 bp, Homo sapien
ggtacgtcgatagcgcgtcaccttt

SEQ ID NO: 6050169 - DNA, 25 bp, Homo sapien
tcggccgaatacgtccattcgtata

SEQ ID NO: 6050170 - DNA, 25 bp, Homo sapien
ctacgcctgtcatacttagtcacga

SEQ ID NO: 6050171 - DNA, 25 bp, Homo sapien
gaatacgtccattcgtataggctcg

SEQ ID NO: 6050172 - DNA, 25 bp, Homo sapien
cggccgtaatatgagcgtaaattgt

SEQ ID NO: 6050173 - DNA, 25 bp, Homo sapien
aggcgcacgatcgacaattgagagc

SEQ ID NO: 6050174 - DNA, 25 bp, Homo sapien
ggacctatcacctatcataagccgg

SEQ ID NO: 6050175 - DNA, 25 bp, Homo sapien
aggctcgttagtaatagatccatga

SEQ ID NO: 6050176 - DNA, 25 bp, Homo sapien
atacaggctcattttagtcacataa

SEQ ID NO: 6050177 - DNA, 25 bp, Homo sapien
cgcatatcggccgaatacgtccatt

SEQ ID NO: 6050178 - DNA, 25 bp, Homo sapien
gatagcgcgtcacctttcatgtcgt

SEQ ID NO: 6050179 - DNA, 25 bp, Homo sapien
tgagaatacgcggacctatcaccta

SEQ ID NO: 6050180 - DNA, 25 bp, Homo sapien
atacgcggacctatcacctatcata

SEQ ID NO: 6050181 - DNA, 25 bp, Homo sapien
acagggataccgagatacgacgact

SEQ ID NO: 6050182 - DNA, 25 bp, Homo sapien
ggacgttagtcgatcgatacgtccg

SEQ ID NO: 6050183 - DNA, 25 bp, Homo sapien
gcctagcgcatatcggccgaatacg

SEQ ID NO: 6050184 - DNA, 25 bp, Homo sapien
agtcagaggctcgttagtaatagat

SEQ ID NO: 6050185 - DNA, 25 bp, Homo sapien
ctggactgcctagcgcatatcggcc

SEQ ID NO: 6050186 - DNA, 25 bp, Homo sapien
tagacgagaaattaacattttggtc

SEQ ID NO: 6050187 - DNA, 25 bp, Homo sapien
ccatgagcggtgatcgcgaatctac

SEQ ID NO: 6050188 - DNA, 25 bp, Homo sapien
acgtccgatagtcgcgcaatgagtc

SEQ ID NO: 6050189 - DNA, 25 bp, Homo sapien
agatacgacgactagacctggcatg

SEQ ID NO: 6050190 - DNA, 25 bp, Homo sapien
tgagagcagtatcgggatacgagat

SEQ ID NO: 6050191 - DNA, 25 bp, Homo sapien
ggttcgctacgcctgtcatacttag

SEQ ID NO: 6050192 - DNA, 25 bp, Homo sapien
cacataacgcgactggactgcctag

SEQ ID NO: 6050193 - DNA, 25 bp, Homo sapien
aatagatccatgatgagggtattta

SEQ ID NO: 6050194 - DNA, 25 bp, Homo sapien
gttagtaatagatccatgatgaggg

SEQ ID NO: 6050195 - DNA, 25 bp, Homo sapien
gagcgtaaattgttgctgaggcgca

SEQ ID NO: 6050196 - DNA, 25 bp, Homo sapien
acgcgactggactgcctagcgcata

SEQ ID NO: 6050197 - DNA, 25 bp, Homo sapien
cgcgaatacaggctcattttagtca

SEQ ID NO: 6050198 - DNA, 25 bp, Homo sapien
cgcgcaatgagtcggctagtagacg

SEQ ID NO: 6050199 - DNA, 25 bp, Homo sapien
atgagggtatttacgccgctatgtc

SEQ ID NO: 6050200 - DNA, 25 bp, Homo sapien
tccatgatgagggtatttacgccgc

SEQ ID NO: 6050201 - DNA, 25 bp, Homo sapien
cgtcgcgatcatctcgcggtacgtc

SEQ ID NO: 6050202 - DNA, 25 bp, Homo sapien
taatatgagcgtaaattgttgctga

SEQ ID NO: 6050203 - DNA, 25 bp, Homo sapien
tctcgcggtacgtcgatagcgcgtc

SEQ ID NO: 6050204 - DNA, 25 bp, Homo sapien
atacgcaggagatgagaatacgcgg

SEQ ID NO: 6050205 - DNA, 25 bp, Homo sapien
acgagatttagccatgttcgcgaat

SEQ ID NO: 6050206 - DNA, 25 bp, Homo sapien
tgtccgggttcgctacgcctgtcat

SEQ ID NO: 6050207 - DNA, 25 bp, Homo sapien
atctaccggccgtaatatgagcgta

SEQ ID NO: 6050208 - DNA, 25 bp, Homo sapien
tcgtataggctcgtaagtccgaagt

SEQ ID NO: 6050209 - DNA, 25 bp, Homo sapien
gctcattttagtcacataacgcgac

SEQ ID NO: 6050210 - DNA, 25 bp, Homo sapien
acgccgctatgtcaagtgaatcgat

SEQ ID NO: 6050211 - DNA, 25 bp, Homo sapien
catgttcgcgaatacaggctcattt

SEQ ID NO: 6050212 - DNA, 25 bp, Homo sapien
atcacctatcataagccggacgtta

SEQ ID NO: 6050213 - DNA, 25 bp, Homo sapien
ttgctgaggcgcacgatcgacaatt

SEQ ID NO: 6050214 - DNA, 25 bp, Homo sapien
atcgcgaatctaccggccgtaatat

SEQ ID NO: 6050215 - DNA, 25 bp, Homo sapien
gaaattaacattttggtctcgcgaa

SEQ ID NO: 6050216 - DNA, 25 bp, Homo sapien
cgcgtacgtcgcgatcatctcgcgg

SEQ ID NO: 6050217 - DNA, 25 bp, Homo sapien
tggcatgagtctcgcgtactagtaa

SEQ ID NO: 6050218 - DNA, 25 bp, Homo sapien
ctaaccggggcagtggccgcgtcta

SEQ ID NO: 6050219 - DNA, 25 bp, Homo sapien
acgatcgacaattgagagcagtatc

SEQ ID NO: 6050220 - DNA, 25 bp, Homo sapien
gagtctcgcgtactagtaagtcaga

SEQ ID NO: 6050221 - DNA, 25 bp, Homo sapien
aaacgtacagggataccgagatacg

SEQ ID NO: 6050222 - DNA, 25 bp, Homo sapien
tagcaatatactttgtccgggttcg

SEQ ID NO: 6050223 - DNA, 25 bp, Homo sapien
cagtatcgggatacgagatttagcc

SEQ ID NO: 6050224 - DNA, 25 bp, Homo sapien
tagacctggcatgagtctcgcgtac

SEQ ID NO: 6050225 - DNA, 25 bp, Homo sapien
tatcataagccggacgttagtcgat

SEQ ID NO: 6050226 - DNA, 25 bp, Homo sapien
taacattttggtctcgcgaaacgta

SEQ ID NO: 6050227 - DNA, 25 bp, Homo sapien
tttagccatgttcgcgaatacaggc

SEQ ID NO: 6050228 - DNA, 25 bp, Homo sapien
tgatcgtacgctagaaggtgacgct

SEQ ID NO: 6050229 - DNA, 25 bp, Homo sapien
tgtggtagttatcgcgacgacagat

SEQ ID NO: 6050230 - DNA, 25 bp, Homo sapien
cacgttatcaaaaaagcaacgtacg

SEQ ID NO: 6050231 - DNA, 25 bp, Homo sapien
atatcaaaacgaacgggcagcgaat

SEQ ID NO: 6050232 - DNA, 25 bp, Homo sapien
tcgatgttcacaaggctacgctagt

SEQ ID NO: 6050233 - DNA, 25 bp, Homo sapien
atgcgtataaggctagcatagaata

SEQ ID NO: 6050234 - DNA, 25 bp, Homo sapien
gtatcagttcttacgtatcgtggcg

SEQ ID NO: 6050235 - DNA, 25 bp, Homo sapien
ggcctataacgtagaaagatgtcac

SEQ ID NO: 6050236 - DNA, 25 bp, Homo sapien
ctagcatagaataaaagtccggtat

SEQ ID NO: 6050237 - DNA, 25 bp, Homo sapien
gagaaggcttattcggcgtatactt

SEQ ID NO: 6050238 - DNA, 25 bp, Homo sapien
acgggcagcgaatagacgtatcagt

SEQ ID NO: 6050239 - DNA, 25 bp, Homo sapien
agttatcgcgacgacagatttagac

SEQ ID NO: 6050240 - DNA, 25 bp, Homo sapien
tttagacccgcctgatcgtacgcta

SEQ ID NO: 6050241 - DNA, 25 bp, Homo sapien
taactcactgatgtaccgatgcgta

SEQ ID NO: 6050242 - DNA, 25 bp, Homo sapien
cataccttacggtcgaactaaccat

SEQ ID NO: 6050243 - DNA, 25 bp, Homo sapien
tcgcgttattccataccttacggtc

SEQ ID NO: 6050244 - DNA, 25 bp, Homo sapien
gtaccgatgcgtataaggctagcat

SEQ ID NO: 6050245 - DNA, 25 bp, Homo sapien
ggtcgttcggactcgcgttattcca

SEQ ID NO: 6050246 - DNA, 25 bp, Homo sapien
aaaagtccggtatctgccctggttg

SEQ ID NO: 6050247 - DNA, 25 bp, Homo sapien
tagacgtatcagttcttacgtatcg

SEQ ID NO: 6050248 - DNA, 25 bp, Homo sapien
acgtatcgtggcgcgtccttcaggc

SEQ ID NO: 6050249 - DNA, 25 bp, Homo sapien
tattaccgtgtgtacaggcgccggt

SEQ ID NO: 6050250 - DNA, 25 bp, Homo sapien
cggtcgaactaaccatcactatggt

SEQ ID NO: 6050251 - DNA, 25 bp, Homo sapien
ctatggtcgcgacgtatctgtggta

SEQ ID NO: 6050252 - DNA, 25 bp, Homo sapien
tacaggcgccggtcgtcataactca

SEQ ID NO: 6050253 - DNA, 25 bp, Homo sapien
ttataatgtctaaacgcgacctgcg

SEQ ID NO: 6050254 - DNA, 25 bp, Homo sapien
ccttacggtcgaactaaccatcact

SEQ ID NO: 6050255 - DNA, 25 bp, Homo sapien
ccatcactatggtcgcgacgtatct

SEQ ID NO: 6050256 - DNA, 25 bp, Homo sapien
tcgcgacgtatctgtggtagttatc

SEQ ID NO: 6050257 - DNA, 25 bp, Homo sapien
aaaaagcaacgtacgtggtcgatgt

SEQ ID NO: 6050258 - DNA, 25 bp, Homo sapien
caacgtacgtggtcgatgttcacaa

SEQ ID NO: 6050259 - DNA, 25 bp, Homo sapien
gacagatttagacccgcctgatcgt

SEQ ID NO: 6050260 - DNA, 25 bp, Homo sapien
cgtggcgcgtccttcaggcaaaacg

SEQ ID NO: 6050261 - DNA, 25 bp, Homo sapien
cacgcgtataacgtcgggcttggag

SEQ ID NO: 6050262 - DNA, 25 bp, Homo sapien
acctgcggcctataacgtagaaaga

SEQ ID NO: 6050263 - DNA, 25 bp, Homo sapien
gcttggagaaggcttattcggcgta

SEQ ID NO: 6050264 - DNA, 25 bp, Homo sapien
cgcgacatgatacgctaagtggata

SEQ ID NO: 6050265 - DNA, 25 bp, Homo sapien
agaaagatgtcacatagacacgcgt

SEQ ID NO: 6050266 - DNA, 25 bp, Homo sapien
acgtggtcgatgttcacaaggctac

SEQ ID NO: 6050267 - DNA, 25 bp, Homo sapien
gcgcgacacgttatcaaaaaagcaa

SEQ ID NO: 6050268 - DNA, 25 bp, Homo sapien
ggcgtattaccgtgtgtacaggcgc

SEQ ID NO: 6050269 - DNA, 25 bp, Homo sapien
tatcaaaaaagcaacgtacgtggtc

SEQ ID NO: 6050270 - DNA, 25 bp, Homo sapien
tatagatcgagcggggattatggtc

SEQ ID NO: 6050271 - DNA, 25 bp, Homo sapien
tcacggggcgtattaccgtgtgtac

SEQ ID NO: 6050272 - DNA, 25 bp, Homo sapien
tattccataccttacggtcgaacta

SEQ ID NO: 6050273 - DNA, 25 bp, Homo sapien
actaggacgtaaatagctttataat

SEQ ID NO: 6050274 - DNA, 25 bp, Homo sapien
cgccggtcgtcataactcactgatg

SEQ ID NO: 6050275 - DNA, 25 bp, Homo sapien
agcgaatagacgtatcagttcttac

SEQ ID NO: 6050276 - DNA, 25 bp, Homo sapien
tcgacaccgatacggcggtcacggg

SEQ ID NO: 6050277 - DNA, 25 bp, Homo sapien
tgtctaaacgcgacctgcggcctat

SEQ ID NO: 6050278 - DNA, 25 bp, Homo sapien
cgtatctgtggtagttatcgcgacg

SEQ ID NO: 6050279 - DNA, 25 bp, Homo sapien
cccgcctgatcgtacgctagaaggt

SEQ ID NO: 6050280 - DNA, 25 bp, Homo sapien
tacgctagaaggtgacgctatagat

SEQ ID NO: 6050281 - DNA, 25 bp, Homo sapien
cgctagttcgctgataaacccgggt

SEQ ID NO: 6050282 - DNA, 25 bp, Homo sapien
cgcgaatatcgaatcccacgggtaa

SEQ ID NO: 6050283 - DNA, 25 bp, Homo sapien
gcgtccttcaggcaaaacgcgacat

SEQ ID NO: 6050284 - DNA, 25 bp, Homo sapien
atagctttataatgtctaaacgcga

SEQ ID NO: 6050285 - DNA, 25 bp, Homo sapien
aggctacgctagttcgctgataaac

SEQ ID NO: 6050286 - DNA, 25 bp, Homo sapien
tataacgtcgggcttggagaaggct

SEQ ID NO: 6050287 - DNA, 25 bp, Homo sapien
catagacacgcgtataacgtcgggc

SEQ ID NO: 6050288 - DNA, 25 bp, Homo sapien
ataaggctagcatagaataaaagtc

SEQ ID NO: 6050289 - DNA, 25 bp, Homo sapien
gcttattcggcgtatacttaggtcg

SEQ ID NO: 6050290 - DNA, 25 bp, Homo sapien
agaaggtgacgctatagatcgagcg

SEQ ID NO: 6050291 - DNA, 25 bp, Homo sapien
gcaaaacgcgacatgatacgctaag

SEQ ID NO: 6050292 - DNA, 25 bp, Homo sapien
gttcttacgtatcgtggcgcgtcct

SEQ ID NO: 6050293 - DNA, 25 bp, Homo sapien
gtggatactaggacgtaaatagctt

SEQ ID NO: 6050294 - DNA, 25 bp, Homo sapien
tcgtcataactcactgatgtaccga

SEQ ID NO: 6050295 - DNA, 25 bp, Homo sapien
atgtcacatagacacgcgtataacg

SEQ ID NO: 6050296 - DNA, 25 bp, Homo sapien
ccgggttacgtcgcgaatatcgaat

SEQ ID NO: 6050297 - DNA, 25 bp, Homo sapien
atgatacgctaagtggatactagga

SEQ ID NO: 6050298 - DNA, 25 bp, Homo sapien
ttacgtcgcgaatatcgaatcccac

SEQ ID NO: 6050299 - DNA, 25 bp, Homo sapien
aaacgaacgggcagcgaatagacgt

SEQ ID NO: 6050300 - DNA, 25 bp, Homo sapien
tcggactcgcgttattccatacctt

SEQ ID NO: 6050301 - DNA, 25 bp, Homo sapien
aactaaccatcactatggtcgcgac

SEQ ID NO: 6050302 - DNA, 25 bp, Homo sapien
tatcgaatcccacgggtaatatcaa

SEQ ID NO: 6050303 - DNA, 25 bp, Homo sapien
cgcgacgacagatttagacccgcct

SEQ ID NO: 6050304 - DNA, 25 bp, Homo sapien
ccggtatctgccctggttgcgcgac

SEQ ID NO: 6050305 - DNA, 25 bp, Homo sapien
cgctaagtggatactaggacgtaaa

SEQ ID NO: 6050306 - DNA, 25 bp, Homo sapien
tgacgctatagatcgagcggggatt

SEQ ID NO: 6050307 - DNA, 25 bp, Homo sapien
tctgccctggttgcgcgacacgtta

SEQ ID NO: 6050308 - DNA, 25 bp, Homo sapien
acgtaaatagctttataatgtctaa

SEQ ID NO: 6050309 - DNA, 25 bp, Homo sapien
actgatgtaccgatgcgtataaggc

SEQ ID NO: 6050310 - DNA, 25 bp, Homo sapien
cgtcgggcttggagaaggcttattc

SEQ ID NO: 6050311 - DNA, 25 bp, Homo sapien
ttcacaaggctacgctagttcgctg

SEQ ID NO: 6050312 - DNA, 25 bp, Homo sapien
cgtgtgtacaggcgccggtcgtcat

SEQ ID NO: 6050313 - DNA, 25 bp, Homo sapien
ggtaatatcaaaacgaacgggcagc

SEQ ID NO: 6050314 - DNA, 25 bp, Homo sapien
ctggttgcgcgacacgttatcaaaa

SEQ ID NO: 6050315 - DNA, 25 bp, Homo sapien
atacttaggtcgttcggactcgcgt

SEQ ID NO: 6050316 - DNA, 25 bp, Homo sapien
cttcaggcaaaacgcgacatgatac

SEQ ID NO: 6050317 - DNA, 25 bp, Homo sapien
tcggcgtatacttaggtcgttcgga

SEQ ID NO: 6050318 - DNA, 25 bp, Homo sapien
taacgtagaaagatgtcacatagac

SEQ ID NO: 6050319 - DNA, 25 bp, Homo sapien
tagaataaaagtccggtatctgccc

SEQ ID NO: 6050320 - DNA, 25 bp, Homo sapien
aacgcgacctgcggcctataacgta

SEQ ID NO: 6050321 - DNA, 25 bp, Homo sapien
tctatgcgaacgtcggatgtcgtct

SEQ ID NO: 6050322 - DNA, 25 bp, Homo sapien
gtcgtctgccgatcggaggtacaac

SEQ ID NO: 6050323 - DNA, 25 bp, Homo sapien
tcggaggtacaacgttctgaaatat

SEQ ID NO: 6050324 - DNA, 25 bp, Homo sapien
gcttacagaagcgttaattacgcgt

SEQ ID NO: 6050325 - DNA, 25 bp, Homo sapien
aatataagtgcgcagtagaaactca

SEQ ID NO: 6050326 - DNA, 25 bp, Homo sapien
gtacaacgttctgaaatatgacgtc

SEQ ID NO: 6050327 - DNA, 25 bp, Homo sapien
agaagcgttaattacgcgtcgaaga

SEQ ID NO: 6050328 - DNA, 25 bp, Homo sapien
caacctcgagtaacgaataagagtc

SEQ ID NO: 6050329 - DNA, 25 bp, Homo sapien
tgacgcgtttacgataaaaggacta

SEQ ID NO: 6050330 - DNA, 25 bp, Homo sapien
acctcgcgacttgtatgggaacgac

SEQ ID NO: 6050331 - DNA, 25 bp, Homo sapien
aagtgcgcagtagaaactcaatacg

SEQ ID NO: 6050332 - DNA, 25 bp, Homo sapien
ccctggggtcgcgtaatgcacaaca

SEQ ID NO: 6050333 - DNA, 25 bp, Homo sapien
ctttctgtcgaacatgctacgtcga

SEQ ID NO: 6050334 - DNA, 25 bp, Homo sapien
caatacgacggtagcgttgtccgta

SEQ ID NO: 6050335 - DNA, 25 bp, Homo sapien
ggcaaccctggggtcgcgtaatgca

SEQ ID NO: 6050336 - DNA, 25 bp, Homo sapien
tcgaagaactgacctggatagcgac

SEQ ID NO: 6050337 - DNA, 25 bp, Homo sapien
tacgcgtcgaagaactgacctggat

SEQ ID NO: 6050338 - DNA, 25 bp, Homo sapien
cgcgtcggtagctcccggatctacg

SEQ ID NO: 6050339 - DNA, 25 bp, Homo sapien
tactgtcaacctcgagtaacgaata

SEQ ID NO: 6050340 - DNA, 25 bp, Homo sapien
tcgtacgcgacccactattatcgcg

SEQ ID NO: 6050341 - DNA, 25 bp, Homo sapien
tccgtacaccgcgatatagcgctat

SEQ ID NO: 6050342 - DNA, 25 bp, Homo sapien
aagccatgacgcgtttacgataaaa

SEQ ID NO: 6050343 - DNA, 25 bp, Homo sapien
gagtacgtacgacgctaatccgctt

SEQ ID NO: 6050344 - DNA, 25 bp, Homo sapien
cgatatagcgctatatcgaatatcg

SEQ ID NO: 6050345 - DNA, 25 bp, Homo sapien
caagtccagcgcgattatactgtca

SEQ ID NO: 6050346 - DNA, 25 bp, Homo sapien
ttacgataaaaggactactaagcta

SEQ ID NO: 6050347 - DNA, 25 bp, Homo sapien
gcgagggcaaccctggggtcgcgta

SEQ ID NO: 6050348 - DNA, 25 bp, Homo sapien
tcggatgtcgtctgccgatcggagg

SEQ ID NO: 6050349 - DNA, 25 bp, Homo sapien
cggtacggacagctctatagattag

SEQ ID NO: 6050350 - DNA, 25 bp, Homo sapien
gggtcgcgtaatgcacaacaagtcc

SEQ ID NO: 6050351 - DNA, 25 bp, Homo sapien
ccagcgcgattatactgtcaacctc

SEQ ID NO: 6050352 - DNA, 25 bp, Homo sapien
gcacaacaagtccagcgcgattata

SEQ ID NO: 6050353 - DNA, 25 bp, Homo sapien
atctacgtcgtaccatcagcgctgt

SEQ ID NO: 6050354 - DNA, 25 bp, Homo sapien
gtcgaacatgctacgtcgaagccat

SEQ ID NO: 6050355 - DNA, 25 bp, Homo sapien
acgcgagcttacagaagcgttaatt

SEQ ID NO: 6050356 - DNA, 25 bp, Homo sapien
tgtggtaatataagtgcgcagtaga

SEQ ID NO: 6050357 - DNA, 25 bp, Homo sapien
gacgtccgcgtgattagatcgttga

SEQ ID NO: 6050358 - DNA, 25 bp, Homo sapien
tcccggatctacgtcgtaccatcag

SEQ ID NO: 6050359 - DNA, 25 bp, Homo sapien
gctaggcgtaccgtactctccttta

SEQ ID NO: 6050360 - DNA, 25 bp, Homo sapien
gaaactcaatacgacggtagcgttg

SEQ ID NO: 6050361 - DNA, 25 bp, Homo sapien
gccttaacggaccaaatctgtggta

SEQ ID NO: 6050362 - DNA, 25 bp, Homo sapien
gaggattatcgaccgcaattacgac

SEQ ID NO: 6050363 - DNA, 25 bp, Homo sapien
agattagaggattatcgaccgcaat

SEQ ID NO: 6050364 - DNA, 25 bp, Homo sapien
catgctacgtcgaagccatgacgcg

SEQ ID NO: 6050365 - DNA, 25 bp, Homo sapien
atatcgaatatcgagtacgtacgac

SEQ ID NO: 6050366 - DNA, 25 bp, Homo sapien
cctggatagcgacctcgcgacttgt

SEQ ID NO: 6050367 - DNA, 25 bp, Homo sapien
tacgacgctaatccgcttacggtac

SEQ ID NO: 6050368 - DNA, 25 bp, Homo sapien
cgtaccgtactctcctttatctatg

SEQ ID NO: 6050369 - DNA, 25 bp, Homo sapien
cgtaatgcacaacaagtccagcgcg

SEQ ID NO: 6050370 - DNA, 25 bp, Homo sapien
aactgacctggatagcgacctcgcg

SEQ ID NO: 6050371 - DNA, 25 bp, Homo sapien
caaatctgtggtaatataagtgcgc

SEQ ID NO: 6050372 - DNA, 25 bp, Homo sapien
aagagtctttctgtcgaacatgcta

SEQ ID NO: 6050373 - DNA, 25 bp, Homo sapien
ccgcaattacgaccgttaacgcgag

SEQ ID NO: 6050374 - DNA, 25 bp, Homo sapien
tgtatgggaacgacgctactagctg

SEQ ID NO: 6050375 - DNA, 25 bp, Homo sapien
attagatcgttgacgcgagcttaca

SEQ ID NO: 6050376 - DNA, 25 bp, Homo sapien
ctctatagattagaggattatcgac

SEQ ID NO: 6050377 - DNA, 25 bp, Homo sapien
gataaaaggactactaagctaggcg

SEQ ID NO: 6050378 - DNA, 25 bp, Homo sapien
cactattatcgcgccttaacggacc

SEQ ID NO: 6050379 - DNA, 25 bp, Homo sapien
cgagtaacgaataagagtctttctg

SEQ ID NO: 6050380 - DNA, 25 bp, Homo sapien
acgaataagagtctttctgtcgaac

SEQ ID NO: 6050381 - DNA, 25 bp, Homo sapien
gtactctcctttatctatgcgaacg

SEQ ID NO: 6050382 - DNA, 25 bp, Homo sapien
acggaccaaatctgtggtaatataa

SEQ ID NO: 6050383 - DNA, 25 bp, Homo sapien
tatcgcgccttaacggaccaaatct

SEQ ID NO: 6050384 - DNA, 25 bp, Homo sapien
gcgttgtccgtacaccgcgatatag

SEQ ID NO: 6050385 - DNA, 25 bp, Homo sapien
tgtccgatcgtacgcgacccactat

SEQ ID NO: 6050386 - DNA, 25 bp, Homo sapien
aatatcgagtacgtacgacgctaat

SEQ ID NO: 6050387 - DNA, 25 bp, Homo sapien
ccgcttacggtacggacagctctat

SEQ ID NO: 6050388 - DNA, 25 bp, Homo sapien
tgccgatcggaggtacaacgttctg

SEQ ID NO: 6050389 - DNA, 25 bp, Homo sapien
gctaatccgcttacggtacggacag

SEQ ID NO: 6050390 - DNA, 25 bp, Homo sapien
ggaacgacgctactagctgagttat

SEQ ID NO: 6050391 - DNA, 25 bp, Homo sapien
gtcgtaccatcagcgctgtgtccga

SEQ ID NO: 6050392 - DNA, 25 bp, Homo sapien
gttaattacgcgtcgaagaactgac

SEQ ID NO: 6050393 - DNA, 25 bp, Homo sapien
tagcgacctcgcgacttgtatggga

SEQ ID NO: 6050394 - DNA, 25 bp, Homo sapien
tcctttatctatgcgaacgtcggat

SEQ ID NO: 6050395 - DNA, 25 bp, Homo sapien
cgttctgaaatatgacgtccgcgtg

SEQ ID NO: 6050396 - DNA, 25 bp, Homo sapien
gcgacccactattatcgcgccttaa

SEQ ID NO: 6050397 - DNA, 25 bp, Homo sapien
cgattatactgtcaacctcgagtaa

SEQ ID NO: 6050398 - DNA, 25 bp, Homo sapien
ggtagctcccggatctacgtcgtac

SEQ ID NO: 6050399 - DNA, 25 bp, Homo sapien
cgaacgtcggatgtcgtctgccgat

SEQ ID NO: 6050400 - DNA, 25 bp, Homo sapien
gcagtagaaactcaatacgacggta

SEQ ID NO: 6050401 - DNA, 25 bp, Homo sapien
cgacttgtatgggaacgacgctact

SEQ ID NO: 6050402 - DNA, 25 bp, Homo sapien
actaagctaggcgtaccgtactctc

SEQ ID NO: 6050403 - DNA, 25 bp, Homo sapien
tatcgaccgcaattacgaccgttaa

SEQ ID NO: 6050404 - DNA, 25 bp, Homo sapien
gcgctgtgtccgatcgtacgcgacc

SEQ ID NO: 6050405 - DNA, 25 bp, Homo sapien
aggactactaagctaggcgtaccgt

SEQ ID NO: 6050406 - DNA, 25 bp, Homo sapien
cgcgtgattagatcgttgacgcgag

SEQ ID NO: 6050407 - DNA, 25 bp, Homo sapien
ggacagctctatagattagaggatt

SEQ ID NO: 6050408 - DNA, 25 bp, Homo sapien
tcgttgacgcgagcttacagaagcg

SEQ ID NO: 6050409 - DNA, 25 bp, Homo sapien
agcgctatatcgaatatcgagtacg

SEQ ID NO: 6050410 - DNA, 25 bp, Homo sapien
acgtcgaagccatgacgcgtttacg

SEQ ID NO: 6050411 - DNA, 25 bp, Homo sapien
acggtagcgttgtccgtacaccgcg

SEQ ID NO: 6050412 - DNA, 25 bp, Homo sapien
acaccgcgatatagcgctatatcga

SEQ ID NO: 6050413 - DNA, 25 bp, Homo sapien
agttcgcgtcggtagctcccggatc

SEQ ID NO: 6050414 - DNA, 25 bp, Homo sapien
gaaatatgacgtccgcgtgattaga

SEQ ID NO: 6050415 - DNA, 25 bp, Homo sapien
ccatcagcgctgtgtccgatcgtac

SEQ ID NO: 6050416 - DNA, 25 bp, Homo sapien
tagtcgcgcagcgcgtaaacggacg

SEQ ID NO: 6050417 - DNA, 25 bp, Homo sapien
tacgttcccacactagtatagtcga

SEQ ID NO: 6050418 - DNA, 25 bp, Homo sapien
acgttcgtggatcagtcatcacgcg

SEQ ID NO: 6050419 - DNA, 25 bp, Homo sapien
aacacgtattctcgtatacggccgc

SEQ ID NO: 6050420 - DNA, 25 bp, Homo sapien
gtaacgtcgcgatgcccaagagatg

SEQ ID NO: 6050421 - DNA, 25 bp, Homo sapien
tcgcgatgcccaagagatgtccgat

SEQ ID NO: 6050422 - DNA, 25 bp, Homo sapien
aagcgtgtaacgtcgcgatgcccaa

SEQ ID NO: 6050423 - DNA, 25 bp, Homo sapien
tacttaaataggcggtcgtatctag

SEQ ID NO: 6050424 - DNA, 25 bp, Homo sapien
tctagttacgcgcggacagctttgt

SEQ ID NO: 6050425 - DNA, 25 bp, Homo sapien
aacggacggttcgacttgcactata

SEQ ID NO: 6050426 - DNA, 25 bp, Homo sapien
gcgtaaacggacggttcgacttgca

SEQ ID NO: 6050427 - DNA, 25 bp, Homo sapien
acagcgctacggacgttcgtggatc

SEQ ID NO: 6050428 - DNA, 25 bp, Homo sapien
tattctcgtatacggccgcgactca

SEQ ID NO: 6050429 - DNA, 25 bp, Homo sapien
gtccggatcgtgttctgcgagccaa

SEQ ID NO: 6050430 - DNA, 25 bp, Homo sapien
catcacaagttcgaagtagtccgga

SEQ ID NO: 6050431 - DNA, 25 bp, Homo sapien
ctcggtatacttcgcaggtgtctaa

SEQ ID NO: 6050432 - DNA, 25 bp, Homo sapien
taaaacgattggcactaacgcctta

SEQ ID NO: 6050433 - DNA, 25 bp, Homo sapien
gcgcaagtgcaatgtcttataagtc

SEQ ID NO: 6050434 - DNA, 25 bp, Homo sapien
ctcatcgttagtcgcgcagcgcgta

SEQ ID NO: 6050435 - DNA, 25 bp, Homo sapien
tgtcttataagtcgcgacgtgtaca

SEQ ID NO: 6050436 - DNA, 25 bp, Homo sapien
aagttcgaagtagtccggatcgtgt

SEQ ID NO: 6050437 - DNA, 25 bp, Homo sapien
ttcaggagcccgattgtaaatagtc

SEQ ID NO: 6050438 - DNA, 25 bp, Homo sapien
tcgcaagtgccagtcaagctcggta

SEQ ID NO: 6050439 - DNA, 25 bp, Homo sapien
tgccattaatggtctagttacgcgc

SEQ ID NO: 6050440 - DNA, 25 bp, Homo sapien
ctacggacgttcgtggatcagtcat

SEQ ID NO: 6050441 - DNA, 25 bp, Homo sapien
aatagtcattaaagcgtgtaacgtc

SEQ ID NO: 6050442 - DNA, 25 bp, Homo sapien
atggtccggaacgataggcatcaca

SEQ ID NO: 6050443 - DNA, 25 bp, Homo sapien
cttgtatcggttgcgcaagtgcaat

SEQ ID NO: 6050444 - DNA, 25 bp, Homo sapien
gtgccagtcaagctcggtatacttc

SEQ ID NO: 6050445 - DNA, 25 bp, Homo sapien
cgcaggtgtctaagcgattaaaacg

SEQ ID NO: 6050446 - DNA, 25 bp, Homo sapien
gctagccgctacgtatagctaggtc

SEQ ID NO: 6050447 - DNA, 25 bp, Homo sapien
ccgcgcgtagtttggtgccgagcta

SEQ ID NO: 6050448 - DNA, 25 bp, Homo sapien
ggtgccgagctagccgctacgtata

SEQ ID NO: 6050449 - DNA, 25 bp, Homo sapien
tagtcgaggataaacacgtattctc

SEQ ID NO: 6050450 - DNA, 25 bp, Homo sapien
tcattaaagcgtgtaacgtcgcgat

SEQ ID NO: 6050451 - DNA, 25 bp, Homo sapien
cggttcgacttgcactataaagaag

SEQ ID NO: 6050452 - DNA, 25 bp, Homo sapien
ataagtcgcgacgtgtacacagcgc

SEQ ID NO: 6050453 - DNA, 25 bp, Homo sapien
gtcaagctcggtatacttcgcaggt

SEQ ID NO: 6050454 - DNA, 25 bp, Homo sapien
cgctacgtatagctaggtctcatcg

SEQ ID NO: 6050455 - DNA, 25 bp, Homo sapien
gctttgttcgttagatatcgcggga

SEQ ID NO: 6050456 - DNA, 25 bp, Homo sapien
agagatgtccgattaacgtgccatt

SEQ ID NO: 6050457 - DNA, 25 bp, Homo sapien
cgcgacgtgtacacagcgctacgga

SEQ ID NO: 6050458 - DNA, 25 bp, Homo sapien
agatatcgcgggagtaaccttgtat

SEQ ID NO: 6050459 - DNA, 25 bp, Homo sapien
aggcattatggtccggaacgatagg

SEQ ID NO: 6050460 - DNA, 25 bp, Homo sapien
gcggtcgtatctaggcattatggtc

SEQ ID NO: 6050461 - DNA, 25 bp, Homo sapien
ctagtatagtcgaggataaacacgt

SEQ ID NO: 6050462 - DNA, 25 bp, Homo sapien
cgactcagtcgattcccgtcgcaag

SEQ ID NO: 6050463 - DNA, 25 bp, Homo sapien
gataggcatcacaagttcgaagtag

SEQ ID NO: 6050464 - DNA, 25 bp, Homo sapien
tgcccaagagatgtccgattaacgt

SEQ ID NO: 6050465 - DNA, 25 bp, Homo sapien
gtgcaatgtcttataagtcgcgacg

SEQ ID NO: 6050466 - DNA, 25 bp, Homo sapien
gtatagctaggtctcatcgttagtc

SEQ ID NO: 6050467 - DNA, 25 bp, Homo sapien
cgcaggtacttaaataggcggtcgt

SEQ ID NO: 6050468 - DNA, 25 bp, Homo sapien
gccttagcgatcgacaccttcagga

SEQ ID NO: 6050469 - DNA, 25 bp, Homo sapien
aaataggcggtcgtatctaggcatt

SEQ ID NO: 6050470 - DNA, 25 bp, Homo sapien
actaacgccttagcgatcgacacct

SEQ ID NO: 6050471 - DNA, 25 bp, Homo sapien
ttcccgtcgcaagtgccagtcaagc

SEQ ID NO: 6050472 - DNA, 25 bp, Homo sapien
cgcgggagtaaccttgtatcggttg

SEQ ID NO: 6050473 - DNA, 25 bp, Homo sapien
tagtttggtgccgagctagccgcta

SEQ ID NO: 6050474 - DNA, 25 bp, Homo sapien
cagtcatcacgcgtagcgatacgca

SEQ ID NO: 6050475 - DNA, 25 bp, Homo sapien
agcgattaaaacgattggcactaac

SEQ ID NO: 6050476 - DNA, 25 bp, Homo sapien
aaagaagttagtatcgccgcaggta

SEQ ID NO: 6050477 - DNA, 25 bp, Homo sapien
gcgatcgacaccttcaggagcccga

SEQ ID NO: 6050478 - DNA, 25 bp, Homo sapien
cccacactagtatagtcgaggataa

SEQ ID NO: 6050479 - DNA, 25 bp, Homo sapien
gattggcactaacgccttagcgatc

SEQ ID NO: 6050480 - DNA, 25 bp, Homo sapien
ttctgcgagccaatacgttcccaca

SEQ ID NO: 6050481 - DNA, 25 bp, Homo sapien
gtggatcagtcatcacgcgtagcga

SEQ ID NO: 6050482 - DNA, 25 bp, Homo sapien
agtaaccttgtatcggttgcgcaag

SEQ ID NO: 6050483 - DNA, 25 bp, Homo sapien
gacaccttcaggagcccgattgtaa

SEQ ID NO: 6050484 - DNA, 25 bp, Homo sapien
agtcgattcccgtcgcaagtgccag

SEQ ID NO: 6050485 - DNA, 25 bp, Homo sapien
agccaatacgttcccacactagtat

SEQ ID NO: 6050486 - DNA, 25 bp, Homo sapien
gttagtatcgccgcaggtacttaaa

SEQ ID NO: 6050487 - DNA, 25 bp, Homo sapien
aggataaacacgtattctcgtatac

SEQ ID NO: 6050488 - DNA, 25 bp, Homo sapien
tcggttgcgcaagtgcaatgtctta

SEQ ID NO: 6050489 - DNA, 25 bp, Homo sapien
ttaacgtgccattaatggtctagtt

SEQ ID NO: 6050490 - DNA, 25 bp, Homo sapien
atcgtgttctgcgagccaatacgtt

SEQ ID NO: 6050491 - DNA, 25 bp, Homo sapien
gtccgattaacgtgccattaatggt

SEQ ID NO: 6050492 - DNA, 25 bp, Homo sapien
gaagtagtccggatcgtgttctgcg

SEQ ID NO: 6050493 - DNA, 25 bp, Homo sapien
tatacggccgcgactcagtcgattc

SEQ ID NO: 6050494 - DNA, 25 bp, Homo sapien
cgcagcgcgtaaacggacggttcga

SEQ ID NO: 6050495 - DNA, 25 bp, Homo sapien
ttcgttagatatcgcgggagtaacc

SEQ ID NO: 6050496 - DNA, 25 bp, Homo sapien
cggacagctttgttcgttagatatc

SEQ ID NO: 6050497 - DNA, 25 bp, Homo sapien
tgtctaagcgattaaaacgattggc

SEQ ID NO: 6050498 - DNA, 25 bp, Homo sapien
gtatctaggcattatggtccggaac

SEQ ID NO: 6050499 - DNA, 25 bp, Homo sapien
cggaacgataggcatcacaagttcg

SEQ ID NO: 6050500 - DNA, 25 bp, Homo sapien
attgtaaatagtcattaaagcgtgt

SEQ ID NO: 6050501 - DNA, 25 bp, Homo sapien
tcacgcgtagcgatacgcaaagact

SEQ ID NO: 6050502 - DNA, 25 bp, Homo sapien
atacttcgcaggtgtctaagcgatt

SEQ ID NO: 6050503 - DNA, 25 bp, Homo sapien
gtgtacacagcgctacggacgttcg

SEQ ID NO: 6050504 - DNA, 25 bp, Homo sapien
gacttgcactataaagaagttagta

SEQ ID NO: 6050505 - DNA, 25 bp, Homo sapien
cactataaagaagttagtatcgccg

SEQ ID NO: 6050506 - DNA, 25 bp, Homo sapien
taatggtctagttacgcgcggacag

SEQ ID NO: 6050507 - DNA, 25 bp, Homo sapien
tacgcgcggacagctttgttcgtta

SEQ ID NO: 6050508 - DNA, 25 bp, Homo sapien
agcccgattgtaaatagtcattaaa

SEQ ID NO: 6050509 - DNA, 25 bp, Homo sapien
gccgcgactcagtcgattcccgtcg

SEQ ID NO: 6050510 - DNA, 25 bp, Homo sapien
ctaggtctcatcgttagtcgcgcag

SEQ ID NO: 6050511 - DNA, 25 bp, Homo sapien
tatcgccgcaggtacttaaataggc

SEQ ID NO: 6050512 - DNA, 25 bp, Homo sapien
acggtagcctcgtaggatcgctaaa

SEQ ID NO: 6050513 - DNA, 25 bp, Homo sapien
caaacgcccgcgcaaagctacgaat

SEQ ID NO: 6050514 - DNA, 25 bp, Homo sapien
agcgattcgcgcacgatagtagcta

SEQ ID NO: 6050515 - DNA, 25 bp, Homo sapien
taacgatccggccagtatccttgag

SEQ ID NO: 6050516 - DNA, 25 bp, Homo sapien
acattggcgcggtcgataagagccg

SEQ ID NO: 6050517 - DNA, 25 bp, Homo sapien
tacgagcaatcatcctcttgtaaag

SEQ ID NO: 6050518 - DNA, 25 bp, Homo sapien
cagttattagcaacgagattacgcg

SEQ ID NO: 6050519 - DNA, 25 bp, Homo sapien
gttttatcgacgcacgcccgacctg

SEQ ID NO: 6050520 - DNA, 25 bp, Homo sapien
tacgactctacgtaaaccgcgtgat

SEQ ID NO: 6050521 - DNA, 25 bp, Homo sapien
taccatgagtatcgcgcaatctacg

SEQ ID NO: 6050522 - DNA, 25 bp, Homo sapien
aaagaaattacgcgcgctggactca

SEQ ID NO: 6050523 - DNA, 25 bp, Homo sapien
acgatagtagctacggtagcctcgt

SEQ ID NO: 6050524 - DNA, 25 bp, Homo sapien
cggggcaccatcaaagaaattacgc

SEQ ID NO: 6050525 - DNA, 25 bp, Homo sapien
gtgaacgtccgactactaccagaat

SEQ ID NO: 6050526 - DNA, 25 bp, Homo sapien
tcgcgcacgatagtagctacggtag

SEQ ID NO: 6050527 - DNA, 25 bp, Homo sapien
atccggccagtatccttgagcgcga

SEQ ID NO: 6050528 - DNA, 25 bp, Homo sapien
ggcaatgttttatcgacgcacgccc

SEQ ID NO: 6050529 - DNA, 25 bp, Homo sapien
cgtaacagcgattcgcgcacgatag

SEQ ID NO: 6050530 - DNA, 25 bp, Homo sapien
cccgcgcaaagctacgaatgttact

SEQ ID NO: 6050531 - DNA, 25 bp, Homo sapien
ccagaatgccaaacgtacttaagcg

SEQ ID NO: 6050532 - DNA, 25 bp, Homo sapien
ttgcggtacgagcaatcatcctctt

SEQ ID NO: 6050533 - DNA, 25 bp, Homo sapien
ggttccaaacgcccgcgcaaagcta

SEQ ID NO: 6050534 - DNA, 25 bp, Homo sapien
atggtaatctcgcgccacagcacag

SEQ ID NO: 6050535 - DNA, 25 bp, Homo sapien
ccctgtaacattggcgcggtcgata

SEQ ID NO: 6050536 - DNA, 25 bp, Homo sapien
catgagaactacgtcgcgggcaatg

SEQ ID NO: 6050537 - DNA, 25 bp, Homo sapien
aaagtataacgatccggccagtatc

SEQ ID NO: 6050538 - DNA, 25 bp, Homo sapien
cgataacgtaacagcgattcgcgca

SEQ ID NO: 6050539 - DNA, 25 bp, Homo sapien
gtcgcgggcaatgttttatcgacgc

SEQ ID NO: 6050540 - DNA, 25 bp, Homo sapien
gtcgagatatgtatggtaatctcgc

SEQ ID NO: 6050541 - DNA, 25 bp, Homo sapien
tgttactagcgtcgataacgtaaca

SEQ ID NO: 6050542 - DNA, 25 bp, Homo sapien
cgttacctgtcatacgccggggcac

SEQ ID NO: 6050543 - DNA, 25 bp, Homo sapien
ggcgcgcgatagtacctataccatg

SEQ ID NO: 6050544 - DNA, 25 bp, Homo sapien
cgccacagcacaggcgcgcgatagt

SEQ ID NO: 6050545 - DNA, 25 bp, Homo sapien
acgagattacgcgtcgagatatgta

SEQ ID NO: 6050546 - DNA, 25 bp, Homo sapien
atacgccggggcaccatcaaagaaa

SEQ ID NO: 6050547 - DNA, 25 bp, Homo sapien
gggtcatagtcgaccgacgccttac

SEQ ID NO: 6050548 - DNA, 25 bp, Homo sapien
atctcgcgccacagcacaggcgcgc

SEQ ID NO: 6050549 - DNA, 25 bp, Homo sapien
gcctcgtaggatcgctaaagatagg

SEQ ID NO: 6050550 - DNA, 25 bp, Homo sapien
atacactagcgcagtcgaatacgga

SEQ ID NO: 6050551 - DNA, 25 bp, Homo sapien
ggactcaaagtataacgatccggcc

SEQ ID NO: 6050552 - DNA, 25 bp, Homo sapien
atacggagggttatcgacgtactag

SEQ ID NO: 6050553 - DNA, 25 bp, Homo sapien
cgacgtactagacaaacggtttgcg

SEQ ID NO: 6050554 - DNA, 25 bp, Homo sapien
ttatagggttccaaacgcccgcgca

SEQ ID NO: 6050555 - DNA, 25 bp, Homo sapien
tcgataagagccgttacctgtcata

SEQ ID NO: 6050556 - DNA, 25 bp, Homo sapien
cgatagtacctataccatgagtatc

SEQ ID NO: 6050557 - DNA, 25 bp, Homo sapien
cgcccgacctgcatacactagcgca

SEQ ID NO: 6050558 - DNA, 25 bp, Homo sapien
gcgcggtcgataagagccgttacct

SEQ ID NO: 6050559 - DNA, 25 bp, Homo sapien
aacggtttgcggtacgagcaatcat

SEQ ID NO: 6050560 - DNA, 25 bp, Homo sapien
tagacaaacggtttgcggtacgagc

SEQ ID NO: 6050561 - DNA, 25 bp, Homo sapien
gcgtagccctgtaacattggcgcgg

SEQ ID NO: 6050562 - DNA, 25 bp, Homo sapien
tgccaaacgtacttaagcgaaacac

SEQ ID NO: 6050563 - DNA, 25 bp, Homo sapien
ttacgcgtcgagatatgtatggtaa

SEQ ID NO: 6050564 - DNA, 25 bp, Homo sapien
ctgtcatacgccggggcaccatcaa

SEQ ID NO: 6050565 - DNA, 25 bp, Homo sapien
gagttacatgagaactacgtcgcgg

SEQ ID NO: 6050566 - DNA, 25 bp, Homo sapien
caaagctacgaatgttactagcgtc

SEQ ID NO: 6050567 - DNA, 25 bp, Homo sapien
agataggtgaacgtccgactactac

SEQ ID NO: 6050568 - DNA, 25 bp, Homo sapien
gagtatcgcgcaatctacgagttac

SEQ ID NO: 6050569 - DNA, 25 bp, Homo sapien
tcctcttgtaaagatcgttataggg

SEQ ID NO: 6050570 - DNA, 25 bp, Homo sapien
ctactaccagaatgccaaacgtact

SEQ ID NO: 6050571 - DNA, 25 bp, Homo sapien
ttaagcgaaacacggggtcatagtc

SEQ ID NO: 6050572 - DNA, 25 bp, Homo sapien
gagggttatcgacgtactagacaaa

SEQ ID NO: 6050573 - DNA, 25 bp, Homo sapien
tacctataccatgagtatcgcgcaa

SEQ ID NO: 6050574 - DNA, 25 bp, Homo sapien
taggatcgctaaagataggtgaacg

SEQ ID NO: 6050575 - DNA, 25 bp, Homo sapien
gtccgactactaccagaatgccaaa

SEQ ID NO: 6050576 - DNA, 25 bp, Homo sapien
tagcgcagtcgaatacggagggtta

SEQ ID NO: 6050577 - DNA, 25 bp, Homo sapien
aactacgtcgcgggcaatgttttat

SEQ ID NO: 6050578 - DNA, 25 bp, Homo sapien
agtcgaatacggagggttatcgacg

SEQ ID NO: 6050579 - DNA, 25 bp, Homo sapien
aacacggggtcatagtcgaccgacg

SEQ ID NO: 6050580 - DNA, 25 bp, Homo sapien
tccttgagcgcgaatacgcagttat

SEQ ID NO: 6050581 - DNA, 25 bp, Homo sapien
cgcgctggactcaaagtataacgat

SEQ ID NO: 6050582 - DNA, 25 bp, Homo sapien
atctacgagttacatgagaactacg

SEQ ID NO: 6050583 - DNA, 25 bp, Homo sapien
accatcaaagaaattacgcgcgctg

SEQ ID NO: 6050584 - DNA, 25 bp, Homo sapien
gacgcacgcccgacctgcatacact

SEQ ID NO: 6050585 - DNA, 25 bp, Homo sapien
gcgactcgcgtagccctgtaacatt

SEQ ID NO: 6050586 - DNA, 25 bp, Homo sapien
cgctaaagataggtgaacgtccgac

SEQ ID NO: 6050587 - DNA, 25 bp, Homo sapien
acctgcatacactagcgcagtcgaa

SEQ ID NO: 6050588 - DNA, 25 bp, Homo sapien
gcacaggcgcgcgatagtacctata

SEQ ID NO: 6050589 - DNA, 25 bp, Homo sapien
tgtaaagatcgttatagggttccaa

SEQ ID NO: 6050590 - DNA, 25 bp, Homo sapien
agcgcgaatacgcagttattagcaa

SEQ ID NO: 6050591 - DNA, 25 bp, Homo sapien
caatcatcctcttgtaaagatcgtt

SEQ ID NO: 6050592 - DNA, 25 bp, Homo sapien
attacgcgcgctggactcaaagtat

SEQ ID NO: 6050593 - DNA, 25 bp, Homo sapien
tagcgtcgataacgtaacagcgatt

SEQ ID NO: 6050594 - DNA, 25 bp, Homo sapien
atagtcgaccgacgccttacgactc

SEQ ID NO: 6050595 - DNA, 25 bp, Homo sapien
gtagctacggtagcctcgtaggatc

SEQ ID NO: 6050596 - DNA, 25 bp, Homo sapien
aagagccgttacctgtcatacgccg

SEQ ID NO: 6050597 - DNA, 25 bp, Homo sapien
ccagtatccttgagcgcgaatacgc

SEQ ID NO: 6050598 - DNA, 25 bp, Homo sapien
ttagcaacgagattacgcgtcgaga

SEQ ID NO: 6050599 - DNA, 25 bp, Homo sapien
aatacgcagttattagcaacgagat

SEQ ID NO: 6050600 - DNA, 25 bp, Homo sapien
gaccgacgccttacgactctacgta

SEQ ID NO: 6050601 - DNA, 25 bp, Homo sapien
cgcgcaatctacgagttacatgaga

SEQ ID NO: 6050602 - DNA, 25 bp, Homo sapien
atatgtatggtaatctcgcgccaca

SEQ ID NO: 6050603 - DNA, 25 bp, Homo sapien
tacgaatgttactagcgtcgataac

SEQ ID NO: 6050604 - DNA, 25 bp, Homo sapien
gcaggataaactgcgcgacgtacgc

SEQ ID NO: 6050605 - DNA, 25 bp, Homo sapien
gctatcccgcgctgcggtttcaaac

SEQ ID NO: 6050606 - DNA, 25 bp, Homo sapien
tagcgatcctacgagcggctagagt

SEQ ID NO: 6050607 - DNA, 25 bp, Homo sapien
aacaagagtaagatcgcgcaggata

SEQ ID NO: 6050608 - DNA, 25 bp, Homo sapien
taccgcgatacgaatatgacctcca

SEQ ID NO: 6050609 - DNA, 25 bp, Homo sapien
tattattccgcgacggtcgttagta

SEQ ID NO: 6050610 - DNA, 25 bp, Homo sapien
tctcaagtacgacgcggtatctctt

SEQ ID NO: 6050611 - DNA, 25 bp, Homo sapien
gcggtatctcttgataggtaccgcg

SEQ ID NO: 6050612 - DNA, 25 bp, Homo sapien
gagacctctcaagtacgacgcggta

SEQ ID NO: 6050613 - DNA, 25 bp, Homo sapien
ggagtgatacgaccgctagtctgtg

SEQ ID NO: 6050614 - DNA, 25 bp, Homo sapien
cgggcttattattccgcgacggtcg

SEQ ID NO: 6050615 - DNA, 25 bp, Homo sapien
tctgtgcgttgcgacgtatggtaat

SEQ ID NO: 6050616 - DNA, 25 bp, Homo sapien
tcctacgagcggctagagtaagtac

SEQ ID NO: 6050617 - DNA, 25 bp, Homo sapien
agatcgacggcgctagttatagttg

SEQ ID NO: 6050618 - DNA, 25 bp, Homo sapien
ttcgaacgctatcccgcgctgcggt

SEQ ID NO: 6050619 - DNA, 25 bp, Homo sapien
gatcgcgcaggataaactgcgcgac

SEQ ID NO: 6050620 - DNA, 25 bp, Homo sapien
tctcttgataggtaccgcgatacga

SEQ ID NO: 6050621 - DNA, 25 bp, Homo sapien
tacgacgcggtatctcttgataggt

SEQ ID NO: 6050622 - DNA, 25 bp, Homo sapien
atcgacaccatatagatcaaagaat

SEQ ID NO: 6050623 - DNA, 25 bp, Homo sapien
aatactttcgtttagcgatcctacg

SEQ ID NO: 6050624 - DNA, 25 bp, Homo sapien
accatatagatcaaagaatatccgc

SEQ ID NO: 6050625 - DNA, 25 bp, Homo sapien
ccattatacgtacgcggttacgcca

SEQ ID NO: 6050626 - DNA, 25 bp, Homo sapien
gcgcgacgtacgctctaaccattat

SEQ ID NO: 6050627 - DNA, 25 bp, Homo sapien
cgggttcgaacgctatcccgcgctg

SEQ ID NO: 6050628 - DNA, 25 bp, Homo sapien
gttcaagtttcacccgcgctagtcg

SEQ ID NO: 6050629 - DNA, 25 bp, Homo sapien
gcattgtcgtatcggccggcttgat

SEQ ID NO: 6050630 - DNA, 25 bp, Homo sapien
cgtatcggccggcttgatacatata

SEQ ID NO: 6050631 - DNA, 25 bp, Homo sapien
acctccataggcgtatcggttcaag

SEQ ID NO: 6050632 - DNA, 25 bp, Homo sapien
cgatatgacgcggagacctctcaag

SEQ ID NO: 6050633 - DNA, 25 bp, Homo sapien
gatacgaatatgacctccataggcg

SEQ ID NO: 6050634 - DNA, 25 bp, Homo sapien
gacgcggagacctctcaagtacgac

SEQ ID NO: 6050635 - DNA, 25 bp, Homo sapien
ggccggcttgatacatatatagtcg

SEQ ID NO: 6050636 - DNA, 25 bp, Homo sapien
caggcagcgcaacgctacgtcggtt

SEQ ID NO: 6050637 - DNA, 25 bp, Homo sapien
tatagttgttgctgacgtgcgataa

SEQ ID NO: 6050638 - DNA, 25 bp, Homo sapien
acccgcgctagtcgtatgactgcaa

SEQ ID NO: 6050639 - DNA, 25 bp, Homo sapien
tcaaattcgaaaggggttagatcga

SEQ ID NO: 6050640 - DNA, 25 bp, Homo sapien
ttcgtttagcgatcctacgagcggc

SEQ ID NO: 6050641 - DNA, 25 bp, Homo sapien
ttcaaacgatatgacgcggagacct

SEQ ID NO: 6050642 - DNA, 25 bp, Homo sapien
gcgcaacgctacgtcggtttttaca

SEQ ID NO: 6050643 - DNA, 25 bp, Homo sapien
tgacctcgtataacgggcttattat

SEQ ID NO: 6050644 - DNA, 25 bp, Homo sapien
aggaggtaatcgcatgataaatact

SEQ ID NO: 6050645 - DNA, 25 bp, Homo sapien
tgttgctgacgtgcgataatcgaca

SEQ ID NO: 6050646 - DNA, 25 bp, Homo sapien
tcgttagtacctaacaagagtaaga

SEQ ID NO: 6050647 - DNA, 25 bp, Homo sapien
catgataaatactttcgtttagcga

SEQ ID NO: 6050648 - DNA, 25 bp, Homo sapien
gcgataatcgacaccatatagatca

SEQ ID NO: 6050649 - DNA, 25 bp, Homo sapien
actatagcattgtcgtatcggccgg

SEQ ID NO: 6050650 - DNA, 25 bp, Homo sapien
tgacgtgcgataatcgacaccatat

SEQ ID NO: 6050651 - DNA, 25 bp, Homo sapien
ccgctagtctgtgcgttgcgacgta

SEQ ID NO: 6050652 - DNA, 25 bp, Homo sapien
cgcggttacgccactatagcattgt

SEQ ID NO: 6050653 - DNA, 25 bp, Homo sapien
tagcaccgggttcgaacgctatccc

SEQ ID NO: 6050654 - DNA, 25 bp, Homo sapien
atagtcgagccgacgggtcggagtg

SEQ ID NO: 6050655 - DNA, 25 bp, Homo sapien
cgtatgactgcaaagatcaaattcg

SEQ ID NO: 6050656 - DNA, 25 bp, Homo sapien
acatatatagtcgagccgacgggtc

SEQ ID NO: 6050657 - DNA, 25 bp, Homo sapien
ccgcgctgcggtttcaaacgatatg

SEQ ID NO: 6050658 - DNA, 25 bp, Homo sapien
aaagaatatccgcaggcagcgcaac

SEQ ID NO: 6050659 - DNA, 25 bp, Homo sapien
tttctgaggaggtaatcgcatgata

SEQ ID NO: 6050660 - DNA, 25 bp, Homo sapien
gacgtatggtaatttctgaggaggt

SEQ ID NO: 6050661 - DNA, 25 bp, Homo sapien
atacgaccgctagtctgtgcgttgc

SEQ ID NO: 6050662 - DNA, 25 bp, Homo sapien
gtataacgggcttattattccgcga

SEQ ID NO: 6050663 - DNA, 25 bp, Homo sapien
gataggtaccgcgatacgaatatga

SEQ ID NO: 6050664 - DNA, 25 bp, Homo sapien
tacgtacgcggttacgccactatag

SEQ ID NO: 6050665 - DNA, 25 bp, Homo sapien
cgtacgctctaaccattatacgtac

SEQ ID NO: 6050666 - DNA, 25 bp, Homo sapien
gggttagatcgacggcgctagttat

SEQ ID NO: 6050667 - DNA, 25 bp, Homo sapien
tacgccactatagcattgtcgtatc

SEQ ID NO: 6050668 - DNA, 25 bp, Homo sapien
acgccgatcggtagcaccgggttcg

SEQ ID NO: 6050669 - DNA, 25 bp, Homo sapien
taaactgcgcgacgtacgctctaac

SEQ ID NO: 6050670 - DNA, 25 bp, Homo sapien
cttgatacatatatagtcgagccga

SEQ ID NO: 6050671 - DNA, 25 bp, Homo sapien
gctagagtaagtacttccgcgagaa

SEQ ID NO: 6050672 - DNA, 25 bp, Homo sapien
tgcggtttcaaacgatatgacgcgg

SEQ ID NO: 6050673 - DNA, 25 bp, Homo sapien
gacggcgctagttatagttgttgct

SEQ ID NO: 6050674 - DNA, 25 bp, Homo sapien
cgagcggctagagtaagtacttccg

SEQ ID NO: 6050675 - DNA, 25 bp, Homo sapien
cgaaaggggttagatcgacggcgct

SEQ ID NO: 6050676 - DNA, 25 bp, Homo sapien
tcggtttttacactgacctcgtata

SEQ ID NO: 6050677 - DNA, 25 bp, Homo sapien
tagatcaaagaatatccgcaggcag

SEQ ID NO: 6050678 - DNA, 25 bp, Homo sapien
gagccgacgggtcggagtgatacga

SEQ ID NO: 6050679 - DNA, 25 bp, Homo sapien
acgggtcggagtgatacgaccgcta

SEQ ID NO: 6050680 - DNA, 25 bp, Homo sapien
aatatgacctccataggcgtatcgg

SEQ ID NO: 6050681 - DNA, 25 bp, Homo sapien
ctctaaccattatacgtacgcggtt

SEQ ID NO: 6050682 - DNA, 25 bp, Homo sapien
gtacctaacaagagtaagatcgcgc

SEQ ID NO: 6050683 - DNA, 25 bp, Homo sapien
ataggcgtatcggttcaagtttcac

SEQ ID NO: 6050684 - DNA, 25 bp, Homo sapien
cgttgcgacgtatggtaatttctga

SEQ ID NO: 6050685 - DNA, 25 bp, Homo sapien
tatccgcaggcagcgcaacgctacg

SEQ ID NO: 6050686 - DNA, 25 bp, Homo sapien
tggtaatttctgaggaggtaatcgc

SEQ ID NO: 6050687 - DNA, 25 bp, Homo sapien
ttacactgacctcgtataacgggct

SEQ ID NO: 6050688 - DNA, 25 bp, Homo sapien
gtttcacccgcgctagtcgtatgac

SEQ ID NO: 6050689 - DNA, 25 bp, Homo sapien
cgatcggtagcaccgggttcgaacg

SEQ ID NO: 6050690 - DNA, 25 bp, Homo sapien
gctagttatagttgttgctgacgtg

SEQ ID NO: 6050691 - DNA, 25 bp, Homo sapien
gctagtcgtatgactgcaaagatca

SEQ ID NO: 6050692 - DNA, 25 bp, Homo sapien
gtatcggttcaagtttcacccgcgc

SEQ ID NO: 6050693 - DNA, 25 bp, Homo sapien
taatcgcatgataaatactttcgtt

SEQ ID NO: 6050694 - DNA, 25 bp, Homo sapien
agtaagatcgcgcaggataaactgc

SEQ ID NO: 6050695 - DNA, 25 bp, Homo sapien
actgcaaagatcaaattcgaaaggg

SEQ ID NO: 6050696 - DNA, 25 bp, Homo sapien
gacgcgtcggtaataattcgcattt

SEQ ID NO: 6050697 - DNA, 25 bp, Homo sapien
ctgcgactatacgagtggtcatctc

SEQ ID NO: 6050698 - DNA, 25 bp, Homo sapien
ataattcgcatttgggacgaacgta

SEQ ID NO: 6050699 - DNA, 25 bp, Homo sapien
ccgacgcgtataaccagtaggatca

SEQ ID NO: 6050700 - DNA, 25 bp, Homo sapien
gatcgatagaacgtcggcagtatag

SEQ ID NO: 6050701 - DNA, 25 bp, Homo sapien
atagagtggcccctggacgtacgct

SEQ ID NO: 6050702 - DNA, 25 bp, Homo sapien
cgaaccgtcaggcatggtacgtcga

SEQ ID NO: 6050703 - DNA, 25 bp, Homo sapien
atagagtgaaattgtccccaaccga

SEQ ID NO: 6050704 - DNA, 25 bp, Homo sapien
gaacgtacgatcaatggtctgcgac

SEQ ID NO: 6050705 - DNA, 25 bp, Homo sapien
gtacgctagatagaatatgcatgag

SEQ ID NO: 6050706 - DNA, 25 bp, Homo sapien
catgacgtatccttcgtatcgcgac

SEQ ID NO: 6050707 - DNA, 25 bp, Homo sapien
ggctcgatcgcggaaaactttgctc

SEQ ID NO: 6050708 - DNA, 25 bp, Homo sapien
tacatccccaattagcgtacgcgaa

SEQ ID NO: 6050709 - DNA, 25 bp, Homo sapien
ggtcgttacactaaggcagcgtact

SEQ ID NO: 6050710 - DNA, 25 bp, Homo sapien
aatggtacgaatcgcgcatcacaat

SEQ ID NO: 6050711 - DNA, 25 bp, Homo sapien
tggcccctggacgtacgctagatag

SEQ ID NO: 6050712 - DNA, 25 bp, Homo sapien
atctacgtacatccccaattagcgt

SEQ ID NO: 6050713 - DNA, 25 bp, Homo sapien
attagcgtacgcgaaccgtcaggca

SEQ ID NO: 6050714 - DNA, 25 bp, Homo sapien
tacggtcgtcgaacctgcatcacaa

SEQ ID NO: 6050715 - DNA, 25 bp, Homo sapien
cgaggtcgtacgatcataaacatcg

SEQ ID NO: 6050716 - DNA, 25 bp, Homo sapien
tcacaatccagacggtcgttacact

SEQ ID NO: 6050717 - DNA, 25 bp, Homo sapien
acatagtcgcgatcattttgcgcga

SEQ ID NO: 6050718 - DNA, 25 bp, Homo sapien
tgaaattgtccccaaccgacgcgta

SEQ ID NO: 6050719 - DNA, 25 bp, Homo sapien
accagtaggatcatggcgcacgagt

SEQ ID NO: 6050720 - DNA, 25 bp, Homo sapien
tgggacgaacgtacgatcaatggtc

SEQ ID NO: 6050721 - DNA, 25 bp, Homo sapien
cctgcatcacaaggctcgatcgcgg

SEQ ID NO: 6050722 - DNA, 25 bp, Homo sapien
cccggatcagttaatggtacgaatc

SEQ ID NO: 6050723 - DNA, 25 bp, Homo sapien
gacgcggtataagccaaaccactac

SEQ ID NO: 6050724 - DNA, 25 bp, Homo sapien
gaaagttcgcgaatctacgtacatc

SEQ ID NO: 6050725 - DNA, 25 bp, Homo sapien
cgtcaggcatggtacgtcgaaccta

SEQ ID NO: 6050726 - DNA, 25 bp, Homo sapien
catggcgcacgagtattatcgtaga

SEQ ID NO: 6050727 - DNA, 25 bp, Homo sapien
gcatgagacgcgtcggtaataattc

SEQ ID NO: 6050728 - DNA, 25 bp, Homo sapien
cccaaccgacgcgtataaccagtag

SEQ ID NO: 6050729 - DNA, 25 bp, Homo sapien
gtatccttcgtatcgcgacccgggc

SEQ ID NO: 6050730 - DNA, 25 bp, Homo sapien
aatggtctgcgactatacgagtggt

SEQ ID NO: 6050731 - DNA, 25 bp, Homo sapien
taccgtatagagtgaaattgtcccc

SEQ ID NO: 6050732 - DNA, 25 bp, Homo sapien
gcatcgcatgacgtatccttcgtat

SEQ ID NO: 6050733 - DNA, 25 bp, Homo sapien
tactatccgcggcacgggaaagttc

SEQ ID NO: 6050734 - DNA, 25 bp, Homo sapien
tagatagaatatgcatgagacgcgt

SEQ ID NO: 6050735 - DNA, 25 bp, Homo sapien
ttcgtatcgcgacccgggcttagcg

SEQ ID NO: 6050736 - DNA, 25 bp, Homo sapien
tctacgcccggatcagttaatggta

SEQ ID NO: 6050737 - DNA, 25 bp, Homo sapien
tcgcgatcattttgcgcgaatagag

SEQ ID NO: 6050738 - DNA, 25 bp, Homo sapien
aaggcagcgtactacggtcgtcgaa

SEQ ID NO: 6050739 - DNA, 25 bp, Homo sapien
tcagttaatggtacgaatcgcgcat

SEQ ID NO: 6050740 - DNA, 25 bp, Homo sapien
acgatcaatggtctgcgactatacg

SEQ ID NO: 6050741 - DNA, 25 bp, Homo sapien
ccgtcgctaggcatcgcatgacgta

SEQ ID NO: 6050742 - DNA, 25 bp, Homo sapien
cgagtataggaagcgcaaggatcga

SEQ ID NO: 6050743 - DNA, 25 bp, Homo sapien
aggatcatggcgcacgagtattatc

SEQ ID NO: 6050744 - DNA, 25 bp, Homo sapien
tcccgtcgagtataggaagcgcaag

SEQ ID NO: 6050745 - DNA, 25 bp, Homo sapien
tacactaaggcagcgtactacggtc

SEQ ID NO: 6050746 - DNA, 25 bp, Homo sapien
ccagacggtcgttacactaaggcag

SEQ ID NO: 6050747 - DNA, 25 bp, Homo sapien
tcgcgaatctacgtacatccccaat

SEQ ID NO: 6050748 - DNA, 25 bp, Homo sapien
ccgggcttagcgtcgcgaacatagt

SEQ ID NO: 6050749 - DNA, 25 bp, Homo sapien
gagtggtcatctcaggattctacgc

SEQ ID NO: 6050750 - DNA, 25 bp, Homo sapien
ttagcgtcgcgaacatagtcgcgat

SEQ ID NO: 6050751 - DNA, 25 bp, Homo sapien
cgctaggcatcgcatgacgtatcct

SEQ ID NO: 6050752 - DNA, 25 bp, Homo sapien
agtaaacctgtcccgtcgagtatag

SEQ ID NO: 6050753 - DNA, 25 bp, Homo sapien
tcgtagatacaatactatccgcggc

SEQ ID NO: 6050754 - DNA, 25 bp, Homo sapien
atacaatactatccgcggcacggga

SEQ ID NO: 6050755 - DNA, 25 bp, Homo sapien
tttgctcgaggtcgtacgatcataa

SEQ ID NO: 6050756 - DNA, 25 bp, Homo sapien
gaatatgcatgagacgcgtcggtaa

SEQ ID NO: 6050757 - DNA, 25 bp, Homo sapien
gtattatcgtagatacaatactatc

SEQ ID NO: 6050758 - DNA, 25 bp, Homo sapien
cccaattagcgtacgcgaaccgtca

SEQ ID NO: 6050759 - DNA, 25 bp, Homo sapien
tcggtaataattcgcatttgggacg

SEQ ID NO: 6050760 - DNA, 25 bp, Homo sapien
aaccactaccgtatagagtgaaatt

SEQ ID NO: 6050761 - DNA, 25 bp, Homo sapien
gcatggtacgtcgaacctaagtaaa

SEQ ID NO: 6050762 - DNA, 25 bp, Homo sapien
ctggacgtacgctagatagaatatg

SEQ ID NO: 6050763 - DNA, 25 bp, Homo sapien
tcatctcaggattctacgcccggat

SEQ ID NO: 6050764 - DNA, 25 bp, Homo sapien
gcacgagtattatcgtagatacaat

SEQ ID NO: 6050765 - DNA, 25 bp, Homo sapien
acgaatcgcgcatcacaatccagac

SEQ ID NO: 6050766 - DNA, 25 bp, Homo sapien
aagccaaaccactaccgtatagagt

SEQ ID NO: 6050767 - DNA, 25 bp, Homo sapien
aggaagcgcaaggatcgatagaacg

SEQ ID NO: 6050768 - DNA, 25 bp, Homo sapien
cgtacgcgaaccgtcaggcatggta

SEQ ID NO: 6050769 - DNA, 25 bp, Homo sapien
aacctgtcccgtcgagtataggaag

SEQ ID NO: 6050770 - DNA, 25 bp, Homo sapien
gcacgggaaagttcgcgaatctacg

SEQ ID NO: 6050771 - DNA, 25 bp, Homo sapien
cgtacgatcataaacatcgacgcgg

SEQ ID NO: 6050772 - DNA, 25 bp, Homo sapien
tcattttgcgcgaatagagtggccc

SEQ ID NO: 6050773 - DNA, 25 bp, Homo sapien
atcgcggaaaactttgctcgaggtc

SEQ ID NO: 6050774 - DNA, 25 bp, Homo sapien
gaaaactttgctcgaggtcgtacga

SEQ ID NO: 6050775 - DNA, 25 bp, Homo sapien
gtataagccaaaccactaccgtata

SEQ ID NO: 6050776 - DNA, 25 bp, Homo sapien
cgtataaccagtaggatcatggcgc

SEQ ID NO: 6050777 - DNA, 25 bp, Homo sapien
gtcgaacctgcatcacaaggctcga

SEQ ID NO: 6050778 - DNA, 25 bp, Homo sapien
cgcgacccgggcttagcgtcgcgaa

SEQ ID NO: 6050779 - DNA, 25 bp, Homo sapien
tccgcggcacgggaaagttcgcgaa

SEQ ID NO: 6050780 - DNA, 25 bp, Homo sapien
ctatacgagtggtcatctcaggatt

SEQ ID NO: 6050781 - DNA, 25 bp, Homo sapien
gcgtactacggtcgtcgaacctgca

SEQ ID NO: 6050782 - DNA, 25 bp, Homo sapien
atcataaacatcgacgcggtataag

SEQ ID NO: 6050783 - DNA, 25 bp, Homo sapien
tcacaaggctcgatcgcggaaaact

SEQ ID NO: 6050784 - DNA, 25 bp, Homo sapien
aacatcgacgcggtataagccaaac

SEQ ID NO: 6050785 - DNA, 25 bp, Homo sapien
tgcgcgaatagagtggcccctggac

SEQ ID NO: 6050786 - DNA, 25 bp, Homo sapien
caggattctacgcccggatcagtta

SEQ ID NO: 6050787 - DNA, 25 bp, Homo sapien
cgcatttgggacgaacgtacgatca

SEQ ID NO: 6050788 - DNA, 25 bp, Homo sapien
cgcgcatcacaatccagacggtcgt

SEQ ID NO: 6050789 - DNA, 25 bp, Homo sapien
cgcaaggatcgatagaacgtcggca

SEQ ID NO: 6050790 - DNA, 25 bp, Homo sapien
tcgcgaacatagtcgcgatcatttt

SEQ ID NO: 6050791 - DNA, 25 bp, Homo sapien
agtccgcgagctgcggattataggc

SEQ ID NO: 6050792 - DNA, 25 bp, Homo sapien
tgcgcgtggccggcgatctagtaat

SEQ ID NO: 6050793 - DNA, 25 bp, Homo sapien
atatccaactctagccggacgaaat

SEQ ID NO: 6050794 - DNA, 25 bp, Homo sapien
caatactaccgcgaacaaggttgct

SEQ ID NO: 6050795 - DNA, 25 bp, Homo sapien
ccggtcgagggtctttgagcgcgat

SEQ ID NO: 6050796 - DNA, 25 bp, Homo sapien
ctttgagcgcgatagtatcagtttc

SEQ ID NO: 6050797 - DNA, 25 bp, Homo sapien
acgataggtccgatcatagatgaca

SEQ ID NO: 6050798 - DNA, 25 bp, Homo sapien
ggaccaagtggtactataggcggta

SEQ ID NO: 6050799 - DNA, 25 bp, Homo sapien
ctaccgcgaacaaggttgcttacgt

SEQ ID NO: 6050800 - DNA, 25 bp, Homo sapien
gtatgtccacccgcggtataacatg

SEQ ID NO: 6050801 - DNA, 25 bp, Homo sapien
gtatccgtatgtccacccgcggtat

SEQ ID NO: 6050802 - DNA, 25 bp, Homo sapien
catactggtacaaccggtcgagggt

SEQ ID NO: 6050803 - DNA, 25 bp, Homo sapien
aatacgacccaagcgcgaacgatag

SEQ ID NO: 6050804 - DNA, 25 bp, Homo sapien
cagcggtcacgcgacatgtctagcg

SEQ ID NO: 6050805 - DNA, 25 bp, Homo sapien
acgggatgcgcgtggccggcgatct

SEQ ID NO: 6050806 - DNA, 25 bp, Homo sapien
actataggcggtacctcctaagcga

SEQ ID NO: 6050807 - DNA, 25 bp, Homo sapien
tcttttgtcagacgcgagtagatag

SEQ ID NO: 6050808 - DNA, 25 bp, Homo sapien
aacatgcgacaagttgtattaggtc

SEQ ID NO: 6050809 - DNA, 25 bp, Homo sapien
taatctcgcggacgcaataaattgc

SEQ ID NO: 6050810 - DNA, 25 bp, Homo sapien
aactctagccggacgaaattagcta

SEQ ID NO: 6050811 - DNA, 25 bp, Homo sapien
acccaagcgcgaacgataggtccga

SEQ ID NO: 6050812 - DNA, 25 bp, Homo sapien
gtgtcgacgcctaccgcttcagata

SEQ ID NO: 6050813 - DNA, 25 bp, Homo sapien
cagtcgcgtagacgtacttggacaa

SEQ ID NO: 6050814 - DNA, 25 bp, Homo sapien
gcgatactacggagtgcttctgccg

SEQ ID NO: 6050815 - DNA, 25 bp, Homo sapien
gtagagttactgtcaataccgatcg

SEQ ID NO: 6050816 - DNA, 25 bp, Homo sapien
cgagctgcggattataggcatatcg

SEQ ID NO: 6050817 - DNA, 25 bp, Homo sapien
tcagacgcgagtagatagatatcca

SEQ ID NO: 6050818 - DNA, 25 bp, Homo sapien
tgactcggaggttaatctcgcggac

SEQ ID NO: 6050819 - DNA, 25 bp, Homo sapien
tcacgcgacatgtctagcgtgccgc

SEQ ID NO: 6050820 - DNA, 25 bp, Homo sapien
ttgtgcgtgtcgacgcctaccgctt

SEQ ID NO: 6050821 - DNA, 25 bp, Homo sapien
cgtagagtatccgtatgtccacccg

SEQ ID NO: 6050822 - DNA, 25 bp, Homo sapien
ttactgtcaataccgatcgtacgct

SEQ ID NO: 6050823 - DNA, 25 bp, Homo sapien
ttataggcatatcgacgtaggacca

SEQ ID NO: 6050824 - DNA, 25 bp, Homo sapien
agtggtactataggcggtacctcct

SEQ ID NO: 6050825 - DNA, 25 bp, Homo sapien
gacatgtctagcgtgccgcgatact

SEQ ID NO: 6050826 - DNA, 25 bp, Homo sapien
cgaacaaggttgcttacgtcgcatg

SEQ ID NO: 6050827 - DNA, 25 bp, Homo sapien
ccgctgcgacgcgtagagttactgt

SEQ ID NO: 6050828 - DNA, 25 bp, Homo sapien
taagcgaatagtaatacgacccaag

SEQ ID NO: 6050829 - DNA, 25 bp, Homo sapien
cgcggacgcaataaattgcatactg

SEQ ID NO: 6050830 - DNA, 25 bp, Homo sapien
gcgcgaacgataggtccgatcatag

SEQ ID NO: 6050831 - DNA, 25 bp, Homo sapien
agccggacgaaattagctattgaca

SEQ ID NO: 6050832 - DNA, 25 bp, Homo sapien
ggaggttaatctcgcggacgcaata

SEQ ID NO: 6050833 - DNA, 25 bp, Homo sapien
tcagataatatagtccgcgagctgc

SEQ ID NO: 6050834 - DNA, 25 bp, Homo sapien
aatatagtccgcgagctgcggatta

SEQ ID NO: 6050835 - DNA, 25 bp, Homo sapien
gtctagcgtgccgcgatactacgga

SEQ ID NO: 6050836 - DNA, 25 bp, Homo sapien
tacaaccggtcgagggtctttgagc

SEQ ID NO: 6050837 - DNA, 25 bp, Homo sapien
agtttcgccgctgcgacgcgtagag

SEQ ID NO: 6050838 - DNA, 25 bp, Homo sapien
tggccggcgatctagtaatcttttg

SEQ ID NO: 6050839 - DNA, 25 bp, Homo sapien
cgtgatacgggatgcgcgtggccgg

SEQ ID NO: 6050840 - DNA, 25 bp, Homo sapien
ccgatcgtacgctacggcttgaaca

SEQ ID NO: 6050841 - DNA, 25 bp, Homo sapien
tggacaagcgcacgtagagtatccg

SEQ ID NO: 6050842 - DNA, 25 bp, Homo sapien
gatgacaatactaccgcgaacaagg

SEQ ID NO: 6050843 - DNA, 25 bp, Homo sapien
gagggtctttgagcgcgatagtatc

SEQ ID NO: 6050844 - DNA, 25 bp, Homo sapien
cgacgcgtagagttactgtcaatac

SEQ ID NO: 6050845 - DNA, 25 bp, Homo sapien
ctacggagtgcttctgccgcgtgat

SEQ ID NO: 6050846 - DNA, 25 bp, Homo sapien
gcgagtagatagatatccaactcta

SEQ ID NO: 6050847 - DNA, 25 bp, Homo sapien
attaggtcgcggataacccagaatc

SEQ ID NO: 6050848 - DNA, 25 bp, Homo sapien
agtgcttctgccgcgtgatacggga

SEQ ID NO: 6050849 - DNA, 25 bp, Homo sapien
atcatagatgacaatactaccgcga

SEQ ID NO: 6050850 - DNA, 25 bp, Homo sapien
tcaataccgatcgtacgctacggct

SEQ ID NO: 6050851 - DNA, 25 bp, Homo sapien
tagtatcagtttcgccgctgcgacg

SEQ ID NO: 6050852 - DNA, 25 bp, Homo sapien
gttagcttgtgcgtgtcgacgccta

SEQ ID NO: 6050853 - DNA, 25 bp, Homo sapien
ccggacgagtaagttagcttgtgcg

SEQ ID NO: 6050854 - DNA, 25 bp, Homo sapien
tcgcggataacccagaatccggacg

SEQ ID NO: 6050855 - DNA, 25 bp, Homo sapien
acgaaattagctattgacagtcgcg

SEQ ID NO: 6050856 - DNA, 25 bp, Homo sapien
cagaatccggacgagtaagttagct

SEQ ID NO: 6050857 - DNA, 25 bp, Homo sapien
ttctgccgcgtgatacgggatgcgc

SEQ ID NO: 6050858 - DNA, 25 bp, Homo sapien
aaattgcatactggtacaaccggtc

SEQ ID NO: 6050859 - DNA, 25 bp, Homo sapien
cgacaagttgtattaggtcgcggat

SEQ ID NO: 6050860 - DNA, 25 bp, Homo sapien
gacgtaggaccaagtggtactatag

SEQ ID NO: 6050861 - DNA, 25 bp, Homo sapien
gcgatctagtaatcttttgtcagac

SEQ ID NO: 6050862 - DNA, 25 bp, Homo sapien
acctcctaagcgaatagtaatacga

SEQ ID NO: 6050863 - DNA, 25 bp, Homo sapien
cgtacttggacaagcgcacgtagag

SEQ ID NO: 6050864 - DNA, 25 bp, Homo sapien
cgcaataaattgcatactggtacaa

SEQ ID NO: 6050865 - DNA, 25 bp, Homo sapien
accgcttcagataatatagtccgcg

SEQ ID NO: 6050866 - DNA, 25 bp, Homo sapien
gagtaagttagcttgtgcgtgtcga

SEQ ID NO: 6050867 - DNA, 25 bp, Homo sapien
catatcgacgtaggaccaagtggta

SEQ ID NO: 6050868 - DNA, 25 bp, Homo sapien
tcgcatgactcggaggttaatctcg

SEQ ID NO: 6050869 - DNA, 25 bp, Homo sapien
cttacgtcgcatgactcggaggtta

SEQ ID NO: 6050870 - DNA, 25 bp, Homo sapien
attgacagtcgcgtagacgtacttg

SEQ ID NO: 6050871 - DNA, 25 bp, Homo sapien
ttagctattgacagtcgcgtagacg

SEQ ID NO: 6050872 - DNA, 25 bp, Homo sapien
ataacccagaatccggacgagtaag

SEQ ID NO: 6050873 - DNA, 25 bp, Homo sapien
agcgcacgtagagtatccgtatgtc

SEQ ID NO: 6050874 - DNA, 25 bp, Homo sapien
ggcggtacctcctaagcgaatagta

SEQ ID NO: 6050875 - DNA, 25 bp, Homo sapien
ggtccgatcatagatgacaatacta

SEQ ID NO: 6050876 - DNA, 25 bp, Homo sapien
aggttgcttacgtcgcatgactcgg

SEQ ID NO: 6050877 - DNA, 25 bp, Homo sapien
acgcctaccgcttcagataatatag

SEQ ID NO: 6050878 - DNA, 25 bp, Homo sapien
aatagtaatacgacccaagcgcgaa

SEQ ID NO: 6050879 - DNA, 25 bp, Homo sapien
agatagatatccaactctagccgga

SEQ ID NO: 6050880 - DNA, 25 bp, Homo sapien
cgtgccgcgatactacggagtgctt

SEQ ID NO: 6050881 - DNA, 25 bp, Homo sapien
cgtagacgtacttggacaagcgcac

SEQ ID NO: 6050882 - DNA, 25 bp, Homo sapien
gttgtattaggtcgcggataaccca

SEQ ID NO: 6050883 - DNA, 25 bp, Homo sapien
gcggtataacatgcgacaagttgta

SEQ ID NO: 6050884 - DNA, 25 bp, Homo sapien
tagtaatcttttgtcagacgcgagt

SEQ ID NO: 6050885 - DNA, 25 bp, Homo sapien
gcgcgatagtatcagtttcgccgct

SEQ ID NO: 6050886 - DNA, 25 bp, Homo sapien
gcggattataggcatatcgacgtag

SEQ ID NO: 6050887 - DNA, 25 bp, Homo sapien
ccacccgcggtataacatgcgacaa

SEQ ID NO: 6050888 - DNA, 25 bp, Homo sapien
gacgcagaaccgcgtactaccgata

SEQ ID NO: 6050889 - DNA, 25 bp, Homo sapien
agattcgcgaccgtaagactcttag

SEQ ID NO: 6050890 - DNA, 25 bp, Homo sapien
gtttttaggatatgagtaggtcgta

SEQ ID NO: 6050891 - DNA, 25 bp, Homo sapien
gcggacgtgccataattagtcagtc

SEQ ID NO: 6050892 - DNA, 25 bp, Homo sapien
tcgcgatctagattgcaatagttaa

SEQ ID NO: 6050893 - DNA, 25 bp, Homo sapien
tatagatctggttcgagtcgtcccg

SEQ ID NO: 6050894 - DNA, 25 bp, Homo sapien
gtacgcaataggagacgcagaaccg

SEQ ID NO: 6050895 - DNA, 25 bp, Homo sapien
aggatatgagtaggtcgtaccgatt

SEQ ID NO: 6050896 - DNA, 25 bp, Homo sapien
tagtagtccgcgctcaatttccgta

SEQ ID NO: 6050897 - DNA, 25 bp, Homo sapien
tgagtaggtcgtaccgattagcgaa

SEQ ID NO: 6050898 - DNA, 25 bp, Homo sapien
tccgcgctcaatttccgtacgtatg

SEQ ID NO: 6050899 - DNA, 25 bp, Homo sapien
agaaccgcgtactaccgatatagat

SEQ ID NO: 6050900 - DNA, 25 bp, Homo sapien
tacttagtaccgcgggcagcgctac

SEQ ID NO: 6050901 - DNA, 25 bp, Homo sapien
gttaacactagtcgcggacgtgcca

SEQ ID NO: 6050902 - DNA, 25 bp, Homo sapien
tacaccacacttcaggattagtagt

SEQ ID NO: 6050903 - DNA, 25 bp, Homo sapien
ttcgtacacgcgtagtcctccgagt

SEQ ID NO: 6050904 - DNA, 25 bp, Homo sapien
gacgtacgatcatcgaacagcgcga

SEQ ID NO: 6050905 - DNA, 25 bp, Homo sapien
ttgcaatagttaacgctagcggttg

SEQ ID NO: 6050906 - DNA, 25 bp, Homo sapien
cttgacttgtatagcgcgacctata

SEQ ID NO: 6050907 - DNA, 25 bp, Homo sapien
acggactcgcgatctagattgcaat

SEQ ID NO: 6050908 - DNA, 25 bp, Homo sapien
ctcaatttccgtacgtatgcgcgat

SEQ ID NO: 6050909 - DNA, 25 bp, Homo sapien
gtggtcgccgcttacttagtaccgc

SEQ ID NO: 6050910 - DNA, 25 bp, Homo sapien
caacgccttgacttgtatagcgcga

SEQ ID NO: 6050911 - DNA, 25 bp, Homo sapien
actcttagcaatgtcgtagcgcgaa

SEQ ID NO: 6050912 - DNA, 25 bp, Homo sapien
ttctttagcacgattgcgaatagtc

SEQ ID NO: 6050913 - DNA, 25 bp, Homo sapien
ctgatcgtacgcaataggagacgca

SEQ ID NO: 6050914 - DNA, 25 bp, Homo sapien
ataccgacagcggtctttccgcgta

SEQ ID NO: 6050915 - DNA, 25 bp, Homo sapien
tcgtcccgttgattctttagcacga

SEQ ID NO: 6050916 - DNA, 25 bp, Homo sapien
agcacgattgcgaatagtcgtcagc

SEQ ID NO: 6050917 - DNA, 25 bp, Homo sapien
cgctagcggttgctgatcgtacgca

SEQ ID NO: 6050918 - DNA, 25 bp, Homo sapien
acagcggtctttccgcgtattgggt

SEQ ID NO: 6050919 - DNA, 25 bp, Homo sapien
gtgccataattagtcagtcgcgtat

SEQ ID NO: 6050920 - DNA, 25 bp, Homo sapien
ggttcgttccgacgctggacacgcg

SEQ ID NO: 6050921 - DNA, 25 bp, Homo sapien
attgcgaatagtcgtcagctctgta

SEQ ID NO: 6050922 - DNA, 25 bp, Homo sapien
gagccaaggtgattcgtacacgcgt

SEQ ID NO: 6050923 - DNA, 25 bp, Homo sapien
gcgtactaccgatatagatctggtt

SEQ ID NO: 6050924 - DNA, 25 bp, Homo sapien
cgcgatatggacgttaacactagtc

SEQ ID NO: 6050925 - DNA, 25 bp, Homo sapien
ggtcgtaccgattagcgaacagata

SEQ ID NO: 6050926 - DNA, 25 bp, Homo sapien
cgtatgcgcgatatggacgttaaca

SEQ ID NO: 6050927 - DNA, 25 bp, Homo sapien
cttgcgataccgacagcggtctttc

SEQ ID NO: 6050928 - DNA, 25 bp, Homo sapien
tggtccgacgtacgatcatcgaaca

SEQ ID NO: 6050929 - DNA, 25 bp, Homo sapien
gacacgcgtcgaataccgtcgtttg

SEQ ID NO: 6050930 - DNA, 25 bp, Homo sapien
agcgcgacctatatcagggttcgtt

SEQ ID NO: 6050931 - DNA, 25 bp, Homo sapien
tcgaacagcgcgatagccgttttta

SEQ ID NO: 6050932 - DNA, 25 bp, Homo sapien
gcgctacagattcgcgaccgtaaga

SEQ ID NO: 6050933 - DNA, 25 bp, Homo sapien
acctatatcagggttcgttccgacg

SEQ ID NO: 6050934 - DNA, 25 bp, Homo sapien
cgctggacacgcgtcgaataccgtc

SEQ ID NO: 6050935 - DNA, 25 bp, Homo sapien
tagcgaacagatacggactcgcgat

SEQ ID NO: 6050936 - DNA, 25 bp, Homo sapien
tctagattgcaatagttaacgctag

SEQ ID NO: 6050937 - DNA, 25 bp, Homo sapien
tcgagtcgtcccgttgattctttag

SEQ ID NO: 6050938 - DNA, 25 bp, Homo sapien
tcagtcgcgtatgagccaaggtgat

SEQ ID NO: 6050939 - DNA, 25 bp, Homo sapien
cgtcagctctgtagcgtagtgcgac

SEQ ID NO: 6050940 - DNA, 25 bp, Homo sapien
acacttcaggattagtagtccgcgc

SEQ ID NO: 6050941 - DNA, 25 bp, Homo sapien
acagatacggactcgcgatctagat

SEQ ID NO: 6050942 - DNA, 25 bp, Homo sapien
cggttgctgatcgtacgcaatagga

SEQ ID NO: 6050943 - DNA, 25 bp, Homo sapien
caatcgataagacgcgattacacca

SEQ ID NO: 6050944 - DNA, 25 bp, Homo sapien
taattagtcagtcgcgtatgagcca

SEQ ID NO: 6050945 - DNA, 25 bp, Homo sapien
aggtgattcgtacacgcgtagtcct

SEQ ID NO: 6050946 - DNA, 25 bp, Homo sapien
accgattagcgaacagatacggact

SEQ ID NO: 6050947 - DNA, 25 bp, Homo sapien
gtaccgcgggcagcgctacagattc

SEQ ID NO: 6050948 - DNA, 25 bp, Homo sapien
agcgcgatagccgtttttaggatat

SEQ ID NO: 6050949 - DNA, 25 bp, Homo sapien
atagccgtttttaggatatgagtag

SEQ ID NO: 6050950 - DNA, 25 bp, Homo sapien
cgcgattacaccacacttcaggatt

SEQ ID NO: 6050951 - DNA, 25 bp, Homo sapien
gccgcttacttagtaccgcgggcag

SEQ ID NO: 6050952 - DNA, 25 bp, Homo sapien
ataggagacgcagaaccgcgtacta

SEQ ID NO: 6050953 - DNA, 25 bp, Homo sapien
tcgtagcgcgaacaatcgataagac

SEQ ID NO: 6050954 - DNA, 25 bp, Homo sapien
taccgatatagatctggttcgagtc

SEQ ID NO: 6050955 - DNA, 25 bp, Homo sapien
tctggttcgagtcgtcccgttgatt

SEQ ID NO: 6050956 - DNA, 25 bp, Homo sapien
cgatcatcgaacagcgcgatagccg

SEQ ID NO: 6050957 - DNA, 25 bp, Homo sapien
tagtcctccgagtggtccgacgtac

SEQ ID NO: 6050958 - DNA, 25 bp, Homo sapien
ctctgtagcgtagtgcgacaacgcc

SEQ ID NO: 6050959 - DNA, 25 bp, Homo sapien
gtgcgacaacgccttgacttgtata

SEQ ID NO: 6050960 - DNA, 25 bp, Homo sapien
cacgcgtagtcctccgagtggtccg

SEQ ID NO: 6050961 - DNA, 25 bp, Homo sapien
ttccgtacgtatgcgcgatatggac

SEQ ID NO: 6050962 - DNA, 25 bp, Homo sapien
tagttaacgctagcggttgctgatc

SEQ ID NO: 6050963 - DNA, 25 bp, Homo sapien
ataagacgcgattacaccacacttc

SEQ ID NO: 6050964 - DNA, 25 bp, Homo sapien
ctagtcgcggacgtgccataattag

SEQ ID NO: 6050965 - DNA, 25 bp, Homo sapien
tccgagtggtccgacgtacgatcat

SEQ ID NO: 6050966 - DNA, 25 bp, Homo sapien
cgggcagcgctacagattcgcgacc

SEQ ID NO: 6050967 - DNA, 25 bp, Homo sapien
tttccgcgtattgggtggtcgccgc

SEQ ID NO: 6050968 - DNA, 25 bp, Homo sapien
cgcgaccgtaagactcttagcaatg

SEQ ID NO: 6050969 - DNA, 25 bp, Homo sapien
cgttgattctttagcacgattgcga

SEQ ID NO: 6050970 - DNA, 25 bp, Homo sapien
ttccgacgctggacacgcgtcgaat

SEQ ID NO: 6050971 - DNA, 25 bp, Homo sapien
aatagtcgtcagctctgtagcgtag

SEQ ID NO: 6050972 - DNA, 25 bp, Homo sapien
cgcgaacaatcgataagacgcgatt

SEQ ID NO: 6050973 - DNA, 25 bp, Homo sapien
agcaatgtcgtagcgcgaacaatcg

SEQ ID NO: 6050974 - DNA, 25 bp, Homo sapien
ttgtatagcgcgacctatatcaggg

SEQ ID NO: 6050975 - DNA, 25 bp, Homo sapien
cgtaagactcttagcaatgtcgtag

SEQ ID NO: 6050976 - DNA, 25 bp, Homo sapien
agcgtagtgcgacaacgccttgact

SEQ ID NO: 6050977 - DNA, 25 bp, Homo sapien
tatcagggttcgttccgacgctgga

SEQ ID NO: 6050978 - DNA, 25 bp, Homo sapien
cgtcgaataccgtcgtttgtgaaag

SEQ ID NO: 6050979 - DNA, 25 bp, Homo sapien
gcgtatgagccaaggtgattcgtac

SEQ ID NO: 6050980 - DNA, 25 bp, Homo sapien
gtattgggtggtcgccgcttactta

SEQ ID NO: 6050981 - DNA, 25 bp, Homo sapien
caggattagtagtccgcgctcaatt

SEQ ID NO: 6050982 - DNA, 25 bp, Homo sapien
atggacgttaacactagtcgcggac

SEQ ID NO: 6050983 - DNA, 25 bp, Homo sapien
gacgcgattactacaaacaggcctc

SEQ ID NO: 6050984 - DNA, 25 bp, Homo sapien
atcctagtcgagtaccgtagtatcg

SEQ ID NO: 6050985 - DNA, 25 bp, Homo sapien
atacggtagttgtcgtgtcgacgtc

SEQ ID NO: 6050986 - DNA, 25 bp, Homo sapien
aagcgcgatactaacctgcaaccga

SEQ ID NO: 6050987 - DNA, 25 bp, Homo sapien
aggccgcgctatacattaggtctta

SEQ ID NO: 6050988 - DNA, 25 bp, Homo sapien
agcggtcggtacaaaacaactctag

SEQ ID NO: 6050989 - DNA, 25 bp, Homo sapien
cttcgtagcgtaagcggtaaaatat

SEQ ID NO: 6050990 - DNA, 25 bp, Homo sapien
aacactatctcgaacgcacgcgata

SEQ ID NO: 6050991 - DNA, 25 bp, Homo sapien
atctcgaacgcacgcgatatacgaa

SEQ ID NO: 6050992 - DNA, 25 bp, Homo sapien
cgacgtctaacgagttcctgtagtt

SEQ ID NO: 6050993 - DNA, 25 bp, Homo sapien
cggtacaaaacaactctagcgtcga

SEQ ID NO: 6050994 - DNA, 25 bp, Homo sapien
taccgttcgcgcatcgtgtaccgcg

SEQ ID NO: 6050995 - DNA, 25 bp, Homo sapien
gccctagttaaacggcgtcctcatg

SEQ ID NO: 6050996 - DNA, 25 bp, Homo sapien
tcgcgcatcgtgtaccgcgcgaatg

SEQ ID NO: 6050997 - DNA, 25 bp, Homo sapien
cctcatgagcatactcgttcgggct

SEQ ID NO: 6050998 - DNA, 25 bp, Homo sapien
aacgtcggataatgcccaccattga

SEQ ID NO: 6050999 - DNA, 25 bp, Homo sapien
tgtagttaggctcgtacgaacaagt

SEQ ID NO: 6051000 - DNA, 25 bp, Homo sapien
gttaaacggcgtcctcatgagcata

SEQ ID NO: 6051001 - DNA, 25 bp, Homo sapien
gatcgagcgtgctacacttaccgtt

SEQ ID NO: 6051002 - DNA, 25 bp, Homo sapien
agtatcgtgtgctgtacgttcgcga

SEQ ID NO: 6051003 - DNA, 25 bp, Homo sapien
ggttgtcacgcaatcctagtcgagt

SEQ ID NO: 6051004 - DNA, 25 bp, Homo sapien
acaaacaggcctcgatcgtaacgtc

SEQ ID NO: 6051005 - DNA, 25 bp, Homo sapien
attactacaaacaggcctcgatcgt

SEQ ID NO: 6051006 - DNA, 25 bp, Homo sapien
ctaacgagttcctgtagttaggctc

SEQ ID NO: 6051007 - DNA, 25 bp, Homo sapien
ggtcttaagcgcgatactaacctgc

SEQ ID NO: 6051008 - DNA, 25 bp, Homo sapien
atcgtgtaccgcgcgaatgacgcga

SEQ ID NO: 6051009 - DNA, 25 bp, Homo sapien
acattaggtcttaagcgcgatacta

SEQ ID NO: 6051010 - DNA, 25 bp, Homo sapien
gtgtgctgtacgttcgcgaacacta

SEQ ID NO: 6051011 - DNA, 25 bp, Homo sapien
atgattgatcgagcgtgctacactt

SEQ ID NO: 6051012 - DNA, 25 bp, Homo sapien
gatcatcagttgtgtcgcgacgtga

SEQ ID NO: 6051013 - DNA, 25 bp, Homo sapien
cggtgccgtcgatgtacgagcgctc

SEQ ID NO: 6051014 - DNA, 25 bp, Homo sapien
gaatcgtacgaacgctctggatcat

SEQ ID NO: 6051015 - DNA, 25 bp, Homo sapien
cgaacaagtttcctacctagcgacg

SEQ ID NO: 6051016 - DNA, 25 bp, Homo sapien
tgcctatgcgaagcgagatctttcc

SEQ ID NO: 6051017 - DNA, 25 bp, Homo sapien
cgtcgatacggcgattaagaatcgt

SEQ ID NO: 6051018 - DNA, 25 bp, Homo sapien
gtgtcgcgacgtgacatcagagttc

SEQ ID NO: 6051019 - DNA, 25 bp, Homo sapien
cgacgtgacatcagagttcgcctta

SEQ ID NO: 6051020 - DNA, 25 bp, Homo sapien
gactcaatcacggtgccgtcgatgt

SEQ ID NO: 6051021 - DNA, 25 bp, Homo sapien
tctttccttcgtagcgtaagcggta

SEQ ID NO: 6051022 - DNA, 25 bp, Homo sapien
agcgacggttgtcacgcaatcctag

SEQ ID NO: 6051023 - DNA, 25 bp, Homo sapien
gtaaaatattcaaggccgcgctata

SEQ ID NO: 6051024 - DNA, 25 bp, Homo sapien
aatcacggtgccgtcgatgtacgag

SEQ ID NO: 6051025 - DNA, 25 bp, Homo sapien
tcgtgtcgacgtctaacgagttcct

SEQ ID NO: 6051026 - DNA, 25 bp, Homo sapien
cgctatacattaggtcttaagcgcg

SEQ ID NO: 6051027 - DNA, 25 bp, Homo sapien
cacgcaatcctagtcgagtaccgta

SEQ ID NO: 6051028 - DNA, 25 bp, Homo sapien
gctctggatcatcagttgtgtcgcg

SEQ ID NO: 6051029 - DNA, 25 bp, Homo sapien
tacctagcgacggttgtcacgcaat

SEQ ID NO: 6051030 - DNA, 25 bp, Homo sapien
gattaagaatcgtacgaacgctctg

SEQ ID NO: 6051031 - DNA, 25 bp, Homo sapien
ttcgcgaacactatctcgaacgcac

SEQ ID NO: 6051032 - DNA, 25 bp, Homo sapien
taccgcgcgaatgacgcgattacta

SEQ ID NO: 6051033 - DNA, 25 bp, Homo sapien
taccgtagtatcgtgtgctgtacgt

SEQ ID NO: 6051034 - DNA, 25 bp, Homo sapien
aacctgcaaccgatgattgatcgag

SEQ ID NO: 6051035 - DNA, 25 bp, Homo sapien
gagcatactcgttcgggctatccag

SEQ ID NO: 6051036 - DNA, 25 bp, Homo sapien
aggcctcgatcgtaacgtcggataa

SEQ ID NO: 6051037 - DNA, 25 bp, Homo sapien
cgccttatacggtagttgtcgtgtc

SEQ ID NO: 6051038 - DNA, 25 bp, Homo sapien
tacgcactggtttgcgtctgatcgg

SEQ ID NO: 6051039 - DNA, 25 bp, Homo sapien
gtagcgtaagcggtaaaatattcaa

SEQ ID NO: 6051040 - DNA, 25 bp, Homo sapien
agagttcgccttatacggtagttgt

SEQ ID NO: 6051041 - DNA, 25 bp, Homo sapien
gcgtgctacacttaccgttcgcgca

SEQ ID NO: 6051042 - DNA, 25 bp, Homo sapien
ctctagcgtcgatacggcgattaag

SEQ ID NO: 6051043 - DNA, 25 bp, Homo sapien
tacggcgattaagaatcgtacgaac

SEQ ID NO: 6051044 - DNA, 25 bp, Homo sapien
ctggtttgcgtctgatcggtcccga

SEQ ID NO: 6051045 - DNA, 25 bp, Homo sapien
cgctcgtgcctatgcgaagcgagat

SEQ ID NO: 6051046 - DNA, 25 bp, Homo sapien
cagttgtgtcgcgacgtgacatcag

SEQ ID NO: 6051047 - DNA, 25 bp, Homo sapien
gatactaacctgcaaccgatgattg

SEQ ID NO: 6051048 - DNA, 25 bp, Homo sapien
tagttgtcgtgtcgacgtctaacga

SEQ ID NO: 6051049 - DNA, 25 bp, Homo sapien
tgcgaagcgagatctttccttcgta

SEQ ID NO: 6051050 - DNA, 25 bp, Homo sapien
gcgagatctttccttcgtagcgtaa

SEQ ID NO: 6051051 - DNA, 25 bp, Homo sapien
tacacttaccgttcgcgcatcgtgt

SEQ ID NO: 6051052 - DNA, 25 bp, Homo sapien
gcgatatacgaacggccctagttaa

SEQ ID NO: 6051053 - DNA, 25 bp, Homo sapien
gtcgatgtacgagcgctcgtgccta

SEQ ID NO: 6051054 - DNA, 25 bp, Homo sapien
gtttcctacctagcgacggttgtca

SEQ ID NO: 6051055 - DNA, 25 bp, Homo sapien
agttcctgtagttaggctcgtacga

SEQ ID NO: 6051056 - DNA, 25 bp, Homo sapien
acgaacgctctggatcatcagttgt

SEQ ID NO: 6051057 - DNA, 25 bp, Homo sapien
ggtcccgactcaatcacggtgccgt

SEQ ID NO: 6051058 - DNA, 25 bp, Homo sapien
caaccgatgattgatcgagcgtgct

SEQ ID NO: 6051059 - DNA, 25 bp, Homo sapien
tattcaaggccgcgctatacattag

SEQ ID NO: 6051060 - DNA, 25 bp, Homo sapien
tacgagcgctcgtgcctatgcgaag

SEQ ID NO: 6051061 - DNA, 25 bp, Homo sapien
taggctcgtacgaacaagtttccta

SEQ ID NO: 6051062 - DNA, 25 bp, Homo sapien
aaaacaactctagcgtcgatacggc

SEQ ID NO: 6051063 - DNA, 25 bp, Homo sapien
tgcgtctgatcggtcccgactcaat

SEQ ID NO: 6051064 - DNA, 25 bp, Homo sapien
cggcgtcctcatgagcatactcgtt

SEQ ID NO: 6051065 - DNA, 25 bp, Homo sapien
gacatcagagttcgccttatacggt

SEQ ID NO: 6051066 - DNA, 25 bp, Homo sapien
tgtacgttcgcgaacactatctcga

SEQ ID NO: 6051067 - DNA, 25 bp, Homo sapien
cggtcgtacgcactggtttgcgtct

SEQ ID NO: 6051068 - DNA, 25 bp, Homo sapien
ctgatcggtcccgactcaatcacgg

SEQ ID NO: 6051069 - DNA, 25 bp, Homo sapien
gcgaatgacgcgattactacaaaca

SEQ ID NO: 6051070 - DNA, 25 bp, Homo sapien
tgcccaccattgagcggtcggtaca

SEQ ID NO: 6051071 - DNA, 25 bp, Homo sapien
ccattgagcggtcggtacaaaacaa

SEQ ID NO: 6051072 - DNA, 25 bp, Homo sapien
gtcgagtaccgtagtatcgtgtgct

SEQ ID NO: 6051073 - DNA, 25 bp, Homo sapien
ggataatgcccaccattgagcggtc

SEQ ID NO: 6051074 - DNA, 25 bp, Homo sapien
cgatcgtaacgtcggataatgccca

SEQ ID NO: 6051075 - DNA, 25 bp, Homo sapien
taagcggtaaaatattcaaggccgc

SEQ ID NO: 6051076 - DNA, 25 bp, Homo sapien
acgcacgcgatatacgaacggccct

SEQ ID NO: 6051077 - DNA, 25 bp, Homo sapien
agtgaattacactagcgacgtacca

SEQ ID NO: 6051078 - DNA, 25 bp, Homo sapien
tcgtatacgcgtctcacagaagtac

SEQ ID NO: 6051079 - DNA, 25 bp, Homo sapien
ggcctgtaagagtgagtaccgtacg

SEQ ID NO: 6051080 - DNA, 25 bp, Homo sapien
cggtactgcgggcttcatctgacga

SEQ ID NO: 6051081 - DNA, 25 bp, Homo sapien
aggatacctcgcgtgcttatacaca

SEQ ID NO: 6051082 - DNA, 25 bp, Homo sapien
aacgatacgtccagtgaattacact

SEQ ID NO: 6051083 - DNA, 25 bp, Homo sapien
ccacagtactcgaacgaccaggtat

SEQ ID NO: 6051084 - DNA, 25 bp, Homo sapien
cagccgatgtgacggtactgcgggc

SEQ ID NO: 6051085 - DNA, 25 bp, Homo sapien
ggtcgtctgacgataccgcctcagc

SEQ ID NO: 6051086 - DNA, 25 bp, Homo sapien
agtaacgtcacgaacgatacgtcca

SEQ ID NO: 6051087 - DNA, 25 bp, Homo sapien
gctaggatgactgtctgaaggatac

SEQ ID NO: 6051088 - DNA, 25 bp, Homo sapien
tacgtagatcgcccggtggactggc

SEQ ID NO: 6051089 - DNA, 25 bp, Homo sapien
cacgcggttatacgcttaataaaga

SEQ ID NO: 6051090 - DNA, 25 bp, Homo sapien
gttaacgcggtctgagaaccacagt

SEQ ID NO: 6051091 - DNA, 25 bp, Homo sapien
gaaacgtctaagtcgcgggcctgta

SEQ ID NO: 6051092 - DNA, 25 bp, Homo sapien
ggactaggcggctcgtatacgcgtc

SEQ ID NO: 6051093 - DNA, 25 bp, Homo sapien
tactcgcgcgataaactcgttatag

SEQ ID NO: 6051094 - DNA, 25 bp, Homo sapien
gtctgaaggatacctcgcgtgctta

SEQ ID NO: 6051095 - DNA, 25 bp, Homo sapien
cgggaggacgcctattcgtaagtat

SEQ ID NO: 6051096 - DNA, 25 bp, Homo sapien
ccggtggactggcacgcggttatac

SEQ ID NO: 6051097 - DNA, 25 bp, Homo sapien
ttcgacgctaggatgactgtctgaa

SEQ ID NO: 6051098 - DNA, 25 bp, Homo sapien
ttatagcgcggactagtagcggcgt

SEQ ID NO: 6051099 - DNA, 25 bp, Homo sapien
tattcgtaagtatactcgcgcgata

SEQ ID NO: 6051100 - DNA, 25 bp, Homo sapien
tgacgataccgcctcagcccgctat

SEQ ID NO: 6051101 - DNA, 25 bp, Homo sapien
caagaccgggaggacgcctattcgt

SEQ ID NO: 6051102 - DNA, 25 bp, Homo sapien
ctcagcccgctattccggtaagcag

SEQ ID NO: 6051103 - DNA, 25 bp, Homo sapien
ttacactagcgacgtaccatatgcg

SEQ ID NO: 6051104 - DNA, 25 bp, Homo sapien
caagattcgacgctaggatgactgt

SEQ ID NO: 6051105 - DNA, 25 bp, Homo sapien
taagagtgagtaccgtacgtcacaa

SEQ ID NO: 6051106 - DNA, 25 bp, Homo sapien
ctcacagaagtacgagcgatcgtat

SEQ ID NO: 6051107 - DNA, 25 bp, Homo sapien
atcctagcgcgattcgtagaaccgt

SEQ ID NO: 6051108 - DNA, 25 bp, Homo sapien
attaggtgccgcgaggtcgaatcgt

SEQ ID NO: 6051109 - DNA, 25 bp, Homo sapien
tctaagtcgcgggcctgtaagagtg

SEQ ID NO: 6051110 - DNA, 25 bp, Homo sapien
gaagtacgagcgatcgtatgcacga

SEQ ID NO: 6051111 - DNA, 25 bp, Homo sapien
tatgcgacgaagagtaacgtcacga

SEQ ID NO: 6051112 - DNA, 25 bp, Homo sapien
cgcttaataaagatcctagcgcgat

SEQ ID NO: 6051113 - DNA, 25 bp, Homo sapien
tgcgcaacaccaccaagattcgacg

SEQ ID NO: 6051114 - DNA, 25 bp, Homo sapien
atgactgtctgaaggatacctcgcg

SEQ ID NO: 6051115 - DNA, 25 bp, Homo sapien
gttatacgcttaataaagatcctag

SEQ ID NO: 6051116 - DNA, 25 bp, Homo sapien
cttcatctgacgactagttgcgcaa

SEQ ID NO: 6051117 - DNA, 25 bp, Homo sapien
ggcggctcgtatacgcgtctcacag

SEQ ID NO: 6051118 - DNA, 25 bp, Homo sapien
gactggcacgcggttatacgcttaa

SEQ ID NO: 6051119 - DNA, 25 bp, Homo sapien
cgtaccatatgcgaaacgtctaagt

SEQ ID NO: 6051120 - DNA, 25 bp, Homo sapien
gttcgacatataggactaggcggct

SEQ ID NO: 6051121 - DNA, 25 bp, Homo sapien
gttcgacgcgcacctcgtttctata

SEQ ID NO: 6051122 - DNA, 25 bp, Homo sapien
cgtacgtatgcgacgaagagtaacg

SEQ ID NO: 6051123 - DNA, 25 bp, Homo sapien
acgcgtctcacagaagtacgagcga

SEQ ID NO: 6051124 - DNA, 25 bp, Homo sapien
tacgtcacaagaccgggaggacgcc

SEQ ID NO: 6051125 - DNA, 25 bp, Homo sapien
cgggtttaagcggttcgacatatag

SEQ ID NO: 6051126 - DNA, 25 bp, Homo sapien
acgaccaggtatttcctacgtagat

SEQ ID NO: 6051127 - DNA, 25 bp, Homo sapien
ataaagatcctagcgcgattcgtag

SEQ ID NO: 6051128 - DNA, 25 bp, Homo sapien
gcgaggtcgaatcgtacgtatgcga

SEQ ID NO: 6051129 - DNA, 25 bp, Homo sapien
tgagtaccgtacgtcacaagaccgg

SEQ ID NO: 6051130 - DNA, 25 bp, Homo sapien
tagcgacgtaccatatgcgaaacgt

SEQ ID NO: 6051131 - DNA, 25 bp, Homo sapien
gcgcgattcgtagaaccgtcactag

SEQ ID NO: 6051132 - DNA, 25 bp, Homo sapien
aaactcgttatagcgcggactagta

SEQ ID NO: 6051133 - DNA, 25 bp, Homo sapien
tacacacgttaacgcggtctgagaa

SEQ ID NO: 6051134 - DNA, 25 bp, Homo sapien
taagcggttcgacatataggactag

SEQ ID NO: 6051135 - DNA, 25 bp, Homo sapien
gtcacgaacgatacgtccagtgaat

SEQ ID NO: 6051136 - DNA, 25 bp, Homo sapien
tattccggtaagcagccgatgtgac

SEQ ID NO: 6051137 - DNA, 25 bp, Homo sapien
gaaccgtcactagttcgacgcgcac

SEQ ID NO: 6051138 - DNA, 25 bp, Homo sapien
ttctatattaggtgccgcgaggtcg

SEQ ID NO: 6051139 - DNA, 25 bp, Homo sapien
tgcgggcttcatctgacgactagtt

SEQ ID NO: 6051140 - DNA, 25 bp, Homo sapien
gacgcctattcgtaagtatactcgc

SEQ ID NO: 6051141 - DNA, 25 bp, Homo sapien
ccaggtatttcctacgtagatcgcc

SEQ ID NO: 6051142 - DNA, 25 bp, Homo sapien
cgcggactagtagcggcgtctttat

SEQ ID NO: 6051143 - DNA, 25 bp, Homo sapien
gtgccgcgaggtcgaatcgtacgta

SEQ ID NO: 6051144 - DNA, 25 bp, Homo sapien
atgtgacggtactgcgggcttcatc

SEQ ID NO: 6051145 - DNA, 25 bp, Homo sapien
tgcttatacacacgttaacgcggtc

SEQ ID NO: 6051146 - DNA, 25 bp, Homo sapien
atatgcgaaacgtctaagtcgcggg

SEQ ID NO: 6051147 - DNA, 25 bp, Homo sapien
ggtaagcagccgatgtgacggtact

SEQ ID NO: 6051148 - DNA, 25 bp, Homo sapien
ttcgtagaaccgtcactagttcgac

SEQ ID NO: 6051149 - DNA, 25 bp, Homo sapien
ctagtagcggcgtctttatcgggtt

SEQ ID NO: 6051150 - DNA, 25 bp, Homo sapien
gataccgcctcagcccgctattccg

SEQ ID NO: 6051151 - DNA, 25 bp, Homo sapien
acgtccagtgaattacactagcgac

SEQ ID NO: 6051152 - DNA, 25 bp, Homo sapien
cccgctattccggtaagcagccgat

SEQ ID NO: 6051153 - DNA, 25 bp, Homo sapien
atttcctacgtagatcgcccggtgg

SEQ ID NO: 6051154 - DNA, 25 bp, Homo sapien
gatcgcccggtggactggcacgcgg

SEQ ID NO: 6051155 - DNA, 25 bp, Homo sapien
ctgacgactagttgcgcaacaccac

SEQ ID NO: 6051156 - DNA, 25 bp, Homo sapien
caccaccaagattcgacgctaggat

SEQ ID NO: 6051157 - DNA, 25 bp, Homo sapien
cctcgcgtgcttatacacacgttaa

SEQ ID NO: 6051158 - DNA, 25 bp, Homo sapien
cctcgtttctatattaggtgccgcg

SEQ ID NO: 6051159 - DNA, 25 bp, Homo sapien
tcgcgggcctgtaagagtgagtacc

SEQ ID NO: 6051160 - DNA, 25 bp, Homo sapien
cgcgataaactcgttatagcgcgga

SEQ ID NO: 6051161 - DNA, 25 bp, Homo sapien
tactcgaacgaccaggtatttccta

SEQ ID NO: 6051162 - DNA, 25 bp, Homo sapien
tcgaatcgtacgtatgcgacgaaga

SEQ ID NO: 6051163 - DNA, 25 bp, Homo sapien
tcactagttcgacgcgcacctcgtt

SEQ ID NO: 6051164 - DNA, 25 bp, Homo sapien
taagtatactcgcgcgataaactcg

SEQ ID NO: 6051165 - DNA, 25 bp, Homo sapien
gcggtctgagaaccacagtactcga

SEQ ID NO: 6051166 - DNA, 25 bp, Homo sapien
acgaagagtaacgtcacgaacgata

SEQ ID NO: 6051167 - DNA, 25 bp, Homo sapien
tgagaaccacagtactcgaacgacc

SEQ ID NO: 6051168 - DNA, 25 bp, Homo sapien
catataggactaggcggctcgtata

SEQ ID NO: 6051169 - DNA, 25 bp, Homo sapien
actagttgcgcaacaccaccaagat

SEQ ID NO: 6051170 - DNA, 25 bp, Homo sapien
cgcgcacctcgtttctatattaggt

SEQ ID NO: 6051171 - DNA, 25 bp, Homo sapien
gtagtatcccgggtgaccatggcgt

SEQ ID NO: 6051172 - DNA, 25 bp, Homo sapien
cgttagacgactcggcgttccgagc

SEQ ID NO: 6051173 - DNA, 25 bp, Homo sapien
tatcggtcggccgagatccggcatt

SEQ ID NO: 6051174 - DNA, 25 bp, Homo sapien
gtagtgtccattccagctcgcgcac

SEQ ID NO: 6051175 - DNA, 25 bp, Homo sapien
gtacgattagtaagattcttgatac

SEQ ID NO: 6051176 - DNA, 25 bp, Homo sapien
caaatgctcgcggtaagcgtagtgt

SEQ ID NO: 6051177 - DNA, 25 bp, Homo sapien
tatacagaccgcgtcgacatgcctt

SEQ ID NO: 6051178 - DNA, 25 bp, Homo sapien
tccattccagctcgcgcacgattaa

SEQ ID NO: 6051179 - DNA, 25 bp, Homo sapien
gtagcataccgggtcctacaggata

SEQ ID NO: 6051180 - DNA, 25 bp, Homo sapien
aaagatatacacgtatcgagaacga

SEQ ID NO: 6051181 - DNA, 25 bp, Homo sapien
cgtactaccgcacaaatgctcgcgg

SEQ ID NO: 6051182 - DNA, 25 bp, Homo sapien
acttcatagcgcgatataacgttgt

SEQ ID NO: 6051183 - DNA, 25 bp, Homo sapien
ctgttgagagatgcgtactaccgca

SEQ ID NO: 6051184 - DNA, 25 bp, Homo sapien
aaccgcgcgttactgtcactgttga

SEQ ID NO: 6051185 - DNA, 25 bp, Homo sapien
gccgctgaacgcgtacgattagtaa

SEQ ID NO: 6051186 - DNA, 25 bp, Homo sapien
tacctaattcgcgtggcacagtgac

SEQ ID NO: 6051187 - DNA, 25 bp, Homo sapien
cgtcgacatgcctttttaatcgaaa

SEQ ID NO: 6051188 - DNA, 25 bp, Homo sapien
ttagtaagattcttgatactattgc

SEQ ID NO: 6051189 - DNA, 25 bp, Homo sapien
atcgaaagctcggaccatcccttcg

SEQ ID NO: 6051190 - DNA, 25 bp, Homo sapien
agaacgaggagatgatcgtacctaa

SEQ ID NO: 6051191 - DNA, 25 bp, Homo sapien
atcccgggtgaccatggcgtgtcgt

SEQ ID NO: 6051192 - DNA, 25 bp, Homo sapien
ctcgagcggcaatagtttcgaagcg

SEQ ID NO: 6051193 - DNA, 25 bp, Homo sapien
ggttccaaccgcgcgttactgtcac

SEQ ID NO: 6051194 - DNA, 25 bp, Homo sapien
ccggagcagagctatacagaccgcg

SEQ ID NO: 6051195 - DNA, 25 bp, Homo sapien
acgtaacccataatctatatacgtc

SEQ ID NO: 6051196 - DNA, 25 bp, Homo sapien
cccataatctatatacgtccggagc

SEQ ID NO: 6051197 - DNA, 25 bp, Homo sapien
accgcacaaatgctcgcggtaagcg

SEQ ID NO: 6051198 - DNA, 25 bp, Homo sapien
ctcgcggtaagcgtagtgtccattc

SEQ ID NO: 6051199 - DNA, 25 bp, Homo sapien
ggcgttccgagcgcgactacgtaac

SEQ ID NO: 6051200 - DNA, 25 bp, Homo sapien
tagtttcgaagcgcgtataccggtc

SEQ ID NO: 6051201 - DNA, 25 bp, Homo sapien
ctgtcactgttgagagatgcgtact

SEQ ID NO: 6051202 - DNA, 25 bp, Homo sapien
aattcgcgtggcacagtgacttcat

SEQ ID NO: 6051203 - DNA, 25 bp, Homo sapien
cgatgatagtgtggcaaggactgca

SEQ ID NO: 6051204 - DNA, 25 bp, Homo sapien
atacgtccggagcagagctatacag

SEQ ID NO: 6051205 - DNA, 25 bp, Homo sapien
tttttaatcgaaagctcggaccatc

SEQ ID NO: 6051206 - DNA, 25 bp, Homo sapien
gtatcgagaacgaggagatgatcgt

SEQ ID NO: 6051207 - DNA, 25 bp, Homo sapien
gtcggccgagatccggcattcgcgt

SEQ ID NO: 6051208 - DNA, 25 bp, Homo sapien
cattccatccgcgtagtatcccggg

SEQ ID NO: 6051209 - DNA, 25 bp, Homo sapien
gtacaatcactaaggttccaaccgc

SEQ ID NO: 6051210 - DNA, 25 bp, Homo sapien
actgcatagtacgtcgccaaagata

SEQ ID NO: 6051211 - DNA, 25 bp, Homo sapien
aggagatgatcgtacctaattcgcg

SEQ ID NO: 6051212 - DNA, 25 bp, Homo sapien
cgtgtcgtacgctaaccatacccga

SEQ ID NO: 6051213 - DNA, 25 bp, Homo sapien
cggcaatagtttcgaagcgcgtata

SEQ ID NO: 6051214 - DNA, 25 bp, Homo sapien
gcgggctgagacgatatacgatgat

SEQ ID NO: 6051215 - DNA, 25 bp, Homo sapien
catgcctttttaatcgaaagctcgg

SEQ ID NO: 6051216 - DNA, 25 bp, Homo sapien
cattcgcgttagacgactcggcgtt

SEQ ID NO: 6051217 - DNA, 25 bp, Homo sapien
agaccgcgtcgacatgcctttttaa

SEQ ID NO: 6051218 - DNA, 25 bp, Homo sapien
cagagctatacagaccgcgtcgaca

SEQ ID NO: 6051219 - DNA, 25 bp, Homo sapien
ggtgaccatggcgtgtcgtacgcta

SEQ ID NO: 6051220 - DNA, 25 bp, Homo sapien
ccatggcgtgtcgtacgctaaccat

SEQ ID NO: 6051221 - DNA, 25 bp, Homo sapien
cgtggcacagtgacttcatagcgcg

SEQ ID NO: 6051222 - DNA, 25 bp, Homo sapien
tctcgcgtacaatcactaaggttcc

SEQ ID NO: 6051223 - DNA, 25 bp, Homo sapien
aagattcttgatactattgcgcggg

SEQ ID NO: 6051224 - DNA, 25 bp, Homo sapien
gtaagcgtagtgtccattccagctc

SEQ ID NO: 6051225 - DNA, 25 bp, Homo sapien
cgttgtagcccgttacggacggcat

SEQ ID NO: 6051226 - DNA, 25 bp, Homo sapien
atacacgtatcgagaacgaggagat

SEQ ID NO: 6051227 - DNA, 25 bp, Homo sapien
ggtcctacaggatatcggtcggccg

SEQ ID NO: 6051228 - DNA, 25 bp, Homo sapien
ttacggacggcatactcgtctcgcg

SEQ ID NO: 6051229 - DNA, 25 bp, Homo sapien
gtcgccaaagatatacacgtatcga

SEQ ID NO: 6051230 - DNA, 25 bp, Homo sapien
gcgactacgtaacccataatctata

SEQ ID NO: 6051231 - DNA, 25 bp, Homo sapien
atctatatacgtccggagcagagct

SEQ ID NO: 6051232 - DNA, 25 bp, Homo sapien
attaatcattccatccgcgtagtat

SEQ ID NO: 6051233 - DNA, 25 bp, Homo sapien
gtaacgtctcgagcggcaatagttt

SEQ ID NO: 6051234 - DNA, 25 bp, Homo sapien
cgaagcgcgtataccggtcgccgct

SEQ ID NO: 6051235 - DNA, 25 bp, Homo sapien
agcccgttacggacggcatactcgt

SEQ ID NO: 6051236 - DNA, 25 bp, Homo sapien
acggcatactcgtctcgcgtacaat

SEQ ID NO: 6051237 - DNA, 25 bp, Homo sapien
tgagacgatatacgatgatagtgtg

SEQ ID NO: 6051238 - DNA, 25 bp, Homo sapien
gcaaggactgcatagtacgtcgcca

SEQ ID NO: 6051239 - DNA, 25 bp, Homo sapien
cttgatactattgcgcgggctgaga

SEQ ID NO: 6051240 - DNA, 25 bp, Homo sapien
acaggatatcggtcggccgagatcc

SEQ ID NO: 6051241 - DNA, 25 bp, Homo sapien
atccgcgtagtatcccgggtgacca

SEQ ID NO: 6051242 - DNA, 25 bp, Homo sapien
tattgcgcgggctgagacgatatac

SEQ ID NO: 6051243 - DNA, 25 bp, Homo sapien
cgactcggcgttccgagcgcgacta

SEQ ID NO: 6051244 - DNA, 25 bp, Homo sapien
gaccatcccttcgtaacgtctcgag

SEQ ID NO: 6051245 - DNA, 25 bp, Homo sapien
gagatgcgtactaccgcacaaatgc

SEQ ID NO: 6051246 - DNA, 25 bp, Homo sapien
ataccgggtcctacaggatatcggt

SEQ ID NO: 6051247 - DNA, 25 bp, Homo sapien
atagcgcgatataacgttgtagccc

SEQ ID NO: 6051248 - DNA, 25 bp, Homo sapien
tagtacgtcgccaaagatatacacg

SEQ ID NO: 6051249 - DNA, 25 bp, Homo sapien
cgcacgattaatcattccatccgcg

SEQ ID NO: 6051250 - DNA, 25 bp, Homo sapien
ccgagcgcgactacgtaacccataa

SEQ ID NO: 6051251 - DNA, 25 bp, Homo sapien
ccgagatccggcattcgcgttagac

SEQ ID NO: 6051252 - DNA, 25 bp, Homo sapien
tccggcattcgcgttagacgactcg

SEQ ID NO: 6051253 - DNA, 25 bp, Homo sapien
cgatataacgttgtagcccgttacg

SEQ ID NO: 6051254 - DNA, 25 bp, Homo sapien
tgatcgtacctaattcgcgtggcac

SEQ ID NO: 6051255 - DNA, 25 bp, Homo sapien
agtgtggcaaggactgcatagtacg

SEQ ID NO: 6051256 - DNA, 25 bp, Homo sapien
tactcgtctcgcgtacaatcactaa

SEQ ID NO: 6051257 - DNA, 25 bp, Homo sapien
gaacgcgtacgattagtaagattct

SEQ ID NO: 6051258 - DNA, 25 bp, Homo sapien
ccggtcgccgctgaacgcgtacgat

SEQ ID NO: 6051259 - DNA, 25 bp, Homo sapien
gcgtataccggtcgccgctgaacgc

SEQ ID NO: 6051260 - DNA, 25 bp, Homo sapien
agctcggaccatcccttcgtaacgt

SEQ ID NO: 6051261 - DNA, 25 bp, Homo sapien
agctcgcgcacgattaatcattcca

SEQ ID NO: 6051262 - DNA, 25 bp, Homo sapien
acagtgacttcatagcgcgatataa

SEQ ID NO: 6051263 - DNA, 25 bp, Homo sapien
cccttcgtaacgtctcgagcggcaa

SEQ ID NO: 6051264 - DNA, 25 bp, Homo sapien
gatatacgatgatagtgtggcaagg

SEQ ID NO: 6051265 - DNA, 25 bp, Homo sapien
tcactaaggttccaaccgcgcgtta

SEQ ID NO: 6051266 - DNA, 25 bp, Homo sapien
gcgttactgtcactgttgagagatg

SEQ ID NO: 6051267 - DNA, 25 bp, Homo sapien
tgttggcaagactaactacgacgcg

SEQ ID NO: 6051268 - DNA, 25 bp, Homo sapien
taactacgacgcgttgactaactgc

SEQ ID NO: 6051269 - DNA, 25 bp, Homo sapien
gcgtcgagacgcgtcggctttcgtc

SEQ ID NO: 6051270 - DNA, 25 bp, Homo sapien
tatagcagctagatcgaagcgacat

SEQ ID NO: 6051271 - DNA, 25 bp, Homo sapien
gaagctgttcttgcgtcgagacgcg

SEQ ID NO: 6051272 - DNA, 25 bp, Homo sapien
cgtaccgcagcttacactgacgaag

SEQ ID NO: 6051273 - DNA, 25 bp, Homo sapien
gggatctagatggaatcgctagaaa

SEQ ID NO: 6051274 - DNA, 25 bp, Homo sapien
gacactactggaccgcgaccgatat

SEQ ID NO: 6051275 - DNA, 25 bp, Homo sapien
gcaccgagtgtacgatcggacaaat

SEQ ID NO: 6051276 - DNA, 25 bp, Homo sapien
agacgaactgaacttcccgacgcaa

SEQ ID NO: 6051277 - DNA, 25 bp, Homo sapien
gacgaagtacgacgggatctagatg

SEQ ID NO: 6051278 - DNA, 25 bp, Homo sapien
caatgataagtgtacgatcagacgg

SEQ ID NO: 6051279 - DNA, 25 bp, Homo sapien
catgtgcgccgtataagacaatgat

SEQ ID NO: 6051280 - DNA, 25 bp, Homo sapien
cagaccgaagctgttcttgcgtcga

SEQ ID NO: 6051281 - DNA, 25 bp, Homo sapien
actgaacttcccgacgcaacgaact

SEQ ID NO: 6051282 - DNA, 25 bp, Homo sapien
ccgcgaccgatatgaagaatccaaa

SEQ ID NO: 6051283 - DNA, 25 bp, Homo sapien
gcgtaggtgtactacgatgcgcgac

SEQ ID NO: 6051284 - DNA, 25 bp, Homo sapien
tagatggaatcgctagaaatattgc

SEQ ID NO: 6051285 - DNA, 25 bp, Homo sapien
gagacgcgtcggctttcgtctcgct

SEQ ID NO: 6051286 - DNA, 25 bp, Homo sapien
cgcaaccgactttgtatcctaaccg

SEQ ID NO: 6051287 - DNA, 25 bp, Homo sapien
acgatgcgcgaccaattctcccgga

SEQ ID NO: 6051288 - DNA, 25 bp, Homo sapien
ctaaccggtatatcgcaagaccttc

SEQ ID NO: 6051289 - DNA, 25 bp, Homo sapien
tggtagtagatggttaacgtaccgc

SEQ ID NO: 6051290 - DNA, 25 bp, Homo sapien
ccgtgcaaaagcgatatacgcgttc

SEQ ID NO: 6051291 - DNA, 25 bp, Homo sapien
tacactgacgaagtacgacgggatc

SEQ ID NO: 6051292 - DNA, 25 bp, Homo sapien
caattctcccggatcgcacgctatg

SEQ ID NO: 6051293 - DNA, 25 bp, Homo sapien
cgccgtataagacaatgataagtgt

SEQ ID NO: 6051294 - DNA, 25 bp, Homo sapien
agtgtgtgacgaccgcgtacgatag

SEQ ID NO: 6051295 - DNA, 25 bp, Homo sapien
gtatcctaaccggtatatcgcaaga

SEQ ID NO: 6051296 - DNA, 25 bp, Homo sapien
ctcccggatcgcacgctatggtagt

SEQ ID NO: 6051297 - DNA, 25 bp, Homo sapien
ccggacgtaatctctgggcaccgag

SEQ ID NO: 6051298 - DNA, 25 bp, Homo sapien
gtacgacagaccgaagctgttcttg

SEQ ID NO: 6051299 - DNA, 25 bp, Homo sapien
gatatacgcgttcggtctatccacc

SEQ ID NO: 6051300 - DNA, 25 bp, Homo sapien
accttttatagcagctagatcgaag

SEQ ID NO: 6051301 - DNA, 25 bp, Homo sapien
taactgccggacgtaatctctgggc

SEQ ID NO: 6051302 - DNA, 25 bp, Homo sapien
ataagacaatgataagtgtacgatc

SEQ ID NO: 6051303 - DNA, 25 bp, Homo sapien
gactttgtatcctaaccggtatatc

SEQ ID NO: 6051304 - DNA, 25 bp, Homo sapien
aatattgctcggcatgtgcgccgta

SEQ ID NO: 6051305 - DNA, 25 bp, Homo sapien
gttcttgcgtcgagacgcgtcggct

SEQ ID NO: 6051306 - DNA, 25 bp, Homo sapien
acgctatggtagtagatggttaacg

SEQ ID NO: 6051307 - DNA, 25 bp, Homo sapien
acgaactgttggcaagactaactac

SEQ ID NO: 6051308 - DNA, 25 bp, Homo sapien
atcgaagcgacatccgttcactagt

SEQ ID NO: 6051309 - DNA, 25 bp, Homo sapien
ccgaggtacgacccgtgcaaaagcg

SEQ ID NO: 6051310 - DNA, 25 bp, Homo sapien
gcagcttacactgacgaagtacgac

SEQ ID NO: 6051311 - DNA, 25 bp, Homo sapien
agctagatcgaagcgacatccgttc

SEQ ID NO: 6051312 - DNA, 25 bp, Homo sapien
tagatggttaacgtaccgcagctta

SEQ ID NO: 6051313 - DNA, 25 bp, Homo sapien
tatgcgcggtttgcgtaggtgtact

SEQ ID NO: 6051314 - DNA, 25 bp, Homo sapien
gcgagatatataagtgtgtgacgac

SEQ ID NO: 6051315 - DNA, 25 bp, Homo sapien
cgatagaccttttatagcagctaga

SEQ ID NO: 6051316 - DNA, 25 bp, Homo sapien
gacgcgtggggctattgagcgagat

SEQ ID NO: 6051317 - DNA, 25 bp, Homo sapien
tgacgaccgcgtacgatagaccttt

SEQ ID NO: 6051318 - DNA, 25 bp, Homo sapien
ggtatatcgcaagaccttcgcccga

SEQ ID NO: 6051319 - DNA, 25 bp, Homo sapien
ttcgcccgaggtacgacccgtgcaa

SEQ ID NO: 6051320 - DNA, 25 bp, Homo sapien
gacgcaacgaactgttggcaagact

SEQ ID NO: 6051321 - DNA, 25 bp, Homo sapien
gttaacgtaccgcagcttacactga

SEQ ID NO: 6051322 - DNA, 25 bp, Homo sapien
tattgagcgagatatataagtgtgt

SEQ ID NO: 6051323 - DNA, 25 bp, Homo sapien
gctagaaatattgctcggcatgtgc

SEQ ID NO: 6051324 - DNA, 25 bp, Homo sapien
tgaagaatccaaagccgttaaagac

SEQ ID NO: 6051325 - DNA, 25 bp, Homo sapien
ggaatcgctagaaatattgctcggc

SEQ ID NO: 6051326 - DNA, 25 bp, Homo sapien
gatcgcacgctatggtagtagatgg

SEQ ID NO: 6051327 - DNA, 25 bp, Homo sapien
gcgacatccgttcactagtatgcgc

SEQ ID NO: 6051328 - DNA, 25 bp, Homo sapien
cgcgtacgatagaccttttatagca

SEQ ID NO: 6051329 - DNA, 25 bp, Homo sapien
cgttgactaactgccggacgtaatc

SEQ ID NO: 6051330 - DNA, 25 bp, Homo sapien
cgatcggacaaattacagcacgggt

SEQ ID NO: 6051331 - DNA, 25 bp, Homo sapien
actggaccgcgaccgatatgaagaa

SEQ ID NO: 6051332 - DNA, 25 bp, Homo sapien
tacgacgggatctagatggaatcgc

SEQ ID NO: 6051333 - DNA, 25 bp, Homo sapien
tccaaagccgttaaagacgaactga

SEQ ID NO: 6051334 - DNA, 25 bp, Homo sapien
ttacagcacgggtcgcaaccgactt

SEQ ID NO: 6051335 - DNA, 25 bp, Homo sapien
agtgtacgatcggacaaattacagc

SEQ ID NO: 6051336 - DNA, 25 bp, Homo sapien
gtgtactacgatgcgcgaccaattc

SEQ ID NO: 6051337 - DNA, 25 bp, Homo sapien
tcgcaagaccttcgcccgaggtacg

SEQ ID NO: 6051338 - DNA, 25 bp, Homo sapien
ccgatatgaagaatccaaagccgtt

SEQ ID NO: 6051339 - DNA, 25 bp, Homo sapien
cggtttgcgtaggtgtactacgatg

SEQ ID NO: 6051340 - DNA, 25 bp, Homo sapien
ctttcgtctcgctatgacgcgtggg

SEQ ID NO: 6051341 - DNA, 25 bp, Homo sapien
acgacgcgttgactaactgccggac

SEQ ID NO: 6051342 - DNA, 25 bp, Homo sapien
cagacggacactactggaccgcgac

SEQ ID NO: 6051343 - DNA, 25 bp, Homo sapien
tatataagtgtgtgacgaccgcgta

SEQ ID NO: 6051344 - DNA, 25 bp, Homo sapien
ctctgggcaccgagtgtacgatcgg

SEQ ID NO: 6051345 - DNA, 25 bp, Homo sapien
taagtgtacgatcagacggacacta

SEQ ID NO: 6051346 - DNA, 25 bp, Homo sapien
gtaatctctgggcaccgagtgtacg

SEQ ID NO: 6051347 - DNA, 25 bp, Homo sapien
tacgacccgtgcaaaagcgatatac

SEQ ID NO: 6051348 - DNA, 25 bp, Homo sapien
cacgggtcgcaaccgactttgtatc

SEQ ID NO: 6051349 - DNA, 25 bp, Homo sapien
cgtcggctttcgtctcgctatgacg

SEQ ID NO: 6051350 - DNA, 25 bp, Homo sapien
cttcccgacgcaacgaactgttggc

SEQ ID NO: 6051351 - DNA, 25 bp, Homo sapien
tccgttcactagtatgcgcggtttg

SEQ ID NO: 6051352 - DNA, 25 bp, Homo sapien
tggggctattgagcgagatatataa

SEQ ID NO: 6051353 - DNA, 25 bp, Homo sapien
tgctcggcatgtgcgccgtataaga

SEQ ID NO: 6051354 - DNA, 25 bp, Homo sapien
tacgatcagacggacactactggac

SEQ ID NO: 6051355 - DNA, 25 bp, Homo sapien
cactagtatgcgcggtttgcgtagg

SEQ ID NO: 6051356 - DNA, 25 bp, Homo sapien
caagactaactacgacgcgttgact

SEQ ID NO: 6051357 - DNA, 25 bp, Homo sapien
aaaagcgatatacgcgttcggtcta

SEQ ID NO: 6051358 - DNA, 25 bp, Homo sapien
gacaaattacagcacgggtcgcaac

SEQ ID NO: 6051359 - DNA, 25 bp, Homo sapien
cgcgaccaattctcccggatcgcac

SEQ ID NO: 6051360 - DNA, 25 bp, Homo sapien
tattgcgaacgtaacggctgtatgt

SEQ ID NO: 6051361 - DNA, 25 bp, Homo sapien
atatcgcgaagggaatctataccga

SEQ ID NO: 6051362 - DNA, 25 bp, Homo sapien
gcgacgacgaccgtagacttgtgcc

SEQ ID NO: 6051363 - DNA, 25 bp, Homo sapien
aattcaatgagattacgcgtactag

SEQ ID NO: 6051364 - DNA, 25 bp, Homo sapien
ttgtgccatcgatggcgtatcgcgt

SEQ ID NO: 6051365 - DNA, 25 bp, Homo sapien
actgtagatgcgaagtatatcggtc

SEQ ID NO: 6051366 - DNA, 25 bp, Homo sapien
ataccgatagctagccgggtgaaag

SEQ ID NO: 6051367 - DNA, 25 bp, Homo sapien
accgatccgcgggatcaaatacgca

SEQ ID NO: 6051368 - DNA, 25 bp, Homo sapien
gaatctataccgatagctagccggg

SEQ ID NO: 6051369 - DNA, 25 bp, Homo sapien
gtaggcattatatatcgcgaaggga

SEQ ID NO: 6051370 - DNA, 25 bp, Homo sapien
ttacgcgtactagacgacctgcaga

SEQ ID NO: 6051371 - DNA, 25 bp, Homo sapien
ctggcgaagctggtacgtagatccg

SEQ ID NO: 6051372 - DNA, 25 bp, Homo sapien
cgtaacaattcaatgagattacgcg

SEQ ID NO: 6051373 - DNA, 25 bp, Homo sapien
cacgcgcgaaacgatgaaagatgtt

SEQ ID NO: 6051374 - DNA, 25 bp, Homo sapien
agaaacatgtatcgcaccggaaaag

SEQ ID NO: 6051375 - DNA, 25 bp, Homo sapien
gacgcgcggcgcgttggtccagtag

SEQ ID NO: 6051376 - DNA, 25 bp, Homo sapien
gtacccacgcgcgaaacgatgaaag

SEQ ID NO: 6051377 - DNA, 25 bp, Homo sapien
gtattaatcaccacgcgtaatctag

SEQ ID NO: 6051378 - DNA, 25 bp, Homo sapien
gtagccagactatcgcacgttgaac

SEQ ID NO: 6051379 - DNA, 25 bp, Homo sapien
gacgacctgcagattgcgtccgata

SEQ ID NO: 6051380 - DNA, 25 bp, Homo sapien
cgatgcaacaaggtagcgcggacat

SEQ ID NO: 6051381 - DNA, 25 bp, Homo sapien
acgcgtaatctaggaagagtagcca

SEQ ID NO: 6051382 - DNA, 25 bp, Homo sapien
aatctaggaagagtagccagactat

SEQ ID NO: 6051383 - DNA, 25 bp, Homo sapien
ttcgctatgcggcggtaacaattga

SEQ ID NO: 6051384 - DNA, 25 bp, Homo sapien
gtagacttgtgccatcgatggcgta

SEQ ID NO: 6051385 - DNA, 25 bp, Homo sapien
atcaccacgcgtaatctaggaagag

SEQ ID NO: 6051386 - DNA, 25 bp, Homo sapien
cgcggcagtcgcgtaacaattcaat

SEQ ID NO: 6051387 - DNA, 25 bp, Homo sapien
cgaagggaatctataccgatagcta

SEQ ID NO: 6051388 - DNA, 25 bp, Homo sapien
ggaagagtagccagactatcgcacg

SEQ ID NO: 6051389 - DNA, 25 bp, Homo sapien
gtccagttcgctatgcggcggtaac

SEQ ID NO: 6051390 - DNA, 25 bp, Homo sapien
tgctaacggtgcgtcgtctgatctg

SEQ ID NO: 6051391 - DNA, 25 bp, Homo sapien
tacgtagatccggtattaatcacca

SEQ ID NO: 6051392 - DNA, 25 bp, Homo sapien
gcgtacaaccgtctggcgaagctgg

SEQ ID NO: 6051393 - DNA, 25 bp, Homo sapien
aatacgcaacggtcagaaactgtaa

SEQ ID NO: 6051394 - DNA, 25 bp, Homo sapien
ttacccactgtagatgcgaagtata

SEQ ID NO: 6051395 - DNA, 25 bp, Homo sapien
aagtatatcggtcgcgtagtgctaa

SEQ ID NO: 6051396 - DNA, 25 bp, Homo sapien
aaaagtacccacgcgcgaaacgatg

SEQ ID NO: 6051397 - DNA, 25 bp, Homo sapien
catttgacgcgcggcgcgttggtcc

SEQ ID NO: 6051398 - DNA, 25 bp, Homo sapien
gcggtaacaattgactcgactagcg

SEQ ID NO: 6051399 - DNA, 25 bp, Homo sapien
ctgcagattgcgtccgataccgatc

SEQ ID NO: 6051400 - DNA, 25 bp, Homo sapien
aacggctgtatgtccagttcgctat

SEQ ID NO: 6051401 - DNA, 25 bp, Homo sapien
catcgatggcgtatcgcgttatgcg

SEQ ID NO: 6051402 - DNA, 25 bp, Homo sapien
ggctgtgtaggcattatatatcgcg

SEQ ID NO: 6051403 - DNA, 25 bp, Homo sapien
gtactagacgacctgcagattgcgt

SEQ ID NO: 6051404 - DNA, 25 bp, Homo sapien
cataaggcgacgacgaccgtagact

SEQ ID NO: 6051405 - DNA, 25 bp, Homo sapien
atcggtcgcgtagtgctaacggtgc

SEQ ID NO: 6051406 - DNA, 25 bp, Homo sapien
aacaaggtagcgcggacattaccca

SEQ ID NO: 6051407 - DNA, 25 bp, Homo sapien
aacggtcagaaactgtaaattcgcg

SEQ ID NO: 6051408 - DNA, 25 bp, Homo sapien
aattcgcgtacgggctgtgtaggca

SEQ ID NO: 6051409 - DNA, 25 bp, Homo sapien
gcaccggaaaagtacccacgcgcga

SEQ ID NO: 6051410 - DNA, 25 bp, Homo sapien
gtgaaagaaacatgtatcgcaccgg

SEQ ID NO: 6051411 - DNA, 25 bp, Homo sapien
cgcgtactatatccataaggcgacg

SEQ ID NO: 6051412 - DNA, 25 bp, Homo sapien
gtagcgcggacattacccactgtag

SEQ ID NO: 6051413 - DNA, 25 bp, Homo sapien
agatgttattgcgaacgtaacggct

SEQ ID NO: 6051414 - DNA, 25 bp, Homo sapien
cgttggtccagtaggcgacgcgtcc

SEQ ID NO: 6051415 - DNA, 25 bp, Homo sapien
cgtacgggctgtgtaggcattatat

SEQ ID NO: 6051416 - DNA, 25 bp, Homo sapien
ggatcaaatacgcaacggtcagaaa

SEQ ID NO: 6051417 - DNA, 25 bp, Homo sapien
cagaaactgtaaattcgcgtacggg

SEQ ID NO: 6051418 - DNA, 25 bp, Homo sapien
gcgtagtgctaacggtgcgtcgtct

SEQ ID NO: 6051419 - DNA, 25 bp, Homo sapien
ctgtaaattcgcgtacgggctgtgt

SEQ ID NO: 6051420 - DNA, 25 bp, Homo sapien
tgtatgtccagttcgctatgcggcg

SEQ ID NO: 6051421 - DNA, 25 bp, Homo sapien
gatgaaagatgttattgcgaacgta

SEQ ID NO: 6051422 - DNA, 25 bp, Homo sapien
gactagcgatgcaacaaggtagcgc

SEQ ID NO: 6051423 - DNA, 25 bp, Homo sapien
attgcgtccgataccgatccgcggg

SEQ ID NO: 6051424 - DNA, 25 bp, Homo sapien
agactatcgcacgttgaaccgcggc

SEQ ID NO: 6051425 - DNA, 25 bp, Homo sapien
cggacattacccactgtagatgcga

SEQ ID NO: 6051426 - DNA, 25 bp, Homo sapien
cggtgcgtcgtctgatctgtcgccg

SEQ ID NO: 6051427 - DNA, 25 bp, Homo sapien
cagtcgcgtaacaattcaatgagat

SEQ ID NO: 6051428 - DNA, 25 bp, Homo sapien
tccgcgggatcaaatacgcaacggt

SEQ ID NO: 6051429 - DNA, 25 bp, Homo sapien
tgatctgtcgccgcgtactatatcc

SEQ ID NO: 6051430 - DNA, 25 bp, Homo sapien
acaattgactcgactagcgatgcaa

SEQ ID NO: 6051431 - DNA, 25 bp, Homo sapien
acgcgtccaaaagcctatcgcgtac

SEQ ID NO: 6051432 - DNA, 25 bp, Homo sapien
taggcgacgcgtccaaaagcctatc

SEQ ID NO: 6051433 - DNA, 25 bp, Homo sapien
gtcgtctgatctgtcgccgcgtact

SEQ ID NO: 6051434 - DNA, 25 bp, Homo sapien
gatccggtattaatcaccacgcgta

SEQ ID NO: 6051435 - DNA, 25 bp, Homo sapien
cctatcgcgtacaaccgtctggcga

SEQ ID NO: 6051436 - DNA, 25 bp, Homo sapien
atagctagccgggtgaaagaaacat

SEQ ID NO: 6051437 - DNA, 25 bp, Homo sapien
tgtatcgcaccggaaaagtacccac

SEQ ID NO: 6051438 - DNA, 25 bp, Homo sapien
gatgcgaagtatatcggtcgcgtag

SEQ ID NO: 6051439 - DNA, 25 bp, Homo sapien
attatatatcgcgaagggaatctat

SEQ ID NO: 6051440 - DNA, 25 bp, Homo sapien
gcggcgcgttggtccagtaggcgac

SEQ ID NO: 6051441 - DNA, 25 bp, Homo sapien
agccgggtgaaagaaacatgtatcg

SEQ ID NO: 6051442 - DNA, 25 bp, Homo sapien
gactcgactagcgatgcaacaaggt

SEQ ID NO: 6051443 - DNA, 25 bp, Homo sapien
acgaccgtagacttgtgccatcgat

SEQ ID NO: 6051444 - DNA, 25 bp, Homo sapien
gaacgtaacggctgtatgtccagtt

SEQ ID NO: 6051445 - DNA, 25 bp, Homo sapien
gtccagtaggcgacgcgtccaaaag

SEQ ID NO: 6051446 - DNA, 25 bp, Homo sapien
ttgaaccgcggcagtcgcgtaacaa

SEQ ID NO: 6051447 - DNA, 25 bp, Homo sapien
ctatatccataaggcgacgacgacc

SEQ ID NO: 6051448 - DNA, 25 bp, Homo sapien
atgagattacgcgtactagacgacc

SEQ ID NO: 6051449 - DNA, 25 bp, Homo sapien
ccaaaagcctatcgcgtacaaccgt

SEQ ID NO: 6051450 - DNA, 25 bp, Homo sapien
agctggtacgtagatccggtattaa

SEQ ID NO: 6051451 - DNA, 25 bp, Homo sapien
tgtcgccgcgtactatatccataag

SEQ ID NO: 6051452 - DNA, 25 bp, Homo sapien
tatgcggcggtaacaattgactcga

SEQ ID NO: 6051453 - DNA, 25 bp, Homo sapien
tccgataccgatccgcgggatcaaa

SEQ ID NO: 6051454 - DNA, 25 bp, Homo sapien
tggcgtatcgcgttatgcgactgag

SEQ ID NO: 6051455 - DNA, 25 bp, Homo sapien
aaccgtctggcgaagctggtacgta

SEQ ID NO: 6051456 - DNA, 25 bp, Homo sapien
cgaaacgatgaaagatgttattgcg

SEQ ID NO: 6051457 - DNA, 25 bp, Homo sapien
tcgcacgttgaaccgcggcagtcgc

SEQ ID NO: 6051458 - DNA, 25 bp, Homo sapien
gactcgacaatcaccgcaataccga

SEQ ID NO: 6051459 - DNA, 25 bp, Homo sapien
tcccgttgctccgagttagtccgcc

SEQ ID NO: 6051460 - DNA, 25 bp, Homo sapien
caggcgcaaggcgtaaatacagtcg

SEQ ID NO: 6051461 - DNA, 25 bp, Homo sapien
gttaaaagatttgcgcgactatccg

SEQ ID NO: 6051462 - DNA, 25 bp, Homo sapien
gcgcgaaccgtgtaattatttatac

SEQ ID NO: 6051463 - DNA, 25 bp, Homo sapien
aagatctagtcgaacgcctcccgtt

SEQ ID NO: 6051464 - DNA, 25 bp, Homo sapien
gactagtcgagctatttgaaagccg

SEQ ID NO: 6051465 - DNA, 25 bp, Homo sapien
ctatccgaacagatactattacgtc

SEQ ID NO: 6051466 - DNA, 25 bp, Homo sapien
attaaagacctgtggcgtccgcgta

SEQ ID NO: 6051467 - DNA, 25 bp, Homo sapien
cggatactcgcgcgggaactaacca

SEQ ID NO: 6051468 - DNA, 25 bp, Homo sapien
gtcgggatactaccacgttcgcgga

SEQ ID NO: 6051469 - DNA, 25 bp, Homo sapien
cggtcgcatagtggcgtaaacttat

SEQ ID NO: 6051470 - DNA, 25 bp, Homo sapien
tgatcggtcgggatactaccacgtt

SEQ ID NO: 6051471 - DNA, 25 bp, Homo sapien
tcgagctatttgaaagccgtccgag

SEQ ID NO: 6051472 - DNA, 25 bp, Homo sapien
agatttgcgcgactatccgaacaga

SEQ ID NO: 6051473 - DNA, 25 bp, Homo sapien
ccgtcgcctactaactagacgcggt

SEQ ID NO: 6051474 - DNA, 25 bp, Homo sapien
ataccgagtgacatgggtggcgcgc

SEQ ID NO: 6051475 - DNA, 25 bp, Homo sapien
tattacgggctaaggcatcggatac

SEQ ID NO: 6051476 - DNA, 25 bp, Homo sapien
cgcgtatctaacgttaaaagatttg

SEQ ID NO: 6051477 - DNA, 25 bp, Homo sapien
ctcgcgcgggaactaaccagcgcga

SEQ ID NO: 6051478 - DNA, 25 bp, Homo sapien
ccgtgaatactagaatcaacggaca

SEQ ID NO: 6051479 - DNA, 25 bp, Homo sapien
accgcaataccgagtgacatgggtg

SEQ ID NO: 6051480 - DNA, 25 bp, Homo sapien
cgatgcgaatgtccggtcgcatagt

SEQ ID NO: 6051481 - DNA, 25 bp, Homo sapien
gaaagccgtccgagcctaagtgtaa

SEQ ID NO: 6051482 - DNA, 25 bp, Homo sapien
gggctaaggcatcggatactcgcgc

SEQ ID NO: 6051483 - DNA, 25 bp, Homo sapien
atactattacgtcgcgggttccaga

SEQ ID NO: 6051484 - DNA, 25 bp, Homo sapien
gcgggttccagatgaatacgcgata

SEQ ID NO: 6051485 - DNA, 25 bp, Homo sapien
acaatcaccgcaataccgagtgaca

SEQ ID NO: 6051486 - DNA, 25 bp, Homo sapien
cgggaactaaccagcgcgaaccgtg

SEQ ID NO: 6051487 - DNA, 25 bp, Homo sapien
aaacagaatccatcgcgcgactcga

SEQ ID NO: 6051488 - DNA, 25 bp, Homo sapien
ttgctccgagttagtccgccgtcgc

SEQ ID NO: 6051489 - DNA, 25 bp, Homo sapien
cgtcggctattacgggctaaggcat

SEQ ID NO: 6051490 - DNA, 25 bp, Homo sapien
gttagctataactaacgtcgctcgg

SEQ ID NO: 6051491 - DNA, 25 bp, Homo sapien
cgctcggtcctcaaacagaatccat

SEQ ID NO: 6051492 - DNA, 25 bp, Homo sapien
cgagttagtccgccgtcgcctacta

SEQ ID NO: 6051493 - DNA, 25 bp, Homo sapien
agtccgccgtcgcctactaactaga

SEQ ID NO: 6051494 - DNA, 25 bp, Homo sapien
gatactaccacgttcgcggactagt

SEQ ID NO: 6051495 - DNA, 25 bp, Homo sapien
tcgcgcgactcgacaatcaccgcaa

SEQ ID NO: 6051496 - DNA, 25 bp, Homo sapien
gaacagatactattacgtcgcgggt

SEQ ID NO: 6051497 - DNA, 25 bp, Homo sapien
atcgacgaaccatctgattattaac

SEQ ID NO: 6051498 - DNA, 25 bp, Homo sapien
tgggtggcgcgcatcgacgaaccat

SEQ ID NO: 6051499 - DNA, 25 bp, Homo sapien
acgcggtatccacttcgcgaattcg

SEQ ID NO: 6051500 - DNA, 25 bp, Homo sapien
agtgacatgggtggcgcgcatcgac

SEQ ID NO: 6051501 - DNA, 25 bp, Homo sapien
tattaactacgtccgccgcagggta

SEQ ID NO: 6051502 - DNA, 25 bp, Homo sapien
aatgtccggtcgcatagtggcgtaa

SEQ ID NO: 6051503 - DNA, 25 bp, Homo sapien
gaaccatctgattattaactacgtc

SEQ ID NO: 6051504 - DNA, 25 bp, Homo sapien
acggacattaaagacctgtggcgtc

SEQ ID NO: 6051505 - DNA, 25 bp, Homo sapien
tataactaacgtcgctcggtcctca

SEQ ID NO: 6051506 - DNA, 25 bp, Homo sapien
tatttgaaagccgtccgagcctaag

SEQ ID NO: 6051507 - DNA, 25 bp, Homo sapien
tctgattattaactacgtccgccgc

SEQ ID NO: 6051508 - DNA, 25 bp, Homo sapien
cctactaactagacgcggtatccac

SEQ ID NO: 6051509 - DNA, 25 bp, Homo sapien
gaatcaacggacattaaagacctgt

SEQ ID NO: 6051510 - DNA, 25 bp, Homo sapien
tacgtcgcgggttccagatgaatac

SEQ ID NO: 6051511 - DNA, 25 bp, Homo sapien
acttatcaggcgcaaggcgtaaata

SEQ ID NO: 6051512 - DNA, 25 bp, Homo sapien
cttcgcgaattcgtcggtccgtgaa

SEQ ID NO: 6051513 - DNA, 25 bp, Homo sapien
gcgtaaacttatcaggcgcaaggcg

SEQ ID NO: 6051514 - DNA, 25 bp, Homo sapien
gaattcgtcggtccgtgaatactag

SEQ ID NO: 6051515 - DNA, 25 bp, Homo sapien
gtcctcaaacagaatccatcgcgcg

SEQ ID NO: 6051516 - DNA, 25 bp, Homo sapien
tagtcgaacgcctcccgttgctccg

SEQ ID NO: 6051517 - DNA, 25 bp, Homo sapien
cgataccgatgcgaatgtccggtcg

SEQ ID NO: 6051518 - DNA, 25 bp, Homo sapien
ttacgcctcgcggacgccgggcgtc

SEQ ID NO: 6051519 - DNA, 25 bp, Homo sapien
ttcgcggactagtcgagctatttga

SEQ ID NO: 6051520 - DNA, 25 bp, Homo sapien
gaatacgcgataccgatgcgaatgt

SEQ ID NO: 6051521 - DNA, 25 bp, Homo sapien
ttatactgatcggtcgggatactac

SEQ ID NO: 6051522 - DNA, 25 bp, Homo sapien
gacctgtggcgtccgcgtatctaac

SEQ ID NO: 6051523 - DNA, 25 bp, Homo sapien
tgtaaaaagatctagtcgaacgcct

SEQ ID NO: 6051524 - DNA, 25 bp, Homo sapien
taaccagcgcgaaccgtgtaattat

SEQ ID NO: 6051525 - DNA, 25 bp, Homo sapien
cgtaaatacagtcgcagtagtcgtg

SEQ ID NO: 6051526 - DNA, 25 bp, Homo sapien
tatccacttcgcgaattcgtcggtc

SEQ ID NO: 6051527 - DNA, 25 bp, Homo sapien
gacgcagttagctataactaacgtc

SEQ ID NO: 6051528 - DNA, 25 bp, Homo sapien
gccgggcgtcggctattacgggcta

SEQ ID NO: 6051529 - DNA, 25 bp, Homo sapien
tggcgtccgcgtatctaacgttaaa

SEQ ID NO: 6051530 - DNA, 25 bp, Homo sapien
tccgagcctaagtgtaaaaagatct

SEQ ID NO: 6051531 - DNA, 25 bp, Homo sapien
atagtggcgtaaacttatcaggcgc

SEQ ID NO: 6051532 - DNA, 25 bp, Homo sapien
tccagatgaatacgcgataccgatg

SEQ ID NO: 6051533 - DNA, 25 bp, Homo sapien
agtcgtgacgcagttagctataact

SEQ ID NO: 6051534 - DNA, 25 bp, Homo sapien
cggacgccgggcgtcggctattacg

SEQ ID NO: 6051535 - DNA, 25 bp, Homo sapien
ccgtgtaattatttatactgatcgg

SEQ ID NO: 6051536 - DNA, 25 bp, Homo sapien
gcgcgcatcgacgaaccatctgatt

SEQ ID NO: 6051537 - DNA, 25 bp, Homo sapien
cgcagtagtcgtgacgcagttagct

SEQ ID NO: 6051538 - DNA, 25 bp, Homo sapien
tctaacgttaaaagatttgcgcgac

SEQ ID NO: 6051539 - DNA, 25 bp, Homo sapien
gcgcgactatccgaacagatactat

SEQ ID NO: 6051540 - DNA, 25 bp, Homo sapien
accacgttcgcggactagtcgagct

SEQ ID NO: 6051541 - DNA, 25 bp, Homo sapien
aattatttatactgatcggtcggga

SEQ ID NO: 6051542 - DNA, 25 bp, Homo sapien
aacgcctcccgttgctccgagttag

SEQ ID NO: 6051543 - DNA, 25 bp, Homo sapien
gtcggtccgtgaatactagaatcaa

SEQ ID NO: 6051544 - DNA, 25 bp, Homo sapien
aactagacgcggtatccacttcgcg

SEQ ID NO: 6051545 - DNA, 25 bp, Homo sapien
tacagtcgcagtagtcgtgacgcag

SEQ ID NO: 6051546 - DNA, 25 bp, Homo sapien
atactagaatcaacggacattaaag

SEQ ID NO: 6051547 - DNA, 25 bp, Homo sapien
cctaagtgtaaaaagatctagtcga

SEQ ID NO: 6051548 - DNA, 25 bp, Homo sapien
aggcatcggatactcgcgcgggaac

SEQ ID NO: 6051549 - DNA, 25 bp, Homo sapien
taacgtcgctcggtcctcaaacaga

SEQ ID NO: 6051550 - DNA, 25 bp, Homo sapien
aatccatcgcgcgactcgacaatca

SEQ ID NO: 6051551 - DNA, 25 bp, Homo sapien
gcaaggcgtaaatacagtcgcagta

SEQ ID NO: 6051552 - DNA, 25 bp, Homo sapien
cagtcgtgcgatagtatctagatcc

SEQ ID NO: 6051553 - DNA, 25 bp, Homo sapien
cgacgatctattactatcgtactag

SEQ ID NO: 6051554 - DNA, 25 bp, Homo sapien
gatagcgttacgcgctgagcagcct

SEQ ID NO: 6051555 - DNA, 25 bp, Homo sapien
aacttgaaaagtatcggctagcgcc

SEQ ID NO: 6051556 - DNA, 25 bp, Homo sapien
cgcgggtctacatcgaccaccgcgc

SEQ ID NO: 6051557 - DNA, 25 bp, Homo sapien
agatcaccttatgcgaccgtacgat

SEQ ID NO: 6051558 - DNA, 25 bp, Homo sapien
tgccaaaagtccgatagcgttacgc

SEQ ID NO: 6051559 - DNA, 25 bp, Homo sapien
tacaaagcactagtcgtacgcgata

SEQ ID NO: 6051560 - DNA, 25 bp, Homo sapien
atatgggtttgacgcgggtctacat

SEQ ID NO: 6051561 - DNA, 25 bp, Homo sapien
tttgagcgccctcagtcgtgcgata

SEQ ID NO: 6051562 - DNA, 25 bp, Homo sapien
tctgtaccggggagcgcgacgatct

SEQ ID NO: 6051563 - DNA, 25 bp, Homo sapien
ggagcgcgacgatctattactatcg

SEQ ID NO: 6051564 - DNA, 25 bp, Homo sapien
gtgtgtagtctttgcgcgtagctct

SEQ ID NO: 6051565 - DNA, 25 bp, Homo sapien
tacgattagcagtgccaaaagtccg

SEQ ID NO: 6051566 - DNA, 25 bp, Homo sapien
gcagcctcgatcaaccgtagatgcg

SEQ ID NO: 6051567 - DNA, 25 bp, Homo sapien
accgcgctagacgtttgagcgccct

SEQ ID NO: 6051568 - DNA, 25 bp, Homo sapien
tagcgcctatcgaggattgcgcgac

SEQ ID NO: 6051569 - DNA, 25 bp, Homo sapien
ctagacgtttgagcgccctcagtcg

SEQ ID NO: 6051570 - DNA, 25 bp, Homo sapien
aaccgtagatgcgtcaggtatgatc

SEQ ID NO: 6051571 - DNA, 25 bp, Homo sapien
ccgcgtgtagttgtgtgtagtcttt

SEQ ID NO: 6051572 - DNA, 25 bp, Homo sapien
cgccctcagtcgtgcgatagtatct

SEQ ID NO: 6051573 - DNA, 25 bp, Homo sapien
tgcgcgtagctctgaactacgcgga

SEQ ID NO: 6051574 - DNA, 25 bp, Homo sapien
tatctgatcgctcgcgcgtacaatt

SEQ ID NO: 6051575 - DNA, 25 bp, Homo sapien
gtagttgtgtgtagtctttgcgcgt

SEQ ID NO: 6051576 - DNA, 25 bp, Homo sapien
ccgatcgccgtctgtaccggggagc

SEQ ID NO: 6051577 - DNA, 25 bp, Homo sapien
tcgatcaaccgtagatgcgtcaggt

SEQ ID NO: 6051578 - DNA, 25 bp, Homo sapien
aatagacacgcgtatacgagatcac

SEQ ID NO: 6051579 - DNA, 25 bp, Homo sapien
cctatcaaatcatgaattaccgatc

SEQ ID NO: 6051580 - DNA, 25 bp, Homo sapien
cgcgcgtacaattgtgcaatatggg

SEQ ID NO: 6051581 - DNA, 25 bp, Homo sapien
gttacgcgagccaatagacacgcgt

SEQ ID NO: 6051582 - DNA, 25 bp, Homo sapien
cgcgcatatctgatcgctcgcgcgt

SEQ ID NO: 6051583 - DNA, 25 bp, Homo sapien
cgcgactacttaatacgtgcgggac

SEQ ID NO: 6051584 - DNA, 25 bp, Homo sapien
ctatcgaggattgcgcgactactta

SEQ ID NO: 6051585 - DNA, 25 bp, Homo sapien
cgatagcctatcaaatcatgaatta

SEQ ID NO: 6051586 - DNA, 25 bp, Homo sapien
tagcagtgccaaaagtccgatagcg

SEQ ID NO: 6051587 - DNA, 25 bp, Homo sapien
gtactagaccaacgcgcatatctga

SEQ ID NO: 6051588 - DNA, 25 bp, Homo sapien
tgtgcaatatgggtttgacgcgggt

SEQ ID NO: 6051589 - DNA, 25 bp, Homo sapien
cagtactcaaattacaggttacgcg

SEQ ID NO: 6051590 - DNA, 25 bp, Homo sapien
tgaactacgcggaaaatatagtcct

SEQ ID NO: 6051591 - DNA, 25 bp, Homo sapien
tatacgagatcaccttatgcgaccg

SEQ ID NO: 6051592 - DNA, 25 bp, Homo sapien
atcggctagcgcctatcgaggattg

SEQ ID NO: 6051593 - DNA, 25 bp, Homo sapien
gcagcggggcgcgtacttagtcgca

SEQ ID NO: 6051594 - DNA, 25 bp, Homo sapien
aaatcatgaattaccgatcgccgtc

SEQ ID NO: 6051595 - DNA, 25 bp, Homo sapien
cgcgataacttgaaaagtatcggct

SEQ ID NO: 6051596 - DNA, 25 bp, Homo sapien
gtcaggtatgatccgcgtcccagcc

SEQ ID NO: 6051597 - DNA, 25 bp, Homo sapien
cgctgagcagcctcgatcaaccgta

SEQ ID NO: 6051598 - DNA, 25 bp, Homo sapien
cagacaggacgccggtacgcgagac

SEQ ID NO: 6051599 - DNA, 25 bp, Homo sapien
tctattactatcgtactagaccaac

SEQ ID NO: 6051600 - DNA, 25 bp, Homo sapien
atatagtcctacctaacgacgtcgg

SEQ ID NO: 6051601 - DNA, 25 bp, Homo sapien
atgttaccgcgtgtagttgtgtgta

SEQ ID NO: 6051602 - DNA, 25 bp, Homo sapien
tagctctgaactacgcggaaaatat

SEQ ID NO: 6051603 - DNA, 25 bp, Homo sapien
cgtcggtaacgctacaaagcactag

SEQ ID NO: 6051604 - DNA, 25 bp, Homo sapien
atacgtgcgggacgcgatagcctat

SEQ ID NO: 6051605 - DNA, 25 bp, Homo sapien
gcactagtcgtacgcgataacttga

SEQ ID NO: 6051606 - DNA, 25 bp, Homo sapien
aaaagtatcggctagcgcctatcga

SEQ ID NO: 6051607 - DNA, 25 bp, Homo sapien
agtagcatgttaccgcgtgtagttg

SEQ ID NO: 6051608 - DNA, 25 bp, Homo sapien
tacgcggaaaatatagtcctaccta

SEQ ID NO: 6051609 - DNA, 25 bp, Homo sapien
gaccaacgcgcatatctgatcgctc

SEQ ID NO: 6051610 - DNA, 25 bp, Homo sapien
cgggacgcgatagcctatcaaatca

SEQ ID NO: 6051611 - DNA, 25 bp, Homo sapien
gcgtcccagccaagtagcatgttac

SEQ ID NO: 6051612 - DNA, 25 bp, Homo sapien
ggattgcgcgactacttaatacgtg

SEQ ID NO: 6051613 - DNA, 25 bp, Homo sapien
gttacgcgctgagcagcctcgatca

SEQ ID NO: 6051614 - DNA, 25 bp, Homo sapien
aggacgccggtacgcgagaccattg

SEQ ID NO: 6051615 - DNA, 25 bp, Homo sapien
aatacgcagacaggacgccggtacg

SEQ ID NO: 6051616 - DNA, 25 bp, Homo sapien
gtcgtacgcgataacttgaaaagta

SEQ ID NO: 6051617 - DNA, 25 bp, Homo sapien
cgtacttagtcgcagtactcaaatt

SEQ ID NO: 6051618 - DNA, 25 bp, Homo sapien
cgaccgtacgattagcagtgccaaa

SEQ ID NO: 6051619 - DNA, 25 bp, Homo sapien
cacgcgtatacgagatcaccttatg

SEQ ID NO: 6051620 - DNA, 25 bp, Homo sapien
acgacgtcggtaacgctacaaagca

SEQ ID NO: 6051621 - DNA, 25 bp, Homo sapien
tcgaccaccgcgctagacgtttgag

SEQ ID NO: 6051622 - DNA, 25 bp, Homo sapien
tctacatcgaccaccgcgctagacg

SEQ ID NO: 6051623 - DNA, 25 bp, Homo sapien
ccgggtaatacgcagacaggacgcc

SEQ ID NO: 6051624 - DNA, 25 bp, Homo sapien
cgagccaatagacacgcgtatacga

SEQ ID NO: 6051625 - DNA, 25 bp, Homo sapien
tacaggttacgcgagccaatagaca

SEQ ID NO: 6051626 - DNA, 25 bp, Homo sapien
tgaattaccgatcgccgtctgtacc

SEQ ID NO: 6051627 - DNA, 25 bp, Homo sapien
accggggagcgcgacgatctattac

SEQ ID NO: 6051628 - DNA, 25 bp, Homo sapien
tgatccgcgtcccagccaagtagca

SEQ ID NO: 6051629 - DNA, 25 bp, Homo sapien
agtctttgcgcgtagctctgaacta

SEQ ID NO: 6051630 - DNA, 25 bp, Homo sapien
tagtcgcagtactcaaattacaggt

SEQ ID NO: 6051631 - DNA, 25 bp, Homo sapien
taacgctacaaagcactagtcgtac

SEQ ID NO: 6051632 - DNA, 25 bp, Homo sapien
cttatgcgaccgtacgattagcagt

SEQ ID NO: 6051633 - DNA, 25 bp, Homo sapien
tcaaattacaggttacgcgagccaa

SEQ ID NO: 6051634 - DNA, 25 bp, Homo sapien
gtttgacgcgggtctacatcgacca

SEQ ID NO: 6051635 - DNA, 25 bp, Homo sapien
actatcgtactagaccaacgcgcat

SEQ ID NO: 6051636 - DNA, 25 bp, Homo sapien
gggcgcgtacttagtcgcagtactc

SEQ ID NO: 6051637 - DNA, 25 bp, Homo sapien
atcgctcgcgcgtacaattgtgcaa

SEQ ID NO: 6051638 - DNA, 25 bp, Homo sapien
ccggtacgcgagaccattgcagcgg

SEQ ID NO: 6051639 - DNA, 25 bp, Homo sapien
tacaattgtgcaatatgggtttgac

SEQ ID NO: 6051640 - DNA, 25 bp, Homo sapien
tacttaatacgtgcgggacgcgata

SEQ ID NO: 6051641 - DNA, 25 bp, Homo sapien
aagtccgatagcgttacgcgctgag

SEQ ID NO: 6051642 - DNA, 25 bp, Homo sapien
agatgcgtcaggtatgatccgcgtc

SEQ ID NO: 6051643 - DNA, 25 bp, Homo sapien
cagccaagtagcatgttaccgcgtg

SEQ ID NO: 6051644 - DNA, 25 bp, Homo sapien
actggattggcgatcgtacgctatt

SEQ ID NO: 6051645 - DNA, 25 bp, Homo sapien
aagaatcacggcacacgcgaacgta

SEQ ID NO: 6051646 - DNA, 25 bp, Homo sapien
ctgacgtcgcgaactggattggcga

SEQ ID NO: 6051647 - DNA, 25 bp, Homo sapien
ggacgtatactttacttgagccgcg

SEQ ID NO: 6051648 - DNA, 25 bp, Homo sapien
ttgcgtagtttatcagtcctagtac

SEQ ID NO: 6051649 - DNA, 25 bp, Homo sapien
aagggcgtcgtttagtctcagtatt

SEQ ID NO: 6051650 - DNA, 25 bp, Homo sapien
acgcaacagactggatcgctcgcgt

SEQ ID NO: 6051651 - DNA, 25 bp, Homo sapien
gcgtctgccttcatggcggacgtat

SEQ ID NO: 6051652 - DNA, 25 bp, Homo sapien
atgcgggaattgtatcctcgatcga

SEQ ID NO: 6051653 - DNA, 25 bp, Homo sapien
cacggcacacgcgaacgtatgcaca

SEQ ID NO: 6051654 - DNA, 25 bp, Homo sapien
gggtatacgtcgttgtcaggcgcta

SEQ ID NO: 6051655 - DNA, 25 bp, Homo sapien
agtgcgtcggttaagaatcacggca

SEQ ID NO: 6051656 - DNA, 25 bp, Homo sapien
gcgctacatcggttcgggctttata

SEQ ID NO: 6051657 - DNA, 25 bp, Homo sapien
cgtcgactagacagtatggattgca

SEQ ID NO: 6051658 - DNA, 25 bp, Homo sapien
ttacgcgctaggtagattggagccc

SEQ ID NO: 6051659 - DNA, 25 bp, Homo sapien
gcaaatctgacgtcgcgaactggat

SEQ ID NO: 6051660 - DNA, 25 bp, Homo sapien
taagaattgcgtagtttatcagtcc

SEQ ID NO: 6051661 - DNA, 25 bp, Homo sapien
ctctggagctttcgcggataacaca

SEQ ID NO: 6051662 - DNA, 25 bp, Homo sapien
tcagtcctagtaccgaacggacacc

SEQ ID NO: 6051663 - DNA, 25 bp, Homo sapien
aaagcgatcgtacggatatctgaca

SEQ ID NO: 6051664 - DNA, 25 bp, Homo sapien
tggcagaaagcgatcgtacggatat

SEQ ID NO: 6051665 - DNA, 25 bp, Homo sapien
tatacgcgatgatatccgactggag

SEQ ID NO: 6051666 - DNA, 25 bp, Homo sapien
cagtattcgtgtcggtattatgcgg

SEQ ID NO: 6051667 - DNA, 25 bp, Homo sapien
aacacatatccgaagggcgtcgttt

SEQ ID NO: 6051668 - DNA, 25 bp, Homo sapien
gcgactagtatctctctggagcttt

SEQ ID NO: 6051669 - DNA, 25 bp, Homo sapien
ctggaggcaaatctgacgtcgcgaa

SEQ ID NO: 6051670 - DNA, 25 bp, Homo sapien
gccttcatggcggacgtatacttta

SEQ ID NO: 6051671 - DNA, 25 bp, Homo sapien
gattactcgcgcgtctgccttcatg

SEQ ID NO: 6051672 - DNA, 25 bp, Homo sapien
cctgccggttcgcaacgcgatgtac

SEQ ID NO: 6051673 - DNA, 25 bp, Homo sapien
actcgcgcgtctgccttcatggcgg

SEQ ID NO: 6051674 - DNA, 25 bp, Homo sapien
gcggataacacatatccgaagggcg

SEQ ID NO: 6051675 - DNA, 25 bp, Homo sapien
tatagcctgccggttcgcaacgcga

SEQ ID NO: 6051676 - DNA, 25 bp, Homo sapien
tagtctcagtattcgtgtcggtatt

SEQ ID NO: 6051677 - DNA, 25 bp, Homo sapien
tcggttaagaatcacggcacacgcg

SEQ ID NO: 6051678 - DNA, 25 bp, Homo sapien
cgcaaagaaagatcgtacgattact

SEQ ID NO: 6051679 - DNA, 25 bp, Homo sapien
catcggttcgggctttatagaaaga

SEQ ID NO: 6051680 - DNA, 25 bp, Homo sapien
cgaacggacacctatcattacgcgc

SEQ ID NO: 6051681 - DNA, 25 bp, Homo sapien
tatccgaagggcgtcgtttagtctc

SEQ ID NO: 6051682 - DNA, 25 bp, Homo sapien
gaattgtatcctcgatcgacgtaga

SEQ ID NO: 6051683 - DNA, 25 bp, Homo sapien
ggtattatgcgggaattgtatcctc

SEQ ID NO: 6051684 - DNA, 25 bp, Homo sapien
tatcctcgatcgacgtagagtgctg

SEQ ID NO: 6051685 - DNA, 25 bp, Homo sapien
ggtacttggcagaaagcgatcgtac

SEQ ID NO: 6051686 - DNA, 25 bp, Homo sapien
ctagacagtatggattgcagtgcgt

SEQ ID NO: 6051687 - DNA, 25 bp, Homo sapien
cgaacgtatgcacaaactatacgcg

SEQ ID NO: 6051688 - DNA, 25 bp, Homo sapien
gagccgcgtcgactagacagtatgg

SEQ ID NO: 6051689 - DNA, 25 bp, Homo sapien
cgtgtcggtattatgcgggaattgt

SEQ ID NO: 6051690 - DNA, 25 bp, Homo sapien
gatgtacggcttcaaatctagcgcg

SEQ ID NO: 6051691 - DNA, 25 bp, Homo sapien
ctcgcgtatagcctgccggttcgca

SEQ ID NO: 6051692 - DNA, 25 bp, Homo sapien
cagactggatcgctcgcgtatagcc

SEQ ID NO: 6051693 - DNA, 25 bp, Homo sapien
tgcgtactgggtataagaattgcgt

SEQ ID NO: 6051694 - DNA, 25 bp, Homo sapien
ctcgctgggtatacgtcgttgtcag

SEQ ID NO: 6051695 - DNA, 25 bp, Homo sapien
tttatagaaagacgcgactagtatc

SEQ ID NO: 6051696 - DNA, 25 bp, Homo sapien
cggcttcaaatctagcgcgataagg

SEQ ID NO: 6051697 - DNA, 25 bp, Homo sapien
tgtcaggcgctacatcggttcgggc

SEQ ID NO: 6051698 - DNA, 25 bp, Homo sapien
gctacaatagatcgcgcaaagaaag

SEQ ID NO: 6051699 - DNA, 25 bp, Homo sapien
tcgtacgattactcgcgcgtctgcc

SEQ ID NO: 6051700 - DNA, 25 bp, Homo sapien
cgataaggtacttggcagaaagcga

SEQ ID NO: 6051701 - DNA, 25 bp, Homo sapien
gtatctctctggagctttcgcggat

SEQ ID NO: 6051702 - DNA, 25 bp, Homo sapien
gtcgtttagtctcagtattcgtgtc

SEQ ID NO: 6051703 - DNA, 25 bp, Homo sapien
gaaagatcgtacgattactcgcgcg

SEQ ID NO: 6051704 - DNA, 25 bp, Homo sapien
tatgcacaaactatacgcgatgata

SEQ ID NO: 6051705 - DNA, 25 bp, Homo sapien
ctagcgcgataaggtacttggcaga

SEQ ID NO: 6051706 - DNA, 25 bp, Homo sapien
ggttcgcaacgcgatgtacggcttc

SEQ ID NO: 6051707 - DNA, 25 bp, Homo sapien
cgatcgacgtagagtgctgctacaa

SEQ ID NO: 6051708 - DNA, 25 bp, Homo sapien
agtttatcagtcctagtaccgaacg

SEQ ID NO: 6051709 - DNA, 25 bp, Homo sapien
agatcgcgcaaagaaagatcgtacg

SEQ ID NO: 6051710 - DNA, 25 bp, Homo sapien
cgatgatatccgactggaggcaaat

SEQ ID NO: 6051711 - DNA, 25 bp, Homo sapien
agtgctgctacaatagatcgcgcaa

SEQ ID NO: 6051712 - DNA, 25 bp, Homo sapien
tatcattacgcgctaggtagattgg

SEQ ID NO: 6051713 - DNA, 25 bp, Homo sapien
agtatggattgcagtgcgtcggtta

SEQ ID NO: 6051714 - DNA, 25 bp, Homo sapien
ggatatctgacactcgctgggtata

SEQ ID NO: 6051715 - DNA, 25 bp, Homo sapien
tcgggctttatagaaagacgcgact

SEQ ID NO: 6051716 - DNA, 25 bp, Homo sapien
ccgcgtacgcaacagactggatcgc

SEQ ID NO: 6051717 - DNA, 25 bp, Homo sapien
aaagacgcgactagtatctctctgg

SEQ ID NO: 6051718 - DNA, 25 bp, Homo sapien
ctgggtataagaattgcgtagttta

SEQ ID NO: 6051719 - DNA, 25 bp, Homo sapien
gctttcgcggataacacatatccga

SEQ ID NO: 6051720 - DNA, 25 bp, Homo sapien
tatccgactggaggcaaatctgacg

SEQ ID NO: 6051721 - DNA, 25 bp, Homo sapien
caaatctagcgcgataaggtacttg

SEQ ID NO: 6051722 - DNA, 25 bp, Homo sapien
cgctattgcgtactgggtataagaa

SEQ ID NO: 6051723 - DNA, 25 bp, Homo sapien
gattgcagtgcgtcggttaagaatc

SEQ ID NO: 6051724 - DNA, 25 bp, Homo sapien
caaactatacgcgatgatatccgac

SEQ ID NO: 6051725 - DNA, 25 bp, Homo sapien
cacacgcgaacgtatgcacaaacta

SEQ ID NO: 6051726 - DNA, 25 bp, Homo sapien
atcgtacgctattgcgtactgggta

SEQ ID NO: 6051727 - DNA, 25 bp, Homo sapien
ctgacactcgctgggtatacgtcgt

SEQ ID NO: 6051728 - DNA, 25 bp, Homo sapien
tagtaccgaacggacacctatcatt

SEQ ID NO: 6051729 - DNA, 25 bp, Homo sapien
tcgtacggatatctgacactcgctg

SEQ ID NO: 6051730 - DNA, 25 bp, Homo sapien
tcgcgaactggattggcgatcgtac

SEQ ID NO: 6051731 - DNA, 25 bp, Homo sapien
catggcggacgtatactttacttga

SEQ ID NO: 6051732 - DNA, 25 bp, Homo sapien
gacacctatcattacgcgctaggta

SEQ ID NO: 6051733 - DNA, 25 bp, Homo sapien
ttggcgatcgtacgctattgcgtac

SEQ ID NO: 6051734 - DNA, 25 bp, Homo sapien
ggatcgctcgcgtatagcctgccgg

SEQ ID NO: 6051735 - DNA, 25 bp, Homo sapien
caacgcgatgtacggcttcaaatct

SEQ ID NO: 6051736 - DNA, 25 bp, Homo sapien
tacttgagccgcgtcgactagacag

SEQ ID NO: 6051737 - DNA, 25 bp, Homo sapien
acgtagagtgctgctacaatagatc

SEQ ID NO: 6051738 - DNA, 25 bp, Homo sapien
atactttacttgagccgcgtcgact

SEQ ID NO: 6051739 - DNA, 25 bp, Homo sapien
acgtcgttgtcaggcgctacatcgg

SEQ ID NO: 6051740 - DNA, 25 bp, Homo sapien
gcaatgttttctagcgagacgtcgg

SEQ ID NO: 6051741 - DNA, 25 bp, Homo sapien
ttacgcgtggaacaccagacgcgtc

SEQ ID NO: 6051742 - DNA, 25 bp, Homo sapien
ttactgtgttgctcggtatacgcgt

SEQ ID NO: 6051743 - DNA, 25 bp, Homo sapien
gagtcgtgtacggatcgacagtcgc

SEQ ID NO: 6051744 - DNA, 25 bp, Homo sapien
catggacgtatgtaactagccgtcg

SEQ ID NO: 6051745 - DNA, 25 bp, Homo sapien
tgccctagtacgtcgcgatagtcaa

SEQ ID NO: 6051746 - DNA, 25 bp, Homo sapien
gccggcgatctactagaacacgatt

SEQ ID NO: 6051747 - DNA, 25 bp, Homo sapien
tgttgctcggtatacgcgtatcggc

SEQ ID NO: 6051748 - DNA, 25 bp, Homo sapien
cgtagggatcaatgccctagtacgt

SEQ ID NO: 6051749 - DNA, 25 bp, Homo sapien
ttggattatcgaaacacgtatagaa

SEQ ID NO: 6051750 - DNA, 25 bp, Homo sapien
attgcggtcgtacgtatgaggatgt

SEQ ID NO: 6051751 - DNA, 25 bp, Homo sapien
acgatgttactgtgttgctcggtat

SEQ ID NO: 6051752 - DNA, 25 bp, Homo sapien
taggcgacctacgaccgatcattag

SEQ ID NO: 6051753 - DNA, 25 bp, Homo sapien
cagtcgcaattgttggattatcgaa

SEQ ID NO: 6051754 - DNA, 25 bp, Homo sapien
caattgttggattatcgaaacacgt

SEQ ID NO: 6051755 - DNA, 25 bp, Homo sapien
ctatcgagggcttatttcaagccat

SEQ ID NO: 6051756 - DNA, 25 bp, Homo sapien
ttttctagcgagacgtcggagtcgg

SEQ ID NO: 6051757 - DNA, 25 bp, Homo sapien
caagtcgtccatctatgacgcgcga

SEQ ID NO: 6051758 - DNA, 25 bp, Homo sapien
gtagatcggaaacgaggagccactt

SEQ ID NO: 6051759 - DNA, 25 bp, Homo sapien
tatgacgcgcgagttgtccaaatga

SEQ ID NO: 6051760 - DNA, 25 bp, Homo sapien
acgcgtcgtacgattagataggcga

SEQ ID NO: 6051761 - DNA, 25 bp, Homo sapien
aacacgtatagaactggttccgccg

SEQ ID NO: 6051762 - DNA, 25 bp, Homo sapien
gaatctctaaagatgtttagcgcga

SEQ ID NO: 6051763 - DNA, 25 bp, Homo sapien
aactagccgtcgcaagtcgtccatc

SEQ ID NO: 6051764 - DNA, 25 bp, Homo sapien
cgtacgattagataggcgacctacg

SEQ ID NO: 6051765 - DNA, 25 bp, Homo sapien
agggcttatttcaagccattagtta

SEQ ID NO: 6051766 - DNA, 25 bp, Homo sapien
agacgtcggagtcgggagtaataag

SEQ ID NO: 6051767 - DNA, 25 bp, Homo sapien
tccgccgatgcgtaactacagcttt

SEQ ID NO: 6051768 - DNA, 25 bp, Homo sapien
gcgcgacgagacagcgccagaccgc

SEQ ID NO: 6051769 - DNA, 25 bp, Homo sapien
tcggtatacgcgtatcggcaatgtt

SEQ ID NO: 6051770 - DNA, 25 bp, Homo sapien
tcgccatacgacgagtcgtgtacgg

SEQ ID NO: 6051771 - DNA, 25 bp, Homo sapien
taagaccgcgctctgtttactagcg

SEQ ID NO: 6051772 - DNA, 25 bp, Homo sapien
cgtatgtaactagccgtcgcaagtc

SEQ ID NO: 6051773 - DNA, 25 bp, Homo sapien
cggaaacgaggagccacttcgccat

SEQ ID NO: 6051774 - DNA, 25 bp, Homo sapien
atgtttagcgcgacgatgttactgt

SEQ ID NO: 6051775 - DNA, 25 bp, Homo sapien
caccagacgcgtcgtacgattagat

SEQ ID NO: 6051776 - DNA, 25 bp, Homo sapien
tatcgaaacacgtatagaactggtt

SEQ ID NO: 6051777 - DNA, 25 bp, Homo sapien
gcgcgactatcgagggcttatttca

SEQ ID NO: 6051778 - DNA, 25 bp, Homo sapien
aagccattagttacgcgcgtattcg

SEQ ID NO: 6051779 - DNA, 25 bp, Homo sapien
cgtgcgcgtagggatcaatgcccta

SEQ ID NO: 6051780 - DNA, 25 bp, Homo sapien
gttgtccaaatgaacctattacgcg

SEQ ID NO: 6051781 - DNA, 25 bp, Homo sapien
gagtcgggagtaataagaccgcgct

SEQ ID NO: 6051782 - DNA, 25 bp, Homo sapien
gatctactagaacacgattacgcgc

SEQ ID NO: 6051783 - DNA, 25 bp, Homo sapien
gatgcgtaactacagctttaacttg

SEQ ID NO: 6051784 - DNA, 25 bp, Homo sapien
ttagttacgcgcgtattcgcctcac

SEQ ID NO: 6051785 - DNA, 25 bp, Homo sapien
tacgcgcatggacgtatgtaactag

SEQ ID NO: 6051786 - DNA, 25 bp, Homo sapien
gtattcgcctcacgggtcgaatctc

SEQ ID NO: 6051787 - DNA, 25 bp, Homo sapien
gaccgatcattagacataattgcgg

SEQ ID NO: 6051788 - DNA, 25 bp, Homo sapien
cagctttaacttgcgaacggttgtg

SEQ ID NO: 6051789 - DNA, 25 bp, Homo sapien
gccttcgtgcgcgtagggatcaatg

SEQ ID NO: 6051790 - DNA, 25 bp, Homo sapien
cgggtcgaatctctaaagatgttta

SEQ ID NO: 6051791 - DNA, 25 bp, Homo sapien
tcgcgatagtcaactgctagtttac

SEQ ID NO: 6051792 - DNA, 25 bp, Homo sapien
gatcgacagtcgcaattgttggatt

SEQ ID NO: 6051793 - DNA, 25 bp, Homo sapien
aacttgcgaacggttgtgagtccgc

SEQ ID NO: 6051794 - DNA, 25 bp, Homo sapien
gcgcgagttgtccaaatgaacctat

SEQ ID NO: 6051795 - DNA, 25 bp, Homo sapien
tagtcaactgctagtttacgccggc

SEQ ID NO: 6051796 - DNA, 25 bp, Homo sapien
actagcgtagatcggaaacgaggag

SEQ ID NO: 6051797 - DNA, 25 bp, Homo sapien
tacgacgagtcgtgtacggatcgac

SEQ ID NO: 6051798 - DNA, 25 bp, Homo sapien
gatcaatgccctagtacgtcgcgat

SEQ ID NO: 6051799 - DNA, 25 bp, Homo sapien
gcgccagaccgccttcgtgcgcgta

SEQ ID NO: 6051800 - DNA, 25 bp, Homo sapien
tacgcgcgtattcgcctcacgggtc

SEQ ID NO: 6051801 - DNA, 25 bp, Homo sapien
agcgcgacgatgttactgtgttgct

SEQ ID NO: 6051802 - DNA, 25 bp, Homo sapien
tatttcaagccattagttacgcgcg

SEQ ID NO: 6051803 - DNA, 25 bp, Homo sapien
agtacgtcgcgatagtcaactgcta

SEQ ID NO: 6051804 - DNA, 25 bp, Homo sapien
ctgtttactagcgtagatcggaaac

SEQ ID NO: 6051805 - DNA, 25 bp, Homo sapien
cgaggagccacttcgccatacgacg

SEQ ID NO: 6051806 - DNA, 25 bp, Homo sapien
tatagaactggttccgccgatgcgt

SEQ ID NO: 6051807 - DNA, 25 bp, Homo sapien
cacgattacgcgcatggacgtatgt

SEQ ID NO: 6051808 - DNA, 25 bp, Homo sapien
taactacagctttaacttgcgaacg

SEQ ID NO: 6051809 - DNA, 25 bp, Homo sapien
ctagaacacgattacgcgcatggac

SEQ ID NO: 6051810 - DNA, 25 bp, Homo sapien
tcgtacgtatgaggatgtgcgcgac

SEQ ID NO: 6051811 - DNA, 25 bp, Homo sapien
ccgtcgcaagtcgtccatctatgac

SEQ ID NO: 6051812 - DNA, 25 bp, Homo sapien
actgctagtttacgccggcgatcta

SEQ ID NO: 6051813 - DNA, 25 bp, Homo sapien
gccacttcgccatacgacgagtcgt

SEQ ID NO: 6051814 - DNA, 25 bp, Homo sapien
aacctattacgcgtggaacaccaga

SEQ ID NO: 6051815 - DNA, 25 bp, Homo sapien
gtttacgccggcgatctactagaac

SEQ ID NO: 6051816 - DNA, 25 bp, Homo sapien
gtccatctatgacgcgcgagttgtc

SEQ ID NO: 6051817 - DNA, 25 bp, Homo sapien
agcgagacgtcggagtcgggagtaa

SEQ ID NO: 6051818 - DNA, 25 bp, Homo sapien
gatgtgcgcgactatcgagggctta

SEQ ID NO: 6051819 - DNA, 25 bp, Homo sapien
acctacgaccgatcattagacataa

SEQ ID NO: 6051820 - DNA, 25 bp, Homo sapien
caaatgaacctattacgcgtggaac

SEQ ID NO: 6051821 - DNA, 25 bp, Homo sapien
tgtacggatcgacagtcgcaattgt

SEQ ID NO: 6051822 - DNA, 25 bp, Homo sapien
actggttccgccgatgcgtaactac

SEQ ID NO: 6051823 - DNA, 25 bp, Homo sapien
gacataattgcggtcgtacgtatga

SEQ ID NO: 6051824 - DNA, 25 bp, Homo sapien
tacgcgtatcggcaatgttttctag

SEQ ID NO: 6051825 - DNA, 25 bp, Homo sapien
gagacagcgccagaccgccttcgtg

SEQ ID NO: 6051826 - DNA, 25 bp, Homo sapien
attagataggcgacctacgaccgat

SEQ ID NO: 6051827 - DNA, 25 bp, Homo sapien
ggagtaataagaccgcgctctgttt

SEQ ID NO: 6051828 - DNA, 25 bp, Homo sapien
ctaaagatgtttagcgcgacgatgt

SEQ ID NO: 6051829 - DNA, 25 bp, Homo sapien
gtggaacaccagacgcgtcgtacga

SEQ ID NO: 6051830 - DNA, 25 bp, Homo sapien
gtatcggcaatgttttctagcgaga

SEQ ID NO: 6051831 - DNA, 25 bp, Homo sapien
cagaccgccttcgtgcgcgtaggga

SEQ ID NO: 6051832 - DNA, 25 bp, Homo sapien
cgcgctctgtttactagcgtagatc

SEQ ID NO: 6051833 - DNA, 25 bp, Homo sapien
gtatgaggatgtgcgcgactatcga

SEQ ID NO: 6051834 - DNA, 25 bp, Homo sapien
gcctcacgggtcgaatctctaaaga

SEQ ID NO: 6051835 - DNA, 25 bp, Homo sapien
tcattagacataattgcggtcgtac

SEQ ID NO: 6051836 - DNA, 25 bp, Homo sapien
tagcaaccgaattggttagttcgcg

SEQ ID NO: 6051837 - DNA, 25 bp, Homo sapien
agcgtaacgcatattctaggtacgt

SEQ ID NO: 6051838 - DNA, 25 bp, Homo sapien
ggtacgtccggacgatctatactta

SEQ ID NO: 6051839 - DNA, 25 bp, Homo sapien
ttctagtggccgcgctatacaagat

SEQ ID NO: 6051840 - DNA, 25 bp, Homo sapien
ggtattactgttgatatagcatcgg

SEQ ID NO: 6051841 - DNA, 25 bp, Homo sapien
actgttgatatagcatcggacgaaa

SEQ ID NO: 6051842 - DNA, 25 bp, Homo sapien
atcgtacgctggaggtcatagtatg

SEQ ID NO: 6051843 - DNA, 25 bp, Homo sapien
ccgcttaggtcgagcgtaacgcata

SEQ ID NO: 6051844 - DNA, 25 bp, Homo sapien
atagtatgtcgttcgcgggacaagg

SEQ ID NO: 6051845 - DNA, 25 bp, Homo sapien
ttgataatgtgcatagtaacgcgcc

SEQ ID NO: 6051846 - DNA, 25 bp, Homo sapien
tctggtgccgcggtattactgttga

SEQ ID NO: 6051847 - DNA, 25 bp, Homo sapien
attgagtgccgtttaacaaaagcgt

SEQ ID NO: 6051848 - DNA, 25 bp, Homo sapien
tacgtcggcgatccaggccttggcg

SEQ ID NO: 6051849 - DNA, 25 bp, Homo sapien
gacgacgccaatctaacggactacg

SEQ ID NO: 6051850 - DNA, 25 bp, Homo sapien
gatatagcatcggacgaaacctcat

SEQ ID NO: 6051851 - DNA, 25 bp, Homo sapien
ctaacgcaacgacggctaaaaactg

SEQ ID NO: 6051852 - DNA, 25 bp, Homo sapien
cgacatctaacgcaacgacggctaa

SEQ ID NO: 6051853 - DNA, 25 bp, Homo sapien
agatcacgtagtccggtagttactt

SEQ ID NO: 6051854 - DNA, 25 bp, Homo sapien
gccagatttgccgtacgaccgaaca

SEQ ID NO: 6051855 - DNA, 25 bp, Homo sapien
tagtatacgcgccaccgttaaagag

SEQ ID NO: 6051856 - DNA, 25 bp, Homo sapien
gatataatgccgacaaatccgctta

SEQ ID NO: 6051857 - DNA, 25 bp, Homo sapien
tacgcgccaccgttaaagagcgcga

SEQ ID NO: 6051858 - DNA, 25 bp, Homo sapien
atgccgacaaatccgcttaggtcga

SEQ ID NO: 6051859 - DNA, 25 bp, Homo sapien
cggacgcgtgagtggtccctacgtc

SEQ ID NO: 6051860 - DNA, 25 bp, Homo sapien
tggtccctacgtcggcgatccaggc

SEQ ID NO: 6051861 - DNA, 25 bp, Homo sapien
atagtaacgcgcctagttgcgacat

SEQ ID NO: 6051862 - DNA, 25 bp, Homo sapien
tgccacgatataatgccgacaaatc

SEQ ID NO: 6051863 - DNA, 25 bp, Homo sapien
atgtgcatagtaacgcgcctagttg

SEQ ID NO: 6051864 - DNA, 25 bp, Homo sapien
tggccgcgctatacaagatgcagct

SEQ ID NO: 6051865 - DNA, 25 bp, Homo sapien
cgtagttcgcggacgcgtgagtggt

SEQ ID NO: 6051866 - DNA, 25 bp, Homo sapien
aagcgtgtatactagcaaccgaatt

SEQ ID NO: 6051867 - DNA, 25 bp, Homo sapien
attctaggtacgtccggacgatcta

SEQ ID NO: 6051868 - DNA, 25 bp, Homo sapien
tggttagttcgcgacgacgccaatc

SEQ ID NO: 6051869 - DNA, 25 bp, Homo sapien
cgctggaggtcatagtatgtcgttc

SEQ ID NO: 6051870 - DNA, 25 bp, Homo sapien
aaaaactgttacattcgcgacgctg

SEQ ID NO: 6051871 - DNA, 25 bp, Homo sapien
ccgaacacgcatagatcacgtagtc

SEQ ID NO: 6051872 - DNA, 25 bp, Homo sapien
tgtcgttcgcgggacaaggtccagt

SEQ ID NO: 6051873 - DNA, 25 bp, Homo sapien
tccaggccttggcgcgaaccgactt

SEQ ID NO: 6051874 - DNA, 25 bp, Homo sapien
gcatcggacgaaacctcattctagt

SEQ ID NO: 6051875 - DNA, 25 bp, Homo sapien
ttcgcggacgcgtgagtggtcccta

SEQ ID NO: 6051876 - DNA, 25 bp, Homo sapien
agttcgcgacgacgccaatctaacg

SEQ ID NO: 6051877 - DNA, 25 bp, Homo sapien
acgcgcctagttgcgacatctaacg

SEQ ID NO: 6051878 - DNA, 25 bp, Homo sapien
acaagatgcagctgccacgatataa

SEQ ID NO: 6051879 - DNA, 25 bp, Homo sapien
attcgcgacgctgccagatttgccg

SEQ ID NO: 6051880 - DNA, 25 bp, Homo sapien
gcaacgacggctaaaaactgttaca

SEQ ID NO: 6051881 - DNA, 25 bp, Homo sapien
cgcgaaccgactttgataatgtgca

SEQ ID NO: 6051882 - DNA, 25 bp, Homo sapien
cgtgagtggtccctacgtcggcgat

SEQ ID NO: 6051883 - DNA, 25 bp, Homo sapien
ccttggcgcgaaccgactttgataa

SEQ ID NO: 6051884 - DNA, 25 bp, Homo sapien
tgcagctgccacgatataatgccga

SEQ ID NO: 6051885 - DNA, 25 bp, Homo sapien
acctcattctagtggccgcgctata

SEQ ID NO: 6051886 - DNA, 25 bp, Homo sapien
catgctgtccatcgcgctaggagtt

SEQ ID NO: 6051887 - DNA, 25 bp, Homo sapien
ccgaattggttagttcgcgacgacg

SEQ ID NO: 6051888 - DNA, 25 bp, Homo sapien
cgatctatacttatgccgatcgtac

SEQ ID NO: 6051889 - DNA, 25 bp, Homo sapien
aggtcgagcgtaacgcatattctag

SEQ ID NO: 6051890 - DNA, 25 bp, Homo sapien
tccggacgatctatacttatgccga

SEQ ID NO: 6051891 - DNA, 25 bp, Homo sapien
tagttgcgacatctaacgcaacgac

SEQ ID NO: 6051892 - DNA, 25 bp, Homo sapien
ttactttgtagggccgatagatcga

SEQ ID NO: 6051893 - DNA, 25 bp, Homo sapien
gtagttactttgtagggccgataga

SEQ ID NO: 6051894 - DNA, 25 bp, Homo sapien
acaaatccgcttaggtcgagcgtaa

SEQ ID NO: 6051895 - DNA, 25 bp, Homo sapien
actatccatgctgtccatcgcgcta

SEQ ID NO: 6051896 - DNA, 25 bp, Homo sapien
tctaacggactacgtcgaccttgtg

SEQ ID NO: 6051897 - DNA, 25 bp, Homo sapien
aggtcatagtatgtcgttcgcggga

SEQ ID NO: 6051898 - DNA, 25 bp, Homo sapien
gccgatagatcgactatccatgctg

SEQ ID NO: 6051899 - DNA, 25 bp, Homo sapien
taacaaaagcgtgtatactagcaac

SEQ ID NO: 6051900 - DNA, 25 bp, Homo sapien
acggctaaaaactgttacattcgcg

SEQ ID NO: 6051901 - DNA, 25 bp, Homo sapien
gccaatctaacggactacgtcgacc

SEQ ID NO: 6051902 - DNA, 25 bp, Homo sapien
acgcatattctaggtacgtccggac

SEQ ID NO: 6051903 - DNA, 25 bp, Homo sapien
aggagttatcaaccgcgactaaaca

SEQ ID NO: 6051904 - DNA, 25 bp, Homo sapien
gtccatcgcgctaggagttatcaac

SEQ ID NO: 6051905 - DNA, 25 bp, Homo sapien
ttaaagagcgcgattgagtgccgtt

SEQ ID NO: 6051906 - DNA, 25 bp, Homo sapien
tgcagatctggtgccgcggtattac

SEQ ID NO: 6051907 - DNA, 25 bp, Homo sapien
ccgactttgataatgtgcatagtaa

SEQ ID NO: 6051908 - DNA, 25 bp, Homo sapien
cgcgggacaaggtccagttagtata

SEQ ID NO: 6051909 - DNA, 25 bp, Homo sapien
cgcgctaggagttatcaaccgcgac

SEQ ID NO: 6051910 - DNA, 25 bp, Homo sapien
tgtagggccgatagatcgactatcc

SEQ ID NO: 6051911 - DNA, 25 bp, Homo sapien
acgcatagatcacgtagtccggtag

SEQ ID NO: 6051912 - DNA, 25 bp, Homo sapien
gacgaaacctcattctagtggccgc

SEQ ID NO: 6051913 - DNA, 25 bp, Homo sapien
gtacgaccgaacacgcatagatcac

SEQ ID NO: 6051914 - DNA, 25 bp, Homo sapien
ggcgatccaggccttggcgcgaacc

SEQ ID NO: 6051915 - DNA, 25 bp, Homo sapien
agatcgactatccatgctgtccatc

SEQ ID NO: 6051916 - DNA, 25 bp, Homo sapien
atgccgatcgtacgctggaggtcat

SEQ ID NO: 6051917 - DNA, 25 bp, Homo sapien
tgccgtttaacaaaagcgtgtatac

SEQ ID NO: 6051918 - DNA, 25 bp, Homo sapien
ccaccgttaaagagcgcgattgagt

SEQ ID NO: 6051919 - DNA, 25 bp, Homo sapien
tccagttagtatacgcgccaccgtt

SEQ ID NO: 6051920 - DNA, 25 bp, Homo sapien
atcaaccgcgactaaacatgcagat

SEQ ID NO: 6051921 - DNA, 25 bp, Homo sapien
agcgcgattgagtgccgtttaacaa

SEQ ID NO: 6051922 - DNA, 25 bp, Homo sapien
tttgccgtacgaccgaacacgcata

SEQ ID NO: 6051923 - DNA, 25 bp, Homo sapien
cgctatacaagatgcagctgccacg

SEQ ID NO: 6051924 - DNA, 25 bp, Homo sapien
cgcgactaaacatgcagatctggtg

SEQ ID NO: 6051925 - DNA, 25 bp, Homo sapien
acaaggtccagttagtatacgcgcc

SEQ ID NO: 6051926 - DNA, 25 bp, Homo sapien
gtatactagcaaccgaattggttag

SEQ ID NO: 6051927 - DNA, 25 bp, Homo sapien
gacgctgccagatttgccgtacgac

SEQ ID NO: 6051928 - DNA, 25 bp, Homo sapien
atacttatgccgatcgtacgctgga

SEQ ID NO: 6051929 - DNA, 25 bp, Homo sapien
tgccgcggtattactgttgatatag

SEQ ID NO: 6051930 - DNA, 25 bp, Homo sapien
taaacatgcagatctggtgccgcgg

SEQ ID NO: 6051931 - DNA, 25 bp, Homo sapien
tgttacattcgcgacgctgccagat

SEQ ID NO: 6051932 - DNA, 25 bp, Homo sapien
gccattccgagcgtagtaagatctc

SEQ ID NO: 6051933 - DNA, 25 bp, Homo sapien
cgtcgataaggccgaggaacgtacg

SEQ ID NO: 6051934 - DNA, 25 bp, Homo sapien
agttctcacggacgtatagcggcga

SEQ ID NO: 6051935 - DNA, 25 bp, Homo sapien
gtagtccaatcacgtttaagccgcg

SEQ ID NO: 6051936 - DNA, 25 bp, Homo sapien
cgtttaagccgcgtgtcgactaagc

SEQ ID NO: 6051937 - DNA, 25 bp, Homo sapien
tgttactaacccaacggagtcgcta

SEQ ID NO: 6051938 - DNA, 25 bp, Homo sapien
taagaaccgcggtagtccaatcacg

SEQ ID NO: 6051939 - DNA, 25 bp, Homo sapien
aagatctcagaacttcgatactgcg

SEQ ID NO: 6051940 - DNA, 25 bp, Homo sapien
ccgcggtagtccaatcacgtttaag

SEQ ID NO: 6051941 - DNA, 25 bp, Homo sapien
tcagaacttcgatactgcgagccaa

SEQ ID NO: 6051942 - DNA, 25 bp, Homo sapien
ccgcaccatgagtatagatgtcgta

SEQ ID NO: 6051943 - DNA, 25 bp, Homo sapien
taacccaacggagtcgctacgatct

SEQ ID NO: 6051944 - DNA, 25 bp, Homo sapien
gccagtataagtgcgcgatagaact

SEQ ID NO: 6051945 - DNA, 25 bp, Homo sapien
gtatagcggcgaactatgagccgcg

SEQ ID NO: 6051946 - DNA, 25 bp, Homo sapien
aacgtcacagcttaagaaccgcggt

SEQ ID NO: 6051947 - DNA, 25 bp, Homo sapien
cgtactataggatccagccagaata

SEQ ID NO: 6051948 - DNA, 25 bp, Homo sapien
acgaatgtaacgcaacgtcgtcgga

SEQ ID NO: 6051949 - DNA, 25 bp, Homo sapien
agaactcaggacttagctgcgcgac

SEQ ID NO: 6051950 - DNA, 25 bp, Homo sapien
aaggtacggcgatgcaatgcgatac

SEQ ID NO: 6051951 - DNA, 25 bp, Homo sapien
ttgatcatagacgatcggaaagaag

SEQ ID NO: 6051952 - DNA, 25 bp, Homo sapien
cctattcaaggatacgcaatgttac

SEQ ID NO: 6051953 - DNA, 25 bp, Homo sapien
ctcatgagccgcgtactataggatc

SEQ ID NO: 6051954 - DNA, 25 bp, Homo sapien
ataggatccagccagaatagtcgaa

SEQ ID NO: 6051955 - DNA, 25 bp, Homo sapien
acgtgtgtattctaccgctcgatca

SEQ ID NO: 6051956 - DNA, 25 bp, Homo sapien
tcgatcaaggtacggcgatgcaatg

SEQ ID NO: 6051957 - DNA, 25 bp, Homo sapien
ttgcgtatacgcgaactaccctatt

SEQ ID NO: 6051958 - DNA, 25 bp, Homo sapien
aagcgcgccattccgagcgtagtaa

SEQ ID NO: 6051959 - DNA, 25 bp, Homo sapien
cgcgaccaatatgcaatcaagagag

SEQ ID NO: 6051960 - DNA, 25 bp, Homo sapien
gactaagccagtataagtgcgcgat

SEQ ID NO: 6051961 - DNA, 25 bp, Homo sapien
gcaatcaagagagtcgtacccgcac

SEQ ID NO: 6051962 - DNA, 25 bp, Homo sapien
caggacttagctgcgcgaccaatat

SEQ ID NO: 6051963 - DNA, 25 bp, Homo sapien
taccgctcgatcaaggtacggcgat

SEQ ID NO: 6051964 - DNA, 25 bp, Homo sapien
aacggagtcgctacgatctagcttc

SEQ ID NO: 6051965 - DNA, 25 bp, Homo sapien
gctcggacgaatgtaacgcaacgtc

SEQ ID NO: 6051966 - DNA, 25 bp, Homo sapien
gtattctaccgctcgatcaaggtac

SEQ ID NO: 6051967 - DNA, 25 bp, Homo sapien
cgtagtaagatctcagaacttcgat

SEQ ID NO: 6051968 - DNA, 25 bp, Homo sapien
cgccgcgattcattgcgtatacgcg

SEQ ID NO: 6051969 - DNA, 25 bp, Homo sapien
tccgagcgtagtaagatctcagaac

SEQ ID NO: 6051970 - DNA, 25 bp, Homo sapien
acgtgcgccatagcgggcatcgctc

SEQ ID NO: 6051971 - DNA, 25 bp, Homo sapien
attccgacgcgcgattagaagcgtt

SEQ ID NO: 6051972 - DNA, 25 bp, Homo sapien
tcgtacccgcaccatgagtatagat

SEQ ID NO: 6051973 - DNA, 25 bp, Homo sapien
aagccgcgtgtcgactaagccagta

SEQ ID NO: 6051974 - DNA, 25 bp, Homo sapien
ccgaggaacgtacgccgcgattcat

SEQ ID NO: 6051975 - DNA, 25 bp, Homo sapien
ccagaatagtcgaacgtcacagctt

SEQ ID NO: 6051976 - DNA, 25 bp, Homo sapien
tatagatgtcgtatagcgaatccca

SEQ ID NO: 6051977 - DNA, 25 bp, Homo sapien
tactgcgagccaagttctcacggac

SEQ ID NO: 6051978 - DNA, 25 bp, Homo sapien
ggaataagccttctcatgagccgcg

SEQ ID NO: 6051979 - DNA, 25 bp, Homo sapien
atagacgatcggaaagaagcgcgcc

SEQ ID NO: 6051980 - DNA, 25 bp, Homo sapien
atacgcgaactaccctattcaagga

SEQ ID NO: 6051981 - DNA, 25 bp, Homo sapien
tagctgcgcgaccaatatgcaatca

SEQ ID NO: 6051982 - DNA, 25 bp, Homo sapien
gagccgcgttatacgtgtgtattct

SEQ ID NO: 6051983 - DNA, 25 bp, Homo sapien
tagcttcgttgaccgactttacgcg

SEQ ID NO: 6051984 - DNA, 25 bp, Homo sapien
cggcgatgcaatgcgatacgtcgat

SEQ ID NO: 6051985 - DNA, 25 bp, Homo sapien
cgcgatagaactcaggacttagctg

SEQ ID NO: 6051986 - DNA, 25 bp, Homo sapien
gagccaagttctcacggacgtatag

SEQ ID NO: 6051987 - DNA, 25 bp, Homo sapien
actatgagccgcgttatacgtgtgt

SEQ ID NO: 6051988 - DNA, 25 bp, Homo sapien
gcaacgtcgtcggaataagccttct

SEQ ID NO: 6051989 - DNA, 25 bp, Homo sapien
cgttatacgtgtgtattctaccgct

SEQ ID NO: 6051990 - DNA, 25 bp, Homo sapien
aagcgtttgatcatagacgatcgga

SEQ ID NO: 6051991 - DNA, 25 bp, Homo sapien
atccagccagaatagtcgaacgtca

SEQ ID NO: 6051992 - DNA, 25 bp, Homo sapien
catagcgggcatcgctcggacgaat

SEQ ID NO: 6051993 - DNA, 25 bp, Homo sapien
gtcgtcggaataagccttctcatga

SEQ ID NO: 6051994 - DNA, 25 bp, Homo sapien
aagagagtcgtacccgcaccatgag

SEQ ID NO: 6051995 - DNA, 25 bp, Homo sapien
taagtgcgcgatagaactcaggact

SEQ ID NO: 6051996 - DNA, 25 bp, Homo sapien
catgagtatagatgtcgtatagcga

SEQ ID NO: 6051997 - DNA, 25 bp, Homo sapien
tgtcgtatagcgaatcccattccga

SEQ ID NO: 6051998 - DNA, 25 bp, Homo sapien
cggcgaactatgagccgcgttatac

SEQ ID NO: 6051999 - DNA, 25 bp, Homo sapien
gattagaagcgtttgatcatagacg

SEQ ID NO: 6052000 - DNA, 25 bp, Homo sapien
aacgtacgccgcgattcattgcgta

SEQ ID NO: 6052001 - DNA, 25 bp, Homo sapien
agccttctcatgagccgcgtactat

SEQ ID NO: 6052002 - DNA, 25 bp, Homo sapien
cacggacgtatagcggcgaactatg

SEQ ID NO: 6052003 - DNA, 25 bp, Homo sapien
aatcccattccgacgcgcgattaga

SEQ ID NO: 6052004 - DNA, 25 bp, Homo sapien
atagcgaatcccattccgacgcgcg

SEQ ID NO: 6052005 - DNA, 25 bp, Homo sapien
gattcattgcgtatacgcgaactac

SEQ ID NO: 6052006 - DNA, 25 bp, Homo sapien
cgttgaccgactttacgcgaacacg

SEQ ID NO: 6052007 - DNA, 25 bp, Homo sapien
ataaggccgaggaacgtacgccgcg

SEQ ID NO: 6052008 - DNA, 25 bp, Homo sapien
aaagaagcgcgccattccgagcgta

SEQ ID NO: 6052009 - DNA, 25 bp, Homo sapien
gatcggaaagaagcgcgccattccg

SEQ ID NO: 6052010 - DNA, 25 bp, Homo sapien
acgatctagcttcgttgaccgactt

SEQ ID NO: 6052011 - DNA, 25 bp, Homo sapien
tagtcgaacgtcacagcttaagaac

SEQ ID NO: 6052012 - DNA, 25 bp, Homo sapien
aagtcgacgtgcgccatagcgggca

SEQ ID NO: 6052013 - DNA, 25 bp, Homo sapien
cttcgatactgcgagccaagttctc

SEQ ID NO: 6052014 - DNA, 25 bp, Homo sapien
caaggatacgcaatgttactaaccc

SEQ ID NO: 6052015 - DNA, 25 bp, Homo sapien
caatatgcaatcaagagagtcgtac

SEQ ID NO: 6052016 - DNA, 25 bp, Homo sapien
tgtaacgcaacgtcgtcggaataag

SEQ ID NO: 6052017 - DNA, 25 bp, Homo sapien
cgactttacgcgaacacgtatcact

SEQ ID NO: 6052018 - DNA, 25 bp, Homo sapien
ggcatcgctcggacgaatgtaacgc

SEQ ID NO: 6052019 - DNA, 25 bp, Homo sapien
aactaccctattcaaggatacgcaa

SEQ ID NO: 6052020 - DNA, 25 bp, Homo sapien
cgtgtcgactaagccagtataagtg

SEQ ID NO: 6052021 - DNA, 25 bp, Homo sapien
acagcttaagaaccgcggtagtcca

SEQ ID NO: 6052022 - DNA, 25 bp, Homo sapien
caatcacgtttaagccgcgtgtcga

SEQ ID NO: 6052023 - DNA, 25 bp, Homo sapien
gcgatacgtcgataaggccgaggaa

SEQ ID NO: 6052024 - DNA, 25 bp, Homo sapien
gtcgctacgatctagcttcgttgac

SEQ ID NO: 6052025 - DNA, 25 bp, Homo sapien
gagccgcgtactataggatccagcc

SEQ ID NO: 6052026 - DNA, 25 bp, Homo sapien
acgcgcgattagaagcgtttgatca

SEQ ID NO: 6052027 - DNA, 25 bp, Homo sapien
acgcaatgttactaacccaacggag

SEQ ID NO: 6052028 - DNA, 25 bp, Homo sapien
tgcaatgcgatacgtcgataaggcc

SEQ ID NO: 6052029 - DNA, 25 bp, Homo sapien
ccaagtccggcaggtattcgcacgt

SEQ ID NO: 6052030 - DNA, 25 bp, Homo sapien
gcaataatcaatcgactaagcgggc

SEQ ID NO: 6052031 - DNA, 25 bp, Homo sapien
tgtaggtcgcgaagtagaatgaatg

SEQ ID NO: 6052032 - DNA, 25 bp, Homo sapien
catccgtcgacgtaggacagatgtt

SEQ ID NO: 6052033 - DNA, 25 bp, Homo sapien
gccacacctatagcgcgaattttct

SEQ ID NO: 6052034 - DNA, 25 bp, Homo sapien
ctatagcgcgaattttctcggcggt

SEQ ID NO: 6052035 - DNA, 25 bp, Homo sapien
ataagcgtacgtgcccatgcttgcg

SEQ ID NO: 6052036 - DNA, 25 bp, Homo sapien
tgaatgcgcgattacggagacctga

SEQ ID NO: 6052037 - DNA, 25 bp, Homo sapien
cgcgattacggagacctgaacggtc

SEQ ID NO: 6052038 - DNA, 25 bp, Homo sapien
aacggtccgattgacgcttctgact

SEQ ID NO: 6052039 - DNA, 25 bp, Homo sapien
gacctgaacggtccgattgacgctt

SEQ ID NO: 6052040 - DNA, 25 bp, Homo sapien
tacgccgtccgactgaatcatccgt

SEQ ID NO: 6052041 - DNA, 25 bp, Homo sapien
agtacgacgcctgcaataatcaatc

SEQ ID NO: 6052042 - DNA, 25 bp, Homo sapien
ctgaatcatccgtcgacgtaggaca

SEQ ID NO: 6052043 - DNA, 25 bp, Homo sapien
caaactataagcgtacgtgcccatg

SEQ ID NO: 6052044 - DNA, 25 bp, Homo sapien
atagtttacgccgtccgactgaatc

SEQ ID NO: 6052045 - DNA, 25 bp, Homo sapien
agagtgtcttagcacgtagatctag

SEQ ID NO: 6052046 - DNA, 25 bp, Homo sapien
accgatcgtaatgcgcctagcttca

SEQ ID NO: 6052047 - DNA, 25 bp, Homo sapien
cccacaatgtattgtaggtcgcgaa

SEQ ID NO: 6052048 - DNA, 25 bp, Homo sapien
atctagcggcgggcgttaaccgatc

SEQ ID NO: 6052049 - DNA, 25 bp, Homo sapien
tcgagtcgtatacgaacgctcaaac

SEQ ID NO: 6052050 - DNA, 25 bp, Homo sapien
tcgcgaagtagaatgaatgcgcgat

SEQ ID NO: 6052051 - DNA, 25 bp, Homo sapien
atgtattgtaggtcgcgaagtagaa

SEQ ID NO: 6052052 - DNA, 25 bp, Homo sapien
acgcaacgaggcaaacgcgttgaca

SEQ ID NO: 6052053 - DNA, 25 bp, Homo sapien
gacgctagagtgtcttagcacgtag

SEQ ID NO: 6052054 - DNA, 25 bp, Homo sapien
tcgcaattgccgtcgccaatacgcg

SEQ ID NO: 6052055 - DNA, 25 bp, Homo sapien
agacagcggtgttcgcaattgccgt

SEQ ID NO: 6052056 - DNA, 25 bp, Homo sapien
gaacgctcaaacaaaccgtatcgtc

SEQ ID NO: 6052057 - DNA, 25 bp, Homo sapien
gagtttacgtaattagacaggatcc

SEQ ID NO: 6052058 - DNA, 25 bp, Homo sapien
cgactagccacacctatagcgcgaa

SEQ ID NO: 6052059 - DNA, 25 bp, Homo sapien
tcgccaatacgcgtacgatcgttaa

SEQ ID NO: 6052060 - DNA, 25 bp, Homo sapien
cccatgcttgcgcttacgtcggttc

SEQ ID NO: 6052061 - DNA, 25 bp, Homo sapien
agtagaatgaatgcgcgattacgga

SEQ ID NO: 6052062 - DNA, 25 bp, Homo sapien
tacggagacctgaacggtccgattg

SEQ ID NO: 6052063 - DNA, 25 bp, Homo sapien
acgtaattagacaggatccagacag

SEQ ID NO: 6052064 - DNA, 25 bp, Homo sapien
cgaaatacgcaacgaggcaaacgcg

SEQ ID NO: 6052065 - DNA, 25 bp, Homo sapien
tcttagcacgtagatctagcggcgg

SEQ ID NO: 6052066 - DNA, 25 bp, Homo sapien
gtattcgcacgttatctacgataca

SEQ ID NO: 6052067 - DNA, 25 bp, Homo sapien
tcgacgtaggacagatgttggtcgc

SEQ ID NO: 6052068 - DNA, 25 bp, Homo sapien
aaaccgtatcgtccgcgaacgctcg

SEQ ID NO: 6052069 - DNA, 25 bp, Homo sapien
aggacagatgttggtcgcgaaatac

SEQ ID NO: 6052070 - DNA, 25 bp, Homo sapien
gacgcttctgactttatgatagttt

SEQ ID NO: 6052071 - DNA, 25 bp, Homo sapien
agaaccgtgcgagttgtaatgcagg

SEQ ID NO: 6052072 - DNA, 25 bp, Homo sapien
aggatccagacagcggtgttcgcaa

SEQ ID NO: 6052073 - DNA, 25 bp, Homo sapien
tacgtgcccatgcttgcgcttacgt

SEQ ID NO: 6052074 - DNA, 25 bp, Homo sapien
gttgtaatgcaggagtttacgtaat

SEQ ID NO: 6052075 - DNA, 25 bp, Homo sapien
tacatatcgcgcttatcctcgagtc

SEQ ID NO: 6052076 - DNA, 25 bp, Homo sapien
cttacgtcggttcgactagccacac

SEQ ID NO: 6052077 - DNA, 25 bp, Homo sapien
agcttcatcggtagtacgacgcctg

SEQ ID NO: 6052078 - DNA, 25 bp, Homo sapien
cttgcgcttacgtcggttcgactag

SEQ ID NO: 6052079 - DNA, 25 bp, Homo sapien
gatcagcaaactataagcgtacgtg

SEQ ID NO: 6052080 - DNA, 25 bp, Homo sapien
tatctacgatacagttatacgcggg

SEQ ID NO: 6052081 - DNA, 25 bp, Homo sapien
ttttctcggcggtacatatcgcgct

SEQ ID NO: 6052082 - DNA, 25 bp, Homo sapien
tggtcgcgaaatacgcaacgaggca

SEQ ID NO: 6052083 - DNA, 25 bp, Homo sapien
cgactaagcgggccaagtccggcag

SEQ ID NO: 6052084 - DNA, 25 bp, Homo sapien
tcggttcgactagccacacctatag

SEQ ID NO: 6052085 - DNA, 25 bp, Homo sapien
atacgcggggcccacaatgtattgt

SEQ ID NO: 6052086 - DNA, 25 bp, Homo sapien
gcgaacgctcgaagaaccgtgcgag

SEQ ID NO: 6052087 - DNA, 25 bp, Homo sapien
atgcaggagtttacgtaattagaca

SEQ ID NO: 6052088 - DNA, 25 bp, Homo sapien
gcgttaaccgatcgtaatgcgccta

SEQ ID NO: 6052089 - DNA, 25 bp, Homo sapien
gctcgaagaaccgtgcgagttgtaa

SEQ ID NO: 6052090 - DNA, 25 bp, Homo sapien
gcacgttatctacgatacagttata

SEQ ID NO: 6052091 - DNA, 25 bp, Homo sapien
aatacgcgtacgatcgttaatctgc

SEQ ID NO: 6052092 - DNA, 25 bp, Homo sapien
gtgcgagttgtaatgcaggagttta

SEQ ID NO: 6052093 - DNA, 25 bp, Homo sapien
ttgccgtcgccaatacgcgtacgat

SEQ ID NO: 6052094 - DNA, 25 bp, Homo sapien
gcttgcgacgctagagtgtcttagc

SEQ ID NO: 6052095 - DNA, 25 bp, Homo sapien
cggcggtacatatcgcgcttatcct

SEQ ID NO: 6052096 - DNA, 25 bp, Homo sapien
gatgttggtcgcgaaatacgcaacg

SEQ ID NO: 6052097 - DNA, 25 bp, Homo sapien
gatacagttatacgcggggcccaca

SEQ ID NO: 6052098 - DNA, 25 bp, Homo sapien
ccggcaggtattcgcacgttatcta

SEQ ID NO: 6052099 - DNA, 25 bp, Homo sapien
atcaatcgactaagcgggccaagtc

SEQ ID NO: 6052100 - DNA, 25 bp, Homo sapien
cgcgaattttctcggcggtacatat

SEQ ID NO: 6052101 - DNA, 25 bp, Homo sapien
agcgggccaagtccggcaggtattc

SEQ ID NO: 6052102 - DNA, 25 bp, Homo sapien
tttatgatagtttacgccgtccgac

SEQ ID NO: 6052103 - DNA, 25 bp, Homo sapien
cgtaatgcgcctagcttcatcggta

SEQ ID NO: 6052104 - DNA, 25 bp, Homo sapien
tcaaacaaaccgtatcgtccgcgaa

SEQ ID NO: 6052105 - DNA, 25 bp, Homo sapien
gttgacacgacagatcagcaaacta

SEQ ID NO: 6052106 - DNA, 25 bp, Homo sapien
ttatcctcgagtcgtatacgaacgc

SEQ ID NO: 6052107 - DNA, 25 bp, Homo sapien
atcggtagtacgacgcctgcaataa

SEQ ID NO: 6052108 - DNA, 25 bp, Homo sapien
gtccgactgaatcatccgtcgacgt

SEQ ID NO: 6052109 - DNA, 25 bp, Homo sapien
cgaggcaaacgcgttgacacgacag

SEQ ID NO: 6052110 - DNA, 25 bp, Homo sapien
tcgcgcttatcctcgagtcgtatac

SEQ ID NO: 6052111 - DNA, 25 bp, Homo sapien
ccgattgacgcttctgactttatga

SEQ ID NO: 6052112 - DNA, 25 bp, Homo sapien
cgtatacgaacgctcaaacaaaccg

SEQ ID NO: 6052113 - DNA, 25 bp, Homo sapien
gcggggcccacaatgtattgtaggt

SEQ ID NO: 6052114 - DNA, 25 bp, Homo sapien
ttagacaggatccagacagcggtgt

SEQ ID NO: 6052115 - DNA, 25 bp, Homo sapien
acgcctgcaataatcaatcgactaa

SEQ ID NO: 6052116 - DNA, 25 bp, Homo sapien
acgacagatcagcaaactataagcg

SEQ ID NO: 6052117 - DNA, 25 bp, Homo sapien
cggcgggcgttaaccgatcgtaatg

SEQ ID NO: 6052118 - DNA, 25 bp, Homo sapien
cacgtagatctagcggcgggcgtta

SEQ ID NO: 6052119 - DNA, 25 bp, Homo sapien
gcgcctagcttcatcggtagtacga

SEQ ID NO: 6052120 - DNA, 25 bp, Homo sapien
aaacgcgttgacacgacagatcagc

SEQ ID NO: 6052121 - DNA, 25 bp, Homo sapien
tctgactttatgatagtttacgccg

SEQ ID NO: 6052122 - DNA, 25 bp, Homo sapien
atcgtccgcgaacgctcgaagaacc

SEQ ID NO: 6052123 - DNA, 25 bp, Homo sapien
cggtgttcgcaattgccgtcgccaa

SEQ ID NO: 6052124 - DNA, 25 bp, Homo sapien
cgtcggacttaacgacatctcttag

SEQ ID NO: 6052125 - DNA, 25 bp, Homo sapien
gttcgaccactgatgtactagtcga

SEQ ID NO: 6052126 - DNA, 25 bp, Homo sapien
tttgacggtatacgaggaggccgtg

SEQ ID NO: 6052127 - DNA, 25 bp, Homo sapien
cgaggaggccgtgccatcgtgatac

SEQ ID NO: 6052128 - DNA, 25 bp, Homo sapien
gatcccgcgttcgtattgctgctac

SEQ ID NO: 6052129 - DNA, 25 bp, Homo sapien
aatatagctctcagattacgatcag

SEQ ID NO: 6052130 - DNA, 25 bp, Homo sapien
gtcggtatgtgcaaaaatacacgcg

SEQ ID NO: 6052131 - DNA, 25 bp, Homo sapien
agagtgtcggggcaatacgcacacc

SEQ ID NO: 6052132 - DNA, 25 bp, Homo sapien
ccactgatgtactagtcgacgcgcc

SEQ ID NO: 6052133 - DNA, 25 bp, Homo sapien
gatcaggcgcggtatgttagataag

SEQ ID NO: 6052134 - DNA, 25 bp, Homo sapien
atatgattagagtcaccacccatgg

SEQ ID NO: 6052135 - DNA, 25 bp, Homo sapien
cggtatacgaggaggccgtgccatc

SEQ ID NO: 6052136 - DNA, 25 bp, Homo sapien
agattacgatcaggcgcggtatgtt

SEQ ID NO: 6052137 - DNA, 25 bp, Homo sapien
ctcacggatcccgcgttcgtattgc

SEQ ID NO: 6052138 - DNA, 25 bp, Homo sapien
acacgcgaagtcatcggtggagcgt

SEQ ID NO: 6052139 - DNA, 25 bp, Homo sapien
gttgacgcgtactattggtcaacat

SEQ ID NO: 6052140 - DNA, 25 bp, Homo sapien
atcacgtcacgtggtctactcgcgc

SEQ ID NO: 6052141 - DNA, 25 bp, Homo sapien
tagataagcgacgttcgaccactga

SEQ ID NO: 6052142 - DNA, 25 bp, Homo sapien
ctagtcgcgcggacagagtgtcggg

SEQ ID NO: 6052143 - DNA, 25 bp, Homo sapien
gataactcgtcgctcgtacatgtta

SEQ ID NO: 6052144 - DNA, 25 bp, Homo sapien
agcgtgcgtcggacttaacgacatc

SEQ ID NO: 6052145 - DNA, 25 bp, Homo sapien
tgatacgcgtgtttaaacgaacggc

SEQ ID NO: 6052146 - DNA, 25 bp, Homo sapien
ggcgtaataccacggatacgacatc

SEQ ID NO: 6052147 - DNA, 25 bp, Homo sapien
ctcgcgctaatgcaatttttgacgg

SEQ ID NO: 6052148 - DNA, 25 bp, Homo sapien
caccacccatgggttgacgcgtact

SEQ ID NO: 6052149 - DNA, 25 bp, Homo sapien
gctctcagattacgatcaggcgcgg

SEQ ID NO: 6052150 - DNA, 25 bp, Homo sapien
catgcctgaggatctgctagtccga

SEQ ID NO: 6052151 - DNA, 25 bp, Homo sapien
tcggtggagcgtgcgtcggacttaa

SEQ ID NO: 6052152 - DNA, 25 bp, Homo sapien
ctcttagattcgcaacggatctgtc

SEQ ID NO: 6052153 - DNA, 25 bp, Homo sapien
aagtcatcggtggagcgtgcgtcgg

SEQ ID NO: 6052154 - DNA, 25 bp, Homo sapien
ttagagtcaccacccatgggttgac

SEQ ID NO: 6052155 - DNA, 25 bp, Homo sapien
cacctaagaccgatatgattagagt

SEQ ID NO: 6052156 - DNA, 25 bp, Homo sapien
cataacgcgtcggagtacactacag

SEQ ID NO: 6052157 - DNA, 25 bp, Homo sapien
ccgattggcagtgataactcgtcgc

SEQ ID NO: 6052158 - DNA, 25 bp, Homo sapien
gacatcgcgtatcatgcctgaggat

SEQ ID NO: 6052159 - DNA, 25 bp, Homo sapien
acttaacgacatctcttagattcgc

SEQ ID NO: 6052160 - DNA, 25 bp, Homo sapien
gcacaccccagggataatcgtagga

SEQ ID NO: 6052161 - DNA, 25 bp, Homo sapien
tattggtcaacatatccgatcgtac

SEQ ID NO: 6052162 - DNA, 25 bp, Homo sapien
catcgcgtcggtatgtgcaaaaata

SEQ ID NO: 6052163 - DNA, 25 bp, Homo sapien
ctacgctagtcgcgcggacagagtg

SEQ ID NO: 6052164 - DNA, 25 bp, Homo sapien
atcgtaaaggttgtctggcatcgcg

SEQ ID NO: 6052165 - DNA, 25 bp, Homo sapien
gtctggcatcgcgtcggtatgtgca

SEQ ID NO: 6052166 - DNA, 25 bp, Homo sapien
tagtcgacgcgcccgattggcagtg

SEQ ID NO: 6052167 - DNA, 25 bp, Homo sapien
tctgctagtccgatcgtaaaggttg

SEQ ID NO: 6052168 - DNA, 25 bp, Homo sapien
cgacatctcttagattcgcaacgga

SEQ ID NO: 6052169 - DNA, 25 bp, Homo sapien
gcaatacgcacaccccagggataat

SEQ ID NO: 6052170 - DNA, 25 bp, Homo sapien
gcgcgttataagatcacgtcacgtg

SEQ ID NO: 6052171 - DNA, 25 bp, Homo sapien
ataccacggatacgacatcgcgtat

SEQ ID NO: 6052172 - DNA, 25 bp, Homo sapien
agtccgatcgtaaaggttgtctggc

SEQ ID NO: 6052173 - DNA, 25 bp, Homo sapien
cccagggataatcgtaggaatatag

SEQ ID NO: 6052174 - DNA, 25 bp, Homo sapien
cccatgggttgacgcgtactattgg

SEQ ID NO: 6052175 - DNA, 25 bp, Homo sapien
tataagatcacgtcacgtggtctac

SEQ ID NO: 6052176 - DNA, 25 bp, Homo sapien
catgcgcactatagtcgtcacctaa

SEQ ID NO: 6052177 - DNA, 25 bp, Homo sapien
gtattgctgctacatgcgcactata

SEQ ID NO: 6052178 - DNA, 25 bp, Homo sapien
caacggatctgtctcacggatcccg

SEQ ID NO: 6052179 - DNA, 25 bp, Homo sapien
gcgttcgtattgctgctacatgcgc

SEQ ID NO: 6052180 - DNA, 25 bp, Homo sapien
aaaaatacacgcgaagtcatcggtg

SEQ ID NO: 6052181 - DNA, 25 bp, Homo sapien
gcgcggtatgttagataagcgacgt

SEQ ID NO: 6052182 - DNA, 25 bp, Homo sapien
cggatacgacatcgcgtatcatgcc

SEQ ID NO: 6052183 - DNA, 25 bp, Homo sapien
tcacgtggtctactcgcgctaatgc

SEQ ID NO: 6052184 - DNA, 25 bp, Homo sapien
aaggttgtctggcatcgcgtcggta

SEQ ID NO: 6052185 - DNA, 25 bp, Homo sapien
caatttttgacggtatacgaggagg

SEQ ID NO: 6052186 - DNA, 25 bp, Homo sapien
gcgtactattggtcaacatatccga

SEQ ID NO: 6052187 - DNA, 25 bp, Homo sapien
gattcgcaacggatctgtctcacgg

SEQ ID NO: 6052188 - DNA, 25 bp, Homo sapien
ctacaggcgcgttataagatcacgt

SEQ ID NO: 6052189 - DNA, 25 bp, Homo sapien
gataatcgtaggaatatagctctca

SEQ ID NO: 6052190 - DNA, 25 bp, Homo sapien
gcgtatcatgcctgaggatctgcta

SEQ ID NO: 6052191 - DNA, 25 bp, Homo sapien
atgtactagtcgacgcgcccgattg

SEQ ID NO: 6052192 - DNA, 25 bp, Homo sapien
gccatcgtgatacgcgtgtttaaac

SEQ ID NO: 6052193 - DNA, 25 bp, Homo sapien
gtatgttagataagcgacgttcgac

SEQ ID NO: 6052194 - DNA, 25 bp, Homo sapien
agtcgtcacctaagaccgatatgat

SEQ ID NO: 6052195 - DNA, 25 bp, Homo sapien
tcaacatatccgatcgtacgaaggg

SEQ ID NO: 6052196 - DNA, 25 bp, Homo sapien
acgcgcccgattggcagtgataact

SEQ ID NO: 6052197 - DNA, 25 bp, Homo sapien
atctgtctcacggatcccgcgttcg

SEQ ID NO: 6052198 - DNA, 25 bp, Homo sapien
agaccgatatgattagagtcaccac

SEQ ID NO: 6052199 - DNA, 25 bp, Homo sapien
tcgtacatgttatcataacgcgtcg

SEQ ID NO: 6052200 - DNA, 25 bp, Homo sapien
atgttatcataacgcgtcggagtac

SEQ ID NO: 6052201 - DNA, 25 bp, Homo sapien
gcgtcggagtacactacaggcgcgt

SEQ ID NO: 6052202 - DNA, 25 bp, Homo sapien
tgaggatctgctagtccgatcgtaa

SEQ ID NO: 6052203 - DNA, 25 bp, Homo sapien
cgtcgctcgtacatgttatcataac

SEQ ID NO: 6052204 - DNA, 25 bp, Homo sapien
ggtctactcgcgctaatgcaatttt

SEQ ID NO: 6052205 - DNA, 25 bp, Homo sapien
ctgctacatgcgcactatagtcgtc

SEQ ID NO: 6052206 - DNA, 25 bp, Homo sapien
cactatagtcgtcacctaagaccga

SEQ ID NO: 6052207 - DNA, 25 bp, Homo sapien
gagtacactacaggcgcgttataag

SEQ ID NO: 6052208 - DNA, 25 bp, Homo sapien
ggcagtgataactcgtcgctcgtac

SEQ ID NO: 6052209 - DNA, 25 bp, Homo sapien
cgaacggcgtaataccacggatacg

SEQ ID NO: 6052210 - DNA, 25 bp, Homo sapien
atgtgcaaaaatacacgcgaagtca

SEQ ID NO: 6052211 - DNA, 25 bp, Homo sapien
agcgacgttcgaccactgatgtact

SEQ ID NO: 6052212 - DNA, 25 bp, Homo sapien
ggccgtgccatcgtgatacgcgtgt

SEQ ID NO: 6052213 - DNA, 25 bp, Homo sapien
cgtaggaatatagctctcagattac

SEQ ID NO: 6052214 - DNA, 25 bp, Homo sapien
gtcggggcaatacgcacaccccagg

SEQ ID NO: 6052215 - DNA, 25 bp, Homo sapien
ctaatgcaatttttgacggtatacg

SEQ ID NO: 6052216 - DNA, 25 bp, Homo sapien
tatactaatttggggctatacgcgt

SEQ ID NO: 6052217 - DNA, 25 bp, Homo sapien
gggctatacgcgtctttagcagtcg

SEQ ID NO: 6052218 - DNA, 25 bp, Homo sapien
aacaagtaggatattaggtcgcgat

SEQ ID NO: 6052219 - DNA, 25 bp, Homo sapien
gcgttgataggaaatgtcgtagtgt

SEQ ID NO: 6052220 - DNA, 25 bp, Homo sapien
cttgcggacattagcgcgaagttgt

SEQ ID NO: 6052221 - DNA, 25 bp, Homo sapien
aatgtcgtagtgtagataccgtcga

SEQ ID NO: 6052222 - DNA, 25 bp, Homo sapien
tatcggcgaacctcgatagtgcgaa

SEQ ID NO: 6052223 - DNA, 25 bp, Homo sapien
tgtggtatgactcgcgcaaccattt

SEQ ID NO: 6052224 - DNA, 25 bp, Homo sapien
cggagtagtcgcgttcatctcactg

SEQ ID NO: 6052225 - DNA, 25 bp, Homo sapien
ctccgtacggggccttacaattgcg

SEQ ID NO: 6052226 - DNA, 25 bp, Homo sapien
gtagtgtagataccgtcgagccacc

SEQ ID NO: 6052227 - DNA, 25 bp, Homo sapien
actttctaacgcgcgttgataggaa

SEQ ID NO: 6052228 - DNA, 25 bp, Homo sapien
ataggaaatgtcgtagtgtagatac

SEQ ID NO: 6052229 - DNA, 25 bp, Homo sapien
tatttcgatctcactagtccgacga

SEQ ID NO: 6052230 - DNA, 25 bp, Homo sapien
gccgatagacctaaacaagtaggat

SEQ ID NO: 6052231 - DNA, 25 bp, Homo sapien
ccttacaattgcgttaataggcgcg

SEQ ID NO: 6052232 - DNA, 25 bp, Homo sapien
agttcggagatttatatgacgtaac

SEQ ID NO: 6052233 - DNA, 25 bp, Homo sapien
gcgtcgtagcggcttcggttcgggc

SEQ ID NO: 6052234 - DNA, 25 bp, Homo sapien
tctagctgagattcgatacgcggga

SEQ ID NO: 6052235 - DNA, 25 bp, Homo sapien
cgtgtgcggttcacgcgctagtcac

SEQ ID NO: 6052236 - DNA, 25 bp, Homo sapien
catttcagacgattgcgtaggtgtc

SEQ ID NO: 6052237 - DNA, 25 bp, Homo sapien
tcgatagtgcgaactttctaacgcg

SEQ ID NO: 6052238 - DNA, 25 bp, Homo sapien
gcgcaaccatttgaagatcgcaatc

SEQ ID NO: 6052239 - DNA, 25 bp, Homo sapien
actagtccgacgatacgcgttatgt

SEQ ID NO: 6052240 - DNA, 25 bp, Homo sapien
tcgacatgggccgccgatagaccta

SEQ ID NO: 6052241 - DNA, 25 bp, Homo sapien
ctcactggacgattgataccgctat

SEQ ID NO: 6052242 - DNA, 25 bp, Homo sapien
tggctactccgtacggggccttaca

SEQ ID NO: 6052243 - DNA, 25 bp, Homo sapien
cgataccttgcggacattagcgcga

SEQ ID NO: 6052244 - DNA, 25 bp, Homo sapien
ttaataggcgcgtgtgcggttcacg

SEQ ID NO: 6052245 - DNA, 25 bp, Homo sapien
attaggtcgcgatctagctgagatt

SEQ ID NO: 6052246 - DNA, 25 bp, Homo sapien
aattgcgttaataggcgcgtgtgcg

SEQ ID NO: 6052247 - DNA, 25 bp, Homo sapien
ttgataccgctattagacctgagac

SEQ ID NO: 6052248 - DNA, 25 bp, Homo sapien
aggtgtcccacggtcggctcgcgta

SEQ ID NO: 6052249 - DNA, 25 bp, Homo sapien
gacattagcgcgaagttgtacagta

SEQ ID NO: 6052250 - DNA, 25 bp, Homo sapien
gatctcactagtccgacgatacgcg

SEQ ID NO: 6052251 - DNA, 25 bp, Homo sapien
ggacgattgataccgctattagacc

SEQ ID NO: 6052252 - DNA, 25 bp, Homo sapien
taggatattaggtcgcgatctagct

SEQ ID NO: 6052253 - DNA, 25 bp, Homo sapien
ctcgcgtatttcgatctcactagtc

SEQ ID NO: 6052254 - DNA, 25 bp, Homo sapien
gagatttatatgacgtaaccacccg

SEQ ID NO: 6052255 - DNA, 25 bp, Homo sapien
cgtcgagccaccccaacggagtagt

SEQ ID NO: 6052256 - DNA, 25 bp, Homo sapien
attcccgcgaggagttcggagattt

SEQ ID NO: 6052257 - DNA, 25 bp, Homo sapien
ggtcggctcgcgtatttcgatctca

SEQ ID NO: 6052258 - DNA, 25 bp, Homo sapien
agcgcgaagttgtacagtatcggcg

SEQ ID NO: 6052259 - DNA, 25 bp, Homo sapien
gcgaattcgacatgggccgccgata

SEQ ID NO: 6052260 - DNA, 25 bp, Homo sapien
aagttgtacagtatcggcgaacctc

SEQ ID NO: 6052261 - DNA, 25 bp, Homo sapien
gttcatctcactggacgattgatac

SEQ ID NO: 6052262 - DNA, 25 bp, Homo sapien
taacgcgcgttgataggaaatgtcg

SEQ ID NO: 6052263 - DNA, 25 bp, Homo sapien
ccgacgatacgcgttatgtggctac

SEQ ID NO: 6052264 - DNA, 25 bp, Homo sapien
gtgcgaactttctaacgcgcgttga

SEQ ID NO: 6052265 - DNA, 25 bp, Homo sapien
agacgattgcgtaggtgtcccacgg

SEQ ID NO: 6052266 - DNA, 25 bp, Homo sapien
ttgcgtaggtgtcccacggtcggct

SEQ ID NO: 6052267 - DNA, 25 bp, Homo sapien
acgcgctagtcacgccatagaaatc

SEQ ID NO: 6052268 - DNA, 25 bp, Homo sapien
tatatgacgtaaccacccgtgggta

SEQ ID NO: 6052269 - DNA, 25 bp, Homo sapien
ctgagactagttcgcgaattcgaca

SEQ ID NO: 6052270 - DNA, 25 bp, Homo sapien
tcgcgatctagctgagattcgatac

SEQ ID NO: 6052271 - DNA, 25 bp, Homo sapien
tcccacggtcggctcgcgtatttcg

SEQ ID NO: 6052272 - DNA, 25 bp, Homo sapien
tagttcgcgaattcgacatgggccg

SEQ ID NO: 6052273 - DNA, 25 bp, Homo sapien
tgactcgcgcaaccatttgaagatc

SEQ ID NO: 6052274 - DNA, 25 bp, Homo sapien
tcgatacgcgggattacgtgtggta

SEQ ID NO: 6052275 - DNA, 25 bp, Homo sapien
cgaacctcgatagtgcgaactttct

SEQ ID NO: 6052276 - DNA, 25 bp, Homo sapien
tgagattcgatacgcgggattacgt

SEQ ID NO: 6052277 - DNA, 25 bp, Homo sapien
attacgtgtggtatgactcgcgcaa

SEQ ID NO: 6052278 - DNA, 25 bp, Homo sapien
gttatgtggctactccgtacggggc

SEQ ID NO: 6052279 - DNA, 25 bp, Homo sapien
agtcgcgttcatctcactggacgat

SEQ ID NO: 6052280 - DNA, 25 bp, Homo sapien
cggggccttacaattgcgttaatag

SEQ ID NO: 6052281 - DNA, 25 bp, Homo sapien
agaaatcgacttattcccgcgagga

SEQ ID NO: 6052282 - DNA, 25 bp, Homo sapien
gcgtcgcgataccttgcggacatta

SEQ ID NO: 6052283 - DNA, 25 bp, Homo sapien
atacgcgttatgtggctactccgta

SEQ ID NO: 6052284 - DNA, 25 bp, Homo sapien
tagcggcttcggttcgggcgtcgcg

SEQ ID NO: 6052285 - DNA, 25 bp, Homo sapien
tacagtatcggcgaacctcgatagt

SEQ ID NO: 6052286 - DNA, 25 bp, Homo sapien
gagccaccccaacggagtagtcgcg

SEQ ID NO: 6052287 - DNA, 25 bp, Homo sapien
aatttggggctatacgcgtctttag

SEQ ID NO: 6052288 - DNA, 25 bp, Homo sapien
ccatttgaagatcgcaatcccgacg

SEQ ID NO: 6052289 - DNA, 25 bp, Homo sapien
gcaatcccgacgtcgtgacatttca

SEQ ID NO: 6052290 - DNA, 25 bp, Homo sapien
ttcgggcgtcgcgataccttgcgga

SEQ ID NO: 6052291 - DNA, 25 bp, Homo sapien
ccccaacggagtagtcgcgttcatc

SEQ ID NO: 6052292 - DNA, 25 bp, Homo sapien
ccgctattagacctgagactagttc

SEQ ID NO: 6052293 - DNA, 25 bp, Homo sapien
gcgaggagttcggagatttatatga

SEQ ID NO: 6052294 - DNA, 25 bp, Homo sapien
cggttcacgcgctagtcacgccata

SEQ ID NO: 6052295 - DNA, 25 bp, Homo sapien
tagtcacgccatagaaatcgactta

SEQ ID NO: 6052296 - DNA, 25 bp, Homo sapien
cgacttattcccgcgaggagttcgg

SEQ ID NO: 6052297 - DNA, 25 bp, Homo sapien
ttagacctgagactagttcgcgaat

SEQ ID NO: 6052298 - DNA, 25 bp, Homo sapien
cttcggttcgggcgtcgcgatacct

SEQ ID NO: 6052299 - DNA, 25 bp, Homo sapien
cgcgggattacgtgtggtatgactc

SEQ ID NO: 6052300 - DNA, 25 bp, Homo sapien
tgggccgccgatagacctaaacaag

SEQ ID NO: 6052301 - DNA, 25 bp, Homo sapien
tacgcgtatactaatttggggctat

SEQ ID NO: 6052302 - DNA, 25 bp, Homo sapien
tcgtgacatttcagacgattgcgta

SEQ ID NO: 6052303 - DNA, 25 bp, Homo sapien
gaagatcgcaatcccgacgtcgtga

SEQ ID NO: 6052304 - DNA, 25 bp, Homo sapien
agacctaaacaagtaggatattagg

SEQ ID NO: 6052305 - DNA, 25 bp, Homo sapien
cgccatagaaatcgacttattcccg

SEQ ID NO: 6052306 - DNA, 25 bp, Homo sapien
ccgacgtcgtgacatttcagacgat

SEQ ID NO: 6052307 - DNA, 25 bp, Homo sapien
ggcgcgtgtgcggttcacgcgctag

SEQ ID NO: 6052308 - DNA, 25 bp, Homo sapien
agataccgtcgagccaccccaacgg

SEQ ID NO: 6052309 - DNA, 25 bp, Homo sapien
gacatcgcttcggaggatacgttcg

SEQ ID NO: 6052310 - DNA, 25 bp, Homo sapien
caacatccatttccaaacgatctgg

SEQ ID NO: 6052311 - DNA, 25 bp, Homo sapien
ccatgattagggaaaacacactgta

SEQ ID NO: 6052312 - DNA, 25 bp, Homo sapien
cgcttacaagtgtcccgtctatacg

SEQ ID NO: 6052313 - DNA, 25 bp, Homo sapien
gtttcagcggggaatacgttgtgat

SEQ ID NO: 6052314 - DNA, 25 bp, Homo sapien
atgctcagctgcgaaatccagcatc

SEQ ID NO: 6052315 - DNA, 25 bp, Homo sapien
caccgagttccagagcttcctcttt

SEQ ID NO: 6052316 - DNA, 25 bp, Homo sapien
ccacttggtcagctccgatgacttc

SEQ ID NO: 6052317 - DNA, 25 bp, Homo sapien
ttgaattccgccgactagagaacct

SEQ ID NO: 6052318 - DNA, 25 bp, Homo sapien
accagggccaacattccagtgtttc

SEQ ID NO: 6052319 - DNA, 25 bp, Homo sapien
ctacaatcgcaacctttttaccagg

SEQ ID NO: 6052320 - DNA, 25 bp, Homo sapien
caggacggttacttctgcacccatc

SEQ ID NO: 6052321 - DNA, 25 bp, Homo sapien
ccaatgcagtgaatgtggctgggtc

SEQ ID NO: 6052322 - DNA, 25 bp, Homo sapien
acagcggactggcaacatccatttc

SEQ ID NO: 6052323 - DNA, 25 bp, Homo sapien
tcccgtctatacgaagcattgataa

SEQ ID NO: 6052324 - DNA, 25 bp, Homo sapien
ggtcagctccgatgacttcgatttt

SEQ ID NO: 6052325 - DNA, 25 bp, Homo sapien
gatctggtatgcgaacaacaaatct

SEQ ID NO: 6052326 - DNA, 25 bp, Homo sapien
gtatgcctcgtccacttggtcagct

SEQ ID NO: 6052327 - DNA, 25 bp, Homo sapien
caagtgtcccgtctatacgaagcat

SEQ ID NO: 6052328 - DNA, 25 bp, Homo sapien
ttgataaataggcatctacatcgag

SEQ ID NO: 6052329 - DNA, 25 bp, Homo sapien
ctcttgagtttcttgaattccgccg

SEQ ID NO: 6052330 - DNA, 25 bp, Homo sapien
tgcaatgctgcggcgccccatgatt

SEQ ID NO: 6052331 - DNA, 25 bp, Homo sapien
gattttaggttcgatgccatgctca

SEQ ID NO: 6052332 - DNA, 25 bp, Homo sapien
ggttacttctgcacccatcgcatgt

SEQ ID NO: 6052333 - DNA, 25 bp, Homo sapien
acgttcgtatgcctcgtccacttgg

SEQ ID NO: 6052334 - DNA, 25 bp, Homo sapien
atcacgtcaaaacgcccggccaatg

SEQ ID NO: 6052335 - DNA, 25 bp, Homo sapien
ctatacgaagcattgataaataggc

SEQ ID NO: 6052336 - DNA, 25 bp, Homo sapien
tgcaaattgaattgccaaatgtcca

SEQ ID NO: 6052337 - DNA, 25 bp, Homo sapien
agctgcgaaatccagcatctcttga

SEQ ID NO: 6052338 - DNA, 25 bp, Homo sapien
aaataggcatctacatcgagatttg

SEQ ID NO: 6052339 - DNA, 25 bp, Homo sapien
gagcttcctctttcttattcatgga

SEQ ID NO: 6052340 - DNA, 25 bp, Homo sapien
gcttcggaggatacgttcgtatgcc

SEQ ID NO: 6052341 - DNA, 25 bp, Homo sapien
gatgccatgctcagctgcgaaatcc

SEQ ID NO: 6052342 - DNA, 25 bp, Homo sapien
ctacgcctacaatcgcaaccttttt

SEQ ID NO: 6052343 - DNA, 25 bp, Homo sapien
gcggggaatacgttgtgatacctgc

SEQ ID NO: 6052344 - DNA, 25 bp, Homo sapien
acatcgagatttgccgataccgtat

SEQ ID NO: 6052345 - DNA, 25 bp, Homo sapien
gttccagagcttcctctttcttatt

SEQ ID NO: 6052346 - DNA, 25 bp, Homo sapien
gaagcattgataaataggcatctac

SEQ ID NO: 6052347 - DNA, 25 bp, Homo sapien
ctttttaccagggccaacattccag

SEQ ID NO: 6052348 - DNA, 25 bp, Homo sapien
gctccaacgcttacaagtgtcccgt

SEQ ID NO: 6052349 - DNA, 25 bp, Homo sapien
tgtgtccggcttggcaggagctcca

SEQ ID NO: 6052350 - DNA, 25 bp, Homo sapien
ttagggaaaacacactgtatgtgtc

SEQ ID NO: 6052351 - DNA, 25 bp, Homo sapien
ttctgcacccatcgcatgtgcaaat

SEQ ID NO: 6052352 - DNA, 25 bp, Homo sapien
tcatggaacggctcaggacggttac

SEQ ID NO: 6052353 - DNA, 25 bp, Homo sapien
tgccaaatgtccaaggccacctacg

SEQ ID NO: 6052354 - DNA, 25 bp, Homo sapien
tcttattcatggaacggctcaggac

SEQ ID NO: 6052355 - DNA, 25 bp, Homo sapien
gccaacattccagtgtttcagcggg

SEQ ID NO: 6052356 - DNA, 25 bp, Homo sapien
cgcatgtgcaaattgaattgccaaa

SEQ ID NO: 6052357 - DNA, 25 bp, Homo sapien
gcatctacatcgagatttgccgata

SEQ ID NO: 6052358 - DNA, 25 bp, Homo sapien
cactgtatgtgtccggcttggcagg

SEQ ID NO: 6052359 - DNA, 25 bp, Homo sapien
agtaatgatttgcaccgagttccag

SEQ ID NO: 6052360 - DNA, 25 bp, Homo sapien
aaaacacactgtatgtgtccggctt

SEQ ID NO: 6052361 - DNA, 25 bp, Homo sapien
ttccgccgactagagaacctgcaat

SEQ ID NO: 6052362 - DNA, 25 bp, Homo sapien
aatacgttgtgatacctgcacacaa

SEQ ID NO: 6052363 - DNA, 25 bp, Homo sapien
agtttcttgaattccgccgactaga

SEQ ID NO: 6052364 - DNA, 25 bp, Homo sapien
cagtgaatgtggctgggtcacttgt

SEQ ID NO: 6052365 - DNA, 25 bp, Homo sapien
ttgaattgccaaatgtccaaggcca

SEQ ID NO: 6052366 - DNA, 25 bp, Homo sapien
cctctttcttattcatggaacggct

SEQ ID NO: 6052367 - DNA, 25 bp, Homo sapien
ggcttggcaggagctccaacgctta

SEQ ID NO: 6052368 - DNA, 25 bp, Homo sapien
ggcgccccatgattagggaaaacac

SEQ ID NO: 6052369 - DNA, 25 bp, Homo sapien
gactggcaacatccatttccaaacg

SEQ ID NO: 6052370 - DNA, 25 bp, Homo sapien
atgtggctgggtcacttgttgcata

SEQ ID NO: 6052371 - DNA, 25 bp, Homo sapien
ggccacctacgcctacaatcgcaac

SEQ ID NO: 6052372 - DNA, 25 bp, Homo sapien
gctgcggcgccccatgattagggaa

SEQ ID NO: 6052373 - DNA, 25 bp, Homo sapien
cacacaacagcggactggcaacatc

SEQ ID NO: 6052374 - DNA, 25 bp, Homo sapien
aaaacgcccggccaatgcagtgaat

SEQ ID NO: 6052375 - DNA, 25 bp, Homo sapien
tacctgcacacaacagcggactggc

SEQ ID NO: 6052376 - DNA, 25 bp, Homo sapien
gcccggccaatgcagtgaatgtggc

SEQ ID NO: 6052377 - DNA, 25 bp, Homo sapien
ttaagatcacgtcaaaacgcccggc

SEQ ID NO: 6052378 - DNA, 25 bp, Homo sapien
cacttgttgcatagtaatgatttgc

SEQ ID NO: 6052379 - DNA, 25 bp, Homo sapien
acccatcgcatgtgcaaattgaatt

SEQ ID NO: 6052380 - DNA, 25 bp, Homo sapien
gcaggagctccaacgcttacaagtg

SEQ ID NO: 6052381 - DNA, 25 bp, Homo sapien
ccatttccaaacgatctggtatgcg

SEQ ID NO: 6052382 - DNA, 25 bp, Homo sapien
gtccaaggccacctacgcctacaat

SEQ ID NO: 6052383 - DNA, 25 bp, Homo sapien
ccaaacgatctggtatgcgaacaac

SEQ ID NO: 6052384 - DNA, 25 bp, Homo sapien
gatttgccgataccgtatttaagat

SEQ ID NO: 6052385 - DNA, 25 bp, Homo sapien
gacttcgattttaggttcgatgcca

SEQ ID NO: 6052386 - DNA, 25 bp, Homo sapien
gaaatccagcatctcttgagtttct

SEQ ID NO: 6052387 - DNA, 25 bp, Homo sapien
gaggatacgttcgtatgcctcgtcc

SEQ ID NO: 6052388 - DNA, 25 bp, Homo sapien
ggtatgcgaacaacaaatctgtcag

SEQ ID NO: 6052389 - DNA, 25 bp, Homo sapien
cagcatctcttgagtttcttgaatt

SEQ ID NO: 6052390 - DNA, 25 bp, Homo sapien
ctgggtcacttgttgcatagtaatg

SEQ ID NO: 6052391 - DNA, 25 bp, Homo sapien
aggttcgatgccatgctcagctgcg

SEQ ID NO: 6052392 - DNA, 25 bp, Homo sapien
aacggctcaggacggttacttctgc

SEQ ID NO: 6052393 - DNA, 25 bp, Homo sapien
ttgtgatacctgcacacaacagcgg

SEQ ID NO: 6052394 - DNA, 25 bp, Homo sapien
gatttgcaccgagttccagagcttc

SEQ ID NO: 6052395 - DNA, 25 bp, Homo sapien
cgactagagaacctgcaatgctgcg

SEQ ID NO: 6052396 - DNA, 25 bp, Homo sapien
ccgataccgtatttaagatcacgtc

SEQ ID NO: 6052397 - DNA, 25 bp, Homo sapien
ctcgtccacttggtcagctccgatg

SEQ ID NO: 6052398 - DNA, 25 bp, Homo sapien
ttgcatagtaatgatttgcaccgag

SEQ ID NO: 6052399 - DNA, 25 bp, Homo sapien
ccgtatttaagatcacgtcaaaacg

SEQ ID NO: 6052400 - DNA, 25 bp, Homo sapien
tccgatgacttcgattttaggttcg

SEQ ID NO: 6052401 - DNA, 25 bp, Homo sapien
gagaacctgcaatgctgcggcgccc

SEQ ID NO: 6052402 - DNA, 25 bp, Homo sapien
aattcaggaatatggccagaagcaa

SEQ ID NO: 6052403 - DNA, 25 bp, Homo sapien
gctaaaaagtaaaggatgttgattc

SEQ ID NO: 6052404 - DNA, 25 bp, Homo sapien
caaacctgctaaaaagtaaaggatg

SEQ ID NO: 6052405 - DNA, 25 bp, Homo sapien
aaggatcacaatcaaaagcacaatg

SEQ ID NO: 6052406 - DNA, 25 bp, Homo sapien
acaatggttgaggtcaatgccggga

SEQ ID NO: 6052407 - DNA, 25 bp, Homo sapien
tccagttctgaggtgaaaagccgag

SEQ ID NO: 6052408 - DNA, 25 bp, Homo sapien
ccatttctccgaagatcagccgaaa

SEQ ID NO: 6052409 - DNA, 25 bp, Homo sapien
ctgatacaaatatccgacaagcgtc

SEQ ID NO: 6052410 - DNA, 25 bp, Homo sapien
acgtttccatttctccgaagatcag

SEQ ID NO: 6052411 - DNA, 25 bp, Homo sapien
cctgaagccgccgatgatgctgatg

SEQ ID NO: 6052412 - DNA, 25 bp, Homo sapien
tttttcattgtattcgcgccgtcta

SEQ ID NO: 6052413 - DNA, 25 bp, Homo sapien
caaatatccgacaagcgtcagacca

SEQ ID NO: 6052414 - DNA, 25 bp, Homo sapien
gccgccgatgatgctgatggtcagc

SEQ ID NO: 6052415 - DNA, 25 bp, Homo sapien
gcaccatcaaaaacatgccggtatg

SEQ ID NO: 6052416 - DNA, 25 bp, Homo sapien
gatgtgcagaaattttttcattgta

SEQ ID NO: 6052417 - DNA, 25 bp, Homo sapien
gatgatgctgatggtcagcacatat

SEQ ID NO: 6052418 - DNA, 25 bp, Homo sapien
tacaggcttgagaaacggcagcgtg

SEQ ID NO: 6052419 - DNA, 25 bp, Homo sapien
taatgctgatttaaatatatttcta

SEQ ID NO: 6052420 - DNA, 25 bp, Homo sapien
tcaatgccgggataaataatgctga

SEQ ID NO: 6052421 - DNA, 25 bp, Homo sapien
gctgatggtcagcacatatacggtt

SEQ ID NO: 6052422 - DNA, 25 bp, Homo sapien
attgtattcgcgccgtctatatcag

SEQ ID NO: 6052423 - DNA, 25 bp, Homo sapien
gatggaattggccagagacgtttcc

SEQ ID NO: 6052424 - DNA, 25 bp, Homo sapien
tatcagcggcttcgtacagctcttt

SEQ ID NO: 6052425 - DNA, 25 bp, Homo sapien
tcggcacattttgcaaacctgctaa

SEQ ID NO: 6052426 - DNA, 25 bp, Homo sapien
gacaacaaggatcacaatcaaaagc

SEQ ID NO: 6052427 - DNA, 25 bp, Homo sapien
aagcgtcagaccaatattacccggg

SEQ ID NO: 6052428 - DNA, 25 bp, Homo sapien
cacaatgccgatggccgctccgtat

SEQ ID NO: 6052429 - DNA, 25 bp, Homo sapien
gctttgaattcaggaatatggccag

SEQ ID NO: 6052430 - DNA, 25 bp, Homo sapien
aaacatcctgaagccgccgatgatg

SEQ ID NO: 6052431 - DNA, 25 bp, Homo sapien
cgtacagctctttcggcacattttg

SEQ ID NO: 6052432 - DNA, 25 bp, Homo sapien
cagcgtgatgtgcagaaattttttc

SEQ ID NO: 6052433 - DNA, 25 bp, Homo sapien
attggccagagacgtttccatttct

SEQ ID NO: 6052434 - DNA, 25 bp, Homo sapien
tgattcccatccatctccatgaagc

SEQ ID NO: 6052435 - DNA, 25 bp, Homo sapien
agaaattttttcattgtattcgcgc

SEQ ID NO: 6052436 - DNA, 25 bp, Homo sapien
aagtaggatggaattggccagagac

SEQ ID NO: 6052437 - DNA, 25 bp, Homo sapien
atctccatgaagcaagcagcaccat

SEQ ID NO: 6052438 - DNA, 25 bp, Homo sapien
tcaaaaacatgccggtatgttcatt

SEQ ID NO: 6052439 - DNA, 25 bp, Homo sapien
tgaaatcaggctgacaacaaggatc

SEQ ID NO: 6052440 - DNA, 25 bp, Homo sapien
gctctttcggcacattttgcaaacc

SEQ ID NO: 6052441 - DNA, 25 bp, Homo sapien
gttcattgttcatccagttctgagg

SEQ ID NO: 6052442 - DNA, 25 bp, Homo sapien
cagagacgtttccatttctccgaag

SEQ ID NO: 6052443 - DNA, 25 bp, Homo sapien
aaggacgtagctttcctcaaacatc

SEQ ID NO: 6052444 - DNA, 25 bp, Homo sapien
aagtaaaggatgttgattcccatcc

SEQ ID NO: 6052445 - DNA, 25 bp, Homo sapien
tgaaaagccgagtttaagtaggatg

SEQ ID NO: 6052446 - DNA, 25 bp, Homo sapien
ctgccaaaggacgtagctttcctca

SEQ ID NO: 6052447 - DNA, 25 bp, Homo sapien
atgaagcaagcagcaccatcaaaaa

SEQ ID NO: 6052448 - DNA, 25 bp, Homo sapien
ccgggataaataatgctgatttaaa

SEQ ID NO: 6052449 - DNA, 25 bp, Homo sapien
cggtatgttcattgttcatccagtt

SEQ ID NO: 6052450 - DNA, 25 bp, Homo sapien
taaatatatttctaaatttgaccag

SEQ ID NO: 6052451 - DNA, 25 bp, Homo sapien
tccgacaagcgtcagaccaatatta

SEQ ID NO: 6052452 - DNA, 25 bp, Homo sapien
tccctgctgatacaaatatccgaca

SEQ ID NO: 6052453 - DNA, 25 bp, Homo sapien
caggctgacaacaaggatcacaatc

SEQ ID NO: 6052454 - DNA, 25 bp, Homo sapien
attattctgccaaaggacgtagctt

SEQ ID NO: 6052455 - DNA, 25 bp, Homo sapien
ggcaagtccctgctgatacaaatat

SEQ ID NO: 6052456 - DNA, 25 bp, Homo sapien
catttcattgtaggcaagtccctgc

SEQ ID NO: 6052457 - DNA, 25 bp, Homo sapien
ctccgaagatcagccgaaaaatgat

SEQ ID NO: 6052458 - DNA, 25 bp, Homo sapien
ccgaaaaatgatccccgcgacaatg

SEQ ID NO: 6052459 - DNA, 25 bp, Homo sapien
gttgaggtcaatgccgggataaata

SEQ ID NO: 6052460 - DNA, 25 bp, Homo sapien
ccatccatctccatgaagcaagcag

SEQ ID NO: 6052461 - DNA, 25 bp, Homo sapien
aaacggcagcgtgatgtgcagaaat

SEQ ID NO: 6052462 - DNA, 25 bp, Homo sapien
ttcctcaaacatcctgaagccgccg

SEQ ID NO: 6052463 - DNA, 25 bp, Homo sapien
caagcagcaccatcaaaaacatgcc

SEQ ID NO: 6052464 - DNA, 25 bp, Homo sapien
ggaatatggccagaagcaatggaac

SEQ ID NO: 6052465 - DNA, 25 bp, Homo sapien
gagtttaagtaggatggaattggcc

SEQ ID NO: 6052466 - DNA, 25 bp, Homo sapien
cgctccgtatcccatttcattgtag

SEQ ID NO: 6052467 - DNA, 25 bp, Homo sapien
atgatccccgcgacaatggttgagg

SEQ ID NO: 6052468 - DNA, 25 bp, Homo sapien
gtagctttcctcaaacatcctgaag

SEQ ID NO: 6052469 - DNA, 25 bp, Homo sapien
aagccgagtttaagtaggatggaat

SEQ ID NO: 6052470 - DNA, 25 bp, Homo sapien
cattttgcaaacctgctaaaaagta

SEQ ID NO: 6052471 - DNA, 25 bp, Homo sapien
tattacccggggaattattctgcca

SEQ ID NO: 6052472 - DNA, 25 bp, Homo sapien
cggcttcgtacagctctttcggcac

SEQ ID NO: 6052473 - DNA, 25 bp, Homo sapien
acatgccggtatgttcattgttcat

SEQ ID NO: 6052474 - DNA, 25 bp, Homo sapien
gatggccgctccgtatcccatttca

SEQ ID NO: 6052475 - DNA, 25 bp, Homo sapien
cttgagaaacggcagcgtgatgtgc

SEQ ID NO: 6052476 - DNA, 25 bp, Homo sapien
tctgaggtgaaaagccgagtttaag

SEQ ID NO: 6052477 - DNA, 25 bp, Homo sapien
tatttctaaatttgaccagctttga

SEQ ID NO: 6052478 - DNA, 25 bp, Homo sapien
tgttcatccagttctgaggtgaaaa

SEQ ID NO: 6052479 - DNA, 25 bp, Homo sapien
tgccgatggccgctccgtatcccat

SEQ ID NO: 6052480 - DNA, 25 bp, Homo sapien
ccgtctatatcagcggcttcgtaca

SEQ ID NO: 6052481 - DNA, 25 bp, Homo sapien
gatcagccgaaaaatgatccccgcg

SEQ ID NO: 6052482 - DNA, 25 bp, Homo sapien
tgaccagctttgaattcaggaatat

SEQ ID NO: 6052483 - DNA, 25 bp, Homo sapien
cacatatacggttacaggcttgaga

SEQ ID NO: 6052484 - DNA, 25 bp, Homo sapien
tacggttacaggcttgagaaacggc

SEQ ID NO: 6052485 - DNA, 25 bp, Homo sapien
cacaatcaaaagcacaatgccgatg

SEQ ID NO: 6052486 - DNA, 25 bp, Homo sapien
taaatttgaccagctttgaattcag

SEQ ID NO: 6052487 - DNA, 25 bp, Homo sapien
gggaattattctgccaaaggacgta

SEQ ID NO: 6052488 - DNA, 25 bp, Homo sapien
caaaagcacaatgccgatggccgct

SEQ ID NO: 6052489 - DNA, 25 bp, Homo sapien
cccgcgacaatggttgaggtcaatg

SEQ ID NO: 6052490 - DNA, 25 bp, Homo sapien
attgtaggcaagtccctgctgatac

SEQ ID NO: 6052491 - DNA, 25 bp, Homo sapien
ggtcagcacatatacggttacaggc

SEQ ID NO: 6052492 - DNA, 25 bp, Homo sapien
gtatcccatttcattgtaggcaagt

SEQ ID NO: 6052493 - DNA, 25 bp, Homo sapien
ttcgcgccgtctatatcagcggctt

SEQ ID NO: 6052494 - DNA, 25 bp, Homo sapien
aggatgttgattcccatccatctcc

SEQ ID NO: 6052495 - DNA, 25 bp, Homo sapien
tatcacttgtacaaaagcttgaact

SEQ ID NO: 6052496 - DNA, 25 bp, Homo sapien
caccagtgctgaatttcctgaaaat

SEQ ID NO: 6052497 - DNA, 25 bp, Homo sapien
tcttataatgccgatatgaacctga

SEQ ID NO: 6052498 - DNA, 25 bp, Homo sapien
atttcctgaaaataagtgctgtcac

SEQ ID NO: 6052499 - DNA, 25 bp, Homo sapien
tatgagcgagatctttgcattcgga

SEQ ID NO: 6052500 - DNA, 25 bp, Homo sapien
gccccttccactcagggttgcctct

SEQ ID NO: 6052501 - DNA, 25 bp, Homo sapien
caatatcttcgatgcaggaaatttc

SEQ ID NO: 6052502 - DNA, 25 bp, Homo sapien
gtgcagcgccatctgtttgcacgtt

SEQ ID NO: 6052503 - DNA, 25 bp, Homo sapien
gttctgtatgggcaatatcttcgat

SEQ ID NO: 6052504 - DNA, 25 bp, Homo sapien
ttcggatacttttccacatacgtct

SEQ ID NO: 6052505 - DNA, 25 bp, Homo sapien
tacagatgatctgtcattaagtaat

SEQ ID NO: 6052506 - DNA, 25 bp, Homo sapien
caagcttcaatgtgccgtgaatttc

SEQ ID NO: 6052507 - DNA, 25 bp, Homo sapien
cgccatctgtttgcacgtttcaatc

SEQ ID NO: 6052508 - DNA, 25 bp, Homo sapien
tgctgaatttcctgaaaataagtgc
